United States Patent Application Publication US 2004/0214272 A1 - sequence listing, part 16

SEQ ID NO: 64734 - DNA, 655 bp, Zea mays
  unsure (1)..(655): unsure at all n locations
  Clone ID: MRT4577_159035C.1
ccgggtcatagggtaagattggaaatcatattagattacatgctcttttctaatgtacaagtataagatgtgacaatatagttgtcattagaaaagtgctgtaaatctatattgtcacactcttatacttgcttctctatgcataagtgtagtgtataactatctctctcatatgatttatgataatatacaaatataaatatattaacttaattagtttgtgtctaaattatgattattagaatgtaattcaattccaacgaaacaaatggggccttagagaattagcttccacggtgaatctagagcaggagctctaccaaataggtcctaaatcactctttcatcttcctcatctccagtcccaaggttcatgagttgggtttgactggtccatgttagacaacaatattcattgccttgtatataggcgtgatgcctggcttctttaagcagccggccagccttgtatagcaggttaggatagagagagatttggggaagagtccaggatggtaaggatcaattagggtccttctgtttccttgtctaggaggtttccttttacctncggctcttcccctatatatgtaacagcactcttctctatcaatacacacacaattcctgcattctactttacttacatggtatc

SEQ ID NO: 64735 - DNA, 548 bp, Zea mays
  Clone ID: MRT4577_159036C.1
gtggggtgggttttttttttttttttttttttttttttttttttttttttatttttttttttttttttttttttttttttttttttttttttttttttttttttttttttaaaggggggggccttttttggttaacccccttttagggggggggggggggggggaacccaattttttaattgcaaacccccctaatggcattggtggggcaggggtttttttggggggttgggggggcccacccccccattggggggggggtttgggctgctttcaaaattgccccccccctttggggggcttggggggacccacaaaacccacatggggggggggggggccccccccggattttgggttgaacccttttgtaaattgcttggggaatgttttgggggtaaatttgcctaaaaacaaaaaaccattgttggtggaaaacctgggagctacttgggtgtttaaaacctgattggggaaaaagccttcccaaaggggtggcctgctcccttaggaattcaagacaattttttaaatttgggcccccggtt

SEQ ID NO: 64736 - DNA, 321 bp, Zea mays
  Clone ID: MRT4577_159037C.1
gattaactattgtttttggttattgattggaacagacctgttttgggacaccacccccaatttcccgagaattaaggactcacttcacgagacctacagtggtgggggactaataacgcatctgacaaagccgtgcccagccaaatcatccgctttttattccaagaataaaccgagccctacggggactaaaacaaaaccctgccgtttgaccctgctaatctggcttaggcaactgcaaaacattggaggccggaactgccctgtagtactagagagtaacagcggggaagatgactggcattatgtaaaggctgaact

SEQ ID NO: 64737 - DNA, 458 bp, Zea mays
  unsure (1)..(458): unsure at all n locations
  Clone ID: MRT4577_159038C.1
cccgggncgacccagcgnccgagattcttaaaaagaagcaggacacggacgagctggaccgccagaagcaggcggagaagaagcggcgccgactngagaaagcgcnggcaaacncggctgccataatcncggagccggaaaagaagaagcagcagaagaaggaagaacagcaaaggcnggacgaggaaggggcggcggggggggaagcagncgcncnncatgnccncanaggcgaggaccccgangaacccngccannngangcngaacaagcaccananaaggggcaaccanngggcccccncggcggcnnnngaaaacaccgnggacgcacagcccgccgaggggnacccgncngagganggacnnggangcggcagccangcgnangcncccagagcccccaaggggaggcgggcnganngggggannggacaggcacngccaagcnggggagaa

SEQ ID NO: 64738 - DNA, 431 bp, Zea mays
  Clone ID: MRT4577_159039C.1
gtaagttcggaatttggctcgtgggctttcggggccgccttcctatgcgcgatgtggggaaaccctggcgcgggtccatttgagttgctcaagcggaccgtgcggatggccctgctgtccacgcctgtgagcgtactcagctgtcgttgctgcgggcgcctacctgactgacccagcgccttaccgagtcgccctcccacaggggatttataggacggcccatttggtggactctaaggtggccgacctgatgaactgttcgcgtaagggctagagcgggccgattaccttcaggctatgctgcttttcggtggagctgaggcacgctgacgggtcctgctactactctgaccggttcggctggatctaccactcgtcgcgcagcgcaggcgttggcatgatcgtagccggcatgctgaccatctagatgg

SEQ ID NO: 64739 - DNA, 231 bp, Zea mays
  Clone ID: MRT4577_15903C.1
tctagatcgcgagggccagcctttttttttactttaatctaacctcaactcctgaaccgagcagcctgtttttttgaacgaagaataacatggggatatattacgaccttttcatttgcaatacagtttacaattggacacacccctgcaaacacacacctttttcaaccaatggatttggcaccagaggggcccctagaccctctaaaaaacagggaggatcatggtttt

SEQ ID NO: 64740 - DNA, 320 bp, Zea mays
  Clone ID: MRT4577_159040C.1
gccgcacagtaactcggatcggtcgagcgggtcattcctgcatccccctcccgccgcgccgcctcaccgccgccggagaagatgggtcgcgtgatccgcgcgcagtacaggggtccggggtccgtgttcaagtcccacatccaccaccgcaagggtccccgccgcttccgctccctcgacttcggcgagcgcaacggagtactcaaggctcgtcgtcatcgacgtcatccacgaccccggccgtggcgcgccgctcggcaaggtcactttgcgctaccgatcgagtacaagcaccagaagagtctttgtcgcagccgagg

SEQ ID NO: 64741 - DNA, 863 bp, Zea mays
  Clone ID: MRT4577_159041C.1
cattgggacctcgagccggccgggaaccgaccaggtgggtaggtagagaatacgagttcgtgctcttctccggcggcttccggacgccgtgcgtcctcaagcggtccggcgcgctccggttcgccaaccccgccagcccgctctacggccacctctccagcaccgactccacggccacatcgatgaggcttacctgggtgagcggcgaccggaggcagcagcaggttcagtacggaggaggcaagtccgctacttctcaagtggcaacgttcacgcagaatgatatgtgcagtagccccttgttgccaagccctgccaaggatttcgggtggcatgaccctggctacatccacacggccgtcatgaccgggctccagccttctcagtcctacacctaccgttacggaagtgattccgtgggctggagtgacacaaacacattcagaatgccaccagctgcaggctccgacgagacatcatttgtgatctacggtgatatggggaaggctccgctggacccatcagtggaacactacattcagcctggatcgatttctgtggtcaaggcagtggctaaagaaatccaaacaggaaaggtcaattcagtcttccacataggagacataagctatgccacaggctttctggttgaatgggatttcttcctaaacctcatagcaccactcgcttctcgagttccctacatgaccgctattggtaaccatgaaagggattatgcagagtctggttctgtatatgtgaccccagattcaggtggcgaatgtggagttgcatatgagtcatatttccgcatgccagctgttagtaaggataagccatggtattcatttgagcaagggagc

SEQ ID NO: 64742 - DNA, 332 bp, Zea mays
  Clone ID: MRT4577_159042C.1
gtactaaggccctgtttgtttaaggtttagggcttacgaattagccttcactcttactgggtttagatttccggtggcatttgtttgcttgtcttatatttaggtcaatttaaccgttcatgacttcatttctctttatttatatttcaaattaacttttctccaagggccgcgtcatcatcagtcaccgtcttacctaggatctgcggcggcaaagactccatccgcgtcggaacaatgcaaaagaaaggcactggggccgccactatcaagaatcacagtttacatatcacccatggcagcgtttacttattatttggcggcatccagac

SEQ ID NO: 64743 - DNA, 516 bp, Zea mays
  Clone ID: MRT4577_159043C.1
cggtcgcgtgggtctacggccacctctccagcaccgactgcacggccacatcgatgaggcttacctgggtgagcggcgacgggaggccgcagcaggttcagtacggaggaggcaagtccgctacttctcaagtggcaacgttcacgcggaatgatatgtgcagtaagttgtggtctcatccgtttatcacagagaccagactccagacgttactaagggaaacgtgactgtgttttattctggaattgcttcgacgaacttatctcgatgcaggtagccccttgttaccaagccctgccaaggatttcgggtggcatgaccctggctacatccacacggtcgggatgaccgggctgcagccttctcagtcctacacctaccgttacggaagtgattccgtgggctggagtgacacatacacattcagaatgccaccagctgcaggctccgacgagacatcatttgtgatctacggtgatatggggaggctccgcggacccatcagtggacactaca

SEQ ID NO: 64744 - DNA, 317 bp, Zea mays
  Clone ID: MRT4577_159044C.1
cggacgcgtgggcgcacattgaccgaagaaatgcattgtgaggccgtcaacaggggaattaatggcgttgtagtctagcagtaaacaacgccgtctaatcctgtgagccgacgcactgctcttcgggctagcgggtgccagcgccagcgatgggacctgctgcatgccacggtgggcgatcctgcacaaaccggtccctagctgccgatggtacgataccaggcggacctgcggcatcggacctcacctaccgtggccggaactgaagatgatattctgaccggagctggcagacatgcccgtttactgacagaaca

SEQ ID NO: 64745 - DNA, 452 bp, Zea mays
  unsure (1)..(452): unsure at all n locations
  Clone ID: MRT4577_159045C.1
gactctggatttttttctattacctacccacttggattataccaacacaccacttaacccatcagcatcgcgacaatattaagcaatatatcatcgacaaagatacttctttcacttctttattgggtgatttttataccggattggggatttaaaggggccaacctatcctaaataatactccttccagcctaaaaaacaggtggttttgcacaaagttggaatcaaatatataaaattgcgcccactaaacacatttgggatatagagttgngaactcacacacatatatatagagttatcttaaaagggcttttgtgaaaggataaatacattaagaggtgatttttattttaaaaaaaaatattagtcaaagctctattttggagaccgcggcgctgtcctaaacgacttgtattttgatactggaaggagtaatgttgttttttttt

SEQ ID NO: 64746 - DNA, 666 bp, Zea mays
  Clone ID: MRT4577_159046C.1
ttccgaaatatacacgcctcgtaaatccgtcaatcgcttccccaagcgcactcgtgtcacccgctcttcaacatcaccaacggaccggctagccctgcaacaagaaagacacaatcacgacacaacaaacaatcaactaagcacaatgtgtatcatgaggacttatgagacgcgtggacgcactgtcgtcgagccacctccacgacgcggaaacttcacctcacacccaccagctggtgttatgcgcttgccacgtgaatggcgccgtacagagagcatcagcgatgacggtcgctacgttgagtacaggagatcacgatcacgacctcgagtcatcgagtactatgaggagccacgccgcagcaccactcgccacaggagcgtgtcaaggcgtcgcgtaactgatgttgagcgcaggacgcccaggacaagctacatagacccacgtgacagctatgtcgacgaacgcattaccaggagaagtgtgagtcgggtcaggcactgagtggttttttatttaatgaataccatgaatctcaagaataaaagcggcatgaacactagtttttctctctacgtccaggatgcctctaagattttttttttcagttacgaacgtcacgatagtcagataatgagcataaatacctacacagtattcttccc

SEQ ID NO: 64747 - DNA, 389 bp, Zea mays
  Clone ID: MRT4577_159047C.1
aagggggggtttattttttaaaacaaaaaaacaaaaaaaaaaacaaaaaaaaaaaaatggggaaatatataggcaggggggacgaaaaaccttaaataaaaacccggtaaaaaaaagggccaagctacccaggggggcccaacccttgcaaaagggaacaagaaagtaaaaacaagcattttttaaagttataaaacccacagaaaaaaggcttatccggcctggggggggggaaaactgaaaaagccctgcacggccatatccctccccgaaaaaaacaccctttttattaggccccagtaaaaatttagttaaataaagcaaatttttccccgggcttgcatcccccaaggggcggggcccaacaaagtaaaagggcactatgaccc

SEQ ID NO: 64748 - DNA, 409 bp, Zea mays
  Clone ID: MRT4577_159048C.1
gcgcgtttcgaagcgcacctcaccacccagctcgtggatggaggcgcgcattttttccaccatgctgacgaggcggaacgtgccgatgtgcggccggctcagatacaggatgtcttccggcgcgccggccttgacgaattcgtccagcaccttgcggccatagtggtgcggatccttgatctggctgtacagcttgccgtcggaaaacgtcccggcgccgccttcgccgaactgcacgttggattcggggttgagcacgcttttgcgccacaggccgaaggtgtccttggtgcgctcgcgcacggccttgccgcgttcgaggatgatggggcgaaatcccatctgcgcgaggatcagccctgcaaacaggccacacggccccatgccgatgacgaccggacgcaagaaa

SEQ ID NO: 64749 - DNA, 544 bp, Zea mays
  Clone ID: MRT4577_159049C.1
cacctccggcgagtgcgccgtcgggtgggattacccttcgtcgtggctacgaggcaggaggaggaagacgtagcgtgcgctgtaggatcgagcatctacgacttggattagacaatagcgtaccggttcgcaaatcgatctgggccatagatcattccggcaggggccaagattagtataagtttggatggcattgaagagattttctctagatagtgatgtattccttcgcatagatgaatggacatcgtggatctacgatccttcggcacagattagatctggcttcattaaaccgtgattgtcgatctccgatctagcgggcagcgttgcataccagttcgagttaagtatgggacagatctgggtgctcgggttatgatcagactgccgaccttatcccgtaccccttcggccagatattttcttaaagagaccctaatgaatctgggaatcaacccacactccaccataactgtagtctgagtctacgaaattttacacgctagaccctgaactctctgttaattgtgcgcacggtcct

SEQ ID NO: 64750 - DNA, 195 bp, Zea mays
  Clone ID: MRT4577_15904C.1
gatccgagcaacattctttacaaaaaaaggtttcaaacgcaattgcattttatttaaaaggggcaccagccactcaaccaaaaaaaggtgaggcctgcccaaaaaagccatcgccaaacactaccatagttgcatctgacccgccagacctaaaactggtaacgaccatttagactaataaaaacgcagaccccg

SEQ ID NO: 64751 - DNA, 358 bp, Zea mays
  Clone ID: MRT4577_159051C.1
agcctggatcctgtagagcgtccgccctccgccttctttttttttttttttttgtccaaccaagggacaggttcagaaaaacggggggtggcattggaagcccaatccttgtgccaaacgaaacaggcccaaagaacatgcaacagtatagtagggcaaaaggcgttgcacacgtcctattccccgccaaaatgcggcactcctgtgttgggccggtagaagacctccaacagggagttacagcgccttctccctggggttccatgatacacccggagctcccagacagttcgcaggtgcaattcaaggatggcccaaagccttgcttggaacggtgctggccccactatcccagccc

SEQ ID NO: 64752 - DNA, 398 bp, Zea mays
  Clone ID: MRT4577_159052C.1
atccagatcaacaaagcgtcagtgcgtagatcggatcgaagaacagaacagcatgaagggggtgattggttttgtcaggtgcctggctctgtcaaatgccaacgcctttgcaatgcacatgccttgcccctgcgcgcggctgtagggcttgtactggcgatgacgacggcctgacgacgattatgggcgcacgcggactgcaccactacgccgaatacctgacgcatgcgcagtgcaccctactagccgcggtgccctactacgaccgctgtgtacaaaccagcgccatgtaccagccgctacgacaacattactatcatcaacatatgatgatgatggacgtacatgccgatgatcatcaacttcaaacgatgatgcagcttgagcatgccgctgtc

SEQ ID NO: 64753 - DNA, 667 bp, Zea mays
  Clone ID: MRT4577_159053C.1
aattcggcacgaggctgcaatgccttccccacccgcggcgcgcagcacacccaaaaccgtaaccctagattgcaagaggacatggccagcaagtttgggctcgccggcggcatcccggagcggcgggtgagaccgatctgggacgcagtcgactcacgccagtacaagcccgcgctcaagctctgcaccgcgctcctcgccaagcaccctacatccccctacgcgctcgccctcaaggctcttattctggagaggatgggaaagcctgatgaagcattgagcggggccctgaatgctaaggagctattgtattcagacaacatttttcattttgatgatcttacacttagcactctacagatagtatttcaaaggcttgaccgattggatcttgctacttcatgctatgagtatgcctgtacaaagtatccaagtaacttggaattaatgatggggctttttaattgctatgttcgagagtactcatacgtgaaacaacagcagacagctctcaaaatgtacaaaactgtaggagaagaaaggtttttgctttgggctgtttgcagcattcagctgcaggtgcattttagcagtggtggtgtgaaattattggcactagccgaagcattgctgaagaacacataaattctcatagtttacatgagcc

SEQ ID NO: 64754 - DNA, 635 bp, Zea mays
  Clone ID: MRT4577_159054C.1
ccgggaggacaggccactcaacagcatcactcaaagccaagcaacagcagcagcttccctagcaacaccttgcccctgagctcatgggatccctgggccccacagtgagcttgagcatcatggccaggccaggcggccagcagccggcggagatggagaggaagaaggacagcggtgtcttcttcggtgggggctgcggcttccggatgccgctgcactacccgcgctacaagaaggcggactacgagagcatgccggagtggcgcgtcgactgcctgctccgcgagtacggccttcccgccgacggcgacgtcgacagcaagcgccgcttcgccatgggcgccttcctctggcccgaccagtactgatccaaccaaacaaagctcagcgctagctagctgcgtgccggccgtgatctcgtcatatttagaggatcagctgcatcagttatagcgagacctaattgatcatctccatcgatcgtatacatgttaccatcgttctgcttgtagttgtagcggccggacatgctgcattctagtatatagctggatcgcgcgctgtatagtgtagtatgtctatgaaataaaagaaatgttgtttattttatcgaaaaaaaaaaaaaaaaagcccct

SEQ ID NO: 64755 - DNA, 638 bp, Zea mays
  Clone ID: MRT4577_159055C.1
gccggccgggctgggccgtcttttattataggcattctgccaactatttccactaatgggtcgtttggatcccttcattttagaggaattgaattcactcaataaagtaacctatttagctccgaatttggcattccactattttttttaaagttcagatatgagcctatttcaaattcatgggtagagtattggaaatgattttatgtattattagaatttgtttctattctgtaaattacattacccttataacacataaatatcttcgacgtcttgttaataataatatacaaatatattttccataaaactgaattagcttaattgatatatgtctatagaatggaattcagttccaattattcaaacggggtgtaactttttttgctcggattggagtagagggtttcatgttgtctagttcaattcatttcccctgaaaattcgctacattgggatacattcgttattcagttggtttcactgatttttgctgggctctgtgggagatggtttcatttttctttctttcccctaaaattcacatggtcacgatcgactcgttattgccgctttcttgggaatgggtgcgttgccattgtcagtaaattatttttcctactaggaagttaacg

SEQ ID NO: 64756 - DNA, 277 bp, Zea mays
  Clone ID: MRT4577_159056C.1
tttattatacaatctttcggggccctgggtgttttcgggaaccgcggccacccaaaatctttgcactgtacatttattttggcccactccttcccccacgtaatccaaatccggtacgttaccccgcccgaaataggttttaacacggactacaattctgggcaccctgggtgtaaactttacaaaaagcctgaccattccctccgccttaagagggatactccaggtaaaaagtttttggagccaggttaaatttcgacaaaaaaaaaacccctcc

SEQ ID NO: 64757 - DNA, 367 bp, Zea mays
  Clone ID: MRT4577_159057C.1
gggttggggcgcaaatcaatgtgaagccggattaaacacaaaaaaaaacagaagaacaagaaaaggggtcaacaaaacaaaccacacctcaccaaaaaaggacaggacaccctccaaggttggtttggtcggttgttcacctcataaaaacacacatccctcgttttttacagactttttttccacgcaacaacaacaaaaaaaaacctaatccacagctggctcaaaattcaaacgacccgaatccccggcaatgggttgggcaaaagggtggaacctcttttccttggttggtgggtcaaaactcaagagccagcagaaaccagtgccctggtccccccccgggggcggcaggccccgatcaacg

SEQ ID NO: 64758 - DNA, 420 bp, Zea mays
  Clone ID: MRT4577_159058C.1
aatgcatattctctttcttataatgcactcggggcaggagagcttggctatgcgtcccaattcccaggcaaacatttttctagtgccacaggggaatgttttctaccactgacgcaatgggatatgggcggggcaaaacaccaacccaattcacttgcacacttcttatacaatagtagcactagcataccttcatcagattgcatattagcgtaagcggtaagacccactgaacagacccggtgttttttatattgcctccgtcatgaataaacactcacttagggcacctgctccatcttgctttcgccagagtggtcctccagaggggcatgccggtgttaggcctcctaagcctgctcgtgctcaggcatgctcaggcccatcttgagcatgctgtgtgatgccgctgctcaaaag

SEQ ID NO: 64759 - DNA, 382 bp, Zea mays
  Clone ID: MRT4577_159059C.1
gccgccagggggagggaatttggcaaaattcgccttttgagggggcggcccggcagggacctcgcatctctgatacccgcagtagttctatagcaggacgagcaaccaacctcgagtttggtgaggctcgcattaatgagattaacggatgacgcgcgcctctgtctgacgatccgagaattcatgataactggacggatcgcacggacttgatgccatcgactcagcattgagagtaatgccctatcgactttcgatggtgagagaggggcctaccatagtgctaagcagcgacgtagacttatgcatccattccggagaggtagcctgagaaagggctaccacatactaggatggccgctagcgcgcagatgaccaaatc

SEQ ID NO: 64760 - DNA, 315 bp, Zea mays
  Clone ID: MRT4577_15905C.1
gacgtactcttgcgtccgtgtgtggcaacacgtaccgcttccagatcattgacaacgaccagggtaaccgaactacaccatcatacgtggtttttaaagaatctgagcgcgtaaatctagatgcgggcaaaagccaagtcgccatgaaccccatcaacaccgtctttgatgccaagcgtctaattcatacgaggttcagtgatgcgtatgaccagagtgatatcaattaatgggcctgaaacgtcatttctggccctgatgagaaacctatgaatggagtacaaaaaagcggacacgagaaacacctagtgattg

SEQ ID NO: 64761 - DNA, 195 bp, Zea mays
  Clone ID: MRT4577_159060C.1
tttatattttactcccccgttctttctgtaaaaaaaaaagggggacaggcccttattagaaggggtggcgaccttacagaaatgggcaccaacacattcggggaagtctgaaaagaaaacacgaacccactaaacctaaaagttagttgggtaagccttccgggaacatttcctggaacaggggcaacaccatta

SEQ ID NO: 64762 - DNA, 333 bp, Zea mays
  Clone ID: MRT4577_159061C.1
gccacgcgtacgacaactctgacgagcgggaccacctgtcattgtctgacccgccgctcgccggacggcagcgcgacgaggacccgattgccgcttactgctacaggacccagcatcgcgtgctacaccgctgatcgagcgaaccccatgcaccctgatcgctccgtccgatcgaccgcctaggggttacgcgtaccactggctccccgcgccttattggaggcggtcccagatacctcaaactcacttcgcagctggatccgctcgactcaacaccggcgaattcgagaagtggcatacgctgcagagctgctatgcgtacaagtagaacca

SEQ ID NO: 64763 - DNA, 693 bp, Zea mays
  Clone ID: MRT4577_159062C.1
atgtcgtcggtattgaggaattgggcaaggcctagcccactactcctcgtgctcctctcctgccggagcaacatcccactcgaccgtccaacccgatggcagggtggtaggccaagtcacaccatcaaccatttcctgaatggtacctgcaaaaattatgccacaagcaaggctgagtatactaatactcagctagacttacccgcatacatggtgacaagcatttatttcaatcaacaagttatctcatgtaacctcatttcacttcttactcgatgcagtacaaggggtcaagcagtctcattagctgcgagaagcagacgattcgaatcgagttttaaccttgcaaggcctcaccgccttggcatacaatgctccactgaccccgggtgccgccgtgcagtgaccgcacttgtacccaccatagctagcatgggagacccagtctcaggtcgtatgagggataaagtccgcgtccggcttcaatcagaaattacaactttggaggtgtatgatctacttgagttaaacaaggttaactttacttcaagttgtgaatggtttattgggttaaacttagctaagtggcttggtattggtgtatgtttctctgtctcaaaatttggggatcagaaagtgaatggttttctctggacaaaattattaaattctagggcagaaggggtgctttga

SEQ ID NO: 64764 - DNA, 1152 bp, Zea mays
  Clone ID: MRT4577_159063C.1
ctcatcgctcctcttcctcctcccccgcgagcgtgtctcgtgccctattaatgcggtggcggtgacagggagtcgagtcgagtcgagtcgagtcgggcgcggcgcggcgcgggcgctgggacggcgacgagacgagacaccgcccgtgaggaggagtgcaggaccaggcagcgccagcggctccgggctcggctcttgcgtgcgccgctcgtcgtgaaggattcgtcggtggaggtagcaggagtccgcagcaacaagatgattgatggcaggcggcattcggtggacatccccgtctcgagggccctgttggccatcatgcggtccagatccctgagggacccggacaccaactcactggccaagttctccgccaagaaaaccatctgggagggcagctccctcgacgaggacgaactggagggggcgaacaacaagaatgcctacggcaggcacagcttcagctacaacgcgtacgatcacctccagcggaggagggaggagttcggggacggcctcaggtctggccggctcgccgactcgcccatcaacatcatcaaggccaatgccatggccaaggcggcgctccacaaccagagctgctgctcggccatttccgggatgtcgaggagcacaaaggacagggcctttggcttggtgggtgatggggaggagattggccggagggaggccagcacgttccaggagagctccaggagtttgcttcagaagtaccggcccagatctttctccgagcttgttgggcatggtgttattgctcagtctctttcgggtgccgttttgaaaggaaagcttgctcctatctacctcttccatggtccgcacggcgtgggcaagacgtccacggctagaacgtttgcagcagcgctgaattgccgttccccaggtgagaaccagccatgtggacgctgtgacgagtgcatgcccatattctcgggaagcagtagcagtgtggtagagattgatgcttccaaacttgattgcaagtctagggtcgcggccttgctcaggaatgcctgagaagtccttgcctcttcacacttcaaggttctgatcgttgatgattgccagcacatgacaaggagggatggtactctatctacaatagcctgaagggattcctgagagcac

SEQ ID NO: 64765 - DNA, 2055 bp, Zea mays
  Clone ID: MRT4577_159064C.1
gttaatgttacaaactgttcatggtcgttataagaaagttgtagatgcttttcttatcttgcttgtgttaaaatttcataaccatatgcctgacagattaggagttatgaatttttcaaactggttgctgtattctgtccactgacagaacagatttcgaaaactgaattgtttgattcagttcagcatagaatcaattcttggtgattacaaaagtatgtagtgcttttgccaagcttttcaaaaagtcttgaatcactctttttggtgatctgaagattaagttatggatgtttaaactctgaagactaaatctgtccaattctggacagcaaagccttctagtgtcttttgtccttagttaaatattgaatcaccttgagatgtttataaatgatatgtagacaattttattacctttccagaaagtccagaatcaattagtttggatgtctgaatctttagttgtgagtttttgaagttgtaagtctgaatctgtccaatctagacagagttgctgtgttagcactttttgaccttgctaagtgttgaatcttgttgagataaaaataccaaagttgtagttcactttttaagctttccataaagtcctagtttgctatttttggattaatatttgaagagttatgattaaaatgagtgactgctgtgctgctgtcccaaacatgttgaatgtgattgattgccctactttgttgtagctgtcttgagtcgactgcttgtttgtcttgggatttgactgaacatgagtaataataataagtgactagtataattggggttatatataagtaagtgttaaattaaaggcaagccccagttttatgcataactgtattattatatgctactttactacacttaatgcttgtaggattgaaatgtgcacttaagtgtaggagttgcttgaaacctctagttgcatgaacttaggattccttttgagatgaatactagtatgctaggtcgagtagctgcttgctaatcaggatctcggtagaagtcgagtgatttttctagcactcgcgcgaggtcaggaattgattgtattcatcttgataacgggatatatgttagtctatggacttggatccagggaggatgccttgtccatgagacgggaaaaatgaattaaggattaatgtgtggatacctgagtcaagcttttgaacgtactaagcacatgctgggaaaaatggtaaccggtaaacctagtacctgagtgaagtcgggcgcggactttatccctcatgcgacctaagactgggtctcccatgctagctatggtgggtacaagtgtggtcactgcacggcggcagccggggtcagtggagcattgtatgccaaggcagtgaggcctggacgcggacggggaatcgatggggacggttgtcatgtgtggggtcggagtaccctgacatgccgtgtgtttaggtttaccttgcaaggttaaaactcgattcgaatcgtctgcttctcgcagctaatgagactgcttgattccttgtactgcatcgagtaagaagtgaaatgtggttacatgagataacttgttgattgaactaattgattgttaccatgtatgcttagaaggagcaaatctagctaagttaatgatgatagaatttgaaaagctaaaatttgcttttagaaacagctagtgcttttggcaaaccaaacccctcagccaaacagctgcatagtctagaggtagaggagtagactcctcacaccggttaagtctagctgagtattagtatactcagccttgcttgtggcacaatttttgcaggtaccattcaggaaatggttgatggtgtgacttggcctaccaccctgccactgggttggacggtcgagtgggatgtggctccggcaggagaggagcacgaggagtagtgggctaggccttgcccgattcctcgttaccgacgacatcgattatccgctgcactttattttgtgaactttatttactacgcaaaaactccgatttatgtaataactcagtacttaatttgaagtttcatgttt

SEQ ID NO: 64766 - DNA, 1837 bp, Zea mays
  Clone ID: MRT4577_159065C.1
cctcgggccggccgggaattacgttaccattatcatccttgattctcgtccccggcctggatggctcactagaatgtaccagtatctgcttctgctctatagaactgtgagcaagccacgtcagttgtagtgccatggctgaagcagcgccccacttcgtgctcgtgccgatgctggcgcagggccacttgctccccatgctggacctggcgcgcgtcctcgccagccacggcgcccgtgccacggtggtgctgacgcccgtcaacgccgcgcgcaacagggccttcctggagcaggccgcgggggcggggctcaccatcaacttcgccgagctcgcgttcccggggccagcgctcggcctcgccgcgggctgcgagagggtcgacatgctgcacgacctctccctcatcgtcccgttctacgatgccgtgtggctgctcgccgagccgctcgaggcgtacctcctctcgctgccccggatgccggactgcctcgtctccgactcgttcatggcgtggactgccagcgtcgcgcggcggcacgggcatccttcggttcgtggtccacttctcgcccgcgtcctacgtcctcgccgcgcacatcctcgaaacgcgcggcgtctacgaccgcgccgccgacgacgaattcgaaccgttcgagggtgccggagttccccgtacgcgccgtggtgagcagggctacggcgcaaggggtcttccagtggcctgcaggcatggagaagttccggcgcgacacgctcgatgccgaggccacccgccgacgggatactgttcaacacgtgtgctgccctggagggcgcgttcgtggagcgcttcgcttcggagctcggcaagaagatttgggcggtcgggccgctgttcctcctcggttccggttccgacgccggcgcgatggccgggagaggcaaccgcgcggcggtggacgccgaccaaatcgtgtcctggcttgacgcgcggccggcggcgtccgtgctctacatcagcttcggcagcatcggccgtctgttcccggctcaggccgccgagctcgccgccggactggtggcgtctcgcctgccgttcatctggtctgtcaaggagacggcgcccggcctcgacgcggagttcgaggagcgcgtgaaggaccggggcctcgtcgttcacgggtgggcgccgcagatgaccatcctgtcgcaccctgccgtgggcggcttcctgacgcactgcggctggaactccatcctggagagcctctgctacggcgtgccgctcatgacctggccgctgttcgtcgaccagttcctgaacgaggcgttggtcgtggacgtgctcggcgccggcgtccgctccggcgccaaggtgccggtgacgcacgtgacggtcgtgaagccaggggaggtgctggaagtgcaggtctggagggacggcgtcgagagggcggtcaccgacctcatggacgagggccccgcgggcgcggcgaggcgggcgagggccaaggagctcgggcaacagatgagggccgcaatggcgaagggtgggtcgtcggacaccgatgtgagggacttggttcgccacgtcgttgaggtcgcgcggaaaaagggggagcacgaggacacggctcttgctggaggtgaccacgtgatcacgagcaaggaaaaggcaatgaacggcaccggtggaaaacactactgatgaaattcgtgtggtacggtcgttttagctgaaagaatctctcgagttaagctagctactagccacgcaacccaacttgcatgtaccagcagcaatgacatattatgctatcgtgtttttgtgcgacaaaaaaaaaaaaaaaaaaa

SEQ ID NO: 64767 - DNA, 103 bp, Zea mays
  Clone ID: MRT4577_159066C.1
cccacacgtccaaggacgcttgtgcgaacgcgtagagcaccttggtgggaatacaaatcaacggtggacaatgaatacgtcattagcctcatgtaccggaaga

SEQ ID NO: 64768 - DNA, 1278 bp, Zea mays
  unsure (1)..(1278): unsure at all n locations
  Clone ID: MRT4577_159067C.1
gggtaccctcgggttcggccggtagtgctagtgttgtaagctcccttcggacaatttcacgggtccacgacagtgccggatagaatcggtccaccactccccgtaccccgaactacctgacctgagagagagaccgtgcctccctcgccgccgccgccgcagcatccctagtcggagaagatggccgagaagccggcaggtcccaccccgaggacgaggatccgaggcggtctcgcggcctcagctccctcctccaggaggctgtcttccgtatctttcaccgcggccccgagcaagatcaagaaggttcctgaccctccaaaggccgtgaggccatcaagagccacacctgccaagaagcggccacaagtggatcaagctcagaagcggagagaagaggtcgctgctctgcaggagcagcttaatggcctgcaaagtaagttgcatgaaaaagatgaagctctaagatccgcagagaacttgatcggacgagttactgcggcgaatgaagcagttgatgggttgaggagccagctctccgagaaggaattgctgattgaatctactggttcagagctgcacggtgcaaagatcatgctagcagagaagcaggcggcactggagaagttagagtgggaggcaaatgtgtcgagtacaaaggtggaagagctccaagctgatgtagcttctatggatactgaagtttctgctctgatgaagctgttcaggaaaataacagagagtgacagagcccctccacccagggatagaaatgacgatttgtctttggaatgcgagccagttcaccttgatgacacggtagacgacattgaccttgagaagatggagaaggagatgtcagcctacgtttcgctgcccgaagctcggctttgtctgccgcgaaggagaaccctaccgacgagttcatgagagcagtcgccgatgcaagattaagacttcaagccgttgtactctgaccaagactagagcgttgcgttgtactgtgtaaccaacaggagcaagcaaatcgatagtacatttgctaatcgatgtgttttgccggtgccccccctcagggccttttctgtgttctttctcctaccttgcaagttctgatcggcggccgctagtgacagtgagctagcttgatgtaacctgtaacgctatgaaccgtggtgtacgtgactgaacctccgtaatagtagatggtatcgtgtacggtgtaccnnnnnnnagcaacaagatggttcggcctgtcttgtcggcagaaagttcttg

SEQ ID NO: 64769 - DNA, 277 bp, Zea mays
  Clone ID: MRT4577_159068C.1
gttctagatcgctggaccctcctctcctcatcatggtgaatttctaattgtttttgcgttttggtaagtaatttctttttgtcagtttcatcaaaaaaaaaaaaaaaaaaaaaaaaaaaaaaaaaaaaaaaaaaaaaaaaaaaaaaaaaaaaaaaaaaaaaaaaaaaaaaaaaaaaaaaaaaaaaaaaggggggccccccgaaaatgggaccccttcacccggggatttatttcgggccgggtacctgcaggggaacaaattttcccaaaagggggg

SEQ ID NO: 64770 - DNA, 913 bp, Zea mays
  Clone ID: MRT4577_159069C.1
ctcgaggccggccgggccgggtcgtttatcggttggtggacagtggatactgcgagagatcgatcaaaggaagaagagggaacaatcaagaagaagaagaagaagaagagatcgtttagctagggggtgcaacagaagaagaagaggaagaggaagagatctgtctcatcagtacgacgtacttgttgttggatacatacaaagatatatgtctcatcaggcgacggcgatgatgtccggcggcggcggtgcggggcagttcggcgacacgacgttgaccaaggtgttcgtgggggccctcgcgtgggagacgcacaaggacggcatgcgggcctacttccagcagttcggcgacatccttgaggccgtcgtcatcaccgacaagaacaccggcagatccaagggatacggatttgtgactttccgtgagccggaggcggcccttagagcctgcatcgatccgtacccggtgattgatggacggagggccaactgcaaccttgcctatctcggcgtcaacaagtccaagacagcactgacgacgatgctgccgcattatcttcaaccatatgctgcccatgtttacgggggaggcagcagcatgcgggcaacaatgaagtcctttcagacagctggtggtggtgccagcctgatgagcttcgtgccggcggccgatcatggcatccagcaagggatccctacgtacgacagtgtctatgccgcagccgggtactctccctatttctcggactacggctacccgctgagctactatcagccctacatggtcggtctgcagcagggaggccagctacagcagtacgccgccgtcgggggaacagcggcagcggcgccggcggccaacccctcagtaggaccctactcctacttccagtacggtccggcgagcgct

SEQ ID NO: 64771 - DNA, 113 bp, Zea mays
  Clone ID: MRT4577_15906C.1
cggtaccttggccggacgcgtgggtgaaatgtgagatatagagtgatgtgagagatatgtgtgagagagatttagaggagtatgttacccgcgagattctgccgtgtagggac

SEQ ID NO: 64772 - DNA, 194 bp, Zea mays
  Clone ID: MRT4577_159070C.1
ggattccggctgcgacccagcgtccgggggtccacgccgacgaccttaagcttcgctagaagcgccgtagcccacggtacaagtactactacggccgtggcgaggccgggggcgcgatacccgccctctgctacgccgtcctcgtactgctcctagccgcggggatcaccctgctaatgctctacgacgtgtac

SEQ ID NO: 64773 - DNA, 191 bp, Zea mays
  Clone ID: MRT4577_159071C.1
gaaccaaacgactgaagtaacggatcaaatgtttggggtgaacagttccaaaatttgaaaatggattgtgctatttcatgacagtgactcctgacatcgacatacataggtggactccgttggaactgtaggaccagccatgctctagtgtccaagactggattttacatacatacagtctcaaatatttg

SEQ ID NO: 64774 - DNA, 564 bp, Zea mays
  Clone ID: MRT4577_159072C.1
cattgggtacctcgaggccggccgggaccggatcctgcctctgccatcagtgctcgtccagtgctcttttcttctacccgccgccctccccgcttgcgtaccgctctgcactcgcatcctgcgcgcgccgtgcgaagcgacgaactacgacatggtaactgccgacgacaccctactattcgactaaccaggcgaagatcaaccagctgctatcgctcgtcatcgacacctactactctgacaaggatatcttcctgagccagcgtcttgcgaattcctccacatgcctcgaataatcatcaagctccacagggtaacacagaagatcaagctggatgcccacacccaccatgacatcctcattaccactgagaatgacatgattactctgaacatcactgacaacgacgttgccatgaccgagacacatcttgagaacaaccttgctaacaatgcacgatctagtgctgaagagaacatgccaagtgtggcgtggtatggcctaaaccatgatgattacctcatctagcgtaacaatctactccttgtagctagctgttgaga

SEQ ID NO: 64775 - DNA, 534 bp, Zea mays
  Clone ID: MRT4577_159073C.1
gcggccgcccgggcaggtacaagctttttttttttttttttttttttttttttttttctttttttttttttttttttttaaaaccaaaattttttttggccatgcaaaaaaaaaagaaaaaacaaaaaaaaaaaaggcaaggcaaaaaccagggccaaaaccaccaaaagggcgaccgccaccaaacgggcggaaggccaaaagaaaggcgaacgagggacgaagagggggggaaccagggggaaaccggggcccggggaaaaagggggaaacctgcgcaatgggacgacaaaaggggaaaaggaaggagaaacaaaaaagccagggaaaaaaaaaaaaggggaaaacgaagagagaccgggggggacaaaaaaaaagggaaaaagccgggaaaccaggggccccacccaaacccaaaaaaaggccaaaaaacggggaaaggcgaatggggaaaagggcgcccaaacgcgggcgggaaaactgaccccctgcgggcggccggtccactgcccccaaagggaggagttgggggaa

SEQ ID NO: 64776 - DNA, 621 bp, Zea mays
  Clone ID: MRT4577_159074C.1
gtaaataaggcacatctacatattgtttgatatgatattaccaaaaaacgaaaaaaaaaaaaaaaaaaaaaaaaaaaaaaaaaaaaaaaaaaaaaaaaaaaaaaaaaaaaaaaaaaaaaaaaaaaaaaaaaaaaaaaaaaaccggtggcaaaaggcccccccaaaaagggagaaacctttcccggacccggcggcccccccctcgcggaaaaggtggtttccaaaaaacccaaaaaggtggccccgggggcaataaaggggccctttcgggaacccaagggggaaaaaggggaccccgaaggaggggggcccccccggggggaaaaccccctcccaaaaggggtggaagaaaaaaacccaaaggccccggggggggtgggggggaaccacagggccaagggccggccccgggttaaaaaacccaaggccccccgccggggccctaagggcgcgcgggggccggccccggttgaggcccccaagaaaccccggggggtccgccggaaaggaatttcaggggcccccggaacccctccccccaacggaggacccctggggccccgggggttttttcgggaaggaggagagggaaccggaaacccccgggcccccatttgggtt

SEQ ID NO: 64777 - DNA, 161 bp, Zea mays
  Clone ID: MRT4577_159075C.1
ttaaccgggaaaaccttttgaaaattgaaggaataacaagttatccggaaaaggttcggaaggaaacaaaaggacctaaggcccttaaggatttcacaaaagaaaataacaaaaattggttaaacaatcaatggggtaatgggaaaaccaaaaaggttcaa

SEQ ID NO: 64778 - DNA, 2181 bp, Zea mays
  Clone ID: MRT4577_159076C.1
caaatgatgatatatatctaaagatttagacttaaatagaagtacatggaaaacacttatccatgtgactgatctttaatttggggggtggggggagggcaattccctccgggtagagctatcccctccctccccatcccttggagccagcaactccactcctgagtcctcacctcgtgctgcccgcgccatttccacctcccactgtcctttcgtccagtccccagccctgcagcccaaccgtggaggttctggaaggcggtgtatcccttctagaaccttctcgagatgcagagcgccgcggctttccggccatgccccactcggctgctggtgagcagcccttgtcgccccctcctctcggcccgcccgcttcgtgcctccgccgctggcgccgtcgctaccagaagcagcgccgtgggccctcgcggtctggggctcgggctgctgccagcctcgcccgatcgggatggcaagtgccgccagcgacaggtgtcatgcagcgcggccggggatgctgtggcacgcctgtaaaagatagagcgatcccctcccctcccctcggcatcccttggagccagcaactccactcctgagtcctcacctcgtgctgcccgcgccatttccacctcccactgtcctttcgtccagtccccagccctgcagcccaaccgtggaggttctggaaggcggtgtatcccttctagaaccttctcgagatgcagagcgccgcggctttccggccatgccccactcggctgctggtgagcagcccttgtcgccccctcctctcggcccgcccgcttcgtgtctccgccgctggcgccgtcgctaccagaagcagcgccgtgggccctcgcggtctggggctcgggctgctgccagcctcgcccgatcgggatggcaagtgccgccagcgacaggtgtcatgcagcgcggccggggatgctgtggcggccccgaaggcggaagaaggaggcgggctcatgaagacgctgtggctcggctcgctcttcggcctctggtacctgttcaacatctacttcaacatctataacaagcaggtactcaaggttttcccataccctataaacatcacagaagttcaatttgctgtcggaactgtagcagctctgttcatgtggatcactggtattattaagaggccaaagatttctggagcacagcttgtagccatcctacctctggctattgttcatactatgggcaatctcttcaccaacatgagccttgggaaagttgcagtgtcatttacgcacaccatcaaggctatggagcctttcttttctggtattctttctgcaattttccttggcgagttacctactatttgggtagtatcatctcttcttccatttggtggtggtgttgcattggcatctcttactgaggcatcctttaactgggctggcttttggagtgcaatggcttcaaatgttacctttcaatcccgaaatgtattgagcaagaagctcatggttaagaaagaggaatccttggacaaccttaatctcttctctatcattacagtgatgtcatttttccttttggcccctgttaccttctttacagaaggtgtcaaaattactcctacatttttgcaatctgctggtctgaatgtaaaccaagtccttacaaggtgtcttttcgctggactgtgtttccatgcataccaacaggtgtcttacatgattttggcgatggtgtctcctgtcactcattctgtgggcaactgtgttaaacgtgttgtggtcattgtaacatcagtgctgttcttcaggacacctgtttctcctatcaactctctcggtactgcgattgcacttgccggagttttcctgtactcacagctcaagcgacttaagcccaagccgaagacggcttaaatagggattgtattttccatctctttgtgttaatggagttaaacacttctatgtttcaggtgactgcattttaaaagatttgtgcttataacaacaacaaagtcttttagtctcaagcaagttagataggctagggttaaaaaccgaaacacctccccccaccccccaaattaaagatcagtcacatggataagtgttttccatgtacttctatttaagtctaaatctttagatatatatcatcattctgaaaaaaaaaaaaaaaaaagcggcc

SEQ ID NO: 64779 - DNA, 248 bp, Zea mays
  Clone ID: MRT4577_159077C.1
tcggggaatgccaattgctttttttcaagaaataaggaggcaaaaatgttgatatatgaattggaattatgagttgtcttattaggcctatcctgaagccaaaggaaatgagatcggaattcctaggtgaattccaattccgcattttcaagagatagggaggcaaagatgttcatatatgaattggggttattgggtttcttattaggcctatcctgaagcctaaggaaatgatatcggagttcctc

SEQ ID NO: 64780 - DNA, 302 bp, Zea mays
  Clone ID: MRT4577_159078C.1
gtggaggcggcgactgctgctgtatgtaaaggggagccgctgcgtttctaggcgtggactgatcccatgccggagctgccgaaccctgataagaccgacttatgtgatgggcctcagtgtgaggccctcggatctttcgtgcagtacatgtgggcattgggaatgacattccacctcatttgttgtggcgtcgctgaggccacctactacgacagggcaactgattttagagacacgcctgcttacaaggaatacacatcacaggagttacctgaggagtcggaattatcgagcgctgatgt

SEQ ID NO: 64781 - DNA, 444 bp, Zea mays
  Clone ID: MRT4577_159079C.1
gggggggccaacctgtaaaaccagaaacaatggggattttttgcccagttgaaacttataaagttttaaaacaacatacacatttttttgcaacaaacccaaccctggggtttttttttttgctagccctcttattttacagttaaaccaaaacggacacctttttttgggcccacttagctgttacttactccataagagcccaccatacaaatccatagggttttaagggatccagggcctttttaataacaagatcattccatgcataaagggggccgggtacacaccagggcaagcaatttttttggacgggcggggatttactgctgccccttgaaaaggaatagggggttttgtaaggcccaacggggccgtccggtttaaaggacaaaaggctggaggtatccataagtctaagtttatccacgtccgttgaaccct

SEQ ID NO: 64782 - DNA, 226 bp, Zea mays
  unsure (1)..(226): unsure at all n locations
  Clone ID: MRT4577_15907C.1
ctcatgagcgagtagtcgactcagtcaactatcgtagacctagagttcgctgtcgctcgcgcgagcactncatctcatcgtcacatgcgacagatcagagagagagtcgtaggacgtgttctagcgactaagaatgtgagggactgcgagatgctattgctgagtgnctcagcgtggacgaatatatcgcgacgcagcaactgtcggaaggcgcgtcagagtactc

SEQ ID NO: 64783 - DNA, 625 bp, Zea mays
  unsure (1)..(625): unsure at all n locations
  Clone ID: MRT4577_159080C.1
ccgggnaaaaaaaaaaaaaaaaaaaaaaaaaaaaaaaaaaatttaaaaaaaaaaaaaaaaaaaaaaaaaaaaaaaaaaaaaaaaaaaaaaaaaaaaaaaaaaaaaaaactcccttttccgccccccgggggaaaaaaaagccttccttacccaaaccccccccccttgggccggggaacccgaccccggccttgcttccgggagttccggggcccccccgggcccgggggccaacaagggggggggggggaaaatcccggccttcgctggggttttttcccggccggccaccccccggttggggccttctgggccttttgggttgaccaccccgaaaacaaggcccaaccggcccgctggggggacttctttccgccaaatacaccctttttccccgggggggaattttggggggttttccataacctttatcccccttaccaattggtcggggggagttgtttccctttgtttaaaaaccaagaccggcccaaaggggaaaaccctttttggggcaaaggggggaaaagggcccttcgctggggaaagaggaaaatctgatccttttgggtggcacctttgggggcttttgatggggaaacattccgcttccggggaaaaattt

SEQ ID NO: 64784 - DNA, 155 bp, Zea mays
  Clone ID: MRT4577_159081C.1
ggggctggcttaaatcattgatcagattaaaaacaccgaaactgaaaatgcagctcacactcgtgaaccacctgattaacaatgaacccctcgaactcatccacacaaaccaaaatttcatgaggacgaacatccctcttcacaattctcgaaag

SEQ ID NO: 64785 - DNA, 325 bp, Zea mays
  Clone ID: MRT4577_159082C.1
cctttttcacaggtttttctagggatttttttttgtttagtccggaaaaaccaccatcacataaacaagctccaaagtatgtaaaacacaggattcatcctacttatatacaatggcccacagtttgctttgggcctgccctaaatataacaaccacatggggctggatcaaacatgttaacaaatgtgtaaaaccaaaacacttttcaggctgggagataataagaaaccctggtattggtgtatgaactacaatcttcaacagacactttactagaactattccaagaaatccttgacctctacagcactgaaaactttaaac

SEQ ID NO: 64786 - DNA, 483 bp, Zea mays
  Clone ID: MRT4577_159083C.1
atgacgacgcacgcacgccccgaaagccccgaatttttatggttgggcgcgtgtagattactagttactataaatctgaaatgacatttcttataatctgcctacatcttattatacttgttcagttgttctaactatttctggtatgagctgtacttgttctaactatttatggcacgaatttcaagttgcgaagtcaagatttcggggaaacaaatgcccatttccacttcaaagcttcaaagctcgtgcgtgaactaggtccatcacaaaggagatgtgcgtgaacgcattacgcataccactacaaagctcgtgcgctttcaccaagtactatgactgcttgtcagcatccatttacaccaagaacaaggaatgtttctaccaaagcgttagttgtgattattaagaactgtaatgatcaattacagaactaagtctgttgatgatcataacaacataagcgggctgacaacagctcat

SEQ ID NO: 64787 - DNA, 510 bp, Zea mays
  Clone ID: MRT4577_159084C.1
gtggacttttttttttttttttttcatatggaatttatttcgggtctcgaaaactaacacaataatttattttgttgggcaattaggcaactacaaaataaattttagcttgttcgggagtacctgacttattgaaatcggcatgatccttaaccctacgtacactgcccacttgctagttccagtccattattatatatacgcgcatcaaaaattctgactgccgcgtccactgctctaagctctgcctgtacgcaggcctccaaatgcagctactgtcacgcgatatccggacagctgaatcgacgaggtcgcaaacggaaagtacatatgctgacaacccatacacagcggttgaacgcgacaacacagaaacaggacagtcttgagcaaaacccgagatctcgaatcctggtggcagcaggggcaacttgtgtcaaaatcaaaacccggccgggaggtgcaacgactcgatcttgattcatgtacatgtgacatatagttgttgtt

SEQ ID NO: 64788 - DNA, 238 bp, Zea mays
  Clone ID: MRT4577_159085C.1
gcaacatacatagtgaagtacactagcaacatcttagcaccaatgggagccaagattcttgccctccttgccctccttgctctttcagcaagcgctgctacctcgactgtgagtgcacaatgctcacaacaatacctctcttccgcgacagccgagggattcaatacccaactatcaatcctacatggacaagaggcatgcaacaagcgtttacggcatacataacccttcacaccat

SEQ ID NO: 64789 - DNA, 300 bp, Zea mays
  Clone ID: MRT4577_159086C.1
ggggaaaacaaaaaagacccttttttttcttaaaaaaaaattaaaaaaaagccgggggggggaaaaagatttcatcgatccgcagtccatggtgtttagagcaggggcctggggaacccggggaggaacccaggattaaaaacgggcacagaggggccttgtaaaaaaaaaaacaggggggggaaaaaaaaccggaccgggaaaaagataaacccctgggactagggaaaaaatagcggggggaaaaaggaaaattggggggggggggccccacgggttaatttcctcaagtcccggggg

SEQ ID NO: 64790 - DNA, 477 bp, Zea mays
  Clone ID: MRT4577_159087C.1
caaaaagggttaatatgtattaaaaacaatcttacccggccaaagctccaattgtttaaaaaaaacgggcccaaccccataatggaaaaaaaattttcttttgggccccctctcccacaaatttacaacagtccccgaccccctgcagctcggggaagaaaaaggtttttttgccaaactaaccgcccaaaaaggaaacatcgaagtatacaagaggcccattttgctcgggggaatttttgccgaaagcaagttggcaagcccatcaagagttttttgaggagcaattgtttgaaaacaacccacctggcccaagagttcggggaaaacccacattgcatttcgggacctgggagctgcaccaggggctacttaattccaccaaaagaagggcaacaccaggggaatgggccaattcccatctccttatagagggcccttggcctatgggaaacaaacgaatttgggattccagaa

SEQ ID NO: 64791 - DNA, 322 bp, Zea mays
  Clone ID: MRT4577_159088C.1
caccgatcatgatgaagggtggtagcaagaaggaggtgggcgcggtggtgaatgctcattcttatctttactcttatactggtccaattcgacatctttatattttttcgcataatcttttaacaatccaccatacacaattaattgccgaccttttaaagctaattaaaacacatcaaatacatcttgactcactgacatttcataatcttttgccgaatactttgcaacttccgtaaccgcattgccttctcgtatcaactccacttttttaatatgtactttgtgttatctctggcatatttcgttgcattcttgccac

SEQ ID NO: 64792 - DNA, 249 bp, Zea mays
  Clone ID: MRT4577_159089C.1
tgatgctgagcacggacaatgcggcgtggatctcggtgacaacctttctggtgctggtggtgccgctgatcatctatgatgacctggagcagcagcttaacagacctctagctggggcagcagacgcttctgggcgtggcccctacgacgtcgtcgctgaccatatagatatatccgtgcatcgaaccttttatgccccctaattgtctgtagaggtatttgctgctgtcaaggtcatcattcgagtta

SEQ ID NO: 64793 - DNA, 628 bp, Zea mays
  Clone ID: MRT4577_15908C.1
tgggtacctcgaggccggccgggccggggatgcccaaactcttccctaccgcagctcccacacggccacccactcctcgtgggccacgttgcatcaccccgtcctcacctatggttcacaccggagactcagaggtcgatgctgcgtcgccgcagagctccgcgcattcgcagggagcgctacgccgagccgtcgcccaggccagaagatcgccgcctcggccccacccaagattcgcgtcgggctcgacgccgtgccgcgccgccagctccgcttccaagctccagcgacctgccagctctacgcgtagtgaggtagttatgtgaactgaatcgatgatgttgctcatcagttgttatgaaatgtgatattgcttactcgttttccatgatattatttagtctacaataccactaccactgggtacctgatatccggcgggtacactgtgggcacaggtacaagtacaattcctggcccgattgatttggaggatatggatacgtataagtcttatacaatatcggatcgggtattattatacccgaatacccgaaaaaaaaaccaacaaaacaccaaccacccaccaaaaaaagcaaaaaaaaaaaaaaaaaaggcccctagggcc

SEQ ID NO: 64794 - DNA, 315 bp, Zea mays
  Clone ID: MRT4577_159090C.1
gctcgggaaagctgggattttgttattttaggagaaaaggagaaaacaactgaattcctgacatatctaaaaaagaaaagggttcatggcatgacggcaatcggccttcaaagtcgctgaattttttcagagcatggatcgaaaaccgttctttttcacacttggggcttggacttcccgctgttatctgctgcgggcccaagaattttatttacaagctacagtctgaacagaaggcccaaaggagtacactgctcgagttcaaatgggttgcatgcactaggttgaagttgaaagggccaataattgcagcga

SEQ ID NO: 64795 - DNA, 196 bp, Zea mays
  Clone ID: MRT4577_159091C.1
gtttcctgaggtctcccagtcatactgctggttaagcctgcagaacggtgtactcgtttgaaatgtatctggcccaatcgctgagcgtccgcgctgcatttctccaaactgcccagcagggggcggtgctacctcggctccgcgcagccacggcttcccgctggcgaaccaagggcgcggaatctgaaaagggcga

SEQ ID NO: 64796 - DNA, 153 bp, Zea mays
  Clone ID: MRT4577_159092C.1
caaggggtctacatgaacatgccaatccgggaaggatttggttaatttacagggcggaccttttccagtttttgctccgcgcaaaattgaggttctccgggacaggaaataggaaaaagggggccttttttggggtcccatattgacatgggc

SEQ ID NO: 64797 - DNA, 207 bp, Zea mays
  unsure (1)..(207): unsure at all n locations
  Clone ID: MRT4577_159093C.1
gcnnccgngcgangccgaacatacngangcnccgcccngcnganggcaacgagaccgccggagcagacaaaggcgcggacgncaacaggaagaggccgaccagccacgcgcncnccaggcaaaagcgcccacaccngccgggcaccncgaacgagggcgaggagaaggggcgggacaccancaccgacaacncgacgggcaacaagc

SEQ ID NO: 64798 - DNA, 621 bp, Zea mays
  Clone ID: MRT4577_159094C.1
taccggcgttctctgggtctcccacgcgtccgatcatacacaagcatcaaagcagtaagataagcattgctgtcattattgatcaagtaacacatgcactgaagaatgtgatatctcccaaaggagatgatggtgcaaacttttcctatggcagcgcagagatagaaaagatggtggctactctgataggaagagtaagcagcatggctgaaagatctagcaaagacaatgttatgagttcccgatcactctctcatgaaaagtctgaactcactttgcgactcgagcatctagttcatgtctgcagtgacgtactagatggaaaggctaaccatgaaaggctcactgatgaagtttgcttgatcctagagtggatggtgagacgatgccttttgtgtcctgatggaatagacattgtggagtacacaacaaataattctgatggaaatgagtcccagaggacattaagcattcatgaaaaagatatggtgcagagtataataaattcgaaaatggtttcaggaacgcaaaaggagaacgcaacaggatatggtgctgaagaccttatccctgctgtaatattagaaaaacattctcaaattgagttgatcagttctaagc

SEQ ID NO: 64799 - DNA, 329 bp, Zea mays
  Clone ID: MRT4577_159095C.1
gacaacagcaacacaccgcgatggcgactccgcaagagtgcacagcaactcgaagttactgccgcactcatcctaggggatagataacaccgttacacccgtcctgaaatggataccgagatccacatggacaaggagcatggcatgcacgtcacactattgtgggccagaacccactgattgcagcatgtgcagagggacatttacctaactatgatgaaacaggcactggccggtgccgaagatatcttcacacctatggttaagatgtaccttacaataaagcacccactgcatctacagccagtaaatcactgacatgaaacacc

SEQ ID NO: 64800 - DNA, 459 bp, Zea mays
  Clone ID: MRT4577_159096C.1
gcaatgcaacaatagccaacagggcaagggcagaacgctagaactaccggattacaatttacaactttacaaggatgaatcaaagacaacaaggggggagaaagggcaagctgacgctatctaatactctgaacacgtgcctcccgtcgatcggggatacaggtcggggtccacctcaccggtggcgcccgcggacgtgtcctcggggtcaggtccggtgccctcgctgtcggaaaggcccccgagccaaaaactgccggggaggtggccgttgacccaaaccaagtactcgagccggccctcataggcgccgagcctgcgggacccgctgcgcggggcaagacccaaggcgggcattcttcaaacgcgcgcgccgcaagaggggaatccggcccgggggtccaacgaggcccggtggcccaccagccacccccgcgtgcggaaccccataaagcctgg

SEQ ID NO: 64801 - DNA, 1279 bp, Zea mays
  Clone ID: MRT4577_159097C.1
cattgggtacctcgaggccggccgggattccacaaaagctgttctgacagccctacataggatatgttcgcctttccaaaggaaaaacagagatagaatcctacctctctagcatggcgaccggcgacgagtcggagacggcggtgcgggcgtctgaggagttgcgggactggtccgacatgacgccagtgtgtcttgccgaagcgttctcgcggctggcgctggaggacctgtggcgcggcgccatgccgtgctgtcgctcctggcgggacgccgcgcgctcgcgcccgggactcttcgcggtgcttgacctcgagcccgggtttgctgagtccacacctggcgccgaggcggcagcgtggtggacgccctccttccagcgccgtgtcgacgccatggtgcgctccgccgccacgttcgccgtgggggagctgtgtgagatccatgtccgccactgttccgacgacgcgctcgccttcgccgccgagaggtctccaagacttagtatcctttcggtcaaaactagcccggcagtaaccgatcgatcaatgcttattgtcggagcatgctgccccatgctcacagaactggacatcagcaactgctacgagatttcatacaagtcactcgaggtgatcggccaaagctgccagaacctcagggtcctcaagcgcaacgtcttcaactggatcgacccatcggagcatgccggagtagttcctgacgactatctgtgtcaatgctcctgtcccccccccagggaagccattacgacctccaggttcatgccgaagctgagacacctcgagctgaggttctcgaagctgaccgccgtcgccctcggctccatccctgaaggatgcaaggacctggaggtcctggacctgttcggctgcgcgaaccttacgagccggggaatagaccaggccgctgctagtctgaagagtctggtgacgctggtgaagcccaacttctacatacctcgctcctccttccacatggggaggtacggccactggcagctctacgacgagaggttccagaccaatgtgtttcagatatgatcatagtctcaggtcaggtactcaggtgctccctttgacctatggtttatattctgtgtatgtgggcgcatatagtggcaccaataacgtgtggtttgaatcgtttctctcgacaacattttgtacagatggttatgctccagcggtttgtggagtgtggttggttttaatataaatgacttattgcctgcaaaaaaaaaaaaaaaaaagcggcc

SEQ ID NO: 64802 - DNA, 409 bp, Zea mays
  Clone ID: MRT4577_159098C.1
tttgggctgatttagtgcttgggatgtcgtacctacgtgatctgttgaggataggcctcataattgtccttttcgtactacctcgatggttaaggggtagttagacgctgttatttggtcgccttcgtggaggtctaaggccgagtcgaagtcgttagcgtctgtgtcggcggacctcgacttacatgggtctaagactccgctggcgcatacgcgcggccttaagaatacgctgcacgatagcgttaactcgatgatgttggatactaagcggtctggcgcttggttgagtgattcggataagcatagagcgttggagtagcgttgctcctttacgattgactatgacactaaggcggggaaagagtcgtctgaggaggatcctgcgaagtagaacgagggtcgggcg

SEQ ID NO: 64803 - DNA, 639 bp, Zea mays
  Clone ID: MRT4577_159099C.1
tcaaagtagcctagtgatggatccgtgttccccatagcgaatcctcttgcggggaggggataacgccatggcgaggacctgggcttcaggcggatcccgtccttgaagtagggcttctaggggtgcaatcccgacatggacatcctctagctccaagtgccttctagagagatccagggtggcactgtccaggtcggtgttgaggtcggccactacactagctagggtgttgaggcgatcctcaccagctccacctggaacaatgctggtctggcttcctccactcagacatagaggcaaatgcctaaaccttatgtcatgcagctgctgctggtaggtgtggctgagagaccacggagtccgtctggcagcattgctgaccgaagtagtgtaggtggatagtggtatcagggactcatgagctgacagtgtcctgaatcccctatcccctgcatccatcaccctgacatgaatgcgagtgatgtaatggcaagcccggggaggctcgcacactcgccttgtctcgtaaaagggtcggacgtaggttcccaacgcgtgcagcacgtcttgcagcaggttggggaagtgccccgtctcgaacattgatgtgtagtgttcggtgacaggcccaaaccccat

SEQ ID NO: 64804 - DNA, 1189 bp, Zea mays
  unsure (1)..(1189): unsure at all n locations
  Clone ID: MRT4577_15909C.1
ccgccgcagcctcgccttggctgcgcctgtcgtcgcgccgtgtcctggagtgtctcccgcgtcaccgctgttgtcctggatcctcgctggcttccgctccctccccgagtcgccctcggcacgcagtgacgacggcggcgcaatcccagactccacgtctgcctcgcgacaccccccactcccgcgtctctccaatcgcctcgcaacctcgcctcctgtcatctgcacatcggccactgactctgcagcttcgacgccgttggcagtggtagcggcagtgtctattgtgagtgaaggttacttgactatacaaatttccgtgcactacatcatttctatagtgctatgctacatgtgctaccaacacaggtcagtaaatccttttcatatattgtgtgtgctgattccatgaattctagttgctccttcagaacaggctatgttgagctcgttggcttctgctcacttcaaactgactgctcaagtgggcactcagactctccccaaagggtctgtatatggtcctgtccggtaagtttagcagatacagacgttcgctgtgcctccaggttccagcaatgaccgcgccgccgaaacgctcgtgacaagctttgtcggtgctagacgcgaagctaggcactaggctaccagagtcgggctggtccaagggagggctgcttgcatcggctggtttccctacgcgaagcagcaaccagccagcgacatcgccagctggtgctggtagttgggctcgatttctactattctgatagacgtgactgtagatttggcgatcttcaatcagagatggcaaatatgaatacattttcggcgctttctgaagctatcaattggcccagtggttcctactctgcaactagcatgcactagcagcaaggacgttgttgtttggactagaagaactatcctagcatgcactaccagcaaggacattgttgtttggaccggaagccccatcacatctttgtgtttcagctatacttacacaccttttcaaatctgtgatgaatgtttcgtattaaaagtactgagttcctcgatgattcttttgacatcggtgataaatcactggaaacanatcanaatagaaacatctagtttttttcctaattttgtggttgagctatatgtacacaactttttaaatctatgatggatgttttctggt

SEQ ID NO: 64805 - DNA, 966 bp, Zea mays
  Clone ID: MRT4577_1590C.1
aaaaaaaaaaaaaaaaaaaaaaaaaaaaaaaaaaaaaaaaaaaaaaaaaaaaccgacacacacaagagagagccgagagctagctacctagcgcgcgatggcgatgtccgcttccaagatgatggcggtcgccgcccctgcccggccgggacgaccacacaccaccgctccacacacaagaagagagccgagagctagctacctagcgcgcgatggcgatgtccgcttccaagatgatggcggtcgccgccgctgccctgctagccctggtcctggccgcgtcgaccgcggaggcgaggaacatcaagacgacgacgacgacgacggagaagaaggacgatgcggtggtgcagccgcagaccttcccgcccttcgaccgcctcggcggcggcgcgtccccggcgtccggtggcctccccggcacctcgtcgggcggcagcagcattccagcgttcagcatgccaggcagcggcagcagcagcatccccggcgggtcgttcttgcccggcagcggcagcatcggcagcatgcccctcttcagcggcggctccccggccttcagcggcttcggcggcatgcccgggtcccccgccgccggctccgtctccgtcgtccccgtgcacggcagcaagccctgaaaatccgtccgtcgccggagcccggaagtctgtcgggccaacttgtgccctagtactcctttgcctgcattgtattggagagttggtatcgcgtttcgtttggtgtttgctttgttattataggccgcctatctaccgagacatgtgatgtttgttgcggtaaattaaaatcggttgtattcatgctgctgctgttgtctttaatttgttaagaacggttcacattattgatttgtcactactttgtttggctttcgggacgcattcaattcaaatctggagctcactgccgcttgaaaaattaagctggcaaggatacgccttttgt

SEQ ID NO: 64806 - DNA, 3756 bp, Zea mays
  Clone ID: MRT4577_159100C.1
atcatttcatcgatgattttggcattggcaaactttcaggaaacgagctcaagaaattcacccaacattgcacagaacttagttccctcacccatcgaacgatcacctctgtgcccgattctcacccactctttcacttcgccgcctccaggtatctccgcgccggaattatagcatgcaataaatcaaaattcggcacgaggataaatctcccagctttgcctccccacgcctctttttatctcccggctcccgtccccatcgagcgctcccctcgctgcccgggtctcccccaccctttcgcttcgccgcctccggggttctccgcgccgtgcattgattctaatgggaaagttcgcataactgaaactttgccgtggatcttgtgaattttagtgggaatttgatcgtggaaagtttatgaagttttgttgggattatggatgcataagatagtggtgtatgtgatttgcccatagtttctgcagcctcattgttttccatttgggatcaataaaacttcatgctcatggatagggctgatacatcaggttttgtcagtggtggtatacattacatgaacatccatgtgtattttcattttgtgtatactatgtgcttcctcagtggtgaagttgtaaagctggagttctgatctctgttggttggattaagtatctggtctctggataacatataaatttcttcctatcataatcctaccttatttataataagcaggatggaccttaataggacaaatctttggtttcatggaaaggaacatatagctactgcttcattctcccaggcccaaccatctgccataaattgcaggaatgaagaactatctatgtcagccgtgaacttgggttacattaggagctcagaaatagcacagaactctagaaaatcatttcagcatggcgatcaaagtttgaccgctccagatgatagctgcaggctggcccttggacttgggccaacaccaaatctatattctgctgatagtcactcatttggtggaaacaaagcttatcaatcagcaactttgctcagtcaacattgtgccacaaccgatcctggtttaatgttgggtctttcaagatgtagctcaagaaatttgcaatctacaagggcgagtggcagcaagaattattcacctgcaaggaagactggtatcatcttaccacttattgatgagggatcaacttcagcaaaaaggaaaaaaggtggctatttgctaccacttctgtttgtgccaagatcagaagatctttgtcttaatggaacatctacagacaccgatgcccaacaacatattggaactgaatgtgatactgaaagcggtcataatagatctctgaatcttcacgagattcagcctagcgctgatctatccattacagctggttgttcttttgctgcaacttctgatgtagtagccgatacaagtgatgagcagaggagtcatcagcgccatccaaagaaatgcaggttcaatggttgctcgaaaggtgcaagggatgcatcaggactttgcatttctcatggcggtggccagaggtgccagaagcctggttgcaacaaaggtgctgagagtcgaacggctttctgcaaagctcatggaggagggagacgctgccaggagctaggctgcaccaaaagcgccgaagggaagacagagttctgtattgctcatggtggtgggcgccggtgtgggattgaggaatgcccaagagcggcaagggggaagtctggattctgcataaaacatggtggagggaaaaggtgcaggatagagggctgcactcgtagtgctgaaggccatcctgggttgtgcatctcacatggaggtggtcgccggtgccagtacccaaactgtgataagggggcccaaggaagcaccatcttttgcaagtcccatggtggaggcaagaggtgcatgtttgatggctgtaccagaggagcagagggcagcacgtccttctgcaaagggcatggtggcggtaagaggtgcctctttgagggaggtgggatgtgcccaaagagcgtccatggtggaaccagcttctgtgttgcgcatggagggggcaaacgctgctctgttcccgggtgcaccaagagtgcccgcggtcgctctgattgctgtgtgaagcacggtggtggcaagcgttgcaggttcgatgggtgtgacaagagcgcacaggggagcactgacttctgcaaggctcatggagggggcaagcgatgcgcttggagcaccggctgcgacaagttcgctaggggaaggagtggcctatgcgcagcgcatacgaccctgatggcttccaaggtagtgcaccatcctggacatgcacgaagcatggtcgggccttgccacttcagcggcggcgtctctggttcgtcagcagctgatagcaacatggatcatgccatctcgtcatccggccatggcgcatggtcagactgcgtcgactcgtcgagagacatgcagagcgccggcaggctcctaataccacgtcaggtgcttgtccctggttcactgaaggacgctccttcgtgtggtctagcaggcaacggccaggacgacggagggagccggaaccagagctgtgggctcgtggtgcctgagggaagggttcacggtggagggctgatgtccatgcttggagttggaggcaacctgggaagcaatcctgatggttcgaaagcctgaaataccaaggatgagacgtagaagcacataatttaggttattttgcatgcctctgttatgattcttgcaatggaacatatacatgaatcttcaaatggccattgtgtaactatagtgcttgccaattggccattgtagtatttgctatgtacaagagtggttttggcatctagtcaatgttgtgcatagagctgagaactgcatagttacttgggttcagaaattatgcggaagcttgtaagttgtttcactccgaatttttgcaaacctgtttgctgaaatatttagtccatccctcgtgcaaaaaaaaaaaaaaaaaaaaaaaaaaaaaaaaaaaaaaaactcgagggggcatccacacgccggtaccccaattcccgctgtcacacaggtacaccttcaaggcgttcgtgatggcaaacaccctcgcatttgtcggctccaccttgtccaccatctggctcacctatgctgggtcggaacacgtccacccactgcttcgtgcaatctacatgttcctctccgtaatttcgatggagcaggcaacaagaagtatggttataggattcgcattgggtgcgtatgtcgttctgagcccagtcagcgagcggattgccattgtggtctgcatgtccaccttcatgacgctcttgcttcgcaacccttctagctggcagctgtggttcctgttcatgccgattaagaggcgattgggatggaaaggagcttttaagacccacttgcctccggaaacaaggagccgccttacaattggtgttggctccaattttgcttgccagttccttcggaggatgctcggtatgttatttacgtacagctttatctttctgttagcattgctatgatgagaaacaatatagtgtgcctcggtgtaatattcatgttccttggagctgtatgttttgtacttttgtatataaatagttcaagttccacgaatggttgctttattccaatgaactcagatattttaatcatctaatgcgatggtggaattatttataatccttaaaata

SEQ ID NO: 64807 - DNA, 831 bp, Zea mays
  unsure (1)..(831): unsure at all n locations
  Clone ID: MRT4577_159101C.1
gccggccgggccgggatctcccggctcccgtccccatccagcgctcccctcgctgcccgggtctcctccaccctttcgcttcgccgcctccggggttctccgcgccgatcgtggaaagtttatgaagttttgttgggattatggatgcataagatagtggtgtatgtgatttgcccatagtttctgcagcctcattgttttccatttgggatcaataaaacttcatgctcatggatagggctgatacatcaggttttgtcagtggtggtatacattacatgaacatccatgtgtattttcattttgtgtatactatgtgcttcctcagtggtgaagttgtaaagctggagttctgatctctgttggttggattaagtatctggtctctggataacatataaatttcttcctatcataatcctaccttatttataataagcaggatggaccttaataggacaaatctttggtttcatggaaaggaacatatagctactgcttcattctcccaggcccaaccatctgccataaattgcaggaatgaagaactatctatgtcagccgtgaacttgggttacattaggagctcagaaatagcacagaactctagaaaatcatttcagcatggcgatcaaagtttgaccgctccagatgatagctgcaggctggcccttggacttgggccaacaccaaatctatattctgctgatagtcactcatttggtggaacaaagcttatcaatcagcagctttgctcagtcaacattgtgccacaaccgatcctggtttaatgtnngggtcttcaagatgtagctcaagaaaatttgcatc

SEQ ID NO: 64808 - DNA, 636 bp, Zea mays
  Clone ID: MRT4577_159102C.1
gccggccgggccgggcttgctgtactggcaactgacaaaggcataagttatacactgaatcctcaggtcatcatactccgctgtttggcatggactggagctgtccttagtcctcgtcgccttgatcatttcatcgatgattttggcattggcaaaacttcaggaaacgagctcaagaaattcaccaacattgcacagaacttaattgttggttccgtccttgtttcaacggtcacgtttgcagcagttttcactcttcctggtggctacatatcggaggggcatccacacgccggtgcaccaattctgtcacacaagtacaccttcaaggcgttcgtgatggcaaacaccctcgcatttgtcggctccaccttgtccaccatctggctcacctatgctgggtcggaacacgtccacccactgcttcgtgcaatctacatgttcctctctgtaatttcgatggagcaggcaacaagaagtatggttataggattcgcattgggtgcgtatgtcgttctgagcccagtcagcgagcggattgccattgtggtctgcatgtctaccttcatgacgctcttgcttcgcaacccttctagctggcagctgtggttcctgttcatgccgattaagaggcga

SEQ ID NO: 64809 - DNA, 232 bp, Zea mays
  Clone ID: MRT4577_159103C.1
caaacaccaaaaaacgatcgacggcccccgatctggacatacccgtgtccgggttttttttttttttccacgtttttcctcccccccctccttttttcctgggggttttttacttgactttgaggggcaggggtttgcccccccactcctgggggcactcgagcttggggcccacaagcttgccctggttgatgccaacaaacaccttgttgccctcctcgccgggggactt

SEQ ID NO: 64810 - DNA, 1971 bp, Zea mays
  unsure (1)..(1971): unsure at all n locations
  Clone ID: MRT4577_159104C.1
cggacgcgtgggattaaatatcttttatggaagaaaaatatatatgcttatattcttttcttatgcagttaaccagaacttccagattgcaagtacaatctctggcatctcatgcatgttacccctgaatggctaaacaatcactcctctggacttcttgtcaataacatctgcatatttggtattgaattcatcaaagttgtcgctatcaaagccatcttgcatcctaaactactttcaattccttggagattatgctccatatgttatagcataggagcgagatgacgctatcgatctggatgaatggcgagctcaacgatctagagtcaaatctggtggggaagaagactggtcggtcgttacctgcgacaatgctggctgcagagctgatcgtgccaccagcacaagagatcaaggagttctttgccatcaccgaagcgtctaggacaaatgtttcgcttccacaaatgtttcgcttccaagtaagactctattgcccagattgtgacgaattgcttgacactagaggaagaaatttccttcatactgctattgagcataagaaatggaaagttgtctggcgtttctctggtactgcagatcttggaaggatggcaaatgtcatggattcagaaggcaacacacctctgcatcttgcaatcaagaatgcagaccagatgatagtgagccttcttatggcaacaaatagtgtgttgccgaatatagtgaacaaccagggcctcaccgccttagatcttgctgtactggcaactgacaaaggcataagttatacaatggtcatcatactccgctgtttggcatggactggagctgtccttagtcctcgtcgccttgatcatttcatcgatgattttggcattggcaaaacttcaggaaacgagctcaagaaattcaccaacattgcacagaaaaagcatggaattgtatttattttttaattaggctgaaggaaattataacaaacaaatgcatcgaaacatgattatttaaacaaagtttcttatgtatgcttgttgagtgttgacactgtttttattagattcatatgctaactttggtacaattcttctcactgttgagtccatttataattgtacctcagtccccaggttcatgtggtttatttgcatgctgattttcaaaacatcgagttggcttgatatttgcacccttttttccctctaacattgtttgtgtcatcttaatagaaatggattattaactttaatcagcggttgccttattatgcttcaatcttatttgttcaatttcacttatggtcctgcttcacctgcagatcgtggaaagtttatgaagttttgttgggattatggatgcataagatagtggtgtatgtgatttgcccatagtttctgcagcctcattgttttccatttgggatcaataaaacttcatgctcatggatagggctgatacatcaggttttgtcagtggtggtatacattacatgaacatccatgtgtattttcattttgtgtatactatgtgcttcctcagtggtgaagttgtaaagctggagttctgatctctgttggttggattaagtatctggtctctagacaacatataaatttcttcctatcataatcctaccttatttataataagcaggatggaccttaataggacaaatctttggtttcatggaaaggaacatatagctactgcttcattctcccaggcccaaccatctgccataaattgcaggaatgaagaactatctatgtcagccgtgaacttgggttacattaggagctcagaaatagcacagaactctagaaaattatttcagcatggcgatcaaagtttgaccgctccagatgatagctgcaggctggcccttggacttgngcaacnacaaatctatattctgctgatagtcactcatttggtggaaacaaagctttatcatcagcaacttcgaaa

SEQ ID NO: 64811 - DNA, 422 bp, Zea mays
  Clone ID: MRT4577_159105C.1
aaacaaaacctaacgctgcccttgactggcaagactgctgcgctctctgccaataataccaggagagggaacaacgaaccatcttaaaaaaactaagcagtcaatgaatcccaactcccagttctgctagtcaaaggctaaaacgcaaaattccgaaaggatatagatcctcctatcatgatcattaaggcaatagttaattaaacaagatcgatatccttcttttgttctcaacacaaccattgttaattccatccattactaccacgaaacgagaatgataaagaatgttatatatcttacgagctagattacttccccatgaacaagtaacaattgccttaacaacaatggatcgcattggacctaataaagcccttcaactttgatatccattatgtatcagtcggaacatcaagatt

SEQ ID NO: 64812 - DNA, 1352 bp, Zea mays
  Clone ID: MRT4577_159106C.1
gcgagacgggaagggaagacactggagcagcataaccagggatgagaagctcaggagcgattgacccgcatagcaagcgtcaagaacctttgcctgcggaaatgctcgcgttagccggcgacctggaggaactacgacgctacatgaaccaatgcgtgcaggagacagagaagaaccttatatgtcccgagagggcggtcgaacaccaacctggccaggctaaacaacgatatttcgcgagccgcggcagttgtgctcactgggcagctaggagctgagacaacaccagaagggatatcaggcctcgaggccggccgggctctcgtacccaaaaaaaaaatcgtgctcggcacacgcaggcggcgctccgtctcgggctctcagcgacggaggggcagacgccagacgggcagtcccagctcgctacgacgctacatcaacatgaggctcaataaggtggaagtgaaccttataaggctgctggaggctgctccacggcagcaaaatcaggctaaacttgtctattatgtaaccacagcgcgggagctgttggagcagctaggagctgagacaacaccagaagggatatcaagcatttcaaaagctaagctttctgagtattcagaaaagattgaagcactagcttccaggcttgctgcttcagtgcctgaaaatgaaaatccgattattgaaagcaaagatgaaatctcttatgaagaagcaaagccagaaagtccaatatctttatcatcaggactgcgaaggagatcaacagcccatgctgtggttggaacaagccatcaggaaaataaagaagatatcggagcaccgataaaattggatgcagaagctcaggctcacattgagaagcataggaagctccaagaagatttgactgatgaaatggtcgagttagcacgtcaactgaaggaaagtagcctaatgatgaaccaatccgtgcaggagacagagaagatccttgattctaccgagagggccgtggagcacagcctggcaagcacaggccacgcaacctcgcgagctgcggaggtctactcgctggcttccaagactacgtgcttccagtggctgctaatgtttgtgatgacctgcatgtttgtaatggtggttctgctgataagggtcacttgaatgatgaggctgtagcaggcactcaaatcgtagtcacccttgtcattgtttcatgggaattctttgtggtcaggtcatggtatttttccgagcaagtgtccccaaccaaacaagcctgctgtatgagagagaaactggaacagctgcctgtacagaggcttggtggtcgcgtgctctttaattttgatcagcaaagaggt

SEQ ID NO: 64813 - DNA, 475 bp, Zea mays
  Clone ID: MRT4577_159107C.1
gaaatctcttacgacgaagccaaggcagaaagtccaatatctttatcatcaggactacgaaggagatcaactcatcatgagagaaaagaagatattggagcacctataaaattggatgcagaagctcaggctcacattgagaagcataggaagcttcaagaagatttgactgatgaaatggtcgagttagcacggcaactgaaggaaagtagcctaatgatgaaccaatccgtgcaggagacagagaagatccttgattctaccgagagggccgtcgagcacagcctggcaagcgcgggccacgcaacctcgcgagccgcggaggtgtactcactggcttccaagactacgtgcttccagtggctgctaatgtttgtgatggcctgcatgtttgtaatggtggttctactcataaggatcacttgatgaaggatgagggctgtagagggcactcaaatcttttgtcacccttgac

SEQ ID NO: 64814 - DNA, 296 bp, Zea mays
  Clone ID: MRT4577_159108C.1
cccacgcgtccgcccacgcgtccgcccacgcgtccgcccacgcgtccggagggccgtggagcacagcctggcaagcacaggccacgcaacctcgcgagctgcggaggtctactcgctggcttccaagactacgtgcttccagtggctgctaatgtttgtgatgacctgcatgtttgtaatggtggttctgctgataagggtcacttgaatgatgaggctgtagcaggcactcaaatcgtactcacccttgtcattgtttcatgggaattctttgtggtcaggtcatggtatttttc

SEQ ID NO: 64815 - DNA, 1399 bp, Zea mays
  Clone ID: MRT4577_159109C.1
tcaaaatctctcgtacccaaaaaaaaaatcgtgctcggcacacgcaggcggcgctccgtctcgggctctcagcgacggaggggcagacgccagacgggcagtcccaggttcggcgtcgtcgtcagcggctccccctcctgccagtcgcctcgcgccctcgcctccggtcctccgcacacctgccggcgactctgcctcgctacgacgctacatcaacatgaggctcaataaggtggaagtgaaccttataaggctgctggaggctgctccacggcagcaaaatcaggctaaacttgtctattatgtaaccacagcgcgggagctgttggagcagctaggagctgagacaacaccagaagggatatcaagcatttcaaaagctaagctttctgagtattcagaaaagattgaagcactagcttccaggcttgctgcttcagtgcctgaaaatgaaaatccgattattgaaagcaaagatgaaatctcttatgaagaagcaaagccagaaagtccaatatctttatcatcaggactgcgaaggagatcaacagcccatgctgtggttggaacaagccatcaggaaaataaagaagatatcggagcaccgataaaattggatgcagaagctcaggcttacattgagaagcataggaagctccaagaagatttgactgatgaaatggtcgagttagcacgtcaactgaaggaaagtagcttaatgatgaaccaatcggtgcaggagacagagaagatccttgattctaccgagagggccgtggagcacagcctggcaagcacaggccacgcaacctcgcgagctgcggaggtctactcgctggcttccaagactacgtgcttccagtggctgctaatgtttgtgatggcctgcatgtttgtaatggtggttctgctcataaggatcacttgatgaaggatgagggctgtagagggcactcaaatcttttgtcacccttgactttgtttcatagggaattctttgtgttgatggtattttctcgaccgagtgtctccaacagtccaaccaaacaaggctgtagtatgtgaaactgggagacggatgcctgtacagaggcttggtgattgctgtttttggttgcatggggattagaggtaattgagggacatataatcgcttgctatttaattttgatcagcaagaggttatggctcgttcggtttgcttgtggcgagcgctcccaggcgttcgaattttgatttcgagcgcctggtattgattgcctgcgaggcaagttcttgggatgcttccaaccaaacgagcctattaggtcctgtttgtccctcttagattatataagttagattatgatagaaaaatgaaattataaataaactaccctttaaagtgattttggttttt

SEQ ID NO: 64816 - DNA, 1709 bp, Zea mays
  Clone ID: MRT4577_15910C.1
tccgagggggaagaggtcaccagtgaggttcctgcttgcccctcttgctctggttctgttgatggctgcagcgtttgtctgtgttccaccgccgccgggttatccggtcatgctgaacacctccatgtcaaaggtgtcagtcttactttcagttcaagaattgcatcctgtggagttggctgctaggctgaagcaatggtctagcagttcgttggacttcgtcacgtcctactgggaggctattgcatcttaccaagaacgacctgtccttggtccgcacttggctgccaatgttactgctgctgctgcagaagtagatgcagattacgctgttggtttctactacagtgctgctcagacaaggccaacaagtttggagttggggactcgtgatgttgtttcagaaaacgatactgagatgattgctgggcctgatgtggaggatccggcaacctgtgatgaccctgatgcagaacctattgatgatattgaaatggaacaggaagatttatctgaggtaccaagtgccatggaggaggtgaatgttgatgcagtagtagaggagttcgatgatgagatggccgaggaagtgtctggtggtagtagtggagaagagagggcagccttcatgactaattctagtattccttctcaatccactcccgagcctgaacaggcaaagggcattgacgaggtatccttgcagcaagatgttcagactgaggattctgaggatcatgctgatggcaaggaggatcagccagcgcagcatggtcaaaagttgggatcagatatgtggtcaagttacttggacaaagtatcggatcctgctgccattggtgctgctcttgctgccattattgttgcagctgttgtggcattcctttacatgaggcagaagcaaactcgtgttgcctccaatgaaccagctgagcaggtggagcaagttgagcaggttgaacgggttgagcaggttgaacaagttgatcaggttgaaactctttctgactcaggaagtagccaggggcatgttgttgccaagggttcactgtttcacagtcctggcgtagaagcctctggcccctcacagtatagcagcagcttgtcatctgggcttggcaggaggaggaataccaagggtgaaggccttgagccagtagtgtcgaggagagactcgacagctcaatccacatcatcttatggtagtttcaccacataccagaagatccctgccaagaaaggaaacaaggaggacgaagcgatgaccccagtccggcgctccagcaggctgaggaatgtgaaaactcctgaatcttaagattggcgcaagctggcatctgaactgccttttagattattagataattgctattgccactttgtttgctgcttagtgaagcatcatgtgtctaggcaatcaacaggtttgcatgatgtgataaacagctctctgctgtttttacttcaaaagatgattaggacttgtgtgttcagtataactgcttaagatttaattgatgttgacttgctcgttgtactgttctctgtttgagatgaatcctctgttttagatgaattctctggattgcatttctccaaagattttttcctaggaagtccgggtgtgttacaaagtccagtgcggcagccggcagaaccttgtgattatctctgtactaaataaaacaccagttccccggttcctcccc

SEQ ID NO: 64817 - DNA, 728 bp, Zea mays
  Clone ID: MRT4577_159110C.1
gtgcggcgcgccggccgcgtctcggaagccccaccctcactcccccagagagacccagacgtcacacgaagcagcagcagtggactggacaacatgaagcttcaggccaccgtcaccgttgctggcctcctcttcctcgtcctcctcctggcgctgccttccctccgcgtctccatggctggatcagggttctgcgacggcaagtgcgcggtgaggtgctccaaggcgagccggcacgacgactgcctcaagtactgcgggatctgctgcgccacctgcaactgcgtgccgtccgggacagcgggcaacaaggacgagtgcccatgctaccgcgacatgaccaccggacacggcaaccgcaccaggcccaagtgcccctgatgatattcattccttcgctctgtcttgcatgcgtatgtaatgtataggctgtgcaatgcatgcatacatgatacatgccgtgactctggatcggcggatgcctatgcatgcttttcactagctgctgctactactactactcttcctgtcttcctactgtgtgcaccaaagtgagagggacgacatgcatggcgatgacatgtcgtgttatgtgcactggcggccgcttggccaggtcataattcatgctctgtgtattgtgatacgtacacccttgcctttggaactgctactagatgcatgacatagagcatcaaaataccaaacaaaaaaaaaaaaagccccta

SEQ ID NO: 64818 - DNA, 136 bp, Zea mays
  unsure (1)..(136): unsure at all n locations
  Clone ID: MRT4577_159111C.1
tcgatatcaaccagatgatccagatnggggaatttggctagatactcgaaattatgggaatccgtgatccagctgtgtggatattgtagaattgtatctgattcaactggccatatatatcatcatttaactaaaa

SEQ ID NO: 64819 - DNA, 827 bp, Zea mays
  Clone ID: MRT4577_159112C.1
gggtacctcgaacccggccgggcggccgatgccattcagcgtgccgctcctcgacacctctccgcctccgcgcgacgggcgacagcgccagtcgtgaatcagcgccggcgagcccccatcctggccggcagactccctaggcggctgggccagctctccgcctccgcatccccagtctccgcgctgactgccccgccccatctccagccacgccggcgccgcatccccattcccctcaccgccgtctccggtcacgccggcgcgtccccagcccccgcgtcgtccgcttaccaggcagggagcctggtcgctacaccaacatgaggctcaacaaggtggaagtgaaccttataaggctgctggaggctgctccccggcagcaaaatcaggctaaactactctattatgtaaccacagcccgggagcttttggagcagctaggagctgagactacaccagaagggatatcaagcatttcaaaagctaagctttctgagtattcagaaaagattgaagcactagcttccaggcttgctgcttcactgcctgaaaatgaaaagccaattactgaaagcagagatgaaatctcttacgacgaagccaaggcagaaagtccaatatctttatcatcaggactacgaaggagatcaacagcccatgctgaggttggaccaagtcatcatgagagaaaagaagatattggagcacctataaaattggatgcagaagctcaggctcacattgagaagcataggaagcttcaagaagatttgactgatgaaatggtcgagttagcacggcaactgaaggaaagtagcctaatgatg

SEQ ID NO: 64820 - DNA, 799 bp, Zea mays
  Clone ID: MRT4577_159113C.1
gcgattgggttcctcgaggccggccgggataaggagtgaagccatggatttcatccggctttggattgggtgaatccatacctcacacccaatcccatggtgggattaaaaatccatgtactctaaaagaattggattggtgtgaaggaagtcctagtgatggtgtagaccgatgatatgtggacattgaaggtctagaccgttgctgagatgtcacgtcacacggttacttgctgccataactgaccttctttgtctgtagtgcaccagcaggtggcggcatcggcgccaccgaggaggcgctggtggtccccgctgccggtgcagctccatgccacagcgcgtacacgtcagtatcacgcgccagctccgtgacgtcaggcacggacggcaggcccagttgcagcgtgaggttcggcggcggcggcggcactgccgtcgtcgtccctctctgcacggtcggtgccggcggtgctacggcctgctgctggttattaacggcctcacggtacagacgtaggtacacggacatgggctgcacgtagtcagccagtccgaggttagcaaagccgacgatcaggtcgtcggcggtgatggtggaggcggcggtctcgccggcactcttgcgtggcggcgcgtacgagggccgtggagaattggacgatgcactggtccatggtctccttggcgccgccggtgaccctcgagtcttgcggcaggacttggcgcatgatacgcgttatggtgcctttcgggatggtgtactcttctagtgggtttgaccctgcagatatttttt

SEQ ID NO: 64821 - DNA, 1116 bp, Zea mays
  Clone ID: MRT4577_159114C.1
cctccgaattcctcgatcgattcgtgtcgaaaaaccccagcccctccccaccgccgccccccgtcggaatcccgaatccatccccgatggcgcaaggcaccgtgccctccgcagccggggccggcggcggcggctgcccctcggcccccgccgtctcgacgactcctccgggcacgccccgggctgccccgcctccgccatctaccttcccgaccggattctactacgccgtggagctctatttcgacccggcgctggagaaccaggtgctcaaagcgtggaacgcgctggcgcggcggcagctaggcagccgcctcatcgacgctgccgcccgcccgcacctcccgctgctccacctccccgccgccgcgctcccgcctcctggcaccggcgcgggcggggatccgctcctccgcctcgcaccctcgctccgcgcgctcgcgtcgcgcctcgacccgctcgcgctcgcgctctcctcgctcgccgcgctcccggcctccgcctcctcttccccgcacgacaacgttctcttcctcgcgcccactccaaccgccgcgctgctcggcctccatgcgcagctctgcgagctgctgcggaaggacgctggcgtcgaggtccccgacgcgttccggcccgaccactggctaccgcggtgcgccgtcgccgtcgacgtgccccgcggccgcatggcggaggccttctgcgtgctccgagagctcaagctgcttcccgtctccgggtacgggatggacatcgcgctcgtcgaggtcggggccaccgttagggagctcgtgtcctacccgctcggcggtggcagcagcgctggagcggactgagaggtcctgttgtattttgtataatatctagatcatggatggacagccatacttgacgaggacgtaatagtgggacaatttgccttcttctgatgagctacatttggaagaagtctggaccatactgtatcctaacacatacagtattttgttcaatcatttctttagtcttttggtttataatgtgtttgatgtcctctccctccattgtagactcttcacgtagtatcacccgttctcgagtttactgtaatgaattgtcagctgtgttcatgtgccc

SEQ ID NO: 64822 - DNA, 324 bp, Zea mays
  Clone ID: MRT4577_159115C.1
gcctaacattggtaatggtttaatataaattggtcatgacaaatagatccgggggagccaaccatgaccatgactggcttacaactggtttaaacggaaagaaactggggctggtcacttggattttttactaccacgccccgacagaccaaaacgaaacgaccctggttgtactactgataaaaagtttgctcccacaactttacccaaaaataagccgagcgataccttttgaggggtagggaaacggcaaaaggcaaaatgggacttccccggatcccacccgacgggggcgccccccctaaacccttttgttggggcaat

SEQ ID NO: 64823 - DNA, 238 bp, Zea mays
  Clone ID: MRT4577_159116C.1
ctcatgcttgtgatattctgcatcttgtacatgattgagttccttgaagaaaaaagtacgaagctactggtaaaaaattggtttacagaacgtgctattctgcagtagattgcatccactgaccatattgtacctggagatctgaatgttagctgttactctgtggatggtgctgtaaatttttcaaaaaaaaaaaaaaaaaaaaaaaaaaaaaaaaaaaaaaaaaactcgagcccgg

SEQ ID NO: 64824 - DNA, 269 bp, Zea mays
  Clone ID: MRT4577_159117C.1
ggagaccacggctcagatcctggtccgggccctcaatcccctggattacatgaagtggagaaggaaatcagcatactggaaagccctcaaggtgttcaagctgcctgtggagttcctgctgctcctcacagtccccgtcgtggacccggacaaggatgaccagaactggaaacggcccctcaactgtctgcatctggttatcagccccctggttgtggtcctgaccctgcagtcggggacctatggtgtctatgagataggcggcctcg

SEQ ID NO: 64825 - DNA, 764 bp, Zea mays
  unsure (1)..(764): unsure at all n locations
  Clone ID: MRT4577_159118C.1
tctcgggtccggtcccaatttttttcctcgcataaatcatcctccgtcaccggcggggcgagggagacgcggtcggcgggcgagacgccagagacaaacccaacggagtttcccccccctgccgccgaccccaaaccctagccgctcctaccagccccagcctctcctaccgaccccagccagccgcgccggaattctcctgggtgttctattggcttttctcaagcctgtagcttcatcgcggcagcatgagctctgctggttctgcaagggttccaaagaggagacggactaccaagacgtcggaggctgcagaccggcaacttcaggagcgacagtttctggacctgaacttgcttccagctgttgaagtagccagcactgggggttcactctccatcaatgagcctgtctcacacaggcagccccctcctacggtggctgccctgctttacgagaccacacaggtcgtggtgtcatctgctgctgcagagtcaaacattggcatgaatagtttccccatcaacgtggaagtgattgatgatgatgttgcgatttatacctcagggccgccccctcaagcaaggcaacagtcgtccaggacaggacctatcactgtgataatagatgatgattctgaaactactgctggaccagcaggggaagctcttgatgagcatgtgaacactctgctgtctctggggatgaaccctaggcacaatccctcgagagcacancccaacaccgacccttgtaataacata

SEQ ID NO: 64826 - DNA, 676 bp, Zea mays
  Clone ID: MRT4577_159119C.1
tgcgtttcagtccacatttttttccgcataaatcatcctccgtcaccggcggggcgagggagacgcggtcggcgggcgagacgccagagacaaacccaacggagtttccccccctgccgccgaccccaaaccctagccgctcctaccgaccccagccagccgccggaattctcctgggtgttctgttggctttcctcaagcctgtagcttcatcgcggcagcatgagctctgctggttctgcaagggttccaaagaggagacggactaccaagacgtcggaggctgcagaccggcaacttcgggagcgacagtttctggacctgaacttatttccagctgttgaagtagccagaactgggggttcactctccatcaatgagcctgtctcacacaggcagccccctcctacggtggctgccctgctttacgagaccacacaggtcgtggtgtcatctgctgctgcagagtcaaacattggcatgaatagtttccccatcaatgtggaagtgattgatgatgatgttgcgatttatacctcagggccgccccctcaatctctgtctcaggcaaggcaacagtcgtccaggacaggacctatcactgtgataatagatgatgattctgaaactactgctggaacagaaggggaagctcttgatgagcatgtgaaacctc

SEQ ID NO: 64827 - DNA, 735 bp, Zea mays
  Clone ID: MRT4577_15911C.1
cgttgctgtcgggacgcgtttctgaacttcttgcgccggaagaaagagaaaccgagaagaggagtcgcggctcccgacatatgtggcggcgggcggcgacagcggcgctgtcgctgggcgccggtgccgggcgcggtctcgatcgccacctccgaggaccccgccgcgacgttcaaggtctgcgcgcacctgcctccgcgcctcctccgcgactctgtcacggccgccaccatcgcgtttgactacaagtggtccctctggggcctcgagccgggcacccccgtgtggcagagcgccaagcaccatgcccacctccgttccgccaaccgactccaggagctctgcttccgcaacggtggcatctacatcaagctcggccagcattcggctcgagtggagtatgtcgtgccggaggagtatgtgcaaacaatgagggaatccatgctgaagaggtgcccggtctcatcgtacgagcaggtccgcggggtgtttaccaaggatctcggtgaatcgccagaaactgtttttgcagaatttgatcctgctccatttgcaagtgcttcccttgcacaagtccatgttgcccgaacgcacgatgggcaaaaagttgctgttaaggttcaacatgaccacctcacaaatactggtgttgtagatatagccactgtggatttgttagtgaatgctctgcattatattttccctacatttgactacagttctcttcaaaatctt

SEQ ID NO: 64828 - DNA, 438 bp, Zea mays
  unsure (1)..(438): unsure at all n locations
  Clone ID: MRT4577_159120C.1
cccgggncgacccagcgnccgccgccgccacaggaacatcgccggggagatggcggcataccagancnncnncngggcgccggagnncgcaccgncggcccgncgnccggnaacccgggggagcaangggaggagggaaagacaagcacgacgagagcgacaaggggcncnncccaaacccgangccacggcggaaccgaaagccangggnaccccccgcagggaaaccccccgcagggccacccaccgcaaccaggagcanacccaccncccccaggggcgnanccccccccacccggcgcanacccaccacaanangggnacccncagccgggnggccacccaccncaaggnggananccggccgcaggccaccccggcccaacncaccagggnnangggagcagccacccccggggccacaaggggacgggggca

SEQ ID NO: 64829 - DNA, 419 bp, Zea mays
  Clone ID: MRT4577_159121C.1
cctgaagagaacacggtccggcaattgcatggacaaggcaggagcagtggtgggcaaggagcagagcattgacgagaacagcgacttcctcctgccgctaaaaggttaagaattatgatcatgctactgggatgtcaagttatgatgtccaatggataagcaaggcatcagcatcccagcgtgctggaagagcaggaagaacagggcctggccactgttaccgtctctactcagctgcagcatatggtaaagatgatttattccctgaattcgctgaacctcagattaagaaaattccagttgaaggtgttgtcctgatgctcaagttcatgtctattgataaggttgagaactttcctttcccaacaccaccaaacaaggaaagtttggttgaagctgagcgttgcttaaagacattg

SEQ ID NO: 64830 - DNA, 612 bp, Zea mays
  Clone ID: MRT4577_159122C.1
gcgttttattagataggaggccctgccccaatgagctaatggtcttagtcatttggcacaagcgttccttcagtctttgcttaatttgtttccagtattttctccgccattttcgaaatttactcttaacatgaaccttctggttttgtgctatgcatgcttctttcttgcttttgcagcatgccagatctagattgatttagagcattgatttatgaccaaaacacagccttccagtattatagagaggttgaagtatgtatctctcttttactatatatatgggcatatggcaggaccgcaggagtggtggaactatggcgtgttgagaagttaaaaggcatcaaagttgcatctacttggaatcaatcaaatttggacctatctagtgaggaaatcagaattttcaaacgagccaaggcatatgcttctggaggccattggcctttggataccaggggaagtcacacgtactgtactgtctgtacatgatgataaacgtgaaaatgaaccagaagaagaagagatagtagcaggtccacccttgtcccgacaatgtaatgctgagctccatacagattatgatggtgccgctgttagatgggattaacg

SEQ ID NO: 64831 - DNA, 143 bp, Zea mays
  Clone ID: MRT4577_159123C.1
gctatccgcgttaggacgttataaaatctaggaggactccgcgcgtcgctcaccatcagcggcacccgcgcactcgcttaactgacaccagtttccacggagcatatacgcagtgcctacatacccagctcactgggaccatg

SEQ ID NO: 64832 - DNA, 583 bp, Zea mays
  Clone ID: MRT4577_159124C.1
gcctgaccgtccgcgacggcaacgtggagctggcccccgtcaacccgcgcgacgagcaccagcactggtacaaggacatgcgcttcaacacccacgacaaggacgacgagggcatccctgcgttcgccctcgtcaacgaggacactgggctcgctatcaagcacttcctcagccaggcccacccggtgaagctggagccgttcatcccgcagtaccacgacgagaaggtgctgcggacggagcagcggcgaccaggacaagggcttgctctgcatccgcatggggaacaacatccgcgtcaacttctacgtcttccacggggacaagggccacggcagcttgcacgactgcaccaccgacgtgctcgcgggagtgggccaaggacgacacccacagctggatgatcctgccctgcggcgacgaggcctacacctggggcagcatgagctgcggcaacgcgccctacttcggcggcggcgagcccaccgtccgcatgtactgcttgggcggcgagaggttcagcgccacggtccgcagcggcgccgagtgactggtgcgcaccaacccgcgcgacgagtaccag

SEQ ID NO: 64833 - DNA, 584 bp, Zea mays
  unsure (1)..(584): unsure at all n locations
  Clone ID: MRT4577_159125C.1
aggtcttagagcattgttgtattggaaaaggtgaaataggaggatggtacnaaataaatagataaaagtgcacatgctaacagatctaaacagttgagacgataacaggaacgatcacaaacaaaacttgtggtggtggggggtagggttgctaaagnaggcgcaggatcgnatgattttttgttgggaggcggnttggtaaanttgggggngggcgggtncttgttntnagagtgttgataantggaaaaggaaccgtgtggctnatggngngggaaggaaanntaccaaggggaggatacgctgagaacgtgntggagaggatgggcttggtgggggtnaggttgaggataccagggtgaggggtgttgaggaagtttgggtggttgtgaaggtggttggnggagggggtggtggtgttggaggtgaggtggggngagtgggnaggagtgtgggagggggggggggggaagagtgggggatagggngggggggatagggggaggagngggggngagggggngagagggggggggaagntggggggggtggtgtggggggggagagagtgggggggggggggg

SEQ ID NO: 64834 - DNA, 1860 bp, Zea mays
  Clone ID: MRT4577_159126C.1
atggggctcggtgtatgcggctcgctctgccaaggtggtgacgaggatgatggttttggttatgactatggtactagtaagtggtattctttccgtttggaaaggatggctcgtcttagacacactgcacggaagtcagtcattcctttcttgccttctcgtctcgcgaagcgtccgcttcgccgtccagtgactggtcagtctagccacttggagaggctgcaccaccgcctgcaagaggagcaggagggtcgacgacaggagctggagcagcaggactcttccttctcgcttcagcaggagatagagtctgtgaggagctgctcccctgtgctcccgctgggggcgccccctgcaccaccactgagcgccccagccgctggagtagctgctggaggagacccagatgacgaaggtggcgacagcagctcgagccacaacaccgacctttcagaggagcaggagctggaaggatgggttgcccgacccatcacccgtgacgtcgctcgcgggtgccacttccacgacgcgctcgacaccctgctacaccgggcacttgaccgacgtacttggtctatcgagtatcgatgtgttgtcttccagcacagtcgcggggtttacccggaccgctgggaggcgacctgcttggtgccccgtccggagaacagtctccagggtgcgggggtctgctcagagcactattccatctctgagcgggactcaactaaggcggacatgcaagaagccgcacggcgtgcgctttcgcactactgctcagtgctcggtggggtagccgatggtctcaacctaaactgtgggctaagcgcgcggagcatcatcacctggaggatggctcccccgctcccgtcgggactcagcactcgtaccgctcacctcagcgtggacaccatgcttaagatgtcagacaacaggcgcagaggaggaaggcgtgctcagcaggagcaggcagccccacaggatgaggcaccccatcagcagctgccacccccgcccctgatgatgatcgagcggatgttcttaatgcagactcaggtagttcaagctatcggtcagactctggccgccattcagcagcagcagccaccacctcagcctcagatgcccagagacaagcgtgctgaattcatgagaggtctgatgacagtaaagaaggaggagttcctagcgctcaagcaagggcccatgtctgtcagtgagtaccgagacaagtttctacaactgtctcgctatgctcctgaggatgtcaacacagatgccaagagagcatgtttccattgtggagagcagggccattgggtgatgcaatgtccgaagaaggcagcccagcagcagtcaggccctagtgccccagcaaagcagaatgtgtctcagcctggaccaggcaaccgctctcagccgcactataaccatgggagactgaatcacttggaggctgaagcagttcaggaaacccccggaggagaagtggtagccgagttaatctcacctgagccaaggaaaggaagttgtcatcagatggctactgatagcaaggagccagattcacttgagattatcaaagtggtgtccgaattctcagatgtgtttccagaagacttaccaggcatgccacctgagcgaaaagttgagtttgctatagagcttctttctggcaccgcccccatttctaaaagagcctacagagtgtctggaccagagttggttgaacttaagaagcagattaatgagctgtcagagaaaggttatataagaccaagcacctcgccttgggttgccctgtcctgttcgtggagaagaaagatggcaccagaaggatgtgcatcgattatcgagctctga

SEQ ID NO: 64835 - DNA, 876 bp, Zea mays
  Clone ID: MRT4577_159127C.1
ggcacttgcaggttccaaaccctactcccctccgcctccctccttccggatccttccttcccacctccctccccgccgctccgatccgccgccggccggccgccgccgccatgtcgatccgcatgctgaaccagaacgcggaggtgatgaacaagtcggcggcgctggccatgaacatcggcgccgccaagggcctccaggacgtcctcaagaccaacctcggccccaagggcaccatcaagatgctcgtgggtggagctggcgacatcaagctgaccaaggacgggaacaccctcttgaaagaaatgcaaatccagaacccaacggcaatcatgattgcgagaacggcggtggcgcaggacgacacgagtggcgatggcaccacgtccactgtgcttttcatcggggagcttatgaagatgtctgagcgatgcatcgaagaaggtactcatccacggtttttggttgatggctttgaggttgccaagaaagcaactcttgaatttctcgagacattcaagacagcagtcgttatcggtgatcaacctgacagggagatcttgaaaatggtagcaagaacaactcttaggacaaagctgtatgaatcattggctgatcagttgaccgatattgttgtgaatgcggtcctatgcatccgccagagtgatcaaccaattgatctttttatggtggaaataatgcatatgcgccacaaattcgatgtcgacacacgtctgattgagggtctggtccttgaccatggttctcggcaccctgacatgaagcgcagagcagagaattggtacatcctgacagctaatgtatcactggaatacgagaaagtgaaaatcatgcagggattctctactcaacgca

SEQ ID NO: 64836 - DNA, 457 bp, Zea mays
  Clone ID: MRT4577_159128C.1
gccggccggtgcagagatccaccatcacacagcaatcattacaagcacttcgacgtcacacgggcgctgcgcacagacacaccaagcgtcggtaccaatggcttactaccaggaggtggactactgctcggaggaggtgaggtcggtggtcccggtcggtttctgtcgcacgttggtggtgttcagaagaacgttgttaaggataattttgattagttttaattgtttttacttgacttcttcaaccacaaccaccaccatgttaactataatgtattcaaattattgatgatttattttattatattaaaaaaaatcaaataatatatatattatttatattataatttttataatatttttttttttattttttttttttttatttttttatttattttaattttttttttttttattttttttttaataattatttttattttatattaatttt

SEQ ID NO: 64837 - DNA, 1015 bp, Zea mays
  Clone ID: MRT4577_159129C.1
ggctggtaaacacccatgtgcacgctcaagtacgattacgaatggagaatccctgcacgtggcgccacaagttcaaaccggcaagatttcgtcgggacatctgatccgagcaagataacacagtgcatgtaaaatgcacatacagtacagggcgacgcagataacagaaaagcacagacagatcatctccaccgaccaccattgatacacatggatggagtggagacatggactatggagcagtctgcacgaggaagaggaatagggtgaacttgctctcagcgatccagcacgaggtgaaccacttcaagaaaacagcagcagttcagcccattggtggctgccgccaaccgtactggtctctccaaccaacacggagcatgcggttgtgctgctccggccgcgaaactcagcagctagccactgccgctcttgcctactctatcctgttaacaggtgaagggcacaattcttgaacccaattcacacatcgatgaaacagagcttgccatctatcctgttctgcactgccttgatcgcagtgacacgggcagctgtagccgctctgtttgcagccatgacggccttgctcacctgctcttgtacgcttgggaggcgaaaggcgctgcctgcagcccttcgagcagcctgcagggcacgctgaacagctgggtctgacagttgtactcttgggaggtgaaaggagctcttcagaattccagaatcccactccccggctcgttcatccccactcccaaatacgtacatcccgaacccctgtttctttccttcgtgccaagatccctcgtagctgtgtccattggcgaatctgtacgcaccgaaaccctggatcttgtctgcgaagtactcccccgcgtacagatcgttcctgcagaggattttgttctgcaaccgatgttacggtgttcacctgaaggtagcgcaggcgcagccgtggcatggaggcggcgtatcaattataaatgttgggaattgttgaatacctgcagggcac

SEQ ID NO: 64838 - DNA, 266 bp, Zea mays
  Clone ID: MRT4577_15912C.1
atgatgttgtaactgccgtaagaggaaaaggattattaaacgctattgtcattaaagaaaccaaagattgggatgcttggaaggtgtgtctacgacttcgagataatggacttctggccaagccaacccatggcgacattatcaggtttgcgcctccgctggtgatcaaggaggatgagcttcgagagtccattgaaattattaacaagaccatcttgtctttctgagggtagccagctgttttcagtggtccctgggagccagct

SEQ ID NO: 64839 - DNA, 321 bp, Zea mays
  Clone ID: MRT4577_159130C.1
cacggccgggccggataacggccggaccggcagcaactagtcggcggccgccctcgatggctggggggggttataaaaaattaaggccggcaacccccacggaaccgcagggcacagtggaggggcgacaggcggcggcaagaagcggagcacccgagaatccgccggaagactggccagggccaccagcaaccagccgccggagaaagccaaacgcctcctacggcgagaaccgcgactccaaggactgcccagcaagcgcaaggaatcaccccacggcctgactgagccgaaggggccagacccgggaagcggcaaaac

SEQ ID NO: 64840 - DNA, 197 bp, Zea mays
  Clone ID: MRT4577_159131C.1
acgcgtccaggtaatgatagagagtggtcacatttcggacacagttggcagatctgtggtactggtaggacgatcaaatacacatgtcgctgcaccttcgacagtggcggcaaacaacgcggtgcagatccgcctcgccatgatcctgctgctgttgtgggatgaccccgatgtgctacatcagcgaggcagtgctg

SEQ ID NO: 64841 - DNA, 309 bp, Zea mays
  unsure (1)..(309): unsure at all n locations
  Clone ID: MRT4577_159132C.1
ccacgcgtccggctcangcacttcccgttgatcagctccacctctacctgttcgctcggcccttcttcatgagctgggaccatgcctcctccatcagctcccgctccttgcgctccatctcgtatctctgcgcctgctgcttgaccttcaccctctcctccttcagatcgcgcataatcctgtcatctacctgctccatctgcctccagtgcctccgctctgcacctatctcaacctggacggctgccacatcgttgcttgccttgtcccggacccgttactttcacgccgtcttctcctaagccatcc

SEQ ID NO: 64842 - DNA, 214 bp, Zea mays
  Clone ID: MRT4577_159133C.1
gccagaggcagctgagagccaatcaagcaactctgaacacttgttagctaccaacctcaaggggaaaccattactttcaagcaagaacagcagcgattctagctacaagcactgactaaatcttaatctacagggaacttgaagaaatgcctgagatatggatcgggaatctcttatccagtaggctgcctagtgttaacatagtgattcaagt

SEQ ID NO: 64843 - DNA, 216 bp, Zea mays
  Clone ID: MRT4577_159134C.1
ctttttatatttttcctccccttatcacaccgggggggattttccgtatatagggcgtcaaggtcatatatgtgcccgaagcaacacacgggggctgaccttttgaggagatctaaaacgcacacaatgaactacattatattgtgaacaaaatattgttgcaaggggagcaaccatgtaaaacgacacgaaaactggttagtgactgaacacata

SEQ ID NO: 64844 - DNA, 258 bp, Zea mays
  Clone ID: MRT4577_159135C.1
tagatgagatgattaagcctggtaggctatcaaagccgtacaagggtatcgttgactgctacaaacgtaccattaaggatgaaggttgctctcacttgcggaggggtaacacctgctaatgtgtataagctacttccctactcaggcttagaactttgcatttaaggactacttcaagaggctgttcaactccaagatggatagggatggttacttgaagtgggttgctggcaacctgtgctctggtggagctgctgg

SEQ ID NO: 64845 - DNA, 312 bp, Zea mays
  Clone ID: MRT4577_159136C.1
ggccaggcacagcctccacggggcaaaaaattatgccccttccactttgttatacaactggtgaatcacataattgcccacagcacaccccaaaataaagggggccgtaaaaaggcccataaatgcggtttcacaggtttttgccccggttttttgggttacaatgcgattttgccagttttggggggggatttataacataaggccgaattgcctacctgaaggccgggggccccacaaagctggggatcaaactatcccgctccaagggaattttttcaggcgccaccctacgggggaagtgtttggggt

SEQ ID NO: 64846 - DNA, 133 bp, Zea mays
  Clone ID: MRT4577_159137C.1
tccaaaccacacatcgcgtcccggcaagggcggggaacgctcctccggtccgggggccaaaaaccggacaactaaaccgcttgttcactaccgggcgcgccacctgacctgccgttgccggcccggtaccttt

SEQ ID NO: 64847 - DNA, 372 bp, Zea mays
  Clone ID: MRT4577_159138C.1
caccttgttaaatcttgatgcttctaggcttcgaaagatattaggtagtggcatgtcaacaaagatgtgggaggccactgtggaacatgcaaaaacatgtgttctaactgacaaagtgcatcactactatcctgatggtctaaacaaagctggtgttgtattcaatgtagttggagaagtaagagggttaatatctgataaatatgtttttgttgatgactttactgaaaaggagaaggccgaagcacgtgcagcagtgaagcaagcatatgaacactggaaggatgtccatacttgtgacaatgaaacgcttgtggaaaacccttcacatccattcaatttgggatctccatctttgcatgaaaatcagta

SEQ ID NO: 64848 - DNA, 286 bp, Zea mays
  Clone ID: MRT4577_159139C.1
agcttggaacaggttctatcttgcttccaaacggagcttttgtagcgggagtaaaatcgtactcacaagcagttcagacagagctgtaaagtttggaacatcacaggctctaactctgaatcatctgtctcatgaagcatactggtatttcttcaagacacttgcatttggaagcattgatcctgaggcacacccagggcttgcacaagtagccatggagattgctaggacgcagaatcgttcaatccctggcgcatgcatcatctgttatttgctgaggaacaat

SEQ ID NO: 64849 - DNA, 996 bp, Zea mays
  Clone ID: MRT4577_15913C.1
gggaccctcgaggccggccgggacaatgattacatgcatcatgtctacgggatgaactatacatgtcaacatgtcacattagattgtctaggcatagtatcttaagtaagacgcaggatacatcagatactactggctatggcgccggccgggaatcatgccaactctacatctcatacactccctagtcaacttgctggttggtcatctttcatgaagggtgcaccactgactcaaccactggttaatatgttggtatcaactcctgcttccagcttggcagaggtcgacaagttatttgaagttgcagttgatgggtcagatgacgacagcatttcagctgccactgttttatgtggagccacccttttacgaggttggaattttcaggagcatacagttcggttagttgttaaactgctctcaccatctgatccaattgataattctggaagagagagccaattgataaagcttggtccaatgctcaatgttattctttcaggaatatcggccgtggactatgctccaatcttctcattccatggcctgattccagagctggctgcttctcttatggcaatctgtgaagtatttgggtgtctttctccaagtgtttcctggacactgagaactggagaggaaatatctgctcacacagtcttctcgaatgcatttattcttctgttgagactttggaagtttaaccatccaccacttgagtattgcataatgggagatggtgctccagttggctcgcagctaactcctgagtaccttctgctgttacggaattcccaggtcctatcttccagcagtttgtcaaaacaacgtaacggacaaaggcaatcacaactatcaacttcacacccatcatctggaaatcctatttttatggactcgtttccaaaggttgaagttatgggtaccagcagcaccaagcttgtctggcctcaactctctctggacttgctcatgggacacctgtacgtaaca

SEQ ID NO: 64850 - DNA, 661 bp, Zea mays
  unsure (1)..(661): unsure at all n locations
  Clone ID: MRT4577_159140C.1
aattcggcacgaggaacaaaaaggaagggcgaggaggacagggagccgagcgcaagagctgaggcttcgccgcgaaaccccagacctcgcgccgccccttcccctccgcggcgtcgtcctcgcacgctctccgatccaagatgtataagctggggagaggaaaccgcgacaaggtgcagcagttcatgaccattaccggcgccagtgagaaggttgcccttcaggcactgaaagctagtgattggcacttggaaggagcttttgacttcttctatagccaacctcaggttgatcctcaggatattgtcatgcttgtcatatcatggcacatgaaagccgccacaatgtgtgaatttactcgtcaggaattcattggtggactgcagtcaattggggtagattcaatcgagaagtttcgtggaaaattaccatcattacgagctgagctaaaagatgacaataaattccgtgatatatacaactttgcattcacttgggcaagggaaaagggtcaaaagtctctctcactggagaacttctattggaatgtggcagttgctatttgctgaaaggaactggcctctttctgatcatttggtgtcagtttttacagggtcagacacaataaagccatatctagagacacatgngtcccagctgc

SEQ ID NO: 64851 - DNA, 1344 bp, Zea mays
  Clone ID: MRT4577_159141C.1
ccacgcgtctggtcaatggggatctcgggttggggcgggcaatatctgcgtctaagtacgtaggctcccccacgtttggacgcagcacacagcattcattcagctagcgagcgagagagaggggaacaaaaaggaggggcgaggaggacagggagccgagcgcaagagctgaggcttcgccgcgaaaccccagacctcgcgccgccccttcccctccgcggcgtcgtcctcgcacgctctccgatccaagatgtataagctggggagaggaaaccgcgacaaggtgcagcagttcatgaccattaccggcgccagtgagaaggttgcccttcaggcactgaaagctagtgattggcacttggaaggagcttttgacttcttctatagccaacctcaggtttctgtggtcaatactcggcatcttgaagatattttcaacagatataaagaacctgatgctgatatgataatggtggaaggaatatctcaattttgcaatgatctgcaggttgatcctcaggatattgtcatgcttgtcatatcatggcacatgaaagccgccacaatgtgtgaatttactcgtcaggaattcattggtggactgcagtcaattggggtagattcaatcgagaagtttcgtggaaaattaccatcattacgagctgagctaaaagatgacaataaattccgtgatatatacaactttgcattcacttgggcaagggaaaagggtcaaaagtctctctcactggagactgctattggaatgtggcagttgctatttgctgaaaggaactggcctcttctggatcattggtgtcagtttttacaggtcagacacaataaagccatatctagagacacatggtcccagctgctggaatttgtgaagacgaccgatccacagttatccaactacgacgacgaaggtgcctggccctacctcatagacgaatttgtggaatatctgactgagaacggactcgtccagcgtaaaagatgaacaacggggagatgcatctccaaacaatggttgggctgtacaaacatgatttatctcggtcagctcgacgcccagggcctgatattggcactcctgctcaattcattcaccaaactgttggcatatcattgaatttgcttataaacgtggggaaacataacttgcctgggaagtggtggctgtcagcctgcgatcgtgaactgtaacttatcgaaaatgcaacggagtttgggactctactatatgatttgtttcagtttttcttaaaaaaaaaaaaaaaaaaaaaaaaaaaaaaaaaaaaaaaaagcggccaagtaggtcaaagcacaaagggcgaaaaa

SEQ ID NO: 64852 - DNA, 1461 bp, Zea mays
  Clone ID: MRT4577_159142C.1
taccctcgagctggccggggccgcttgcctccgccggcgagggaagggacgaggcgccgagccggcaaccgttttcggggttgctggcggcgattggctgcggttccgcatcaaggctggtcgaacgctgcccctcctggttggggacctcgcggagtccaaatccttggtgagcggttacagaggtgcatggtttcgctgtaagatacataatatgcgtgtcaggcttggatacctggagtgttacttggaatacattgattatccaggcgaaaaaaaggaatgggttaggctctttcgaaagaactctgcaaggtccaaccaaaattcaagtgatagtattcacaccatgataaggccttcatttccaaaatggtattttgtgcatgaagttcctgagcagttcccaaatagtgatgtcacagcaattgttgatgaaacctggcaaattggtgatcgagttgattggttgaaggaaggttgttattggtctgggacaattactaagataatcaatgaagatctggtcgagatagagctgccggcacctcccataggtgaaggaaaatgttataaagctaaatgtagtgatctgaggcctactctcgagtggtctctagcaagaggttggatggtccctctttcacaggcaaatggaaaaggttggcatgctgctcgtctacttcaacattataaatctgaatcagatgatgataatgacgacaacgatagctgcgacgccccggcaaacggtgtgcagagcttcaaacacgcatgaggaagctcccagccccatgggtcccgcacctccgtcagccacaaaacacgcttccagccacacatatcaggaggatgctgctgtcacatccacagaggacctgctgaagcccagctcaacatccaagtcgccagaccccaggcacgacacccaagctagcactcaacctgcaggtacggaggtctccatgaagccggaaccggttattcgagtctcaacaatcaagaaagaggactcagcattgacagaaggtgaggttgatggcggcactgaagagtgcctggagaagctgggcacgatcaaagccaggctcaaatacctcatgcagggcacgcggctggaacatgagcgcagcgccaccttccgtgggtagtcaggcagatgaagctgcatcaaaggtgcaacttcacgcaggggtttagggtttagggccatctaacgcctgttgtggttgctgaattttgtgtcctgtggttacaggtattattgtcctgaataatgatgctgtgaataagtggtttgttttttgagtgcggcaatttgtaggagctaagaggaatgtgttgcttttgcattagactgtatccactagttcactcatatggtcatcccaaacactgcacaatggagtttgaatattgaaatgaggatagataagctggtgcagatagctttatgttgcg

SEQ ID NO: 64853 - DNA, 546 bp, Zea mays
  unsure (1)..(546): unsure at all n locations
  Clone ID: MRT4577_159143C.1
aattaaaatttggtttgatatcactcactagtcactaccactaaaagagagcagtgaactacattatatgtttatatgaaacccattgttagtcattgatcatatcttccaagacaaaaaaaaagaaagaaaaaagaacaaaacaaatattcttttaacaatattcaaatggaaacgaaccaaagaattaaccaaaaagagagagagagcagttctatatcatttgtaagcaaaaaaaaatcaagaacatgaacctttgatctgcatgttactcatctgaccttctatatcatcttcattgttctgggtccttagattcaaccatggatgttgcagacattgttgtgcagttggtcgtttctcaggtgcaaaatccattatcgggcagagaaaatccgcaaattctcgtgcttctgcttctggaagcttgtatttatcaatcagtaaacggtcgagtggccagtattttaatctccggatcctcttcaagtcgccgtgtctgtcaaagtaatcctttgatctcgcacctncaatggcaatctttcg

SEQ ID NO: 64854 - DNA, 1392 bp, Zea mays
  Clone ID: MRT4577_159144C.1
ggaccctcgaggccggccgggattcgtacgcttctcagagaagaatgggaatccaaaatcctataagaccctcctcccttcatgcacagctctgccgcttgcctccgccggcgagggaagggacgaggcgccgagccggcaaccgttttcggggttgctggcggcgattggctgcggttccgcatcaaggctggtcgaacgctgcccctcctgattggtaggtagctcgagatggatctgattcttccatataaggttggggacctcgcggagtccaaatccttggtgagcggttacagaggtgcatggtttcgctgtaagatacataatatgcgtgtcaggcttggatacctggagtgttacttggaatacattgattatccaggcgaaacaattgttgatgaaacctggcaaattggtgatcgagttgattggttgaaggaaggttgttattggtctgggacaattactaagataatcaatgaagatctggtcgagatagagctgccggcacctcccataggtgaaggaaaatgttataaagctaaatgtagtgatctgcggcctactctcgagtggtctctagcaagaggttggatggtccctctttcacaggcaaatggaaaaggttggcatgctgctcgtctacttcaacattataaatctgaatcagatgatgataatgacgacaacgatagctgcgatgcccggcaaacggtgtgcagagcttcaaacacgcatgaggaagctccaggccccatggtccctgcacctccgtcagccacaaacaacgctcccagccacacatatcagaaggatgctgctgtcgcatccacagaggacctgctgaagcccggctcaacatccaagtcgccagaccccaggcacgacgcccaagctagcgctcaacctgcaggtacgggggtctccatgaagccggaaccggttattggagtctcaacaatcaagaaagaggactccttgacagaaggtgaggttgatggcgacacggaagagtgtctggagaagctgggcgcgatcaaagccaggctcaaatacctcatgcagggcacgcggctggaacatgagcgcagcgccaccttccgtgggtagtcaggcagatgaagctgcatcaaaggtgcaacttcacgcaggggccagggccatctaacgcctgttgtggttgctgaattttgtttcctgtggttacaggtattattgtcctgaataatgatgctgtgaataagtggtttgttttttgagtgcggcaatttgtaggagctaagaggaatgtgttgcttttgcattagactgtatccactagttcactcatatggtcatcccaaacactgcacaatggagtttgaatattgaaatgaggatagataagat

SEQ ID NO: 64855 - DNA, 244 bp, Zea mays
  Clone ID: MRT4577_159145C.1
tacggcttatctctgctctactctcacctggggatgcatcactttcctgactcttcaacggccactacttataaaaccaaatcgtcaccatatcttaccaccaacaacactaatctgaataaacatcatgccatatacacaaacattctccaaccaatctactcaagcaacatgtacacccacatttaaagctaccggaatatccatgaacaccgccttatccatcacatggtatcatactcac

SEQ ID NO: 64856 - DNA, 870 bp, Zea mays
  Clone ID: MRT4577_159146C.1
cctcgaggccggccgggttgcctctgccggcgagggaagggacgaggcgccgagccggcaaccgttttcggggttgctggcggcgattggctgcggttccgcataggctggtcgaacgctgcccctcctgattggtaggtagctcgagatggatctgattcttccatataaggttggggacctcgcggagtccaaatccttggtgagcggttacagaggtgcatggtttcgctgtaagatacataatatgcgtgtcaggcttggatacctggagtgttacttggaatacattgattatccaggcgaaaaaaaaggaatgggttaggctctttcgaaagaactctgcaaggtccaaccaaaattcaagtgatagtattcacaccatgataaggccttcatttccaaaatggtattttgtgcatgaagttcctgagcagttcccaaatagtgatgtcacagcaattgttgatgaaacctggcaaattggtgatcgagttgattggttgaaggaaggttgttattggtctgggacaattactaagataatcaatgaagatctggtcgaggcaaatggaaaaggttggcatgctgctcgtctacttcaacattataaatctaaatcagatgatgataatgacgacaacgatagctgcgatgcccggcaaacggtgtgcagagcttcaaacacgcatgaggaagctccaggccccatggtccccgcacctccgtcagccacaaacaacgctcccagccacatgtatcagaaggatgctgctgtcgcatcacagaggacctgctgaagcccagcttcacatccaaagtcgcagacccccagcacgacgcccaagctagcactcaacctgcaggtac

SEQ ID NO: 64857 - DNA, 1637 bp, Zea mays
  Clone ID: MRT4577_159147C.1
cacagctctgccgcttgcctccgccggcgagggaagggacgaggcgccgagccggcaaccgttttcggggttgctggcggcgattggctgcggttccgcatcaaggctggtcgaacgctgcccctcctgattggtaggtagctcgagatggatctgattcttccatataaggttggggacctcgcggagtccaaatccttggtgagcggttacagaggtgcatggtttcgctgtaagatacataatatgcgtgtcaggcttggatacctggagtgttacttggaatacattgattatccaggcgaaaaaaaggaatgggttaggctctttcgaaagaactctgcaaggtccaaccaaaattcaagtgatagtattcacaccatgataaggccttcatttccaaaatggtattttgtgcatgaagttcctgagcagttcccaaatagtgatgtcacagcaattgttgatgaaacctggcaaattggtgatcgagttgattggttgaaggaaggttgttattggtctgggacaattactaagataatcaatgaagatctggtcgagatagagctgccggcacctcccataggtgaaggaaaatgttataaagctaaatgtagtgatctgaggcctactctcgagtggtctctagcaagaggttggatggtccctctttcacaggcaaatggaaaaggttggcatgctgctcgtctacttcaacattataaatctgaatcagatgatgataatgacgacaacgatagctgggatgcccggcaaacggtgtgcagagcttcaaacacgcatgaggaagctccaggccccatggtccctgcacctccgtcagccacaaacaacgctcccagccacatgtatcagaaggatgctgctgtcacatccacagaggacctgctgaagcccagctcaacatccaagtcgccagaccccaggcacgacgcccaagctagcactcaacctgcaggtacgggggtctccatgaagccggaaccggttattggagtctcaacaatcaagaaagaggactcctccttgacagaaggtgaggttgatggcggcacggaagagtgcctggagaagctgggcgcgatcaaagccaggctcaaatacctcatgcagggcacgcggctggaacatgagcgcagcgccaccttccgtgggtagtcaggcagatgaagctgcatcaaaggtgcaacttcacgcaggggtttagggtttagggccatctaacgcctgttgtggttgctgaattttgtgtcctgtggttacaggtattattgtcctgaataatgacgttgtgaataagtggtttgtttttttgagtgcggcaatttgtaggagctaagaggaatgtgttgctgagttaagttatgaattagaccgtgtccagcagttcactcatatggtcatcctaaacaccgtgcagtagagtttgaatattagtatgaggatggataaactggtgcagatagccttatgttgtgaatgaatatgttgctgagtaaaaaaaaaaaaaaaaagcggccaataatgacgctgtgaataagtggtttgtttttttgagtgcggcaatttgtaggagctaagaggaatgtgttgctgagttaatttatgaatta

SEQ ID NO: 64858 - DNA, 223 bp, Zea mays
  Clone ID: MRT4577_159148C.1
ggcctctcctcccgtccgtatctctctcttgctcgctctcgcggagatcgaagagaagcgcaggaggccccagcactagcgccgccccgccggcgcatcagacatggcgctggccggtcgcctcgtctcgcgctcccgtgagctatattcgggtcaagggattttgggggcggggggggtgggggcgacagggggcggggagtgggagtgggggggggggggg

SEQ ID NO: 64859 - DNA, 314 bp, Zea mays
  Clone ID: MRT4577_159149C.1
ttaaggtcaacggttacaaataacctaaaccctttttttttttttgtaatggaatcattttttccccttaaaacttgtttttttcttttcaaactttttaccggttgtaattaaacatgaattattcccggtggcatttacattacttttcgggaaccaattcccactttacacataataatacccaccttttggggggggaacaaaagaaaaaaaaaggggcggttttaacaaaagccccggttttccacccatacaagtttctggtgtaatttttccacagtgccaaaacatttttttttttcacaattttt

SEQ ID NO: 64860 - DNA, 169 bp, Zea mays
  Clone ID: MRT4577_15914C.1
ctaaaacttactttcaaacattaaaagttatgagtttagttgaaaacttggctgcaacagatggaggatcgattagtaatcatttcaaagtgaaaagaaaaaaattgatacactttagatacacaaaataattactgagtgaatgtaaatgccagactctgggcttatt

SEQ ID NO: 64861 - DNA, 122 bp, Zea mays
  unsure (1)..(122): unsure at all n locations
  Clone ID: MRT4577_159150C.1
tgactggaatgccgacaactgaaaacagactagacacagatcggagcttacttatacctgtctcacaccgcatctatacagagtcncttgtgattgtggacaaacataggacacactacaca

SEQ ID NO: 64862 - DNA, 1553 bp, Zea mays
  Clone ID: MRT4577_159151C.1
aaaaacccgggccgaccacacgcgtccggttcacgcaagcgcaagtgcgcaacttgctgctctcgctgtctcagattccctgctacgccgcctcctccgcggctccgccaccagtctcccctgcaaccgggaatccgggataagaggaagagaaaccgcgcggcaaaaggaaaggagtccagcagcgagaaaagaatctctgaccggagtcctgccaggctgatagaatcctgggagccatggatatactgctaggttctgggagattcttggcgcgacggactcccctcatgctcgtccctcgctgctctcgagcctcccgggacagaagcggcagcgacaaaggtgaaacctctgctgactgggacaaggcatgggctaagttcaagaagaaagggaagaggaccctcttttctgatttctcaccagacaagtatgtgacctggaacccacggcgcagcgagtatccgttgtcagaagaggttgatccaatcaagagaactgaaagatctaacttgatgctttggacgagtccccagttcacgttggtgggggcgattatcatcgtcttgacattactaatctacacactagtcgttcctcccaagtaactgcacaagtgacagctaggaagtgagttgtaaatcaatattatttcaaatgggtagtcttgattgtacaattttaacgtgcattacacctactacattagtactcccgttattccaactcccttgtaactgcagtgattcctacttccagcggggggggggggggggcccggcccactctgacattagacacaacacagcccacacggctctccagtccccagattcccgcgccttcctgagcaagaagacacccgcggcgacgatggagcggctgccgccgcaccaggagaaggcggcgaggcggacccttcctcggcgcgggcagatcaaggcgggcatcttcgcgagcctgttccggtgcatcgtcgcccccgaggcacccgcgcgcaaggaaggcggcacgaacaaagatggcagcagcagccaccaccgcggctgcaagaacaaagatggcggcagccaccgccgcgtctcccccggtggctgatgcggttcgaaggagtcaaggtataaataacagggagagttgacgatgtgggggttgcgatgatccccgttgtgaaacgctgcagcctgcggcgccggtcgttgaactcgcggagcggaggagggtcttcggggggtggtatcgggttagctgaatctgtataatggtatggggttcagagttcagacagggtcagggcagtgaattgtctggactttctgtggtcggatggggtctctgaactccggcttcagctggagtgctatgtaaatatgtaatgcacgctcttgtctgtgttctttagcggcaacttcagtgccttagccctttggtgtttcctttccaggtcaccactgtcttgtggatattattgctcttgttggttaatgaatcttctcagtgttcttacttctgccaaaaaaaaaaaaaaaaaagggcccttgagctccagc

SEQ ID NO: 64863 - DNA, 472 bp, Zea mays
  unsure (1)..(472): unsure at all n locations
  Clone ID: MRT4577_159152C.1
acacccccagcccgccgccaccatactactagaaagcgatgcctaccataccacactgctgtcagtcctctggagcactttaggctggtgctggatcaactggaacgggttggggggtttttttttttttgtcttagaagagcctgcgtgactggtgaatgagggggggagtgaagacggccacatgcgtaccccttacngtacgtaccccatccatcttttggtggtgcctgccactccgatgccccggttagcacagatcgagagagagcaactaacgcagcaggcttctctggcttcccgggcctggtcttactggccggtcccgggccggtttaacttctactaggtgtgattcggtcccatggtgtttacgcagccagcacgcaggtgctatctggtgcgggtcatgtaatgcggattgcgaactactattgggtgtaaaaccataataaatgtgcgaaaaatatgc

SEQ ID NO: 64864 - DNA, 568 bp, Zea mays
  Clone ID: MRT4577_159153C.1
agcccggaagcacaacatatatgtaaatataaaataacatggattgctactaggcgtgataacagaaaagctacgtaaatagaaacaaccaacgcccaatcataaaagatcgagaggtgacaaagaaatcctataccatcggcatacaagaatttatgatccaatgaacacaacacgcatactaattcggaaaagcctatctctgcatcaaacaatagcagcatcgtttcatcatggcagtagactagaccagattggtgccggaccgaaacttcttcacctaacactggaagaatacaaatgacaccgacatgggtcctggtacgcaaacaaaatctacgctggcgaggatactgtaataactcctccaccaccaggagcccggagggaaataatctttcatacatcaccaaaatgaacaggcatccacaactggtcatcataactcaaggtccccgccggaaaggctgcacatgttggtgataacctcactcaacttgactctatatgatcacgctccccaagaccactactgggaaataatccatgccgatgtgtccgcatggga

SEQ ID NO: 64865 - DNA, 338 bp, Zea mays
  unsure (1)..(338): unsure at all n locations
  Clone ID: MRT4577_159154C.1
cacgccctcgccctttttttttttctcttttttatacataccatcctattttanggggtgggggaattttaaattcccccaacaaaccactcccaatttcacatatttcaaaacatcttacgcacccacaaaacagacaacaatcttaaaaaaaaaatttctccccccatccccccttatttaacgccctaaatgtctcttatacaaaaaccccatggacccacactaatcctactttcttccaaatatcgcctgctaaaaaccttaaaccaatgccctccccccccacactttaaaaaaaactctctccccaaacagaagaaaccaccccccccaaa

SEQ ID NO: 64866 - DNA, 429 bp, Zea mays
  Clone ID: MRT4577_159155C.1
aagtactatctatatatgtggctgaatctatggggggttttccgctaacaacgggtgccccggccgggataacaaccggtgatgggcgcgcggccggccggatgacgagtgcagttcacgtttaacctgatggcgaagaacataatgagcatggaccccggcgaggaggagacggagcggctgcggctggagtacatcaccttcatgaagggcgtcgtgtcagcgccgctcaacttcccgggcacggcctactggaaggcgctcaagtcacgcgcgtccatacttggagtgatagagaggaagatggaggacaggcttgagaagatgagcagggagaagtcaagcgtggaggaggacgaccttcttggatgggccctgaagcaatccaacctgtccaagaacagatcctggacctcttgctgagcctgc

SEQ ID NO: 64867 - DNA, 449 bp, Zea mays
  Clone ID: MRT4577_159156C.1
gggccccaagggaaggccttggttcaacacggggggggtcattttttacaaacccccaaggcccaggggggggtttcctaattaacgggatctccattaaaaaaggggcgatcttgccatcctttttttcccactcataaaaaaacgagaccccccccgagggggtgatccctccccaggctcataaaaaacggggttaattaaaccaaaaacaccttccggccggtcaatggacgggggggaacaaaggggggcttaaaaggacccccccaacgggtcaaaaaaggggggggggagcgggtccctcagggggggggcccaattgttgagcggccccttgccgggggggggggcctgcacgggaaaacccaggaaggggaccatggggagccccccgggtttgatttcccccaggtggagccgcttctttttttaaggggcggccccca

SEQ ID NO: 64868 - DNA, 297 bp, Zea mays
  Clone ID: MRT4577_159157C.1
gttattgaaatgagatttctaagttatcagtgtcaaaaacatatgttggtgggaccccccactcccataaccattgctgtgctcccccactctcatcggcttgccagacgcacttctccagcatatactgacgtccctgttacatactgatattgatactcttgtgcgagcccaccacatgtcttctgctatcattgccccaaagccaagccaccttccgagtgcctcaaactacctatatgaaacacaaaaccagtccccccatacatctgtatttacttcaactactgccctact

SEQ ID NO: 64869 - DNA, 553 bp, Zea mays
  Clone ID: MRT4577_159158C.1
aaacacacactcttttacagactcaatgaaattagagtgcgtaaaccattaggcctgcgacaagatgattgtgagataccggacttccattatagaggctggaaaggagatggtacagacaagttgatggctacatagaggacttgcaaagtggtttatctaataaggcctggaaagcacagtagtacatagaggaccttgtgtggtctgattgcccgggtcattatcaagtaagggttttctcaagatctctctgaaaaggagacccaggctgtttgatgacaacatggggaaccttctgaaactgactggggaacctatgataaatacggtttaagaataacaaaaatgctttgcacttaacttcaaagggccctgaattttttataaaggactgttcaaaaatgcctaataggcagattggctccatagagttccaatttatttataccaagctaggaagaccgtgtaggattaaccattgcaattctggagaaaatgtgggaagataatgacggacctataattgaaagctgaccacctttccttatat

SEQ ID NO: 64870 - DNA, 224 bp, Zea mays
  Clone ID: MRT4577_159159C.1
ttgggggtaaacccccaacccttttaccaatggaacaagtggtggcctttggccaacttggtttgacaaaaccaacaaccttttaacaacaacacattattggcggggccatcttttaaaattgttaataattggaaatcaataatgaagttttttggctgaaggatggggcctcctaaaaataagaaattacatttccaaaatctaatgggccattggcctgc

SEQ ID NO: 64871 - DNA, 567 bp, Zea mays
  Clone ID: MRT4577_15915C.1
ctgtgccgtgctttgacctccggcgccaagtccgcagatctggatctcgggatcacccacattcacagagacacgcactgaatgagggtcgccttatccgcgctctcctgttcgacgctcaactgatgggaggaatggcaccgcgatggttcattagggttgatagctagaggcactctgcttcttaaatgcaagagctggctcccactggtgagactgacgcgctcttcacttgatatgatgaagactttgaaagttgtgatcgacatgccccttgaacagaatattctgagagtgcatggatgcatatggtctttgaacaaaccactactgctattcagccgagaggcaattgtcttcttatgcaaggggcttgatgttattcagcaagcacaatcttgtacatgaaagacagaaacattctgttctggtatctagcaggatgttgactatggtctgtttgaatgccaggccctggttcgtgctgctacacgtgagcttgcacagcaaagtgatatagatatgcgagcacttggcgactaccttggtgttaaagaccatgcatgc

SEQ ID NO: 64872 - DNA, 189 bp, Zea mays
  Clone ID: MRT4577_159160C.1
gcgatgcgtatctcctatccgcatttacgcttagtttatacatggggattggttgctaagctattgaatacactgggtgaacctaatcattatttactaataattactttagattagaagcaaagggaatctaagcaagaatcgatccagtcgagaaaatggtgcaattcgggaagtggctgaagaggc

SEQ ID NO: 64873 - DNA, 626 bp, Zea mays
  unsure (1)..(626): unsure at all n locations
  Clone ID: MRT4577_159161C.1
aataacattataattaatataacatagacaagtgtcattcaatatctcataaataagcattgtcaaataactcatacataagtgtactatacatccaaactaaaatactaattaaaaaacttggtcatcaactgtttgcactaacattgagtctaactaagtgtatacatgaattcaagtctccacaccagtgtaaccaccaaaatttgagttccattctatcttttcctgagatatagtgctatctttcaatgcttctagtttatgtggaactaaatcatcttcaaaatcaatatgtcctagttgaacgtatttgcgccaaccataagtgtatagattacttgagtcacaaacagtaatcgtatagcgccatccacatgccagaagcaccatcttctcaaccttttagcttatgatttggcttcgatgatggattattgtccatttgtccttaatgggtggaatctactgcaactcatctagggttgtacagatgtcttgtaaagtttcttcatatactccttcactcgataattgggtaaaactgacagcatctccttccatttcattgccgcgtngtaaacgtagagcttctccccggtaggaacatggattgtccagggacc

SEQ ID NO: 64874 - DNA, 403 bp, Zea mays
  Clone ID: MRT4577_159162C.1
aaaatattcaaaaactataaattccaacatcttcttttttaaaaaaaaaaaaaaaccccattttttaaaacccaagggaaaaaaaaatttatttttttttaaaaaaaaaaaataaaaaaaaaaattaccccctccccgcggggggtaaacaataatttatttttttaaaatcaccttctctatatataggcgggaagggggaaaaatttttcttcatccccggggggggataaaacaacccgggctgtttgataaaaaaaccacccttggtgttgaaaaaaaaaaatataactggggagaaccaccccccatccccgtcgtgtgggaagtaaaaaatccctattaaactcaccaaaaaagacttctaatggaaaaacaacaaatatttttttccccccccccc

SEQ ID NO: 64875 - DNA, 245 bp, Zea mays
  Clone ID: MRT4577_159163C.1
tcgcaggctgcccgatggtcttgtcggtatttcactacggttccctcatctccgaccttgcttttgactgtccctacaaaattcttggccttatcaagggcttcaaccggacctttaatgtccattgtattgaccacagaggcacaacagagcatgcggcgaggacctgcacgctttaaaccgacggcgaagcgacgaccaggccatatgccatggtacaaggcctacaaggagaaagtttattc

SEQ ID NO: 64876 - DNA, 1092 bp, Zea mays
  Clone ID: MRT4577_159164C.1
ggccgcttttttttttttttttttagacaagtgccattcaatatctcataaataagcattgtcaaataactcatacataagtgtactatacatcctaactaaaatactaattaaaaaacttggtcatcaactgtttgcgctaacgttgggtctaactaagtgtatacatgaattcaagtctccacactagtgcaaccaccaaaatttgagttccattctatcttttccagtacaacaaataggagaagacaataattagtagttagacacagttgaacacctcacattgtgacatatcacgagggtcatatagatatataaaaagaatagagtaatgctagattttgtatatgtcaaaagaacttatcttcttaggaactttgctagaagtaagtgtgctgacaattggagagacaatcgtttttatgaaatactggtatgtcccatctgatgacatgctaattaattctggcaggggtattttgtatggggctttgggctaagtagcattagatatattcctatttgtttgtgagtttcctaaacttttaatgtaaacctggctacatataccaatatgtaaaaagtagattatagccattagtataaggtatgtcgattcaacatgtgcatagaagtatggaaccggtctttgtaaatatcctagaaaagcgaaattgaagttttgaaaccatgtcatggaatgtttgtagatggtattacctgggatatagtgctatctttcattgcttctagtttatgtggaactaaatcatcttcaaaatcactgtcctacttgaacctatttgtgccaaccataagtgtatagattacttgagtcacaaacagtaattgtatggcgccatccacatgccagaagcaccatcttctcaacctaggttgtcctccctattgctgttgcaagtatgtccatattatccaatggtgtaaaggtaccagctactgacttttcatttagatctacctgaaaaaacaattttatgtgtgaatcaaatagggtaagaaaattaaatggacaatttatggtggagaggaaattacaagaactttatcccggccggcctcgaggta

SEQ ID NO: 64877 - DNA, 305 bp, Zea mays
  Clone ID: MRT4577_159165C.1
gctgagcgttcacgagcgcaacctctcgtttgtcgcatacaacaatgtgatcgggactcgccgtgcttcatggcgcattggctcttctattgaacagaaggaggagtcccgtaagaacgaagagcatgtgaaccttatcaaggaataccgtgcgaagatcgaggctttattgtgttatatcttatatgtcatcctgaatttgctttactcccacctagtgccttcttctactgctgctgaatcaatggtcttttaccttatgacgatggtttactatcaaaggtatcttgcggaatttaagactg

SEQ ID NO: 64878 - DNA, 385 bp, Zea mays
  Clone ID: MRT4577_159166C.1
cccagcgcgtccgcccacgcgtccggttctagaccgtgcattaccaaaaaacaatagacaaggcgcaaggtgaaaaaaaaaactgaacaaaaaataataaaagagcgccagtttccaacattatgcatgatgggtactagtactggtgacggccggcgattgatattctggatcagatactagatattggtgacccccgtaagaaggggcttcacttggctaaatagtgtaccacttgtgcatactatcctttgcttactctaccttcttgttccatgtcagttctcaaggtgacccacactacaatcgccgtttgcatgcagtgccctcccttcatggcaaatgaaatgccctttacaccgaacttttaaacgaacccgatcac

SEQ ID NO: 64879 - DNA, 576 bp, Zea mays
  unsure (1)..(576): unsure at all n locations
  Clone ID: MRT4577_159167C.1
cccgggggcggggccgccctnntttttttttttntttttttntatttttctttttttgttttttggggtttttttnntttttttttttttttgtttttttttttagccggaaacaaatacccgaaaagaaaaattaccggtttactttaagggttggccggagcccggataacatgggaacccgccggcttttacgggggcccaaaaaaaaacccccccaaaagggccccccccccccaaataaaggttaagggggcacaccggaccggccggagaagataacttgggggagggaatggggccacccacaactggaggacgcttaaaaatggcaacaaaacggttaatccaccttcttcattttgggggccggggcccccctttcaacgggggggttctttttcattgcggcagggccgcccatttttttacccccgccccgggacattttggcgaaaaagggggtggaaaaggttttcaacttctttattttggtcttgaaatcgtcccccttggggaggtgggtgggggccaacccacttatgggcgcgtcgatgggggccccgaacttttttt

SEQ ID NO: 64880 - DNA, 240 bp, Zea mays
  Clone ID: MRT4577_159168C.1
attggtcacgccaggacaggggcgggagccgaggtgcaaacaccagcgagctggctgccgatggcatgaagcgaccgaggatagaggcggcaaccgacggaagggcccagaaacaagcagggaccccgggcagccccagcgaccaaggctgacgaagagcgaaggggcaaggacgcgccgtgggagcctaagaccatgaggcggaggaagcgcggaaccgccactcacatgcggaccgga

SEQ ID NO: 64881 - DNA, 224 bp, Zea mays
  Clone ID: MRT4577_159169C.1
ggccgcgcgctgcatctcctgcccattatttcctcatcgtctctctgcccttcaatctcctataatcctcttagtatcccggttcaccaaatcagccctcagtgtgcgtgctcaccacaagcccctgtcacagcaagcaggtttgctagctctgtaggaccatcatgtaaaatatgctacgtgcacatccatcggctgctgctgtcccctgcgcgcctgcatct

SEQ ID NO: 64882 - DNA, 116 bp, Zea mays
  Clone ID: MRT4577_15916C.1
cttgccgcggagccctcttctctctaccgccgtctcgcctcatcacgccattaaaccccactcgcgcgcgagtgggctggcggcgagccctcacgcatccgagcaagccgaggagg

SEQ ID NO: 64883 - DNA, 183 bp, Zea mays
  Clone ID: MRT4577_159170C.1
gagaatacatactggcagagcaaccctagaaatgggaaaaatttggcaaagccatgaatcggtcctcgcacctcaccacagataagataactcattggagagaaatcttacaagtatgaatactgtgccaaagcctaagaacttcctcaattcttaatagatataagattattcctactggag

SEQ ID NO: 64884 - DNA, 446 bp, Zea mays
  Clone ID: MRT4577_159171C.1
gactgtcaaggtgactgttattcctatacataggtgatgtaatgttgacccttgagggctttttcggtttcatcaaatctatatagatcggaggaaattaggtgagtttcaatctattgcaagttaaaattcttcacaattttttttataattccttctaatctataaggcataggaataaccggacatgactgaggtggtgtttggttctacaatctacggcggcagcgagcaacgggaacggaatcattaccacgccttctaatttattctgtttgatccacgcctggcaatcgaaagacagctttgttttccacgcggacggtagcgtgagcgtaatcggcgcgctgggcggccctatttattcccgtaattttcctattgaacagtcgtctaaatctagacacgtttgtttaggcgacgtgtggttcaaccattattttttt

SEQ ID NO: 64885 - DNA, 253 bp, Zea mays
  Clone ID: MRT4577_159172C.1
gggcgaaaattggcccctgaaaatatattttttcaggggatcaatgtttcatggacataaaaaaatgtataaccctgtagagctttttttctgggggggggttgcacccaggctcaatacaggaccactcactaattgttactggactcccgagggcatattttgttcgtcaggtgacggggacccagatacccaaaaaaatgtggcttctctccaaggtcttttttatttttcgggtcttggaacttcagga

SEQ ID NO: 64886 - DNA, 762 bp, Zea mays
  Clone ID: MRT4577_159173C.1
ccaccgcccctccctgcgcctgcggcgctccgtccccatcgctgcgatgccctctagccctgccgctccccttcgctacctctcatcccgccgtccggctcgccgccccgccgcttctcgcgcgccgcctcgccgtgtctcctcgaagggcagcgtcagcgctggaagccctcgtgctggaatctgacgacgaggaagaggagtccgggataggcctgttccagggtgaggagtgggcagcgaccgccgacgagagggacgcggtaaggtcccccgaactggaggttttcgagctcgaagagctgccggagcagtggcgtcggtcgaggatcgcctggctctgcaaggagctccccgcttacaagcactccaccttcacccgcatccttaatgcccagcgaaagtggattaaccaggacgacgccacctacatcaccgtccactgcctccgcatccgccacaacgccgctgcattccgggtgtacagctggatggtacagcagcactggtaccgcttcaactttgcactagccacaagggtagccgattgtcttgccagagaaggcaaggttgaaaagtgccgagaggtgtttgatgcgatgatcaagcaaggacgagtaccggctgaatccaccttccacatactggtggttgcatatctcagtgttgctagggggggatgtcttgaggaggcatgcaccatctacaacagatgatacagatgggtggctataagcctcgcctcagcctgcataattcctg

SEQ ID NO: 64887 - DNA, 632 bp, Zea mays
  Clone ID: MRT4577_159174C.1
tttcgttagtcttgtgaatttcggtaacattccgtaggatagttgtctgaacagggttgctcagacagtgtctacaattgacataattaacggggttttgcttatgtgcagagaaatatgtattgcactctaattgataatctgttaggagggttttgcttatgtgcagagacatattgtgtatagctggttgttgtactctaatctttctgatctagaagtgtggaaccatatggattggaggtaatgtcaaagctgtgctgtttactaaacagcattgcgttgcttatgttaatgaggttgattgattgttgcttgttgatcatgttatttaattgttgattggtgggtgaatagcacgtagcttttttattggtcgattaacaatatgggatgctgaattaattagctgctaatgtctataggttcttgcagttgttcaagaaacctggatggatcctgccataggcctcacaccttatgatgtccataagcatgttgggtttctcaagcatctgatgataagaactggaaggttagtgtcataaataatgtgaactcgtctgttggtaattcatctgtgggtgaacaggaatatactttgtgtggggaagacgaacattactggacat

SEQ ID NO: 64888 - DNA, 621 bp, Zea mays
  Clone ID: MRT4577_159175C.1
tgtccccactccccacaccctgctgcctgcggctcatcgatctcctcctctccgacgacgaccatggcttaaacgaccctgctgacgaggaggtccaagcgcatcgctctgcgcgtttcccttgccggagccaaacccagctggcgtgactgggccggcctagcgccgctggcggtggagaagatcgcggaccgcgaccgcggcgcggaactggccgacttcgtgcggttccgcctggtgtgcaagctgtggatggacggcagcggcatcaggaagccccgtgagctgggcgcacgcgtcatcgaccacagcttccaccctcgccggtggatcctgctgacggaggagaaggaggaggctgatgaggcgacgcccacgcccacgcgccgcacgctgcttaacctcaccacccggaagaccatccaggtggatctgccggagctcgctgggcactccgtggtccccggacccaccgcggcgccggagggcatgctggtgacaccgtcctccatcaaggcgttatttgctgatgacaatgttgtggtggcacagccacctaatgctgggattggtgctggtgcaaggttcggtgctattggtgtagatccccaggctcaatga

SEQ ID NO: 64889 - DNA, 301 bp, Zea mays
  Clone ID: MRT4577_159176C.1
ctgcaagatttcaataaatttaaagggcgcgcaaatccccggcaaaaaaaaaagttgggggaaaccaaaaaccccccttgtttgggacgtgcaaaatttttgagggaaaatttttgaatggggttggggttttttttttttttcaaaactttgggggggcaattgctttttgggggggggaaaattttctcggggcttgattaagcaagcgtttttttctccgtcagtttttgggcaggggcttcctttttttttcttgaaaactcttaaatgggggggccttaaacatttttcccggccc

SEQ ID NO: 64890 - DNA, 2166 bp, Zea mays
  unsure (1)..(2166): unsure at all n locations
  Clone ID: MRT4577_159177C.1
ttttttttttttnnnnnnngaaaaaaggtggtggggacgggcatcggaggggagaggggcttgcggtgtagttggtgaccgacgatgccgcgctgcgcgcggcggacttcttctgggtttgcctcgcgtccccgacccgcccgacgccaccgttcatcgtttagcacccccacttttgtcctctccttgttcccaatcctctgctagcttcgcttccaaccccatcgatacttcccagcaagctacactacaagctcatccgcctagtccttccatggccgatcaccagcctcaggtcgaggtcctgaccgagtcagtgcgggtcaacggcaccaaggcggaggccacgctcgtgggcggcgagctggtgtggcgccccgccgccggcggcaacggagaggggcaggagcggcggctggagctggagtcggaggtgctcgggttccagatggacgggaagcagctcaaattcgcgacctttgccgcgagcggcggcggtaatgggaaagggggaggaggggatgggaatcggaggagaggggaggtggtggtggagatggagaacgaggccaccgcggtgcggtggggggtcgtaatcagtgatcgcctagcctcgctcggccggccaaagaaattgttcattatagtgaacccttatggtggaaagagaagcggaccgagtattttccagaatgaagtcctccccctcattgaagcttctggcgtgctttatacgatgcaagaaaccaagcatcgccttcatgctcaagagattgcacattcacttgatcttaggaagtatgacggcatcatttgtgtcagtggagatggtgtgatggtagaggttgtcaatggtctcctgcaaagggaggactgggaagcagcaataaaagtgccccttgggatcattccagcaggtactggaaatggaatggcacgatctctactgcatgctgctggtgaaccattctatatatctaatgctgtgttcgcaatcatcagagggaaaggcgaggttctttagtgtcctgatgcttacatggggtctggtggctgatgttgatattgaatcagagaagtataggtggatgggaagtgctcgccttgatttttatcttctactccgcattctgaacctgcgacggtacaatgggcgtatcctttttgttccagcaccagcatacgatttggttcgttagccttgcgactttgctaccgagaaccatgtgactctatatgtaaatattagtcacacggtcacaccccactccagtggatgagcgatgagcggctatgtgggcccatcgatcaaagaagcagaagctggtcttagatggagatcactgaatgggccattcgtttcagtctggctcggcaatgttcctttcgctagcgaagatgccatggcagcaccaaaagctgagtttgcggatggctacttggatgctgctataatcaaggattgtcctcggtgggatgtcctcgggctcgtgttccagatgaaggacggcagctacgtgaactcgccatgcgtggagtacttcaaggtgaaggcgatccggatcgagccgggcctgcgcgtgggcagcagcaccgagggcggtatcatcgactcggacggggaggtgatcgcgaggggcgacgagtccgattcccgcgccggcgacgacgagccggggcacctgatggcgtacggcccgcccatccagctgacggtggaccaggggctggccaccatcttctccccgagatgacgatccttctctcagttctcctccaccgcctgcgagtaatttgcttcgtctagcccaccctgccattctctcgcgtaggatcatgtgcttctgtatgtaaatattgctcacagcccaccccggccagttggatgagcgatgagccaagagggacggatactggctggatctccgtctatagattgttttatttccatttccctgcccacatggctgccgcttttagtgctagcgtgagaaaatgagagcagctgggcagttcataagcttcattttcgtgtgtttgtgattaatgttacttatttatacgagaagtgtttaaagaacgcagagacgacaatgagtcgtctcttctcgctcgacttaaaacttatggtgtttaattaaccttaaaaacttgaaaaagcccccc

SEQ ID NO: 64891 - DNA, 331 bp, Zea mays
  Clone ID: MRT4577_159178C.1
ctcacacactcactatacactgctctgctgcatcttgagggaagaagctagcccctccctagctatggtcgtcagcactggccaccaccgcctggtccagcctcctaaagtccaaccttcgcgggctccctgttccgcttcggccactcgcaccaccacctctgagtccgtggccgtggccacccgccgcgcctgggggggcccaatccgcccgtccatctcctcctcacccaccccgccctacgacctgacgttcttccggtttagccctatcaaggtggccatcttgtccccaacgaggaccagtctctacatggcggacattactacc

SEQ ID NO: 64892 - DNA, 1512 bp, Zea mays
  Clone ID: MRT4577_159179C.1
cctcgagccggccgagaattgttcttatagtgaacccttatgtccgaaagagaagtggaaggagtattttccagaatgaagtcctccccctcattgaagcttctggcgtgctttatacgatgcaagaaaccaagcatcgccttcatgctcaagagatcgcacgttcacttgatcttaggaagtatgatggcatcatttgtgtcagtggagatggtgtgatggtagaggttgtcaatggtctcctgcagagggaagactgggaaacagcaataaaagtgccccttgggatcgttccggcaggtactggaaatggaatggcacgatctctattgcatgctgctggtgaaccattctctatatctaatgctgtatttgcaatcatcagaggtcataaacgtgcacttgatgttacttctgttgtgcagggaaacacaaggttctttagtgtcctgatgcttacatggggtctggtggctgatgttgatattgaatcagagaagtataggtggatgggaagtgctcgccttgagttttatctcctactccgcatgctgaacctgcgaaggtacaatgggcgcatcctttttgttccagcaccaggatatgaagaagttggtgatcccgtggaacaaactaccggtcatgaaacaaatggggttagcggggcaactgacaataatggtgaaacgtgcggctatgtcggcccgtcgatcaaagaagccgatcgtagatggagatcgctgaacggtccgttcgtttcagtctggctcggcaatgttcctttcgctagcgaagatgccatggcagcaccaaaagcagagtttgcggatggctacttggatgctgctataatcaaggactgcccgcggtgggatgttctggggctcgtgctccagatgaaggacggcgcctacgtgaactcgccgtgcgtggagtatttcaaggtgaaggcgatccggatcgagccgggcctgcgcgtgggcagcagcaccaagggcggtatcatcgactcggacggggaggtgctcgcgaggggcgacgggtcccactcccgcgccggcgacgagccggggcacctgatggcgtacggcccgcccatccagctgacggtggaccaggggctggccaccatcttctccccgagatgacgattcttctatctgttctccatcgcctgcgaggactttgcttcgttagccctgccattttctcgagtagaaccatgtgactctatatgtaaatattactcacacggtcacaccccactccagtggatgagcgatgagccaaaacacaagagggacagatcctttatctccgtcaagagattgttttcgtttcacggccacagcccacatggccgccgcttttagtgttagcgtgagaaaatgacaagtgggcagctcctattctttttttcaccttgtgtgtgttgttgattgtccctttacaaacagtggactgttttcctgcaaaattggtgtttaattcaccttaaaagcttgcacttgc

SEQ ID NO: 64893 - DNA, 594 bp, Zea mays
  Clone ID: MRT4577_15917C.1
ctcacccattggctataaaaccgcagcactaggaccgctatctgtgaagctatccgccttcttactcaaggtggcatcaatcagagctggagtatgaacctacaaacgctccaaaactacctacaaaagcaccagctaacgcaaaaggtagaagaaccgctgattgatccgatcatgcatacgatgatacgatcaaagctaggatttagtctcctaaagtgtggcctcacatatgacaggacgaagatcatgaaaagtttgatgggccacattatggagctcgttctaagtgatgctggatgtgattttcttatctgcattattattatcgttgatgacacagagcttgacactaagattgtcattcaaaatctggttaaacatctaaagcaacttattttggacatgattgggagacagacattgatacaactactgcagcctttacgctaacgctatctttctccctatgatctagctggtgtgaactacagtgtgccctacattgagccaacagtagttgaaacatcagatggtgctttaggaggtgttacaggagatatatcagatgatgtgattactgatgatcccact

SEQ ID NO: 64894 - DNA, 364 bp, Zea mays
  Clone ID: MRT4577_159180C.1
gcggttatttattatttttggcatgtcgtatttctcataaatacttcctggacgacatgaaccaataagagagctcacgtgttactacaggaaaagggaaaacccataggatccggacttattatgaagatgaggagctaattagagcactatatgagatatctttagatccaaattggaaaagtacagggaggctataacaactgggatctgccatgtcataaacaatgaactcagagtcatgctaccactgagtggtctaaatgctatggcacacattgagtatacagtgaggcatcatatgaccacgaatcagactaacgaggtacttcttgctaagagtggcactaatcagatgacgatg

SEQ ID NO: 64895 - DNA, 232 bp, Zea mays
  Clone ID: MRT4577_159181C.1
tgttctattaaaaaaggtcgtaccacacacaggtggtgcgcccccatacagatcacgacggtggcctgctactactataccaataataagtgatccatgcaagcaagccaagactcccacttagttcgtcaaggtgtggctaacgcacatacttcggggcggtttcatcatggacgaggctaccccttatcaggctcgcctcgcggaggaggtccgtgcgtgcgccgtgata

SEQ ID NO: 64896 - DNA, 231 bp, Zea mays
  Clone ID: MRT4577_159182C.1
tggcactgtttcgatttgtaatttataacaccctagctccttgcatgcattgaccgtgattgcagacctgctctcgttgatcatcccgctcaaagaggggctgacacgtagatcttctcggtacagtctagagcatcttttacatgcgcaccgaggtggtcgacaccgtgcttaccacggtgcagcctcaggagattgactggttaatacaggaccacatgggcggattct

SEQ ID NO: 64897 - DNA, 220 bp, Zea mays
  Clone ID: MRT4577_159183C.1
cccactcgtacgctcactctcgatcaaactttctattctaatccataatatctgggaacgactaaactaagacctacctggactataattagcattcaatctataacttataaaataaagacccgtaacctatagacacctcaacatactaacatgtaaaaatgataccataacataacctgatttaaatctataactcctacatactacaatatcacac

SEQ ID NO: 64898 - DNA, 549 bp, Zea mays
  Clone ID: MRT4577_159184C.1
gcagcaatgacttctctaccattctctagtgaagttaaacatgcagcaactccgaaattgaccaaagtaacaaattcccaaattgacacgtgaaaatagacagcaaatttacatcaaaccaaacgacaggggctactagctaaatatatgttcatccctatttcgtacagcagaggcctatttgtttctaccgatcataggctggccaccaccctttggactcggcatgctggtagacctgctgatcttgcttccggcgccaaaactcttcacgtcgatcaggtctccgaacaaattgtccggcatgtaatatggtctggctgctgccactggagtttcttttggccgctgattcccgttcacccgagcatttgtagccacgctcgaaccagtgtttgtttgaggaatagagaagttgtaactttgcaccggtgttggtgttagagatggaacatgttgcgctgatggggcaggagtgtttggcgtttggtatgtcacaggcctggaaagattagctgaattggcacttgcaggcatagcccatggggg

SEQ ID NO: 64899 - DNA, 227 bp, Zea mays
  Clone ID: MRT4577_159185C.1
cccttttataatttttcctggatcataaaaaaaaaacaggggttttttcccaaattcccccggtatctcggaaatgcaacattttttttctggctggccccatacatcatcgaaaatacattatttttgacatacaacctcttcccaaaggttaggggggcgccacccaacatgggttgttgcttggaagctgtaggggctgccaaaaaaagtgggtccaagggcaa

SEQ ID NO: 64900 - DNA, 2387 bp, Zea mays
  unsure (1)..(2387): unsure at all n locations
  Clone ID: MRT4577_159186C.1
atcctgtactctctctagtttctctctccccccgttctccggtgtggtcgcgtgcgcattgagacgacgagtttctagagcgccgtaccgcgcacggctcccgagccccaccgcaaagcgccggaatcgtgagcgcgtccggcctcgcctagctccgcggcgagaggcggccgaggaggacgggcgatgtacccggtggtgacgggcacgccgccggcgcggctgccggcggcgtcgcgggtggacaaggccacgagccacctgctgcagggccccgactgggccgtcaacctcgaaatctgcgacaccctcaacgccgaccgctggcaaacgaaggatgtagtaaaagctgtgaagaagcgattgcagcataaggatccaaaagttaaattctttactttgacgttattggagacaatgatgaagaactgtggggaatatgttcattttgaagttgctgatcagcatgttttacaagagattgttaaaattgtccagaagaggcatgatatgcaagtgagggataaggctttgttacttctggattcatggcaagaggcatttggtggacctggtggcaaatatccacagtactactggtcatacattgaactaaagagggcaggagtaatgttcccacaacgtcctgtagatgctcctccaatatttactcctcctgcaacacatcaggcatatggttcacctagatatccttctggaagtctaaatgagagaatcacatctgatgctggaacgttgagctttgagggcttgaataatattagaaatgcaacggaactgctgtatgatatggtgaatgctttgaaccctgctgaccgcatggcagttaaagatgaaattattgcagatcttgtaaatcaatgtcgttcaaatcaacaaaagctcatgcagtttgtcagttccacaggggatgaagacctgctaaagcaaggactagaattaaatgatcgcttacagagtgtcctcacaagacatgatgctattgcttctggttctccattaccagttgagacaccgattagagaaccacagagagaggatccaaatcctgagccatctacaccaattacacatgataataaggctcaagttgaagaggatgaagatgatgagtttgctcaaatagcacgaagaaaaaacaaatctgtgatatgcggtgatgaggcatcatcgagtgctggtgatcaggccctggtacctgttgatccagcactttctgaagtttcttcggttgcgagcaatgcaatagtacctctcgacgcaacttctgttagtggaaccaggacgaaggagcaggatatgattgaccttctcagcctcaccttgtacagtcctgaatcatcagaagactcttcaactcagaaccaaaatgggagtcagccgagtgtcacatcaaatggatcagaaacactgccaagctatcagcctgctgtggcgaacggggcaaattaccctgccaacacccaggtttatccaacaaatcagggatatgttccatacaataactatgtggcaccatgggcccaaacgggaccggttgcacagcctggggcatattcgactcaaacccagcaatatgtgtcgagcaatccggcacccccatgggctatgcctgcaagtgccaattcagctaatcctttccagcctgtgacataccaaacgccaaacactcctcctgctgcttctgttgccccttcagctgctccatcagcgcaacatgttccatctccagcaccaacaccggtgcaaagttacaacttctctattcctcaaacatacactggttcgaacgtggctacaaatgctcgggtgaacggaaatcagcggccaaaagaaactccagtggcagcagccagaccatattacatgccggacaatttgttcggagacctgatcgacgtgaagagttttggcgccggaagcaagatcagcaggtctaccagcatgccgagtccaaagggtggtggccagcctatgatcggtagaaacaaataggcctctgctgtttaagatagggatgagcatatatttagctggtagccactgtcgtttggtttgatgtaaatttgctgtcttttttcacgtgtcaatttgcggatttgttactttggtcaatttcggagttgctgcatgtttaactttactagagaattgtagagaagtcattgctccagatgatcagtgacatcattatcgtgacggtttgatgacggaaaacattgaaaaaaacgggctcaacattttcaagtgacctgatgatgatccggcatattaatttaaaacgtgaaccttttattttgggttgtnnnnnnnnnnnnnnnnnnnnnnnnnnnnnnnnnnnnnnnnnnnnnnnnnnnnnnnnnnnn

SEQ ID NO: 64901 - DNA, 261 bp, Zea mays
  Clone ID: MRT4577_159187C.1
ccccacccgggcaccctgtccccactgctccagggctgtgcgcaccaactggtcggacaaatatcccatgccgctacataaacccgcgcgccatttgccgcctccccaagctacccagctacctacctacctaccttccccctgggcacgaacttagggaacccggcccatgcttcgggcgctcaacccgtccccgtcccagctccgcgcgcgcccggcgagccgcgccgtgccgagccggcgcccgcgcggggtctgggc

SEQ ID NO: 64902 - DNA, 811 bp, Zea mays
  Clone ID: MRT4577_159188C.1
ctcgaggccggccgggcttttgttttctattttgctgttcagctttgagggcttgaataatattagaaatgcaacggaactgctgtatgatatggtgaatgctttgaaccctgctgaccgcatggcagttaaagatgaaattattgcagatcttgtaaatcaatgtcgttcaaatcaacaaaagctcatgcagtttgtcagttccacagggtacgcctatcacactcagattatatagagctacattaccttgttgatttgttcctaatgtattgcataacctaatttatgaataagcatggtttacattgttgcaattattgatgtctactgctacttggtgtggacttgcagtgtatcataaaaataatatatggattttttgtgtgctcttgttgtcagggatgaggacctgctaaagcaaggactagaattaaatgatcgcttacagagtgtcctcacaagacatgatgctattgcttctggttctccattaccagtcgagacaccaattagagaaccacagagagaggatccaaatcctgagccatctacaccaattacacatgataataaggctcaagttgaagacgatgaagatgatgagtttgctcaaatagcacgaagaaaaaacaaatctgtgatatgcggtgatgaggcatcatcgagtgctggtgatcaagccctggtacctgttgatccagcactttctgaagtttcttcggttgagagcaatgcaatagtacctctcggcgcaacttctgttagtggaaccaggacgaaggaggcaggatatgattgaccttctcag

SEQ ID NO: 64903 - DNA, 3375 bp, Zea mays
  Clone ID: MRT4577_159189C.1
aactcgtcccattatttctctaaaaatccaacaaataaatccttgtgccagcagaaagtatagatcgtgttagctaaaagacatccgcgatgacgtcgacagcggtggggggcgagccggcggcgggccacgggtactggcggtggagcaaagccgactttttcccggagccctcgttccagagctggcgcgcgtacggcggcgcgctcttgtccactgggccacggctgcgcgaccgcgtcacgagtcgctcatccgaggccgttgaggcggggacgctgctcgcccagagcgagaaccccctccggcggtgcctgtcgtgggtggatctcgccttcctcggattcggctccgtcgtcggctcgggcgtcttcgtgctcaccggccaggaggcgcggttcgacgccggcccggccatcccgctggcctacgccgccgcgggcttctcggcgctgctctcgtccttctgctacgcggagctcgccggcgagatcccgtcggctggcggctcgttctcgtacctgcgcgtcgagctcggggacctggccgcgttcatcgccgccgggaacatcctgctcgaggccgtggtggtcgcggccggcctgggccggtcctggacgtcgtacctcgcggcgctcatcggccgcgacagcgacgcgctccgcatccacgtccccgcgctcgccgacggcttcaatctgctggacccgatcgccgtcgtcgtgctgtgcgccacttccgcgctcgccgtgtccggcgcgcgcctcacctccaccgtcaactcggtggcgtccgcggtcggcatcgccatcatcgcgttcgtgctggccgcggggttctcgcacttcgagccagccaacctcgcgccgtcattcttccccttcggcgccgcgggcgtcttccgcgcggcggccgtcgtgtactggtcctacacgggattcgacatggtggccaccatggccgaggagaccaagaaccccggccgcgacgtgccgctgggcctcatctcgtccatgtccgccatcaccctcgtctactgcgccatgtccctcgcgctcgtggggatgcagcgctacagcgacattgacgccaacgcggcctactcggtggcgttcgcggcggccgggatgaagtgggcgcgctacgtcgtggcgctcggcgcgctcaagggcatgacgagcggcctcctcgtcggcgcgctcggccaggcgcgctacaccacgcagatcgcgcgcacgcacatgatcccgccctacttcgcgctcgtgcaccccaggaccggcacgcccatctacgccaccatcgccgtcacgctcggcgccgcctgcgtcgcgctcttctccagcctcgacgtgctcgcgtccgtctcctccatcagcacgctcttcatcttcgcgctcgtcgccgttgcgctcctcgtccgacgatactacgtcgcgggaaccacgtcacccgcgcaggcccgcaccttcgtcggcttcctggcgctgatcgtgctgtcgtccatcgggctgtccgtgtactacaactcgggctacgctgctcggtggcccgggtacgtagcgttcggcgctttgtgggcggccggcacggcggggctggcgctattcgcggagcagcagcgcgcgcccagggtatacggcgcgccgctcatgccgtggctgccggccatgtccgtcgccacaaacctcttccttatgggctctctcggctccctcgcctacatgcgctttggcatctgcacggcggcgatgcttgtgtactacgtgctcttcagcgtgcacgccacctatgacatggtgcactctcaaggtcagacgacatcggcgcccgacgctgccaccgacggcgtggagcagaggaagataatgccggtgtgacacagaggatgccatttcttggttagttgagcaaaaggtttgttcaactgtagtgtagggtagacttgtgtttggtttgttcaattgctctagttaattggatccctcgttcagaatagctcatctgtatgaaaaaatggtttgtgcaaaagatggcattttctagggaacttttgttagtggaaccaggacgaaggagcaggatatgattgaccttctcagcctcaccttgaggcagtcctgaatcatctgcagactcttaactcagaaccaaaatgggagtcagcagagtgtcacatcaaatggacaagaaaactgccaagctatcagcctgctgtggccaacggggcaaataccctgccaacacccaggcttatccaacaaatcagggatatgttccatacaataactatgttgcaccatgggcccaaacgggaccggttgcacagcctggggcatattcgactcaacccagcaatatgtgtcgagcaatccggcacccccatgggctatgcctgcaagtgccaattcagctaatcctttccagcctgtgacataccaaacgccaaacactcctgctgcttctgttgccccttcagctgcctatccaactatgtcaacaccgtatgctgctccatcagcgcaacatgttccatctccagcaccaacaccggtgcaaagttacaacttctctattcctcaaacatacactggttcgaacgtggctacaaatgctcgggtgaacgggaatcagcggccaaaagaatctccagtggcagcagccagaccatattacatgccggacaacttgtttggagacctgatcgacgtgaagagttttggcgccggaagcaagatcagcaggtctaccagcatgccgagtccaaagggtggtggccagcctatgatcggtagaaacaaataggcctctgctgtttaagatagggatgagcatatatttagctggtagccactgtcgtttggtttgatgtaaatttgctgtcttttttcacgtgtcaatttgcggatttgttactttggtcaatttcggagttgctgcaaaaaaaaaaaaaaaaaaaattcagctaatcctttccagcctgtgacataccaaacgccaaacactcctcctgctgcttctgttgccccttcagctgctccatcagcgcaacatgttccatctccagcaccaacaccggtgcaaagttacaacttctctattcctcaaacatacactggttcgaacgtggctacaaatgctcgggtgaacggaaatcagcggccaaaagaaactccagtggcagcagccagaccatattacatgccggacaatttgttcggagacctgatcgacgtgaagagttttggcgccggaagcaagatcagcaggtctaccagcatgccgagtccaaagggtggtggccagcctatgatcggtagaaacaaataggcctctgctgttttagatagggatgagcatatatttagctggtag

SEQ ID NO: 64904 - DNA, 345 bp, Zea mays
  Clone ID: MRT4577_15918C.1
tgtaaaaatactgaatcaccatgctgtatacctgaaacaaatataatattttaaattgactgtgctttcattttaagaaataccatggactaattcaacactttttcttttgattaaaataaaggattttagcaggaacgtcctgcttattaatggtggcaaccaactggactgtcaatgcttcctgcctcactctgcggtccattctgatatatcttatgcatgatatataatatgtggcttctaagagctgtgataatacattagatatcacaacggaatgttaattagaatgggccaggataattcacagtgatacggatcgctgaaataactttcaatgac

SEQ ID NO: 64905 - DNA, 294 bp, Zea mays
  Clone ID: MRT4577_159190C.1
aaaaaaaaaaaataaaaaaaattatttcccgtttaaaaaaaccgtttaaaagcaacaaaacgcaaaaaacaacccaaaaaaattgcaacaaatttgaacatttccaaaaatagcggttttgaaaagggtgttaataccacaaaataaaagggcccttccttgacaaaaaattggaaaagggaactttgggtaaaataaaaaacttatatcctctttttttaaacaagttcaaaaaaactatataatttttttttttggggggacccttctttggaaacctaactcctaattcca

SEQ ID NO: 64906 - DNA, 406 bp, Zea mays
  Clone ID: MRT4577_159191C.1
gggttcgcgtcccctttgcttagccacgcctttagctcttttttcgggccccctattttcatttttttggccggggttttacagggtcatccctgggaaatccctggcgttccccactttattccccttgcggtccccccctttttgggccgttggcctattcccttttgggcccgttgcgatcgccctttccagcattggcccggcctttttgcccaatgtttccccccctgtatgggggctttaaaccccccgtttgtggtggtttttcccaggggggcgggtgcgttttccagcctttttccccctcttttttccgcttttttaccttcttttcttgcccctttctccgttttttcccgccacgtttttaccgggttgctcctttttgggttccgattggggg

SEQ ID NO: 64907 - DNA, 280 bp, Zea mays
  Clone ID: MRT4577_159192C.1
tattctcctggagtgaatttttgaccttgcatgaaatcgctggggggggatatcctggtgcgggtgtttaaacaatgtaaatgcttcttaaaaggattaaggattttgtgcagacagaacaccctgtgatgggttcccaatcaaggtcagtaaccatctctacaaacgacaaaatagcaagggctcttattccccatgattttcggtgcccaatatcactgtatttaatggaagatccagctattgttgccactgaacagacttatgagcgggggaacat

SEQ ID NO: 64908 - DNA, 355 bp, Zea mays
  Clone ID: MRT4577_159193C.1
ggtatagctgaacagacggtgtttcagctgtaaatgaaaacagggggtaagaacgcagagtacgcgggactttctgattgagcttgcggcgctcttctttctcgacgtatagacggagttctgtgagcagtatggaacctgcttgggtcttgatttgtaaatgggacgggtagaaagcttagtcaaataactattgcttttggcacttatggctgtggttgcatttataggcaacccagttgtacagatggtagtgtacaagaattttgctgtgctcttaacatggtcataagttatggtttgtttagcgaaaaaaaaaaaaaaaataaaaaaaaaaaaaaaaaaaaaaaacaaa

SEQ ID NO: 64909 - DNA, 660 bp, Zea mays
  Clone ID: MRT4577_159194C.1
ttttttttttttttttttactctataacgtaaaatggatgcagtatattatgagtacaaaaggagtctatcatcatgtaaaaaacatgttatttcaatttaaaaacatgttattcttttggaactacaaaacaaaaatgtcacgaacaagtagttggaagctctatatgtctaaaacaaagtaaaatgcacaagtgatatataaacttatcttttatgaagagtgaggttcttgaactctcaaaatacatttttatgtacttgagcttgatcttgaattaacattctagagttcttgaaattttatgtttagtactttgaagttattactttgtttcatctaagtacaaatgagctccaaatcaaccacatgttggtctctaactctccatttgcatgtcttccctcaaccctctctagctctatatccatgctcttcccttctctcaacttttccaatctaatatggcatcacaactcgatctagaacttgccatccccaacacatatcttaatcatcatccacatgaaaaccaagacatcaccaatcatggtggcatcaaatggcaaagctagcactttttagacaaaagaggtacacaaacaattttcgcattaagttttttcacaacgaagaatgacgtatcgattcaatcgttat

SEQ ID NO: 64910 - DNA, 801 bp, Zea mays
  unsure (1)..(801): unsure at all n locations
  Clone ID: MRT4577_159195C.1
cctcgagccggccgggaganagattactcaaagatgggcacaacccacacgtttccttaccctaaccgtgggcagccgccgtttcttcatcttcgtcgcagcggcggcgctccgtcttccgctcctccctcccccgacacgcgctcggcacgcaggcgacggcggcagcgctcaggatcgggctctcagcgacggcggggcagtcccagactcggcggcggcgtcaccggctccccctcccgcatctcgccaatcgcccgcacaacggtcggcgaccctgcgtgcgcgcttcccgctcccctgccgcctccggtggaccgtagacggcgctcgaccccggcggctgcactgcgcgccgcgtgcgaccggcgggcagcgggatccagctgctgctgctccacctaggcggctgcgtcgatttgggagcgcttatgccccaaacgaagtgttacccgtccgcttagggctgaagtgtgcgcttagtgacgctttttagaacctaggcaattaagcagtttgaggttctcatatatctctttggagatgcatccacatctgactttacataggcatcctatgtgtgccgagattattgaagaattccagaagtgccatctggatcaccctgtcaagaagttcttcggagagtgcacagaccttaaaatcaagctagatcgctgcttccgacaggagctttgaagagaaaggcaaactttgaagagagcaagagatttaaagaacagttgnaggcttacnaaagggaaattgcagagaaaacgaggaataataacttgggaggga

SEQ ID NO: 64911 - DNA, 435 bp, Zea mays
  Clone ID: MRT4577_159196C.1
accttcaaaaggcaaactctcaaacacacaggttgtgaaccattctttgaaaaggaccacaaatccatatgtttgaaaaatgatccgtgcttagacaggcacaagccacaagctccctcagaagaggttgatcatgaacggccatataccaacccccctgcatatgccaaattcactgcaaagcattgggaacaaaaaagggtgaaacataaactcttaaaatgagattgtctatccagatacggaagcctttttccaaaaaagataagttaacacttgaaatacaagatgccactttgcttgggcacattaagcgcctacccatctatgtgaaaggactcctttggggggtcctgagccacacctttaaaatcccctttaccaacaaccatgtgaaaataaaccttgagggggggatcctacttgataaacaaa

SEQ ID NO: 64912 - DNA, 1183 bp, Zea mays
  Clone ID: MRT4577_159197C.1
cttcatcttcctcgcagcggcggcgctccgtcttccgctcctccctccctcgacacgcgctcggcacgcaggcgacggcggcagcgctcaggctccggctctcagcgacggtggggcagtcccagactcggcggcggcgtcagcggctccccctcccgaatctcgccaatcgccttgcgccctcgcctccggtcctccgcacaacggccggcgaccctgcgtgcgcgcttcccgctcccctgccgcctccggtggaccgtagacggcgctcgaccccggcggctgcactgcgcgccgcgtgcgaccggcgggcagcgggagccagctgctgctgctccacctaggcggctgcgccgatttggtggcgcttatgccccaaacgaggtgttacccgtccgcttagggctgaagcgtgcgcttagtgacgctttttagaacctaggcaattaagcagtttggggttctcatatatctctttggagatgcatccacatctgactttacataggcatcctatgtgtgccgaggtaacttgctattttttttttaattttgtcctggccttgttcatatatatgttgttgcactactttagtaaaacttacaattatgatgtacttgtccagattattgaagaattccagaagtgccatctggatcaccctgtcaagaagttcttcggagagtgcacagaccttaaaatcaagctagatcgctgcttccgacaggagaaagctttgaagagaaaggcaaactttgaagagagcaagagatttaaagaacagttgaaggcttacaaaagggaaattgcagagaaaagcgaggaatgataacttggaacggaggacaaggccgtagaggctcttaatctgtgatgacctgcccttgattttgtgaaggatctgtcgagtgtttttgaatataatgtttctaaaaaatattatactcttttcctagtagcagctaaactttaacagcttaaagtttcttccatgactaccgaatatgtttccaatttgttcatgcatgcgtgcaggagtcctttgtatcaaatttggacaacccactcttgttgcctagtataagcagtttattggcgagttccttttatttatgctatttattctatgttgatgtaatgggtataacatttgaatttataaatccaaataaattgttctgt

SEQ ID NO: 64913 - DNA, 1120 bp, Zea mays
  Clone ID: MRT4577_159198C.1
cctcaggtttttccttatcccataaacatcacaacagttcagtttgctgttggaactacgatttccttgtttatgtgggccacgggtatccttaaaagaccaaagatttccggtgcacagcttcttgctatcctccctttggctattgtccataccatgggcaatcttttcaccaacatgagccttgggaaggttgcagtgtcatttacacatacaatcaaggccatggagcctttcttctcagttctactttctgcaatgttccttggcgagctgcctactccttgggttgttttgtctcttcttcctattgttgtggtgtggcattggcatctatttctgaagcttcttttaactgggctggatttttgagtgcaatggcttcaaatgtgaccttccagtcaaggaatgtcctcagcaagaagcttatgctgaagaaagaggcatctctggacaacatcaatctcttctcgattattacagtcatgtcattcttccttctagctcctgtaaccttgttgaccgaaggtgttaaggtcactcctacttatctgcagtctgctggtctgaacttacaacaagtgtacacaaggtctttgattgccgcattctgcttccatgcataccaacaggtgtcatacatgatcctcgcaagggtgtcaccagtcacccattcggtaggcaactgcgtccccaactaaatcaatcattttatcctcggttctgttcttcaggacccctgtttctcccgaaatcaaatctcactaggtctgcatcttttccttttgctactcttaactattgtattccgtcacggctcaccctcacgaatatgaaacattaaatttgtgcaccgggatcgctcttgctggagttttcctatactcccaattgaaaagacttaagcccaagcccaagactgcttgatcaaaaacatttgtaggtccattcaatagaactttggaagttatgctatgtcattggagtgaccagtgagtcccgtagttaaaataataagcctccccgttttgttaccagttgggtggaaaatttatgatttccttgccagcatttttggacggatttgttcgtgtattaaaaattttgcagggagggtttt

SEQ ID NO: 64914 - DNA, 520 bp, Zea mays
  unsure (1)..(520): unsure at all n locations
  Clone ID: MRT4577_159199C.1
cgcttgtccttggcgcgcccctcctggccctgctgctgctggcggcggcggccatgatcgccccgtcgccggccaatgccgccgtgtcgtacgaccacagggccgtggtcatcaacgggcagngccgnatcctcatctnggggtccatccactatttttttttttacgccggagatgtggccggttttggtggggggggtcaaggacggtgggctggacgtggttcagacgtacgtgttgtggaatgggtatgagccggtgcgtgggttgtactagtttgtgtatgggtatgttttgtttttgtttgttattttttgttggtttgcttggtttttttgttttagttttttttgggttgtgtagtgttgttttttttttntttttttttgttgtttttttggttttgttttttttttttgttttttatttgggtgggttgttggtttttgtgtttggttttttttgtttttttggtttttgtttttggtttttttttttttgtgtttttttgtgtgtgttt

SEQ ID NO: 64915 - DNA, 686 bp, Zea mays
  Clone ID: MRT4577_15919C.1
ccggccggggcccgccgcccgcgtgctcctccctcgcgcccgccccgccccgctccgcccctatctatatccattcccgctcgtccccctcaacaaccctcctcaccgcgcactcgtgttcgtgtcatcccgcccgcaggccgcagtccatggccaccgccagccttctatggaggtcgtggccaaggctaaccatgtgacggtcatggaccatgagatgaagtcgaggagggagcacttcgtgcctgatcccatgaggatccccaggacaatcatggagcagtggaacccgcagattgctgacagcctccctgatgcattttgtggaggatgggttggattcttctcatatgatacagtgcgttatgttgaaacaaagaagcttcctttcagtaaggcaccacatgacgataggaaccttcctgacattcatttaggcctctatagtgacgtcattgtgtttgatcatgttgaaaagaaaacacatgttattcattgggtgaggacagactgctatcgttctgttgatgaagcatatgaagatggaagaaatcggcttgaagctttgttatcaagattacattgcctcaatgtcccaacactttcttctggttctataaaactcaatgttgaaaactttggcccagtaatgcaaaaatcaacgatgtcaagcgaagaatataaaa

SEQ ID NO: 64916 - DNA, 589 bp, Zea mays
  unsure (1)..(589): unsure at all n locations
  Clone ID: MRT4577_1591C.1
gggtttaaaatatgtacatcagaatttaagtagagaaataatcaatttgccatgctgccacattgcacgatgtgtttagctatcaagagattggttgtttccagtggttcctgtactagaatatattgttccacccagtctttagtcaaatgaaatttttggtgtttattgaattgcactcactttctcggttctttttttatgtttatcaatattgaattgacctctgttcctcagtacttgaaaactcagttttcctttcacatgtttttttagagtactgtgaaaaatacgccaaaccagaggatgctggtgtcagcccagaagacgagtccagtgacgaagagctgagtgaagaggaaaatgactcgggtgatgaggagataatgggcaaaccagacacatagtcgagttggaacctagatctgtaatctgcacacgatgtttattgcagcaagtgcaattaaatagtccatggatgttcccgtgcagtctgaatgccattgtaataaactgcaatttcatgttcgcttatcttatttccatctccagttgatcaaaagggaaaaaaaaaaananaaagcgggcc

SEQ ID NO: 64917 - DNA, 157 bp, Zea mays
  Clone ID: MRT4577_159200C.1
acgagcccagactgccaactgcgaccgatagtaatctctatccggaccccgtccgggttggttggtgtttgaactacttttttcgcctccgcaaaagcttcttccctaccgaaagatacctattgttcggtgccaccaactagccaatattgggagg

SEQ ID NO: 64918 - DNA, 241 bp, Zea mays
  Clone ID: MRT4577_159201C.1
cgcacgcgtgccgggactcatagacgaatacatggagtatagacatcgacagacacccttggtgctcgtactcccgtcgtcgggcttcataggcatgtatacacgactcaaacggacggcttcttcaactaggcgtatgcttaacgcatgactatatatcacacagtctactaatacttccgtctctatcatagcaaaaggtactatcgtcggatgacaatgggtttgacccgtgggcgct

SEQ ID NO: 64919 - DNA, 626 bp, Zea mays
  Clone ID: MRT4577_159202C.1
gggtccctcgggctgccctctcaaaccctatcttgttagctttcctccgccgttctccctccattctggggggggggggggcataccgtgctccgccacctctgctgagagcgagaagagatggcaggcaagggggatgggccgggaatcgggatcgatctcgggacgacgtactcttgcgtgggggtctgggagcacgaccgtgtcgagatcatcgccaacgggcgggggaaccgcaccacaccctcgtacgtggccttcaccgactccgagcgcctcatcggagatgcgggcaagaaccagggcgccatgaaccccatcaacaccggctttgatgccaagcgtgctcattgggagggagggtactgatgcctctgggcagagtgatattaagcggtggcccttcaagggcattccagggcccggggagaagccaatgataggtgttcagcacaagggggaggagaaacaggttgcggccgaagagatctcctctatgggtctcatcaagatgcgtgagatcgctgaagcttaccttggcagcactatcaagaatgctgggtggacgggccctgcctacttcaacgactgacagagggggggcacaaagggtgcgtgggggattg

SEQ ID NO: 64920 - DNA, 458 bp, Zea mays
  Clone ID: MRT4577_159203C.1
agacactgtgctccattgtccacaattatagccttcggcacgccgaagcgacaaacaatgttttgctagaagaatttctggactgtgactgaagttattgcggccaaaggcttcgcttcaatccacttacaaaaatattctacagccaccacaacatatcttaaattgccttgcgctggcggaagtgggcctagcaaatcgaggccccatctttgcaacggccatgtgggctgtattaactgagtgagagatgaacggtgtttctggtctcttgcacattttttacaactttcacatttttggactagctctgctgcattcgaagctaccttcggccagtaaaattcttgtcgaaacacttttcccagcaagggcctactacacattgtgagatccacatatacctgcgtgtatctcttttattaattcaataccttcaactcttgataaacacttga

SEQ ID NO: 64921 - DNA, 325 bp, Zea mays
  Clone ID: MRT4577_159204C.1
cccactcgtccgaaaaaaaaaaaaaaaataaaaaaaaaaaaaaaaaaaaaggaaaaaaaagaaaaaaaaaaaaaaaaaaaaaaaaaaaaaaaaaaaaaaaacaaacaatataaaaaaaaaatagataacgcaatccaaaattacaacgatttacaactcctaaacaggaaccaaaactgaattaaccgaacctcttaaaaaaacatcacatactggaaaaaaccaaatctttaccaaactaaaaaccctggcaaaaaacaccttaattaccagctttaaaaaaaccaaaaagacccatacccatattcataacaaacattaacca

SEQ ID NO: 64922 - DNA, 301 bp, Zea mays
  Clone ID: MRT4577_159205C.1
gggaacagggtatttgcccttgcatcggttctcttgggtagcaggagacattaaacgctcagtcccaaggggacatggcctggctttacaacatgggttggggcatttggcccatctaacttaaactggtcacgcttcataccactgggagggaactggggatcaaaaacctggttggaaaggcccccgggcaaggggcaatgtacgtcacctttttcctttggagggcaacaccatcaacatgaatgaatcccgcaacattgctagaaattatttcttcagggtccttaacatagaaaaa

SEQ ID NO: 64923 - DNA, 230 bp, Zea mays
  Clone ID: MRT4577_159206C.1
tcctctagagcgggcgcgctctttttttttgttatgttgttctcccaacgagccacatccgacgcaacatttgaaaaaatgatttggtttgggcacaaaggccaccaaagattttttatcggttacaacaaatacagatgttgcgccaagttaaatctttctgctaacaaattaaagcgaaggagaatggggcaaaccgaccgcgtggccggacgcgtgggtggaaccca

SEQ ID NO: 64924 - DNA, 339 bp, Zea mays
  Clone ID: MRT4577_159207C.1
agcccccccctttttttttttttttttttcttggcttccttccaaagaagtttttttatagagtgctgagtacttattttttctatcctctttttttatttaaaacaaatattaattcccctattcccataattaatggtttttttatcccattctttttttaattgttccaccgtccattaataaatttgtttattccccaattgggggattcaagaattccataaattcctcctttaatcatttatttttcccatgcatttatttatttaaatttttctctcctttatataatccataaattaattttttagaaaataaaataaactgtccatttct

SEQ ID NO: 64925 - DNA, 508 bp, Zea mays
  unsure (1)..(508): unsure at all n locations
  Clone ID: MRT4577_159208C.1
acgcggccttagcgtaaaaaaaaaacaaaagagtacaagctttaaatttttaaaaaaaaaaaaaaaaaaattaaaataaaaaaattttaaaaaaaaaatttttaaaaaaaaaaaaaaaaaaaaaaaaaaaagttttttaccccttgcccgtgacccccctgggggggatttttgccgttttccttccccctgcgggccgctcgggcgtgcttttgggggcccccattcccccttttgggggtggttttacaattcccgggccggctttttacaccttgggttttgggaaaaccttggggttcccccttttatgcccttgggggggtttccccctttctccagggggccnntttngngntgggccgcacccggncccctttccccnngnnnnggnngccggntgggggngtggcccccccctcgtggggcgctttttgcccccggggggggggggttccccgccgggggcccggtcactttgcgggccccctggggcccccccccttgg

SEQ ID NO: 64926 - DNA, 293 bp, Zea mays
  Clone ID: MRT4577_159209C.1
agtctgaccaatgtaacactttacattcgacacgcactactgtcgcagtagctacgagggctaagacgattttacatgtcgtagcgcttcttgtacttatagcgagcgcaatatatgcggttatcagtgcacaatgctcacacgctcctagtgcaacaattgcagaactacatcgtacaagctcttgaataggcagctaacgcctagctgggtgagtgcttatgccagatgatgcgcttgatgcaagtgtcttagaccaactattttgcgaattgagaaaagaatcttcggta

SEQ ID NO: 64927 - DNA, 350 bp, Zea mays
  Clone ID: MRT4577_15920C.1
ggagatctttttggtagatagtagaagtgcgttcctgttttcaccttcctttactcagctgactagtgcttcccttcgttttctagtaactgggtgtagaaatcacgtgctgcggctttacagtttttaaactattttagatattctgaaacatcactgtcttgccagagtaccaacactgtcatgtgattgatgccgccccctctagacctcacccacgcggacacatgcttcccgtacctttgggtctgtgaggttctgtcaagcgctagtgctaacgccgttctgtacaacctaactcactggcaagaacacagtgttggtgctttcgaccactagaacaaactttt

SEQ ID NO: 64928 - DNA, 217 bp, Zea mays
  Clone ID: MRT4577_159210C.1
tgcatatatgcctgaatataaataaatatgaaacggcgatatggaatttagaaatgtcatcactcacattcactctagtgagcacaaaggttaattaatttccgtatcgccgtttcatatttatttatattcatgcatatatgcctggcaacaattcctgtaataacgtcgtactcgatcgttctagcactaataatatattatctattattgcaaa

SEQ ID NO: 64929 - DNA, 204 bp, Zea mays
  Clone ID: MRT4577_159211C.1
gaaatattcttcccgtcgaaagacggagagaggaaaatggacaagggcaaggcaagagagaggcgtcctcgtttgatctgctgccgcagtgcgaacacgaacacgaacatcatcgccggagttttaaagatgttcctcatggactggttcaacggggtactggcattccctgggctttggcaggaggatgctaagatcctctgt

SEQ ID NO: 64930 - DNA, 351 bp, Zea mays
  Clone ID: MRT4577_159212C.1
agtatcttgattctcgtatttttatctgattagaaataccttggttccaattccttttattaatgcaatgcattacaaatgttattagaaataccctgaacttgctggatttgatttttggtgtatgcgactagtggacaaacggatatatccgcatatatctgtgtatacgggttttttttatctgtggcggttaacgggtatgtatggattcaggtattggatttaagtcgtgggtatggatgtccagagccattatctgttgatggtttacctgttgtcatccctagtcgtgagccatatacactcattcacatagttgttaaggcggtaaggtgactgacccccttt

SEQ ID NO: 64931 - DNA, 613 bp, Zea mays
  Clone ID: MRT4577_159213C.1
ctctcgcccgcgccgccgccgcctccctgccctctttgccgccgccgccgccgccgccgcccgttgtcgcggacgcctcctcctcgccgaagagatgacgaagcgcaccaagaaggctggaatcgttggcaaatatggtaccaggtacggtgccagtctgcgtaagcagatcaagaagatggaggtctcccagcactccaagtacttctgtgagttctgcggcaagtttgccgtgaagaggaaagcagtcggaatctggggatgcaaggactgcgggaaggttaaggccggtggtgcctataccatgaacactgcaagtgcggtcactgtcaggagcacgatccgtcgcctgagggagcagactgaagcttgatcgcggtcaatctgacaaaggagcctttggattttgtagttcagacgagactcattcgacgcaatgtagcctaaattgacagcatacaatgttatttatcggcttgttgggttctgagagtatctggctacgttacaatgtgtatctcgtttatgttgcttagatgatcgtctgactgtactctttgtgcgtgtcgttgattcttgaatcttaatgctattgcgatctgttattcgatgt

SEQ ID NO: 64932 - DNA, 2165 bp, Zea mays
  Clone ID: MRT4577_159214C.1
ggtaccctcgggaaagccattggcgtcacgtcgtcgcctctgcggaaaccggcggtccacgggaaaggaaagaggaaacagggaggcgacgccgtcacaattcgttctcgcgatttgcccttctccacctccccgtccatgtcgcgggaaatcacgcgcggcgacgctggattcacttagatccaacagggtaatcggcacggggcagcctctccacccattcccgcagccggttgggcgagtcgtcggttcagataatagactgggcgtgtggatccaagaggtttgatccctttaatttggattgaagtgccagctttcggtcaggaaggtgatgctggatgatgctgacggactttgaaagcataccggttcaaagaagtgttgcctgtcaccatgaggctcaacgttgggctcctagtgcccttgatggcacaatactccgcacccacatgggctactttagttgctgggttcttcatgctgcttgcgctttcgctctccacgtacctgatatttgagcatctctcagcatacaacaatccagaggaacaaaaatttgtactgggtgttattctcatggtcccttgctatgcaattgagtcatgtatttctttgataaatccaagtacaagcgtttactgtggcatcctacgtgatggttatgaagcatttgcaatgtactgctttggaagatatattactgcatgtttaggtggggaagataaaacaatagcctttttaaagagggaaggtggctctggttctgggcagtctctactgcatcacacgtccgagaagggaatcatacaccatcattttcctgtaaattatgtattgaagccctggagactggggacgcggttctacctgattatcaaatttggaatcttccaatatgtgatcataaagaccctcacagccaccttatctcttcttctagaatcttttggtgtttattgtgatggagaattcaatttacgatgtgggtacccttactttgctgctgttctcaactttagtcaatattgggccctgtactgtctagtagcatggtatacagccaccaaggacgaattggctcctataaagcctctggctaagtttctttctttcaaatcgatagtgttcttgacttggtggcaaggtgtggtgattgcaataatgtatgctttgggccttcttagaagccctttagcccagagcttggagttaaaatcaagcattcaagatttcattatttgcatagaggatgggcattgcttcagttgttcacctctatgtgttcccagccaagccctatgcactcttaactaatcagtcacacggaaacatttctgtacttggggactatgtatcctctgagcccgtggacccttttgaaataaaggaaagcaaccggcctaccaaaatgaagcttccacagttggaaccagatgagagaagcgtgacaaacataaaagaaagtgttcgggactttgttgtcggcagtggtgaatatgtgatcaaagattttaagttcactgttaaccaagcagtgcgaccagtggagaagcgcattgataaattgatgaaaaagaatgataagagtaagaaaagccaggacgacaactgggtgagtgcagcaacaccagagaggcctgttcgtgggattgatgatccattattaagcggaagcgcaagtgacagtggtgtcacaaagggcagaaaatatcgcagagttgtgagctcagttactgctgtggacagctggggaggtggtgatcaagcttctgacggatatgagatcaggggtcgccgctgggctgtaaaaagctaacgatttacatagcgagatggtaaattcgaaccatatcgcgtggggggaaaaggacttttaggtttgcaactgtttctgcgatactggccatttaggagccttcgcaagttcagattgtctttgtataggtacttaggtagctgataatgatatgtaacctttttgcgtagattgtttaattttcttttctttttcttggtcgagtcgtactgacatttggtattgcaaaatttgaaagtacaatagtttttttcattctttggaaatggaaacagagttcagcgagtgtgtccatttggacggatttgtatagtttcgttacacgcttacatgcatcattgatctg

SEQ ID NO: 64933 - DNA, 1275 bp, Zea mays
  unsure (1)..(1275): unsure at all n locations
  Clone ID: MRT4577_159215C.1
ctcgagccggccgggaaactgtaccgcattgggctccttatcttactggcgcccaagctctccacgccagccatctcccctccatcttcccttctgcagaaatcctaccatggccgccctccctggtgctcaccccagtcgaggtctctccatggccggctgtagttccctggcgcccctgctcctccctgttctagctcggtgctcagagccccagcgccagtcgcccttctgctcccttccccatggcgcgcttgctccctagacggcgctcggattcctccttctcggccctctccatcgcgccctgctcgcccagccgcgccgagctcggcctcttcttctcccctgctcctatggcggcgccggtcggatctccctggcgcctcaccctgctctctatctgcccatgaagtcgcctagcccaaccgtgcctgctccctcactgtgctcgccatggtcgccgcctccaagcttctccctgctgcgcctgtggccgtcccctctgctcgccacgacgtgtcgagctcccgcgtcgagtccttttcctgctcgcccgcgatgcccggcgtcctgcctgctctgctcgccatccgtccatgcgtcatgcgtggagcaacagaggaaaatctgcagcctaagccttggtcaatgtctgtgtggatttgggaaagaagactgaagttggcttgtgtctcacgtctggtgctcagcgaaaagcccgaacatgagaccgtcatcgatccagccgtcgtccatctcgccaacatattttatccgccatggttcagctcgccatgggtctggtcatcgtccctgctttgccttccccaagcagccgtgtggatggcctcgctcacgtcgtcattcttacaaatatcgaatctacgtaactctgatcctcaccaaccatgtgatgtatcatcagacttctatgcgcaatctcgtcgactgtcgcgcccctactcaccgtcaacccgctcggacatcgcctcgacgcgcaacaaccatcatagcgtggggattcagctgcgtcgtttctttttcggagcgcaaatcgcttgatggtgaagacagtggagttctaggtcggtgctcgccaaatgtttgatggaacgtctaaactgatgatcgttgccgattgtgggaattttcaagttggtttgatcgcggtaaggactcgnggtttatgttctttttggtttacctccaatgaattatggtgagctggaagtgtgtaaatgcttgttagattaataagtagctggggcatat

SEQ ID NO: 64934 - DNA, 787 bp, Zea mays
  Clone ID: MRT4577_159216C.1
gccggccgggatccaaattggtggagctcctcgctctccttagcccttaattaccatccatcgatcgcgaaggaagggtgctgaggagggtttcccatgcaccctcgttcctactagccacaccagctatgagacaccccggctacttccttcttggtacgtactggtggcggtactgaaaactactccgcagagatacacgagaagacgtatagttctgtacctagccaagccaagctacctccctcgctcgctccacacctgcctgctgccgggcatgggaacgcgagcttgccgtcgtcaccaggcggagagcgccgccggccggtcgcgctctcgtcctcgtcccccgtgttccgcggagacgatccgagggcttccacttctcttttggcggcggcgtcgtcgccctcctcttcctcctctttgctgctatctccacaaggtcagtttgtctgtgagcagcctgctgccaccactgcggccgagggcgtgagcctagatttgcatctataattgtttccttttggtcgtctatgctgcttttagcggacgacggtggtgtgagcctagattttcacttgaattcagatcgtgccttgtttcctgacacgggtgcacaagaatttcatctatcgaagtttcggaactttttgtctgtgtgcatacacatatacagaaagattcagaccatatgttagggtttggattttgtcgctgaattgaacacaagaaatcaatgcatcacgtgtagatttcctggaaaaaaaaaaaaaaaaggccccta

SEQ ID NO: 64935 - DNA, 323 bp, Zea mays
  Clone ID: MRT4577_159217C.1
gggaaaacgaaccaatttttttatacaaaagcaccccgcccggggcttaatggaacaaaacgttatcgggagggggccggaacccttggcccattacgccttttggtaaaagccggtaccaaaccatacccccctttttaggggggcccggggttcacgctttcttttttttaggtcaatttgggaggggggccaaattctgaggcaccaccgggaaaaaaaagatagggggggcgcacaaacacactaatggcccttttccaaggggttggactccgggcccaaaaaaaaaacctttgaaattcctttggtggggaaggggg

SEQ ID NO: 64936 - DNA, 1498 bp, Zea mays
  Clone ID: MRT4577_159218C.1
tacctcgaggccggccgggccttcagctcctcgctctcctcagtccttaccatccatcgatcgcgaaggaagggtgctgaggaggctttcccatgcaccctcgttcctactagccacaccagctatgagacaccccggctacttccttcttggtacgtactggtggcggtactgaaaactactccgcagagatacacgagaagacgtatagttctgtacctagccaagccaagctacctccctcgctcgctccacacctgcctgcatgggcggcggcggcgaaggcagagacagcggcggcggcggcggcgcggcgagctttcgggaggcggctcgtgacttcagcaacgtcgcgtccttctccgagcttccgttcctgcagcgctccgccgccccgccccgtggaagcccccacaactccggcatccgcatcttcggcatcgacgtcccgcactccccaccggagagaaactctaataaagatgccacggccgctactactactaccgccgccgcttccgccacgcagagcagcggcggcggcggggccaccaccgacagcagcagcagcagcagccgcaagttcgagtgccactactgctgcaggaacttcccgacgtcgcaggcgctcgggggccaccagaatgcgcacaaacgcgagcggcagcacgccaagcgcgtgcagatgcagtccgcgatggccgccgccgcagccgcggcggcggcggctggcggcgcgcaccaccaccacctactcggctacccgcagcaccgcttcggcgtcgcaggccccacggtggcgacattgtacccctcgtggccaacaatgaggcctccagctccagcaggcgccggtgccggtgccgtcgccatcggcggcccgcagttctacagcgggatcggctcgatcgcccagccgatcaacgggagccccctcctcacggctgccgggctctggaggggcccgccgccgcctgctgccgggcatgggaacgcgagcttgccgtcgtcaccaggcggagagcgccgccggccggtcgcgctctcgtcctcgtcccccgtgttccgcggagacgatccgagggcttccacttctcttttggcggcggcgtcgtcgccctcctcttcctcctctttgctgctatctccacaaggtcagtttgtctgtgagcagcctgctgccaccactgcggccgagggcgtgagcctagatttgcatctataattgtttccttttggtcgtctatgctgcttttagcggacgacggtggtgtgagcctagattttcacttgaattcagatcgtgccttgtttcctgacacgggtgcacaagaatttcatctatcgaagtttcggaactttttgtctgtgtgcatacacatatacagaaagattcagacaatatgttagggtttggattttgtcgctgaattgaacacaagaaatcaatgcatcaggtgtagatttcatggaaaaaaaaaaaaaaaaaaggccccta

SEQ ID NO: 64937 - DNA, 586 bp, Zea mays
  Clone ID: MRT4577_159219C.1
cccctcctcgagtttttttttttttttttttttttttttttttttttttttttttttttttttttttaaagggaaaccctacctttatatgaattaagccccccttttgggggcccccaaattggaatcccacttctatgtttcccggtccaacaaatgggaaaaacctagccttagcaaaaggctttaaccagcccggggagggcctcaaagcggcccttgggcttccccctgttcttgacccctctgcccttgggcgttcccctgtttttgacccccccggaggccaaggttttggaacagggggcaggaccccctttacaggccgggcaaggggggatccaatttcaggaatatgaaacataactttttcctgccccccctcaactatgggccccaaaaccttgaacaaaaaagcaaactcgttttcatccccagaacttatttttttaaaaaccacttgcaaaaaaaggacccacccttggggaacaaaactattgggaaaacaagttatggcctccacataccccagggccaacgcctttcttagggccggaaaaaacctaaaactcatgtccttgggggg

SEQ ID NO: 64938 - DNA, 2226 bp, Zea mays
  Clone ID: MRT4577_15921C.1
gcatctagggttttcagttccctcagtgtgaaggtgtacatctttcggaagtgattcctttagcaagcagggatgcaataaaggctacatctgcgtcgcgcctcgccctccccgactccactccactccactccactcgcccgcgcccgccgcccgcgtgctcctccctcgcgcccgccccgccccgctccgcccctatctatatccattcccgctcgtccccctcaacaaccctcctcacggcgcactcgtgttcgtgtcatcccgcccgcaggccgcagtccatggccaccgccagcctcgcgctctcgctgcgcctcgcgccgtactcgcacccgctgagcctccgccgccggggggccgccggcgtcacctgccgcgccaccaccgccacgttccaccagcttgacgccgtcgcggtgagggaggaggagtccaggttccggacggcggcggcggagggccgcaacctgctgccgctcacgaggtgcatcttctccgatcacctcacgcccgtgctcgcctaccgctgcctcgtcaaggaggacgaacgcgaggcgcccagctttctattcgagtctgtcgagcaggggtccgagggcaccaatgtggggaggtacagcgtggtcggggcgcagccttctatggaggtcgtggccaaggctaaccatgtgacggtcatggaccatgagatgaagtcgaggagggagcacttcgtgcctgatcccatgaggatccccaggacaatcatggagcagtggaacccgcagattgctgacagcctccctgatgcattttgtggaggatgggttggattcttctcatatgatacagtgcgttatgttgaaacaaagaagcttcctttcagtaaggcaccacatgatgataggaaccttcctgacattcatttaggcctctatagtgacgtcattgtgtttgatcatgttgaaaagaaaacacatgttattcattgggtgaggacagactgctatcgttctgttgatgaagcatatgaagatggaagaaatcggcttgaagctttgttatcaagattacattgcctcaatgtcccaacactttcttctggttctataaaactcaatgttgaaaactttggcccagtaatgcaaaaatcaacgatgtcaagcgaagaatataaaaatatcgttgtccaagctaaagaacacatcttggccggtgacattttccaagttgttttaagccagcgttttgagagacggacattcgccgacccctttgaaatctatcgtgcattgcgcatcgtaaatcctagtccatatatggcctatctacaggcacgaggttgtattctcgtggcatcgagtcctgaaattcttacccgggtacaaaagaggacaataatcaatcgtccgcttgctggaaccataagaagaggcaaaacaaaagcagaagacaaaactttagaacaattgcttttgagtgatgaaaagcagtgtgctgaacatattatgctagtagatcttggccgaaatgatgttgggaaggtgtccaaaccaggttcagtaaaggtagagaaattgatgaatatcgaacgatattctcatgtcatgcacatcagctcaacagtaactggagagctacgcgatgatcttacgtgttgggatgcgctacgagccgcattgccagttggaaccgttagtggcgctccaaaggtgagagcaatggagttgattgatcagctagaagtgagtatgcgtgggccgtatagtggtggttttggagggatttccttccgcggcgacatggacattgcactcgctcttcgcactattgtcttccccaccgcatctaggtttgataccatgtactcgtacacagacagtaagtcccggcaggagtgggtggctcacctccaggccggagctggcatagttgctgatagcaaaccggatgacgagcaccaagagtgtataaacaaggctgcaggtgttgctcgtgccattgaccttgctgaatcgacatttcttgaagagtagtctagtctaatgaaggaaatgtatgtttaagttctctgtataattatggattgtcctagaaaacaggctttcttaggccgaataaaaactcaactgtaataaagttaataaatggacaactttagctataaaaaaaaaaaaaaaaaaacggcagtttaaggcggacaatcaagaaaagcatgaaaaaacatccaatattgtgatgttc

SEQ ID NO: 64939 - DNA, 197 bp, Zea mays
  Clone ID: MRT4577_159220C.1
gcctcatagggtaagatcctcaactccaagatcataatggagcagtatactcttacgtcacgctgcttcagcttcattaacttctactccgaaaactccatactcaattccatcgacaacataaactgtaatgaaatcaactttcttataatcagatttatatacacccaataacgttgcgatagcatttgcagcag

SEQ ID NO: 64940 - DNA, 469 bp, Zea mays
  unsure (1)..(469): unsure at all n locations
  Clone ID: MRT4577_159221C.1
ccgggtncgacccaacgcgtccgaaaaaaaaaaaaaaaaaaaaaaaaaaacaaaaaaaaaaaaaaaaaaaaaaaaaaaaaaaaaaaaaaaaaaaaaaaaaaaaaaaaggaaaaaaaaaaaaaaaaaaaaaaaaagaaagaaagggggggggcggcgaaagggccccaagctaacgcccccgaactggaaaaggctgggcgctcggagggggagggcgaaaggaaaaaaacgggcgggcgccaaaaaagggaggggggggaaaaaccggggggtcgccagaaggaaacaatgggaagaggagcacgctgacggaggtgggcaaaagagcggaaaagcccaacgcggaaggggtggcgaaaagggggggcgcacaaaaggggaagggggacgcgccaacaccgggggcaaaaggcacaggggaaggggcagtaaccccaaggcagacccttaaactgaaaagcgaaaaagg

SEQ ID NO: 64941 - DNA, 659 bp, Zea mays
  unsure (1)..(659): unsure at all n locations
  Clone ID: MRT4577_159222C.1
agcagtggtaacaacgcagagtactttnttttttttttttttttttttttttttttatttttttttttttttttttttttttttttttttttttttttttttttttttttttgggttttttttttttttttttttttggaacccatgttttgttaacgtttttttttaaatgtaagcattttttaagtttttgtcgaaaaacttttaataaaaaaatgtttggtttgggactgttacggggaaaaaaaaaggggggtttgcccaggaagagtttatttaaacaagtttgggggggaattttttttttgaatgttgttgttgttaaatgggcaaatgggcccgtttttagcttaattgagggaaattttttgcccattttttttaaggggctttaaaaacagcaaaatgcattccaaaagctttacaagattaattggtggcaattttttttcggggtgcctttgggtttttatactcaaatttgggcccttttggaatttgaaatgttttttttgtttacaaccacttcccgattggatttttttaaatttttggggggtatttaaaaaggttggttttgccaattcattcccaattggccccaaaacagggggccttttttgtttccgggctctttgggttgtttcaattgtttaagg

SEQ ID NO: 64942 - DNA, 881 bp, Zea mays
  Clone ID: MRT4577_159223C.1
agactcccgacccgatctcccaccgcgtcgggaactcgggatcctcctgcccgcctacccgcccgcgcgccgccgtcccgttcgccagaaccatggacggcatcgagggcctgctggcccgcgacttcggcgtccggccgcagggcaaggccgcccccatggccggcgcctcccgctccaccggatccagcgccggcgccgacgcatgggccagctacggcagatccaccccggccccctccgcggccccgtcctacgacgacctcttcggcgcctcgctcttcgactcgttcaagggccccaccaccaccacaaccaccaatcccgccgcgccttcgcctgcccccgcgtacgacgacgacatcttcgacgcggtcccgggggctgcgcccctccagctccgcgtccaccaccgcctcctccgcgccgcggtacgacgacggcgtgttcggctcttcggcggccccggcgtacgacgacgtgttcgccaccagcgcccgctccgcgccgccgcctcccgcttacgacgacgacatcctcggcgggttcgggagcgcgctgccgcaggcacaggccgaggagaggaggaggccggtggctgtcgacgacgacgacctgctcggggcgttcgggaggagcccgtcagagggaaagaggaagccggctcctgcgcaggcggaccgagtggggagcacggggttcgatgatctgatccctggattcgcggggagcagtccgccgagtagtacgaagtctaacgacgataacaaaatgaaggcaccagttccgacttctaaacagagagctaggatgggagatgggccatttgttgttctagaaacaggctcggtatatacacccccaggaaggtccaccgatcc

SEQ ID NO: 64943 - DNA, 681 bp, Zea mays
  Clone ID: MRT4577_159224C.1
gtcaggatgttaaaaagatcaatcattcatgtcgcacagatcaatcaagaacgatgtcataaatataacaaagatggcagatgtcatgccataactcatgtcaatatatgtgcatgctgaaccaataacagaaaacacaattgaaaaaacaaaatcatcagaacacttggcttctgctataaaaatgcttcttatgcttctttgtagcctatacatatttcctccatatgcttttatgattccgggatggttgatgaggtgctggatgcagaggattcggggggtgcctgcatgagacattgtgatgttaaatgttaactatagatcagcatagcaagtgaactaaactcattttaactaacctgaactcaattaaaactagtgtcttgtatatgtcctaaaaggaaggacttatgatgtcgtaacaaagaacaattactttcaactatatagataacatgaatgttcacaacaaaatctattggttgtctccaccctgaattgtttagcaaaaatattccagaaatttttccactacaactgaccattactagcaactgacaaatattgttatcttaacagtgctcaattaattattttgataagcatttgcatgtaatgatattttaatgggagtgaacatcacaaggataagggtgattaaacagtgtatattgatgc

SEQ ID NO: 64944 - DNA, 221 bp, Zea mays
  Clone ID: MRT4577_159225C.1
attcggctcgaggatgagtacacagagtgagagcagcttcgtgacctgctctataacaggttcaaaaatgaccctggccaaagctagaccgcgcgagcacagccagagaccagcttgggtactgtcaagccgctcagaccgatgcaagacaacttcagtgagcaacgtgacagcagggtgtgaaggatacgcataacactctctacactgaaacaaaaatg

SEQ ID NO: 64945 - DNA, 239 bp, Zea mays
  Clone ID: MRT4577_159226C.1
cggacgcgtggggaaaaatcctgttcaagtagatgataatttgcatttgcctagaaagaatgaatttatagcaggggacttcactctgcgaaatgccaactctcctggatcctcgagcgacgataaccctcgttgcatagtggatgagccattcataaaactctggtacaagatggacatgacatttaatgtccctcgtgccaacacttattttttgatttatgtcaaggatggctata

SEQ ID NO: 64946 - DNA, 257 bp, Zea mays
  Clone ID: MRT4577_159227C.1
aagctccttcagatgctcgtttgacctcctggtaagtttgatttcaggttgacttttgtctcatgtggatcattacattatgatgatgatgttatctagcttatgaatatgacctcttacaagttgtccgaaatttatgacttcaagtttttgttcctttctgtttacaagctgtttcacatttcaaaactgttgttgtaattaatcttaaatctatatcttctcatggattcaataggttgtaaaaatgctttgga

SEQ ID NO: 64947 - DNA, 612 bp, Zea mays
  Clone ID: MRT4577_159228C.1
cgtctttttttttctaccaaacaatacccttatattcataaataataataataattttaaatttagttaaaatttaaaaggtttgactcaatccaaatctagaactatatcattttagtacagaggagatgctgcagtgaccagagagagaggcccttccttccgacgggcggtcacctcacaccctcctgcacgccagagcacatcagaccagactcggtcacgcaccgtgccgcctgtaacaaccaacaaacacccctgggcaagaaggaacacaccaatccacagaaagctgccgtcgtcttccaaccgagcgggaccccaatggggccttttggcctccagatttgtccgcaaattcagttcatcagttggttcgccttctctccagatctccagtacacacacccgactgtgcttccacaagatcgcctcgcctgcatgcccagtgccagtgacacccggcttctcctctcctccatttcaattcctcacttcaaagacgctgcacgcctgcctgcctgcctctgcgctggggggctcactgtcactggtcaccgtcaacactgcatcaatcttcgggcatgtgtgcatggacccatatactgacca

SEQ ID NO: 64948 - DNA, 505 bp, Zea mays
  unsure (1)..(505): unsure at all n locations
  Clone ID: MRT4577_159229C.1
ctttnttttttttttttttttttttttttttttttttttttttttttttttttttttttttttttttttttacccacaaaaagttcccaaacaactttttccctaaaaaaaaacccctccccttaaaagggttcattcagggcatgggccccccggccccccaggggggggggggaccccacgttacccatggccggtaaaggggaaaaccaccgagccagggaactaggcagggggccccttacctttttacccccggcccccggggggagccccgcaaagggggaaatccagacccccgggggccggcactagggggctcgaaccccctcccaaacctgggggcaaaaagggccaaaaacgcttccctgtgggaaattttattccttaacaatcccccacacatccacgacccagaacaataaagggaaaagccgggggggcccagggggggaccaaacacacataaaacgtttccccctcaaggccccttttaacgccggaa

SEQ ID NO: 64949 - DNA, 618 bp, Zea mays
  Clone ID: MRT4577_15922C.1
cattgggtacctcgagggccggccgggaggagtatttcgggtgtcgccaaggttggcaaaaggagcaggggaaactttgtaaaagctctaggctgccaaactctgacccgtgcggtcctacttcgcaggcacgttctcctacgtgcagtggaatggtggcagtcgacgcagcagcaagcaaggtgtggatcgagaaggagtcgggagagtcgacaacaggtggcgaaccgacaagggagaggaaggttccacgcaggatcgtcatcgtgcacttgcaggtagctatgcagatggacatattgatcattgtgcagactgcagagactgcagacaagcccatgccattgtctgtgttttctattgctatgctcctacatggacaggcaggacaacccagtgatacttgtggagttgttgaggccgggccgggtgacaatgcacgcactcgtcagtcattttattgctgatgaagtaggtgacgatgctcgtggagtggtgaactcgctcagtcagaaggccgggtcgacaataatgccgattaattggatctggctgtgtaaacaaaactatgtattgagctgtgtagttcttgttaaaaaaaaaaaaaaaaaagcggcc

SEQ ID NO: 64950 - DNA, 829 bp, Zea mays
  Clone ID: MRT4577_159230C.1
gcaatgtcaacctccgcagttgtcgttggctgcattaacaccactccagagcagtacatatggtgtaggtccgcaacagaaaagttgttctgtgagctgggtgcccactaacgtctcaggcagaagcaaggcggcgttgccttcgcatgatcctgaaatggaggtagatccatggaatctgctcgaagatggcacaagctgcccctcaacagcatctggaagccatggcgcgagtggagtgacgggtgaccatgctaatctgaaagcgtgcagctggcttaagggtgctgtgagggtgaggaggacagaactgacctacattggctctttagacgatgacacctgacgtgtgtatgattattttggtgaattgtggaggaaattagtctcacctgttggcactggagtgaatggtggaaaccaaccatggcccttggctttaggatggttgttgttggtgtagaatacatacacatcgctgcccccgttttgttttgttttgttttagggccttgtgggggcggctgtatataatggaaaaacatttgatccattactgaggcatggcccgagaagacaccttcaaatgggcttctgtgtaagcttgcttatttgagaagtaggaagccatgcagtagattttgtatccaaaagccgtgtacttgtttttgtctgatatgtaatctagcgcatgtcacacatatgtattcccttcctttgattgaagggctaatggtatgatgtctttttttttttgataaaacatgaggggtgagagcccctactggaaattaaataaaaaatatgtacaaggagttacacgtttctt

SEQ ID NO: 64951 - DNA, 334 bp, Zea mays
  Clone ID: MRT4577_159231C.1
taccctcgaggcctgccgggacggctgcacaggcacagccgcaggctcctcccgcatctgcatgggcgctgaccgcttggcagacggcctgctcggctgctcctcatctccgacgctctgctcggctgctcgtgctcggcagacggtagtcccgctccggcgctccgctgctcgcccggccagccggcctgctcggctgctcttgcagactgcagtccttctacctctgcctgcttgggcggtgtcccgcccggcgggcggcagccgactgcagggtgcaggctgtggctgtttatcccggcccgccgaggcgccgacccggccggctgtcgta

SEQ ID NO: 64952 - DNA, 244 bp, Zea mays
  unsure (1)..(244): unsure at all n locations
  Clone ID: MRT4577_159232C.1
ctgggccgcggctgtggcctttgcgctgagacttgcaaggaacgccggcgagagggccgagcagacaggcaggcgcacagcacagacacagactccgacatccnagagaaccggccggacagcgctcccgatggcagagcaagtacaagatgcacagaaacgaatgagacgacgaccacccgcagaacaaggagaagaaagacctagccctcgagcggctgcaccacggaaggcgcctactgtc

SEQ ID NO: 64953 - DNA, 374 bp, Zea mays
  Clone ID: MRT4577_159233C.1
tgagatggcgcaaaccatggcgtccatgaccggcctgtcgcagggcgtgcgtctcccaggcccggccggcaggcgcgccagcaggttcaccgtgagggcgtcgtcggcggaggccgaggccgccggccgccgcgcggtccttggcctcatggccagcggagtcgtcgggagcgcgttcgctcaggtggtgcgcgccggcaccgtcgcggccatcaaggttggccccccgccgccggtctccggtggactccccggaacggacaactctgacgaggcaagggacttctacctgcccctgaagaaccggttctacctgcattcgctgccaccggcgtaggcggaggggcgggccaaggagtctgtccaagtcatgc

SEQ ID NO: 64954 - DNA, 205 bp, Zea mays
  Clone ID: MRT4577_159234C.1
aaacaaggataaatcaaccataacactcataacctttacgattttattcaaacggacatacgcacatggaggcggggaactccaaaaataggaatttcacactaacctccactacctgtaaaccctatctcgcataaaccatatcatattatccacaatacaacattacactaacacacttcccatgcttagtctctatatatct

SEQ ID NO: 64955 - DNA, 580 bp, Zea mays
  unsure (1)..(580): unsure at all n locations
  Clone ID: MRT4577_159235C.1
ccgggnccaacaccgtcgtcgtcgtctgtcaccggccacaacgacactgataaactgatgacactgtgatcggtatcgacacacacgtccaaggaaacacagtattatattactctagcggcagagagatgggatccctgcagcccaacaatgctgtcgccgtggcagtggccgccgccgtagtcctggctgcgctcgccaccggcgggtcgtgctggaccgacgaccgcctcaaggcggtgccgccgggccccaacatcacggccgactacgacggcaagtggctcgccgcaaaggcgacctggtacggcagtcccgtcggcgccggccccgacgacgacaacaacggcggcacgtgcgggttcacgggcgtgaacctgccgccctacagcggcatggcggcctgcggcaactcccccatctacaaggacggcaagggctgcggctcctgctacgagatcaggtgcacggcgccgcaggagtgctccgacgagccggtggtggtcttgatcaccgacgcgaacgactaccggctgggtccctaccacttggaccttaatggctcgggggtcgggtgatt

SEQ ID NO: 64956 - DNA, 317 bp, Zea mays
  Clone ID: MRT4577_159236C.1
ctattgtgctttatgctgctaatcttctgcctgatgcagcacggaatctttctcagaaagttttgacttacgatcacttggtgacccttggagagtgactttttacgcccttcacggtgtctagcccagcctgcaaggaccttatgctgatattatgcttctctagggcagcctaactagttcgtccgccgtttgactgtgacatcaagatacggctccatttcctgcagactaaagcgctttgattgacgggactcagacacattagctagtatagtcagtagctcacgatcattctctgtaacggatgcttcaga

SEQ ID NO: 64957 - DNA, 1064 bp, Zea mays
  Clone ID: MRT4577_159237C.1
attgtcggagcaggactgaaattaccaaccctactgtagttccccatccattccgcggcgccggcggataccttctccctgcatcgccatcggagcccaagatttgctacgccatgtgcttcgacgactgctgttgctgcggctgctacgacgccttctgcgaccggtgctgcccctgcatctcctacgacacgcgcgagaccatcttcagcatctgcatctgcttcctcgtggtcgccgccgtcgtcctcttcgtcgtgctcctcgccgcctacgggttcatccgccacgtggaggtcgccgtcgaggccgcctcgctgaccaggttcgccctcgtgaccaccccggccaccgcgttcgcctacaacctctccctcacgctcaccgtccgcaaccggaactgggccatgagcatcaagaacaccaagccgctggaggccgactacagcttcgacggccagcggttcgaccgcatcgaactcgccgacaagggggacgtccaccccgcgggcaagacccgggtgtaccacctcgactccggcgcggaaggcgcgtacgtggcgctggggaacgccggcgtcgccgaattcgggaaggagaacgcaacggggctgttccaggtggaggtggcgctcgccggcgaggtgaggtacaaggcgcacgtcaccaagtgcaagctggcccgcgacgtgcccgctgaagctgcagctcgcgcccccggggacgccagccgtcgttttccaaaaggtcaaatgcaagctcgccaagcccgccaaaaacgcttagacaacaaaccggccgagtggcgagtgttgttcaatttgttaaagttgtgtagtaccaatgagctagtgattgccgattgtgcttttatttaaaattttagcaatgagcagtaatttatttgaactggaattgttggtaaatgtctgtaatgtccggaggcccagggaaagacgaaagacggccccataattttttttgaaacccccccttttgtttggttagctcttaattcatatggattgagtgatttaaattttaagtaagtcaaactttttttt

SEQ ID NO: 64958 - DNA, 869 bp, Zea mays
  unsure (1)..(869): unsure at all n locations
  Clone ID: MRT4577_159238C.1
ggtaccctcgggctcggccgggccgataaggcatgcaacgtgcgcccattttctagtattcttccaatgaagaggaccaagataacatggaagatgcggatgcatggactcactagtcattagttatttattttcgtgtttaccccnnnnnnnnnnnnnnnnnnnnnnnnnnnnnnnnnnnnnnnnnnnnnnnnnnnnnnnnnnnnnnnnnnnnnnnnnnnnnnnnnnnnnnnnnnnnnnnnnnnnnnnnnnnnnnnnnnnnnnnnnnnnnnnnnnnnnnnnnnnnggnnnngnngngggctgtgcaatgttcttaacgtttcagtttgatcatttatctttattttagttaattctcggtgcaatgttaatgggatagtttttgccaatagttgcaaacataatgggtagttttcactgctaagtaccctagtcatgagcaaagcctgggtctgctactgtttgcaacccttcatgggcgtcgttgtgcgctgctgctaagatcaccggagcagctaagatcaccggaaggagagtgtagtcgctgggcatgaacatgtgctggccaaacataacgagttccgaggtctgaccctgatggcgttgtgcaaggcccacaaaaatgctgggtctgctttagttgctgcttgtatgctgtgacttgggaagttgaacgatggtgttgagacggcaaagcaggtagcagcagttccacattggcaaagcaggtagcagcagtgccacattggctcattgtgcctagatagtgtgtctgccaacatgttcaagcatcctggcttatgttcaataacagagccaaagcccaggattttacattgactctatccatcttttgtgatgtcatgttc

SEQ ID NO: 64959 - DNA, 649 bp, Zea mays
  Clone ID: MRT4577_159239C.1
gccggccgggttccagaccgactcattctcactcagcaaataccccacaaggtgcactccaaagacctagtattggaaccgaagatgttcgtggacatctcatagatccccatcatcggggacctgatgcttatcatctataatgcgcacctcaaggtgaacgtgctgctcgagcgcaagaccgtgctcggcttggacgtcaccagcatcgacgcctccctcctcgacgggatacggcgaggtcctctcacgctctgtcacctgccatgttatcagctccaccgtcgccaaccctaacaacgttgaccgcggtaagttgcacgcgcaggacgatccttggagcagtggatgctgaacccgccgccgcttctgtccagagagataccagatcgcgcgtcaccttcgatcgtgggagagtggcagaatgcaggacatcccgggcagtccatcatctgtcaagaacaaccacgtctccgagatcttcctcgagagcatcaccctcaacgacgtccccggccacgtcaccatcgtcttcgtcgacaactcatgagatctacccgcagtccaagtaccgctacaaccgaggcttcttctccaacgacacgtacctcctcaaccatatgccgttggatgctgaagttctaccgcg

SEQ ID NO: 64960 - DNA, 662 bp, Zea mays
  unsure (1)..(662): unsure at all n locations
  Clone ID: MRT4577_15923C.1
aattcggcacgaggcaggccgcagtccatggccaccgccagcctcgcgctctcgctgcgcctcgcgccgtcctcgcgcccgctgagcctccgccgccggggggccgccggcgtcacctgccgcgccaccaccgccacgttccaccagctcgacgccgtcggtgagtgcctgtgcctcgatccgaggccgtgtctgttccgccggattgggaccgggcgtgctgcagttttggttaactattaatgccgtcgaggtacggtctcgtttctcgtgtgcgcgcgcgcagcggtgagggaggaggagtccaggttccggacggcggcggcggagggccgcaacctgctgccgctcacgaggtgcatcttctccgatcacctcacgcccgtgctcgcgtaccgctgcctcgtcaaggaggacgaacgcgaggcgcccagctttctcttcgagtctgttgagcaggggtccgagggcaccaatggggngaggtacagcgtggttggggcgcagcctgctatggaggtcgtggccaaggctaaccatgtgacggtcatggaccatgagatgaagtcgaggagggagcacttcgtgcctgatccatgaggatccccagacaatatggagcagtggaacccgcagatgctgacagcctcctgagcattttg

SEQ ID NO: 64961 - DNA, 280 bp, Zea mays
  Clone ID: MRT4577_159240C.1
ctcctccctccactactgccacaccgttccgagttcccgacgacgagcgagtatgagatgaggtgacgagaggtcgagatatatgtgtatatatatgagtgagaaggaccacgctggagaagcagggcacgtgcatgcacatacgccattctcgatctctcctctccaccactactgcatctagctatctccatggatggatgtacgtagctcggactggatcgatcggagaagcaataagctagcgagctcatgcatgctggctgtgcacgcacgtggt

SEQ ID NO: 64962 - DNA, 239 bp, Zea mays
  Clone ID: MRT4577_159241C.1
attgtctccagtttctcccattaggagtaaggcaatggcaaagcagcaactggctctagctgggccctctgccatggtgacgcaaaggataacacaagtacgcaacgccgcatgagttggtgtctggctttgtcaagtgtccctctcgcggtgcctgtctcctttcacttgtggagcacggtgagctcgcaaattcgttcactgcaaaagagcctgctgtgacccccctgaaaccaacc

SEQ ID NO: 64963 - DNA, 282 bp, Zea mays
  Clone ID: MRT4577_159242C.1
gagagtaaccccggttacagcgaacggagttcctatataccgcacatgcccatcccatccggcaatagattgcaccatggccctcgcacctttccagcatgacatgggcaaaccgtatttggcataccggaccggtgaatgtaccctctatcgcaaccaactgtggtgacaccctccagttggaccaggggatcaatgcattcacaaagccccctaccggacaaagacaccacgtagaccatcgtctgatggaacggccaaaggtatttcaaacccccacct

SEQ ID NO: 64964 - DNA, 195 bp, Zea mays
  Clone ID: MRT4577_159243C.1
gggccgggtgacaggcgcgccggcattatattacaatgaactaacgttggccaaatttacaacatagcatctaatttcgatagatccaaattattcagatggaatttttcacaattgcctgcaatgaacaaatcatcatatctcgtaccaaacaaacaaaaaaacacggcctcacgctcaaattaggataccttt

SEQ ID NO: 64965 - DNA, 247 bp, Zea mays
  Clone ID: MRT4577_159244C.1
ccaggtcgctcgtcccaactgatccggtcgagcacctagtagcgagctggtcgatcatcagtgtacagtgacagtaggtgtctggctctcttgctgcgtggctgcaacggtcgtggcccacagcgtgtcgtcaagcgccgttgctgctgctgtgcctgggagtgctggagacctgctccttccaaacccacatcttggacaattagctggacatcacgccgggcgacgggagggaccaggcccttga

SEQ ID NO: 64966 - DNA, 349 bp, Zea mays
  Clone ID: MRT4577_159245C.1
cacagtcaaggccacgagtgctcgtcacctgcaatcaggaaattcgcgatgcgccggtttgcatgccgcgtttgccgttccattggcatcgaataccctatggctcccaatgccgagaagaagcccgcggagaaaaatcacgctggacgagaacgccaagacgaagtacagggcggacaagcgcgtgccgggctaggagggctgcgagatgaactggaagaactgggccatgaagagcgtacagacgtacaataccgacatctacaaggtgctcaagcatgtgcacccgggcataggtatctcgatcaaggccgtggccatcaataactggtttagcaacgacggcctc

SEQ ID NO: 64967 - DNA, 120 bp, Zea mays
  unsure (1)..(120): unsure at all n locations
  Clone ID: MRT4577_159246C.1
agttataaaacaatgcacaaccatttatcagaatgcgtnattttttcgattattccggtggnatttacacaggnttttcatttaatggcaaaatatgtttgaaggtaagttagtactcag

SEQ ID NO: 64968 - DNA, 226 bp, Zea mays
  Clone ID: MRT4577_159247C.1
acataaaacataattaaatttcaccattgttaattttccaatgttccttttggtttgctcaaaggtggggatgcaagaaagtgaatacaatccagcgggaacagattgaggctcctgttcatttatttataggcccaggacccaccccggttgaaaatacatttatgcctttaacccttttttttgaacataattggaatatttggggtttaatggggttttgtcc

SEQ ID NO: 64969 - DNA, 371 bp, Zea mays
  Clone ID: MRT4577_159248C.1
gccacccgtgcgttagcttagactgcataagcctaactgagaacagcattagaagaagtcactacactgcatctcattggcctagaccaacagcctgaagatcgggaaggactctctcattaatggtaccggtgaggcctggagccggaggaccaggcccatatcgagagagaagaggagcacaaatcctgagcatgagtcaaggtggcttgaatcatccaagcactcctattaacacacaagcctatgaccacgatctggttgctaaacctgtgtactacatggagcattattctaaacagcatcacagcatatgactactctacacaagagaagacacatgccttggcatcttcaaaagacaataatac

SEQ ID NO: 64970 - DNA, 604 bp, Zea mays
  Clone ID: MRT4577_159249C.1
acacaacgaacacgcgtccgcggacggtgggcgacgcgtggcaacccaccagccaccacgcacagcagcagctagctagctagcaaccacctcgatcgcacagaggccggaagctcagccgcgaattcggcaagcaacaaggagaagtcttgggttcctcgccacctctcgatcggccaggcggatccaagaagagatggagaagaaggcaaccagattaaggactgagccatggcatccaagggcgtcctcttcttggctctcaacctcctgttcttcacagtggccaacgcctgcggcagctgcccgaccccaacgtcgccggtcgtgccaccgccgccgacgtctgcctctgcacggtcatcaagggcaacgtcctcggcgtcgtcttcgatgtccctatcaagttcaatgccctcgtcaactactgtggcaagtgcgtgcccaagggctacatgtgtgcgtaagctccgcgcggttacacgctcgtagccgttcgcgtgcgtaattaagcatgcacctgcatggcacacatgtattgtgcgcctgctgatctctcctgtctcatttgtgcaccttaagttctacagtcctagaaccatat

SEQ ID NO: 64971 - DNA, 1168 bp, Zea mays
  Clone ID: MRT4577_15924C.1
ttgggaccctcgaggccggccggtataaaaatctcgttgtccaagctaaagaacacatcttggccggtgacattttccaagttgttttaagccagcgttttgagagacggacattcgccgacccctttgaaatctatcgtgcattgcgcatcgtaaatcctagtccatatatggcctatctacaggcacgaggttgtattctcgtggcatcgagtcctgaaattcttacccgggtacaaaagaggacaataatcaatcgtccgcttgctggaaccataagaagaggcaaaacaaaagcagaagacaaaactttagaacaattgcttttgagtgatgaaaagcagtgtgctgaacatattatgctagtagatcttggccgaaatgatgttgggaaggtgtccaaaccaggttcagtaaaggtagagaaattgatgaatatcgaacgatattctcatgtcatgcacatcagctcaacagtaactggagagctacgcgatgatcttacgtgttgggatgcgctacgagccgcattgccagttggaaccgttagtggcgctccaaaggtgagagcaatggagttgattgatcagctagaagtgagtatgcgtgggccgtatagtggtggctttggagggatttcctttcgcggcgacatggacattgcactggctcttcgcactatcgtcttccccaccgcatctcggtttgataccatgtactcgtacacagacagtaagtcccgacaggagtgggtggctcacctccaggccggagctggcatagttgctgatagcaaaccggatgacgagcaccaagagtgtataaacaaggctgcaggtgttgctcgtgccattgaccttgctgaatctacatttcttgaagactagtctagtctaatgaaggaaatgtatgtttaagttctctgtacaattatggattgtcctagaaaacaggctttcttaggccgaataaaaactcaattgtaataaagttaataaatggacaactttagctatcatagcatgttaatttacattagaatctggcagtttaaggcggacaatcaagaaaagcatgaaaaaacatccaatattgtgatgttcatgttttgttcttaatcatttgacattctagttgtgctttttaagcaatcatatattttcttttc

SEQ ID NO: 64972 - DNA, 1023 bp, Zea mays
  Clone ID: MRT4577_159250C.1
acccaccagccaccacgcacagcagcagctagctagctagcaaccacctcgatcgcacagaggccggaagctcagccgcgaattcggcaagcaacaaggagaagtcttgggttcctcgccacctctcgatcggccaggcggatccaagaagagatggagaagaaggcaaccaaattaaggactgaggcatggcatccaagggcgtcctcttcttggctctcaacctcctgttcttcacagtggccaacgcctgcggcagctgcccgaccccaacgcccccggtcgagccaccgccgccgcctcctgctaccccacccccttcatcctccagtgggaagtgcccgctgaacgcgctcaagttcggcgtgtgcgtcaatgcgctcggcctcgtcaaaggcgaggctggcaaggtaccagctgagccatgctgcaacctcatcaaaggccttgcagacttcgaggccgccgtctgcctctgcacggccatcaagggcaacgtcctcggcgtcgtcttcgatgtccctatcaagttcaatgccctcgtcaactactgtggcaagtgcgtgcccaagggctacatgtgtgcgtaagcagcttccgcgcggttacacgctcgtagccgttcgcgtgcgtaattaagcatgcacctgcatggcacacatgtattgtgcgcctgctgatctctcctgtctcatttgtgcaccttaggttctacagtcctagaaccatattccaggcaaattcttgtcagttcacatgtattgtctcttgttgaatttctatttttttgttttattttgtatttgaacatttgtttataagagtttgccatcttcttctccaagaaaaagaggagtgctgcttctagtttttatatctacgagtcatgcatgtaatctgttgagagtcatgtgtttgtgtatgtaaaaccaagcacttgaatttaatatatacttattcgatttgtgctaaaaaaaaaaaaaaaaaccaaaaaaaaaaaaaaagaaataaaaaaaaaaaaaa

SEQ ID NO: 64973 - DNA, 297 bp, Zea mays
  Clone ID: MRT4577_159251C.1
gtgacccttgtcaaaatataaaaaagataaatgaaagaaatataaagcacaaaaaaggagaagagcattacaaaaggatggataaactcaagataataggtatagaaaaataaatatggtgaggactaatgttacaacaattgagaaaggcgtatggcgattttcatgtcccaaagttaacttgctgacctttcattgatattcggttgcacgtaggcaatgtattagaagttcactttcagtggtgttattgtgacataagtgcttatattgcgagttgaataagtttaatgtggt

SEQ ID NO: 64974 - DNA, 196 bp, Zea mays
  unsure (1)..(196): unsure at all n locations
  Clone ID: MRT4577_159252C.1
ccggcagcaccccacccaccagagagcgagaaaccgcgccacaaaagccacgcgaaacgccccgccgcaagcagnngaggccagccgggaaaggagccgggcggacggaacgagcccaggacgaggngcccgagggggggagcgagaacccganccggggaggcgcgcccggagcaanggggggagcgaaaaagcc

SEQ ID NO: 64975 - DNA, 608 bp, Zea mays
  Clone ID: MRT4577_159253C.1
cttgtgaatctctagttggcgcacatcctcatctcccagcttgcgactaaaccctagcttgcctatccatggcgcctaacaacagtgagggcgatcccggcgagccccccgccgacgtggaggcactcaccaccaaccacacgccacgtacgccgcggtcctcggagcaccacagccacgggtctccatctacttccccatcacagacgtatcccgcccgaacccaaagccgccgaataggacatatgtgcatcgaaggcgccggcaacgacgagtactactggtaggacattgacaagctacttgagccactgtcgcggaagcaacttgttgcgctgctccgcacggaggatgatgcctagtcacgtcacatatgatggccgtgcgccgacagtcgatgaggccgatcctgtacataaggaacctcttactgacacggactctaatggggtgccggcctcgagtagctccgctccgccttctacaagctactactgacatcgaggactgccgcgtcatctctgaggaggaatctggcataccctggggctacagactcgtcgtctgacgctgccgtcgctctgtggtccgcgccctcatccgacctc

SEQ ID NO: 64976 - DNA, 731 bp, Zea mays
  Clone ID: MRT4577_159254C.1
gcacgaggttggcgactctttggcgcagcggcagccaggtcgaagcggcacccacccgcaatgagcaaagcaggcggcggccccggctcggccccgggcccgacggccgcggccgcggcggccgcggtgcagaagcagaagtcgctgctgcagaaggcggacgccgacgtctccagcctcgtcgacaatttctcctccctcatcaacatcgcccgagtcaacgatccgccagtgcgcaactcgcaggaggccttccagatggagatgcgcgccgcccgcatggtacattcagcagactctctgttgaaattagtgtcggaacttaagaggacagccatcttttctgggcttgcttcattgaatgagaatgtggataggaggatcgaagtgctgggtcagcaagctgagggaactgagagaatgctggagaggattgggcaggaggcagcagcaagcctcaaggagctagaggcacactactactcatctgttgtgcggtcaccatcctatgattgagggttatcccaggttatctgttaggcggtttgctcttcagggttatctcagggttttttatttcaccttgaatattgcctactgacattaccattacctttttgttgggactaaagtttagtagattcgtcttattgtttagtccctatctgtataattagtttaaaattagattatatttaatacttcgaaatatcaaaaaaaaaaaaaaaaaa

SEQ ID NO: 64977 - DNA, 2421 bp, Zea mays
  Clone ID: MRT4577_159257C.1
gggtacctcgaggccggccgggcaattaggacgctcccctcctcgcccgcccccgtacgtgtccatctctccactcctttcctttccttgttggtaagagcaaggcgagacgtaacgtaatccggccatggcgttcttccggggcctcaccgcggtctcgagactgcgatcccgcatggcgcaggaggccaccacgctgggtggtgtgagatggctgcagatgcacagcgcgtccgagctcgatcttaagtcccagctgcgggaactgattccggaacagcaggaccgcttaaagaagcttaaatcagagcatgggaaggttcagcttggaaacataactgtggatatggtccttggtggaatgagagggatcattggaatgctttgggagacatccctagtcgacccagaggagggtattcgttttaggggcctctcaattccagagtgccgaaaagtgctgccaacagcagttgagggtggtgaacctttgcctgagggtctcctctggcttcttttgacagggaaggtcccaaccaaagatcaagttgatgctctatcaaaagaattgcttgcgcgctcaactgtcccagctcatgtctataaggtaatagatgctctcccagtaactgcacatcctatgacacaatttaccgcaggaataatggctcttcaggttgagagcgaatttcaaaaagcttacggcaatggattgccaaaatcaaagctttgggagcctacttatgaagactgcttaaatttgattgctcggcttccaccagtggcttcttatgtttaccggagaattttcaaggatgggaaatcaatagaagctgataattctctggattatgcggcgaatttatcacatatgcttggttttgacgaccccaggatgctggagctgatgcggctccattgatcatgaaggcgggaatatcagttctcatactggtcatctggttggaagtgctctgtcagatccttatctttctttcgcatcatctgtgaatgggttagctgggccactacatggccttgcaaatcaggaagcgcttctatggctcaagtctataattcaggaaacagggagcgacgttacgacagaccaactcaaagactatgtctggaagacactgaagagtggaaaggttgttcatggatttggtcatggagttctgcgtaggacggacccacggtatctatgccaaagggagtttgccctgaagtatttgccagaggatccgcttttccaactggtccgtctagatcctctctgtctaattgcatttgctttcttgagttgaacgattttagatacgatactccgtacgttacagctgtccaagttatatgaggtcgtgcctccgatcctcactgagctgggaaaggtaatgtggtaccacattgatcacgagttttcactcatttggtttcagcttagacctctcgtattcacctcaatccatgtgtattgaggtggattggagtgtaatttaaactaaattacacccctaattcacctcagtacatgtggattgagctgaatatgagagtatctaaataaagctggtttatcaacaccattctttgcccatgttttctcaggtcaagaacccatggcccaatgttgacgctcacagtggactcttgctgaaccactttggactatctgaaacacggtatcacactgtcttgttcggtgtttcgagaagcatgggggtaggatcccaggtctgccttctaccttctctttgcacagtttctaagtaattctgccggctaattttgtttggttatttaattatgatgcagctcatctgggaccgtgcccttggcctgccactcgagaggcccaagagcgttaccatggagtggctggagaactactgcaagaacaaggctgcctgaagcttttcacaaatgcctgcttttttccccccagccttggctgttaatgatttaaacacgagttatagaactattctttttcccccattggccgttgaataacgcaagagcaatatgctcaggcggaagaattttgtatcttccgtaacttggtggacatccagatacttgatctgcggcaacaatgggcagaagagattagcacatgctgattgatctttatacgccaacacttgtttttctttaacattacttgttcgctgcagctttaatccagctgtttgtaactgcaatttatagcaatttatagagatttgggctatggcatgtatcatcatgtatgccagttatctcgtgttgcggcatttatgttttagttgatcagcgacatggctgaattgctgataatcgttgtacctgatccctgtccctgctgattttaaaccgtttttacggctacttataaaaatggtaaggagcaaatttatcgggaaaaaaaaaaaaaaaaag

SEQ ID NO: 64978 - DNA, 601 bp, Zea mays
  Clone ID: MRT4577_159258C.1
aaaaaaaaaaaaaaaaaaaaaaaaaaataaaaaaaaaaaaaaaaaaaaaaaaaaaaaaaaaaaaaaaaaaaaaaaaaaaaaaaaaaaaaaaaaaaaaaaaaaaaaaaaattcccccccccggggttttcaaacctttagttttttttcccccaaagggcaaaaaaacccgttcgaccccttgggggggtggttcttggccctccttctctgggttttcgttgggggggccccccccccgattaaaagggggggtgggggttgccacccccccccgcgggtttttttaccgccgcgggggattttgcccccccgggttccccggcccccccgggggattttcccccggggggtccacttggggccgcgggtccacttgcccccgcgggtccttgggccgccccggttttttttgcggccgcccccttgccattaccttattaaaccgcccgggcttcagctttttccccagacaaaccattgccggggcaaaaaggggatttaaagcccgggccatttaaaggaaacctggggggtgggaagccccccaatcttgggccagggggtaaagttcctggggcttcagggcaccccaaggggaac

SEQ ID NO: 64979 - DNA, 293 bp, Zea mays
  Clone ID: MRT4577_159259C.1
accgtttggtgtctgatgtgtgcccagatcgttctgccacttgcactgtgcttgctcctaagcaaaagggaaaaggagcgcgcgtgatagaagaaaagcactgggagaactaacagaggagaaaggtgaaacacacacacattcttaaggcaataaaactagggggtgtatattatcttctggtgcatgttcttttctggaaaatatggtagctcgccaaccgcatctgctcatctgatattcaaacacacagtattcgtgaataagttgattctgtcccccacgtggactct

SEQ ID NO: 64980 - DNA, 328 bp, Zea mays
  Clone ID: MRT4577_15925C.1
ggaacctgttttggtttaccttttgttttgtttttttttttttacgcaagaaatacatcgctaatttcgctttttaataatccacatgacgctggagccttcaaaatgtccctggcccgggctaaaatccatcttacatggttcccttgaaacaagatagcacagcaccagttgagggaaggacgcggaacgcattgccgtatataatcaacatggaaatccaccccccaactgctgggtgttccggctgcaaactactatttaaccacccaacagctgatttttgaaatgatgactccggtacaaaacattacgcatacggggcggt

SEQ ID NO: 64981 - DNA, 850 bp, Zea mays
  Clone ID: MRT4577_159260C.1
gcggcttgtgcaggccgtcgtcccccctctcggtgcccgggtgcaatcttcgtcggagggttggctcgtccccagctttggtccatcgctcgtctcgcgctcgggctgcaggaccgatctcctctcccgcctggtagcaggaccgagtccgtctcgcgcacggctgcaggaccgcgctcgtctcgcgcccggcgacaggatccgtcgcgtctcatgcacggtgcagcaggacgagtcgatggaggccagatgcttgggggcgctcagtctctttggttaggggagcggcgggtctcgggtgtggtggtgtttaggccttggatgccggggcgacggccctggtggtggttgcgcggtgctcaagggcagagcccgtggctcagtgctgcccggtgactatggccgtgggggcggtgtggtttccggggtgtggcgttcggtggcagtgagtgttggccggggtgaaaacccgctctttcttcggacggaccggcggcggcgaatctcgctcccttcctgaaggcgtcgtcgcagctctcattgcccgtcgtgttgctctaggggaaactctgaccctcgggtcgggcggtggcggcgctccggtgttgtttccttcctgaaggcgccgccttggagcgcacggttcgtcatatgtggcttcatctcatcgcagtggcgtgttcacggcgaagaaccccggtggctattgtagtgctaggggaggtgttgctgcgttcagcatctttgtatcctgccttgggtgtgtgcgtgtgttttggtggcgtgcgtttgtaccgtgttgttgtggattgtgctttatatataaagcagggcgaaagcctttttcagt

SEQ ID NO: 64982 - DNA, 200 bp, Zea mays
  Clone ID: MRT4577_159261C.1
agcgaacagagcactgaagcagagcgagcgagctgtcttgccaaactctcacggccgacggcacaatggcgagctatatagcgctgttactgcccctgctactgctggccttgccggtggccacgcgcctggcgtacgccatctgctcattcgagaagatcccggcgatgcgtgcgtacacttcatacagaggacctgcc

SEQ ID NO: 64983 - DNA, 323 bp, Zea mays
  Clone ID: MRT4577_159262C.1
tttttgttggattttttttttttgatcgtttttttctctttctgtggtgttggtcctttttatgcttggttgtttggccaactcggccctggattctgaacattgggtggaacgggtttggggggccaaattagaaacccaggcgccctttgggaaagggccctcgttttttccgggattttccgggggttccaccgggggggttcatgagggaccctggaagaaacactaattcccctccttttgttgctggctggaaaaggtgagctttattcttgggctctccaacccctaaattagagcgcccttttaagagagaaaaa

SEQ ID NO: 64984 - DNA, 294 bp, Zea mays
  Clone ID: MRT4577_159263C.1
acgcatcgaacacggtccgggacgtggaccgtggttattgctattggataggaattatatttgggtgaatttaacttcaaaccaatccgtaatctaactggtagcagtttgcttgggttctgaagatgtagctgtttgttacaatttgcagtgtcttcatattttttaggcatatgggagtttcaaattctactagatgcatgatgcatataagaaagataccgtacccagtttcaacaagaaaagaaaagactagagaagggcgctatggatcaaaataaaactaacaactat

SEQ ID NO: 64985 - DNA, 326 bp, Zea mays
  Clone ID: MRT4577_159264C.1
ccggttcggaatcgacgccacgcgtccggtgacgcgtgcgtgctagagatgaccctgtgcgacagtcaccacgtctgctctgctcagagaatcacgtgccagtcgtgaccatgctcacaattctttacccaccgtactcagaacattctagggagacgctggcctatatgaaacttgatccataatcagtctcagaacgcgaagaagaagtggaagtccctggggcgacgacaacaccacattttgagtctcacgcatggtctcacttctactttagcatatgcgggcctgagactaactcatacataagcaaaggtgcggcagcg

SEQ ID NO: 64986 - DNA, 262 bp, Zea mays
  unsure (1)..(262): unsure at all n locations
  Clone ID: MRT4577_159265C.1
ggggggggggttttttttttgtgggggtttnngaaaccactcttttttttttaaaccaatttcttaaaaaatgtggggttggaaacagacccttaggccaattcttttcacttgttcgggaggggttttaaacagaacaataagggattgtgttgttttttattccccctccaaaattaacttgcaagggattgtttgttccttaatcccctttaattcccattcaactaaacaagcccttagagacttacactttcttttt

SEQ ID NO: 64987 - DNA, 271 bp, Zea mays
  unsure (1)..(271): unsure at all n locations
  Clone ID: MRT4577_159266C.1
aacgaatacaggtatacatanactcaaaattcaactcangaaacattcttaaatataatctacaaccatcattcctatctactattcttacaccatctacaaaaaacaaanaaannatanaaaacatcttaaacaatctctctaacaatacccataacctatattaaaaatccaaaaacaatataaacattactaatctaaaaaacannaccataacacacccttacatctccttcaccataaattttatctaaaaccaaatataattcct

SEQ ID NO: 64988 - DNA, 249 bp, Zea mays
  Clone ID: MRT4577_159267C.1
gccgggaagtgattcgcctaactctatagctcgagtattgtttgctctcacaaagataaaaagcaaagcaccaacaatggacgccgaactcctcatcttctggcctcctgctgatacaggacgacgacttggctgacatgaccgtcaacgccgtcaccttcaccatcaaaaacaactgcggataaaacgagaaggccgcagccaccccgaaggacgagaggacgcaggttaacccgaacgagactggga

SEQ ID NO: 64989 - DNA, 495 bp, Zea mays
  Clone ID: MRT4577_159268C.1
cttgtgttccggggctgggttttgggggggggccggcgggccccggccccgggtccccgcgggcccgggctggccccggttcggggggggcccggccggccccccggtcccgggggccggggccgcccaagacgccccggtggggggggaggatctggcccgagaaggcctgcccccaccctggtggatggggaggaacacgtagctgggagggaggtggggggggcggacggcgaggttgggggggaccgggggccaaaaaaggaacaccttcttcgtgcccggggacgcggggaggggccccgtccccggggggccgggcgccgcgccgaggggggagaagacgggggcggggaggaggacaaagagggcgggggccaaggcccccagggggaccgggggggccggggagacgaacaccatgaagccccccccgccctggggaaacaaaagggtattgggggccgggaaatgaggggggccccggtaaccccg

SEQ ID NO: 64990 - DNA, 652 bp, Zea mays
  Clone ID: MRT4577_159269C.1
gccaggaaaatcgatactctttccttataacttttagattttttagtgagtgttattgtcatcatgtatacaatttgttttcttactctatatgagtgtaattaataaggtatacatacgtataaacctgcaaattttattagatgttgttgatgatctacacaagaagtgtagcggtgtttgactcatttaggaatggagtgattccatttatttagttttctggggtagtatctgaacaaggttcattttgtaaaaaccaatatgaatggaatgctcctttgcgtatagtatatgacttgctagtaaatagtgtcctttttgggcactatttaactaagaagaagccaaagtcaaaaaaatctgaaaggaaagaaaaaaggtagacaaggatgatgttgagcactttgtcggcatgactaggcgagaaggaatatataaatctaagaggccaaaagactataaacacattagccacaagttatttgagaagagaagaaaagtaaaattatttcgtatctctggtaacaagaaaaataattatttcacccactagttgccttttccaaataggctcgggatgttgtctagatgatgatggagactagtctcactcctgctctcaactcttattgtgctttccgaagagctc

SEQ ID NO: 64991 - DNA, 337 bp, Zea mays
  Clone ID: MRT4577_15926C.1
cgcacgcgtccgcgtacgcgtgggctgacgcgtgggcgctactgccgtacccagggcgggagtccggcagcatggacgaggctgcctaagcgtgcgcaatcgtctcttggacagcctactgtccacgaccgctgacgcaatctccaagttcgacagcatagccgataggatcagcatcttctgctcgtccgacgaggctgcggaggcctctatctctaccttgaagaaccttacttgtgactggtaactcgcagctatgctgtaccacagcttatcgtaacactactccgcgcagtctctcagagcgatcaatgaggacgtaagcacgcttgtcttc

SEQ ID NO: 64992 - DNA, 559 bp, Zea mays
  Clone ID: MRT4577_159270C.1
cgcggcccacggccctgttctttatgatactctgctctcgatctggctggccagcagagtcttcagggacgactccttagagagaacacagggacggatggctgagtgctctgtagacgaaaaaaccgcggtcagttgtggttgactgcgctaatatactaagccactcccactcgcgctggatcttctgtcaaactgacgagcgcaaagagacacctgtgcacgggttctgtgcggtttgcagtgctcaggatgtgaattggaaacgctggtgctagctcatgagaaaggacagatgatgacgacctcaacctgaacttatttgtttctgagctggtgaccgtgacgggctgacaactctcattgctcaagattactgacggttggctgcgacgttgaacctattcattatcgccaattaataacgactcactggtcatgttctcacaatcggaggagtgtatagatcgtccggtgcttgcttactgtgcgttgcggctacttccgactgctatcgattaataataaattggtgaggcccgaaccgatcgcccttcgc

SEQ ID NO: 64993 - DNA, 108 bp, Zea mays
  Clone ID: MRT4577_159271C.1
gtaacttgtgtccttttgaatgatccgggcgttttcctgcttggttaatgatgacaatgtcttgcatggtttcttatgacaagaaatttccgactttgaccattaaaa

SEQ ID NO: 64994 - DNA, 487 bp, Zea mays
  Clone ID: MRT4577_159272C.1
gggccgccacatggagacgccacagcagcaattcgccgccgccgccgccgccgccgcccacgggcaggacgacggcgggtcgccgccgatgtcgccggcctccgccgcggcggcggcgctggcgaacgcgcggtggaacccgaccaaggagcaggtggccgtgctggaggggctgtacgagcacggcctgcgcacccccagcgcggagcagatacagcagatcacgggcaggctgcgggagcacggcgccatcgagggcaagaacgtcttctactggttccagaaccacaaggcccgccagcgccagaggcagaagcaggacagcttcgcctacttcagcaggctcctccgccggcccccgccgctgcccgtgctctccatgcccccccgcgccaccgtaccactcactgccgcgtcccgggcgccgcccgcgatgccgatgccgatgccgtctacatgactgtgccacagctgcccgacagcaacg

SEQ ID NO: 64995 - DNA, 589 bp, Zea mays
  unsure (1)..(589): unsure at all n locations
  Clone ID: MRT4577_159273C.1
agcgtccgcaaatctggncttttctttaacatggggggtgggtctgataatgccgacaaattgacccataatgtggccaaagaaagccaaagcgttaggctagataaggtagatgataagctgtggacatatgcaccaactactacttgactagaagctgaaatctaaggtaggcacaagacttaggggggcagatcattagacccgtgagtagtagcacgggggtttgcaaagccacgaagttaactacttagccaattaaatgatcacactttcctgagagtttacgaacagtgggtttgtctgttttttctttagttgtttggtctagtatttttgtttatgcttcacattagcttcactgttcatggcttcatgctgattgattatccaatttaggttttatgtatcctcacattagctgggttcgtctcatataaaaagaacttggttcttgaagatgcattcaatcaaaatatgctcggttcattccttctggcaaatatccttactggtctggttaatctctcagttaacacgctctctgcttcttccctcaccgccttcatgattctatgacctgacgtat

SEQ ID NO: 64996 - DNA, 1971 bp, Zea mays
  Clone ID: MRT4577_159274C.1
acattgggcaaaaaaaaaaaaaaaagggcggcggaccaccacgcctgttctcagtcacgctagtagtaggaaatcctagcgcgtcgctgcttccattaccgcctccgcaaccagcccgccgcgcccccgagcgtttcgttccgggagcggcaagactgggacacgccagccctttatttcgagctttctgcgtgcgggaggggggttgacaggcgatggcggccgagggcgaggcggcggcgctggagttcacaccgacgtggatcgtcgcggcggtctgctctctcatcgtgctcctctcgctcgtcgccgagcgatgcctccactacctcggcaagacgctcaagaggaagaaccagaagccgctcttcgaggcgctgctcaaggtcaaagaagagttgatgcttctggggttcatctccctgctgctgacggtgttccaggggatgatccggaggacgtgcatccctgaacgctggacattccacatgctgccatgcgagaagccagatgagaaggccggtgaggccgccaccatggagcattttgtagggacgcttggcaggatcggtaggcgtctgttgcaggaaggcactgctggggctgagcaatgccagaagaagggaaaagttccacttttgtcccttgaagccatacatcagctgcacattttcatatttgttctggcaatcacacatgttattttcagcgtcacaactatgcttttaggaggtgcacagatacaccaatggaaacagtgggagaatggaattaaaaaagatgctcctggaaatgggcctaaggtaaccaatgtacatcatcatgaatttatcaagaaacgttttaagggtattggcaaagattctataatattgagttggctgcattcttttggtaagcagttttatagatcagtatctaaatcagattacaccacaatgcgtcttggttttatcatgactcactgccctggaaatccaaaatttgatttccatagatacatggtaagggttttagaggcggattttaagaaagtggtaggcataagctggtacttgtgggtcttcgtggtgatatttctgttgctgaatgttaatggctggcacacatacttttggattgctttccttccccttattcttctgttagccattggcactaagctggagcatgtcatagctcagctagcccatgatgtagctgagaagcacacagcggtcgagggcgatgtgatcgtaaaaccatcagatgaacacttctggttcggcaagcctagggttatcctttacctgatccacttcatcctctttcagaatgcgtttgagattgcgtttttcttctggatactgagcacttatggattcgactcgtgcatcatgggacaagttcgttttattgtgccaaggcttgtcatcggggtggttattcagcttctctgcagctacagcaccttgcctctgtatgcaattgtaacccagatggggagctgctacaagaaggagatcttcaacgagcatgtgcagcagggcgtcctgggctgggctcagaaggtcaagatgaaaaagggactgaagggagctgcatctgctagcaaggacgaatcgattaccaatgccgattcggcaggaccttccgttaagattgaaatggcgaaggctggggaggatgttgagatcgttggaaacacaggttgattgggacaatagggtgcccgtgttgtaatgatgtaacaggttaatatgccatcatctttttttgtagatactagatagcttgctgtggcaataccgcaatagcggtgaactagagaaggtgagtttgggcccgggagcctcatctgttatcggtccagtaggaagcaaattcttatatacgggatatcgataaaaaatgaactaagttcctggattcataaccattaaaaaaaaaaaaaaaaaaaaaaaaaaaaaaaaaaaaaatcgacgcggccgc

SEQ ID NO: 64997 - DNA, 505 bp, Zea mays
  Clone ID: MRT4577_159275C.1
gaagggctggaccaatctcatccattggaggcgacacaaggccatgtcgtcctctttcacttgttcagccatggtccgggctacagtttgttccacgagattacatagttcctgtgcccatgactgcgccatctcatgtagttgatcaaaggcagccagggtcatcgctgacgaatgctttgggcgctccaggccgcattccttcaccaatgggcagaatctcgagcaactgtttgttcgctcgtctggggcaaactctgtatgaaaacagaatcattgctgaatcgctaggaaacactgactacttcgcatgcgaataccaaaggagtctgctgagggagtacaggatgcatagtcaactagtccctgaggcaaccagcttgagctattctgccttcttggaagctcgccaatgggagtctgttcagagacaggagcggctacggaggaggatcgaatacggacggtcccagtgaaggatcagttgcctgaggccgaacttggg

SEQ ID NO: 64998 - DNA, 226 bp, Zea mays
  Clone ID: MRT4577_159276C.1
cccacgcgtccgaaaaaaaaaaaaaaaaaaaaataaaaaaaaaaaaaaaaaaaaaacaaaagggggggaaaaataaagggtggcgggcgcgtccataccccagtcatcgctctttttttttggcgcctatatcttttctactgcccgtcgtttttcaacgtccggactggtatatccctggcgttgcccaacttaatccccttgcacacatccctttttctccagc

SEQ ID NO: 64999 - DNA, 827 bp, Zea mays
  Clone ID: MRT4577_159277C.1
aattcctgcctagcttggctagaactacatccagagaccgtagcaatgccagccccagctgcagcttgctcgcttcttctgcttctccttctggtggcgccggtggccgccggtgactgcgtcatccatggtgtccgttggtcggcttgggccaacaggggtcacttgacggagggcctcatcatcccggcgcagacgttcagcgccttcaccttcgacctctccgtcggcttgcagaccctctcggtcatcatggacatctccagcgagcttgtctgggtgcagtgcgggccggggctcaggcgcaagcccaccttcctgcccgggctcaggccctccttcgccccgatcgcgccctgcccatcatccgtgcgcaacaactccgactcctttggccagatccactacgccgaccggacttgccatcccggcgaaaccggctgcgcagcccgctgccggtacgtggagcacatctacggcgccggcaacacgtccggctacctcgccaccgaaacgttcggtttggggaacagggtcttcaccggcgtggtgttcggctgcagcggcaacgtcacgctgcgggatggcctcgccggcgtctccggcttcgtcggattcagcaggggccccctctccctcgtttcgcagcggcagatctccaggttctcctacttcttcgtgctcccggacgaccccgacaacggcaaggccttcgttagcttgagctgggcagacggcgcagaacacgccgacgttaagggcagccacacgccgttgctggcggccaggcccaacagaacccttacttgtactacgtcaacctcatc

SEQ ID NO: 65000 - DNA, 332 bp, Zea mays
  Clone ID: MRT4577_159278C.1
agcttatgcaagctctgatgacgtctttagcctctactaagcagagcaagctgtcagggaaattttgacattgccttctaaacacaatcatgcgatcatcatacttctaatacctgctgataatttgctgcacaatatcacatactgccgcgattttacacggcgtatgcgtccacctgtaaacgatgtcagagtactaccacgattgccctgactcttacatccaggccagcacctacagcctttaaaaactttaccttatgaacctgaactacgccattcgtctacaacctgtggacccatgccattgctggctgcgccttttacatttt

SEQ ID NO: 65001 - DNA, 207 bp, Zea mays
  Clone ID: MRT4577_159279C.1
attaagatccagccccgcgtctcacgtattctttaaaaaaaaaacttaaaaacaaaggggtttgtgtgaacatttaaaaaaagaataataacataaactataaattaatcataataaaatttgggctgtcccttttaaagaatccaaacttacttacccgtgcttccaactactaatcttttttatatgatcacctaaattaaaatt

SEQ ID NO: 65002 - DNA, 345 bp, Zea mays
  Clone ID: MRT4577_15927C.1
ggggggaccactccgacaaaatcaccaccattttgcacttggcccacaaaaggtacaccatgcattgggtcggtagtaaagggacccttttatactaaaaaatattatactttgaagactactggaactgggagtttggcagtaccgggctacacgcagttaacagggcacgggacgggagcctgtaaactggagtcaatgacacgcaacggcgggcaagggaacacaccggtccccttctattcgtccggacaagggttttggagagaggaaccgtttttttttttcggcgcacagtaattattattaagggcccaaaaaaaaatgttattaccacttccaatc

SEQ ID NO: 65003 - DNA, 401 bp, Zea mays
  Clone ID: MRT4577_159280C.1
gagctcactgacggcggccgccctgcctttacctttttggactgttttccttacatccttgagcaccatctcaaccgtaatacttccaaagtgcagctggggcagcaggctaccccccaccccggggggccaaggcccagggccagcagccgccaaagcctatgaagggggggccccgccaacactccagggtcaccacctctgggctctggatcactggcgggacgaccacagaaatgactgtgttttctcgagccaaagcccgagcccacgtacgtgtgcacgggaaactagttcacacggtcacacaccccacccttccacccaatggccgaaacccaacagcgtattttctgaaaaaaccccgccagaaaatagccacatccaactttttttaagag

SEQ ID NO: 65004 - DNA, 260 bp, Zea mays
  Clone ID: MRT4577_159281C.1
aaccaaaccgccttattttgttacgggaaaaactgccaaccggggggtttcctttataaggggttcaaaaaaaaaagggggatcgggcacccctaaaaaaaaggccgtaccccttgcccccctcaaaaaaagaccccgggggaccccccaaagcgaaaaccggcccggggaaattcccccccaagaaattttccccatcctccacccccaaccgttggagacccgaacacccggttttgccctgcagcggccagggcccc

SEQ ID NO: 65005 - DNA, 346 bp, Zea mays
  Clone ID: MRT4577_159282C.1
gggatgtagcttgggtcgagagctccagcgacaatgtgcatgtttatgatttccatgttgtctacagcttctcctacaaagtcccagtgctatactttcgcggttatcacactagtgggcagctactaactctagatgaggtaaaagagggtcttccttcccactcacagaaagtattaagtgaatcaaagtggacgtttattactcaagaggagcacccccatttaagttatttatgttttggcctgtacccctgtgcaaccagtggttggatgaagctacttctcgaagaaactgaagcgactgataaggagcactcggtgcaatatttaccggcatggttatc

SEQ ID NO: 65006 - DNA, 116 bp, Zea mays
  Clone ID: MRT4577_159283C.1
ggaagcctaaaataactaggctgcatccatttcttatcagccacccaagcaccacctatgggtggggggacttctccccctgccctttattcaaacgccctgaggtgccacggaca

SEQ ID NO: 65007 - DNA, 227 bp, Zea mays
  Clone ID: MRT4577_159284C.1
ttcgaccgtccagaccaaggcgcagggcaggggcgccgcgcacaaaaccaaggggagagaaaccacagccgccgaaacgaggcaaggggaccgccagagcacgcaaaggcacccggaaaagcacgaaggccaacagagggcggcgggaaagaacaggacaccgacaaaaaaaccgagaaccggacaaggaaacagcaaaaagacgacacgggagcgacacacacaga

SEQ ID NO: 65008 - DNA, 374 bp, Zea mays
  Clone ID: MRT4577_159285C.1
ggaagaaaaacaatacggccaaatttaataccccgggggaagggggggggaataagggtttccaaggggggggggaacccccacacggccggttgggtaggacccgggggaaccttaccggggggggggcccctggggggagttcacgggttaggggggggacaaatgcccagaacgcccgggcaggtggggggtttggttttggtaccccggggggggggcctacccggggaaaaactgagggccgccctcggggaggtccttttggggggcagccggttcctaaggggccgggggaaattggcccttttcaatccccttacggttttacaagggaaagagggggggctggggttacatgggggcaaactggg

SEQ ID NO: 65009 - DNA, 360 bp, Zea mays
  Clone ID: MRT4577_159286C.1
gcattagatacaattacttcaaagcgcacaagagcgcgaacgacaccatgcggcagcaggagggtggcgttggtctcctgggttttgctgggagtgccagctagagccatacaaacggatactggcggtggctgccactgccagccactgatgtagcgtcatctacgcatgtgggagcatctgttaacttgcgatcacctgtgcatttccgagcatctgtcaacgtggggccacctgtcgacgtgggaccacctgtcaatgtgccgccatgtgctgatgtggggtcatcagcatgcgactacattactctaccgtactgaactgagcctgattcagagtcatacccatgcacatgcaaac

SEQ ID NO: 65010 - DNA, 392 bp, Zea mays
  Clone ID: MRT4577_159287C.1
caaaatttttattttagtttctgtattcaacaatttagggaataaatagaataaaatggagaaactaaaatttagtctctagaaatcaaacaccccttagggcttgttcggttagatctggatcgaaggggattgtaggggattaaatccctttttatggctactttgtgagccacaaaatcgaagaggattggatgagctagaatcccccttcttattcaaaactaaataagaaaggggattatagccccttcaattccctttgattttctaccttccaaactagccctttgtcaaaattgaatagaaatggatttaatcctctccaatccctttctagagaggtctgatcgaacaagccctaagtcaccctcttaaactttaggaaaacg

SEQ ID NO: 65011 - DNA, 501 bp, Zea mays
  Clone ID: MRT4577_159288C.1
cgtcgctgggggctgttcagaggccgaaggagcaggaggacaggcagaggaagagggaggaagaggggaagatggctgaggacaggaaggagacggtgcaggagaaggacacggtcacggagcagcaccagcagcaggaggagaaggcaatgctggcagagaaagagatggcgttcgcgaaccagcccgggccggccttcgcgagccgcggcctgctgatgaacgtggcgatcgccgtggtggtgctcctcggggtcaccgtccacttgtggcttagcctgaggaacgccactggaggcgccggcgagcacggccacggcccacgggcagatgggggccggtagacatacgaccacgcgatgtgaacagggctgactcgagctggggcgtgagtacactgtacacactacacaatacacgtacacagtacactaaactgaaaggggaaatgggaaataatccaagtacatacaaaagaggcgcggtacagtacatactcgt

SEQ ID NO: 65012 - DNA, 346 bp, Zea mays
  Clone ID: MRT4577_159289C.1
acctgtgctatctttgggtttttttgattttttcaggaacaaaaaaccagccaacttgcttttactgactgaaccgaggaaattgttgaaaactccaaacttgcaaaacccctgcaccactttttactcgcatgttcaccatatgctaatgacaacagtactcgttgtttcacaacagggccccatttcattctccaatgggcaaatatccacaagaccctcggcccttattttggaaaactgcaaactgacctggtgactggtcagaccaatcttgggcccgccaaggcaccacaccccaccaaaagagccatgctttcttgggggaagaagatgcaccacgaga

SEQ ID NO: 65013 - DNA, 335 bp, Zea mays
  Clone ID: MRT4577_159290C.1
gtccgcgcatgcgtaggctgacgcttggacccactgcgacggggaactgcacaggggctaatctcaagtggactactgcacgaggcctactaattgtcagcgataacatcgatggcaccatcagcacacgtaaacaccgaggccggtggcaccagaactgcaatataagcagctcaggtgacccctgtagctgcagaatctacctctatctcaaacttgaaggcgcgccaaccgttggcaacggacagtcgccaatactattcacatcccgacacttgtatcgagactgttatctgctgcagaagcctgagcagcgccatgcaaggctggcagcc

SEQ ID NO: 65014 - DNA, 874 bp, Zea mays
  unsure (1)..(874): unsure at all n locations
  Clone ID: MRT4577_159291C.1
cattgggaccctcgaggccggccgggattggaaccggtgtccggtgagggggatccacgcaactcctgctaccaccaccatcgccgctacagcggcgcatgcagcagccggcacgacgatgggggagcgagacgcgctcccgccgctgccgctcgccctcggtccgccgcatctaatcccgccggcgcccacccgcgacccgcgcgccatcgccttcctccctgacctcgtgggcttccactgggtcgcctacgctgccggctccttccttgtcgtatcccacctcccctccccttgccgggacgacaacaacaacgacagttgctccccgttcttccgccaggtcatcgacctccgcgcccccgtgtccgcagttgcttggtgccgccgcgggagcggagaggtcgccgccgctacagacaattctatacacatattccagcctgcgcccgcctcttctccaggttcgtttggatggctcctgagatggtctatcaccgagacgttcgccatcgttgctgtatcctggaccggctgcggcaatggcattgtggcagttggcgcaggtgtttccatgtgggcaagattggagtcctcctggcagctcgcttggaggtctacaccgcaggtgccgcaagcccttgtctccactacctgttccatgcaaggtcctgtcgcgacagtggcagctcttgctccagccgagggcagtgtgcctgttcttgtgtttctgaagatgccaggagggggctggagcaagctgagcttgtgcatcctcagcctgtttgtatgatcccagtggagatcctgttcgttatacccccatgatctgtctgagatcangagagagatcctcatgacttgctgctttgat

SEQ ID NO: 65015 - DNA, 682 bp, Zea mays
  unsure (1)..(682): unsure at all n locations
  Clone ID: MRT4577_159292C.1
cgagcgagacgcgctcccgccgctgccgctcgccctcggtccgccgcatctaatcccgccggcgcccacccgcgacccgcgcgccatcgccttcctccctgacctcgtgggcttccactgggtcgcctacgctgccggctccttccttgtcgtatcccacctcccctccccttgccgggacgacaacaacaacgacagttgctccccgttcttccgccaggtcatcggcctccgcgcccccgtgtccgcagttgcttggtgccgccgctggagcggagaggtcgccgccgctacagacaattctatacacatcttccagcctgcgcccgcctcttctccaggtctgcttctctggccaactcttcaaattctcatcgtcagttagcttagacggctgttgtggctcagttcagtgtttggagattggaacctgcaggttcgtttggatggctcctgagatggtctatcaccgagacgttcgccatcgttgctgtatcctggaccggctgcggcaatggcattgtggcagttggcgcaggtgtttccatgtgggcaagattggagtcctcctggcagctcgcttggaggtctacaccgcangtgccgcaagcccttgtctccactacctgttccatgcaaggtcctgtcgcgacagtggcagctcttgctccagccgagggca

SEQ ID NO: 65016 - DNA, 799 bp, Zea mays
  Clone ID: MRT4577_159293C.1
aggtccctccagccccccgtacgaaaaccggaggcgaaaaccctcaaaccctaatccccatggcggactccgacgcatcggcgccgccgccagaggtagcgaccgagatgaagattccagtcgtagacctcaccgacgccgtgcaggaagacgctgcatctgacccttcggcagatgcccagaatgccgaggctgctcctgccggcgatctgcagacaagttctgaggtcaagcctcaggagactgcaactgaagcaccaccacaacatcaagaaggcgatgcaaccggtgccctgcaggagactacccgcctaattgatgtgcccaataccaaggtcggtgttctaataggaaaagcgggtgaaacaatcagaaacctgcaaatgagctcaggcgcgaagatccaaatcacaaaggatgcagatgttccttcagatgccacgactcgtccagtcgaattggttggaactaatgagagtattgacaaggctgagcagcttattaagagtgttatagccgaggctgaggctggcggttcccctgccttgatagccaaaggtttcggatctggtcagtcaggttcagagcagtttgagatgctagtccctgataataaggttggtttaattattggaaaaggaggtgagacaattaaaaacctgcaaacccgatctggtgctcgaatccagttaattcctccacatcctccggcgggtactacactgactgaaaggactgtacgtgttactggcaataagaagcagatagaagctgcaaaagagttgattaagcagctatg

SEQ ID NO: 65017 - DNA, 248 bp, Zea mays
  Clone ID: MRT4577_159294C.1
agcacgcacgcctgcagtgagccgggccggagttatattgccgggtcgacgatctctttagtcggcggtcgtccttaattaactttcttgggatagatacaaactggtgacggcacgctgccctcgtgaaacctgctgtatcagggatgttgaatcttgaagaacatacccgaagagacgccatgattcacgcctggagagcataggtgcttagctatcctaccaccaagtgatgcttgttgaacttc

SEQ ID NO: 65018 - DNA, 812 bp, Zea mays
  unsure (1)..(812): unsure at all n locations
  Clone ID: MRT4577_159295C.1
ctcgcatatcccccaggcgcctccagccccccgtacgaaaaccggaggcgaaaaccctcaaaccctaatccccatggcggactccgacgcatcggcgccgccgccagaggaagaggcgccatcagaggttgccgaggccgaaggcgaccacaagaggaagctcgaggaggtcgacgcgggcgcggaggccaacggcgctggggaggacgccaagcgaccgcgcgtggaaggcaacggcgcagatgccgtgcaaaacagtgagtcctccgagccccaggagccagtcgctgtgattaccgagggggcggcagatgcccagaatgccgaggctgctcctgccggcgatctgcagacaagttctgaggtcaagcctcaggagactgcaactgaagcaccaccacaacatcaagaaggcgatgcaaccggtgccctgcaggagactacccgcctaattgatgtgcccaataccaaggtcggtgttctaataggaaaagcgggtgaaacaatcagaaacctgcaaatgagctcaggcgcgaagatccaaatcacaaaggatgcagatgttccttcagatgccacgactcgtccagtcgaattggttggaactaatgagagtattgacaaggctgagcagcttattaagagtgttatagccgaggctgaggctggcggttcccctgccttgatagccaaaggtttcggatctggtcagtcaggttcagagcagtttgagatgctagtccctgataataaggttggtttaattattgggaaagggagtgagacnattaaaaaccctgcaacccgatctg

SEQ ID NO: 65019 - DNA, 800 bp, Zea mays
  unsure (1)..(800): unsure at all n locations
  Clone ID: MRT4577_159296C.1
gcatatccccacaggcgcctccagccccccgtacgaaaaccggaggcgaaaaccctcaaaccctaatccccatggcggactccgacgcatcggcgccgccgccagaggtagcgaccgagatgaagattccagtcgtagacctcaccgacgccgtgcaggaagacgctgcatctgaccctgcggcggccgcccccacgcaggaagaggcgccatcagaggttgccgacgccgaaggcgaccacaagaggaagctcgaggaggtcgacgcgggcgcggaggccaacggcgccggggaggacgccaagcgaccgcgcgtggaaggcaacggcgcagatgccgtgcaaaacagtgagtcctccgagaagcccgaggagccagtcgctgtgattactgagggggcggcagatgccgaggttgctcctaccggcgatctgcagacaagttctgaggtcaagccacaggagactgcaactcaagcactgccacaacagcaagaaggtgatgcaaccggtgccctgcaggagactacccgcctaattgatgtgcccaatactaaggtcggtgttctaattggaaaagcaggtgaaacgatcagaaacctgcaaatgagctcgggcgcaaagatccaaatcacaagggatgcagatgtcccttcagatgccacgactcgtccagtcgaattggttggaactaacgagagtattgacaaggctgagcagcttattaagagtgttatagccgaggcttgaggctggcggntcccctggcttgatagccaaagggtttcgggtcctggtcag

SEQ ID NO: 65020 - DNA, 275 bp, Zea mays
  Clone ID: MRT4577_159297C.1
gaatggggttttttttttttatgtttgtgtttctgctttttttttggggaaaaaaaaaggtccccacgttgcctttccccccgaaatgcatcaaaatttgcccccaaatggggggtttcccggggctttccccagaccttaagggttccctttgttttgaaaccatctgtttggcaaattccacaaacaggagttaaaggggcccccgctttgccgggggggcattttttttgggggggaaaaaaaggggcccttgcccggtttcgggggcgttt

SEQ ID NO: 65021 - DNA, 108 bp, Zea mays
  Clone ID: MRT4577_159298C.1
ggaggaacttattcccttttttggacattttcttgtggcctaccacgccccagaactggggttccaaagagttaaaattaagcagcttgcgttcgaggtattggaacc

SEQ ID NO: 65022 - DNA, 837 bp, Zea mays
  Clone ID: MRT4577_159299C.1
agcggtctccaattcccagcgcgcctccagcctagcgccaggccttctccgcttctggcccattggcccatgttccgataacgtcgcgtttgtgaagatttgttcgacttcttccgtttatcttctttatggactcgttcttcttccttgcggcgtttcaggcaagatgaccataccctcgaaatcacttctatctttgcttgctagttgtttcgctctattgctatgccgcgctacctaccacttaccatatcatgcctcccatattgccatgtcaagactctaacccacctttcctagcaaaccattgtttggctaagttaccgcttttgctcagcgcttcttatagcgttgctagttgcaggtgaagttgcagttggtttcatgttggaacatggatattttggcatatcacaatatctcttatttaattaatgcatctatatacttggtaaagggtggagggctcggccttatgcctggtgtttcgttccactcttgccgccctagtttccgtcataccggtgttatgttccttgattttgcgttccttatgcggttgggtgatttatgggacccccttgacagtttgctttgaataaaactcctccagcaaggcccaaccttggttttaccatttgccacctaagcctttttcccttgggttttcgtgagccagagggtcatctttattttaaacccgcgggccagtgctccttcgagtgctggtccaaacctgggcgatgtccggcgccccctgggcaaaccaggtctatgccaacccgacgtcttgcccatccggtgtgccctgagaatgagatatgtgcagctcctatc

SEQ ID NO: 65023 - DNA, 659 bp, Zea mays
  Clone ID: MRT4577_15929C.1
ccggccagccgcctgtctctactcctctggagctcgctgccaccggactccgacaccctcgatcacgccgacagccgaggaaaggacgatgtggctactgccagcgtgctctccgatgcgctgaacgccatggacaacgctgagaagatcggcaagaggcaggtcatgatcacgccgccaaccaaggacatcatcaggatcctgacgcgcatgcaccgacaccgctacgttggacagctctagtacgttgatgaccaccgatacggaaacatcgagctgcaactcagcggaaggctgaacaagtgcgtggtctcagacctcgctttgatatcggcgtgaaagacattgaggagatggactgcaaggctgctcccgtccatacatttcgtatacatcgtcctcacaacttctgcaggcatcatggaccactaagaggcccgccggaatagcgtaggaggcaaggctctaggtttcttctattgaagaagctgagaatctttgatatggactgcctgcctgtgttactctctcagactacagtacctgatattttactttactatgactctctcagactagagcgacttcttttacttagatatcggtgactgcattggcctttcactttaaaatcggagactgcattgatcgattatctg

SEQ ID NO: 65024 - DNA, 864 bp, Zea mays
  unsure (1)..(864): unsure at all n locations
  Clone ID: MRT4577_1592C.1
ctcgaggccggccgggaatcaatcagtgtgaccatccagcacattcccatgacgtgccacgccagcctgctgctgccggcgctcgccgccgtcctgctctgctgccccctcgcgcaatgcgggcagcagaactacacctccatgttcagcttcggcgactcgctcaccgacaccggcaacctgctcgtgtccagcccgctctccaaccacatcgtcggccgctacccctacggcatcacctacttccaccgccccaccggccgctgctccgacggccgcctcgtcgtcgatttcctagcgcaagcgttcggcctgccgctgctgcagccgtacctgcagtcccgcggcaaggacctgagccggggcgtcaacttcgccgtcggcggcgccaccgccatggatccgcccttcttccaggagatcggcgcgtccgacaagctctggaccaacctgtccctcagcgtccagctcggctggttcgagcagctcaagccgtcgctctgcagctcaccgaaagagtgcaaggagtacttcagcaagtccctcttcctggtcggagagatcggggggaacgactacaactacgccttcttcaagggcaagaccctggacgacgccaagacctacgtccccacggtcgccgccgcggtcaccgatgccaccgagaggctgcctcaggacgtacaacgacttcgcgcagcaccacaacgcggtgctccagcggaagctgcgggcgctccgggcgaagtaccgcaggcgaggatcatgtacgccgactactacggcgccgccatgtccttcgccaggaaccccaaagcagttcngnttcacgcaggggcccgctgcggacgtgctttgcgcggc

SEQ ID NO: 65025 - DNA, 524 bp, Zea mays
  Clone ID: MRT4577_159300C.1
cacccttcaactaccacacgccactgtacatgtgtcaaggaacacaaaaatgtattgtcaagcatcacatccaagaacgaaaaaaaaaatccatcaatcggtgtcgtcatgtatcgaagctgagatttcctgcatcccacattgcgcgtctcagcgttccagcgtctaccatatacctcctaatatgccctttttctttcatttggacgaaaatgttcggctcttaggtcgtggtggcctcgcttcatgctcaggagcatcactcctgccactgttattcttgccttctcagcattcaaatcgatacacctcagagcagtcaaaagggcacgtttcagctcctttgtcgaaggccttctctcaaggtttgggtccaccacttgttcagaacgtctgttggcaaccatcattttaagccagtcaaccaggtttacctgtaatagcttccaacagaacaaccccaaagctatagacatcactcttttcatttagaagtccactggtagcatattcaggtgcaacat

SEQ ID NO: 65026 - DNA, 1553 bp, Zea mays
  unsure (1)..(1553): unsure at all n locations
  Clone ID: MRT4577_159301C.1
atcgttttgcaaaggataatgtaattggagagggtgggtatggtgttgtatatcgaggcanattatcaaatggcaccccagttgctgtcaagaaaatccttaacaatttaggacaggctgagagagaattcagagtggaagttgaggcaattggccatgttcgtcacaaggatttggtccgccttttgggttactgtgttgagggtactcaaaggatgcttgtgtatgagtatgtgaataatggaaatcttgaaagttggctccatggggaattgtcccagtacagttctctcacttggttggctcgcatgaaaatccttctgggaactgcaaaggcccttgcttacttacatgaggcaattgaaccaaaagttgtgcaccgtgacatcaagtccagcaatatcttgattgacgatgagtttaatgccaaaatatcagactttggtttggccaagatgcttggtgctggtaaaagccatattgctacacgagttatgggtacctttggctatgttgcacctgaatatgctaacagtggacttctaaatgaaaagagtgatgtctatagctttggggttgttctgttggaagctattacaggtagagatccaattgattatgatcgccctacaaatgaggtaaacctggttgactggcttaaaatgatggttgccaacagacgttctgaacaagtggtggacccaaaccttgagagaaggccttcgacaaaggagctgaaacgtgcccttttgactgctctgaggtgtatcgatttgaatgctgagaagaggcctagcatggaccaggtggtccggatgttggattctaacgaactcatacctcaagaggaaaggagacaccgaccaatccgaatccctgagagttcagaaaccgagccactgcggggcaagaataacagtggcaggagtgatgctcctgagcatgaagcgaggccaccacgacctaagagccgaacattttcgtccaaatgaaagaaaaagggcatattaggaggtatatggtagacgctggaacgctgagacgcgcaatgtgggatgcaggaaatctcagcttcgatacatgacgacaccgattgatggattttttttttcgttcttggatgtgatgcttgacaatacatttttgtgttccttgacacatgtacagtggcgtgtggtagttgaagggtgtatagttgtattacttagttcctagttcgtaaaaaaaaacttcaaaagaagaatgcgttcctagcaaaaaaaaaagggaaagggaaaaaagatgggcgtgtgtggtggtcggttgcagcaactgttatctggttgctatgaactccaaagtgcatgaagagatcaatgtaaccctggatgatgtttgtgtttgtttcgtttactcgtagaatataaaggggagaaagaagaattggcttcaaaaaaaaaaaaaaaaaaaaaaaaaaaaagtgaaaaaaataaaaaaaaaaaaaaaaaaaaaaaaaaaaaaaaagaaaaaaaaaaaaaaaaaaaaaaggggggggcctttttaaaggatcaaag

SEQ ID NO: 65027 - DNA, 327 bp, Zea mays
  Clone ID: MRT4577_159302C.1
caacagaaacacgactggtggaacaaaaacaaatgcgcactcaaattgagggcgcgaccaaagaaaatttgttgggagcaggcaactttacttgtgaccctaaccaacaggcaagggccgagttaaagcttttttgggggggctcctactaaacaaaatcctaaacgctccaagttttccaaaaaaaacaggttttgttcccccacatgatccccctattttttcttaatgatcggaacgacgtcctaatggtaaagctaaggctccttgccaactcttggaggcttatgtttcacacggaacccccatcccagggcgtttttaaat

SEQ ID NO: 65028 - DNA, 250 bp, Zea mays
  Clone ID: MRT4577_159303C.1
gtggatctgaacgacctcgagtccatggatctgtcggcggacgctgctccgctggagcacatggagccgttcgtgctggcatgcgcgcgggtgctgggcccgacgccgggccggacgcgtggcgtcgccgacggccgggtcgtcttctgggacggcaagcggtgggtcccattcgcgacggcctctccgcgctggacgcaggagctctgcggcgggcccaaggcctcgccgctggagtatctccccacgc

SEQ ID NO: 65029 - DNA, 388 bp, Zea mays
  Clone ID: MRT4577_159304C.1
ttttttttttttttttttttttttttttttttgttttttttttttttttttttttttttttttttttttttttttttttttttttttttttttttttttttttttttggggacaaaaaaaagggccccccgggggtacaaaaaaccccccaagggcgggccaaaattttaaacccccccccctgggaaggggggggtttccggccccccaccaaaaaaaaacccccccccaaaaaggggggccctttaaaaaaccttgggaaagggttatttccgggacccttactaaacccatttcttttttcaaactacaccccccccgaaaacaggttttgggccccagccaaacccggtttttgctaccccggaaaaaagggcgtctttttgtt

SEQ ID NO: 65030 - DNA, 386 bp, Zea mays
  Clone ID: MRT4577_159305C.1
agcgacgaagcagtcgcctaggcagctgacggtggcagctctagcatgcggtcggcgctgtcagcctgccccgcgaggtcgaggagggagagggagcgggacatcatgcccctggcgacccaggcgccaaggcggaaggtgctgacgaggaggtctgtctccctcactttttgattttttgcattagattagaccttttgcttaggaagttgtatctgatagaagaactatgaattgacatgttgtcaaagttttcgcttcccgtgaaaatgcatactctcaaggtctgtgttgacattgtgacccgttcagatcctacgtacttcaacatcaatcatttggccctcctgtgatttggggctcaatgtcctattaatatcacgtgc

SEQ ID NO: 65031 - DNA, 307 bp, Zea mays
  Clone ID: MRT4577_159306C.1
cggctcgagcttgaatgtacaacccaccccactgtcgggaaggcctccgtcctcggcccctgcctcttgctgctgtcctgtccccgagcccctgcaggtccccccccgcccccccactcaagagttaagagcaggtggctgcaggccttgggcccggagggaaggccactgccggccacttggggcagacacagacacctcaaggatctgtcacggaaggcgtcctttttccttgtagctaacgttaggcctgagtagctcccctccatccttgtagacgctccagtccctactactgtgacggcat

SEQ ID NO: 65032 - DNA, 296 bp, Zea mays
  Clone ID: MRT4577_159307C.1
gacgcgaggtatttctggaccatcgataaccagcctaacttcaagaaggtgattgctgtggtcaaccaagcagagtttgtacctcctattccgaaaaagggtgctccttctaaggagccaaacagcaacagactgcaagaaggacgcttcaaaggaggctaccaagacaaaggtggttgatgcacccacctaagaggatgcaccatatccgatgacaaacaatactctcgacttgctgccaccaagccagatggttcttgatgactgtgataggctatactcacacacacagacca

SEQ ID NO: 65033 - DNA, 854 bp, Zea mays
  Clone ID: MRT4577_159308C.1
actcctcctccacacaccaccctcccccatccgccgccgcctccacctccacaggggaaggaagggaagatgtcgcaccgtaagttcgagcacccgaggcacggatccctcggtttcctccccaggaagcggtgctcgcgccaccgcggaaaggtgaaggccttccccagagatgaccaatccaagaaatgccacctcactgccttccttggctacaaggctgggatgactcacattgtgcgtgaggtcgagaagcctggttccaagctacacaagaaggagacatgtgaggctgtcaccattgttgagacacccccgattgttattgttggacttgttgcctatgtgaagactcctcgtggccttcgtactctcaactctgtctgggcacagcatctcagcgaagatgtcaggagaaggttctacaagaactggtgcaagagcaagaagaaggccttcaccaagtatgctctgaagtatgacagtgatgctggcaagaaagaaatccagatgcagcttgagaagatgaagaagtatgctactgttgtccgtgttatcgcccatacccagatcaggaagatgaagggtttgaagcagaagaaggctcacctcatggagatccagatcaatggtggcaccatcgccgataaggtcgactatggttacaacttctttgagaaggaagtccccattgatgctgtcttccaaaaggatgagatgattgacatcattggagttaccaagggtaagggttacgaaggtgttgtgacacgttggggtgtcacccgtcttccccgcaagacccacagaggtcttcgcaaggttgcctgtattggtgcctggcatccttgcta

SEQ ID NO: 65034 - DNA, 394 bp, Zea mays
  Clone ID: MRT4577_159309C.1
cccttcccaagaacactatattgaagagggttttaaaattaaaaaacttgtggaaggggtttaaaaaaaaccttgaattaaacattcattaattctttgaggtaaaaaacacattttttccggccggggggcattccttgcttgggttattgtaaaataagaaacttagttttggaccattggaccaccagtgcttggccattcaattaagggttcggtttaatattggcattcttatttttttgatcggctttttcaacttaccaagggccgggttaattaagcattccaaaatattaatcttaatgggggccttttttcaggaattcatttcacaattggccgaaggcaatgtacctaacatgaaatccttccagttggccaaagaaagggt

SEQ ID NO: 65035 - DNA, 258 bp, Zea mays
  unsure (1)..(258): unsure at all n locations
  Clone ID: MRT4577_15930C.1
gggattcagatcttcatcanatcatactctgagatcaaccggggactgatgaggcatcccagtacttcttctatcagttacatacacatggctaaaacatgtgcactcaccacatatactccaccgcgatctgaagcccaacaacttgttcctaaatgcaaatctgaacctcaagaatgcacactttaggctcacaaaaaccacttcagagacagatctcatgacacactatatgctcactccgtggtacccggcacc

SEQ ID NO: 65036 - DNA, 393 bp, Zea mays
  Clone ID: MRT4577_159310C.1
atcctctacaattggccttgtatgaagtatctatcttgatatatagcaatgcctaattgggctggaaggtaagtttttcttcatgtttgagttttcatcttccgatgaaagacaaacgagatgccattgctgtcaagatcaataggtgtaaaatttgtaaatcagattcattaccgcaacaaatatttcacttcctttcccttgccaaaatcccttatcctcggtgctagcactgtgaatatggtgtatttttctttctcgtttttactggatcatgcatgcttccattccattacctgtccattggagcaaaattcttgatttatttatttaattaataatatggattattgaagggtcaaaaggagtacatgattatacaatcagaaatga

SEQ ID NO: 65037 - DNA, 350 bp, Zea mays
  Clone ID: MRT4577_159311C.1
gcacctctgagttcggcaaggctctcggcggtgctcagtacggcggtatctcctcccgaagcgagtgtgatagtttccccgaacttctcaaggacggctgccactggcgattcgactggttcgagaacgccgacaaccctgacttcaccttcgagcaggtccagtgccccaaggctctcctcgacatcagtggatgcaagcgtgacgacgactccagcttccctgccttcaagggtgatacctcggccagcaagccccaggcctccagctccgctaagaagaccacctccgctgctgctgccgctcagccccagaagaccaaggattccgcccctgttgtccagaagtcc

SEQ ID NO: 65038 - DNA, 139 bp, Zea mays
  unsure (1)..(139): unsure at all n locations
  Clone ID: MRT4577_159312C.1
gagtaaatgaccaatccggttttatctggatgtcatggatggtctacggacnttgctggctttgcttccgaacgcaacatgcatactggtgctgtaagacggtacctcttgacttaatttgccctataatatgatttgg

SEQ ID NO: 65039 - DNA, 279 bp, Zea mays
  unsure (1)..(279): unsure at all n locations
  Clone ID: MRT4577_159313C.1
gaannccggggccgacccactcttcctctgacccgtgtccccaaatttcaccattaattctcatcaagaggccgccnacaggggagggagggtctttttcttttagggggagccacctcctcctaatcctcgcagccgccgtcctgctctccttgctcgcggttgccagccccagctccgggacctcctgcttgccgttgtgggccatcccgtacaacccgttcccaagctgccgtttgtacatgaccagcctaacctgcttgatttttccgcgccttc

SEQ ID NO: 65040 - DNA, 474 bp, Zea mays
  Clone ID: MRT4577_159314C.1
ccggccgggacaccaattccccagcccgcaatgaaagaccactccaatcccagcgcaagtgcaaacagtatcgtttccttccttgcagctagctataatgattcttgacgacgatagtgacgtttttgctcgaggatgacaccgcactggagtcgcgtctgcatggagcagctgctcaactgcgcaccgttcccgcgccggcatgcactgcctcatggtgcgaaaactccccttcgagtcgccagctctggacccaccggcgccagcgcacggcctccacgataccacaacgagtctgattattgtgtccatttgtctcacgagtttcaggctactggccgacgaggccttacacctactattctgctctggaagcacctaataacaaatactgaatgttgagcaatgatccaccgggtatttctcgctttcctctagacaggagatctctatcggctatactacactgtgctg

SEQ ID NO: 65041 - DNA, 259 bp, Zea mays
  Clone ID: MRT4577_159315C.1
ataaatattggtgattttttaaaatttatgtatatttgtaaatttggtatggtctttaattttaggccaaaaaaaagagggcagtgctatagttttattcaactgcataaatacgttacgaagaacaacaagaaattttctggcaaaaaagagcttgccgtgtggaggaccaaaaaggcgggagctcaggcctttggacaaccaattagtggaaggaaaatagctacgatttttgcaactgaccgggaagaaaaacact

SEQ ID NO: 65042 - DNA, 480 bp, Zea mays
  Clone ID: MRT4577_159316C.1
tgtagccctgtcgcggccgtgcgcgttggtgggcgggtgtctgctttgcatatgcctggcgcgtgctgttccgcgtccggagaattgggggaagcgcgcgcgcgcggagcgcatcgtagcttcctgcgctggacgattccgggatatggacagcgcggcgcgggcgacccaaaagtggcgagcggtggtggctcaagaccaggggatggggatcccgcctcgagtgcgcggtgcgcgtccagacggccaggtccaggctcgcgctgctgcaggacgggaggctgccacgtgcggtcctggggttgcgcggtcggtttctaccccggtcccgggcagaatcttctccgccagagcacaaagcccactaccgccaacgctcgacagggaccggctatggacggccctattgttgtggcacatgtccggacagctgcttgggtggtctctgattctgaatgaccgaacactcctgtacaaaca

SEQ ID NO: 65043 - DNA, 495 bp, Zea mays
  Clone ID: MRT4577_159317C.1
acaagcttttttttttttttttttttttttttttctttttttttttttttttttttctttttttttttttttttttttttttttttttttttttttttttttttttttttttttttgtttaccccccccgggggggccctccaaagggaaaaagccagccaccagggggccctaactaggggcccccagcaagggaccaaccttggcaaaatcaagcgcaaaagagagattccaaccgaaaaaaatttatccccgcaaaattgcccaaaaaaaaaaaaccaaaaccaaaaaggggaaaaccggggggccccaaaaaaggaacaaacagaaattaattgggggggggcaaaagccccaattccaaggggaaaaaccggcgggccacgggcaaaaaaaaaccgccaaacccccgggaaaaagggggttcggtaatagggcccttcacactttccggggaaaagacagggtagaacttgggggtccgggggcagcaaa

SEQ ID NO: 65044 - DNA, 297 bp, Zea mays
  unsure (1)..(297): unsure at all n locations
  Clone ID: MRT4577_159318C.1
atcacaatnaacatcaccttatcttntatcctcatttcaattgcattctgattgcctcaaataaacttatactccgnaaaagcaaacccatatgaatgtggcttcgacnccaacaagttctgcacgccttccttttncaatanaatttttcttagtagncattacatttctnctatnncgacctagaaatcgccttactanttcccctcccatgagcgattcaaacaaccaataccantacaataatagcaactgcctttatttnagtcatattttagctcttggcctaagctacga

SEQ ID NO: 65045 - DNA, 269 bp, Zea mays
  Clone ID: MRT4577_159319C.1
agctcgccatggcctctttctcctctgacgccgccaccgccccttccttcgccgcaccagcgccagtccgcgccgtggtcagaaggaggtccttcaccgtgcgcgcctctctccgcaaggccaccggcaccatcgccgagccactggctgctagcgccatgcttgccggagatgacatggcccaggaggtgatgctgggcgcacgcgaccgcggcctcgtcctcgagcccagcccgcacaccgccaaggtacatttacaacatcacatt

SEQ ID NO: 65046 - DNA, 1014 bp, Zea mays
  Clone ID: MRT4577_15931C.1
gcctgttcttgtcactgcctacatctgccactacaatgttcacagcatcgataatgagctggaggacacaactcagattaaaccaattgtgcaaacttctctgggactctgctcaagtgtttacattgcaacaagcttcttcgcatatctcctctttggcgaggctaccttggctgatgtgcttgccaatttcgactctgaccttcgcattccgttgagttctgccttcaatgacatagtgagagtgagctatgtcgtccatatcatgcttgtcttccctattgtattctttgcccttaggctcaacttggatggattactctttcccaccgcaaggcacatttccggtgacaacaagaggttcaccattatcaccatctcacttattgctgtaatttatcttgctgccatcttcataccaagcatctgggatgctttccaattcactggcgccacagctgctgtgcttatcggtttcatctttcctgccatgattatactaagggacccatatggtgtttcaaccaagcgtgacaaggttttggcggtaacaatgattgtgcttgctgtggtgtccaattgtgtggccctgtacagtgatgcgttcaacatcttctacaggaagcaggaggcctagagcccatacctcaggggaagagaacctctttgtacaggtcaagggtgattgttgagcttcaagtaagctactactgagcagcagtaccacgaatctcatggtggtcaatagtttttgtttggtcacttcgaagaaactttggtttgctgcgaatatttgtctagtttcctgaacataaactgcctccacatctggatgggaccacgtgtgctatgatcacccgtggaacaatttttttcttgtaatggatgattgaaatagctgtatataaatatataataatatgccccgatgcagtagcaaaaaaaaaaaaaaaaaaaaaaagaaaaaaaaaaaaaaaaaaaaaaaaaagaaaaaaaaaaaaaaaaaggccccta

SEQ ID NO: 65047 - DNA, 741 bp, Zea mays
  unsure (1)..(741): unsure at all n locations
  Clone ID: MRT4577_159320C.1
ggtacccgggnccctctccctcgagtttttttttttttttttttttttttttttttttttttttttttttttttttttttttttttttttttttttttttttaaaggcaaccccatttttaaattcaagggccccaaaccgttttaaaaaaggcaccagggttcaccccacctggggccccccagaaccaaaaacaaccaacctgggccccccttaggggcccaggaaaccacctggcccccacctttggaaaaacctagccatagttaacctaaaacccaattttaaaaacaaaacccccccacaatagtccactttggggggctaaaaacctttaaaccccgggatggggggcccccgggtgaaacccaaaaagggggggaaggaacccaggcttttttggggaggtttttttaaaccccttttttccctaaaaaggtttccccctggaagtttcggatcccattttaaaataacccacctttggggaaaggccccctttttttggcttccaattccaaaccccacccggaaaaccggggcccggggaaaaattggcccctttagggggcctttgggggggggaacaacccccggcaacacaaaaaaaagttgtggtttggccacccggaaaaacaacttttttggcggacttggggcccggcccatttggggcggggcacccaaaaaggcctcccataaaaaaatgggtttctgcccagcccggaaaaacccattttt

SEQ ID NO: 65048 - DNA, 513 bp, Zea mays
  Clone ID: MRT4577_159321C.1
cgaagatcagccctggagaccaagccatgttgtcttcgggaaatcaactatgaagcaagggcagattgatgcttcggagagtggctaatccggacacagtaggcaaactacagctgaagtgggaaggaccttttctcgtggtaccttcgtcaaggcctggttcttacaggttgaaggatatggacgacaacgatattcctagatcttggaatgcggatgagcttcgacgatattatgtgtaatttgatgtaatcttttttcatttttttcctatggcgcccttttcctttccaatggaagagaaaggtttttaatggggccatagtttgtaatttttcttttcttattcagctccatgagagcaaaatcccccaaaagaatgtaaaatgtaacatctgagcgggcaccatcgagtgcagagagaaaaaaaaccagggagaagctcaaaagtcgtccctaaagggatgcagagcacgatgaagctacaaaaagtcgttcctaaaggaacgcagc

SEQ ID NO: 65049 - DNA, 232 bp, Zea mays
  Clone ID: MRT4577_159322C.1
tttatattcaattcaccactcacctaacgggggggatcaaaacaacagaggtggggccaattaacatcatctctcactcccttatctcgaccccatgggggatctcattactatccacaacagccattccctttttcatgtcgcattctcatgcttctatctttactgctctttgctttttatccattttgactttttggtaaccctttactataccattgttttatttttt

SEQ ID NO: 65050 - DNA, 645 bp, Zea mays
  Clone ID: MRT4577_159323C.1
aattcggcacgagtctccactccacccgcgcacaacagatcgcacgcctcggttccctccactcgacgcttctcccgctcctaacccctagtaccttcgctcgctctgccgcctccgccgacgacgcgccagatccgcgcagcagtggtgtcctccgccgcggatcgagctcccgatccgcgcagtgggagtggcggcgagcgcaggagcgctcggccgggggttccgcgaggctggagacggaggaggaagggagcggtagttccgcggtggtagatccgccggtcctgtcgccggagatggactcatctgtcgagaagcaggggagcgtggcgctggatccggacgagcgcgcgccggcgtccggcgaaaccaaggcctgcaccgagtgccacaccaccaagaccccgctctggcgcggggggccctgcggacccatgtcgctgtgcaacgcgtgcgggatccggtaccggaagaagagacgggaggccatgggcctcgagtccagcagcaaggccgccaccgccggcggcagcgagcaccagcagcagcagcggaagaagaaggccaccgcggcggcgcgcgggtaagcctcaaagggagagggagctagggagcggggaccgggaccggagcggaacaagg

SEQ ID NO: 65051 - DNA, 804 bp, Zea mays
  Clone ID: MRT4577_159324C.1
gcgatgtagctcccccgcaccgtgccccctctctcttggcgtgatgcccgcctcccacccccttgctccgcaccgcacggatctagcgcggccgctgctcagccacggctccgcacaccctcccttcccatgatacggagctgtcctatcctgctcgcgaggcaacgaaagggtacgtgatcctctgtctacatggaaggtgaggcagatcggggggagagtggctcgtggcagtcgcctcgatggcgtccttcgcgccgtccggcgaggtgtcgtccaagcacggcgtcgtcggctacgggatcgtgggtgggcccaacggcaacgccgtcgcgcccgctgccaagtccaccgtcgtcgagaccaccatcgagagggttatcttcgatttttggttcctggcgctcctccccgccgctcgggaaccactccaccgctgagaccgtcgtaacgatcggctccgttgtggcccgcctgtgaccccgtatccgcttgcgctcagctagggttcagatctaaaaatggctgatgtcggtgcgaggaggggaatgcccgctgaaggctgaagctgcccccacgggctacagtaggtgccatcgctcgccacaccgaacaccccactgccctccagaccgtgctccagggccctacggcgataggaggccactgaggatggatcagtgcggtactgctgccttccggaggacgccgagcgccggaaggggggctcttctattggacttggagcaagcccacggcaacaacgccggaagcaaaatggcctcttctctagaaggacatgag

SEQ ID NO: 65052 - DNA, 251 bp, Zea mays
  Clone ID: MRT4577_159325C.1
cggtcgacccacgctcggagaccaaccccccgcctggtgggcaggaggagactgactgagagacggatgcaaagaggagaggacccacccatgtaggtcaccgcaagcctggagcactgaactgaggacttagtccagactttaagcccattgtgaagaccaggagtgtgagcttgtccgtaacaggaaagtctggaggagggaagcgtccaagtaatgactattaggcatgcaacggcttggagcagaca

SEQ ID NO: 65053 - DNA, 1435 bp, Zea mays
  Clone ID: MRT4577_159326C.1
gccggccgggccgggaccgggccgggaataattgaggttccactctgtctgttccctccttcctgctgttacaatgattgttactattagccagtctgagtaatacatgtgcatttggtattgtccttgtttactagtagctaatagctgttaagatctaaaaccagccatccgtcttctgggaagaagaggtatagtctcccgatcctagttctgcctctccagttgcatccttcgtcactcactctccctacatcctgtcacgagactggtgttcagacctgagagacctttactcccatggttcagatgtctttgcagaggagcatagccgtatatcctcgttgctccttatctgattcgttccatcgtgtgggtggttcacgaagaagatgggcctcttgtaggtcccagtcatcacgttttgcttataatgcaagaccatccccaattgttctcaagaccgaccatgcaattgatccccctgaaccaaaggatttggatgcaagttcctcagcttcaagaagtggaccttacattgggacttgccatccatcaggcgcagtcggagtgatgggtgcgtcttcctcttcctgcctcagatttttagagaaatttgtgagttggagcactggaggtggagaagaggcacctccgttcatcatctgcaatgacccgcttgtcaagaaagagctgttgccatctggaacccaatccacttctggctgcagtgccagtattgctcttgggaagttaaggcagaagaggctcttcttggagcaatctggagcatgctgtattgttatgccatgccagttcttacatgcctggcatgatgagatttcgcagggttgctcggttccgttcatccatgttggtgattgcgttgtgaaggaactcaaagctgctaacttgaaacctgttgagtatggaagtaatggcccgtgtgggagttctcttcactgacaataaattggctacaaactgttaccctagacagttggagagccagggttttgaggtgctatgtccagataaggcttccatggagcgtacagtgttaccatcagtggctgcattcgggaagggggacatggaaggtgcgagaaacctgttgcgagtgtcgctgcaggttcttcttgtgagagctgtcaattcgataatccttgcgtccgatgaccttgtaggcattttgcctgatgatgaccctcttctcaagaaatgtatagacccactggatgccctggtccgagaggccatcgcatgcgcccgagcaccacggccatgattcgccgccctagctagattactctgtttacaccttggctgctctgctgatgagcacatatgtaaataagttttacacaaggtagaaaaagacggatattggttgaacacattacgcattttcatttatgttagcccatgtaatgtc

SEQ ID NO: 65054 - DNA, 292 bp, Zea mays
  Clone ID: MRT4577_159327C.1
acctggacaagcttcaggagcagcttccagaactcttggaaataatcaagccaaaacttgaaatgattggctttaagaatttttcttctatctcagcagccctggaggactcccagagctctttttcagcctgtgtgccctccttgagtagcaagatcatccaggatttaagtgactcttgcttcggtttcctaaaaagcgccctggaggttcccaggctttaccgaagaaccaataaggaggtcccaaccacagcttcctcctatgtggacagtgctctgaagcccttatt

SEQ ID NO: 65055 - DNA, 157 bp, Zea mays
  unsure (1)..(157): unsure at all n locations
  Clone ID: MRT4577_159328C.1
cccactcttccggtgacacanaaatttttaaaaagtatttcatacagttgcaccagctctttcaagactttttttgaattttttaagacccccaacaatcaccctttcatccctattactactttctattactactatcctaatttcatttttattt

SEQ ID NO: 65056 - DNA, 729 bp, Zea mays
  unsure (1)..(729): unsure at all n locations
  Clone ID: MRT4577_159329C.1
ctctcttcggctgggccttctctcctcgtctcctctctctctctctctctctctctctctctctctctcatggcggcggccacctcctcgtcggcggtggcggtatctacgccgcagggagtggcggagcggcggggaatcccggcggcatccttcgtcgaggatgtcgaaacctacctccggcaggccgggctcgaggtcaactccgccctcgccttcctccaagaaaggctgcagcagtacaaaatggtggagatgaaacttttagcacaacaaagagaacttcaggcgaaaattcctgatatagagaaatgcttggatattgttgcgacattgaaagctaaaaaagctttgggtgaggcactcatagctgattttgaattatctgagggaatctattcgcgtgctaaaatcgaggactctgactcagtgtgcctatggttgggtgcaaatgtgatgctggaatactcctgtgacgaggccaatgagctcttgaaaagtaacttggaaaatgcgagggccagtttagaagtccttgttggcgatcttcatttcttacgggaccagcaaacgataactcaggttacaattgctcggatatttaactgggacgtgcaccagcggagaagcaagcagtctgttatgaaagaaacatgatcatcatagggtatgcgcagccaatgaaatcgnggttatttttgtacttcttgctgcctctggcgatttagt

SEQ ID NO: 65057 - DNA, 206 bp, Zea mays
  Clone ID: MRT4577_15932C.1
ccttctcactagtagacaaccccatagccaagagtatgttgtagactttatctatgaactcataggtttcttcaaccttggacccgtaaaaagtaggaggattcatccgagtgaaatcccttagacaggaagacatggtagcaacttgttgatttggacggggtataacctcctggttagcttgggttgtcatagctaaagcttgg

SEQ ID NO: 65058 - DNA, 299 bp, Zea mays
  unsure (1)..(299): unsure at all n locations
  Clone ID: MRT4577_159330C.1
gatttcctcccactacttcttgttagattttatgacctcctattgtaccacatctcatctttccaagttggttctcaaacatgtctgttaccgtcacaaagaccaagacaaatgtcaatggccaggacaatgaaaacatagcttctctgacgcttactgctccagtgaggaccgtgccactcaaaccatccagagcgctggatggntatgtacgcaaagagatcactccagtgataggtactgagttcctgatgccatgttgtggacagctgcatgctccacgctgatgacctctgcgc

SEQ ID NO: 65059 - DNA, 422 bp, Zea mays
  Clone ID: MRT4577_159331C.1
aaaaaaaaaaaaaaaaaaaaaaaaaaaaaaaaaaaaaaaaaaaaaaaaaaaaaaaaaaaaaaaaaaaaaaaaaaaaaaaaaaaaataaagaaaaaataaatataaaaaaaatttaaaaatgaacacaaagctgtttaatcaagctgggggcgggcccccttttctatggcttcccgctgttctcccccccttcctgtccccttttttttggttctttttttgcgtgcccctctttcgtttccttggcgggttgtttcctaggtcacctccgggctcccccccctttttcccccccttgtaatccccgtggggccccccttttttccccgttctgtatactcggcagttggctcccccattggcgtttcctccattttgggggccgggatcggggctgggtcccccccctttctcgttttttt

SEQ ID NO: 65060 - DNA, 956 bp, Zea mays
  Clone ID: MRT4577_159332C.1
tcgcatgcacgcgtggggaagctcggaattcggcacgaggtcgacgccgccggcacgctgctcgcccccaccgagcccatggcgcaggtgtacaggacgataggccagaagtacggagtgaattactcagaggatgagattctgatgcggtaccggctagcttatgcgcagccatggggtcgatcgcgtctgaggtatgtcgatgacggaaggcccttttggcaacatatagtgagctcatctaccggctgctcagatctacagtacttcgaggaactgtaccagtactacacaactgagaaggcctggcgtctctgcgacccagacgctggacgtgttttcgaggcgttgaggagggctggcgtcaaaacagccatcgtgtccaacttcgacactcgtcttcggccgcttttacaggcgctgaaatgcgacggctggttcgacgcagttgctgtgtctgctgaggttgcagcagaaaagccgaaccccacaatattcttgaaggcctgcgagctgctaggagtgaaacctgaagaagcggtgcacattggtgatgaccgtaggaacgacttatggggagcgagggatgcaggctgcgatgcctggctttggggcagtgacgtttactccttcaaggagatcgcggagaggatcggagttgaggtgtagcaagttgtttctcctcggtcggcgccacttaccccgggcgtcttgtacatattcccaagagaaataacaagagcatcagtttctcctgtgtgcgactgtgccaggccttttgtagcaaataccgatgtgcatttccacgcttccctgtagcaaatactgatgtgcaggagctctgtccgggttgaattcacagagaagagggtaccaaaaaggacagctaaaatgcaatgcagagaaacaagaacagcaaactcacacaaataatggcgaaagcttctcttttgccc

SEQ ID NO: 65061 - DNA, 838 bp, Zea mays
  unsure (1)..(838): unsure at all n locations
  Clone ID: MRT4577_159333C.1
ggtccggaattcccgggccgacccacgcgtcaacgggcttctttaacatcatttcgtaagaactacaccaaaaccagcagcacgccgacacgccgcgcgcgccgcgccgccattctcccatccgcccccgccgcccttccctaacctcgccgcggaagacgtcgcgccgtgcgtagctagcagttccccggcgcacgcgcgtcggataagaattggttttggctcttcgtctccccccatccttgggtccttcccctcccactccctcttcgcctcgtccgcggcagtaggctcaagcttaggaactcgctaccgaggattagttggaggcttcgtgatggcgggcgcgaaggcggatgtagacgcagaaacgggagatggcagcggggtcggcagtggcggcggcggcctctttagcgagcagatgctgattgataagctcaacaggctcaacaactcagccactagcattgagaatattaatctgggatcaacgtaaagtttttgggactcgtattggaagtatgaaaaatagcattcttggtgacaaccctcctatattggataacaatgtgaatagtttaaatcctagctctaatcccacttcaaattccaaagctgcacggaaggattctggtgcagtagtaaaaaaactcactgttggcgggatgcctgaaaagattgtgtctgcataccaatcagtgcttgatcaacattntgatgaagacacagctctaaacaaatgtaagagtactgtgggccttttggagagaataaatanagatattaacgatgctagcatcaacggtaatcagccagcatcatcatttgatctctg

SEQ ID NO: 65062 - DNA, 1136 bp, Zea mays
  unsure (1)..(1136): unsure at all n locations
  Clone ID: MRT4577_159334C.1
cccagtcacaaccactgaatcctgcagcttcgcttccccctacagtcagtgcagtgggtgatgagtcgaagagaacggcggcagctatggcggataagcttgcatctttgtcagcacctgtgcaggtgctgacctccattctctcatcttttgctgctgagcaagctgcttccataaatggtggatcatcttctggggaattctctggaggaccaccaggtttccacattgataagaggcctaggcttgagaaaacaggtcaggcctctgacatgggtgctcctcctcccttttttgggcaagcggcacaggtgcaacaacagattggagcagtgcctacttctcttggaggcacgcatccaccagctccagctccaggcccattcccaccacctccaccgccattgccgtctctactgccaccgctcctgcaacagttcggtcaaaatactggagggatgattggaatgggaggacctttcgggatgatggctggatctatgccacctccgcctccattgtccaacattctgccggcaggttttccgcgaccaagtgggccacctcctccacctccacttccaccagctcagagccagccccagcagcagcagcagtctcctcaggcgnnnnnnnnnnnnnnnnnnnnnnntggattctttcagtcatcgggcatggggttctttccgcctgcgcaggtgcagcaatctccatctgcccaacgccagtgactcaacggtggctctggcattcatgggcgtaaaggcagcgacgcccttgtgtgttaactttgtacactgaacaatatttcactctgtgtcgagcttaaacgtggctggctggtcctgcaagccaggcagggccaatggccccgaattagagagattgtagaataggcatgcgtcctctgctatgtataactattccctttttttgttttgttttgtttgtctgagtagttttaacttttccttttcccgtttgcattgatcccccgaggcagaagaaagtgactttggaaaaaaaactggtgcttgcccaactgatggaaacagttttagggctgtaacagctgtagaactaccggtcatagtctcagatatgataatgaactgcaaatatttcccatgctgttt

SEQ ID NO: 65063 - DNA, 807 bp, Zea mays
  unsure (1)..(807): unsure at all n locations
  Clone ID: MRT4577_159335C.1
gccggccgggtcgggnatcatttcgtaagaactacaccaaaaccagcagcacgccgacacgccgccgcgccgccattctcccatccgcccccgtgcccccgccgcccttccctaacctcgccgcggaagacgtcgcgccgtgcgtagctagcagttccccggcgcacgcgcgtcggataagaattggttttggctcttcgtctccccccatccttgggtccttcccctcccactccctcttcgcctcgtccgcggcagtaggctcaagcttaggaactcgctaccgaggattagttggaggcttcgtgatggcgggcgcgaaggcggatgtagacgcagaaacgggagatggcagcggggtcggcagtggcggcggcggcctctttagcgagcagatgctgattgataagctcaacaggctcaacaactcagccactagcattgagaggtatcaaaaccatatatccctagttcgaatcctggtataggcaacaagtccttcgccctctttattccacgtttgcacatctcagcactttcacaatggtgcatttttcaccgcaagagggccaaaagggttgtagatacatgggaaaaacagtttactagttcaagggaggagaagaaaataccattcctctatctatcaaatgatatcctgcaaaacagtaaacgcaagggggcagactatgtggatgagttctggaggttctacctagatcctgagtgtattttannaaaaatggggggagagaagggaggaaaacagtggcgagattggtattaatctgggnnatcacgtaagtt

SEQ ID NO: 65064 - DNA, 2594 bp, Zea mays
  Clone ID: MRT4577_159336C.1
gaactacaccaaaaccagcagcacgcgaactacaccaaaagcagcacgccgacacgccgctgcgccgcgccgccattctcccatcccctccctaacctcgccgcggaagacctaacctcgccgcggaagacgtcgctccgcgcctcacgcgcgtcggataagaactggttttggctcttcgtctcgccccaccccatccttgggtccttcccctcccactccctcttcgcctcgtccgcggcagtaggctcaagcttaggaactcgctaccgagaattagttggaggcttcgtgatggcgggcgcgaaggcggatgtagacgcagaaacaggagatggcagcggggtcggcagtggcggcggcgggctctttagcgagcagatgctgattgataagctcaacaggctcaacaactcagccactagcattgagacactttcacaatggtgcatttttcaccgcaagagggccaaaagggttgtagatacatgggaaaaacagtttactagttcaagggaggagaagaaaataccattcctctatctatcaaatgatatcctgcaaaacagtaaacgcaagggggcagactatgtggatgagttctggagggttctacctagatccctgaagcatgtttatgaaaatgggggagaggaagggaggaagcaggtggcgagattgatattaatctgggaccaacgtaaagtttttgggactcgtattggaagaatgaaaaatagcattcttggtgacaaccctcctatattggataacaatgtgaatagtttaaatcctagctctaatcccacttcaaattccaaagctgcacggaaggattctggtacagtagtaaaaaaactcactgttggcgggatgcctgaaaagattgtgtctgcataccaatcagtgcttgatcaacattttgatgaagacacagctctaaacaaatgtaagagtactgtgggccttttggagagaataaataaagatattaacgatgctagcatcaacggtaatcagccagcatcatcattgatctctgaccttcaagagcaggaaatgaccttaaaacattgcatcgaacaacttgaaagtgcaggtatggcgaggatatccctgatcaatcaattgaaagaagctctcagcgaacaggagtcgaagtcattagttcttcgtgatcaattgcaagtcgctcaagcagaggctgaacgtgtcatccaacttagacaacaactggggggtgtccttgtcacgaacgatacacaatctacttctagtccgctcatgattactccaccagatcaaacagcagctatgatgcacggttcaggagtaagatcgacacctccccattcacaaccactgaaccctgcagtttcgcttccccctacagtcagtgcagtgggtgatgagtccaagagaacggcggcagctatggcagataagcttgcatctttgtcagcacctgtgcaggtgctgacctccattctctcatcttttgctgctgagcaagctgcttccataaacggtggatcatcttctggggaactctctggagtaccaccaggtttccatattgataagaggcctaggctggagaaaacagggcaggccgacgcgggcgctcctcccttttttgggcaagcgtcacaggtgcaacaacaggctggagcagtgcctacttcttttggaggcacacatccaccaactccaggcccattcccaccccctccacctgcgcaggtgccgcaatctccatctgcccaacgccagttaggtcaaaataccggcgggatgattggaatgggaggacctttcgggatgatggctggatctatgccacctccgcctccattgtccaacattctgccggcaggttttccgggaccaagtgggccacctcctccacctccacttccaccagctcagagccagccccagcagcagcagacctctcaggcgccacagcaatcaccaacatcagctggattctttcaatcatcaggcatggggttctttcctcctgtgcaggtgcagcaatctcagcctgcccaacgacagtgattcaactgtgtctatttgcactcatgggcttaaaggcagcaccttgcattaactttgtgcattaaacaatatctcaccgagtattgagcctaaacgttggctggtcctgcaagcgaggcacggccaatgacgacggattagaaagattgtagaataggcatgcacgttgtagaactatccctttttttgtccgagtagttttaactcttcctggttatgtgaagttgctagacttcgtttgtttttgatccggtctgcattgatcacccgaggcaaaagaaaacgactttggaaaactggggctgaaattgggactttgccaactgacaggacagttttatggctgaaacagttgtagaacttactggtcttagtctcatagatatgatgtgaactgcatatttggcatgctgtttaaatctgttgattattattattatcataccagaaaaaaaaaaaaaaaagctgccgaattctttcacctggttcttacacaaggggctagtttggacaaagaaatcgggatctgg

SEQ ID NO: 65065 - DNA, 295 bp, Zea mays
  Clone ID: MRT4577_159337C.1
agcagtggtaacaacgcagagtacgcggggttgctgtgcaacgcctgcctccggttctgttcgtgtagtaaataattaggcagtggggaggtaccgatttcccatgtactcatgttcatgtatggctagggagtttcagttaggcacaaccacactacattgagtatcatcctgtatgtgtagctcgttgtaatgcaatcaataactgatattctctttggagtaagcttattttcagttttgttccaaaaaaaaaaaaaaaaaaaaaaaagtactctgcgttgttaccactgct

SEQ ID NO: 65066 - DNA, 317 bp, Zea mays
  Clone ID: MRT4577_159338C.1
ttggggccgaccttgtatttagtttggagcgaggtggacgagcgcaatgcagttaggacaaataactaagagcacccaaataaaaccttacatgcgttagaccaaccgacaatttaactccggcatgaggaccacacacaaactcacacagacggttacacatttactgacctgtctcagtagctggggagaaaccctcaaccataacccacggcatgccatactgtttctctagaaacccctgcctacaagttcaagtttactcgttccggaactacatacctttagtccactgcgggaccttgctctatccaata

SEQ ID NO: 65067 - DNA, 2533 bp, Zea mays
  Clone ID: MRT4577_159339C.1
aattcggcacgatagaggaaaacatccaccccccacgaaaaccaccagcacgctgcacgccgccgcgccgcacttctccccatctggcgccttctctatcctcgccgcccttctctatcctcgccgctgaagacgtcgcgccgtgcgtagctagcagtgctgacgcgcgctcgtcgaataaggattggatttggctcttcgtccccccaccgcctcctccggtccttcccctgccactccctattctcctcgtccgaagcggcaagctcaagctcaggaactcgcaaccgaggagtaccaatttctctagggatttggcgtatccaccagggagcaggaatagtgtgaggcttcctgatggcgggggcgaaagcggatgtagacgcggaaacaggagacggcggctccttcagcgagcagaggctgattgataagctcaaaaggctcaacaactcagccgctagcatccagactctttcgcgttggtgcatttttcaccgcaagaaggccaaaagggttgtagacacatgggaaaaacagtttactagtgcaagggaggataagaaaatatcattcctatatctatcaaatgatatcctgcaaaacagtaaacgcaagggagcagactatgtggatgagttctggagggttctacctagatccctgaagcatgtctatgaaaaaggaggaggagaagggaagaatcaggtggcgagattgatatcaatctgggatgaccgtaaagtttttgggacccgtattgaaagtatgaaaaatggcattcttggtgacaaccctcctatattggataacaatgggaatagtttaaatcctagctctaatcccacttcaaattctaaagctgcacggaagggattctggtacaatagtaaaaaaactcactgttggtggtatgcctgaaaagatcgtgtctgcataccaattagtgcttgatcagcattttgatgaagacactgctttaaacaaatgtaagactactttgggccttttggagaggataaataaagatattaatgattctatcatcaacggtaatcagccagcattgtcattgatctctgaccttcaagaacaggaaatgacccttaaacattgtatcaaacaactcgaaagtgtagatatggcgaggatatccctggtcaatcaattgaaagaagctctcaacgaacaggagtcgaaatcattagttcttcgcgatcaattgcaagttgctcaaacagaggctcaacgtgtcatccaacttaggaaacaactggggggtgcccttgtcacgagcgtcacacattctacttctagtccgctcatgattactccaccagaacaaacttcggctataatgcagggttcagaagtaagatcgacacatccccagtcacaaccactgaatcctgcagcttcgcttccccctacagtcagtgcagtgggtgatgagtccaagagaacggcggcagctatggcggataagcttgcatctttgtcagcacctgtgcaggtgctgacctccattctctcatcttttgctgctgagcaagctgcttccataaatggtggatcatcttctggggaattctctggaggaccaccaggtttccacattgataagaggcctaggcttgagaaaacaggtcaggcctctgacatgggtgctcctcctcccttttttgggcaagcggcacaggtgcaacaacagattggaggcacgcatccaccagctccagctccaggctcattcccaccacctccaccgccattgccgtctctactgccaccgctcctgcaacagttcggtcaaaatactggagggatgattggaatgggaggacctttcgggatgatggctggatctatgccacctccgcctccattgtccaacattctgccggcaggttttccgcgaccaagtgggccacctcctccacctccacttccaccagctcagagccagccccagcagcagtctcctcaggcggcacagcaatcaccaacatcaactggattctttcagtcatcgggcatggggttctttccgcctgcgcaggtgcagcaatctccatctgcccaacgccagtgactcaacggtggctctggcattcatgggcgtaaaggcagcggcgcccttgtgtgttaactttgtacactgaacaatatttcactctgtgtcgagcttaaacgtggctggctggtcctgcaagcgaggcagggccaatggccacgaattagagagattgtagaataggcatgcgtcctctgctatgtataactattcacttttttttgttttgttttgtttgtctgagtagttttaacttttcctttttcccgtttgcattgatcccccgaggcagaagaaagtgactttggaaagaaaaaaaaaactggtgtttgcccaactgatggaaacagttttaggaccgaaaaaaaaaaaaaaaaaagcggccagttttagggctgtaacagctgtagaactaccggtcacagtctcagatatgataatgaactgcaaattttcccc

SEQ ID NO: 65068 - DNA, 295 bp, Zea mays
  unsure (1)..(295): unsure at all n locations
  Clone ID: MRT4577_15933C.1
ggggggggggtttttaaaaaaaattttttggggggtttttttttttgggggaaaaaagatgaagtagttggaaatggtttatttgaagaattatggaatattatgggggaaaaaaaaaaaaagcttaattttaaattatatttttggtgggtgtgggggggatnaaaaattaataantntaaaattatcaaagaactaaataatattaaggtgttaggggagaagataggaaaatttattgatgggggttaagaatatgtaaatgttttatggtagggggtttgttttaataaag

SEQ ID NO: 65069 - DNA, 1017 bp, Zea mays
  Clone ID: MRT4577_159340C.1
ggttagtttctacgtgcccgtttaactaacgggcgcgtccaacctccccttgccaccgcgacgccaccgcaccaagggaggtcggcgagaaagcaaccgcggaagccatggcgaacaaggcaacagcgccgacctcctggcggtggcggcttctgctgctacttctcgtcaccgtagccgccttatgctggattcctccggcgatcgctgctgtggcggcggccgcagccgcatcgacgtccaatggagcacggaggtcgctgctcggcttcgtggaggcgcaggggaacgcttcctaccactgcacgccctccggtccctgcgttccctgccagtattctgagaagaacgatgaaaagtatagctgcagcgaaactggctatcgcctgcccttgaaatgtgtacaggcacaaaatgctacaaaagaaggaaacatgagcaagcagaggaagatattggatgatgcatccacatcaggtggcacaaaatccgcatcaggtggtccaaagcattatattacttacagaagttgtgtgccgttggttggagaggagaatttatctgttgttggttttgagataatgatggccggaatgttgctagtaagtggcccgttcgtatattaccggaaacggcgcacaaatcttatgcagggagctgcaagaatcccgacaagtgatcctaggttctagtatgggggacatggggtaataacggatcgcatacttgtgttgatctggtctatctttcttgtgattttgcctcttgtcattgtactattatatttcacacatgtaattctgggagaggcgaagtgcttttttatttcgcacaggagtaggaaccacagtggttagtctcatcgacctggtttacttgggtcaaatcacttgtgttacatattcaaatttatggttttgttaccccaaaaagttgctctaaaaaaggaacaactttgttcatgttgataatttatgcgaccaatgcgatcatttttctgaaaaaaaaaaaaaagtc

SEQ ID NO: 65070 - DNA, 1074 bp, Zea mays
  Clone ID: MRT4577_159341C.1
gcgcccacgcgtccgctctgtaagactagactatcagaatttgatttggcaaatcgttcgttgtaccaactagctagacgctagttagtgccactagtgcagtgcgctctgacgtgacgatttcagttcacgtgcagaagtcgggttccgccggccatggccatccccggattcggcagctgcgcggacggccggactgcagccggcaggcggaagtgatgggcagcaccgtcgacgacgacgaggcgtgcgagctggtgagcggctcggacctcgtcatcggcgagggagacgacagcgtcagcgcgtaccttttcaaggccgtcaagaacaacaatggcaccggcatcctcctgctctccgacatcttcggcttccaggactccgccacgcgggacttcgcctaccgcgtcgcctgcaatggctacaatgtcctagttccggacttgttccgtgggaacccgtggaagctgaacgtcccgttcgacggcgacagcttcgagcggtggcgggcggggcaggccccgggccgggtgtccggcgacatcgacgcgtgcacgaggtggctggtggacgagttcaaggccgcgggggtgtccaagaagctgggcgtgatcgggttctgctacggcggcgggcgcctcgtggagacgctggcgcgcgacgccgagagctgcttcagcgcgggggtctgcttctacgggtcccggatggacgcgtccctgggcgaccgcgtcgcggcgcccgtcctgttcgtgtgcggcgacggcgacccgctgtgccccgtggagacggtgcgggagctggaggggcgcgcgagaggcgcccgggcggcggtgtacgccggcaggggccacgggttcgcgcaccggccgcagtcggtggaggaggacggcgacgccgaggacgcgttcaacgcgatgcgggggtggctgcacgaccacctgctcgcctgatcggacgatcagacgctgtacacgggtttgggtgttttgtacatacgtactaatatgttatttgaccaagtctcctggtcatcctataataaagagcaaaatccaccattaaaaaaat

SEQ ID NO: 65071 - DNA, 394 bp, Zea mays
  Clone ID: MRT4577_159342C.1
gcaagcaccttttcttatgataagcccctttcaggacgtccctagtgcatcggccactacagaatctgcctgcagtgcaggagacctgagttcgatccctgggttgggaagatcccctggaaaagggaaaggctacccactccggtgttcttgcctggagaatcccagggatgggggagcgtggtgggctgccgtctatggggtcgcacagagtcggacatgactgaaatgacttagtaacagcagccgcagcacccactccagaattctgtcctggagaattccatggactgtatagtccatggggtcccaaagagtcagacacgactgactttcactttccagtggttaagactctgcttccagtgcaagggactctggttcgatccctggt

SEQ ID NO: 65072 - DNA, 391 bp, Zea mays
  Clone ID: MRT4577_159343C.1
ttcggggcctgccctacctcctcaacatgtaccggcgagcgaccatggtcgcgacaggctccgggatatgcgtgttcatgtccttcctgatgcagcctggcccggccgagctatcgttggtgtgggtcgccaagggcatcgacgcgaactatggcgaggagatgaagtcggcggcgtacagcagtgagaggctccgcgggcgggtgatcgtgcatgacacggcgttgatggggcggcccaacgtggcggcgctagcggtggacgcggcgcggcgttggggctcggaggtggtggtagtgaccagcaacccggaagggagcagggacgtcgtcgcgttcagcacctacgccgccatacccccattctatcctatctgccacccccgatcccc

SEQ ID NO: 65073 - DNA, 429 bp, Zea mays
  unsure (1)..(429): unsure at all n locations
  Clone ID: MRT4577_159344C.1
gcggtggctgcgcaaccgcgcaggcagctgtagctgtcggcatgcggcacggtgactgcgagagcccaggcggtgccggtgcggctgtagccggcggcgggcgaccgtgaggcggctgcgggcgcggtgcaagtcactctgttgttcttcaagactacccgaagcgattcattctccggttcagcactgttcttcaagactaactgaagcgattcattgatgatgcaaaggttctactcttgcttgatttactcttgtatgatttactgaagcatttggagctgcattttctagaacaacattttttcttccgatcagtgagcttgcaccgtgatcctggtgtggagattggattggttttggacatcatcgacnagatcaacctgatcgacaccttcttctggtatctgggaggcaacgcacgggacg

SEQ ID NO: 65074 - DNA, 115 bp, Zea mays
  Clone ID: MRT4577_159345C.1
attacatcgacgctcctatctgcgatacggatcgatttgcatattctagcaacgaacagagtatccgccatgacccctttcgacgaggagatcacgccagaaaccctcaaggaca

SEQ ID NO: 65075 - DNA, 442 bp, Zea mays
  Clone ID: MRT4577_159346C.1
gccgctggaagtagagtttttttatcacattttgacatcaaagatcactgggcacaccaccacacgtccacaagggtggggggcaaccctttcccccccaaaagccaaatccagctttgagttcgacaatccataaacaaccccacacttggcacgttcagctgctttttttggcgaaaagcccccccaggcccccgaggttgaaccccccccccctgcccctgtcgtcccccccggtagcctttttgcccccggtcgttttggcccgggaggggggggccggcccggcccccaccttgttgaggagcgggtccctctccaccaagtgggcctttttgaaaaaaaaacccaaaatgggctccccgaggccctttttcttcttggccggggccgggccccccctggtggcagggggcgggacaaccaaaacggaccggggccc

SEQ ID NO: 65076 - DNA, 625 bp, Zea mays
  Clone ID: MRT4577_159347C.1
cttcattattgtcccagtaggtttgagccctgtggtctcattcagttgcaagggatgagatatggagtgtgcaaatatttttctagatccccatctgttcatcaactggaggacttgttgacacggttaaggagggtgtcaccggattccacatgggttctttcagtgtcgagtgtgaaactgtagacccagctgatgtcacagcagtagcgtcaactgtcacacgagccctgaaacagtatgacacctcggcattccatgagatggtgcagaactgcatggcgcaagacctgtcctggaagggacctgcaaagaagtgggaggaagtgcttcttggcctcggagtcgagggaagtcaggctggcatcgatggcgaggagattgctccacttgccaaggaaaacgtagctactccctgaggtttggtgcctcggaaatatgtgttgatgataggaagcatcttctaggatcctgacctggtggctggcgagatgttgagtcagacaccggcaaaaccaccagtttcgcctctactacttcatttgtaatataatccttgacgttctaaaaatgccatgcccctggtttaattttatccatgcacatcgttagctgggatgttcgg

SEQ ID NO: 65077 - DNA, 438 bp, Zea mays
  Clone ID: MRT4577_159348C.1
ttttgtttttttttttagatttaaagcaagtatgtctttatttgtaagcatattactgaaacgatcaaatgaacagaagtggataaacgtcgagtcacttggctgagatcatacgcatcttacgtactgcttgtattaggatgcaagattgaatgtgtcttttttttaaaaatgcagccttgtgttgcactatgaaataagtgatttaaaaagaaaaacatgatacatagatcccatcctgaccttagaggcttggataaagctgtcgggagacagtctcatggtgcagctagattagtgtgcctggtgtatgactgtaaagatctccccaagactttcaggatcagctgctgttaatcaaacaagtgcttataaaaatggaacacgtgacaaaggaaacgttaaatttcctacctgaaaccaggcagctgagaaata

SEQ ID NO: 65078 - DNA, 592 bp, Zea mays
  Clone ID: MRT4577_159349C.1
aaatcgcacaatatgaacgcatgtctcagaaacgattcataattacaaccgatatttgtaggggtgcaaatctgcatctgaccatatttatcagcgtggcacagataacctggccaaaggaaccaagcaatgctagaaaattgcaaatggtcaaatatcctctcgactcggaaaggtgatggccttgaccatggatgctgaacacatggaaatgccataattttgtacagcagctgaaaagagcctataaggataaccaaatgtccaacaatatgccgaaatgatcagttaggttgttggttatgaccaagcaccgatggtagggtaggccaagcacagtttgagttgtcgacgtggagggcaggctaccagcactggcctcgtcagcaggcttagaaggcttttgcttctctcccatgcggtaagggagcctttggtaggttagcttgtgtatctacaacatcgtattcaggttttcttttcttcttgatctcgccaatatttctgttgccgtcatcaggaattccactggagctcgtttcacgagccctgtcaaaaaattaaacccctggttctgtccataatctggtat

SEQ ID NO: 65079 - DNA, 159 bp, Zea mays
  Clone ID: MRT4577_15934C.1
attcaccactggttcctctaccaaatttttttaggactctgtttgcggcaataacttgcgtggcagcccctccaataaaaagaaacatgtccaaacaaaatattctatctctcctcaaaaaaaaaaaacagatgccacagacgaaaacgctcaaagtgc

SEQ ID NO: 65080 - DNA, 646 bp, Zea mays
  Clone ID: MRT4577_159350C.1
ccggccgggactgatgttatctaagcagaataaactatgtgggcaagcctacccacgacttgtccgcctcgccctcgtggcgttgatgactgccgacctcttcccatatgcgccacgcaacgcttaaggcataaagcgtatggtagcggagccatcaactcgctggctgccgatatctgatctcacaccccattctatgaaggttgtacgatcacaatcgggcgccatgattgcaagcacccagtcatctaccatttcaccatgctgaaatgcaagagatcgcctacaccaagcgcacagagcaggcgcggaatcacgctccggcgtttgcccgcactattccaccgcactaggcacatggcctcaaaacctgccacacgatgtacatgaacacacattgacatcatctcagcattgcacacagccatcgagtccaaagacacaagcaccgagaatatcatgctgaatgtcggcgctcactacttctactcgtgtgaccgtccgtgcacccatgccggtgtccacaaccgcatgggcaagtgcaataatgagttcagccacatgcccaacaactgcatgttgcttgcgaacatgatatgaattatatatatgcctgactcgacagtttggcatgtgcttacactcc

SEQ ID NO: 65081 - DNA, 425 bp, Zea mays
  Clone ID: MRT4577_159351C.1
cttcagaaaaagcccgagagcgttactaccctctagttggatcaagttcggggttcccaccacaaaatgttatcttgctctagtgcaactggcttgtgtgaaacatgacttaaaagcattcgtcattgatacatataagaatgcactctagagttataggctaataataagaggcattaccaagggtactgcgaccatggaattggcacttccaattgagcggccttttctctaacaagtcgttccgggagctggtccttgggcgcaggattgaaatgaaggacccctccaacaatttgattgcccgaacagtgacgcaggtcaagctctatcgtgagcggcatgtgcagcggtacggggagcgctttcctcgcccactgaatcagtccccccggtcgcacgctcagtctattggcacccttttt

SEQ ID NO: 65082 - DNA, 294 bp, Zea mays
  Clone ID: MRT4577_159352C.1
catcaaggagacaaacaagggggactttctgagaatacggatctcctatcattaccctatgcacttgagacggtatagcatcaaacggttgctcattataggacctaacgggaccccccggttcctatcgcccagagcctcttgatctgacaaagcctacctaaccaaggtttaaagatataaactttcccaactatcccatgatgaagacttcttaagttgaacatcacggcgcacctaatctgtctcgctctgaaaaattgctgacttaggaacgatccccctggttcccaa

SEQ ID NO: 65083 - DNA, 2005 bp, Zea mays
  Clone ID: MRT4577_159353C.1
ttgggtacctcgaggccggccgggagaatctctccgtatctccctccccgaagccccgccagaccaccttaacctccccaccacaagcccgcacacaccatcccgctccgctcaagtcgcctccgcattcctgccccctctacccgcccgccgccgcgcggacgacgggagacgccggcaccatgctctgcctctcgctgtgcgcaccgcaccttcacctccacctcccccgcagcccgaccgcacgacccgccgccgccacgtgcaggaacgcgcgctgcatcggcgtcacgctatgcctccggatgccgacgacaccggaggaacggcggcagaagcgcgggctggcccagttcctggacttatcggccgcgccgacactcacgccacccgcgcccacgcccgtgcatctcacgcccgcggccaaacggcgcggggcgctgcgggagatgcgccgggtgtggtgggtgtgcggggtcgggtactgggtgcaggggttccgctgcttcccgtggctggcactcaacttccacctcacgcgcggcatggggctcagccccgccggcctgcaactcctgcagaacgctgggagcctcccgctcgtcgccaagccgctcttcggggtcctctccgatgccgtctacatcggccgcgcccaccgcataccctacatctcccttggagtgtggctgcagctcattgcttggggagtacttgcaaccattccagttacaggggatgcgtttccaactctaatggcatgcattctcattggaaatctaggagcatctgtcacagaagtcgtaagtgatgctgttgtcacggagttcagtaggacacagaaggctggtgtactacagtcatatgcattcgtagccctggctgcaggatccttgctggggaacttgtctggtggttacattctgcttaaaacacaggaaccaaagatcatgttcacagcattctcagtccttcttggcttccagctagcactgtccctaagtacaaaagagacattgccaagctctcgaggaaactccagaaatcgtcttgtcaaaagctctttggcagctaacttccgcaagcaattctcaaacttgatgacagcgatcagagaggaaaggatcttataccctcttgcatggatcatgacatcctttgctgttgtgcctgttctttctggaaccatgttctgctttcaaacacagtatttgaatctcgatccatcggttattggtctatcgaaagttgtgggacaggtcatggtcttatcactaactgtactctacaatcgatatcttaaaaggataccactgaggtgccttaccacaggacttcagatactatatgctctggcagttttgtcagatttgatccttgtgaaacaagtaaaccttgtgctagggataccgaacgagattcatgttctttgcttctcagctctagctgaagctctagctcagttcaaggtattgccattctcggttttgttgtcaagtctctgcccaccaggctgtgaaggttctttgttcgccttcttcacatctggactggtgctttcagcaatacttagtggagtattcggagttggattgtccaccctgatcggtgtgtcttctgtggactactccagcttgcctttgggtattttgctgcaaagtttggctgcattgctaccgttgggatggatatcctttgtgcctgagaaatggactgccgatgacacggttgtaataaaaagatgaagtgttttcaccatacaaatttccaggcaagatcctgttaggcaatgacacaatgtagataaatgtagcccacccagtcaacactggtgaggttacatgtataggtatccagattctcttcaattagaatagttcttattattactgtactatatgcaatacaggatagcccttatgctcctgctgaatatagcacacaaattgcattgaattagttgtctcgtgaaacgagattggactataaaatttgcttcacatgc

SEQ ID NO: 65084 - DNA, 225 bp, Zea mays
  Clone ID: MRT4577_159354C.1
aaacaaagagggtgggaatttctgaattggcaatgagggttagcaatatcaagcacagctatccctttaaatggaggaatcacagacgggagggagagaaggggtactatgccttatgaaaaatagcaccagtctgggagttaagacataacgtgaccaaaccgggcagatgcacttgcgtatatgactcctaagagctgggggcttaaccttcttgcctaaagg

SEQ ID NO: 65085 - DNA, 245 bp, Zea mays
  unsure (1)..(245): unsure at all n locations
  Clone ID: MRT4577_159355C.1
ggaaaacccggctggacgccacgcgtccgctcaatcatangatagcgaagcttgctgtcggtgttgctgtcattcaagtgggagctgtaacattatactgaactaaaagagaaaaacttgagagttgaggatgccctaaatgcaactaaggctgccgttgaggaaggtattgttgttggtggagggtgcactcttttgcggtttgcacataaagaagacgccattaaggcttcactggagaacca

SEQ ID NO: 65086 - DNA, 1126 bp, Zea mays
  Clone ID: MRT4577_159356C.1
atgctgccaaccaatctgatcaatacaatgtcttcagcggtcaagtaatcactgcggttaaagaagcatgcagagcagctgttcttcagaacaagccaaggcttgttgaggctatgtatttctgtgagttgaccacgccaaccgagcagttaggtgcaacttatgcagttcttggtaagaggcgggcaaggattctgaaagaagagatgcaagaaggaacctcgttatttacagtgcacgcttacctgccagttgcggagagcgttggattttcgaatcaacttaggagtttaactgcaggtgcagttagtgctctcctcgttcttagccactgggaagctattcctgaggaccccttctttgtcccaaagacgcaggatgagctcgaagaattcggggatggttcaagcattgggccaaacttggctaaaaagcttatgaattctgtcagacgaaggaaaggactgcatgtcgaagagaaagttgtggagcatggcacaaaacagcggactctggctaaaaaagtgtagttgttggcctccatacagatgcggtaggaaaaccgcatctctttttgtccaaggttctgtcttggtatactgaaacatactcaaaatttatatgcagtgaaatagctttcattcagtacgacattgttgtttgagagagttgagatgggatatgtacgggccgcattggtggtgccttggtctacaatattagaaagatcacagtttgttgtgaggaaaacggggacgatttaccaaaaaaaaaagcccttcatgataggtattttctggaccttcgtatcttgcaataccaatgaaatagcatagagcgcccattttgtcctgggagcaagagcaaacttcgtctattattggtttgcatgtgtactgagtgagtgaaaagctatgttctttgtaggaagctatgtgtactgagagtgagaagctatgttctttgtagcaagctgtcttgttactctaacagggcgacagaacactcggataaacatttttgtaaacctaccctttgtggaagggactgttggagcacaaaaaactaactccctacatggcgtgtatagagtgatactattgaatggcatagaataccttttact

SEQ ID NO: 65087 - DNA, 317 bp, Zea mays
  unsure (1)..(317): unsure at all n locations
  Clone ID: MRT4577_159357C.1
agctggcgccttttttttgtcccccctctttggtctgtttttcttcccctgtctcttcttcgtgccgcttttccttgggccgtgggtgttttctctcctcccccttcgtgggggggggtgccttttctcctttccttcggttttccggtcttgcgtctttgccctcgacgccctgctttcctttctggttctggnccctgcttctgccttcttttgctccctgttgttgctgtccccctttttgccctcgcgtggcgcctctggtgtttgcggttccggcccccgccgttggcctccggtctttgctcctgcgcctg

SEQ ID NO: 65088 - DNA, 574 bp, Zea mays
  Clone ID: MRT4577_159358C.1
cctctgcctggattgctgcgaggaagacacagacatccacacttccccagctacgtagctaactgctcggtgccctgcgtccgcgatcccgatctatatggtgacagatctatctgcagaccagtcgctaacccgtcggatccgtgctggctatggggcaggaccaaccatggtcgcgcttgcccatcaagtgcccagagatagagatggagcatatccgcacatctccaactcccgcattgctggcagtgacattgacctcctgcccatccagtagcctggtgcccatgacgtgaggacatcatgaaggggccggaaacctcatctcctccactgaggcctacaaaatgcggctgtgacgctgacatccatatcgtgtctgcgacgaactgccccaccaagacccggagagatttcatgtggcaaggcgtgccgagctcaacctactggtagagcgatgcccctacgatgggcaatgtcctcaacttcgcaaagaatggtgttgacaagctcactgtgccgggcctcacgggtgacgttatcgacatcatcttgacccagaagatcaaggtca

SEQ ID NO: 65089 - DNA, 606 bp, Zea mays
  Clone ID: MRT4577_159359C.1
gggggggggggcccccttttttttcccagcaaaaataaagagagacgggggagccccccaacgaacattttcccaacggaataacgaaaaaaaacccaagggagggacagggccaagtggcagcccaacggaaaaaaagggggttaaaaaaaggggggaaaaaaccccgggggccaaaaaagttttaaaaaaaaaataatatttgggggggggagggcccaacgggcaaaaggggggggaacccgggtcctccggggggccgaaaaaaaggggaccccccccacgtttttttgtggccggggaaggaggaaccaggcccaaaaaaagggagccgccgaaacccaaaaaaaaagtcgggttggggggggcccaaaaaaccggggggttaatttttcccaacccgaaaaaggccctggcaacccccgggagcccacccattaaaggggggcccataaagggggggaaaaaatggggggggctggcaagggaatatcccagcccggccagggagaatccaacggttttccccccctaaaccctaaagagttggtaaaagtcccgccccaaaaagggggaagggtttttcaatcccccgtggcccagggg

SEQ ID NO: 65090 - DNA, 306 bp, Zea mays
  unsure (1)..(306): unsure at all n locations
  Clone ID: MRT4577_15935C.1
gcgtccgcggnacgccgtgggnataaaaaaaaacaaaaaaaaaaaaaaaaaaaaaaaaaaaaaaaaaaaaaaaaaaaaaaaaaaaaaaaaaaaaaagagaaggggcaggcctgttttgatccagtccttaccttcctcccgctttccattgggcctggccttttttttggtgtcgcgctttcctcacttcactcgtccctttttttgctgccttggtgctggcctgccattcccctgctctgccccatttttttcgcctcgcagccggttcacccctggtcgcttgccctttttgtggcctggccc

SEQ ID NO: 65091 - DNA, 369 bp, Zea mays
  Clone ID: MRT4577_159360C.1
gccggccgttccgggcccttttcttatagatccttttcatatggaccaaagactcccgttaagctcgctagagttacaaaggttctcggccgtactggttctcgtggtggtgttacccaagttcgtgttgaattcatggatgacactaaccgttctatcatccgtaacgtcaagggtcccgttcgtgaaaatgacattctctgtctcttggaatctgaacgtgaagcccgtcgtctccgttaagcaatcaagtcaacacttgatgaattggttgccagttgtatagtttatatacatttacaaaataaatctcgacacgttttcaaaagacgtattaacagaaaaaaaaaaaaaaaaaaaaggccccta

SEQ ID NO: 65092 - DNA, 542 bp, Zea mays
  Clone ID: MRT4577_159361C.1
ggggggggggggggggggtttaaaaaatttttttttttttttttttttttttttttttttttttttttttttttttttttttttttttttttttttggccccgataaaacagcattcctaacaaacaggggccataatcattaatttttggggggggggggggggtcccaaaccccccccatttccctggggggccgtgcccggaaaagggcccattagcccttgggcccggggggccccccatgggctaaaaaaaaccccgccccataggatcagttcccggaacggctcccggttgataaaaaggccctttagttggggggaaatcttgacccccccccgcgatcagtatcttgccggggggggggggcctccaggcgggcaggggggccattttgcctgagcggaccccgtgaaccccagcgatctttatcggggttgccaaaaggggtgcttttgctttcaccccccggtttaaacttgggaatatttttcctaggagccggagccggagcccccccccccccaacaattgcaggccc

SEQ ID NO: 65093 - DNA, 257 bp, Zea mays
  Clone ID: MRT4577_159362C.1
tttttatgttcacaaagctccaaacttttcttaggaaatagcccgagagggactctaagaaccactgcttaagatgtggtaccagacaaccatgcgcattcagttcagacacccacaatgggctccctacggaacgatgccacgcgccacaacaacagacaggcgctcagatagcaccccagacgcagggccatgtgagcctggcaagaacttggcccccaggagctctagcggcgtgccccacgctacaagggccc

SEQ ID NO: 65094 - DNA, 294 bp, Zea mays
  Clone ID: MRT4577_159363C.1
ataccttgttgaaagacggggtactggactaacgaaagaaaacgccctgacaaaacacagacacaaacgggacgtaaccaaaaaagaacaccggaacaaaccccaaagtggccggcccgagaacagtaaacagagaaagaacaggattctagccaacagaagacaaaaaaagcgcgaaccccggaaggcatggggcaaccaccccactgaaggcgggcaccaccaccattacaacccaaggaaaagtttattgagaccacgaaagtgtgagtccggaccggacacatccaagcc

SEQ ID NO: 65095 - DNA, 836 bp, Zea mays
  Clone ID: MRT4577_159364C.1
ttcggggtcagggcctctcgatcgctcatctgtcgccagaggagttaattgttgatcgaggtgagtgaggttgaaaagcaggcggcgaacaaaggcaccatcgtcatggacggcggatactacggcggccgcgatcagcgctacggcggcgggtactgccgcgccaaccccaactacgccatgagcgtccgcgaggggaaggtggtgctggcgccggcgaaccccaaggacgagtaccagcactggatcaaggacatgcggtggagcacgagcatcaaggacgaggaaggttacccggcgttcgcgctggtgaacaaggcgaccggggaggccatcaagcactcgctggggcagtcccacccggtgcgcctggtgccctacaacccggactttttggacgagtcggtgctgtggacggagagccgcgacgtcggcaacggcttccgctgcgtccgcatggtcaacaacatctacctcaacttcgacgccctccacggcgacaagtggcacggcggcgtccgtgacggcaccaacgtcgtgctctggaagtggtgcgagggcgacaaccagcgctggaagatccagccctactactgaaccaacggatgatatgaccatcgcgccgcccatcgatcgtgcacatgcatgcatatatggtgcagacgtgcatgtacgtattagcagcgtctactatctacgtacgcatgcatacgtactagcagaataacaggggtcttaatgtcttatctcccgtggcccgtgccgtcttttgcatgcatgccagcagttgcgagacaaagggtgttcatgtatacgttattgcagctgtatgtatg

SEQ ID NO: 65096 - DNA, 1051 bp, Zea mays
  Clone ID: MRT4577_159365C.1
gccggccgggtcggggcgtcagggcctctcgatcgctcatcagtcgccagaggagttaattgttgatcgaggtgagtgaggttgaaaagcaggcggcgaacaaaggcaccatcgtcatggacggcggatactacggcggccgcgatcagcgctacggcggcgggtactacggcggcggtggcgccatcgcgacgccggggtacgctccggcggtcccgtacgggatgtcgcaggtgaacatcgagggcaacgggtgcgggcgggcgctgccgccgcagccgaccgtgaaggtgtactgccgcgccaaccccaactacgccatgagcgtccgcgaggggaaggtggtgctggcgccggcgaaccccaaggacgagtaccagcactggatcaaggacatgcggtggagcacgagcatcaaggacgaggaaggttacccggcgttcgcgctggtgaacaaggcgaccggggaggccatcaagcactcgctggggcagtcccacccggtgcgcctggtgccctacaacccggactttttggacgagtcggtgctgctggacggagagccgcgacgtcggcaacggcttccgctgcgtccgcatggtcaacaacatctacctcaacttcgacgccctccacggcgacaagtggcacggcggcgtccgtgacggcaccaacgtcgtgctctggaagtggtgcgagggcgacaaccagcgctggaagatccagccctactactgaaccaacggatgatatgaccatcgcgccgcccatcgatcgtgcacatgcatgcatatatggtgcagacgtgcatgtacgtattagcagcgtctactatctacgtacgcatgcatacgtactagcagaataacaggggtcttaatgtcttatctcccgtggcccgtgccgtcttttgcatgcatgccagcagttgcgagacaaagggtgttcatgtatacgttattgcagctgtatgtatgtgccttgtaataatacatataataaagttgctcggggtgtattaattagaacataaaaaaaacccacgcgtccg

SEQ ID NO: 65097 - DNA, 952 bp, Zea mays
  Clone ID: MRT4577_159366C.1
ccacgcgtcctgagagagagagagagagagcgcgagcgagcgaagagggcgtgagagaggagggaggccaagccgtacgcgtcgtctcctgctgtttctccccatccctttcctgcctcggcttgcaccttcaaccttacttaaagctctgacctcaaactgaaagggacctgcgaagagttttttttgcggcagtacaatggaggtgaacatctctgattccattttcatctgttgggtggcaagaaactaatcaaggagtctctctcttctcattctctgcgtggaggactgtttagctgtagctgagtggcatgctttccagaacataaattggtggaagagaagtttgatgctaccactttgcgagaaggaccgaaccaacacaataacatcaaacttagatactgcagtttaccaactttttcaatattgaagattgaagagcagcaagatcagcctcttccatatgcagtttgaagaaatcctttttaaggtctattagactagaatccttccggcaatcttgccttcaccccaagcatgctgcataccttgtaatgagtgtggtacttgacgactgttaccaaagtttttttgagggtaaaaaaaaaaaaaaaaaaaaaaaaaaaaaaaaaaaaaaaaaaaaaaaaaaaaaaaaaaaaaaaaaaaaaaaaaaaaaaaaaaaaaaaaaaaaaaaaaaacaaaaaaaaaaaaaaaaaggaaaaaaaaaaaaaaaaaaaaaaaaaaaggaaaaaaaaaaaaaaggggggggcgcgtttgttggtccaaaatttttgaccccgtaaacccccgggcttaacaatttttttggggggccccaaaataaaaacccggggcggggtttttaaaaccggggagggggaaaaaccctgggtttcccaaaaataattccgcctggaaaagaaacccctttccccctgtgggctaa

SEQ ID NO: 65098 - DNA, 692 bp, Zea mays
  Clone ID: MRT4577_159367C.1
atcgccgcgccggcgccacggcgctccgtgtcggccgcgttgccaagggcaacgacctctccgtgggcgacgctggcgcgtcgcagaggcatctctccgtcaagttcctcccgccgcctgcggcccggtggtccgtcaccgatttatgctcctccaacggcaccctcctcaacggtacgcctctcgtggccactatccccgccccgctctccgacggggacctcatcaagatcggggaggccaccgtgctcgccgtctccatatcgaccgaggcaggcccggtaccgggcgccgccgcgactaggcgttccgcgcgcaacgcagcagccgtggcgacggcggcggaggaacaggtggccgctgtttctcgcagggtcggacggaggaaggccgtttcggctgaagcccccgaagctgggaatgaagtggaggaggaagctgcactcccgactcgccgaggcgggcggaggaaggccgttgagcccgctggggtggagacggaagaggaagacgaagaggaggaagcggcaataccgcgccgtagcaggccgaggaaggctgcagcgacggttgtccttccgccacagccgcaaaatatgaggtctacgagggctgctgcaaggagagttgaggttttggggtgcgaaaacgatgagggagaagtggtgaggaccgggtcccggaggggtcga

SEQ ID NO: 65099 - DNA, 641 bp, Zea mays
  Clone ID: MRT4577_159368C.1
ttcccccccccccccccccccccccccccccccccccccccccccccccccctcctccttttttttaaaaggggggcccaaaaacaaattttttttaaaccgttttttgggggggggacccccccacccgctttttttgacataaaaccccgaggggctcaaaatcatataacggctccttgaaatttttccaaaacgtataaaaacttgttaaaaaacccgcaaatgggaccaaaaaccccggggggtttctccggggggaggaaggggctcactccctccaaaaaaaccacgtcctttaaatttggcccccttgccttgaacccccccttgggaagggagcccggcccccccggggcgttgtttgtaatggcaaggcccccaacaatgaatttcgacggaacttttatgggagctccagcccatgccgaaaaaagcccccaactcctgtttatgcccctggagaaattaaaccccccaaaaaagcctgtttttgcaaatttttttgcaaaaaaaaaaatattttcctttgatacccaggggggacaagttccttttgaatcaaaaaagtaaaaaaaccttttgtccttgggcaaaataaaaggagctggtttgcccatgccaaatgttttcttaaaccc

SEQ ID NO: 65100 - DNA, 436 bp, Zea mays
  Clone ID: MRT4577_159369C.1
ctctctcatcgttccctgtcatacggcactacagctgccattaaatcacttgcttgtacgtcaagacagggaattttggaatccccgtctgcgactcatgtcatatgacacgcgctgctcccttagcttatcatgatgattagatgtcatgtcgacgggtgaaacatagttttgttgtacccctctgctgagcatgcttgtccgtgtcacggttgctttggaccaaagaacaaatgtttcccattgcactggattgcaacagttgttatttgtattggacctgcttatggccttgcttttctccatgaggaagcacaaccacggatcgtgcaccgagatatgaaggctagtaacattttacttgataagaagctgctgtcgtaaattggagattttgtattggcgaaactctcttctgatactgtaactcacatta

SEQ ID NO: 65101 - DNA, 404 bp, Zea mays
  Clone ID: MRT4577_15936C.1
gactagttggcattttttttaacagagaagggggtaaacaaataacttcctactaaggccgtgaaaggcgcggccccaaaagctttacccaaggtgaaaagggatgaatttttggaaccccccgataaccaggtttggtggaaaaagaatccccgtactaattgcgcaccgtgccgaagcagaaccaatgccaggcgattacttccccgcgtgcaagaacgcttggcaacatccgccggtacgggaccgataccaggacggctcccatattttggtataggatacttgagctagagctgggggaaatcatgaaatagcttcctgcttggcgaatttgccgtccgctcacaggtttacacaacctgcacgcgggaagcatgacgagaaccgttttgggggccaaa

SEQ ID NO: 65102 - DNA, 2415 bp, Zea mays
  Clone ID: MRT4577_159370C.1
acgccgcaacagtctagtttagggttcttacatacagcatgatatgtacatttcttatgcccttaagggcgtcgtggcggtgatccaatagctagctcagctgcaattctaagaaaggtcctcgctcagctcggcactcgggcgttgttttttattgtttcctgagatcacctcgcctggcgatatccttctcccgtttaacgggtgatgttcaggtcccctgcttgacaattatatttgttgtgtatgtcgctataaatcagcccccttcctccacggtcgcgtttcacgggcgtagagggagagagagagagagagagagagagagagcgaagagggcgtgagagaggagggaggccaagccgtacgcgtcgtctcctgctgtttcttcccatccctttcctgcctcggcttgcaccttcaaccttgcttaaagctctgacctcaaactgaaagggacgtgcgaagagtcttttttgcggcagtgcaatggaggtatttggcaaatctgtgattgctgagcccagcaatgtgattttcttgtccgcgatccttaacacagaagggtcaaaccctagtcacaagtgtgacaagaggtgccagagcgagcgcattttggggaacatgtaccgttgcaaactgactgaaaccactcacatctgtgacaaaaactgtaaccagaggattctatatgacaaccataactcgctctgccgagtgagtgggcagctttttccgctctctccactggagcagcaagcagtgaggggcatccgcaggaagcatgaagtggacagcagtgaaggttgctcctttaagcgcaggcgcggcgcacagctgcatccttcccccttcgagagtcctactctgctgtgtctccaatcccgagccaggttggagatggcatggacatgagctagagctaatgagacttccttttcttcggccagccacctaatttcgttctgtctaccctttttcccttcgattacaagatggaactataagagcttccttctttttagacttatatgatatagactccttagatgcaccgaataaatgttcatgtagtatctattctgtttcatgggaccttgttgtaactcgtgaactttgattgaacgcctattctgatttagtggtactttcagataatcattcgctgcttatcaaaaaaaaaaaaaaaaaaaaaaaaaaaaaaaaaaaatactttactttttgttcaactaatttgccttctaattttaatcctttgatgcaatttaatataattgagaggtttacatttgtccgccaatgtaagtaagtgaaggattctttggtactgtaatccaggcacagggaactggcttgcctttgctgactgaagtttttgtacagctgttactagtgttttgcttgacaagttcctaatcaagcttgaatcatttacggtttgttcccatatagctcaattctatctgttgcttaactcttttttacaggttatgtttctaacgcttaatgttttcctatgttcttttttgtcttaacatttgttgtatgcaggaccatccaggttctaatcgttttttgggaaatgttttgttcttttttatataactatattgctaacttaatttaatttgttgattaatttgcctttctttgtttttgcaggtgaacatctctgattccattttcatctgttgggtggcaagaaactaatcaaggagtctctctcttctcattctctgcgtggaggactgtttagctgtagctgagtggcatgctttccagaacataaattggtggaagagaagtttgatgctaccactttgcgagaaggaccgaaccaacacaataacatcaaacttagatactgcagtttaccaactttttcaatattgaagattgaagagcagcaagatcagcctcttccatatgcagtttgaagaaatcctttttaaggtctattagactagaatccttccggcaatcttgccttcaccccaagcatgctgcataccttgtaatgagtgtggtacttgacgactgttaccaaagtttttttgagggtaagactgttaccaaagtagtggatgcttttctttggcacgaagtttctttcatatccacctagtttgtctgtaaaaaaaagtgaaacaccgagaaagacgatcagacgaaaaaaaaaaataaaacacatattggtaacgtaatagtaactgataacgttaaatcatgtttgtttaagtctaactgtaagtggatgcttttctttcgcatgaagtcatgttgatttttgtacgttctaacagcgtccccatcaaaatcctattgaatctcccatacttctaaacctataattttcaagagattcctaaaaaagatagaagatacgtttgaagaaaaaaaaaaaaaaaaaaaata

SEQ ID NO: 65103 - DNA, 884 bp, Zea mays
  Clone ID: MRT4577_159371C.1
atttctgtcatttgacacagaccgcacattctataaatcagaccccttcctccaggtcgcgtttcacgggcgtagagagagagagagagagagagagagagcgaagagggcgtgagagaggagggaggccaagccgtacgcgtcatctcctgctgtttcttcggttcttcccatccctttcctgcctcggcttgcaccttcaaccttgcttgtcaacatctctgattccattttcatctgttgggtggcaagaaactaatcaaggagtcccttctcattccttgcagtggaggactgtttagctgtagctgagcagcatgctttccagaacataaattggtggaagagaagtttgatgctaccactttgcgagaaggaccgaaccagacacaattcgcatgattggttgcccgctcgcgtccatccatgctctccacatgcattgaccgagtgatgaacagtgtttggtttcttgtatacacgagaccagggactgcacccgcagctgcaggataaactagaaatagcacatctagttgcatatctgattgcatgcatagatacgcacaaaaatcccgtttccggcgggccaagcacacatgagccatgctacgctcatccagctatccaatcaggtgcaataacatcaactgagatactgcagtttaccaactttttcaatatggcagattgaagagcagcaagatcagcctcttccatatgcagtttgaagaaatcctttttaaggtctattagactagaatccttccggcaatcttgccttcaccccaagcatgctgcataccttgtaatgagtgtggtacttgacgactgttaccaaagtttttttgagggtaagactgttaccaaagtagtggatgctt

SEQ ID NO: 65104 - DNA, 435 bp, Zea mays
  Clone ID: MRT4577_159372C.1
acgcgcgtagagagagagagagagagagagagagagagagagagagagagagcgaagagggcgtgagagaggagggaggccaagccgtacgcgtcatctcctgctgtttctccccatccctttcctgcctcggcttgcaccttcaaccttgcttgtgaacatctctgattccattttcatctgttgggtggcaagaaactaatcaaggagtctctctcttctcattctctgcgtggaggactgtttagctgtagctgagcggcatgctttccagaacataaattggtggaagagaagtttgatgctaccactttgcgagaaggaccgaaccagacacaataacatcaaactgagacactgcagtttaccaactttttcaatatggcagattgaagagcagcaagatcagcctcttccatatgcagcctgaagaaa

SEQ ID NO: 65105 - DNA, 540 bp, Zea mays
  Clone ID: MRT4577_159373C.1
gccgggccgggccccttcgagaggcctactctgctgtgtctccaatcccgagccaggttggagatggcatggacatgagctagagctaatgagacttccttttcttcggcccgccacctaatttcgttctgtctaccctttttcccttcgatcacaagatggaactataagagcttccttctttttagacttatatgagactccttagatgcaccgaataaatgttcatgtagtatctattctgtttcatgggaccttgttgtaactcgtgaactttgattgaacgcctattctgatttaaaaaaaaaaaaaaaaaatagcacgttcagaaaatcattcgctgcttatcttttttcacacttccgagttagttattttgtgtgtttttttactttgtgttcaactaagtttccttctaattttgattctttaatgcaatttattataattgaggtgtacatttgtccatcaatgtaaatatgtgaaagattctttggccctgtaatccaggcacagggaactgactgcctttgctggctg

SEQ ID NO: 65106 - DNA, 697 bp, Zea mays
  Clone ID: MRT4577_159374C.1
tagtaaaaacctttgcacgcaggatgctacaagaagagctcttgcccaccaaactctgctactcaggacatcacaatcttcggcgcgctgcttgtggtcgcgtcctgcttagtcctcctcatcatctacaacttctccggccaaatcctgaccaaccgcgagaagcggcaggccaagtcccgggaggccgccgcgaggcacgcgcgagagaccgcgcaggcccgggagaggtggaagtcggccaagggcgtggccaagaaggccggcgtgggcctgcagtcgcagctgtcccgcaccttctcgcgcaagaagggcggtggcggtggcggtgggcagtcgtcgcagctgcaggccggagcgtccacaaaggtaggtgatgacgcgggcgggaagaagcacagcaacctcgccgacatggtgcggtccatcgacgacaacccggagagcgacgaagggttcaacctggaggtaggggacaaggcgctgaagaagccgacgggcaaggagatgcacacccggagccagatcttcaagtacgcgtacggccagatcgagagggagaaggcgatgcagcaggagaaccacaacatgaccttctcgggcgtcatctccatggcgcaggaccacgacgtgagcacgcgcctgtccgtcgagatcgccttcaaggacctgaccctcacgctcaagggcagcaaga

SEQ ID NO: 65107 - DNA, 398 bp, Zea mays
  Clone ID: MRT4577_159375C.1
caactgaaaccaccactgcatctgcacctaaagagactacccagagttctctttccaacagctttattatctataccccctttttcaaggaagttctcagcaaaggcagagtttatgtccatcgaaaacctcaagaccttcgaccccttcgccgaagccgacgaagataccggtgagactaaacagtctcagaattacattcatatacgaattcaacagcgcaatggtcgtaagacattgaccaccgttcagggtcttcctaagaagtttgatcagaagaagattctcaaggtcatcaagaagaaatttgcttgcaatggcaccattgtcaatgacagtgagatgggggaggtgatccaactgcaaggtgatcagcgcaaaaatgtccaagaattttt

SEQ ID NO: 65108 - DNA, 810 bp, Zea mays
  Clone ID: MRT4577_159376C.1
attcaatggcgtcgctgcaagcagacgaagagatagtggcggtgctcgacgaggagactctagcgctgatgggggtcagcaacgccgccaccgcagcgcgggtggcggtgggcgccgagtgggagaagttcaaggagaacgtgcggccgctcaagcgcgggcacgacgtgtccaaactcaaccacgcgctcgctcaaggcacacgccaatccctcccagcgcaccgctctcgtcgaagcccgcaagttgattttcctgattcagaaagatgatcgaggcaatctacgagtaccgaggcgaggatccgctccaaccgtggctggactgcatcaagtgggtccaggagtcattcccgaccggcggcgacagtgcgtgcggaccttatggcacgacgagcgctacaaggacgacatccgctttctcaaagtgtggctggaatacgctgggaactgtgctgatgccgaggtaacatacaggttcctggaggccaaccagattgggcagggccatgccatctactacatggcttacgcatcgttgatggagtcaaagaacaagttgaggaaagctaatgagatctttgatcttggtatagctaggcaatgttttcagatcggcgatcagcttctgatcgccagaggaccgatcagagcgattagagcgattaatcggacgatcagtccgattaatcggcttcctgatcggttgatcagagctcctgatcgtccagggctgggaaaaacgaccagaggtccaggcatcagaaatcagcattcagctggcagattcagcagttcagcacttcagcta

SEQ ID NO: 65109 - DNA, 1962 bp, Zea mays
  Clone ID: MRT4577_159377C.1
caaaacgcaacggtcgaatctcctcgaattcgaattgcagccggtgccacccacctcacatggcggcggcggaagagatgatggcggtgctggacaaggagacgctggcgctgatgggtctgggcaacgccgccgccgcggtggttgccgagtgcgagaagttcaaggagaacgcgaggccgctcaagcgcgggcgcgacgtgtccaaactcaaccacgcgctcaaggcacacgccgatcccgcccaccgcgacactgttcgcggagcctgaaggaagccgattgatacaatgtcgaagtaccaatgcgaggatcggcgccaaccgtcgctggggtaagtgtttatcataggccctttaactcgtcctttgcgatttcttggttcgtgcagggactggtagctgtcttagtggataacgtgttctttacggatctgattcgcccgcttacagctgcatcagatggctgcgggagtagtttcggtccggaggtgagtgaccagggttggtggggttgccagatcagtgagtgcggaccttattggacgacgagcgctacaaggacgacctccgcttcctcaaagtgtggctggaatacgtgagtgatgctttgccagcttgattgtttttctctgtagtttgtgtcagtgcagtggaggcacctcatatatcattccgctgccgatcttgtcctttttgcaggcggggaactgtgctgatgctgaggtaatatacaggttcctggaggccaaccagattgggcagggccatgcgatctactacatgtcttacgcatcgttgctggagtcaaagaacaagttgaggaaagctaatgagatctttgaccttggtatagctagaaaagcgaagcctctggagaagttggaagctgtatacagggcatttcttcgaagatcaatcaaaaagagggaacaagaggatgatacagtagatgatgatctgccaaaacgcagtttcgggaataacttgaaacgagatgaaaacagaaatcagcaagcagggaactcccacctggggagaccaagggcactgcagaggccgctttcagtttacaaagatgaaagtccattaccaaatcagggccttgacagagtgaggagcaaagaaaataacacaagttggcgcgtcctcggaacacgagcagaacggaacaaggaaaataacatgatgcctgctaaatggacgtctcacaagattccacagaagttaggagcaagaggagcggttcaatcaacccgagccagttgttccattgaagtcttcgtcgaggaagactgcacacaggaacctgctcggccggtgccaaagagcccaaatccttctgttctgaagctcaggcaaacaacaagcaaaagccttaagaaggagactgaattgctcaaggagaacccgctgcgcaacttccccctgagcaggcttaggtaattagcatcttgctggttctgagaaacatctcgtacgttatgatttggtcgtatgtatggttgctgtgaggtgttgtgcccaaaaaaggctttattagcctctaaagcttagacgagcaatgtatgcctatggcattacccaagtgctgtaaggttgtgcattatattgacacggcgtgcttattatctcgtgcgtgcctatgtgaatctaatagcctcgcaaaataaaaaaaaaaaaaaaaaaaaaaaaaaaaaaaaaaaaaaaaaaaaaaaaaaaaaaaaaaaaaaaaaaaaaaaaaaaaaaaaaaaaaaaaaaaaaaaaaaaaaaaaaaaaaaaaaaaaaaggggggggccgtttttaaaggacccaagttaacgtccccgggcttgcaaggtaatagtttttttatggggccaccaaaattaaattaatgggccgggttttaacaacgtcggaattggaaaaaccggggggttcccaaattaaatcgctttgaaaaaaatccccttttcgccag

SEQ ID NO: 65110 - DNA, 349 bp, Zea mays
  Clone ID: MRT4577_159378C.1
gcagaacctagccgcctccaccctcaccacaccaccggctatgtccacagcggcggctcatggcggcagcgacatagccggcgctggggaggcccgtcttcaccaaggtcgaccagctcatgccgtgcaccaactggcacaccctcaccgtcaaggtcttcagcgccacccccgtgcctgggcgcgcgcgcccagtcgcacccgccgccgatccatcctgcgcgcctcgcatcgtctagtgcctcgttgtactagacctaccatcgtttcaccgtccagaacgaccaagttgacttgctgaagcccaatgctacagtgattcttgctcaatgccaaattagacatgctt

SEQ ID NO: 65111 - DNA, 242 bp, Zea mays
  Clone ID: MRT4577_159379C.1
gcctcaggggccatggcgaagacgagcagatcctggtcctcgacccgcccacagacctcagattcaaaggccccttcacagatgtagtcactacaaatcttaaattgcgaaatccatcggatagaaaagtgtgtttcaaagtgaagactaccgtgcctcaccggtactgtgtgaggcccaacagtggaattattgacccagggtcaactgtgactgtttcagtaatgctacagccctttgac

SEQ ID NO: 65112 - DNA, 229 bp, Zea mays
  Clone ID: MRT4577_15937C.1
cagcaagctgcatagatagcgtgcatccatactcaacaatcgagcatcaatggcatccaaggtattctccgtacttatgctccttgctcattctacatgtgttgctctcgcgacaattgtccctctatgctcacaaggtcctagttgcttcctgactcaaccatacctgccatccgttatacgctccaatatgtggataacccagctattcaaccatatctgcttcaac

SEQ ID NO: 65113 - DNA, 589 bp, Zea mays
  Clone ID: MRT4577_159380C.1
tggacgtgctggaggattaccacctgacgagcatcacgctagactaccgccgggagtgccgtcagtcgcagctgctcgagtcgctcaccagcatgacgacctcgtcgtcggcgccggccgagccgccgctgacgtcgagcctgtgcggctctgacctgtacagcacacacctgatacggcagcaggatgacagggccgagattgtcagggcttgtgccgaatggcgtcgcaaggagcatccacggtcgattgaacagctctgacaagcggttgggtatatactctgttttgtatttgcttgtttttgttttaagatttgtgtgtcttcatttgtgctttatgctttacttgattggaaaacagtagacaaagaattggggaaaaaacacttggatattttgatgtatagaatggagcagtccattaccatctcattctttttttatatttttggaaaggaattaatgagttgctccatcgccaactcattacttgtaagctaataattagtattaacatgaaaaataaaatcattctactaaatttgagaaacaaaaaaaaaaaaaaaaaaaaaaaaaaaaaaaaagga

SEQ ID NO: 65114 - DNA, 347 bp, Zea mays
  Clone ID: MRT4577_159381C.1
ccggccgggagtaccctttttgccatgcgtagcattcgtacgaataaacatcctagcgacatctgagcctcctccgcctatcctcatgtgggcctactggagcaagtacgcccatgagcccatcaagaatgccgactacatcgggacccctgcttagggtatccttgctcctccagagccaactggaaccattggcaaacgactttcccactcaatgtcgataaccccgagaataacctgggagctccccgtgagctccagttctggtgccctggagccctctaggacatcacgcggcgtcaacctctcctaggagaccctctaccagaaccatcaacgatgggcaa

SEQ ID NO: 65115 - DNA, 258 bp, Zea mays
  Clone ID: MRT4577_159382C.1
gactagttctagatcgcgagcggccccccttttttgtttttttagcgaacaaaacccttgctcatacttctctcaccccatttcacagcgggagcaaacaaggggaccaccaggggtcccaacacctaatccaagggtagaagggacactatcacggtgacaaaagcaaagggtaacacgatactatagacagtcacgaaacctccattagtacatcaaattcaaaacgacgaccctatgtgtgaaacccccgattcg

SEQ ID NO: 65116 - DNA, 175 bp, Zea mays
  Clone ID: MRT4577_159383C.1
gcacgcatactcaaacctggaaccacatcagccgccaccctttttttcttgaatggaacaatgcggagggggaagaaacacgccttgctcaacattcattcaaacaaacacacattgtgcaaaataccgtactgcagctatacagattccaacatttgtgcgtactcacaaacaa

SEQ ID NO: 65117 - DNA, 937 bp, Zea mays
  Clone ID: MRT4577_159384C.1
cccgtcaaacaccttggtggatagcactaagcaatgacaacacctctgaacttttatactccatccgtgaagaaaaacaatagtggcacacactacatccacacgaaatagtaccacactatttattgacgacgaccacgtaccccggagttgaaagaacacaacatatatggattcttctgcggaatcctatattgaaaataaatactatataataaaagcacaggaagagtattctccgatccatacatctcaaagttggtacacacacatatgccgtctgcaacaacgatacatcgccggtcattttaattaccagcgccaaacattttttccagaagttccggcatcttttcgttccatggggatgtagaaggcatggatctgaaggtcaattttggatgtgctatcgaccgtcgttaggtatttcttgtatatgacgcctcgagccatagtaagttttccggtgcctccaacgattgaccagtctcccttgaatacattaggccccattacttggagtgtggacccttccaacccgctgccttgctcgaagacgatgtcaaacgaagcatgccagcttgcttcttctctgctagcttggacatgcagacccttggcgtgcgcaactattttcccgttttggcagggatcttctagatcccaatcgttagcgaccatgtttcccagcttgttaaagcctccgggagatgcgacttctacttggtttgctttgctagtgccacaccagtgctgtatcaggatcagctggtagtgaagctcatggagctccagggagtgatcaaggggctcggaatcgtaaggcggcatggctagctgctactactgggcgctgctctgctttcttgtatagctgatggaagtactcaatactctgacccgtgagactacggtcccggcccggccggcctcgagg

SEQ ID NO: 65118 - DNA, 682 bp, Zea mays
  unsure (1)..(682): unsure at all n locations
  Clone ID: MRT4577_159385C.1
ttttttttttttttttttnnnnnnnnnnnnnnnnnnnnnnnnnnnnnnnnnnnnnnnnnnnnnnnnnnnnnnnnnnnnnnnnnnnnnnnacaaaacaaggtagacgttcccactaagatgaaagggggaagaaattttaataagcgaggaaaggataaatccaggctggtccagcgattggagtgatcggcatagcacatttcgtttcagtgacttccttcgtgtttcgacttggggcggtggcgcactaagcttcggcgagcatattgtgaggagaggggtggacctggtaaaggcgaagtcgagtgtaaatttccgttgtgatagccccatggaaagtggatagatgggacgttgttcagagtgccagcgtggtcggattcgatgtcgagctggccacatgacgggtagtattggtcttggaaaccttcgcttgcgaccgattctccccaagtaattatctcaaatcgaaagatatagctgcccgcagcgatttcgctggggatcggaacttcccaaatgtcggcgcgcgcctcggaagaatattgtcggcgtaactgaaggaccccatctttcttttgctggattttgaagtacgacgcagtagaggcatcaaacgattgacaagcggtaggcgagtcaccacatctgccaaggtatgccaggatgtgtccatggtgat

SEQ ID NO: 65119 - DNA, 310 bp, Zea mays
  Clone ID: MRT4577_159386C.1
ggcggcgcgtcggacgggcaggagttcaaggtcgtgtcgcggcttaagaagcggccgacgatcggcgaggtggagtctatgctgtacaacatcatggccgcgaactcgccggtgaccaaatcggccaggttcctccgtgagattgtttccaatgtgactggagcaaagtccaaggcacagtgacagtgagtcaccctgcctgcgtgagcgtgagattcgtcggtctggattttgttggagtgctctgaatttctttgtgccacgcaacgaaaaatgagctgcccctgaacacggtgagctaattttggtc

SEQ ID NO: 65120 - DNA, 255 bp, Zea mays
  Clone ID: MRT4577_159387C.1
atgactgccccgcgaatcacccgtcccgtcgcattaactcctcagcagggcaagcgacacccttggcaggcaaagcgggcgtcgtttcacctccgccatgatgaccacgtcaaaaaagggaccgggaaaggagacatttcgaaaaggatccttctcagcgaaggaaacgggccccgagccctcctactgatcaggggttcgaaggttggcccctcggaagggttcgacagtcgccccagagcactcgggctctga

SEQ ID NO: 65121 - DNA, 582 bp, Zea mays
  Clone ID: MRT4577_159388C.1
atgcttcggctagctgaacttcagaggaagattgatgaatctgccaaagaaatgtgtcatatcacgcaagatgaccaaggacgaaggccacaacagagagagcttcgtcaagaaagcccaagcaacgataacgaatgcagcagaactgcaggctacccatggccaccatcctacaagccaccacaacttcccatgtatgatgggcattctgatccaaagcagttcctcatgagctacgaagcaaccatatcgtcatatggtggcaacacgactgtcatagcagtcagaagcgtgactgagacgtggtattcttccctccgtccgggaatgatcacgtcatggcaaaagctgaaggatatgttgtgtacgcaagaccatgaggaatacctgcaagcgtatgtccaaatgtttttatgtctcagagcccaagcgccaacgatgccaaacgagattgtcatcgaagctatgatcaaggggcttcgactaggaccaacgacacaatattttgctaggaagccaccacaaactttggaaaaggtcttccagaagatggacgagtacatcaaggctgataatgactga

SEQ ID NO: 65122 - DNA, 472 bp, Zea mays
  Clone ID: MRT4577_159389C.1
ccgggaaaccaagcaacccaatccaaaccagacaagcaaggaatcccccgatggctcatcgcgttctcctcctcctctctctcgcgacaatcaacggggcgtgtttgaagcaccacatgaagggggtctcacgccttccgtttgctgccggcagctggtcccttcttcgagcataaggatatgggcagcgtgaactatgaatcaatgagagcccgaaaactcttgatgaccgaattttctaatcgctccatgttcacacgatgaatacctactgtcgccgcgtactctcatatcctttgtatctccgctgctagctgattaactgctattacgataaatggctggacttcttttttccacccgctttgaatcatgcatgatgcgtgcatggtcaccatttcttcgtgtcatgtgaattgaaacagcccaaaaaacaccaaaaaaaatttgcggccctcgagctacacctttt

SEQ ID NO: 65123 - DNA, 526 bp, Zea mays
  Clone ID: MRT4577_15938C.1
aaattacagcataggtcattggtaatgatcacaaggaccacagcgtgcgagcgggatacgcacactaccggagcaatgtctgaggcaggctccgttcttcacaaacactggtacatctcctgcggggcatatacggaggcgggagattacgggacacgcatacaagcgcgtgtatgcccccggtaacttgccgccgacgaatgtgggcgcgccagcccagcctatgttgagtgacagggacagctaggcggacggtgaggatatcaacgggaccgcttgaagtgacgatgggctgcacgaagcaaaccgaacatggaacaacatggcataggcggccgatcctgatctgcttgacctagagctccgactaacacctacgggtcggcggccacccccagcggtccaaagctgacgcctgggtacagcaggtcgaccacctaatcgagcgggccaccggcgaaggcggaccgcttgtcggcgcccatgagcaccacctggcacgcccaggaggaccagcaagctctga

SEQ ID NO: 65124 - DNA, 276 bp, Zea mays
  Clone ID: MRT4577_159390C.1
agttcgagcaagaggtagaataggcatggtcaccctagcaagaaactagatatcgaataatgattattatcaaacttcataccagcagtatatatgcatggcacatgcattgcattgttaggatattgactgtttcaactttcaataaatagtatatgcaaagaacactgccaataaaataggtttcataattgttctttcctagtcggaagggtcataaggtttccttctcattgatctaaacggacattcgagtgttggagccgccggcggaaa

SEQ ID NO: 65125 - DNA, 339 bp, Zea mays
  Clone ID: MRT4577_159391C.1
cggcttttactgtttctcttttcttacctcaaggcagatggggaagcctttagctttttttatggatccaaaagcattacataagcatcaaaaccagaactaaccctgtaggacgggaataagcacacacaatacagccccgcacacataccaattattaggacagggccagtccagtacaaatgataaccagggtgctaatcaagaatcacacgtgggacccataaaaaagcatgatacaccgcaggcacaccagaccagaccagaccagaccaaactcttgttccaaaacaaaagaagcgccttatgcacaagactgattctccgccttggggggct

SEQ ID NO: 65126 - DNA, 773 bp, Zea mays
  unsure (1)..(773): unsure at all n locations
  Clone ID: MRT4577_159392C.1
ccgggtatataccttaatataaatagaaaacgtagcaatgtacgaacactttactagtatacggtatacgtcatttcctatttccaaagtgccctaattcttgccaagtaattacggttatatgagagacaagctacgattacgtccacatatatggttatatcatatcatcaagattgaaatagtatttgtcgatattaataacatactcaatgtctctgtattaaagaatgttcgaagaaactttataagataatccaatgtgccaagtaagtttttattaatttagttaatataagatttgaacctttcaacatatatgtttataattatatatatgcatatgtagatattatatatatacatgggttaaaagggcctacttataggttaaaagggcctacttataaattttcgcccagggcccctaaaatctcaggaacggccctgctctctcggcggctccagctcggnactcatagtgaagttctaccaaacagtaaaaaaagtttctcatcgagagagccagaaccatttaattgctaatagttatagcacaaaaaaacatgacttctaccggctcctcatacgttctcctcaaacatcattctaaacaacacataggagaacttgttttgtcaaacgaattataaaacggctaaaagccaaagagccagaggagtataagccgaaactgttgttggagaagccagagccttgccaaagggaccttgttacatcaatgattcaaaagacaatcaaagtttaacagt

SEQ ID NO: 65127 - DNA, 501 bp, Zea mays
  Clone ID: MRT4577_159393C.1
acacgggataaagggccatccaaccatccatttgttttagtttttatccaaggggcacaccccttggggacccttttggacatttttttttaaagggggtctttgcaaaaaaaaaaaaaacaggcctattatttggctttccctctccactggttttacttttgagcactcaacttttaaaacgttataaaaactttcccaaaaaagatcaggggaagaagggagaacccttgttttttttgacaaaaacaacaattggggtttgcaaataaacagcaagggttgaagcaaaccatttccatgcccataccttgtttgcaaaaaattttgcacattttttataatcccagggtggagggctttgtttttgggaaaaaaaaaaaaattccaccaggggatgccattccttaaccccgtgggcaaatgcaaaaagggcacttttttgtttttcaaggggggacaaggggggttccactgggggggggggggggggggctcccc

SEQ ID NO: 65128 - DNA, 401 bp, Zea mays
  Clone ID: MRT4577_159394C.1
ctcttgcgggccgtgagactaccccttgcggcgaactgtgctttctaagtcacacttcctgagctcatgctgggctccaaggcagaagacccttgaacctgtttgtttgacacttgactatgggaagaacctttgcctttccttgccctctcgaggggctacttatcatcctgcccgacctatatgacttacataccataaacatgcaccccatgaattccaaatgctggcccctatcttcgcagaaaattgaggccgagattaacctaatgagggacattccaagggccctctgataatgccccactacaaacacaataggatgctaacatagctgctccatagttaaacgcttatagaactgtaccttattacaggaacctgtccgggcgaaacggact

SEQ ID NO: 65129 - DNA, 339 bp, Zea mays
  Clone ID: MRT4577_159395C.1
ggcacaaaaggcccctatgacactcccatagccggttgagccacgcctccccggagagggagggagagccccaatacacaccgcccgccctttctcgtgcggagacggaagctagatgctacccaccggcgatggcgacggagatgggctcgatggccgccaggctggatgctcgcgatcccggccgacgctacgaccgcgggtgatctataggggggaccatcgtaaccggagcaaagcctcggacagggggttcaacgactgcgaccgcctgatggaagatgcggccaggaaccacggcggcatgaagccgatcaacaccgtctgcgatgcgcaagc

SEQ ID NO: 65130 - DNA, 251 bp, Zea mays
  Clone ID: MRT4577_159396C.1
cccacgcgtccgcggacgcgtgggaacttactggacctagaggacaagctgcaccccggtgggcccttcgaccccctgggcctggccagcgaccccgaccaggccgccatcctcaaggtgaaggagatcaagaacggtcggctggccatgttcttcatgttcgccttcttcatccaggcctacgtcacctgctaaggccccgatgagaacctatttttgcacctcatcgaccctttcttcatcaacctgct

SEQ ID NO: 65131 - DNA, 668 bp, Zea mays
  unsure (1)..(668): unsure at all n locations
  Clone ID: MRT4577_159397C.1
atatcatgtaaaaataagaccgcattcaaaagtcttccacctgagtcctgcctcatagttttgtgtttgctgtacacatgtatggtatacttctttggttatgttctctactcagaagcagcttttattggaaacaagccgctatgttctgtaatctattcaaaatgcaaaagaaataatagaactgtgcatcatattatcagttattatgaaatacactggtgagcagctttctttcaaaatgcatatactctttcttccttttctttttgcttttagattgcctcttgttttgttgtctctaaatactacctgggcatgagcgcatgggccttatgtttgaacgattttacacatttttgatatataatgacttctttttcatgcatatgtacatatgtatgcataaatatttggagaattaaatctaacttgtctgccctgtgctcttcttttgccttacagagatgaaatctgtgatagaattatccaagaaaacacggcttgatctgtccgcttctgctgaacctgtgaaaccgttgaacanacatgcagctagagctcctgagaataagcgtgttggggaaagttctgtctgcaaggaagagtttaagttcttcgacaagccctgggcctggctggacattttgtgcacaatacaggtgggg

SEQ ID NO: 65132 - DNA, 217 bp, Zea mays
  Clone ID: MRT4577_159398C.1
gggaagcatgtatacatattcgtgcggcttggttaaccgaatacttatactataggtttggggccggtgggtatacatgacatgcatcatgaagagttcggggagctgcatgtgcctgggtttttctttctttctttttaaataaattattttgggtacattttaaaaaagcttgtgggttggtcatgtgtcttaaccaatggaagccaaaaataaa

SEQ ID NO: 65133 - DNA, 404 bp, Zea mays
  Clone ID: MRT4577_159399C.1
gggcataattgggtttatattttttgcaataggaatatgataacgtcattttttatataaatatatgtatctgcccagggaaacttaagttccgtatggttcctcagagtaaactttagtccatatgtgaacctattaaacctaatcagtccataattcggtcatgtgaacctagtagtggaagagtcaaaccgcgtgagctgtggcttgtgcgtgtaggttcccaaaatatggcgccactgattttcgggtgttgtagatgttcttgggataacttcaagatgttttcaaatttcttgagcgtgctacaaccctaatgttcactacttttttattacactaccaaatttcaaaaataaaaacaggattataattgctccgtggagttcttctgggggcccctt

SEQ ID NO: 65134 - DNA, 129 bp, Zea mays
  Clone ID: MRT4577_15939C.1
gcacgagtgaaactatagcttcttcttcttgactttggttgtaagaaatactaagtttcgatagcatgcgtggtgggtgtttgggactgtgattgaacgcgagaggttcaggtgctgctatatttgagt

SEQ ID NO: 65135 - DNA, 961 bp, Zea mays
  Clone ID: MRT4577_1593C.1
gcgggacaatactgtggacgtactggagcagccgagctcgagctgctgtgcggctggctgtttcccccctccagtccaggccagtccagccctccaccacccaccacctcctcctgctcgctcattcactcagatttgcactcggccggcatggcatttatcccccacctacaatctcaggcaatccgccattactgagagccccaatcgcacatcgggtcgtggcaagctcgcgacgcggaagcgccaccgctcccctgtccgtctccgtccatctcctgcctgcctaccacatcaatcagtgtgaccatccagcacattcccatgacgggccacgccagcctgctgctgctgctgctgccggcgctcgccgccgtcctgctctgctgccccctcgcgcaatgcgggcagcagaactacacctccatgttcagcttcggcgactcgctcaccgacaccggcaacctgctcgtgtccagcccgctctccaaccacatcgtcggccgctacccctacggcatcacctacttccaccgccccaccggccgctgctccgacggccgcctcgtcgtcgatttcctagcgcaagcgttcggcctgccgctgctgcagccgtacctgcagtcccgcggcaaggacctgagccggggcgtcaacttcgccgtcggcggcgccaccgccatggatccgcccttcttccaggagatcggcgcgtccgacaagctctggaccaacctgtccctcagcgtccagctcggctggttcgagcagctcaagccgtcgctctgcagctcaccgaaagagtgcaaggagtacttcagcaagtccctcttcctggtcggagagatcggggggaacgactacaactacgccttcttcaagggcaagaccctggacgacgccaagacctacgtccccacggtcgccgccgcggtcaccgatgccaccgtaaggctgatca

SEQ ID NO: 65136 - DNA, 237 bp, Zea mays
  unsure (1)..(237): unsure at all n locations
  Clone ID: MRT4577_159400C.1
gccggnaaaaaaaaaaaaaaaaaaaaaaaaaaaaaaaaaaaaaattcacttcctttttcttcttctccggcatcaaggatgcatcatcagnggttctcccgttcccactccagtggcgcttccctgctgtgncccctncctcgccgctctgctcctgggtcgccgccacgnncggctgtgggactaccgtcttcgtgcgcctcgtatggcggccgtacgccatcaccaagggggtct

SEQ ID NO: 65137 - DNA, 1612 bp, Zea mays
  Clone ID: MRT4577_159401C.1
tcacagtgcaacctgatttcattacttttttcttgttaaaccaaacatgtgacaaatggcatagcgcatccagttcgttaccatttgcgttgtcacagccgaaaaaagacagtgcatgcagttcagtgacagagaaggaaaaaaaagggacttattgatctccacggtgagataccagcaaggcattcttttattacaggtggccgctgacaggtttctcagagctactcatacagtaacgcaagtacgcaacaggagtttcttcctcgcagcttctcaccagaaaagcctacacggcacagcaacatctcgcgcggtcactggtactgactggcaagctggccttccttgacgatgtagttctgcaccgggaagtcctcgcccttgaaatacctatccagcatgtccctcacaccatccgcataccgcagctgcgcatcaattgtagtcccagagatgtgaggggtcatggcatggttaggcatgtagcgccaggggtgatcctttggtgctggctgtgggaaccacacatcaccaccgtatccagcaatgtgaccgctagaacatgcatctgcgactgcttgagcatccatgattgctcctcgagcattattcacaacaattacacctttcttcatctttgcaatcctctctttgttaaacatgcctcttgttttctccgtaagaggtgtgttgatcacaatcacatcacactttggaagcatagcatccaggtcctcctcaaatttggccccaatttctttctcaagctctgggtcaatctgaagtctgtcatggtaaagcaggttgcagttaaagggcttaagacgctgaagcaagagcctgccaatacgaccagccccaacagtcccaacagtttttccttcaagatcataagctctatgggcaatgcctgctacgttccattcgccttgaactacctgttggtacccaggcaagaagttcctgagcagaatcagaatgcgcaagagctcatcttctgccacagagacagtgttgcttccagtgacctcagccacagttaagcccgcagcagcagctgctggaagatcaatatgatcggagccgattcctgccgtgagaagaagctcaagattcttcgccttctttatcctctctgcagtgacataagctgggtggaatggggtggtaatcaggacatgcatgtcttcaatgtgcttctccagttcacagttggggccttccttgtcatcggtgacaatgtactgatggccctgcgactcgagccagccgcggatgccgagtgcaccctcgacgcagccgacgaagttggggttcttgtcggcatactccccggccttgtagaacaccccgactatctttttgctgcctgtagacgtgtgcgcggcccttgagccgagcgcccggtcgaccagctgcctagcggcggccctccacatcgccatgaaccgcgaagccaaaggaggatcagggagaaggaaccgcgcggcgaggaagcgcaggagtgagtggggaggaacagaactacagtctacagctacagaagtgcccggcccggcctcgaggtacccaatggggggatcggcactatacggacaagctggaacgc

SEQ ID NO: 65138 - DNA, 564 bp, Zea mays
  Clone ID: MRT4577_159402C.1
agcagtggtaacaacgcagagtacttttttttttttttttttttttttttttttttactaccatattttttttttgttgtttttttttttgttgcttgcgttttttccttccttcaacatcatttgcggcaacaaacttttttggggcttttatggtaaggggggatccataaaataaaccccccccgcttttttttttggccgctttttggtagcaaaaagggctaggcaccaaccaaaaaaaaaacccccccgggggagttttaatggggggggcgcttactaaaggggaactgttgggggcacaatattaggagccaaagggggttttcacttttgggggggactcctcctgggccaaaaaagtgggggccaggccttttccccttaaaatagcccaaaactttttgaggattctccggctaaccaaaaaatggggggggggaaaacacccccgggggggggccaacttcaaaagaaacttttatgggggtagccccctttgggtggggaaacgcaccaaaaagcgccccaccaacgaaaaaaacaatttccccgctgggg

SEQ ID NO: 65139 - DNA, 149 bp, Zea mays
  unsure (1)..(149): unsure at all n locations
  Clone ID: MRT4577_159403C.1
tcggtccttccggggaggggacttcgctcggcttcaactttccctcgtgccttcccccnggcccggtcgccaccggggtggcctcatctcgacgccaagcgtgccaggccgtcttgccagtatacctggcgaagagcgggcnncggagc

SEQ ID NO: 65140 - DNA, 485 bp, Zea mays
  Clone ID: MRT4577_159404C.1
ttttttttttttttttgtgaaaactgaaattaattaaatggaaataggaaaaaagaaaacatcttctggaccaactctatgagctggcaaaatcccctctttcccacgtcggcccacctggcccgggtcgcgtgtctacgccaacaggcgggacccgcgggtcggccgtcccacgcgcgctaccgcaccatccaatgtgtgggccctatcaggctgatgaacactcctcactggcgtgtgggtccagaaggtcagggtgccttccccttgctccgcacgaatggagcctcgagctcaacaaactgcgctgaatcctccgtggttgttgcggtcaccctctagtgtttatctaccaggcgcaactcccctgccttctcgtttcatttcaccagagccaaaatcgagcaccagcgccagagcgaaggggagatgagcagggagcgcctgccaacgccgtccccgtccacgaccgacgttcggggatc

SEQ ID NO: 65141 - DNA, 267 bp, Zea mays
  Clone ID: MRT4577_159405C.1
actttctactcctcatctttccattttcttactaagcaaaacaacttcgtttggacagcatctctatggcataccctttcccgtaggtcacgggggggtccacatttttcctcaataaattatcgctcttctcccagactcttcatctacgcaatggattccaactccggattaaacctactcatcccttcttacattacccaaacaaaccagatcaaaggctgctccctctgctaataactcattctactcttccccatcccttac

SEQ ID NO: 65142 - DNA, 656 bp, Zea mays
  Clone ID: MRT4577_159406C.1
gggtacccgcggccccccctcgagtttttttttttttttttttttttttttttttttttttttttttttttttttttttttttttttttttttttttttttttggggggaaaccagcctcttttttaatggggggacaacaagggtaaatgggccggaaaaaaaacatgagttagcccccgggggtgggaaaaaaaaacccccctaccttttttggggggcaaaaaaaaaaaaaaaaaatttgggtttagaacccaccccctaggtttttatttgggggggggcctcgcacccccattacgggggcccatgttttaaaaggggcgaaaaaaccttttggccaggcttttccccaaaatccgaactttttaaacccctgggttgaccctttcagggagggggggaacttttttttgggggcgacgaaaacaaggccaaaactttgggggcggccggggcccctttaaaaggtatccccccaaaaccaaggaaagggcccccccacctttgcccccaaattaattgcccccttgaaagtccaaaagggaccccggctaaaacccaccctttgggaatctttaaaggccccccccgggggggggggttttttctttgcaataacacccccggttccgttctcaaagaagaaaaaggggg

SEQ ID NO: 65143 - DNA, 855 bp, Zea mays
  unsure (1)..(855): unsure at all n locations
  Clone ID: MRT4577_159407C.1
gctgcacgccatcgtcgacacctgccacagcggcgccatactcgaccgcgcctcacctctgccgcctgtccaggtacgtacgtacgtacggagcatccatcgcgccacaccacagttaatccgcccaaaccaaagcggcaagggcaatcttcttgacgtcctcgtacgtgtgtcttctcttctctccatcaaggaccgggtactggcagtgggagaaccaacagacggcccgcctcgccgcgtccggcgagaccaagtgcaccagcggcggcctcgccatctccatcagcggctgcggcgacagccagacgtcgcaggacaccacggtgagtactgagacctactcggctatgcaaacatatgctacttgcacccctgctcaaacgacgacgacgtccttgtgcgcgtgtaactctgcatgcaggcgctctccgggtccgcctccaccggcgccatgacgtacagcttcatcaaggcggtggagtcggagccgggcaccacctacggccgcctgctgacggcgatgagagccaccatccgcgacaacggcggtgagttcggcataccgggccccatcggcaccttcttccgccgggtcatcacgttcagctgcgcgcaggtacaaaactctcaaacgaaaacgtccataatctgagcctgatgccctcgtcatcctcgtattggattttggtctggcaggagccccagctgtgcgcttcagagacgttcgacatctacaggaaaccttttctcttgtgactcatttgctttgctctgctaaaccaggggcgtcttgaaagggctagaatggcgcgcgtgcaggattttcccggccgngcctcgaggtacccaatg

SEQ ID NO: 65144 - DNA, 2685 bp, Zea mays
  Clone ID: MRT4577_159408C.1
atggcggcgctggaggacgatggcgtggagcagcagcagcagcagcaggcgggcgttgcgggaatgcggaggttcaagtccgggaggagagctgcttcgtggggagacgaggcgctggccacggcggcggtgggcgatgtggacgaggggatggagatgcccgacagccaggacgctgagcagtggtcccggcggccggtgttgttccgacttgaccttctccaccgtttggtggacttgtacgagatctcaggatctccacaaatcgataatggtgcttatcttgatgtgcctgtgtcatataatatggacaacatatgcagggcatccaatagtgttgatgttcagattgaggatgaggaggagccatatgaggctgcacgggccttagattctgatgatgaccgtccggttcaagaaatgaccgagcaagaaattgaactcataagacgtttgtgtccggagcgtgaccctgcagtacatgaatttagcagtctaagtcattccacccgtgtatatgctgaaggacgtgatgatgaactgctagaggctccggataacgccgacagcattgagattaaggtaggcttacttttcaaggacctgcctacactgacacgatggctacaggaatattctgtgaaccgcaagaggccgttcaaggtgagacattcgtatgcacagcgtcgttacactgttgtgtgcgaggtgtcggaatgtaattggagggtatgtgcccgaaggcagaaggacaccggaaagtttaagatcaccaaaattgtaggtccacacacttgtgcccaaacagagctgagctctaagcatcgtcagttgacatctaccctgattgcaaaaaggatattggggatattgaagggtcagccaaaattgaaggtgaagtcaattatgaccatgacttcggagctgtttggttacaggatcaaatatgggaaagcatggagggcaaagcagcgagcatggaagatgatatacggggattgggaggagggttatgagaagttaccagcattgtttaatgcaatcaaagcaaaaaacccaggcatgcattacgagtacatccccaaacctaatgaatggaggaacgacagagagatattttttcgtgttttctggtgtttttcgcagtgcgtagaggccttcaggcattgtcgtcccgtgctctctattgatggtacttttctgcttgggaagtataagggcacattgttggttgccatatcatgcgacgcagacaacgcactggttcctttggcatttgctttggtggagagggagaacagagatagttggtcttggttcttgcggcttgtacgcatccatgtcgtaggccctggacgcgaggttggtgtcatatctgacagacaccaagatattcttaatgcagtgcaagagcagattcctggctacgcacccatgcaccacagatggtgcactcgacatctagcagaaaatcttcttcgaaaggatcataacaaggctaacttccccctttttgaggaggtatgtcgacagttgaaggtttcatttttcgaggataagttgaaggaactaaaagatgcaacaaatgatgaaggtaagaactggattgctggattgctgagggaaccgcagaaatggacaagggcctacgacgaaggtggctggcggttcgagtttcagactagcaacatggccgagtcatttaacagtgtgctcaagggtatacggggcatgccagtcaatgatatagtaacattcactttttataggcttgtggcttggtttaatgatagacacgcgcaggccaaggcaatgcagacgcgagggcagagatgggcacctaaaccaacatcacaccttaataatgcaaaggaacgtgcccatagacatgaggtacaatgctttgatgaggagttgggtaaatacgagcgcatcgatgggacaaacgtggtagtaggaaaaggagccggtgcaacatggttatggatcaggtttccggacgcagtaggagaggtcgagcgtccccctttctcgtggacccagagaagaatgaatgcggaaaatgcggtagacttggccacaactcacgtacatgcatttggtcacttagtcaggatggcgcagttccacttgctggaccctcactacgatgagcaccacaggggccgtctcaccgcagagggagaggtgttgcccgttctgcgggtccggacccacgaccggtttctggaggagatgaggtacgatgagaggtacactcctctcctacagagggctggcttggacgtcgtatcgtaccagagggtatcacgtcgtcttcgtcgtgcagcggctcggtgtggatgccggtctctagcgggcgttgacgtgcagctgcctgtgcctcgtatgcagcaggacgttcagcctcccatttgtgcagttggaccatctacagcaggactgagctcctcgcgatcgacgcgggacacgtttgaggacgtggcccacgaggacgaggacaaggacgacgacactggcgctggcgccgcaggtcaggaggagattggaccatctcagttgcaggatgctcctacaactcagccatcacagctgacaccacgtagaaggcgtccacgagacccttacactccaggcaccgacgctcttggggccaagggcaagggtaagactaggaggaaatga

SEQ ID NO: 65145 - DNA, 284 bp, Zea mays
  unsure (1)..(284): unsure at all n locations
  Clone ID: MRT4577_159409C.1
aataacgacgcatgcgcgagtcaactagtcactagccgccagctaattctaacttttactaacaaacacataagggttcacgagactagcggctgattcgagaccggccaangacatgtaggccacggatgagcacaaggccacagtctacctagacccgaccgcaaatccaatcgtgcacactgcagagctgacccaaactgctcataacgcatccataattaacgacgcatgggtcaaggcaatctacctctacacgctggtcgtcaccatgatctggtaca

SEQ ID NO: 65146 - DNA, 618 bp, Zea mays
  Clone ID: MRT4577_15940C.1
actaccaagattaatattttaaaaaacttcaacaggggtaacctgattcattcagcaattataacaaattctacattggtgcacaaacaacctaacacagccctaaatatgaaaaaatttaacaacgggcgggggggggggccccctaaaaggatgtaaacttggaaaccgccttggccccttcggaaacggggtgcttggcaagctccccggggaggacaaggcccaccgaggtctggatctcccgggaggggatggggggctttttgttgtaacgggcaaacttggctgcctcggggggaagcttctaaaaaatgtcgttgatgaaggagttcatgatggacatggccttggacaaaatgccaatgtccgggggcccctgcttgagcaccttgaaaatgtaaatcttgtacgtttcgacgctttttttcgcctttttttttccctttttttcgccgccctccttgctcggaacgcgcttttccgcccttggttttttttcggccttctcctccgccggttttttctccgggggctttttctcggccttgggcgccatcaggaatcgatcaaatggggcccaaaaaattgggggaaggggcggcttggaaatttgct

SEQ ID NO: 65147 - DNA, 3177 bp, Zea mays
  Clone ID: MRT4577_159410C.1
atggttccaccatgtttggatgtggttgttcaaaagttacctgttagtcattgcgaaggtccagtcgggttatctccacaaatgccaaatgcatctcgtattgaagctcctttggtagagcttcatgaagaagtcgttgttgtgcccgatgctcaatcgggtccgcacgagtatgggatttgtggggcttctaatgcggtggtacccccccaagagatcccatttacccaggatccagttcacgatcatcctagatctccacatatcgataatgctgatgttcagattgatgtgcctgtgtcatataatatggacaacatatgcagggcatccaatagtgttgatgttcagattgaggatgaggaggagccatatgaggctgcacgggccttagattctgatgatgaccgtccggttcaagaaatgaccgagcaagaaattgaactcataagacgtttgtgtccggatttaagtcattccacccatgcgtatgctgaaggacgtgacgatgaactgctagaggctccagataacgccgacagcattgagattaaggttggcttacttttcaaggatctgcctacactgagacgatggctacaggaatattttgtgaaccggaagaggccgttcaaggtgagacattcgtatgcacagcgtcgttacactgttgtgtgcgaggtgccagaatgtaattgtagggtatgtgcccgaaggcagaaggacaccggaaagtttaagatcaccaaaattgtaagtccacacacttgtgcccagacagagctgagctctaagcatcgtcagttgacatctaccctgattgcgaaaaggatattggggatattgaagggtcagccaaacttgaagtgcgtagaggccttcaggcattgtcgtcccgtgctctctattgatggtacttttctgcttgggaagtataagggcacattgttggttgccatatcatgcgacacagacaactcactggttcctttggcatttgctttggtggagagggagaacagagatagttggtcttggttcttgcggcttgtacgcatccatgtcgtaggccctggacgcgaggttggtgtcatatctgacagacaccaaggtattcttaatgcagtgcaagagcagattcctggctacgcacccatgcaccacagatggtgcactcgacatctagcagaaaatcttcttcgaaaggatcatagcaaggctaacttccccctttttgaggaggtatgtcgtcagttggaggtttcgtttttcgaggataagttgaaggaactaaaagatgcaacaaatgctgaaggtaagaactggattgctggattgctgagggaaccgcagaaatggacaagggcctacgacgaaggtggctggcggttcgagtttcggactagcaacatggccgagtcatttaacagtgtgctcaagggcttgtggcttggtttaatgatagacacgcgtaggccaaggcaatgcagacccgagggcagagatgggcacctaaaccaacatcacaccttaataatgcaaaggaacgtgcccatagacatgaggtacaatgctttgatgaggagctgggtaaatacgaggatggcgcagttccacttgctggaacctcactacgacgagcaccacaggggccgtctcaccgcagagggagaggtgttgcccgttctgcgggtccggacccacgaccggtttctggaggagatgaagtacgatgagaggtacactcctctcctacagagggctggcttggacgtcttatcgtaccaggtccaccgtgggctgcccactttcaacctagcggcgttgacggctctggtcgacaggtggcggccagagactcacactttccaccttccctacggtgagatgaccgtgacgcttgaagattgccagaagattcttggtctcagcattatgggtcgtccagtgaccggtcaggcatcaccaggcggttggaggcagagggtggaggcctttcttgggagactgcttccggatgagctacgaggtagccacaacaccggagtcccactgacctggcttaggcagagctttgggcagtgtccacctggtgcagatgagcagacggttggataccattgtcaagcttggattctccatctctttggttcagttctttttccagacgcgacaggcgacagcgcgtcatggatgtttctgccctgcctgactgactgggatacgaccggaggttacagctgggcttcagcagtgttggccttcctgtacaggcaactttgcgaggcttgtcgtcgttcgtcgaggaccgccagcttaggtggatgtgtctacctactacagctgtggatgtgggcacacatacccgtcgggcgacccagagagtttcctcctcgtgagtggttcgtggtagccggacatcggcttaagcccacggctgcttaccgctgggaccaggtcgaggagccattcacacgacaccagcgtgcttacgtggagtactcaaacgagctcgacgcacttactccttcgatggtgacttggcaaccgtatcttgatccatatttcaccagcatacagttgagcagcatgtgctcaatagacgaggacctctacctcatgaggtgtcccctcatctgtttttatgctgttgagtaccacttgccccacagagttgctcgacagttcggattgcgccaggagtttccggtggagccattctcaacttcaatagaacttcataagttcgacagacagagacagaagaaggccacggacttcgagacgcaccatcgtgattacattgatgaatgggaccagcagggggatctgaactatgagaatgaccaggcgcacacaaactacaacttccggagggtatcacgtcgtcttcgtcgagcagcggctcggtgtggatgccggtctctagcgggcgttgacgtgcagctgcctgtgcctcgtatgcagcaggatgttcagcctcccttttgtgcagttggaccatctacaacaggactcagctcgtcgcgatcgacgcgggacacatttgagaacgtggcccaggacgacgaggacgatgacgacgacgacgacgctggcgctggcgctggcgccgcaggtcaggtggagattggaccgtctcagttgcaggatgctcctacaactcagccatcatag

SEQ ID NO: 65148 - DNA, 3771 bp, Zea mays
  Clone ID: MRT4577_159411C.1
atggacagcctagtaacactataccatggaggaagggtggagatagatgcttatgggagtgttacttttgatggtatgaagatcgtgaccatgttgttcgttgaaagaccaacttttgaccagcttttggctcgagcttgtgaggagattagttgcgacataaacgaccctagaatatcaattcagggtttgttgtcccatattacatatggaacagttgtccgacggttgatctccattacctcagaagatgattgggtgatatatttaagaattgtgaagacgatggttccaccatgtttggatgtggttgttcaaaagttacctgttagtcattgcggaggtccagtcgggttgtctccacaaatgccaaatgcatctcgtattgaagctcctttggtagagcttcatgaagaagtcgttgttgtgcccgatgctcaatcgggatctccacatatcaataatgctgatgttcagattgatgtgcctgtgtcatataatatggacaacatatgcagggcatccaatagtgttgatgttcagattgaggatgaggaggagccatatgaggctgcacgggccgtagattctgatgatgaccgtccggttcaagaaatgaccgagcaagaaattgaactcataagacgtttgtgtccggagcgagaccctgcagtacatgaatttagcagtttaagtcattccacccgtgcgtatgctgaaggacgtgacgatgaactgctagaggctccggataacgccgacagcattgagattaaggttggcttacttttcaaggatctgcctacactgagacgatggctacaggaatattctgtgaactggaagaggccgttcaaggtgagacattcgtatgcacagcgtcgttacactgttgtgtgcgaggtgccagaatgtaattggagggtatgtgcccgaaggcagaaggacaccggaaagtttaagatcaccaaaattgtaggtccacacacttgtgcccagacagagctgagctctaagcatcgtcagttgacatctaccctgattgcgaaaaggatattggggatattgaagggtcagccaaacttgaaggtgaagtcaattatgaccatgacttcggagctgtttggttacaggatcaaatatgggaaagcatggagggcaaagcagcgagcatggaagatgatatacggggattgggaggagggttacgagaagttaccagcattgttcaatgcaatgaaagcaaaaaacccaggcatgcattacgagtacatccccaaacccaacgaatggaggaatggcagagagatcttctttcgtgctttctggtgtttctcgcaatgcgtagaggccttcaggcattgtcgtcccgtgttgtctattgatggtacttttctgcttgggaagtataagggcacattgttggttgccatatcatgtgacgcggacaacacattggttcctttggcatttgctttggtggagagggagaacagagagagttgggcttggttcttgcgacttgttcggatccatgtcgtgggccctggtcgcgaggttggtgtcatatctgacagacatcagggtattcttaatgcagtgcaagagcagattcctggctacgcacccatgcaccacagatggtgcactcgacatctagcagaaaatcttcttcgaaaggatcatagcaaggctaatttccccctttttgaggaggtatgtcgtcagttggaggtttcgtttttcgaggataagttgaaggaactacaagatgcaacaaatgctgaaggtaagaactggattgctggattgctgagggaaccgcacaaatggacaagggcctacgacgaaggtggctggcggttcgagtttcagactagcaacatggccgagtcatttaacagtgtgctcaagggtatacggggcatgccagtcaatgctatagtaacattcactttttataggcttgtggcttggtttaatgatagacacgcgcaggccaaggcaatgcagacccgagggcagagatgggcacctaaaccaacatcacaccttaataatgcaaaggaacgtgcccatagacatgaggtacaatgctttgatgaggagctgggtaaatacgagcgcatcgatgggacaaacgtggtagtaggaaaaggagccggtgcaacatggttatggatcaggtttccggtcgcagtaggagaggacgagcgtccccctttctcgtggacccagagcagaatgaatgcggaaaatgcggtagacttggccacaactcacgtacatgcatttggacacttagtcaggatggcgcagttccacttgctggaccctcactacgacgagcaccacaggggccgtctcaccgcagagggagaggtgttgcccgttctgcgggtccggacccacgaccggtttctggaggagatgaggtacgatgagaggtacactcctctcctacagagggctggcttggacgtcttatcgtaccaggtccgccgtgggctgcccactttcaacccagcggcgttgacggctctggtcgacaggtggcggccagagactcacactttccaccttccctgcggtgagatgactgtgacgcttgaagattgccagaagattcttggtctcagcattatgggtcgtccagtgaccggtcaggcatcaccaggcggttggaggcagagggtggaggcctttcttgggagactgcttccggatgagctacgagttctttttctagacgcaacaggcgacagcgcgtcatggatgtttctgccctgcctgactgactgggatacgaccggaggttacagctgggcttcagcagtgttggccttcctgtacaggcaactttgcgaggcttgtcgtcgttcgtcgaggacggccagcttaggtggatgtgtctacctactacagctgtggatgtgggcacacataccagtcgggcgacccagagagtttcctcctcgtgagtggttcgtggtagccggacatcggcttaagcccacggctgcttaccgctgggaccaggtcgaggagccattcgcacgacaccagcgtgcttacgtggagtactcaaacgagctcgacgcacttactccttcgatggtgacttggcaaccgtatcttgatccatatttcgccagcatacagttgagcagcatgtgctcaatagacgagaacctctacctcatgaggtgtcccctcatctgtttttatgctgttgagtaccacttgccccacagagttgctcgacagttcggattgcgccaggagtttccggtggagccattctcgacttcaatacaacttcataagttcgacagacagagacagaagaaggtcacggacttcgagacgcaccatcgtgattacattgatgaatgggaccagcagggggatctgaactatgagaatgaccaggcgcacacaaactacaacttccggaggtgcaagctgaagggacagtggacagcagcagactacgccgagcaagaatcgtcagacgacgaagacacagctttcgacatagctgctcggcacgggtcccaaattgaggctgctccaatccttgatagagtgggaaactctatgctcgtatctgttgttgaactcgagcgtatctcacagagaacttcagatactactacgctatcgttactatcacaggacgttctgcctcccatgtgtgcagttggaccatctacagcaggactcagctcgtcgcgatcgacgcgggacacgtttgagaacgtggcctag

SEQ ID NO: 65149 - DNA, 4442 bp, Zea mays
  Clone ID: MRT4577_159412C.1
atggatcctaagggcaaggggattgtgatcaatgataagaagaaggagtccttcgtcaacaagcctaaagatgacaagcccaccgactcgagctcgggccacaaaagaaaagatggaaagaagaagaagacgaggcgcatcaaggagatcgtctactacgacgacagtgacgagtcctcttcttcccaaaaggacgacgacaacgactacgagaaaaagaagacggttaactcaaacttctcttttgattattctcgtattccgcatagctcaaatgcacatttgctttccattccacttggtaaacctcctcattttgatggagaggactacggattttggagtcacaaaatgtgtagtcacttgttctctctccatcctagtatatgggaaatagtagagagtggaatgaaatttgatagcttggatagtcctttgtttatcaatgaacagattcataaaaatgcacaagctactactgtgttgttagcctctttgtgcagggacgaataccataaggtgagcggcttggacaatgccaagcagatttgggacaccctcaagatctcacatgaggggaacgacgtcaccatgctcaccaagatggagttggtggaaggcaaactcgggagattcgtgatgataagaggggaggagccaacccaaacgtataacaggctcaagaccctcatcaacaagataaggagctatggaagcacgcgatggatgaaccacaacgtcgtccgcctaatgctaaggtcctttactgtacttgatccacatctggtaaacaatattcgtgaaaatcctaggtacaccaagatgtcgcccgaagaaatccttgggaaatttgtaagcgggcggatgatgatcaaggaggcgagatacgtggatgatgcattgaatggcccaatccacgagcctcaaaccattgctctcaaagcaacaagaagcaaggaggcactacctagcaagatggacaacctagtaacactataccatggaggaagggtggagatagatgcttatgggagtgttacttttgatggtatgaagatcgtgaccatgttgttcgttgaaagaccatcttttgaccagcttttggctcgagcttgtgaggagattagttgcgacataaacgaccctagaatatcaattcagggtttgttgtcccatattacatatggaacagttgtccgacggttgatctccattacctcagaagatgattgggtgatatatttaagaattgtgaagacgatggttccaccatgtttggatgtggttgttcaaaagttacctgttagtcattgcgaaggtccagtcgggttatctccacaaatgccaaatgcatctcgtattgaagctcccttggtagagcttcatgaagaagtcgttgttgtgcccgatgctcaatcgggtccgcacgagtatgggatttctcgtcctattcccggcgtttgtggggcttctaatgcggtggtacccccccaagagatcccattgacccaggatccagttcacgatcatcctagatctccacatatcgataatgctgatgttcagattgatgtgcctgtgtcatataatatggacaacatatgcagggcatccaatagtgttgatgttcagattgaggatgaggaggagccatatgaggctgcacgggccgtagattctgatgatgaccgtccggttcaagaaatgaccgagcaagaaattgaactcataagacgtttgtgtccggagcgagaccctgcagtacatgaatttagcagtttaagtcattccacccgtgcgtatgctgaaggacgtgacgatgaactgctagaggctccggataacgccgacagcattgagattaaggttggcttacttttcaaggatctgcctacactgagacgatggctacaggaatattctgtgaaccggaagaggccgttcaaggtgaggcattcgtatgcacagcgtcgttacactgttgtgtgcgaggtgccagaatgtaattggagggtatgtgcccgaaggcagaaggacaccggaaagtttaagatcaccaaaattgtaggtccacacacttgtgcccagacagagctgagctctaagcatcgtcagttgacatctaccctgattgcgaaaaggatattggggatattgaagggtcagccaaacttgaaggtgaagtcaattatgaccatgacttcggagctgtttggttacaggatcaaatatgggaaggcatggagggcaaagcagcgagcatggaagatgatatacggggattgggaggagggttatgagaagttaccagcattgttcaatgcaatgaaagcaaaaaacccaggcatgcattacgagtacatccccaaacctaatgaatggaggaacgacaaagagatattttatcgtgctttttggtgtttctcgcagtgcgtagaggccttcaggcattgtcgtcccgtgctctctattgatggtacttttctgcttgggaagtataagggcacattgttggttgccatatcatgcgacgcagacaactcactggttcctttggcatttgctttggtggagagggagaacagagatagttggtcttggttcttgcggcttgtacgcatccatgtcgtaggccctggacgcgaggttggtgtcatatctgacagacaccaaggtattcttaatgcagtgcaagagcagattcctggctacgcacccatgcaccacagatggtgcactcgacatctagcagaaaatcttcttcgaaaggatcatagcaaggctaacttccccctttttgaggaggtatgtcgtcagttggaggtttcgtttttcgaggataagttgaaggaactaaaagatgcaacaaatgctgaaggtaagaactggattgctggattgctgagggaaccgcagaaatggacaagggcctacgacgaaggtggctggcggttcgagtttcagactagcaacatggccgagtcatttaacaatgtgctcaagggatgccaaggcaatgcagacccgagggcagagatgggcacctaaaccaacatcacaccttaataatgcaaaggaacgtgcccatagacatgaggtacaatgctttgatgaggagttgggtaaatacgaggatggcgcagttccacttgctggaccctcactacgacgagcaccacaggggccgtctcaccgcagagggagaggtgttgcccgttctgcgggtccggacccacgaccggtttctagaggagatgaggtacgatgagaggtacactcctctcctacagagggctggcttggacgtcttatcgtaccaggtccgccgtgggctgcccactttcaacccagcggcgttgacggctctggtcgacaggtggcggccagagactcacactttccaccttccctgcggtgagatgaccgtgacgcttgaagattgccagaagattcttggtctcagcattattggtcgtccagtgaccggtcaggcatcaccaggcagttggaggcagagggtggaggcctttcttgggagactgcttccggatgagctacgaggtagccacaacactggagtcccactgacctggcttaggcagacctttgggcagtgtccacctggtgcagacgagcagacggtcgaggagccattcgcacgacaccagcgtgcttacatggagtactcaaacgagctcgacgcacttactccttcgatggtgacctggcaaccgtatcttgatccatatttcgccatcatacagttgagcagcatgtgctcaatagacgagaacctctacctcatgaggtgtcccctcatctgtttttatgctgttgagtaccacttgccccacagagttgctcgacagttcggattgcgccaggagtttccggtggagccattcttgacttcaatagaacttcataagttcgacagacagagacagaagaagggggatcttaactatgagaacgaccaggcgcacacaaactacaacttccggaggtgcaagctgaagggacagtggatagctgcagactacgccgagcaagaatcgtcagacgacgaagacacagctttcgacatagctgctcggcacgggtcccaaattgaggctgctccaatccttgatagagtgggaaactctatgctcgtatctgttgttgaacttgagcgtatctcacagagaacttcagatactactacactatcgttactatcacaggacgttcagcctcccatttgtgcagttggaccatctacagcaggactgagctcctcgcgatcgacgcgagacacgtttgaggacgtggcccacaacgacgaggacgacgacgacgacgacgacgacgagctggcgctggcgctggcgccgcaggtcaggtggagattggaccatctcagttgcaggatgctcctacaactcagccatcacagctga

SEQ ID NO: 65150 - DNA, 286 bp, Zea mays
  unsure (1)..(286): unsure at all n locations
  Clone ID: MRT4577_159413C.1
ctcaantgcanctccaaagccacccctcaccnantaggntaccnnctnacctatncanccttnncagtacattgttntaaagccatgtaccgtncatagcacattacagtcaaatcccttctcgtccccatggatgacccccctcagataggggtccctnncccancatcctccgtgaaatcaatatcccgcacangagtgctactctcctcgngccgggcccataacanttgggggtagctatagtgnnctgtatcngnnatctggttcctacttcagggccata

SEQ ID NO: 65151 - DNA, 781 bp, Zea mays
  unsure (1)..(781): unsure at all n locations
  Clone ID: MRT4577_159414C.1
ccacgcgtccggctgaaggacgtgacgatgaactgctagaggctccggataacgccgacagcattgagattaaggttggcttacttttcaaggatctgcctacactgagacgatggctacaggaatattctgtgaaccggaagaggccgttcaaggtgagacattcgtatgcacagcgtcgttacactgttgtgtgcgaggtgccagaatgtaattggagggtatgtgcccgaaggcagaaggacaccggaaagtttaagatcaccaaaattgtaggtccacacacttgtgcccagacagagctgagctctaagcatcgtcagttgacatctaccctgattgcgaaaaggatattggggatattgaagggtcagccaaacttgaaggtgaagtcaattatgaccatgacttcggagctgtttggttacaggatcaaatatgggaaagcatggagggcaaagcagcgagcatggaagatgatatacggggattgggaggagggttacgagaagttaccagcattgtttccggtggagccattctcgacttcaatagaacttcataagttcgacagacagagacagaagaaggtcacggacttcgagacgcaccatcgtgattacattgatgaatggaaccagcaggggatctgaactatgagaatgaccaggcgcacacaaactataacttttcggaggtatntgatttggtattctggtgtgactaggtgcaagctgaaaggacagtggacagcagcagactacgccgagcaagatcgtca

SEQ ID NO: 65152 - DNA, 746 bp, Zea mays
  Clone ID: MRT4577_159415C.1
agcagtggtaagacgcatggtgggcggggctgaaggacgtgatgatgaactgctagaggctccggataacgccgacaacattgagattaaggtaggcttacttttcaaggacctgcctacactgagacgatggctacaggaatattctgtgaaccgcaagaggccgtgcgaggggagacattcgtatgcacagcgtcgttacactgttgtgtgcgaggtgtcggaatgtaattggagggtatgtgcccgaaggcagaaggacactggaaagtttaagatcaccaaaattgtaggtccacacacttgtgcccagacagagctgagttctaagcatcgtcaattgacatctaccctgattgcgaaaaggatattggggatattgaagggtcagccaaacttgaaggtgaagtcaattatgaccatgacttcagagctgtttggttacaggatcaaatatgtgtcttcctcttgagcacgtaatcctgcctcagctagtgcgatgagctcactcaaccttgatgtgtcgtcctcctcttcttcatgtaatcccgcctctgcgagagcgataagctcactcaatctagatgtgtcgtcctcctcctcctccatcagctcaaccatcgccattttatcctgaacatatcttgcatgcgcctcatcagccaaaaagtttacgccacatccaatctctgcaaaaaaaaaaaaaaaaaaaaaaaaaaaaaagtactctgcgttgttaccactgc

SEQ ID NO: 65153 - DNA, 1876 bp, Zea mays
  Clone ID: MRT4577_159416C.1
gtgttctattgcattatgctggattactggtcaactagagcattcttaatagagctgaaattctatgctggttctataaacatcactttacaggggaggtgttcgtccgacttgaccttctccaccgttagctggactcgtacgcgttctcagatggacagcctagtaacactataccatggaggaagggtggagatagatgcttatgggagtgttacttttgatggtatgaagatcgtgaccatgttgttcgttgaaagaccaacttttgaccagctgttggctcgagcttgtgaggagattagttgcgacataaacgaccctagaatatcaattcagggtttgttgtcccatattacatatggaacagttgtccgacggttgatctccattacctcagaagatgattgggtgatatatttaaaaattgtgaagacgatggttccaccatgtttggatgtggttgttcaaaagttacctgttagtcaatgcgaaggtccagtcaggttatctccacaaatgccaaatgcatctcgtattgaagctcctttggtagagcttcatgaagaagtcgttgttgtgcccgatgctcaatcgggatctccacatatcgataatgctgatgttcagattgatgtgcctgtgtcatataatatgaacaacatatgcagggcatccaatagtgttgatgttcagattgaggatgaggaggagccatatgaggctgcacgggccgtagattctgatgatgaccgttcggttcaagaaattgaactcataagacgtttgtgtccggagcgagaccctgcagtacatgaatttagcagtttaagtcattccacccgtgcgtatgctgaaggacgtgacgatgaactgctagaggctccggataacgccgacagcattgagattaaggttggcttacttttcaaggatctgcctacactgagacgatggctacaggaatattctgtgaaccggaagaggccgttcaaggtgagacattcgtatgcacagcgtcgttacactgttgtgtgcgaggtgccagaatgtaattggagggtatgtgcccgaaggcagaaggacaccggaaagtttaagatcaccaaaattgtaggtccgcacacttgtgcccagacagagctgagctctaagcatcgtcagttgacatctaccctgattgcgaaaaggatattggggatattgaagggtcagccaaacttgaaggtgaagtcaattatgaccatgacttcggagttgtttggttacaagatcaagtatgggaaagcatggagggcaaagcaacgagcatggaagatgatatacggggattgggaggagggttacgagaagttgccagcattgttcaatgcaatgaaagctaaaaacccaggcatgcattacgagtacatccctaaacccaacgaatggaggaatggcagagagatcttctttcgtgctttctggtgtttctcgcaatgcgtagaggccttcaggcattgtcgtcccgtgctgtctattgatggtacttttctgcttgggaagtataagggcacattgttggttgccatatcatgtgacgcggacaacacattggttcctttggcatttgctttggtggagagggagaacagagagagttgggcttggttcttgcgacttgttcggatccatgtcgtgggtcctggtcgcgaggttggtgtcatatctgacagacatcagggtattcttaatgcagtgcaagagcagattcctggctacgcacccatgcaccacagatggtgcactcgacatctagcagaaaatcttcttcgaaaggatcgtagcaaggctaatttccccctttttgaggagactgtcaacaattggaggttcc

SEQ ID NO: 65154 - DNA, 2233 bp, Zea mays
  Clone ID: MRT4577_159417C.1
gaaaaccccaccgtcagcacacggcgcacctccccaaatggccgctccgaccaccgccgtcgcaccaccgccccgcctcctacacctccctcggcagagcccgcggctgcacccgcaccggatcaaaaggtgtctccgcctcctctgcccctcagcctgataccgctgctcccccgcccgttcccgcgccagcgccgaggaagcggaagctcgaggaagcggggttccacacctccgaatgctacaagatccgtgccgtcgtcgccgacctgcgtgtccgcttcgtccaggtttgccaagctactgatttccgcaacacggatgcagctcgtgagattttgaaaggatggcgcagttccacttgctggaccctcactacgacgagcaccacaggggacgtctcaccgcagagggagaggtgttgcccgttctgcaggtccggacccacgaccggtttctggaggagatgaggtacgatgaggggtacactcctctcctacagagggctggcttggacgtcttatcgtaccaggtccgccgtgggctgcccactttcaacccagcggcgttgacggctctggtcgacaggtggcggccagagactcacactttccaccttccctgcggtgagatgactgtgacgcttgaagattgccagaagattcttggtctcagcattatgggtcgtccagtgaccggtcaggcatcaccaggcggttggaggcagagggtggaggcctttcttgggagactgcttccggatgagctacgaggtagccacaacaccggagtcccactgacctggcttaggcagagctttgggcagtgtccacctggtgcagatgagcagacggttggataccattgtcgagcttggattctccatctctttggttcagttctttttccagactcaacaggcgacagcgcgtcatggatgtttctgccctgcctgactgactgggatacgaccggaggttacagctgggcttcagcagtgttggccttcctgtacaggcaactttgcgaggcttgtcgtcgttcgtcgaggacggccagcttaggtgggatgtgtctacctactacagctgtggatgtgggcacacataccagtcgggcgacccagagagtttcctcctcgtgaggtggttcgtggtagccggacatcggcttaagcccacggctgcttaccgctgggaccaggtcgaggagccattcgcacgacaccagcgtgcttaccgtggagtactcaaacgagctcgacgcacttactccttcgatggtgacttggcaaccgtatcttgatccatatttcgccagcatacagttgagcagcatgtgctcaatagacgagaacctctacctcatgaggtgtcccctcatctgtttttatgctgttgagtaccacttgccccacagagttgctcgacagttcggattgcgccaggagtttccggtggagccattctcgacttcaatacaacttcataagttcgacagacagagacagaagaaggtcacggacttcgagacgcaccatcgtgattacattgatgaatgggaccagcagggggatctgaactatgagaatgaccaggcgcacacaaactacaacttccggaggtgcaagctgaagggacagtggacaacagcagactacgccgagcaagaatcgtcagacgacgaagacacagctttcgacatagctgctcggcacgggtcccaaattgaggctgctccaatccttgatagagtgggaaactctatgctcgtatctgttgttgaactcgagcgtatctcacagagaacttcagatactactacgctatcgttactatcaagggtatcacgtcgtcttcgtcgagcagcggctcagtgtggatgccggtctctagcgggcgttgacgtgcagctgcctgtgcctcgtatgcagcaggacgttctgcctcccatgtgtgcagttggaccatctacagcaggactcagctcgtcgcgatcgacgcgggacacgtttgagaacgtggcccaggacgacgacgacgacgacgacgacgacgctggcgctggcgctggcgccgcaggtcaggtggagattggaccgtctcagttgcaggatgctcctacaactcagccatcacagctgacaccacgtagaaggcgtccacgagacccttacactccaggcaccgacgctcttggggccaagggcaagggtaagactaggaggaaatga

SEQ ID NO: 65155 - DNA, 372 bp, Zea mays
  Clone ID: MRT4577_159418C.1
aaaaagagataaaaaaccacggcgggggcaaaaaaaaaaactgtaccttgggggaaaaaggaccctgttttttttaaccctaaggaaaaaccacccggggcttgaaaaccaacccctgggacatatgatctttggccccccttttttatgaaacccttgggggggggtttccaatctggcagcaccaagtccgagggcgaaactgttgcagcgccggcctaaaagtgacaccttttgcggtttttaccgacccagcgatttttgtaaatgccggtacccctccaactagggccccaatcatagcacccatgggggttatcttcaccccacatttctttggaaatggctctaccccaccaaataggggggtcc

SEQ ID NO: 65156 - DNA, 318 bp, Zea mays
  Clone ID: MRT4577_159419C.1
gggtggggtttttttttgggacaaaaacccccacatctatattttttattaagaagaagagggagaagaatatcaaaggaagaacccggaaagcgcggggaaaaaaatgcagagggtccacgaacagccgaaagcggggcctgtcagggccaccctgaaaaatcgggagggcaaaagggccgccggcccaacgaggggccaagaggcgaaccggcccggatagcacacggaaggggcgctgtcgtggacacgggggctcggccaggcccggccctccatggatccctggaaagccccagaccccatgaatgcggggga

SEQ ID NO: 65157 - DNA, 343 bp, Zea mays
  Clone ID: MRT4577_15941C.1
agaccatgaatgcaaccgaaaattatttcctaggaccacccagcatttataccacggacagtccatacgatattcgcatgtttgatcgtgtgtgagtgcacaaacaccaagtactactcagaattcttgctactaccatcatcctccactcctgaacaccgtgtgttcagtgatagacctgagtatgaaatgctccccatccgaaaaatacactctgaagcatgccaggaccaactgccccacctaaagccttgcgaacaactaaggcgaaatcgaccggacggaccttgtcactggcattcctgagggcgacctcgttggcgatgcccctgcagtgggccac

SEQ ID NO: 65158 - DNA, 264 bp, Zea mays
  Clone ID: MRT4577_159420C.1
ttctgccccctggccggcacccaagggggggggtttaaatgaaaggtggtttggttcatgagccaccacgacaagtgcctggacgcggacaacgacaaggggcgcgtgtcgcccgaccgggacgggtccttggcgaacgcgccgtggaccagggaggcagctccggacaacgcgggcgccatccgactgctcaagcatatacgggcgctaccttaccgtctccggggagccgttcctgctggggatgacggggcagccggggag

SEQ ID NO: 65159 - DNA, 701 bp, Zea mays
  Clone ID: MRT4577_159421C.1
gattcttccggagtctagcccctctctcgctctagaccccctgctacgcccgaactctcactatgaagtattcttggttgtcttcctcgctgactactcctcgcagttcagtgcactcgattgaagatgatgacatccacgctcttcataccaccgatgcccttagcaatgcccaagagtggtattgcaggggacgatacaccttagctggtacaccctagaagtgccaggcgctcccgccacatacgatctcatgtgaggaatgccagagaatcactgcactatagatagccatgacttccaggcctaataaatacatgtacttagcgcgtctcgaacccgaaagactcccagattgctcacttctggtgaggcatgaacatgatccgtcatcacactgtctacttatagctgcgactggacccttaaccatgccccgaggtgctctacaagactcctctgtccccgaggaccgtaacggcagaaacgttccagaatgtgtatgtgcactactacacgtccctgccacgtatgtaaagacccactggctgtactcgactcttgctagagaccttactaactacgatcgacattactctgaccatccatgtgagcacactgcagtgcattgacgtgacgatacgcccttccacctgacattcttcgttatgctctcgccgataataaccgaaccccactcc

SEQ ID NO: 65160 - DNA, 958 bp, Zea mays
  Clone ID: MRT4577_159422C.1
tttttttttttttttttttaaaacgaactagaactgttactttaattatatctctgataatcgtatctccatgacgacgatgcaagcgaaacaagtacaatcgatagtataatgcttcccttttataagaaaaaaaaaaaagtatgttcacacccattccaaggcaaccacacagatttgtcgatgccacctcttgcacctccaatcctaatggagctatcgtcgtcgccaatgttactcacctgccttggcatggtgctcaccatcgtgatcctgatcctccgcagtctgaaatgcaagtcccgccgccgtgtttatcgcctcccgccgggcccgaggccatggcctgtcatcggcaacctgaacctggtcggcgcgctcccgcaccgctccatccacgagctctccaacaagtacggcgagctcatgcacctccgcttcggctcctactccgtcgtcgtcgcctcgtcgcccgagatggccgagctgttcctcaaggcccacgacctgctcttcctggaccgccccaggacggccgccggcaagcacaccacctacaactacgcggacatcacgtggtcgccctacggcgcgtactggcgccacgcgcgccgcatctgcgccacgcagctgttcagccccggccgcctcgcgtcgttcgagcgtgtccgcgccgaggaggtgcgccgcctcgtgcgcggcctcttcgcggcgtcgggacgacgacgcgccgtgcgcctcggcaaggaccacctgtccacgttcagcatgaacgtgatcacgcggatggtgctgggcaagcggttcttcgacggggaggaggcagaggagagcgcggcggaagggcccggtgtcgtccctgcccgagttcatgtggatgatggatgagctgatgctgctcaacggcgtgctcaacatcggcgactggatcccgtggctggactgcctcgacctgcag

SEQ ID NO: 65161 - DNA, 411 bp, Zea mays
  Clone ID: MRT4577_159423C.1
tctcagcttctgctcatcgtcaggttaggtacggtccttcgttcgttccggagctagctagggtggtggaccaagatgagcttcttctccggcggcggcagcaagaaccaccagaggaccttcagggcgaagaagagcctgtcgtcgcccgggaacaagggtacgcaactgaggaggcacattgacgccactctcggcagcggcaacctgcgagaggctgtccgtctacccgtcggggaggacctcaacgagtggctggctgtcaacactgttgacttcttcaaccacataaacgttctgtacagcacgctggcggagttctgcactccacatacctgcccggtcatggcagccggaccaaagtacgagtacaggtgggccgacggagccaaagtcaaggtgcccatcaag

SEQ ID NO: 65162 - DNA, 2002 bp, Zea mays
  Clone ID: MRT4577_159424C.1
caaaccctccaaagtcaacgtcggaaaccaagaagaaggcaagaagcagaggggaattctttctctcccttcctatctctctccctctctctattgcaattgcatcccgcgaccatgtccgcgcgtccgccgcctcaaccgcgcccgcgcctggcgctgccgccgcgctcgacggcggaatcgctcttcacgggcgccggggacaccagccccggcccgctcacgctcgcctcagcgctcttcccctctgacgccgacggcggcggtggccccggaggcgcgtcctcctccgccgccggggccgcgaccttcacgcagctcctcaccggctcccttgcgcctcctcctccgcagcagcagcggcatgacgcggagaggggacgaggcggcggggtcgccagggccgggccggcgctctcggtggcgccgccggcatcggcgtccgctggcgcgtccgtgttcacggtgccgcccggcctcagcccctccggtttgttcgactcccctgggctgctcttctcgccggccatgggggggtttggaatgtcgcaccagcaggctctggctcaagttacagcccaagcaacccattctccactcagaatgtttgatcaccttgaacagccatctttctccacagctgcaacaacgtctggagctctacagcacatgaattctgcagccagtatggcaggaatttcagatatgacaatggcaacagcaaacaatgagaacccgtcctttcagtctgctgaggcatcccaaaggtatcaagttaatgcccctgttgataagccagctgatgatggctataactggcggaaatatggtcagaaggtggtaaagggcagtgattgtccaaggagctattacaaatgcacccatcccaattgtccggtcaagaaaaaggtagagcatgcagaagatggtcagatatctgagatcatatacaaaggcaaacacaatcaccaacgtccaccaaataagcgggcaaaagacggcaactcttcagcatttgatcacaatgaacaatctaatgataccgcatctggcttgtcagctgccaagagagatcaggacaatatatatgggatgtctgagcaagcatctggtttaagtgacggagatgatatggatgatggtgaatcaaaacgacatgaagatgcacgagtgataatgagagtaaaagaaggaatatacacatttcttcacaaaggaccttgtcagagtctaagatcattgtgcaaacaactagtgaggttgatcttttggatgatggttatagatggcgcaagtatgggcagaaggtagtcaaagggaatccacatccaaggagctactacaagtgcacgtttgctggatgcaatgttaggaagcacattgagaggtgttcatcagaccctaaggctgtcataacaacctatgaaggaaaacataaccatgaaccaccggttggtcggggcggcaaccagaacgcaggaatgtcatcacaacagaaagggcagaacaacgtatccagcaatcaagcttcattctcgagaccagacttgagcaacgctaaccagatgccaattggaatcttacagttcaagagcgagcaatagtaacatgtatttggatgacgttcttttggcaaatacaagatgcctgcaattcgtacagccatatggcatcaaaagtttcttaaagcctgataatttcaaatggtatcagtttgcagtttttccccgtagatacacaggatatatagctgatacggcctcatcgtttctagtttgtacatgctattaagttggggcatgagggatgcaatactagctaggtgaggttacttatatgtggttatggtgttctatagatggatcgatggtatacatgttctgattttgttcccaacacccgacaagattttgtatgtatttgtacagatgtttttgagttacattttgccttttgtaactttgaagatgttctagtttgctatgtcaaaaaaatttttttc

SEQ ID NO: 65163 - DNA, 251 bp, Zea mays
  unsure (1)..(251): unsure at all n locations
  Clone ID: MRT4577_159425C.1
aataatcacttactctttcaatctataacacatttattaacaccatcatcacccnntccccgcgacttattcaaacggggttcgtgcccattctaacataaaccatttcattactacccacttattttttacttatacctacctacatacattcccattgactcacataacctctgtttctcacaatctctacacctaaacatagagttcaaactaacataagctactatctacatcttacccatcttatc

SEQ ID NO: 65164 - DNA, 139 bp, Zea mays
  Clone ID: MRT4577_159426C.1
aaacgacccataacggggttatggaagggaacaatcactacttgaatgtcaaatggagggcgttataaaactgtggttgagaccaaaaagaatcacccgtattattgggaactaatctaaaaaaagtcaaaggaatttt

SEQ ID NO: 65165 - DNA, 1220 bp, Zea mays
  Clone ID: MRT4577_159427C.1
cgggaaggaggagcaagccgaagaaaaacaaagtgaaggtttttttatatgtcgatcaaggcagcggatcctgttcatgattttgcaatgctagtatgttttcttaaccagcatttatcctcaccaacacgtgtgtggccgaggcagctcctcctcacctcgccgccggccgcgcacaccgccatcacaacgcagaagctcctactggaggaaagtcgccgctggcgcaggttttgtgctgaagtcgcatcaccgtcagcaagcgcgccagggtaacagcgaacctcgggtgacggagagttgaagcctgcaggcaagcggaagttcatcaccaaggaagaggagccagaacagtactggcagaccgcgggggagagggagggcgagacactcgccttatccacccgtcctgttcctgaacaccgtgacacacagacacaggtactagtactaccatatcatgtgacgtgcatgcggctgtgatgcacaccaacccagccatggccaaggcagctcctcctctcctcgccgccggcagccgcactgccatcacagcgcagcagccatcgtcgaggaaaggcgccgctggcgcaggtttgttctgcagtcgcgtcatcgtcagcaagcgcgccagggtaacagcgaagctcggagacggagagctgaagcctgcaggcaagcggaagttcatcaccaaggaagaggagccagaacagtactggcagaccgcgggggagagggagggcgagaaccccatgatgacacccctgccctacatcatcatcttcggcatgtccacccccttcgtcatcctcgccatcgccttcgccaatggctggatcaaggtccctgtgcgatgaccgtaacgcgaaagccagtctggatcatagatgctgactcgtcagcctgcatctcatccagcgtgtgtcctgcgagtttgtaccttcatatatagagacaggagttcttgcttgtgagcataattgcatgatcgtgtggtgtatgtaacccgaaactgtttaaattttcgcaaaaacttcagtcttcaggcattgttccgattcagtgttccgattcagtgccctggtatcaatcttcagttatgagaaggtttgtatcatctgcagttgttgtagaatcatcacaggcagaactacttgctttgagaagaattgtaaaaagggacctaaaaaaaagaaaaaaaaatagaaaaagcggcc

SEQ ID NO: 65166 - DNA, 377 bp, Zea mays
  Clone ID: MRT4577_159428C.1
gggaaaaacagggggggcgttttttattagaaacaaaacccaaaggagccattacatttcaaaaccgggggacttctgcacaaaggggacttttggagaaaaggcccggtccctgggcgaaaaaacgggtgtttgctggggggccaactgctgaagggaggccgcatgggccacaagtggggaaggggtgaacagctgctgccgcaaccaaaagctgaacatgcccaaaaatttgggagggaccccctaaaacttccaaaaaaaacgcaattctcatcgccctagggggaaaaaaatttaaacttaaaacaccggggaaaagggaaaaaaaaatggggccaacctgaggggggcttaaacttggaaaattcaggccc

SEQ ID NO: 65167 - DNA, 836 bp, Zea mays
  Clone ID: MRT4577_159429C.1
cattgggctcgacgccggccgggggggtgatgtcattggctccctcgaggccggccgggcacagacacaggtactagtactaccatatcatgtgacgtgcatgcggctgtgatgcacaccaacccagccatggccaaggcagctcctcctctcctcgccgccggcagccgcactgccatcacagcgcagcagccatcgtcgaggaaaggcgccgctggcgccggtttgttctgcagtcgcgtcatcgtcagcaagcgcgccagggtaacagcgaagctcggagacggagagctgaagcctgcaggcaagcggaagttcatcaccaaggaagaggagccagaacagtactggcagaccgcgggggagagggagggcgagaaccccatgatgacacccctgccctacatcatcatcttcggcatgtccacccccttcgtcatcctcgccatcgccttcgccaatggctggatcaaggtccctgtgcgatgaccgtaacgcgatcagccagcctggatcatagatgctgactcgtcaacctgcatcttatccagcgtgtgtcctgcgactttgtaccttcatatatagagacaagagttcttgcttgtgagcataattgcatgatcgcgtggtgtatgtaacccgaaactgtttaccttttcgcaacaacttcagtctttcactgtcaaaaaaaaaaaaaaaaagccccaaaaaaaaaaaaaaaaaaacggacaaaaaaaaaaaaaaaaaaaaaaaaaaaaaaaaaaaaaaaaaaaatgtaacccccccgaaactgtttaccttttcgcaaaaacttcagtcttcaaaaacaagaaaaa

SEQ ID NO: 65168 - DNA, 239 bp, Zea mays
  unsure (1)..(239): unsure at all n locations
  Clone ID: MRT4577_159430C.1
agatggatggatggatggatccatattaaatgagatagatgcaatttttttttttcaaatgggcggccggacggacaaaaaaggggggacgccggngtgcgcctgcctaggacggcagttgttcgacggccacctcctccattttcgggggcgcccgggcctccatctcgaaaaaaaggcagggccggttgagcacggggccgggcgcgggcgcgggcgcgtgccccaccccgccgggg

SEQ ID NO: 65169 - DNA, 302 bp, Zea mays
  Clone ID: MRT4577_159431C.1
ggtacgcgcacaaaatgaaaaagaaaaggcgaaggcaaatgaatcccagtcaggcaagcaaagggaagaaccagctgctggggagtgcggagatatcgtcgcagctgatcgaggagcacctgtccgactcggacgtacacgtctggcacgagctgtgcgagcacacgtaacgcgacttcatggtagacctcgacctccacgacagcctactaacgatgaccagactaggacgacgtgggctacaacccgtcgaccgcgttcgagtggctgcctcataccaacatgactgacccacaccttaa

SEQ ID NO: 65170 - DNA, 971 bp, Zea mays
  Clone ID: MRT4577_159432C.1
caaacagggcaaaaaagccaagtttagcgtttcctttagatagtttgttggaacccatgctttgtagatagcttcctttagctaagtgtgctctgtaaacttgagatttagctaggatttttatataagctcttggagatgctcttaacatacagtgggaagacggaagggtgtacaggtccaagtccaacacacgacacacacaaacacacgcgctgatggctgacgagtgacgacccacatgcatgcacataccgacatacgtacgcccaatccttcatcacaagagcggacaggcacacggcatgtacgtacagtacagagtacagacacgccttattacacgcgcacgcacgcatgcatccatggccatgcacagcgttgttcaagactcacgggacgccggcgccacctgctcctcctcctcctcctcctccgccaccgaggccgccgccgcctccgaacccgccgaacgggcccgcgccggcgacggccccgccgaacgggccgaacccagcgacgccgccgcccagcgggccgtggacgccgccgaagaggccgccgccgccggtccgcccaccgaacacgtcggcggtcttggcctgctcgtcgtcctcgtccacggcgccggcactgccgtcgcccgccgcgaaggcggcagtagtgtcgcagtcgcggggcgttgctcttgccgccgccgatgcgacggcgaggcagagcagcagggaggcgacgagccaccacttggctgccattggcctctctctctctctcgcttattaccaggaggaccagctcttgttcttcgaggtgtgcctgtctggcctggtgctgctggactggtggtggcgggggttcgatgcagccggcccggccggcaacctcgaggaacacgagctcgtcctactggtaataagcgagagagagagagaggccaatggcagacaagtgggggttcgtcgccttcctgc

SEQ ID NO: 65171 - DNA, 298 bp, Zea mays
  Clone ID: MRT4577_159433C.1
aatacttagacaggtatattagtacacaaaaccaatgtactaagactggggaacataccttggctggagatcggcactatgttaattcatgggcattggatcacatctaagcactagcgttgacagtgaatcaccaagatgcttagaaacggcccaagggctcatttgcctttcaatctcccccttttaggagatttatgccaacacagcataaagtacatagaacaaggggaaaatcactaaaaattaaagctcaaattggtcccgattcaattttggcatatatggatcatccttt

SEQ ID NO: 65172 - DNA, 1722 bp, Zea mays
  unsure (1)..(1722): unsure at all n locations
  Clone ID: MRT4577_159434C.1
ttgttcaatgggagcagtaaccatttctcagggaacctagatgagtctatttcaaacttcacacaactgtcttttcttgatatccacaacaacagcctcactggaagtttgcccttctcactttctgatctcagttatttaaactatcttgacctctcaagcaatgacttcaatggccccgccccttgtggtatctgcaatatagttggcctcacatttgccgacttctctggtaatcacattggcatgagcggcttagtggattgtgctgcagaaggcttttgtactggaaagggttttgatcggaaggcacttaattcatctgatagagttcgaagagcagcaatcatttgtgttagtatactcactgttgtcattgtcttagnnnnnctggtggtttatctgaaacggaggctattgagaagcagacccttggctcttgtacctgtcagcaaggccaaggctaccattgaaccaacctcaagtgatgagctcctagggaagaagtttcgagaacccttgagtatcaatcttgcaacatttgagcatgcacttctgagggtcaccgcagatgatattcagaaagccacggagaatttcagtaaggtgcacattattggggatggtgggtttggcactgtctacagggcagcacttcctgaaggtcggagagtagcgatcaagaggcttcatggtggccatcagttccaaggtgatcgtgaattcctggccgaaatggagacaattggaaaggtgaaacatcctaaccttgttcctctacttggctactgtgtatgtggtgatgaaaggttcctgatatacgagtacatggagaatgggagtcttgagatgtggctcaggaaccgggctgatgccatcgaaacacttggatggccagaccgcctgaagatatgtattggttctgcccgcggtctttcgttcctgcaccacggttttgtgccccatatcatccaccgtgacatgaagtcgagcaacattctattggacgagaactttgagccaagggtctctgattttggccttgcaaggataatcagtgcatgcgagactcatgtcagcactgacattgctggtacatttggctacatacctccagagtatgccctgacaatgaagtcctctacaaaaggcgacgtctacagctttggcgttgtcatgcttgagctgctcactggacggccacctacagggcaagaggaaggggaagggggtggaaaccttgtaggctgggtgcgatggatgatggcacatggcaaggaaggtgagctgtttgatccttgtttgcctgtctcaagcgtgtggcgggtacagatggcccatgtgctcgccattgcccgagactgcactgtggacgagccatggaagaggccaactatgctggaggtggtgaagggcctcaagatggccgaaacgatagaatgtggacctctggttgtgacagtcaccaaggacatgtaatgctgacggcatcaacgctgatgtatggaactgggtgttcagggaatgttgttcttgtgtcgatataataatgtaggctccttgttgctgtagctgtactggtgactgtaatgagaaactaacgctgctcatgttcaggctgtagttattgatgtaaccttttcatctggacccaagcaagcacttatgatatggcagggatcgtttaagcacaaaaaaaaaaaaaaaaaggcccctagggcc

SEQ ID NO: 65173 - DNA, 391 bp, Zea mays
  Clone ID: MRT4577_159435C.1
acatccaatccatcaaggagagtcgatgttgtacttgagtaagttatgcgtggaaggaattagcatgtatcgtcctgaactttaatttcttgatgccaagaacatgtacagctagttcattctgatccttggtaacgtatggatgaatatgcctgatgcatctacatcaaacctctggtgctctgctcactctcgcagagtcaatcagctggtacggagtgtgggagtctgttgttcaaacattttttctgaccttttccttgtctttccttgcttttttctttttcttttgtgaatgaactgtgttggatgatgtagaaatggacatgtttctgaagatttcccgcaggtttcgaactttgcactttattatgcaggcctttttctgtag

SEQ ID NO: 65174 - DNA, 513 bp, Zea mays
  unsure (1)..(513): unsure at all n locations
  Clone ID: MRT4577_159436C.1
ccggaccggaanacccgggggggcgccacgcgtccgcgccaatccaaaacctagccttcaccggcctaccgctcccctccggcgcttgcccagcagcgcgccgcagcgccctcgccggctcgcccccacagccacctccaaggctatggcgcaatcagacgtcggcgccatgtcgaacacgtagggccgcggctgcttcttcttggtgccagtcccttgtgcgctcgctctctcacccgacgatgaatgggcgcccgccaccctatgacaggtctccgactcgtcgccaggccttcgcgagcaacgagcaacaagcacccaccactaagatatgcgcaccctccctccctctctttcggtgatgaatggacgctcgccgccctatttcaggtctccggcccttcaccacgccttcacgggcgacgagcacccaccaccgtttacgtgcaccctctctcctttggtccttccaccctttcttccgtgctaagccaccgagcacccaaaccttag

SEQ ID NO: 65175 - DNA, 463 bp, Zea mays
  Clone ID: MRT4577_159437C.1
attatttatctcttctcttcttctcactactacagctacttttttctcctcctcacacctgcacacacttgcacacttgcacccaccctctctcctccatccagcaccgaccatggccgccgtcacggctgcggccgtctccacctccgccgctgctgcagtcaccaaggcatcgccgtcccccgcccactgcttcctgccatgcccgccaagaaccagagccgcccaccagcgcggcctgctgctgcgcgcgcaggtgtccaccaccgacgccgccgccgtcgtcgtcgcgccggccaagaaggagaagatatccaagaagcctgacgagggcgttgtcaccaacaagtacaggcccaaggagccctacgtcggcaagtgcctcctaacaccaagaacaccggcgacgacccgcccggcgagacatggcacacggttttaacaccgcaggtgagatcccctt

SEQ ID NO: 65176 - DNA, 339 bp, Zea mays
  Clone ID: MRT4577_159438C.1
cgacccactcttactcacacacatacatccaatctattcattcactctaactttcctcacacaccacaacattcatgcttttttctcaactatcactgacctaaaactaacccttctactctcttaacccaatccctctattaatctacctacaacatacacaaacaccatcaaaaccctccttttcatatacacatttcaatctatcccaacctatcttatcaatacacaccaactacaacatcatcacactctcctcatattaatactctaaacatcaatctcctatacacctacacaactcacataatctccactaccatcatcatctgccaacct

SEQ ID NO: 65177 - DNA, 336 bp, Zea mays
  Clone ID: MRT4577_159439C.1
atttgatatcgattctcgctcgtcttattgcgctcgagggatcggcagcttcgttagaatcttcgccacctgtctggtctctaggatgctcctgccaccaacatgatgcctatacccagcccttgaaagttgatctactttcgtcaacgtcttgcgcgtcacgaacgaggaactacctaccagataatgatctcgacgcagtcgtgtagcccctcttacgccggcacgcacatgcctctaccaaagcgtgtagaagacaccgcccgatactcgcacgtacagtcagatatcgtacgcgtcatagcgtaccgaaggactctagatacaggtcactca

SEQ ID NO: 65178 - DNA, 1801 bp, Zea mays
  Clone ID: MRT4577_15943C.1
ggaacatcagatatcctgttgcatctaaaaatatgcacattttattccttaatgtatttcaagtgtagagggcggacgcgtgggcgcgaagtctacatgataggtcccgtctgctcagacagggacggtcgcgagagtgaaggcaaggaaaaacacccaaacggccaaaccccaggaagccccgtcggaccctacagaccctaaccctagcgctcccgacgcgccgcggagcgatggcgatggacgcggagcggcggcaggcggagctgatcgcgcagttctccgctcaggcggcggcgctttcgtccgcgccccagctcgccgcgctggtgcttgaggccacctcccacccggccctcttcgccttctccgagctcctcaccctcccggccctctccaagctcactggcacgcagtacgcgtcgtcactggacttgctccggctcttcgcctacggtaccctgaatgactacaagagtaattctggattccttccagcactgttgcctgaccaggtccgaaagctaaagcagctcagcgtgctaactctggcagagtcaactaagatactaccatatgatcagctcatgcaagagttagacgtttcaaatgtaagagaactcgaagatttcctaatcaatgagtgcatgtattcgggtatcgttagaggcaaactggatcagctgagaaggtgctttgaggtacaatttgcagctggaagagatcttacacctgatcagctaaagaacatgatagagactttgtctgattggttgggaacatcagatagactgttgcatcaaattcaggagaaaatcaagtgggctgacacaatgagtgaggtgaacaagaagcaccagaaagaatttgaagacagagtggaagaggccaaaaaatcaatcaagaagttaacaatttaagcaggcagacattgacttacgggggcatgacgagtttctctctgaatctggaggaataatggattttgaagaggaccgcgtccgaccaaaaaggaggaggcaaccaccggcgtagtttcaattagcccttaccaatctctcccagaatgggacctgctgataccttgattgagacattttgacgccggagttgagtaaactttgtacatctgtcgtgtgatgcctccactgtagcgagtctgtttattttgccttctggtcttggtggggacgtacaaggccaaacctaggcgttatgttgcatttatttggtagtaaatggcccatggaagaaataacgttgttatgattatggcactgggttattctcaagtgtactgaacgataacagaagcacctctgttaaatgatgattgactcgaggcttgctgattgggcgctccagtggccgtagcaccgctgctcattgatgtgacttgaggcttgctgttttgctgctctaaaaaaaaaaaaaaaaaaaaaaaaaaaaaaaaaaggtatcgtcagcaaactatcagctgagagcttgaatttgcagctgtcttacacctgaacatgatagtgagctagattaaactgaagcatttgttatgaataaatttgcatctgcttgtgatgagttatgctctgttttcttcattttcctacttctgccttactggctcatgtttagatatataattattttttgagtgttcatataatggcaactactgtattaaatagtgttgccgaaccatgtttcttacttgatggcagaaagtgaacaatttaagcatgcagacatcgacatacgatggcatgacaactacctctctgaatctgtatgaataatggatttt

SEQ ID NO: 65179 - DNA, 397 bp, Zea mays
  Clone ID: MRT4577_159440C.1
ggttggggtgtaaactgcaaacccgtgctctggggcgggctacagggggggggagctgccgaatgcgtaaaagaaactcctacttggcgtgggaaggcaaaagcaccggcgggtatggaactgggggggggggggcagggaacggggaaagtggatcaacaaggccaacacaggggcggatgagaaacaggaccaagaacactgacaaaggaagcagacggcacgcgtcacggacatgaggggaacctgaagaaagacagaaccatgagaccgcacatggactcaactcgcaggtgcaggcaggacctatatctctacgccaccaacacagtctcaggttaacggtaagtgggaggacacacacccgccggttcatgtcagtcttgaacacctatgc

SEQ ID NO: 65180 - DNA, 658 bp, Zea mays
  unsure (1)..(658): unsure at all n locations
  Clone ID: MRT4577_159441C.1
cgctgctccctccttcccctccgcgaagattctccttcgacccctcccgatctccaaggcggcgtcgccgtcgccgtcgccgcgcgccagatctcctccacgcgctcgcggtgcgccctcgccgcctgcgcgatctacccggccaagatggcgacctatgagcccaagaacatcctcataactggtgctgcgggtttcattgcatctcatgtggcgaaccgtctaattaggagctatcctcactacaagattgtcgtcctcgacaagattgactactgctccaacctgaaaaatctcaacccctcccggccatcgccaaatttcaagtttgtcaagggcgacatcgcaagtgctgatctggtgaactatcttctcatcactgagtcgattgacaccatcatgcactttgctgcccagactcatgtggataattcgttcggcaattcctttgagtttacaaagaacaacatatatggcacccatgttctccttgaggcgtgcaaggttactggccagatcagaagatttatccacgtcagtactgatgaggtgtatggagaaactgatganggatgctgtggttggtaaccatgaggcctcacagttgcttccgacaaatccatattcagctaccaaagctggggctgaaatgcttgtg

SEQ ID NO: 65181 - DNA, 447 bp, Zea mays
  Clone ID: MRT4577_159442C.1
taaaaaaaaaaaaaaaaaaaaaaaaaaaaaaaaaaaaaaaaaaaaaaaaaaaaaaaaaaaaaaaaaaaataaaaaaaaaaaaaattaaaaaaaattaaaattataaaaaaaataattaaaaataaaaaaaaaatttctcctctcgtttattgtttttaaagttgttattttttaaaatttccatacctttttggcgggctctaacttttttattttaagggctcaaataatctttttatgacgtaaatttaaaatttttgtcaacctttttataatggttttggtgattaaaaaactataattttcatatttttaacacttttgaataatattctatatttaatttttgtaaagataaaaaagagtaaccgctttttttgctttattaaaatgtgggtttcactgacaagggaaatacatcctctttttccttcaaatatttccata

SEQ ID NO: 65182 - DNA, 1010 bp, Zea mays
  Clone ID: MRT4577_159443C.1
ttgccgcgaggaaccgcgtcgaccttgtcgtcgatgttggcttgcaaggcgagcccgagccggccgtgcgtcgtcctccttgtttgcctgctggtggtggcggccgcagtcgtcgtcgtcgctgcctcgacgccgccggcggaggcggcgttcgacgacaactacgtggcgcagtggggtagagatggttatcaccttgtcgtccggggcacggaggcgaatgtcaccatggaccagagctctggtgccgggttccggtccaagtccacgtacggctcagggttcttccacatgaggatgaagctgccgtccgggtacacggccggcgtcgtcacgaccttctacctcatctcgcagccggaggatgggagccgcgacgaggtggacttggagttcctgggcgacaaggccggcgtgcccatcaccctccagaccaacgtcttcgtcgacggccgcggcgacagggagcagcggacgcgcctctggatgttcgtggacgacacgccggtccgggtgctgaggaacctgacgggcgccgtgccggggtacccgttcccggggaagcagacgatgctgatccgcgcgagcgtgtgggacggctccgactgggccacggacggcggccggaccaaggtggactggtccaggggccccttcaccgccggctaccggggcttcgacgtcgacggctgcgccaacaacgggagcgacgcgtgccaatcgcccgacctatggtggaacgccgccgagtaccggaacatcaccgcggagcagcgggcggcgtacgaggacgtgaagaggagttacatgaactacgattactgcgccgataaggccaggttcaacagcaccaccgtacccattgaatgcaactacgcttgataagccagctaggagtggcgttgtatattatacatacacgaaaagatatgtctgcttatttgttgcattgcaagggtttaaatatgcaaatgcttataaggactacaaaaatatattactttgtcact

SEQ ID NO: 65183 - DNA, 232 bp, Zea mays
  Clone ID: MRT4577_159444C.1
gggggcaccacgaaaatacaatgtgggattgaaacaccacagttgaacctcgctacttacacaacacatccactgatgacagagtggtacaaagctggatgttgactgcacataagcatggaaacgatctacacatttaaataacaaacagaacacggatgtaagcaaagccataggacacggaagcacataataactcgacctatgccacgatccgatatgttccaggtta

SEQ ID NO: 65184 - DNA, 1098 bp, Zea mays
  Clone ID: MRT4577_159445C.1
cccacgcgtccggcggccgcccttttttttttttttttttagtgacatggaaatatatttttttagtccttataagcatttgcatatttaaacccttgcaacaaataagaagacatatcttttttgtgtgtgtgtatatatataatataaatcgtggatttagtttgacatacaacgccactcgtagcgcttatcaagcgtagttgcactcgatgggtacggtgttattgaacctggccttatcggcgcagtagtcgtagttcatgtaattcctcttcacgtcctcgtacgccgcccgctgctccgcggtgatgttccggtactcggcggcgttccaccagaggtccggcgattggcacgcgtcgctcccgttgttggcgcagccgtcgacgtcgaagccccggtagccggcggtgaaggggcccctggaccagtccaccttggtccggccgccgtccgtggcccagtcggagccgtcccacacgctcgcgcggatcagcatcgtctgcttccccgggaacgggtaccccggcacggcgcccgtcaggttcctcagcacccggaccgggcgtgtcgtccacgaacatcacgagctggtatgggttccagaggatcttgtagtcgtggaagtcggcggcggggtcgaaccagaggcgcgtccgctgctccctgtcgccgcggccgtcgacgaagacgttggtctggagggtgatgggcacgccggccttgtcgcccaggaactccaagtccacctcatcacggctcccatcttccggctgcgagataagatagaatgttgtgacgacgccggccgtgtacccggagggcagcttcatcctcatgtggaagaaccctgagccgtacatggacttggaccggaacccggcaccagagctctgatccatggtgatattagcctccgtgccccggatgacaaggtgataaccatcttcaccccactgcaccacgtagttctcatcgaacgccgcctccgccgccgagccagcgacgactgccgccgccaggcaaatgacgaggacggcatcccacgcgcacgccttggaagccattgcaaataaagccggccaagagcccaag

SEQ ID NO: 65185 - DNA, 735 bp, Zea mays
  unsure (1)..(735): unsure at all n locations
  Clone ID: MRT4577_159446C.1
cctcgaggccggccggggatcagtgatgcctttccgtgctggatgagcgagcttcccaggctgcaggtccttgtcctgaaaagaacaggttctttgggcaggtttccgaaccagttctgcaagaaaagaagcagagctactcctgcgcgttccctagcgcatcgatcgtcgatctgtcttcgaacagcttctctggcccactgccggaaggccgatggttcaagaacctaaggtcgatggtactcacggacccgagcaagccgttggtcatggatcatgaggtgcccggagtgacaagaacgtatagatacaccactgcagtcacgtacaaggggcatgacaccagcttcgctgagatactgacagcgttggtgttcatcgacttctccaacaacacgttcagcggtagcatcccggcagctattggggagcttggtctgctacacgggctcaatgtctcgcacaacttcctcaccgggcagatcccacctcagctcggccatctgagcaggctcgaagctctggacctgtccttcaatgggctctctggagagatcccaaaggagctggcgtcgttggactccctcacgacgctgaacttgtctgancacaggctcgtangaagcatacctgcgtcgcctcacttctcgacgntctccagctcgtcgttccaaggaaacgacggnctttgcgggcctccgcttgtcaggcgtgcaacgacaacgtaacgcaggt

SEQ ID NO: 65186 - DNA, 753 bp, Zea mays
  Clone ID: MRT4577_159447C.1
cattgggaccctcgaggccggccgggattgctcgatgacccaccgcctccgcaacgtcccttccctccacaagcaaccgatatcccggcgcagctcccatgtcgccttattctgatctcctatgtgccctccagctcctggcgtattctttcatctaccaggagctctagaatgccctcctgcgacaggtccatccaaagcgtcctaccccccgccctgctgatgtgcacattggtgccaatccatccgccgaggcagctgcacgacaaacgcgctgatgacacacctgcgaaggcgtgtgatattgttgacacattctgcctacagtgaggaatactccttttgacaacaattcatttgggtcttacatcaacaaatacagtcacgacatctcactgctgtgttggagccagcacaaagcggatgcagtctcaaaaagggtgcccagggtgcaaccaagtctctccttagctagctgaaggacctccgattttttgttgccgagtccatgaatgatgatgcgcctgaggtattcgcctattaccaggatggtgccactaatccgacattcctctatttctctcatggtcttaatgagatcaagagctaggcgtgcggataaattacctatccatgttgcgcactatctatgaactattattatatccagcactatagttgtcctgtctgaatgactcaactggtttgggttttggagaaaaactgtccaagattgcattgcttgttaaagct

SEQ ID NO: 65187 - DNA, 376 bp, Zea mays
  Clone ID: MRT4577_159448C.1
aaaaaaaaaaaaaaaaaaaaaaaaaaaaaaaaaaaaaaaaaaaaaaaagggggaaaataggaacatagggaaatatgagggacataaataaaaaaattagacaaatatttaaaaaaacaatattatggggccggcctttttataggaccaaagtttattaccccgttcatacaacgatatacctctttttttgggaccccaaaattaatttaacgggccggattttaaaaacgtgggaactggaaaaaccctggggtccccaaatttaatgcctttgcaaaaattccccttttaacaagttgggttaataacaaaaaggccccacccattcccctttccaaacattttcccacctttattggcaaatggacccccc

SEQ ID NO: 65188 - DNA, 279 bp, Zea mays
  Clone ID: MRT4577_159449C.1
ctgatgcccatactatcgctcgttctgaaccatttctatcataaacccttactacctcgcggtgactcacatacgtagggcgagatcctcaactatctaatcatatcgctcgtgtatactccacacgagcagtaagtcatcaaatacaacacatacgatggcaacttgaccaccacacccataaacggtgctatcctcactctcaatacaagaacggctcaacttcttcttaagggcatgcacacaagtgtctggactggccacaaacatcctgagcaa

SEQ ID NO: 65189 - DNA, 1216 bp, Zea mays
  Clone ID: MRT4577_15944C.1
gtgaaggcaaggaaaaacacccaaacggccaaaccccaggaagccccgtcggaccctacagaccctaaccctagcgctcccgacgcgccgcggagcgatggcgatggacgcggagcggcggcaggcggagctgatcgcgcagttctccgctcaggcggcggcgctttcgtccgcgccccagctcgccgcgctggtgcttgaggccacctcccacccggccctcttcgccttctccgagctcctcaccctcccggccctctccaagctcactggcacgcagtacgcgtcgtcactggacttgctccggctcttcgcctacggtaccctgaatgactacaagagtaattctggattccttccagcactgttgcctgaccaggtccgaaagctaaagcagctcagcgtgctaactctggcagagtcaactaagatactaccgtatgatcagctcatgcaagagttagacgtttcaaatgtaagagaactcgaagatttcctaatcaatgagtgcatgtattcgggtatcgttagaggcaaactggatcagctgagaaggtgctttgaggtacaatttgcagctggaagagatcttacacctgatcagctaaagaacatgatagagactttgtctgattggttgggaacatcagatagactgttgcatcaaattcaggagaaaatcaagtgggctgacacaatgagtgaggtgaacaagaagcaccagaaagaatttgaagacagagtggaagaggccaaaaaatcaatcaaggcagacattgacttacgggggcatgacgagtttctctctgaatctggaggaataatggattttgaagaggaccgcgtccgaccaaaaaggaggaggcaaccaccggcgtagtttcaattagcccttaccaatctctcccagaatgggacctgctgataccttgattgagacattttgacgccggagttgagtaaactttgtacatctgtcgtgtgatgcctccactgtagcgagtctgtttattttgccttctggtcttggtggggacgtacaaggccaaacctaggcgttatgttgcatttatttggtagtaaatggcccatggaagaaataacgttgttatgattaaaaaaaaaaaaaaaaggcgctggcactgggttattctcaagtgtactgaacgataacagaagcacctctgttaaatgatgattgactcgaggcttgctg

SEQ ID NO: 65190 - DNA, 2379 bp, Zea mays
  Clone ID: MRT4577_159450C.1
atggccggttcaaaagatagctctgaggtttccaccagcaatatcatcacaccgacatgggaagccttgccggctgaagaacagcttctgttcgaggagcgccaggagcagctgatccaagaagcaaaggcgaagttcctggctgacttcaaagtggacaggaacaacaaagtcgttcggcaacgggcgacagatctggcttcgctccgacctactacgattaccccaaatagagccggtggtcttgcaccggctgccattggtatagtgagggaagaaatagccggggcgttccgagataagctcggagtaagcatgatccctggggggcaatcatatcggaagccttatgacagccgatttgatcaccacccatacccacagggaactaggatacccgagtttgcaaagttttcgggtgaccaaggaaagagcacgcgtgagcacataggccagttcctagcacaattaggagaattggccgacaccgaagctttccgtgtgcgtttattttcattatccttaacagggactgcattcacatggtatgccacgctccctcctaatttcattttgtcatggggagacttagagcaaaaatttcatgaacacttcttctctggtgattatgagctagatttagtagacttagtgaccctacgacaagaaaaggatgaatcggttagtgattatatccggagattccaggatacgagaaaccgatgctttcaaattcatctaacagataaacaactggcgggaatagcctttgatggattgcgctattatttaaaagagagattagaaggcatccagttctttactctagcacaattacatcagagagcttcggcttgtgaaagccgaagcaaagaactagtcagaccggttcatcataatgtccctatagtagaacacaatcaaagtagttcggacgatgaaccaaagaaagtttacactgccgaaatagtttggcccgagcaggccaaatcttcggcttgctactccttgcagtcagttcaaaaggaacgacaagaggaggttaagtttacatttaatgtcgacaaatgtgataagatattcgatgaattactaaaaaatggtaacattaaaattgattatatcgttccacctgccgacgaactaaagcgtcgcgcatactgcaagtggcacaactcattttcacatgccactaatgattgtaatgtgttccgacgacaaattcaatcggccattaatgagggacgattgaaatttcaggaggacacggagcccttcccaatgaatgtgatcgactttaatggcaaaaaggtcctaattcggcccaacacagccgataagggcaaagacaaagaagtcatcatcggcaacgcacgggaggccgatggaaacaacaaaatttcttgcaggaaagtgatggccgagaagactcctgatggaggggagacactgaaggtaaccatcacaaactccagcgctggggggcaagcacagacaaggggatatgcgcgagaacccatactacgcatcgcggacggtccggtgtctaggcgcggacggtccgtaacatcaccggacggtccgaagcgttccgacggacggtccggcaacgtcgaagagccgcggcaaccacgtaccttcaaaccacgacgaccagaaataggtacgtggaaaactaacacattcaaggcaactggtcggttggtaaaatctagcccgacctttgatcaattattgtctaaatatgtgaaaaagaaggctggctccagcaaccggccaacaaagggacctcgcttacccacccaggtgcgacggcaggttaggccgattggaccaccacatcaatcggaaaggacggaaggtcataatgttcaattaagacctaacgtacctgcatggacacctccaccaccatatccacctatgccatatccatacacatacatacctccaccatatgtcccaaatcaaatgtggggcatgccaccatatccatttgggatgccacagtaccccgcttggggggcaccccaaacatctgtattcaataggttgacacctccagtacaagaccgattgagagcccctcaatctggtccacgagcacaggcccagcaagattgccgaacaactcagccccaaaggctgactaatccggcagggggacatacagctataacctccaacagtatggtagactgtccggctataaaggccggatcatctgcacaggacgcggaccatccgacccctgaggccgaaccatccgcactacaccaagacacctccgacgacgtaccgacgcccatggaggaagacgacctgcatggagaagacctggtcgactacggagctatgccagaacacttagagaattag

SEQ ID NO: 65191 - DNA, 1007 bp, Zea mays
  Clone ID: MRT4577_159451C.1
atggggaggaaagcaatataccaacatccaaacaaactcacccatattgggtcaaagagccgatggtctcccaccggcttccatcgatataggactgcattcatgtggtatgccacgctccctcctaattccattttgtcgtggggagatttagaacaaaaatttcatgaacatttcttatctggcgattatgagctagatttagtagacttagtggccctacgacaagaaaaagatgaatcggaggacacggagccctttccaatgaatatgatcgacttcaagggcaaaagggtcctaattcggcccagcacagccgataagggcaaagacaaagaagtcattatcgacaactcacgggaggccgatggaaacaacaaaatttcttgcaggaaagtggtggccgagaagactcctgatggaggagagacactgaaagtaaccatcacaaactccagcactgggggacaaccgcagacaaggggatatgcgcgagaacccatactatgcatcgcggacggtctggtgcccaggcgcggacggtccatagcatcaccggacggtccggagcgttccaacggacggtccggcaacgccgaagagccacggcgaccacgtaccttcaaaccacgacgaccagaaacaggtacgttgaaaactaacacgttcaaggcaactggtcggttggtaaaatctagcccgacctttgatcaattattgtctaaatatgtgaaaaagaaggctggccccagcaaccggccggaccaaagggacctcgcttacccacccaggtgcgacgacaggttaggccgattggaccaccacaccaatcgaaaagggcgggaggtcataatattcaattaagacctaacgtacctgcatggacacctccaccaccatatccacctatgccatatccatacacatacatacccccaccatatgtcccaaatcaaatgtgggacatgtcaccatacccatttgggatgccacagtacaccgcttag

SEQ ID NO: 65192 - DNA, 450 bp, Zea mays
  Clone ID: MRT4577_159452C.1
gggggcaaaaagcaaccacaacaaggcttgtgacccggttaaaacaacggccatggcaacaacaacaacccatgcagttaattcatgtccaggggagggagaggggtttcggggctttttcctttcgtcgttaaaagggccactccggcaaaactcaaaaaaaaaaaggcagcgagggaccctgacccgggggaggcaaacaaagcaactcaactccgcagcccgaaggctccagtcctaagggagttccgttgcaacctttgttttggtggggccgtcactcctcctcccattcgggcgggtcacacggaaagcagccctcctgggcaacgtccgtgatctggacccccgtgtcgaaaacctcgccggcgcccccccaccggggaacaccttgggggtcggcccacacccacttgccgtggtacccgcccgtcaccaccaccctgagct

SEQ ID NO: 65193 - DNA, 3492 bp, Zea mays
  Clone ID: MRT4577_159453C.1
atggccggttcaaaggatagctctgaggtttccaccagcaatatcatcacaccgacatgggaagccttgccggctgaagaacagctcctgttcgaggagcgccaggagcagctgatccaagaagcaaaggcgaagttcctggctgacttcaaagtggacaggaacaacaaagtcgttcggcaacgggcgacagatctggcttcgctccgacctactacgattaccccaaatgtaagtagcaccaacgaactccaatctcttaaagcttacatagacgaacagcgagaacagatgcaaaatatcataggggttatgcaaaacgattgtaggagactagtacgtgcatttgataaatctagtgtagcaaattttccttcacacgaggttgaattaggagataatacacgtaatacatcggttagaggttgtcacgaccagtcacaacccccttatgggatgccgatggacacgtaccctgagcaaacgcaaatcggcagtaaaccagccgatctacacgtgtccggaccgtccgcccgcgagcgcggaccgtccgggtcagccgcagccgggcccatttttaatgagttacctagacacgcacccgagccaccacatagggcaccgaatttaaactacccagtcggacggtccgcatacaacgacggacggtccgcacataatcacggacggtccgggcccgtgtccggacagtccgcgcatgacccttttgagggggattgttacttgaatcctcgcccatcccagcaacacttcccatcacattatgcaatgcaccagcccattaattcaggacccagagcccaggaaagctttccggccccacctagaaggccggaaagaaacgatcaaacatatgagccatatagggcaaatggaaatgcaccacgtagctcaaaccaatggggggaacgacaacatactaacatgcaaccaaccccacctatgtttgaccagagagccggtggtcttgcaccggctgccattggtatagtgagggaagaaatagccggggcgttccgagataagctcggagtaagcatgatccctggggggcaatcatatcggaagccttatgacagccgatttgatcaccacccatacccacagggaaccaggatacccgagtttgcaaagttttcgggtgaccaaggaaagagcacgcgtgagcacataggccagttcctagcacaattaggagaattggccgacaccgaagcattccgtgtgcgtttattttcattatccttaacggggactgcattcacatggtatgccacgctccctcctaattccattttgtcatggggagacttagagcaaaaatttcatgaacatttcttctctggtgattatgagctagatttagtagacttagtgaccctacgacaagaaaaggatgaatcggttagtgattatatccggagattccaggatacgagaaaccgatgctttcaaattcatttaacagataaacaactggcgggaatagcctttgatggattgcgctattatttaaaagagagattagaaggcatccagttctttactctagcacaattacatcagagagcttcggcttgtgaaagccgaagcaaagatctagtcagaacggttcatcataatgtccctatagtagaacacaatcaaagtagttcggacgatgaaccaaagaaagtttacactgccgaaatagtttggcccgagcaggccaaatcttcggcttgctcctccttgcagtcagttcaaaaggaacgacaggaggaggttaagtttacatttaatgtcggcaaatgtgataagatattcgatgaattactaaaaaatggtaacattaaaattgattatatcgttccacctgccgacgaactaaagcgccgcgcatactgcaagtggcacaacccattttcccatgccactaatgattgtaatgtgttccgacgacaaattcaatcggccattaatgagggacgattgaaatttcaggaggacacggagcccttcccaatgaatgtgatcgactttaatggcaaaaaggtcctaattcggcccaacacagccgataagggcaaagacaaagaagtcatcatcggcaacgcacgggaggccgatggaaacaacaaaatttcttgcaggaaagtgatggccgagaagactcctgatggaggggagacactgaaggtaaccatcacaaactccagcgctggggggcaggccccctagaggggacatgcgcgagaacccatactacgcatcgcggacggtccggtgcccaggcgcggacggtccgtaacatcaccggacggtccggagcgttccagcggacggtccggcaacgccgaagagccgcggcgaccacgtaccttcaaaccacgacgaccagaaataggtacgtggaaaactaacacgttcaaggcaactggtcggttggtaaaatctagcccgacctttgatcaattattgtctaaatatgtgaaaaggaaggctggccccagcgaccggccaccaaagggacctcgcttacccacccaggtgcgacggcaggttaggccgattggaccaccacaccaatcggaaaggacgggaggtcataatgttcaattaagacctaacgtacctgcatggacacctccaccaccatatccacctatgccatatccatacacatacatacctccaccatacgccccaaatcagatgtggggcatgccaccatacccatttgggatgccacagtaccccgcttggggggcaccccaaacatctgtattcaataggttgacacctccagtacaagaccgattgagagcccctcaatctggtccacgagcacaggcccagcaagattgccgaacaattcggccccaaaggctgactaatccgacagaggggcatacagctacaacctccaacagtacgaaaaagggagacgtcattaaaataggaacgacagatgtcatcgtacaacaaaataacgaagggccgatgatttttggtgaatcggccaacacaaacaaaaaagaaagtacgactgtcaataaaatagccgatccaaaatactccatgccccgatggtgcccatcgggattgacacgatcgcaaaagcgaaaattacaacgccttagagcaaaggagaatcatgagaaggaggcggaaaaaatattcaatgacacacatccgcagtatccgccaccacaaaagaaatggagaccaaaggccgttgagaaaaatcaaacggccacaaagatagtaaataaaaagacaactgtgcatctctctgcaggtatggtagattgtccggctataaaggccggatcatctgcacaggacgcggaccatccgacccctgaggccgaaccatccgcactacaccaagacacctccgacgacgtaccgacgcccatgaaggaagacgacctacaaggagaagacctggtcgactacggagctacgccagaacacttagagaaatag

SEQ ID NO: 65194 - DNA, 2775 bp, Zea mays
  Clone ID: MRT4577_159454C.1
atggccggttcaaaagatagctctgaggtttccaccagcaatatcatcacaccgacatgggaagccttgccggctgaagaacaacttctgttcaaggagcgccaggagcagctgatccaagaagcaaaggcgaagttcctggctgacttcaaagtggacaggaacaacaaagtcgttcggcaacgggcgacagatctggcttcgctccgacctactacgattaccccaaatagagccggtggtcttgcaccgactgccattggtatagtgagggaagaaatagccggggcgttccgagataagctcggagtaagcatgatccctggggggcaatcatatcggaagccttatgacagccgatttgatcaccacccatacccacagggaactaggatacccgagtttgcaaagttttcgggtgaccaaggaaagagcacgcgtgagcacataggccagttcctagcacaattaggagaattggctgacaccgaagcattccgtgtgcgtttattttcattatccttaacagggactgcattcacatggtatgccacgctccctcctaattccattttgtcatggggagacttagagcaaaaatttcatgaacacttcttctctggtgattatgagctagatttagtagacttagtgaccctacgacaagaaaaggatgaatcggttagtgattatatccggagattccaggatacgagaaaccgatgctttcaaattcatctaacagataaacaactggcgggaatagcctttgatggattgcgctattatttaaaagagagattagaaggcatccagttctttactctagcacaattacatcagagagcttcggcttgtgaaaggcgaagcaaagaactagtcagaacggttcatcataatgtccctatagtagaacacaatcaaagtagttcggacgatgaaccaaagaaagtttacactgccgaaatagtttggcccgagcaggccaaatcttcggcttgctcctccttgcagtcagttcaaaaggaacgacaagagcaggttaagtttacatttaatgttggcaaatgtgataagatattcgatgaattactaaaaaatggtaacattaaaattgattatatcgttccacctgccgacgaactaaagcgtcgcgcatactgcaagtggcacaactcattttcccatgccactaatgattgtaatgtgttccgacgacaaattcaatcggccattaacgaggggcgattgaaatttcaggaggacacggagccctttccaatgaatgtgatcgactttaatggcaaaaaggtcctaattcggcccaacacagccgataagggcaaagacaaagaagtcatcatcggcaacgcactggaggccgatggaaacaacaaaatttcttgcaggaaagtgatggccgagaagactcctgatggaggggagacactgaaggtaaccatcacaaactccagcgctggggggcaggcacagacaaggggatatgcgcgagaacccatactacgcatcacggacggtccggtgtctaggcgtggacggtccgtaacatcaccggacggtccgaagcgttcatggcccggggtccattttccttacacggcggacggtccggcaacgtcgaagagccgcggcgaccacgtaccttcaaaccacgacgaccagaaataggtacgtggaaaactaacacgttcaaggcaactggtcggttggtaaaatctagcccgacctttgatcaattattgtctaaatatgtgaaaaagaaggctggctccagcgaccggccaccaaagggacctcgcttacccacccaggtgcgacggcaggttaggccgattggaccaccacaccaatcggaaaggacgggaggtcataatgttcaattaagacctaacgtacctgcatggacacctccaccaccatatccacctatgccatatccatacacatacatacctccaccatacgtcccaaatcaaatgtggggcatgccaccatacccacttgggatgccacagtaccccgcttggggggcaccccaaacatctgtattcaataggttgacacctccagtacaagaccgattgagagcccctcaatctggtccacgagcacaggcccagcaagattgccgaacaactcggccccaaaggctgactaacccggcaggggggcatgcagctaccacctccaacagtacgaaaaagggagatgtcattagaataggagcgacagatgtcgtcgtacaacaaaataacgaagggccgatgatttttggtgaatcggccaacacaaacaaaaaagaaagtacgactgtcaataaaatagccgatccaaaatactccatcccccgatggtgcccatcgggattgacacgatcgcaaaagcgaaaattacagcgcctcagagcaaaggagaatcaggagaaggaggcggaaagaatattcaatgacacgcatccgcagtatccgccaccgcaaaagagatggagaccaaaggccgttgaggaaagtcaaacggccgcaaaagacagtaaataaaacagcaactgtgcatctctctgcaggtatggtagactgtccggctataaaggccggatcatctgcacaggacgcggaccatccgacccctgaggccgaaccatccgcactacaccaagacacctccgacgacgtaccgacgcccatggaggaagacgacctgcatggagaagacctggtcgactacggagctacgccagaacacttagagaattag

SEQ ID NO: 65195 - DNA, 210 bp, Zea mays
  Clone ID: MRT4577_159455C.1
tcggtttttttttccgggacgagccggggacggcagcgtggacatcgaggtgtgcctgcctccggagaccatggcggcgctgctccacgacgccgagtttatgcactacgtgtcgagcccgtcgtatttgtagcgaagcactgtagtcgagcgggcgggcgcgagtgggccaatggtcgtgacatgccatcaggtacctgttggaatgct

SEQ ID NO: 65196 - DNA, 279 bp, Zea mays
  Clone ID: MRT4577_159456C.1
cagtatgattttgggggcaaggtaaaaaaatccggtccaccggttctaaaggcgtaagacacacaccccgaaaaggtgaattaaaaggggccttaaaaacgtctaccgaagggaccccacccgaaccacccaggaggggcggggccttcaccattggcccctcgaaaagccgcctgggaaaggccccttttagaaagagcctggtcccctgtggcgggggggggggggggttaccacgggaggcctgaccgggcccttcgggcctatttaaagggggcc

SEQ ID NO: 65197 - DNA, 2748 bp, Zea mays
  Clone ID: MRT4577_159457C.1
atggccggttcaaaggatagctctgaggtttccaccagcaatatcatcacaccgacatgggaagccttgtcggctgaagaacagctcctgttcgaggagcgccaggagcagctgatccaagaagcaaaggcgaagttcctggctgacttcaaagtggacaggaacaacaaagtcgttcggcaacgggcgacagatctggcttcgctccgacctactacgattaccccaaatagagccggtggtcttgcaccggctgccgttggtatagtgagggaagaaatagccggggcgttccgagataagctcggagtaagcatgatccctggggggcaatcatatcggaagccttatgacagccgatttgatcaccacccatacccacagggaaccaggatacccgagtttgcaaagttttcgggtgaccaaggaaagagcacgcgtgagcacataggccagttcctagcacaattaggagaattggccgacaccgaagcattccgtgtgcgtttattttcattatccttaacagggactgcattcacatggtatgccacgctccctcctaattccattttgtcatggggagacttagagcaaaaatttcatgaacatttcttctctggtgattatgagctagatttagtagacttagtgaccctacgacaagaaaaggatgaatcggttagtgattatatccggagattccaggatacgagaaaccgatgctttcaaattcatttaacagataaacaactggcgggaatagcctttgatggattgcgctattatttaaaagagagattagaaggcatccagttctttactctagcacaattacatcagagagcttcggcttgtgaaagccgaagcaaagaactagtcagaacggttcatcataatgtccctatagtagaacacaatcaaagtagttcggacgatgaaccaaagaaagtttacactgccgaaatagtttggcccgagcaggccaaatcttcggcttgctcctccttgcagtcagttcagaaggaacgacaggaggaggttaagtttacatttaatgtcggcaaatgtgataagatattcgatgaattactaaaaaatggtaacattaaaattgattatatcgttccacctgccgacgaactaaagcgtcgcgcatactgcaagtggcacaactcattttcccatgccactaatgattgtaatgtgttccgacggcaaattcaatcggccattaatgagggacgattgaaatttcaggaggacacggagcccttcccaatgaatgtgatcgactttaatggcaaaaaggtcctaattcggcccaacacagccgataagggcaaagacaaagaagtcatcatcggcaacgcacgggaggccgatggaaacaacaaaatttcttgcaggaaagtgatggccgagaagactcctgatggaggggagacactgaaggtaaccatcacaaactccagcgctggggggcaagcacagacaaggggatatgcgcgagaacccatactacgcatcgcggacggtccggtgtccaggcgcggacggtccgtaacatcaccggacggtccggagcgttccggcggacggtccggcaacgccgaagagccgcggcgaccacgtaccttcaaaccacgacgaccagaaataggtacgtggaaaactaacacgttcaaggcaactggtcggttggtaaaatctagcccgacctttgatcaattattgtctaaatatgtgaaaaagaaggctggccccagcgaccggccaccaaagggacctcgcttacccacccaggtgcgacggcaggttaggccgattggaccaccacaccaatcggaaaggacgggaggtcataatgttcaattaagacctaacatacctgcatggacacctccaccaccatatccacctatgccatattcatacacatacatacctccaccatacgtcccaaatcaaatgtggggcatgccaccatacccatttgggatgccacagtaccccgcttggggggcaccccaaacatctgtattcaataggttgacacctccagtacaagaccgattgagagcccctcaatctggtccacgagcacaggctcagcaagattgccgaacaattcggccccaaaggctgactaatccggcaggggggcatacagctacagcctccaacagtacgaaaaagggagatgtcattaaaataggaacgacagatgtcatcgtacaacaaaataacgaagggctgatgatttttggtgaatcggccgacacaaacaaaaaagaaagtacgactgtcaataaaataactgatccaaaatactccatgccccgatggtgcccatcgggattgacacgatcgcaaaagcgaaaattacagcgccttagagcaaaggagaatcaagagaaggaggcggaaaaaatattcaatgacacacatctgcagtatccgccaccacaaaagagatggagaccaaaggctgttgaggaaaatcaaacggccataaagatagaaaataaaacaacaactgtgcagctctttgcaggtatagcagacagtctggctataaagaacggaccaaccgtacagggcccggaccgtccgacccctgaggccgactcatccgcaatacaccatgacacctgcaacgacgtaccaacacccatggaggaagacgacccgcaaggagaagacctggtcgactacaaagctacgccagaacacttagaaaattag

SEQ ID NO: 65198 - DNA, 478 bp, Zea mays
  unsure (1)..(478): unsure at all n locations
  Clone ID: MRT4577_159458C.1
aaaaacgaattggtgaattgatccaaataaatgggaagcaatgggacaaggggcgatccctttttttaaaggggcgaacaaataacaaggggccaaattaaacttggggcatcaatgaattcgttaaattaagggggagaacaaagaaacgaaaacaaagggggggcgaatcaaaacacccccacccattggaatgcccccccgtgttgggatcagcgcaaccatgtttcctccccttgggtttttcctcctcctcctcctcctccctttgggcgcgggcggccggctcactgaatgttgtnggcgaaaaaggaggccacgggggccccgagtgcggggcccacggggggtgccacgggggaggagccgctggtgggggccggagccggagcctccgcggggagcgccacggtggccgaggcggcgaaaaggacggggcaggcaatcttttttatttccatccctggaggcggggggg

SEQ ID NO: 65199 - DNA, 809 bp, Zea mays
  Clone ID: MRT4577_159459C.1
cccacgcgtccgcggacgcgtgggcgggcgcgtgggcagctttgactgccctcgcttggtgctcagttcttccccctgctcctccgcctcttctcgcacctcggcgccttcttcggcaactgcgagcgagatggaggcgcaagacgactgcaagtggcggcagatcccggcgttcggcggctggaacgtgtgggacggcgacacgcccgtcacccagtacttccaggcaggggccttcttcttcgcggcgccggcggagaagggcgacgcggatctcttcaaggtgccccagttgcctgccaagccctagggttacaaaaagtgggttgttcgagtgaagggggagaaaaaaacccttgtcccggcggcggcaaggaagggacccaggaggccctgggtgagcgaccagcccaagtggaagcccaagggagctgtggacgaggacctgtacaagatctccccgcagcttctctgcaaggtgaagaagaagaagctgctgaggaatttgcttggagggtgcctgggcttgggctgcattgcctgagagtgagagatgcagagcttaataagtttcttgaaagttcgcttgcttgatgctctggagagagttgtatagttgtctacgctaatatgagattaatggaaacttactactgctaaaaaaaaaagtcctccaaggagtgaagactagggaatgcacattgttagtttaaactggacatttctgtgtgctcctctgcgagtccctgtcgtcgtgtaggttttagttgagctggcaagttggagtgacccttctcctgtgtaacgct

SEQ ID NO: 65200 - DNA, 1276 bp, Zea mays
  Clone ID: MRT4577_15945C.1
ttgggaccctcgaggccggccgggacagactctaaccctagcgctcccgacgcgccgcggagcgatggcgatggacgcggagcggcggcaggcggagctgatcgcgcagttctccgctcaggcggcggcgctttcgtccgcgccccagctcgccgcgctggtgcttgaggccacctcccacccggccctcttcgccttctccgagctcctcacccttccggccctctccaaggttcgcgcactgcccttggcgtgcgccctgctacgttactccgggacccgctgccggactagctcactggcacgcagtacgcgtcgtcactggacttgctccggctcttcgcctacggtaccctgaatgactacaagatgtaggtaattctggattccttccagcactgttgcctgaccaggtccgaaagctaaagcagctcagcgtgctaactctggcagagtcaactaagatactaccgtatgatcagctcatgcaagagttggatgtttccaacggtatcgtcagaggcaaactggatcagctgagaagatgctttgaagtacaatttgcagctggaagagatcttacacctgatcagctaaacaacatgatagagatcttatctgactggttgggaacatcagatagcctgttgcatcaaattcaggagaaaatcaagtgggctgacacaatgagtgaggtgaacaagaagcaccagaaagaatttgaagacagagtggaagaggccaaaaaaaatcaatcaaggcagacattgacttacgggggcatgacgagtttctctctgaatctggaggaataatggattttgaagaggaccgcgtccgaccaaaaaggtgataaaatgttgggcaccataggtttgttatgtagttatgtattatcctgataatttttagcttgtgtggcgtgcatctgtttggagatattgttgtctacttgtaccgaagtataatgattttagctagcattataatttataaacctatacctattaaaatgttagctaccgcctccaatccaaattgttatttgttgtgtcttttttaaatgcataactttttactatttatctagacataatctatatataggtgcatagcaaaagctatgtacctagaaatgccataacggcttacaatttggaatcagagggaatagtttttagctagcatttgtaggttctattgtgagctgccatagaaggttaatgttctgtctaaatgtactttgtacatgagctgccataagtcacctgttatt

SEQ ID NO: 65201 - DNA, 278 bp, Zea mays
  Clone ID: MRT4577_159460C.1
gcgagcatcaacgcttcatatccatgtcaacctacatgtatctacatgtacactaactggtgactgcgcaacatctatcaactggctataatctacttcagtttgtattctatgctactgttcaacgccaccattttttgctcattacatcccattgctcctatatcatacccttctgcttatatacatcttcatcaatctcctactcaagtgtcctaaatacctacaacattcaaccgtatactctttgacaagcaatagctgcattgcaacttacc

SEQ ID NO: 65202 - DNA, 1420 bp, Zea mays
  Clone ID: MRT4577_159461C.1
atccttttctactcctatctctacagtccacaccctccgggcgccggcctccactcctccattcttgtcccggaaccatgtcgatgcttctctcgcgaaggttctcctgcgccctcgcccgcgccccgtcgctcgtacggggccggccccttcctccctgcgccgcccgcaccacccctccggctcccagctccccgccccgccgcctcatgtcgtcctcctccgccgggtggcagcactcctcgcaccgtcccccgccgccgccgcctcctcctcatcccggtgctgacaaggaccagctgttcagggggctggaggcggcgctgggcaccgcgttcagctccgagccgctggcgccgccaccgcagcctatgatcctcgtcatcagcgggcccagcggtgtcggcaaggacgccgtcatcaagaggctgcaggaggagagggaagggatccatttcgttgtcaccgcgacaagcagggcgatgaggccaggtgaagttgaagggaaagactattactttgtcagtaaggaggaatttctgacgatgattgagagggaggagttgctcgagtatgctcttgtttatggggagtacaaggggatccccaaacagcagattcgtgactacatggctaaaggctgtgacattgttctgagagtggacattcaaggagcagcgacgttaagacagatacttggtgaatctgcggttttcatatttttagttgctgagagtgaagaggcacttgttaaaaggctaatccaccgtaaaacagaaacatcagatatgcttcttgtcagagtcgcaacagccagggaggaggtgaaacacatgaagaatttcgactatgtggttgtaaacgctcaagggaaacttgaggaggctgttaaacaagtggaatctatcattgatgctgagaagtctaaaattcacaagcggcatgtcaatatctaagccaaggatcatgtgatttatgcctattgtcttcatctctataaaggaaaattatctgtccaagtctactgaagcgtgatgaaatgactcaggtttcagtagccagaaagttcaatggattgctgagttacaagaatatggcatgttctgtttaagaaatttccctcaccacaaccgggccagcacaatctctgggatatatacacgactctcttgttgatttgtctcttttttcccctttgattttttagctctgcctggaggaatctggaaggctgtaccaaactagttctgggtgaatcttaagtgatgttctatccttctcaatttcgtactgaccagtgttgctgggcatgcacaagcaatcggtgcccccaaatagcaaaattgccagtttggctgcaaaatataaattgcattgtttttttccagtaacagaatagatgttactggaattcttcctc

SEQ ID NO: 65203 - DNA, 330 bp, Zea mays
  Clone ID: MRT4577_159462C.1
cggttcccacattgaatgtatcatgcggctcgctctcttaggtggtgaggatgatcaagaacagaaagcgccggatgcccacggaattcgcgcgctgagcagtcatggagctgggcacccaccgcgtctacccctaccagatcacgttcaactaccgcacgctgctggtgtccaactggacgcgcctcagcttctccgaggtggactacgcatagggcccaaccacgcacgtcgtgcccctgacaaacctggactacatcggcacgttcatcctagtgaagccctaggcccacaagccatgggcgcggctcatcacgcattgcgtcaccc

SEQ ID NO: 65204 - DNA, 502 bp, Zea mays
  Clone ID: MRT4577_159463C.1
aaaccctcatactcagggccatcatgcctacagaatattgacgtataagctgtcaaggggtggggccaaccacaagaactaaggagcgatgcagcacctcgggagaaggaacagagtgcgcctccggccagaagatgtccagcgcttcctgcagggggggggatccctcaaaaccagctgcgacgggcatatcaaggacacgatccctccaaaccaattgccagcacgtactatcttggccctgctcgtctgcaagatatggaaaggccaaatgggtacacccaatggccctactgactataatagggattacctctgctaaatggataaggcgttagccaacattagccacaaatatgatcctatcatatagctggcaaacaacgtgaggaacgtgctcaacataacactggagacctacatcactggtgccattgctttcctgaaataacatgcccctcttgtgcacctggccgcgcttccataagacaccgtcactact

SEQ ID NO: 65205 - DNA, 681 bp, Zea mays
  Clone ID: MRT4577_159464C.1
ccggccgggaggaaacccagagccggggatcatccagctgccattgctgggaccgggaagagagagagcgtcgggtgccgtcaaacgcgtgtctcgccggcgttgtcgccaagggccaagaaggcggtccgggcgccttgtcgggacttgtgtgagcttcgggcatcgccaattccacgcgtagaaccctggtgcggtgcgtatttctggccgtaattgtcgcgccgccgcgaagtcgccccactctgtgaacaactcgcttcagcctccttaccgccgtccggcgaactcgccgccgtatggggcggcagcaccactgctctggtcatgacaggatgaggaaggggagtgtggtcgtggatccagcgatggacgactctgattagagggtagaataatgtttcagccaggatccgtgtcgccgtagatctttgatcgggtggttgggagctcatgtagttcaggatccattgtgattcgttggatcaggatccgatgaccctggattgcgtaccggttcgttgtttatgtaatctgatcctgaccgttgatgtttgatccgagggatcgagtgcgatgcgtgtgatactgccgtggcagattatcataaaaccctctaggcttctcgattaacaacccgtcgtccttatacctgtaaaagaaatataaagcagttcccgc

SEQ ID NO: 65206 - DNA, 388 bp, Zea mays
  unsure (1)..(388): unsure at all n locations
  Clone ID: MRT4577_159465C.1
aattcggcacgagggcgctctcgtgctcgtgcgcgcgcgtcgcctcccaccccttcgtccgccgttgccgcccgcactctcccttccgccgtcgtgggcgcgcggcgacggggagagaggcaggtgaggtcggaagcggcggcggaggcgggcccccctccgtctactcttactcacgcacaccacggcgcccgcgagctagcgccctagcggagcggaggtcgaggcgggagaaaggcggttggggctccccggtgggcaggggggggggggggggggaggcggngatggggctcgacggtacggtctcgggggtggtgttcaggaaggtgctgccggcgagaggtgggctctgctgactctgcccttcgctgggtgcccgctccag

SEQ ID NO: 65207 - DNA, 216 bp, Zea mays
  unsure (1)..(216): unsure at all n locations
  Clone ID: MRT4577_159466C.1
ggcacgaggaagaaaaccaagcatctctatttgttccatcgtccgaacccaatgcctcgaaaagccttaaacggttaaaccccgaccacagcctgtccgagtcacccgaccgttttccatcttttctcccaaccgtgtcattcccacctaacttactttttccgatttcaacttgattcctcattccaaatagttaaccnaatgcactacccatcc

SEQ ID NO: 65208 - DNA, 331 bp, Zea mays
  Clone ID: MRT4577_159467C.1
gaggcaaagggggcccatttttaacctttttcccaaaggggttttatttcgcccaaaaaaagccggtttttagggccaaacaaaattgggccggggaactaaaacacccttttccttttttggactggacgggctttaaaaaaagggatttccaccgggggaaaggggccgggaaaccccggggcccttgtttaacccccttgggggggagcaaccgggttggttttaagaaacattcccaccccgggccggggggggagcccccccccccgggggggctttatggctggggcccaagccctgggattaaaaccgaggggggggggggaaa

SEQ ID NO: 65209 - DNA, 325 bp, Zea mays
  Clone ID: MRT4577_159468C.1
cccacacgtccaatgtatggttcgtgaatccgtgaagcgagcatgtatacattcgtgtcatgataaaagtagtgcagtcaccacgctctgtacaacctggcaggatcctgctgttccggctcatttggtgaatcgatctagcacttgctcaagagcgtgtcaattcagaagccatttgccgctgtatggatggtcccaaaccactcgcctaaatgctccctggcgtgggggttttttgcctgtttggggagaacctttcttccaccttgaatttgtcattgtggacgcggaacaagatgaggacccctggtactttgttttggtg

SEQ ID NO: 65210 - DNA, 512 bp, Zea mays
  Clone ID: MRT4577_159469C.1
aacaaatgtcacatatttaatatataataggagttcggtacaaaataactaaacaattatatcatacgaagacaacgatcctccgcaaccatagttgactgggagatgacagactagatctctcacgaactcatcacaaactcatcacgaccttcttcatgctccttatcttgtggtacatgttcttgacccaagatagtagcgcagaggtgctttctcacatccataggcggatttgcggagaagtacaacccggtgagcaagcgcccctgcatcgatcgcttattcaatgaattcgtggtagccttggcttcaagcttcccagcgtcccttctgagcgccgaggtcgaggaggtggcaaatcgtgtgcacgtcggtggaggagaactggcacctacttctttggttttccgcctcgaatcgatgttgggtcatgggtgctcagataatggggatggtgattgcagccgaggggttccatttatgcacgataggcgcagtggaagcccggg

SEQ ID NO: 65211 - DNA, 412 bp, Zea mays
  Clone ID: MRT4577_15946C.1
aaagcctaccccaatactctgagggcgcttgccaatttgatctgcctcaccgtcactggcccgtccgtggatggggccgccccactctttaactccgctgtctccctatccacctcaccatctccgactttacccaatgctgttgctggcagtggtgcctccaacactggggatatgacacggtatgagagagggtgcgtgccaccgctcaagggtgcggtgacacatgctggctactgtgacccgccccactggtgacacaccgtcctggccatgttggtcggactcgcctgaggagggcctcgcccctcacgagcggtgtgtgtggccagcaccccacgctcagggctctaactgtgtcaggatcatgcgccaacacctagatgtgcctattgtcggtggcagggactct

SEQ ID NO: 65212 - DNA, 455 bp, Zea mays
  Clone ID: MRT4577_159470C.1
cacggaccgggccagacctacgggtggacccaatactactctcacgggcgtatgccatgtccgatcaacaaccacatctcctattgggggagcatttctcagtgcagctacctttgccgagaatcgtaccacaccacctccatcagcatttgctcggaacatgtaattaagtcgtcacaccaatcctttattcttacgtacaggaacaacaatttatctcattcaaacaactagccgtggtgaaccttgctgcttactttcaagcacatccccttctaccattcaaccaacttgttaggagccctgctgccttgttactggagcaacagttgctggcatttcatgtacaagacgtggcaaacattgcttgttttttgtaacaacaacaattggtgccactttatccacaggattgtggaaacagttacgccttcttgcaacaacaacaggttgct

SEQ ID NO: 65213 - DNA, 410 bp, Zea mays
  unsure (1)..(410): unsure at all n locations
  Clone ID: MRT4577_159471C.1
gaatatgaggagtatgggatcggctgtcggcggagtaactgtataattttatatatgtagtttataataaaattataataattcacaaaatacatttatatagtgaaanntggtgctagagtactaataattatttgttggtatgccgtttcagtgtaatttctgntgtgtttgtgtttttttttgggagaggggttggtttggtgttttggttttgttttgatgttttttttttttttgttttgttttgttggttttttggcgggnnntttgcgttgtttgtgggtgtttttttttttgttttttttttttgtttttggtgtttggttttttttttttttttggttttttttttttgttttgtttttttttgtttttttttttgttttttttttttttttttttttttt

SEQ ID NO: 65214 - DNA, 461 bp, Zea mays
  Clone ID: MRT4577_159472C.1
ggggggcaaaagctttccaaaggcctcgaaaatccaaaaaacatgttcccccaggggtctaggaccaaggcattgacagggggccccaggccaaccctttttcaaccaaaacaaccccgagggaaaacgttttttccgactttccgggatcccgggcccttatttatgggaaaactcgattcaggggcccccgacccgaacaaaaaaaacctttttccaaatcccaacctttccgggggaaaccacccacccaacccccggggggttggggttttaaaattgggcagggccaattccgggccccccggggggggtttattagggccccccccgggaccccttggtggccccccggggcccccccccggcccccgtcccttaaacaaacgggtgcctggggcggatggggtaaaactgcatttgttcgaaacggcccccctcgctggaaaagggcgggcccc

SEQ ID NO: 65215 - DNA, 231 bp, Zea mays
  Clone ID: MRT4577_159473C.1
tctgctagccaacacatggctgatcaccaccggagcgcgacgcaaggcggcggaggctacgctgacctgcagcgagggggcagcatgcacggtgaggcgcaagagcaggacaagcagggcgccatgatgacggccctcaaggtcgggatggtcgcgaccttaagacggtcgatgctggtgctgtcaggcctgatcctggccggcaccgtgatcgcgctcacggaggccacc

SEQ ID NO: 65216 - DNA, 400 bp, Zea mays
  Clone ID: MRT4577_159474C.1
gctagtcatcactagtcacgttcgtccaccagagacaacaatggccatggagacgtgcttcagagcgtgggcgctgcacgcccccgctggcagcaaggacaggctcctcgtctgcaacctggggctgccgtcgaagcgggcgctcgcgccgctgtccgtgggccgagttgacactcgccggccgcggcacgtctgccaatgcaagaacgcagtggaccaagttgaggcggctgactagctgatccgggactggttggtgatggcgtaccagacgccgatgctggaggagatcctggctcctcagagcaggccgtaccgcatgatcgcgccatatatcgacgagctaatcaaaggcttccccgtcatgatcacgtgctgcctggataacacggcctacagt

SEQ ID NO: 65217 - DNA, 558 bp, Zea mays
  Clone ID: MRT4577_159475C.1
cattggtacctcgaggcggcgggatcgatctcagctcatcgaatcgccttctcttccgcacccggccgtctctctcttctctctgtctctcttctcggagccgagtcgacctcgcatgaacatgcaagcgcgacaaactggtgcctctacgagaccgcggatctgctgcctggtctgcgtgcaacatcctgttgatgccatcttgcgagatgctgataatcttcatctctctacgtgagcgagctagtgctgctagagtccggcgacttgctcagttcctccgtaggcgcgctcgcctacgacgtctggatcatcgccaagctcggggggtcctccgcgttcttcatgaactcctgggacgactatgacggatacatgttggtgcacatcctgcagcagaacaacgtgcatcgggacgggtagcctgaatgacaagcacgagcgagacgtcggtggacgttgtgaccctcaagcacgacggagagcgcgagtgcatgctctatagaaacccaagcagctgacatgctgctgacagatgcggagcttgagctgcgcctg

SEQ ID NO: 65218 - DNA, 392 bp, Zea mays
  Clone ID: MRT4577_159476C.1
aaggtacagtgcctagaggtggctcttgacactgtgccagctcgaccacctgtagctgcctacaacacaatacgacatgatgctcaagatactgctctacccgctggtaacgacacccttgaggatcctgacgaattcacgcggcttgctcgactgatcaagcaacccgaacaccacaacgactctgttatcatacaatccagcagcagaggatgaatgggctgtaacacattggccatttcaaatacacgccgaggcaccaaagaaagtgccacagagaatgatagctgaagctcaacgattgctcgacatgttgaacagacaaaagcaaaaattgcacgacgtccgttaatcttagagatagaatgaagaatctatacatctgaaggagc

SEQ ID NO: 65219 - DNA, 156 bp, Zea mays
  Clone ID: MRT4577_159477C.1
actttctcttctcaaccacatcaaaagcaataaaatacgtaacccccccgcttccttcgcggagaaggatcttcacaaagaagaccacttctttctcaaaccccctaaccttagtgcttcctttcctataaaaaatacgcacactcctatacttat

SEQ ID NO: 65220 - DNA, 346 bp, Zea mays
  Clone ID: MRT4577_159478C.1
accggcggggagtcccacgcgcgagccacaccttcgcgacactgccatgtgcgacaggacaaacagagacacgagcagcaacagacggagccatgagcggcaacctcatccacacttccagggctaggacgagctccatcaaccacaacagacctaagcgaacatgaagcatggccagtagataacacaacggcaacaatgtcatagcccggagcggcaccagactacaaggcgcatctgtggcttctatagcagtagctcaaatctaaaaaattgtcatgaattcctaatgcagcagtgcagccctttgacaatggcttttctccaatcacgtttgatacaacca

SEQ ID NO: 65221 - DNA, 275 bp, Zea mays
  Clone ID: MRT4577_159479C.1
tttcatgcgtacgcagacagattggcgtaaacatggcagacaaaacctaatcccatcacattgcaatattaacaaacacgtgcaactaaacaaacagattaaagcaggcacttgaagaaaacggaacctaagcatagagcaagggaaaatactatcgacgactctactgttgctaatgatggcaatacatagatcaaggcagacaaaataagtcctaagtcctaaatagctccatatttacaagacatcttgcatttttaaggacacaactactg

SEQ ID NO: 65222 - DNA, 1683 bp, Zea mays
  unsure (1)..(1683): unsure at all n locations
  Clone ID: MRT4577_15947C.1
cattgggtacctctcgaggggggccggagcgaaaggacgcaagaaccccaggaggcaccgtctccaaagtccaaaccctaaccctagcgcccccaactcgtcgccgggagatggccatggacgcggagcggcggcaagcggagctgatcgcgcagttctcctctcaggcggtggctctttcgtccgcgcagcagctcgccgctctggtgctcgaggccacctcccacccggccctcttcgccttctccgagctcctcgccctcccggccctctccatgctcgctggcactcagtactcgtcttcactggacttgctccggctcttcgcctatggcaccttgaaggactataagaataattcgggatcccttccagcattgttgcctgatcaggtccgaaagctaaagcaactcagtgtgctaactctggcagagtcaactaagatactaccatatgatcagctcatgcaagagttggatgtttccaacgtaagagaactcgaagattttctaatcaatgagtggcatgtattcaggtatcgtcagaggcaaactggatcagctggagaagatgctttgaaagtnacaattttgncagccgggaaagaagcntcttaacaacccggatccaggctaaaacaaacatggattagcagaatcttaaactggaaatgggttgggggaaacatccaggataagccccgttgggcatccaaattccaggggggaaaatccaaatgggggtggnacacaatggagtggatggggccaaaaaatcaatcaaggcagacattgacttacgggggcatgacgagtttctctctgaatctggaggaataatggattttgaagaggaccgcgtccgaccaaaaaggaggaggcaaccaccggcgtagtttcaattagcccttaccaatctctcccagaatgggacctgctgataccttgattgagacattttgacgccggagttgagtaaactttgtacatctgtcgtgtgatgcctccactgtagcgagtctgtttattttgccttctggtcttggtggggatgccaaaggccaaaccaagttggaatcctgcatttatttggtagtatagcatttgtaggttctattgtgagctgccatagaagtttaatgttttgtctaaatgttactttgtacatgagctgccataagtcacctgttattaaccctcttcgtccttatagaattgtgttctattgtgaaaactactcctataatgctgtgttattttgacacactgatattgcaggaggaggcaaccaccggcgtagtttcaattagcccttaccaatctctcccagaatgggacctgctgataccttgattgagacattttgacgccggagttgagtaaactttgtacatctgtcgtgtgatgcctccactgtagcgagtctgtttattttgccttctggtcttggtggggacgtacaaggccaaacctaggcgttatgttgcatttatttggtagtaaatggcccatggaagaaataacgttgttatgattatggcactgggttattctcaagtgtactgaacgataacagaagcacctctgttaaatgatgattgactcgaggcttgctgacttgctgctctagaggagttagcatagctgctcaggtatacaaactgccatcatttactctgcatgc

SEQ ID NO: 65223 - DNA, 419 bp, Zea mays
  Clone ID: MRT4577_159480C.1
aaaaaaaaagaaacggggccccttccgaattcccaaccctttacataaagggggataccaaacccaaagggcccctccaaggaacccagggcccccaaaaaaaggacaaaaaggggccgggggtcccaattttttcccaacgggaggccttttttaaaccccggccgaaccaatttggacaacctttttttcccatggcctccgccccatccggccctcaaaattccaacggccttaagggggggcctggggagccatttccctttgggccataaaaccccaaaggggggggggggtttggggccccccccggccagggggggggtgcccagcccccccttttgggggcccagttggccccaagccttggggcccttgcccccgtccaccttgagcgccccccccccggcggggcgggg

SEQ ID NO: 65224 - DNA, 837 bp, Zea mays
  Clone ID: MRT4577_159481C.1
gactgtgcaccatctcccctgcttgaccttcacacagcgcacacgcccctgctaagctccaactgcgcgccgccggttgtccctcggctcactccctccagcagtcatggacgtgcgcccctcgagctgtccggcgagtcgcgcccaggccgcgtcgagctcctcctcgggtcaccgtctccgagctcgaccccaagctgcagtgcgtcctatcccatctcttagccgagtccctccattaatcggcgtccgtcctcacttctggccatgggacacgcgcccacctcgtcgttcccttggctgtcgcagtgttcttagtcatcccggctccctcttgtccctggtccggctaaggaagcccctggtgtcgtcttcctctgttcctatctccagtctgtagccggccctagcactgcctctgctggcgcccaaatccctagatgccgccctctcgtctctgcatccgtgagcatggtgccgcgtctctatttcccctttagatcgtgccctctgcgacctcgtcggctgcacctccaccgttgggtcccgagtgtcccaccctgctcgtttcctggagctcgcctggcctctagctcgccttcagcatggtcatcgcaccctccctgctcgctgaagacagtgaagtcctagaaccacgcatacatggtgttcgatgaatggttcataccggatagccttttcgaaatcatggctccgagtcgattcagacatagtaagctgatccatttgtttaccgttagtatgaggaatgattagatacattggattaaattactggtcataatgataggcaatatatgctatttttatttaaaa

SEQ ID NO: 65225 - DNA, 422 bp, Zea mays
  Clone ID: MRT4577_159482C.1
cccagcgtccgcttctgttttgggtcattgattcccttcaggcactgaatagaaggaaacctgtccctcaaaaaaaaaaaaacagaggaaatcttcagcatttctttgctccaatagtgaggtaaataaaagaataaatgggaggtattaacatcaagtctgcaacggtgatacttcatgttcatagaaatgcttaggctattccattgaaattttgtggtgtatacttacattcctacaaaactaagtcgagtatatgatgtttgggggggaaataatggcttttcagcaccctcttgttcatgtttaatgtatattcatcgagagaaccgatttggtggtaactctgttttcactgcatgtgcatgctggatgattatagatccttgtggcttatttaggtcacgatctatatctcttat

SEQ ID NO: 65226 - DNA, 442 bp, Zea mays
  Clone ID: MRT4577_159483C.1
acaggtccggcgagtcaaaccataggccaacagctgacactcgtgctggggatagccaagactctggcaaaccttctccctacttagcacaacatttttcatcaacaactgctacactgaaccctgtgttattacagacacaactactaccatcaaccagctgctctgctacttagcagcaacattcttcatttaaccaatggcgactgaaccccttgcttattcagcagcaaatactactaccatttggcagctagctcaacagccccgttcttttgacacacacatgcttcgtctaccacagtgtggtaacccgaactttacaatgcacagtgctgcctttgtcaactgttgacaacccacagctttacacaacaatattggcggccattttaattgttattagtgaattaatatgaagttttgctgatgtatgggctct

SEQ ID NO: 65227 - DNA, 378 bp, Zea mays
  Clone ID: MRT4577_159484C.1
actttgggctgattttgtgcttgttctaaggggtcgtaggaacctaagttcgcccaagagggcgtcagtgttcaaggacgctcttcctcttacgcgtgagttcgaagtctaaagtaaagccgtagaacaaggagttacgtctttccgcgcaaccctacaagatcataatttcaccagggtccgcccggccgcgctcgcactgaagggaaccgaacgcgaccaaccccttcctcacctcaacagaggggccccaactcttcttaacatctcctaacttatattcaattgaataagtttccaacacgacactccataccgttgcactcgcgcaacactacgaacaaaacccgtcaccacgcacctcaaggcccacgaatc

SEQ ID NO: 65228 - DNA, 401 bp, Zea mays
  Clone ID: MRT4577_159485C.1
aaaaaaaaaccgcccccctgcctttttttttttttcccttcaaacggggaaaaacccccatttgggggacattacattggggggcccctcggcgggttttttttttgaacaaaaacaatttgcttaaaaaaggcccgattaattggaatccaattttttgttccccccatataaaatggttatcgcatgcggggccccccggggaccacctacctataaaccccctcagcgcctgaggtgaaccccccgtcaccccggggcatgcatacatgcatgcctgcctgcatggttcattcatttcaaggggcttctcttcaaaaaggggggggggggcaggaccccttgcagttttcggtggggcgcgggtttttttccttggcccaagtgacccttcaggcctt

SEQ ID NO: 65229 - DNA, 155 bp, Zea mays
  Clone ID: MRT4577_159486C.1
acagcctcaatgtgcacagggacgcaaacaatattatccgcagaacagctggtaaacggccaccagagacaccgctgatcttgacagatgggggaggctgcgttatttactacacgtcacactacaaaggggggaaaaatggctcgcagacaccc

SEQ ID NO: 65230 - DNA, 406 bp, Zea mays
  Clone ID: MRT4577_159487C.1
gaagattacggaaaatgcttcaccatgaagaagaaacaatagacagccgagaaactattgttcaagctttgggagatttacaagcccaagccgaagttgctctatgcttctgctgcgtcaaacgttaactgtaagtatcttggttccctccttttccgacatgtttttgatttctggaagcagaacactgcactgttctgaattgtttttgttggcaggcatctttgaattagtttgctgatgggtatggcttcggcgattatagaagggtgtcaggcatgcatgctgacccgctgatgtgaaaagttccggcaggcagagattgaattttagaagctattctcatgctagtcttttttttttcttttctgtcagatactatgatcaggctgtagatgtcagcgta

SEQ ID NO: 65231 - DNA, 922 bp, Zea mays
  Clone ID: MRT4577_159488C.1
tttggggaattccaagcagagccagcacagccacagcccacagcccacagcccgagaggagaagcgagcgcgcgatccagttggtggccgcccccgcccgcacaccatggcgacgccgtggtggtggccgtcgctgctgccggcgtggctgagctccagcgcgctatggttcctcgtcgccaacgcggtcgtcgccgcggtcgccatcttgtccaggcgcccgccgctgccgctgccgctgccgctgccgtcgccccgccgccgccgccgcagcagcggcgccgccgccgcgctcacgcggagggcctcgtctgcgctgctgcagcgcctccgctccttctccatcttcgccgtcccctccgcctgcttcaacaccaccacgccgtttccgcaccccgacgccgcccaaggaacagaaactgaggcgccggccaggacaccggcgtcccctctctcgtcgctgggccgcgcgccggcggcagacgccgacgaggaggatagcgagcccggcgggatgagcatggacgaggcctacgcgctggcgctggaggcgcgccgccggccggaccgggagagggaggaggcgcccaggaggtccgaggtggacgccaagcccgaggagttcatccgcggcttcgaggaccaccaacgccagcagcgcctcaactccatcttcaactacacccagatgctcaagcagcgcgccgccgccgcccgccgccagcgccagccggatgccccgccagatcagctttgagtcacgtgttcggttcgttcgttcctgatattggtcagcgttttcagggagaccaaaatcagttttgagttgctgtacatagcctgctttcaacagattgtttgtatatagtcaccagatatgatttacagataaagtacgacataaagatatatcttgatcgtt

SEQ ID NO: 65232 - DNA, 747 bp, Zea mays
  Clone ID: MRT4577_159489C.1
gcccccgcccgcacaccatggcgacgccgtggtggtggccgtcgctgctgccggcgtggctgagctccagcgcgctatggttcctcgtcgccaacgcggtcgtcgccgcggtggccgtcctgtccaggcgcccgccgctgccgctgccgtcgccccgccgccgccgccgcagcagcggcgccgccgccgcgctcacgcggagggcctcgtctgcgctgctgcagcgcctccactccttctccatcttcgccgtcccctccgcctgcttcaacaccaccacgccgtttccgcaccccgacgccgtccaagaaacagaaacagaggcggcggccaggacaccggcgacgaccgacccgtcgccgcgcgcgctcccgccgtctcctctctcgtcgctgggccgcgcgccggcggcagacgccgacgaggaggatggcgagcccagcgggatgagcatggacgaggcctacgcgctggcgctggaggcgcgccgccggccggaccgggagagggaggaggtggccaggaggtccgaggtggacgccaagcccgaggagttcatccgcggcttcgaggaccaccaacgccagcagcgcctcaactccatcttcaactacacccagatgctcaagcagcgcgccgccgtcgcccgccgccagcgccagccggatgccccgccagatcagctttgagtcacgtgttcgggtcgttcggcctgagattgggcagcggtttcagggagaccaaaaa

SEQ ID NO: 65233 - DNA, 361 bp, Zea mays
  Clone ID: MRT4577_15948C.1
cagcaggggggaatgagagattaagggaacgaaagggccctcgctcactaattctgccttaatgggttccatgaccagactactataccctacaggggacatccccggaagaagaaaaaaaaaaaccccccattttgtggcatgcgtttgatccgatgcagccgtaccacgacgctggaaatcgaaaaccagctggggggattcgatcgaccgatgagcacaagcccacagggatgactggtgacacgacccccgtgggggccggcagcatgcaaataataggccaagcgccccgagcggggttttgccctgtccggccttgaagtaaaaaacgagcatggaaagcatggcgatgcgggcg

SEQ ID NO: 65234 - DNA, 412 bp, Zea mays
  unsure (1)..(412): unsure at all n locations
  Clone ID: MRT4577_159490C.1
taacggccgccgtgtgctgggattacgccctatgacgatgtggcaggagggagggattagcttttttttttttttgtgttatttattaccaggatggttatgtgagaaatgaattgaatgaactattgaaaagtggaaaggaagaatatatagggaaaaggatgtttggaaaagggagaaaaataagaaagaaaaggggggggggggggtttttttattataagggagaattgcggaaattgggggatgttataggggattagagttgggtataaggttggggtaaaatggtaatgggtgttntttgtgtgaaattggtatgggataaaaattgnaaaaaaaatatgaggtgggaggataaagagtaaagtttggggtgtttaatgagtgagttaaatgaaattaattgggt

SEQ ID NO: 65235 - DNA, 156 bp, Zea mays
  Clone ID: MRT4577_159491C.1
atgtcagcgtatgcgtacacaagcacatagatcaggccaagagccagcaggtgaacgacgagttcgccaagctctagcaggctcatgacaggcgccacttgaaaaaaaggaaccttgacaaccagttgataaggctcaaggccaaacttttgctcc

SEQ ID NO: 65236 - DNA, 1208 bp, Zea mays
  Clone ID: MRT4577_159492C.1
ccgtgtaagacccgcgggtgagagctccgaggagaagaagaccggccgggagcaggagggcggggccgcagagaagaagcccgaagcagagtcaaagaagaaggacggcggtgacagcaagggagctgagacgattgccaagggctcagcagagccggcaaaggaagctgccgccgtccccgcccccgcccccgccccccggacgcgtgggtgacaaggccgaggcaaagaagagcgagaagcccaaggacgccggtaaggcggcggagccagccgccgtgacgacggagaggtcgctgcctgcgccgccggcgccggcgccaatgcccgcgtacgagcaggagttccgccacccatactacgccccgcagccggtggtgagctaccacgcgtcgcagccgagctcgagcgtgtcgtacacgtacttcgcgccgcagacgcagccggcgtactccatgcaacaggcacagccgcacccacaggccgcggtctcctactccgtgcagccgacaccgccggtgtactactccgcgcaggagctgcagccgcagcagccggcgaagcagtggtcgccgtcgtacctgtacatgccgtacccgcacgcgcaggcggcgccggagccttactaccagcagcaggactactacagcccgcccgggacgcacgcgtcgccgatgcacgacccgtaccgcatcttcgacgacgagaaccccaactcctgcagcgtcatgtgagaggcgcgagctggtcggcgcggcccggacgccgccggccgccgtgggcagcgagtagtttgggggggaggcggcgccgcgcgctaccgcaacatcagagagagacgtctctgtggctgtataggtagagtagcctgttactgtttaccacccctcttccttccatcctatttccacctagtatagaggtcaaacctcttctccgtgtagtgacggaaccttttcttaatttccatctttttactgttctgaatcaagtgattagaaagaacatgtaaattgtaacgagatacgttcatgttcaccgcgtctgtatatgccggctactagaactttgaatgagctaccacagatacatacagtatcagtatatataacagattatacatgtacgaactgatatagatttctactgatagagaaaggcaaaggcacattaacacctttgctgattttgacccaaaaaaaaaagag

SEQ ID NO: 65237 - DNA, 444 bp, Zea mays
  Clone ID: MRT4577_159493C.1
gtaaaaaaaaacccattttttttaaaatcctttcaagggaacgaaaaacacaggggggtcctttgggttccgaggtacaaaaaaaaccggggttttccgacactaagggaaaaaaaaggggggggggctaaaaccaaacggaaggggggaacccggggggaagaaaaactggggaaaccggtaaaaaatagccaatgggttttcttccaatggggaggaggaaaaagaccaacctttatggggcctgggtggaaattacaaaaccgggcttggaccaaatgggggtttggaggaccccccccccacccgggctatggaaccttggggggaagggcaagttaaccgggctggggaaccccgaggaaaaggacgggtttttttgggggggggggggccacctttggggggtgggaaaaaacgggggcagggtggcccgtctctggg

SEQ ID NO: 65238 - DNA, 2054 bp, Zea mays
  unsure (1)..(2054): unsure at all n locations
  Clone ID: MRT4577_159494C.1
cccggttttcattggtgttttggctgtcgactgcgaactggggggggggcaggatagactgctcagggctgccacctttgccttcatccctctcctgctactggtctgcgtccagagcgcggctcctgttctcggcttcacaaggagcgagttccctgaagatttcgtcttcggatccgctacctcggcttatcagtatgagggtgctgttggtgaggatggtaggagcccaagcatctgggacaccttcactcacgcagggagaatgccggacaaaagcaatggtgatgtagccgccgacgggtacaacaagtacaaggacgatgttaagctcataatttacaataactttctagggtctcgattaaactttcttaaattaaatacacagatggaagaggtgctattaatccaaaagggatagagtactataacaatctcatagacgagctagttacacatggtgtccaagtccatgttatgatttaccagctggatctccctcagatcctggaagacgagtatggtggatggttaagtccaatggttgtggaggatttcacggcatatgcagatgtgtgcttcagggagttcggtgacagggtttcacactggaccactctggatgaagtcaatgtggctgcaattgggtcctatgatattggacaaattgcaccgggaagatgttctgatccatttggaacaaacccacgcgtccgggggaactcaagtgtggagccatatatagcagctcataacatgctactggcacatgcatcagctaccagactgtacagagaaaaataccaagctgtgcaaaaaggagttgttggtataaatatatatacaatgtggtcatacccactaacaaactccactgccgatttagaagcaactcaaagatttctggacttctattccggctggatactagaaccattggtgtttggagattatccaagcgtaatgaagaagaatgttggttctcgccttccgtcattcagtaaagttcaatctgaagccattcgtggcactctagatttcattggaataaaccactattattctttctatgtgaacgaccgccctttagaaaaaggcatccgtgacttctcactggacattgctgctgactatagaggttcgagaactgatccgccaataggtcaggtaaggtttttcatcaacaatcttcagaatttcgacatgatagatacatcctttttattttactgcagcatgccccaacatctattcccgctgatcccagaggattgcaacttttggtagagtacctgagtgaagcctatgggaaccttcccatctatatccaagagacaggttatgcaaccacaaacggcagcctccatgatactgacagggttgattacatgaagacccacataagcagcacattggctgctctaaggaatggggccaatgtgaaaggctacttcgcgtggtgcttcctggacgtcttcgagtacctgtcagggttcatgtcgcaatacggcctgtaccgtgttgatttcgaggacgaggcgctaccaaggcaagcaaggctatctgctcgctggtattctaaattcctagagaacaaggggatccatgtagaggacgagcttgatgatgcgggatcacacgttgagcaataagttttctacagcgacacattgatctgtacatcctctagcgagactattgaatactactgtgcgttgcaataagaacacttatattaaaaaaacaaattccataaaaaaaaaataataatataaaaaaatattggggtgaaataaattagctgcgaatcagtttttctgctggtntcgaggtgctggtttcttactatgcctgtcaactaaccttttgtctgatctctattttttttattgaaaaaccctggcatctaaatatgaaagttgctgtcttaattttaacatgtagtttgttgggctgacgtactgtcacttctgagatcagcatgctgaatttttcagcatatgggaaaggagcattcttgatctggttcttgctttgatcttaaccatcta

SEQ ID NO: 65239 - DNA, 590 bp, Zea mays
  unsure (1)..(590): unsure at all n locations
  Clone ID: MRT4577_159495C.1
gccgccgccgcggnaacgctcccgatggagctggatccgtcggaggccttagttgccgctgcggtggaggcgaagggcgaggaggctgccaacgggaggagggagttcgtgatggggaggaacgtacacacctcctgcttcgccgtgaaggagcccgacgcggacgacgaggaaaccggcgagcgggaggcaaccatggctagcgttctcgcgctctaccgccgctcgctcgtcgaacgcaccaagcaccacctcggtatgttgcgccttggacgctccagccccatcgattttgatttccttctcttgcccctcgatctggcccgtggtggcctgatcccgtcacacaccagtgcgccagacgatttagccgcttgcgggttgcgacattattagtgtcgtcttgtggtgtgccccgggccccctgtacatttggtattggtactctactgggctaaaatgccgtgctcgtttccataaatacgctcgccgttttctcaaaataaataaataataaatgcactcgctggcggataaatactggcgttttttattaattatgcaccaattttatgtacgagtaactcaaa

SEQ ID NO: 65240 - DNA, 669 bp, Zea mays
  Clone ID: MRT4577_159496C.1
ggcttgaaaactcgcataaatgctcagttggtagcagttgcgaaggaacacgctgcctatggtgatactgtagaatcagtggctggtcagggagtcaaactgctgaatatattgagaaaatattgtgaagccttttcttccatggtggaaggcaaaaacagggtgtctacagataaactttctggtggagcaaggatacactacatttttcagtcaatatttgtcaagagtctggagcaggaaattgacccttgcaagagtattagtgatgaagatatccgcacgaccatccagaattctgggggtccaaaaggggctatgtttctgcccgaggtaccatttgagattcttgtgcggaagcagataggtcgcctacttgacccaagtcttcagtgtgcccagtttatctatgatgaattaatcaaaattagccacagttgcttaatcagcgaacttcagaaatttccagctcttaaaaagcggctgagtgaagtcgtttgcagtttcttgagagatggtcttcgacctgcagaaacaatgataacccatatcatcgaaatggagatggattatataaatacttcgcacccaagctttgttggaggcaccaagggttgttgaacttgcaaagcatgaagttctacctcccaaaacatcagcttcactatc

SEQ ID NO: 65241 - DNA, 2252 bp, Zea mays
  Clone ID: MRT4577_159497C.1
tcgaggccggccgggctttgccttcatccctctcctgctactggtctgcgtccagagcgcggctcctgttctcggcttcacaaggagcgagttccctgaagatttcgtcttcggatccgctacctcggcttatcagtatgagggtgctgttggtgaggatggtaggagcccaagcatctgggacaccttcactcacgcagggagaatgccggacaaaagcaatggtgatgtagccgccgacgggtacaacaagtacaaggacgatgttaagctcataattgacaataacctggaggcatataggttctctatctcctggtccagacttataccaaatggaagaggtgctattaatccaaaagggatagagtactataacaatctcatagacgagctagttacacatggtgtccaagtccatgttatgatttaccagctggatctccctcagatcctggaagacgagtatggtggatggttaagtccaatggttgtcaattctcggaatttctcagaagattggagacgggcgttctcttttcatttggagttttggactagtcgaactgacgaactggcaccgctttcacgacaggcctggctgccaacttcggcttcttccctctgcttttacaggtctgggtccagagcgcgactcctgctttcggcttcctacggagcgatatccctgagaatgtcgtcttcggaaccactgcctgggcccatgaggctgcgaatgatcccatcagggagtcccatgcatggattaaaagggctgtcttgcggctcatgacaggtaactaattctttattttgaaatgaattgctgctccagtatgagggtgctgttggtgaggatggtaggagcccaagcatctgggacaccttcactcacaggcgctgactacgcaagcaaggctatctgctcgctggtattctaaattcctagagaacaaggggatccatgtagaggacgagcttgatgatgcgggatcacacgttgagcaataagttttctacagcgacacattgatctgtacatcctctagcgagactattgaatactactgagggaattttcccaaaatgaacatatcttgatcatccatgctaccacaaaacgcagggaggatttcacggcatatgcagatgtgtgcttcagggagttcggtgacagggtttcacactggaccactctggatgaagtcaatgtggctgcaattgggtcctatgataatggacaaattgcaccgggaagatgttctgatccatttggaacaaaaaaatgtacagtggggaactcaagtgtggagccatatatagcagctcataacatgctactggcacatgcatcagctaccagactgtacagagaaaaataccaagctgtgcaaaaaggagttgttggtataaatatatatacaatgtggtcatacccactaacaaactccactgccgatttagaagcaactcaaagatttctggacttctattccggctggatactagaaccattggtgtttggagattatccaagcgtaatgaagaagaatgttggttctcgccttccgtcattcagtaaagttcaatctgaagccattcgtggcactctagatttcattggaataaaccactattattctttctatgtgaacgaccgccctttagaaaaaggcatccgtgacttctcactggacattgctgctgactatagagcatgccccaacatctattcccgctgatcccagaggattgcaacttttggtagagtacctgagtgaagcctatgggaaccttcccatctatatccaagagacaggttatgcaaccacaaacggcagcctccatgatactgacagggttgattacatgaagacccacataagcagcacattggctgctctaaggaatggggctaatgtgaaaggctacttcgcgtggtgcttcctggacgtcttcgagtacctgtcagggttcatgtcgcaatacggcctgtaccgtgttgatttcgaggacgaggcgctaccaaggcaagcaaggctatctgctcgctggtattctaaattcctagagaacaaggggatccatgtagaggacgagcttgatgatgcgggatcacacgttgagcaataagttttctacagcgacacattgatctgtacatcctctagcgagactattgaatactactgtgcgttgcaataagaacacttatattaaaaaaaagaaaaaaaaaaaaaaaaaagcggcaa

SEQ ID NO: 65242 - DNA, 188 bp, Zea mays
  Clone ID: MRT4577_159498C.1
gtggaagaacctacttatgtcagggggcgggagattcctactcctcctcctacaggagattaacttgtagaattgttgtccaacgtatggtgtttggccactggtgatatctcgaaccgatcactgaggcttagtgcctgagtttcctcctactgagaggacaactgggacgctgcgccctggacaaa

SEQ ID NO: 65243 - DNA, 1258 bp, Zea mays
  unsure (1)..(1258): unsure at all n locations
  Clone ID: MRT4577_159499C.1
ctgttctcggcttcacaggagcgagtggccctgaagatttcgtcttcggatccgctacctcggcttatcagtatgagggtgctgttggtgaggatggtaggagcccaagcatctgggacaccttcactcacgcagggagaatgccggacaaaagcaatggtgatgtanccgccgacgggggcaacaagtacaagatggaagaggtgctattaatccaaaagggatagagtactataacaatctcatagacgagctagttacacatggtgtccaagtccatgttatgatttaccagctggatctccctcagatcctggaagacgagtatggtggatggttaagtccaatggttgtggaggatttcacggcatatgcagatgtgtgcttcagggagttcggtgacagggtttcacactggaccactctggatgaagtcaatgtggctgcaattgggtcctatgatattggacaaattgcaccgggaagatgttctgatccatttggaacaaaaaaatgtacagtggggaactcaagtgtggagccatatatagcagctcataacatgctactggcacatgcatcagctaccagactgtacagagaaaaataccaagctgtgcaaaaaggagttgttggtataaatatatatacaatgtggtcatacccactaacaaactccactgccgatttagaagcaactcaaagatttctggacttctattccggctggatactagaaccattggtgtttggagattatccaagcgtaatgaagaagaataaaaaggcatccgtgacttctcactggacattgctgctgactatagagcatgccccaacatctattcccgctgatcccagaggattgcaacttttggtagagtccctgagtgaagcctatgggaaccttcccatctatatggcctacagaagttatgcaaccacaaacggcagcctccatgatactgacagggttgattacatgaagacccacataagcagcacattggctgctctaaggaatggggctaatgtgaaaggctacttcgcgtggtgcttcctggacgtcttcgagtacctgtcagggttcatgtcgcaatacggcctgtaccgtgttgatttcgaggacgaggcgctaccaaggcaagcaaggctatctgctcgctgggcctgttcgtttttcacggattcaagccctggaatagttcctagccggattacttctctaatttatataaattttgatgagctggaatga

SEQ ID NO: 65244 - DNA, 176 bp, Zea mays
  Clone ID: MRT4577_15949C.1
cttctggcagggaaacgtgtttatagatcactaaaacaagtactactactactagtaataagagtacgtttggtcgttcatttcatatcactgtgcacttggttgcctattacacccaattcttgggtgatgcctcaaatcaaatgcctttaacgtcaacttggaggacagtaagt

SEQ ID NO: 65245 - DNA, 1735 bp, Zea mays
  Clone ID: MRT4577_1594C.1
actggagcagccgagctcgagctgctgtgcggctggctgtttcccccctccagtccagtccagcctccaccacccaccacctcctcctgctcgctcattcactcagatttgcactcggccggcatggcatttatcccccacctacaatctcaggcaatccgccattactgagagccccaatcgcacatcgggtcgtggcaagctcgggacgcggaagcgccaccgctcccctgtccgtctccgtccacctcctgtgccggctgcctgcctgcctgcctaccacatcaatcagtgtgaccatccagcacattcccatgacgggccacgccagcctgctgctgctgctgctgccggcgctcgccgccgtccttctctgctgccccctcgcgcaatgcgggcagcagaactacacctccatgttcagcttcggcgactcgctcaccgacaccggcaacctgctcgtgtccagcccgctctccaaccacatcgtcggccgctacccctacggcatcacctacttccaccgccccaccggccgctgctccgacggccgcctcgtcgtcgacttcctagcgcaagcgttcggcctgccgctgctgcagccgtacctgcagtcccgcggcaaggacctgcgccggggcgtcaacttcgccgtcggcggcgccaccgccatggatccgcccttcttccaggagatcggcgcgtccgacaagctctggaccaacttgtccctcagcgtccagctcggctggttcgagcagctcaagccgtcgctctgcagctcaccgaaagagtgcaaggagtacttcagcaagtccctcttcctggtcggagagatcggggggaacgactacaactacgccttcttcaagggcaagaccctggacgacgccaagacctacgtccccacggtcgccgccgcggtcaccgatgccaccgagaggctgatcaaggccggcgccacgcacctggtggtgccggggaacctgcccatgggctgctcgtcggcgtacctgaccctgcacccgggccgcaacggcagcgactacgacgccgccggttgcctcaggacgtacaacgacttcgcgcagcaccacaacgctgtgctccagcggaaactgcgggcgctccgggcgaagtacccgcaggcgaggatcatgtacgccgactactacggcgccgccatgtccttcgccaagaaccccaagcagttcgggttcacgcaggggccgctgcggacgtgctgcggcggcggcgggccgtacaacttcaacccgaaggcgagctgcggcgtgcgggggtccagcgtgtgcgcggacccgtcggcgtacgccaactgggacggcgtgcacctgacggaggccgcctaccacgccatcgccgacagcatcctcaacgggccctacaccagccccaggctcctctgatccgaacgccggtggttgaagctcgtcgtccgtccatcggcagccgcagctcatacaactgtagtggcgccaacaatgtggctggcctgtgagcttgctagctgtggtaattaaacgaatgctgtacgtagtactccctactactagtgtgagagtgtgacggtgttgggactggaactggaactggaagggtaactcgtaactaaaaatggtggagttttgcgtccgttcgtttcttggcatgatgtgactttggcgtggggctgtgtcgtggatcgttaaggccttgttcgtttacgtcggattgc

SEQ ID NO: 65246 - DNA, 1572 bp, Zea mays
  Clone ID: MRT4577_159500C.1
cattgggtacctcgaggccggccggggtcgaactgacgaactggcagagcgttcaggatagacatggctgccacctttgccttcatccctctcctgctactggtctgcgtccagagcgcggctcctgttctcggcttcacaaggagcgagttccctgaagatttcgtcttcggatccgctacctcggcttatcagtatgagggtgctgttggtgaggatggtaggagcccaagcatctgggacaccttcactcacgcagggagaatgccggacaaaagcaatggtgatgtagccgccgacgggtacaacaagtacaaggacgatgttaagctcataattgacaataacctggaggcatataggttctctatctcctggtccagacttataccaaatggaagaggtgctattaatccaaaagggatagagtactataacaatctcatagacgagctagttacacatggtgtccaagtccatgttatgatttaccagctggatctccctcagatcctggaagacgagtatggtggatggttaagtccaatggttgtggaggatttcacggcatatgcagatgtgtgcttcagggagttcggtgacagggtttcacactggaccactctggatgaagtcaatgtggctgcaattgggtcctatgataatggacaaattgcaccgggaagatgttctgatccatttggaacaaaaaaatgtacagtggggaactcaagtgtggagccatatatagcagctcataacatgctactggcacatgcatcagctaccagactgtacagagaaaaataccaagctgtgcaaaaaggagttgttggtataaatatatatacaatgtggtcatacccactaacaaactccactgccgatttagaagcaactcaaagatttctggacttctattccggctggatactagaaccattggtgtttggagattatccaagcgtaatgaagaagaatgttggttctcgccttccgtcattcagtaaagttcaatctgaagccattcgtggcactctagatttcattggaataaaccactattattctttctatgtgaacgaccgccctttagaaaaaggcatccgtgacttctcactggacattgctgctgactatagaggtaaaacagtttgtcactcgatacatgattatccttttattgcttgcaattctttagatacattccctgggacttctgattcatttatctagagtcacacacacaatggcctacagaagttcaaaacggtgtcacatggaccaaataatttgatgatacttctgaaacatattcgcaattttatgaaacctacaagctaaatgctgtatataacaaaacaattatctgaaacaggttcgagaactgatccgccaataggtcaggtaagggtttttcatcaacaatcttcagaaattcgacatgatagatacatcccttttattttactgcagcatgccccaacatctattccccgctgatcccagaggattgcaacttttggtagagaacctgagtgaagcctatgggaaccttcccacctatatcca

SEQ ID NO: 65247 - DNA, 364 bp, Zea mays
  unsure (1)..(364): unsure at all n locations
  Clone ID: MRT4577_159501C.1
ttttaccgttaaacttccgcaatgatgccacagagctcgctaacggggccttgggcatacgtgcaagagcacagggaatgcgtggccgcttgtcacaccctggacaagtcaatcgatgtgttcagaaaggcgaatgcaaaactgcattctcagttgaaggctctccatacacggaaaatgtgggccccatggataaacaccccactaaagggcatggacatcaacgatcggatgatgatgacgcgactggcatccacagaccggaacggactgcctggacggccatggtacaaacacctgattgactcacctacgatgnacaacaattactgggctgaagtgcatacagtcatatgcgacgcca

SEQ ID NO: 65248 - DNA, 754 bp, Zea mays
  Clone ID: MRT4577_159502C.1
aagacccaaataatgaaatttctcctcacactctagcagatatgggcttgagttgtacaaacggtcccttgttctggcaggaccgtgtccctaatattggggtggtgtttacctggagtcctggacagaggttttgatggaatttgtttttttaatataagtgttcttattgcaacgcacagtagtattcaatagtctcgctagaggatgtacagatcaatgtgtcgctgtagaaaacttattgctcaacgtgtgatcccgcatcatcaagctcgtcctctacatggatccccttgttctctaggaatttagaataccagcgagcagatagccttgcttgccttggtagcgcctcgtcctcgaaatcaacacggtacaggccgtattgcgacatgaaccctgacaggtactcgaagacgtccaggaagcaccacgcgaagtagcctttcacattagccccattccttagagcagccaatgtgctgcttatgtgggtcttcatgtaatcaaccctgtcagtatcatggaggctgccgtttgtggttgcataacctgtctcttggatatagatgggaaggttcccataggcttcactcaggtactctaccaaaagttgcaatcctctgggatcagcgggaatagatgttggggcatgctctatagtcagcagcaatgtccagtgagaagtcacggatgcctttttattcttcttcattacgcttggataatctccaaacaccaatggttctagtat

SEQ ID NO: 65249 - DNA, 342 bp, Zea mays
  Clone ID: MRT4577_159503C.1
aagagggacgacgacgatggactcgaacgtaagctcagaataacttttagctcaagtctcatatctattcctggatctaacccgagctttctggtactttttgtaacccctactccttaccccgacgcctgtcatcggctatatcaacatccccttctacttcttccttatgcagcggaggctaaaaaccagagcagtaatgcaccacgatgatgtcgatcttgatgaacagacacaacccttcattaacattgattacatgacacacatgtccaagaacaactcctttcacggctaatggaaagacagcaactttatcgtacaggactaaaaaacacttct

SEQ ID NO: 65250 - DNA, 309 bp, Zea mays
  Clone ID: MRT4577_159504C.1
ctttttctgaatacctcacagatccaaaaatgtcttccgaacagactttcattgccatcaagcccgatggtgtccagcgtggcctcgttggacccatcatctctcgcttcgagtcccgtggcttcaagctcgccgctttgaagttggtctctccgcctcgtgagctcctcgagaagcactatgccgacctctccgagaagcctttcttccccggtctcgttacctacatgttgagcggccccatcgttgccatggtctgggagggccgcgacgccgtcaagaccggtcgtaccattcttggtgccacca

SEQ ID NO: 65251 - DNA, 399 bp, Zea mays
  unsure (1)..(399): unsure at all n locations
  Clone ID: MRT4577_159505C.1
gggggggggggnccgccacaanacgaacagaccccggaccnnaccacncanccaaagcagagaaaagggggcggannnnaacaaaaacaaacnccnnnanccagaaaccnnagcagccanaccancnagagaagggcggcgacangggccgggggcgccgcaacgggcacgnggnagaaccncgggagggcaaacagcanncgcncgncgncgcgggggacgaagnngagggcaacacccnnccnnccaaaccgaccacnacggccgangcggnggagggagnncncnggcngggncggcagggcgnagnggaggacaagggagaccngcnggacgncganaccacgggcgagcaggncgggggngangagcacacgagaggacccggaccngaacncc

SEQ ID NO: 65252 - DNA, 568 bp, Zea mays
  unsure (1)..(568): unsure at all n locations
  Clone ID: MRT4577_159506C.1
tcgaggccggccgggaaataatcanagaaagcacacggctcccacgctcaccgacgacactgcttgtgcgcgtgcaatggaactcgtgtccgcctcctcgtcctccaccaccgccgtcgcggtgctccccaggaatgtacaacagcgggcgtcgtcgtcgtagttctcctcctcctcctcttcctccttcctcgtcgctaagacactgctgaggcagtgcgaggcacaccgaccgtcgatcgacgtgcgcgccgcggcgcattccgacaggtcgatctgattacccggcagcacccctccgtcgagactcgacgaacacacttcccggtgacttcgattatgatccctggcacctcatatctgacccgtacagcctgtggagcaacgtgcaatggaacctggcgcactgccggagcttgatgttcttctaaggcgtccatcgttcatcccgaagttcctgaccaagatcggaggcctcaacacgaccttctgttacaccgccgtttaaggaggagtacttcgccgacatgaccaccctctgcatcaacgagctcatcctcatcaattg

SEQ ID NO: 65253 - DNA, 995 bp, Zea mays
  unsure (1)..(995): unsure at all n locations
  Clone ID: MRT4577_159507C.1
cggggnatgccgtatatatcggtttatttttctgtaaacttggtcagagctagagaagttagacttaggataaagctaaagtgattcactccataacttgtagcagagggagcaattactattccaagttttttgtttgaaattttagtatttgcgttgtcattttgattttcttgtgcacttttcttggtccaatttatattaacagatgaacataacatataccgcttcagatggtgggaatgttactttaagtgatgggaaaaatgtggactgcatcatacatgttggggggacagtagagaggcaatcagtttctgatttgcaaaaacagtttcagcaggttgcagcctatgcaatgcatttgaatccaatttatggagcctctttttttgttttcgctgttgttttggttagcgttgtatgtgtctgttgtaagtttgcgaagaggagaggcaatgatggactcccgtaccaacagcttgagatgggaggtcaggcaccgaactcttcaggtgtagacatcactgcaaccaccacagacggctgggaacacgactgggatgatgactgggatgatgaagcagcagcaggacctgtagataaaaaaacctacaagcagtgtctcagcaaatggccttccgttgagatcacagacgaatagcaaagatggttggaacgtggattgggatgactaagctcctacagaagaactttgaatggggatgtcaagtgagatagaagatacttccatctgcctgacttgtaggaaagagtcgaacaaggacaactaaaactcgaactgatggaactcaggcttggtaaagtaacccatatcctggaaaggtgaaggattggctcacttcatacggtttgtaccatagtgttcaccttttttctatctgagctgataactgttagcagtacagattttagttctttttgggttgtaatactacagcagaagttgttagtatatatcgaaaacacatttc

SEQ ID NO: 65254 - DNA, 1231 bp, Zea mays
  Clone ID: MRT4577_159508C.1
gcccagcgttccatactcctggagatagaaaatatatagacagagctcgttactagtcgtagctagccagggctagctgtagctgaagtcatcatcagataaatatattcatcagcctgtaattaatagctagttttcagtggattagctagcttggcaatatatatttaactaataaggcggcggtggcatggacgcgatcagcagcctgctgctgcaggagggctggaggaagggcccgtggacggcgctggaggacaggctgctcaccgagtacgtgcagcagcacggcgagggcagctggaactccgtcgccaagctcacagggctgcgccggagcgggaagagctgccggctgcggtgggtgaactacctccggccggacctcaagcgggggaagatcaccccggacgaggagaccgtcatcctccagctgcacgccatgctcgggtgcaggtggtcggcgatcgcgcggtgcctgccagggaggacggacaacgagatcaagaactactggcggacgcacttcaagaaggcccggccgtcgcggcgcgcccgggcacagctgctgcaccagtaccagcagcagcaggaggaggagcgccgacagtacctccagagcctgcagctcctgcagcaggagcagcaacaacagcagctgctcctccagcagcagagtcagcagctggtggtgaaacaacagcagctggagcagcaaagcccgccggagcctgatcaccaggccgtgatggcgatgttggacagccagcagagcacggcggaatgctactgcagcccggtgccggtggtgccagagcagtgctgcgcgctcccggccgacgacgacgacgccatgctgtgggatagcctgtggaggctggtggacggggacgggcgcggctgcggcgacggcgacgactccagcggagtcgcatactagccggctagtacgtacgtgtgcgtgtctataccagtgtaaaaaaacaaagcgggatgaagaggaggttcttcaggtttcagctgctgcaaggcaaggatactgctagtggtagtagagacatgctaattttgcaacgagaatagttgatcatgtttcatgttttttttattttacccatgaaccatgagcaagtggcattgtatcaaaaggccctctgtttatacaaggtcgaaataccttcatgtaactttggtttcaagaataaagaccgtgttttagcatggatttatt

SEQ ID NO: 65255 - DNA, 495 bp, Zea mays
  Clone ID: MRT4577_159509C.1
cctctccgcagcgagtgaaggcgaagcccaggcaggcaggggatgaagcgcgtcgtggggagcccagggacatggagcggcatggcgctgcgtgtgtcgcagtgcgtcttcgccgccgcgtcctccgccgccatgtcctccgccttcggctccctcaactacagcgcctacttctacctgaatacagcggtggtcctgcagcttctgtggagcatgggctttgcttgccaggacatctttgctttgaggaacaaaaaggatcttcacgctgagccggaacttgtactgctccgtgccatcggcgactgggtcctcgcgattctcatgttctcgggatcctgcgccgcggctagcgtgaccatcttcttcatgaaggacgtgaagttctgcgccgagtaccggcggctgccctgcggccagatcgagctctcggtcgccctcgcgttcatcacgtggtcattgcaagccgcgtcttctttctccgggttctggctt

SEQ ID NO: 65256 - DNA, 388 bp, Zea mays
  Clone ID: MRT4577_15950C.1
ttataagccaagctggcgcaggccaaagggtattgactcctgtgttaggaggaagtgcataggctacaccttgatccccaacatttgttatggctctcacaaatcaaccaggctctaccttctcaacatgtttaagcaagtttgtgttgcacatttttctttcatttattttttgtttttattcattatctaattcctattgttcttactcatgcctattgccacggtagtgtggatcttaaacgtttctatataattctttattacattcatattttactattttctacatttccatttttattttttattcctctttattttatctttcctatttttatattttcccttacctttcttctcttatttactttttcttcctctttct

SEQ ID NO: 65257 - DNA, 440 bp, Zea mays
  Clone ID: MRT4577_159510C.1
cccacgcgtccgcccacgcgtccggttagtaccatgccaactgaatgtaagatagaagtaagctatggtgccagattgaaaggcaccccctcctcagtcctccgaggatttgagatagctatcttcaaatgtccctaaattggaggataatcagacttgtaaggtctatcaccatcatgatagcaaccctgtttatgggaagaggtcatcattcgatatctttaagcgaagcagccaggtgtgtgtacaagtgtagaggagatcctcattacgctatgaatccttaaggcttaacaataaatattacataaaataagaggactaatttttgtagagggcctctttgactagattgcttattattcttaatgcattgtccaaatgaattttagattcaattgttgtgtatcccttgtcgaaacaaccaaaaataacatatg

SEQ ID NO: 65258 - DNA, 185 bp, Zea mays
  unsure (1)..(185): unsure at all n locations
  Clone ID: MRT4577_159511C.1
cgggagcccagcatgtgaaatggggagcagccatcaaagggactggcaaaatgcaaaacgccttctaaaagagctgctgtcatgcccataaagtacccaaaaaccnaactttttttttttttctctgggaaaggcaaccnactttttgggcccccaatttcctgattttaangccggccaaagcg

SEQ ID NO: 65259 - DNA, 1658 bp, Zea mays
  Clone ID: MRT4577_159512C.1
gccggcctggctgggccccctctccccactggtgactggctgactgctccacgccgcgaccacgcccaccaccgcgctgcactggccactactcccccttccccgcactgcactgcaccagaaccagaactgccccgcgcaaatggacagagcatcgctgtgatccctccaccctcctcgtccccctagccgtgtcgcgatggccaccgccgccgccgccgccgccgccgcctgccctctcctgctcctcgccgcgctactcctcgcggtgtccgccaccacgagcgcgctcaccgacgacgtgctcgcattggtggtcttcaagatggacatctcggacccgtcgggccgcctcgcgacgtggaccgaggacgatgatcgtccctgctcctggccggccgttggctgcgacgcgcgcacgggccgcgtcacctcgctctctctcccggcggcgtcgctctcgggccgcttgccgcacgcgctgctccgcctcgacgcgctcctctccctcgcactcccgcggaacaacctctccggccccgtgccccccaacctcctaaccgcgctcccgcggctccgcgccctcgacctctcctccaaccgcctcgccgcgcccgtccccgcccagctcttcgcccaatgccgtgccgtccgcgccatctccctcgcgcacaaccagctctcgggctacatcccgcccgccgtcgcgtcctgcgcatcgctcgtgtccctcaacctctcgtccaatcgcctcgccggtcccatcccggacgggctctggtcgctgccttcgctccggtccctcgacctctccggcaacgagctctccgggagtgtgcctggtggattcccccggaccagctcgctacgggaggtggatttgagccgaaacctcctcgccggggagataccggcggatgttggagaggcggcgctgctgaagtcactgggtttggggcataacttgttcactggcagccttccggactcgctccggaggctggccggtctgcagttcctcggcgccggcggcaatgcgcttgcaggggagctgccagcatggatcggggaaataagggcgctggagcgccttgatttatcgggcaaccgatttgccggcaacattccctacactatcgcgaactgcaagaaccttgtggaggtcgatctaagctgcaatgcgctcaccggcgatcttccctggtgggtgttcggcctaccgctgcagcgcgtctcggtggcaggcaaccagctgaatgggtgggtgaaggtgcccgacgacgcagcaatgacgcttcgtgtgctggacctgtcgtgcaacgcgttctccggcgagatcccgctgcggatcactgccttcgcgggtttgcagtctcttaacctgtcctcgaattccttctcggggcagctgccggccggcattggtggattgaggctcctcgaggttctggacgtgagcgctaaccgacttgaaggaaccgtgccgccggagatcggcggtgcggtggcgctccgggacctgaggatgggaaggaattcgcttacgggacgcatcccggcacagattgggaactgcagctccctcgttgcactgtaagtaatacagtaaattgtttcccaacccatattctggaatgaaatttgacgtcattgggatt

SEQ ID NO: 65260 - DNA, 645 bp, Zea mays
  Clone ID: MRT4577_159513C.1
ttgggtacctcgaggccggccagggtgtttgtattgcagagagagagagaatggcgaccacacccggtttgtgtggcagtgtgttgttgagcacctcgttcctgaggaagcaggcaatggcatcagtgaacatgagaatgctgaaggctaatgctggtgtttttggcttaaagggagggcgtggagggcgtgtgagtgcgatggcaagttacaatgtgaagctgataaccccagaaggagaacaagaatttgaatgcccagatgatgttttcattcttgaaaaggctgaggaatttggcattgaccttccctactcatgcaaggctggtgcttgctcttcctgtgccggcaaagttgtttctggcaaagtcgaccaatctgatggtagttaccttgatgatacccaaatcggtaacggatttgttctcacctgtgttgcttatcccacctcagatgttgttattcagacccaccaggaggatgagctattctagttctatatctcatgtctctttctatcttgcattttcatttatatgcttgtttatcatatcaccaacttcaactgtagtacctacgtaccatgtcatcttcattcttgaataacaatatccttaattcaaaaaaaaaaaaaaaaaagcggcc

SEQ ID NO: 65261 - DNA, 625 bp, Zea mays
  Clone ID: MRT4577_159514C.1
ttttttttttttttttgagcaaattagacgtatttattaaaaaaacgtttcctatacatgcatggagaaagcacggttgaaatgaaaacaaatctaacacatatatacgttcgacgagagagatcaaacaacaactttgtacacaagacgtacgatctcatgcatatcctgttgggagtgtttacatcgatcagtggtctccagcagtctagctgtcgtcccgcgaagaaggaagaaggaacagcgcgtagaagccgccggcaacggtagaagctcccatgaagcagacggcagcggccccggcgggccacggcacgagcagggcgacggtcgtcctccaggagaaggccgccgtgagcaaggccgtcgtgagccatacgccggccttggcgcggcccctggccggcgagccgggcggagcgctctcgaaggcgcgcatgaagcggaggagcagtgcgaggctggcgtacgacgcgacgactgaggccgtcgcggctgcgtctactccccatgacctgtggatcgcgagtatcgagctcgctgtgaggaggacgaaccctatagccgtggccatcggcatgcggtccaggaagaacgagagattatacgcacacgcacgtcgtcg

SEQ ID NO: 65262 - DNA, 313 bp, Zea mays
  Clone ID: MRT4577_159515C.1
gggccaaccacccgtccggtcatccataaatacatataaccaacttagctcgattttactttttcacagcaaatagctagaaaaagggggcggttacaacaaacccctagcgaaattgctcaccatgctgaagctggcacctcttcaataccaggccacctatctacaccccgtgatggacttaagcgtagtcgacatcaactgaaatccattacaaaacctgtacccatgacagacgactacggctgacgtagaccacaaacttttttctaccaacatctccacagcaggccatcccctgctcaaccccaac

SEQ ID NO: 65263 - DNA, 307 bp, Zea mays
  unsure (1)..(307): unsure at all n locations
  Clone ID: MRT4577_159516C.1
ccgcgcgccggacctgtcgtctcatccaccccccgatgcccctctctgactcccactcgggcgctcgcaccaccaccccgtctcgtctcgtctcgtctcgccaatagaaaagcatgccgcagaaataatcgccaaagcccaaaacagatagggagaggggagagacgccacgcgaggggaggaagaggaaaaaaagcagaccagagagagagagaggtgggaagggaaaaggaaaagaaaaaaaaggaaatccaccgcccgcagngccgccgcgcgctgcacacacgggacttccttcctttccttc

SEQ ID NO: 65264 - DNA, 400 bp, Zea mays
  Clone ID: MRT4577_159517C.1
gaaacccgtgatatctaagatcagtgtggttatcattccccctccgattgaatagccgggggctgtatcgatacttgctcatccgacatataataatgctattttggaccctcatttgccggtggaggatatcactgacagcctcaagggtgctggtggtaaaaccatgtattccactcactgaaaggtcatacgggcaatctatgcactgaacactgggagaagctctatctttgctgccctgtgctgtcctacaagagcaaaggcagaacatctgatgcataagctgccttgaggagccctggaggctccggctcttgtgtgagacacaccattggatgcctgagctcctacatgatacaagctattccagtatgttgcaactgttgcaaaagacctg

SEQ ID NO: 65265 - DNA, 420 bp, Zea mays
  Clone ID: MRT4577_159518C.1
cgccgagctcggcctctactcctccctatgctcgccttgctccgactaggtccatccatggggcttgcctgcgatgcccggcgtcctgtctactctgctcgcccgcgcctgctgcttgcctgtgctccaactcgtcggtcgcggtcttgccttggtttatgctgcagctcgccatcgaatcgcctgctcctctgtccgcccatggccactgcactgaactcctccctgctgtctgtgatgcacacgtgatggacgcgatgaggtcgctgcgtgtgtttgtgtccgagcccacccggccgcaacctcgctttgctcctcgcgttgctgctcactgagtctttccccagtccacactctctccctgcctgccataacgtcatttcgcgtcgagccttgctgccaatcgcggagttccctact

SEQ ID NO: 65266 - DNA, 543 bp, Zea mays
  unsure (1)..(543): unsure at all n locations
  Clone ID: MRT4577_159519C.1
naaaaaaaaaaaaaaaaaaaaaaaaaaaaaaaaaaaaaaaaaaaaaaaaaaaaaaaaaaaaaaaggtccccccggaaaatccccaatttgcaaataaaaaaagtgaaggtaagggtttttttttaacctgaaccggatatcttggtatttttttttttttggttatttctaactcatttttttgagataataaaatttgacaaaggttttcccaaaaatgggttcacgtaaaaaggtgctttttggtttgcgtaggaatgcccgttttattttacggaaaagtgcccgtaaaataacaaaggggatttttcatgttcaagttagtttaaacaatccctttttaaccgttccaaacccacagggtcgggtcgttttttggtcctccgcaggtccttggggattaaaaagctaaaaaaaagcttcaccttatgctggtaaaaaaacagcagtaaatgtttttcgtccagggggtttgcaacgagcaaaatttttggtaaagggtgttggtagcgaaaaaaatcccgatttacaagcctttgttaa

SEQ ID NO: 65267 - DNA, 254 bp, Zea mays
  Clone ID: MRT4577_15951C.1
ggggctccgcttgttttgctgcgcggtcgcgccccctggggggcgggcgccgcctgcagagctcgtgcgcgtcctctggtgctgggcgtggccgccgtgcgtcggcgcatggacctcggcggccccaactacgccccgccggcaacccccggtgcgcccgctcccgcgacggcgtccatcatcatctcgggcgtgttggccaagcccggtctgttcatcaccttcatccggctcctcaagtccacgggcgtggg

SEQ ID NO: 65268 - DNA, 222 bp, Zea mays
  Clone ID: MRT4577_159520C.1
ccacgcgtcaacggacgcgtgggtgcggactggttccaattatcaggtcagcgacagtgcacagtttacataattgctgactcaaggtgagctaacaggtcaatcatgggcgaaagatgtacaagtgacgaatgaacgcgtcagtcagatcataatgcatatgagtcctgaccacacggcgatccagttcatgtgggtttgggaagagttcttctacatcat

SEQ ID NO: 65269 - DNA, 337 bp, Zea mays
  Clone ID: MRT4577_159521C.1
atggcccgcgtgcgcaagtcctacgtaaaggctggcgagatcgccgaggaggtgatcgggaacgaccagaccgttcaagctttcgtccaaaatgaaaatgcaccgaggctctacccggaggcgcttcttaggacgctcacctaccgcatgaggggccgtcatcgcaagggcctcgggctcggctacatgcactatgtgctttttctctgggaagcgcgtgtcatatgattcaacagagtcgctctccacaaacgtatatggaatggcgtagagtgctttacctccatgcgtcaaggccaaattcatggctctgtgctcggtcaggcggttcctaaca

SEQ ID NO: 65270 - DNA, 383 bp, Zea mays
  Clone ID: MRT4577_159522C.1
cacgcgtccgataaatcgttctacactcaaacaatatcgtcacggtcaccctcaacgatgcagatgacatcgaagcgaggtaggcatctctgatctaggagcaatgtcgtggtaagcttacgtgaggaagcagctgatatgtgacatcaagggccagcaactcacggcggcgacgatctgctgccacaactgattcctctgggagcagagcatcgcgttccccgacttcatgaccgaagacatgggcaacatcatgaatgacttcgacgagccagagcacctcgcgccgacatgcctgttcctcggacctagcaagtacatggtcatccaatggtaacctggtgccgtcatccgtggcaacaacggattaggatgcatcaacg

SEQ ID NO: 65271 - DNA, 365 bp, Zea mays
  Clone ID: MRT4577_159523C.1
ctttcggctgatttatgtgcttgtttatgtgcttgtttatgtgcttccccatgcgccgatccatatgcggatatgaatgagaggcgagtacggtaataggtgatcgattcggtacggacttgactcatcatgacccttgtatacctagtactattaatgtatcgtaacatcccaaagcctctacccatcaatagtgagaatagacgtatcaacacaacatccgccacgatgactaatctcaggagatcggatcgttacccgacgcaatcagctcaatatatcgccacccatatgatgatcatccaggaaacaccatatacgacatacttaccatagaccgctataactaggcataatttttccac

SEQ ID NO: 65272 - DNA, 264 bp, Zea mays
  unsure (1)..(264): unsure at all n locations
  Clone ID: MRT4577_159524C.1
aaaaaggtcaaatgaattttaatttcggacggagggggtttgatttttttttccaaccacaggttccaacaacacgtgatgcgctggcaaatcaaacggttctgtttattctccgtttnttaaacctcactgttcctgtgttgggctcagcaggcctcgtgcttttgctggtgactttctcaattgccgaagacgtggctgatccaaccgtgcgtcttctccaagcccaagctaagctccgtaggctttcatgggcgtccttgg

SEQ ID NO: 65273 - DNA, 387 bp, Zea mays
  Clone ID: MRT4577_159525C.1
gcttctctcgtctgcctgaaactatcctacttcgaactttccttcttctgggccctcgtctctctttctctcccggcgcggcgctcgagcactccttcctcggcgatgtggctctcgcctgtataggggtcatccgcccaccgtgcacgagggcggcgctcgcggctacggcggcggcggcggcgtcgtccgcggcctccggagatgtgagagcctcccgcccgctggagatggctgctgcgggggcagggtccgggggcgaggggaagaagcggggcgcgccggggagctggatcctgctggacgcggtcggggcggagttgctgctggtcgccccttgggccccttcctgcgccgcgccggcatcggcgcgcgccgcctgcgggt

SEQ ID NO: 65274 - DNA, 516 bp, Zea mays
  Clone ID: MRT4577_159526C.1
attcccacaggtgcggcggcgcacactgctgcacactgcactccctctgtcccgcgtccccgttcggcgctctcggcacgaccgccggtagcccgggacgcacgtcgcacggacccatccctccctagcggccggtgacggcaccggcggccctttgctcggctgtgcccaagctgcgagggcgagatctacccccgcgtccgtgcatcttcgtcagccccttctccggacgagcactcacagggtataccgacccctttttttccgtccctgctatacgaaaccggcatcccaaaccatgaacgtgatctattcagctatctcctatctgtcccggaacccggttcttatctagtaattacgactgcagtgtacatgcgttatacctgtaactttaattttttgggagcccttttactggtctgcccctggcaaagccagtttttttttttgagtcgttgaatacctgcgattagaatttattatgggtagcaaaacaacgatgaacatgctgcg

SEQ ID NO: 65275 - DNA, 1025 bp, Zea mays
  Clone ID: MRT4577_159527C.1
cggccgcgccggggtccgcctttccgtgcgggcccacgcgtcggggagcgagaggcgaagcagataaggaagccagccggcaaggggagccactccggcgtcgagaaacctagggcgagcgcctcgacgactcctatcaccccatggcggccttcgctacgggcagcaccacagcgcgcgcgacgctggcatcgccgacttcgtgccagccggccgcgcgccgggcgccggcccgatggatgccgctgcgctgctcgccgccggccctgggcctcaggggaggagcgcgttctcggcggagcgccacgctacgggtggaagctaagaagcaaactttttcttcatttgatgagttgctggagaagtctgagaagccattgttagttgacttctatgcaacttggtgtggtccatgccaatacatggttcccatacttcaagaagtgagtgagaagttaggcgacaaaattcaagttgtgaaaattgatactgagaagtacactagcattgcaagtcgttacagaattgaagcattgccaacttttatcatattcaaggatgggaaaccttgttatcgctttgagggagcattacctgttgaccagatgatcgaacagattgaaaatgctttggcagtcacaaagtagcacatatggtgatgagcagggcagaatccccccccccccccaaaaaaaaaagaaacttggtggtacctcataacgtgtgcctctacatattgaaaaatcttgattattgtctacaagatcacaacatcaagggcctaacatttgtaaggatttgttggatcttctagattcttatggggagttagatgttctcttccgatgagacatgtagatgttggtctgccattggcgtattaatggttccttgtgtcttttatcgggagcaagagccctcgcattgcctagtgttggtaataaggattattttaatcctccgatatgcatgaacgtctatcaggatgatattaaaaaaaaaaaaagcggcctcccccgttctct

SEQ ID NO: 65276 - DNA, 477 bp, Zea mays
  Clone ID: MRT4577_159528C.1
gtcgacccaagcctctacacaagactcgtgatagaacagcttagactcttgcaccacaccacaccaccacacacgacgctcattgctctcacacctttcccttctcccttgtccatctccaccgcttttgcacacaaacgcaaacactcacagtcagcacacacacacgcacaaagaggcaacgctgtagcggctcggtaccaatgtacgttatcgtgcgaccgtctaggtcctatgggcccattcagaacgccatcgcagtcctcaatctgctctccttgctcgtgggaatgattttgctctgcgtcggcacgtttgtctactttgcacccggcgcagtctttgtgacctcaacgcttttaccacacttggtccttgtcctcggcgccacaatctcaatggtcccctttttggggtactaagggggtgataatgaaaagcgctggatactctggctccatggattgaatccgttga

SEQ ID NO: 65277 - DNA, 208 bp, Zea mays
  Clone ID: MRT4577_159529C.1
gaataagatccaaaaatgagaggggggggtttaataataattacatggggtggtatagagatgaaccaaaaaagaaagacaatacaaaccagcggactatatattcaagaggggactcaacatatcttgacaaagatagaggtgtacaaagagctaacatatatataacttttacaagccaaaaaacaggttcaaatccaatctaaca

SEQ ID NO: 65278 - DNA, 238 bp, Zea mays
  Clone ID: MRT4577_15952C.1
tgaaatttggtgatcctacagagaagctcgtgcaatgactgaaatgaatggaatgccttgttcttccaggcctatgcgtattcttcctgccgcacgccggaaccatacaggagtagacatgcttcctcttgcgcttggccgcttctcttggcacaggcgctcaagattggggggggggctccccgctttttttcttccacgccccgccttttggctcctgtctcaggtgccgcgttcc

SEQ ID NO: 65279 - DNA, 330 bp, Zea mays
  Clone ID: MRT4577_159530C.1
gggttggggcaaaaatttgcgtgcccaaaacaacaaatggcagctaaagctgaaaaaaaacaagtgcttacaagtacactttttatgaaagggcccgggggggttattcttactacttacacgggttgcatacaaaattgaggaaaaagggttattggaaagctttccccaattggggcattacttgaaaccatctcccaggcccgcaggcatttccaggttttgtgccaagaaaaccattctttttttcattgcctggaccctcccttggggggcatccttttaagcattcttgaccaaccccgaaaggtttttagcacccaacttcat

SEQ ID NO: 65280 - DNA, 1710 bp, Zea mays
  Clone ID: MRT4577_159531C.1
ctcattccccatccgtccccgtgggaagcggggctaagcgacgtacgtccccctcggcgtccgcggtgcgcttacgcaagcaatccccactcaactccccacccccaccagcttcacctcttcctcctcgcctccccttccgccggcaatcccacctcccatccgctgccgctccagccttccatccatccatcccgtagctgctctctattacgccagcgatcgagagaccaagaggagcaggagcgatggcgaggagctcgttcaagctggagcaccccttcgaaaggaggcaagctgaggctaaccgcatcagggagaagtaccccgatagaattcctgtcattgttgagaaggccgagaggagtgacatcccagacatcgacaagaaaaagtaccttgtccccgccgacctcacagtgggacagtttgtgtacgtggtgcggaagcgcatcaagctcagcgccgagaaggcgatcttcatcttcgtgaagaacaccctcccaccaacagctgccctgatgtctgccatctacgaggagaacaaggacgaggacgggttcctctacatgacctacagcggcgagaacacctttgggctgctatgagtggcgccgcgccgccgtggatcgacgtcggacaatgccccttctcctgtagctccttaaaaaaaaaataggcgtctcaagaacccccgcatctaagcctttcgcatatctatccttccaagaccgcttagctctgtctactctattcccgccaggcgattcgagagaccaagaggagccaggagccgatgggcgaggagctcgttcaagcctggagcaccccttcgaaaggaggcaagctgaggctaaccgcatcagggagaagtaccccgatagaattcctgtcattgttgagaaggccgagaggagtgacatcccagacatcgacaagaaaaagtaccttgtccccgccgacctcacagtgggacagtttgtgtacgtggtgcggaagcgcatcaagctcagcgccgagaaggcgatcttcatcttcgtgaagaacaccctcccaccaacagctgccctgatgtctgccatctacgaggagaacaaggacgaggacgggttcctctacatgacctacagcggcgagaacacctttgggctgctatgagtggcgccacgccgccgtggatcgacgtcggacaatgcccctcctcctgtaaatacttaaaaaaaataggcgtctcaagaatccgtgtacataataatctggcatgtcttgcatcaaaagcaactcgttgcgtccactgtctgttgaaactattgaagcgtactaaacatttaagcaaaaaaaaaaaaaaaaaagcgcctgatgaagaaaaatcaatcggattcccattgattttacaatatgattttaacaaccagctacttctgacaaaaaaaaaaaaaaaaagcggcctccgccgggcaatctggtgaacatcagagaccgagcccggcggaagagcatctataacgatgtcgaagtccgagaccggcctcgcgattgggattggctcgtcgccaaagccgtcatccgcgtcgtactcatcctcctcgctttcatcggacccgaacccaccggtaacctgaggcgccgcgtcgtcggggcgctcgatgagagcccgaaattcgtcctccagcccggacgcgtgggcggacgcgtgggcggacgcgtggg

SEQ ID NO: 65281 - DNA, 1442 bp, Zea mays
  unsure (1)..(1442): unsure at all n locations
  Clone ID: MRT4577_159532C.1
gcacgagaagcctcctgctgtccacctcattccccatccgtccccgtgggaagcggggcaaagcgacgtacgctaccctttgcgtgcgcgtagcatttaaccaagcaactcccaatccccactcctcctcctcccccaccatttcttccctctcgccttcccctccgccgccaatcccacgtccaatcagccgccgctccagccttccatccatccatcccgtagctgctctctattccgccagcgatcgagagaccaagaggagcaggagcgatggcgaggagctcgttcaagctggagcaccccttcgaaaggaggcaagctgaggctaaccgcatcagggagaagtaccccgatagaattcctgtcattgttgagaaggccgagaggagtgacatcccagacatcgacaagaaaaagtaccttgtccccgccgacctcacagtgggacagtttgtgtacgtggtgcggaagcgcatcaagctcagcgccgagaaggcgatcttcatcttcgtgaagaacaccctcccaccaacaggtttgccataccatcgtggggaaaaacaaaataaaacctacctgtccatggtgcccgtgtgtacaatgctgttactttttcttgtccatgcagctgccctgatgtctgccatctacgaggagaacaaggacgaggacgggttcctctacatgacctacagcggcgagaacacctttggttgggtctatgaagtggcgccgcacccgcgccgccgntggatcgacgtcgcaccatgcccgatacgccgtactcttcgcaagccaccgcaacccgaagcccgccttcgccgcatccgcctctgcgatccccgcaaggtcgcaaacatgtctaccgtgctccttcgcccgacccccgggacgggccagggcttcggccgcaagaagcacggctgtgggcgtcgcctacaccaagccgggaggcgaggtgatcaaggtgaacgggattccgattgagctcatcaggtcggtagatgctccgcctcaaggactgccagtccatcctgctgaagaaaaactccagggtccaggacatcttcatgagggtcagtgtgtgtacgtggtgcggacacgtctcaagttctacgcagataaagggatcttcatcatcgtgaagaacaccttaccaccaaaagctgccctgatggctgccatctacgaagagaacaaggacgagtacgggttcctctacatgacctacagcggcgagaaaacctttgggcttgctatgagtggcgccgcgccggcgagggaatcgacgtcggaacatgccccctcctcctgtaaatacttaaaaaaaaaataggcgtctcaagaatccgtgtacataataatctggcatgtcttgcattaaaaagaactcgtttgcgtccgaaaaaaaaaaaaaaaaatttggggccctcgagctc

SEQ ID NO: 65282 - DNA, 631 bp, Zea mays
  Clone ID: MRT4577_159533C.1
actgattctgctgctgaagacgtatttctgcagatgtgggtgctgatgtccctgtgaggcggtccaggaggaattcgttcaatgctgccgaggctgaggaagcaggagaggctgttgctgttgacaggaagcccaagcgcaagaatcaggagaatgacgagggcgttgctgttagcgctcaggctagagttacgagaaggtcaaatttggagtggtctgctactgtgttgcctcctgctgttgagaagaagagagggaggcggaatgcagctgagtctgatgtgcagaagtccgctctggtggaagtaacagctaggactacaaggtctcgctcaatcgtacctgttgtggtgccacccactgtggttgagaacaagaggaggaagactggagatccacaaacaactgtagagttggatatgctttcagatgttcccagaaatgattttcctgccaccaggtctttaaggaacaaaattgtccacgttaacaacagcgtcgtggacgaaactcacactaccaggcagctggaaaacaagatgcgtccgtctactcgtaggcatcaacaggttgcatcttctccggaggataaaggtcaaaaaattcctgctaccagtaagtcccctctact

SEQ ID NO: 65283 - DNA, 344 bp, Zea mays
  Clone ID: MRT4577_159534C.1
cgggaatctaactgagtgagaactgctgtgagaacttcgcactcgcgcgcctgcagcatgaaagactgctcgatgtctgagcttctggcctatgcgctcatcttcacgctcttgttcaccgcggcggccaccccgaccgctggcctcaccatgcgtgccgatctaacccacgtcgacaaaggtaggggcttcaccagatgggagcgtctcagccggatggccgttcgttccagagcccgcgcggccagtctttatcagcggggcggccactacggtcagccggtgacggcgactgcggtacccagctccggagagtacctcatccacttcaacatcggcacgcc

SEQ ID NO: 65284 - DNA, 364 bp, Zea mays
  Clone ID: MRT4577_159535C.1
cagtcctgtgtccgaggtcacatcatccttggggggcacccttaggatggatggtgctgtgaacgttgatgttaacaagttccagaccaacctgtagccctaccaggagttccactgcatgctatcggccaacactccagccatatctgctgagaaggcctaccacaagcaggtggacgatggtcaagaacacgaactgcgtcttggagccatccttcatgatggacaatggcgacccccgcattgagatgaacatggactgcggacacatgaaccgaggagatgaactttctaaggacgccaacatggctgtgggcacaatcaagaccaagcgcaccgttcaaggagaaagctggtctcgcca

SEQ ID NO: 65285 - DNA, 304 bp, Zea mays
  Clone ID: MRT4577_159536C.1
ggaaataaacgcaatcgggacattaaaaaacacggggccataacacggaggggccaactaaaacccaagggacatttttagggggggggggacaaaacaaaaggcggggggggggggggggttccgcctttttcactatccatataaccaggaatcatagggttatatccaaccttaaaaaaaggaaaaccccgggccccaaaaattaaagggggggggggtcatttgccgacaaaaaaaaagaacggggggggaaattcggggctgggcaaaaatatatgccatgcccgggcccccttgtttt

SEQ ID NO: 65286 - DNA, 385 bp, Zea mays
  Clone ID: MRT4577_159537C.1
tgtttttaataccaattattctgcagttgcactgcttgtttaaattaaccaaactttgatcggaacaatggcactgcacgctctcggatgtcagttgaggccatatacacctaccgattacaaaaagcaggggtggtttccgacggtagtggtcgggggaaaggaaaaggaaacgatgtgaacgaaaaagcctacaggtatgactttgtggcggacacacccttattggtttgttggaccggaacatggacgagaacatccaagtgctatccccgatggcgtggcactgggccttgaaactttcccctggggagggttccgtgacactttgtccatccaaggggaagaagacgatattggcccactttatgccacacggccccgc

SEQ ID NO: 65287 - DNA, 264 bp, Zea mays
  Clone ID: MRT4577_159538C.1
atgcagaacctcacgcagtaccaggccgtggagcgcatgaaccccatgctggtgcccactgaccttgacgtcggcaccatggtcacgttccccgtcttgtgccagtgcccggccgccgccgaaaacgccacgacgctcatcacctacgtcatgcagcctagggacaccttgtgcaacataagacagatgatcactgaggttgactggtctagacagaagatgactgcctactataacttcggtggtccacaacaacgttgctga

SEQ ID NO: 65288 - DNA, 1185 bp, Zea mays
  Clone ID: MRT4577_159539C.1
tatgccggatcttaagaagtggatccatgaagatggcaagagggagaaaaccggcatgctgagcattgtcgggtttggtggtgtgggtaaaaccaccatcgcaatggatctctaccaaaatacgggcctgaattctagcgtcgagcaatggtcactgtgtcccagagctcagatcctgaggcggtcgtcagaaatatactgaaccaggtcaaaccactgtccaacaacgcggagaggcgaggcgaagatagctctggcgccgtctccttgaggaagaagaatccagtcattgcaactatattaagccgaattaggctgccgttcccaaatcaaaagcaagataatggtggcggtcgtgacaagcatgaacatgtcaggtctgaaatacataaaaatttgaagtgtagccgctgtgacaaggatggagatccagctttggatggtactggttttgcagccactggtcataaggcttcaatacctggagtgcaagattatgctgatattggtgggtttggtgagatatctggatgtttgcagaaaatgaatagcacacatcagcagattggatcgcctactgaagaagacttaggaagttggggacatcactgtgacccatcaactgtacctgatactatactgcagtgttctgctggcgaagaggtttcttttgttttcaccaatcaggttgacggaaaacttgttccagttgaatctatggtgcgatcagcagctcatcaacaaaacggaatagcagccaccggagaaaaaggagtgcagatacccaaatctcctagcaaacctggaaagcaatccttaaatggcaagaatttgaagatgggatttcatttaaagaattcgtctttgaaatgttcaaccaaatccagaccatcaccaaattgcttgcaagggttgatgaaaaccagcccctttttggatcaacctcaaattaaaaagcttcatgttgcttctgatatatctgacgatgattttgtttgagtgtcaattcagaattacttagtctcatatatgttgatgtgctatctgttgcatatataatgccatcagctttgtcggtgcctattgcatcttttattcaggtttctacaattttcttttaataaaaaataggtcctaataaggtatgtacatagaaaagcaaaaactacttacaatttggaataa

SEQ ID NO: 65289 - DNA, 103 bp, Zea mays
  Clone ID: MRT4577_15953C.1
ccggccgggagcatagtaccattcactatccagacaaacatggtgtgatgtgagaacatgtggtcgtcgatgcggcacagttgcgatggtgtgggcgtggtgt

SEQ ID NO: 65290 - DNA, 385 bp, Zea mays
  unsure (1)..(385): unsure at all n locations
  Clone ID: MRT4577_159540C.1
aaaagaaagaggatgcccanaatgtagtatggacaaacatagattccacaagttcgtgctcagctagactgacacagggagataatggccaactgattcaggcagtaaacaagaagcagtgagctcttatggccactggaggaaaagcttacgagattatatactgacgatggtagcaagggttacacgctgtagcttgagctgaggctatagatcccgggaatagaatgggctgtattttgcgtaggttactatatgctcagaactgttgaagagatagactgcatgaactgttaccagagcatggtatctgtgcttaccttctgtacttgttgaggtgagtgtctatagctgtatagagctgatgagtactacaggcatttga

SEQ ID NO: 65291 - DNA, 865 bp, Zea mays
  unsure (1)..(865): unsure at all n locations
  Clone ID: MRT4577_159541C.1
cttttcagaactacacttctactacggccgcacgactctcctccaagcaccgccgtccgtaccacttctcccgtgcccgcagcgtacgcaatgccgcaccaccaccacaccaatccgtcgcatcctcctgcggcgcgcaagctcctctcctggcgccgcgtagtcgccgcctgcgccactgtcgcggcgctcgcgctcctcctggccgccgcccctgccacggaggaccccagccgatggcgctcctatctcttaggacccctccctgggggtacccgcaaggagacagtggcggccgcagtcgtggccggaagcttcgcgggccccgccgcctccacgtcgttgccaaccgaagcgccgctttcttccttcagcgaaattaatttgtcagctaggattgctccagcagcagccccctctatgttcctggccccttcatcttcacctgcagaaattttttatgatggttcaatggaggaacccgaacatcctgatataaagagaaatccgccaaaggagtcatccccttttctcaaagaagagcccatttttagtggtttgcctacaatgagttctgatgtcaatggagaaaatgtcatggataccaaatctgttctgcctgtaatgccagaggcgcctctttggtcaacagcagctgatgaagagcttatatatgcaaagaaagaaatcactaatgcaccattgacctcagatgaccctgatctttatgcacccttgttccggaatgtatccatctttaaaaggagttatgaactgatggagagacttcttaaggttttcatatatcatgatggagcaaaacctattttccattccccagagntgaaaggtatctatgcgtctg

SEQ ID NO: 65292 - DNA, 266 bp, Zea mays
  Clone ID: MRT4577_159542C.1
aaataaagaagggaacaccgtgaatattcataaaaccatatagtttcatcacacaatactaattgactagtaattccggagtgaaaataactacaaagcataaactcttccaaactaagtaaagattaacattcaaataacaaccggtttaattcaaatagaaaatcacttaattctacaggaaaacagacacaccatgaagctagattttacatacttccaaagttccaacatgcatgacaatatccactttaaatgaataaact

SEQ ID NO: 65293 - DNA, 280 bp, Zea mays
  Clone ID: MRT4577_159543C.1
aggaccggccggaatctcgggcgacccacgcgccttcagacgagcgcggcaccacgcgagcggagtgtggagaaccaccgcggaaccaccgcggcgggaaacgaacaccaaaccgagcgaacaaggcacacaaggaaggcacacggcgaagctccagggaacgcgcacagggccaaacaggcacgcggaggagagccaaccgcaccaacgggcaaggaagcgcaagccagaagacgacaggacagaaacgatcacagcagcgcggacgaacaccagaaag

SEQ ID NO: 65294 - DNA, 265 bp, Zea mays
  Clone ID: MRT4577_159544C.1
tggcacgcccgcaggcaccggatcctgaatatccggcgcgacccgagcgcccgggcctatgaggatgacgcagaggaagaccatgacgacgacggggaaggggacaaacaataatacggtgatgacgaggagactgtattctaagagaggctactcatcacctgtaactcttgaagtgtgagtcattttttttactataggggtggtacctggtgcgacttcatatacgtgtacttgtacgcgccctctgggacacactgagccc

SEQ ID NO: 65295 - DNA, 647 bp, Zea mays
  unsure (1)..(647): unsure at all n locations
  Clone ID: MRT4577_159545C.1
gccataccacttttgatccatttgcagttaatcatggctgcagttttcaatgtttggttaaaactattgtcctggactcctttggtttaaacacgttgaatgtattgtgatgtccttgatctctcgctggttccttctgggattttcncgaaatcccattgaaactttcttggcaatttgtgttttttttaccgttgatgtttgcagcgagataaaaatggatgatcatcgttatgatatgctctttattagtgccacgtaaatcaccaaaaatattttaatgttcctgtaaaaatatggaaataggaccatagaagtggcatgttgcaagattattttaaatcctcggtgaataagtgtcaaccaagagagtctgcaacaaaaatgttgtaattttaaccagtgatacctttatgaatatttacctaggccattgggaaagtcatttatagatttgattatctgactcaaatgctcttagtttcatcggttatattatgtttacaaacacagtacatcagaggtcagtaaattatgaagcgataactgatgttgtatcagggtgattgtgtgccttcgtatcattatatgtgggctattctgacttgtgaaaaattttgtaactatttctctgcaacttgttgtgt

SEQ ID NO: 65296 - DNA, 432 bp, Zea mays
  Clone ID: MRT4577_159547C.1
cgtccgcgctggcgtacaccctggccaccgacggctagccgttccagcttgagctgcttacaccggtggatggcggcaacactggctgattcttattgtaatgttatcgcaatctccgctcggattatctacatggaatcaaactgggttagctctgctgtgccggtgaccatgctgtttgcctctggcagatcctctctgaccttagtatatatcaggcccgtgtaatctatcccaaagaacgtgctcctatgctggaattggaagggacatttccaatattcaggcgatatatatcgctgctggtgtcacatatactgtcatcactgatggactacctttcaagaacgaattgatcgcaccggaggtgtgcaggaccttaattcgatactctacataaatgtctttgctatatcggtctgtgctgctcac

SEQ ID NO: 65297 - DNA, 378 bp, Zea mays
  Clone ID: MRT4577_159548C.1
ttttcatcttccggttttttttgttcttccaatcgtttacgcgtgcgtcctcgtggcgattattatattatatttatagaaggcaaaaagataggcatctccttccaaaccactaatggctggggactgctagatgattgggttcaatcatgacgacttatgatgctctaatctagccacgtccttgtagccagcagcagcagcagcacagcagcagagataaagttggctgaggctgggaactccaaagaggaacatcgtccatggaggctggaggcgcaggaagtggtttgaatggggcggtgcaggcaaaggggactggggctgatgatggctctgccaagcgactgccgccttgctgcgtcaaggccagagccg

SEQ ID NO: 65298 - DNA, 330 bp, Zea mays
  Clone ID: MRT4577_159549C.1
cggccggcccgtccctttttttttttgttttttttttaccccgactggcatatccttccattgcaagccctttagccggagaagagtggagatcaatcacatccatgcgcgtatcacaaaaggtggtcatcgcacacattgctgccatacccacaaaaaaatctgatacgtgcaaatcctgaggcatgaatacactacatgatatctacttgatgcaaacccaaggccttgttgagaataagcccactcaaaggctttgtcctcatagtgcgggaaacgcccaccctgacaaaaaagggcacttggataacagtaatgagaataactgac

SEQ ID NO: 65299 - DNA, 727 bp, Zea mays
  Clone ID: MRT4577_15954C.1
ctaatcagggcgctcaccaccgatgttgagaagttctacgtgatgtgcgacccagagaaggataatttatgtttatatggacttcccaatgagacatgggaagtaaacttgcctgctgaggaggttcctcctgaactcccagcatatatgaggttgtcacaggaacggccaagaaagagtccaaagaaaaaactcctaaaagcagcaacaagactaacaaatctggctcaaagccttcacgccaggtagaacccaactcaagggtcccaaagatgccacctccaaaggacgaggagagtgaaggggaggaaggtgaaccacaggaagaccatgagagtgcgctgtgcggcgcatgtggcctaggttatgacgacttctggatctgttgcgacttatgcgagacatggttccacggcaagtgtgtcaagatcaccccaaataaagcggagcacatcaagcagtataagtgcccctcgtgcacaggaagcaagagggccaaggcttgattctatctatctacgatatagatatgaattgcggacaatgctccaagaaccgaggagcctttgacgggagttgtaagatgaatcttccgggtagggcagctaatagatttgaatacttcgtgtggatactttcggcattggtgctcgagatgcctctaaatatagtgtcagtactgatcaactgttaactgttggagtttggggggccctcaggcatctat

SEQ ID NO: 65300 - DNA, 195 bp, Zea mays
  Clone ID: MRT4577_159550C.1
ctttctagagatgatggacacaactatagtgatggagaatctattggtgcatatggaggttaggatgaccgggaagaataactcagcaacggcggttccaattaaccccttgtccatgagaatatggtttcccacggccaagttacgcgcttggaaatcctttaagaaggacccaagcggccaaaaggggggcct

SEQ ID NO: 65301 - DNA, 477 bp, Zea mays
  unsure (1)..(477): unsure at all n locations
  Clone ID: MRT4577_159551C.1
anaacctcgggaagctttcagctacttaggcctgctcctagatgcctcacagccacaccaagccttatgttcagtcgaacggactgaagcttgcaaaggcaagaggaaggaggaacaacgcgggctgcaaggactaactgatcactggcctgtcaatctagggccgccatgctcgagtgaacttaatattaccgcagtgggactaaagctgtaatggatgatatgaaaaaatctcgtgtcatcatctacatattataaccaatcactatgacctccattcatgtttttacaatgggaccttatcgtcacgaacatctcaattacatggaagcaaactagtgaaagctatctatgcctctgcacttgcaaattatcaggagatgacttcttaaccggtgttgcgtctgaggtgaggcgaagatctttgaatccatgcacatatcactgacctgctactgcttactacctgatgagcgt

SEQ ID NO: 65302 - DNA, 263 bp, Zea mays
  Clone ID: MRT4577_159552C.1
ttcttttaataaaaatctagccaaaacggggagggcctacttcatatacaggggggccaaacaactccccacccaaaaaacccaaaatacaacaagcttaaaaaccaacaattatgggctcctccctgtccttttccagtccgctcccacgccccgtcaacgtttccctatagacctctgccaccaatctaaaggaaactattcacacaaataatgccccaccaaaaactatcccttacacaaatgccatcaaaacaaataac

SEQ ID NO: 65303 - DNA, 529 bp, Zea mays
  Clone ID: MRT4577_159553C.1
ttttatttctatatgcacattctacggtgggggcgaggggtttgatttatctcctgaaggacaattgcccttccgagtagacaccgattacccttacactgtgaataatggcaaatgcaagctccacaccctcatcattgagaatagatgtccgaacttcattcttctgcttgtgtacgaggctgaggggacttctaacctgatcaaacatgacccattggccattcggatctatgatgtctacatgcaaacttacttacggaggcctaccatgcgccttacctttgtggcacgcatcttcaccatcatgaagtactatttccatatctctcttatggctatttctacattcttctcaaagacaagccttactagatcatcaagaactctgagatccccaactacccggagaacggatactacactatatgcacgccttacaaccttcttaactaatgcagcgtagattctatgcactttaccgaattcttagtccacccctagaatgagagtactctggacattggtg

SEQ ID NO: 65304 - DNA, 550 bp, Zea mays
  Clone ID: MRT4577_159554C.1
cattgggaccctcgaggccggccggggctaatacacagttcccaggcctaccgacgcgagtgctttagtgcgcgccatgtgcactcgcggccgcttccctgtcctccgctaccgtcggcgcagacgttcactcggaattgtcgcaaggccgcagcgtcgacggcaacactctcgtacctcctacatatgtgcgctaccttcgcatcggcgatcaacacgctgctaagagcaggacgaacgcaaatccggaggaggcgatcagcgtgcacaccgcggcggataccgacttgcctgtatgatggcgcgctacaagccctgcgacgggtctcatactgtactcatatcggcaaacaacgccctatgatgcgtgttcccgaaagtctgagccgatgagactgcgacgagtaagctgaacacctgtcagctgatgcaccgtcgcaacgatacgcgtccactgaggtgagggatcagtcctcccgacaggtcctgacggagcaccgatgtgctcagactcgccacggtatggtacacctacctcatgagcatgcat

SEQ ID NO: 65305 - DNA, 306 bp, Zea mays
  Clone ID: MRT4577_159555C.1
acttcccacccctgctggactacgacgatccaatagtaacatccctggcgaccacgtatgccaaggagacagggatctacaccgcgcaggatgtagcccatatgtgagccctactgggggtcataaacgggccccgccttagccccatattcgagatgtggaggtgagccaatgactacctggtcaactgaaacaataccttccttttgcatagccaacaattgcagagcagctacctacgaatccagcacgccactcatgccaagcgtctggacaatgtgaactacttcttcgacaattatatac

SEQ ID NO: 65306 - DNA, 410 bp, Zea mays
  unsure (1)..(410): unsure at all n locations
  Clone ID: MRT4577_159556C.1
aaaaaaataattagnttgtnagttttgtagtgtaggtanagttgttattaagnaanaaagagggaatattttttaattantgangnaaaaaattttgttttttggtgggtggnannnnnngnantattagnaaaaattttaatgatggtgatggaaggttaaaattttgggtggttgagnangttaagaggaggtaagntttttttgaatnttgggtggtannattaaaaggtaaaggtaaaaaaaatatgatngnntgtggaaatatttttgngtattgaatgatttganaaanatttatttattttgnaanagntaagagtgnataannagaaaggtttattanaagaaggtttgtggatggggaattaaaaaaagggggaatttaaaatgnaagaaattataatatg

SEQ ID NO: 65307 - DNA, 230 bp, Zea mays
  unsure (1)..(230): unsure at all n locations
  Clone ID: MRT4577_159557C.1
ctaantaanngngctnatnagcacagcaagtctcaccagactagcggctagcgcgagaatggnccaaggacatcgaggccgcggncgcacgaggggcaaggacctaacttcggnacccggccttccggggccggcttngttggaacgtcggnangaaggctgganccaagttggttcgtttgttaaccggcgtcgggtgnattcggctcgnagttttcggtgtggcccaa

SEQ ID NO: 65308 - DNA, 428 bp, Zea mays
  Clone ID: MRT4577_159558C.1
gggtttacccacgcgtccgcttcttcttcccggcccgctaacatcagacgccgcggaacagctacatcttggatggtctcctgcactgccacacccaggacgcttgaggggtaggccccaccttaggcccccgcatgcacactgagcggtgccgcccgacgcgctcatcaatctgcaggggaggcagtggactgatgaacacgtcgctccacaaggtgacctgtggaggagccaatacctgccgcctacgctggtgctaaaacgggttcagaggttgtctctacttacgcatccagcgccacgacatgacactcgggggactaaacggctcacataacctgcaggacgggtgagaatccatggacgtgcaccaatgccaatgactatgcgtgcagcgcgacggcgaccacgaccacggtgactgctac

SEQ ID NO: 65309 - DNA, 1257 bp, Zea mays
  unsure (1)..(1257): unsure at all n locations
  Clone ID: MRT4577_15955C.1
cgggtactagtgttgtgctatattcttcagtttctggatgctactgggcctatcttgttattttttaagtaaagtatgtgtcaactggagcattgaatgcatgattgaaggtcggatgtcttgtaagcaaaccagtttgcatattcatgattaggaatagcagcattggctgccacgttgttgtggattaaatcaaatggacgcaatagtggtttaaataatgttggttattttctcatgtttcacccttgttctataaaaagtttaggaccaattagtgtaaggctttaagaatgaccttaaaatgctatactgttgtgttttgatgtgtttaacagtagctttttgtattccattgttactttagcactgtcttaccttttggatcatgttttacatatgtttgatactttaatgtgaaatccttttttctcatgtcccctgaattccatattatagattattagattttgatcaaagccacgtgggactaaattttctttgtataactaaagcagtctgatggagtcaccttcgggtggttgcgttgcaggaaacgtctcttcaccatgatcaataatcttcccagcatatatgaggttgtcacaggaacagccaagaaagagtccaaagaaaaaactcctaaaagcagcaacaagactaacaaatctggctcaaagccttcacgccaggtagaacccaactcaagggtcccaaagatgccacctccaaaggacgaggagaatgaaggggaggaaggtgaaccacaggaagaccatgagagtgcgctgtgcggcgcatgtggcctaggttatgacgacttctggatctgttgcgacttatgcgagacatggttccacggcaagtgtgtcaagatcaccccaaataaagcggagcacatcaagcagtataagtgcccctcgtgcacaggaagcaagagggccaaggcttgatnnnnnnnnnnnnnnnnnnnnnnnngaattgcggacaatgctccaagaaccgaggagcctttgacgggagttgtaagatgaatcttccgggtagggcagctaatagatttgaatacttcgtgtggatactttcggcattggtgctcgagatgcctctaaatatagtgtcagtactgatcaactgttaactgttgtagtttgtggggccctcaggcatctatgttctatagtctactgtgtggtggtttagataccgtctatgccatttgtgatgaagcagtcgttttaaagttagatccacagt

SEQ ID NO: 65310 - DNA, 369 bp, Zea mays
  unsure (1)..(369): unsure at all n locations
  Clone ID: MRT4577_159560C.1
ggaagataaatttacctcgcagcatcaactcatgaacggtttcgaattggttcataaacgcgagggttcgtctgtggaagccgttgatcgaggagatgtaccaggaccttaagaggagctcgggtgcaggaggaggagggcacggtccggcgatggagccgcagcagcacttgagcaaacgttgaatttgcgagctggaagatggtggccagtgaaccatccagctccatagttgcctgctgtcgatttaccattggcccttgtagtttccgtgtgctatgtttttgtacatatcattgccaactccagcatttaacananaaaaaaaaaaaaaaaaaaaaaaaaaaaaaaaaaaaaaaaaaaccatat

SEQ ID NO: 65311 - DNA, 563 bp, Zea mays
  Clone ID: MRT4577_159561C.1
tacctcgagggcggccgtcagctgttgcttgtctgattgtgattgcgagactgtcgccgaccaccaccgcgccgaaaggttcctccgcctgccattcgacgatgaactgcaggcattgctcatctacgctggtggacgactaccaccacttcgccaagtgggctcctctttccgtcaaagactggccggtgtccgatcccgaatcactgaggggctggcactagctcgtgaaatcgatagatgtcctttcatgcgtgtctactgccgctgtttctggccaaaccagctcttatgtgtccacacgacaagacatctacagatgtacctcatcgaaagtgaacgtggtagactattcgccggcgtatacaatgtgtccagcatcaggaccatatacaatcataggtgctgatgaacgtgaagacgatttataggatggttgggttactcgcccaagaccctcgaggaaaacgaagaatttgatgaaaagcacaacctatatgaccagaacgcaacaacgagaaacaacaaactataccgttttacgattcacaatgtggatacat

SEQ ID NO: 65312 - DNA, 115 bp, Zea mays
  unsure (1)..(115): unsure at all n locations
  Clone ID: MRT4577_159562C.1
ttgggcatgtaaaggtaaatgaaccggggacaagagatacaaagcgagaggggtcaacaagtccgcggnctggtggacaactccatggccgagtcaacatccgacctccaaggct

SEQ ID NO: 65313 - DNA, 305 bp, Zea mays
  unsure (1)..(305): unsure at all n locations
  Clone ID: MRT4577_159563C.1
taacgntggtttcttaagatcccttgtcaagatacacatgagcagaaatttttttttttttcaaatacctaccaatttcaaagatttcaatagcttgaatttcctctcattatctctgaacaacattactatcagaataccatcctcttttcttcatttcacatcacttacagcttaaaatctctcatctaattctcttacttttcaaatcccaattatccttatcactctagtaaacatatactttcttctactcaacaataatattctcttcttaaacatttcaaatttttcctcttcacctt

SEQ ID NO: 65314 - DNA, 1171 bp, Zea mays
  Clone ID: MRT4577_159564C.1
cgacaaaaggcatttgcagaatggattctttacacatctagtggaatttccagtgcattataccattcatgtgatgttggcacttggtgcattctgtcttttcgtgtattgcagtttttggacttctggctttccttcatggctgtcgtgggtacgttcatatatatggctacaattgatgaagtttcaaagagagcaatgcatactgctgtatttatcctcacggctcttttagctgcgactggtgcaacaagatctgcaaatattggaattgttattgccattggttctgttggcctgcttatggggtggctactggagttctctacagcacgaaggtttatatgctggccctcacgaattaaccttaatatgcctcaaagttggccaaacctcagaactttgttccagattactctggagatggtgaacaaacgcttccgttggatattcttacttttgggtttcatgacactgtcttttgcggctatcagctggaagctggaatcaaataacaactactggatttggcacagcatatggcacataaccatttatacttcttcattcttcttcctgtgctcaatgcgtgtcagcccaaggaacagcagtccagagtcaaactatgagctaacgaggcaagactctttgcctagatctgagccaagggaaacctaggtttgtttgtgtaggtacatgattatctgttgcagtccggagcgtaataacatatgaccaatcccagaagagggatttgggaaccacgtgtggtaagtctccgcagctgcatcgcatgagaactgtaaatagcccggtgcaggtaaaacatctatttgtgggatgttcatcgatgaacattgataatcatgtaaatgcgttgtaaaagtaaatccccaatggaccgggcaggtaaattaaaaaaaaaaaaaaaaaaaaaaaagaacattaaaaatcatgtaaatgtgttgtaaaagtaaatccaaaatggaccgtctcttgaggttagctcatgcatcatgagtttggccacttgtcgtagtacgagtctcatacaagctttgatgtggggaacgtatccggtgaaaatcaacctctccgtgcaaccatgtaaacttctaatctgaaccacatgatgtccaaccaaatagacgtgcggaggagtgagagaggg

SEQ ID NO: 65315 - DNA, 1226 bp, Zea mays
  unsure (1)..(1226): unsure at all n locations
  Clone ID: MRT4577_159565C.1
tctccgacaaccgaatggattctttacacatctagtggaatttccagtgcattataccattcatgtgatgttggcacttggtgcattctgtcttttcgtgtattgcaggtaagctacttagcacccacttgttgaatgctagtgtaaagattgttgggcatggtactggtattcatcagtactagtcatgtctatccaaatcaagnnnnnggacttctggctttccttcatggctgtcgtgggtacgttcatatatatggctacaattgatgaagtttcaaagagagcaatgcatactgctgtatttatcctcactgctcttttaaccgcaactggtgcgacaagatctgcaaatattggaattgttattgccattggttctgttggcctgcttatggggtggctattggagttctttacagcacgaaggtttatatgctggccctcacgaattaaccttaatatgcctcaaagttggccaaacctcagaactagcagtggtaacaacgcagagtacgcgggcaaacgcttccgttggatattcttacttttgggtttcatgacactgtcttttgcggctatcagctggaagctggaatcaaataacaactactggatttggcacagcatatggcacataaccatttatacttcttcattcttcttcctgtgctcaatgcgtgtcagcacaaggaacagcagtccagagtcaaactatgagctaacgaggcaagactctttgccgagatccgagccaagggaaacctaggtttgtttgtgtaggtacatgattatctgttgcagtcaggagcgtaataacatatgaccaatcacacaagagggatttgggaaccacgtgtggtcagtctccgcagctgcatcgcatgaggactgtaaatagcacggggcaggtaaaacatctatttgtgggatgttcatcgagaacattgataatcatgtaaatgtgttgtaaaagtaaatccaaaatggacgtctcttgagattagctcatgcatcatgagtttggcacttgtcgtagtacgagtctcatacaagctttgatgtggggaacgtatccggtgaaaatcaacctctccgtgcaaccatgtaaacttctaatctgaaccacatgatgttgatccaaatagacgtgcggaggagtgagagaggggatttgaaaaanaaaaaaaanaaaaaaataaaaaattaaattttaaaaaataata

SEQ ID NO: 65316 - DNA, 734 bp, Zea mays
  Clone ID: MRT4577_159566C.1
cattgggtacctcgaggccggccgagacccgaagtaatcgcctctgcatcccataccactacgacgcatctcgtcgctcgtctattcgatgccgttcttccaaccaaaatgatggcatacgaaaaggacagtgtgcaccctgctgctatcggatctgaaacgaaacaaagaggacatgcacacctacctcaacgatccggtcgacaacgcccataatatctccgaccactgacgcatccgcgcctccgtgcccaccatgaagatcctcctcaagaagatggccacggacatcctcgcctcccgcctgagctgaacgaaagacggaacccctgagtacggattaaacccccttgttacgcacttgtctgagatacttggagatgaaggcgggatgttcattcgatcgcatcggtgaggaaacctagaactaacatcgccgctttgccataaggtagcatgctgatccctagacaatgtaatattctacgaggaggacgagaagaacgaacactgagaatgctaagaatctagcctctgatgctgaccttaatgccaatgatgcttttgggacggcacacacagctcgtgcttcaaccgtaaggagttaccaagacatttgaagcctgctgatgctggctaccgcatgcagaatgaacattgaccaccttgtatgcatgtgtggtccacccaaagaagccatttgccgcccttgctggtgcatccaagggctcaac

SEQ ID NO: 65317 - DNA, 1896 bp, Zea mays
  Clone ID: MRT4577_159567C.1
atggcagccctgagcagatttatatccaggctgggagaaaaaggtttaccattttacaagctactcaagaaagtggacaagtttcagtggacttcagaagcacaggaagccctagatgcactaaagaaattcttgacaaccccaccagtactgaaaccaccacggcgagccacatcaactcaaccagccgaagatctgctgctgtatatctcttgcacgactcacgtggtaagcaccgcgttggtggtcgagcgagcagaagaaggacatgcctacccagtgcaacatcctgtttatttcatcagtgaagttctgggtccctcgaagaaaaagtatcctcaagttcagaagctattatacgcagtacttctaactgcccgcaagctacgtcactactttgacgaccacaaagtcatagtagtcactggttttccgataggggacatccttcacaacaaggaagccattggtcgaatagccaagtgggcctgcgaactgggatctcatgacatcgaatttcgacctcgcactgccattaaaacccaagcattggttgacttcgtatcagaatggactgaacaacaagtaccagaaaacccagaaactgcagaagtatggcggatgtattttgatggctcactgaagctgcagggagcaggcgcgggaattctcttcatcgcacctggaggcgagcacctcaagtatgccctccagttgttatttctagcctccaacaatgcagccgagtatgaagctctgatccatggactaaacatcgccatatcattaggcatcaagagactaatggtatacggagattctttggtagtcataagccagataaacaaagaatgggactgttcgaatgattcaatgggaaaatactgcactgtcgtccgaaaactagaagataaatttgaaggcctagaatttcatcatgtagaaagagatcgaaacacagcagccgatgtattgtccaagctagaatccagtcgaactcaggtcccacccggagtctttgtacaagaaataccacaaccaagcatctcaatggatcaggcagaagagtcgtccaggacgctaatcgggaaggtcttcaggtcgggattctattggccaacagcgaaaagtgatgccgccgagttagttcggaggtgcgaagcttgccaatacttgtcaaagcaacaacatctaccagcacagcaaatgcagaccataccggtgacttggcccttcgcatgctggggattagatatgattggacctttcaagaaagctcaaggaggatacactcacgtgttggtagcaatcgacaaattcactaaatggatagagttcaaacccattgcttctttaacctcagctaaagtcgtggaattcatacaagacataatattcaggtttggaataccgaacattatcataaccgacctggggtccaacttcacaagttcagagttcttcgatttctgcgagcaaaaaagcattcaggtcaagtatgcttcggtagcacacccgagagccaacgggcaggttaaacgagctaacgggatgatattggaggcactcagaaaaaaggtcttcgataaaaatgagaagttcgcaggaaaatggataagggaattgccctacgtcgtttggagcctaagaacccaacctagccgagccctgtatggaaacactcctttcttcatgttctatgggtcagaggcagtactacctgccgatctcaagtttggggcaccgaggctgatctttgaaagcatagcagaggccgaagcaactaggctagaagatgttgatgtactcgaagaagagcggctgaacgcagtaattcaatcggcacggtaccagcagactctaagacgctatcacgacaaggccgtacgacaatga

SEQ ID NO: 65318 - DNA, 1770 bp, Zea mays
  Clone ID: MRT4577_159568C.1
atgccgtttggcctcaaaaacactggagcgacttatcagagagccattcaaacatgtttagccgatcactggggcaagcgtgtggaagcctacgtggatgacgtggtaatgaaaacagagaactcggaaaacttcatcgaagacttacagctggttttcaacagtctatggcgatatcgatggaagcttaatcccgaaaaatgtgtctttggggtaccggcagggaagctactcggatttattgtcagccaccggggaattgaagctaatccggataagattgaagctatcataaaatggaagctccacaatcacaaaagaaggctgggagaaaaaggtttaccattttacaagctactcaagaaagtggacaagtttcagtggacttcagaagcacaggaagccctagatgcactgaagaaattcttgacaaccccaccagtactgaaaccaccacggcgagccacatcaactcaaccagctgaagatctgctgctgtatatctcttgcacgactcacgtgctgcagggagcaggcgcgggaaatctcttcatcgcacctggaggcgagcacctcaaatatgccctccagttgttatttccagcctccaacaatgcagccgagtatgaagctctgatccatggactaaacatcgccatatcattaggcatcaagagactaatgctaggatccagtcgaactcaggtcccacccggagtcattgtacaagaaataccacaaccaagcatctcaatggatcaggcagaagagtgtaatatcgtgaatcaaccagagtcaggctctgatgactggagaaggccgaacatcagatatatcaagaatgaagaggaaccagacgataaaaatgcagccgagcgcatcgctagacagtcagctcactacacactcattggggatacactatacagaaggggcgcatcaggcatcttcatgaaatgcattctatcgtctactgggaagcgacttctagacgaggtccatgctggacaatgtggaatacacgcggcgtccaagacactagtcgagaaagtcttcaggtcgggattctattggccaacagtgaaaagtgatgcagtcgagttagttcggaggttcggaataccgaacagtatcataaccgacctgggatccaacttcacaagttcagagttctttgatttctgcgagcaaaaaagcattcaggtcaagtatgcttcggtagcacacccgagagccaacgggcaggttgaacgagctaacgggatgatattggaggcactcaggaaaaaggttttcaataaaaatgaaaagttcgcaggaaagtggataagggaattgccctacgtcgtttggagcctaagaacccaacctagccgagctctgcatggaaacactcctttcttcatggtctatgggtcagaggcagtactgcctgctgatctcaagtttggggcgccaaggttgatctttgaaagcatagcagaggccgaagcaaccaggctggaagatgtcgatgtactcgaagaagagcggctgaacgcagtaattcaatcggcacggtaccagcagactctgagacgctatcacgacaaggccgtgcgacaacgatccttttcagtaggagatctcgtcctccgccgaattctaacgggggagggacgacacaagttatcgcccttatgggaaggaccattcatagtagcagaagtcactcggccgggatcatatcgtctcactcaaatggacgacatagaaattgggaactcctag

SEQ ID NO: 65319 - DNA, 2088 bp, Zea mays
  Clone ID: MRT4577_159569C.1
atgtcgggagtcccgagagaactggtcgagcacaaactgaaggtctacccccaggcgaggccgattcggcaaaaactacgtcgcttcacgcccgacaagagagaggccattcgcgctgagctggctcgcttggtcgcggctgggtttattagagaggtgttacatcccgagtggttagccaaccctgttcttgtactcaaaaagaataaagtggattggcgcatgtgcgtcgactatacggatctcaacaaacactgtccaaaggatcccttcgggcttcctaggatagatcaggtggtagattctaccgctggatgttctgtgctgtctttcctagattgctactccggatatcatcagattagcttggcaaaggaagacgaggaaaaaacagcgttcatcactccgttcggtgctttctgctatacctccatgccgttcggcctcaaaaacgctggagcgacttatcagagagccattcaaacatgcttagctgatcactggggcaagcgtgtggaagcctatgtagatgatgtggtaatcaaaacggagaactcggaaaacttcatcgaagacttacagctggttttcatcagtctacgtcgatatcgatggaagcttaatcccgaaaaatgtgtctttggggtaccagcaggaaagctactcggatttatcgtcagccactggggagttgaagctaatccagataagatcgaagctatcatgaaaatggaggcgccacgatcacaaaagaaagttcagagacttaccggatgtatggcacccctgagcagattcatatccaggctgggagaaaaaggtttaccattttacaagctactcaagaaagtggataagtttcagtggacttcagaagcacaggaagccctagatacattgaaaaaattcttgacaacaccaccagtgttgaagccgccacggcgagccacgtcaactcaaccagctgaagatttgctgctgtatatctcttgcacgactcacgtgggagcaggcgcaggaattctctttaccgcacctggaggcgagcacctcaaatatgccctccagttgctatttccagcctccaacaacgcagccgagtatgaagctctgattcatgggctgaacattgctatatcactaggcatcaagagactgatggtacacggagattctttggtagtcataagccagataaacaaagaatgggactattcgagcgattcaatgggaaagtactgcgccgccgtccggaaactagaagataaatttgaaggtctggaatttcaccatgtagagagagatcgaaacacggcagctgatgtattgtccaagctaggatccagtcgaactcaggtcccacctggaatctttgtacaggaaataccacatccaagcatctcaacggaccagacagaagaatgtaatatcgtgaaccaaccagagtcagattctgatgactggagaaggtcgatcatcagatatataaagtttgaagagaaaccagatgacaaaaatgcagccgagcgcatcgctagacagtcagctcactacacactcattggggagacactatatagaaggggtgcatcaggcgtcctcatgaaatgcattctctcatctactgggaagcgacttctagatgaggtccatgctggacaatgtggaatacacgcagcatccaagacactagtcgggaaggtcttcaggtcgggattctattggccgacggcgaaaagtgatgcagctgagttagttcagaggaaaaaggtcttcgataaaaatgaaaagttcgcaggaaaatggataagggagtttccctacgtcatttggagcctaagaactcaacctagtcgagctctgcacggaaacactcctttcttcatggtctatgggtcaaaggcagtattactcgctgatctcaagtttggggcgccaaggttggtttttgaaagcatagcagaagccgaagctactagactggaggatattgatgtactcgaagaagaacggctgaacgcagtaattcaatcagcgcgataccagcaaactctgatacgctatcacgacaaggccgtgcgacgatga

SEQ ID NO: 65320 - DNA, 556 bp, Zea mays
  Clone ID: MRT4577_15956C.1
tcttggacgcgtgggccgccaaaaccctagccactcccccgccgccgcctcctccttcgtctaccgtccgcaccagcccatggaggaagacgccatctcgacgctcatggacatcgacgactcgccgctcagcgccgcgggggccgggttcctcgacgaggatgacggggacggggagaggggggtggccccgcaccgcgcgggccgcggcggcggcggtggtggcgaggcccgcgggcccctcctcttctccgggttcttcaacagcttcgacggcgccgacttcgacgacgacgacctcgcctgagggaactaaccgcccggttcggtaacggaggttgttcgtgggtcgcgatccgtgttatgtcgatatagtgatgggctctcttaattagcgtatcggtatcagactcgtttgagcaatctgaagatgtttagggatcaatataaatacctttgtgccctgtggttcgtggatcactgtgcatgtggtcttccgtatctttttggtactttgggtccattggcatgatctattgaagtttgctttgttgtc

SEQ ID NO: 65321 - DNA, 1998 bp, Zea mays
  Clone ID: MRT4577_159570C.1
atgccgtttggcctcaaaaacgctggagcgacttatcagagagccattcaaacatgcttagccgatcactggggcaagcgtgtggaagcctacgtggatgacgtggtaatcaaaacagagaactcggaaaacttcatcgaagacttacagctggttttcaacagtctacggcgatatcgatggaagcttaatcccgaaaaatgtgtctttgggaaaaagtatcctcaagttcagaagctattatacgcagtacttctaactgcccgcaagctacgtcactactttgatgaccacaaagtcatagtagtcactggttttccgataggggacatccttcacaacaaggaagccattagccgaatagccaagtgggcctgcgaactgggatctcatgacattgaatttcgacctcgcactgccattaaaacccaagcattggttgacttcgtatcagaatggactgaacaacaagtaccagagaacccagaaactgcagaagtatggcggatgtattttgatggctcgctgaagctgcagggagcaggcgtgggaattctcttcatcgcacctggaggcgagcacctcaaatattccctccagttgttatttccagcctccaacaatgcagccgagtatgaagctctgatccatggactaaacatcgctatatcattaggcatcaagagactaatggtatacggagattctttggtagtcataagccagataaacaaagaatgggactgttcgaatgattcaatgggaaaatactgcactgccgtccgaaaactagaagataaatttgaaggcctagaatttcatcatgtagaaagagatcgaaacacggcagccgaggtattgtccaagctaggatccagtcgaactcaggtcccacctggagtctttgtacaagaaataccacagccgagcatctcaatggatcaggcagaagagtgtaatatcgtgaatcaaccagagtcaggctctgatgactggagaaggccgatcatcagatatataaagaatgaagaggagccagacgatagaaatgcagccgagcgcatcgctagacagtcagctcactacacactcattggggagacactatacagaaggggcgcatcaggcatcttcatgaaatgcattctctcatctactgggaagcaacttctagatgaggtccatgttggacaatgtggaatacacgcagcgtccaagacactagtcgggaaggtcttcaggtcgggattctattggccaacaacgaaaagtgatgcagccgagttagttcggaggtgcgaagcttgccagtacttgtcaaagcaacaacatctaccagcacagcaactgcagaccataccggtgacttgtccctttgcatgctgggggctagatatgattggacctttcaagaaagctcaaggaggatacactgatgtactggtagcaatcgacaaattcactaaatggatagagttcaaacccattacttctttgacctcagctaaagccgtggaattcatacaagacataatattcaggttcggaataccgaacagtatcataaccgacctgggatccaacttcacaagttcagagttctttgatttctgcgagcaaaaaagcattcaggtcaagtatgctttggtagcacacccgagagccaacgggcaggttgaacgagctaacgagatgatattggaggcactcaggaaaaaggttttcgataaaaatgaaaagatcgcaggaaagtggataagggaattgccctacgtcgtttggagcctaagaacccaacctagccgagctctgcatgggaacactcctttcttcatggtctatgggtcagaggcagtactgcctgctgatctcaagtttggggcgccaaggttgatctttgaaagcatagcagagaccgaagcaactaggctagaagatgttgatgtactcgaagaagagcggctgaacacagtagttcaatcggcacggtaccagtag

SEQ ID NO: 65322 - DNA, 285 bp, Zea mays
  unsure (1)..(285): unsure at all n locations
  Clone ID: MRT4577_159571C.1
cgcgtccggagcaaggaagagatcgagcgcatggtgcaggaggcgganaatttcaagaccgatgacgagggggtgaaccgcatggggggggccgtcaacgcgctggagaactacgcgtataacatgcgctacacggtgcgtgacgagaatatcgcgttgaatctgcccgttgatgacgagaagaatatcgtggactcgagcgatgacgtcatctattggctcgacggttaccatctttcggaggccgatgagttcgaggactatgatgaaggatttggagagttt

SEQ ID NO: 65323 - DNA, 431 bp, Zea mays
  Clone ID: MRT4577_159572C.1
gcgtgtcctatatactctgtaccgtggcacgagtccgttgaactatggcgcacgcaccaatatcggtaatttaccatagcgtctctatttccctcgcgagacccatgtgcacatctgtatctagccttaatactgataggagcgtacatgatgcaaactgcccgaatgactgaaccatacctgcgacccaataaaatgttggtggactacaatgaacctccaacagtagataatatacttatcttatcttgagctgaaccttgatgagggggagtctactatgtctggcccaaataggcctcatgagcgcgtccctttgaaggaaaggaaatcagattggcatgcttgctctggacaacaaagttggcttcaagggttttgccgtgccaaaggagccgcaggataaggctggcaaatttgactttcatggg

SEQ ID NO: 65324 - DNA, 1782 bp, Zea mays
  Clone ID: MRT4577_159573C.1
gaagccattggccgaatagccaagtgggcctgcgaactgggatctcatgacatcgaatttcgacctcgcactgccatcaaaactcaagcattggttgacttcgtatcagaatggactgaacaacaagtaccaaataacccagaaaccgcagaagtatggcgaatgtattttgatggctcgttaaaactgcagggagcaggcgcggggattctctttaccgcacctagaggcgagcacctcaaatatgccctccagttgttatttctagcctccaacaacgcagccgaatatgaagctctgattcatggactgaacattgctatatcactaggcatcaagagactgatggtatacggagattctttggtagtcataagccagataaacaaagaatgggactgttcgagcgattcaatgggaaagtactgcaccgccgtccggaaactagaagataaattcgaaggtctggaatttcaccatgtagaaagagatcgaaacacggcagctgatgtattgtccaagctaggatccagtcgaactcaggtcccacctggagtctttgtacaagatataccacatccaatcatctcaatggaccaggcagaagaatgtaatatcgtgaaccaaccagaatcagattctgatgactggagaaggccgatcatcagatatataaagaatgaagaagaaccagatgacataaatgcagccgagcgcatcgctagacagtcagctcactacacactcattggggagacactatacagaaggggtgcgtcgggcgtcctcatgaaatgcattctctcatctactgggaagcaacttctagatgaggtccatgctgggcaatgtggaatacactcagcatccaagacactagtcgggaaggtcttcaggtcgggattctattggccaggagcgaaaagtgatgcagccgagttagttcagaggtgcgaagcttgccagtacttgtcaaagcaacaacatctcccagcacagcaactgcagaccataccagtaacttggtcgttcgcatgctggggactggatatgattggacctttcaagaaagctcaaggaggatacactcatgtactggtagcaatcgacaaattcactaaatggatagagttcaaactcattgcttctttaacctcatctaaggccgtggaattcatacaagacataatattcagattcgaaataccgaacagtatcataactgacctaggatccaacttcacaaattcagagttcttcaatttctgtgagcaaaagagcattcagatcaagtatgcttcggtggcacacccaagagccaacgggcaggttgaacgagctaatgggatgatattggaggcactcaggaagaaagtcttcgataaaaacgaaaagtttgcaggaaagtggataagggagttgccctacgtcgtttggagcctaagaactcaacctagccgagctttgcatggaaatactcctttcttcatggtctatgggtcagaggcagtactacctgctgacctcaagtttggggcgccaaggttgatctttgaaagcatagcagaagccgaggctactaggctagaggatgttgatgtactcgaagaagaacggctgaacacggtaattcaatcagcacggtaccagcaaactctgaggcgctaccacgataaggccatgcgacgtcgatcctttgcagtgggagatctcgtcctccgccgaattctacgggggagggacgacacaagttgtcacccctatgggaaggaccgttcatag

SEQ ID NO: 65325 - DNA, 685 bp, Zea mays
  Clone ID: MRT4577_159574C.1
atctcgttggaaggggtatccaagttgagccacctcagcaaacttgctcgtgacaacaacacggcaagcaggacagttgaagcagatcgcttgcatacgatgctcctcgcaatggcggatgcgcgcgctgttctaataaagcttgcggatcggctgcataacatggagaccttagaagctttgccttgtgccaaacaagaaagattcgccaaggaaacaatggagattttcgtgcctctagctaaccggctaggggttgctagctggaaagaccagctggagaatctctgtttcaagtatctgaatccggaagagcacgaggagttgtcgtccaaacttagggaatccttcgacgaagaactgatcacatctgccgtggataaactggataaaggcctgagggatgctggtgtctcgtaccacagtctttctgggaggcacaagagcctatacagcatccattgcaagatgctaaagaagaacttgacgatggaagagatccacgatatacacgggctgcgtcttttggttgagagcgaagaagattgctacgaagccctttgcgtcgtccacagactgtggcctcgagtcaccggtcgattcaaggattacatatcacgtccgaaactaaatgggtatcggtcgctgcacactgtcgtcatgagcgaaggcgtccacccgttcg

SEQ ID NO: 65326 - DNA, 2412 bp, Zea mays
  Clone ID: MRT4577_159575C.1
cccacgcgtccgcggacgcgtggggcggagcatgcacgctcccacgcggccagcgtgcgacgaattctttggttccgcaggcctggagccttgtgtggggctactcttgctccatcacctacggacgtaggaataccaaccatgccactgccagatctcctctcctctccactgaggactctgaccagtgggactaggatattccttcttcttcacccacgactccgccttcctagttcttgggcggccggcgaggacgaacacggactcgcgctctcgctcgcgccatcggagggaaggagatccactcggagcatgcgggccgccgcgcggtagatgaaactgaggaacacggcaataacacgagcaaattcagcttgtcttccaatgggggatcgtgttggtgtcaagtacaacagcatcaatgaggctgaagagcgtaagggagggcatggcatccccaaggtttccatgatacccctcatattcctcatattttatgaagtttcagggggtccctttgggattgaggatagtgtcaaggctgctgggccactactggcaattttgggctttcttctgtttgcactcatatggagcgttccagaagctctaatcactgctgagatgggcactatgttccccgagaatggtggttatgttgtctgggtttcttcagctcttggtccgttctggggttttcagcaaggttgggcaaagtggctcagcggtgtcatagataatgccctctatccagtcctatttctggactatgtcaagtccagtgttccagctcttggaggtgggctcccaaggaccttagcggtgcttatcctcacagttgcgcttacatacatgaactacagagggctgactatagttggctgggtggcagtctttcttggggtgttctctcttctcccgttctttgtgatgggattgatagctattccacagattgaaccttctaggtggcttgaaatggacttggggagtgtggattggggattgtatctgaatacactattttggaacctcaactattgggattcaatcagcacattggctggtgaagtcgagaatccaaagagaaccctaccaagagcgctttcttatgctctagttctagtggtgggaggatacctctacccattaatcacttgcacagcagcagttccaatcgttagggagcactggtcagatgggtatttttcagacatcgcaagaattctcggtggcatttggttgcactcatggattcaagcagcagctgctttatccaacatgggcaattttctcactgaaatgagcagcgattcttaccagcttcttgggatggctgagcgaggcatgctccctgacttttttgccaagagatctcactatggaaccccgcttattggcatcctgttctctgccttcggtgtgatcctactgtcctggatgagcttccaggagatcatcgctgccgagaactacctctactgcttcggcatgatcctggagttcattgccttcatcaagctgcgggtgtaccatccgaacgcctctcggccctacaagatccctttgggcaccattggtgctatccttatgatcatcccacctggtctcttgatcattgtggtgatggcactcgcgtcctacaaggtgatggtggtgagcatcctagcgatggtcttcggattcgtgctgcagccgtgtttggtgtacgtggagaagaagcggtggttaaggttctccatcagtgcagacctgcccgatttgcctgatgtgcaggaaattgctgaagatgatgctgtcccactcgtggtctaatattcggccattgtgctctggaggtgttgttcccaatcgagacatcctaggatggaatgtgacacactgggattcacgaccttgtatctcctgaatgagttccaaagccagaggtcttagacatcttgtataaggacacattatgttttcaccgtgctattgaacatcatgatggcatcatgcatcaaacagaaatgtaagccccagacagtgttcatcaaaggagatcatccagattatcaaatacttgttgcatctgctgtcagctgtcgcttaacttgtctatatactagggtcgatccatgacatgacatgaggttactcatctgggatcgccttaaaatgggtgaacgttaactcttgataagaggcagtagaggttctcgacctgcagattgtaacctggtttccattgcataaactgttatcagtaattccatcttttgcgtacagttttgtgttataaatggagcatcggcgtaattgtccttggaagttagttgccattattctgcaaatctgcatggttcgactcattttcgcaaacaatataaaatgtttttcgcaaacaatataaaatgttgagttttattt

SEQ ID NO: 65327 - DNA, 902 bp, Zea mays
  unsure (1)..(902): unsure at all n locations
  Clone ID: MRT4577_159576C.1
gggttcgcccttaagcagtggtaacaacgcagagtcagactctgatgactggagaaggccgatcatcagatatataaagaatgaagaggaaccagatgacaaaaatgtagccgagcgcatcgccagacagtcagcccactacacactcattggggagacattatacagacggggcgcgtcaggcgtcctcatgaagtgcgttctctcatctactgggaagcgacttctagatgaggtccacgctgggcaatgtggaatacacgctgcatccaagacgctacccgcgtactctgcgttgttaccactgcttaagggcgaatcgaaaagcgacgcagccgagttagttcagaggtgcgaagcttgccagtacttgtcaaagcaacaacatctaccagcacagcaactgcagaccataccagtaacttggcctttcgcatgctggggactggatatgattggacctttcaagaaagctcaaggaggatacactcatgtactggtagcaatcgacaaattcactaaatggatagagttcaaacccattgcttctttaacctcagctaaggctgtggaattcatacaagacataatattcagattcgggataccaaacagtatcataactgacctaggatccaacttcacaagttcagagttcttcgatttctgcgagcaaaaaagcattcagatcaagtatgcttcggtagcacacccaagagccaacgggcaggttgaacgagctaacgggatgatattagaagcactcaggaaaaaggtcttcgataaaaatgaaaagttcgcaggaaaaatggataagggaattgccctacatcgtttggagcctaagaacccaaccgagccgagctctgcaggaaacacncccggccgaacccgagggtacc

SEQ ID NO: 65328 - DNA, 343 bp, Zea mays
  Clone ID: MRT4577_159577C.1
ctcacgctttcaaacagactcagggccttctgctattcaaaactgcaccaggggcaaggtcaccagccagtgaatgactgagtgcagaactagcccaaaccctagaccccgcatccaaatatcccaccaatccaccagatgctatccaagaaaggactctatacaaccaaactccgacttcgagctacatcgatccatagatggtcccggactcgaataccacgcttgctatccatgacgacgaacccatcgtctcctatgtagatcgatcgatggccacagacacataatcaccgacgccgacgacggtgacgactcttgtgatccgcaactaggtataacc

SEQ ID NO: 65329 - DNA, 540 bp, Zea mays
  Clone ID: MRT4577_159578C.1
tcggtttttttttttttttttttttttttttttttttttttttttttttttttttttttttttttttttttttttttaaacgaaaaaggggttttttgtttaaaaaaaaaacgggcaaacccccgtaggaggagaggtcttgggaaccccaacggaaaatttacctacccagggggggaaaccaacaaggggggggccggaaaaccccttccgttggggattttttattaaaaaaaagagtttccgttttgtaaaacccatccccaagctcaggtaaaacatgctttttgggggccaaacaaaccatgtaacatttgggaggggcctcatgcgaaaatggggggggaggcccccgtaccaaccccgcacatgtttttgcccatttccatttggaagaaacccttataaccccagtaagggccccttgagtttttgaggacccagtggggaaccccttttttgaccccggacccaacagccaaaacaggggggttcacatccatgggggtagtcccacaaggggggctagggaaaaccccg

SEQ ID NO: 65330 - DNA, 362 bp, Zea mays
  unsure (1)..(362): unsure at all n locations
  Clone ID: MRT4577_159579C.1
cgnntccgggaaaagggcgagctcttctcactctgtcggactcgcggcgatagcagcaggcacccgtcgctctctcggctccggccgtacgggcaccggaccggctcacgacctttgtcttactcgcatcggttcgatcgaattcctcggtacccatgaggggtgcgcctgaggggcaagaatcctcgccgtcgcgccgctctcataccatcgtgcagagcgcctgcnnacctagtaggccggaaggctnntgcttctattggctagtcagttgtccaaaagggggcgcgccggctgaacataagttcgctcgtgcctgtccaatggcgcgcggcgattccctggctattagtggtgggggg

SEQ ID NO: 65331 - DNA, 372 bp, Zea mays
  Clone ID: MRT4577_15957C.1
aatattattctaactcttacatcaagcggtaggtgctgtttttttttttatggaacatcacaaacattggactctgacaacggaaaacatgccccacaaccctcatcacaactgcacactaatctacatctcaatcatccacagatgacaataccactagataaaagagcagggccaccaaaataacctatatgacctgtcatttacaaaacttgagactgattgccccctgtaactctaaggacccatacaaacaagaccgaggcccggaacattgtccatggccttgggcgttaatgtgaggccccataaagtgacaggaagaaagatgtcccacatcctaaaaatacatctataactagtgacaataag

SEQ ID NO: 65332 - DNA, 619 bp, Zea mays
  Clone ID: MRT4577_159580C.1
gggggggttttgtagaacaagctaattagtttaaaaataaagtaattatcctgtcataaacatcttaactcagaaacgaagggagtattatttaataatacttcagccggtcccggcccttttggagaagagatcgggacaagcttgggaagggggggctaccgataacaactaagttttaagatacacagatctctgttcgaatcttatgtacttgctagatttttataaatgtagccagataaaataatggttgaagtacgcatccaaaacatcgggcacttttgaccggaccgagtactcgacaacttcgatcttcacgtggaactgggctcacttttgtaatataaaacatggccgtggcagtttcattcaaaaacagtaggttcaaatggaaatgaagaacttttaaatatccagcacaggtgtggttttttattgtccacacggctctctccttttctctacttccctaataatttttgtgggcctcaccttctttctcttgaaactaacatagcttctgcagatatcactgtcacctgcaggacacccattttttcatctgagccttaacaaccattctttcaaaccatacaccaaagccactgtgttgggg

SEQ ID NO: 65333 - DNA, 363 bp, Zea mays
  Clone ID: MRT4577_159581C.1
tcgattgagaccaacaagcaacattttttgtggaatccagttgcaacaatagagcagcaatggctatcaagatatttttcctccttatgctccttgctctttctgcatgtgttgctaacgcgacaattttcccttaatgcttacaagctcctatagctccccttcttcccccataccttccatcaatgatagtttcagtatgtgaaaacccatcttttcaaccctataggctcctacaagcaattctattatgcaacatacctttatcacccttgtttcatcaatcgctagccctatcattggtgcatgtcattggtactaatcatcaggtgttcatcatttgtagcaacttgtgctacctgt

SEQ ID NO: 65334 - DNA, 440 bp, Zea mays
  Clone ID: MRT4577_159582C.1
cggacgcgtgggagaccgacaaggacttgcaggtttatgctcctgccgctaagctcaggtgcctataaccacgacgactgcccctcattgctcacatcctcctataccctgtatgttaccaccgtacctttcaccagcgatgtcttcagcctgtgaaaccccaattcttgagccctacaggatccaacaggcggtcacatgccgcatcttacctgtatcaccctcgaacgtacaactgtcatcaaccctattacatcaactacctatgatgcatttatagctacatctcatcacgctacagcagctactgcatctcgggctaccaaaccttgctgactacgctcaacatcagcagttacctttgatgctattgatggcacagaacatgagctcacagctgctacgacagctcttgctagccaaccttgatgtctactctc

SEQ ID NO: 65335 - DNA, 828 bp, Zea mays
  unsure (1)..(828): unsure at all n locations
  Clone ID: MRT4577_159583C.1
ggtaccgcgtgctcacccctgccccgcacctctccaatgggcccgcgcggcaacgccgcgctcctcgctgccgtcaagagcgctggcgcagaggaggtggatctaagccagatgtggggaggcgcgttccaggcaccggaagggtggttgaccgcggtgagtgagcacggcggcggcgtgctgaatgcgaccaagtcggtggccatgttccaggcgctcgccgtcaagatgggcgccgtagtcagggacaacgccgaggtcgtggacatcaggaaggagccggagggaggcgtcgtggtgaagacgagctccggcgaggagttccgcggcgccaagtgcgtcgtgacggtgggcgcctggacgagcaagcttctgaggtccgtggccggcgtcgagatccccatccagccgctgcacacgctgaccctgtactggcgcatcaagcccggtcgcgagcgcggcctgatggccaaggctggcttcccgactttttccagctacggcgacacgcccgtttacggcacgccttcgcttgagctcccgggcctgatcaagatcagctgcgacggcgggccgccgtgcgacccggataaccgcgactgggcatccggcgacagataaatcaccgagcgggtggctaggtggatccaggagttcatgccgggccacgtggactccgccggcgcgccagtcgtccggcngtcttgcctatgttccctgacgccngataatgatttcgtgatccgctggctgggtggggaattcggggtggacatggtggtcggggctgggttctctgggccggcttcttttggngcccgcggtggg

SEQ ID NO: 65336 - DNA, 560 bp, Zea mays
  Clone ID: MRT4577_159584C.1
aagaaaagggggttttcacgggccccgaacccaaaataacaaaaaccaaacaacgcccctaaaaccgcctttttgggggggaacaaaacctttaaaaaacccccggaaaaaagggctacccccccccgccccggaggcggggggcaaactggatgcccttgggcaagagggggacccccttaacgggggggggccaaagggtggggcccccaaaaaaacccccaagggaggccccgggggcccccgggagccccaacacgggggggttttggaaccggggggttgttttgaaaccctgggcgatccccccccccaagggctggaagggcaatttggggataaaaaaccccgggccttttggggacttggggaacccggccaaggccacgggtccgggcctgaacctggggggttttttcaccccgccgggggggggggcccacttccccccccccttggggggaaactgcttggggggggccctgccccccggggacttgggggcgggttgttttaaacgaaccaaccccccggggtgtttttttcctttgggggggggg

SEQ ID NO: 65337 - DNA, 209 bp, Zea mays
  unsure (1)..(209): unsure at all n locations
  Clone ID: MRT4577_159585C.1
gggganntccctccttccgcttcnttccgcgcngcctncngggccgtngccgncatggtgaagtatcgcaggagnngggcaancctanaaagtnggctaaggccatgggcagggatntgngggtccattcaagaananaagggngntngcgtttgcgttngnaagttgtctttgaccaaggntaagcgatacttgaggatgttattgnt

SEQ ID NO: 65338 - DNA, 805 bp, Zea mays
  unsure (1)..(805): unsure at all n locations
  Clone ID: MRT4577_159586C.1
acggcagttcgccagttcccacatgccgccgtccccgccactgtcgcctgcgcttcatcgtctcctctccttcctcccgcgtctcgcctccccacggcacctactgcaggcgcacgccttcctccttccccgcggcggccaacgcgacccgcgtctcctttccgcgctcctcctctcttccctctgcctcgtgcctcactcgcagcaaaccagtgaccacgccgccgcgctcctccgtcgtgtatacccctctgtatacctcagggacgtcgcgcgcctcccgccgcatctcctccgcaggagcctcctcggccagctccactccctgctcctccgcaccggccacgtggcctccgacgctcacgtctcctccagcctcgtccaactgtactgcacctgcggacatgtcgccgacgcgcgcagcgtgttcgacgagatggccgtcagggacgttgtggcctggaacgttatgatcgctagctatgtgaaggctggggaccaggcccacgcgcgggagctgtttgatgctatgccggagcggaatgtggtgtcgtggacgacggtgatcggggggtacgcgcagatgaagcgtccggagaaggcagtagaggtgtttcgaaggatgcaggtggagggcatcgaggctgacggtgtggcgttgctgtcggttctggcggcatgtggggatctgggtgcggttgatttaggggagtgggtgcacaggtttgtggtcaggcggggcttgtgccaggagataccactgatgaantcgatcatagaatgacatgaaaatgtgggtgtattg

SEQ ID NO: 65339 - DNA, 256 bp, Zea mays
  Clone ID: MRT4577_159587C.1
atctcatgttccggtcgacccatgagcttggacggaagccaccacaggtgcattaacgggatatatcgcgtgtgcatgactgatcgactctcctacacctctttcgcactctgttctttacttcctgagaactcatggagctcaattgacatagcctacagatcgaggtcgtagtactggtctcggtcgagcagtgtgtgctctgacaatcgtcgtcatggcggctgatgacatacgctcgtgtctgtgtataggc

SEQ ID NO: 65340 - DNA, 422 bp, Zea mays
  Clone ID: MRT4577_159588C.1
taggtgacactatagaaggccttaaccgaaaaggtgttgctcctgaatcaagggaattgtatgacaatggcacctaggaggtggcaacctcttgggttggtcaaacaatgaggcaaattcttgaataagactttgaatctcgtgtggtagactggtatgggattgttggtcagaagtctgttgtaactcaattgtgcaccaaagttcatccaatttgtctaagtgatacagctggcatactgagatctgctccaccattgaagtatcagacaactggccatgaagaaccactctctgctgttcatgagtaaaggctaaccacttatcttgccaatgaatctccataggactatgtgaagataatcaatccatacccaatataacattgtagcattgcaaaggaagaaccttaaggttgatag

SEQ ID NO: 65341 - DNA, 525 bp, Zea mays
  Clone ID: MRT4577_159589C.1
actgagcatcgtctagctatctctgatcgaactggccagttgtgacactccttctttggggggggggggggggcaattaaataaattcgggatggcactaaagtagtcaaagggagctcaaataatcagaggttaatgttacaggataataaacgtattcgactagcaaacggttatgcacttatataatagttacatattatcacacaatacattcagtgaggcagcccgaacatcaagtgcgaagaacgaggggggagcagagttcataacccgagagcgcgacagtacctgcaatttggcactggtggcctcagcttgctcaacgatggttttgccgccaacctcgctgttactgttattgtctgtccttattgtcacttcgtcctcctcaatcgcttcctcttcgaacccctgcttctttgcaattgccgttagcttcaatactggcctcttcaaccgcgactttatacctatcaatattagcttcccgctcgaatgcccgcagtctgcgaatctgcgtcg

SEQ ID NO: 65342 - DNA, 701 bp, Zea mays
  unsure (1)..(701): unsure at all n locations
  Clone ID: MRT4577_15958C.1
gaattgtaacatacaacatgctttattctacttgttatttacacaggaaataaatagaataaataacatggagcatgttgtaaattaaaattataccaaattttcttaacccaatagaaatttaaatgaaaaaattatgtgctcctacgtgatttccatgttccaagccactttgttaggatctttaactaacacatgcaaatttcacacaatattctaatcgttgcccccaactagttgggacgactgcatgggtactgagtgcatgcacgcatgcaacagatcctgctacggtgctacccgtcacttttttcttttcgtctgcaaccactgccatgactgcggccatgcaagtgcatgcatgcatctttttcgctttgactcaactacctctctctccgcgctcatgacggcgagtaaccaggtactgcatgtccttcagggaatgcccaactgctgcaacgcacgcggtcaaagtggctttgcatggtcaacgaaatgcaacnggttcgtggttggccgacgaggccataggcaagctacaggccagcagtgacggcggttgtggtaggtgctgtcctttttttcttccgatatacagatcacaaatcgtagaaagatataccggagcatgcggatgagccactaccgtagcgatggcaagttcgtcgcacacaaatcgtaacccgtgcacagcagca

SEQ ID NO: 65343 - DNA, 410 bp, Zea mays
  Clone ID: MRT4577_159590C.1
ggggggtttccatgaaaacctcctcagggcctccgtaaacacgctggtattgtttgctagccaaccatgcaacttggactttttccattgaagacggttttttttactaaggacttcgaggctttgggtccttcggggccgttccggtttttcctgaagtccatcctccgaccaattcaagcgggcattatccgccccctgcctaacggcctaaattactgggccgttaacggtattccgcccgcatacggcccgaacgctggggctgagctgggcccacgtattattggccgttaggacctttcccatagccaaggcacttaaggacgccgcccttgccaaggcgcatggggccaagctgcacttcatggagctcgacctgtccaccatgccttatgtcacccctttcg

SEQ ID NO: 65344 - DNA, 419 bp, Zea mays
  Clone ID: MRT4577_159591C.1
ttttttttttttttttttttttttttaaagagatagaattggcatttcctatcctatcatgccttaaattcagcgactgaagtcagctccgccatgctgggcaagtccacggactcacacaaagacaggtagcaaatcaacaaggaaaaaacacatcacaaccctcgagcctcaaaacagcccccgaattggcttatttcacgacgtcaacgatagcgtacttgggggcatcgggtcaggaaatctttgttgtctcgaaaatcaaagccggggggcttgatgtgccatttagtgaccgcaagaggagcaggagcagccgttgcagtcgctggagcaggaccaggtgttgcaggaccagggagtcattttgattgagttgatggggaacgaagcgttgcttgaaaaaaatagactgttca

SEQ ID NO: 65345 - DNA, 361 bp, Zea mays
  Clone ID: MRT4577_159592C.1
ggacctggtccggctccatggactccaccctgctgctgccgcgtcttcctcctcctcccctcccagtcgtcgcttcgtcgccgtcaccggcagccgcactgtcttcctccgcaccgccgacccaaaaccgtcccgagacatggcaggatgccgccggcggcgcgagaaggacgcgccgacgccggcacgaagttccgcgcccgagggctgttcggcggcggcggaggaggagacgggctccgggccgtgatgaggatggtgaagctcaactcggccatccagaaccggagcgtcagggagctgctggagctgctcggcgacgagtgcctctacttcctcgggaacctccggtccgtcgacg

SEQ ID NO: 65346 - DNA, 524 bp, Zea mays
  Clone ID: MRT4577_159593C.1
aatcaagcttctttttgcgcttctcacaactgcattgcgcagctcggagaattgatgaccctttccccagatgatcgacgctgaacatactgagcgctacattttctcgttcgagaaagccaagccagaactctgattctctgaagtgcttcgtcgatctacctctttctttattcatctgattaccatcgttgcttgctattttgaagaagaaactaaactaaactatgcatctgaagtggccacttgtaaacttgactatcatttgggccctgcgttgaaaaactgattaccagtggatggatttaggtgcccgctgcgtatgagttctctatttcatgcatgtactgtacctttgcatgatatcagtggtcgagcacgagttgagatattttctactttttttgtttgcagatcatatgatgttctgtcccagtcttttaagcggtgtaacctctgtttagctacaactgttgcttgaacaaaaccctacatatgcatgcatacaaattatttggataatt

SEQ ID NO: 65347 - DNA, 265 bp, Zea mays
  unsure (1)..(265): unsure at all n locations
  Clone ID: MRT4577_159594C.1
tgagcactggtgtagaatctgcactctgcttagctgcgagcttgaatgccttcgttgggtagctgacgcaggccagcacacacacaccagttcgtccagctgcactgcaccaatggccgccgtcgaggtccaggtcccgactgccgctcccgtcgaggaggttgcccagctggccgccgcctccgccgtggaggggggggacnatganaccgctgctccggcggtggagaccgangtcgtcgtcgctaaggagccggtgccgtcc

SEQ ID NO: 65348 - DNA, 409 bp, Zea mays
  unsure (1)..(409): unsure at all n locations
  Clone ID: MRT4577_159595C.1
ggacaccacgtcatcggccccattctcctccgtcctctccctctcgacttggcgacaggctctctctcctacccgagaggacagaccgcaccgccacgcacccggcaccccctctcctctctgccgtcatgggacgtgccgcgccgtcttcatcgccgagctcgccgcagctcgggcgcaagcgcacggcggcgcccacaccggagcccccgacaccgcagcgccactgctccatggtcgacgtcatgcgccgctcgcgcgccgtcgccgcgccgccccctgtcgcacgcgcgcgggtgtacacctactacgagacccttctctgtgagacctgcggcctcggtgaccgcgacgaccagatgctcctntgcgaccggtgcgaccgcggctgccataccttttgcctccg

SEQ ID NO: 65349 - DNA, 624 bp, Zea mays
  unsure (1)..(624): unsure at all n locations
  Clone ID: MRT4577_159596C.1
ggtacctccgggtccggccgggnaggccctctattcttcgttggtagccaaatcgctccctacggtaccaacgcgaggccaaaaccatgtacatctactgaccctcacaccaacgaggtccctcccccaataactgcttggagtactggagcggcagaggaggtcgagggaggagcccaaaacagattcacgtccgtctgctcatgtatgattctgatataaaagatatcgacgaatcggatcgtctactcttgtcaaaagaggctggtcctttgtccatccttaccaaataatgatggtgcaacacggtgagccaatgacgaccatcgaggcagttcgaggcattcgactaccagctgtaaccgcgggaggacgtgctccgcatactggggcctgacggctgctggatatgcttcaaggactcggtgtgccgctgcttcggctacatggtctacaagaagaaggacgtctacgccatcaacaacgactggttcgatgagcaacgagacctcaggaaacggtatcatgtgctcttggacaagagatcatgaacctgctcagaccgtacacacagttcttgttgagaagcctgtacgacccgtaccgggagggtgcctactttcc

SEQ ID NO: 65350 - DNA, 261 bp, Zea mays
  unsure (1)..(261): unsure at all n locations
  Clone ID: MRT4577_159597C.1
aattcnccctttccgtggccggggcgggggggcggggttctttctgggccgcccgtgcttctcnctgcccacctttcttctttgtcttttccttctatcacctctcacactagtcacctcccttgatgggttgttggtcgacctctcctgtctttcgtctttcttgttttttgggtctgctcgggtggtgccgttgttggcgggtgccttcgttgggcgcctcgtgctggtctctcggcctcctttgtggttgtgtcacga

SEQ ID NO: 65351 - DNA, 153 bp, Zea mays
  Clone ID: MRT4577_159598C.1
ccggaagaggtctagaaacattcaagcacactagattcctattaggaaaagaagaagtgagagatagttctagctctacaagcagactagggcgtaatactgcttagtcttttccctttgcagcgttaattttggagtcagtataaagcttga

SEQ ID NO: 65352 - DNA, 595 bp, Zea mays
  unsure (1)..(595): unsure at all n locations
  Clone ID: MRT4577_159599C.1
tccttcccgtctcttcttcccacttccttccacttcttgtccctgctcctgttggttttagcatcctgctcggccgaatgctggatcagaggctgcagcaaaggtagtaagtcgcttctcgtatttcccgtcgagagagggacagggggggagaacccccaaccgaggcgctgcaagttccccacggccggggcgggcttctcttgcgggaacatgaggaagctgttgttcatctccttcgtcctctcgctgtccgctgcagcagttcacggtgaagacggtaaggttcctcgcgctctctgttttgatccgttttatgcagttccggatgtgtttggccttttacgcgtgaatgcctgatgcatccatcttactcttcttgcttccgtatgcatggatggatcgatcgatctccacgttcgtgctcgctgcgttggttctcagctcagattttagtacgcctgcttcttgttttctcgttgcaatcatggagcatccacggagcgattgacagcagcggtcaagaattaaaaaaaaaaaaaaaaaaaaaaaannnnaaaaaaaaaaaaaaaaaaaaaaaaaaaagggcggccgc

SEQ ID NO: 65353 - DNA, 177 bp, Zea mays
  unsure (1)..(177): unsure at all n locations
  Clone ID: MRT4577_15959C.1
ggcttggaacctttgggctgatttatgtgcttggcaagagctgctcaacctaaccggcctccaccatatnttcctccacccttctcgcgtngcacccccacaattggtcggcgactcataagaatcaattaaacatcccacctacccacccatcgaccgccatgttcacccaaaccc

SEQ ID NO: 65354 - DNA, 1697 bp, Zea mays
  Clone ID: MRT4577_1595C.1
ccggccggggagctgctgtgcggctggctgtttccccccctccagtccagtccagtccagccctccaccacccaccacctcctcctgctcgctcattcactcagatttgcactcggccggcatggcatttatcccccacctacaatctcaggcaatccgccattactgagagccccaatcgcacatcgggtcgtggcaagctcgcgacgcggaagcgccaccgctcccctgtccgtctccgtccacctcctgtgccggctgcctgcctgcctaccacatcaatcagtgtgaccatccagcacattcccatgacgtgccacgccagcctgctgctgccggcgctcgccgccgtcctgctctgctgccccctcgcgcaatgcgggcagcagaactacacctccatgttcagcttcggcgactcgctcaccgacaccggcaacctgctcgtgtccagcccgctctccaaccacatcgtcggccgctacccctacggcatcacctacttccaccgccccaccggccgctgccccgacggccgcctcgtcgtcgatttcctagcgcaagcgttcggcctgccgctgctgcagccgtacctgcagtcccgcggcaaggacctgagccggggcgtcaacttcgccgtcggcggcgccaccgccatggatccgcccttcttccaggagatcggcgcgtccgacaagctctggaccaacctgtccctcagcgtccagctcggctggttcgagcagctcaagccgtcgctctgcagctcaccgaaagagtgcaaggagtacttcagcaagtccctcttcctggtcggagagatcggggggaacgactacaactacgccttcttcaagggcaagaccctggacgacgccaagacctacgtccccacggtcgccggccgcggtcaccgatgccaccgagaggctgatcaaggccggcgccacgcacctggtggtgccggggaacctgcccatgggctgctcgtcggcgtacctgaccctgcacccgggccgcaacggcagcgactacgacgccgccggctgcctcaggacgtacaacgacttcgcgcagcaccacaacgcggtgctccagcggaagctgcgggcgctccgggcgaagtacccgcaggcgaggatcatgtacgccgactactacggcgccgccatgtccttcgccaagaaccccaagcagttcgggttcacgcaggggccgctgcggacgtgctgcggcggcggcgggccgtacaacttcaacccgaaggcgagctgcggcgtgcgggggtccagcgtgtgcgcggacccgtcggcgtacgccaactgggacggcgtgcacctgacggaggccgcctaccacgccatcgccgacagcatcctcaacgggccctacaccagccccaggctcctctgatccgaacgccggcggtgatgctcgtcgtccgtccatcggcagccgcagctcatacaactgtagtggcgccaacaatgtggctggcctgtgagcttgctagctgtggtaattaaacgaatgctgtacgtagtactccctactactagtgtgagagtgtgacggtgttgggactggaactggaactggaagggtaactcgtaactaaaaatggtggagttttgcgtcaaaaaaaaaaaaaaaaaaaaaaaaaaaaaaaaaagaaaaaaaaaaaaaaaaaagcggcc

SEQ ID NO: 65355 - DNA, 374 bp, Zea mays
  Clone ID: MRT4577_159600C.1
aaagattctcaagaaaagtttcctgcaggggaacaagcggtaaagaagaagaaaaagagggggccacgtgttcctggaaatgctgaagagcaatggaaaaattttcaagattttggagctgaaaatttttcggggatgcccttgggtccaactggagcattcaacccttactggggcggagtgccattgccaatggattacatgagtgcaccgtttcctggtcccatgccttacatgggttatccaccaggtccatttgacccttttggtgggggtgttctcccacaagatccatttatgcccccaggatacatgatgccaggagttcctagggatctttctgaattggcagttaacgctatgggaataaacat

SEQ ID NO: 65356 - DNA, 732 bp, Zea mays
  Clone ID: MRT4577_159601C.1
gtcctgctgggcccacccatttccgaaatctcgacatcccaggcatggacagatatcttgatttctggaatctgatggcttacgactacgctggctcttgggacccgacgagcggccaccaggccaatctccacgggtcgcttgacaaccctacatctacaccgttttcaactgacgcggctattgaccactacacaaggaacggtgtggcccccagcaaaattgtgctcggaatgcccatctatggtcgtgcttttgagaatacggacggtccgggcaggccatacaacggcattggcgaggggtcctgggagaatggcatctttgactacaaggtccttcctcttcagggctcgcaggaaatttatgaccaagccaccggctccagctactgctacaacccacagacgagaaagctcgtttcttatgatacccctcacgctgccagagtcaaggctggctacgtcaagcagtggggtcttggcggcggcatgtggtgggagagcagcggtgacaaggagggccaagacagcttgattggaatcgttgtcaatgagtttggcggcccacaggcgctccagaggaaggataattgcatcgattatccgcagtcaaagtacgacaacctgaagaatggattcccaaataactagaggcgccttattcgagaatgagagtagatagaatgataagaaagaaatagagtatgagcgaaatgaaaaatgaacaagt

SEQ ID NO: 65357 - DNA, 345 bp, Zea mays
  Clone ID: MRT4577_159602C.1
acgtcccacgcgtcctcgcctgcgcttgttctcactgaatacatccaatctaccatagcgaatttctgcaggggtgagggccttgttcttctaactcctaacgtatatcaagtcaacatatatcttgacaacaagaaatataactctttcaacaatatagtaagatccatgagccatggcgagtatgatctatcattattatcttttcactttacatttcaaaggacactatatacagtgtagtaaaagatgagggtacatggataatactgacttctgggctccaatatgaaatcagatatccaagatacctatatttcttcttggaactcattatcacttatc

SEQ ID NO: 65358 - DNA, 352 bp, Zea mays
  Clone ID: MRT4577_159603C.1
gcacgaggcggagcggcgcggggctgcggcgggtgggcggcgacggcgacggcggcgctggttcttctggccgcgtcgctgacggtgggtccgatggtggcgtgatggatggtagagccacctgtcagggtcgagagagtggtgggttgatgtgatgggatctgcatgggtagtacgtgcattggttcaaacacgctgtattttgtgctactgccgcacgtcacgttattattctctgcgtggagttgacgcccagaatatatagtaccaccactattatattttgtttgctattgtacaacattttcatgcttgattacttctaccgtgcctatgatggtcaaaaaaaaaa

SEQ ID NO: 65359 - DNA, 533 bp, Zea mays
  Clone ID: MRT4577_159604C.1
aaaaaaaaaaaaaaaaaaaaaaaaaaaaaaaaaaaaaaaaaaaaaaaaaaaaaaaaaaaaaaaaagaaaaaaaaaaaaaaaaaaaaaaaaaaaaaaaaaaaggggagcgccggttttgggggctcccgttttttccgtgcgccgcgcttggcgtgggtcttggcctcttttttagttcccccttgagttccgttgtacctggcccccttttggcccacccttggggcctggccaaacctcttggcttgtccccagtttttccccctttgcgccagttgcccctttcctcccgttgtgcctattagggggggggcccgaacggttcgccctccccaccgtttccttaccctgaacggttgtgggggctcccctttacgcgcccctttcccttccccgggtccgggggccccccccttgggggccccttaccttcgccgtccctttagggccccgcctttcggttttgtccctttcttttttggcccccttcgccgtttttcccggggcttctcttgatggggggccccttttgg

SEQ ID NO: 65360 - DNA, 1618 bp, Zea mays
  unsure (1)..(1618): unsure at all n locations
  Clone ID: MRT4577_159605C.1
ccggccggaatagtaattcccactcggagtcgcgcagccagatatagctcgctctgggagaggttaatggcggcatggcggctagtcttcagctcgccattttcatgtccgccgccatcgcgctcgggttcgccggcgtccaggccggcgcggcgcagctgcagtgcagcgagtactacgaccggacgtgccccgtcgtgcaccgggtcgcgcggcgggtgctgaagaaggcgcacgagtccggacgtccgcatgtacgccagcctcacccgcctccacttccacgactgcttcgtgcaagtaaaaaagcagctggccccgtgtcccgtcccgtgcaaggctgcgacgggtccatcctgctggacaacagctccagcatcgcgtcggagaagttcgccacgcccaacaacaactcggcgcgcgggtaccctgttgtcgacgccgtcaaggcggcgctggaggaggtctgtccaggcgtcgtctcctgtgctgacatactggccatcgccgccaagatctcggtccagctgtgccggttcgtgacggcgcggctgtacaacttcagcggcacgaaccggccggacccgacgctggacagggggtaccgggcgttcctctccctgcggtgcccgagggccggcggcaacgcgtcggcgctcaacgacctcgacccggccacgccggacaccttcgacagcgactactacaccagcatcgaggcgcgccgcgggacgctgcagtccgaccaggagctgctgtcgacgccctccgcgcccacggcgccgatcgtccaccgcttcgccggcagccagaaggagttcttcaggagcttcgccaggtccatgatcagcatggggagcatccaggtgctgacggggagccaggcgtttctgattcacagggtgcacagccagtggactggaactggcgcttccgcgcttcgattcctgaatcctggctgcgcggcgcggtcgcggagacgggaagctggaactgaaacggcgtcgctggcgcttcgattcctggagactggagagtggagactggaactagaggtggcgggctggcggcacggcgccctggagattgtgacgggtgctctggaactgggaatggcgctggcccgggttgaggaggtgcttgagtgtgtgcaaggtcgtgttactcaagaaatgaatgataatctcattaaacattttacgggagaggaggtcatcagggaggcgttacaagacatgggagatctaaaagcacccggggctgacggaattctggtgattttctacaaggaattttggtcacttggtggtgaaaaagtaaaacatgaggtgttggatgtgttgaatggggcatcaatgccgcaagggtggaacgacacagctattgtcctgattccaaagatataggtcgtgtcacgccgacatcgcgctcgcactccaccgcccgaatccggcgacaccgacgagtacggcgaccccatccgccgactcaccgggcactcccacttcgtccaggacgtcgtcctcagatccgacggccagttcgccctttccggctcctgggatggagagntccgcctctgggaactcttcttcgggctcaccacacggcgcttcgt

SEQ ID NO: 65361 - DNA, 616 bp, Zea mays
  Clone ID: MRT4577_159606C.1
cccagcgtccgcccacgcgtccgcggacgcgtgggtgcatcacaaggacggtggatgcatgcaggggcgcatacgttcgggcgcgtgcagtgccggttcgtgacggcgcggctgtacaacttcagcggcacgaaccggccggacccgacgctggacagggggtaccgggcgttcctctccctgcggtgcccgagggccggcggcaacgcgtcggcgctcaacgacctcgacccggccacgccggacaccttcgacagcgactactacaccagcatcgaggcgcgccgcgggacgctgcagtccgaccaggagctgctgtcgacgccctccgcgcccacggcgccgatcgtccaccgcttcgccggcagccagaaggagttcttcaggagcttcgccaggtccatgatcagcatggggagcatccaggtgctgacggggagccagggtgagatcaggaagaactgtagagtggtcaatggaagctagactcgtcgaagacgcaagtagtagcttttgtaatgtggtgtgtgcctaagttactggtgaattgaaattgaaagcacttctgctatgtacgatgctgcaaacatgtacgtgtagacgtgtagtttgagtg

SEQ ID NO: 65362 - DNA, 442 bp, Zea mays
  Clone ID: MRT4577_159607C.1
agagacgtcgcgccgccgcctaaaccctaacccgggccagcgccattcccagttccagagcacccgtcacaatctccagggcgccgcgccgccagcccgccacctctagttccagtctccactctccagtctccaggaatcgaagcgccagcgacgccgtttcagttccagcttcccttcgcgaccgcgccgcgcagccaggattcaggaatcgaagcgcggaagcgccagttccagtccactggctgtgcaccctgtgaatcagaaacactgtcaagcaaaaaggtgtgctccaagattccgtagctcgtgaaaaaaagaacaagacaagcggagagttctctcttctcagcgagactgggcatttgtctgtactgtacctgtgacaacacaatacgacgcagcacacagcacacagctacacagagctgtgcgcagttcc

SEQ ID NO: 65363 - DNA, 410 bp, Zea mays
  unsure (1)..(410): unsure at all n locations
  Clone ID: MRT4577_159608C.1
cgggccgggcaacgcggnacgcgcacacagccaaaccanccgcccccnccgccgcnncggcgccgcagnacccaccgggcaangagaagacganccnggcgncggagacganggacancccggagggcgncacggncacgggggccgccaagccggncacggnggaggggccccgcggcaagcncacccgcaaccncaagcaccncaaccncgacggggagcggcaggaggccggccgnaagcncaaggaggacgccnggnncggcacccgccgcaccaaggccgacanccgcaccgacaacaaccacgnccagaaccagagcaaggggggcaccaagggcnaccgcaacaagacgaggggcggggacgcccacnagcccagcaacgccagcaagaccaacagnaacacc

SEQ ID NO: 65364 - DNA, 859 bp, Zea mays
  unsure (1)..(859): unsure at all n locations
  Clone ID: MRT4577_159609C.1
gggtacctcgaggccggccgggatagttcataccactcggagtcgcgcagccagatatagctcgctctgggagaggttaatggcggctagtcttcagctcgccattttcatgtccgccgccatcgcgctcgggttcgccggcgtccaggccggcgcggcgcagctgtgcagcgagtactacgaccggacgtgccccgtcgtgcaccgggtcgtgcggcgggtgctgaagaaggcgcacgagtccgacgtccgcatctacgccagcctcacccgcctccacttccacgactgcttcgtgcaaggctgcgacggctccatcctgctggacaacagctccagcatcgtgtcggagaagttcgccacgcccaacaacaactcggcgcgcgggtaccccgtagtcgacgccgtcaaggcggcgctggaggaggtctgtccaggcgtcgtctcctgtgctgacatactggccatcgccgctaagatctcggtccagctgtccggcgggccacggtggcgcgtgcccctcggccggcgcgacggcaccaccgccaacaacaccgccgccaacaacctcccaagccccttcgacaacctcaccacgctccagcagaagttcggagccgtcggcctggacgacaccgaccttgtcgccctctcaggggcgcatacgttcgggcgcgtgcagtgccggttcgtgacggcgcggctgtacaacttcagcggcacgaaccggccagacccgacgctggacagggggtaccgggcgttcctctcccctgcgtgccccgagggccggcggcaacgcgtcggcgctcaacgacctcgaccccggcacgncggacactttcgacagcgactacta

SEQ ID NO: 65365 - DNA, 1218 bp, Zea mays
  Clone ID: MRT4577_15960C.1
aattcggcacgaggtctcttttctttccagaaaagtcttctcttctctgtctcagcgccgacgcttcccaactccttccaatcgattcttcgtctcgtcctcgtgtaatccccagcttgccctcctcgctcttccctcccaaaaccctacgcctccctgaccaagctccggggacgaatggacggaggagccggcttccctggcacgccggtcccgcgctcgccggaggacgttttccgggactaccgcgcgcgccaggccggcctaatcagggcgctcaccaccgagaaggataatttatgtttatatggacttcccaatgagacatgggaagtaaacttgcctgctgaggaggttcctcctgaactcccagagccagctctcggaattaattttgctcgtgatgggatgaatgaaaaagattggctatcacttgttgcagtgcatagtgattcttggctaatgtctgttgcattttattttggagcaaggtttggattcgacaaggaatccaggaaacgtctcttcaccatgatcaataatcttcccagcatatatgaggttgtcacaggaacagccaagaaagagtccaaagaaaaaactcctaaaagcagcaacaagactaacaaatctggctcaaagccttcacgccaggtagaacccaactcaagggtcccaaagatgccacctccaaaggacgaggagagtgaaggggaggaaggtgaaccacaggaagaccatgagagtgcgctgtgcggcgcatgtggcctaggttatgacgacttctggatctgttgcgacttatgcgagacatggttccacggcaagtgtgtcaagatcaccccaaataaagcggagcacatcaagcagtataagtgcccctcgtgcacaggaagcaagagggccaaggcttgatcctatctatctacgatatagatatgaattgctgctccacgatccaaggagcctttgacgagagctgtaagctgactcttcgtgctagggcagctaatagattcgaatgcttgttttgatacaaattacgagtactgacgaaccgtaaactgatgtagtttgtgtggccctcaaagcatctatgtcctgatttgtgtggtttaggtttccttcggcacagtttctaatctaatatgagttttgtcaattagagagaagtggctatgctgaatttatgagctgattttataaagtgatgatttt

SEQ ID NO: 65366 - DNA, 353 bp, Zea mays
  Clone ID: MRT4577_159610C.1
actcctatagggggtattagtgaccctctaggacgggcggcgatgctaccaccgctagctagaactctccgctactcaatgagagatctgctgaagctcaccgcccctcccctgctggccgtggatcccctactagtgcggtagaccatggatgcagatgaggatatccaccccctcgtccgcgacaacggccttaggcgtggtggaagctgggctcgccgaagacgacgctccgtaggacgacttcctcagcatccatgggcgccggcgtcacatcggagcgtcgagtgaggatccgccagatcgacctctacgtgaacgacgaggcgcactcctagcaggggaatcctgac

SEQ ID NO: 65367 - DNA, 2427 bp, Zea mays
  Clone ID: MRT4577_159611C.1
aaaagtgccacctctttcttcctcgaaacgaattctgtgccccaccccgacgctacctataaatctcatcagcacaccccgaatcccggcaaaacccaccggcagaagctaagctcgctccgcagcatcggcagccgcgatgatcctccgcatccgcagccgcgacggcacggaccgcatctcggtcccagactcggcgtccgccaccgtcgccgacctgcagcgcctcattgagtcacatctcaccgtgcccgtcccgctccagcgtatctccctcgacccggcactcctgctccctaacccatccgccgctgtcccactcctcccggacccgggtacctcgaggccggccggggcgccgccgggccggccgggagtcacatgctagcgtgcgtgtgcgtgtgcaacggctataccacctgcgcgacccaccgcgagcgcccgcagctaagctagctctcgctcgcgcgctctgggagaggagagatcaatggcgtcccgtggcagcatgacctgtagtcttcagctcgccgtcctcgtttccgccgccatcgcgctcgggttcggcgtccgggccggcgaggcgcagctgtccagcgagtactacggccagacgtgccccgtcgtgcaccgggtcgcgcggcgggtgctgaagaaggcgcacgaggccgacgtccgcatctacgccagcctcacccgcctccatttccacgactgcttcgtgcaagtaagaagcagccggccccgtgcccgtgttccgcagacggctggccacgacgccgcgcgcgcgcgcgcgcttgcccttcccacacgccggccgtgcgtgcgttctgagcctgcgtccgcgtgtgtttgtttcttcagggctgcgacggctccatcctgctggacaacagctcgagcatcgtgtcggagaagttcgccacgcccaacaacaactcggcgcgcgggtaccccgtggtcgacgccgtcaaggcggcgctggaggaggcttgcccaggcgttgtctcctgcgctgacatactggccatcgccgccaagatctcggtcgaactggtgagtttttctacctatcgatccaccgttggtcatccccagtctactgtctccatccgcagaagaacataattctacctcagtacaggaggcctcgatgtcaccgttaatgagttgatctcgaacggaacgccattgtacaacagcaagcaaacaaactgtcggactggcattgtaccttctaccttgccttgaccgggaggcagtagctgtagctctagcctctaggcctggagacctggagcaatagtccgaacaaaactcccgtcggtgcaaaataattgaactagtagctagtatggccattagagagatctacgagaagatgacaaaactgcacgccttttttttaagattaaaattaaaagcatgcagaaacagatagataccctagtacagtatgacgtgcatattcacacacgtcaacgtcacgtcacgtcggctgccatcagcaggacgttcgagggtcataggcgcccgtcagtgtcctctccgtgccacgctttaatccaacacggccacatgacgcgtggtccctcccttctcaccatgcgcgcagtccggcgggccaaggtggcgcgtgcctctcggccggcgcgacggcaccacggccaacatcaccgccgccaacaacctcccgagccccttcgacaacctcactacgctccagcagaagttcggcgccgtcggcctcgacgacaccgacctcgtcgcgctctcaggtaaaaaaaaaagggggggagagaaaaccggcgatgcatgcctcgtgattcttgcacctgcacagcacgacacatggcgtcacaacgacggcggatgcattgcaggggcgcacacgttcgggcgcgtgcagtgccagttcgtgacggcgcggctgtacaacttctgcgggacgaaccggccggacccgacgctggacagggggtaccgggcgttcctctccctgcggtgcccgagggccggcaacgcgtcggcgctcaacgacctcgacccgaccacgccggacaccttcgacaacaattactacaccaacatcgaggcgcgccgtgggacgctgcagtccgaccaggagctgctgtcgacgcccggcgcgcccacggcgccgatcgtcggacggttcgccgccagccagaaggagttcttcaggagcttcgccaggtccatggtcaacatggggaacatccaggtgctgacggggagtcagggtgagatcaggaagaactgtaggatggtcaacggaagctagacccgtcgacggcacaagttactggtgaactgaaagcagttctgctgtatgtacgatgcctcaaacatgttgatgggataatggtgcgccgatcgatttatttgtctaaaagaaaaaaaaaaagc

SEQ ID NO: 65368 - DNA, 588 bp, Zea mays
  Clone ID: MRT4577_159612C.1
cacctctactgtgggccgggactgagggacctctaaccagcggcgtctctggtatgagaaaacccaatacttgaaccctacaggatccaacaggtcacgcacacgatggccatactaccttcaatacccttgcttctacagcaatgatcagccctattacatgagtgtaccttcggagcatatatgggcacagatcattaggcgcacaacaactacaacaacctctgggctagcaaaccttgctgtctactctcacaagcaacagtgagaggccattcagccaactagctgcattgaactttgcttcttatttgcatcaacgacatccaccattcagccggctatatggtgactacccccatcaatggcttccattcaaccaactgacagctttgaacatctcctgcttatttacaggagcagcaactactaccattcagccagctagctggtgagagccctgctaccttcttgacacaaacacaattgctgccgttctaccatcacgctgagcctaacgctggcaccctcttacaactgcagcaattgctgtcattcaaccaacttgctttgacaaacccaacagta

SEQ ID NO: 65369 - DNA, 691 bp, Zea mays
  Clone ID: MRT4577_159613C.1
aaccagatcgatctcaatctccctagcaatctctagcagcagatcctcgtgcgaagcaaagcgctagcccccttcgtactgtcccgatggcccgcacgaagcagacggcgaggaagtccactggcggcaaggcgccaaggaagcagctggccaccaaggcggcgcgcaagtctgccccggcgaccggcggagtgaagaagccccaccgcgctccgggagatccgcaagtaccagaagagcacggagctgctgatccgcaagctgccgttccagcgcctggtgcgtgagatcgcccaggacttcaagaccgacctccgcttccagagctccgccgtcgccgcgctgcaggaggcgtccgaggcctacctcgtcgggctcttcgaggacaccaacctctgcgccattcacgccaagcgcgtcaccatcatgcccaaggacatccagctcgcccgccgtatccgtggggagagggcctaggcgtcgtcccggtggaggtggaagtagtagtcgccgtttctgtcatcactgtctggctagaaggtgtagagatgtgccgggttctgtagtttgggttatcggtcaaatcatgatgtagttgggtcttccctgctgtaatttaactatgactatgcaatggcaatgaagttctcggttatcagttcccgaatatatgcgtctacaatctagatcg

SEQ ID NO: 65370 - DNA, 498 bp, Zea mays
  Clone ID: MRT4577_159614C.1
ggcacgaggaatctccctagcaatctctagcagcagatcctcgtgcgaagcaaagcgctagcccccttcgtactgtcccgatggcccgcacgaagcagacggcgaggaagtccactggcggcaaggcgccaaggaagcagctggccaccaaggcggcgcgcaagtctgccccggcgaccggcggagtgaagaagccccaccgtttccgccccggcaccgtcgcgctccgggagatccgcaagtaccagaagagcacggagctgctgatccgcaagctgccgttccagcgcgtcaccatcatgcccaaggacatccagctcgcccgccgtatccgtggggagagggcctaggcgtcgtcccggtggaggtggaagtagtagtcgccgtttctgtcatcactgtctggctagaaggtgtagagatgtgccgggttctgtagtttgggttatcggtcaaatcatgatgtagttgggtcttccctgctgtaatttaactatg

SEQ ID NO: 65371 - DNA, 351 bp, Zea mays
  unsure (1)..(351): unsure at all n locations
  Clone ID: MRT4577_159615C.1
gtacaagcttttttttttttttttttttttttttttttttttttattttttttttttttttttttttttttttttttttttttttttttttttttttttttttctttttctttttttttttttgtttatttatttttccttttttctttacctctctattttctaattccatcacacttactcccctttcctatttttatcctatctcnttaccaacctttttttattcattctcatacctttttcctctntnaaattnttatcccctcacatttccacacaacatacctatccccaaccttacaatctaaatcctnncnttcccttattattcacctaactcacattaat

SEQ ID NO: 65372 - DNA, 270 bp, Zea mays
  Clone ID: MRT4577_159616C.1
gatcacccatctaattggggcttggcctaattatataacacaacctggccggctcccgcacgaaacattggccaacattggtcaagcttgctcgaggagtacagacacgatcttggcaagggcaaacaggagcatggggctacggtgagtgcatcatcttgatacttagcctccctaatgttgcggttcacgctataccctgtgcacatgccacgcgacctcaatgccttccttctcggcggcgtccacgttgtccgggtcagggaccac

SEQ ID NO: 65373 - DNA, 664 bp, Zea mays
  Clone ID: MRT4577_159617C.1
cggattccgatctcaatctccctagcaatctctatgagtagatcctcgtgcgaagcaaagcgctagcccccttcgtactgtcccgatggcccgcacgaagcagacggcgaggaagtccactggcggcaaggcgccaaggaagcagctggccaccaaggcggcgcgcaagtctgccccggcgaccggcggagtgaagaagccccaccgtttccgccccgggaccgtcgcgctccgggagatccgcaagtaccagaagagcacggagctgctgatccgcaagctgccgttccagcgcctggtgcgtgagatcgcccaggacttcaagaccgacctccgcttccagagctccgccgtcgccgcgctgcaagaggcgtccgaggcctacctcgtcgggctcttcgaggacaccatcatgcccaaggacatccagctcgcccgccgtatccgtggggagagggcctatgcgtcatcccggtggaggtggaagtagtagtggacgtttctgtcatcactgtctggctagaaggtgtagagatgtgccgggttctgtagtttgggttatcggtcaaatcatgatgtagatgggtctaccctgctgtaatttaactatgactatgcaatggcaatgaagttctcggttatcagctcccgaagaaaaatgaat

SEQ ID NO: 65374 - DNA, 674 bp, Zea mays
  Clone ID: MRT4577_159618C.1
acacaacgatctcagtctccctagcaatctctagcagcagatcctcgtgcgaagcaaagcgctagccttcctactgtcccgatggcccgcacgaagcagacggcgaggaagtccactggcggcaaggcgccaaggaagcagctggccacgaaggcggcgcgcaagtctgccccggcgaccggcggagtgaagaagccccaccgtttccgccccggcaccgtcgcgctccgggagatccgcaagtaccagaagagcacggagctgctgatccgtaagctgccgttccagcgcctggtgcgtgagatcgcccaggacttcaagaccgaccttcgcttccagagctccgccgtcgccgcgctgcaggaggcgtccgaggcctacctcgtcgggctcttcgaggacaccaacctgtgcgccattcacgccaagcgcgtcaccatcatgcccaaggacatccagctcgcccgccgcatccgtggggagagggcctaggcgtcgtcgcggtggtggtggaagttgtagtcgccgtttctgtcatcactgtctggctagaaggtgtagagatggttatgtagtttgggttatctgtcgaatcatgatgtagttgggtcttcactgctgtaatttaactatgactatgcaatggcaatggagttccctgttatcagttccct

SEQ ID NO: 65375 - DNA, 294 bp, Zea mays
  Clone ID: MRT4577_159619C.1
gatcagcaaagcggcagtgcgtattttgtgtatcgtcgaacagaacagcatgaggatggtcatcgttctcgtcgagtgcctggctctgtcagctgtcagcgcctctgcaatgcagatgccctgcccctgcgcggagctgcagggcttgtacggcgctggcgccggcctgactacgatgatgggcgccgtcgggctgtacccttactcggtgtacctgtggcagccgcagtgctatccgctggcggtggtaccctactacgcctggtgatgggcagctgagcgccatgttccagt

SEQ ID NO: 65376 - DNA, 2630 bp, Zea mays
  Clone ID: MRT4577_15961C.1
aatagattatacaacactttgtatgtgttttatatatgtgtgtagatttatcatcatccatttgaatatagatataaaaagtaagagctaaaatgaatactatcttggaacggagggagtatttcataactccctcacaaactgctactttttttcatatgaaatgactgggaaatatgccccattgtcacatttgggtgggagattactagttgcacatctttttcattgaacaattgcacattccatctgctaatgttgttgagcagtggacatacaactacaaaatccttgttcaagttgatgccagatggtggcagctgtcagctattttgggtatagtgtcgcttttgaggtcttacattttttttctgttgatgggacttaatatgaacatttcatttgtctagttacttttgtgttatctctatactagtgttgtgctatattcttcagtttctggatgctactgggcctatcttgttattttttaagtaaagtatgtgtcaactggagcattgaatgcatgattgaaggtcggatgtcttgtaagcaaaccagtttgcatattcatgattaggaatagcagcattggctgccacgttgttgtcgattaaatcaaatggacgcaatagtggtttaaataatgttggttattttctcatgtttcacccttgttctataaaaagtttaggaccaggtagtgtaagcctttaagaatgaccttaaaatgctatactgttgtgttttgatgtgtttgacagtagctttttgtattccattgttactttagcactgtcttaccttttggatcatgttttataaatgtttgatactttaatgtgaaatccttttttctcatgtcccctgaattccatattatagattattagattttgatcaaagccacgtgggactaaattttctttgtataactaaagcagtctgatggagtcaccttctggtggtctcattggaaggcccgcgactgcggctgcgcctgcgcccgaccaaacgtaggagacccatctcctctcttttctttccaagaaaagtcttctcttctctgtctcagcgccgacgcttcccaactccttccaatcgattcttcgtctcgtcctcgtgtaatccccagcttgccctcctcgctcttccctcccaaaaccctacgcctccctgaccaagctccggggacgaatggacggaggagccggcttccctggcacgccggtcccgcgctcgccggaggacgttttccgggactaccgcgcgcgccaggccggcctaatcagggcgctcaccaccgatgttgagaagttctacgtgatgtgcgacccagagaaggataatttatgtttatatggacttcccaatgagacatgggaagtaaacttgcctgctgaggaggttcctcctgaactcccagagccagctctcggaattaattttgctcgtgatgggatgaatgaaaaagattggctatcacttgttgcagtgcatagtgattcttggctaatgtctgttgcattttattttggagcaaggtttggattcgacaaggaatccaggaaacgtctcttcaccatgatcaataatcttcccagcatatatgaggttgtcacaggaacagccaagaaagagtccaaagaaaaaactcctaaaagcagcaacaagactaacaaatctggctcaaagccttcacgccaggtagaacccaactccagggtcccaaagatgccacctccaaaggacgaggagagtgaaggggaggaaggtgaaccacaggaagaccatgagagtgcgctgtgcggcgcatgtggcctaggttatgacgacttctggatctgttgcgacttatgcgagacatggttccacggcaagtgtgtcaagatcaccccaaataaagcggagcacatcaagcagtataagtgcccctcgtgcacaggaagcaagagggccaaggcttgattctatctatctacgatatagatatgaattgcggacaatgctccaagaaccgaggagcctttgacgagagttgtaagatgaatcttccgggtagggcagctaatagatttgaatacttcgtgtggatactgtcggcattggtgcttgagatgcctcaaaatatagtgtcagtactgatcaactgttaactgttgtagtttgtggggccctcaggcatctatgttctgtagtctactgtgtggtggtttagataccgtctatgccatttgtgatgaagcagtcgttttaaagttagatcccagtaatttccctactatacatttgtcttcgtgtaatcgtgtttaggcggattccggccgtggcgcccaggtcccgggtgcctttgccggcggtggtgtcgggtatcttccgggtggcgcagcggttcggcttgtttgcgtcctctggataccttcgaaaaaaaagctcgagatgcctctaaatatagtgtcagtactgatcaactgttaactgttgtagtttgtggggccctcaggcatctatgttctatagtctactgtgtggtggtttagataccgtctatgccatttgtgatgaagcagtcgttttaaaaaaaaaaaaaaaaaaaaaaaaaaaaaaaaaaaaaaaaaaaacacccaacc

SEQ ID NO: 65377 - DNA, 677 bp, Zea mays
  Clone ID: MRT4577_159620C.1
aacaacgatctcagtctccctagcaatctctagcagcagatcctcgtgcgaagcaaagcgctagacttcctactgtaccgatggcccgcacgaagcagacggcgaggaagtccactggcggcaaggcgccaaggaagcagactggccacgaacgatgcgctgcaagtctcgccccgcgcgaccggcgtgagtgaagaagccccaccgcttccgccccggtaccgtcgcgctccgggagatccgcaagtaccagaagagcacggagctgctgatccgcaagctgccgttccagcgcctggtgcgtgagatcgcccaggacttcaagaccgaccttcgcttccagagctccgacgtcgccgcgctgcaggaggtgtccgaggactacctcgtcgggctcttcgaggacaccaacctgtgcgccattcacgccaagcgcgtcaccatcatgcccaaggacatccagctcgcccgccgcatccgtggggagagggcctaggcgtcatcgcggtggtggtggaagttgtagtcgccgattctgtcatcactgtctggctagaaagcgtagagatggatatgtagcttgggatatctgtcgaatcatgatggagctgcgacttcactgctgcaatttaactatgactatgcaatggcaatggagttccctgttatcagttccc

SEQ ID NO: 65378 - DNA, 1758 bp, Zea mays
  Clone ID: MRT4577_159621C.1
cacccgtcagccgcggtctgacgaggcggggccgtttcctcgccttttcccttgccgtggacgcgtgccgcggtcgtcgccggccgcgggaggagatcgattccacgcggcggacttggtctacagtctactaatctattctctatctctagcagtggtaccatttggcggcgatcgccgtgctattgcttgggccttggactgagtaggtttggaggtagcgatacgagacactcgcccccgattcccctcccgttgccgaagcctgtgttgcagggatcgttcgcggaagcggtttttgatcggagagagagaaagagagagcgagggagggaggtggcagggatggacgcggcggcagcggcggcggcgcagatggagaggcactcgtcggcggcggcgcacctggagaggcactcgtcggcggcggccttcgtggagggcggcgttcaggacggctgcgatgacacctgcagcatctgcctcgagaccttctccgacagtgacccctccgcggtgaccagctgcaagcacgagttccacctccagtgcatcctcgagtggtgccagaggagctcccagtgccccatgtgttggcaggcaatcagcatgaaggaccctacgagccaagagctccttgaggccgtcgaggaagagcggaacgacgtgcaggaaaaccacgcgcgcacaaccaccgttttccgtcacccgctgctcggagatttcgaggtaccggtggatgcagacgacgccgagatcgaggagcggatcatgcagcacctggccgccgccgcagccattcgccggtcgcaccgccacgccagaagagaaggccgccgcagcagcagggcggcggcagctcatggccatggccacccacaaccacaaacacaagtcctgttctttccgtctgctggcgaggccactcctggtggttctggttccccgtctccgcatccgcggcaagaacatgctgcttcttctgtggtttctcctccgccattgcccgccgttgcctccgcagaaggaacggatgcagacagtactgcctcggttggtggcgctgtcgggccagatgacagtgtttccaggagccagtcttcgcctgtcaaccacgatgaagctggaccatctgctgacgcgcagtcattctcagacacgatcaaatctaggctgcagtcagcctatggcaggtacaaggactccataacgaagagcacgcgcgggtggaaggagaggtggttcgcgcagagcagcgccatgtcgaatcttggctcggagatgaggagggaggtcggtgctgggatcgccgccgtttcccgcatgatcgagaagcagctggagacacggccggatgggagtgggacagcgccgtcgcctgctaccgcttcgtctccagctcacgcccaccctggttcggatgcaagtagtcagggtcagggagctgctgttcccgctacacctgcagccgctctgaataacgctacgcctgcagctgctgctgctctgaatgacgcctcgtcgtcttcgacagcttgaacgcgcgccaggatcatgttcagtgagtttgcactaggtgtggttttcaagtgctttagatgcttgcaatgcaatgcgtcgcgtgtatagtcagtttgtcaattagcctcattggtagccagtgaaacagatagtggatgccaagctactgttcgatcagtgaatgtttcagaataaagttggatacttggatgcgcacaagaacacccgagagaccac

SEQ ID NO: 65379 - DNA, 600 bp, Zea mays
  Clone ID: MRT4577_159622C.1
acagaacgatctcaatctccctagcaatctctagcagcagatcctcgtgcgaagcaaagcgctagcccccttcgtactgtcccgatggcccgcacgaagcagacggcgaggaagtccactggcggcaaggcgccaaggaagcagctggccaccaaggcggcgcgcaagtctgccccggcgaccggcggagtgaagaagccccaccgtttccgccccggcaccgtcgcgctccgggagatccgcaagtaccagaagagcacggagctgctgatccgcgctgcaggaggcgtccgaggcctacctcgtcgggctcttcgaggacaccaacctctgcgccattcacgccaagcgcgtcaccatcatgcccaaggacatccagctcgcccgccgtatccgtggggagagggcctaggcgtcgtcccggtggaggtggaagtagtagtcgccgtttctgtcatcactgtctggctagaaggtgtagagatgtgccgggttctgtagtttgggttatcggtcaaatcatgatgtagttgggtcttccctgctgtaatttaactatgactatgcaatggcaatgaagttctcggttatcagttcctg

SEQ ID NO: 65380 - DNA, 709 bp, Zea mays
  Clone ID: MRT4577_159623C.1
acacaacgatctcagtctccctagcaatctctagcagcagatcctcgtgcgaagcaaagcgctagccccttcgtactgtcccgatggcccgcacgaagcagacggcgaggaagtccactggcggcaaggcgccaaggaagcagctggccacgaaggcggcgcgcaagtctgccccggcgaccggcggagtgaagaagccccaccgtttccgccccggcaccgtcgcgctccgggagatccgcaagtatcagaagagcacggagctgctgatccgcaagctgccgttccagcgcctggttcgtgagatcgcccaggacttcaagaccgaccttcgcttccagagctccgccgtcgctgcgctgcaggaggcgtccgaggcctacctcgtcgggctcttcgaggacaccaacctctgcgccattcacgccaagcgcgtcaccattatgcccaaggacatccagctcgcccgccgcatccgtggggagagggcctaggcgtcgtcgcggtggaggtcgaagtagtggtcgcagtttctgtcatcaccgtctggctagaaggtgtagagatgtgccgggttctgtagtttgggttatcggtcgaatcatgatgtagttggttcttcacagctgtaatttaactatgacgatgccatggcaatgaagttctcagctatcagttcacaaaaaaaaaaaaaaaaaaaaggccccta

SEQ ID NO: 65381 - DNA, 763 bp, Zea mays
  Clone ID: MRT4577_159624C.1
accggtctactaatctattctctatctctagcagtggtaccatttggcggcgatcgccccgtgctattgcttgggccttggactgagtaggtttggaggtagcgagacgagacactcgcccccgattcccctcccgctgccgaagcctgtgttgcagggatcgttcgcggaagcggtttttgatcggagagagagaaagagagagcgagggagggaggcggggatggacgcggcggcagcagcggcggcgcagatggagaggcactcgtcggcggcggccttcgtggagggcggcgtccaggacggctgcgatgacgcctgcagcatctgcctcgaggccttctccgacagtgacccctccgcggtgaccagctgcaagcacgagttccacctccagtgcatcctcgagtggtgccagaggagctcccagtgccccatgtgttggcaggcaatcagcatgaaggaccctacgagccaggagctcctcgaggccgtcgaggaagagcggaacgacgtgcaggaaaaccacgcgcgcacaaccaccgttttccgtcacccgctgctcggagatttcgaggtaccggtggatgcagacgacgccgagatcgaggagcggatcatgcagcacctggccgccgccgccgccattcgccggtcgcatcgccacgccagaagagaaggccgccgcagcagcagggtggcggcagctcatggccatggccacccacaaacacaagtcctgttctttccgtctgctggcgag

SEQ ID NO: 65382 - DNA, 862 bp, Zea mays
  Clone ID: MRT4577_159625C.1
cccagcgtccgcaatctccctagcagcagatcctcgtgcaacgcaaagcgctagccttcctactgtcccgatggcccgcacgaagcagacggcgaggaagtccactggcggcaaggcgccaaggaagcagctggccaccaaggcggcgcgcaagtctgccccggcgaccggcggagtgaagaagccccaccgtttccgccccggcaccgtcgcgctccgggagatccgcaagtaccagaagagcacggagctgctgatccgcaagctgccgttccagcgcctggtgcgtgagatcgcccaggacttcaagaccgaccttcgcttccagagctccgccgtcgccgcgctgcaggaggcgtccgaggcctacctcgtcggtctcttcgaggacaccaacctctgcgccattcacgccaagcgcgtcaccatcatgcccaaggacatccagctcgcccgccgtatccgtgtggagagggcctaggcgtcgtggcggtggaggtcgaagtagtagtcgcagtttctgtcatcaccgtctggctagaaggtgtagagatgtgccgggttctggagtttgggttatcggtcgaatcatgatgtagttggttcttcacagctgtaatttaactatgacgatgccatggcaatgaagttctcagctatgagttcccgaaaaaaaaaaaaaaaaaaaaaaaaaaaaaaaaaaaaaaaaaaaaaaaaaaaaaaaaaaaaaaaaaaaaaaaaaaaaaaaaaaaagaaagaacaaaaaaaaaaaaaaaaaaataaaaaaacaggggggggccccctttataaaggtacccaattttactcacccgggggtttgcaaaattaaaacctttttttt

SEQ ID NO: 65383 - DNA, 731 bp, Zea mays
  Clone ID: MRT4577_159626C.1
ggtaccctcccggtccgtccgggctatatagcatctcactccaacaacacaacgatcacagttctccctagcaatctctagcagcagatcctcgtgcgacgcaaagcgctagccttcctactgtcccgatggcccgcacgaagcagacggcgaggaagtccactggcggcaaggcgccaaggaagcagctggccacgaaggcggcgcgcaagtctgccccggcgaccggcggagtgaagaagccccaccgtttccgccccggcaccgtcgcgctccgggagatccgcaagtaccagaagagcacggagctgctgatccgcaagctgccgttccagcgcctggtgcgtgagatcgcccaggacttcaagaccgacctccgcttccagagctccgccgtcgccgcgctgcaggaggcgtccgaggcctacctcgtcgggctctttgaggacaccaacctctgcgccattcacgccaagcgcgtcaccatcatgcccaaggacatccagctcgcccgccgcatccgtggggagagggcctaggcgtcgtcgcggtggaggtggaagtagtagtcgccgtttctgtcatcactgtctggcgggctagaaggtgtagagatgtgccgggttctgtagtttgggatatcggtcaaatcatgatgtagttgggtcttccctgctgtaatttaactatgactatgcaatggcaatgaagttctcggttatcagttcccg

SEQ ID NO: 65384 - DNA, 758 bp, Zea mays
  Clone ID: MRT4577_159627C.1
ggatatataatctgtagatatatcaagattaattgattaaatggttagaggtcctaagaagcacttaaagagaatcgccgctcccaagagctggatgcttgacaaactcggtggtatcttcgccactaagccctcccaaggcccccacaaatacagagaatcccttcctctcactgtcgtcttgaagaaccgtcttaagtacgctttgactggtagagaagtcactatgatcgtcaacgacaaggaaggaaacatcgctgtcgatggcaagatcagaaaggaccccagattccccgctggtctcatggacgttatctccatcaagaagactggtgaattgtacagagtcctctacgacgttaagggcagattcatcctcagaaacatcggccaagaagaagctaaatacaagctcgtcaagatcaccaagaaggctgtcggccccaacaagatcccctacattgtcacccacgacggtagaaccctcagattccccaaccccgaactctccgtctacgacactgccaagctcgacatcgccactggtcaagtcgtcgatttcgtcaaattcgaaactggcaacctttgcatgatcacctccggtaacaacgtcggtagagtcggtgtcatcgtccacagagatagacacatcggtggtttcgatatcatccacatcagagactccagaggtcacgctttcgccacagaatcggaacgttttcatgatcggaagggaaagacccttggatttccctccc

SEQ ID NO: 65385 - DNA, 423 bp, Zea mays
  Clone ID: MRT4577_159628C.1
tttgggctgatttatgtgcttggtcttcaaccatcgtcataggcgcggtaaccccgtcgtaacttcagagtcggacgagaatgcgaacaagtagccttgtgcacccgaagtcgtcttatacgaactaagaggcgccttcgtcaagaggttagtattagaccatccctcgcgacgtcatatagtgaatgtccgagtccatcgcgtccctaagtgtcggattctacgccgtaagaagagtctaggtttcatagtcccttagttaggaggcggcccctaggacgcgcaaaccgagcgctactcctctttcctaggcttacgacccgcaagagagccggaccccggtacttagcccccctatagaatactatttacccgagtcggagaaacatgtttccgtgaaggggccctacgcgacgcgtcaaa

SEQ ID NO: 65386 - DNA, 453 bp, Zea mays
  Clone ID: MRT4577_159629C.1
gtaatatttatttgttttttttttttattttggtgctcttttttgctcaaaaacaaaaaacggacttctttttttttgggaaacccccaacataagacaaaaaactctattcttgggccattcctcccaaaaaatctcaaagggggcacccccactcatgggtcgttagctaaaaccatgctggttttacaaaacataccatggtgaatggcacgaattgttgcatatttaaaaaggagcccacattgggcccccagttcgtggaaaaccgaaccccctcgtgctgaggaaaaactggtacaggactaccacccactcgactactaaagggccctagttacccccagctgcaaacaaaccggaaaactccaggctggaacatgggttaaacgaaaaactcctgcggggcaaggaaccaatagctcgaccaatcgaagttcatcgcgtgcaaaa

SEQ ID NO: 65387 - DNA, 347 bp, Zea mays
  Clone ID: MRT4577_15962C.1
cggacgcgtgggcggacgcgtgggcggacgcgtgggtttgaccttgagctagtagaagccatgcgcaaatcatgctatacccacggttgcaccatactagtgcactaggcgagggaaaccctatcgaccgaccatggtgttgctcccgcgcaccgggcggatggcccttctttgcaccccgcgggcgtactccgctgtcgctgatgcgggcgcctacccggcgtccccagagccatacgggggcgcccccccaccggcgatgtcgaagacggccgacttcggggtctttaaggtggacgacctgatgaactgggcgcggtagggctcgatctggcccatgacctttg

SEQ ID NO: 65388 - DNA, 356 bp, Zea mays
  Clone ID: MRT4577_159630C.1
ctacctctatcgctgttggggagcgcctgactttcctgccacatggcttccgtatcttgttatgggcttatctagtatggggcactactttttcccaagaggggactaccttgtacaaagctgccttaaccattgtctaacaacagctgcttatgatcattacccccatgtaattccatatgtcttaattactttggtaaacttacttccctagaagaccatgagcaagagatcatttaagcaggtgataccgagcagccatcgtctgtatcttccctggaagccaacagtctctaccgttaattgcaatggaatgaaaaagctacgttgagcctaaaaaagtatcggccaacaac

SEQ ID NO: 65389 - DNA, 400 bp, Zea mays
  unsure (1)..(400): unsure at all n locations
  Clone ID: MRT4577_159631C.1
gggggttttgttggtttttaatttttttttttttttttttttttttttttttttttttttttttttttttggggcacattaattttttacaacaaaaccctgggccttaatttcatcaacctgcaaggctaaaggtnggggagctgaagggggggggaaactcccctaacttacaaactcatccatgcgacaaaacaaaatggggcctgaacactcaagacgacgttctcccttttacttttacattagccctttttttttttatgggaacgaacggatatgcatgtatgcctctgtaccttttttttgcccacaagcaaagggggggggggggtaactaataaacccaanntctggtctgataaacctttttttttcacggacctttttttggaccccg

SEQ ID NO: 65390 - DNA, 433 bp, Zea mays
  Clone ID: MRT4577_159632C.1
tttttctcttttttttttttttttttggtttttttttgtgttttttttttttttttttttttttttttttttttttttttttttttttttggggggaaaaccgtcctttttggaggcccccatgacaaaattcccaaggggtttttttaattcccccagggtgggaaagggggctaattttccattcgagggggaaaaatgcaacttttccccaagaaaattttgcggcttttttttgctaacccccctttatttaacccttttttttggggcccccaaaagggacatggtagaggggggctaaacagaaaccgaaccaattttaccgggaacaaaaattttgggacatagtattttgaattttttaacccaaagggcccaaaaaaaaagccttgtttgtcttccccctggggggggggccaccatttttaaa

SEQ ID NO: 65391 - DNA, 438 bp, Zea mays
  Clone ID: MRT4577_159633C.1
gtgttccattttttttataaggtgagccggaccagagcccggcgccggcacggccatagcggagcccggggggaaaaggagatccgcggacaaagccacacacaaacggggacggaagcacaaaggcccaagccagaggagccaaaagagtgaaccaacaaacataaagggcgaagcgcgcaaggccaaaaaaaaaaacaggaaaccggaaagggcagcgggaccaatgaacaaaccaaagcgcggaaagaggcgaataaaaaaaaaaacgcaaagggggaagggcgaggcaaaagggagacgggcaacagcggaagggcctgcaccgacagggcaaaagagagagggaccaagcggtccacgccgggaggccccagaaggggaaaagccgggctgaggggggccaacgggggaatacaacaagagcagaattcggga

SEQ ID NO: 65392 - DNA, 931 bp, Zea mays
  Clone ID: MRT4577_159634C.1
caatgatgcaaagagaaaaaccgtatttaaatgtgtaattgcgggtacttaggctatctccagcagaccccttatccaatccaatatattctcccctatttcaaactccactctgcaaacagtatcaaacaatgttatctacagttccgtgtcccctattttaccctatctactggagacagtcttattatgcaattgccccctgaccgtgatgaaattgtcttattgaatcagattgagatcatgcattgttggtgtggcatggcgagtaatcagatggaagcttgtttgttttaattgagtattttttctaactaatgagctaaagttcttgtagttgtcttagcttgctgaattttacagggggatctagaggagaaagcaagaagtttacgtagggagatagtgaatcattggatcagtaaagaactccagaggctagaaagattaattgacagggcgagtgagaaaggttggcgcaaggaagtttgaataccttgataagaaacaactcttgcgcaagccatctgaacaacaacgtttacttgaaaaggtgcctcaagttattccagagacagaagataataaagatactgaatttcaagttacaggacaagacaaacctattcaaaagagtactgtcgctttacaaggtgacactattaaggtttctgttattgctaattgttactgaaggatctgtgtaacgtcaaaagcatccagaagttctatgaacataaattctagctgcacttgatattttctttgcatcgtcaattttctttgtgggaaaaatattttcttcttttgcctaggtttgtgatgtttatgtaacttctgtacattagggttgccccctcttgtttattttgaatatgaaggacagtaaaagtaggcccccttaaattgtcagaaaggagtttattttttg

SEQ ID NO: 65393 - DNA, 167 bp, Zea mays
  Clone ID: MRT4577_159635C.1
tctgctcgccttactccctcatttaacctattgaaatattgccagtcccaacatccgaatagggtcacaccaactgctggtcctcgccatactcaccctcgcggccaccgacgtctctgacaactcctacttcacggactccaaccccatccaccctgacaccaacc

SEQ ID NO: 65394 - DNA, 477 bp, Zea mays
  Clone ID: MRT4577_159636C.1
agcagtggtaacaacgcagagtacgcgggctggaggcgttgtctctgcaagagtcatcatcagacaacaagcatgagagaatacagatttggtgggctgggaaagagctagccatggaccagaagctatccgactatatcggtgttaatgataaaaccaagattgtcgtcaggctaattgaagctcgtgatgagtgttgattgtgctcctacctcttcattgatatcgcagagttggtttcctcttcgataatattagtatatatggatactggtcctcagtccctgtaagatagttttaattcccttgaacaacattcttgtcaactgtattatctgacaataggtataagtggtttgacttcttgtaccagttgcttgtacaatatatcctcagtcctcacagaggcttacttttggggtgttaaaaaaaaaaaaaaaaaaaaaaaaaaaagtactctgcgttgttaccactgct

SEQ ID NO: 65395 - DNA, 453 bp, Zea mays
  Clone ID: MRT4577_159637C.1
cccacgcgtacgcacaattgttgtggtacgtacacgtgggtgctacgtcagaactaatggcttgatatatcgtgcaaaccctgctctagataaaaaaaaaaacaaataaaaagaaaccaaaaaaaaataaaaaaaaaaaaacttaaaaaaactaaaacaaaaaacctatcaaagaaactgatataagaaaacgaaggcaaactttgaagcatggaacattagtatgggattgaactcataagagctatgaatcatggccaacgtattctgtgcttaagtgtgtttactgggttgtcttattcgttatgggttatcaatcatgttaccaaactaaccactatctcaatatgtgctgtgtactatgcactatctgaataaaaatgcagaattactcctaaaaaaaagagtcctctaacaatgacatttcttaaattaggtttagtttaaaccatt

SEQ ID NO: 65396 - DNA, 458 bp, Zea mays
  Clone ID: MRT4577_159639C.1
gaaatattatgccaaaaccatataaagcaatagcaaaaactacccaaatgattcaggggtaaacaaggtaaaatggataaacagactagggtgacctattgggtcccatcaaaattaaacctatgcattgaataatgataataaagaatattattggggtaacaaaagtggatcaagggcacaacttgcttggcacttgaaattccaggtaccagggtgattcttcagatcctcgtgaccgaaggcgctgatgggaagagtgctgacaacccatgatgatcggacggcggttcttgcggatcccagcgagcaatcgccgccgcacctaccgtcttcggccccactgaccgatgcacgcgcctttagtgagcccctatgatcacgcctgaccaactattatgccccgagcgccgttgtaagctggtacccccgttcccatcgtacctctctgcgtcagc

SEQ ID NO: 65397 - DNA, 1345 bp, Zea mays
  Clone ID: MRT4577_15963C.1
attgggtacctcgagcgcggcttgataggggcgctcaccaccgatgtggagaagttctacgtgatgtgcgacccagagaaggagaacttatgtttatatggacttcctaatgagacatgggaaataaacttgcctgctgaagaggtccctcctgaactgccagagccagctcttggaattaattttgctcgtgatgggatggatgaaaaagattggctatcacttgttgcagtgcatagtgattcttggctaatgtctgttgcattttattttggagcaaggtttggattcgataaagaatccaggaaacgtctcttcaccatgatcaataaccttcccagcatatatgaggttgtcacaggaacagccaagaaagagcccaaagaaaaaactcctaaaagcaacattaagactaacaaatctggctcaaagccctcgcgccatacggaacccaactcaagggtcccaaagatgccacctccaaaggacgaggagagtgaagaggaggaaggggaaccacaggaagaccaggagagtgcgctgtgtggcgcgtgtggcctaggttatgacgacttctggatctgctgcgacttatgcgagacatggttccacggcaagtgtgttaagatcaccccagctaaagcggaccacatcaagcagtataagtgcccctcctgcacgggaagcaagagggccaaggtttgatccacgatccaaggagcctttgacgagagctgtaaactgactcttcgggctagggcagctaatagattcgaatgcttgtttcgatacaaattacgagtactgacgaaccgtaaactgatgtagtttgtgtggccctcaaagcatctatgtcctgacttgtgtggtttaggtttcctttggcacagtttctagagctgattgtctatgaatctaatatgagttttgtcaattagagagaagtggctatgctgaatttatgagccgattttataaagtgatgatataaaacaaaaaaaaaaaaaaaaaagcggatgctgcaaaaaccgaggagcctttgacaaaagttgtacaatgagcagtttccggatagcgcagagtacgcgggtgaatacttcgtgtggatactttcggcattggtgctcgagatgcctctaaaaatagtgtcagtactgatcaactgttaactgttgtagtttgtggggccctcaggcatctatgttctatagtctactgtgtggtggtttagataccgtctatgccatttgtgatggagcagtcgttttaaagttagatcccagtaatttcccaaaaaaaaaaaaaaaaaaaaaaaaaaaagtactctgcgttgttaccctggctt

SEQ ID NO: 65398 - DNA, 665 bp, Zea mays
  Clone ID: MRT4577_159640C.1
ggcacattccccttcagcagtgctcctcttccgacccagtctagagaggaacactttgcctctgacctggcgcaccacctctttgctcctcatcatcctcctccccactgttgatcattggattggcgcttctctctctctttttggttcttgttgccaaaaagggggagaaagtttattatgcagtaccatttatgcagtacccctttatttttgtaatgaacaatcggtctgtaataactatttgatgcatgcatggctcgaatgccacaaacacttttatgatgtgatgagatgagttctcattgttgtaatagctgtagaatttttcatatcatatgctatgcaataatgagcttgaatgtgtaatttttactctttctatccaattatgtttcatacctcatcatttttgtgtatggtgttgattgttctctctctctaaatatgtcgcaaattgacatatcaagtcaatggtaatatcgcaaaactcatgcacatatttagggggggctacacatacacaaaagattttatctcgcaagtacttgtaacttttaattcttatttccattctagtttgttttggcatcaatcaccaaaaagggggagattgtaagtgcaatcaaccctaatgagggttttggtgattaatgaccgacggt

SEQ ID NO: 65399 - DNA, 828 bp, Zea mays
  unsure (1)..(828): unsure at all n locations
  Clone ID: MRT4577_159641C.1
gggtacctcgagcatggccggggtcgaactcggacctgacaccgcgcgctgtaaatctgagtattcaacagcttttcctcacttcatccaaaacaacacactaccgccaacatgggtaaggaaaagattcacatcaacgtcgtcgtcatcggccacgtcgactccggcaagtcgaccaccaccggacacttgatctacaagtgcggtggtattgacaagcgtaccattgagaagttcgagaaggaagccgccgaactcggcaagggttccttcaagtacgcttgggtcctcgacaggctcaaggccgagcgtgagcgtggtatcaccattgacatcgccctctggaagttcgaaactccacgctattatgtaacagttatcgatgctcccggtcaccgtgatttcatcaagaacatgatcactggtacctcccaggctgactgcgctatcctcattatcgctgccggtactggtgagttcgaggctggtatctccaaggatggccagactcgtgagcacgcccttctcgcctacacccttggtgtcaagcagctcatcgttgccatcaacaagatggacaccaccaagtggtctgaggaccgttaccaggagatcatcaaggagacctccaacttcatcaagaaggtcggatacaaccccaagcacgttcccttcgtgcccatctccggtttcaacggtgacaacatgattgaggcctcctccaactgcccctgggtacaaggnnntgngagaaggagaccaagntcaagggcacccggtagaccctcctcgaggcatcgacgcatcgacccctcccagccgtctacg

SEQ ID NO: 65400 - DNA, 101 bp, Zea mays
  Clone ID: MRT4577_159642C.1
tgacgctggcaggcgactgtgccgacgccatgccgacgagcgccttctgcgacgccgtctacgctacgacgcattctacgacgccgacttcgttgcggcgg

SEQ ID NO: 65401 - DNA, 473 bp, Zea mays
  Clone ID: MRT4577_159643C.1
aaagggcctttcttatttcggggcccccccaaacattaaaaaaaaaactttattatggacctagagcggaaaaaaaatcaaaaagagggcccccccaatgaggggttgtgggaaaaacactgctgggtttgcaaaaacaagttggttaaagggcaaaaattgttgcagttgaaaaaggggcccaccgttaggcccaaccgcctggaaaaacggaaacaactggggttgggtaaaaaaggtaacagggctaacaccaactacctggctaaaaggaaaaaattgttgctgctgaaaaaaaccaggaaagtccaatgctgctagttggttaaaaggaaaaaattgctgggggtaggcaaaaggaacctggctaaaaggaaattgttgttgttccaaaaaaaaagcaaagttcaatgaccctatttggttaaatgaaaaaaactgcttttgctaaaagtaggcaaaaaggtttgcta

SEQ ID NO: 65402 - DNA, 338 bp, Zea mays
  Clone ID: MRT4577_159644C.1
tgcagctagaatgggccaactgtttagctcggccaggcaaacatttgaagtctcatcatatgatgtagaagtaattccagatattgaagtcacaactgatggcactaaatacatattttcagatggtatcgggaagatttctactagatttgccagacaggttgccaaattaattggcttagaccctgctcatcctccttctgcttttcaaataaggtatgggggctataaaggagtcatcactattgaccctacttcctttttcaatctttctctgcgacctagtatgaagaagtttgaatcgaagagcactatgctgaacattacaaattggagta

SEQ ID NO: 65403 - DNA, 396 bp, Zea mays
  Clone ID: MRT4577_159645C.1
gccggccgggccggaagaactactctgtcgtctcccgcctctctcactctgagaccgcagatgcgttgcccggcgagtggaagccgaacgaacccatggtctccggggagatagcctgcagctacacagctactcatcgtcggtgacgatggcataacacatcatccgtcgcgaaagatctccacgatatgcgaaggtgactcaacatcaaggcctagttctactgtccgatgctcttcgtactgctcctgcagaatggcaacggcgaggatcacatgctctccgatggatctgaaggaggagctgctccaattgctgctgcacgcccctgatgaaggtgctcgcgccgccaatgacccgtatgccaaggacaataaggaagatgcccatagagga

SEQ ID NO: 65404 - DNA, 595 bp, Zea mays
  Clone ID: MRT4577_159646C.1
tttcgtcgctgagctggcttttagtttttgcaaaaagaaaaaaaaaacaggttaaaaagcccaaccaaagagggcttaaatacagagatgtaagggaggcctacagcagactacatgcgagaatacacagcgaccacgcactgattgggggataatggacatccgctcatgtctaagttttccccgcctgaagctgaaggagcccggcaagcgcgccggaaccatgtcttgaacgcggcgaccagatgggggcaggcatggacattgcgggtcgagaaccccaggcattgctgcaacagctcctgggcttctaggacaagcaaggtggagatgttctgaagaaacgcctcctccaggtcttggcaattggtcgatttctggaagtgcattggttgaataatgtcccggcagacgtttaggacagggagccagcttctgacgagcatcatcctcacctgagtaacactaggttagtgttgttaggtgacgtccacttggcgatcagcttttgggtctgacacttgttcagtttatccatcttcagattcgtccatcagcatcaccatgcggagtagcccacgcttggggtcgactt

SEQ ID NO: 65405 - DNA, 179 bp, Zea mays
  Clone ID: MRT4577_159647C.1
gcgcgcgcggaagctctctatccatccacgtgttgagggagatacgggtatggcgaatgtctggctgagcaagcttaagagcgtgcttatgaggtggtactcctaaagccggatattgctcacaccacaagggcgctcggctcgctcctcacacgacgttcatgcacatttgtgcgcca

SEQ ID NO: 65406 - DNA, 144 bp, Zea mays
  unsure (1)..(144): unsure at all n locations
  Clone ID: MRT4577_159648C.1
atgncggcacgaggcacaagcgcagaggcactgtancaatggcattctgagggtgtccgccctancgacgccgagctactgcaggcacaagccgacatatggggggtcancctctcctaccgggcgcccctgggactggagtgc

SEQ ID NO: 65407 - DNA, 202 bp, Zea mays
  Clone ID: MRT4577_159649C.1
attttcttctctacttcttgcgtataaaaaatagtcttttaataaaaagtgggggcgacaccaacaacctctccctctacaacaaaaatcccactatcacctactaccatatccatacctccgaacgcctttttctccccaactaactctacaaaaactccccttattacaacaccaaccccgtcacctagttcacctccta

SEQ ID NO: 65408 - DNA, 322 bp, Zea mays
  Clone ID: MRT4577_15964C.1
ctaaaaggttttgctttttaaatgccattgtttgttctgggcaggtttctggctccaatgtttgtaaggtcgttcactcctttttcaaagggcaaaaagaattgggggggggggggtcaaaaaatttttaggtttcaaaggaacatgttttcagaaggacaatctgaagctggaacacccataaaaaaacaacggcccccgcggggaggattattaccgggaaaaaaaaatcaatatcaaaggcttccaaaaaatgaacttggtgaaccgcgtcctggttgtcttttaaaaaaagatcactgaaaaaaacctgggggttttt

SEQ ID NO: 65409 - DNA, 387 bp, Zea mays
  Clone ID: MRT4577_159650C.1
cccgggggaggaaaaaccggaaaaacagattgaaaacgcggttgtaaagcaaagaaccgcagaacggacggggggaagaggaaaaccgaggacggggacaaaacagacgaggagccagacgaagaaggcgaggacgaggaggaagagaagaacgcaccggcgaagaagccgaggcgaccacacaacacaagaagaacgacaccaacgacgcacgaaaaaaaaaaaagcacggcaaacagaagggaacaacacgacggcaggaggccaaacaggcacacaaagccccgcaagaaacaaaggcccagaaacggcgggaccacaggagcgaagaaaaggcggaagaaggaacaggaacggaagggagcaaaaggcgaagagaagagcgcg

SEQ ID NO: 65410 - DNA, 589 bp, Zea mays
  Clone ID: MRT4577_159651C.1
acccacgcgtccgggcaagggacgtaagaagtcgtctaattcttggatcgaattagacgacttcttcgtccctctcttcattagcacgctaacttgtaatctacaggatctaagcaaagacttgatttagttatggacggattggtaggcctcttgaaagttcgcgtggtccggggtatcaaccttgcctaccgcgacgcaagaggcagcgatccgtatgtcgtcttacgacttggcaagaagaaactgaagacaagcgtgaagaagagatccgtcaaccccatatggcatgaggagctaactctgaccgtcacagatcccagccaaccactcaagctggtggaaggtgtttgacaaggacacattcagcagagatgacccgatgggagacgcggagatcgacgtcgcaccattgatagaggcggtgaacatgaacccagaggagatcaggaacggcgccatcatcaggtccgtgaggccgagcaccaagaactgcctcgccgacgagagccacgtgtgctggaggaatggcaagttcgtgcaggacatgatccttcggctcaagaacgtcgagagcggggagatacag

SEQ ID NO: 65411 - DNA, 412 bp, Zea mays
  Clone ID: MRT4577_159652C.1
taaagaagtcgtctaattcttggatcgaattagacgacttcttcgtccctctcttcattagcacgctaacttgtaatctgcaggatctaagcaaagacttgatttagttatggacggattggtaggcctcttgaaagttcgcgtggtccggggtatcaaccttgcctaccgcgacgcaagaggcagcgatccaaactgaagacaagcgtgaagaagagatccgtgaaccccatatggcaagaggagctaactctgaccgtcacagatcccagccaaccactgaagctggaggtgttcgacaaggacaccttcagcagagacgaccccatgggagacgcggaggtggacgtggcgccactgatggaggcggtgagcatgaacccgcgggaggagagtctgaggaacggcgcca

SEQ ID NO: 65412 - DNA, 1062 bp, Zea mays
  Clone ID: MRT4577_159653C.1
acccacgcgtccgcttaaaatctagctaggctcggatcctcgaggccggccgggaacacacacttctagtagcgagaggcaagggacgtaagaagtcgtctaattcgattggatcgaattagacgccttcttcgtccctctcttcattagcacgctaacttgtaatctgcaggatctaagcaaagacttgattcagttatggacggattggtaggcctcttgaaagttcgtgtggtccggggtatcaaccttgcctaccgcgacgcaagaggcagcgatccgtatgtcgtcctacggcttggcaagaagaaactgaagacaagcgtgaagaagagatccgtgaaccccatatggcaagaggagctaactctgaccgtcacagatcccagccaaccactgaagctggaggtgttcgacaaggacaccttcagcagagacgaccccatgggagacgcggaggtggacgtggcgccactgatggaggcggtgagcatgaacccgcgggaggagagtctgaggaacggcgccatcatcaggtccgagcggccgagcgccaggaactgcctcgccgacgagagccacgtgtgctggaggaacggcaagttcgcgcaggacatgatcctccggctcaggaacgtcgagagcggggagatacagctgcagctgcagtgggtgaacttccctcctggtccaggtcctgctgttgctgcaacaaccaggtgatgatcgtgcttcctgattgatggtagatgctgttcctgtcgccatttcctcctgctggcaggaacaggaactctctgaagcacggggtcagggtagttcatgttgctttgattcgatcgtaggggagataatgccggatggcgctgctcatgctttgtaaagtttgggaggacatgcatcataattgaagtcaagtgataggatcctgttttttaagtacacgatacaacacaatcttaacatactccctttgttttaaaaaaaaaaaaaaaaaggggcgggcctctttaagggaaccatgcttcgtaccccgggcatgctaagtcaaatctttttttt

SEQ ID NO: 65413 - DNA, 1102 bp, Zea mays
  Clone ID: MRT4577_159654C.1
accacgcgtccggggacgtaagaagtcgtctaattcttggatcgaattagacgacttcttcgtccctctcttcgcgagcccgctaacttgtaatctgcaggatctaagcaaagacttgatttagttatggacggattggtaggcctcttgaaagttcgcgtggtccggggtatcaaccttgcctaccgcgacgcaagaggcagcgatccgtatgtcgtcctacggcttggcaagaagaaactgaagacaagcgtgaagaagagatccgtgaaccccatatggcaagaggagctaactctgaccgtcacagatcccagccaaccactgaagctggtgagtgagcagcaagcagaacgatcctgtttgtgattcattattctagactgtttgctacaggaggtgttcgacaaggacaccttcagcagagacgaccccatgggagacgcggaggtggacgtggcgccactgatggaggcggtgagcatgaacccgcgggaggagagtctgaggaacggcgccatcatcaggtccgagcggccgagcgccaggaactgcctcgccgacgagagccacgtgtgctggaggaacggcaagttcgcgcaggacatgatcctccggctcaggaacgtcgagagcggggagatacagctgcagctgcagtgggtgaacttccctcctggtcctggtcctgctgctgcaacaaccaggtgacctgatcgatggtagctgctgttcctgtcgccattgcctcctgctggcaggaacaggaactctctgaagcacggggtcagggtagttcatgttgcttcgattcgatcgtaggggagataatgccggatggcgctgctcatgctttgtaaagtttgggaggacatgcatcataattgaagtcaagtgataggatcctgttttttaagtaaaaaaaaaaaaaaaaaatttgcggcccctttttttatttgtcgctctcatcagtggacgactgttgatggggtaggttgagtgctgtgaatcgtggtgcagcgatcgcagttgcaaaagttgcagggtcaggctgccgcggcaacgagttggtcgtctactcacctcgccggggctttactta

SEQ ID NO: 65414 - DNA, 270 bp, Zea mays
  Clone ID: MRT4577_159655C.1
ttctccactttttctatcaatgctaatgttacaagcgctggcaaatttaatattttttgtcggccctacacttcaattcctacttcaatagagctttttataaacacactatcaagaataactttgtttttatatattaacttcttgatgagaacatcaattattcttatcctcaaaacctatcacctaaaattattaatttttatataactcaataaactcttctttcaccattatccttaaatccctcttataatcctttttcaaatt

SEQ ID NO: 65415 - DNA, 509 bp, Zea mays
  Clone ID: MRT4577_159656C.1
cggggaacgagactgcgcacgacgcaggcggcacctttttgacccacactctccctggggcctgggggggcccccgccgcctaacgagcggggcgaagatgaacaagtgcgagcctcatgaagatggccgccgccggccgaaaccatgccaagctcaccatgcgcagaaagaagcaaggctgtacacaagacgcaccaccaccgacgacaagaggggttgacggggtgtcaagagtgtaaccgtcaacaccacccctaccaatacgaggcaggagaacatattcaaggccgatctcgctatccagctcattgaaccccaaagcgcaagctgccatcggagcaaacacatggagggacagtggatcgccacagacgaaaaagctacaggatgatctacctgggatcattaaccagcttggccctgacaacatggagcacctgaagaggatagccgaggagatgcagaagcaggtggctgctgccggtgcggcagcacaagtcaaggaaga

SEQ ID NO: 65416 - DNA, 460 bp, Zea mays
  unsure (1)..(460): unsure at all n locations
  Clone ID: MRT4577_159657C.1
gatggatgcatgctcttagcttctccttggtacttctctccatatatagagatcgatctcgaggcctcctctttcctccgtcgnctttagtctttacaagatgatccgtaggacctcccgcaccatggtcggngcttttccgatccactcgaaaacgggtgtgtgtggggatatgtctctgcaggccctgcgtagcttttgcgcgacacggcctagtagccgcaagatcttgctccgtttcctctctctctccctccctctctctctctcttcagttgcatgggtaaagatatgcatctcactagcgaaaagagatttgcatctgaaaagttgtaggattggactggccggctaggatagatgttcaagaaagagagagagagaggatgcatggtggatactagctagaagcacatggttgctggtagagggtgcaggaggctgctttgctttgctttgc

SEQ ID NO: 65417 - DNA, 303 bp, Zea mays
  Clone ID: MRT4577_159658C.1
gccagcagcatgtcgtcctcgctgctctcatcgtcgtcgtcgtcgccaccatattggtgcagacgacgccgccgccgcgtggtgcggaggcggccattattccgggtaatgttagcgcccccaacgccgtcgtcttcggcgtagtgccatgcagcaccgggagctccatcaacgtggccaccgccccgccgttcccaaacgccagcctacagctgcagtgcggcgccgactcccttgctggcaacgtgagtggacgcgcgacgactgcagacagccgcggcaactttcttgtcggcgtggccg

SEQ ID NO: 65418 - DNA, 293 bp, Zea mays
  Clone ID: MRT4577_159659C.1
aggtgacttaggtcaagtcgttggtgttcctgtatctcttgacgacgaagcctccctcgatgccgctatctctcgctccaacgttgtcataaaccttcttggacgcttttggaaaacgaagaatttctcaatcaatgaagctaatattgaaaccgcttctataatcgctaaggcagcaaagagagttggcgttgagcgattgattcacgtttcttctgtaagcgctgcaccaggtgctccatcagagttttcaagagcaaaatacttgtcggaactagcagtgtcaagagaat

SEQ ID NO: 65419 - DNA, 415 bp, Zea mays
  Clone ID: MRT4577_15965C.1
aaaaaaaaaaaaaaaaataaaaaaaaaaattttataaaaaaaaaaaaaaaaaaaaaaaaaagaaaaaataaaaaaagaaaaaagaaaaaaaaaaaaaaaaaaaaaaaaaaaaaaaaaaaaaaaaaaaaaaaaaaaaaaaaaaaaaaaaaaaaaaaaaaaaaggggccccctttttaaagatcccaattttatttccccttttttccaacttaaaacttttttattagggcccctaaaattaatttaattgccctctttttaaaaatcttttacttggaaaaaccttgggtttcccaatttaaatcccttttaaaaaaatctccttttctccagtttcttaaataccaaaaagccccttaccatacgctttttaaaaaattttcccaccttaattgtcaaattgaacccccctttt

SEQ ID NO: 65420 - DNA, 209 bp, Zea mays
  Clone ID: MRT4577_159660C.1
cttcttacacaggaaattatcttgggcatcaagttatcaataagcatacaaaatctcgactttctgtgggcttgaatttactttagatgagacacatgctaaattactatatatcaaatgcaaccttcaagtacacttttttagtccattaaacaccccccatcacgtctaggagatccttcggccgcttgctttgatttattaacaag

SEQ ID NO: 65421 - DNA, 522 bp, Zea mays
  unsure (1)..(522): unsure at all n locations
  Clone ID: MRT4577_159661C.1
tttttttttttttttttttatttttttttttttttttttttttttttttttttttttttttttttttttttttttttttttttttggttgcgtggtttttccggggacccgggggccgccccgggaaggcgggccggggcccgggggggggaccagcttccccaaagggggggcgaaggaaagcggggggaaaccgggggaaaaggggaccccgggggaaaatgggaaatccgacaaaaaggcaaaaaaaaaaacaaaccggaggcaaaaagagaaaagccgggggggccaaaggagggagcaaaccaaaaaaaaagggggggagccaaaaacccggtttccaggggggaaaccgggaggcccccccgcctaaaggaaagggccaacccgcggggagaggcggggtgcgtattgggccccagggggggttttttttcacccaggggaacgggaaaaagtggattgcccataaccgncgggccctggaaaagtggaaaaaagcggcccacccaagttgccccc

SEQ ID NO: 65422 - DNA, 767 bp, Zea mays
  Clone ID: MRT4577_159662C.1
aattcggcacgaggtccaacccgtccccccccaattcagcaccagcctttgcgcatcgcgacagcgatctcgggaagaggaaactcgaaagcccggcgagcggtatggcaaccggcccggagcacgtggcggcggcggtcgaggagacgccggagaagaaggcggccagcacaaccgagctccccgcaccctcaggctggacgaagaaggttgctccaactcgaggtggacgatttgaggttatttttgtttccccaactggtgaggaagttaagagcaagagacagctaacctcaaatcgtccaactcgaggtggacgatttgaggttatttttgtttccccaactggtgaggaagttaagagcaagagacagctaacccagtacctgaaagctcatcctggaggccctgcatcctcagagttcgattggggaaccagtgatactcccagacgctcagcacgcttgagcgagaaggtcaaggcaactgagagcccagagggtgagaagacccctaaacggggaagatcaagttctaagagaggcaaaaaggaggaaaaagacagctgcaaatgaggctggagaagatggtgcttcaggaataaatacagatgtggagatgaaagatgctgaaaacgctgagccaaatgcctgctgctcttactgcccgcttgtccgtcccctttcaatttgctcgcacgctcctccctgcgcgccgtttgcttctggcccgggggctgggggtgcctgctcgcgttggggtgctgg

SEQ ID NO: 65423 - DNA, 2829 bp, Zea mays
  Clone ID: MRT4577_159663C.1
cccacgcgtccgcccacgcgtccgcggacgcgtgggccaacccgtccccccccccccccaattcagcaccagcctttgcgcatcgcgacagatatcgggaagaggaaactcgaaagcccggcgagcggtatggcaaccggcgaggagcacgtggcggcgccggcgccggcggtcgaggagacgccggagaagaagcaggccagcacaaccgagctccccgcaccctcaggctggacgaagaagcttgccccaactcgaggtggacgaggtggacgatttgaggttatttttgtttccccaactggtgaggaaattaaaagcaagagacagctgactcagtacctgaaagctcatcctggaggccctgcatcttcagagtttgattggggaaccagtgatactcccagacgctcagcacgcttgagcgagaaggtcaaggcaactgagagcccagagggtgagaagacccctaaacgggcaagatcaagctctaagaggggcaaaaaggaggaaaaagtggatgcagaggatgcaaatgaggctggagaagatggtgcttcggcggaaggtaaaggtaccgatgtggagatgaaagatgctgaaaatgctgaagacgagaagaaagatgtcccaagtgcagagaagactgaggaagttgacgataagaaagatgctgaaaatgtggagatgaaagatgctgcagagaagactgaggaagttgacgataagaaagaggaagcccctactgtagatgcagcagagaatactgtggaaggtgatgataagaaagaggagccccctgcagagaagactgatgagaaagaggaagccccagctgtagatgcagcagagaagaatgaggaaggtgatgataagaaagaggaggagccccctgcagagaagactgttgagaaagaggtggtccctgctgtagatgcagcagagaatactgaacaaagcaccggtgggcaagcacagcctaacgatgttgctgccccagaatctgagaataaaggagacggcaagccagctgaatccgaatcagctccccttgcatttgttgatgaagcagcgccccttgtaatcgttggtgaagagaaaactgaggacagtcaggcagctgaatctgcggtgccttccctggcgtcttcagagggagagaagaaagagaacggtggtgccactgaaccagcagctccgcttgtggttgagacaaaggcagatgcacctcctccagctgatgcagacaagggcgcggagaattcaggccaggtgaacaccgccccccaagaaccgacggcagcgaactgcgacaaggggcagatccaacctggtgcctctgctgtcaggtgcacataagggagcttggtctccgatgggagactgtcgctttgtgtgtttagggcaatacctcgcatttgctttgagaattataatcgtggttaacctgacaggacagcgctgtgcagcactaggctgcccagcacgtagttatctttccgttttttttatggcggcagggacaaatgcgtgtacccggttcgaagtgtaactcgttattagcgtggtgaacattgatctctggagcggactggaggacgtagtactgtctccaactgttgtaacgtgacgttgtttgtgttgttgccttgtgttattgaacttattatgatccataaataaaagccataagcgtggcaggggtcattccctgaccaccttcaggcaccaaaaaaaaaaaaaaaaaaaatgcaggaaagtactgtcatagacagttgtaacgttacgttttgtgtgttcccttgagttatattacttcttttatgattgaactatttatgatccataaataaaagccataagcgtggcaggggccattacctgaccacaaacagggaaaaacacgggcggtcacaaaattaaaatcgtttggaaaaaaaaaccccttttacaaagtggggggaataaaaaaaaaaggccccacacagatccccttttcaaaaaaatggccacccccgaaaagaaaaagggggcccccccctttaagggggatataaaagcgggggggtgggggggggtatccccaaaagtgataccctaacattttagcaaagcctgtgaaaggcgcgggggggggggggggggggtgcgggggtcggggggcgccctcctacccccctccccccccagaccaccccaaacaccggcgcacactccccccgggagggtatttaaattccccttgagccttacccctcaaaaacacagaattgtgatgaggcatctcgaaacgtgtccggctcctccttaaaaaaaaaatttaaccacgctaatttaggaacaacctactcaacaaatcgttctgtatctgccgtagaaagacacataacacacaactggacgactcttttattacaatgaaggtacccatagcccaatgaatatcgaacggatgacagattgcaggttatgtgcggcatcctactggaccgtctaggtaatgtgatgcaattgtaccgtcgccgctggttcatccacgtcgagcggatcacccgcgagaaggtgaacggctccaccgtgaacgtgggtatccacccctccaaggtgatcgtcaccaagctgaagctcgacaaggaccgtatggcgctcctcgaccgcatggcccggtgccgcgccgtcgactaggctaatggcaagtttactgccgacgacgtctcctcccccgccgctggtggaaccttcaccggcccctctctcctgcagatcgactaaactcttctcgctcctctaatttttgtcgaacccccttttcctcatctctttagattt

SEQ ID NO: 65424 - DNA, 361 bp, Zea mays
  Clone ID: MRT4577_159664C.1
gggggcgaaaaacattttttgggggggggaaattaaaaaacccggtcccttccaaaagccaccccaaataattggaaaaaaatggtggcccccgccctcccaaataaacctgccccttaaaaaaaccggcttttaacccaaaaaagcttttttaataaccggccaccttttttttacccaacacaaaaattttttttgggaaaaacacaaagaaaatttggggggaaacctaaccctggaaaccaaatgaaagggaggggctccctttgacccttggttggccttaacccttaccttttaaaaaccctttttttaatggggggcagggccccccttttttttggattttcccccctggggg

SEQ ID NO: 65425 - DNA, 156 bp, Zea mays
  unsure (1)..(156): unsure at all n locations
  Clone ID: MRT4577_159665C.1
gacggactggtccccaaaagagcgattggagaggtactggttgactgactgacacactagcgcagagcgcacaggagcaaaggggggcatcctctctcgcgcgcgcgccatggncaccacgccggtcccctttgactgaatggccatggccaaggc

SEQ ID NO: 65426 - DNA, 312 bp, Zea mays
  Clone ID: MRT4577_159666C.1
gtgatattctttttccatccgatgctggtttaccaaaattatcttcacctcttgattataaagtaccagaatcatttgattgggccactcaagattttatgtacacctttcatgacaagtcaacaaacgagttgaataattttctttgctttaaacaatatgtgcctgtacacaaacaagaagaacaagaaaatcaaatattatctcaagtccatcaatatctgtctactggacagtctgaattaaatgagattctcaaaggatttcatctttccgtacaaaaatcaattcaaaacaatcaaacccaaaaca

SEQ ID NO: 65427 - DNA, 233 bp, Zea mays
  unsure (1)..(233): unsure at all n locations
  Clone ID: MRT4577_159667C.1
attanactaggcatttnncatctcacttctaggantactagnatatcgcnnacacctgcatatnccnccctactatgcctagaaggaatantactatcgctgtncantatagctactctcataaccctcaacacccantccctctnagccaatatngtgcctattgccatactagtctttgccgcctgcgangatnggnngggcctngcnctactagncnnaatntcnaanac

SEQ ID NO: 65428 - DNA, 337 bp, Zea mays
  unsure (1)..(337): unsure at all n locations
  Clone ID: MRT4577_159668C.1
gttgtgcctgntagttgtgatcggggggggcgtggggggtttgcacctnagttgggggatgccgncaaacccgggcttgctcgtgtgaatgcagttgatgttgtggtgtgcaggggggagagacttttgggactcccatgttttagttttctttttttttaaccaaatgagaggtggggggggggggtgattagtattgttcctgctagtttatgttatgatgtactgtttgtgacttattgttttttggtgttgtccttggggttccttgcttgtgcgtccatggggatgtcgggtcttgtttaagctggttgggtgggtgggttgggggtcagtt

SEQ ID NO: 65429 - DNA, 345 bp, Zea mays
  Clone ID: MRT4577_159669C.1
gctctcgctctctgagtgacaagctcagaaattaaaatcgcttattagtcatatagggaatggtcacgtaggaatcttgcatgctagacaagaactcacaccatcaatacacacgaccaactggtaatggtagcggcctccttaattaccggcatgatgtgcttaaagaatgattattatttcaatcatactgtgcaccactacctggacaaattgctacctgagcacaagacatacattctcaagactgttgcatgatgctatcttgaactagcaagacatcactatggctcctgcgtcctgacgataatggttggtcattcaactgatgaacacagaaacaac

SEQ ID NO: 65430 - DNA, 426 bp, Zea mays
  Clone ID: MRT4577_15966C.1
ctcttttaggacctggtctccttggatgctcctattatattccagcgccctaacatctatgtggttcacaggatgccattgcatgtcgacatattgttagctcacaatgatgcttatgatatgctgcgtctagacatgagttctctattaaaaaataacatcgcgcatagcctgtcggtagtactgtgtccctatcaatgctctcagatctcaacatatagcccttaccgcgaacgatgcatgtcctaatagatcatgctgatgttgttccgcctacatgatttacagtaagattgactgacggcactattggtcaactgcactgatgctggctccgagaaagcaaagagatggaggctattaaaatcggtcgctctgcaaagtaatacagttacgcatcaatgatagtagctgccgtcctgcaga

SEQ ID NO: 65431 - DNA, 432 bp, Zea mays
  Clone ID: MRT4577_159670C.1
atcggtagcgaaaccctagaatcgaatcgaaccgaggcgaggcagaaggcagaggcggcggcggagacgagcggagaggaaatcgaggataaggcgaaggaagaggcaatcatgtccctccggcggaccgtcggtttcgtcctctcacggaggttctcgccgcgggtgatcccaagggcggctcctgcacgctctttccacaccttgaaggaactccctgtaggtgatggccttcgtggtgctgctggtgtggccgcggctgcgattgccggtgttggagcctgggcagttcagtatttcaggaaaggcccagatgatgacgagtcagctgctcgcaagaaagaggaggacatgaaggcgaggttcgaggattggatgaaggagtacaacaagacataccgcgacgaggaagagaaggctatgcggttccaa

SEQ ID NO: 65432 - DNA, 240 bp, Zea mays
  Clone ID: MRT4577_159671C.1
ggggctcaaccccccacgggagggagaccaaagggggcccgcgggcaacgaacggcgcacaggaccccacaggagggcccaggacaggaagacgacaggcacgccgagaccggcagccccaaccagaagcccagcgaacgcgacaagggacccgaacggacaacgcgagcacacacaggcccaagaccgcaaagcagcccaccaacacgcgagagaacccaggaggggaagcacacgcaa

SEQ ID NO: 65433 - DNA, 469 bp, Zea mays
  Clone ID: MRT4577_159672C.1
gtttctggtgtacctaggttggcatatgaacagtttgtgttttgtgatatatttcaccaaaaggaatcaggatggagagactgctcattttgtgggaaggtgaggtggtgacgcaagcgctcaaatacatgcaaattctgaaatgacatcctctgcaattgagtgtagttgagtcctggcaggtcatcaggctcacttgccagtgacaaatacaccatgcagtcaactgcagaggaattgattctgcaaattcttgggctgaactgtaatgcaacagtattcttatgaaattctaccgtttcagcgcctccattgtgggtgtgttgcttcaaagaactcttatgatctacttgacagtggaggagttcattgtgtcacttgcatgaaaaattcattaacccagtcccgaagttctgtttttggtcagaatattcacctttcctttttaaatcatctgactgtagttttt

SEQ ID NO: 65434 - DNA, 339 bp, Zea mays
  Clone ID: MRT4577_159673C.1
atcacgtttaccatcacactctcccacacacgatatataacgagacgtatcctcctgtgaagttccttttacaggggggtgtccaaattcacgtacgccgtccaactagcctaacaaatcgtatatcaatttataaataaaattaggacacaattctaacccacaaggagatcgacgacgagatatgtcccagtacaactagcactaccacgagcactgccacatgcacggaaacaaaggcggatatccagggggctattacgacggcgactacgccccttgcggcaggggttccgccgccggatacaggaacgcctacaggttctcctaccacgtcta

SEQ ID NO: 65435 - DNA, 291 bp, Zea mays
  unsure (1)..(291): unsure at all n locations
  Clone ID: MRT4577_159674C.1
actctttgtttttttttttcagttcataattgattcttcaaattaaccataccacgccataacatgtnacatttattaaactactagtacacttttcaaaattcaactagttcaatactaaaatataaacttaattcaatctaatcttcttcctctccctctttctcaacaatatttaattatctgatctcataaacatttctatcctttttgtcatcaaccactcgtatccaatcccccactttgtgcttcttcaagtacttcttgttcaaatacttcaagtacctcttt

SEQ ID NO: 65436 - DNA, 370 bp, Zea mays
  Clone ID: MRT4577_159675C.1
gtagtgtcttctacgtcgccgccgcatctaacgcagttccctccgccgcagcccgaggcaggatggttctccagaacgacattgatctgctcaacccgccggcagaactcgtgaagctcaagcacaagaaaaagagactcgtccagtcgcccaactacttcttcatggatggtaagtgccaggggtgcttcagcataaccactgtttttagcccattcccatattgtttgtgtgtggccctggctggcaaaactgttcttttggcaacccacaagggtggatagggcaaggcttaactgagggctggtctttttccgaaggtaagggagacctaggagccggaatggggtccttaaaaggttttggcttc

SEQ ID NO: 65437 - DNA, 354 bp, Zea mays
  Clone ID: MRT4577_159676C.1
gtgacgcatgggtagggctgtaagggagaacgcggttactttttaaggatcatggacacgtagctccccggtgatcccgtgcggccaaacatgtaagggcgcaatacattatgtcccgccaaaataggctaggaggtggaagagctcacgtccattctggaggctcggaatgagaaacgcgtttcatcacagaaagggcatgtcataccttaagaccacttggtcagcaaagaaaaggagctcatcaaggtgcataccaaggggttggtaggcttctcaatgccgcgcgccaggcacagaaatttctctaagaattgcacccatcatggactaaagatgccacagttattgcat

SEQ ID NO: 65438 - DNA, 727 bp, Zea mays
  Clone ID: MRT4577_159677C.1
gtctccgcccgctgtcgatcccatcgatgccgaccccgcgcgccctgtgggggggaggaggaggctgcgtcatataagctgcagctggagaagaagcgggacgaccggaggaagaaagacgaggcggcaaccgtgatagagaagaagacgtcgcagtcgtgcaagaagtcgacagtcctcgtggttgagcgcccgtccaaggagaatgaggtggaagccggacccacgcagccacgctcgagcgactcgacgcggtagaagaagggtgcgtcgtccgggacaggctcggcgacgacgtccaacatggtgggggcctcgaccttcacctcctcggctcccctcccccgcctggtgcgaaggcacacccactgctcccccaggcggccctccacgacgaacgacttgaagctacttgcctacttgacggctgcacgaagaagcaactcgcgtcatatcgttgcctccactgccctcactcggcaacggggacacactggtccgttgaccgttgctttaaggattgattgattagttcgattgcatggtggaatcaatcaattgaatgtttatctagcgctatgggtgttgtttctttgatatgtcgtgtagattgggtcaaaatatataaataggcaccgataaatagataggtctattaattcatgtcttttcagatgctataattagaggattcggtttaataataaggacataaaaaaaaaaaaaa

SEQ ID NO: 65439 - DNA, 297 bp, Zea mays
  Clone ID: MRT4577_159678C.1
tggttacattccaaaagaccattactctttttttcctcacacatttacctttataaaccgcccgcgtttcttacaatactctctcaaccccattatcacatgaatctccaatttttctttcttctacaaatatctctttttcttccttcttactcaccaaaaatcccataataaattctcatcacaactacactaatattttactcttgtcatcaatgtcgcccttcattcttactattatccttctccttctctctctcctctctattcttacccttcttcttcaaaaacatactc

SEQ ID NO: 65440 - DNA, 519 bp, Zea mays
  unsure (1)..(519): unsure at all n locations
  Clone ID: MRT4577_159679C.1
gacagcaatcaacctcaccacggcgtgtggggggcgcccacaccttcatgatcactatctgcaacttcaacaacctccctttaatccccctcgtccattaccatcatctcgcgcctgccactaacaagcaccctccagccgcgttcaatacccctaaccaccaccatcagggggggggggggccttattattcctctcctctcacgactatttacaggcagagcatcccctaccattccaccaggtagcaagccatacccctgccgactagttgacacaacacatttcgtgcgcgtgattactaccttctataccacaaccccagcccatggtattaactgcaaacattgacgaaatacacacaattgatctacgaacacccaataacggtcacacaacacctctttatacatgcgcctctctcttacattgcttataagtgctatatgaacaatgcactcaaactgcctatctnttttttagtaaaaaataaaccaatgttcctgtgtgagtgaaaaa

SEQ ID NO: 65441 - DNA, 205 bp, Zea mays
  Clone ID: MRT4577_15967C.1
gcgggccactacagggcgcggcgagatggaggtgtcggggacatcggcgcccaccgtgacggttttcatcagcagctccctcaacagcttccgttcggacaagcgatacagtcgtagcctcaccatcgcagagttcaagtgtaaactggaactggtggtgggcagcctgcttcctgcatggaactggagctgtatggagctgacg

SEQ ID NO: 65442 - DNA, 597 bp, Zea mays
  Clone ID: MRT4577_159680C.1
accaggaggggccaggtggctttaaacgggtttcctggggggcccaccaatagggtttttggagggttaacataaccaaacttttttttgggaaaacttcacctaggcccttttgcccaaaaaagtttttggcccaggggggccctatttttttttgcatccccccagttttgggggggtttcaccctcaaattaatttttttttaaaggttttatgcccaaagggggggggcccttttttttgcggccaaaaaaaagttttttgataaaaagggcccatttttttttgcataaacccccagttttaggagggtttcaccatcgggttaatatatccaaaaaagtctcatgcccaaagggggggggcccttttttttgtttgcaaaaaaaaaaccattccttgtttccaaaggagaggggtttgttagcataacccgccccaaagagcccattgtatttttgggaccataaaccaaataccttttttttgaaaggagggaaccattcccttccaatgggtttatttaattttcccctttgatccccgaaggcgggtcctaatttttttaccccaacaggctttgttttgtttaaaat

SEQ ID NO: 65443 - DNA, 243 bp, Zea mays
  unsure (1)..(243): unsure at all n locations
  Clone ID: MRT4577_159681C.1
ctgacagaanaacaangtgacatcacgaacaactacagtttaacttatcaatgaccactcagggcactaaaggacagttgatactatgaagtgcttgtcaccaccctcccaaattatatccaaataataccgcctaattcaaatgtcatcatatgaacaatctttcgccgatcacataacacattgtaaaatgtttacctattaataactcaatgtataaaacgcgttcattcttcatttgcc

SEQ ID NO: 65444 - DNA, 426 bp, Zea mays
  Clone ID: MRT4577_159682C.1
cttggaacctttgggctgatttatgtgcttgtgtctgttttttcccttcttattcactcctcctagatgattagtaggaggcatgagtaagattgattcaggaggttctctctctttctcttttagttatttttgcagtgagagggagggtggaagaggacgagtgtgcttaggcctacaaagcgtgctatggctggggatggtgttgctggtaagattcgtacgtctactcttcatattcttaatattccttttattgatcacgccttgatagcgcccgacaatcctagcgttaatgccgcggccgacggcaatatcgctaattctggttctcgggataatcgtaggctagaggaccataatagatcgagattatcgagtcactgcggagtcgaagccccctcctcggtccctctatcgactagc

SEQ ID NO: 65445 - DNA, 373 bp, Zea mays
  unsure (1)..(373): unsure at all n locations
  Clone ID: MRT4577_159683C.1
cccaccagggctgctttattaaaaaggcaggcccccacactcactgcncccaatcatttgatgctccactatcttttcgcatctcttgctcccaatccatcttttagacctcacaattctaatcagtgcctcccacttatcctcattatcattaacactcttaactatactcttacataccattaacccatttccatcctaatacaaccccatctacttcctcatatctattttaatacacacaaaacctaccctacttccttcatcaatatcatctccatgcccaataccaactacaactaccaacttctttattacactaaaatccgatttccccttcacccaatcatttatgaagatgctaatttcaaac

SEQ ID NO: 65446 - DNA, 335 bp, Zea mays
  unsure (1)..(335): unsure at all n locations
  Clone ID: MRT4577_159684C.1
nnnnnggggggagcctttttcttttttttttttttttttttttttttttnntntctnnnngggnnaaaccttttcttatccaatatcccttggttacatttcccatgtacctaaaaggatctattgcccaaccccccacaccaatggccccattttatttcagttgtttccacccacgaaaaaaccaaggccacccaacccctttaaaatttaaattccaactcttcccaaccttaaacactggcaaaatccaaccccctgtcgccacccctctacttaccccaccgatgtactacccccccccctggatacccaccaacggaggaagaaacccc

SEQ ID NO: 65447 - DNA, 386 bp, Zea mays
  Clone ID: MRT4577_159685C.1
agaccattagctttatctactccatatcttataagaacccgatcgacaccatgagggggttgctcgttgccctggctgtcctggctctagctgtgagcgccacctacacgcatacaagcggaggctgacgctgccaaccaccgccgccggttcatctaccgccgccggtgcatctgccacctgcggttgacctgccacctacggtgcatctcctaccgccggtacacctgccggcgaccgtccacctgccaccggcggtccatgtgccgccggcggttcatctgacgccggcaccatgccactaccctactgaaccgtcccggtctaagcctcatcctcagccacacccatgcccgtgccaacagtcgcatacaagcccgtgccag

SEQ ID NO: 65448 - DNA, 228 bp, Zea mays
  Clone ID: MRT4577_159686C.1
gccgtgtctgcacgtgccgaccgacgtgatcctgcaggtgcgggcgccccacgctctggttcatccggaatgcccccgtgttcgccgatccctccaccgtcccgaggccgacgccttgcgtgttctcgcttgccgtctctctgccctcctcctcctcctcgcctgccgcctacaatgccaaggtgttccgttgtccctgtcccctatactctctatgcgctcacctcc

SEQ ID NO: 65449 - DNA, 641 bp, Zea mays
  Clone ID: MRT4577_159687C.1
tcggcctgtcgctggccgagtcgggcggcttcgtcaaggcccccggcggcgcgcccgccaacgtcgcctgcgccatcgccaagctcggcggctcctccgccttcgtcggcaagttcggcgacgacgagttcgggcacatgttggtgaacatcctgaagcagaacaacgtgaactcggaggggtgcctgttcgacaagcacgcgcggacggcgctggccttcgtgacgctcaagcacgactgggcctggtgcggcgcgccagggtgttccactacggctccatctcgctcatctccgagccgtgccgctcggcgcacatggccgccatgcgcgcagccaaggccgcgggcgtgctctgctcctacgaccccaacgtgcgcctcccgctctggccgtcgcccgacgccgcacgcgagggcatcctcagcatctggaaggaggccgacttcatcaaggtcagcgacgacgaggtggccttcctcacgcgcggggacgccaacgacgagaagaacgtgctgtcgctgtggtttgacgggctcaagctgctcgtcgtcaccgacggggacaagggatgcaggtacttcaccaaagacttcaagggcagcgtgcccggcttcaaagtcgacaccgttgacaccaccg

SEQ ID NO: 65450 - DNA, 521 bp, Zea mays
  Clone ID: MRT4577_15968C.1
attgggtacctcgagccggccgggccggctgacttattcactgtcctccaacatcacctcgacctgccaacgttctcacgactccgccacgacgagcatctataatgccaggctacggcgcaaagtacagggatgcagctcatcaagaatgctgcctacgttgaaacccccggacatagcctatccttgctgctgatgaggccactgtccaccattggcaagcgcctttccagtatcaatgtcgagaacgatgaggagaaccgccgtgccctccgtgagctcctattctgctgccctggcgctctccagcacatcagaggtgagatcctcttcgaggagaacctgaaccagaagaccaaggatggcaagccttttgttgatgtcctcaaggagggaggagtcctccctgacatcaaagtcgacgaggtcaccattgaggatgttgtgactgattaggaaaccagcatccaagagcatgacgaccatgcgaagtgcagcgtcaagaactagaaggtaggtga

SEQ ID NO: 65451 - DNA, 619 bp, Zea mays
  Clone ID: MRT4577_159690C.1
atgcgtcgtgtctttccatcttccaagcccccagatggggggtacccaccgtctttccgcctcctcgttggaggaacacaactccgtgggagttggtacctttcagccatcgttcggcttcaaggattttcatcagccagcccggctgctcccccacgccggcggtcacccaggatgatgaccaccagttcctgggtggggaagagcaagtcgggctgcgatcttggtcccaccctcagtttcaaggatgttcatcatccttgctggggtgggggccaggctgagccggcgctcaacctcccgtgcgggtctgcgggtcaccttctcccacagcgttcgggggaggaggcgctcactggccttgcgggcggcgcggactcagacaacgtggggctgaccgactgcgggcgtcgtcacctccagcgtgtcggagtcgtcggctgggctcccggcgggcccctcctgccagagggcggctgccgcgccgtgtgcacgggaggaccacccacgatgccgcgcgctgctagggcggcgttcgtgttctggggtggccctgcttttgcactgggatggcgccctcgcgcagaggccggtgccccactcgtctaggaggatttga

SEQ ID NO: 65452 - DNA, 906 bp, Zea mays
  Clone ID: MRT4577_159692C.1
cctcgaggccagtcccgacacctcgccgtctactcgtctcccactatcccctgcaccaacaccaccaatcgggtcccccactacttccgtcgccctcgcccgctccgccgcgccccggacagcggcgacatggccgagtaccgcctcggacttcagctgcacggccacaccgacgacgttcgtggcatctgtgtatgcggcgatgctgggatcgcgacatcatcgagggaccgtactgtgaagttctggacccggaacccagaaaaggagagcgaatatgttctctccaagacactcgcaggacattcgagttttgtcggcccattggcttggatacctccttcagaccgttttcctgaaggtggaatcgtctctggtggaatggacacatttgttttcctctgggatctgcaaaaaggagaagttgccgagacaatgaaggggcacagttcgcaagtcactggactcgctgtggacactaacggtgacatcatctcttcatccatggattgtactgtaagacgttggagaaatggcaatgctatagaggtttgggaagcgcacaaggttgcagtgcaaactgttctaaagctgcccacaggggaactcttcactggttcaagtgattccactattaagctatggaaaggaaggacttgcctacagactttctcaggacatgcagacactgttagatttttagcctcaatgccaggtctaggaattctttccgcctcacacgacagcactgtcaagttatgggcgttgtcaggtcagcccctgctggacatgatcggacattcttctcttgtatattctggggatgcacattcttcaggtctaattgctagtggtagtgaggatcgctctttgaagatatggaagatggtgtctgcgttcaagcat

SEQ ID NO: 65453 - DNA, 145 bp, Zea mays
  unsure (1)..(145): unsure at all n locations
  Clone ID: MRT4577_159694C.1
agttttaggaacgtgcagcaggctgtggcgatggcatggcgggcgagcctgtgtcggagcgtgaaggagatcctcgtgctcttctgtcagtgcttcccggtcagcgtcggtgcccgggagttngtgaggaataactatgttgaca

SEQ ID NO: 65454 - DNA, 618 bp, Zea mays
  Clone ID: MRT4577_159695C.1
cccgttactgttcattaggggtgtaaacggtacggatattatccgaccatccgaccgttcgaaaaggctaattattcggttggatagtttttttaggatatccgcagaattttcggatttcagattcgaattcggatagtacagttcggatatcggatacggatatgatatgactgatatccgtcggatttcggatatccggatatcttctcggataactgtccgaatttcatatttcggatatccggacatctacccagatatcttaccagatttcagatattcggatagttacatgtggaatcgccctaaatatctaagtttcaacataatcaatacttcactttatcatttccatatggggatttgaggttatgttcttatataatgtttattgtttctggtaacatatttgcaattttcggtcgatagtggaatattttatgaatttaaatgcattttgataattttgtatagaaaaaattataataatacacaaatagtctcaaaaaatcatgaaatttgacggaggagtaatatatgcccatatagcatcctcaaaaatgtttgggccataaaatctaaagattgccaacattttctttcaattcactttca

SEQ ID NO: 65455 - DNA, 229 bp, Zea mays
  Clone ID: MRT4577_159696C.1
gggtacctcgaggccggccgggagtagatagcaacggtcggctatcccacgacaggcgccccgcgacgccgacgaggcagcgatacctcatcgcgcccttactgcttcttccgcgtcgctgctggagcgcaactgcagctgcacccacgacacttcgggccgcacctccgcgacaagctcgtttccaagctcatcaaggacgccgagggcacctgcagcgggcggcacg

SEQ ID NO: 65456 - DNA, 536 bp, Zea mays
  Clone ID: MRT4577_159697C.1
ataaatatactaggtatatgctcgtacgttgctacgaaatcaatatgataaaatacattgatatacaatggctcacagtctagcataggtaggaataattgtataaagcagctacgaccattaaacaaagatgggatggacaataatacatgtagtagagaccattcctttcatcagttgcaggctattaggcttgtcattgcgcttcctcggtccatgcgttaatcctgcaagagtagaagtccactgattcataactcatcagagagatgaactgaatggaatcgttggtaaggaatattggatattcgagttcactttcatcgaatgcttaaaccatatcttcaactcataaattcggatcgaagcaatacatatcaactacctgtcatatctagaagtgaactgataggaatggggcgcctaattcaagtttaaatgacgtcatattaaaagcagatatgattcctaaggatcttctatgttttttaaaagatgcaaaaaatcattgctagaaatccattaaaataccatgt

SEQ ID NO: 65457 - DNA, 848 bp, Zea mays
  Clone ID: MRT4577_159698C.1
tacccgggtaccccgcagccggcgaaaatagaaaaagtctcctgcctccgcggccgtgccgagccggcatccccttccgtcccccacccccagcagcgatcgcgacgacccgagccggcaagggtgacaggcggctgacgagccccatgggagacaacaagtctccgctgagcctgagcccgatgggcgggcgcgaccgggaccgggagctcctcatcccggtctcgggcggcggctcggcgcccggcgacggggtcgaggacggggacagggcctcctccgcctccgccgcgctatcctcctccggccgcgaggctttccataaggttgtccgcagttgggcttcaaagaagttcatgactggatgtgtaattctcttccccatagcaataacgttctacatcacctggtggttcattcattttgttgatggattcttctctccaatctatgctcaactgggaatcaacatattcggtcttggctttgtcacatctgttactttcatatttttgatcggagtctttatgtcatcttggcttggggcatctgtccttagccttggcgagtggattattaagcgcatgcctcttgttcgtcatatctacaatgcatcgaagcaaattagtgctgcaatatcaccagatcagaacaaacaggcgttcaaggaagtggtcatcataaggcatcctcgtgttggagaatatgcgtttggtttcatcacatcgtcagtatccctccagagttattctggtcaagaagatctttactgcgtctatgtcccaacgaaccatctttacattggtgatatcttcatggtgaatcaaaggatgtcataggccaatctt

SEQ ID NO: 65458 - DNA, 1525 bp, Zea mays
  Clone ID: MRT4577_159699C.1
gttctgtagccaaggatcatttccgggtcgagggttaacataatctggggcattgacatacctcgagacccacggatttgtatgccttcacgcgggaaaagttttggccttatgacatcttttgaattcgccatgaagatatggccaatgtaaacatggttagttgggtcatagactcagtaaagttcttcctcggcgtgggcggggactccagggtctatcaggtaaaaaaaaaaatcaaaaatagaaaaagtctcttgcccccgcggccgtgccgagccggcatcccctcccccagcaacgatcgcgacgacccaaaccggcaagggtgaccagcggctggccgccgccgcggcagacgagtcccatgggagacaacaagtctccgctgagcctgagcccgatgggcgggcgcgaccgggaccgggaccgggagctcctcatcccggtctccggcggcggctcggcgcccggcgtcgatgacgagggcgccgacagggcctcctccgcctccgcggcgctctcctcctccggccgcgaggctttccataaggtcgtccgcagttgggcttcaaagaagttcatgactggatgtgtaattctcttccccatagcaataacgttctacatcacctggtggttcattcattttgttgatggattcttctctccaatatatgcacaactaggaatcaacatatttggtcttggcttcatcacatctgttactttcatatttttgatcggagtctttatgtcatcttgggttggggcatctgtccttagccttggcgagtggattattaagcgcatgccccttgttcgtcatatctacaatgcatcgaagcaaattagtgctgcaatatcaccagatcagaacaaacaggcattcaaggaagcggtcatcataaggcatcctcgtgttggagaatatgcgtttggtttcatcacatcgtcagtatctctccagagttattccggtcaagaagatctttactgtgtctatgtcccaacgaaccatctttacattggcgatatcttcatggtgaattcaaaggatgtcataaggccaaacctttccgtgcgtgaaggcatcgaaatcgttgtgtctggtggtatgtcaatgccccagattctgtcaaccctcgacccggagatgatccttggtgacagaaccggaccaagcagaagctgaagctgccacgagccctttgtttacctttgtgctgatgattgttagtaacattttcatacaggctaccacgagtacggcaaactagactccgagcacaagtatctgtatattaagtaggtgtaggtgactcacacggtttgattatttgctggactctgtaccatggtttgtagtttgtactgcatccgatgcaagaaagaagcatctcacctgtctgtgatatatccaactgttgtcaaattactatcctctgtgtagtccttgattctcatctgacaacgttgaattgggttcttgacttgtcgatggttagctgcattcttttcttct

SEQ ID NO: 65459 - DNA, 116 bp, Zea mays
  unsure (1)..(116): unsure at all n locations
  Clone ID: MRT4577_15969C.1
ggtgggggcgaatctggcccaattgattaaggaaagagtgaaactgggtgcagattccagtagttgtgggtccagattccgattttgtggctcccctttcantncccacccccctt

SEQ ID NO: 65460 - DNA, 382 bp, Zea mays
  Clone ID: MRT4577_1596C.1
aaaacttcagcctctaaagcaagaacagcttcacttaagaggcccttgcggaagagctcctgtccttcctgcattggattagggtgaccaacatacggagttagttctcaagaaaaaacataaacccctcgagaggcgcccggactttggttgaaagatgacaagtgttcttggaacctacaaagaatgaaaaaaggattggtacaatagttataccaaagggttccctataaaaatcaacataattcaccaatgtcaatataaactaattagataattgaattaacaatttaccaaactagatgcatgttggaacagataactcgggtacaaagttattatctgatacaaagataggtttgatgaaactgataaaatgcgg

SEQ ID NO: 65461 - DNA, 120 bp, Zea mays
  Clone ID: MRT4577_159700C.1
caataatcgatccttataataacctttctcataacacagacaagtacgtacattacgcgatggttaaaacaaaagttggcgactaatcaccatatacagcgagcctaataccattatcac

SEQ ID NO: 65462 - DNA, 1414 bp, Zea mays
  Clone ID: MRT4577_159701C.1
gagggtatcgctcggggccggccgggcagaatcttcagacatccgagcgtcttgcgcgttcgatttgaaccacttggcgctgcctgaccggtcctcaccccctcaacccgccgaacttcctcgtcaccgccggcggcgatcgatcgttgccaagtctcccaccatcgcctccacgggaaaaaaaatggcgcaggaggctgcaccggcgaggccggcgggccccaccaggctcgtctacttcgatgatatgggggcactccaccactcatccgccaccgttctctccgtccaccaggaggagggcggccgggtagcggtggtgctggacgccacggtcttccacccgcagggcggcggccaaccggcggacacgggcgtcatctccgccggcggagccaggttcctcgttgaggatgtgcgggcgaaagacggagtggttttccactacggaagatttgagggcacggagcaaggatgtgggactgtatttaaggagggggaaaccgttagcttgcaggtcgacgcagaacgacgcagctttaattcaaggcttcattctgctggccatttgttggacatctgtgttcacaatgtaggcctctttcatctggagcctgggaaaggctatcattttcctgatggaccgtttgttgagtataagggaataattcctccagatcaaataccggttaagaaaaatgaactggaaagagaagccaatagactaatttcagaaggagcgaaggtcttagcttctgtttttccttatgaggaggcagccatattatgcggaggttctttgcctagctacatttcaaaggatagcaatcctcgcattgttaagtttggggataaccctggtggtccttgcggtggcactcatgttgccgacatttcaatcatcaacagcctaaaggtgacaaacataagagtcaagaaaggcctcactaaagtctcatacagcatcagcccatgatccttttccagcagccgcagcagacaacacctggaatttattggagcgagaattattaattgaatcagaaggctgtactttagtttcgtggcatcacatgtatacgtagggtggcaaataaacaatttctatgtagtaaagtctgccagttcctcatgtacttcaatagatgatttgtttctgtactgagtcgtagcagagccgttaaggttctgatgtagatgatgacacatgtaaaactgccacggcaccatcatacagcaacttgaaggagatttaaatttgttaggccggtggattgtgtaaaataagtgacacggtacagtagacgatactgcataatattgtttgtaacgtaaagtctgaaagaggagataagatatataagatggaaaaaaaaaaaaaaaaaagcaatgcaaaaaaaaataaaataaaaaa

SEQ ID NO: 65463 - DNA, 280 bp, Zea mays
  Clone ID: MRT4577_159702C.1
acagggccacccgcccggttaaccagaaaggaaacaaaggggggcccccaaaaaggggtccaaaaagaaaaccaaatggggattcccccaccaaacaaaaccaaaaatgcgagcccctttgggggggggccaaaccatttgggtgggggagaaaaaaaaaaaaccccccccattaggcccaaactgggactggggccccctggaaggcccggacccccccgggttggaggaacatacaaaagtgccccaacccatgggggggggtgagataaaaatgaaa

SEQ ID NO: 65464 - DNA, 628 bp, Zea mays
  Clone ID: MRT4577_159703C.1
ggcgattgggaccctcgaggccggccgggaccccaagtacgtggagtgcgcctgctccgactcccgcgtgtgcccgccgaagaccctgcgcctgcagtgccgtttaggccttcaccgtccgaaacatcgccggcgtgatcccagcctacgatcaagtaccaagtacaccgggatcgggtccgccatcaagtacgacgtgtgcgcgctcaaggcgcaggtcctcgtggctattgatcacagctgatgcgtcgatgtcaggggggtcctctcgctccaggacgttgcacctgacaacttccacttacggtgagaactgtcctaagatcggcttccctggcaagattaatgtgacagaaagacactgatcagggccgctcgatgactcgagtgctcgtattctatagaacgaagccgtagaacgctgtccctggagaacctcaagacctaccccttcgaaaggaatgtgtgaacaacgggacactccagctggtggttggacagtacaacttcgggttgcgtgaggtcctcatatgctactataaggatccatcgtgaatcgatatatatacactacatgcatgcatgtgcgtatgcagcatgcagcttcctacctatatatataccggat

SEQ ID NO: 65465 - DNA, 193 bp, Zea mays
  Clone ID: MRT4577_159704C.1
actccctataatgagtcgtattataggcgtccagtatgccgtctgcgatcttcggcggcagcatcggcgggctgctccgcccggcgcacgtggaggagttctacgtcgtcacgtaggcgttccccatcgaggaggtgttctaggtgcatatcggcggcggcgccagcatgcgggaggggcgcacgctcgtcga

SEQ ID NO: 65466 - DNA, 512 bp, Zea mays
  Clone ID: MRT4577_159705C.1
ccaaatcaattgcacagaggccatgggcaattttatggtgcacctgctcaactccaaccccgagatgctcggacggcgtagttgtcctccgttccctgtccagctcctcctcctcctcctccttcttgttcttctggcccttctgctcctcctccatcttctacctcttcttggtcataatcgacgacgtcagagcagcggaagcaaagatcggtggcgatgtgccatatgaggacgctccggtcaaatgatatgccctgcaggctatcttttatctctttgccacatttatcctgcagctacttgcttagagcccagttctctgtggttgagtcgaagatcctgtagctggcgagggctttgtcctgtgagccctctaccaggtccgcgagcagatgtggctcgacttgcttggacagctttgcatacggtcgccgcctgcaccaacttgagatgtacctggcgcaactgccctggtaagcttcccggacagactcgtccatgaggttgga

SEQ ID NO: 65467 - DNA, 549 bp, Zea mays
  Clone ID: MRT4577_159706C.1
gtatatatgtttcttcttcttttttatcgtatagagccagagagattcttgagtcaccgtgaataaggcaagcaataacatgatatgactatgtggattatgctattacacataagatctatgttgcgacactcggcagagcaatatgcagattaacagcctgattttacaactactacaaattaatcacacagctgctagcgcggagcccttgagtcaggcggtccaagtgattttacatcgtgagcacctcattacaaggcgtagttttagggggacactcctgtgtagtttaccttgttaaaccgcacaatcaccgactagcgggtgttgggatcctaattgacggtgacgactattgacgatccccttgtaccatgaggactcccttctaaggatcttaaacttgatgcccgtcttggacccaatctactgcggatactgaagcttggaataggtggtcaatgaaccctgctgttgcgctgccttaggtgtgatgggctctttgtcggaccgaaccactagtcctttgccaagccatttgggcgc

SEQ ID NO: 65468 - DNA, 255 bp, Zea mays
  unsure (1)..(255): unsure at all n locations
  Clone ID: MRT4577_159707C.1
gggtgcctgattacatnccaggagggacctttctgtttgtcacatagcacccctgaggaagctccacgatgactccgacaaaataggcttgtgaaatgtacaacttcggggacttggaaaggggacgttccgcgttggaaatggtcgctgcattctaaaaggcttctgggaagaaaacccctttggtgttgcgtgggcgaagacccgcacacgcatagatcgtatacgctgtaactgtgcaagcagagaaagagc

SEQ ID NO: 65469 - DNA, 1482 bp, Zea mays
  Clone ID: MRT4577_159708C.1
ggttttcatggtattccgaaatagcagcaatcaagagggcaccctgaatgttctgaatctgttgataatttgtgaatgcttgtaattaatcatcagttctctaagttcatttttcattcatatttctactagtgatttttgcacatgtttcctttggcaacataggtagtacagttctgtggtctaatttctgagaacaactatgtagtaatatatgaatttgatccattttgaatttttctcctttgacgcatttggcacatcctaaatgtgcatatttgatctgcaggtctacgtgatcgactcctactattctctactggggtgagcatcggtattctgtcaaataagaaggaatttgatacattgaagggcacactgaaacaaatggagaacttagttcaggatttacaagatgagctggagatgaaagagggtttaactgtgaaagaattacttaatgaaacatctatcgaacatgatgatgataatagcaaactacacggagttgatccagagccaatgagcaaaattgaggctgagcttgaagctgagctagcaaggctggaactgaatatcacttcgataagtttagaagaagaaacatctgaaatcaatggggccgacgatgattccattggtgacattgtttgcggggaactgaaagctgatacggtccctcgcgacctcacagagtacagcagtgaatctgaccatcgcagggacagcagggaaagctccccaggttacacatgtggagccaactgtcctgtctcgccaagagatctcagcatccgtcttcacaaggtgatccaacacaggctcgaagaccgaatcaaggagctcgagtcagcaatcgtgcacggacagaagcagacgcaactgcagatgatggtgactgaccaaatggtctccgaccgaatacgctcgaacagcgagtcaggttcttcttcaggccagggaagtcccattttcatacaagaaaccagctcgctggcagaaccgtaccgtctaaacctatctggagacgcgctcgaagcttacgatgaagcttacgaagagttcatgaggatcgcggactccccttacaccacaagtccaaacgggaagccacaggcaaccgaagattgcttggcagaccgtggtctagtctggggaatggaggacagctctaggaagctgagagaagtgcccacctgggagagagctctaaggagtgcagatcctagcagagatcacgagcgcgatagggatgagtcaggtggcgacgacgacgatgacgactgtgaagtgctgatccggcagatcgtagagagaactagacaaggttcacatgtactcgttaacgcccagaaacttctgttttctgtggaccaatagtccactgcactatacaccattgctttttgagagatatatagcttgtatgtagtgccgaattattgttgagaaaaaagggaattgttgattgttttgaggctt

SEQ ID NO: 65470 - DNA, 387 bp, Zea mays
  Clone ID: MRT4577_159709C.1
aatttcattacgagaggccaaaataaataaattttcgcttcagtgacggcaccaacagcgacccgttcgatacccggattcaaaaccggagaggaatccatccccaattcccttcctccccacccccaacgtcgcccaacagatctggttctccttcccaaacagttcgaattcgatcgcgccacggtccgtcacccgcgccagccagatttatgcagccatgcagagcggcggggcccggtgcagtttgactactgccgctgccgctgctacggggctgaggagggaccggtttcgggatccgcaatggcgagcctgtcggactcggcggtcgcttgcggcggacgcgccggagcgaagctgatggagccacaactactactcaag

SEQ ID NO: 65471 - DNA, 264 bp, Zea mays
  Clone ID: MRT4577_15970C.1
attagggtggttttttttttttttgagttttttttttttatggattttttatattttttagttttttatagggtactgggggaaaaccctttttgaaaataggaccagggggcgggcttcttacaggcgcacgccggctttctccttgattagacggggggctgcttctttcaaaggctcgtgtaccccatagtttgatttggtcaatccacacactcctgctacatcccgggcctgaaccctgggttaagaacctctttgtcc

SEQ ID NO: 65472 - DNA, 265 bp, Zea mays
  Clone ID: MRT4577_159710C.1
tgtgaacaggttattacattcaaggtaataaaggcaataacatagcatgtaagttatactccatggtacaataccaaataagaccccttcaatggatgagggccaatgatggttttgacaacacataaactgtgtcgaacatattaaagttaaaaagaggatcaatgagcattgagaaccgcttagaataagacaaaggtggcatacggaaacctgatttagaggtctcgaaagagcagtctatatagtgctgctgaaaaaggca

SEQ ID NO: 65473 - DNA, 519 bp, Zea mays
  Clone ID: MRT4577_159711C.1
cccacgcgttcgaccactcgttcggtagctttgtttaactatagctacgctccactgctgcaagaaagtgacagcgccggcatggagggcacggacgaggacttccacctgcgcgccatcaagacctcggagcgccagaccatcgacacggacgaccaggacacggacgacaaggactactaggagcccccgccggtgccgttcttcgagcccggccagctcaagatctgctacttctaccgcgccggcatcgtcgagtacgtctccaccttcatcttcctgtacgtctccatgctcaccgtcatgggcgcctccaagtccatctacaagagcgccacgcgtctgcatccagggcatctcctgcctcttctactgcatgatcttcgtcctcgtctactgcaccgacggcatctccagcggtcacatgatcctggcgagaccttcgggctgatcctggcgaggaagtacatcatcaccacggcggtgttctacatcatcatgcacggcctgagccccatc

SEQ ID NO: 65474 - DNA, 271 bp, Zea mays
  Clone ID: MRT4577_159712C.1
cccataaaacgcgctaggggttatgggtagcttttaattcacacaaatgcacgacaacgactctcttttgtgggctctaacaaacacgcgaaacttaacaacgttccgaacaaaccaaggtgaatcccacacctacgtaaactgtacgctgctctctgaccacatgagcgtatcttgatatgatccctaaatatatgttgggataaagggctactcacgccccaaccaatagttgaatccttttaacgggatccccaccaacaagtctata

SEQ ID NO: 65475 - DNA, 243 bp, Zea mays
  Clone ID: MRT4577_159713C.1
attcatcaacactggcccatcactcgacctgcttaacaatccatcataactgctatgcatctacggctctaactcctccacattacagtcctacgcggactctgcagtcggcactgcccagcacgtgctgtcctgcatctccggctaccccgctgacaaggccgattcctacgccatcaaatttcaagccgagcatgaatccgattactctgagaccgccgcccgcgtgggcaccttcaccgc

SEQ ID NO: 65476 - DNA, 241 bp, Zea mays
  Clone ID: MRT4577_159714C.1
gccaaaaattatgccggcactagaagaaccaaggaggtggcaaatccttatcgttgagtctcaaccagccattccttctcttaaacgtactcttttatttgcactttcatttttatacccaaatacttataaaatacccacatatacgtcaaattattcgcatactctaaacacaaaactttcactcacccgaggaccgccatatccacaaaatatccacaagccccacacacaaaacttt

SEQ ID NO: 65477 - DNA, 248 bp, Zea mays
  Clone ID: MRT4577_159715C.1
gggatcgcccgatgcatccacccgtcgtgcggtttttttgggttttatctccaacatggaaaattcttcaaacatctgggggttttcgaaaggatatttcgaccaggtgttgaatatatttttggcccacaatatatatcgcttagcccttccaaaagttaggtcattaaacgaggcccttttatcaaatggggcatttggctttaccccattgccaaaattaggcccggtttagagcttcctttctg

SEQ ID NO: 65478 - DNA, 837 bp, Zea mays
  unsure (1)..(837): unsure at all n locations
  Clone ID: MRT4577_159716C.1
ctccgctgatcaactacctcgccccgacatcaagcgcgcaacttcacccccgacgagangccctcatcgtccgcctccaccgcgagctcggcaacaggtggtcagcgatcgcggcgcagctgccggggcgcaccgacaacgagatcaagaacgtgtggcacacccacatcaagaagcgcctggaggacggccacggggaggagaagaaggcgcgcaaaggcaagcccgccgccaagaaggccgccgacgccgtgggccgcagcagcgagcacgggccgttcctgaccgcgtcgccggggctgtcgagcagcggcgtcacgttctccgccgcggcggactccgccgcggccgtgtcgtcgtcggccgacaacgcggccaccaccagccaccacccgcagcaggtcggcgccagcaaggcggagtcgtcgacggagttggacagcggcctcagctccgccgagttcccgcccctcgacgacagcttctggtcgtcggcggacgtcgtggacatgggcctcggcgccacggacgaggagctgggcctcgcgtgcccgccgccgctgtcgtcgtcgtccaccagggacgaggacatggagttctggctcaacatgctgctggaggccggcgacatgagggacttgagcgtcttgtaactaggatgcaggatcggaagcctcaggcgcctgctatatctgaggactagagcatcgcatcttctttcttttttcttgtcatcttgttgccctgttttctggtgatgagaaaatgctgagaaactcggtcgggtgattttcaccttccgtacaagaaagaatactagcatcaaccaaaaaaaaa

SEQ ID NO: 65479 - DNA, 272 bp, Zea mays
  Clone ID: MRT4577_159717C.1
aaaaaaaaaaaggggggttgggttttcccatttggggggggcaaatttcccgggaatgaagaacagggacttggtgttaatttcccaatttaaagataaccattatccaaatagggaggatgtttttttcatggccgaatttaaaagctttaaaaaggaaaaaaaacttagaaacctatttgggggggggggttccaaaaaaacgggatcgcaaagagaagcaactcaatacttgtagtccttgacgtgaagggttttgggggacccgtggg

SEQ ID NO: 65480 - DNA, 528 bp, Zea mays
  Clone ID: MRT4577_159718C.1
ctgtttgccagctgaaccacatctggtcgtgcacatccggagcccgggaacacacacacacacattgtcatggtcatgcccaagcccgttctgagcctgctcgtgcacctacacgccgacgtcctgttccttcccgtcccggccggcggcgcggtctacaacgtgctgcgctacggcgcgcgccccgactgcgtgacggacgcgggggggcccttcctccgtgcgtgggcggacgcctgccgttcgcccctcccggccgccgtgtacgtgccgccagggaggtaactggtgcggagcgccacgttcaccggcccgtgccacacccgcgccgtgacgttcgccgtggccggcacggtcgtcgtccccgcggcctacagtgcgcgcggctcgtcggtgaggtggatcacgttcgagaacatggatgtgctcgtcgtcgacggcggctgcacgctggacaggcgcttgagggcgctctgatcctgcagacagcgcgggcagcgcgactgtacgacccccacgttcactctg

SEQ ID NO: 65481 - DNA, 113 bp, Zea mays
  Clone ID: MRT4577_159719C.1
ggcgctcttctatcacatgagccgttgcagcatgttatagcattatgtgacgatgaatgttgtacacgttcctattgcctgatatgcgttaggcatccatttgaacagattgt

SEQ ID NO: 65482 - DNA, 351 bp, Zea mays
  Clone ID: MRT4577_15971C.1
tggggggccttttaaaaaaatgcgcgctggtgacccgacaggacgtaaaacaaggcttgcatctagacagtcttcgcaataagatgagagaccccttacagcatgactgttccgcaactttaaaacagcacacaaacaataaacaacctaggataacccatttccccccgtaacgaactggtactatagcataacatcgggcaaaaatctcaggggctccctcaagaaaataactctgctcttttggaaacatcaacggagccttggtccaccagaatgctccgacaccttttactggacaagcttcggaaaccgctgctttggtacacaaactgggggggagctctctcc

SEQ ID NO: 65483 - DNA, 640 bp, Zea mays
  Clone ID: MRT4577_159720C.1
ctctttcccccatggaaaaccaaatatcttgcccacggtcccttcctctccatctttctctctcaaatctctctaccctagaaaccaaactaatacagagcaagcgcggcgatggatctaaaaagcatatggggccatggatctagcgttcctgatctagatcaggttgtcctcgaattcaccctaatcacgatttggatcaaatcctcaatcttttgaagtacaatttctggatcaggttgtcctcgaattcatcctaatcacgatttggatcaaaccctcaatcttttgaagtacaatttctgtatgccttatggagatcggaccggagcacaactatgcccatcaggcagcccttgcacaagagatgccggagaagcgggagtaaccccatcgcatgtagctcagtatgcgtggcatccaagaagctgcttcgatcgcagactacatgctcaggtccatggcatagcatatacatcatgtacgtcatggatgcatgcataaaagcaagctaggacgtaagacaggttaaatctaacaagagacatcaccaaccaaaaacctaacaactcatcaacttagttataatgctatcctaactgttaagagacataataactaaagaagatacaaattctca

SEQ ID NO: 65484 - DNA, 326 bp, Zea mays
  unsure (1)..(326): unsure at all n locations
  Clone ID: MRT4577_159721C.1
ccaaaccctttttttttacaaataaattacttaaaattttaggcttttttactgctaacacgnnaaaattttttggttttttgcaccatttttttaccccccacaatcaaatcccataaaaaacttttttgaaatggcctggaaacactggtaactgtttttttttaatgaacgggaacttccggggtgccaccgaaaatttccaaaacacacattttgaccaaaaagctttttttttgacaggcccttttgtttttttgttaaccactttggagtcaaccttccttgaaaaccnnttgaggtttttcccccccttggccacaaaa

SEQ ID NO: 65485 - DNA, 338 bp, Zea mays
  Clone ID: MRT4577_159722C.1
cgtccgaaaaaaaaaaaaaaaaaaaaaaaaaaaaaaaaaaaaaaaaaaaaaaaaaaaaaaaaaaaaaaaaaaaaaaaaaaaaaaaaaaaaaaaaaaaaaaaaaaaaaaaaaaaaaaaaaaaaaaaaaaaaaaaaaaaaaaaaaaaaagaaaaaaaagggggacagcgttcgggaggggggaaaaaccactggagtgacccagggggaagggcactggcattaaataaacgcgtagcgaaatgttggtaaaatgaggcgaagagggcaaaaaccggatcgccgtgacaaaaagtgagggcataccagaatggaagaatgggacgcaacctgtatctttt

SEQ ID NO: 65486 - DNA, 431 bp, Zea mays
  Clone ID: MRT4577_159723C.1
ctcaagcgacacggcacacttacggtcactcttcctccaagactacatgtacaacgtgcgagtggtatgaagctatgaagactggacatgtgatcgaatggttagtactggtaacaaactatcacacttccatgtggttagtacttggcagaacacatatacacttccatgttagccacctgtagcaaccgacataacataatggccatgcgatcattagcataacatataactgcacatggacaaccatgatgagcacatgaaactgctagacatatgccctctggagatgttgatgagaccagctgacatcatgcatactgcatagttggcaagatgtaagtacatatagactactcctacagtccctaattatgatatgaatgtggctcgccctgctgtctataaccatcatcacacagtcaaatgtg

SEQ ID NO: 65487 - DNA, 1146 bp, Zea mays
  Clone ID: MRT4577_159724C.1
accgagtcgacactcgacacaggcccgcgatcccctccccctcttccttctccggattcgcggcgatctagccggcggggggcggcgcagcgatggcggggcaaaaccagcggctcaacgtcgtgccgacggtgacgatgctcggcgtcatgaaggcgcggctcgtcggcgccacccgcggccacgcgctattgaagaagaagtcagacgcgctcacggtccagttccgcgccatcctcaagaagatcgtcctccagtccgtccgcgccgcctccgtccgcgtccgatcccaccaggagaatgtcgccggggtcaagctccccaagttcactcacttcgtcgaccccgccgcggcatctgggggcccctccaacgcgtccccgagccttacgggcctcgcccgcggcgggcagcaggtcgccgcctgccgcgccgcgcacgtcaaggacatcgaggtgcttgtcgagctcgcctcgctccagacctccttcctcacgctcgacgaggcgtccgagaccaccaaccgccgcgtcaacgcgctcgagaacgtcgtcaagcccaggatcgagaacaccatcagctacatcaagggggagctcgacgagctcgagcgcgaggacttcttcaggctcaagaagatccagggctacaagaagagggagatcgagcgccagatggccgccgccaggctatttgcggaggaacagcttgccgaggatctcgcgcttaagaggggtatctccgtgggggctgcggcaaacctgctggttgctggtggggagaaggacgacgacatcatcttctgaccactccttccatggccatccagtcattcaatcgattatcattttatcttaaaatgctgaagattggccattggaatttaattggcagaaacaataagttgatgctggagctccagaattgtatctgtttatagaatgatggagattttgattcagtaagtagtctggagtctagccatccgagaccctcaataatctgtacctggaaaccaaacagtgccaaataacttttacggagcgttatgtgcagctcatgtagaaaattcaattggaccgtatttcctgtcgtgtaccttctagtatcgtattatattatatatttattattcaattggacctg

SEQ ID NO: 65488 - DNA, 595 bp, Zea mays
  Clone ID: MRT4577_159725C.1
gccggccgggtcgggattcctacagtttattcatcgtacgtggtccgtcttcatggacgccagcccactctaccccaacatcggtcgtgccccggtgctcggccgccacaccaccctcgcgttggctccttgctgcgctcaccctcttcttgcttagcgtgctcggctggtatctctttctagtccgcgagccgcgcctccacctcttggtcctatgggcgtgcgccatcgctcaccgtgaagctcgaccatggggctgcgtccttgtttgggcgaaggagaacacgcatgcccgagcgagtcgaaggcgccaattggatgaagactagcgcggtccccgttgtcgtcgtcgttgcaagacgaaggctctgtcggagtctacgagtctcacgtcgtcaccgcgctagtaggcccatgtgggtttcggcccattgtaacgggcctcgcgcggagtttgtattacaagccgtgtttgtaatagcctttactgtaatgactgactgtaacctcccctcgtggcaatattttgggattaaactgggtactcgaggggcacaaacgtctttgccaaaaaaaaaaaaaaaaaaggccccta

SEQ ID NO: 65489 - DNA, 520 bp, Zea mays
  Clone ID: MRT4577_159726C.1
caaaacaacaatcggttataaaatgcaaaagcaaatacgtcccagactgcaacttcagagtgcaggtccaattgaataataaatatataatataatacgatactagaaggtacacgacaggaaatacggtccaattgaattttctacatgagctgcacataacgctccgtaaaagttatttggcactgtttggtttccaggtacagattattgagggtctcggatggctagactccagactacttactgaatcaaaatctccatcattctataaacagatacaattctggagctccagcatcaacttattgtttctgccactgcaaggagaaggaatcaattaaaacctggtaatgaaagactaattgtctaattccatgtctgatgtggagcatttgaaatgcaaacgaggcacagtaaacagcaatgcctttgggaagacaaatggggagtgcctatctgctcaaatgacaaagatatggcgccaccaagtaatataattctttttggcccttttttt

SEQ ID NO: 65490 - DNA, 355 bp, Zea mays
  Clone ID: MRT4577_159727C.1
tcgtataccgaggaaacttacgccctcgctgctctcctgccgacgccagtaatcaactgcctaggacttggtgcgtgctgttgtccatgatattcaacctctacccctaccggtgatcaacgcaacttgtggcacctcatggatcctaggcagtcatcaacatgaggacagaggtcttcgttgcatgctgctataggtgccattggaggagtacgacctgcacttcgacaagaatgtacgagaagcctaatggattttactactgctgcaaccccatcaacgtgcacacaacatgtatgtcaacatgagtcgacagtcggcggtgagaatccctctttgatgtctgattatagag

SEQ ID NO: 65491 - DNA, 2277 bp, Zea mays
  Clone ID: MRT4577_159728C.1
gaagtttctaatggatacaaagtgggggtgctggataagcgaaatggttcatagttacactctagagtagcacctccagtgcctagttgactccctgtgggagtgagtttcagggatggttaagaaaactccctcgctagcaacccataaaatagtggcagggcgctggtagtcagggggtgtgagagctggtcctacctaggggttgtgccagggtgcccaaaccaggtcgtggtgggtttgtggtcactggcctaggttatggtgtggcgctatagggtccactgtcagggttcagtgctgtttctcggtctgttgaagactggtttattctttcaaacaatataccttccctgctagcggagtttttgttatggttagtaagaccttgtatactccttccatcccaaaatataattcgttatagattaaacatgcatccattaattaatttatgaatgtagtttgtatgtatgtcaacattcattatgatttcttcgaatgtagacgaaaaaaagggccaaaaagaactatattacttggtggcgccatatctttgtcatttgggcagataggcactccccatttgtcttcccaaaggcattgctgtttactgtgcctcgtttgcatttcaaatgctccacatcagacatggaattagacaattagtctttcattaccaggttttaattgattccttctcctcgggccgtacgctccccgatgccatgccgcccatgcgcatccactcgaggcaggccctcgacgctgtcctggccggcccaaatatacccccacacgcctgttgaattggccgggatgagatttggggtcggtggcccatggtctagtcccgaaatttgcagccggcatccacgagagctacgaccagcggccagccccccctttcggcctttccctcccatatactcgccgtcggccagcggatctaatcggggcgggcgcgatggctgggcagaaccagcggctcaacgtcgtgccgacggtgacgatgctcggcgtcatgaaggcccggctcgtcggcgcgacccgcggccacgcgctgctgaagaagaagtccgacgcgctgacggtccagttccgcgccatcctcaagaagatcgtcgccgccaaggagtcgatgggcgagacgatgcgcgcctcctccttctccctcgccgaggccaagtacgtcgctggcgacggcgtccgccacgtcatcctccagtccgtccgcgcggcatccgtccgcgtccgctcccaccaggagaacgtggccggggtcaagctccccaagttcacccacttcgtcgaccccgccgcggcctccgggggcccctccaacgcgtccccgagcctcacgggcctggcccgcggcgggcagcaggtcgccgcctgccgctccgcgcacgtcaaggccatcgaggtgctcgtcgagctcgcctctctgcagacctccttcctcacgctcgacgaggccatcaagaccaccaaccgccgcgtcaacgcgctcgagaacgtcgtcaagcccaggatcgagaacaccatcagctacatcaagggggagctcgacgagctcgagcgcgaggacttcttcaggctcaagaagatccagggctacaagaagagggagatcgagcgccagatggccgccgccaggctatttgcggaggaacagcttgccgaggatctcgcgcttaagaggggtatctccgtgggggctgcggcaaacctgctggttgctggtggggagaaggacgacgacatcatcttctgaccactccttccatggccatccagtcattcaatcgtggcagaaacaataagttgatgctggagctccagaattgtatctgtttatagaatgatggagattttgattcagtaagtagtctggagtctagccatccgagaccctcaataatctgtacctggaaaccaaacagtgccaaataacttttacggagcgttatgtgcagctcatgtagaaaattcaattggaccgtatttcctgtcgtgtaccttctagtatcgtattatattatatatttattattcaattggacctgcacaaagaagttgcagtctgggacgtatttggcttttgcatatagcatgctattttgtttttagctcgtatatatatatttggtttcgttgctcatataaaaataaaaaaaagggcccgactctgaagttgcggtcaaggacttttcttttggatttttaaccgattgttgttttgccccccctataaaaatttggtttcgttgcccc

SEQ ID NO: 65492 - DNA, 588 bp, Zea mays
  unsure (1)..(588): unsure at all n locations
  Clone ID: MRT4577_159729C.1
gnaacagctcgccgggatctcgcgctgaagagggcatctccgtgggcgctgcggcaaatctgctggctgctggaggggagaaggacgacgacatcatcttttgatcgcctctttccatgctcatccaatcattcaatcgagtttgcatgccaagatgttgtacttcgcttggtgaggctggacatcatctccctttgtctagcatgtgtgtgcactccccactccatattctctttttttggagacgtgctgtatacttggatgatctgaccagatgcatcatgcaatttaattttccatgctcgttgatgtgatgatcacacatggaattagtctctttcatttagattttaatggtttgctcctccttgcagccccggaaacaataagttgatgctggaactccagaactgtacctgtttatagagtgatggcggttttttttttgtttcagtgagtagtctggtgcctggtcatccaagaccgatgaataatctgtacttgttgggaactaaagattgccaatgaactttaagcacgcagtggttatgtgcagttggtgtagtaaattcaattgtgctctgtttt

SEQ ID NO: 65493 - DNA, 487 bp, Zea mays
  Clone ID: MRT4577_15972C.1
aacaaattcacattatgtttatcggagtgattacagaagtgattcaaagaaataaactttaaaatgttataatttatttataagtttgaaatatatgctagctcattgacaatcctcaataagaagtatagaagagctactttaacctataagaaggtcgtgcccaccggcgcttaacaccatccacagcagcacaaatctagtacctgcaacaacatgggttcgaaaatcctgagtacgaagtttactttcgcaagtcttacccgtctaaggaaaaaactctcaaggatatgctggcttttgggaatcaaggtaaagtttaacaagattcaaagactcttttgcagaaaagcttactatgagtggatccttaagaattcattttacttgtcaggttaagtaaagttaactgcatctagagttctttcagtcctagttcaaacacttggcctatactagccgtctttttatcagcccttcagttcac

SEQ ID NO: 65494 - DNA, 281 bp, Zea mays
  Clone ID: MRT4577_159730C.1
gggacccggcgaaaacatgaattagggcaaaaacagaattacatgtttgggctaaaattgattaaaaaaacagttgggggacccccaccaggatccatttgattacataggagcctcgctgggaaacaaacaactaacacaaacaagtttcatgccttaggggggaactgtagctgcagttttagcaggggcactgccgccgacgagttcgcgccttgggtaatccctggccccgtccttgtttacgatcttgatcacaaaggtttggggggccacaacca

SEQ ID NO: 65495 - DNA, 1485 bp, Zea mays
  Clone ID: MRT4577_159731C.1
tggggacctcgagaagcccggcgggggcccaattattttttctctaaatttcgccaattctgctgcaattcaccaccgtccggtccgtccccatctcgtcgccgatccaacacaacccaccttcacatcaagcagtacaccgccgtgtccccgatccagccacacgagtcgacactcgacacaggcccgcgatcccctccccctcttccttctccggattcgcggcgatctagccggcggcgggcggcgcagcgatggcggggcaaaaccagcggctcaacgtcgtgccgacggtgacgatgctcggcgtcatgaaggcgcggctcgtcggcgccacccgcggccacgcgctgttgaagaagaagtccgacgcgctcacggtccagttccgcgccatcctcaagaagatcgtcgccgccaaggagtccatgggcgagacgatgcgcgcctcctccttctccctcgccgaggccaagtacgtcgccggcgacggcgtccgtcacgtcgtcctccagtccatccgcgccgcctccgtccgcgtccgatcccaccaggagaatgtcgccggggtcaagctccccaagttcactcacttcgtcgaccccgccgcggcatccggggggccctccaacgcgtctccgagccttacgggcctcgcccgcggcgggcagcaggtcgccgcctgccgcgccgcgcacgtcaaggccatcgaggtgctcgtcgagctcgcctcgctccagacctccttcctcacgctcgacgaggccatcaagaccaccaaccgccgcgtcaacgcgctcgagaatgtcgtgaagcccaggatcgagaacaccatcagctacatcaagggggagctcgacgaactcgagcgcgaggactttttcaggctcaagaagatccagggctacaagaagagggagatcgagcgccagatggccaacgccaggctattcgcagaggaacagctcgccgaggatctcgcgctcaagaggggcatctccgtgggggctgcggcaaatctgctggctgctggaggggagaaggacgacgacatcatcttttgatcgcctctttccatgctcatccaatcattcaatcgccctggaaacaataagttgatgctggagctccagaactgtacctgtttatagagtgatggcgggtttttttttcagtgagtagtctggtgcctggtcatccaagaccgatgaataatctgtacttgttgggaactaaagattgccaatgaactttaagcacgcagtggttatgtgcagttggtgtagtaaattcaattgtgctctgttttccctgtttgtgttaattatagttgtatttatatttattgagaggtgtgcgactctgaagtcgcgaccaatgtatttgctgttggatatgcatgctattgaggttgtagctcgctatatatatttggtttcgttgctcaaaaaaaaaaaaaaaaaagtcgcccctagggcctcgtgc

SEQ ID NO: 65496 - DNA, 835 bp, Zea mays
  Clone ID: MRT4577_159732C.1
aggccggccgggccgggatagtcgacactcgacacggcccgcgatccgctcccctttcttccttccccggattcgcggcgatctagccggcggcgggcggcgcagcgatggcggggcaaaaccagcggctcaacgtcgtgccgacggtgacgatgctcggcgtcatgaaggcgcggctcgtcggcgccacccgcggccacgcgctgttgaagaagaagtccgacgcgctcacggtccagttccgcgccatcctcaagaagatccagggctataagaagagggagatcgagcgccagatggccaacgccaggttttcgcagaggaacagctcgccgaggatctcgcgctcaagaggggcatctccgtgggggctgcggcaaatctgctggctgctggaggggagaaggacgacgacatcatcttttgatcgcctctttccatgctcatccaatcattcaatcgccctggaaacaataagttgatgctggagctccagaactgtacctgtttatagagtgatggcgggtttttttttcagtgagtagtctggtgcctggtcatccaagaccgatgaataatctgtacttgttggggactaaagattgccaatgaactttagcacgcagtggttatgtgcagctggtgtagtaaattcaattgtgctctgttttccctgtttgtgttcattatagttgtatttatatttatttgcggggtgtgcgcggattgctgtactacacctactctgaagtcgcgaccgatgtattatttgctgttggatatggcatgctattgaggttatagctcgctatatatatatttggtttcgttgctc

SEQ ID NO: 65497 - DNA, 533 bp, Zea mays
  Clone ID: MRT4577_159733C.1
cctgcaggtccggtgccggattcccgggctggagtagctgcgagcggccttgccgaccttgtcgtcaacaatagctggggttgccatgcaaagcaggacctgtgaatcatgatagatgcagatctaggtactccttgacttattgcttgcattgaatgctaggtgcacagatgctgtaccatgaaggaatgcgcctgtactagagcttttgctggaggaccgtggctgagctaggacctgtatggttcattcaatcgtatactcctggagcagcatacttgaagctgtggtctacgggacatccgcagggtgctaatatgcagcgccttgcatatctcggtgtgagtgtggacgttcatctgagacatggagagctacactgctcaacacacgggggactgagccctatttcttggatgccactttcaacagtggggtaggtccgtactgagagctccacgttagccgatcttgcatgcacacgtataactgcgtctttgttgcatataaagctgatctatgggccggacgac

SEQ ID NO: 65498 - DNA, 617 bp, Zea mays
  Clone ID: MRT4577_159734C.1
attccgtcagtcacagagctgaatattactactaccaattctctttgtgtgtgtgtgtggtgtgtatatgctacaccagtgagtgtatgtttcactagtgtgtttgagtacaactagcaaagaaagtgagaaagatagagtaacagttagtagtatgtgggctcacatcgcgcggaatcggatgcggcgaacgccgccatcctcgtcgcggccccagatgtgcgccggatgtggacatcctcgccatcgagcaccccctgcccctgccatctagggccaccctccttgctgctgacgtccagacccgcctctgtgttcgacaagtttcagatccacctccctggatggcgacttccatatctgcctccctccgcatgttgaggtgcgcaatctcccaatactttgaagattgcgaggagcgagatcagtgactgcataaaagatgatcttgcacaaagacttcgcaaggcacgtttgtgttgtccccgaagtctccttcgggaatgtgtgtctgatcatgccatggatgttcagccaaagttaaaagtgaatacattctgtgacggtcttgatgataatcttcaggaacggagtggaacgtttgcgatgttactata

SEQ ID NO: 65499 - DNA, 339 bp, Zea mays
  Clone ID: MRT4577_159735C.1
agttccactcgcgccattatcggcccgtggcctctccctccgtcggttggtttctcgtaagaatttttggggtttccgaggccgtgcgtcgccgtcgcgtcgacggctgggatgcgatgcgagaagcggaggctgctaggacggcgctaaccttggtttgctttctgtttacgttttctaagaacgccatgtgttcaccttaagcacggatggttaagggtttaagctcgtttaggatgggaggaattagtttcgtttttcccccagtttgtttggcagcagctcagaactatttatgaagtgcatttgcttcgcataaaaaaaaaaaaattatttttt

SEQ ID NO: 65500 - DNA, 2021 bp, Zea mays
  Clone ID: MRT4577_159736C.1
atggtggtttggcagagttttgataacccgactgatgtactgctctctggaggatacctgggattcaataaaatcaatggcaacatcaacagtcttggtatacattttaatctgtcattcgatgcaactagaaggagaggttttattatccagtatcctgaaggtcggaggtttgctggtgccttccctgaatggatggatattctcgaagatggaaactatacgctaatattcaatgacacatatacatacatacgtttagatgatactagttttgttagattcggtaagcaaggggactgtgattctattttatggtctgccccagaaagtttatgtgattatgatccatattgtggaccttacagcctttgcacgttgtctggctctggctcttgtatatgccctgttggttttaattcagtgtcgacagatgcatggattactgctggttgttcgagaaatgactctctgaattgtgaaaatgtggaagtgacattttatccaatagatggcatccatagatatcccctggaagctttcgcgttggaagttacaaacatgagtgagtgtgaatccgcttgcttaagggattgtacctgtactgcctttgcttacaatgcaagttgcttgctatggttttcggagctgcggaatacaatagtgctcgactctggtctaaatggcatccgtatgtacgtacgtacggcagccagacaacagtcaggttctggaaccgttcctccgttttctttctggaaaagagtgcctcttgaatggatgatcggtgtgataacccttattgttatttctctgattcttttgttgagatgcagaagcaaaccttacagtgctagaactgtgggtgaccatggaagtcttgtggtattctcgtttgcgcaaataaagaactccaccaaaagattctctgaaaaacttggcgaaggaggatttggctgcgttttcaaagggatgttgccaggctgcactcctgtggctgtcaagaagctaaaagaccacagacaggacgagaagcagtttcgagccgaggtgcggaccataggtatgattcagcacatcaatattgtccgtctgcttgggttttgcgccgaaggtagtgggaggttcctagtgtatgaatatatggcgaatggttctttgagcagccacctgttctccaagagttcctctaagctaagctgggagctgcattactcgatcgcgcttggaatcgcacggggcctggcttatctgcacgagggttgcgttgatgaattatgtcctaagattgcagatttcggcatggcaaagcttcttggccgagattacagcagggtactgacaacagtgcgagggaccataggataccttgcgccggagtggatctcagggctaccgataacacacaaggccgatgtctacagctttggaatgattctcctggaaatcctatctgggcgaaggaattcggagaagattgaagaggggaggtttacttacttcccttcctatgtcgcggtcaagttgagcgaaggagacgatgtcatgtggctgctggatagtagtctggagagcaatgctgatgcagagcagctacagagagcctgcagagttgcatgctggtgcattcaggatgctgaagatcacaggccgatgatggggcaggctgtgcacatgctggaaggtgccatggatgctcaagtccctcctgttccaaggtcactgcaaaactatgtcggcgtggaggattctaccactgcagaattttacatctctgaaggctcgtgctagtccagtgtgagcctgcccttttgttctttgtactgcttcggaactgaatctaagcggaacacacagttgctgtgtactgcagttttactcactagtgaactattttaagaatataagtactgcaaccctcacatttcctgattaactgcttcaaatgttggtcagacatcataggaattttgatgtacttcaaccctcatatttcctgattaactacttcaaatgttggc

SEQ ID NO: 65501 - DNA, 166 bp, Zea mays
  Clone ID: MRT4577_159737C.1
tgagcattcatatacacaccaagttattttcactatcaacaacctaacaacaatggctgccaatatattatctctgcttgctcttctttcgcttatcgcgagctcaataaatgcgctcattatttcacaatctacactaactcttagtttcattattccatatttc

SEQ ID NO: 65502 - DNA, 830 bp, Zea mays
  Clone ID: MRT4577_159738C.1
ttgaacattggtattgcactctggttggctgctggtggtgatggttgggtggatggaagtatatgtcgtatgcaagatggttctcgctataagtacaggtcgagatctagagtccttatagtgggttctggggctgatgagcagtgtgctggttatggtagacatcggactaaatataggcttggagggtggaacgcattggatcaggagatgagactagatgtgcagagaatatggaaaaggaatatgggaagagatgataggtgcatctctgatcatggcaaggaggcccgtttcccatttcttgacgagaacgtgataaaaactttgttggaaattccgttatgggaaattgctaagcttgatgaacctgttggaaggggtgacaagaagatcttgagagaggttgcaaggctgctgggcctacaagaagctgctcttcagccaaagcgcgcgatccagttcggttcaaggatagcgagggagtcgaaccgcaagaacttcggcagcaacagagccgcgaaccaggcatcagcaggcagcgtgcagattcaccagagtccagcttctccagtggcgtcggccacacgccagccatttcttaccaacaatcagccatgaacacgcttagctgtgacaagtgccgcatggtttggttgatggagcatcattatcagttgttacggttcatcacaaattttcaaacgattcattgtcagctggatggagcatccatcatttgttatgtatactagccctgaatcctgatcatgtaacagcaacttggacgtggttgaaacctaaaagtggccggctgctttgtgtctgtt

SEQ ID NO: 65503 - DNA, 485 bp, Zea mays
  Clone ID: MRT4577_159739C.1
ccacccaacaaaagggaagcactttatttggtggaaaaaggaaagctcgttggacctaacgagagggctcgttaacaaaccgggctaaaatcctaacttagctcggaacaaaatggaaaaaaactaagtcgggccaagcgaactaacgggccataagttttaggtccacccctaagtagagccaatccccgggggacatcaaaaaacctagttatattatattattacaggtttgcaaaaggattcccaaggaggggttgaggggaacctagcaaagccctgtaggggcggcaaccttttttaaagcaaaagttaataggttgggacgaaaatttttcatcggggggccaccattttctttttctcgttggcaggaccaagggggtaaaaaccctagcttcaaaccaaatgttgcattggcgttaagcaaaaaggaagctgcttctgaaaatctggggatggggctattaaaatttggcccaccc

SEQ ID NO: 65504 - DNA, 123 bp, Zea mays
  unsure (1)..(123): unsure at all n locations
  Clone ID: MRT4577_15973C.1
ccggnctggaatgacagcaccgacgcacgcgtacgaacgcgagcggccgctctagatgatccaagtttacgcacgcgtgcatgctagggcatagggctactatcgtgacacctaaatgcaatt

SEQ ID NO: 65505 - DNA, 374 bp, Zea mays
  unsure (1)..(374): unsure at all n locations
  Clone ID: MRT4577_159740C.1
gccgccgttgtgcctcccatcaaccctccacgcgagctgtcgcctgcccctcatcgctcgcccccctccaacacgcgaggaacccctaccgtcgctgacccctcatctgcttgctcgggggccaggcgtctagtccggggatgtcggcggcggcggttcacggctccgtgtagtggctgttgcagaccacgacggggtcaaacacctnctnctcctnctactcctgctcggactcgtctccggctgcgttccggcgccacctcaccatncagccgccactgctcccctcgtcggtgtccttgctgaccgcgagcacctccgtgcggaggcggatgatgccgtcaaggtggaatcagcgcgcaaaggcctggatg

SEQ ID NO: 65506 - DNA, 830 bp, Zea mays
  Clone ID: MRT4577_159741C.1
ccctcgggctggccgggcccggtcggctcggctgccgatccttcttcaatccctcgcctgcaactggctctctgtccccttctgctccccccacggttccccagagcccgagccaaatctaggggcttccttcatccgagcgtggtttcaattctaggggtagtcacctcacctgaattccgcccaaataaattcgtcgctgccttgtgatccttggggtttccttggttcttgagttgcgatcttctgctggttcgtgtcccccaatccgtaatcaatccggcgtctaggaaaccaattgctgctcagttctcttatttgctcctcgccttccttcctccagcctggttaaaatatcgaaaggggatttttttttaaaaatctgctcatcgaggaagcagggaagacaagaattgttgcatcggataaaggtcgggtgaaaatacaagcaaatcctgggaactcgcgtccctttgctaggtggttctttcctgatacaaagaacacaatgggcgatgtgtccttgaacggacccattaaggctgctgagccaggtgccggtggcattgccaagggcaatcaagttctggacacgatgtccgccgggtggacagacgagagacacaggctgtatataagctctatggaggcctctttcgtcgatcaactgtacaaccacgggagccgtccgcgcaacgcaaacggcaccgccttcaaggctctccgcagggagtacgtcgagtatgagaagaccgatgctcctgtgcgaaggggggctaagtgctggcgcgttcctgcaaatccttggatgcagcatttcaggccacgta

SEQ ID NO: 65507 - DNA, 348 bp, Zea mays
  Clone ID: MRT4577_159742C.1
aaggaaagtgggcgcgcccgcagagctcggatccggaatagcgggcgcgctccactgtcgttcggggtctttagaccattagctttatctactccatagcagcagaagaacccgagcgataccttgagggggctgtgtcgccgccgtcgatctcctgactcttgttgctagcgcaacctccactcatacaatcagctagctgagcttggccagccactcgacgtcggtacatataccgccgccggggcatacgccacctgcggttcacctggcacctgcggtgcatctgccaccggccggacacctgccgcagtcggtgcacttgctaccgtcggacaatgtgccgac

SEQ ID NO: 65508 - DNA, 230 bp, Zea mays
  unsure (1)..(230): unsure at all n locations
  Clone ID: MRT4577_159743C.1
cttcatttcaccatgtcnntcagcaatcgatttgctgnggccnccnccctcacctcggccgtttattttatatcttctccacacctcccaccanctnnanccaaaaaatactaaacaatatcacctttacatactttctataccattaacaattacctctattttttcaaaaactctatcttttatctctttatctttattcattattattttactatttttttaaattt

SEQ ID NO: 65509 - DNA, 502 bp, Zea mays
  Clone ID: MRT4577_159744C.1
gcacttacatccaccgctagccggaagaaaaaaagaactctggtcacgccgctgccactgctacagcaacgaagcccttcctcggcacggagtctcctcggcgcgccatgcgtcgtgaccaccctaggtcgcgatcagcaccaccgtggtcgtggcacaccagcgttatgacgaccgcatgaagcatcagcgtctggtgagggcaccagcacaccgccgtcacgcgcagcatcaccatctcggcgatggctcgagcacgcagttccaggtagacggccgaagcaacctcccaccgtgcgtctgctccggcccctaggttgaagcgacttcatcgattcagacctcctagacgtctggatccacatcttctgaagatgactgtccgctaccaaccaagctcgcccctacttcactgtaacacccactttgtaatttgctaagaataataccaatagagaaacaatttctctcaaaaaaaaaaaaaaaaaaggcccctagggcc

SEQ ID NO: 65510 - DNA, 711 bp, Zea mays
  Clone ID: MRT4577_159745C.1
agctggactggcgatggtgggtgacgtatctttgaagtcggtggagtctctcttggagacgaaggttgacgaatcggtagaggtagcagtgggtgatgatgaaggctgtcttttgtttgaagcgatgctgacaaacttcacagggttgattgatgatgttgatgctggagcaataccaacacagaggtgtgcagtttctggaggtgacctgcagaatagcaaggcatctgaggatttgaaacaactgggtgataggattgaagaaggagaacctcttagaaactgtgataatgggcagaatgatggtggtggtttcgaggaacccacgcgtccgggcgagtttcaggatttgggtcagaagaatctggaaattccgaacatggagacgaagatggtgaagatgagaaattggaagacaattccattagcagaggctcagggccaaataaatcttgtgattatggcacacaattcgggaatttgcactcaattcctgaaacaggaaatgatcatcttgtactgaacatggatgctattgtcagaggtgatgcacaaatatctgttaccagggctcaagccgtcacttatgatgaagttgtggattggaatgagactccgctgcctgacaatgagagtgtcgaccctgggaagaagagaaaacgcattctgacagaagagagaaaagctaaaaaaacaaaaaaaaaaaaaaaa

SEQ ID NO: 65511 - DNA, 639 bp, Zea mays
  Clone ID: MRT4577_159746C.1
cgggtttgtattaatcctatacttgagttttagtccccctgaattgttgaaccagggaatttactcaccaaaaaaaaaaaaaaaaaaaaaaaaaaaaaaaaaaaaaaaaaaaaaaaaaaaaaaaaaaaaaaaaaaaaaaaaaaaaaaaaaaaaaaaaaaaaaaaaaaaaaaggggaccttttttccagagggcgggcttttaatttcggggatttttgtgggggacccggctccccaaaaaaaaatccctgaaatccgaaataatagtgggttcctgaaaaaccttcctgctgatctgagggatgaggatggcatgaccacccaatttggggggcctgcccagccaatgcaaaccatggttcaaatcatgcaaattttaacagaggccaccataccacctgcctgttttcgcagaaaaaaggccctacctgagggactggacatggccaacaacttggatgatcttgattccaactaaaattttgatgttaacagcaccggggaaattgtgtccccaatgggagaaacatttaagcagccttttaagcggtcacccagggacccaatcaggcttgggatgccctgttgtatactttggaaaagggcatgcttccttttggaaaaaaatccatgtagttt

SEQ ID NO: 65512 - DNA, 127 bp, Zea mays
  Clone ID: MRT4577_159747C.1
cccacacgttcgaggatgcatagccctaagcaataacaaactttctggtttccatattgcccatgtctcttctgggccgggcgtgccgtagtcctcgccaaccccgtggctccccttattctaccga

SEQ ID NO: 65513 - DNA, 738 bp, Zea mays
  Clone ID: MRT4577_159748C.1
gacccccgggctcgccgggcactcacccctctggttgactgtgattattatgttaggttactaagcaagtagaattatcactttttaactgcaagtcttgatttgatgcggaaacctgttctatttcagttgcacagaaggtaacaactaactgtattggcttaggcatttacatgtttgggtaccttcattaggacaggaggctttccaagagtctattagggtggtgcttttcatcagtgtgcctaaacattttgtccttttcatctactagtgttacattttgacataagtagtagcatttatagtattggctctgttactctcctataaacatgatcgaaccatcctgctaaaacgagtgggcatgcattcatctaaattactgaaagactgaaggacagatataataccatgtgtatcaggagaatcgatagtcactgaatgcactcgcatgttcttgtttaacttaactggctgctatgtttgaactacacctttactggaattacaccatatctcttttctttctataatgatataagctgcctattcatttgtcagaatgtgtattatggtgttgaaaatctatgatgtgaaatgtttgcagctaccaacctgttcaagatgcttcttaagtaccggcccgaagacaaggctgccaagaaggagaggcttctgaagaggccccaggctggagatgaaggaaaaactgttgaatccaagaaaccaattgtt

SEQ ID NO: 65514 - DNA, 366 bp, Zea mays
  Clone ID: MRT4577_159749C.1
attcggctcgaggcgaggacactacacattgcgccactgacatgacgaagctcaccagggcactggtccgcaagcatcagcagccgccgccgccgccgcactagaagcaccagcagaagggcggcaaaacgcgcgccgaggctaccgccggcgacgaagagtcactgggggcgaagaaagccgtgagtatcgacatcaacacgcaggggacaggagtggacgccatcacgctggagagaaccgaggcgccggcgctaggccagcccaccgtcccgacagaacagcatggactggaaggagacaccgaccgcgcacagtgttgacggcccaccggcaaggacggggccgagactaggtgaatgtcga

SEQ ID NO: 65515 - DNA, 268 bp, Zea mays
  Clone ID: MRT4577_15974C.1
gtacattatatcaaactgtgacatcagggaggctatctgtccttttcttgtgaaatatccaccaatcttatagatccaatcaaggatagatgctcgggtggtgaacatcctcagacaagcttatggtcggctcaaacaactgcttaaaaagcatgacaagcaattacatgctttgacaaatgcgctgttggagcgtgaaacacttactccagatgagatcaacaaattaattcacccttaccaaaaataaccccagtttttgtttcaa

SEQ ID NO: 65516 - DNA, 562 bp, Zea mays
  Clone ID: MRT4577_159750C.1
gggccccggaagttcctcggcaagaagatggcttttgtccaaataaagtttgtggccagcaccgtgctccgccggttcgagctcgtccctgggccgaggggcgtggtccggtgttcctgcccctgatgacggcacacatgggggacgggctcaacgtgacggtaaggaccagatcaggggaacacgttgcctctgctgcgtcgtctgggaattgagtattatacccggcctcctcatgtaagtagtacgacaaattaaaaccaggattatttatttagttactacgatactatatgaaaactgcttcgttattactactagctatgaaattcatgaggaccacgtactgttttattagctgcgtagattgcagacaacagtgtacacttttgtaccatgtcgatcatgatcatatgaaagagatacacaggaggatacatatttgcagctatacgccctcgctcgcatgtatatacaccaagctatttatttctgttcacaaacactcagtttgtatgtatctatctactcgtatatattaatatatataaaaataaatgtt

SEQ ID NO: 65517 - DNA, 419 bp, Zea mays
  Clone ID: MRT4577_159751C.1
ggcggagacctaatcaacttcaccgtcctcaacatcaacttttaggttatcaccgcctatggcaacgtgagggttcattgctcgggtacaacttcagcaaacacgttgaacgtctacactgcattttgaataacatacttgaattacctagtcctacacagtagctatgaggaatactaaatttacacttataaacttcatgttctatggcaacctcaataaattcagcattcatatgtgtcaagcataaaggctttgacctgaatctactttctctttaaaaactcattctaacaacctgatctctataactccaatactattactctaattctaaaaactattgggaggggaccacattatattacaaattcatcttattgcagtatgtctgcattctgtaaagtccgtaaaggcaa

SEQ ID NO: 65518 - DNA, 314 bp, Zea mays
  Clone ID: MRT4577_159752C.1
ctatctaacaaaagggatggttgaactacaaaaaccgtctataaccaaacctaaattaaaaacaatgaaaatcaaattacaacatctaaacttgaaaaacctaaactttaacaaaaaaaaacgcattaaaaaaaatccccctttcaacaaataacctattttcaaaaaagacccaaacaaataaccttcccaacaaaagcccatcctaaattaaaaatggaacccccccttaaacctaccaaaaaactcaaaacaatttaagtttacactgagagttaccactaaacctgaaaaagacaaaatccccaatccct

SEQ ID NO: 65519 - DNA, 259 bp, Zea mays
  Clone ID: MRT4577_159753C.1
ggctgtcaccctccaccgagccacgcagtgcctggagttgagctgactgagcaggctgttgggtgcagcactggactccggggccccactggcttgatgaagtggggtctggcctgttgatggtttacatggcgcctgcctcctggaggaccagattgctctgcctcaccttgccagggcagggtctgggctgggcacctgacttggctggggaggatcagggccctgggcagggcatggcagcctgtcacccgtgtga

SEQ ID NO: 65520 - DNA, 350 bp, Zea mays
  Clone ID: MRT4577_159755C.1
cacgaataaatctgagctgatttctgtgaaatttatatgcgaaccccttgaaattcgtgtggtccaaacacggcctaaaagaactttgtctagagaaaccctctaggtaacacagacgcgcaaaccttcaagtatcgatctcagagaggacatgcagaagatgatttgcagtttgctgcggggtaggctcctcagggcctttgggactgcttttgtcttcgcctgactccaccttttatttttgtttgaacttgctaccagctggatacttccagagaatccgtacagtacagcccttggctgttgaattccaagtcttcgctaaatgaaccattcagacatcgccatct

SEQ ID NO: 65521 - DNA, 363 bp, Zea mays
  Clone ID: MRT4577_159756C.1
aaaacggggcatgctgcaagaaggctgaataattcactcttttttttctgaaccccatgtttttggaccggtttgtggggcatgttacttaggacatttggaaaccctgccttcctgggacctccctcttaaaaccaccgtaccataagggggattagattattaaccggtaaaaaccaaggcacttttccggcccatttggaccacaatttttaaattttcctggaggaatcctaaaaccctgctttccttttttcccggaaaatcacccccttgccccccggaggatttgaaacaaccaccggcgggtcccaaaaaaaggcggtgggagggcggaccccatccatgagtttttcctcaaac

SEQ ID NO: 65522 - DNA, 418 bp, Zea mays
  Clone ID: MRT4577_159757C.1
aaaaaaaaaatttatttaaaaaaaaaaaaaaaaaaaaaaaaaaaaaaaaaaaaaaaaaaaaaaaggggaaaagggcggccgggtgtacaggcccacccttacgtacgcgcgcatgcaacgttcttctttttttgtagtgaaacctaatttcatttgccggggcgtttcattttcaacgtctgggcctaggcaaaaccctgaccttttccaaccttaatcggcttgctacccatttcccctttgctcagctggcttattaggggaaacaggccggttcccctttgcccttcctaaccgttgccccattcctgaatgtggactggccttctccctgtacgggaccctcccgcgctgtgggtgttacgctcacccgcaccgtgacctttcccctggcccgcgccctaacgccccttccttt

SEQ ID NO: 65523 - DNA, 368 bp, Zea mays
  Clone ID: MRT4577_159758C.1
gggaggaaaaaatttttttaaaaaacaagccctttggggtcatggggaacccccagaaacaaaattgaacccaaactgggaggggtaatgggaccgggggcccaatgactttcttttaaagcagcatttccaagaatggcacttttggttggaaaaaaaattttcccaaggaaaaaccaaacatagttgaaacaaaaagggttccaaatgggtggaaaacagggccttccttggggaaaccccccgaactttaggaaattgaaaggggggagggggtttttttgacctcccaaaatgagacaccaatgggggttaaattgaaactgggttcctaagaaacccggttgggggctgataaatttttaaaa

SEQ ID NO: 65524 - DNA, 320 bp, Zea mays
  Clone ID: MRT4577_159759C.1
cagcgctaccacctttcattattatgctgctcaaacaaaaaagcacgaggcatacacaggcaaatccatattgacttcctaggcccccggtccagaagttaattccaaccttctcataataacgtaagccctttccacaacagcaggggagttgcagaccagcacatatccaaccctagctgtatcctaggttaattatcgaaccctctgcctgatggtcctcgagcttcctgagctctgcgctcaccatatgaagcgcatccatcactctgagcgtccaaccgcttggagagctcgatctccacgatggcaccaatgat

SEQ ID NO: 65525 - DNA, 172 bp, Zea mays
  Clone ID: MRT4577_15975C.1
ttaaggcagtcgggtggcattgataatatgtttaatgtcatggtgaattgccattcagagctggagaaacttgtaaacgatgcctccactacggatgtggagggagaggaaagagctcctctgcaaagcgctgcactcctcttgaaatgtttgaaaattttggagaatgcca

SEQ ID NO: 65526 - DNA, 968 bp, Zea mays
  Clone ID: MRT4577_159760C.1
aattcggcacgaggcacacacaacaagcgcgcatagggacacagactcgacagagctgtgttagtgagtagatacctacagctacagagtggtagcaaaagagagagagggacgtgtgcagacgcgtacaaatatacagagggaactgagctaagctagccagccccgaccgacactcggctggtgaattccggcccataatttctatatatcccgttcccgtccctcccccccacgtacttcactcgacacctcccgcgccaccttcttctcttctcccccccgcccgcctccagagaagaagcggggatctcctcctctgtcttgcactcatcctcacacaacctagaagagcggacgaggcacctagcttcacgttcttggtctccgttcatccactcctcccacccagaagaccccgctcggcctcttctctcttgcctcgagagagagagggagagagatacaggggagccagctacctccggccgccggcaggcaggcagagagggagggcgcgcccggcattatggcggcggggcagcagcaagcgagcggcggcggcgccaagcacgggtgcgtgtgcgggttccccgtgtgcgcgtgcgccggcgccgcggcggtggcgtccgccgcgtcctccgccgacatggaccgcgtggccgtggccgccaccgagggccagatcggcgccgtcaacgacgagagctggatcgccgtcgacctcagcgacgacggcctgtccgccgacggcgccgacccgggcgtcgcgctcgaggaccgccccgtcttccgcaccgagaagatcaagggcgtcctcctccacccctacagggtgctgatcttcgtccggctgatcgcgttcacgctgttcgtgatctggcgcatctcgcaccgcaacccggacgcgctgtggctgtgggtgacgtcgatcgcgggcgagtttctggttcggtttctcgtggttg

SEQ ID NO: 65527 - DNA, 461 bp, Zea mays
  Clone ID: MRT4577_159761C.1
cttatgtgagacttcccagtaaataagtaaagtacatcttctaataaaaaaaaaaaaaaaaaaaaaattaatttaaaatatttattaaaatataaaaaaagacaaacattattaatcataactaaaatctactaaaggggaagggtgaatggacttaacttgtagcggctcattaagttcggaaactgtgactgattactcgcacccaaaccaatacacttatcaattctataactccctctaaattctcataactttattgcttattggtcctaacacacaactttccacttacaaactttaaattccatgctttatatacgttacttatgtagagcaccacttgcctattggaaaaaactgtgtttccccgaagaccttttttttcggcctgcggatgatccacccttatgctcacactatgaacaattacatcagaatatacattactaatccctttt

SEQ ID NO: 65528 - DNA, 269 bp, Zea mays
  Clone ID: MRT4577_159762C.1
gtaataggaataatgttttattagccaaattttttaaaaaatatatttttcaccggtttatgaactactattcaaaattgtattccagtttgcacattacattacaaaaaaatatttatattctttttgaagaggtgtgggaaatgaatttagtattctgtttacgaactaatatcatatgaagtgaaatctgtagtatcgctacagttggtctgaactttgcatgaaccattaaccacgcacttatacctttgtcttgttctttaact

SEQ ID NO: 65529 - DNA, 634 bp, Zea mays
  Clone ID: MRT4577_159763C.1
ggccggccgggaaaaaacacccccacacctcgctcgcggcgcggcgacggcaatccaccgcggtgcgctgccttcgccggtgatctgacctctccgagcccgggcaatctcctccctccgaatcggcccggtccgcccggagaggatggcgtaccggcggggaagcagcagttgcgcgctctgcgagggatccaacctgccttcctgttgtgccttgtgcgtcaacgcgaggttgctcgagtaccacacgaagcttcgcatgatgaggagcctccgcgactccctccacgcccgaatcgccgcacgcctcgaagccaagagcaaaacagatgagcagaggatctggagatcgagcaaagcacacgatattatggagttgagggatcggctcactgaattgaagagcaaaactgccgtagataagaccaaggtcgagcaggcatcgagtggtctcaaggcaaaaactgcgtcattgaatttggctcttggcacgctgaaaaagaggcaagctgatgcaggggccatgcacaccagtggccatggaaattgcgcagatgaatctaagggcaatcaccttaagattggtatgaaatgcaaacaaaaatctgtaaaagcaactttgcagaattggttt

SEQ ID NO: 65530 - DNA, 207 bp, Zea mays
  Clone ID: MRT4577_159764C.1
cagacgctgcgctacccgagcatcagccatggcgatcgcagcgcgcgtccaggccgcctcgcgctccacctctacgcctcgctcgctcgctctttctgcgcagtttccccgtccggcgcctcgaccgtaccggcgtccgcctcggccgagccggtgtacgccaacgtcgccgatcgcatcgtgcgcgtcatcgacatcgatctcgaa

SEQ ID NO: 65531 - DNA, 116 bp, Zea mays
  Clone ID: MRT4577_159765C.1
tatcagattaccactttactgtattcccaactttggcgtaaaaaaaatttatgctctgctacctccgtttcacataactagagttaccgaacctagtctctgctggtagtctctgc

SEQ ID NO: 65532 - DNA, 1936 bp, Zea mays
  unsure (1)..(1936): unsure at all n locations
  Clone ID: MRT4577_159766C.1
ctcgaggccnnggccgggaaaagatggaaggaggaagaggaaggggtagaggagatcctcaagcctctccactcctttctctcccagctcccaaaattccctctccgtcgccgccgctcccaaaatcccctctccgtcgccgcctctcgccaggtcgtttccaagccccgttgggggcctcgccggcgccggcattggatataacctcgcccgctacctccgtccgaatgcagggccttgatatttaatgggctggaggtggtacatgcatgttcgcagtgacaagaacacattgaaacgttggtttttcattgacaagaggcttgttaaagcatttttggtgcactaaccttttgttgtctgtaattggtttcacaacaagtttcttggggggttgtgtcctgttgatggatttgaagacaggcctcaattcacctgttattgctgaccatctccctacgttagcattgcctgctgctgtcatgactttcacaacacctactagctttccctctccggggctttgcttgaacactacaaagaagatacctctgcctggtaagattgaagaagttcgtgctgctggatggcttgatctcatgaaggcctcatcacctacccgcaaaaggcagatcaaggatgtcatctgtgatgctcaatctgatcttgatttgcaatactgcaactggacagtgaactatccttctgctttgatctcatttgaggcaattagtgatcttgctgggagtaaaaggttggcattgtttcttgactatgacggaacactttcaccgattgtggacaatcctgaaaatgcattaatgtctgatgagatgcgtgctgcagtgaggcatgcggcatcacttttcccaactgcaatcattagcggaagatctcgtgataaggtttttgactttgtgaagctaaatgaattgtactacgctggaagccatggaatggacataatgggccctgttaggaagactactgactccaatggcgtggaatgtattcggtcaactgatgtgcatggtaaagaagtcaacctgttccaacctgctagtgagtttttacctatgatcactgaggtgtatgaaaaacttggtgagagtgttaaggacattgatggtgcaaggatggaagacaacaagttctgtgtatctgtgcattaccgtaatgtggcggaagatgactataaaaaggttttccatcgtgtaactgctgttttggaaggttacccttgcctaagactaacccatgggaggaaggtttttgaggtccgtcctgttattgattggaacaaaggtaaagctgtggagtttttacttgaatcgcttgggctcagcgagagtgaagatgttctccctatctatgttggagatgacagaacagatgaagatgcattcaaagttctgaaggcaagcaaccgtggctttggaatattggtgtcgtctatacccaaagagagtgacgccttctactccttgagggatccagctgaggtgatggaatttctgagaatgttggcagcatggaaggagcagtccacctgatatcagttttgctgggtctgagaatgtgggcagtccacaagattataaatattagcaagatatataatatataatgctaatcaaataaatcggctattaggaggactcgagccatttttttgatttggcattttataagaggctaccacatttccatactttttcagtcccactttgttcttgtgttaaatgggttttcaaacagttcaattctttcattatttaggttccttaagtatatatgcaaatattcttaaaagggattttttggttccttctagtgtttcactgtgttgcgatttttgtattctgcaatctgtaaagaaccggttcttcgtataaacagcatttgacaatgcctcatggaaagtcaagttatgagc

SEQ ID NO: 65533 - DNA, 194 bp, Zea mays
  Clone ID: MRT4577_159767C.1
gtcgccgtcgctctgccctcgtatcccggcccacgacacccagacaccaagatgaccgggccaaccccggaggagcttgccacccaaaacgagccgcaaaagcttgaggggccaaaaaaccaagccaaagaaatttttgttgaagaataagaagaagaaaaataagaccattaccattattacaagggtgatga

SEQ ID NO: 65534 - DNA, 1228 bp, Zea mays
  unsure (1)..(1228): unsure at all n locations
  Clone ID: MRT4577_159768C.1
ggtaccctcgggccggccgggcgcctctccactcctttctctcccagctcccaaaattccctctccgtcgccgcctctcgccaggtcgtttccaagccctgttgggggcctcgccggcgccggcattggatataacctcgcccgctacctccgtccgaatgcagggccttgatatttaatgggctggaggtggtacatgcatgttcgcagtgacaagaacacattgaaacgttggtttttcattgacaagaggcttgttaaagcatttttggtgcactaaccttttgttgtctgtaattggtttcacaacaagtctcttggggggttgtgtcctgttgatggatttgaagacaggcctcaattcacctgttattgctgaccatctccctacgttagcattgcctgctgctgtcatgactttcacaacacctactagctttccctctccggggctttgcttgaacactacaaagaagatacctctgcctggtaagattgaagaagttcgtgctgctggatggcttgatctcatgaaggcctcatcacctacccgcaaaaggcagatcaaggatgtcatctgtgatgctcaatctgatcttgatttgcaatactgcaactggacagtgaactatccttctgctttgatctcatttgaggcaattagtgatcttgctgggagtaaaaggttggcattgtttcttgactatgatggaacactttcaccgattgtggacaatcctgaaaatgcattaatgtctgatgagatgcgtgctgcagtgaggcatgcggcatcacttttcccaactgcattcattagcggaaaatctcgtgattaaggtttttgactttgtgaagctaaatgaattgtactacgctggaagccgggggagggacataangggccccggnaggaagacnacngactccaanggcgnggaatgtattcggtcaactgatgtgcatgtgaaactactttctagatctttaccctcaatttaaatgttttacttgctttcttagtgtgtatcttcttatcctcctcgtagggtaaagaagtcaacctgttccaacctgctagtgagtttttacctatgatcactgaggtgtatgaaaaacttggtgagagtgttaaggacattgatggtgcaaggatggaagacaacaagttctgtgtatctgtgcattaccgtaatgtggcggaagatgactataaaaaggttttccatcg

SEQ ID NO: 65535 - DNA, 378 bp, Zea mays
  Clone ID: MRT4577_159769C.1
ccatgtacaacaagggtatctgggactggcgcccactcttctccacccataacagccgctggcgcacatcgcaggctatcatgatgggtgtttttggtcagttctctggcaacggtcttggttattacaactcgtctatcttcgatattttgggttacacatcgcactttaaacaactagggttcacggtcgtcaaccaggtcgtttccgccaccggagctctaaccgccatgtcccttactgaccgcatgccgcgccgaaaggtgcttatcattggtacttttgtcggcgctatcttgctatgtatcaacgcagctctgcagaatgccctttctaaatcgacagtcaacggtgttatcaccaacactcacctcgcac

SEQ ID NO: 65536 - DNA, 670 bp, Zea mays
  unsure (1)..(670): unsure at all n locations
  Clone ID: MRT4577_15976C.1
gggacctcgagccggcgggactggatacaagaagccattcgctctgtgcctgtgccgctgcctaccgtcgcgcgagacgggcgagctcctctcccggccgcacgacgccgcgggggattccttttccccggaatgctctgccgctccgtccgggcggaagaggagcactaggcggcggctcggatggggcgcccggggtacatcacggcgccgatactctcggcgctcgccgcgatcggttatgtctactacaccacggcgatcctggcgatccccacgtggcctggaactctccagggcatgaaccccaccaacaccgccttcgatgccaagcggttgatcggcaggaggttctctgacccgtcagtgcagagtgacatgaagctatggccgttcaaggtcatccctggccctggtgacaagcctatgattgtagtctcctacaagggtgaggagaagcagttcgctgctgaagagatctcctccatggtgctcatcaagatgaaggagattgctgaagcctacctcggctctactatcaagaatgcagtggtgacagtgccggnctacttcaacgactcgcagaggcaagccaccaaggacgccggtgtcattgcgggcctcaatgtgatgcgaatcatcaaccagccccctgctgctgctattgcct

SEQ ID NO: 65537 - DNA, 559 bp, Zea mays
  Clone ID: MRT4577_159770C.1
ccggccgggaacggaagcacctccctccgccgccgaattcgctcatctccggcttcacggtcgtcctgaagctttcgctgtccgcagatttcagtgttgcgggctctgcctttctcgcctatgccgcttgctcgtgttcttcgagatctgtcgttgttttatctgccttggcatcgctgcttggtgctgtgggactgttggatctgtcggtgcagatgaggagccacaagttgtaatgggtaatttgcatctgaggcatctctgtgatgtcacaccctttttcaccttggagatctgatgcacccaatgctccgcctcaagtccatctctgtagcgtcctacagttgttttgatttattttttccccgtcgttgccttttccccgtttcagtatgtctgccttttctctttttctgtctggattcgtgttcttcgatctggattcatctttcaagaagggtgtggttcagtcacgccattggtgctgctgtgtgtggtggtctggagatgaaatgacgatgaaattgtttcccgtaaaaaaaaaaaaaaaaaagcggcc

SEQ ID NO: 65538 - DNA, 258 bp, Zea mays
  Clone ID: MRT4577_159771C.1
cggaattcccattgcaccatgcggtccaacggccaatgcctgaccagcaaccgcgactcgacttaagctaatgtggtggtagacaagtgccggttcttagctacggtccgagtgaacaggcacgtgcccatggaccgtaccaacacgctcaaatggtcaatcggcctggtgatggccgctacctcgtcgactctcttcgcggggctcacggtgcggcacgacgaccgccgcaccagccagtcgtggactacgaccaac

SEQ ID NO: 65539 - DNA, 421 bp, Zea mays
  unsure (1)..(421): unsure at all n locations
  Clone ID: MRT4577_159772C.1
cggaanttcccgggntcggacccacgccccgtccggggaaaggaagccggagaatgaagggcgggaaggcagtcacgccggtgcggcgtagggcccagcgttttgagtgaaaagccgtatnnatagatatatcagtatatanntatatatanntcggcacgaaacatacatannctgttcataanntagtttgaaagtgcctttaaaggtcaacaaggggcatgtgtgtacaagtaagggnnttggcgtccctagggggttagtttgggtgaacccataaaaatggaggggaatctnnataaaggagagatcccgttngttaattcaaaaattaaaataaccaagaaggatcccctctttccataagattcccctcttccatttttctttgtcccacncaaaaccaaccccnntgagtttc

SEQ ID NO: 65540 - DNA, 266 bp, Zea mays
  unsure (1)..(266): unsure at all n locations
  Clone ID: MRT4577_159773C.1
taatggtggcctgcctaccataataaaaataatatataccatgtaagccagacaccaataaacagantctttttacaaacgtgaatcacatccatgntgnccggctaacatggtatatattatctttattgtcgtctcgctaacatgataaatacacatatttttcccaaatactgctctgtcatcacgaacccagacatgttcaaaagccctaactcagacacatacgtcatattctacgaggccaagatcaatattaccccata

SEQ ID NO: 65541 - DNA, 226 bp, Zea mays
  Clone ID: MRT4577_159774C.1
gatcctctaaagacacctcatcgtcctttatctgccccgcctcctctcgtccgtccgcctatttttatagccgggatgagggtacacaaacttctttttaatagcaatgctgatctgcaatcacatcttaaggagtttaaatctgagctctccctgctactcttatccaatgtcaccgtctgatctcccaacaagctctccaagatcaaggttgtgctcaccttca

SEQ ID NO: 65542 - DNA, 356 bp, Zea mays
  Clone ID: MRT4577_159775C.1
tctcaagattcactcaatgttcaatttgcaattctttatcaattcagcattttaggtgcgatgtatgaagtttgctacacaaaaatgcacttaccaactgttcagatagacaacattcaacatacttggacatgcactctctatggtattttaagggatcaaagtctgtttaaggggcatacaagcccgagatgatgcatgagaccaaacatgaagtgtttggactcttcaataatgcatttaactacagaatgcacgctaaatttactcctcttttttctggaaacgtaaagcggtaggttgtataaatacaaacttcacaagcattttttcatgaaggtatttcttatatgtcc

SEQ ID NO: 65543 - DNA, 342 bp, Zea mays
  Clone ID: MRT4577_159776C.1
ataggcgacacaaaggctgttgggtgaccatacttgaatttaatgatccagattcatccatacagggtccataaatatagtggcggtacagcacttaattgtctggctatacataacagcttttaaaggcgcagtcatttaaaacaggcaagttcgcgaacgactaatctcaaaaaccacatgactgcttggcaatttgtacagaaccctgtagaaggagccctacatcacccacactgggggggtgacgccatgcgagggaagctcactgggagaggcgataccgggagaaccgtacggttgttttgatcgtttttggcacttgcgaccggtctaatcccc

SEQ ID NO: 65544 - DNA, 278 bp, Zea mays
  Clone ID: MRT4577_159777C.1
gccacaacctgctccccgacaacccgctctgttacctcaaggacgagccgctggggaggtgtgcctctttgctcaaacacatggactcggacgaccacgactatcagtcatagcacatttacgacgtctatctatatttaatagcacgttgtctactaccgatcgcattcgtatgtagactggctggcactaaaccacaaattctctttacctggattacaaatattttactgttaatggtaaggaaaacaaaaatgtaactgcgtttctgtacctta

SEQ ID NO: 65545 - DNA, 467 bp, Zea mays
  unsure (1)..(467): unsure at all n locations
  Clone ID: MRT4577_159778C.1
aacaccaggaactncagaannncgttttttagtttatcaaagttagccttttttttttgtttgcacatgtaaactgtgatttagtaacactagtttattctcaacctcatatggaagatgggttgttattgacgaaccaaacattgtttgggtgttatgtttttatttttaccagaccaattaaaatatatggttatcctagtatctttccacttccataataaatggatcttctaaagccatagaccctatgagctttacaaaatccatctagagctgaaccttcacaaggtacactgcatgtgcttcagtattataaattgctcaaagagttgtatctgatggaagatctaacctgttgacaagttttgcaatattgtctctctaagtgctcggcgaaccaaccgcttttatatcatgtttttttgcaaaactgcgatgaatgtctaagctcccattacttttac

SEQ ID NO: 65546 - DNA, 336 bp, Zea mays
  Clone ID: MRT4577_159779C.1
cattattgtttatttgtttatttagcgcgcggaggtggccaaatagcgttaattgctacatgttttgttcaaaaagcaaccaaggcatgttaggggcgagccttcaccagcaaggtctctacacgactgtatacaagcatacacagcagggtggggggtgtttgcttaataagagggacctgccggccgggatctacggcggtttgccatacacatccagatagatatgctgcagctcatgatttatctctaatcagacgccctccttgcagggtcaggtttgtctacaccccgtggttattgacaaaccatgaatctgggtgagcttgtttttca

SEQ ID NO: 65547 - DNA, 356 bp, Zea mays
  Clone ID: MRT4577_15977C.1
ccttaaggaaccagtggatagagatcgacaatcaaatacttaacgccctcttcaccctcatgagcttatacgagcacccaaatttcatccaccacactgttctcctctgccggtggctgccagaggacgctgctaagctcaggaaagtttactgcaagaatgagatgccccgtcgaaatgagcgagcacacatatcctttgtggttgccctcctccacatcacttgcttatgccagtatgctgattgtgggctgtactggggctaccccagcacatcacgctctgattgtgccgacaacttcttcttcatgctaagcataactgcaccagtctttgctgggctatacgcagtgtac

SEQ ID NO: 65548 - DNA, 384 bp, Zea mays
  Clone ID: MRT4577_159780C.1
aagggcaacacaccccataaaacaaattggggggcatataacaaatttaaggggtctaaaaacagggggcgaccaaatcagagttccagcccttggagggccttccttggccatgaggaatagcgttttttggccggggggactatacacaccaacatcggggggaccaaaaaacgtttttgaaaggactttttttacgcccgggaatctttggggaaagcaaaagggttttttcgaggggagctgcaaaacatgttaaaggggatccctggatacaaaaaaaggaagcgaacatgactggccctgtttcgttcttgcttttttgcaaactaggaagccatgaatccatgactggcacccttgtaaatgaatccctaaaagaaa

SEQ ID NO: 65549 - DNA, 611 bp, Zea mays
  Clone ID: MRT4577_159781C.1
ggggggggggcccaagggcccaaaaaaaacgggctccaaaggttttttttttccggggggggaacccccaaaaaaaattggttcttttgggggccccctaagaaaaccctcccagtttttttttaaaaacccaacctatttaccccccggggggcccaaaaaaaccctaggggccagcctttaaaaaaccccggggggggcgaaattgtcaaggggcccaaacgggaaaacccccggggggtcccttgtttccgggggaagggttttcccaaagggggagggggaaaaaaaaaaaattttttcccccccaaaaattttcttttcccgggggaccccaaccgaaaacccggccggaaattttggcccaaaaagggggaccttcagcccttggacatgggccggccaaaaaaaaaccccgggtcccgaaagggaaatacctcccccgggacaaaaaacgggaaacaccctcccaaaaccgggttttaggatttttccgggaatgggaaatttggcttccctagaccccaaataataccaattttaaaaagccccggcccaaatcccggcgcccggggggacccccctattttaaaaggggccccccccggggg

SEQ ID NO: 65550 - DNA, 758 bp, Zea mays
  Clone ID: MRT4577_159782C.1
tggtacacatcgcacatcgcagcaagtacacagctgatcacacgacgatcgcgatcggttgctagctgtcaagtgtgagtccatatccatcgatcgaccatgaggtcctccacgcttgcagttgcagttgcagcagcggttcttgtcctctccgtgctcgtcgcgtccggtggcgcggcagcgcggcgatcggtggtgatgaggcagggcggcagcaaccctggcgccagcgccgtgctgcaggatcgcgtcgccatggcggtgcagtcgacgagcacaaattcctcggcgcagccgtccaactgcacctacgggcacaactccggcggcgtgtgccctccgactcctcccgctcccggtgcaggccactagccactagcagtagcaggctagcagcaagttcccagccaggcagccagccacccgccggaaatgcctcggctggactgctgcccagatttccgcgttacaacagacatttcgtatgtagcttcgagtcggcccaataaatccctagagcccagatcgttactcttgtgtactggagtatgtattttgacgtatgaacaggctgggcctgttggccgatctcgtagcccataggcttcagcccctacagacacaggtttatcaatgggtgttatttttttatttcgctcaaacaaacggttgttttacatggagagagagaatggcaatagcttcgccgacgaatgtattgttgctatacatgtcaatatgggccgaccttttggacg

SEQ ID NO: 65551 - DNA, 373 bp, Zea mays
  Clone ID: MRT4577_159783C.1
ttgacaccgggaccggtgggccaaccccgggggatctatccgtgggaacccgggagtttgcgctggcagacggaaagtctcagaaacgtggcaacgagggaggcgacagcacggcggaggcggggagcgcacgatatgctaacaagaggaggacaaacaaagaacgctggcggaccgctagcacatcataacaaagaactggaagacacacatggaccggattgacatgaaacgcaggaccaacagactatacataatcaacctgagaaagacatggcataagttccagctcgcagcgagaggaatggaggccgttgacaacggacaagacaagactgtacagagggacgggcgatacgggcagcgagccggc

SEQ ID NO: 65552 - DNA, 576 bp, Zea mays
  unsure (1)..(576): unsure at all n locations
  Clone ID: MRT4577_159784C.1
ggccggnaagcacacacggcactngaagcaaattaaaactgcttgctagctcggagagatcgagcagcagctatgggggaaaacaagggcagccgcagcgcaattgccgtgctcctggtcctggtgatggccttgggcttcttcgccgggcaatcctcggcacgtagctggactgacttcgccagtctcatccaaggaggagcagcggcggaatcggcggacgaactctgcaaggactgcgactgtcccttaaccggtggctgcgtgtgctacgacaccttcgcttcgtgtcccaacttctgctctggttgctggtgctctaagacgaaggctgaatgccaatgcgttaactatgtcgagaagaagtggtgtgctgcaccacctgcaaccacggtgcagaagaaaccggtcagcgatgccctctactaatccagcgcgttcctcttcctccccggccgttcccggccacctagcgtcgcgcccggcggggccgtatcgactgcgtgccgaccaaagttagtacaccatgtatcttgagagtggagggttcaataaattaaagcatgcatcatgtgt

SEQ ID NO: 65553 - DNA, 168 bp, Zea mays
  Clone ID: MRT4577_159785C.1
atcatgtggtggtgatggtgaatcatcaagatggtatagagcacttctgttggaccgaagttgagggaccattattgctgatttggtgcacctggcattaatgtcagtaactcagtgtcacaggcagcaagtgagccagagttactaggctcatggtgttgcagtggc

SEQ ID NO: 65554 - DNA, 282 bp, Zea mays
  Clone ID: MRT4577_159786C.1
cccacgcgtgcgcagacgcttcagcagtaactccatttgttaaagcatctgcttcagcctacgtctagccggacgttcagtcactcgagcgatcacggacttcgtcatgggctgcgccatcaggagcgcgctggcgatcgcgtcgcaggtggtgtcgcacgccctggtgatggactgcgacacggtgtggcacaccgtggcgtccaacgtcgtctccagcgcgcaggccagggcgcacgacgtggagggcgacagcggcatgcacagcatcttgaacttaaa

SEQ ID NO: 65555 - DNA, 349 bp, Zea mays
  Clone ID: MRT4577_159787C.1
cagagggctcaaggcaggctcgggattgagatattgcagacatcactaacaacctcagcatgagcgagtcttgtggtcataaatacacagttgggtcaacaacaacatcgtgacacgcatcgataacatacggtcacgagcacggccccagacaatgctaaaccccctctagactggggtgaacacggcagctgctgccaacatgataacttggcctcagccgaccccaccgatgagtttctaccagttcccgaacttcgttgccgtagccgacgccgcggtttgcaccaccgtatctccccaccgccgctcaagcctgcacgaccaccgtcgtatgctgcatcgccac

SEQ ID NO: 65556 - DNA, 398 bp, Zea mays
  unsure (1)..(398): unsure at all n locations
  Clone ID: MRT4577_159788C.1
tcccggcgagcacgactcctatactagcctggcgtccacccccgctcgtggggcttcaaatactctcccgcccctccacctccccgtgccccgccgcctcgctcccgaggtcctcccacgccgcgccccacatccgccggggccgccgcgccgtcnccgtcnctttctccttcaccnantcccccaggggcttgtangggggnnacnccatcnccnnnctcaccctcnagggggggggggggctaaacnaccacctncaaaancnnctcnnnntnaccgccnnngncttcnccccggccgccgtcntcncnncgcccggggcgggcgggagngccccggccgaggaggaggcccccggggggaagacngagttgnactttttttttcaagaggtgccc

SEQ ID NO: 65557 - DNA, 277 bp, Zea mays
  Clone ID: MRT4577_159789C.1
cctaagctcctatcctctatattctacccactttttctatttaatcccccttggtaccaaaagagaacttttatacccaccaaggttacctctccacaatctctttctatcttccaattttccaatgtcataaactaactacattattaccttatctctaatactcatactttcaattaatcttaccattacacatacaacaattaatctttatacatattatttttatttttttttatctcaataattttaccattcttttcttaatttcatactt

SEQ ID NO: 65558 - DNA, 235 bp, Zea mays
  Clone ID: MRT4577_15978C.1
tcttcctgaagagcgtctagtctcataagagagcccaaagctacatgtgctcgatggtagaaaacatggataataactagccgaccgtgtgcgccaagtacagggagggcgtggacaaagccaggctcatgctccgagccctaattgacaaggagagcagcgccccgataatgctgcgactgatgtagatctccaagatatcggtcgtcgtagaggaaaggaccggcatgacatt

SEQ ID NO: 65559 - DNA, 469 bp, Zea mays
  Clone ID: MRT4577_159791C.1
ctcggcgcgccattcccggatcgacggacgggtgcacgcgtccgagactctatcggatgagcacgaggtcaagatgtccaagatcaaggactccggtgatagaaggatcatgcggaggtcggagagatagtctcacgtcccaagggcacctgcggcaacactcatgtttagctactgctcctgctgcaactgaccagagatggctattaaattctgaggctaatccactaattctaggacctaattttggtgctctccaactctcttgctcttacataccctagctgtgacatttctgaaataacatcttacacttgtccgtgccaagatttatgtcgaaccaattttcacagatacctgctgaatgcttctgtgtaacccagttctgattgggctattttaccgtgtagatctggctcctgtaggtacaattcaagctttactgcttcaatctgccaaactagaatat

SEQ ID NO: 65560 - DNA, 150 bp, Zea mays
  Clone ID: MRT4577_159792C.1
accagctccgctccgagctctctgctcgccccatggcgtccggccgagctcctcctatgccgacgttgttccctgccgcgctcgtacccatggcgtttctctctccacgctgatctctatatctctgctaggcaattcctcacgtcatgc

SEQ ID NO: 65561 - DNA, 271 bp, Zea mays
  Clone ID: MRT4577_159793C.1
tcggcctagccttgctccgagcggtcgttgcggcgactgccacgatgatggactgcgctggaggccgagaccccgtggaggacttcctcctcggcggcgccggctcctgctacgacggagatctcgtcgccgtcttctgcgacggcggggccggtgacggacgactcggcattgagggtatccatcgagatgcttgtggatttgagcaatctaattcggggaacaggggcagagatgaaccctgatcatctcgtccaacctcccaagcttg

SEQ ID NO: 65562 - DNA, 253 bp, Zea mays
  unsure (1)..(253): unsure at all n locations
  Clone ID: MRT4577_159794C.1
gagcaaactgggggactgnnaacaaaagatcaaggagttcgtccgatacaaaaccaatcaaaacacccacagttttgggccttcaattcattataccaagcaagaccagttgaccgcaattattattctaaaccttccagcctaacctaaacacgttggctaactaaaaattctattgggcccttaaccgtattaccaaaccgaaaggcccaaggatcaaaaaaacttgttaggggaggacgccttaaacggg

SEQ ID NO: 65563 - DNA, 260 bp, Zea mays
  Clone ID: MRT4577_159795C.1
aataccaacatgcaacatcaaacgttttttacaacatcaacaacaacctaacaacgagggctactatatttttcttcctcactccccttgctgcgcttacatctatcgcaacaactacatttattattcaacaatgataacctgctataacttccattattacacaataccttccattaattatttcaatagtctgtgaacacccagctctgcaatcatataggctacaacaagcaatcgcatcaagcaacatacaacaa

SEQ ID NO: 65564 - DNA, 1678 bp, Zea mays
  Clone ID: MRT4577_159796C.1
gggcaatagaagtgtcaccacaggttgatacttcacaggtatctaaatcacctgatggaggtaaacctgagcaaactgatgttttgattggttcaaatcaaccagatacagtacataaaaaatcctcagatccaccagagacatctgtagcaaaggacatagatcttcctgccctggtcacatcatctggaacacaaactgaggctgacaccccaaatgatgaagcaccaactgcaattgaggcaaatgattcttcctccaatgacgatgaaagagattcaggagcagatacaccagaacaactgtctagtggaggtgaaaatgagaaatcttcactatctgagagtgaaaagaatgatacaccaagagaaggtgctaaagagacaacaagtaaactttctgctgctgcggctccattcaatccatccagcgtaccagcttttggttcaatggctgtcccaggtttcagagaacatggagggctattgccatcaccagccaatgtgccccctatgctgtccatccctctccgcaagcaccctcaccaatctgcaactgcaagggtaccttatggtccacgtctggctggaggctacaatagatcagggcaccgaggacttcgtaagaagcctgtgttgacaagtggtgaggcccctacagaaacaaacacgtctggccccaggattatgaaccctaacgccccagagtttgttccaggtcaatctcggagtcctaatggccatccagcatctccaaatggtcctttagcatctccaggtggtattccatcttcaccacaggaccttctatcctctccagatagtaccttggaatcaccagtaactgcatccccacaagtttctgaatgtagccagattagtcctgaaggagatgttgagggtgggggtgtaaagcagaacatggatgacacgaaccacccagaaagtaaagatggtgaagtggagcctgagcaaaccaaagctcctgaaggtacagaagaaggcgcagcggtaaaagatgctgctgaagagttgattgcagccgagcagcccaaatcctgggctgactacagcgatggagaggttgaggtcgttgaggttgcaagctaatgaaaatacgaccttctcagatagccaacacagagtggaatttttatttctcgaacagatgagcatttctccttctcaatagatggtgcatttttttacagtgcgggcttctcccgctgtattttctgctaaagaaaagatgctgcttttttggggatagactgaattgccttccagtggcattcaatgacctttgggacttgaaattttgaagactttccagaatgtgtcagcctttgggatttggcatttcttcatctatttttttgctgcgaagaattttggggaataagagcacctcaaagtatcagcaggggagatacggcgttaacatttcatcatttccccatcttgctcctgatttcccccccttggtgaatgtactgtcgacttaacgtctttcatagttatttctttgttacaataaatagactttttgaaccatgtataaaatataaagcaagtgattttatctttccacacttgcggataaaccgagcttgtatagcatcgaaaattcgagatcgaactaaagaaagcttcctattgaatttcgcttttaacactat

SEQ ID NO: 65565 - DNA, 1335 bp, Zea mays
  unsure (1)..(1335): unsure at all n locations
  Clone ID: MRT4577_159797C.1
gtactgtttctactgtttcttgctagtctttcgattgcttgcaggacgagtgccntagtggccagggtgtcacgctccacaagatcgtgacagccataggaggtggtgtatcggttgctaaggcgcagcgtctttgaaaggctgtagtcgggccgtgaacgtcgtctcctccnccaatcgagttattccacaccctctcatcgaaagatcgggcaatcacncaacgggtgcgccacactcgctagctccccccggttgtacaggcgacgagagcttcattgtctgccgccttcttctacctcgcgtccgttagtatggtcagcctccgagcggtcttggtgaactcactgaaaggctcgtcgccggcgtgcttgagcgctccagaagcgccgtcgcggtagaagacatggctcgtcagctcggccctgtcgacgccgaacatgtcggccagcctctggtagagctcctcgtacgacgcgacagccgagaggtcgagcgtgcgcccgacgtcctccgactgcatgaacaccttgcagtgcccgaggagatcgtcgtcatcagtcgccgtcgccgccgccttgttgtcctggcacgacgacggggcgcctccactgatggacggcgtgctcccactcccagtcccagctgggctcgaggcatccgagttgttgctcatcgttatctcagtctcagcaacgtcgccggacgggctcttcttcggcgccggcagcggccggaagcctagagatatctgctgctcggtgagaatcggtttcccaaacagcatcagctgcggcgccggcgccgccgcggccgacttgacgtctgatggtttcttgtgcggggcggtgccaatggtgagcaagcacgagatgtcgtcccgagctgccgggtggccgacgatgaggccgccggcgatcctcggccgcgcgccgtggtcgagctggtggcgaagcccgtgcgcgtgcggcgatagactcgactgcagcctggtgaggtggtggagatctggtaaacatatgccgaattgcgcatgcctggctccctgtatgcctgcaggaggagtgccgccgtccgggaagtagcgcatcggcccaacaccacggcccaccagagggcttccgtggaacatcggcgccgggagctggtggccctccgggtacaatgggatacacagcttcttcctgcttggcggcgagaacggcgtgaggtggtggatggccggcgtgcttgagacaagctcgaccagccatgggctcactctcttcacgttctgtaacaagtccggctcatcccaggcgacctggagaagcctccagggtgaattgggccatc

SEQ ID NO: 65566 - DNA, 182 bp, Zea mays
  unsure (1)..(182): unsure at all n locations
  Clone ID: MRT4577_159798C.1
aaaaaaaaaaaaacaaaaaacattggggccttccgcctcctctttgtgacacgcctccgccggcgggacagggtggctgaatanaccctagnnctaaacccccacgcggcgccgcggcganncctcctccgnnccggcgggatgggnnacagcctcaggnnggagtcaagcntnngccgggc

SEQ ID NO: 65567 - DNA, 190 bp, Zea mays
  Clone ID: MRT4577_159799C.1
tcgggttaagctccactccagttccaatcacagtcgggaccaaagcgcgagagctagctagagggccgtgaaaatgccgatcaataggatcgccctggggagccaccagagtgtacacccggcgcctaaggggttcgtggtcattcaccctattgttgcgcagtcgtgctaaggcgggccccggcggggg

SEQ ID NO: 65568 - DNA, 497 bp, Zea mays
  unsure (1)..(497): unsure at all n locations
  Clone ID: MRT4577_15979C.1
accccgggaaaaataacatggaaatatatagaatcaatttccatctctcaccccatgaatttgagataggcttatataaaaactttgggaagggggggattggctancttaaaaaaaagcccattgcattaggaagaggccaatttttcgaaacgaaacgaaacaaacggggcctaaaaaaaaaggattatattatattatatggggtttggattcagggcaaataatgcgggggggggtatgccacgggccctccctaaaaaaagagggccccccccaccaacccggaaagggcgaaggggggggccaccgcgaacgggatgccccaagaaaggaagcccaacttgagctggatggggtccaccctggagagcaacaagaaaaaggggcccctgggggagcacccggcggggagcaaaattatgggctgggcgaacctgagcacggggcggggcctttcccttggcccgggggggcgccatgccggcattttcttg

SEQ ID NO: 65569 - DNA, 415 bp, Zea mays
  Clone ID: MRT4577_1597C.1
aacccaaaaattattgggaaccaagggcaggtttgctacatgattcaaattttcttgaactttaactgtttatctaaagaatttataaatggtatccgggggacgaacacccctagattcacccatgaaatccaagttttgtgtccgcgcaaagatcgagacatatgaatgagcctacccgcactatcctacagatttgtttgtttagaagccaccatgccaataaccactttcctggtgaggagcggactttaaatcccttggcttggcagggtcaacgaaaattacccatccatacaagaacttggtgtatatcatgctggcgcgctctgtgggcctcttttatggcgggatatctgacaaaacctaaaccctttgacctcccataaactataatgcctaccattatttgttc

SEQ ID NO: 65570 - DNA, 2269 bp, Zea mays
  Clone ID: MRT4577_159800C.1
acgagggggaaggccgccagggtgtgggtgcggccagaggaggtcgtcgaggcgcgctaacctggccgtgagcgggcagccgttcgaggtggtgtactacccgagggcgagcacgccagagttctgcgtcaaggcggggggggtgcgcgccgccatgcgcacccagtggtgccccgggatgaggttcaagatggccttcgagacggaggactcgtcccggatcagctggttcatgggcactgtctccgccgtgcacgtcgctgaccccatccgatggcccaattcaccctggaggcttctccaggtcgcctgggatgagccggacctgttacagaacgtgaagagggtgagcccatggctggttgagctggtgtcgaacatgccggtcatccatcacctcacagccacgcccttctcgccgcccaggaagaagctgtgcgtcccactgtacccggagcttccgctggagggccagttcccggcgccgatgttccacggaagccccctcctcggccgtggcggcgccggtggcccgatgtgctacttcccggacggcactcctgcaggcatacagggagccaggcatgctcaattcggcatatccttatcagatctccacctgaacaagctgcagccgggcctgtcaccgcacgggctccaccgccagctcgaccacggcgtgcaggtgcaggtgcagcagccgaggatcgccgccgggctcatcgtcggcggccacccggcggcccgagacgacgtctcgtgtctgctcaccatcggcaccccaaagagcaagaagccaccgtcagacgtcaagaaggcgtccacggcggcggcaccgcagctgatgctcttcgggaaagcgatcctcaccgagcagcagatatcgctaggcggcggcaatgtcgtgccggcgctgctggcgaagaagagcccctccgacgacgacgacgacgtggccgagaggacggtgagcaactcggacgtgtcgagccctgggaggagcaaccaggacggcacgtccagtggcggaggcccggcggcgcgggcgtgctggcaggaggaggagtgcaacaacagggcggcaggttctgaggacgacctcctcgggcactgcaaggtgttcatgcagtcggaggacgtcgggcgcacgctggacctctccgccgtcgcgtcgtacgaggagctctaccagaggctcgccgacatgttcggcgtcgacaaggccgagctgaccagccacgtgttctaccgcgacgacgcttccggagcgctcaagcaccctggcgacgagcctttcagtgagttcaccaagaccgcccggaggctgaccatactgacggacgagagcagcgacagcttagcgaggtagagtccagtctcaaggagacggcggttcggcagtttcggttgggagtgggaggcgccccggaacgggagcgcgtgcgtgcgtctgatccaggaccaaagatttgtcggactagtagctctacagtagtggagtacgtacgtacaccttgatgctgctgcttctgctgtcagttcaagtggccataaccataatgcagctgcctttggtcacagtgactgatcggatgtgttgtgtacatcggaccgttgatttgcgaacgcgattactgaaagattattattatttttttgtatttttgatataactaaggtgctttggttcaatgaagctctcgtcgcctgtacaaccggggggagctagcgaaccgcggcggcgatctcgaaggacgatccccccttgcaaagtgctggtgcagactgcaaaaagggcggtgctgctgtcgtgtcggtcgtttcttatcagctcttttgttgcctgcaaaatgaatttaaagaatgtgctctgtccccctgcccagaatgtgctctgtcacgctgccacgtcagtcagtcagcacgcagttgctaccgcaccaccggtactgttctactgcttgtggcgatccatgccctgtcgttgttcctgttgcgggggagccctggcaggcgtgcgtagtgcgagcgccccggatgccgtgccatttcaccagccaggccgcgccgtgctgcttctagcggtccttgtgtgcacggcgtacgttgttcagtgatctttcctggagtgtccaagtactctcgtgcctactgtcccacggtctgcttttcatcctctctaatatatgttcatctctgtacacgagcgaaaagcgtgaacagtagaggaggaagatcactaaacagaaaaaaatataaaattttgtgt

SEQ ID NO: 65571 - DNA, 245 bp, Zea mays
  Clone ID: MRT4577_159801C.1
atgtccagaacgcgcccttagcgagaaaaaaaaacgaggtacaaatctttgtggaaatatactatagacaaaccgaacctacttctgattcatgaatatttggagaaattttttttatccatccctctctatctatctatgtcataatgcagtacgacgacacacattaggatgtgtggtttgaccaataatatatgcctcataataaagttttggttttaaagaattaataacacagcccctat

SEQ ID NO: 65572 - DNA, 388 bp, Zea mays
  Clone ID: MRT4577_159802C.1
cacacaggtcactactgcatctgaagatgatcaattggtgctgtcccagatcaccgaccattgcgcatactgccgtatggtcgctcgtcgctttcttgttcgtggcgtggctggcaccttttgacctagcgagagcgagagcaatgacgtcggaagtttacgctatgtcctccgagcacatgttcccggcttactagctgtagcatcagctgttcaactctgagcacatggagtctctaccggtgtaggagcacacgatggacgcgctgatggaggtcatcgttcacgactatcaagggcgccatcaaagtaagagacatggtggtgctcgtgaacggtggacactcttgcattgggcgcgccgggtgccattgcttcgtaaaggaag

SEQ ID NO: 65573 - DNA, 800 bp, Zea mays
  Clone ID: MRT4577_159803C.1
gaagaagaaaaaaggatgccgcaacagaacactacccattccgggaacttcctggcaagctaggtggtctggtcacacgtcacgtctaagcaaacacaagcaagtttgaaatggcggcgagagctagggcagcggcgccgttctggctcctggccgcggccgcggtcacgctgctggtggcggcggcgtccgcgcagtccggcggcagcagcagcgacgactgcacgtcggcgctggtgagcctgtccccgtgcatgggctacatcagcggcaacggcacgtcggcgcccagcgcgtcgtgctgctcgcagctcaaggccgtggtgcagtccaaaccgcagtgcctctgcgccgccctcggcagcgacgcctcgtcctccctcggcggcgtcaccatcgaccggtcgcgcgcgctcggcctccccgcggcttgcaacgtacagaccccacccgtcagccagtgcaacaacgggtcgtcgggcggcggatcgaaggcgacgcctttcctgccatctggtggtgcgtcgctcggggggccggcggctcttgtgctcgggctcgccgcggctgctgtttacgccgtggcagctacgtgagcgtttgtgttgtgtgattcagggatcaggatgcgttgcgtcgtgtcaactttcgcttttcagaacgggcaggggggattttgagtgctttgtgtctatggctttgtcgcatttgtgaaattggttgattcggtctacggtcgcaataaatttgccgtaatggtttcccttaaaaaaaaaaaaaaaaaaaaagggcggccgaaa

SEQ ID NO: 65574 - DNA, 146 bp, Zea mays
  Clone ID: MRT4577_159804C.1
gcaggggaaataacatctttatttccctcataaaaggggggttcaaggttactttgccgggccaaaagccttgtgggaaaatattccccaactttcgggcagacagaaagtgtttaattagacccctcccggggggattacaccct

SEQ ID NO: 65575 - DNA, 331 bp, Zea mays
  Clone ID: MRT4577_159805C.1
ctcgagaagacacctgctcctcgccgatcgatacgatggccgtcttcttcgaccttcacaccgccgacggccttaagtccctcgaggctcacctcgccggcaaaacctatgtgtctggtgactccattactaaagatgacattaagggcttcgccggggtgccctccaaacccggcgcttagttttcttaatgccgcccggtggtacgagaccgtttctgcggctgtagcctcaaggttcgatttgtttctctaattgcaaatttataggtgtagtgggttgatgtctttcactggccgcaggttttatttatttcactgattgcacattt

SEQ ID NO: 65576 - DNA, 479 bp, Zea mays
  Clone ID: MRT4577_159806C.1
ggcgacatcaagcccagcaacatcatgctggacgacgcgctcggcgccaagctcggcgacttcggcctggcccggcttggcgaccacggcgggcgctggcacaccaccaacgccgtgctgggcaccgcgggctacatcgacccggagttcgtcaacacgcggcacccgagcacccactccgacgtctacagcttcggtatcgtcctcctcgaggtcgtctccggccgggccccggtggtcctgcggcaggacgagccgcccttcgttctgctcaagtgggtgtggggcctgtacggccggaacgcgatcctcgacgcggcggaccagcggctgagggccggcgacgggctccatgtccacgaccagtgtatggagagggtgctggtcgtcgggctgtggtgcgcgcaccctgaccaaagcgagcggccgtccatcgcacaggccatgcacatcctgcaggcggaagacgccaggctccc

SEQ ID NO: 65577 - DNA, 259 bp, Zea mays
  Clone ID: MRT4577_159807C.1
gaaggccacggggaggagttcgtggagatcggcgcgggagaccttgtcgtcttccccaagggcatgagctgcacctgggacgtcgccgaggccgtcgacaagcactacaacttcgagtagccgccgccgccaactagccctgcggcgctcgatgtagacttgctgtgctcttgggccctgtttttttcagcttttttctgaccagctttttcgagaatctagctgtggggagaatctggctgtatagagaatctgaata

SEQ ID NO: 65578 - DNA, 577 bp, Zea mays
  unsure (1)..(577): unsure at all n locations
  Clone ID: MRT4577_159808C.1
accccgacatcttcgtcggaatctttccaaatcttcccgactactcctgctccatttccgggtcaatttttttttggtttcgtccggccggcacagcagcctgctttgctcgcgatcgaccagtgttttcctagttgctcatcccctccaccccaccttgtggccccgtgtccggctctccaaccgcaacggcgacggcgaggagttccaccccttggccgcctatgaaatgatgtgctcttgatgcggtttacggccacgaagaaattactgaaccgaaccaaggcgcactcgaattccctcaggattaaccccgcttcgatgtgaagcgacgcagagcagagcgccaaattatggtcttctccttctccccatcatctggacagcaggaagaaggcatccattgggcgccgctcgtacggcggcgccggtctctatgctgctgctgctgctccacctgtcgccgcgcgcggttcctgccgggaccgggacaggcgacgaggcagcggcgctgctcgtgttcaagcgcgcctncgtagccgncgaccccgncggcaggctcgcgagctgggcggag

SEQ ID NO: 65579 - DNA, 310 bp, Zea mays
  Clone ID: MRT4577_159809C.1
taccctgaaaaaactgatgcctccgtagatggtgaaactgctaccggtactcctcggttagatttcggtcggtttattacttctgatgggcataatactgttggttcaaccaccgaaggaagtgttcaagacggtgatatgattgtaaatcttagttctataaagactagccttcaaacggataacggtttgagcgtaccacaacttctccatcagataagcaatggtactgaagtttcaagctcagaaaaacgggaagcattgcagcagttggttgatgcttcccttgataacaacacctccatttggg

SEQ ID NO: 65580 - DNA, 1516 bp, Zea mays
  Clone ID: MRT4577_15980C.1
cattgggtacctcgaggccggccgggccggtcccgtctcctccacctttcactttccagttcaagtcaaaccacgttcctcgcggtcgcggaggctcacgccaagctcgctaaccgctcccctcctccctcactccctcgtctctccccccgaatcctcgtcgtcctcgacacccaaagcccaaaccctagcacgggcagcggagctgcgtcgggcgaatggacctgcagctgcatgtcttctacagggcgctcgggctctcgttcgtcggcggcctcagcaccgccgtcggtgcactgtttgtcgttttgaatcctgcccctaaccttaaagtgctcgggcttctacagggttttgctgctggacttatgctcagcatctcctttctagacctggcacacaatgccctgaattctattggcttcttgaaggggaacctctggttttttgcaggggttcttttctttggtttcattattaagtttattccagagccagatttttcgccaccagctgatccaagcgagaaagaggctgatgatggtggatcaggtaaagatatgatgagaaaacatcgccggcaagtgctattcagtggtattatcactgctgttggaattagcttgcataatcttccagagggaatggctgtatttcttggatctgtcaagggtcttcatgtgggcctgaacttggctgttgctattgccttacataacataccagagggggttgctgtagctcttccaatctattttgctaccaaaagcaaaaaaaaggcattttatacggcagcattctctggtttggctgaaccactaggagtggttgctgtagctttgttgtttccaagcagtttgaatcctgacattcttgaaggcctacttggatctgtgggtggtgtcatggctttcctcactttgcatgaaatgctgcctcttgcatttgactattgtggccagaagcaagctgtcaaagctgtctttgtgggcatggcctgcatgtctgcaagcttgtacttcttggaagtcagcttaccaaaggagataagcttgtagcatcgcgctgcaggtactgggaggccatagcctgtcagtagatcctgaattctaggaggaggaacagcacaataaaaccatgaacagtgactactggtgtgccgccattgatattgtccatcttaccgtgaaaggagggagaaactgcatttccccagaatgtattccccagattcctcgtgggaccatatgaaagaattgaaaaatgtactgtagtactctgtcgtccggcaatggaagcttcgaagtcgtcaactaaactatttctagcactctcgtcggttgacaatggaagattctatgtaaaaacccatcagatagatgttaacctttaatctttaatttcttaaaagtacattgaaataagatactttgctttcaaacaccccctatatttagtttgaaccagtacacatctcccttgtctgaattgaaacacgtacaagctgccaaaggtc

SEQ ID NO: 65581 - DNA, 141 bp, Zea mays
  Clone ID: MRT4577_159810C.1
aaacatagtgcgcagtgatgtttttattcaaaacggcgagaggaacgccctcttttaattgataacgcgctcatttggagtacaaagtgtggggatgcataacaagggaaattgtaccctcactttaagggggggtcactt

SEQ ID NO: 65582 - DNA, 1769 bp, Zea mays
  Clone ID: MRT4577_159811C.1
tttttttttttttttttgtctgaaacgcaaatatcattgagaattcatcgtagtgttcacttcaaaattctgttgagtctgcggaaagctaacaaactgtttagtcctgttattcacaagtagcaacatatttcccacaaagggcacaagataaaaaaaataaggcacacagcaaacatcaattgtcatgtgtgatcataatactggtcgtcatttgttgatcgttgctccctcaagatagctagtgaacaaggctaagagatctattccacttgcatctgtgctccacggttctttgtttgcaaaagcgactagatcggatggaagcgcaaaaatggagagcaacttcgcaacaatcttccattgtagtactgctcaagatgatgttccctcgccaggctctcgaatttggatggaagttctcgacaggcttgcttcaagttcattcaattcatcaatgtctaagtcatcgtcaacatcgatatcatcgtcgtcaggctcctcaacctccttgccattagatgttgatgaacttggacctggattctgacttttattggtcgattcttcattggcctcagactcctctctctcatatacttcatatgcttcagcatcatcaacaaacacacttgcgtcagccatgaacaactcacggccactcatgcgatcattcttagccctctctgctttcaaggcagcctgaccagcttctctttcttctgccttcctcctcttccattccatgaacaattccgttgtcataggggttgtagtctttgtctttttacgctgatcttcaatctcatcttcaatagctatcttctcactctcttcctctagtaaggccttcatttgtgatttcagtacgtatccaggcggaagggcatgcctgtaatggcactctttgccgccatttgggcaaacccagaaccatccatactgtttcttctccacagcatcaagaaagtacttgcagacaatatcggtaggtttgttttgctgatactccatctttttggattcaacaaccttctcaagagtttcctgatcccagtcctccatggtttctgcatcacgcttgtctgtatagatatcaatcttttcacccttcctctggacattcaggtcatgagagaatttgcacttaaaacccttctggcactggccagccttgaagaactcacacaatattgacttgggatcaacaccaacagggaccttgggctggctgacggcaaccttgaacagatcattaagctccttctcgcgcgccttctcctcctccttcttcttcttggcggcggtcttggtcgagtcaggcttgggctggacggcctggtgcagggactggacgtacttttggacgttcttgctcttattcttgttcttcagcccgaaggtcttgtcctccacgaccttctgcttcttggccagctccgccttcgatggcgccgctttctttggcggcatcctacccccttagtccaattcccgtcctcacgaaggttggtccgggtccgggactaagcggcgggaggatgaggaagcggcggcgaggcaggagggtttcgtgggtttgggtctggctcctgcggtcctgcctgagctgggggagggaaagacggaggcgaggaggaaggttctagagatggtggtggcctggtatgtggtctcgccccggcttgcggaaatgggattggatcctgtattagcaaagtaagggctgaggaagcggcggcgcggcccgggggtttcggaggtttgcg

SEQ ID NO: 65583 - DNA, 717 bp, Zea mays
  Clone ID: MRT4577_159812C.1
gcaccagcctccaatttcccagcaggtaactcccctcatcctccatatctccaccgtgatcggaactaagaaagagaaaccaaatgtgccacgcgacacggtacggatccagcaatgtcgtttggccactcctaccgaggacaccctgcagcaactaagctacaacgagatgcatctacggcttccatctccgtttccgtcaccagatcgacacccttggttgcggcatgactatctccatctacctgcccccgaacccggagaacaaccttaccgagctgtactgaatcacgggtcccacctgcaccgaaaagaatttcatcattaagaccgctgcctagctcgccgccgaatgactgcggaataaccctcgagtacctttacacctccccacgtcgtgtttagatattgaaggaaagaaatacatctatcatttagacgggagtgccgccatttatttgaatgccacaaatgacatgtggaaccactggcgcatgcatgactacattgtgaaggaacttccaaaagttattagtgataaatttgaacaactcaacacgatagatgtatcatcttttgggcactcaactgtgcaaggcatgaagctcatgacaaaatacttgaagaagccttgataaatacaataactcggatataatttgcttccaattgccaatccgcataaactgcccttgaagttgaaaaagccatctccaa

SEQ ID NO: 65584 - DNA, 237 bp, Zea mays
  Clone ID: MRT4577_159813C.1
ttcccgggggcggagtatttgctgacgctgggttttcaaatgttacaaagaattttttggctgtcctggcggacaatggcaggggggggcatattggacgcggggggggagagatttgttgatttgactatggaacataagggggagatgaaggttgggggcaggacagttatggcactcaccaaggaggaggagaaagaactgaaggaaaccttgcgggatatgtctggggaaaac

SEQ ID NO: 65585 - DNA, 342 bp, Zea mays
  Clone ID: MRT4577_159814C.1
gttctgtcaccttacgcatcgcatgctcgaatttaacttctccggcaccaaggccagcaagcagggccgtggcctcttaatccttgccgccgtccacacatgctttctccttcttctcgtcccagactgctatgacgccaccaacgtccatcactgcagtaaaaaggagtatccactgatggagaacggcgtgcatatcgtcctctacccagtagagcccggcaagcccacaactttcaatatctccgctgctactgataaacccatcgataatgtgaagctgctgatcaacgacaagtactccttgtaatacgtacactccgaaactcgccacatttacgg

SEQ ID NO: 65586 - DNA, 704 bp, Zea mays
  Clone ID: MRT4577_159815C.1
ccgggatgtcaagcaccatctaccttaatgtcttgatacgtaacagagcagtaaaaaaagcagccgcaatggcgagcagcaccatggccctctcctccactgcttcgccggcaaggtcgtgaacgtgtcgtcgtcgagcgccttcggggaggtcagagtgacgatgagtaagatggcgtggaaggcctagtcggcggccgtgtcacgttgcgctgaacggccgcgaggtcaacgccatacttatgcagcgtgtggtcaaggtcgacgggatggttcgcactgacagcaccttccccactggattgatggacgtcatctccattgagaagactggcgagaacttccgtctgatctacgacaccaagggccgcttcaccgtccacaggataacagacgaggaagcacaatacaagctcggcaaggtcaagcgtgttcagcttggcaagggcggaattccctacttggttacgcacgatgcgcgaacgatccgttaccccgaccccgctatcaaggtcaacgataccgtcaaggtcgacctcgccactggcaagatctccgacttcatcaagttcgacactggcgtcatcgtcatggtcactggtggtcgtaacatgggccgtgttggtgtcatcacccaccgtgagcgccacgacggaggcttcaacattgtccacatcaaggacgctgttgacaacgagctcacc

SEQ ID NO: 65587 - DNA, 196 bp, Zea mays
  Clone ID: MRT4577_159816C.1
cagtcgggggggagtcaagtgtgcaagggcactctccacggactgaacattcgtcttacctgaaagcatatgtcttcagtctaataattctaggggcatggaactgaaaaaaaaatccatttcctttgagaaaacagcatctaatgccacagttggtaacacctaaactctgagttctaacagaccgacagcaacg

SEQ ID NO: 65588 - DNA, 557 bp, Zea mays
  unsure (1)..(557): unsure at all n locations
  Clone ID: MRT4577_159817C.1
cccgggnacttcctttcgcgcgctcgcttccgcctccgcccccgcggcttcgtcgtacgtcgacacctgcacctacacgggcgcgcccatggcaacgcggaccgccgtgggagaggagtcatcggcggcggcgcgccgcctccaccgcctatgcctgcatctcattcagtcgaccagggcaagacctatctatgtcatcaatggctgaccatgaactgtagaaaattcagtgataaaaggttcctagtgttaatactgttggtgtgtgaattgattctgattatgattgtattctatacattgtgctgaattttgtcataatactctcgtttgattatattatctgaggatagatgtgagaaacgtgattttggtagaaatctgtatagctgagtatctagttaggtcaaaaacagtggtgaagtaacagttgatgttggtggagatgaggaattaggtatgttaatgaagaatgatgatatactggccaaggaggtaaatgtgaagataaatagagtcgatccaacattatgaatggaggcagacactggagatga

SEQ ID NO: 65589 - DNA, 288 bp, Zea mays
  Clone ID: MRT4577_159818C.1
ccacgcagcagcctctagcgaaccccgcctgctggggctcctcccgggatcccgcgacgctgccagctgctgggtggcggcagcggcaccggcgccatgcaggcggagaagaagccgccggcagctggccgacgcgcgcccgcgggcaatgaacgccttcagctccgggaggcacatcatggtcagacaaggggggggggggcgcctccttttttttttttcggctccgccacccgcggaccgacggccacttcacggtaaccgctgctcgcccgcgggatcgccaac

SEQ ID NO: 65590 - DNA, 402 bp, Zea mays
  Clone ID: MRT4577_159819C.1
atagagaccaccgttggattatgttactgttcctgcaatcctattcctacgtagacacccctcgatgcctccgtatatgtgtacaggttctttttttttttgatacatagggtctgccgtttgcagcagcaacacatgacacagtataacaaaggtacatgatgcatgttgcttgcacgtacgtcttcgtcttcgtcttctctgaatcaatcatctgatcggcgtcaagcagaagaggagctggaggactcgaacgtggacaccctcctgcgcttgttgagaagcgacgccctcggcgcgaactccagcgcagagttggccctgtcgaggacggactggagcgcctggcgcaccgagtcgacgacgacggcgcccacgttgccgcacgtcgacgatgtgatg

SEQ ID NO: 65591 - DNA, 311 bp, Zea mays
  Clone ID: MRT4577_15981C.1
accgaggtcgcacgcgtgacacttctccgccgcctccgccgcagacgcccccgcgatgcgctacgtcgcctcctacctgctggctgccctagggggcaactcctcccccagcgccaaggacatcaagaagatcttggacagcgtgggtatcgaggcggacgacgaccggctcaacaaggttatcagtgagctgaatggaggaaacagtgaagacgtcattgcccagggtattggcaagctctgccagtgtacctgctggtggggctgtagcgtctctgctgcaccaggctctgcagcccctgctgctggtt

SEQ ID NO: 65592 - DNA, 131 bp, Zea mays
  Clone ID: MRT4577_159820C.1
ctcactcgtccgcctacgtatatgatgtaccagatactgtcagcctgatgatattaagcgtaagatatattcagcagctttaacggctgattgaaacactattgctgagagtcgagttagctacagctgct

SEQ ID NO: 65593 - DNA, 318 bp, Zea mays
  unsure (1)..(318): unsure at all n locations
  Clone ID: MRT4577_159821C.1
tntttttttttttttttttttttttttttttttttttttttttttttttttttttttttttttttttttttttcaacccgaaaaaaacaaatttttttcataaacaaaaggggcccacagatttttttccataccttcatgcccattggggggaccccaactggccccctaggggtgcatacttacttattcaaaccgacccagcttggggcaacatcgggagtgaacatgcttacagacgacaaatttttataacaataccctggtttgctggtttccacgaatacccaacccccacccccgaattggggccctttt

SEQ ID NO: 65594 - DNA, 366 bp, Zea mays
  unsure (1)..(366): unsure at all n locations
  Clone ID: MRT4577_159822C.1
tcccgggtaatacacagtcgtcctttgctgaactataatgatatccatagcagcacgcctcaatcccaaagaggcggtcaccgccgagctcgggtagcctgcctcggggctccctccgtgagctccgcacccgcatcgactccggcaggaacacgcagaagatcacggaggccatgaagctggtggccgccgccaaggtccggtggggggggggggaaatttcccctgccttcccctncngggaggcgccggnggaggcgcgcgacaacangaaccagcccccccccccggaggacanngancagccccncacccgcacccggcccgccaggaaggaaaaaaaagagggccggaccggcgagcgcg

SEQ ID NO: 65595 - DNA, 591 bp, Zea mays
  Clone ID: MRT4577_159823C.1
gctacgaggtgatcaagaaggcgatcgagaagctggggaagaggcacacggagcacatcgccgcgtacggcgagggcaacgagcgccgcctcacgggccgacacgagaccgccgacatcaacaccttcaaatggggcgtggcgaaccgcggcgcgtccatccgcgtgggccgcgacacggagagggagggcaagggatacttcgaggaccgcaggccggcatccaacatggacccctacgtcgtcaccggcatgatcgccgagaccaccatcctgtggaacggaaactgataaagccacggttgttcctcttctgcacaacgctactacgcctgcaatgcacgcatccgctctgatgtcatgtcagtttggttttgcgatttcggttccccgtcgtggggtgtcctaaaattttttacttcggtctccggtgtactgcttggaaagtctgaataatggctgcaaatggattttgctttcgtcataggggtacctagctacctttagctgttctttcctgtttattggatatgtataatgtaatgtaatactattactacgtgattttatatgaaaagaatcattgtcgttt

SEQ ID NO: 65596 - DNA, 540 bp, Zea mays
  Clone ID: MRT4577_159824C.1
aaaaaaaaaaaaaaataaaaaaaaaaaaaaaaaaaaaaccctttattttttgggccttcaaaaaccaccccaggggaggccaattacaaccacccaaccaccatgggttccaagaatttatcccttcttgggcctcttgggccttttggggggcgcacaaaaggcgtcaataatccaaaatggctaattggttcaaggtccaataataaccaagtccctccaacaagtaccttaaagggctttgaaccaccaagttgggaagcctaataggttaaaaaaggaaatggggggaagggtttaaaacaaccaaattcccaagtggaacaaccattcttgggacaattaaaaattaaaaacaatggaaccgaacaagaacaaccatttctaaccagacttgacccactaaccaaggggaacccttgccgcctatttgaacaagaagtggttggaataaaaccaattggtttgggaaaacgaattggaaaccaagccacacaaccagtggaaaaagttctggccagggttaagcaaataagcctg

SEQ ID NO: 65597 - DNA, 775 bp, Zea mays
  Clone ID: MRT4577_159825C.1
tccacgcgtccggcacgctgcatttacacacacttgtctcttgtgtcttggctcgccaccgatcgaggtagatgtctgccgtgccgtgcagtgcagcggtgggcgcaatgaacccgtataagtacctcaagatccggttgaacccggacggctcgctctgccgctacggggaagcgccactcctccccgcggcgccggccggggagcccgtggcggtggaggacgagcagggggcgcgccgcattgtggtccactccagcgacgtcccgctcaacgacgccaccggcacgggcctccgcctgttcgtgccgtccgggtccggcggccacgacggcgggcggctgccgctggtcgtctacttccacggcggcggctacgtcctgttccgcgcggcctccgcgccgttccacaacacgtgcgcggcgctggccgccgccgccccggcggtcgtggcgtccgtggactaccgcctggcgcccgagcaccgcctccccgcggcgttcgaggacgccgccgacgccgtcctgtgggcgcgcccgcacgccgccgccggcaggccggtgttcgtgatgggcagccacaacggggccaccatcgcgctccgcgccgcgctggcggcggcggacgccggcgtggagctgcgcggggtggtcctgaaccagccgcacctgggcggcgccgcgaggtcgcccgcggaggcggcctcggtggacgaccgcgtgctgccgctgccggcgaacgacctgctctgggagctggcgctgcccgtgggcgc

SEQ ID NO: 65598 - DNA, 375 bp, Zea mays
  Clone ID: MRT4577_159826C.1
taacaacttattaagcacaattgtgtaccaacatatgtcacccaaaatatttcgcttccttaggctggttgtcctttctctagggggggataccccaaccatttccccacaatgctcacaagctccaataccttccctcattccccaatacctctgacaagcccaatcttcaatgtgtgaaaaccaaattgttcaaccctacagaacccaacatgcaattggaccaagtatcttaccattatcacccttatttctccaacaaccttcagccctattacagcagttacacttggtccatttggtgggacaaaacatcattgcccaacaactacaacaatctgggctagcaaaccttgttgtatactcttagcaaca

SEQ ID NO: 65599 - DNA, 605 bp, Zea mays
  Clone ID: MRT4577_159827C.1
cgagatttatcttcacttcgttttttttctcgaatacgcaggagagctgcgtatcattatattaagtagaaaaagatggggtgaggtgttaaagaacctcatacaactcaacacaccacgcaacaaaagaaaaaaaagaaaaagaaaaagagcatactagagaccaactcctcaaataatatgccgaggtaaaaggatatcagataatccgcgagccccagccctacaccaaagatgagactcagccatgacccaatttatgaccttgctagccctaggctgctcgccgttgaagacacattgattgcgatgaatccaaatggcccaagctcctaaaatgataagggagttcagccccttgcgcagcttcttatcggaggggctaataagggtcatgcttacattctcccaccaatcatcaaaggaagaagaatcaagactgggagagaggtgctgcaaaccgaccgttttcaggatattaaaccagacttcccttgagaagacacaggaaactagcagatgattcatagtttcttcctcctggtcacataacagacaactttgaggatgaggcaggcctctcctcgccagccggtcagcggtcc

SEQ ID NO: 65600 - DNA, 739 bp, Zea mays
  Clone ID: MRT4577_159828C.1
gtttcagcctcaataggatttccatggggtcaccaaaccccaggaagtacctagcatcctgcgcctcattgtggtcctcaagctggtgctcctcctctgcagccgcgtcaaggtccatgaccccgacttcgaccacgagcccgaggagctaaaccggttagaggaccgtcgcctccggttcctcgacgactttcaaagccggaacaccagagacgacgtgtggtgtgccacacgatggacaagagaacgtcggagaactagagccggagaaaacggtgggcgcgaacgagatccccaatcgaccgcctcaagaccgagaagggcgagcacgagctggacaagcagagccacgacaagctcgccaatgaggtagatgtcgtgcgccaggagaagctcaagctcgaggaggagatcagggccctgaaggcttctgccaccaccgcggtcgctgccgagaagcccactcctatcagcagcgttgcgaacggtgagggggtccccggtgcccacactgccgccaagtcctacgctgtcgtcgtcgtcctcacggagatcactgccctccacaccgccaagctggacctagggccaaggcacaccagagacggagaacacggcgagaggcgagaggcgagaggagaaaacggcggcgctgtcgccagagaccgagaggggcgtcaggtcgggctcgaggacttggggatagcggatagtccggaaggcccgagggtccccagaa

SEQ ID NO: 65601 - DNA, 1930 bp, Zea mays
  Clone ID: MRT4577_159829C.1
ttgggtacctcgaggccggccggggcattcggatcaaagggcccaattccacccatccccatcgcgatcgcctctctccagctaagcgatgaagaaccctaaccctcctccctcgcgtccctccgccgcaggcaaggagccccccgcaggcatggcgccgccccgcaaatctcgctggggcccaccgccaccgggcgttgccggcgacaaggccgcgccatccacctccgcccgccgcaccccgaccccgacccccacccgcacagcggactccaggcgccatccgggggcccctcacgcgccagcaccgcacgcccgcaaccccgggtcgcaggcggtcgctctccggccgcaggctcgtccgcaacctccggcggtggagactcctcccccgcagccgtacggcttccacaacctggaccgccgcgtcatgcccctcgccgacggcaccgtccgaacctacttcgccctgccccctgactacagcttcgagccggtgcccctgccacccctcccacaccgcctcctcccccgcgccgccccggacctctggccgccgccgctacatttgcagatgccgccgcacgaggctaggcgcaaacaccctgccgaacaggacgagggcttcgcgaggcaccccaagcagccgcggctcgacgagccgcatcaaccgccgccgcatgccaaggtggacgggcatgcgctcaggagggcgttcctcaaatacgccaagatgctcaacgagagctcggcgcagaggcggagctatctcgagggcggccgtgtcccgtgcctcgcctgtggcaggtcttctaaggactttgctgatgtccatggacttgtcatgcatgcttacaacccaccaaatgcagattcacttgttgatcatcttggtttgcacaaggcattgtgtgttcttatgggatgggattatacaaaagtccctgagaactttaagggctaccaatcattaccttctgaccttgtccaagcaagtagggaggacctcattgtctggccgcctactgttatcattcacaatacttcgactgggaggaagaaagatggtcgcttggagggtttagggaacaaagaaatggataaaaaaatgacagaactagggttttctggtgggaagtcgaagtccttgtatggaaaggaaggacatatgggtttgacacttatcaagtttgcaaacaactcatctggcttgaaggaggctgagcgtcttgctgagtatcttgagaggcaagatcgtggacgtataggttggtcacgcgctcatgccagtcgttctgtagattcagatcagaaccctttgttggtcgagacggataccaggacagctgagaaaaagaggatactttatgggtacctagcaattgcatccgatctggacgaactagactcagattctagaaaaagggcttccctccagagcagaagagaattcgacccaaacgaatgatctcttgtcataaagcccacccccatcagttcattaaatttgcactgaggcgtgcatacctatctctgatcccaatttataaattcatactgctgctgtggagaaaaggtgttaccttgaatataatatctgccgctagttgagttataaccactagttctggaagctgtatttgcactatgtgtattttcttgcacgcgtctatggctcacgatttgactggctatttggaagagatctgtcttcctatttaagtatcgcccgttgcatgattcattgctcttcatttggaagtgtgatgttgcatagacctcctgattggtatcttttatgtattatagcattccctttctttcttgacttcccatgaatatttaaatttctgctaagacggtagtggctacatattccttggcacttctgaacatgtctggttctttgaatatcagagtatattgttgt

SEQ ID NO: 65602 - DNA, 451 bp, Zea mays
  Clone ID: MRT4577_15982C.1
ggcggctttcctggcgcagtgcaccccgcggtgtgactaggtccactggttctcggaaggaacggtggtcggaatgctgaacgtgacctgtcaagactagaaccgggcgttcttgccttgaagaacagctttacactccaagcaccccctctgcgcgcgcttgatggttctgactgctaaacttgtggaggaatcggacattctaaatgcactcgaccttcgatccccatataggatgtatagtactaagggcatgaatagtggcaaaagcgcccataaagctatagctgcttgatgtacatgatacagatgatcccacagcaacctgatttacccctactttcatatgagggggcgagtaaggcccaattcacaaaggactcttactgactgacatatatgagcgatggagcgatgcctgtttgtgccatcaacgcatagatgacatgaa

SEQ ID NO: 65603 - DNA, 355 bp, Zea mays
  unsure (1)..(355): unsure at all n locations
  Clone ID: MRT4577_159830C.1
cgtgcgcattgttcatcggcatggcactagtgttgacttcatagaatgaggggcctgcgcatacagccaaggacgctatttatatcgaacccgggagataaccccccgctgatcactagaaacatatatataaaaagactgctagagaacatgaggtggcaacagctagccactcaacatgagagtgaaggagtagcaaactgataacgaccacaggctaactagagatatagtctcagtgcataacctatgctatcaaaacccacaagcaggttgaaaagcgaacgaaacataattgacaaaaccaacattctataaaaaaaaacactggcgccagggcgagggaacaaanacg

SEQ ID NO: 65604 - DNA, 279 bp, Zea mays
  Clone ID: MRT4577_159831C.1
taaagaaactaaacacgaatggttcgcatactagatattaaatcataaatactgtatttattaaagtggacatatgacccacatatctgatattgcgctttattttagttaaaaggtatgagttgaaaagatatatatatctcttattgcttgcttaaccgcttgttttccttcaactaggcgagatggtactggtactatccgagagcctctgcatacgactttgtgtcgtattggttttagatactttctcatggcttatcttggacaaccaaatga

SEQ ID NO: 65605 - DNA, 2114 bp, Zea mays
  unsure (1)..(2114): unsure at all n locations
  Clone ID: MRT4577_159832C.1
gtaataatatantctgaaacaattaatgaccctctttgtgtgcccatctgtttgggcatggtatatggctgtgcgaggcgaccatgtacagctgaaacagttccttccagaaattactgagaaagattgtgtctctaccagccaaagcagagttgggaacaccatgtaatttggcgatgttgtcaacggcaacttgagcaacagtagaggtatatgggtgcttgataggaaagaagtgagcaaatctgcagagtttgggcatgtttttctcctagggctttgctaaggtaagcaatgggttgataagcatctgtctccacagtgaaagtgtcctggaaatttggtaaagccaaggctagagttctggttgttgcagctttgaatttctgaatcttctgaatgagtcacctgatccgggtcagggcacttatgtgccattacaagcactggccgattagccccacatgtcacccataatggaaaaaggtaagatcttctcttatcagttaaggattaatgtcataccgaaacccaagtatgttacaacaaatcagtttggaagtatgtgcagtgaaatgaggtagagattcatctggctctgaaaaggatgaagcagtgtcactgaaaaggcagaggaaatcctcaagtgcagctgccttctttgcaaaaaaaacccaactgcatttgtcattttcctttttttcctggtctctgatccaaccagtttcagtgaaaaatcgtcatattaattctggactggaaaatgggaggcacaggacaacaagacccaaaagtttttgctcgtataactaactatttatatgtagtcttggatcttcctttgctatcatgaaatgtatgaattgtagtatggcctctggttgcctggcctctgtctgcgccaactcatgatcgatcatgtatctgtccgcttcacctggatgttctgctccatctgcatgacgccaacatggctggtgattaatacctcaccaacgaaccgaatggcaggtggagcgtcgccagtcggcggcttgcttgatctcatgcagcatgcaaaggctgctcactgaaaggaatacacatggtttaatgcagcattttcttttgtttcagaacgagggcgatcatgcctttggctagagcatcaggctgtttggtttgcgtcacgaagccacgaggaatcatctgagcctatccatggagtttggtttgcgtcacaaagccatgaggaatcatctgatccaacatctgagcctaaccatggcgtttggtttgcgtcgcaaaaccgagtcgtctatcgtgaagtcattcctcgtagtacccccaggtgaccaatgaaaaggtaattcctcagattgagttcgttccttgaaaaatgttggacgagctgatccttcatcgtacatgatcagttcatgatggacgaatccaaactgctgaatttggcatataagaacttggactagcaggtttccgtctaatttgaatttcctttgtttccactataatactggatgccttattatccacaattgtgagcccttcaaagcattttttggtctttcatccactcaactggttgatataatcagaaagagacgcaatggttttcaaatgatcaaaggtatggcttgtggtgttacatctcctgtcttccagtggttttcaaatgattaacgatagttacaggactactgaattttgtgccaaccacgaccaacacatcatccaataaaacatcatcctggctggagaatcgatgaaggtcaactatctcatgtattagaagaggttttcacagtatttacctgtagagtgaaaggcatgctgaagcagagctgactgtgcgaaagacatgcagaagcaggtattcaattttgcacacgagctttggaggcatctacacgtatatctggccttgttcccttcaatcgctggcatgcctcataaatctcggcacagcaatcagttatatgtagtagtcgtagtgaatcggggaggccctccttaggcagtgatacgatgttttgaggcccaaggatagttatttcatggagagaaggaaggcgatgcagtccttgggggagagactggagagccctgcagttata

SEQ ID NO: 65606 - DNA, 1692 bp, Zea mays
  unsure (1)..(1692): unsure at all n locations
  Clone ID: MRT4577_159833C.1
gggcctggtctctgatccaaccagttttagtgaaaaatcgtcatattaattctggactagaaaatgggaggcacataacaacaggacccattttttttgcttgtataactaactatttgtatatttgtgttgtcttggatcttcctttgcttatcatggaatgtatgaattggaatatggcctctggcctgtgtctgcaccaactcatgatcgatcatgtatccatccccttcgtctggatgttctgctccactgcatgccggccaacatggctggtgattaattcctccccaacaaactgaatggcaggtggagcatggccattggccagtcggtcgcttgcttgatctcatgcagcatgcgaggctgctcacttgttgatttgtgaagatcgcgacaaacaggaggtcagttaagcttatcacacgactccaattgccgatcagctcaacaatgacctttagagattcaggcctagctagggcaggaggatagtgttgttcatctgcaagactttcttcaaccacgggcaacacattctcagcttagatgaggttgcagtcttcttatagttcactgtcttccatgccgttctcatccaacgcgacaacatcatggttagtgaattgatgaaaatctactatctttcaccggatgcgttattcacaagcttatgttgagttttcctaatccagactcaatttcccggccagcaatgttttcggtacgatgcaaatcaagtcatcatattcttcaatcctgtcccattttttgctttatttatagcaagagctgttctttgtatacttcaagccgagcacgtctcttatgtcacaagaagtgttcagttcagtctccttggctgcagattcaggttaatggtgaaagattaggagtgcagagtgtatgtgtatctataatgctgaatttggcatgtaagaagttggactgataggtttccttccaatttgaatttcctttgtttcctataagatactggatgccttattatccataattatgagcctttcttccaaagaattttttggtctttcatccactcaactggttgatagaatcaaaaggagccgcaatagttttcaaatgatcaaaggtatgacttgtggtgctacatcacctgccttcaagtggttttcaaatgatcagcgatagttataggcctgatattttctagatgcgccagggttgctaaaagtgagactatgtataacattatgatgaactgtagtcctttactttctgaaattttccacaacncaagcttgttctcatttatggtcatgaatgatgtgcagcaccaatgaaaatgtcctactgcattttgtgccaaccacgaccaacacatcatccaataagacatcatcctggctggagaatcgatgaaggtcaactatctcatgtattagaagaggttttcacagtatttacctaaaaagggaaaatgctagaaagtaagatgacgatccaaaagttgaaactatagtatgtaagagaaattaaatttcttggttaaagaaatgaatggatggacaagaattatgaatggtggctccagttgtaatacaatagcatttgaggatggaacatatcgatatgcaaaaaataaaaaagcagttcgatttgcagtcaacgaaatcataaatcagtcaacataatagttgtttttgatcc

SEQ ID NO: 65607 - DNA, 417 bp, Zea mays
  Clone ID: MRT4577_159834C.1
aacaaattatgcaattgagcaatccccagatcactattcatgcatggtggatctctatggccgagctgggctcattaaggaagcgtacgagatgagcacgggcaatgccaatggaaccacatgcaggtgtctggggagccttgatcaatgcctgcaggaagcattgcaatgttgtagtcggtaaggttgcagcgagagagctcattgctattgaacccgggaatcctggaacttatgtactccttgccaacacgttggctcgtggtcagcaatgggaatatggtgagactgtgtggcaatcaatgagaggaaagggttttgagaaaacagcagggtgcagttggcttgaagaggaaaatgttgatcatgagttcttgatgggagagtccagccaccctaatttcgatgagatttaca

SEQ ID NO: 65608 - DNA, 1395 bp, Zea mays
  unsure (1)..(1395): unsure at all n locations
  Clone ID: MRT4577_159835C.1
aacttgtgcaaaggaactagaaatatttcttagaggatagaaatgcctgtatgctttcctgtattacagnaaaaactaacgctataacccatttcataagactatagaacataaactttgatattgatctgaacaataaagaccactaaattttgctggtttccccaagtataaagactcagaatttctacacaaaggatatataatacaatttttgtcatcaaggtataagcatataaaaccttatgccacaagaagtgttcagttcagtctccttggctgcagattcaggttaatggtgaaagattaggagtgcagagtgtatgtgtatctataatgctgaatttggcatgtaagaagttggactgacaggtttccttccaatttgaatttcctttgattcctatatgatactggttgccttattatccataattatgggcctttctggttgatgaaatcaaaaggagccgcaatagttttcaaatgatcaaaggtatgacttgtggtgctgcatctcctgccttccagtggttttcaaatgatcagcgatagttataggcctgatattttctagatgcgccagggttgctaaaagtgagactatgtataacattatgatgaactgtagtcctttactttctgaaattttccacaacccaagcttgttctcatttatggtcatgaatgatgtgcagcaccaatgaaaatgtcctactgcattttgtgccaaccacgaccaacacatcatccaataagacatcatcctggctggagaatcgatgaaggtcccctatctcatgtattagaagaggttttcacagtatttacctgtagagtgaaaggcatgctgaagcagagctgactgtgcgaaagacatgcagaagcagatattcaattttgcacattagctttggaggcaaatactagatatatctggccttgttccattcaatcgctggcatgcctcataaatctcggcacagcaatcagttatatgtagtagtcgtagtgaatcggggaggccctccttaggcagtgatctaatgttttcacgcccactgatacctatatcctggagagaaggaaggcgatgcagtccttgggggagcgactgcagacccctgcagtgatagaaatcaagggattcgagagacgtgaggagctgaagcgcctcgtcctgctctttngtgaagttctntgtnngccccccccccctcaagcttaacttctngagggtagcggagagcagcctgcagatgggagcaacaagcactcccgagatgctgtccacatcaaggctcaccagtttgaaggaaacgtcgggcattgttttggtcctcaccaccgctacccctcatccccntcccccagaataggatcccggacgcgtgg

SEQ ID NO: 65609 - DNA, 527 bp, Zea mays
  Clone ID: MRT4577_159836C.1
ttgggtacctcgaggccggccgggtctcctgacctttttgagctcttcttcccccgccgccagcgcgcagtgcacggcgagtatccgactgtcgccctgcagagggcatactgcagatacggctggtgctctgacggagcaacaggagaagcagagcgagcctaggcgaaggctacagcttggtgccttatcatggtatgcgaagcggcgaggccctgcggcttgctcaaggtgtctgggacatacgagcggaacctacccgtgcgcgcagtctgcgccctgcagaccccatacgccatcgtccacggacggcgactggaccaccgatacagccggtgtcgcaggtgcctcgatccaggttcgaagtgatagatgaccctctccatgagagaaccacgacgaatacttcattgcaggagcgccactgccaccgcctccagcacgacgacgacatgggacatgctatcctggacctggaccctgaggaggcggcaaccaagctgcagagggagctgcggatcacagct

SEQ ID NO: 65610 - DNA, 550 bp, Zea mays
  Clone ID: MRT4577_159837C.1
ctggtgggggttttttttttttttttttttttttttttttttttttttttttttttttttttacaaccaaaagcaaacgggcagggattgggttattatattccacaaaaatttgaacaaaagcgaatgctagtacaatgggacaaaagagcccgggggggggggaaaagaaaaaagcacgacacggggggctcatgcgggaaggagggggaaaccgatgaaggggccgagcgagccgacgaaacccgcgacaacgggggcagccggggaagggtggggcggcgttggggagctgccgccctcaacggccggcgcgctggcggaagcggttggcgggggggagcccccccctgctgggggtgtcggagtcggcgccgggggcgagctaggagttgtcgggggaacgggcgccgggggggagctaggggttgtcgggggggcaggcgccggagctaaagctggggacgtcggcgaggggggggtggctgccggagcaacggaccaagggggcgacaaggatgggctcgtcgcaagtgcgggggcaccagca

SEQ ID NO: 65611 - DNA, 795 bp, Zea mays
  Clone ID: MRT4577_159838C.1
ggccgcttttttttttttttttttctacaacaacttatataatatatttaattttaggtttcacatgtattaaaattcacttatcaatttggcgatcaatcatcacctattcagtattctagatgaattgaaaatcaagatgtacgtagttcatgaaaaaacaataaatgtcataacaaagaagattaggggtgtagagtatatgtgtatctactactgaatttggcatataagaacttggactagcaggtttccgtctaatttgaatttcctttgtttcctctataatattggatgccttattatccacaattgtgagcccttcctactgaattttgtgccaaccacgaccaacacatcatccaacaaaacatcatcctggctggagaatcgatgaaggtcaactatctcatgtattagaagaggttttcacagtatttacctgtagagtgaaaggcatgctgaagcagagctgactgtgcgaaagacatgcagaagcaggtattcaattttgcacacgagctttggaggcatctacacgtatatctggccttgttcccttcaatcgctggcatgcctcataaatctcggcacagcaatcagttatatgtagtagtcgtagtgaatcggggaggccctccttaggcagtgatacgatgttttgaggcccaggatagttatttcatggagagaaggaaggcgatgcagtccttgggggagagactggagagccctgcagttataaactcaagtattggagagacgtgaggagctgaagcgctcgtcctgcttttt

SEQ ID NO: 65612 - DNA, 3093 bp, Zea mays
  Clone ID: MRT4577_159839C.1
ccgaaactcaagtatgttacagcaaatcagtttggaagtatgtgcagtgaaatgaggtagagattcatttgactctgaaaaggatgaagcagtgtcactgaaaaggcagaggaaatcctcaagtgagcacatcatcgacgggcagctgccttctttgaaaaaaaaaacacagctgtagttgtcatttccctttttttcctggtctctgatccaaccagtttcagtgaaaaattgtcatattaattctggactagaaaatgggaggcacaaaacaacaggatttttgcttgtataactaactatttgtatatttgtgttgtcttggatcttcctttgcttatcatggaatgtatgaattggaatatagcctctggttgtctggcctgtgtctgcgccaactcatgatcgatcatgtatctgtccgcttcacctggatgttctgctccatctgcatgccgccaagtgccaacatggctggtgattaatacctcaccaacgaactgaatggcaggtggagcattgccagtcggcggcttgcttgatctcatgcagcatgcaaaggccgctcacttgttgatctgtgaagatcacgacaaataggaggtccattaagcttatcacacgactccaattactgatcagctcaacaatgaccatgatagataaggtgtgcggacttacaggctgtttggtttgcgtcacgaagccacgagaaatcatacgatccaacatctgagcctagccatgtcgtttggtttgcgtcacgaagccacgaggaatcatctgatccaacatctgagcctaaccatggcgtttggtttgcgtcgcaaaaccgagtcgtctatcgtgaagtcattcctcgtagtaccccaggtgaccaatgaaaaggtaattcctcagattgagttcgttccttgaaaaacgttggacgagctgatccttcatcgtacaggatcaatcatggacgaatccaaaccatcagagagattcaggtctagagaggacagggaaggcagtgttgttcatctgctagattttcttcaaccacaggcaacacattttcagcttagatgaggttgttgtcttcctctagttcgccgtcttccatgtcattctcatccaatgcgacaacatcctgggtagtgaattgatgaaaatctactatctttcactggatgcgttattcacaagcatatattgagttctcctatgccagtctcaattcctctgccagcaatgtctccagtaggatgcaaatctgtttaagtaatgggttgttcagaatatggagaaaataagttatactcatcggttcacaattataacaccatgttcaatatatcataattcagaggatgcagtgacactctttgggctagtttgaaagcaagggaattagaggggattgagggtgctcaaattcccttcctatttaattaggaaggggattttagccatctctcctctaattctcttgcttccgaactagtcctttatgtgtccttaagaacaagccgatagtatttttttcaaacaaaaagagaacaagccgatagtaccaacaatgtatagctaatatgaaaccatatactaaactcaaacttctcatcaccatataatatattttcatataaatttatatttttgcaacacagaatttttcaaaagaaacagagaactaaaattcatgcaagtgttcaaaaatggaatgaacattaacaacaacttatataatatatatttaattttaggtttcagatgtattaatattcacttatcaatttggtgatgaatcatcacctattcagtattctagatgaattgaaaattaagatgtacgtagttcatgaaaaaaacaataaatgtcataacaaagaagattagggtgtagagtgtatgtgtatctactgatgaatttggcatataagaacttggactagcaggtttccgtctaatttgaatttcctttgtttcctctataatactggatgccttattatccacaattgtgagcccttcttccaaagcattttttggtctttcatccactcaactggttgatataatcagaaagagccgcaatggttttcaaatgatcaaaggaatggcttgtggtgctacatctcctgtcttccagtggttttcaaatgattaacgatagttacatgactgaaattacaaaaaaagttgcaatagctgtaaatagaatgccttgaactataaaacagcagagagagggagacaatgccatatacaagaagtccattagtgactgccaattttttcacatattcagatccacttactgcctcacctgatattttctagatgctccagggttgctaaaaggttgttctttcattatgtactcaaactaaggtgccaagccaacgtcgtcaagaattcacttgtctttactttctaaaattttccacatcccatgcttgttctcgtttattgccttgaacgctgtgcaacattacgatgaagcatagtcttgtaaaagaaaatcagcatatcatctcatagttgtgtgggggaaaaaagtattgtgacagaaacaaggtgattttgaaatgagcatatgcatcatggtttatgaaatctaataatatgataatgtggaaccaaacaatcagcaaccaaaaagaacaaactaagtaaactataaggacattgtgtttactagaccgttgaaactggtgctttaagtatatagtatagaaataacactcgcagtgaatcagggagtcccttgtttggtagcgatctgacgttttgagtcccagtgatatgtatttcctagagagaaggaaggcgatacaacccttgagggagggattgtagggccctataatgttcgaactgcaattcttgaagagacatgaggagctgaagcgccatgtccttctcttccatgaagttctctgtccgccaatcatgaaagaagattaacatctggaggttgcggagaggcatctacagatgggagcaacaggcaccacggtgatgctgtccacataaagtctcaccagttggaaggaactgatatgcattgctttagtccttgccacatctacaagtagatctgct

SEQ ID NO: 65613 - DNA, 2357 bp, Zea mays
  Clone ID: MRT4577_15983C.1
ttgggaccgtcggggccggccggaaaaatctcccccttgccgtctccccgcccccgcgtccccaagccgagctctcgctttcggcgctctcctcaatcctcgccccccgcgtctttcagagcgcccatgagctgaggccgccgccgatgggcccgccccccggcgcgcaggacccggcgccgtcgccgtcgggcggctccggctcttccaggcgccgcttccgccgcctcgaccgccgcaacgcatccaagcacatcgcctacgacgccaccaacttctgccagtacccgccgtccccgcaggccgcatccgcgccggggtcagggcgggcttcgctcgccagctccgctgcctgctccatcgatctcgtcaacagcttccgcatcggcggcagcggagacgggggcggggacctccgcttcctgtgcgagaacctcggcctctccggccccgacgacttcgccatcccgcgggccgactgggaggcacacaaggccgctcgatcatccgcctccgcttcgagctcccccaaccccgcacgccccaactacgactcccctcagcggaactcaccgctctctcaggtgggtgccgaggagcaggagcccgcccaggcttcggacgccgagacggagctaccggccgcaacgggaagggacggcccaatcgaagccccggagcggccggcacgcttggatctaccgctcgagtccacctgtccggatgccaggagggcgcctgggcagggaggaatcaagggcgtgcgcccgccaccggtgctcaagccgccgccttcgatggccctaccagctgtctgcggcgtgggatccacgtgggatatcttgcggtcgttggcgccggatgagaaagatgacgcccccgctagcagatctggccgtcgttttggacaccaggatgcagtggagaaggatgacgacgagcgtgcggcggttctgttaatgttggatgatcttaggctggaggagtcgtccgagagctttactggtacttcttcgctatcaacgaccaacgatgacgacacctcaagcaccaccacagaatccatgttctatatttcaccgaacgggaggtttaggaggaggatcaagtcatggagccgaggggtgctcctgggtagtggctcgtttgggacagtctatgagggcatcagcgatgagggtgtcttctttgctgtcaaagaagtgaacttatttgataaagggagcaatgcgaagcagtgtatctttcagcttgagcaggaaattgcacttctgagccagtttgagcatgagaatatagtgcagtactatgggacagacaaagaagattcgaaactttacatcttccttgaattagtgacccaaggatcccttgcatcactatatcataagtatcgcctgcgtgatactcaagtctctgcatatacaagacagattcttaatggattgatttacctccatgaaagaaatattgttcacagagacattaaatgcgcaaatattctggtgcatgcaaatggatctgtgaagcttgcagattttggactcgctaaggagattaccaaattcaatgaacttaaatcatgcaaaggaactgtttattggatggcacctgaggttgtcaatccaaagcagacatatggacctgcagctgatatatggagtcttggttgcactgtcctagagatgttgacacgccagataccctatcctgaccttgaatgggcacaagctctatacaggatcggtaagggggaatcgccagcaattccaaacactctttcgagggatgctcgcgattttataagccggtgtgtaaaaccgaatccggaagacagaccgtcagcatccaaactgttggagcatccattcgtaaacaagtccataagatcagtacggtctatgaggacgacatcttcacgctcgaattcatctacgcgtggcatcaattaatgggccgtccgtcatcatctattgggcagcggcagaatgatattggtccgcgcaaatcatgcggagctggccgagagggagtttgttttgactggagctagtattgtcaacgctcaacagcattgtcgtcaacctcttattggtgtttcattagttgattctttggcatacgcccgcgaggaagatgtcctcgttgagccgccggctaatgtatgttcttctgcctggatagagaatagggaagggtcgtgcatttgagtgcatgagttgtagagtgagaacgggctgtgtaaaacagactgtcctgatgccaaggatatgttattagttgtcacgagatgaaagggaggaaagaaaggaagaaagcaaaggaacagagcacaggggaagaaagaaaggaaaagc

SEQ ID NO: 65614 - DNA, 576 bp, Zea mays
  Clone ID: MRT4577_159840C.1
cggaattcccgggtcgacccacgcgtccggtgaaccatctgcaacaccaatggggacactgaaaatgaagaactcaccaagcacctccttgagatagaacaacccaaggattgtgaagaacaagagcctgaagtggcaccggctgcccaggctgtggaaaaactagaggcaggaacagctgatttcctggttgaccttgaggggaagagatctattaaagtgctcggatcgaacaccttcctgggcctcggcatcgtcaccttcgccggcgtgagctactccctcttctcgccggcgttcaacctcgccaccaacgaccagtggcacacgctcggggagggcgtcccccacatggtggtgtacacggcattcttctacttctccctcgcctgcttcgccatcggcatcgccctcaacatctggttcctctaccaccccatggtcggcgtgccgcggtcgtcgctcacggcctacctgaaggattggaaggggagggatcttgctctcgtcgcaggcatggtgtgtggccttggcaatgcgttccaattcatggctgggcaggctgctgggtatgct

SEQ ID NO: 65615 - DNA, 433 bp, Zea mays
  Clone ID: MRT4577_159841C.1
aaaagtaaagaacggtgcaataatgaggtattgtacttcaagaagaaaaatgctagaaacatatatggcccaaaagttgaaattgtagaagaaattaaattggttgattaaacattatgaaaattacctactgaattttgtgccaaccacgaccaacacatctaccaataaaacatcatcctgggtggagaatcgatgaagatcaactatctcatgtattagaagaggttttcacagtatttacctaaaaaggaaaaatgctagaaagtaagatgacgatccaaaagttgaaactatagtctataagagaaattaaatttcttggttaaataatggtggccccagttgtaatacaatagcatttgaggatggaacatatcgatatgcaaaaataaaaaagcagtttggttcgcagtcaacgaaatcataaatc

SEQ ID NO: 65616 - DNA, 299 bp, Zea mays
  Clone ID: MRT4577_159842C.1
ggggtaggggttttttttataaaggaaaaaaaaaaatattggggggtgtattaaattaactgtttataaaaaaaaatttggagtaaaacttgtttaaataaaaggataaaaatattttgaaggggggggtaaccgtggaattacggaatgggacttttaaggggtaaaaatttttcattttgtaagacttatttaagcttgggggaaaaatgggatatattggttcatggaggaaaaaggtaagctgataaaaaattcaaaaaaaataatgaattggagagattaattttaaacctggg

SEQ ID NO: 65617 - DNA, 2063 bp, Zea mays
  Clone ID: MRT4577_159843C.1
gaaaaaaaacacacagctgtagttgtcatttccctttttttcctggtctcttttttaaccagtttcagtgaaaatttgtcatattaattctggtctgaaaaatgggaggcacagaacaacaagacccaaaagtttttgctcgtataactaactatttgtatatttgtgtagtcttggatcttcctttgcttatcatgaaatctatgaattggagtatggcctctggctgtctggcctgtgtctgtgccaactcatgatcgatcatgtatctgtccgcttcacctggatgttctgctccatctgcatgccgccaagcgccaacatggctggtgattaatacctcaccaacgaactgaatggcaggtggagcattgccagtcggcggcttgcttgatctcatgcagcatgcaaaggctgctcactgaaaggaatacacatggtttaatgcagcattttcttttgtttcagaacgagggcgatcatgcctttggctagagcatcaggctgtttggtttgcgtcacgaagccacgaggaatcatctgagcctatccatggagtttggtttgcgtcacaaagccatgaggaatcatctgatccaacatctgagcctaaccatggcgtttggtttgcgtcgcaaaaccgagtcgtctatcgtgaagtcattcctcgtagtacccccaggtgaccaatgaaaaggtaattcctcagattgagttcgttccttgaaaaatgttggacgagctgatccttcatcgtacatgatcagttcatgatggacgaatccaaactgctgaatttggcatataagaacttggactagcaggtttccgtctaatttgaatttcctttgtttccactataatactggatgccttattatccacaattgtgagcccttcaaagcattttttggtctttcatccactcaactggttgatataatcagaaagagacgcaatggttttcaaatgatcaaaggtatggcttgtggtgttacatctcctgtcttccagtggttttcaaatgattaacgatagttacaggactgatattttctagatgctccagggttgctaaaaggttgttctttcattatgtactcaaactaaggtgccaagccaacgtcgtcaagaacccccccgtctttactttctaaagttttccacatacaccatgcttgttctcgtttattaccttgaacgctactgaattttgtgccaaccacgaccaacacatttggtaataaaacatcatccaagctggagagatgagacagtgggtagcacaacaccatcatccagtactctcacaatgtttcctcacatatagtgacatttatacgtctcaaggaatgtagctttttaagatccataaaggacaagggtaatgtatcccaagccatcaatgtctctaggtcacccagattttcgaaggcaaatctagaggggttattaatgtaatacatggtacgatcttcataaaatctagagaggttagtaattttcaacatggtacgatcttcataagaaaagtcttccatctgaatatgggatacctttgaagtgtgaggcaagggtggaaggcacaacttcgggcattcatcaatgtaaaggtcatgaagattagggaaccatacagtgttgtcttctatagaagaaatagaccaatctgagaccagcaaccctgtcagcctaggacaattagtacactggattctttcaattcctgagaacatattccagttagctcccccaacccactcgagaagctctggcatatcattaaactcaacttccttcaagtgtgagacacttttttctgtcgtgctaccgaagaagccaggtccaatctgtgatatcccaacaattttactcagccttagctttgtgccgagattgaactgcccaataggtggaaggttagcccaggatacgctctctagatgtagagtctccaagtttttcatgtatatgttgctgttgctgcacaaccaactaggaccgattgtaccaccatgatttacaatgaaaagtctcctaacattagagcctcgtgccgaatt

SEQ ID NO: 65618 - DNA, 733 bp, Zea mays
  unsure (1)..(733): unsure at all n locations
  Clone ID: MRT4577_159844C.1
tcatgaaanaacaataaatgtcataacaaagaagattaggggtgtagagtgtatgtgtatctactgctgaatttggcatataagaacttggactagcaggtttccgtctaatttgaatttcctttgtttccactataatactggatgccttattatccacaattgtgagcccttcaaagcattttttggtctttcatccactcaactggttgatataatcagaaagagacgcaatggttttcaaatgatcaaaggtatggcttgtggtgttacatctcctgtcttccagtggttttcaaatgattaacgatagttacaggactgatattttctagatgctccagggttgctaaaaggttgttctttcattatgtactcaaactaaggtgccaagccaacgtcgtcaagaattcacttgtctttactttctaaagttttccacatcccatgnacttgttctcgtttattaccttgaacgctactgaattttgtgccaaccacgaccaacacatcatccaataaaacatcatcctggctggagaatcgatgaaggtcaactatctcatgtattagaagaggttttcacagtatttacctgtagagtgaaaggcatgctaaagcagagctgaatgtgcgaaagacatgcagaagcaggtattcaattttgcacatcagctttgtaggcaactgcatctatatctggccttgttcccttcaattgctggcatagaaa

SEQ ID NO: 65619 - DNA, 692 bp, Zea mays
  unsure (1)..(692): unsure at all n locations
  Clone ID: MRT4577_159845C.1
cattgggtacctcgaggccggccccatgttggaggtcatgagctgaccagcctcgtgtcctcgctgaagctctcgtagcaccgaccccacctcgggtcacggcacacctgcgcatgtacgcaaagcacgacagacccggccgatgacgatgatgatggatcggtcgttgggtactccagtgacgacgtacgtaccgctacgcatggcgcgaaagtgtaggggatgccggtggccctggtctcgtgcgccgtggcctccccgacccgcttgacgaggcgggggtccctggtggcgccgaggccgacgttgtgggggaagatggtggcgttgtagacgtcgttgttgccgtgcacggcgtcgatgccgtagatgatggggatgcccagccgggtcttgagcgccgccttctgcatcctggtcaccatcttctgccacaccgacgccgccgccttctccgccggcacgctgccgccgccgctgagcacgctaccgacgaagtacttctcgaggacctcggcgggtcgcgttggccctctcgatctgcgacatctgcccgatcttctcctcgagcgtctccggnncgaggaggtcctgcacgggctcattgatgggctgcttcgcgtccttgtacttgacgtactgcgccgccgaccggcaggaggaggacagcgaggacgaccaggcacgcggcc

SEQ ID NO: 65620 - DNA, 320 bp, Zea mays
  Clone ID: MRT4577_159846C.1
ctccaagccaagcaggtccagagatctcgatcggacctcttgccgaaacgaggaaagaaaacatgtcttctccactgggttagggcgaaggtgtacccgctgatcgcgacgacaggggtggcggaggagatctgcgtcatgcaattggtgcgcagcatcaccaccaacccggaggtgcgactgaccaatgagaaccgggcggccggcgtgctggacaaccactaccaggggcggggctactcgcaacacggcgtgcgcaggttctggctatcccagcgccgagaatacatgcaggccatggacaaggtgcccacggtccc

SEQ ID NO: 65621 - DNA, 543 bp, Zea mays
  unsure (1)..(543): unsure at all n locations
  Clone ID: MRT4577_159847C.1
ggtcgcccagcgtccgnaaatttaaaaaaaaaaaaaaaaaaaaaaaaaaaaaaaaaaaaaaaaaagggcaaaacaataaaaaaaatccaaacaaacaaacacatacatacaaaaaaaaaaggggccggcctcttttaaaggttaccatcctttcacttccgccggctttcgaacatccataagtttcttttttaaaacgcctccctatattccaaatcttattgcgcccttgcatttacataccccctttactgcagaataaccctagtagtccccaaggctattaccgttcgcccttatcaacatttttcccagcctgaatagtaactaggacgccccctctattcgccctttaaaccagttgcccatcctgattgcccactgggtcaccccttctcttgccactttaatagcgccgggtcgttgtgtttactcccattgtttcctttacacttgcgagcgctttaccgcccaagctttaaatttggtgccctcctttagtggccccatttagcgctttcccgccccaagccctaaataaac

SEQ ID NO: 65622 - DNA, 287 bp, Zea mays
  Clone ID: MRT4577_159848C.1
gagcttattagtcggcggccgccctttcaaccttctttttctttttggtccgtgcggtcacaccggaaaagcgaagctaaactgaaaatttaaacagggtaggcctcgaaactgcctgtctgctggtacggactctaaatttatccggggtctaaccacgtcttgggaactaggtgacgaccttattttcccttgggcagttctgccatgtcacccccgccatggtcatgatacgcaccaagaacgttggggaactcaccgaacccgacctgttggtgaaggacttg

SEQ ID NO: 65623 - DNA, 332 bp, Zea mays
  Clone ID: MRT4577_159849C.1
ctggttactgttgggagtgataatagtaaggattctaaggatgcaaagaatagcaagaagagcaaagagaatgacgagaggcgtcaaccgcgtagttcgagaaggtcgaagtatgactcagacgtggctcacgatgatcacgctcatacgacgaagacttctcagcatgcttcagatgatgcttctgaggctgcttatgctgagtatgatgagaagaagtacaacaagtaccatcgtcttggtcctcatgatgctgctgatgatgctcgacatgatgcaaagcgtggaaagcgctctggttctgcgtctgctacagctagtgagcatggcgg

SEQ ID NO: 65624 - DNA, 131 bp, Zea mays
  Clone ID: MRT4577_15984C.1
gtcggaagaacaggaagcggcatatcatttctcatacaggccctctttcgtatcgtgggggcgactatcgtccagagactaatatacggcgtctacttctgcaccatcggtctgtatgatctgtgatctta

SEQ ID NO: 65625 - DNA, 815 bp, Zea mays
  Clone ID: MRT4577_159850C.1
aacaaactcttcttgccactcgcatatggcattgagccaaccaatcctcagagcaaagcctgtgttgttcaagcagattactttccccctgggcatttcttccacttgatattccaggctgaacaggtccagaaaccactcctcttccactgaacttccaaatgaaacatactctcattaagaaatggtatcgctgttgtgtgtagactttggtagccattaggttttggagttgcaatgtaatcttccacagcttgaggaacgggtgtccatatgccatgaacaaggccaagaacatgatagcagatctgttgtgcagtgcacaatggcccaacaccattgcaggattttgattttatgatgatcctcagctgagcaacctgattcacctcatttattgaactcttgtatttgagtgtagttttgtaaatgctgtagagctctttgtaaactgagcgcacttctgtttcaacactaacatgatcgagaaactgatcctcagcaatcttttgccttaaaattctatttgccggacccttgcttttcccttgaccatctctagcgcgagtccagcctctagtgatccctcacccgcacgggcgcagttgacacggtttttgctgaacacccccaaatatagtttgggagattaactgcacccagtgcttcggtggattgatatcatgcactgaagaacgagaaccttatggggagagagtagtagggattctgtgttccaaggtgacaaacacagacagagctgctctacaatctgaataatgatttataatcccggccggcctcgaggtacccaa

SEQ ID NO: 65626 - DNA, 289 bp, Zea mays
  Clone ID: MRT4577_159851C.1
acgccggacaccgacttagtcatcaggaacttttaagaaatcccgtgcggtgaggctggggcggagtatgtcaaggagtccaccctcgtcttcactgacaaggacaaggctgctgcacatttcaagggtggtgccaagaaggttgttatctttgccccaagcaaagatgcacccatgtttgttgttggcgtcaatgaagacaagtacacctctgatgttaacattgttttcaattgctttctacaccacaaactgtcttgctccccttgctaaagacattcatgacaac

SEQ ID NO: 65627 - DNA, 2383 bp, Zea mays
  Clone ID: MRT4577_159852C.1
gaccctcgaggctcggccgggtttaaggcaaaagattgctgatgatcagtttctcgatcttgttagtgttgaaacagaagtgcgctcagtttacaaagagctctacagcatttacaaaactacactcaaatccaagagttcaataaatgaggtgaatcaggttgctcagctgaggatcatcataaaaccaaaatcctgcaatggtgttgggccattgtgcactgcacaacagatctgctatcatgttcttggccttgttcatggcatatggacacccgttcctcaagctgtggaagatcacattgcaactccaaaacctaatggctaccaaagtctacacacaacagtgataccatttcttaacgagagtatgtttcatttggaagttcagataagaacagaagatatggatttaatagcagaaagaggcattgctgcacattacagtggaagaggagttgtttctggacctgttcggcctggaatatcaagtggaagaaatgccaaggggaaagtaatctgcttgaacaacacaggctttgctctgaggattggttggctcaatgcaatccgcgagtggcaagaagagtttgttggtaatgagttctagggaatttgttgatactatcacccgagatcttctaggaagccgtgtctttgtgttcactcctaaaggcgagattaaaaacctgcctaagggagccacagtggttgattatgcttatctgatccatactgaaatcggcaacaaaatgattgcagcaaaggtgaatggcaatctggtttcaccaatccatgtacttgcaaatgctgaagtggtggagattataacttatgataaattatctagtaagtatgcattccagcgtcaccagcagtggctacagcatgcaaaaactcgcagtgctagacacaaaattatgagattcttaagggagcaagctgctctttctgctgctgaaattactgctgacgcagttaatagttttgttgctgatcttgaagatgaaagtgatagtgagctttcacttccaagcaccaagaaagaagatagtaaattcaactgggagaagatattaagttctgataaattattctttgtcaacaaaagtagtgatggctttttacctgttaataatgtctatccaaaggtcaatgggaagcaaaacaaaactgttaaggatttgggcatcaaaatcaatggtcattctacaattcgaggtgatagcttcagtgagttaatgcaccctagcaattccacctgcaaggaagttttccctggtttggatgactggaaatctggtaaaatttctggttggcataatacggaaggcaactctgtccaatggctttgcatagcctgtgttgatcgaaaagggatgatggcggaggttacatctgctcttacagcttgtggaattactgtatgttcctgtgtggcagaagtcagtaaaaggaggggaatgggtgctatgctgttccattttgagggaagctatgagaacgtggtcagtgcttgtttgagtgttgacatgatttttggtgttcttggttggtctgtggggtgtagctggtgtccattgggtgctcttgagtgctaatgggtatcaagagacgtatactgcagtagttcaccactaatactatcttcctccaagatgatgataatgttggaagcaccaagacatcggtggctcaaaattttgttggtcagatccttaaaatctgggaacatagagcttgtccatattcctcattttggaaacgttcgtccgttccggagacgtgggaacaatctcgtcccccatctcatccttgtagtgttaaaatcctttttaagcacgttcccgttcctcaacctcatcgatccagaaacttggttgctaaggtcagatcatgattggacaggtgagcgagtggaatcctttacttctctgtcaaatcagaaagtgagggtgagcaaagtagaactagatatatatggttcattctgaaagtgagtgtacatagcagagtgagtagggttgggctatggctaacaaatcgtacatatgatcatgtaaaacactgttttgcattgcgaattacactgtttacattgtgtagtttgaaataagagatagagatgaataagctgccgactatggagagtcagtgcatgctgggattgattggattatacagaaggccttgtaaaagattgttaagggcggttcttctcactttgtggttcgcatatactagtttgcttaaatgtgcagctagaattttgacctggacgctaattccaaattttgtctgtgtttagtttccaaaaaatgcatgtaaatgttattgtatagcttcagttttgcgagtcaaaatttgagcatacttaactggc

SEQ ID NO: 65628 - DNA, 250 bp, Zea mays
  unsure (1)..(250): unsure at all n locations
  Clone ID: MRT4577_159853C.1
aacgctcgtgacgctacgcgggtccgaagttacattattgattcgatgagctgcactgctctttggccggccttcgtcctttttttttttttgtttttttttgacacagcatcggggatttaaaagacgaaaacataactaatttctcttacataaatctaacttaacacacagacataaaaaggaatggtttgcatctacttcacatggacgcatngatgccatgtaggacaggcctcttatcaaaacc

SEQ ID NO: 65629 - DNA, 374 bp, Zea mays
  Clone ID: MRT4577_159854C.1
aacacacccatttctttccggacacgttcttcgtcatacaacgggcaaatatgtcggacgctcagacgaagaagtttggaaagggcgagcggacgatccctcaccacagccagaaggctcagaagtggtatcccgtggacgatgagtcgcaacccaagaaagtccgcaagaccgtccgccccgccaagcctcgtgagagcctccagcctggtaccatcctgatcctcctcgctggtcgtttccgtggcaagcgcgttgttctcctcaagcacctcccccagggtgttctcctcgttaccggcccctttaagatcaacggtgtccctctccgacgggtgaacgctcgttacgtgattgctaccagcggcaaggtc

SEQ ID NO: 65630 - DNA, 329 bp, Zea mays
  unsure (1)..(329): unsure at all n locations
  Clone ID: MRT4577_159855C.1
ggcgacgggcgcgcagaagcngccgcggacggaggcgcggccgccgncggggcacgagggagcggngncggccgagcggcgcaaccgagacggcaannaccgccggagggggggcgaggaccgnacncnccgccagaggaacccccacacaggcgccaggccaagacccacaaggcccacgcccgcgaggnccgcgangngcacccnnccacggacaacgccaaacaggagnccagcggcgccgacagacaaagcnnccagggggacggggccncgggccgcgncanccgcaaggnccgcggccacaacagcgagggcaacccagcgaa

SEQ ID NO: 65631 - DNA, 273 bp, Zea mays
  Clone ID: MRT4577_159856C.1
ctctcgtcgtttatccgcctcccatccttgctaccctcctccgtgatctctgctcaccaattcctccaggattcggatttaggattgggattctggcgccggaaccgaagcggcgacgcgctggagccgcggccggatcggtgcgtgcttctcccgtacctattttttgatggccaatttttagattctgttgcggttgttgtatggaacgcgatccggttcagttggcgcaattccaaccggatttccgtttttcccaaccgcggatttctt

SEQ ID NO: 65632 - DNA, 209 bp, Zea mays
  Clone ID: MRT4577_159857C.1
agaaatgatttttttcttaagtgacaaagacgaccgcgttatggaaccggtatcgagttcgtctcactgcccactgttgctatcttcccgaccactcaggtgctaactgctttctgctcggtgcatagacttgatccatgagctgtacggcacacactctggttttgtcaggaccagaacactcgtattcatgcaatatggaagataca

SEQ ID NO: 65633 - DNA, 549 bp, Zea mays
  unsure (1)..(549): unsure at all n locations
  Clone ID: MRT4577_159858C.1
cggncgcgtgggtttttttttttttttttttttttttttttttttttttttttttagtacaacgcaaatctgtatagtttacaagtagcaaagacaatcccgcaaacctcaggcttgcgaacaaaattttactatacagaaaactatcttggggtattgttttccatgatttctgtttccgatcgctcgcttatcgtcacaaataaaaatggtacatcgcaatcgcatcacagttaaggctgggggggtatactggtatgcagggaatcatacctctgttttcagctagcatccttgtccgtttcaaatctgacaattggcaggttccttctgtactggggggaagttaatctcctctccaatggggtcttcctcttgctcacaacgaatctgtttacccccttcctcatcggcattatctcagggaagtcctcgtccggaatgttcgctagctcaaagatgtcctttatctgagctgccctcctaaaccatctttcagccttagcttcctcggacatgtctaggggatcaggatcctttacagcagat

SEQ ID NO: 65634 - DNA, 565 bp, Zea mays
  Clone ID: MRT4577_159859C.1
gtggggggggggtttttttttttttttttttttccccaaaaaagcaccttttggttttttcaataggcgcacaaaattacctttggaaaggttgggggattgtttggttggccctgggggaaccaaggggccaaaccaaatggtggcccccccactgggtgggggggtcaagcaatctcccgggccgaataaaatagatggagatgggcccccccctcctttaaaataaggcatgccacatctggacctaaaaatggtatttgggcctcccttttggggcttcatgccaaaggaaacccccaccctccaacttggcttggtggtctaagggctactttcatcactcgggcttttcccatttttttcatttgccctggcttcatgatgttcacttttttggaggccctattcatcatttccaacaaatacttttggggccacaaggccctgggaatgggaagcctttaaaccggccctggaaattggcctttggaccttggtccctttcccaacacaaaccttcggtttgggttttggcccgggattcccggcccggcccctgggg

SEQ ID NO: 65635 - DNA, 803 bp, Zea mays
  Clone ID: MRT4577_15985C.1
cattgggtacctcgaggccggccaggatgcctcttatctcaaaccaatatatatacctaccagctagctagctagccatctcatcgatctctagatcgagcgagctcatcactgacctaataagctactcgctcttaacgactgtgtgtcatcaaccatgaggcacagcagctccctagcaaatctggtcgacaggcagctccacaacctctccacgtcgaagatgaagatcagcaacaagagcgcccccgatctgctcaagaaggccgtgacgtcgatcaagagcaagaccgacgccctaaggacgaagctcatcatcctggcctcgctgcgccgcaggatggcgatcgtcgctgccgtgtctcgcaaggtccacacgctcgtgtcgtcgtcgtccagccaggagaaaatggcggcggaccgccgtcacagcagggctctcgcgctgagcaataaggcaatggcgacgccaagcgaagggccgccggccactactggtggtggtggtgaacgcggtggtagtaataataaggcccatctcagtctctttgagatcgcggggttcgacgaggatgacgaccatgtctaccgtggtgatcattattggacgagcagttccctcttcgacgatggcaattatcgttgcagtaatgaggaagaagaagaagacgtccaccaggaagacggtgctgatgatctcgatgacgttcttggtgcgctccatgagccctccgtcatcgaggtcatcaggagcaaccgggaggctgaaggtctcaagttcaatatagacgatgagattgacg

SEQ ID NO: 65636 - DNA, 131 bp, Zea mays
  Clone ID: MRT4577_159860C.1
gtacaattaaaacatgcatttgaaaaagtactcgatacacgagcgcgcactttggagagaattctgggggcaatcaactcaacacaagtgtccttaataagggagcctttgaacaaagcattatctgaaaa

SEQ ID NO: 65637 - DNA, 175 bp, Zea mays
  Clone ID: MRT4577_159861C.1
taatcaccagaaccggagacgatctcttttttattgtaaaaaaaggcagacaaaacaaccaagtgctccaccagcacacaagatcaacactcggcggtattgcctccggttaacaatctacaaacaatccccaagagaaaaatttttgttacccgaggccctcgcccgatgaaca

SEQ ID NO: 65638 - DNA, 181 bp, Zea mays
  Clone ID: MRT4577_159862C.1
ctgtgaagagactctgtttgcttgtgtttgtttgtttgcagtatctctctgccatggccttggcaggctgctggaaggcagcttgtggaggccgttggttccgcccactcattccttctcgtgcactgctttctccttcacagctaagatgccatgtgcaggtggactccatgccgcagac

SEQ ID NO: 65639 - DNA, 429 bp, Zea mays
  Clone ID: MRT4577_159863C.1
aaaaaaacagggaagctccaattggtaatgggaacagccatgattatgattcgggatactgccccagcctgcagatgttttcctagctaaagcctccttcattcataaagaaagaaacccagggcccgataatggatacatagtacaaacagactccaaagcgtcgcgcaagaaaacaccacaacttcttcaaagattggaaaggttctaaattaaaaccaaccttgatcttagctaaaaatcaacagggccaatgaactgcttctagtgacgtaatgacacccccagatatttgaaggatgcgggaacaaacaagccaaagcccttggggatattcccatactccacaggtcccaagcacgcattctgaagcttatccctgaactcaaatattctagcactcccatcaagctttgccctgtgtgcaag

SEQ ID NO: 65640 - DNA, 195 bp, Zea mays
  Clone ID: MRT4577_159864C.1
caggcgatcctacacagattacctccacacatgcaacctagttattctatactgtacctaaatagctagccgaggcatcctcatagatgcttgctgactcaaattgatatccgatcacaatttcatacaacataccagacctccgaggcagggcttaaaactctggtgcctaacgagtgacactaactcacatta

SEQ ID NO: 65641 - DNA, 386 bp, Zea mays
  Clone ID: MRT4577_159865C.1
gacaaagcccaatacaaccaattctcatatcctgacaatggcacacatacttgggggcattgtcatcctcggcggcacctatgcaactgctcttaccgcgtccatttccgcaccatggtgacagactgccttcgcttcgtaccaccacacgatccacgctctaccgggggatacagtctgtccaaacgccattgttcaccagtatcggaaccaacacgtactggcagttctgatcactacttttatgacccttgccactgaaccaaatatcacacctataactgcttactcccttacagtacatatattggcacagaacatcaagccacaacaatatacaacatctagcgctagcaaacttcactgcctactctgagaaacaacaa

SEQ ID NO: 65642 - DNA, 600 bp, Zea mays
  Clone ID: MRT4577_159866C.1
atctcctcttgtggcagtccagtgagcagatcatcatcgcctggcgagctgtcgtcagcttcctcattggtgccctccatggataggctcgtcgccgccggcatccttggctttctactgattgcgtcggtaggaagccatgcagctcgtgctccggagcaatactggaagtctgctcttcccaacacacccatgccaagctccctctctcaactcctaaacaatcaagccgggggcacgtcggtgaacatcggctcaggcggtgtccatgtcgacgcgggtcatgggatgcccggcggcacgacggtcgatgttggcaagggtggcgtcggcgtcaacgtcaagcctggcagcgccaagcccggcaggactacggtcggcgtcggcaagggcggcgtgggtgtcaacgtcaagcctggctacggcaagcccgggggcacaaccgtgggcgttggcaagggcggcgttgacgtcaacgtcaaacctggcagcggcaagcccagcggcacgacggtcggcgttggcaagggtggcgtgggcgtcaatgtcaagcctggctacggcaagcccggtggcaccacggttggaggacgaagggag

SEQ ID NO: 65643 - DNA, 711 bp, Zea mays
  Clone ID: MRT4577_159867C.1
gaatacggccgccgccgccgtcctccttcgcgccgccctccgccggagccgccccgccgcggcagccctcctcctcccccgtacccttccttccccgccagttccgctacctccccctcctctcgcctgtgctttacctctcctcccgcgccttccattcgccgccggcttcccgtactccaccgttgcagagatatcggaggcccccgcgaagcccaagggcaagccaaagaggagcccaatgaagcagtcccgcgtcgacttcaccaaggtggacgcggcgcttctccccaccatcatcctcgtcggccgccccaacgtcggcaagtccgcgctcttcaacagattaatacggaggagggaggcattggtgtataatacacctggagaccatgtcacccgcgacatccgagaaggagttgccaagcttggagatctccgttttcgcgtgcttgactcagccggacttgagactgcagcaacatctgggagcattcttgctcggacggttgatatgacagggaatgtgttggtcagatctcaatttgccattttcttgattgatgtgagggatggtctacaaccgttggatcttgaggtcgggcaatggctgcgaaaacatgcatctgggatacataccattgttgcaatgaataagtccgagtcacttgatgagcatggagttttgacctccggttgttggagaagccc

SEQ ID NO: 65644 - DNA, 196 bp, Zea mays
  Clone ID: MRT4577_159868C.1
acgattgattgagatttatctcaaaaaaaacaattcatatacaaataaataaaaaaaaacaaaagggggggtttctttctaacaggacctagctttcatacacaaacaggccgcccgttctataggattcaagcgtcacgtaacataccattcaacgtcctaacttttataaagtgtaacctaaataaaatccact

SEQ ID NO: 65645 - DNA, 170 bp, Zea mays
  Clone ID: MRT4577_159869C.1
ctttatagcggggcgcccttttttttttttttttatataattccaaataatccttcggttcaaaattcccaaaatcaaaggcgggagcaaaccaaaccattttgcttttggaaacggaaggaaattttaacagtgctggcacatatataatacaccctagcattcaacag

SEQ ID NO: 65646 - DNA, 710 bp, Zea mays
  Clone ID: MRT4577_15986C.1
cattgggtacctcgaggccctcgaggcgggccgggacgcgataccccatctacaacacccggtcctactaacacacagtcaaaatgtctgcccccaaggtcaagaccgcccagctgtggaacaagtccaaggatgagctcgcgtctcagctcgccgacctcaagtcggagttgatccagctcaggaccgccaaggttaccggaggctccaacaccaagctcacccgcattcatgacgttcgcaagggcatcgctaaggttctcaccgtcatcaacgccaaccagagggctcagctcaggctcttctacaagggcaagaagtacactcctctcgacctccgccccaagcagacccgcgccatccgccgaagactcaccaagcatgaggcttctctcgtcaccgagaagcagaagaagaagcaaacacacttcccccagcgaaagtacgccgtcaaggcataagcgtgcttttgcgaaggtgtttctcttttcttcctttgtctcatgaagcattgcattgccggggcttttccagctagcgactcacccgtgtactcgtagtaccatactccagaggagcgaggaaggtggcgtagcaaatgggggtggacggacagggcgatctttaacggaaatgggttggcgtccatgtcaagatctatgaataaaaaagttcataaaaaaaaaaaaaaaaaaaaaaaaaaagcggcc

SEQ ID NO: 65647 - DNA, 2727 bp, Zea mays
  unsure (1)..(2727): unsure at all n locations
  Clone ID: MRT4577_159870C.1
cctcgagggcctggccgggaaaaaaaaaaaaaaaaaaaaaaaaaaaaaaaaaaagaaaggattccacgctgccctcggcgctgcgcctggccccggcacctacctcccccctccccacctcgccgccggcgggtggagtcgggctggagcagccgctctcctctgttaccccctaaccccctataaagaaaaagaaaaaaacagagagagagcgagcgaccggcggctcggcagccatggggcacggcgtcagctgcgcccgcaccggtgacgagcacgactacttccgcgcggcgcaggtcggggacctcgaggccctggaagcgctcctcgacgctgacccctcccttgcccgccgcgccacgctctacgaccgcctctccgcgctccacatcgccgccgcgaatggccgcctcgaggtgctgtcaatggtcttggatcacggggtgccgccggacgtggtgaatcggcacaagcagacgccgctgatgctcgcggcgatgcacggcaagaccgactgcgtgctgaagctcctgcaggccggcgccaatatcctcatgttcgactcccagcacgggcggacctgcctgcaccacgcgtcctacttcggccacgtcggctgcctgcaggccatcctcacggcggcgcggaccacgccggtggccaactcatggtttcctggtagcacgtcgctgcacctcgccgctcgcagcgggagcctggattgcacccggaagctgctcgcctggggagcggatcgtctccggagggatgttgccaggaggatcccttacgccgtggcgctgaagcgcaaccacgaggcgtgcgcggcgctgctgaacccgtcggcggcggagcccatggtgtggccgtccccgttcaagttcatcagcgagctggagccggaggccaaggcgctccttgaagcggcgctgacggaagccaacagggagagggaggagaagatcctcaggggcaccaagcactctccgcatcctcccacctgggaccacgcgagcgacgccgccgacgccgacgccatcgacgacgcgtcctcagatgtatgctttgtgaccgctgacaaatgtgggacctgatgcatcatcgcccattttgcgctcacttgacttcactcacagcccagcgccagcgacgcggagctgtgctgcatctgcttcgagcaggcgtccaccatcaaagtgcagnactccgggcaccaaatgtgcccggcgtgcacactggcnctgtnctcccacagcaacccaaacccgacaactctnacgccgccgtcnccggcctgcccgttctgccgcggcagcatctcgaggctgctggtggcccgggcgagcccccaccccgatgacggcgacggcgtggacaagcccgagcacgacctgtgatcggcatttgatgctgtgcgtggctgagcagacagcagagcacgaccattttaaaagctgaagcaggcattgccactggctttccaagatgagagacatcacatccaagcgtgattatctactacttgtaatgcatcctcttcttctcccccatgtctggtctatttttgggcatgcagctgcgcgatacggttgagctgagcttgagccaccgatgtgcactggactccgaaggaggcattgcatgttgtaggacagcacagcagcaacagtggtaccggtcggcaggcaggcaggcaggctccgtgagcggtgctccggccatggccgtccggaggtggcagccagccaatggtccgtgaccgtgatgcacgcaggagcggtgcatggagcgaggctcagagcagccgcagttattgtgtgccagtgtcgtacaagcgctgctcacaccacaggcagcagatgcatgccgtcactgaccagctgctttcctgcaagatcttctcgggagctatggtcggtcaggcatgctgcaaaagcttgaccccttgccaggaaggaagcagagataacccatccctacctccctcgacgtcgacgagatggctatccgtttggacatgaccaagagtaatgctcccagtttcgagcccaacgccgccattactccgacatcacccaagccttacctccgctccaagcgtgtagcccggctacaggctcaaaccctccaggcctccaccagcaaaatcgtgatgcttttctaaaatagccaaatatttaccagcaaaataaacataaacaatcaagattaccttcgagcaggcgtgcagcatcgaggtgcaggactgcgggcaccagatgtgcgcggcgtgcacactggcgctgtgctgccacagcaagccgaacccggcgacgctgacgccgccgtcgccggcctgcccgttttgccgcggcagcatctcgaggctgctggtggcccgggcgagccccgacgccgatgacgacgacaaggccgccgccgcctggtccccgcagctcgtccggcggcggtcgcccaacctcaaatgggcggcggcgacggcgtggacaagcccgagcccgacctgtgatcggcatttgatgctgggggtggctgagcagacagcagagcccgcccattttaaaagctgaagcaggcattgcccctggctttccaagatgagagacatcccatccaagggggattatttactggagtacttgtaaggcatcctctttttctccccaaaaaaaaaaaaaaaaaaaaaaaaaaaaaaaaaaaaaaaaaaaaaaactcgagaagggg

SEQ ID NO: 65648 - DNA, 312 bp, Zea mays
  Clone ID: MRT4577_159871C.1
caacagaatgctggtagatcaggccttatacagtgacaagggagacgttcatactagcggaactccaatctctcggtaaaaatatgggtcgggtcagtggcgaagcttaggccgaatccatggggtgtagacactgtaccatgctgtgtttagcatttaagtgtgcctatatcagcacgtctcatgactagcctcagttttcgtactagtcgatgtccggcttatattgatcagcccaccctgtatgctacgctggtcccgtatgatgcatatcttccggcttgttggcagtgttcaaggcccttggctcta

SEQ ID NO: 65649 - DNA, 2077 bp, Zea mays
  Clone ID: MRT4577_159872C.1
cattggctcactcgaggccggccgggctggcgggggaaagtgatggctccccgcgggccgggccggatcccacgctgccctcggcgctgcgtctggacccggcacctacctcccccctccccacctcgccgccggcgggtggagtcgggctggagcagccgctctcctctgttacccccctaaccccctataaagaaaaagaaaaaaaacagagagagagcgagcgaccggcggctcggcagccatggggcacggcgtcagctgcgcccgcaccggcgacgagcacgactacttccgcgcggcgcaggtcggggacctcgaggccctggacgcgctcctcgacgccgacccctctctcgcccgccgcgccacgctctacgaccgcctctccgcgctccacatcgccgccgcaaatggccgcctcgaggtgctgtcaatggtcttggatcacggggtgccgccggacgtggtgaatcggcacaagcagacgccgctgatgctcgcggcgatgcacggcaagaccgactgcgtgctgaagctccttcaggccggcgccaatatcctcatgttcgactcccagcacgggcggacctgcctgcaccacgcgtcctacttcggccacgtcggctgcctgcaggccatcctcacggcggcgcggaccacgccggtggccaactcatggggtttcgctcggttcgtcaacgtgagagacgaccacggcgccacgccgctccacctcgccgccaggcagggccgccccggctgcgtgcaggcgctgctggagaacggtgccatcgtctccgctttgaccggctcatacgggtttcctggtagcacgtcgctgcacctcgccgctcgcagcgggagcctggattgcacccggaagctgctcgcctggggagcggatcgtctccggagggattcagcagggaggatcccttacgccgtggcgctgaagcgcaaccacgaggcgtgcgcggcgctgctgaacccgtcggcggcggagcccatggtgtggccgtccccgttcaagttcatcagcgagctggagccggaggccaaggcgctccttgaagcggcgctgacggaagccaacagggagagggaggagaagatcctcaggggcaccaagcactctccgcatcctcccacctgggaccacgcgagcgacgccgccgacgccgacgccatcgacgacgcgtcctcagatgccagcgccagcgacgcggagctgtgctgcatctgcttcgaccaggcgtgcacgatggaggtgcaggactgcgggcaccagatgtgcgcgccgtgcacgctcgcgctgtgctgccacagcaagcccgacccggtgacgctagcgctgccgtcgccagcctgcccgttctgccgcggcagcatctcgcggctgctgctggtggcccgggcaagcagcgacgacgcagacaccgagaagtcggcggcagcggctgcggcagcggctgcctcctccccgcagctcgtccggcggcggtcccggcggtcgcacaacctcagcgacggcggcagcagcagcttcaaggggctgtcgtccgccgtggccggttccttctccaagatcgggcgcgggtcgagccggacgatggccgacagcgacggctgcggcgtggacaagcccgagcacgacccgtgatcggcattggatcctgcgcatgtggagccgagcgcggggccatttgcggacatccaatcgaatccaagccaagcgtgactgcttgctgcgaaaataaccgcatccttttcttcttcttctccccatgtccctgtctgtcaatcctattcttgggcgtgccaggatttgttcacctggccattgccgtattccattgtcaccgaccggctatagtatatagtactagattccatttccataaaaaaaaaaaaaaaagcggcctaaaaaaaaaaaaaagcggccgtggccaacagcaagactactgctacctccaacagcttcaggggactcacctcggccatcaagtccttgtccttgtccaggattgctcgtggctccgggagggtagccgacagctcattaccccaatcattc

SEQ ID NO: 65650 - DNA, 2344 bp, Zea mays
  unsure (1)..(2344): unsure at all n locations
  Clone ID: MRT4577_159873C.1
aaaaaaaaaaaaaaaaaaaaaaaaaaaaagggacacccccgggcccggccgggattcacgctgcctcggccggcacctacctcccccacttcgccgccggcgggtggagtcgggccggagcagccgctagctcgcctctgttacacccccccccccccaaaaaagacaaaaaaaaataaagagagagtaccaagcaagccgccggcagctcgggcagccatggggcacggcgtcagctgcgctcgcacgggcgacgagcacaactacttccgcgcggcgcaggtcggggacctcgacgccctggacgcgctcctcgccgccgacccctccctcgcccgccgcgccacgctctacgaccgcctctccgcgctgcacatcaccgccgcgaatggccacctcgaggtgatgtccatgatcttggatcacggggtgccgccggacgccgtgaaccggcacaagcagacgccgctgatgctcgcggcgatgcacggcaagatcgactgcgcgcggaagctcctggaggccggcgccaatatcctgatgttcgactccctgcacgggcggacctgcctgcaccacgcgtcctacttcggccacgtcgactgcctgcgggccatcctcgcggcggcgcggaccacgccggtggccgactcatggggtttcgcccggttcgtcaacgtcagggacgaccgcggcgccacgccgctgcacctcgccgccaggcagggccgctccgcctgcgtgcaggtgctgctggagaacggcgccattgtctccgccctcaccggctcctacgggttccccggcagcacgtcgctgcatctggccgctcgaagcgggaacctggactgcatccggaaactgctcgcctggggcgcggatcgtctccagagggactcagcagggaggattccttacgccgtggcgctgaagcgcaaccacgcggcgtgcgcggcgctgctgaacccgtcggcggcggagcccatggtgtggccttccccgctcaagttcatcagcgagctggacccggaggcgaaggctctcctggaagcggcactgatggacgccaatagggagagggaggagaagatcctcaagggcatcaccaagtattcgcagccatcgcctacttcgccttgcgagcacgatgccattgacgaagcgtcctcggaggccagcgacgcggagctgtgctgcatctgcttcgagcaggcgtgcagcatcgaggtgcaggactgcgggcaccagatgtgcgcggcgtgcacgctggcgctgtgctgccacagcaagccgaacccggcgacgctgacgccgccgtcgccggcctgcccgttctgccgcggcagcatctcgaggctgctggtggcccgggcgagccccgacgccgatgacgacgacaaggccgccgccgcctcgtccccgcagctcgtccggcggcggtcgcacaacctcagatgggcggcggcgacggcgtggacaagcccgagcacgacctgtgatcggcatttgatgctgtgcgtggctgagcagacagcagagcacgaccattttaaaagctgaagcaggcattgccactggctttccaagatgagagacatcacatccaagcgtgattatctactggagtacttgtaatgcatcctcttcttctcccccatgtctggtctatttttgggcgtgctaggatggacctggccggcgcgatatggttgagctgagcttgagccaccgacatgtgtgtaaaactgtcggtcgagagaacacgcagagtggaaccggcgatgtgcagtggacttacttgtaaaaaaaaaaaaaaagggcggccgnnnnnnnnnnnnnnnnnnnnnnnnnnnnnnnnnnnnnnnnnnnnnnntccgtgagcggtgctccggccatggccgaaagaccggtggcagccagccaatggtccgtgnnccgtgatgcacgcaggagcggtgcatggagcaaggctcagagcagccgcagttattgtgtgccagtgtcgtccgagcgctgctcaccccacaggcagcagatgcatgccgtcactgaccagctgctgtcctgcaagatcttcactgtgctagagctatggtcggtcaggcatgctgcaaaagcttgaccccttgccaggaaggaaccagagatagccaatccctacctccctngacgtcgacgagatggctatccgtttggacatgaccaagagtaatgctcccagtttcgagcccaacgccgccattactccgacatcacccaagccttacctccgctccaagcgtgtagcccggctacaggctcaaaccctccaggcctccaccagcaaaatcgtgatgcttttcta

SEQ ID NO: 65651 - DNA, 2164 bp, Zea mays
  Clone ID: MRT4577_159874C.1
tcgaggccggccggggtctttctccccaccctgtccgtccccgaaaagctcatcgtgcttataaatacaggacccacccgtatcggcgggcgcttccgaatttccgatcgagctccagcccccaccggataccaccgcctccaccaaccgattccgttccgtccccccggccccgacctcgtcaccaccggtcacgctcgagcgggaggcttctctcgccacccaccagcggattcctacagctcccgcgccgatcgcgtcgcggacccgtccggagggagaggtgatgataaaggatatttgctgaccaaacttgcagtatttctccttaaggaaatagaaattggcgtcatgtcatatagaaatatgctctggacacatcagtccgttaatcctgaatgggagcaaggacatgtccaagtccaaccaagaagttcctattatgcaggcactgtaagtgattcatccaacctgggcatgcaagttgctgttggtgttccagtaaatactgttaatgttggtatatgtgatctgtggaatcatgagcgcctgcctgttcataattcatacccacatgccagtgttacatcgagatttgtcctcccaactagtatgtacaacccttgcatgccagcagcagctgtcaacatatatattcctcagactcaaagctttggactgggcaatgtgctaccaccatctttacatagtcaagtttccacaggaactattgatgagaataacagcagtttcaattttggtgatagtgccattggatccatgaaaaggaaaaccgcagtagttgccggaaaccatcacattcttcatggatttgctggctcaagttcatctgttcatgtccctcagaatcctgtgtatgggccatggaatgcttcatctcaatcaaattgtttacccagttctgcagcttcaaacctaccagaataccacaatagtaatgggtggccgttcttagaagaatcttctgcaaatgcttcaaacagtttcacttcagtggatgcttgtccagagttggtacctcatggtaacaatttatatccagcttgtcacataatacagtgcaatacatgggttccacagactgcaagtcatggaataccacagtggggatatggtaatgtcatggtcaatcctccaggaaccgtagacatgccgaatggaaatattcaggattatcaagctgggcattcttctattcatgggccactacctcatttctgccagattcctttgcgtagtatgcaagtacctcaaatacaagtaccccatcaacagttcatcggtaacaatgtggtgcatggtttaaatccttcagccgcaggccttccgttagatccaagaatgctggctttcccattcaatgatgagcacacttttgggcatcaagtgcatccacctctgataaaccaagccaacaatggggctttaagaattctgccatatcagaatgctacagtgatggatcattcaaggatttatgaagcaggacatgttattgatgaacatagagatatgcgtttagatgtggataacatgacttatgaggagcttgtagcattgcaagagcagataggtgatgtcaatactggtttgacagaaagctatatccaagaaaacttgaggtccacttttcatgttccaggagcagctagcatttctgatcatttctgtgagctttcgttagagaacgatgcttgcataatatgccaggaggagtatgaagctagagaacttataggagcccttgaatgtggtcacaagtaccatgaggattgcataaagcaatggttgatggtgaaaaacgtgtgccccatctgcaagacaacagctttgtcatcagatagaaggaatggatgatcttcgccagtaacattattggttatttaccgcgtggcaagttagcgcgattttgtatatagacagggttgcctttatttgccgtcccccttcgctgtggacataaactgtacagatattattttgtaggatattttagacgttaaatggcaccatggtgtgtaaggctcccatggttgccttggtagatcctcccttcctttacattgtatttatctttactcttcaaaaaagaagcccgaaaacatgtatattttggaagtgaaagaaccgattttttttcttc

SEQ ID NO: 65652 - DNA, 609 bp, Zea mays
  Clone ID: MRT4577_159875C.1
actcatctccgaaagaccggcgactgcgaactagcctacctccgcgactgaagacgtttcgcgcttgtcgcaacccattacgccggacgcagtttgacctgaacgacgacgccacgactggcagcgatattactatcccacggagccacgccggaaaccacatcggccacccgagctgcaagctacgctgtctcgagcctggcgtgccagcagaccgccagatgcccgcatgccagacccttctgggaatatatgatgcttatcacacctgcatcagcgacactgctcctgggaaccaccagccccacgcggtttctcttctacttgcacccactgacgtcaacaacgagagaactggtacctaccgccaattcttccaccctgagaaactcatcacagcgcgacaggatgcccacaacaactgtgcccgcggacactacaccattggcgatgagattgagaacctgctgactggatagcatcacgcttctggtcgacgactgcactgatatcctccgcctcctctatgtactctcatctgatggacgaactgcctatgggctttttgcccccctcctatatagcctggctgatgactacgccatgatg

SEQ ID NO: 65653 - DNA, 974 bp, Zea mays
  Clone ID: MRT4577_159878C.1
cctcgaggccggccggggccatccttcaccgtccctcccccctccctccgccagattccctctcctcgcgcgcggcattccgcaacggcgcatggcatggccaccccgggggccacctgcgccatctcctcggcgctggcccgcccgccggcgctcctcgactacgccgccatccacgcgtgcctgctccgcggcgacgcgcggcgctccctgccgctgctcgcgctgctgctcctcctccacttccgcctcctcgccgccgcggcctcggcgcgcttcacaccggcggtgtcccgcctcgccgcgcgcctgcggctctcgccgtccatggccgccgtcacgctgctcgcgctcggcaacggcgcgcccgacgcgttcgcgtccgccgcggcgctcggcggcccccggggcatgcccagggccgggctcgccgccgtgctctccgcgggcgccttcgtctccgctttcgtcgtcggggccgtcgcgctcgtcgccgcgcccttcgccgtcccgccgccgtcgttcgcgcgcgacgtcttcttctacctcctcgccgcgtccgcgctgttctacgtctacctcagcgccgagatcttcctctggcaggccgtcgggttcgtgctcttctatgccttcttcgtggggctagtcttctacatggatttggggagcgcggacgggaagaaggcggtcagcgccgcggcagctgacctggagatggtgagtggcagtgaccgtgtggcggtggacctgccgatcacagtggaggatcacaggcaacaacgacgacccgcttgctgtgcgttgctctggaaggtatgcattcaacaactcaaattgttaatgaccaatgcgctagtacttgaccgaaacatcaatcctagtctgtttgatggtgtctgcagaaccacactctcacctgaaaatgctgaatgtaatgggttttttaatcggcaaatctcatactttcgccc

SEQ ID NO: 65654 - DNA, 518 bp, Zea mays
  Clone ID: MRT4577_159879C.1
cgcccgccgtggtcgcccaggtgctgttcggcggcggcgaggtgcgcctcgccacgcgcaccgccgtcgacggcaggctcagcctgctcggcgggctctacggccgccgcaccgtgcgcgtcgccatgcggtgccgcgtcgcgctccgcgtctctgccgcggccgtcgccgtcgccggcaaccccgcgtgcgtcgcggacttcgggcgctgacgtggtctactcttcgtcagctgtagtctgtgggtgagccggccggtgtagtttttgccctttctctttaccgccggcgatgaccggcggagatagttacggtggcagctataactgaactgccgccgaatgatgatccaataacactcctgtcggctagtctcgtttacagaggacagactttgggcacaattcgatgaccaattgatgatggtgagtcagttattttgactggtggcggctaagctataactgagctgcagcctagtggtgctccaataatactcactagtatttggcgcgccg

SEQ ID NO: 65655 - DNA, 1125 bp, Zea mays
  Clone ID: MRT4577_15987C.1
ggacgacgacgtctacggcgaccccaagatgatgatgaagcccatggctgtgccgccgccggccggcgggggcgacaagaagggcggtggcggcaagaagggtggtggtggggggaacgagatcccggtgcagatcaagggaaacaaccacggcggtgccggtgggcagccgcacaatgcaaagggaggcgccccgggaggcggggcccacctgggccaggggaagaagggcggcggcagcgccgccgccgtcggtgtcggtggcccgatgggcggaatgctgcctcaacaaggcatgatgaggcctcctaacattcttggtggtgctggtgccggcttccccagcacggcccagatgggcggcggacctatgggcatgccggttggccacccgcacatgggtattatgcagcagagcggcggtggcggttgcggagctggcggcatgccgggcctggggttccacccgggattgggcggcggaatgcattctggggcggatatgcttcaggccgccgcggcatccgggaaccccgtggcgcagcagcagtacatggccttgatgcagcagcagcagcagcagatgatgatgatgcagcagcagcaacagcagcacgggaacggcggtgcaggatacccggcggcaatgggctacggctatggccggccaccgatgcattacccaatgggctacccagtgctgcccccgcactcgcatgctgagccttacaacatcttcagcgacgagaacgccaacagctgctcactgatgtgatcagcaattccgcatggaatggccctgttccaagtaaaccatctcaaggagctcaatgtcaccgctgatcaccgacagacatcgccatggttgaagcgccgtgaatcaatcaacaatcagtatgcttggggatgagtcctagctagaaccctgtccctttcctgctccttccccccctttctctagcttattttcgccttgcttttaaaaaaaaaggaacttccttgaatgcgaagttaggtatagtaattatgaggttccctcctggcttcataaaggtggactaatggtagaacaatgttgtcaatctcagtcgtaaatcagtgtgaatatgtcgtgatttctcttct

SEQ ID NO: 65656 - DNA, 1029 bp, Zea mays
  Clone ID: MRT4577_159880C.1
gatcatccaccgtggcctgctagtggtggtggagtcctccgctaccgtgacagcctgcgagttcgccgtccgcccgtccgcgtcctgccgacctcatccacgccggcgtcggcacgcactccgcgcccgcctccacggaccgcagattcgctgtgacgccatcagctgcgccgcgcgccctcaggcctgcctcagccgcgtcgccgcgcccgcctcaggttgctcagcccccacgcgcgctgcgcctgcctcagtccccacgcgtgcctgccggcggccggcctcacgcctcagccctcaggcgctcaggctcagcagcgcctgcgccacgtgccgatgcgcgccctcctggccgccgcctccctgcttcgtggtgcctgcagcctgcctgtctggtgctagaatctgttcctggatctgccactgctccacggcattgtgcgaagccgcgtcgccagagggatcaagaggcctggcctggagtcgtcagcgtggtggcgcctcctccaccccacagcacccatgtcctccgcctcgtgcctcgtccatcccgctccaaggttccgggttcggctcctgcctctcccctcctccgtcaccgcgaggccgttgcttggcttcaggcctcggtgtggggctccagcgaagggatgggcattgtggcacgtctcatgcttcagaaatggtcaggatgggccaacaacatctgacgaaggtgatgacttcaagtatgttgcccaatcacagagctctggtggtgcagaggtgaaaaaggaagtggtgagtagcttaaacggggagcaggagcagaatttgaaggacgacgattggttcctgcaactgcagaagataaaagaaaatttactaggcaggatagtaaaatttcagacagaacgctggatagtaccttggactggacaaaccattgctcaggtgatgattttatggattgccacattttggtttgtgggttcctggatagtgccattggtggctcatgctgctgggtttagcaaggaaacattaacg

SEQ ID NO: 65657 - DNA, 1189 bp, Zea mays
  unsure (1)..(1189): unsure at all n locations
  Clone ID: MRT4577_159881C.1
cccgggcgactccatcgcggcggggagcttcccggagtggacgctgtacgtgcaggtgatggacccggacacggaggagcagtacgacttcgacccgctggacgacaccaagacgtggccggaggacctgctgccgctccgccccgtggggaggctggtgctggaccggaacgtggacaacttcttcaacgagaacgagcagctggcgttcggcccggggctggtggtgccagggatctactactcggacgacaagatgctgcagtgccgggtgttcgcctacgccgacacgcagcgctacaggctgggtcccaactacctgatgctgcccgtcaacgcgccgcgctgcgcgcaccacaacaaccactacgacggcgccatgaacttcatgcaccgcgacgaggaggtggactactacccgtccaggcacgcgccgctgcggcaggcggcgccgcccacgccgctgccgcccaggccggtcgcggggaggagggagaaggcaaccatacgcaagcccaacgacttcaagcagccaggggagaggtaccggtcctgggacgccgaccgacaggaccgattcgtgaggcgattcgccgactcgctcggacacccaaaggtcagccaggagctcaggtccatctggatagacctcctcgccaaggtatgtggatggcatggcatgccagtggcacacgtgttttcgttcgatcttagctactcatgcatgatatacgtacgattgctttgcatatgcagtgcgacgcgtcgctggggatgaagattgccacccggctcaacatgaagccaaacatgtgatgcatcatgcttgtgctcaataataataaagacgcatgcatgtcgtcgccaggagcaaagatcgagaaataatacaagaccagcacgcatgcatgggcatactgctctatatacttccaccgtttctttttatatgtcgctggatagtgtaaaattgcacctatcccagcgnncaaaataaagaaacggagggagtatatgtatagcccgtgcccgtgcccgtgcccgtgcccgtgcccgcctttgtaccaatacaagccaaaccaagtggatgtgtattattattattattattgcgctatcacatacatgtacccctgcctgctacctgaagatggatgtgtatccagttatcaaattaaggcccaccagc

SEQ ID NO: 65658 - DNA, 534 bp, Zea mays
  Clone ID: MRT4577_159883C.1
gttttgtggtgtatggtggtggctcgtcgaattattatgggtcacatggattacaaagcgtgtttggtgacacatgactgattgataagcagttgttgactcatttgtatctacatgatagatttttgtgtttttttaaatctctctcatatctgattcctgaagctgtcgacgttggagcaatggcgtttctctggtcaattgggtggtagtagtgccgacgtgaggtgctccactaaagagaattttattactgtgaaccaagttggtcgaaaaagcaggagctgggaagcgtaggtgtccatttctgccaaagatcggtggcatgataggggtaacagttgctgcgaagtccaattcggaaagcgatgcgctgagaagacgccggtgcctgttctcttcctgcgagctgcgctttctagggtcgaaacattggtttcctggtgtaattttatcgtctgaatgtactgtagtgtagtagtagcatttcactctcaacatgttttttttccttctaaaaaaaaaaaaaaaaaa

SEQ ID NO: 65659 - DNA, 329 bp, Zea mays
  Clone ID: MRT4577_159886C.1
agataaaaggagcaatacctgaagttcatgacacatcgctgtcttaacagaccgctaaggctcaaacacccatccctaacaaactttacaacattatactagaaattggacacatctgtggctgaagaaccacattttcaatattattagactctagaaccttgccagctacagttcttcggcgggcctcctgatggtccataggtccagcacaagctgttgggacgctgtaccccaactggcaagatggaggacgcggtagctgatatccctcgatctgcttaacacctacattaaaacgtgggtctataacacctgatgtattcagt

SEQ ID NO: 65660 - DNA, 228 bp, Zea mays
  Clone ID: MRT4577_159888C.1
atcactctcgccctactgcttcccacatgtccatcttttccgccaagccgagacccacatgcagccttactatcctcggacaactcccttctgtccgtccttaaccctcctcaccgctctcttcctctgctgcaccggtctgtctatccccgctcgcaccgaactcacaccctccctcagctccataaaccaccacctcttcctgcctcatctctaccaacccacaac

SEQ ID NO: 65661 - DNA, 688 bp, Zea mays
  unsure (1)..(688): unsure at all n locations
  Clone ID: MRT4577_159889C.1
ctcaattctacgcccatacaagtgaaggaaggctactggtgctggtgccggcactggcagccggtgcctaaaccatatctaccggcctatataactttccactggccgtagtcggcttcttctctgaactgaagcaaggggggagacaagcgccatggctgaggatgccagaggagagaagaaggatgcctacgcggcggcgccggcgtccaagttgccggcgaagcaacggggagggttcaggagcatgcccttcatcctagctgcacctgccgctcgtggaggcctccaacatcatcaccaactacaatggcactgctaaccttactccgctcatcggcggtctcatcgccgactcctttgccggccgcttctggaccatcacattcggctccatcatctaccagctcggcatggtctgccttaccctctccgccgcgctcccctcgctgcacccgccatcctgcgccaagcacgctgcagactgccagcgcgcgtcctcctaccagatttccgtgctgtacctgtctctgctctgcacgtcgatcggcaccggnggcacgcgcccctgcaccatggcgttcggcgccgaccagcttgagctgaacgcgcacaggcaccggggcgccaagcccaagtggagtttctttaacctctacttcttcgccgtcgagctcgcgaagctcgc

SEQ ID NO: 65662 - DNA, 1110 bp, Zea mays
  Clone ID: MRT4577_15988C.1
gccagatattattgcagcctccggtcctcccttcccttccctcctcgtctccccctctgattgatttgagagctcgggcaccagatctgaagccctcttgttctgtggttgtgtgcctttcggctggtgtagcattgagaggaggcgctgttccagttccagttccaggatgagcaaggaggatgtgctcaaggtgcagactttgatgctgagagtgaacatacactgtgacgggtgcgagaagaaggtcaagaagaccctccacaagatcgacggtgtctaccagagcagcatcgacgcggaacaggggaaggtgacggtgtccggcctgctggatccggacaccatcatcaggaagctcaacaaggccggcaagccggcccagctgtggggctccaagcccggcgtccctcagaacggccatggcggcggcaagggccagcctaaggacgccggcggtggcaagggccattccaaggatgccggcggtggcaaggcccagaagggcggtgcgggtggcggcggtcacaagggtgccggtggtgccggtggcgggggtggtggggccaaggatcctaagatggtgatgccgcagccgacgccgcagcagctccagcagctgcagcagcagttgcagatgaaggggctgaagctcccgccgcacctcctgggcggcaacatgccggcgttccccgacggacatccccatggttaaagccccgttactcaatcaacaatcagtatgcttgggaatgagttatacccagaaccctgtcgggttcctgctccttccccccctttctctagcttattttcgccttgcttttaaaaaaaaaggaacttccttgaatgcgaagttaggtatagtaattatgaggtttccataagggaggggaggagagaggagacgatagggacttcgtacggggtcgttcgcttgtgggttcttcttccctcctggcttcataaaggtggactaatggtagaacaatgttgtcaatctcagtcgtaaatcagtgtgaatatgtcgtgatttctcttctaaaaaaaaaaaataaaaaaaaaaaaatagtaatggaaaaaaaaaaaaaaaaaaaaggccctaaaact

SEQ ID NO: 65663 - DNA, 2329 bp, Zea mays
  Clone ID: MRT4577_159890C.1
cattggcacctcgagccggccgggaattctcacgcccatcacaagtgaaggaaggctactggtgctggtgccggcactggcagccggtgcctaaaccatatctaccggcctcatataactttccactggccgtagtcggcttcttctctgaactgaagcaaggggggagacaagcgccatggctgaggatgccagaggagagaagaaggatgcctacgcggcggcggcggcgtccaagttgccggcgaagcaacggggagggttcaggagcatgcccttcatcctagcgaatgacttctgcgaccggcttgcgtcggtggggttcacgacgaacctgatctcgtacctcaccctgcagctgcacctgccgctcgtggaggcctccaacatcatcaccaactacaatggcactgctaaccttactccgctcatcggcggtctcatcgccgactcctttgccggccgcttctggaccatcacattcggctccatcatctaccagctcggcatggtctgccttaccctctccgccgcgctcccctcgctgcacccgccatcctgcgccaagcacgctgcagactgccagcgcgcgtcctcctaccagatttccgtgctgtacctgtctctgctctgcacgtcgatcggcaccgggggcacgcgcccctgcaccatggcgttcggcgccgaccagcttgagctgaacgcgcacaggcaccggggcgccaagcccaagtggagtttctttaacctctacttcttcgccgtcgagctcgcgaagctcgcggccgtcaccgccgtggtgtacatccaggacaacgtcgggtggggttggggaatcggcgtgcctaccgtcgccatggtcgccgcggtgatcgccttcgtgtccgggtactcgctctacatcaggatgccacccgggggcagccccctggtccggttggcgcaggtcgctactgcagcatacaagaagcggaaagccgtcgtgccggacccgagcctcctgtacgaggacaaggagctcgacgctggcatctccaccaccggacgccttcttcacaccgaccagctaaagtgcttagacaaggcggctattgtgacggacggcgacgtgctgccgtcgggtcagccgaagctatggcggctgtcgacggtgcaccgcatcgaggagctcaagtcgatcatacgtatgctgccgatctgtgctgccggcatcatcctggtgacatcggcgtcgcacaatcacagcttcgccatccagcaggctcgtaccatggaccgtgacatcacgccacacttcaagatcccgccggcctccatgctcatcttcaccaacttcggtatgctgctgaccctggccttctacgatcgcgtgctcgtccgcgtgctgcgccgcttcactggccgcccgaacggcatcactcacctccagcgcacgggcgtgggactgacgatcgccatgctgtccaacgtggtggccgcggtcgtcgagcggagacgcaagtccgttgccgctgcgagtgggctgctcgacgctcccaaggccaccctgccgatgagcgtcttctggctggtgccgcagtacgccatccatggcatcgccaacgccttcatggacgtcggccgcatggagttcctgtacgaccaggcacccgagagcatgcggagctcagcgacggcgctctactggctgaccttctcgatcgggagctacctcggcacgctgctggtgaccatcgtgcacgacaagacgaagcgaaccgggcaatggctcccggacaaccttaaccgagggaagctagacaactactactggctagtcgtggctctggaggtggtcaacctcgtctacttcttcatctgcgttaagtactacacctttaagccattggagatggtgagcggtgaggaggttgagctctaccaccatggcaatggcaccgacgacgccaagaagcaaggtgtggaagcttagagtgagcaaatccggatcccaacaagaaggcttgggtccggatgaaataattgtacttcgacatctctttaaaaaatagcacctatcttaaagcagttctgaattagttaaccattttgttaattattttcatctgaataacttctggactctgaacaatcaggagcggacttgctccagtccagcacaaggcaaagcgaacacagagctctcatagctccggttccagtaaaaatcactcccgtaaagtcaagcagtaaaaatctaaactgctacatggtcggattggaatgaatctagtgattctagtctatgttttgtactataaagtgagagcaaaaaaaaatgtttcccacc

SEQ ID NO: 65664 - DNA, 542 bp, Zea mays
  Clone ID: MRT4577_159891C.1
agcctagctctatagctcgagtattgcttgctctccacaataaacaaggcagagcaccaacaatggccgccgcctcctcgtcctcggtcctcctgctgctcctggccgccgccttggctggcatgagcgccaacgccgccaccttcaccatcaccaacaactgcgggttcaccgtgtggcccgcggccaccccggtgggcgggggcacgcagctgaacccgggcgggacgtggaccgtcaacgtgccggctggcaccagctccagccgctgctgacgctggccgagttcaccatcggcggcagccaggacttctacgacatctcggtcatcgacggctacaacctcgccatggccttctcctgcagcaccggcgtgcggctggtgtgcacggaccctggatgccccgacgcgtaccacaacccccccgacatgaagacccatgcatgcggcggcaacagcaactaccaaatcaccttctgcccgtgatcggccggaataggctctgcatttgcatggtctagatgatttgaatttgcaagaa

SEQ ID NO: 65665 - DNA, 284 bp, Zea mays
  Clone ID: MRT4577_159892C.1
cacacgcgagaggaaatcagtctatttacggtcgcgcagagccatgaacggttggtggggagataagaatggtgtagatatatacacaaagttggttcagttgttatgaaattttgatagttctgtatatctttaaaagttgaggctgcttaatctgttactatatcagggttactgtgaacagaatgggatgtattaaatgtacttgacatttttatatgataataggtgtttgatggatactacgttcttgaattaatgtgtattagtggatatgatttgtt

SEQ ID NO: 65666 - DNA, 217 bp, Zea mays
  Clone ID: MRT4577_159893C.1
tcgcccacttttctgtccacacgtccgctgtaatttccccgggagaaggtccaaaggccgaagcagaccaattcaagcaccccacgggagctcgttcatcccctttcgccgatcgagccagggcccagggccgagctacctggtgctccgcccctcgccgttacagtggcgcctctgtctacggctccacattgcctgcctgccttcgcggtcctgt

SEQ ID NO: 65667 - DNA, 485 bp, Zea mays
  Clone ID: MRT4577_159894C.1
tcgggagcaagagtgagtagcctagctctatagctcgagtattgcttgctctccacaagaaacaaagcagagcaccggctgctccttcaacggcaacagcgggagctgccagacgggcgactgcggcggcgcgctggcctgcacgctgtcggggcagccgccgctgacgctggccgagttcaccatcggcggcagccaggacttctacgacatctcggtcatcgacggctacaacctcgccatggccttctcctgcagcaccggcgtgcggctggtgtgcacggaccctggatgccccgacgcgtaccaccaccccaacgacgtgaagacccatgcctgtggcggcaacagcaactaccaagtcaccttctgcccgtgatcggaaatcggaataggctctgcatgcatgggcgagtgatttggatttgcaggaataattctgatttggatttgcacaataatatataagcgtgcattacacgtgc

SEQ ID NO: 65668 - DNA, 560 bp, Zea mays
  Clone ID: MRT4577_159895C.1
cctagctctatagctcgagtattgcttgctctccacaagaaacaaagcagagcaccaacaatggccgccgcctcctcgtcctcggtcctcctgctgctcctggccgccgccttggctggcatgagcgccaacgccgccaccttcaccatcaccatcggcggcagccaggacttctacgacatctcggtcatcgatggctacaacctcgccatggccttctcctgcagcaccggcgtgcggctggtgtgcacggactctggatgccccgacgcgtaccaccaccccaacgacgtgaagacccatgcctgtggcggcaacagcaactaccaagtcaccttctgcccgtgatcggaataggctctgcatgcatgggcgagtgatttggatttgcacaataatatttagggagcgcgtgcatgacacgtgcacgcatttgtatgtacgcgcgtatacgtacctacgtagctggatttgtgtgcgtgcttcgtaccaaatattaataagaataaacaaatatgactcgtgtcatatacacgaaaaaaaaaaaaaaaaaagcggcc

SEQ ID NO: 65669 - DNA, 1043 bp, Zea mays
  Clone ID: MRT4577_159896C.1
ccggccggggtagcggcgagaccgagccgtgtaaataggtgtcaagtggaagtgcagtgatgtatgcagctgaggcatcctaacgaacgaacgatttgaaagcagcaagagtgagtagcctagctctatagctcgagtattgcttgctctccacaagaaacaaggcagagcaccaacaatggccgccgcctcctcgtcctcggtcctcctgctgctcctggccgccgccttggctggcatgagcgccaacgccgccaccttcaccatcaccaacaactgcgggttcaccgtgtggcccgcggccaccccggtgggcgggggcacgcagctgaacccgggcgggacgtggaccgtcaacgtgccggccggcaccagctccggccgcgtgtggggccgcaccggctgctccttcaacggcaacagcgggagctgccagacgggcgactgcggcggcgcgctggcctgcacgctgtctgggcagccgccgctgacgctggccgagttcaccatcggcggcagccaggacttctacgacatctcggtcatcgacggctacaacctcgccatggccttctcctgcagcaccggcgtgcggctggtgtgcacggaccctggatgccccgacgcgtaccacaacccccccgacatgaagacccatgcctgtggcggcaacagcaactaccaagtcaccttctgcccgtgatcggccggaataggctctgcatgcatgggctagtgatttggattttgcaggaataattctgatttggatttgcacaataatatatatataagcgtgcattacacgtgcacgcatttgtatgtacgcgcgtatacgtcgtacctacgtagctggatttgtgtgcatgcttcttcgtaccaaatattaataagaataaacaaatatgactcgtgtcatacatatacacgacattgccgtatcattttggttgtatatctagcaatcatttcgcttagggcatctccaagagactatatataaatcctagctaaatttagagtaaaaaaaaaaaaaaaaaaaa

SEQ ID NO: 65670 - DNA, 869 bp, Zea mays
  Clone ID: MRT4577_159897C.1
ccggccgggagcagcaagagtgagtagcctagctctatagctcgagtattgcttgctctccacaagaaacaaggcagagcaccaacaatggccgccgcgtcctcggtcctcctgctgctcctggccgccgccttggctggcatgagcgccaacgccgccaccttcaccatcaccaacaactgcgggttcaccgtgtggcccgcggccaccccggtgggcgggggcacgcagctgaacccgggcgggacgtggaccgtcaacgtgccggccggcaccagctccggccgcgtgtggggccgcaccggctgctccttcaacggcaacagcgggagctgccagacgggcgactgcggcggcgcgctggcctgcacgctgtcggggcagccgccgctgacgctggccgagttcaccatcggcggcagccaggacttctacgacatctcggtcatcgacggctacaacctcgccatggccttctcctgcagcaccggcgtgcggctggtgtgcacggaccctggatgccccgacgcgtaccacaacccccccgacatgaagacccatgcctgtggcggcaacagcaactaccaagtcaccttctgcccgtgatcggccggaataggctctgcatgcatgggctagtgatttggattttgcaggaataattctgatttggatttgcacaataatatataagcgtgcattacacgtgcacgcatttgtatgtacgcgcgtatacgtcgtacctacgtagctggatttgtgtgcgtgcttcgtaccaaatattaataagaataaacaaatatgactcgtgtcatatatatatacgcgacaaaaaaaaaaaaaacaaaaaaaaaaaaaaaaaagcggcc

SEQ ID NO: 65671 - DNA, 175 bp, Zea mays
  Clone ID: MRT4577_159898C.1
aaaaaaatgggggaggcgttaaatgatttttaccaagcaacactctttaagataatatgggaactaatactctaagaaaacctttctagtgtatatgccttcccactttttaatattaacagagcaaaactgctataggccaaggtggggaataatggtaataacaaaaaactaa

SEQ ID NO: 65672 - DNA, 996 bp, Zea mays
  Clone ID: MRT4577_159899C.1
cctcgaggccggccgggtattctggtgtcctaggcgtagaggaacacaccaatccatcccgaatttggtggttaaactctactgcggtgacgatactgtaggggaggtcctgcggcaaaatagctcgatgccagaataagcaagagtgagtagcctagctctatagctcgagtattgcttgctctccacaagaaacaaagcagagcaccaacaatggccgccgcctcctcgtcctcggtcctcctgctgctcctggccgccgccgccgccttggctggcatgagcgccaacgccgccaccttcaccatcaccaacaactgcgggttcaccgtgtggcccgcggccaccccggtgggcgggggcacgcagctgaacccgggcgggacgtggaccgtcaacgtgccggccggcaccagctccggccgcgtgtggggccgcaccggctgctccttcaacggcaacagcgggagctgccagacgggcgactgcggcggcgcgctggcctgcacgctgtcggggcagccgccgctgacgctggccgagttcaccatcggcggcagccaggacttctacgacatctcggtcatcgacggctacaacctcgccatggccttctcctgcagcaccggcgtgcggctggtgtgcacggaccctggatgccccgacgcgtaccaccaccccaacgacgtgaagacccatgcctgtggcggcaacagcaactaccaagtcaccttctgcccgtgatcggaaatcggaataggctctgcatgcatgggcgagtgatttggatttgcaggaataattctgatttggatttgcacaataatatataagcgtgcattacacgtgcacgcatctgtatgtacgcgcgtatacgtacctacgtagctggatttgtgtgcgtgcttcgtaccaaatattaataagaataaacaaatatgactcgtgtcatatacacgacattgccgtagcaaaaaaaaaaaaaaaaaagcggcc

SEQ ID NO: 65673 - DNA, 1940 bp, Zea mays
  unsure (1)..(1940): unsure at all n locations
  Clone ID: MRT4577_15989C.1
agcgtccgcggncgcgtgggcgagagctcgggcgccagatctgaaacctcttgtgttgtgcctttggtagtttggtgtagcattgagctagtagaggtgctgttctagttccaggatgagcaaggaggatgtcctcaaggtgcagacattgatgctgagagtgaacatacactgtgacgggtgcgagaagaaggtcaagaagaccctccacaagatcgacggtgtctaccagagcagcatcgacgcggaacagggcaaggtgacggtgtccggtttgctggatccggataccatcatcaggaagctcaacaaggccggcaagccggctcagctgtggggttccaagcccggcatcactcagaacgcctaccatggcggcggtcacaagggccctggcggtggcggtggcggaggcggtggcgtgggcaatcctaagatggtgatgccgcagccgacgccgcagcagctccagcagctgcagcagcagctgcagatgaaggggctgaagcttccgccgcacctcttgggcggcaatatgccggcgttccccgcggctgcgccgatgaaggaccccaagtccgtcaagtttgccctcccggaggacaacttcgacgactacggcagcgagttcgacgatgacttcgacgacggcttcgacgacgacgaggacgactacgacgacgacggcctggacgacgacgtctacggcgaccccaagatgatgatgaagcccatggctgtgccgccgccggccggcgggggcgacaagaagggcggtggcggcaagaagggtggtggtggggggaacgagatcccggtgcagatcaagggaaacaaccacggcggtgccggtgggcagccgcacaatgcaaagggaggcgccccgggaggcggggcccacctgggccaggggaagaagggcggcggcagcgccgccgccgtcggcgtcggtggcccgatgggcggaatgctgcctcaacaaggcatgatgaggcctcctaacattcttggtggtgctggtgccggcttccccagcacggcccagatgggcggcggacctatgggcatgccggttggccacccgcacatgggtattatgcagcagggcggcggtggcggtggtggtggcatgccgggcctggggttccacccgggattgggcggcggcggaatgcattctggggcggatatgcttcaggccgccgcggcatccgggaaccccgtggcgcagcagcagtacatggccttgatgcagcagcagcagcagcagatgatgatgatgcagcagcagcaacagcagcacgggaacggcggtttaggatacccggcggcaatgggctacggctatggccggccaccgatgcattacccaatgggctacccagtgctgcccccgcactcgcatgctgagccttacaacatcttcagcgacgagaacgccaacagctgctcactgatgtgatcagcaattccgcatggaatggccctgttccaagtaaaccatctcaaggagctcaatgtcaccgctgatcaccgacagacatcgccatggttgaagcgccgtgaatcaatcaacaatcagtatgcttggggatgagtcctagctagaaccctgtccctttcctgctccttccccccctttctctagcttattttcgccttgctttaaaaaaaaaggaacttccttgaatgcgaagttaggtatagtaattatgaggtttccataagggaggggaggagagaggagacgatagggacttcgtacggggtcgttcgcttgtgggttcttccctcctggcttcattaaggtggactaatggtagaacaatgttgtcaatctcagtcgtaaatcagtgtgaatatgtcgtgatttctcttctaaaaaaaaaaaaaaaaaaaaaaaaaaaaaaaaaaaagtactctgcgttgttaccactgct

SEQ ID NO: 65674 - DNA, 189 bp, Zea mays
  unsure (1)..(189): unsure at all n locations
  Clone ID: MRT4577_1598C.1
ccgggtcgacgctgcgcgagcggacgatttcgacgatcgaccagatggtggggggagccgccgacgcgtaaagcgcgccggtttcgccgaagtacggatgcgcgacccggtaggccacccagggcagcagcaggttgacgaagagttcgaggatcagtccggctcgcggnttcacggntcgccattcca

SEQ ID NO: 65675 - DNA, 273 bp, Zea mays
  unsure (1)..(273): unsure at all n locations
  Clone ID: MRT4577_159900C.1
acagaaaaccctttccgccgccaccgaagcggccncccaggnaagcaggagcgcccaccccgccgccgncangaagcgcaanccccgcgacacgagcncccgccggaagagccgcaaggcgcacaanacggccccgaccaccgaccgccgcgcacacaggaccgccgggccgacgacggagcaccgccacaagaacaacgagccgcaccaacccgaaccgcaaggacgaccaggcgcaggccgcgcgcgacaccaacaaaggccgcgagggaa

SEQ ID NO: 65676 - DNA, 1023 bp, Zea mays
  Clone ID: MRT4577_159901C.1
gtataatgatgtgctcctcctggtgtcatcttagtctgcacttggtgaagttttcttctcccaagtacaagatgagatgactggagttgaagtttgcatcagtatgtgatgatagaaatggagattgttatcttgctgaccagacaataaaaataataaaaaaaattttaaaaaaaaaaaaaaaaaactcgagtattgcttgctctccacaagaaacaaggcagagcaccaacaatggccgccgcctcctcgtcctcggtcctcctgctgctcctggccgccgccttggctggcatgagcgccaacgccgccaccttcaccatcaccaacaactgcgggttcaccgtgtggcccgcggccaccccggtgggcggggggcacgcagctgaacccgggcgggacgtggaccgtcaacgtgccggccggcaccagctccggccgcgtgtggggccgcaccggctgctccttcaacggcaacagcgggagctgccagacgggcgactgcggcggcgcactggcctgcacgctgtctgggcagccgccgctgacgctggccgagttcaccatcggcggcagccaggacttctacgacatctcggtcatcgacggctacaacctcgccatggccttctcctgcagcaccggcgtgcggctggtgtgcacggaccctggatgccccgacgcgtaccacaacccccccgacatgaagacccatgcatgtggcggcaacagcaactaccaagtcaccttctgcccgtgatcggccggaataggctctgcatgcatgggctagtgatttggattttgcaggaataattctgatttggatttgcacaataatatataagcgtgcattacacgtgcacgcatttgtatgtacgcgcgtatacgtcgtacctacgtagctggatttgtgtgcgtgcttcgtaccaaatattaataagaataaacaaatatgactcgtgtcatatatatatacacgacattgccgtataaaacaaaaaaaaaaaaaaaaaagcggcc

SEQ ID NO: 65677 - DNA, 383 bp, Zea mays
  Clone ID: MRT4577_159902C.1
taagacgaactgtgtaccgggccccccctgtacgcggcctctattttcttctcgtggtctttgagaggtatgataccgatatttctgggctcaacggacttagcaacggcgtagctatggaataaaagcatttgctgcactctatttgagaaccatgccctgtaagagggcttggggatggcaaaacctaaagttctgcccatatcctaacattgggggccgcatggtctctagacaaatatcaatccggtgattaaggacaatttagggtccacgccctgctagggtctaatgttcagacctacaaaccgctaagaactctacttttcaaaaacagccacccaaatagcagcagagacatgaacacatgcttccaaacggac

SEQ ID NO: 65678 - DNA, 1191 bp, Zea mays
  Clone ID: MRT4577_159903C.1
ccggccgggcacgactttcaaaacggatatctcggctctcgcattgaccaagaacgtagcaaaatgcgatacctggtgtgaattgcagaatcccgcgaaccatcgagtttttgaacgcaagttgcgcccgaagccttctggcggagggcacgtctgcctgggcgtcacgcagcaagagtgagtagcctagctctatagctcgagtattgcttgctctccacaagaaacaaagcagagcaccaacaatggccgccgcctcctcgtcctcggtcctcctgctgctcctggccgccgcctcctcgtcctcggtcctcctgctgctcctggccgccgccttggctggcatgagcgccaacgccgccaccttcaccatcaccaacaactgcgggttcaccgtgtggcccgcggccaccccggtgggcgggggcacgcagctgaacccgggcgggacgtggaccgtcaacgtgccggctggcaccagctccggccgcgtgtggggccgcaccggctgctccttcaacggcaacagcgggagctgccagacaggcgactgcggcggcgcgctggcctgcacgctgtcggggcagccgccgctgacgctggccgagttcaccatcggcggcagccaggacttctacgacatctcggtcatcgacggctacaacctcgccatggccttctcctgcagcaccggcgtgcggctggtgtgcacggaccctggatgccccgacgcgtaccacaacccccccgacatgaagacccatgcatgtggcggcaacagcaactaccaagtcaccttctgccccgtgatcggccggaataggctctgcatttgcatgggctagtgatttggattttgcaggaataattctgatttggatttgcacaataatatataagcgtgcattacacgtgcacgcatttgtatgtacgcgcgtatacgtcgtacctacgtagctggatttgtgtgcgtgcttcgtaccaaatattaataagaataaacaaatatgactcgtgtcatacatatacacgacatcgccgtatcattttggttgtatatctagcaatcatttcgcttaagagcaccaagagactagatataaattctagctaaatttagagtattgaaagctgtaaaaaagatatataagtttctaatggtgggtgtatccaacaaaaaaaaaaaaaaaa

SEQ ID NO: 65679 - DNA, 343 bp, Zea mays
  unsure (1)..(343): unsure at all n locations
  Clone ID: MRT4577_159904C.1
ctgccatctaccagcgactcagctagcgttagcagcacacacgcacctacctaggagcagcatctccggcnctggaaacggcggcctacatgatctcctcgtcagctctggccgtggcgcctcacggtctgccgcctctcagtcgccgcgcctcctgcttcgccgtcgtctgctccaagaataagatcaagaccgacaagccctactggattggaggtggactgaccgtcgacgtccacgcctaccgaagaaaggccaagggcaagggcgtgtaccagtttgtcgacaagtacggtgcgaacgtcgaccgatacagnccaatctacaacgatgatgactggtc

SEQ ID NO: 65680 - DNA, 452 bp, Zea mays
  Clone ID: MRT4577_159905C.1
gtaggggaaaaacatgtttcattttctgctgcacctgtcctttcatttggtaaatgtcaattcagaaatttccttctttttttttttggaccaattgaaaaaattttgggggaaaaaaactcggccccgggggtggccccgggatttccggcccgggccttgaaggcttcccacctttccttttgggggggggttttaaacctgggggtaataagggccaaagttttttcctgggggaaatttttttccctttccaattcccccaaccttacagcccgaaggattaaattgtaaaacctgggggccctatgagggggcgcaccccccataaattgggtgggcgcactggccccttttttatggggaaaaactctttgcccccccttttattaaaaatgcccacacccccggggagaggggttttgtattttgcgcccccgggggtttttttt

SEQ ID NO: 65681 - DNA, 211 bp, Zea mays
  Clone ID: MRT4577_159906C.1
cccacgcgttcgtttttgatcgggagcgcctccctttgtttgttcttgttgatgggggtgaggttgtcttttttgtgaagaactttgctatcttatttttggattgcaacaacaattcctcggcacagtttatctcttcgagccattgaaacgcaacaacatctactacatgggttggcattactgatgcatctagccgaggtgaaacctg

SEQ ID NO: 65682 - DNA, 114 bp, Zea mays
  Clone ID: MRT4577_159907C.1
gcgcggtccggttctatcggatggcactctattactcgtcgccgccgactgcaccccgacgtggatgccggggatgccgggcagggtgttcgataccgtcacgcctttctcaca

SEQ ID NO: 65683 - DNA, 361 bp, Zea mays
  unsure (1)..(361): unsure at all n locations
  Clone ID: MRT4577_159908C.1
gtcgaccacgcgtccgcacaagcacatagaaagtggaaacagtaccacaatagagcacaatggcggccaagatatttccatcctatgctcctgctcttctgctgtgtgctacgcgaccattttctaaactacaagctcatactgcctcttccatactcatatgccgttagatgtgaaccaccctacctcggtcacngcgacagactactatacctgcttacaatgagctattggccatgtcacatagccacagtgaactgctcaggaagcagagttgcaactttctattagacacattctcatcaccctgctcatgaacctgtgtattgagacacactctcatcagcagtagtctgctatt

SEQ ID NO: 65684 - DNA, 360 bp, Zea mays
  Clone ID: MRT4577_159909C.1
attaaaacagaaccattgttttgattattatgatctgaacaacccattttatacatagagctcgtggcaatggcaaccccacaaaaagatgatggaactcatggcgcatggcgttgagtggtggcgtgcttgggctcgtgctcctctgcaacgagacactgtttcccacgagtgttcccatcaccattacagtcatgccacacgtcgcttggacttgagccgttggaggctcgtcaatttgtcttccgtcgcaacgctcggtcacatgcaagcctagtaacaatagatgctcatatatcaataataggtatcgccgttatctttactaattctacacatgcaaaggtatggctccttctt

SEQ ID NO: 65685 - DNA, 1160 bp, Zea mays
  unsure (1)..(1160): unsure at all n locations
  Clone ID: MRT4577_15990C.1
ggtccgnattccgggtcgcaccacgctccggggtggtggtggggggnacgagntacccgtgcagntcaaggnaaacaccacgcggtgccggtgggcagccgcacaatgcaaagtgagcgccccgggtggcggggcccacctgggccaggggaagaaggcggcggcagcgccgccgccgtcggtgtcggtggcccgatgggcggaatgctgcctcaacaaggcatgatgaggcctcctaacattcttggtggtgctggtgccggcttccccgcacggcccaaagggcggcggacctatgggcatgccggttggccacccgcacatgggtattatgcagcagagcggcggtggcggttgcggagctggcggcatgccgggcctggggttccacccgggattgggcggcggaatgcattctggggcggatatgcttcaggccgccgcggcatccgggaaccccgtggcgcagcagcagtacatggccttgatgcagcagcagcagcagcagatgatgatgatgcagcagcagcaacagcagcacgggaacggcggtgcaggatacccggcggcaatgggctacggctatggccggccaccgatgcattacccaatgggctacccagtgctgcccccgcactcgcatgctgagccttacaacatcttcagcgacgagaacgccaacagctgctcactgatgtgatcagcaattccgcatggaatggccctgttccaagtaaaccatctcaaggagctcaatgtcaccgctgatcaccgacagacatcgccatggttgaagcgccgtgaatcaatcaacaatcagtatgcttggggatgagtcctagctagaaccctgtccctttcctgctccttccccccctttctctagcttattttcgccttgcttttaaaaaaaaaggaacttccttgaatgcgaagttaggtatagtaattatgaggtttccataagggaggggaggagagaggagacgatagggacttcgtacggggtcgttcgcttgtgggttcttcttccctcctggcttcataaaggtggactaatggtagaacaatgttgtcaatctcagtcgtaaatcagtgtgaatatgtcgtgatttctcttctaaaaagaaaaaaaaaaaaaaaaaagcggccttctgttt

SEQ ID NO: 65686 - DNA, 372 bp, Zea mays
  Clone ID: MRT4577_159910C.1
aattgtggcgccttggcgtgaacagatccacacctcggccgctaaatcaaactgcgcgcgctccatgataagcggagagcccccgtcagatcaccaccatcttattcctatccaaaggaacggacccatgctttagttgacaatcacggaggggggggggccgaacctaccagatcagagagatctaggagagctgttctgacccagggaccttgaccaccttggaagttcccccggtggggaagcccaccttttggatggccttgaccacgtgcatgccgtggactacttgttcgaagacgaagtttttgccgtctagccaaggggtttctacagtgcattattaataaatggaatcctttggggttgggc

SEQ ID NO: 65687 - DNA, 491 bp, Zea mays
  Clone ID: MRT4577_159911C.1
cgaccagtacgacggagtggtcgcccactgagagggagaaggacccaggtgctgccgcggctcccgtatgctactctacgaggcacgcagatagagcgcacgaagcgcgtctcctggtgcaccgcagcccgcctagaatcggggatggcatgcacttagatgagtcggacgctgccccgacctcctcttcgatggtggaggtggtcgccagcaccgcagtcgccgacaccgtatacttcgagttcgggatctcggtggggcactcgacgccttctcagcctgtcctcatgcgtgatctcagcgtctccttggccgagtactctgtctgtggctgcatactaagcattggagcgatgctacgaactggtgccaggggcaccgtgacagaccgagttcgacgaagaactgcagtgcggatgtcactatcctctctgcatgttgggattatctgttgatactcctgttccccagaatttctggctggcttgaca

SEQ ID NO: 65688 - DNA, 386 bp, Zea mays
  Clone ID: MRT4577_159912C.1
cgaccacgcctccgcccacgcgtccgctcattggaaccgtgggccaatgtttgtttatggttctcgcctttggtgcgttgattccgggggatcgcagtccgtcaagggtgctgccgtcggactcttcacctacatcgcgttcttcggtgccacctggcttccgctgccctggttgtacccggccgacatcaaccctctcaggacccgcgccaaagctaatgctctctccactacgagcaactggatctggcatttcttcatcgtcatgattacaccaatcctcatcgcctctatcaactggggcacctatctgttcttcgctgtgttgaatgcttgttttatccccattctctatttcttaatccccgagactgctggtcgttccc

SEQ ID NO: 65689 - DNA, 796 bp, Zea mays
  Clone ID: MRT4577_159913C.1
ggccgcttttttttttttttttttgctcataggactagtttgtattatagacatagtttttgcgaaaaaatatatatatgcatatatcgttattaatattatctctttaattatgcgataagctttaaaaagaaaaatagtctatagggcctatattttctagttgggaagaggccattgaaatcatagagccggccctggctgtgatcatcgtcgtacatgtacatgagaaagatttaatcaagaaaaacaaagatctgtggtctgcttcgggtcgatggatcgatctggcaaggccgccgctgctagcaaactaggcgtaggtgtgcactctgctgctggtggctttgcctacctcggcctccagcgtctccatctgctgctccagcagcctcaacctctggtggatgctgtccagcctccgccgccgcctcatctagctgcgcgacgaactgagagacggtgacctcctgcccgccgtcggtgacgacgatgggggtgccgccggctccggctccgtggacggcgcccgccgcgtgctcgggcttggtcgtcgacgacgtccctgctctcgtcgcgctggaaagcatggctccacacgcgccgtcttgttcagccgaccggttcgtcggtttcttgcccgaggcaataatgacaactgacagtagtagtggtcagttagctagtaatacatgcgcgcaggtgaacagcgggaccgatcggcggatgggggcttcacatttgcttgtgcgcggggtcaagagaggagactgattagtggctaggaaaaccccgg

SEQ ID NO: 65690 - DNA, 207 bp, Zea mays
  Clone ID: MRT4577_159914C.1
cggtcttgtgggcagtcgcatccgctaccggtgcttttggttcgggtggatcctacgccagggcaataccgacaaacgctgcttctcttcgcgtcttgcctacacatccatgcatgcatacattcgtgcattcgcggtcgcgatgtgggggtgtcggtgccgtgagcattggggtatgggaggagctgcaacgcccggctacgggca

SEQ ID NO: 65691 - DNA, 437 bp, Zea mays
  Clone ID: MRT4577_159915C.1
gaagaatgctctgaagaatgagccagaggtagaactgtaagcacactgattctgcttccggttcatttttgattgacacttgacagtactggttttatgcgacattaatcatcgcaagtactagaaaatggagaaccgcagcaagactaattacgttcgaaacatcaagtgatgctcatgttgggtcttttgctccagttgttagtcatcaacaaaactagacaccttttgctggtcctctttttgggggtgtaattggatcgtgtaccaagactagcatcatttgcagcaataatactagagtagtaagattttgaatttaaataacttatgtcggtcccttctttcagtattatctatgtcaaatcatcgttcaagtctcttttcctgaggaccagaccttgtttttggttccatgccgtggggtctttctttgg

SEQ ID NO: 65692 - DNA, 246 bp, Zea mays
  unsure (1)..(246): unsure at all n locations
  Clone ID: MRT4577_159916C.1
cttgggtgtttttagctagtacttcggcatgattcaaggtggccttggtggtttggggccacacacaaaggtttttgctgagaagtacagatttacaaatgactgggtgggtgagggctacagctttttttggtacaacaaactcccaataccttacggtttgggatgttttaggggggcagaaacacgcttgtgtgtacacacattcgcaacccaaatggtgcaaagatgcnactgcgggggctc

SEQ ID NO: 65693 - DNA, 2439 bp, Zea mays
  Clone ID: MRT4577_159917C.1
atggcaaagacaaacacagagaagattactaaagagatactggaaggtttatctgaagatactggtgatagcgatagctatgatgtggaaagtggagacaaagattctgaagatcggccctggcggccaagccatataatcttcgaaaaatcaacgattaaacagagtcatcttgacaacatgagaggaagatactttcaagacatgtctatcgtgagaattggcggagacaacacctcccctgcccctgaggaaaatgaagttgttattttccgaagctttttcaaggctgttgaagtgctgaagatcttccagatcttccttcaccagattacccccgaagctataatgaggatggggatttttgtctgggctgtgaggagtcaggggctagagccaagcacaaagtgcttctgcagtatgcacgaactcttatatgagacgaaggctactggcaaagaacaataccataacaacttcggttgttatggatttattgctcgccccaacgcaagccacctggtgccaacgtttcggaagagatggcccggagcttggatggaagagtggttttatgtgaagaatgatttgaaggcaagggaagacattaaagaagttaccatgcgccctatctggtcccgcttcggcctccgatggccgaaggtggaatttgatgatactgtcgaagcgtgccagagagctttcagcactatttgctccttcattggcacaagggatttaattcaggaacatatagccttcagggtatggccgcttgtagaaagctgggaaatgctaaaggagacctccaccgactctagcgaaggtggtctggttcgactgaagtacaccttcagattcagggagaagtttgatgagcccaacgacgactggctgaagtgtatcgaagctaccagtgatgaactgcttggagcttattccaaggctgaagataatgctctatccgcagccttcagaggtcgggggaagaaaagactgaatagggtttttgatgcaattggcttcagataccccgattatcgctacccgctgcgagggcaaaagaaaaagaggaagattgctgcttcggtcaccccagccgagcctgtgccaaagggcaaaaagatgaaggttctgacccgtcggccgcgttacattgaaccggccgtggtgcctgactttggcgcagggtcctcttcaacagccaaagcaatacaaactgcttcaactgtacagggcgctgaagaaccaaatgtaatgtcgaagacgcatatagttgagccagtcaaagataaggctgaaaaggctgaagagccgaagattgaggagaaaatgccaaagattctgagccctccgatagaggcaaatctgctgaagatgcaaaagacttatgctgcaactcctaagaggagaaggatgcccaacatactggatgcagtgctggagaccacaatggcattgagccctgctcctgcaaagaaagtcgctccaactgaaaccaagtcgcaggccgaaatcgaaactaagcaagcagaagccgaagttgcgcaagttcaagctaaagccaaagctgggcctttagtgcccaccgagacagagcctatcgctcctgaagaaaaagcgacagagcaaattgctcctgaagtgatcgagaatcctacccccgaagctttgatcgaaaatgttgactacatcattcgacacgcttctgggaagaagttgtccgaagaagaaattctggaagccagacactatgcgcgaaagttgaaatatccgaagggtgccttggtttttaacgagagtaatgaagatgatttcttatactatctcccggataacaaagaaatatccttttgtcgggagataggtaaaagcatcggattcccgaagctggaagacggcctttcgattttatcgaaggatgaacttgctgacagcatagcatacaatagcataaagggcttgattcttagtaatgcccttagggcacagaaaaatattgaagacgaaagctatacgatggctctgaacaaccttcgttcagaggtgatcgaattaagaaacgaaggtcttgaaaaatacaaaatcttactttctctggttaacaaagtgcaagaagaagttattttcaaagctcaggccgaagcccaaaaaattgaaattgaagacctttggaggcaactagccgaagctaaggaaaaatgcgcactcgcagaagctaaccgagaaatcagcgaatattggaaaaatcatttagagaaaaatgttgaagaacttcacgcatccaaggaaagatgctttgaaaaatccttggattgtgtgaagaaaataaaagaaagtttcgccaaagtggttgcctattctgccgaagagaacttcatacgaggcaactccgaaggcgttattgaatggataagtggagaggccgagaccttctaa

SEQ ID NO: 65694 - DNA, 213 bp, Zea mays
  Clone ID: MRT4577_159918C.1
cttattcttgcttttctttttctttttcttttcttttttttttttttcccattcggaggttgccttaagcattcttaattcccgacagcgggtttaagggccattttttaacattaatcgcaaactccgtttgtttaaatggtaattaaaccggggatgaaaccccccggggtttttatcccctgggggaacagggatatggaaaaatatttt

SEQ ID NO: 65695 - DNA, 209 bp, Zea mays
  Clone ID: MRT4577_159919C.1
tcttcctctgcagagttattagaatgccacttctcagggttgaaggctctggagaatgaatagacttctgttgaaattgttaagcacggaacagaaatagttcatagagctgtcaccaaatcattccagtccctacatgaaccttacaaagggaaaattgtcggtctgttaatatccacatttgaggctccataatccttaggacccat

SEQ ID NO: 65696 - DNA, 1308 bp, Zea mays
  Clone ID: MRT4577_15991C.1
cagcgtcgcccagggtgccaacgctgggcagggggtgaccggcttcgattccgtccgagagagtctcaagcgctccccgctgcggacaccgcatcctccgtcgacgccgtttctgactctttcgcagagcaacatcttcagcccggagttacagaggaagtttaaggctgtagatgcgcggaaggatgggaaggaatctaacgtggcgctttcgaggctctacagctacgaagagcttgggaagaagctaggcgagctccggccagctgttggggccaaagacggtaaggagtggttctctcttaaggagctgcaggggcggatcgccaagctggcggagttggagaagcaggagaaccagttttcagggtctctttgggaaatcaagaattgcattgggaacctgaatcataaaccagaaaacggggctccgcgggtaaacattcatgcactgctgaaccttcgcggtcagccgacgccagactacatgagtcagcctccgcaggaggagttgttagagaagtacttccatccagatcatatgtcatccgaagagaagatgaaattggagctccaaagggtgagggatgagttcaagatgtccgagaatgactgtgggtctgcacgagttcaaattgcacaactgactctgaaaatcaagcatctgtcagctgttctacacaagaaggataaacattctagaaaggggcttcaggagatggtccaaaagaggaagaaatacatgaaatacttgcgaagaaccgactgggactcgtactgttttgttctatcaaagctggggctacgcgatgtgcccgagtacaaagctcctgattacaagagcaaagcaaccactaaggccaaatctaagaagagcaagagcaagaggagaaagataaaggcataggagcggtgaacaaacacaccctttgcatggctaggaaatgattcgagaagatagatccatccaatcttacagtgttttttttttgacaagaagctgtttgtaataaccatctctttggaggccacggtttttccttgttctgcttggagcggcaaccttcctgtaagttttgtaacaactgatttattatattattgcttttgagttctcccgctcgatatgccttattatgagggaagggaggaacagatacgacgatatgataccattacgtcatcatcagtttgtagctttgccagttttttttgtttgacgtaattttccagaattcttgtataagaatgcttgaacaatcttgctagctagcctagcgaaacaatcaagtagaaattcttctattt

SEQ ID NO: 65697 - DNA, 1755 bp, Zea mays
  Clone ID: MRT4577_159920C.1
ggaagccagcaaatgttttgctagacgcagccatggaacctaggatcacagattttggtttatcaaggcttattggtgaagggaatactagaatagtcaacacacacactcctggaccaatagggtacatggcacctgaataccgttacatgggggaagtttcacgcaaggtagacatattcagcttgggtattcttatactagagattgtaactggtcaagacaatagtaccaaagttgactttatcgatcatgtatgtgaacactgcatggaagggccacaaataaaatttatgtatccctctctggaacctgaattacatgatcaggtagaactgtgcatcaaaattggcctagagtgtgtccagacagatcgaaaaaaaagacctactgcaggggacattatacgtaagctcgaggaaggaaccaaattgggccctacaccatcccgtgaaaatattactacagaaattggtaagccacagatgttttcgtttgaactcctgaatgacatcacagaaagcttcagtccgggacgcctgcgtgggacaggtggatttggatatgtttatgaggggataccacatggtaacgagggagcgatggccgtgaagaggcttaaagaaaaaataggtatatcaccgaaacagtttgagaatgaggttcataatctgagcagaatcgagcacaggaatattgtacggcttataggctactgcgatgaaatacgggaaatactatctcatggtaaaaacaagaatgatccacctattcgcgaacatattcaagaaaggttattgtgttacgagtatatgcctaagggaagccttgacaagataatttatgataacctcgattggcatacgcgatataaaataatagaaggtatttgccatggcttacattgtcttcacgagggtcaacaggatattcagattgcgcatttggacttaaaaccagcaaatatattacttgacagtgacatggttcctaaacttgctgattttggtatgtcaaggctcttcagtctcgaacaagtttatatccttgcttccaagcctatgggaacaattggctacatagcaccggaataccttgaccacaaaaaggtatcaacaaaggcagatatatatagtttcggcattgtagtactggaaatcgtaacacgaaaacagtgcccacgcagttacgcagacataaatgctcagcattttatccaccatctgcgtcaaaatttgacaaaagataactacgtcaaatccatgtacccggcccttgaagcggactgccttcagcaagtgaaactgtgcatagaaattgggctgaactgcgtggagaaggaacctacaaagagaccaactgccagggaaataatctctatgtttaatcaaaaaaaggattcgagcagatctggggtatctaactgcatcgttaatgtgatagaggcgtggctatcaaggcttccatggcatccttggcctctaactttgctccgtcagacttaagcttgatggcaacagcggtatttgaaagatttgcaagggtgtccgcttgagttcctgcgatgcagcggaaggaagaaaaaaactagcagattaaaaatgagaatggggatcttgtatatctatttatgttttatccttttcatagaaaaattacaagctatgattttgatggtatagtggcaatattatgtcaatgtaacattcaatgggcatcgaattaaaatataatctaagtattttttttcctagc

SEQ ID NO: 65698 - DNA, 304 bp, Zea mays
  Clone ID: MRT4577_159921C.1
tcgagatctttaccttcttggcgtgccccgaactttcggggcgggggcacaaccggggctgggaatggaaaaacactgaacccaacttcaagcagaattccacaatagcgccaccgaacctgaaaacttcgaccccccacgaaatcgcgggacctaaccaccagccgaggcatgcttaagccaatctgcccggggaggcgacaggtaagttatatcccgggcgcggcgtaccgcgttttttctggagaggggacagcgtttgggggttccaagagagaacagcccccctctggctctgtgctct

SEQ ID NO: 65699 - DNA, 2167 bp, Zea mays
  unsure (1)..(2167): unsure at all n locations
  Clone ID: MRT4577_159922C.1
atcgacaagtacatttttggaaaaaatcatgaactagattggcacacgcgttacaaaatgattaaagggatttgtgagggtttacattacctccacgagaatgacagagctccaattattcatttgaacttgaagccagcaaatgttttgctagacgcagccatggaacctaggatcacagattttggtttatcaaggcttattggtgaagggaatactagaatagtcaacacacacactcttggaccaatagggtacatggcacctgaataccgtgacatgggggaagtttcacgcaaggtagacatattcagcttgggtattcttatactagagattgtaactggtcaagacaatagtaccaaggttgactttatcgatcatgtatgtgaacactgcatggaagggccacaaataaaatttatgtatccctctctggaacctgaattacatgatcaggtagaactgtgcatcaaaattggcctagagtgtgtccagacagatcgaaaaaaaagacctactgcaggggacattatacgtaagctcgaggaaggaaccaaattgggccctacaccatcccgtgaaaatattactacagagcagcagcacaccacctcactcgatgttctcgatggagcgcagcacaccaacaatacaaatcatttattttaaaaatgattatttccttcaaggacaggtagcaaaaaggacaagcctgcacatgcatacttgggaaaacaaaggcaacaatactgcaagcaaaacatccccgattgatttaacaagaaattggtaagccacagatgttttcgtttgaactcctgaatgacatcacagaaagcttcagtccgggatgcctgcgtgggacaggtggatttggatatgtttatgaggggataccacatggtaacgagggagcgatggccgtgaagaggcttaaagaaaaaataggtatatcaccgaaacagtttgagaatgaggttcataatctgagcagaatcgagcacaggaatattgtacggcttataggctactgcgatgaaatacgggaaatactatctcatggtaagaacaagaatgatccacctattcgcgaacatattcaagaaaggttattgtgttacgagtatatgcctaagggaagccttgacaagataatttatgataacctcgattggcatacgcgatataaaataatagaaggtatttgccatggcttacattgtcttcacgagggtcaacaggatattcagattgcgcatttggacttaaaaccagcaaatatattacttgacagtgacatggttcctaaacttgctgattttggtatgtcaaggctcttcagtctcgaacaagtttatatccttgcttccaagcctatgggaacaattggctacatagcaccggaataccttgaccacaaaaaggtatcaacaaaggcagatatatatagtttcggcattgtagtactggaaatcgtaacacgaaaacagtgcccacgcagttacgcagacataaatgctcagcattttatccaccatctgcgtcaaaatttgacaaaagataactacgtcaaatccatgtacccggcccttgaagcggactgccttcagcaagtgaaactgtgcatagaaattgggctgaactgcgtggagaaggaacctacaaagagaccaactgccagggaaataatctctatgtttaatcagaaaaaggattcgagcagatctggggtatctaactgcatcgttaatgtgatcgaggcgtggctatcaaggcttccatggcatccttggcctctaactttgctccgtcagacttaagcttgatggcaacagcggtatttggaagatttgcaagggtgtccgcttgagttcctgcgatgcagcggaaggaagaaaaaaactagcagattaaaaatgagaatggggatcttgtatatctatttatgttttatccttttcatagaaaaattacaagccatgatttttatggtatattggcaatattatgtcaatgtaacattcaatgggcatcgaattaaaatataatctaagtattttttttcctagcattgtaaggcgtagaaatataagacaacactcctttccttttaaattggcacccgttctggatttgtttttnnaagaaatntaggcannggggn

SEQ ID NO: 65700 - DNA, 526 bp, Zea mays
  Clone ID: MRT4577_159923C.1
ggccgcgggttttttttttttttttttgaatcatgatacatgatcgaatgtcacatctttactacataacaggagttctgtacaaaataaataaataattacattataaggagacaacggtccagcaacccaaagttgactgggggacgacgacctagatctctcacgaacacatcgcagcatcctccatgcgcatcatcctgcggtacatgttcttgacctgggacttgagattccaggtaccaacttggtcttcagctgactcgtgacctcacgctcaggtctgggcgacgtggatccggactacgcgacgcagcggtgccctgatgcatggcggcccgacgacgacgcccacgcaccggtgtgggatcccaggcccggcctacaggacggcatgtcgagcttaggacgacgacgagttcctttctctctctgctatccatcttcgatggcgcagcttgcttggtagatggcgatggtatggtagactctcgaattcaagcgccgactcgagctatacggccgg

SEQ ID NO: 65701 - DNA, 1168 bp, Zea mays
  Clone ID: MRT4577_159924C.1
cattgggtacctcgaggccggccgggatacttaccagtagtcgtcgcgtctgcaggcagatctgagttagtcggcgtgatccgatccgtgcgcgtgcagtgtgtgtgtgtgtgtcgtatggagatgtccacagctatacgctcccatggcgagccatggtgatgaagagcagactcgccttgcactcgaggacgaggggactgtcaggcgctgctgcgctcacataggcggccccgaggtcaccgtcgacccgtgctgtcgttcttcactcgcaataacttcaccgtctctgaccgcggggaggtcatcacattcgagggcacaatgataccaaacagaggccaggcggcgctgctaaccttctgcacctgcattagcctcgggagtgtcgggcttgttctatcaatcgctgtcccagaaggtggcaacaactggttctggctcatgaccctgagccccttggcgggagcgtactactggacgaaagcgtcaaggaaagaagagatcaaggtcaagatgatcctatccgatgacgggaacgtgtccgagatccttgtgcagggcgatgacgtccaggttgagcagatgaggaaggacctcaagttcagcgagaaggggatggtctatgtgaagggcatctttgagacatgactgggagtttcatactctatctgtgagtgaacaatcgagtggagacgagtctttgctgcaacggaaactgcgtaagcgtaacccaggtgaggaaatgcaaattggacgggcaaatctgtaccttggcttaaaggaaaaaaagaagtgatcttcatacgggatttgattattgtaagtgttgcccgtatgaggatagttaatgtatgaactcaaactaatgactttataaaaagctgatgagaaacacctttttgagcatgaaaaaaaaaaagagacaaatggggccgcggccgcgaattgccgccgcggtttctgcctacccggtacccaggtgtgggcctgcgtcttgggcgggctacgccgtaccttgccgtcaagggttacccgtactgttcttcatacgggatttgattattgtaagtgttccccggatgaggatagttaatgtatgaactcaaactaatgactttataaaaagctgatgagaacccccaaaaaaaaaaaaaaaaaaaaaaaa

SEQ ID NO: 65702 - DNA, 977 bp, Zea mays
  Clone ID: MRT4577_159925C.1
ggtggccaacggcgggacaggttactcgcaggcgagctactacacgtctctgggactcttcgttctctccgttccggggctgtggtccctcatcaagcgctccgtcaagtccaagattgtgcaaaagacatttgtgaaagacgatggacagtcgatggcgccaaatcaggtggctggagagatcctgtcgttcttcactcgcaataacttcaccgtctcagaccgcggggaggtcatcacattcgagggcacaatgataccaaacagaggccaggcggcgctgctaaccttctgcacctgcattagcctcgggagtgtcgggcttgttctatctatcgctgtcccagaaggtggcaacaactggttctggctcatgaccctgagccccttggcgtatgtctctctgctactcaactcccagcaattcagaatgaattcttccagtacaaatgcagtaactgacccttcatgatgaggtcccaggggagcgtactactggacgaaagcgtcaaggaaagaagagatcaaggtcaagatgatcctatccgatgacgggaacgtgtccgagatccttgtgcagggcgatgacgtccaggttgagcagatgaggaaggacctcaagttcagcgagaaggggatggtctatgtgaagggcatctttgagacatgactgggagtttcatactctatctgtgagtgaacaatcgagtggagacgagtctttgctgcaacggaaactgcgtaagcgtaacccaggtgaggaaatgcaaattggacgggcaaatctgtaccttggcttaaaggaaaaaaagaagtgatcttcatacgggatttgattattgtaagtgttgcccgtatgaggatagttaatgtatgaactcaaactaatgactttataaaaagctgatgagaaacaccttttgagcatgaaaataaaaaaaaaaaaaaagggcggacgctcgcgatctagaactagt

SEQ ID NO: 65703 - DNA, 297 bp, Zea mays
  Clone ID: MRT4577_159926C.1
ccactgagcagttctctcttctccctgctcacttacccacactctcacgttcctcagcatggccacctgcacccgtcagttcacctcctccagctccatgaagagctcctgtggcatcggtggtggctctagccgcatgtcctccgtcctggctggaggatcctgccgggctcccagcacttatgggggcatgtcggtcacctcctctcgcttctcctctggggcagcctgtggggattggaggtggctataagtgggggcttcagcagcagcagttttggtggtggatttggtgga

SEQ ID NO: 65704 - DNA, 548 bp, Zea mays
  Clone ID: MRT4577_159927C.1
aaaaaaaaatttttttttttttaaaaacgggggtttattaaaagggaggggtaaattttttaaaaggcccgggttgccgaaaggggaaaaatttaaaaacatgcaaaaagggggaaacccccccaaagtttaacccaaccccatttaaaattcccccaaaaccggaaaccccccccccccccaggaaaccctaaaagccccccaaaaaccaaaaaaaaaagggggtgaaaaaccccggaacccgggggggcttttggcaagtttacccccaaaaaaaaaaaaaacttcaagggatttgggggtaaaaaggaaaaaaagaaagggctggcccaaaaaaaaattaaaaaccttggggaaaaaagccttccaaaagggggcccttcttttaaaattttaaacccctaaaaaaatttaaaaaacccttggggccttttaccttatttcccccttttaaaaaaaaaaaatttatttttttcaaaagggtcaacccccgaccctggggggggggaaaaaaaaaaactcccccttttccgggaattttccgggat

SEQ ID NO: 65705 - DNA, 796 bp, Zea mays
  Clone ID: MRT4577_159928C.1
caaatactgatctcactgatccagtatggctatggcaaaggcaggcgcgccgagggtctcggcggcccagctggtgactctcgggctatcactcaccggctccttcttcaacggcatcaagagccaggccgggagcgggtgcgagggcaagaacttctacacccggagcgcgttcctgagcgccgtcaaggcgtacccaggcttcgcccatggcgggtcgcaggtgcagggcaagcgcgagatcgccgccttcttcgcgcacgccacgcacgagaccgggcatttctgctacatcagcgagatcaacaagagcaacgcctactgcgacccgaccaagaggcagtggccgtgcgccgcggggcagaagtactacgggcgcggcccgctgcagatctcgtggaactacaactacgggcccgcggggagggccatcggcttcgacgggctcggggaccccggcagggtggcgcgggacgccgtggtggcgttcaaggcggcgctctggttctggatgaacagcgtgcacggggtggtgccgcaggggttcggcgccaccaccagggccatcaacggcgccctcgagtgcggcgggaacaaccccgcccagatgaacgcgcgcgtcggctactacaggcagtactgccgccagctcggcgtcgaccccgggcccaacctcacctgctaggctaggcggcgtcggcggacggcgggagccttcaggccttgtgcttgctcggggtcgcaccctcgcgcgcgaaaccgagcaatagtgacaataaaacgccggggctagctg

SEQ ID NO: 65706 - DNA, 1010 bp, Zea mays
  Clone ID: MRT4577_159929C.1
atcctacgagccggccgggacctcagtatttgtcagagctcaaatactgatctcactgatccagtatggctatggcaaaggcaggcgcgccgagggtctcggcggcccagctggtgactctcgggctatcactcctctgcgctgtcgccggcccggccgccgcgcagaactgcggctgccagccaaacgtatgctgcagcaagtttggctactgcggcacgaccgacgagtactgcggcgacgggtgccagtcgggcccgtgccgctcgggcggcggcggcagcagtggcggcggtggtgcgaacgtggctagcgtcgtcaccggctccttcttcaacggcatcaagagccaggccgggagcgggtgcgagggcaagaacttctacacccgctgcagatctcgtggaactacaactacgggcccgcggggagggccatcggcttcgacgggctcggggaccccggcagggtggcgcgggacgccgtggtggcgttcaaggcggcgctctggttctggatgaacagcgtgcacggggtggtgccgcaggggttcggcgccaccaccagggccatcaacggcgccctcgagtgcggcgggaacaaccccgcccagatgaacgcgcgcgtcggctactacaggcagtactgccgccagctcggcgtcgaccccgggcccaacctcacctgctaggctaggcggcatcggcggacggcgggggccttcaggccttgtgctcggcgtcgcatcgcaccctcgcgcgcgaaaccgagcaatagtgacaataaaacgccggggctagctgagcctgtttgttcgacttcgacctgaataatgaagcagctgtgatatgcatgttgtttcgacacaacgtgtacgcttgcagagcgcttgtactttacgattgcattgtatgcagcaagggtttaaaggctgaatcaataaacggtgtgtaggcgatcactgtttcaccgcaaaaaaaaaaaaaaaaaaaaaaaaaaaacaccaaccc

SEQ ID NO: 65707 - DNA, 941 bp, Zea mays
  unsure (1)..(941): unsure at all n locations
  Clone ID: MRT4577_15992C.1
cggacgcgtgggttgagagctcgggcaccagatctgaagccctcttgttctgtggttgtgtgcctttcggctggtgtagcattgagaggaggcgctgttccagttccagttccaggatgagcaaggaggatgtgctcaaggtgcaggtgggtgtgcgcgccatttgctggcctccctcttctcaactcagccacccttcgtttttcccctccaggcaggcaggcaggcagctttgcttgtgtttgcagcaagtgttccccttgccgcgcctcctctgcagctgccctgccaatgtttgttgctgttcccttcaaatccctcctcttctgttgtttcagactttgatgctgagagtgaacatacactgtgacgggtgcgagaagaaggtcaagaagaccctccacaagatcgacggtacaaggacgaaccaccgatgccttctttttttttttctttgtacgtcagaccgtttggtttgctctgcatgcggaaacgtgatggaggttgaccttgccactgtaggtgtctaccagagcagcatcgacgcggaacaggggaaggtgacggtgtccggcctgctggatccggacaccatcatcaggaagctcaacaaggccggcaagccggcccagctgtggggctccaagcccggcgtccctcagaacggccatggcggcggcaagggccagcctaaggacgccggcggtggcaagggccattccaaggatgccggcggtggcaaggcccagaagggcggtgcgggtggcggcggtcacaagggtgccggtggtgccggtggcgggggtggtggggccaaggatcctaagatggtgatgccgcagccgacgccgcagcagctccagcagctgcagcagcagttgcagatgaaggggctgaagctcccgccgcacctcctgggcggcaacatgccggcgtncccc

SEQ ID NO: 65708 - DNA, 538 bp, Zea mays
  unsure (1)..(538): unsure at all n locations
  Clone ID: MRT4577_159930C.1
tcccgggtctcaatactgttttgtactgnatccagtatggctatggcacaagcaggcgcgccgagggtctcggcggcccagctggtgactctcgggctatcactcctctgcgctgtcgccggcccggccgccgcgcagaactgcggctgccagccaaacgtatgctgcagcaagtttggctactgcggcacgaccgacgagtactgcggggacgggtgccagtcgggcccgtgccgctcgggcggcggcggcagcagtggcggcggtggtgcgaacgtggctagcgtcgtcaccggctccttcttcaacggcatcaagagccaggccgggagcgggtgcgagggcaagaacttctacacccggagcgcgttcctgagcgccgtcaaggcgtacccaggcttcgcccatggcgggtcgcagatttctgctacatcagcgagatcaacaagagcaacgcctactgcgacccgaccaagaggcagtggccgtgcgccgcggggcagtattactacgggcgcggtccgctgctgttctcgtg

SEQ ID NO: 65709 - DNA, 1162 bp, Zea mays
  Clone ID: MRT4577_159931C.1
ggccgggacataatataaaaaaaaaaaaaaaatcacctcagtatttgtcagaagctcaaatactgatctcactgatccagtatggctatggcaaaggcaggcgcgccgagggtctcggcggcccagctggtgactctcgggctatcactcctctgcgctgtcgccggcccggccgccgcgcagaactgcggctgccagccaaacgtctgctgcagcaagttcggctactgcggcacgaccgacgagtactgcggcgacgggtgccagtcgggcccgtgccgctcgggcggcggcggcggtggtgcgaacgtggctagcgtcgtcaccggctccttcttcaacggcatcaagaaccaggccgggagcgggtgcgagggcaagaacttctacacccggagcgcgttcctgagcgccgtcaaggcgtacccaggcttcgcccatggcgggtcgcaggtgcagggcaagcgcgagatcgccgccttcttcgcgcacgccacgcacgagaccgggcatttctgctacatcagcgagatcaacaagagcaacgcctactgcgacccgaccaagaggcagtggccgtgcgccgcggggcagaagtactacgggcgcggcccgctgcagatctcgtggaactacaactacgggccccgcggggagggccatcggcttcgacgggctcggggaccccggcagggtggcgcgggacgccgtggtggcgttcaaggcggcgctctggttctggatgaacagcgtgcacggggtggtgccgcaggggttcggcgccaccaccagggccatcaacggcgccctcgagtgcggcgggaacaacccccgcccagatgaacgcgcgcgtcggctactacaggcagtactgccgccagctcggcgtcgaccccgggcccaacctcacctgctaggctaggcggcgtcggcggacggcggggccttcaggccttgtgcttgctcggcgtcgcaccctcgcgcgcgaaaccgagcaatagtgacaataaaacgccggggctagctgagcctgtttgttcgacttcgacctgaataatgaagcagctgtgatatgcatgttgtttcgacacaacgtgtacgcttgcagagcgcttgtactttacgattgcattgcatgcaacaagggtttaaaggctgaatc

SEQ ID NO: 65710 - DNA, 1121 bp, Zea mays
  Clone ID: MRT4577_159932C.1
gtgagacagagaccgaaggggggggttgaccggtgctcgggaggaagatgtttagcgggacgcagcagaagtgcaaggtgtgcaccaagacggtgtacccgatggaccagctctccaccgacggcgtcgtcttccaccgctcctgcttcaagtgccagcactggtgatgcaatgtagcatcgggtagtagatctgcgaattgccgcagcgaacagatctggtgcgagtttcctagtaccaggaaaattctacgcccaggagaggtcatgactttgtccgtttcccattcgctaacttggtgaaagaggattgggcagggaatccatgcaaatggacactcttatctgatcttctacttaggacgacctgtcgatgtctaggcaaagataagcagctgtgcgaggtctgacaatctccgtcttcatcctttccgcctttgacagctgagcaactattcctcgttcgaaggagtgccgtactgcaagacccatttcgagcagctgttcaaggagaccgggagttacaacaagagcttccaatcacagtcacctgcaaagattactccggaaaagttggcccctgagctgaccagatcaccaagcaaagctgcaaggatgttttcaggaacacaagacaagtgtgcgacttgtggtaaaactgcgtatcctcttgagaaggtaacagtcgaagagaagtcctaccataagtcatgcttcaaatgctcccacgggggctgcgcgattacaccttccaactatgcagccttggagggcatcctctactgcaaacaccatttctcccaacttttcaaggagaagggaagctacaaccacttgatcaagtgcgcgtcggtcaagcgcgccgctgaagcacagccagaacaaccggcctctgattcctcctcctgaccacgccatttaaacagtgggggtttggaggcgagagagttgggaatcctcctgtttctacttaaaaccgcatgatgtatgttattattccatctatgccccgaggatactagactactctattttggtatcctctgctgtgctagctggatcatatcagcgaaccatggaattgctgtcattttcaatgaaactgttgtgcatcaagtagtg

SEQ ID NO: 65711 - DNA, 401 bp, Zea mays
  Clone ID: MRT4577_159933C.1
atcggactctacatttgtgatatgttagctagagctgcccgcgccattgccaggtgacacatgttcttaggtgcagcccacaggcctgcataccgaatcgtagaaagttgtgcacagagatgaaattcttgtagaaacttgttgagaggctgagcgtagcatttttcccgtcattcaccaatcgggtgatgaggagcacgccttggtttccaattctttcacacgaagcgttgcctgccaccgccgttgtaacgcgcgatacgatagacagatacgagcagcactacggggaagtggcttggtcgtgaaggagcatttaatgctttgcagaatctagagacggcattcatgggagcgacacaatgctgctgtgcttgcggtggtattcctccagatgttca

SEQ ID NO: 65712 - DNA, 1277 bp, Zea mays
  Clone ID: MRT4577_159934C.1
cattgggacctcgagccggccgggaaaaaaaaaaaaaaaaaaaaaaaaaacctcagtatttgtcagaagctcaaatactgatctcactgatccagtatggctatggcaaaggcaggcgcgccgagggtctcggcggcccagctggtggctctcgggctagcgctcctctgcgctgtcgccggccccggccgccgcgcagaactgcggctgccagccaaacgtctgctgcagcaagttcggctactgcggcacgaccgacgagtactgtggcgacgggtgccagtcgggcccgtgccgctcgggcggcggcggcggcggcagtggtggcggtggtgcgaacgtggctagcgtcgtcaccagctccttcttcaacggcatcaagaaccaggccgggagcgggtgcgagggcaagaacttctacacccggagcgcgttcctgagcgccgtcaaggcgtacccaggcttcgcccatggcgggtcgcaggtgcagggcaagcgcgagatcgccgccttcttcgcgcacgccacgcacgagaccgggcatttctgctacatcagcgagatcaacaagagcaacgcctactgcgacccgaccaagaggcagtggccgtgcgccgcgggggcagaagtactacgggcgcggcccgctgcagatctcgtggaactacaactacgggccccgcggggagggccatcggcttcgacgggctcggggaccccggcagggtggcgcgggacgccgtggtggcgttcaaggcggcgctctggttctggatgaacagcgtgcacggggcggtgccgcaggggttcggcgccaccaccagggccatcaacggcgccctcgagtgcggcgggaacaaccccgcccagatgaacgcgcgcgtcggctactacaggcagtactgccgccagctcggcgtcgacccggggcccaacctcacctgctaggctagctaggcggcatcggtggacggcggggccttcaggccttgtgctcggcgtcgcaccccctcgcgcgcgaaaccgagcaatagtgacaataaaacgcccgggctagctgagcctgtttgttcgacctgaataatgaagcagctgtgtgatatgcatgttgtttcgacacaacgtgtacgcttgcacatcgcttgtactttacgattgcattgcatgcaacaagggtttaaaggctgaatcaataaacggtgtgtaggcgatcactgtttttcaaaaaaaaaaaaaaaaaaaaaaaaaaaaacaaaaaaaaaaaaaaaaaagcggcc

SEQ ID NO: 65713 - DNA, 1495 bp, Zea mays
  Clone ID: MRT4577_159935C.1
atcgaggccggccgataaaattggaacgatacagagaagattagcatggcctctgcgcaaggatgacacgcacaaatcgagaaatggtccaaattttttaaaaaaaaaaaaaaatcacctcagtatttgtcagaagctcaaatactgatctcactgatccagtatggctatggcaaaggcaggcgcgccgagggtctcggcggcccagctggtgactctcgggctatcactcctctgcgctgtcgccggcccggccgccgcgcagaactgcggctgccagccaaacgtatgctgcagcaagtttggctactgcggcacgaccgacgagtactgcggcgacgggtgccagtcgggcccgtgccgctcgggcggcggcggcagcagtggcggcggtggtgcgaacgtggctagcgtcgtcaccggctccttcttcaacggcatcaagagccaggccgggagcgggtgcgagggcaagaacttctacacccggagcgcgttcctgagcgccgtcaaggcgtacccaggcttcgcccatggcgggtcgcaggtgcgagggcaagcgcgagatcgccgccttcttcgcgcacgccacgcacgagaccgggcgtaagctggctctatctattaacctcgctcttcagcgcggcgcaggttctttgatttttgacccatcatgctgatcaattttttttttggaaaattttccgctgctgtgtctgtgtccacgggcagatttctgctacatcagcgagatcaacaagagcaacgcctactgcgacccgaccaagaggcagtggccgtgcgccgcggggcagaagtactacgggcgcggcccgctggcagatctcgtggaactacaactacgggcccgcggggagggccatcggcttcgacgggctcggggaccccggcagggtggcgcgggacgccgtggtggcgttcaaggcggcgctctggttctggatgaacagcgtgcacggggtggtgccgcaggggttcggcgccaccaccagggccatcaacggcgccctcgagtgcggcgggaacaaccccgcccagatgaacgcgcgcgtcggctactacaggcagtactgccgccagctcggcgtcgaccccgggcccaacctcacctgctaggctagcgcggcatcggcggacggcgggggccttcaggccttgtgctcggcgtcgcatcgcaccctcgcgcgcgaaaccgagcaatagtgacaataaaacgccggggctagctgagcctgtttgttcgacctgaataatgaagcagctgtgatatgcatgttgtttcgactttcgaaacaacgtgtacgcttgcacatcgcttgtactttacgattgcattgtatgcagcaagggtttaaaggctgaatcaataaaaaaaaaaaaaaaaaaaaaaaaaaaaaaaaaaaaaaaaaaaaaaaaaaaaaaaaaaaaaaaaaaaaaaaaaaaaaaaaaaaaaaaaggggcggccgtttttaaa

SEQ ID NO: 65714 - DNA, 413 bp, Zea mays
  Clone ID: MRT4577_159936C.1
ccccagctgctgcacccaagcttgtccaacagcgtgttaccaagacgaagaaagataacagtcgtccccctatttcttcaactacaacaatcagtggtgctgcacctagtcgccggccccttaattctcaatctcgtaatcctgctcatcctggtcgtaaacttgtccaatcaattgtgaagttgaacgttaagcttgtagataaagcaagtctgtccattcaacaagtcaagtgatgccatgctgttagcagcttaggacttcagtcatctatcttttgactatttaccaaccttttgggtcttaatgtcgtaaaaggcttaacaacttatgatgaccatgtaataaaaacatataatgctatattcggtactatcatagtgttgctactttatgcaaaaaaaaacccaaac

SEQ ID NO: 65715 - DNA, 622 bp, Zea mays
  unsure (1)..(622): unsure at all n locations
  Clone ID: MRT4577_159937C.1
cgggagggacacgcaacatcaaattcacggttgatgtagcctggcctcccttctgctgctgatcagctgattgatactactattcagacgcactaatttatagtggataatatacaacatcttagcagtaaaaaagtgggatgttgcaaaaaagaaaaagaaagtgagatgcanaaaaaaaaaaaaaaaaaaaaaaaaaaaaaaaaaaaaaaaaaaaaaaaatccccatttggacctttccaaccctccaaaggtgagagggccaaactgaaagttaaagtgcgtctcaacatccacgggattgtcacagttgattcagctatgatgctggaggaggatgtggcagttccagtctcatctgctaatgaagctccaaaggatactacaaagatggacacagatgatgcaccaagtgatcctgtctctggaactgatgtgaatgtgcatgagcctgatactactgaggctgctcctgcagctgaaaatggaacacaaaatcccgaggaaaaatctgttccaatggaaactgatgcaaaggttgagccatcaaaaaggaaagttaagagaacttctgttccggtccatgcgttggtctatggtgccttggctgcagctgacctgc

SEQ ID NO: 65716 - DNA, 375 bp, Zea mays
  Clone ID: MRT4577_159938C.1
gcgttcggagaactgaaaagtgaaggtcttgctttgtttaggcccaccagcctcatctttttgggtgcggttacccttcctgaagaggccaatccttccttctataagcaagtatggcgcatgcacaccatactgatcttcagagactatatgattaatgtcccacagaaccttgaagcttgccagaagatagtctatttcagcaatccattgtttatgaacataccaacgtcaacccaggttgacaagatgatgacttccagtgtcacgactccttaatactatgatgaggtgttttacactacggaccatctctataaagagaatgcagctggcatctcaatattatactatctaaaacatatttacccagat

SEQ ID NO: 65717 - DNA, 259 bp, Zea mays
  Clone ID: MRT4577_159939C.1
cctgaaatggcaccagcagagagatcctggcagtaagaaagattattcccagtatgaggaaaacatcacacacctgcaggagcagatagtggatgacaagatgaccaatgctcagattattcttctcattgacaatgccaggatggcagtggatgacttcaacctcaagtatgaaaatgaacactcctttaagaaagacttggaaattgaagtcgagggcctccgaaggaccttagacaacctgaccattgtcacaaca

SEQ ID NO: 65718 - DNA, 1797 bp, Zea mays
  Clone ID: MRT4577_15993C.1
cattgggtacctcgaggcgggccgggactctcccccaaaccctataggctatagcggcagggagaaagtgagcacccacctcaacccgcccgccgccatggcgctccgccgcatcacaccgcggaggagacccgttctccccgtcccccgtgccttctcctcgagtccgccgtttcctccacccccgcctccggcgaacgaccccgaccccgacgccgcccaacccccatcctcttctccgccccctaattccggcgcgccgcggaacccggagtcctcgttcttccaggacatcaaagatcgcctccgttcgtctcccacgtctccgtctccgcgccggatcccgacgaccctgccccgccccgaccctgcgcgcggcgctccttcttcgggaccgcccattggagacatccgccggatgctccagaacttccgcttaaccggctcaaccagcgacgcgccctccacctccgctcccggatccaacccctccttcatggacctgctcaagaaccacttggaccagggtgccaacgcccggcaggcggagctcggcttcaatgccatcggagagagcctcaagcgcccccgtccgccgaagccttttataaccccttcgtcgagaaacatcttctgccgggagctagagaggacctcgaaggctttaggtgcgcggcaggaagagaatggctctgccattgagcttaaggggagctacagctacgaagagcttgggaagagactaggggagctgcggccggcgggtgcaggtaaagacggtaaggagtggttctcgctcaaggagctgcaggggcgtatcgccaagctcgcggagcaggagagccagcttgccgggccgttttcggaaatgcggcggggcattaggaacctgcagaaacaaggaaaaccgggtcggcctgtaaacatccaagcactgctgaaccctgtcggtcagccgacgccagactacatgagtgggcctccgcaggtggaattgttagagaagtacttccatccagatcatatgtcatccgaagagaagatgaaattggagctccaaagggtgagggacgaattcaagatgtccgagaatgactgtggttctgcacgagttcaaattgcccagctgactctgaaaatcaagcatctgtcaactgttctacacaagaaggataaacattctagaaaggggcttcaggagatggtccaaaggaggaagaaatacctgaaatacttgcgaaggaccgactgggactcttactgtcttgttctgtcaaagctggggcttcgcgatgtgcccgagtacaaagctcctgactacaagagcaaagcaaccaccaaggccaaatctaagaagaagagcaagagcaagggcaagaagaagaaggtgaaggcataaaagtagtgaacaaatatgccctgtttctggtcttgaattgcatgctcagaaaataaatcgagaagacgctcaggcctgagatggcttgatccaatcttgcaatgctgtttttttttgcatggtcagaaaatgaatcgagaagacgctcaggccccaattggctcgatccaatcttgtaatgttgttttcgaagctgtttgtaataaccatttcactgattcggtccagccttcgaacaatgccttttagttctccccctcaatttgcgagaacggaagtggactaaccgacactagtactataccgttgcattatcaccagtttgtaactttgccaaaattcttgtttgggtttaaggaaatttggacaaattttttgggcaaaaaatccccgacccc

SEQ ID NO: 65719 - DNA, 381 bp, Zea mays
  Clone ID: MRT4577_159940C.1
atcatttatttatataaaagggagaagaaagagccccacatacaagacctttgccaggcctacaccactcatacagactagcgaatcaacctggatcaaaggctaaacccaactcaaggaggtgcttaaccccagccaacacccagcagacagccttattagagaagtcctgcttcagcttgggcagactcggctgagccccctcaaacacacacctatttctatgaagccataggctccaaccaccgaggataatagcactattgacaccttcctccaccattccccaaagacctcatcatcaatttggggggcaagcgccgcaagtccaaggggagccagcagatcatgccaaaattgacgggcaaagacacaactagt

SEQ ID NO: 65720 - DNA, 3390 bp, Zea mays
  Clone ID: MRT4577_159941C.1
ccacgcgtccgggtaaaaattactccgacatttctgtatcatatggaacagagttaaatcctgaggatgggagctaagcgcctgctgttgacaacagaagtaacttgcaagctgttttgcgaagtcttcccgtatcagaagttatcttgctatgcccattacttgcgattgatggattgtcgttcagcgctaaactccttataggtaaactgttgaacttcattttgtctctttccactatcctctcgtggcatttcataaatgctcttgaactataaaagaaaagcttgacactttgttcaactcatgagcttcgtttgtacgagaattctgaaaaggctcttcttagttctacatcagccaatggaacagtcatccagtgggttggggaaatcgtgcaggcgctcagcaaaggaagacaaagcccggttcctccagttcgtcactggcacttcaaaggtaccgttggaaggttttagtgcacttcaagggatctctgggccacaaaggtttcagatacataaggcctacggcagcacgaaccatctgccttcagctcatacttgctttaaccaactagacttgcctgagtacacatccaaagagcagctccaggagcggttactattggcaatccacgaagcaaatgaaggtttcggatttggctaatcagttatactcgtttgtccgtgccctgagaactgcaataggcgagcagcacgtgtgtggctgatcacattatgaactccacgtgtgtgatgagagatggccggagagaacatgtccaggatagacgaatgcccgtgggagaggtactactgttaagagagagagcgactattttgtgtttataatctttgtctgtttgtagtttttgccttacattggtcgttgctccgaagtttttccccttcttttcgttcatagactggtgtaagttgtaaccgaacattatgtcaaatgcaggtcatcttacgctggaatgttatacctcccctaatctgttaaaacaactgtaaattccgaaggactatttattctaatattattagagcgaaaattctctctttcgctctcccaatctacattttcaaagatgagcaactgcataagcaagatagaaagctcttcagagtatgcatcaaatctaagtcctgcttctgcaagtgcagctatgttaactacaggagtagcgcctccattgcctgcaggaaccgaaaaccggatttcaaccgaaccctaattctgtgtatcaaactgagcacctctcatactttaaatttgctggacgagtggttggcaaagctctcttcgatggtcagcttttagatgctcattttactagatctttctacaaacacatacttggtgtcagggttacataccatgacattgaagccatcgatcctgcatactacaaaaacttgaaatggatgctcgagaatgacataagtgatgttttggatctcaccttcagcatggatgcagacgaagagaaactgatattgtacgagaaggcagaggtcactgattgtgagttgattcctggagggcgtaacatcagggttactgaggagaataaacatcaatatgtagatcgggtagcagagcatcgactgacgactgcaatcaggcctcaaattaatgccttcctggaagggtttaatgaactcattccacgggagctgatatctatcttcaacgacaaagagcttgaacttctgattagcggtcttccagatattgacttggacgatttgaaagcaaatacagaatattctggctacagcatagcctctccagtcatccagtggttctgggaaatcgttcaggggttcagcaaggaagacaaagcccggttcctccagttcgtcactggcacttcaaaggtaccgttggaaggttttagtgcacttcaagggatctctgggccacaaaggtttcagatacataaggcctacggcagcacgaaccatctgccttcagctcatacttgctttaaccaactagacttgcctgagtacacatccaaagagcagctccaggagcggttactattggcaatccacgaagcaaatgaaggtttcggatttggctaatcagttatactcgtttgtccgtgccctgagaactgcaaataggcgagcagcacgtgtgtggctgatctcattatgaactccacgtgtgtgatgagagatggccggagagaacatgtccaggatagacgaatgcccgtgggagaggtactactgttaagagagagagcgacgattttgtgtttataatctttgtccgtttgtagtttttgccttacattggtcgttgctccgaagtttttccccttcttttcgttcatagactggtgtaagttgtaaccgaacattatgtcaaatgcaggtgatgttacgctggaatgtgatacctcccaggggttctgcaaggaagacaaagctcggttcctccagttcgtcactggcacttcaaaggtaccgttggaaggttttagtgaacttcaagggatctctgggccacaaaggtttcagatacacaaggcatacggcagcacgaaccatctgccttcagctcatacttgctttaaccaactagacttgcctgagtacacgtccaaagagcagctccaggagaggttactgttggcaatccacgaagcaaatgaaggtttcggatttggctaatcagtcatgctcgtttgtccgtgagagtctgtacagatactgagcattgcaatgggcgagcagcacgtgtgtgctgatccttaccacattctgaactccacgtgtttgatggccggggagaacatagaagaatctccgtgggagaggtactgatgagagagagcgactattttgtgttcataatattcattaccttttttttagcttttttcggtcgttgccccgttcgtagtttttgccttacattggacttcgctccgattttttttctctgcttttccttcatagactggtgtaagctgtaaccgaacactgtcaaatgcaaatcatcttagggccccttcggttattactgaatggaggcatggaataattgctttacccaacttgacttgcctgagtacacatccaaagagcagctccaggagcggttactattggcaatccacgaagcaaatgaaggtttcggatttggctaatcagttatactcgtttgtccgtgccctgagaactgcaataggcgagcagcacgtgtgtggccgggcgcggtttgtcctccccgtctgggttcggggagggcccattcttttatcagtactgttgtagctaatacccttccagggtcacttctattgttaaaccattacaagttcggtagccaattggccacactaaaaaaaaaaaaaaaaaaaaa

SEQ ID NO: 65721 - DNA, 493 bp, Zea mays
  Clone ID: MRT4577_159942C.1
cagcttttagatgctcattttactagatctttctacaaacacatacttggtgtcagggttacataccatgacattgaagctatcgatcctgcatactacaagaatttgaaatggatgctcgagaatgacataagtgatgttttggatctcaccttcagcatggatgcggacgaagagaaactgatattgtacgatcaggcctcaaattaatgccttcctggaagggtttaatgaactcattccacgggagctgatatctatcttcaacgacaaagagcttgaacttctgattagcggtcttccagatattgacttggacgatttgaaagcaaatacagaatattctggctacagcatagcctctccagtcatccagtggttctgggaaatcgttcaggggttcagcaaggaagacaaagcccggttcctccagttcgtcactggcacttcaaaggtaccgttggaaggttttagtgcacttcaagggatctct

SEQ ID NO: 65722 - DNA, 580 bp, Zea mays
  Clone ID: MRT4577_159943C.1
gatctctgggccacaaaggtttcagatatcccttgaagtgcactaaaaccttccaacggtacctttgaaggttttagtgcacttcaagggatctctgggccacaaaggtttcagatacataaggcctacggcagcacgaaccatctgccttcagctcatacttgctttaaccaactagacttgcctgagtacacatccaaagagcagctccaggagcggttactgttggcaatccacgaagcaaatgaaggtttcggatttggctaatcagttatactcgtttgtccgtgccctgagaactgcaaataggcgagcagcacgtgtgtggctgatctcattctgaactccacgtgtgtgatgagagatggccggagagaacatgtccaggatagacgaatgcccgtgggagaggtactactgttaagagagagagcgacgattttgtgtttataatctttgtccgtttgtagtttttgccttacattggtcgttgctccgaagtttttccccttcttttcgttcatagactggtgtaagttgtaaccgaacattatgtcaaatgcaggtcatcttacgctgg

SEQ ID NO: 65723 - DNA, 3881 bp, Zea mays
  Clone ID: MRT4577_159944C.1
aattcggcacgaggatgatggtgaccggcatggaacttcaggcacctcagaacgattacctttgggtgatattcaagcagctgctcgatcacggaggccatctggaaatgctgtgccagtaagcagtagagatatgtctctggagagtgttagtgaggttcctcaaaatccagaccaagaacctgatcagaatgctagtgaggggaatcaggagcctaccagagcggcaggtgctgactcaattgatcctacatttttggaggctcttcctgaggacttgcgagctgaagttctttcttcacgtcaaaatcaagtgactcagacttctaatgaccaacctcaggatgatggtgatattgatcctgaattccttgctgcactcccccttgatataagagaggaggtgctagctcagcaacgtactcaaaggatacaacaacaatacaagaattagaaggacaaccagttgaaatggatgctgtttcaattattgcaacattcccttcagaaattcgggaagaggtccttttgacatctcctgacaccctcctagctacactcacacctgcactagttgctgaggccaacatgttaagggagagatttgctcatcggtatcacagtagctctctttttggtatgaactccaggaacaggagaggtgagtcctcccgacgtgacataatggcagcaggacttgataggaacacaggtgatccctccagatcaactagcaaaccaattgagattgaaggtgctcctcttgttgatgaagatggccttaaagctcttattcggttacttcgagttgttcagcccctatacaagggtcagctgcagaagctacttgtgaatctttgcacgcatcgggatagcagacaggccttggttcaaattctggtggacatgcttatgcttgatctgcaggggttttcaaagaaatcaatagatgcacctgagccaccatttaggttgtatggatgccatgcaaatatcgcatattcacgccctcaatcttcggatggtcttcctccattagtctcacgtcgtgtgctcgaaacgctcacgaacttggcaagaagccatccaaatgttgctaaactcttgctctttcttgaattcccttgcccatcaagatgtttccccgaagcacatgatcataggcatggcaaggctgttctcctagatgatggtgaagaacagaaaacctttgcacttgttcttctgttaaatctgttgaatcagccactttatatgagaagtgtagctcatcttgaacagttactaaaccttcttgaagttgtcatgcacaatgctgagaatgaaattaatcaagctaagctagaagcatcatctgagaagccatctgcacctgataatgcagtgcaagatggtaaaaataactccgacatttctgaatcatatggatcaaagttgaatcctgaggatggcagcaaagcccctgctgttgacaacagaagtaacttgcgagctgttctgcgaagtcttcctcaaccagagcttagattgctatgttcattgcttgcgcatgatggattgtcggacagcgcttatctccttgtaggtgaagtgttgaaaaagattgtggctctggcccctttcttctgttgccatttcataaatgagcttgcacgatcaatgcaaaacttgacattttgtgcaatgaaggagcttcgtttgtacgagaattctgaaaaggctcttcttagttctacatcagccaatggaactgctattcttagagttgtgcaggctttgagttctcttgtcagtactcttcaagatagaaaggatccagaacagcctgctgagaaggaccattcagatgcagtttcccagatttctgaaattaacacagcattggatgctttgtggttggaattgagcaactgcataagcaaaatagaaagctcttcagagtatgcatcaaatctaactcctgcttctgcaagtgcagctacattaacagcaggagtagcacctccattgcctgcaggaactcaaaacatattaccatatatagagtcattttttgtgacatgtgagaagttgcgtcctgggcaacctgatgctgtacaagaggcttcgacttctgatatggaagatgcttcaacatctagtggtgggcagagatcatattcctgtcaagctagtcttgacgagaagcaaaatgcttttgtgaaattctcagagaagcacagaagattgctgaatgcattcatccatcaaaaccctggattactggagaagtcattctcgctgatgttaaaaattcctcgcctgattgattttgacaacaaacgtgcatatttccggtctaaaatcaagcatcagtatgatcatcatcatcataatcctgttagaatttctgtgcgtcgttcatatattcttgaggactcctacaatcagcttaggatgcgctctcctcaggacttgaagggtagactcactgttcattttcaaggagaagaaggaattgatgctggtgggctgacaagggaatggtaccaatcgctttcacgagtcatttttgacaagagtgcccttctatttacaacagtcgggaatgatttgacgtttcaaccgaatcctaattctgtatatcaaactgagcacctctcatactttaaatttgctggacgagtggttggcaaagctctcttcgatggtcagcttttagatgctcattttactagatctttctacaaacacatacttggtgtcagggttacataccatgacattgaagctatcgatcctgcatactacaagaatttgaaatggatgctcgagaatgacataagtgatgttttggatctcaccttcagcatggatgcagacgaagagaaactgatattgtacgagaaggcagaggtcactgattgtgagttgattcctggagggcgtaacatcagggttactgaggagaataaacatgaatatgtcgaccgggtagcagagcatcgattgaccactgccatcaggcctcagattaatgccttcctggaagggtttaatgaactcattccacgggagctgatatctatcttcaacgacaaagagcttgagcttctgattagtggtcttccagatattgacttggacgatttgaaaacaaatacagaatattctggctacagcatagcctctccagtcgtccagtggttctgggaaatcgttcaggggttcagcaaggaagacaaagctcggttcctccagttcgtcactggcacttcaaaggtaccgttggaaggttttagtgaacttcaagggatctctgggccacaaaggtttcagatacacaaggcatacggcagcacgaaccatctgccttcagctcatacttgctttaaccaactagacttgcctgagtacacgtccaaagagcagctccaggagaggttactgttggcaatccacgaagcaaatgaaggtttcggatttggctaatcagtcatgctcgtttgtccgtgagagtctgtacagatactgagcattgcaatgggcgagcagcacgtgtgtgctgatccttaccacattctgaactccacgtgtttgatggccggggagaacatagaagaatctccgtgggagaggtactgatgagagagagcgactattttgtgttcataatattcattacctttttttagcttttttcggtcgttgccccgttcgtagtttttgccttacattggacttcgctccgattttttttctctgcttttccttcatagactggtgtaagatgtaaccgaacactatgtcaaatgcaaatcatcttagggccccttcgattattactgaatggaggcatggaataatttctagccgtaaaaaaaaaaaaaaaaaaactcgag

SEQ ID NO: 65724 - DNA, 339 bp, Zea mays
  unsure (1)..(339): unsure at all n locations
  Clone ID: MRT4577_159945C.1
nnaaaaaaaaaaaaaaaaaaaaaaaaaaaaaaaaaaaaaaaaaaaaaaaaaaaaaaaaaaaaaaaaaaaaagggaggaacgatgtaggggatccaaagcttacgccacgcttgcttgcgccgggcttgccatcttctttggtgtccccttagtttcactctactggccgtcattgtccaccgttttgcctgggaaagcccgggcgttccccaccttatcccccttgaagcgcttccccttttctcccgttggcgtattttcgaataggcccgtaccggtcggccttcccaacggttgcgcaccctgactggcccttggtgcccgccttgtcgcgccctt

SEQ ID NO: 65725 - DNA, 714 bp, Zea mays
  Clone ID: MRT4577_159946C.1
caggtcatcataatacatctggaagtagtaatccttggcaactgcatcccggagcttggcgacttgctccttggacaatgttttcttgcagagagtcttggagttcgtatcttccttaaagttcaactcatatggtgcatcaaccaaccgatcaccatttagaacctccccaagagcctctcttttgtcctttgggtgttctggtgcacaaaagggtagatcatagtaccggtatgtctcacttggattgtggaaagggccgaccttgttcgcgtagagcgggacacgatctccctccttgtacttgtgatcagagccatcagctccagcccccaccatacaagccaacagggccaccgcaagagcagcgcccgccgcctccgtcctcaccatcactgcgagcacctccgacccaaaaggggcggatctggatgctcagaaaccaatgctccgagatcgcgggtcgagagacagcagggacaaggtgatgtagaaaaggcgacgcgcgcgcgtgataggcggaggggttagacgtcggcggcgacgcgaagctcgctgtgcggcgagccggcggcggtagactgccgggggggattttagagccgcactgggtgggatcggagcttgggggcggggaggaagcggaagggtaccgctctggtggagaggaaaaaagtcgtttgtgagggaggtaggtttctttcactgaggatc

SEQ ID NO: 65726 - DNA, 323 bp, Zea mays
  unsure (1)..(323): unsure at all n locations
  Clone ID: MRT4577_159947C.1
gttgggttttttttttttttttttttttaagggagaagactcaagtcttcacagatagatagatagatggataacactggtaaccagttacataaacaggtacatgggacataaaccagttacatagatagatagatggatatcatcaggggtnccgtttggggtccctctactttaatatatgggtgcgcagtcctcctgcgctctttcgaaaaaaaaaaaagttcctaaacaggtgcctggttcacagatccccantgggtcgaatgatatccttcttctggggaagtggcccattgcttatttggcaaattgctgtttgg

SEQ ID NO: 65727 - DNA, 205 bp, Zea mays
  Clone ID: MRT4577_159948C.1
ttcaattcacggactaagcccccgccggaaagcactgaccttccgcgcggcccgccgcaaggaacgcgtgacctccccgccccctgttgcggctgggcgggcggcgcattcaggatctgctagggtttccccgccggcggggtcctggccatggcgagcccgcgctcgggccggcggcgacgagggcgaatctggatgaaagctg

SEQ ID NO: 65728 - DNA, 321 bp, Zea mays
  Clone ID: MRT4577_159949C.1
aaggggacggctggttttaaaaccttgacaagcaaaacaacaaaggttttactggtaaccccaaattaaaaaattaccaaagctggcgacccacgggggttggattctcctgccctgcagttagagcagctccaaaacccaacattttggcagggcttcagttctgaattggctgctgtggctgctgctgagctggagggccattaggcggctggtgctgccctccacctgcatgcgggggatgccgagatgaactagcccgggcctgtgctggatgaactaacatcggttgggaaggtggattttggggggggtagggca

SEQ ID NO: 65729 - DNA, 2147 bp, Zea mays
  Clone ID: MRT4577_15994C.1
cccacgcgtccgcttgaatcttgagcacagagtaggctcgctcacaggacagtcacttgcctgggaagccagatattattgcagcctcaaacaccgcccttccctactgcttcctgagattggagagctcgggcgccagatctgaaacctcttgtgttgtgcctttggtagttcggtgtagcattgagctagtagaggtgctgttccagttccaggatgagcaaggaggatgtcctcaaggtgcagacattgatgctgagagtgaacatacactgtgacgggtgcgagaagaaggtcaagaagaccctccacaagatcgacggtgtctaccagagcagcatcgacgcggaacagggcaaggtgacggtgtccggtttgctggatccggataccatcatcaggaagctcaacaaggccggcaagccggctcagctgtggggttccaagcccggcatcactcagaacgcctaccatggcggcggcaaggcccattccaaggacgctggcggcggcaagagccattccaaggactccggaggtggcaagggccattccaaggatgccggcggcggcaaggcccagaagggcggtgcgggtggcggcggtcacaaggcccctcgcgatggcggtggcggagccggtggcgtgggcactcctaggatggtgatgccgcatccgacgccgcagcagctccaggagctgcagtagtagctgcagatgatggggctgaaacagccgccgtaccagttgagcggcaatatgccctcgttctccgcggctaccccgatgaagcaccccaagtccgtgagctttgcccttccggaggacatctttgtgttctacggtagctagttcgacgatgacttcgccgttggttttgactacgacgacgccgactacaacgaagaaggcctggacgatgacgtctacggggaccccaagatgatgatgaagcccatgactgtaccgccgccggccggcgggggcgacaagaagggcggtggcggcaagaagggtggtggtggggggaacgagatcccggtgcagatcaagggaaacaaccacggcggtgccggtgggcagccgcacaatgcaaagggaggcgccccgggaggcggggcccacctgggccaggggaagaagggcggcggcagcgccgccgccgtcggcgtcggtggcccgatgggcggaatgctgcctcaacaaggcatgatgaggcctcctaacattcttggtggtgctggtgccggcttccccagcacggcccagatgggcggcggacctatgggcatgccggttggccacccgcacatgggtattatgcagcagggcggcggtggcggtggtggtggcatgccgggcctggggttccacccgggattgggcggcggcggaatgcattctggggcggatatgcttcaggccgccgcggcatccgggaaccccgtggcgcagcagcagtacatggccttgatgcagcagcagcagcagcagatgatgatgatgcagcagcagcaacagcagcacgggaacggcggtttaggatacccggcggcaatgggctacggctatggccggccaccgatgcattacccaatgggctacccagtgctgcccccgcactcgcatgctgagccttacaacatcttcagcgacgagaacgccaacagctgctcactgatgtgatcagcaattccgcatggaatggccctgttccaagtaaaccatctcaaggagctcaatgtcaccgctgatcaccgacagacatcgccatggttgaagcgccgtgaatcaatcaacaatcagtatgcttggggatgagtcctagctagaaccctgtccctttcctgctccttccccccctttctctagcttattttcgccttgctttaaaaaaaaaggaacttccttgaatgcgaagttaggtatagtaattatgaggtttccataagggaggggaggagagaggagacgatagggacttcgtacggggtcgttcgcttgtgggttcttccctcctggcttcattaaggtggactaatggtagaacaatgttgtcaatctcagtcgtaaatcagtgtgaatatgtcgtgatttctcttctaatctaactaactatatatatggtaataagttctgtttaacgt

SEQ ID NO: 65730 - DNA, 485 bp, Zea mays
  Clone ID: MRT4577_159950C.1
cgtccattttttttttttttttttttttttttttttttttttttttagcaaacataatatattagatatcacaacttagggcgttgaaaagttaacataaagtcaccagtccccaagagcatatattatacattacaaataacatataatttcagttaatttgggtataaattttggttttcaaacctaggatctgaaatagggtttgaaaattcaggtttcggtacatcagttacgagttgggatatttcaagtttggataatgccactagcagcacctagctagagtttcgcataaagaagccgccctagctcctttatattttcagcccccacggtcacgagcacgcggacgtcgccggggggggtgcatccaccctcatcgttgatcaagtgcacgaatccgccgcggtcggagtccgcccgggacatgaattgcggggttccccacccaaaatccgcgttgtactgtgacctacccaacc

SEQ ID NO: 65731 - DNA, 294 bp, Zea mays
  Clone ID: MRT4577_159951C.1
aatccaaccgggaggggatccagagtgccagatgtgcctgcgggtgccacaacaagaggggcatacatgctatccaagcaagcatgataagccagcaggttggagtccaagaaaagcacaaattgaattgcaacggctccttgcgaaacatgtattctactaggatggtccagggcaatatacaaccctaggggcattgccctgagagggattaagtccctacaaaaattgacaatgggaaaagggagccatccttttgggagctgccatgggggctactacctacatatgcag

SEQ ID NO: 65732 - DNA, 1553 bp, Zea mays
  unsure (1)..(1553): unsure at all n locations
  Clone ID: MRT4577_159952C.1
aatggtccaacgatggcgcgtacgtgttaattcatctgttggtcgatcatatacatgccccattatggagagatggaggagtgctgctagtacagtcagtgcactgattctactgctgctgctggcgatgatgatgacgatgagtggtggtgggtgttgttgggttgctcgagcatcttgacaacttgcgccatggttgatctgttggcgggatcagagtggaggcacttgtcggcgacggagaagagcaacctgagttcctcggtgtgtaagtgtaaggggtggtgcagcagagcctcgtctatggcgtgctcctcccgcttctcttccatggtctccctgacccaggtgacgagcctggtgccgttctccaggaaggactcgtcggtgggtctcttccccgtgagcagctcgagcaggacgacgccgtagctgtagacgtcgcccttggtggtggccctgccggtgtcgaagtactcgggcgcgaggtagccgaaggtgccggcgacgagggtggtgacgtggctggcgttgggcttgacgatgagcgtggcgaggccgaagtcggagaggcgcggctccatgtggtggtccaggaggatgttactgggcttgatgtcgcggtggatcacgtgcgggatgcagtcgtggtggaggtaggagaggccgcgagcaacgcccagggcgacccggtagcgagcaggccagtcgaggatgaggcggtgggcatggtcgtgcacgtgcagggcttggtccagactgccgttgggcatcagctcgtagatgaggaggttgaagtgcgtggcggcgtagtagccgcagagcgggacgatgttgcggtgcttgatgtctcccatggcgtccagctcccgctcgaatccgcggtcgtccgcctcgtggtggtgggtgccccggttgagcctcttgacggcgaaggcggtcttgtcgtccaggcgcaggcggtagacggtgccgtagccgccggcgccgatgacgtccttggtggagaggcccatgagcatggcgaggaaggacttgggggtgagcgactgcggcatggccatggtggcggagcggaagatgaccatcttgccgccagcgaggctgttgtcgatgatcctcttcttgcgcgcccatttcttgtagaggaggaaggagatgagcatcttggagaggaggaagaggaccgagcagatggtgacgtagagggcaactaaggcagaagacatctagcttgcttcagtgctgtgctgctgttgttgaatgaaatgaaatcaacagatcgatagcgctgaacgacggcgatcgagctcagcacaggatgaaagatggatgcttatttgctttgaagaatcgatcagctgatcgacagacgacattgagagaatgggaagaggccggtggccatgtctcagttctcatgtgaacgagcgaggagaaagcaatactcgctctccatgtganacctgggagaagtttggcagagctggtggaagaaacagcaatacagtgctcaactaaccaaccaatcaatcaatacatggngggtgaag

SEQ ID NO: 65733 - DNA, 367 bp, Zea mays
  unsure (1)..(367): unsure at all n locations
  Clone ID: MRT4577_159953C.1
tgaagcttgaacgttcttgagtcacttgacctctcgttgaacaaactgtcaggagccattcctccagggctaagcaatatgttgttcctctcgttgaacaaactgtcagggttgtactactgtgtgatcgctggagtcatttttgggttctggctgtggtacgggacgctcttctccgttgcgaagttgaggtgctctttctgtttgttgatcgcgtacagtacagagttatgcagaaggtgcgtcctaccaatcattttttttatatccaaagattttgatgaactgctcaagatgcactnccgacaaaagggaagagttagaagtatttacaaaagaggtcattcgctttggaaactattgcaag

SEQ ID NO: 65734 - DNA, 202 bp, Zea mays
  Clone ID: MRT4577_159954C.1
cggactcttgggctagcgggcccgaatctctagctggcagaagacgacggagaacggggtgggatacctgacgattaaccaacttaactggtgggctgaagatgtctttgacaggcagcacgatagccgccacattataacacgctttcattcattttgatggatatgattgaaaataataatcaatcacgtatcactggtg

SEQ ID NO: 65735 - DNA, 512 bp, Zea mays
  Clone ID: MRT4577_159955C.1
aaaaaaaacagacataattattccttgcatcaagcagtaataattcttaggggagggggagggaaaaaaaaacaaaaagggcccccattaaaaagacatgtatgggttccatctgcagatctagctgagatctaagttgggaaaggaagggtcaagcaaaagcttggcaacacaacaaggggggcttttccccatacataattcatcacccaaaaaaaaaggcaccggctgatctgggagtctgatccggtggggggatctacaaaagcggggggaccggacgggatcggatcacccggaggccgcggccgtgcgggagcggtaaagcttgcccaaaatgggggggggggggaccaagcccatgaagcagagcgacatgacgagcaccatggggggcgaaagggggaggcccggcccctcttcggtgtaaaaacggagcatgttgctcccgccggccccggagaaacccctccccggcccttgagggggggcgggggggggcattcccgggg

SEQ ID NO: 65736 - DNA, 827 bp, Zea mays
  unsure (1)..(827): unsure at all n locations
  Clone ID: MRT4577_159956C.1
gtattcagcrcttagttctwtrgkttaaaaatatacatagagtatgamgtctactawystttattaacattacacatcgasrgcyaacaaataaayataactaaaacctctttctgckyaactatgtwgcttccatcatcgaactcatctgtgtcyyyttcttgtctgcctagtttcactatatattacttacttngtatacgcgccatatacaatcgccttttttttcgtcaccaatgtggttgtgctcagtcatgcagaacgaagacgtgcactatcgtgcgctctgcacgtgacactacacgtgtcgtgacgcatgccatgngtctactncaatgctcctctcgctacagagaatacttcgcgcgcgancgggtatcttgcgcgcgattggatctctgcgttgaattaacgtatcctttntrtgtatactctacttcgatacgaataacacaccctacctctgtgacgatcgatatgtgtcattagtactctacattctctctcgttgactgtcgagaaacactgtcgcgtccgcaccatcaactgcgaccggtagwtacacyagccaagtsatcgctyayytatacgacrggggcgtcctatcawcaccgcgcagcstgatgattgtagckccwccagctcgcgcmggcngcagctgtcgctcctctacgtgaygatctcttgagctgtcgagmkataaaaagtctctatcgtcgtcgtccacgcagccgatgtcgccggtgtgcagccagccagtctnggtcgatggtgtgcttcgtcgnactcgtggtcgtacatgtnatctgtcatgatctgctcacccg

SEQ ID NO: 65737 - DNA, 2310 bp, Zea mays
  Clone ID: MRT4577_159957C.1
cgattgtttaacgtgcctgattcaggtgcattgacttactatagatttcttcccagagtgagcgggcggtctctcagcgtgacatggagtagtaacgccaaatttgtattttctggcagcagtgacggtttaatcagatgctgggattcaacatctttccatgaaatgtatcgtattactgctggattaggaggggctggtacctcacctgaactttgcatctggacactattgtttctgaggtgtggaactattgttagtggagatagtaccgggagtgtacagttttgggatagccgccatggaacacttctgcaagctcactcctatcataaaggcgacgtgaatgcactaacaactgtgcctagtgagaacagggtattttccgcagggtctgatgggcaggtaattttatacaaaatatcaaaagatgaatttggtgctagtaaaaatgtgatcaaagagcaagttcagaaatgggtctatgtgggatatctcagagctcacactcatgatataagggcattaaccatggctgtgcctatctgtagagaagatgcattacctgaggaaaaggtggtgaagattcgccggcgtgaaaaacatgaattcagctaccacagatgggctcatcttggggttccgatgcttatatctggtggtgatgacgccaagctgtttgcatattcagcaagagagtttactcagttctcacctcataacttctgccctgcacctcaacaccctttgataaagctggctaggaatagcacagtcaatggagattatgtaatgcttgtccagtcttcgaacttcttggatgttttacttgtccacgcgtccgacaagctgacgactccaagtacatcatcatctagaggagatgctcagtccgacaacttgttcgtttgaaaagcaaggggtccagaaaaataatttctagtgctgcctgtgccaatggaacacttttggcctattcagatggtgtgagaccctgcctctttgcactaagacataagggtggaaagaagtacacccttgacaaattagagctgccaaaaggattgccctgttctcagagtatgctgtttactgtggactcgtccaatttgatacttgctgggcgtaatggaaaaatatacatcattgacattgcaacaagagaaatttcaaatgtatttcaccctacaagaagggcagatggagcaaaaatctcaagagaaccaccctgtaacgaagatgttcctaagtgcagacgggcaatggctagctgcggttaactgctatggggatatttatgtatttaaccttgaggtgcaaagacaacactggttcatatcccgaatgaatggtggttctgttacatctggtggtttttgccctaagaacaacacacttatcataactacatctaaaaacgaggtgtatgtattttgatgtggaaacaaaacaactaggtgaatggtccaagcgatatacgcaccagttgcccagaagtttccaggaatttcctggagaggtcattggcctatcattttctccgcaaagctcgtcatcggttattgtatacagtaccagggctatgtgctacattgattttggattgccagtagttgaggatgttgacttgccaaatggatcagctggagctgcagagaagtcggacacaaaaaaaattaaaaaagcaaggcagaaacgtaaggcccatgatgaagagtctaaacaagagaaaaggaataacttaagtttttttgcgtttaaagaaccagtgctctttgttgggcacctactggacagttcaattttaatagtagagaagcgatggatggatgtagttgaaggttttggcgcaccggttcacagacatatatatggcacatgattctttctaacatcaaactttggcgcccgtgacaagcagaccattatttttgtttttgcattcggcctcgagtatgttaccggttgaaagggctccaagttttgcagtacaaagtggcagctgcatctaatctttagaattggggactctggcaattgtgtagtgttattttgttctcgagtaatgcagtttttcataccttgtcactgcgcaaaattgtcagatgtaaaaactgtataactatgttattgttagtttatatctgctgttcgtctcaagtagcatgttgtctgtataaaggccccattgacggccgaactgttgtgtcgcactatgtgataaattagttatttatagcgtgtttggtttgagaaatgagataaaaaaaaaaaaaaaaaaaaaaaaactcgagagagggggccggtacc

SEQ ID NO: 65738 - DNA, 468 bp, Zea mays
  Clone ID: MRT4577_159958C.1
ccggccgggagtaaaactcggtcacacttcactcctatccattgcgagctgaacaccttcgagaagcttgtccacgcagccggagcttcctgatggctcctctgaagatatacgagatgtcgctgccgctcaacgtggtgaacgtggccaccgtgctcaacgagaacggcctcaacttcctacgatcgccccttcgacctcaccaccgacgaccacaagcagcccgacttcctcatccctcaagctttgcgctgcagatcccggttcacgtctacggacacaaactcctcttctagtgccgtgcgatcaaccggtacatcgccatcaattacacgtctgaggggactcacctgctcaccgcgaaagagtcatgaacgtaaatggaggtgtggctatgaggtggagtcgcatcacttcctacccgaacgcagcctcactgaagctccatgtgctcgtaaggtcgctcct

SEQ ID NO: 65739 - DNA, 348 bp, Zea mays
  unsure (1)..(348): unsure at all n locations
  Clone ID: MRT4577_159959C.1
gccaaacccnccccgggcgccgcgaccgcagagngagaagaagagangggggggaagggcgagggcccggcagaaggagggagcaggacacgacgaacacaggcgaggacgcgnggaagaacgaccgcgaggagaccgacggcaacgaccagggcaaccggaccacgccggggggcggcggcaagaccaacagcaaacgcgcgaagggagaagcgggcaagaaccaggcagggaagaaccccaagaacaccggaaaggagggaaaacacaaccaagggggagacggccacggagagcgagcgcgcaaaggaaacaacaagaaggagagcgcacgaggcagaagaaaga

SEQ ID NO: 65740 - DNA, 638 bp, Zea mays
  Clone ID: MRT4577_15995C.1
gaccgctcgtggcgctgccgccggcggggagcctcgttgtctacttcccgcagggacacagcgagcaggtagcagcatctatgcgaaaggatgcagatgccaaaattccgagctatccaaatctctcatcatctgttttgtctagcgacagtatgcatattggaattcttgctgctgcagcccatgcagcagccaataacagccaattcacagtattctataacccaagggctagtccttcagaatttgttattccttttgccaagtaccagaaggccgtctatagcaaccaactatcacttggcatgcggtttagaatgatgtttgaaactgaagaatctgcaacaagaaggtacatgggaacaataactggtataagtgatatggatcctttaaggtggaaaaactcccaatggcgcaatattcaggttgcatgggatgaagcagcaccaagtgagagacgcaccagggtttccctttgggaggttgaacctgttatcgctccattcttcatttatccctcgccattgttcactgcaaaacgtccgaggcaacctggggtaacagatgatgatagctcagaaatggacaatctttttaagcggaccatgccatggtttggtgaggaagttggcaag

SEQ ID NO: 65741 - DNA, 269 bp, Zea mays
  Clone ID: MRT4577_159960C.1
ttctttttttttttttttttttttttttttttttggttttttctataaatattttgggggtagccacacacaaaaaggttagttccatataaatgtatgtttgggtcatgggtaactacctcacactttgcctaagggtagtcataagggtagggaaaagttagggaaaaccaaccaaaaagggcttaaaagcttcaaaatcatcacccacattgaaaaccacaactaatttactctaatttttcattcttggtccttttgagggcaca

SEQ ID NO: 65742 - DNA, 252 bp, Zea mays
  Clone ID: MRT4577_159961C.1
ttttgggggggagataaaaaaatgtcggtgggcaatctatcaactgaaaagcgccgcgccaaaggttccaacgtgcttacccacataacgcgatattcgcatcgcacgggcctaacataaacaaattgaccatttgtttatagaccacaagcaatagaactctatctttatactttacagaaacaccatacactcattagacatgctacatcgtatcttgcatcttgtactggatgaacaagctgtacaact

SEQ ID NO: 65743 - DNA, 719 bp, Zea mays
  unsure (1)..(719): unsure at all n locations
  Clone ID: MRT4577_159962C.1
tggcggccgcttcgaggcnccggccgggcctggggaccaccacccttcttcttcccagttcttccgcccgatgcctccgcatcatcacgcccccctcccgcgaaaccgcgtctagggttctcgccttcacccacccacccaccctactctcctctccccttttcccttccgcaacgtcgccgccgccgtcgcacgcagatggcactcctcggcgacgcgctgcggcaggccttcttgatgccacggcgcgcctacgcggcgctccgcgacgacgagcagtccttcccgccgcgtctccgccgcccgctggccgtgaccgccgcctgctgtgtcgccgccgctgtggcagctgccgcgtgcgtcagcctcgggatcgccttccctgccgagcccgcggagcggcccttctgccgggagcgccgcatgctggaggcgctgcctgccgccgccagcagtatggaggaggagcccgaggcgtaccggtaccgcgggggtgccttctacatgaccaccgctgaggccgccgacttctactggatgggcgtcttagtgccatccgccgcactctttggcgcctaattcacctaccttgtacgtggaatgtacgttgcatatgctgctccaaaaaggcatacgatgatctgtgctcgttgagaacaatttttgagcttctactaataagagcgttcattgcctgattatactaaacgctgttcttg

SEQ ID NO: 65744 - DNA, 210 bp, Zea mays
  Clone ID: MRT4577_159963C.1
gttctagatcgcgagcgtccgcccttttttttttttttttttttatagatgccccaggatatcttaataatggctcgcttcaagaatacaaaacgccccagtacgagcaaacgtagggccatttttaaaccaacaataaagctattatactagtatgaaggtgctgatccggccttcttcttcttctaataagcgcacggttggagcggc

SEQ ID NO: 65745 - DNA, 313 bp, Zea mays
  Clone ID: MRT4577_159964C.1
agcaagcatccgattcggcattaagtacggcccggcccgtgagcattcagaggatgaagtccgtgaagtcttctatctgctgcctttgtaggcggagtgatccaagttactgctctctgttcaaatgaagcagcttcaggagaaaaagagcaactacttttgaattctccactcaatgtgggcagtacagttagtgcagagcccttcctggtgaaggtgaacccccacggtcatggagacctgagagactgagtgggcagggcactcaccatccctcccacaaagggatggcttaccctagctacaaatgtaa

SEQ ID NO: 65746 - DNA, 662 bp, Zea mays
  unsure (1)..(662): unsure at all n locations
  Clone ID: MRT4577_159965C.1
cgggatttgaataaatgaactttaagggattataagttttgataagttctaaatgcccttaagaacctatttgagcaccttagagagtttagaagttcagatttggaaaagctatatttggagccaagtttgagccaaaacaggaaactaagtaggatgaagcaaagaagtgaaaagctatgacttagactagtttgagactttagataagtttgtctaagttataggaatgctcttaaagacatccaaattaaattgaagaagaaatcccaaaaggacttaactccagcgggtctacggtgcaccggaccagttcgatgctataccagaccaagttcatagtgaagccagactctgaatttgtgacttggtgcaccggaccaatttgatggtgcattagaccacttacgtagagagaacttcgataaggcttcaatgacctagtgcatcagaccagtccgggggtgcactggaccacttacacagaacgacctattcttgaagagctgaagcacgtggcgcaccggcctagtttggtgtgcatcggaccgtcgagttcaatggctagttcctgctccagtggctacttcaacggctacatggcgtggcaactaacgttgtgaggtccagtggtgcaccggactagntcggtgccacctaca

SEQ ID NO: 65747 - DNA, 1136 bp, Zea mays
  Clone ID: MRT4577_159966C.1
actcctatgggcgattgggggtaaaacattgggacttgcctcgaggcgcgggtccttcccccttccccgcttcgacaagtctcgtcccccgcccccttattccattacgagcaactccgccgccgccgtaaagccatctcccccatccgccgccgccgccaccgctgctggtgggacgggccgtgcgtccgttccagcgaagaggagcagcgggtcggaggagccgccggcgaggtcgggccgcgggggatcgagatggtgctgtgggagctcacggccatcaccgcctacttcctcgggctgaggcgcacctaccgcctcgcgctccgcatccagcgccgcctcatcccgcccaaccaccccaggatccgggacttcgtctacaggcgcacacgggatgtcttcaacgtcgcagtgtcggtccacaagaacattcagcagagagacatagaggtcggccggaacctcggaaacgcgatccttcgctggcttgatcgcatgaagccatcagcggagatccgcccccgtcttccaggcccaccaaacggcagcacggccgagcagttcagacatgtatcgagcgcgagcaggggcgcgggggcacagaagacctcctcctcctccaaagcttcgccccacgactccagcgggaagatgctgttctcgcgcctcaacattgggcccaagcacttcccggttctgcccacgctagcacagcccaacaggatcagcgcgagcagccagtgcaggcgcatctcctactcctacgccccgttcccgtcggtcactgccaggaggaagggtgtcttccgcgaggacattgcgcagctgatggtgtaaggatctaaaatacttgtcagcgatcccgtgtactgtttttttgtttttggaacactggacttagtgatttgcccagatcagatgtctgatgtgtcttggtttaataataaagaagcgagcgagcgcaggggaaattgtcactgctgctgcggtttaggccattagatttgtaaccaaatgctcagatgaacagcatttcgtgtttggtaatgaacaccagaacatgtgcactcgtttatgtgctaaaaaaaaaaaaattaacagctaaaaaaaaaaaaaaaaaaaaaaagctattt

SEQ ID NO: 65748 - DNA, 442 bp, Zea mays
  unsure (1)..(442): unsure at all n locations
  Clone ID: MRT4577_159967C.1
attggctattcaatgtacttaaatggcaaggaaactcctacgggggtacgagataagccacgtgcccatctgcctgtttgtgctggagtcgagctccaaaaccacgtcaatataaaccagggcatgcaggagatgatttcttaacgaaatttcagaggaatgcaggtcttgtggccagtggtgtggctaagaacctgaatagagttgggacctacatcaaagacactgtcagtgatatgatgcagcctcaccgcaagcgtcccaaataaaacataggcctgtctctcctaaatcctgtatggaagttaacattagaaattagatgatcggngaacatcggatcaatcactttcttccatacacacccagcgcagcagtagcttagctttctgttggtgtcagaaactctagagaattgagagaagatctatggttaggaaaa

SEQ ID NO: 65749 - DNA, 722 bp, Zea mays
  Clone ID: MRT4577_159968C.1
cgggtgacatctgagctctttaatgctgcctttttactatgtaactggatgtattaatatagatgcttctatacccactttagcaagcccgcttcttattgctgttttgtgtttgttttaattgatagcctggctgtggtgcgagctgtctcactgagtcaccgggaacgagtttgaaacagcctctccacatttgcgggggaggcttgcctcggtttatccctttctcggacggcactcacacaggagcctctggcactgagtctacccttcttttatagcctagctgtgtgacattcttatcttaggatctagttttgctacaacattttagcaaatggaaaatgtgagctggctaagcttgtttgtacaattttactaattagtaacgacatgattaatacgtgttttatgctcctattggccatctagaatgatatatgcttgatttcattgtgcactccacactccagatttagcctggttgtgtcttcaatatttgcagacgttttcgctggttactgatagtttggtactgacttcccctgctatctttgttgccacatttgcagcaagcaattgaatctggcctcccagacaaagatgttctgacaatgtgcatgaagttcgctgaactagagagaagccttggtgaaattgatcgttcgcgtgccatctatgtgcatgcatccaactatgctgatccaaaatatcctgacttt

SEQ ID NO: 65750 - DNA, 1133 bp, Zea mays
  Clone ID: MRT4577_159969C.1
gccggcctttttttgtcttttttcttcacgtcggccccgcctcttctccccccgacgcgcttgccgatccgcccattccgccgctaccactctcccgccgccgccgcgcgcctcagccgcccgtggcccggacatggagggcgccgccggggaggagggcgcctccacgccggcggcgagagggggagcggaggcaggggcaggggcaggggcaggtggagggatgctgaaggggaggtcctgcaagggctgcctctactactcgtcaaagctcaggtcgcgagcgcgcggccccgtctgcgtcggcgtcacccgcgcccttccccaagtttctgagcgtaaggttggaaaacttgaactggaagctatccaagaaggtcgttatcttgcagatttcagatatgcatgcattggctattcaatgtacttaaatggcaaggaaactcctacgggggtacgagataagccacgtgcccatctgcctgtttgtgctggagtcgagctgttgatagatagaaaagtcccaacaaacgttaagaaagaagctccaaaaccacgtcaatataaaccagggcatgcaggagatgatttcttaacgaaatttcagaggaatgcaggtcttgtggccagtggtgtggctaagaacctgaatagagttgggacctacatcaaagacactgtcagtgatatgatgcagcctcaccgcaagcgtcccaaataaaacataggcctgtctctcctaaatcctgtatggaagtaaacattagaaattagatgatcggggaacatcggatcaatcacttcctcccatacacacccagcgcagcagtagcttagctttctgttggtttcagaaactctagagaattgagagaagatctatggttaggaaaaatagccacttgaaacatgttatccactagctcatggggcttcgattccccctgtctcgccccattttggggagccattgttgttttcactaggcccctcctccggcaatgtacaggatggcaccatgtaatgaaacatcaaaacaaccacgttccgccccttctgacaataataacgtggtgccgttgagaggtccacgtagatgatatacaaaactcaaaaaaaaaaactaaaaaaaa

SEQ ID NO: 65751 - DNA, 841 bp, Zea mays
  unsure (1)..(841): unsure at all n locations
  Clone ID: MRT4577_15996C.1
ttatttgagctnctgatttagaatcattttaacctatgtccctaacattttagttggtacgtctggattctattgccgtagatctctactcatatcctcattgtcgcattacttctcggaggcggagctgcatgacgtcgtggtgcaggagcaggccagcaacatgcactgaatagacgaaccgacggcggcgagaggagctaattctgtcgtgcgcctgctcgcatcctcatcgtcgcactgcttattggaggcagagggagcagcagccacgacaaaggacaatgccaccaggaggaggatcgaggcacggaggatggcttcacgccaccgtcagcaccaactaccgttgcgcctccgacaccatggacgccaagacgacagaggctaggatgtcgatgcccgccgcggcgagtaggagggctagcgaccccgtcaagcagccggcgtcacacaccatggtgctcgtccgctctagtggggacctccttgtcccgtcgccagccacctcggtcattgtcgccgctagggtttgggcgatgaaaaacacccgcgcgttggagtatgcgggaggggggtgagctgggcgcggtacctccgtattatgagatgacaggcgcgtggatttgtttgatatgggggaggcgacgcgggtttgttgcagatgcgggaggggcggggtttgttggagatgcatgcaggtcgcaggaggcgccgagatgggcgagcagggtgcggaggtttgttgggacaatgatgcacgcgcataggactacaggttgatttgaaggaaatgtaaggggtgtgttgtaaaattatgacgcatgccggaacggccggc

SEQ ID NO: 65752 - DNA, 728 bp, Zea mays
  Clone ID: MRT4577_159970C.1
aatctcatctggagatgaacacaacatctcttggtggagctaaagcaaggttccctcagtactatgaggatactatgagttggtggtaggtatcatatttgcagctgagaattttccttgattccctttgtttattcccatgtatttgtgttgacaattttggtagcgctatgtttaactgttggtgcgtttattccttttactataagtttttttgttcaccttggtgcttcacaatacattaccgctcgagatctccgtcgatatatcctgttggagcaaagagaataataggattatagcatggattgacaaactagacctacctcactacgatcagatatttgaatactggctgggaatgctctagatcttgtaagtattctttatgaccatatatctctgtttcctctaactatttggaactggaagaaaaagtggtcatcgcagactatttggaactatttggaatgtcagattttaaatctcatactgtaatctcaacaccgtagtaatgtattgtgaagcaactttggaagcctattgatggctgatccatacatttatggattaagagtgttgtgccaaagtggaagaccacatgttggtgtataagtttggttaaaggtcatgcccctgaaactatttggaactggaagaaaaagtggtccaaatatgtaatgtttaaattctggactccagacttagtacaaattcagagtctgaaa

SEQ ID NO: 65753 - DNA, 271 bp, Zea mays
  Clone ID: MRT4577_159971C.1
aagtaatgggtgattgctttccttaatgcaagggctagaggaacgagaaagaaatagaaacaccgcgggtaaaaggccaccggttaacaagcataatacccaatgatactaagacaccgggaaagatggaaagtgccctacaccaaagaaaacacacggacgctataccctcggcacgaaggaacagaaaccacgggcaaccgaaagaaacacggggggcactgactaggcaaaggccaggagcgacccagaatgacaacatgctgataca

SEQ ID NO: 65754 - DNA, 211 bp, Zea mays
  Clone ID: MRT4577_159972C.1
ggctcggctacgactggcttcgcgctgctgctctgcaagtacgcctaccttgtcgcgctccttctgctctcggtcctgtccgtcgacgcctgcgtgttctgcgtcgcctccggttactgaagacaagcgcgacgggctgaccctgccgcgcgtgctctcacgggtgccccgcgtattggcggaggatcgccggcacgttacttgccgtctt

SEQ ID NO: 65755 - DNA, 555 bp, Zea mays
  Clone ID: MRT4577_159973C.1
gcgttccgcacgggtacaggtacaggtacagcctcctggtcttcctgcggagacagacaccgctgctgtcccgcgtaggcacggccatttttccggtaacagcaacgccgatgcagcgaccagtaccagtacgatagtgttgccaagaatggatttgggggatggaaacaggagcaaacggggctctgatatggatgccaagcacaatgagagtggagtaagagatgaggtagtgcgcacttgtgccagggttagatcgagcggtgctgccgttcaaactggagacgagaggtcgttgcgcaaacgagcaacacctacacggccggaggtttctggttctgggattacagagcctgggggcttggctggatcgacgcgcttggttggacgcgctcgtgaatcggtatctgctactaggaaggtcgcacacggtggttctggtccgagaagagagctcgtggggccgatcgttgggcaagggagaatgacacgcagagatttgaacagccaaaatggattatcatccacaagtaggattttaagcaatggatctgc

SEQ ID NO: 65756 - DNA, 358 bp, Zea mays
  Clone ID: MRT4577_159974C.1
gccacacgtaggaccacgcgtccggtcgatcgacagtggcactagctagtcgctctactagagggcggctatagaggtgtctgcactgcgccgctgctaagggaggatcggaagcgacgatgcggtcggatgctactgcctatctggcagggggcgctgcctgtgtggagctggcggaccccgtgcagggaggcaactactaccaggacactgagatgagctgtggcaatgtacgaggtacggcagaggactgtaaacgcgggctggacctgactctggaccgtacgttcagcttctggtgtcagatcaagaacgagaacatggtcggcaagaacgacatgcagattaagctggtgcc

SEQ ID NO: 65757 - DNA, 734 bp, Zea mays
  unsure (1)..(734): unsure at all n locations
  Clone ID: MRT4577_159975C.1
cattgggtacctcgaggccggccgggatgagcagtcccagtttgctcatcctctgcggactgcggccgaacgcccatcacgccacgcgccttctactcccacgccgtcccgctcgccgaccccgtctcccgccgcccggcctccttcgtcaccgccttcgccttctccatcgccgcccccgacccggcctccgcctcgggcgacgggcttgccttcttcctctccccgttcccatccgtcctccccgaatcctcggcggggggactactcggcctcttcaattcatcctcggtccgcgccggcacgctcgtcgccgtcgagttcgatacccacaagaacgagtgggaccccagcggcgaccacgtcggcgtcgatctcggggggatcgtctcctccgccaccgccgactggcctaccagcatgaaggacggccgcacggcccacgcgcgcgtcgagtacgacggcgtcgccaagaacctcaccgtctcgctctcgtacggctccgcgcgcccgaacaccacgggtgacgtccttctctggtatgccgtcgatctgagggaccacctgccggactccgtcgccgtaggcttctccgcagccacgggcgaggccgcggagctgcaccaggtggctctactgggagttcacctccaccgtcgaccctaaggagngagacggtggccctggtgggtgggggggttaggggctgtgcgctttgcttctcgtatccgtcg

SEQ ID NO: 65758 - DNA, 487 bp, Zea mays
  Clone ID: MRT4577_159976C.1
gttggtggtattgataacgttcctgaccattctctctatcctctcccgcacgggcgttccttggtttcttaaactgatgataagtctgtcatcacagacaaatgaactataccagctggcagcggttgcgttctgcttgttatttgcttgggagattcggcttattttctggcttttaccgaagtacccatcccacttggaggatcgctggcatttgctatccacaacggcataaccaagaactgagcattgctgcccttttgccacccacaactacttttcccttgaacacgcaggagagctgctatttgccaattacctataagccagcgtacaagctgggttgccaaacaacaacaacaacaacaacaacaacaacaaagcctttttgggctagagttgaaatccaacaaaaaccacaagtcaaggactcaaggttgccaaacaaccctacaactttgggtctgtttggcaacaatgtttctca

SEQ ID NO: 65759 - DNA, 2389 bp, Zea mays
  Clone ID: MRT4577_159977C.1
ggtaccctcgggctggcccagtcccagcttacgaacgagacgaccttgtggacacctgattggaagtcaacaccccctatgagcagtcccagtttgctcatcctctgcggctgcggccgaacgcccatcacgccacgcgccccttccccaatccccatggagatctccgccggcgtcaccactgtcaccgccgtgtcgatcctcatcctcctgttgctgccgcaacccgcggcgccgttctccttcacatacaacttcacctcgccctcggacacgccgccgcccgggattgccttccagggggacgccttctacaacaaggccatccgcctcacccgcgacgagcgcctcggccccatcaccagcagcaccggccgcgccttctactcccacgccgtcccgctcgccgaccccgtctcccgccgcccggcctccttcgtcaccgccttcgccttctccatcgccgcccccgacccggcctccgcctcgggcgacgggcttgccttcttcctctccccgttcccatccgtcctccccgaatcctcggcggggggactactcggcctcttcaattcatcctcggtccgcgccggcacgctcgtcgccgtcgagttcgatacccacaagaacgagtgggaccccagcggcgaccacgtcggcgtcgatctcggggggatcgtctcctccgccaccgccgactggcctaccagcatgaaggacggccgcacggcccacgcgcgcgtcgagtacgacggcgtcgccaagaacctcaccgtctcgctctcgtacggctccgcgcgcccgaacaccacgggtgacgtccttctctggtatgccgtcgatctgagggaccacctgccggactccgtcgccgtaggcttctccgcagccacgggcgaggccgcggagctgcaccaggtgctctactgggagttcacctccaccgtcgaccctaaggaggagacggtggtcctgtgggtggtgctagggctgtgcgctttgcttctcgtactcgtcggcgcgggcatcgtctggttcgtcaggcaatggaggaaggccggacaattcgacgacggtgacatcgaggtcgacgacgtcatgggtggcgagtacgacgagctcgcggacgagttcgttgtccagtgcggcccgagaaggttcaggtacgccgaattggcggcggccacgaagaatttcgcggaggagcggaagctcgggcaaggcgggttcggcgccgtgtaccgggggttcctgaaggaactcggctttgaggttgccatcaagagggtgtccaagggctcaacgcaggggcgcaaggagtacgccgccgaggtgcgcatcatcagccagctgcgccaccggcacctcgtccgcctcgtcggttggtgccacgagcaccggggcgacttcctgctcgtgtacgagctgatgcccaacggcagcgtcgaccaccacctctacggcaagggcatgctcctcacctggccgatgcggtacgacatatcgctgggcctcgcgtcggcgatgctctacctccacgaggagtgtccacagtgcatcgtccacagggatgtcaagcccagcaatgtcatgctggacgccgccttcaacgcgaagctcggagactttggcctcgccaagctcgtggaacatggtagccagccgtacaccactgtcctggccggcaccctgggctacttggcgccggagtgcgtgatgacaggcaaggcgagccgggagtcggacgtgtacagcttcggtgtcgttgcactggagatcgcgtgcggccgacggcccgcagagctcaacaacgagccaagcaaggcgagactggtgccttgggtgtgggaactgtatggcaagaacgccctccttgaagcagcagactggaggctgaaggggcagttcgatgagaagcagatggagcgcctgatgattgtgggtttgtggtgtgctcaccctgactatgcgcataggccaagcatcaggcaggccctgaacgtgcttacgtttgaggcgccattgccggtgctgccggagaagatgccggtgccgacgtatttccccttgcctgatctcgttgcttcgatttctgttgggggaacctcgagcgccgaggatccagatccaggtgttagtgattatgggtcctcgggtaaagtttcatcagtcagggataggctgctggagccatgagccgatgacggagttttctgtgttttactgcaaacacgaggagtgaatctacggttttcagattcaggtgtatagcatcgaaatgtattgattgttaattcataggtaagggtggcaaaataatttgtgctgttttatttttttcacatacaagtttgctatcataatatgcagttttgattttgttactgct

SEQ ID NO: 65760 - DNA, 654 bp, Zea mays
  unsure (1)..(654): unsure at all n locations
  Clone ID: MRT4577_159978C.1
aattcccgnnnnccgagctcactagtttttggccgcccttttttttttttttttttttggttttttttttttttgcagccaaaaatcaattcattgttgatcgccaaaaaaatgttatcttcacattgtggccattcaaaaaaaaatcaactctcgtaccgtcattatttatcacacgtattgtttagaagaagaagaaacttattcaagaaaatagaagaagcacgaaacgtgacacgtccggtcaccattttgtaccgtcgcgcgcacgacacgatgaatcagtccagcttgacggtggagaagaggtagtgcacgaagcagaaggacgcgccgagtcccacagcgccggtggcgagcatgacggcgagagccatgagcaaagagtagccgacgtagagcgcggcagaaacggggccggcgaggctgtgcagctcgaacaccaggtagtagacggcgtaccccagggtgtagagcgcgacggagccggatgcgaagaaggcgcgccaccaccaccgtcagtccttcacgcacaggcccatgtacgtgagcaccaccgacacctnggcgcaaaccgtnaccagcagcgccagcaccaccagcaggaacccgaacacgtagtagacgcggcccagccacaggctcgacatgatg

SEQ ID NO: 65761 - DNA, 459 bp, Zea mays
  Clone ID: MRT4577_159979C.1
gcaggctggtacccgtccgctattcccgcgatccggattgtatatatggctgtgcatgaacctcgtgaccatgtgtttgaagactcctagcgggagctgcatcgcaaatcccctgaagaaatgaagaatcgattgtatatagtgtttgaaggagaagaagggcaggatgctggcgggctcctgcgggagtggtacatgatcatctctcgggagatgtttaaccctatgtatgccttgttccgtacctcacctggtgatcgagtcacctacaccatcaatccatcttcccactgcaaccccaaccacctcagctacttcaagtttgtcggacgcattgtggccaaagctgtatatgacaaccgtcttctggagtgctactttactcgatccttctacaaacacatcttgggcaagtcagtctaatatacagatattgagagtgaagattaccacttctac

SEQ ID NO: 65762 - DNA, 176 bp, Zea mays
  Clone ID: MRT4577_15997C.1
ataaaaaaaaaaaaaaaaaaaaaaaaaaaaaaaaaaaaaaaaaaaaaaaaaaaaaacttgtactcttggccgcgtaccacccttaagggcccatattgtgggaatatttccataaaactgggcgagcctgttcgaccatgcttttaaggagggccaaatgggcccctttagggcat

SEQ ID NO: 65763 - DNA, 232 bp, Zea mays
  Clone ID: MRT4577_159980C.1
aaggggcccaaacaaccaccggttgaacaagttgcagccaaacaacccggggttccaacgaagcttgggcttgcattattttaccatgttttccatggggctgctccaccccgtcgtcccggagaaacaaagcgagggggaggtccgcccccaacgaccaccaccagcagcagggccacccccacgggcggggaccagggcgcccacgtgccccaagggtgggccaagagga

SEQ ID NO: 65764 - DNA, 282 bp, Zea mays
  Clone ID: MRT4577_159981C.1
atgctgttgggcatccacttacagtttatggaaaaggtggtcagatatgtctttgttatagcgcggtgccaaataactcgcccctcttcttttttgaaatatgtctatggttgaaattgttagtgtgcatcaatcagatcaatacttaaaatgtcagtggttgaaatcactactcgcattttgtcataaatcttgggaactgaaaaatcatgttagctctacctcaacaagtattgaaattgaatttgtcttcttttcctgccaaatgctccaaaatagtga

SEQ ID NO: 65765 - DNA, 624 bp, Zea mays
  unsure (1)..(624): unsure at all n locations
  Clone ID: MRT4577_159982C.1
aacttagtaaactttgagtattgttttccatctgttccattcgatttgtcaagttcatagatgacggttgtttcttatgaatctacagactcgcagtcgctgagctctcaaggttctaccagcgggagcactttcgagagcaggagatcagctaggggactatatggctccaccctcaggaactcttcagagagggaggtacccggcgataggaagttcaccttgccagagatccagaaagcaacgaagaacttctcacccaacctcaagattgggcagggtggttctgggacagtgtacaagggtcagctcagcgatggcaccctcgtcgccgtcaaacgggccaagaagaatatgtatgacaagcatatgggccacgagttccggaacgagatagagacgctgcgatgcatcgagcacctgaatctggtcaggttccatgggttccttgagtttggtggtgagcagttgatcattgtggagtatgttcccaatggcaatcttcgagagcaccttgaaggtctgaatggaaaagttctggagttctccgtgaggttggaaatcgcgatcgatgtggnccacgccattacctatcttcacacctactctgatcagccggtcatc

SEQ ID NO: 65766 - DNA, 1039 bp, Zea mays
  Clone ID: MRT4577_159983C.1
gtgagcccaagtgtccgagacttcgagcgcgcgtggtcgtctgcggatcgagttcgaggtggtgggatcgatggcaggaggcggcggcaggggcgctgcggctgcggctgcgagcgctctagcgctggcggctctggtgtgctcgctgtcctgcggcctcgcgcagggccgcgtggcgaggaagagcctcggcatcggcctgggcggcggcggtggcggcggaggcgacgggctgggcctcgggcttggactgggcctcggcgtcggcgcaggtaccggaggagtgtcggtgtctgggtctggctctgggtctgggtcggcgcctgtggtgggatctacctcagggtctaggtctgggtctatatccgttggaggggccagctcgtccgccggatcgagtgccggatcgtccgcgggctccactgggtcggcggccggctcttctgcgggctctggcggcgggcaagggtacgggcagggcggtgggagcgggtcgggatctggatttggggagggcagtgggtcgggcaatgggttggtgggtatagggactggtcaggggtatggtcatggttctaacttcggtggaaatccttgaagtcataaaatgtttgtattgtatggtgcggtgtattttgttctataacagtggaatatactatcttttcttttggttctaaaaaaaaaaaaaaaaaaaaaaaaaaaaaaaaaaaaaaaaaataaaaaaaaaaaaaaaaaaaacccccctttctgtttttttgtatggacaaaaaagtttttcttttcccccggtgggtaagatgggcccccttttggatttcccactaccgggggttaatggcccccttaagcataaaagtcctacccctttttttcaaaagggaacattgtgttttttggcccatagttttcacccggtatgtaaattaatttaaccttaaggccctgagaaaaatgtggcacccaaaaaaccactgttttaaggttatccgattaatcacggttgggcgaaataaactgtaaaagagggttggactta

SEQ ID NO: 65767 - DNA, 538 bp, Zea mays
  unsure (1)..(538): unsure at all n locations
  Clone ID: MRT4577_159984C.1
aaaaaaaaaccaaaaaaaaaaaaaaaaaaaaaaaaaaaaaaaaccggcgnagaagaggggggcgcagggaaacccccaagcaaacaaacaggganagagggagggggaggaggagaggagaggagaggagaggnnnggggccggggacaccagggcccccgaggaagcggaacggggcggggaggccggggaacgggacgaggggcgcaacggcgcgggaggaggcgggcaccgacaacgagaccgggcccaaaaacnccgccaccgccgagcacaagagccccgagcaccncgnccgcaacccgnngggncaggncccagcccggcaggagggggacnggaaccacanncgaaacacgcgcaaccggcaagaacgcggcncgcaaaaacaagccagagcggnggagggaaggaaaccncgaggaggcagcaaggggggaggggcggaccgagggggaggcaaaccagaacaccgcggcacggaancccanccncnnccaggncccaaccagcccgaggccggggggaaccaccgacc

SEQ ID NO: 65768 - DNA, 2627 bp, Zea mays
  Clone ID: MRT4577_159985C.1
cccacgcgtccgcccgggcgtccggccgtcgttgacaccagctagtagcagccagcactagtcgctactagctagatagccatatcaccagcatgtggaggctgacggtggccgagggcggcggcccgtggctgcgctcgacgaacggcttcgtggggcgggcggtgtgggagttcgaccctgacctcggtacgccggaggagcgcgacgaggtagagagggtacgccaggagttctccgaccaccgcttccagaggagagagtcggccgacctcctcatgcgcatgcagtgcgcaaagcagaacagatctcaacgtcgtgatctgccacgcatcaagcttggggaggatgagcacgtcactgaagaaattgtactgagctccttgaggtcggctctggaccagttctcttcactgcaagccagcgatgggcactggcctggtgatttcagcgggattatgttcatcatgcctggtttgatatttgccttgtatgtcactggatcactgaatgttgtcatatcaccagaacatcggcatgagatttgccgctacatctacaaccaccagaacgaagatggtggatggggcacacttatcttgggttcgagcaccatgtttggcacatgctcaaactacatcaccttgaggcttctcggtgaggagccatacgccaacaacagtgtgttggctaaagggcgtgcttggattctatcccatggtggtgcaaccttgattcctcagtggggaaaaatatggctttcggtacttggattgtttgattggtcaggaaataatccaattttccctgaactatggtccattccccagtttcttccatttcatccagggaaattctggtgctttgcccgtatggtatatctaccaatggcttatctttatggcaagaaatttgttggaccaattacaccaactatattggcactaagagaggaaatctatgacactccttatggaaagattgactggagtgatgctcgtagtaaatgcgcaaaggaggacctcatctgtccacgcacactgttgcagaatgttatttggacttcactttataggtgtgtggaaccagtattgagcagttggcctatcaacaagctgagagagagagctctgggaaacatcatggagcatatccattatgaagatgagaacacacaatacctatgcatatgtcctgtgaataaggctctaaacatggtctgctgctgggtagaagatccaaattcagatgcattcaagcgtcaccttgcaaggataccagacttcttgtggatttcagaagatggcatgaaggcacaagtatatgatggctgccagagctgggagacatcattcataattcaagcattttgcgctacagatcttgttaatgactatggttcaactcttcagagagcctatgagtttatgaaaaattcacaggtcatgaggaaccatcctggtgaccaacgttattggcatcgccatagatcgaagggttcatggacactttcatctgcagacaatggatgggctgtatctgacactacaggagaagcacttaaggctgtactgttgctgtcaaagatctcaaacaaaaacaaccttgttggggatccaatagaaagagaaaggttgcatgacgctattgattgccttctatcttttgcgaacaaagatggcaccttttctacatatgagtgcaaaagaacttattcttggttagagattctaagtccttgtgagactttcccaaacattgttgtcgattatccttacccagaatgcacttcatcagtgctccaagctctgatattgttcaaagacttatatcctggttaccgcacagaagagatagaagcattagttagaagtgcagcaacgtttattgagaccaaacaacaagaagacggttcatggttaggtaattggggtatatgtttcacctacggggccttcttttcgattaaaggtttagtcgcttctggaagaacgtacaagaacagcccttgcatacggaaagcatgccacttcatattgtcgaagcagctcagtactggtggatggggagaaagccatatcgctattgaaactcaggtgtatgtaaatctcaaaggtgaccgtgctcacgctgtgaataccgcctgggcaatgctcgctttaatttatgctggacagtttgaacgagatccaacgccattacatcgtgctgcaaaggaattgatcaacatgcaactggagacaggagagtttcctcagcaagagcatgtaggatgcttcaactgcagcctctacttcaattacccaagctaccgcaacttgttccccatctgggctctcggtgagtaccatcgtggccttcgtgcaaagaaagacaagtgagtccgtgtgtctatatatatatatatatagagagagagagagtacgtatagcattgtgaggaataaaacaggttgcgtcggtggtgagtgcgcagaaacaagatgtgcttttatgtaggcgtaccacagtgtacaatgttggtcgttgttagactgtaaggctatcatgacgttgtatattgtaatatatatatagtgttccatatgtttcaaattatataagacgttttatcttctctttgaaaa

SEQ ID NO: 65769 - DNA, 1006 bp, Zea mays
  unsure (1)..(1006): unsure at all n locations
  Clone ID: MRT4577_159986C.1
gttcagcccaggcttcgatggagagccaattttcgacgaggagcccaacgactccatcgccgagttcgtcgacgtctccttccacggcggcaggatctcctcgagtgggatccaccacccggcctccaccatgccgaggctgcacgcgagcgtggtcgtcgacgactgcatcgaggggttcgacgtgttggacgaggacgccgcgagcgccaacgcggctgacttcacctccacagtgggggacgccacaccccaggccaccgagacgcggctcaatgccggatgggtgcgctggctggaagggcggactggcccctacgacgacatcgcagcagcacaaaccctcttctccgacgacgccattcacctctccgaatcagaacccgaccatctcgtttacgatttcctcaacctcgtgaccgctcaggttctccctgtcgtggaggccagggccgcgatgggcgcggtcgtggacgtggacgtgagggactctgcgatgttccattcccttctcgccgcgggaaatttgctgccgcccttcctcacgctgccgcagccacacgacgaggcagatacgaacttcggttccagccaggacaaggagctgctcgaccttctcgaaggtatgctggccaccgaatccgtggtggtgaagagagaccagcgcatcgtgccactcgacgtgacgctcaaggggaagagcgtctccgtgcgcgccgacctcaacgcgccgcttgacgcgcaccaggacagcaccgaagacatccacgccatccagtacctcttcagcaagggcgccaaggtgcaaagagccgatgatgtgattgagcctgaagttgagaagctggtggttacgttgcccaacagatgtttgacgaattgcttcacccncgtaganagttgtntcagctgggatnnagtgtcanatcggnaannttggtctncanntacanagtttctgatattgggagatgtgttccagacaggtttacaccttggaaatcac

SEQ ID NO: 65770 - DNA, 511 bp, Zea mays
  Clone ID: MRT4577_159987C.1
tcaaaggtgaccgtgctcacgctgtgaataccgcctgggcaatgctcgctttaatttatgctggacagtttgaacgagatccaacgccattacatcgtgctgcaaaggaattgatcaacatgcaactggagacaggagagtttcctcagcaagagcatgtaggatgcttcaactgcagcctctacttcaattacccaagctaccgcaacttgttccccatctgggctctcggtgagtaccatcgtggccttcgtgcaaagaaagacaattgagtccgtgtgtgtatatatatagtacgtatagcattgtgaggaataaaacaggttgcgtcggtggtgagtgcgcaaaaacaagatgtacttttatgtaggtgtaccccagtgtacaatgttggtcgttgttagactgtaaggctatcatgacgttgtatattgtaatatatatactaccatgaaaaatgcatgtgtccaattatttatttttatatttattaataaatattatggggggg

SEQ ID NO: 65771 - DNA, 258 bp, Zea mays
  Clone ID: MRT4577_159988C.1
cggtcgcccacgcgtcccacgcgtcgtttgtgttcccctttcttgctattattatgcagtcattttcccctattatactgggagcttgttgtgatgccaaccacttagggagtcactaacacactgtggggaacttcctgcttgctgacagtgatcatactgctatatgccttttcttgaaatcatactgggtgggttctgctactacattattaaaagttgacagctttatccttattaggagtgctgaaacctaaa

SEQ ID NO: 65772 - DNA, 322 bp, Zea mays
  Clone ID: MRT4577_159989C.1
caaggactccaagacgcttctcttctgcgataagccgttcaccgtctctgtcatcgggaagccctactagatcccgtggggagaggctgtttctcattatactctttagtccacctgtgtcttcactgacaaggacaaatctgccagcacatctgaatggtattgccaaaaaggacgctatctctgccccaagcatatatgcacccatgtttgttcttagtgtcaatgaggacaagctcacctcccatgttaacattgattacaatgctagctgcaccacaaactgacttgctaccctcgctaaggtcaatcatgacaacta

SEQ ID NO: 65773 - DNA, 534 bp, Zea mays
  Clone ID: MRT4577_15998C.1
actcgcgccattgccgttcacctcctgtcgggctacggaaccttatcgccaaaatcctcgtcccctacccgaggtgagcatcatggcggtcgcgctcttctccagctcgctctcgccccgcttcctcgccctatcctccccgaacacggccgcgcccgcgggcacagtcttcctccccttcaggctgccgccgagcgctgtctcggcgccgggcaggcgcgtcttcgagcccgtggacgtcgcggtgtcgtcggagtaccagacggatgtcgcgtagcaggacggggaggatggatcccaggagctctccgaggacctgaggctgttcgtccgcgacctaccgctcggcgagcgacggcgcgcacctcgcaggtgtctttcagcatgccgggtccgtccagatggacaaggttgcatatgaccgaatgactggacggatccgaggattcggattcgagacaatgtcttcgatcgactaagacgaagctgctgtcgagcagatcaacgggtatgcatttcgaggaagacaggtga

SEQ ID NO: 65774 - DNA, 246 bp, Zea mays
  unsure (1)..(246): unsure at all n locations
  Clone ID: MRT4577_159990C.1
aattatatatngcagggacgacaaaccccaaggaatacagagatacaaaaattgtacaagatcccatgcttgcttcaaaacttgaagaagctatctggaaatcatgagttcagttggtggcgctcttcttcttcttcttgttcttcttcttgaggcccgtggcatagtatttgcatgataataagactcctcccttgaagcactctgctcgtgcgcatcccaccttgttgcttcatttgccaacca

SEQ ID NO: 65775 - DNA, 1366 bp, Zea mays
  Clone ID: MRT4577_159991C.1
taattggatatggctgcacaacatgcattggtaactcgggcgagcttgatgaagatgttgctaaggcagttactgacaacgatatcattgcggctgcagtactctccggtaacaggaacttcgaagggcgaattcatgcattggttcgggccaattatcttgcctcccctcctctggttgtggcctatgcccttgctggcactgttgatattgattttgagacggaaccgattgggaaaggaaaagatggaacggatgtgtactttaaggacatatggccatcaaatgaagaaattgcagaggttgagcaatcaagtgtgctgcctgacatgttcaggagcacctatgaagcaatcacgcagggcaacccaatgtggaaccagctgtcagttccaaaggcagaccgcttcccatgggatcccagttccacctacattcatgatcctccattctttaaggatattacaccgactccgccaggtccatgcagcatagagaatgcctattgcctgctgaagttcggtgacagcatcacgaccgaccacatctcaccagctgggagcatccccagggacagccctgctggcaagtacctgcttgagcgtggtgtgcagccaaaggatttcaattcttatggaagccgtcggggcaacgatgaagtgatggcacgaggaacctttgcaaatatcaggattgtgaataggctgttaaatggagaagttggaccgaagacgattcacgtccctacaaacgagaagcttttcgtgttcgatgctgcaatgagatacaaagctgatgggcatcacaccatagtgttggctggagaggaatatggcagtggaagttctcgggattgggctgccaaggggccaatgttactgggggtcaaagcagtaattgccaagagtttcgagaggatccaccgcagcaaccttgtaggaatgggagtgttaccgctgtgtttcaaacctggtgaggatgctgattctctggggctcaccggtcatgagcgctacacgataaggctccctaccaatgtgagcgagatacaaccgggccaagatgtccaggtgctcagtgacactgggaagtcattcacctgcaagctccggattgatacaatggtggagctggcttacttcgatcatggcgggatccttcactacgttttgaggaacctggtgaggcagcaacagcagtaaaacgctaaaaccgcatgcaaacatgtgaatatcttgtctgtttcgaaaaaggctatgataagaataaaattggactcaagaagaaaccgatgtaaatgtccatgagatgagctgtggtgttttgtatagtaccctttttatgtgataataaaggtgcatttgtc

SEQ ID NO: 65776 - DNA, 483 bp, Zea mays
  Clone ID: MRT4577_159992C.1
agacataaagggcataggttctcttattattgccaatcaactcaagcgctgcaaatcgctgcgaaggagtactgtatgaagtagagaaggcaggccacggaatttacacaaaccgcatggccaacataccacctatgatccaactggaacacacgggggggtgatgtgtacatgcacgcttacccaccaacccgacgaataacatacacgcctgagaagacagcgtccttattggacgacaccatgtaatgtaatcgccaccaccaccaacaccaaaggtgattctaggggtagggctcctcatgtaagaagcaggccgactgacgaggaaaccgcagatgacgggcattttgcagtctgaaagatcgaggcctattttaagccgagacgatgcttgttgtaattggccgagctcttaatgccaccatcttggtgggctgacggtggaataccgcacattactaggcccgatccagcgcccat

SEQ ID NO: 65777 - DNA, 378 bp, Zea mays
  Clone ID: MRT4577_159993C.1
ccccctcgccctttttgggtgctgagaataaggcaggtgcggtgccgtttataagtggcgcgactgttgaaccattgactaccatgcatgttgaaaaagagccagaacatggtggagagcctggcagagtctgcattaagcgtagcgtaccacattggaaccgatgatggtgatgagccgatcgagtgggcaaagccaaagggtgagacaatggcagcggtgcagttggcagatgcagccatggctcttgcacagcattcagatgctagtagaagctgctgggatggcaagagcttcacatactgcagtattatcaacattgcactgtctgctgcaatggatggaggccttatgacacctgtgctttaagatgctgac

SEQ ID NO: 65778 - DNA, 369 bp, Zea mays
  Clone ID: MRT4577_159994C.1
gcacgaaaaccagatggcataggcattggcattgctgctagcagacagcatgttacctatgggtcacagttacagactcattataactgtccctccgctatttatctccaagaagacgcactccttggaattattaactgagcccgcttaataacggatcttcgttgatcgataataatcaaccaaagaaaaacatgggcccaagaccaagaccaacaggatacaacagggaggggcacacggacgacacggagggggaggacatgcttcccatcccctgaggacggtggcccgcgcgacgcgggtgacgcctagcgtgaaggcccccatgccgaggtcggaggctgggttccggacatctgcttgacc

SEQ ID NO: 65779 - DNA, 769 bp, Zea mays
  Clone ID: MRT4577_159995C.1
cgtgtactacggagggagaaagactccaacagcttcccccaagccacaccctctataggggagaggagaaactcccaacatatatagatgagttctaatctcgccctattttttaattattctattttattttaataatcactctttttaagtaccgtaatatgatagcaatgtatactagcacagtacaaacagtctattatttttaaaatttcaaaaaactgatgggaatatgttaaataactgaattatagtatataggggaacctgtacatggttaatggatggcgagttgcaccttcgcttggtggtctgaaactgaagctgcacttgggtagttgggtaggttgggcgcgcgagcctcgactccgcaccgggacggatcgggatccccgacacaaaacaaggtggggccttcgaccgcggcgcgcgcaggcacgcagagccaccggcaccgcagaccacccaccagaccacgggacccgcgccgcactactgctgtgttgtgtgcacactgtacatatcgtactacttgcgaaacaaacagtccgtctctttgtctcaccttccgggcaacccattcatgcgacgcagggacagtcacacaacacagtgcagtttgttaataaatctgatgttacaacacactgccgtttgttaataactcgtggaggatcccttttgtgttacgttttctaagtagatgaaggtaacataattaagatattgattatgcagtgggcgactcagttgctatgcttaggatgtg

SEQ ID NO: 65780 - DNA, 127 bp, Zea mays
  Clone ID: MRT4577_159996C.1
gggtacctcgagcggcgggaatatttcataatacgaataaaggcgaacagatgaccgatctattattacgacacaaacacgtacaaacatgcatatatgatcgcactatcgatccctcatcatgcaa

SEQ ID NO: 65781 - DNA, 542 bp, Zea mays
  Clone ID: MRT4577_159997C.1
ctggccgggaactgatttcgatcaacccaatacatcaaccaactctcaaccaaccaaccaaacaaacatcaacatgtctgacctaggacgcaaaggactcggcgagcaggccaaggagaaggtcactcccgactcccagaaatctaccctcgacaaggccggagagtctgtctccggactcggtgacaaggccgcatctgccgttcagcctgagggccagaagtccaccacccagaagctcggcgactccacccgctccggcggcgacaaggcgcagaaccagggtagcggtatcctcgactccgcccagcagggtctcagcaacgccggccaggctgtcactgataccttcaacagtgccactggcaacaagaagtaaacagcttctttcatgacctctctttgagaatgaagagcttttcatgatgggtggagccaagaggcatacacccataccatataccctattagctcatgaatgaatgatcttcacttctgaatttacctgttcttctgccaaaaaaaaaaaaaaaaaagcggcc

SEQ ID NO: 65782 - DNA, 389 bp, Zea mays
  unsure (1)..(389): unsure at all n locations
  Clone ID: MRT4577_159998C.1
aaatnccggggccggcccaggcgtccgaaatcgatccccctggatgtcggacccctgaaccattttaccattccttgcccaattgttagaggggggcttcgaccaggtgaggggggggccccttccttttttaaacaccaaaaaggccatgtaaatccatttgtggagtaatttgccccaaggggatgtaataaaagggttcatcaaggaaggacccaaggtcccaccccaccattttccccagttaattgccccatttttaaagtcgtaaccactgcctggcctggctggctctggtggtcaaatcttgattaagttggcctcgtcctccccccattataattggtggttttgatgtcctgttgcgtcgtcaaaccacatcctttttt

SEQ ID NO: 65783 - DNA, 337 bp, Zea mays
  Clone ID: MRT4577_159999C.1
aacaatggggcgacgccggaactccatacttgggatctggatcataaacgccacggtcaacatgagatggcattgtacaaacggattttgccttatgctcaaaaacaaattgatgtacagtagaaaggattatactactactaccacacgtgtttctgcgcatgtttccaccatggccgatagacccgaggcgatgaccgcgcacataaccggtttccgttcgatgccctttgacgtggaaagaatcgaagcatccttgtaatagattccaaacagaggcggcgggagtagaaccaacacgcccgatggattcattggaagttgtaaaacagacaga

SEQ ID NO: 65784 - DNA, 322 bp, Zea mays
  unsure (1)..(322): unsure at all n locations
  Clone ID: MRT4577_15999C.1
gctcttcttgtcttttgagcaaatgtatacaatatttcacccagtcaatggcttctggcataatagcaccttatatatcaactnnnggttgaaccangnnattcctnncttccttctgctttattcnaatgaggacntnngtcactgcacagcaatacggctgttctttccctgcacttggctggacttttgtgactggagaatcactgcntcacgcctctgtgaggcacagcagaatttggaaaatattcccacagttactggggtacggactttctcgaaagtggtgctatttcttgaccaaaacnnctcagtcatatgg

SEQ ID NO: 65785 - DNA, 189 bp, Zea mays
  Clone ID: MRT4577_1599C.1
actggccggaccgacgcgctcacatacgcgaggacgcccttccatgtccttgatgagcattattgccacgataatgctggagagtctgcaattggaactccacgaggaatggcgatctcagaggcatcaccctcacgataggcccagtcagacaacaaatcaagacaccccataactggtcactttagc

SEQ ID NO: 65786 - DNA, 457 bp, Zea mays
  Clone ID: MRT4577_159C.1
agcagtggtaacaacgcagagtacttttttttttttttttttttttttttttttccttatttttttcttaaatactttctcaaatatcaatttttattttttaaatatatttaagttgttgcctcgccttacgctttgtcgcttaaaagtaaaagggggtcagtcactatggttgtgacgaaagattctagagtccaaaacttttggactcagtagaactaacatcgaatatatgatatgactttggcactactataaaagaggaaggaaatgttaatttaaaaggtcaaatagtgccaaaaaaggataacttccggtatttatgatcagtcccgcgtactctgcgttgttaccactgctttccgcgtactctgcgttgttaccactgcttcccgcgtactctgcgttgttaccactgcttcccgcgtactctgcgttgttaccactgcttaaggaa

SEQ ID NO: 65787 - DNA, 829 bp, Zea mays
  Clone ID: MRT4577_15C.1
agttcggcgacctggtagacatggacagggcgcggctcaccgccaaggtcaaggagctcggcgaagcggtgagatccgcatcggccagcgccggcgtcgtggtcaacctcggcaacctgcagtggctcgtcgaagaaagatgcgcggctcctcggggcgagcaacaacaagagaagaggagggacgtggtgctcgacacggcgcgagctgccgtggccgagatggcgcgcgttctgaacctgtccggcgaaggggagcaccgcgtgtgggtgatcggcacggcgacttgtgccacgtacctcaaatgccaggtgtatcacccggcgctggagagcgagtgggacctccaggccgtgcccgtgacgcccaggcctccaccgccgccaccgccgccgcttgggctctcgccgagtgctggagttaacaggggcatcctgagcagctctgtggaggtgctgtcaacggcgatgacgtccccaatgcaacgggcgccgagcctttgcagcgcctgcgcagagggctacgagcgcgagcgcgccgagatggcttcatccgagcgtgctccctgtccggccgagcagccgatgtcgcagtggctgcagatcggcacgccgagcagcggacgcccggccgaccgcgcgcaggagaaggcgcgggaggctgacgagctgcgacgccggtggcgcgaccggtgcgcgcagctgcactcgcatggccgcccgccgctggtcacttgctcagagtggaacggggccagcattcttgccagcatgcaggcggcgccgccggtggtaccggtacgcccattggtgcagcgtatggttgccgt

SEQ ID NO: 65788 - DNA, 1269 bp, Zea mays
  unsure (1)..(1269): unsure at all n locations
  Clone ID: MRT4577_160000C.1
cgctcccaggacgccgccgctggggacggcaccacgactgttgtcgtcctcgctggatcgctcctccgccgcgcccagtcgctcctctccgccggggcccacccaaccgccgccgccgacgctctccaccgcctcgcgacacgcgctgttgagatcctccacggcatggccatccccattgagctatctgaccgggaatccctcgtgaagtccgcgtccactgctctcaactctaaggtcgtctcccagtactccacccttctctcgcccctcgccgtcgacgccgccctctccgtggtggatcccgctcaattataagctgctgaaggccggccgggccgggagcactcgaatcgggaccctcgagcccggccggggccgcgaagtctgaacatactagaagcgtaaccctaagtctcggaccccaaccctcgaggaaggcgaccggagatggcggcgtcgtcggcggtggagaagctcaaggtcctctgggactcgcaggtcaacgacgaggagcagtgggcgctcaattataagctgctgaaggctgctggtctgtttgcgggatccatcttcctgatgcggaacttcggtgatctgatggccatttagtaggcttatcagcgttgtttacttggatcctatgagtgttgttttgatgttccaataattcctgctatgaatatgaaagttattttgctctgaagaggactagatctgtgccgatagtgcttgatcttagactttgtagccatagagattagaccctttaatattcggcgtgtaccgtggatattttggaacgatggtatcagtctgcacccataataatttttgatttgatgggttattaatattttaagagaagatgttgcaccgcagggcagggtctaagatgcacaaaagtgtgctattaaaaatgagggctgtcgttttttaaaaaaaaaaaaaaaaaaaaaaaaaaaaaaaaaaaaaaaaaaaaaaaaaaaaaaaaaaaannaaaaaaaaaaaaaaaaaaaaaaaaaaaaaaaaatttttttttntacccactgtttaagggcaaattccaacacattgggggccgttattaggggacccgggctgggacccaacctgggcgaaatcattggaatggttgttcccggggaaaaatttttatccgttaaaattcccacacaacatacaacccggaagcttaagggataaagccgggggggcccaagggggggngcaacctccctttatttggggtgggttaatggccggttt

SEQ ID NO: 65789 - DNA, 983 bp, Zea mays
  Clone ID: MRT4577_160001C.1
catatccgcctccgcccggcgcctccctctgcctcctctgctccgccctgccgccgcaaggatccaaaccccgtacgtcgccttctccgccgcctttcttcccgaggtaccggctcgccccacgcgtcccgctatttattccgccggctcgtcgccagcgccgctccctctgtcgcggccgagtggagctcgtcagatccgcgcgccgcacgccgatctgcgccacctccggtgagaccgcgcgccggcattgctctcatggtagctgccggggtgctggggttcgttgctcacttgctctgcctgggtacacacatacagggtttaagcttgggatggattgggcagcgccacccgaggttttgcatgcgcccgaccgcagcggaattccgtgaaccctgtacggcaatggcaattggcaatgacagggttactggggtgggtgaatggtttcgggatagacaattgtttgtgggagctgcgctggcgaaatgtaggctgtctattgttgcaattgcaggatggatgggtagcctctggtcggctctgctagtgtgtagtgttgctgtctgtggtctattcagggattcccatgcccatacccatgcagattgctaggtgccgttctgtcggtacatggttggtggcgtgtctgcgtctttgctgtcactgggtttaaggtttaaggtgtagtatcagtgggtaccctcatgaattaggggttaagcccaatgttcctttgtgggtacatcatgaatgcacttggccttgttccctgttagcttttgcttatgtgtcattctagcaagtgggttactgtaacatttgcaccctttgatggttgatggctctgcatcttttcgcttcctctcgatatttaatacctgagtgtaactgatgacctacttttgagtaccatatactttacatccttttgtgggacatatcaattgtgaaaaaatatgttttgcattctcagtatg

SEQ ID NO: 65790 - DNA, 500 bp, Zea mays
  Clone ID: MRT4577_160002C.1
cctcgaggccggccgggccgggaaaatccgctgcgtcgtattgccgccgcagaccatgtcctcttgcgcgactgagagatcgccggcttccgtgcactcaagaggcgagaagatgctcacccatacgaagattgctggtgagcataactcgcagctgatcaccgggtccaggggtgcaagccgcaacagcgtcgagacgaaatcccatcgcctgcacagaaccggctcatcatgaggaatgtcgaggggcccgaccgcgattctgacatcctcaccctggtggacgccaagagacactgcagaagactgcattgaagacctagcggacaggtgtggcctcattgcatggacaattgaagtctactaaatagcggtaagaaagaactactgcgaccctgtactgagagaaatacgcctgcagataagagggtaattgtgcacacactgtccgatcaggcatcagatgataagacgtgcatgtacgtgatatataaacgata

SEQ ID NO: 65791 - DNA, 495 bp, Zea mays
  Clone ID: MRT4577_160003C.1
cctccgatcctcatcaacacatctcatcaacctaccaaccaaccaaccaaccaacactcactctcaacttcactcactcactccacctctcttctcaaccaaccaaccaaccaaccaaccaacctcttcttccaaaatgcctgccagcgtcgcctcctccatctccaccatcgtcaagcccaccgcccccaagtgcggcgagtcctgcgattgctgcggctgcgacgaatcttgttggtgcactgtcatgtaaaaaaaaatctaccttttttttttctgcgacaaatgtcatcaaataccgagtacgataacatgcaacaacgggcatgaaagcggggtttcttagcgggtgaaaggagttttcttattatggttggattttgttgggggtttcgtttttttggggaggagcaggaggggggatgtatagaataggcattaccgattctgcggtagtgggaaggggggttaggagaattttatccttttttcttc

SEQ ID NO: 65792 - DNA, 129 bp, Zea mays
  Clone ID: MRT4577_160004C.1
gtcttacaccacaagcgcaggctactcattgggagtacaacctggtagagggggggatacaaatactggaaggtgaaatactaggatgaatttctataaactaacatattgggcaaaagagatccgaat

SEQ ID NO: 65793 - DNA, 298 bp, Zea mays
  Clone ID: MRT4577_160005C.1
gaattgttgtcttgtgttctaattaatgctgtcaaggaggatggaaacacatcgggaaataaaagtggatacacatctgtttaacgctagccttccaatacaaggatgttacgcagacatacggggccaactaagagagtggttcccaccaaaatttaagggcaactatacttcacaatttggggcatgacagggctgtgctggataaattggaaccactccaaagagcgttgaaatgacgggtgaaaattcaggtattttgtccctcaagagaacaaaaagacatttctattgctag

SEQ ID NO: 65794 - DNA, 1525 bp, Zea mays
  Clone ID: MRT4577_160006C.1
gccgattcgccaggtaggctcggacgaacctcgaaagcggccatatacccttcccatttctcgtggcgcccacgggccacggccacgccgtagatctcctcctcgtcgcagggctccggcggtctcgccggcggtgagctgaagcgatggagctctggagcaagctgcgaaacctggatgcctacccgaaagtgaacgaggacttctacagccgcaccctctccggcggcctcatcaccatcctctcctccctcgccatcctcctcctcttcttctccgagatccgactttatctatattctgccacggaaagtaagctcactgttgatacctcgagaggggaaagactacatatcaattttgatgttacgttcccggcccttccttgttctctagttgctgttgatacgatggatgttagtggagagcaacattatgatataaggcatgacataataaagaaaagaattgatcatcttggtaatgtaattgaatcaagaaaagacggagttggtgcccctaagattgaaagaccattacagaagcatggcggtaggcttgaccacaacgaggtttactgcggatcttgttatggtgctgaggagtcggatgatcagtgttgcaactcctgtgaagaagttcgtgatgcgtatcgaaagaaagggtgggctgtcaacaacgtagaattaattgatcagtgcaagagggagggctatgtacaaaggttaaaagatgaacaaggggaaggttgtaccatccatggatttgtaaatgtgaataaagtagctggcaactttcactttgcccccgggaaaagcttggaccagtcattcaacttcctgcaagacctgttgaacctccaaccagaaacttacaatataagccacaagataaataagctgtcctttggggaagagttcccaggtgtagtcaatcctcttgatggagttgagtggatacaggataactccaatggattaacggggatgtaccagtattttgtaaaggttgttccaacaatctacacagatatcagggggcgcaagattcactcaaatcagttttctgtgacagagcacttcagagaggcaattggctatcctaggcctccacctggtgtatatttcttctacgaattttcaccaatcaaggttgattttactgaggaaaatacgtcgctccttcacttcctgacgaacatatgtgctattgttggaggtatcttcacggttgctggcatcatagattctttcgtgtaccatggtcaccgcgccatcaagaaaaaaatggagctcgggaagcttgggtaaccgcagttttcggcatatagcagttaggaccatagcggaaacgagttgaacttgtgttgcactggcccccaaaagaggagggattttgattcgctgtgatgcatctgtagtcattcagaattgcctgccaaggcaacgtttgtgttattttttttgcaaaagtatattgcaatgcgcaactcaaactcgctgttaaaatatgtgattctgctccc

SEQ ID NO: 65795 - DNA, 361 bp, Zea mays
  Clone ID: MRT4577_160007C.1
cagtcattcaacttcctgcaagacctgttgagacctttacgagaaacttacaatataagccacaagataaataagctgtcctttggggaagagttcccaggtgtagtcaatcctcttgatgggtattctttggaacttgaactaaatttcagatcataatttgcattgcactttgctctataactttccatggcctaatttttctaagcattccagagttgagtggatacaggataactccaatggattaacggggatgtaccagtattttgtaaaggttgttccaacaatctacacagatatcagggggcgcaggattcactcaaatcagttttctgtgacagagcacttcagagaggca

SEQ ID NO: 65796 - DNA, 2248 bp, Zea mays
  Clone ID: MRT4577_160008C.1
cgacccagcgtccgggcggagggtgggcccggcggggccgtcgaggagggcgtcggggagagctcgtccccgccgcgcgaggacgccgtcccagcgcccgccggctccggcgggagcgggggcagcggaggcgcccgcgaaatctgtgcccaggtgctcgaccgcctcgtcgccgacggctacgcggaggcgtccgaccccgagttccgcgacaggctcgccgcccatttcggccggctcccgcacaggcagggcacaccatatactcacattcatgagatagttttctccacaatcgataagccaaagctccttagtcagctatctgcattgctatctgacattggattgaacatcagagaagcacatgttttctctacccatgatggctattctcttgatgtttttgttgttgatggctggcctgttcaggatgctgatggtttgcacaaagcactggaagcatccattctaagaaatgagggttcatggtctggttcatctcattcctcagccgctgaaagaacactgcccttccaagttaaaggtggtgagtgggaaatcgacaaacgacttctgaagatgggagggatggttgcttctggttcttgtggggacttgtatcacgggacttaccttggtgaggatgtagctgttaaagttataagagctgagcatttgaataagaatgtttggaacgagtttacgcaagaagtatatatactaagagaagttcaacataaaaatgttgtgcgattcattggtgcatgcacaaaaccaccccaattttgcataattacagaatacatgtctggaggaagcctatatgactttgtgcacaagcagcataatgttctaaacctcaggactttattaaagtttgcagttgatgtatgccgagggatgtgctacttgcatgaaaggggtatcatccatagagacttgaagactgcaaaccttctaatggacaaagatcatgttgtgaaagtggctgattttggtgtagctcggttccaggatcaaggaggtgtcatgacagctgaaactggaacatacagatggatggcacctgaggttataaaccatcaaccctatgataacaaagcagatgttttcagctttgctattgtcatctgggagctgataacgtctaagatcccgtatgaaagcatgacccctctccaagcggctgtaggtgtgagacagggattgcgcccaggacttccaaagaagacgcatccaaaggtattggacttgatgcagagatgctgggaagcagacccatctgcccggcctgctttcccagacattttagccgaactggaggatcttttggcacaggttcagggaacaccgggaaagacggcccatgctccatcaaataactcgaacacgaaagattaacccccatgcacacatacctgacgtttttctgaattcagtgatctgccatgtttaggattcgagtcgctaattacgaggaatgtagcatatcgatttttttccctggatggttttgcttgtgtacatttgaacaatcttcttggggcctattttttatggtcacctcattgttcttacataggggaaattggctcgagcgtttgggaggattacgtattatgacaacggctgataatttaccgcctacaacatgggtggacatttttccggcatgctttcccagacattttagccgaactggaggatcttttggcacaggttcagggaacaccgggaaagacggcccatgctccatcaaataactcgaacacgaaagattaacccccatgcacacatacctgacgtttttctgaattcagtgatctgccatgtttaggattcgagtcgctaattacgaggaatgtagcatatcgatttttttccctggatggttttgcttgtgtacatttgaacaatcttcttggggcctattttttatggtcacctcattgttcttacataggggaaattggctcgagcgtttgggaggattaaaaaaaaaaaaaaaaaaaaaaaaaaaaaaaaaaaaaaaaaaaaaaaaaaaaaaaaaaaaaaaaaaaaaaaaaaaaaaaaaaaaaaaaaaaaaaaaaaaaaaaaaaaaaaaaaaaaaaaaaaaaaaaaaaaaaaaaaaaaaaggggggggcccttttaaaggaccaaattttacttccccgggcttgcaaaataaaattttttttttggggcccccaaaataaaataaatggcccgggttttaaaaacgcgg

SEQ ID NO: 65797 - DNA, 496 bp, Zea mays
  unsure (1)..(496): unsure at all n locations
  Clone ID: MRT4577_160009C.1
tacatcttcaccgtctacaccatccgggggactggcgtatgcccgccgccgcgacggcggggaagccatacaacacgcccttctaccacttcctgtacctctccctcgccctcgcctcctacctcctcgtcatgatcgtggtggagaagcaggtgcagttctcccacgccgcgtacggggggggctccacggctctgctcatcgtcctcttcagtcccgtcggcgtggtcgtcaaggaggagtacaaggccgtntcccagctagaggagtcactgcagcagccgccggccatcgctgtcgacgaaccaaaagcaggctctgctggcaaaggcgacgacgagtcatcgtcgcctcccttgtgtggcggcggcggcttggcctgcctcaccaacttgttcacgccgcctgcgctcggggtggactcttccttcctgccggctctggcccgcgtggcgttgcccgttgctgctccccctctccctgttccgcctccgcg

SEQ ID NO: 65798 - DNA, 290 bp, Zea mays
  Clone ID: MRT4577_16000C.1
cacagaggtagcacccgtgtatcaggtgaaagatccctagtcttcttttctggcccattcatggtacagcgatatgctcacgcgcccacacactttgttacaatcacaggtgttggcatcagcgaggatcactaacggagcaggcatgacgcatatgatgatgtatgaagtgcatgaagaacaaaccaacaaggcgtgtgttttcagcggacgctgccgagcgtgcgaaagccggcggaactagctagcttagctgcggttgcactcaggctggaggtcctgggggaacc

SEQ ID NO: 65799 - DNA, 722 bp, Zea mays
  Clone ID: MRT4577_160010C.1
tcaacataaaaatgttgtgcgattcattggtgcatgcacaaaaccaccccaattttgcataattacagaatacatgtctggaggaagcctatatgactttgtgcacaagcagcataatgttctaaacctcaggactttattaaagtttgcagttgatgtatgccgagggatgtgctacttgcatgaaaggggtatcatccatagagacttgaagactgcaaaccttctaatggacaaagatcatgttgtgaaagtggctgattttggtgtagctcggttccaggatcaaggaggtgtcatgacagctgaaactggaacatacagatggatggcacctgaggttataaaccatcaaccctatgataacaaagcatgacttccaaagaagacgcatccaaaggtattggacttgatgcagagatgctgggaagcagacccatctgcccggcctgctttcccagacattttagccgaactggaggatcttttggcacaggttcagggaacaccgggaaagacggcccatgctccatcaaataactcgaacacgaaagattaacccccatgcacacatacctgacgtttttctgaattcagtgatctgccatgtttaggattcgagtcgctaattacgaggaatgtagcatatcgattttttttcactggatggttttgcttgtgtacatttgaacaatcttcttggggcctattttttatggtcc

SEQ ID NO: 65800 - DNA, 1590 bp, Zea mays
  unsure (1)..(1590): unsure at all n locations
  Clone ID: MRT4577_160011C.1
gctcgagtttttttttttttttttttntttgcacatacctgacattttttctcaatccagtgatttgccacatctaggattcgagttgccaattatgaggaaatttgttttgcttgtgtacattcgaacaatcttcttggggcctattttttatgggcacctcattattcttattcaaaagaaattttttttcgacgcttgggataccacacagattcaggcattgactacaattacctatgctctttcacatcgttaaaataggttagcgagtgccaaagttgcattaactgcagccatgttttgttctctttacttatgttttggaaccgcgactcccaggtatgggtaatgagactttgtaaaatggcaggagtatccatatttttcacttgcccctccggaaatgctgactcacatatttattattaggatgctgatggtttgcacaaagcactggaagcatccattctaagaaatgagggttcatggtctggttcatctcattcctcagccgctgaaagaacactgcccttccaagttaaaggtggtgagtgggaaatcgacaaacgacttctgaagatgggagggatggttgcttctggttcttgtggggacttgtatcacgggacttaccttggtgaggatgtagctgttaaagttataagagctgagcatttgaataagaatgtttggaacgagtttacgcaagaagtatatatactaagagaagttcaacataaaaatgttgtgcgattcattggtgcatgcacaaaaccaccccaattttgcataattacagaatacatgtctggaggaagcctatatgactttgtgcacaagcagcataatgttctaaacctcaggactttattaaagtttgcagttgatgtatgccgagggatgtgctacttgcatgaaaggggtatcatccatagagacttgaagactgcaaaccttctaatggacaaagatcatgttgtgaaagtggctgattttggtgtagctcggttccaggatcaaggaggtgtcatgacagctgaaactggaacatacagatggatggcacctgaggttataaaccatcaaccctatgataacaaagcagatgttttcagctttgctattgtcatctgggagctgataacgtctaagatcccgtatgaaagcatgacccctctccaagcggctgtaggtgtgagacagggattgcgcccaggacttccaaagaagacgcatccaaaggtattggacttgatgcagagatgctgggaagcagacccatctgcccggcctgctttcccagacattttagccgaactggaggatcttttggcacaggttcagggaacaccgggaaagacggcccatgctccatcaaataactcgaacacgaaagattaacccccatgcacacatacctgacgtttttctgaattcagtgatctgccatgtttaggattcgagtcgctaattacgaggaatgtagcatatcgatttttttccctggatggttttgcttgtgtacatttgaacaatcttcttggggcctattttttatggtcacctcattgttcttacataggggaa

SEQ ID NO: 65801 - DNA, 2071 bp, Zea mays
  Clone ID: MRT4577_160012C.1
ttgggtccctcgaggccggccgggaacggttccgtgggcggcttcgtggcttcgactgcccagagcgccccagcgcccgcgaagcttctagaacacgcgacgcgggcgagcgagctggcgggtgggcgaggcaaaactaaggaggcgggaggggcggcgatgcggggcaggtgacgctgcggcgcggcgtgggggatggtggcggcggagggtgggcccggcggggccgtcgaggagggcgtcggggagagctcgtccccgccgcgcgaggacgccgtcccagcgcccgccggctccggcgggagcgggggcagcggaggcgcccgcgaaatctgtgcccaggtgctcgaccgcctcgtcgccgacggctacgcggaggcgtccgacctcgagttccgcgacaggctcgccgcccatttcggccggctcccgcacagctatcagctggatatcaatgttgacaaagcatccgatgtcttggtccaccagaacgtcttagcggaagcaaaggatcctgataggcgccctgcattctatgtccgtttcttgaggattgaagatatggattcagcatacgactccgatgcatctgaagaaggggatgatgatggtgatgatctctctgtaaggcaggacacaccatatactcacattcatgagatagttttctccacaatcgataagccaaagctccttagtcagctatctgcattgctatctgacattggattgaacatcagagaagcacatgttttctctacccatgatggctattctcttgatgtttttgttgttgatggctggcctgttcaggatgctgatggtttgcacaaagcactggaagcatccattctaagaaatgagggttcatggtctggttcatctcattcctcagccgctgaaagaacactgcccttccaagttaaaggtggtgagtgggaaatcgacaaacgacttctgaagatgggagggatggttgcttctggttcttgtggggacttgtatcacgggacttaccttggtgaggatgtagctgttaaagttataagagctgagcatttgaataagaatgtttggaacgagtttacgcaagaagtatatatactaagagaagttcaacataaaaatgttgtgcgattcattggtgcatgcacaaaaccaccccaattttgcataattacagaatacatgtctggaggaagcctatatgactttgtgcacaagcagcataatgttctaaacctcaggactttattaaagtttgcagttgatgtatgccgagggatgtgctacttgcatgaaaggggtatcatccatagagacttgaagactgcaaaccttctaatggacaaagatcatgttgtgaaagtggctgattttggtgtagctcggttccaggatcaaggaggtgtcatgacagctgaaactggaacatacagatggatggcacctgaggttataaaccatcaaccctatgataacaaagcagatgttttcagctttgctattgtcatctgggagctgataacgtctaagatcccgtatgaaagcatgacccctctccaagcggctgtaggtgtgagacagggattgcgcccaggactcccaaagaagacgcatccaaaggtattggacttgatgcagagatgctgggaagcagacccatctgcccggcctgctttcccagacattttagccgaactggaggatcttttggcacaggttcagggaacaccgggaaagacggcccatgctccatcaaataactcgaacacgaaagattaacccccatgcacacatacctgacgtttttctgaattcagtgatctgccatgtttaggattcgagtcgctaattacgaggaatgtagcatatcgattttttttccctggatggttttgcttgtgtacatttgaacaatcttcttggggcctattttttatggtcacctcattgttcttacataggggaaattggctcgagcgtttgggaggattacgtattatgacaacggctgataatttaccgcctacaacatgggtggatatttttcatgcattattatcccagt

SEQ ID NO: 65802 - DNA, 571 bp, Zea mays
  Clone ID: MRT4577_160013C.1
ctgctgcttgcgccgccgcggctggtggcactgccgtgccaaagcgcgcaggggcatgcacggggagcgaggaagtcgccgcatgggcggtggaccctaaccctgcacgggactctcgtggaactgcagggacgcacacaggctccgatatgcttacatataatgtcagcaagagccatcaagggtagggtgaggagggtgccgtgcgccagtacctgtgacatggcaatgggtacatgccaagaacggagatggcgttctccaggagtaagtaatgctcaagagcgatccgagctcatccacgacttgagggaatacagggctgactacatgtacttagatgataagctagcatgcacgcgaacccatgggtgagaagaggggagatgctactattgcacctatttgacctgagagtgcagacctttatacattacatgctagttctgcgagtgctatcgactgatgctgctgtttgatacagttttatatgtgatacataaaaagcttttgtgcactaaaacataaggggaaactctctagaggaatgaactttaggtacagacgctga

SEQ ID NO: 65803 - DNA, 413 bp, Zea mays
  Clone ID: MRT4577_160014C.1
acgcgtccgctcctgggacccagacctctaggacctggctccccgtaattgccaccattcccatgtttgcctgcactacaaatcgaaggacgctttagtggcagctcgccacttatgcctgcatatcctcacttaacgttgacgccttaaccctcggcagtgcgatgggaggcacccttctattaacacgccttgataaatggtcaaagtcgaagaaaccgtgacctacagtctcatcgctactttcatcgggaactaagtgagccgatccttatgcgttcaactccgcgtccaggaactctgctgtatcaaccagagatactacctgctgtgcgtaagagaaaacatcgacgggcaccattgcaaatgacactgctgcatcctcaagcactaccacgatgactgtggatact

SEQ ID NO: 65804 - DNA, 359 bp, Zea mays
  Clone ID: MRT4577_160015C.1
acctttgatgcctctgtttgtcttggtctggttccagtgatagctgtatcttgtgctaggttatggttatagcagttcatcatatgagcttttggagaccagcaagatatggaaagttcctggtaattacttaagtatcatttcactgaatgagtaatgctagctagttagtgaaaaggaacatgtcagcacctaactgcaccagatatcagaccgcaacatcaggatacaatacaatgcagcgagataaacagtctacccaacgagtataaatatactatgagcagtatgttggggcctcagggaaagggggtaggcagggaattgaattcattctaataattataatttaggcatag

SEQ ID NO: 65805 - DNA, 158 bp, Zea mays
  Clone ID: MRT4577_160016C.1
caaccaatcagatgtttcagttttccttgcgaggaggcatggacatagcgtgatcactttggcctccgaatggaaccgacaagacgagagcccaacttttaaccctggatgtgtgtttaaaagacttgaaaaagcctaggcctgtgggacttttacgg

SEQ ID NO: 65806 - DNA, 693 bp, Zea mays
  Clone ID: MRT4577_160017C.1
ctcgaggcggcgtgacctgccacaatgtctctgtgccggtgatcccgttgctgatggagctggtggtcgccgtctcccacgtcgcgccgagccgggcatgccacatgttcgtgagcgatcatggagctcccacgtctaccggaacatccagacacgctcgtgccccccctgtcgcctacgttccacaacccgaaatgatgggccctcctccaccctgcctagctgctggactccttcgtgctgcctgcagccgcggaaaccatcccaccggctctccacatccacgcgctggactacctggcccccacctacgtctctgacatcccgaatgtctgccctggtgacaccgtcgtactggacgaaagtgttcagagtcctgcaagactacgtcaagaacaaaaacctgctggaagacaagctaggcacgttgtttgccatagcgcccgaaaacgacataaccctctacaagaggaccatgttagtgacagaaacagctcatgtagagggcaccacgcacacgtctggaatgtgcccacacgctcaagaggatgcgtcgcaagatgcctcatgatgacctggaactgcattggcttgttctgcggggatggttctgcatgacccggttctgaggaagtactcaactagactgtcgtctttcaccatcactctggcgatgggaattcgtccagctcg

SEQ ID NO: 65807 - DNA, 219 bp, Zea mays
  Clone ID: MRT4577_160018C.1
ggtacgcctgcagtacccgtccgatatcccggtcgacccgcgtccgcctggacgcgtgcgagagattgacaacactagcacagggatggagcctcttaacttgttcgcaaacgaatgctcgccttgttcgatcgttcaacaaataggtatacctcgtgagtcacacccctgaaaagagacgaatgaatctgtagcataacatagatcctggctactatc

SEQ ID NO: 65808 - DNA, 397 bp, Zea mays
  Clone ID: MRT4577_160019C.1
ggaaaacaacggggtgtttacatggataaggggggcaaaagaaaaaagaattcccctttggggggggggcatgacaatgcaaagatggggatacaattgggagaggggatatttaatttttggttataaaaaaaggacacaaatacccccaaaaacattgcccaaaggaaaaaaacacttcaaaattagaacaaatttttgtaacggggttttccaaaaaggaaagggttacttaacactaacaccatggaacagggggtaacacccaaatttttaaaaaaaacgggtttattttggggttttaaaccatggggtttttaaaagattttttttgcgttggaaaaatgggtggggatgaatttgggggacaaaaacattttggtaaggggggggtttt

SEQ ID NO: 65809 - DNA, 363 bp, Zea mays
  Clone ID: MRT4577_16001C.1
tttatggaagacactgtcacttggtgagagcgagggcccgcgtcgccgccggggtggttgctcttctcgccctctttgtcgtcccggccacggcgcacgcccctgccgagtggcccaaactcgcccaaggcgctgaaccacccaagatggcctgtcttccggcgtcgccgaccagggcccccatggactacccggcctagacttccacgatgtcgaccgcgtacgcctgctcccgctacgctgcagccacaagcaccgtatgtgcgggatttcgaaacacgatgtccccagcatgagcctgcggtattactctggacgccactcccgtcaccaataagagcacagtctcatctgccttcgcca

SEQ ID NO: 65810 - DNA, 407 bp, Zea mays
  Clone ID: MRT4577_160020C.1
gcatgttgtcactgcgaggaagatgatccagaaggagggtggccttgagccctcctagctcgtggactcccttgcccaagcttttatttgatctggagaccgggaaccaggagcttaagagcgacctcaaggacctgaccatcaacaatgctatttatatggatgttaccgggagcaagaaggctgttgtaatacacgtcccataccgtctgcgcaaggccttcaggaagacccatgtcagactcgtcagggagctggagaagaaattcagcggctaggatgtggtaattgctgcttcaaggaggattgtgaggccacccactaagggtttatctggtctgccccctacaaccatgactgtgactgctgttcacgatggcatcctggatgatgttgtctacccagct

SEQ ID NO: 65811 - DNA, 182 bp, Zea mays
  unsure (1)..(182): unsure at all n locations
  Clone ID: MRT4577_160021C.1
caccggtcggaatacccgccgcgacgccacgcgtccgggccaaccttcgtcacccctcgtagccttcttntaaccctggggcccaaaagccgcccgaggagnaaggcctgagtacgcacaagcggccgcagcgtcgcagtttattcctctcatacttccagccaccgttccccatgtcgctc

SEQ ID NO: 65812 - DNA, 278 bp, Zea mays
  Clone ID: MRT4577_160022C.1
gagggttttgggatccaggttttgagtgtggttgctgctcgttttgatttggactgatggacgataaacaagcagtgaaactagcctttatttatggctaactttgcctgttgtatgccgcaaatctactttttttcttggcaaaaaaaaaaaaaaaaaaaaaaaaaaaaaaaaaaaaaaaaaaaaaaaaaaaaaaaaaaactaaaaaaaaaaaaaaaaaaaaaaaggcgatttctccttgcctggcctcccactggaaagggctaattttggcaatt

SEQ ID NO: 65813 - DNA, 255 bp, Zea mays
  Clone ID: MRT4577_160023C.1
ccgacacatgttacaagcctcatctcacccttgcatgaccaattagttttgcttcactccgcgggtccatccatatccatccatcagaattctcactctccacagtaacaaggcgcacgaccagcagcaccagcagccggcaacaaaagacacagcaacgatggcgttcgtgccggagtgcgtgcaatgcgtgactcagagcaacccgttccagtacaaggtggtcaagccgacactagagttcgtcgctttcgt

SEQ ID NO: 65814 - DNA, 1804 bp, Zea mays
  Clone ID: MRT4577_160024C.1
ctggccggggacgaaaaggctaggtagagtcaaatccccgggagaccaaccacccccacaccgccacgaacacgcccaaatcggagacggccgggaaaccaaagccttcgcatccctccggaaccctagcatcctccctcctcgctcctaggatgccccagtagctccgatcggcgcctcaccgccatggatccgggcggcgggggcgggatgctcctggaggacttcggccagcgcgtggacctcacgcgccgcatccgcgaggtgctcgccaactacccggagggcaccaccgcgctgcgggagctcatccagaacgccgacgacgctggcgccgggcgcgtccgcctctgcctcgaccgccgatcgcacgggagggcgtcgctgctgtcccccgcgctcgcgcagtggcagggtcccgcgctgcttgcttacaacgacgcggtgttcaccgacgaggacttcgccagcatctcccgcattggagacagcaggaaggtcgcccagacgtggaagactggccgcttcggggttggttttaactcagtttaccacttgactgatttgccatcgttcgtgagtggcaagtatgttgtcctattcgacccccagggtgcttatctaccaaatgtgtcggcatcaaatcctggaaagcgcatcgactatgtcagttcgtcagcaatcacaatgtaccatgatcagttttcaccctactgtgcgtttggctgcgacatgaaagcatcatttcagggaactctgtttcgttttcctttgaggagctctgagcaagcatcttcaagtcggttatcaagacagtcatacacagaagatgatattttatctctttttgcccaactgtaccaagaaggcgtatataatctgctgttccttaaaaatgttctatcacttgagatgtatgtgtgggaatctggtatgaccgagccaaaaataatatactcttgctacttagggccacagagtgaaaagctgtcctggcatcgccaagcccttgtcaggttctctggcactcctgttgaatcttctaagcagaagctggactctttctcgatggattttatatcagaagcattcttgggcaacaagattgagaagaagagctctacctattttatcatccagggaatggcatctgcatcaagtaaaattggtatttttgcaactgcagctgccaaggaatatgatcttcacttactgccttgggcttctgttgctgcttgcatctccaacacagggcttgaggatactgttctcagacagggtcaagctttctgttttcttcctttgccagggtggtaagcttcgctctgattggaacaggctactgttggaagatgttgtcgctccgttgttcagagaactgctgatgaaattgcggacgctttctgactccacaatatcatattattcactgtggccaactggtttatatgaggatccctggagtatccttgtggagcaaatttacaaggttatttacacctcgccagtcttgcactcagagattgaaggcgggacctggatatcaccggctgatgccttgcttcacgatgagggattctcaggaagcaataatcttaatgaagccctcgtgttggtaggcatgccaattgttcgtgtatctaatgcaataggcgatatgttttcaaaattttatatgcagtctatgctcaaaatagtaagtcctgctatagtgaggcatttcctcaaggattatgctaaacttgctacgctaggaaagtctcataagttaatattattggaatattgtcttactgatgtttac

SEQ ID NO: 65815 - DNA, 352 bp, Zea mays
  Clone ID: MRT4577_160025C.1
gactttgattgtttgtctttttttatttattttgtgttgtgccttgtgtctttgtttgccaccggggaaaaacggaaactagggcgcgtgcctctgctacgcaacccgaaaaacacaaagaagggacgaaccaagagcccctagagcattcaggcggattttccgaccgccatagtgaaccctgggaaaacaatgaaacgggtccttgatataccaccaccctctacccttggtttttgaggactactagtataaagcgagtgtccgtccgatgcttaagatggaatgctgcgagccaaaactcgatgctgtcctgcgagccattttgcggtgaactctgcactgggaccaa

SEQ ID NO: 65816 - DNA, 325 bp, Zea mays
  Clone ID: MRT4577_160026C.1
tcgcgatctatacagacgcgtgggctgactcgttttcggacgcagaagctgacgcgtgggggaaagttcttatcctccttcccttcctcctccctctccgtcttccgttcccaaagccaatagttttcaagttgcaatggcataccatgctaaccaacccactgttcttcataagctcggagtccagtttcaccttcgctcgatcatttctgaacgtgttctgtccctttacatatgctcatttggctcatcttatgaaaggagatttgcttcattgaactacatgacccagagtcttttgggcccttcgatgtttgttagcttt

SEQ ID NO: 65817 - DNA, 363 bp, Zea mays
  Clone ID: MRT4577_160027C.1
tccaaattgaaacaatttcaagcttttctgagctcggcttttgttcctaagactgagtcctattccagctgacgggatgtcaagccctattgaccgatatactaggccatgctatgaagggtttatacataactatgaaaggaaagatagcaaatcttatgcagacaactcataaagagataataagactaagattagctctttcaagaaaaaagcaattaatgcgacgaacaaattaaggcattcattgagaaggagaagcaaaacaaataccgaaaggcgggattacatcaatgacataatggacattaaagagcttcaagatcttaaacattccgaaatgcttaattgatgaaaatttgc

SEQ ID NO: 65818 - DNA, 433 bp, Zea mays
  Clone ID: MRT4577_160028C.1
gggaccgaaccggaagacccgggccgacccacgcgaccggctgtttttacacgaaacagcagaccggaaactgggggggcaataaaagcgccaagaacccctacaacaccacacggcaagggcaacaagggcaggctaaaccgccagccgaccgacagcgaaggcaacaaggccaaggccaccgccaagaagggaaagcccgaccacaagaagaagggcaagcacgccagaaaagaacgccagagcaagccggggcgaccgaaggacggagccaacaagcacttcgaagaaaaggcaggagacaacgagaaccccaagggcagagaaagaaaggaaccagcaaacacaggacctaaaaggaaaggaagtgcgccgaacccataggcccaagaaccgacaaagcaacaaaaggccaaaggaccgaaacccaccc

SEQ ID NO: 65819 - DNA, 853 bp, Zea mays
  Clone ID: MRT4577_160029C.1
cattgggtacctcgaggccggccgggacctcgaccggctgcagctacctgcttgcttgctagctagctccaaacagaccgatagatacaacccccggcccttcacatcatcagtccacacacccaacccaacaagcgagtcacgactgaagctgcagcctaatagctagccgctagcctagcagtccaatgagaaggcacggcgccagcgaggcctccccttccatcatccacacgtcctccatagctctcctccaggagaggttcagaaacctgcagaaggtgaaggagatgagggaaggcagggagctgcagagggtgcacgctgctgatactactactaccaccaccaaccgcaccgcttcgtcgccgtcgtcctcgtcgtccctgtcgtcggctctcagcctcggcctccaacaggccgccaacgccaacgaccacccgaggtggttcttgcacccggacttgatccggccgtccaggccgctgcgcggacacgcgtgccacggcctcggcgccaccggtggtggtgtcgtcgtccagacgacgtcgccgccgccactaccgccgagctcatcgtggggaggagcgcagaattcgggctataggactgatatagatgtcgatacctcgctccatctgtaatctcttctataataagcacgtatggccgtgctgttctttcgttgcttttttttttggtatggcttgtcagtttcccggccttatttgcagctagctagcactacgtacttcttctgtcgtctcgcggcctgccttgtaactgcttgggtacttttactatatatgaggcttcctaagatcgatgattgaaaaaaaaaaaaaaagcggcc

SEQ ID NO: 65820 - DNA, 352 bp, Zea mays
  unsure (1)..(352): unsure at all n locations
  Clone ID: MRT4577_16002C.1
ccacttcctaagtttttccggccttctccacggggcataacatcgagcgaggagggtgccactcncatgttgactacctatgcttcctagaaaccctcccatcgacccacaaccaccactgcctccacaccgccttcagcacctacaccaaggtcttcgagtgcacaactatcctgcactggtagactcaaacttcccccaggttgaccttcgtcacattttgcacccaggattccacgcgtaacgccattccacgtatcaacggcatggagctggacggccataacatcaccgtcaacgagcccaactcctcctgcccccgcggacgttgtacctgaaccggttacactcc

SEQ ID NO: 65821 - DNA, 248 bp, Zea mays
  Clone ID: MRT4577_160030C.1
agggcaaacaaacaccagctttggttcgaacaaccactcacagacccacaggcctttaaaatccaagttgcacaaccgacgcctacggagttccatgaagttaataaaacagctgtccacaaccttgtttattatccatggatggatgggatggatcacacctaagcagtatttggccccattctcttctatcgacagaagtcagtccgacgggctagagacactacctagataacctccattgcctc

SEQ ID NO: 65822 - DNA, 592 bp, Zea mays
  Clone ID: MRT4577_160031C.1
ttttttttttttttttttttttttttttttttttttttttttttttttttttttttttttcaaaaaaaggaccaataaattttccctttaaaaaagtttaaaaataaccatccgtttctggaggcaaaagggaccatccttggtttttcctggacaaaaaattttttccttttttggaaaaaggatttgggggaaagccattccggaaggggttgggcaaaggaattttctttccaaagtcccgaattaaccctttttttggcagaaaaccccttttttttttaaacccaaaacccagccctttttttggggccaaccccccccggccctggaatttaacaaacggacctttaaatttttgggaacatgttttgggttcaaacccttaacagaggggcctttgcaataacctggggaaatagggggggcaataaatggccaaaatcccaaacttctggggggaccggcaagaaatttaaaggggggggcgggggatttgccaaaaaaaccggcaaacccatcatccttgggaccagcgctttaaggaaaaagctgccaaaaaaggcaccctcctcaaatcccccaagttttc

SEQ ID NO: 65823 - DNA, 220 bp, Zea mays
  unsure (1)..(220): unsure at all n locations
  Clone ID: MRT4577_160032C.1
aaaagaggntcnnnttattggacaccgaatgggcagggagcaccagtttaggcaagggagcagctccccagttgttggtcggggcctcctgggctcagcgcttctctcgcggggcccgggcctgaggggagggtgatgggcccggagggataagtgaaaaccccttgaccaaaaggggggtgaacggggcgttaaacgggggggggaatgggggacccaa

SEQ ID NO: 65824 - DNA, 523 bp, Zea mays
  Clone ID: MRT4577_160033C.1
ctctattacggccgccctttgtcctgcccttttttttttttttggggaaataaattggggcggttttaaattaaaaaaaaaaaaaaaggggggggcctgggtttttttttttaaaaaaagggaggggaggtggggtggggtttaaccccccctggattttgtttttttttattttctttttgtttttttttttttttttaaagaattgacccgtcccccaaaccttttaatccctttttgtgccccccctccctttttttttttttaaaccaaaatttcttttcctcgggggtttccaaaaaccccaaatggggtttttaaaaaaaaaattgttttcccccccccccaaaccaaagaaagcggtttgggaattcttttttttggtttcataccgggcggggcccccgctccccaaagcccgaaccccggggtgggcccgggaaataaaaacccggtcctcttgccgggcaccgggcaccaaattggggggtttttaaaatttgcttttgcccgggcttaaggg

SEQ ID NO: 65825 - DNA, 111 bp, Zea mays
  Clone ID: MRT4577_160034C.1
taataccgtaatagtaataacaaagctctagtagtagtacgcacttagcaggccccatcaagaccgggcatgccgtcttcgctccagtactgcaacgcgacgcagttggcc

SEQ ID NO: 65826 - DNA, 378 bp, Zea mays
  Clone ID: MRT4577_160035C.1
gggtgaaaaatccgctggttgtttttaacccacgtttccacatgatttttgcccttttttgccccgatccccaccccttaagagggggggggaacccttgcaacaaacacggtggggagaaaaaaaaacattccccccggttgggcccggggttcccgaagttttgggttcagtttacagggccgtgccgccttgggcctttttttaggggagagggatggaagatttatcaaaaaaactaggggtgggccgacaatactttccccacatgttttagcacacccccggccggtttagacctgttttttaaccgggtggcccctgtgatcacctggtgggggatggcagcccgggcgggggccgtttaaagggcccccc

SEQ ID NO: 65827 - DNA, 615 bp, Zea mays
  Clone ID: MRT4577_160036C.1
atggatcctaagggaaaggggatggtggtcaacgataaggagaaggagtccatcttcaacgagccaagagatgacaagcccactgactctggctcgagtcacaagaagaaggacgggaagaagaagaggcgcatcaagaagatcgtctactacgacagcgacgaatcttcttcttcgccaaaagacggcgacgacgactcgcacgaatacaacaaggtgagcagcttggacaacgccaagcaaatttgggataccctcaagatatcgcatgagggaaacgacgccaccatgatcaccaaaatggagttcgtggaaggcgagctgggaaggtacaccaaaatgacgcccgaggagatactcggaaagttagtgagcgggcgcatgatggtgaaagaggcacggcgcttcaagaccgcactgaaaggacgcaaggagtacccaaacaagaacaaagcaaagggaaagcgctcctgcttcaaatgcggtaagactggtcactttatagcaaattgtcccgataatgatagtgaccaaggacaagaaaagagcgggaagaaggagaagaaaaagagctacaggaaggcaaagggtgaggcacacctcggaaaggaatga

SEQ ID NO: 65828 - DNA, 1041 bp, Zea mays
  Clone ID: MRT4577_160037C.1
atggatcctaagggaaaggggatggtggtcaacgacaaggagaaggagtccttcttcaacgagcctagagatgacaagcccactaactctggctcaagtcacaagaagaaggacgggaagaagaaaaggcgcatcaagaagatcgtctactacgacagcgacgaatcttcctcttcaccaagagacgacgacgacgagaaaaagaaaccgcaaattcataagaatgcacaagctaccactgttttgctagcttcgttgtgcagggatgaatacaacaaggtgagcggcttggacaacgccaagcaaatttgggataccctcaagatctctcatgagggtaatgatgccaccatgatcaccaagatggagttggtggaaggcgagctgggaaggttcgcaatgatcaggggagaagagccaacacaaacatacaataggctcaagaccctggtcaacaagattaggagttatgggagcacaagatggatggaccacgacgtcgtccgacttatgctaaggtacaccaagatgacgctcgaagagattcttggaaagtttgtgagcgggcgcatgatggtgaaggaggcccgatatgtggacgacgctctaaatggtccactccccgtccacgagcctcaaactattgccctcaaggcaaccagcagcagggagatgctaccaagcaaggtggcacaagttgaggcgaccgggctaaacgaagatgagatggctctcatcatcaagcgtttcaagaccgcattaaagggacgcaacgagtaccccaacaagaataaagaaaagggaaagcgctcctgcttcaaatgtggtaagataggtcattttattgctcaatgtcccgataatgaaaatgaccagggggaagaaagacatgggaagaaggagaagaagaaaagctataggaaggctaaaggcgaggcacatcttggcaaggaatgggactcggactgctcgtcatccgactccgatgatgaaggattggcagcctcggccttcaacaaatcttctctcttccccaactaa

SEQ ID NO: 65829 - DNA, 777 bp, Zea mays
  unsure (1)..(777): unsure at all n locations
  Clone ID: MRT4577_160038C.1
aggtctgcttcggctccctccgctgcggtccctccgtgtcgtcgtcctctgccaccattcatcacaccctggtcgctccccctcgtcgaagcttacggatatgctcctcgaccttccctcctccacccgcgcccgccatcgagggtcgtgacgtcagcctctcggtgaccacgcggcggggcagggtgttgccggtgcttaagggatgctccctccttgtcccgcccgggcagctctggatgctcctcggccccaacggctgcggcaagtccacgctgctcaaggttttagcaggttttctgaatccaacggccggtacagtgtatataaacagaccatgcagctatgtcttccaaaatcctgatcaccaggtggtaaaacttctctttctttaatagttctctaactggtctgttgtcaggtctcacaatagattttaagtgcgatctgtagtatactagtatgccaacacaattaactcacatagcatctattgagttcagtttcagtgttacctgtatcagcttatgtgttaaactcagcagctattggctatattactttgtattggacaagtaaataatgtatttggttaaatgatataaattgatgcttgtgattatacatttaatcatgttgctcagtatatgagatatgtcattaggcatggacaatttgtcacaaaaacttttccatgcataccctgctattgctcaattcatacaatatccacttanatgcattcggagcatagntttaggtgagtcatgcaatctg

SEQ ID NO: 65830 - DNA, 1281 bp, Zea mays
  Clone ID: MRT4577_160039C.1
atggatattaagggaaatgggatggtggtcaacgataaggagaaggagtccatcttcaacgagccaagagataacaagcccactgactctggcttgagtcacaagaagaaggatgggaagaagaagaggcgcatcaagaagatcgtctactacgacagcgacgaatcttcctcttcaccaagagacaacgacgagaaaaggaaaccggagatagttgaaaatggaatgcaatttgatagtacggataaccctgtgtttattaacgagcaaattcataaaaatgcacaagctaccactgttttgctagcatccttgtgcagggacgagtacaacaaggtgagcggcttggacaatgccaagcaaatctgggacaccctcaaaatatcacatgagggaaacgacgccaccatgatcaccaaaatggagttggtggaaggtgagctgggaaggttcgctatgatcaggggagagaagccaacacagacgtacaacaggctcaagaccctggtcaacaagatcaggagctatgggagcacgagatggacggaccacaacgtcgtccgacttatgctcaggtcttttactgttattgaccctcatcttgtgaacctcatccatgaaaatcccaggtacacaaaaatgacgcccgaagagatactcggaaaatttgtgagcgggcgcatgatggtcaaggaggcgaggtatgttgatgatgcattaaacggccccatgcccatctacgagccgcaacccgttgcactcaaggcaacaagcagcaaggaggcgctaccaagcaaggtagcacaagtagaggctctcgggctcaatgagagtgaaatggtgcttatcatcaagtgtttcaagaccgctcttaaaggacgcaaggagtaccccaacaagaacaagacaaggggaaagcgctcctgcttcaaatgcggtaagactggtcactttattgcaaactgtcccgataatgatagtgaccagggacaagaaaatagcgggaagagggagaagaaggcctacaagaaggcaaagggcgaggcgcatcttgggaaagaatgggattcagactgctcttcctccgactccgatgacgaaggacttgctgcctcagccttcaacaagtcctctctcttccccaacgaacgccatacctgcctcatggcaaaggagaaaaaggatagacttttagaaaagcaagaggatattttgtatgaagaacatgataagtttgttagtgtgcaaaaatctcttgctttagagcttaaagagtattaa

SEQ ID NO: 65831 - DNA, 243 bp, Zea mays
  unsure (1)..(243): unsure at all n locations
  Clone ID: MRT4577_16003C.1
taccctataccttccccaagaacctccacgtngattttatacactggggatggcccattctcttcccgctcctttacttctacccagaactgctctcccacaacatcctcaagttctgcgagccaatttacttcaatgcgatctcccatatcttcaacgagggcggactgtactacctaatcaaccctatcctcctccacgcgcttatcatcctacccatcttcacgttccaccatgtactca

SEQ ID NO: 65832 - DNA, 272 bp, Zea mays
  Clone ID: MRT4577_160040C.1
ctaggatccgaccacgtcgacgatggagctgagaagataatgatgatgacgacgacaacgacagatggttgtgtcatctgctctctttttttagcgccaacaaaactggaaatgaaaaagggaaatcaatccgaaaggagaatagaaattaggaagtataggtagaatctctctcttgctagtgactatagaaattaggaagtataggtagaatctctctcttgccatttatgatgcattggatttttttatatataagaacttcccagtgg

SEQ ID NO: 65833 - DNA, 313 bp, Zea mays
  Clone ID: MRT4577_160041C.1
cttgggaaggaacactaattaatgccccccaaatgacaatgttgccagttttgattacaagttagggtttaagcaaatgctttatcctgaaaagggcagttataaggggttaaacaagggcccttcccagttaaaggatgatatctaaagggtaaacccaacttgttaaaaaaggcaaaggattgaacctattttccatgggtgtgcatattctgataattttgtagggctggaagatgtgccaactgaaggtaattttgtttacgaacaaaaaactgaccttattggcccaaaagttgaaaaaccaaaattt

SEQ ID NO: 65834 - DNA, 320 bp, Zea mays
  unsure (1)..(320): unsure at all n locations
  Clone ID: MRT4577_160042C.1
aagcagnggtaacaacgcagagtacgcgggtattccatgtcattttcgagaaataaaaggggaagataagcgaagccagcaggactggagcgaccgaccgagagcgagtggctgcatgcctaggcattcattctctgcacgcaactgcactttcaaccctggagaaaacataataaatgctcgttcccctgtaaaaaaaaaaaaaaaaaaaaaaaaaaaaaaaaaaaaaaaagaggggggaaaaaaaaaaaaaaaaaaggaaaaaaaaanaantggtttttttaaaaagagtagtgtggggtgttaccactgcttagggg

SEQ ID NO: 65835 - DNA, 1913 bp, Zea mays
  Clone ID: MRT4577_160043C.1
cgggaccgagctcaaacacacatcaagaaagcaagaaagaaaagactgtagctagctagccaccgcgcgcgcgcacgagtagtctagctagaatacactcgcgttcaaaacaaacacaccaagcagctgatggcggccaccgtatcttcctgcctgagcctcgtccccaccgtgcaccaccgggccggcgggttccccagtgtggcactgacgaacacgcttcagcgccgtcgtcgttctcgccgctatcttgtcgtcgcctcggcgacgagagccgaacaggaggccgcccctgtgacgatcgaggacgtggacctcagctctcatcaggccgcggccgacgacggggagctcgccgcgcggtggcgggaggtccacggcagcaacaactgggagggtctgctggaccccatcgacggcgtgctcctccaggagctcatccgctatggcgagttcgcccaggccacctacgacagcttcgactacgaccgcttctccccctactgcggcagctgcaagtacccggcgaagaccttcttccacgacgtcggcctcggcggcatcggctacgaggtcacccgctacctctacgccacctgcaacgacctcaagttccccaacttcggcatcaagacggccgccaacgccaagatgtggagcgagtccggcacgttcatcgggtacgtggccgtgtccaccgacgaggagacggcgcggctcggccgccgggacatcgccgtggcgtggcgcggcaccatcacccgcctcgagtgggtggccgatctgacggccaaccagatccccctgcgcgagacgggcgtcccctgcccggaccccgacgtgaaggtggagcgagggttcgcggcgctgtacacggacaagggcgccggctgccgcttctgccggtactcggcgcgggagcaggtgctggccgaggtgcgcaagctggtggatctgtaccacgggcggggcgagcaggtgagcgtgacggtcacgggccacagcctgggcagcgcgctggcgatgctgtgcgccttcgacatcgcggagacgcgcgcgaacgtgtcgccgggcgacagggtggcgccggtgtgcgtgttctccttcgccggcccgcgcgtcgggaacgtcgccttccggaggcggttcgagcgggagctgggcgtgcgggcgctgcgcgtcgtgaacgtgcacgacagcgtgcccaaggtgcccggcgtgttcttcaacgagtcggcgttcccggagctcgtcctgcgggcggcggacaggctgggcctcggcggcgtgtacacgcacctgggcgtgctgctgcagctggaccacaaggtgtcgccgttcctcaaggagaccctggacctctcgtgctaccacaacctggaggcgcacctgcacctgctggacggcttccgcggctccggcgcggggttcgagccccgcgggagggaccccgcgctggtgaacaagtccaccgacttcctccgggaggaccacatggtgccgcccgtgtggtaccaggcggagaacaagggcatggtgaggacggaggacggccggtgggtgctgccgccgcggcagagggtgctcgacgaccacccggaggacactgaccatcacctccagcggctcggtctcaccgcgtgaagctcagcaatactctgatagtagcgttaattagtgcgtgtggcgttcgcgtacgtgcgcggggcagtcggttactctgttgccgcgcgcggcagctcagtggcgcgttcatgccgtgcatgatgcgggtgacgtgcgggatgggcacgtcgctgcctgagaagctcgcaccgttggcgttcgtgtggctgcagaaaggtcgtcttggattgtaattctctctacttatttttgtaaattgacccagaaaagctgctgcttgcagcgcc

SEQ ID NO: 65836 - DNA, 622 bp, Zea mays
  Clone ID: MRT4577_160044C.1
ggccgggccgggatacctccgagtctccttcagctgctagtctagctaggtacgataggcctctactatgagtccgcttctcgctgctgccatgaaccacgctgcagcccatcctgtgcttatgagtcaccgattaggagcctcaatgagagttctcacgtcccacctgccgtcttcttctccactgagcaccaagggatggtgtaaccttagctttactacgcgatctgctctagcacgcatccaagatggagaccttatgttgatcccctctgatgtcccacaaagggactgtttcccctcatgacttcaccttcggtgccgccgcttcagcgtatgacactgatggtgcttggaatgctgatggtgagggggaaagcaactggaatcacttctgccacgatcatccggataggatactggacttcagcctcttcgactattggatgcgaattcgtaccatatgtacaatactgacgtcagattgctcaaggaaatgaatctgaacgcagataggatctctatctcgtggtccggaatactgcccaagggagacttttactgaggtattaccccggatggcatcatgtactacagagacctcatctgcttgatgctagaa

SEQ ID NO: 65837 - DNA, 2153 bp, Zea mays
  Clone ID: MRT4577_160045C.1
gccgatggggtacctcgagcgggcattggctcgagccggccggggagcacttgtcagttctcatcccatgcacgcatcggcatatatcaatggcgagctccgcctcctccccagccgggggaccgagctcaaacacacatcaagaaagcaagaaagaaaagactgtagctagctagccaccgcgcgcgcacgagtagtctagctagaatacactcgcgttcaaaacaaacacacagcgtcgtgctgcgtgatctctgaccgcgtcgacaactaccgcagcaccaagcagctgatggcggccaccgtatcttcctgcctgagcctcgtccccaccgtgcaccaccgggccggcgggttccccagcagtgtggcactgacgaacacgcttcagcgccgtcgtcgttctcgccgctatcttgtcgtcgcctcggcgacgagagccgaacaggaggccgcccctgtgacgatcgaggacgtggacctcagctctcatcaggccgcggccgacgacggggagctcgccgcgcggtggcgggaggtccacggcagcaacaactgggagggtctgctggaccccatcgacggcgtgctcctccaggagctcatccgctacggcgagttcgcccaggccacctacgacagcttcgactacgaccgcttctccccctactgcggcagctgcaagtacccggcgaagaccttcttccacgacgtcggcctcggcggcatcggctacgaggtcacccgctacctctacgccacctgcaacgacctcaagttccccaacttcggcatcaagacggccgccaacgccaagatgtggagcgagtccggcacgttcatcgggtacgtggccgtgtccaccgacgaggagacggcgcggctcggccgccgggacatcgccgtggcgtggcgcggcaccatcacccgcctcgagtgggtggccgatctgacggccaaccagatccccctgcgcgagacgggcgtcccctgcccggaccccgacgtgaaggtggagcgagggttcgcggcgctgtacacggacaagggcaccggctgccgcttctgccggtactcggcgcgggagcaggtgctggccgaggtgcgcaagctggtggatctgtaccacgggcggggcgagcaggtgagcgtgacggtcacgggccacagcctgggcagcgcgctggcgatgctgtgcgccttcgacatcgcggagacgcgcgcgaacgtgtcgccgggcgacagggtggcgccggtgtgcgtgttctccttcgccggcccgcgcgtcgggaacgtcgccttccggaggcggttcgagcgggagctgggcgtgcgggcgctgcgcgtcgtgaacgtgcacgacagcgtgcccaaggtgcccggcgtgttcttcaacgagtcggcgttcccggagctcgtcctgcgggcggcggacaggctgggcctcggcggcgtgtacacgcacctgggcgtgctgctgcagctggaccacaaggtgtcgccgttcctcaaggagaccctggacctctcgtgctaccacaacctggaggcgcacctgcacctgctggacggcttccgcggctccggcgcggggttcgagccccgcgggagggaccccgcgctggtgaacaagtccaccgacttcctccgggaggaccacatggtgccgcccgtgtggtaccaggcggagaacaagggcatggtgaggacggaggacggccggtgggtgctgccgccgcggcagagggtgctcgacgaccacccggaggacactgaccatcacctccagcggctcggtctcaccgcgtgaagctcagcaatactctgatagtagcgttaattagtgcgtgtggcgttcgcgtacgtgcgcggggcagtcggttactctgttgccgcgcgcggcagctcagtggcgcgttcatggcgtgcatgatgcgggtgacgtgcgggatgggcacgtcgctgcctgagaagctcgcaccgttggcgttcgtgtggctgcagaaaggtcgtcttggattgtaattctctctacttatttttgtaaattgacccagaaaagctgctgcttgcagcgccaaaaaaaaacgattttcatctttcaaaaaaaaaaaaaaaaaaaaaaaaaaaaaaagcggccccgagagaggggc

SEQ ID NO: 65838 - DNA, 776 bp, Zea mays
  unsure (1)..(776): unsure at all n locations
  Clone ID: MRT4577_160046C.1
gagcctctcgccccgccgcgggtgatctctcctctagcggggagccttcccgcgttcccaagcggaggatcccgtcgcagctggtgcctcacctatccctctccttcgcatctccgccgtgctctctcgcgcaccccctcgaccctaggtttgctccttccctcccttcctcgccacccgattcgatctcgctccctccggcctccggctaggctgctccgtctctcctccgccatgttctcgcacggcgctgattccgcccacgacgccggggccgtcggcgtcagcagcggcggggctaccgtccccacccgcttcgtctggccctatggtgggaagagggtcttcgtctcaggctccttcaccaggttgagttgagttgctgctgcctatgtttcaattccccaccgattatcactgcctgctctagcagtatgcatgtacttatctactcgcgattcctcctgcttactcgtgttagcagatagttgctctcgcagttttgcctgtgcacaactagtttcatggttcattgcttcccaatcgaatgaatctggtcgtatatatgcattactcactttgtataggtctattattggtttagtcatcctaaggtttcttacgcatcagctgcatatatatagataggtttatatccctctgctctgctctttggtgcagtatatctgtgatctaatgtcatgcatgatacggaaatacagcttactcaaccaatgtagcttcccttaatcaggggctataccagntaattatcc

SEQ ID NO: 65839 - DNA, 299 bp, Zea mays
  Clone ID: MRT4577_160047C.1
ctcctttttttttaataaccagatcttccttactgcgggaagcatgtcagaaaagctcggacaatagaaaaacatgtacattggttcgactttttttccctaaaagcacaatgttctgcgaaaactattatcctatatatcaaaagatgcagtgtaactaatgctatctgtgagccttaggacgcctctataaaggggtggcaatttgagatgcactcaaaaaaatgataaggcctgccctctccaccaggttgggccatcttatagatcactcacctgttagcaaaaatgcccttaca

SEQ ID NO: 65840 - DNA, 162 bp, Zea mays
  Clone ID: MRT4577_160048C.1
gttatgcgtacgtccacgcgtaggatcattggtggttccatgcacggtgactaagagggctttgtaaacacatatgttgagggtttggcgatagtaccgttcaagaaagatattatgggacagattgagaccgtgcagaaccatgttgttggacatgattag

SEQ ID NO: 65841 - DNA, 395 bp, Zea mays
  Clone ID: MRT4577_160049C.1
cggacgcatgggcggacgcgtagggggatgggcatcgctctggcagactccgaccacaacggcatcgggagcttcgctggtaaccgtgtggatcactacgtcagatgcgccatgacaaatgccttcgctaaggcattgggtaacgggctcagacaggggaacaacatggacatccaacgcaacgacaacaccagcgagatcatggcagggatcgccaaggacactgagcacctggctcagttcgagctggagatgttcagcccggtgctgaagctgtggcacccgttcccgggcgcgtccgtggtgagcacgctccacatctgctacagcgtcttgctgaagcagtacatgtccaaggcgacgtacctcatgaacgagctcgtgcacgtgctgaa

SEQ ID NO: 65842 - DNA, 551 bp, Zea mays
  Clone ID: MRT4577_16004C.1
gcacatatgaggtaagcatccgaaaaaactgagtactgatcgacatggtcgacgccaccatggatctcacctcccgagcgctcgtcggcaagctcgacgaccagcaccagggacgtcttcggggaggggagcatgatcatgcgcaagactgctggcaagcccaagccagcggggtccggcagcccctgctacggggcctaccgcgtcctgtacctgggcccgctgtccggccagcccgcaactgacctgactcggcgagttccccggcgactacggctgggacaccaaggggctgttcgccgacccggagacttttgccaagaaccgctagctggaggtgatccactgccggtgggccatgctgggctcgctcggctgcgtgttcccggagctgctcgcccgcaacggactaaagtttggtgaggtcttgtggctcaaggacgggtcctatatcttgatcgagggcgggcttgactacctcgacaacccaagcctgatccacgcgcagagcattctggccatctgagcgtgccaggtggtgctcatgagcg

SEQ ID NO: 65843 - DNA, 326 bp, Zea mays
  Clone ID: MRT4577_160050C.1
tttctttttcatccgcagcagacgacccaaggggacggtttcttgcatgcaacaacacacctctcaaataatgccaacaacacggaaaacaccccacgcagcgaaccaacaaggagactggcaaacacctgattcaccgaactgaatcccgttgggggacaggcgcataccgccaccgggactgatcccaaacaggcccacaccgagcgacgcggccaacaccggcacaggctgaacaggcaatggaacgcaccctggaccctctcaaaaatcccagcgtacggacacgtgacacccacaccaaccgctacacatggcggcaccct

SEQ ID NO: 65844 - DNA, 105 bp, Zea mays
  Clone ID: MRT4577_160051C.1
gaagccgtcatgggactactttcccgacgatgtataccaagggatgattgaccacagcgtcgctggagacagcagacgtcatgaaggcgctatacaatgaggaca

SEQ ID NO: 65845 - DNA, 1677 bp, Zea mays
  Clone ID: MRT4577_160052C.1
cagcaaacttagcatcagcattggcataatcttcttgaacaatgtatgtctcgacgggattctgaatgggctatatatatagatgtggttctttcatctaatgatgcatccagcaaacttagcatcagcattggcccatcggtcttgaattctttattgccccctcggagtctgtggactgtttataattgttgttgtacttgtacttctttgccggaggaaaaagaccctggaaaagcagcattcaaagacctggatgcctttctctatcaatgggctcacctctctcagcacaggaagcagaacgtcttatggtactactctcacatcagggctgaatggaagctatggataccgttttgccttcagtgtgctccaagaagcaacaaacaatttcgacgagaactgggtcattggagttggaggctttggaaaggtctacaagggggtgatgagggatgagagcaaggttgcagtgaagcgtggaaacccaaagtctcagcaaggtctcaacgagttccgtacagagattgagctcctctcacgtctgcgccaccgccatttggtgtctctgattgggtactgtgatgaaaggaacgaaatgatcctggtctacgagtacatggagaaaggcactctcaagagccatctctatggctccgataacccctcgctcaattggaagcagaggctggaggtttgcatcggagcagcaagggggttgcactaccttcacactggatctgcgaaggccatcatccatcgtgatgtcaagtccgcaaacatcttgctcgacgagaacctcctcgccaaggtcgctgactttgggctatccaagactgggcctgagctcgaccaaactcatgtcagcactgcagtgaagggcagcttcgggtacctcgatcctgaatatttccggaggcagcagctgaccgagaagtcggatgtctactctttcggtgttgttttgcttgaggttctttgtgcaaggccagtgatcgaccccacgctgccgagggagatggtgaacctggccgagtgggggatgaagtggcagaagagaggagagctgcaccagatcatcgatcagaggatctcgggcacaatcaggccggactctctgaggaagtttggcgagaccgtggagaagtgcctggcagactacggcgtggagcggccgtcgatgggagacgtcctctggaacctggagtacgttctgcagcttcaggacgccgattcgacggtctcggatgtgaacagcatgaaccgtatcgtggaactcccgtcacaggtccagaacgtcggggccctcgagagcatcagcgtgacgatggcagaagccggagcgtcaaacgagcctgaccacgacctctccgatgtgtccatgagccgcgtcttctctcagctgatcaaggccgaggggaggtaaatgtgcgtgacgcagcctgtagggtgtgggtggtggggaggaagccttcaaagtcatctcttgctgaagtttacgtgagagagatcatgtgtgattttttttcttcttttcgtctacaaatgtactactgaagtgaactatggtttcgagttacagttttagccattgtgagcctgtgcggctacaaatttcgtagatagcacatttcgagtttgaatttgttactgggcgttgaataatattcccct

SEQ ID NO: 65846 - DNA, 407 bp, Zea mays
  unsure (1)..(407): unsure at all n locations
  Clone ID: MRT4577_160053C.1
ggtgtaactataataattctatgacaagctgggcccccctgcggaagctgggctgctatacaggggccgcccgggggggggggtcgatcccgatcccatcttgaaccagccctcgccagccggtgaaaatatcgtgccctcacgccgcctgcgcccgatctcttacagagaaccgtgggctcatctcctcccgggacgggcatgcaaagcacggctgccatcagtctcgctcgggcatgcaccgcgcggacactccctacctaacctagcccaccgtgcggtacctgttcatgcatcacgctcgnacaggccatcctagcgccccggaggctctggctatccacccgaaccagcctactgccggactcaccgatggaggaggagtaccgtagatgcaccgccgggcg

SEQ ID NO: 65847 - DNA, 312 bp, Zea mays
  unsure (1)..(312): unsure at all n locations
  Clone ID: MRT4577_160054C.1
acgctctagagcggccgccctgcggtcgcctttttantcagatatattggccgactgattcattcattggaaaatgaggcacgatattacaatctacgagaatcaggaagaaaaaaagaggaaaatatcacagattagtcaaccctcgcaaggtcagagtgcttttctctaagctcatgcactgactcctattgtgttaggtcctctctcgtgttgcttatctcagaccggactctcgttatagctagccactcttttggacagattctccatgacaaggatttggttgcatggatggacggacggacaaca

SEQ ID NO: 65848 - DNA, 382 bp, Zea mays
  Clone ID: MRT4577_160055C.1
tcggacgcgtgggcggacgcgtgggtttagccaaaatggaagcaacccacctagcatgacttccatgtctgcagatggggcagatgctgaaggaagttgtccagccctcttgtaggctccgtctcgggcccatcctctccctgattcgagacgagagacccgtccgctccaaatcgaatctaatcagtacttttggaggcgcctactggagaacggcagaggagaggagcgtggagcacgtccgcaacgcggagattagctactgggtcagcataagggccagcagggagatcgcctccatcggggacgacatgagctcgatctcgagcagcattgggtggtcagccaaatggatggtgaacaaatgtaaagggaagatgca

SEQ ID NO: 65849 - DNA, 442 bp, Zea mays
  Clone ID: MRT4577_160056C.1
tgcagtattgacctgcccgtatatcctctccctactttgttactgacagcgcaaacgtcacaaccgaatgtcaaaactgcatgctcccccttgtggacaatgaaacttaacaatgccagagatgttatcagtatcctggaggattctattagaattggatatccaagtctaatagcggaacacgacatagagcatgaagcacttgcaacccttgtgagttaatatgcttacaggagccttgaagatttctgccattaaggccactggacatgcatagagcaaaagccaatatcttgataacattgctactctaactggagccactgataggacaaaagaagctgaattatccttacacaaggcagactatccagttctacgaactgctgctaaggaggcacttaccaacggattcaacaactatagcgggacatcgcactac

SEQ ID NO: 65850 - DNA, 399 bp, Zea mays
  Clone ID: MRT4577_160057C.1
cacacgcatgccttgaaaatacacttttactctgatccaagcacacaaacagctcaggccgtgacacactattctgcgccaggcccatcttctctcctgccttacaacgccatggggagcaatctcaacccccaactctgcctgatgccctttatcttgggcctcttgtctggaggtgtgaccaccactccatggtctttggcccggccccagggatcctgctctctggagggggtagagatcaaaggcggctccttccgacttctacaagacggccatgcactggactacgtgtgtccttctagcttctacccgtaccctgtgcatacacgtacctgcagatctacggagtcctggagcaccctgaatactcaagaccaaaatactgtcaggaaggca

SEQ ID NO: 65851 - DNA, 291 bp, Zea mays
  Clone ID: MRT4577_160058C.1
ctgcgaggaatggagagggagggaccccttcttgatacctaccgagggcgacgtcacctggccaactgttgcctgctccgatgacgaggtgccggcgtggggagcgagacgaaccggagcagatggttgtctactaccggggaggccgacgcccggcgggtcctgatagagaggactgcgcccggttgaagagcgcgcgcgggagcccgagcgttgcagggctgtggacacaacaacagtccgaggcctagcagcccgatcgtcagacgggctcacacgccgcacggtgct

SEQ ID NO: 65852 - DNA, 258 bp, Zea mays
  Clone ID: MRT4577_160059C.1
ttcctttacttatgccccccctagcttgccggatgagctctctttaagctgggcgtggttactctagcttgcactttctggttccgagccaccaggcgacaggtccaggcacacccgacacaccgactcccactactcgattcctctccccagcaacttctgcgctgcaggactacccaggaacacctgcgactcctccatcaaggaccccttcattccctcaagagcctccaacctacatgttggccaaatggctcc

SEQ ID NO: 65853 - DNA, 293 bp, Zea mays
  Clone ID: MRT4577_16005C.1
cccactcgtccgcccactcgttcggactacttcgtgcaatggtcgactgcaaaagcgcgggtgcagagctacaatgatgaacagtgcgcgcagagtcagagccacctgtcagaggcgcaccggacactgaacagtgcctgtccggtgcggcaccggactgtcaggtgtcactagaagacaaagcctccaacggtcagaagctcccgaaccctaacggttgggtgatgtggctggcgcaccggactgtccggtgcgcccatcgacagcagcctgccccaacggtcctttggtgg

SEQ ID NO: 65854 - DNA, 331 bp, Zea mays
  unsure (1)..(331): unsure at all n locations
  Clone ID: MRT4577_160060C.1
tccttatccccatcccccgccaccaacggcggtcgttataaaatatcgtcggcctccaacaaccgccnccccnccaatccctggtctaggttctcgcctcttagcaaccacaacgcgcgcctaaattaattctcttgcccaagaagacaaaacagcggaacttgcccgcccgctccaaaaccatctcccccctgtggacttctgctacgcgtaccgctccacactccttcacacacgcccctactggacgtccatggacgagtacatcatcagcatctctgaccccctccaatgacactcctaaaacctagaaaggaacccccctcactac

SEQ ID NO: 65855 - DNA, 339 bp, Zea mays
  Clone ID: MRT4577_160061C.1
gcatgctccaagtcttccgtttcttccagcagcttctcccccttccccactatacttccaagcaaaggcgagaaccctagcctcacgagcaccgcgcagcggagatcccgaccatcaccgcgatgcaggccccgacgaacccccccgtcgacctcccgccgctggtggcgccgcccccgcgggtgaaggcgccgaccccgcgcccccctccgccggcttcgctccagcccgactccccgggcgacttcttcaccaacgctgccgctgttgttctactgggatccgcccaccgccgcatcgccatcgccgtcgatctgtccgacgagtccgcctacgccg

SEQ ID NO: 65856 - DNA, 476 bp, Zea mays
  Clone ID: MRT4577_160062C.1
aggctggctccaacttaggatatctgaatcgaggccggcttcaacttaatatatagaattggtgttgcccatacatagaccagcattacagcgtagtgcacattgcaaaaaaaggggctgatagattctccataggcaggaccaatttacacgaactttaacagcattagagactaattaacattccaatgttgagataaccatcatcccacataggaagcatgttttttggttggccaaaaataacttgtaacaatcaaacgacactccgtaacctatctcgtaggcaagagttccaaaacggtcacgcacagagaaacaactgagcacttgtagtacttgaccaggaagatctagttgtcctcggccacatcacccttggaaggaccgagtgtagactcagagttggtcttgcacctggcccataaaagcaactttagccttgtccaatgtgtccaccttgccattccagacct

SEQ ID NO: 65857 - DNA, 778 bp, Zea mays
  Clone ID: MRT4577_160063C.1
catttaccaccatataatcatcactcgcccccaggcttgtcgggagcgaagccaagccagtcttgtgttggaagaacgcctcaccatccatcagagcagctcggcttgcagatcgagagtgagggagtgagaggcaatggcgacttcgttccaggggacgaccaccaagtgcaacgcctgcgacaagacggtgtacctcgtcgacaagctcaccgccgacaaccgggtctaccacaaggcctgcttcaggtgccaccactgcaagggcaccctcaagctcgcgaattacaactcgttcgaaggagtgctctactgcaggcctcactttgaccagctcttcaagaggaccgggagcctcgacaagagcttcgaaggcactccaaaggttgtcaagccggaaaggaatgttgggaatgagaatgctattaaagtctcgagcgcatttgctggcaccagagagaaatgttttggatgcaccaagacagtctatccaattgagagggttactgtgaacaacaccatgtaccacaagagctgcttcaaatgctgccatggagggtgcaccatcagcccttcgaattacatcgcgcatgagggcaagctcttctgcaagcaccaccacacccagctgatcaaagagaagggcaatttcagccagctcgagaacgatcacgacaagacgtcacagagtgccgggtcagtggatgatgaagactcggagtattagtcagtccttgaggatatccagagatgaataacgagcccttttgcatttgca

SEQ ID NO: 65858 - DNA, 367 bp, Zea mays
  Clone ID: MRT4577_160064C.1
tcttaaatgatactttttttttctttctccctgggcgaaactttaaaggaggggcaaaaatttcagccccccgcccccttgagccctttgattttaaatggccctgggcacccccaaccttttaaatatttctttccaacctttattatttaaagggcccccagcccggttttttgaatccccaaaaccttttaaaaataccaaaagcccggggccctttcccttcccaccactctgtccaaaagtcccccccccccaaattaaaaagccagggagttctaaaaacccccgcttttttttttccgaaatcttttttatattctttataaaaaaaagagggggcccttaaacatttttattttttggg

SEQ ID NO: 65859 - DNA, 259 bp, Zea mays
  Clone ID: MRT4577_160065C.1
aagggggaatcggcgcctcaaacttttttccaaatttattcttttccggaaccgggggggcgggagcatccccatggctgacttgctttcaaaagcctaaccggggctggtttacatgacattggaggagataaaccctgcggaatattttggggcccaaaaagggcggaaaaaaatttttgttggggggcttagggttttccaggttgaaaacctgaacccggttttttttttaggaaattttccatttgacccaagg

SEQ ID NO: 65860 - DNA, 253 bp, Zea mays
  Clone ID: MRT4577_160066C.1
cccacgcgtccgtctactcgtccgcccactcgtacgaaaaaaataaaaaaaaaaaaaaaaaaaggaaaaaaaaaaaaaaaaaaaaaataaaacacactaataaaaaaaaaaaaaaaaaataataataaaaaaaaaaagtgggctccatttaaatgatccaagtttacttaccattacttgcaacgatataaatctactatatggtgacctaaatttaatatcatgaccctccttttaaaatattacaactcta

SEQ ID NO: 65861 - DNA, 662 bp, Zea mays
  Clone ID: MRT4577_160067C.1
cccgcacatcgccgtgatcctcaagacctcccctacgtcctcgaccacctctccggagcagcctcgccgccggtaagcccctccgcccttttctccgccgcgggtactgtttaattggggacaggaccgcaggttcgatttccagaaaccctagggggttttctgcagagccgtagactcaaatgaatagtgccccggtgacctatctataattcctttaagaactttcgctagggaccccagcgcaaaactgcttttctttaaaccatttcgaattaatctttatttattcagcagaagacatagaaaattcataacttgagaaatatttaaccaaaatttgtcaaaccaattttgttgaattttaaatattatggactatcaattaaaaatactgaaccccatgccttctgttctaatttttagagtttggaattaaacacagaaactgaccaaaccttgtttaattaaagaaaattagttatgcttctgtgctgaacttaagaaaatttgtagttgttcaaaccccaattagacactgtttaaaaatagtgggaaccccagtaataaaaatttaagtagggatatctattaaaagccatttttacccaaaacttaagaaaatcagaaaggcgttacaaattaatgaacagtgaatgaaa

SEQ ID NO: 65862 - DNA, 374 bp, Zea mays
  Clone ID: MRT4577_160068C.1
acccacgcgtcggggccatcgtatgtggacctgaagccattgacgtcgcactcagtgaccctgcggcctaaccgccataagtaacccaagtcgacaactaggatcctcagccaaaggcatctccggccgccgtatcagtaaggcggcaacgctgcccgctatgcagatagtcttgtctggctaccgtgtcaccgtagacacgtttgactgcctccccgacgacctcttactcgccgtgttagccggcatcgctgctctcgcccggtgccccgccgacctcgctgcagccgcactaccgtgcaagatgttccgagacctcgcggagcactccgccgtgctgtcgcgtacgtcggcagcggccgtctccgtgccct

SEQ ID NO: 65863 - DNA, 1493 bp, Zea mays
  Clone ID: MRT4577_160069C.1
ataatatatgtatatatagagatatgtagagattttcttttctatatatcgagatcgagatatcgaagtttatttatggcgaggtttaaaatcttgagaaaattaagaaaaataagaaaatctttcatattatctcttatcacttgcacaaagtataggtatttattattatataaataaatacatatacatatcatgtataataaaatacatgaacagagaattgacacacccaaaaattattatatatatcggatacacttgaagaggctaagttcataggtatgtaaacacgatctcgtacgactcaccaaaccaaagtccggaagttccattttttttgttaagaagagaacaaatatgtatcaattgttgaatcggatacaacaatgggccaaaaaggccaaaggggcaataagaactgctgttaaaaaaatgataaactttttttttatctttaggctattcacttttcacgtgctcagaatgttctgcagaattagggacttttttcttctattggctgatcttatgatgagaactttctccatttatgttttatttcccctaattctaattgggtggggtataaaggaatttgcgctcttcatatacccctatggctggatagtaattttcagtgatatacttcttatctgttttggtgagagattgaaacaatttttagcaggcatcttttggaaaaactttcgagttcaaaactttttcatttttcttaaaaagttttggacggatttgttgaaacgattttcaacaggtaccccttggaaatggggtacttgactattctacaaggattatagtggatttggaacaaactatgttggagttttatcaacaattttattctaaaaaaaagggttgggagtcgaatttatactgcagagtatcaaaattatactactgcctgtccaacaaaaaataaaaagcatatcctacatacctaactcctccaggttcagggttttccgtttccgaacactaggaaaagggaggattctagattttcgatcctagggttaaaaggaaggggatagatacccaatatgattcttaggaggaacgtttggtaatggttctctatgctcttttttatgtgttcttagttctattcatcttctttgattcttttaaacaagaatctaataaactagaattgagcggaaaagaagagaggaaattaggaaatggagaggatcgactaaccagcgattcgtatctgcttttctttttaagttattactctttgttgcttctctcaagcgatagacgaagtctatgaaaaattttggaaagtcatctcactccttccctatggctcgcacttcatgatacgtggaggaagaaaacatctttcgcaatttctttgttcaattctgaacaaaaaagaaaaggaagaaagggatttatggggactgtaccctggggggggccacgctagaggggaattttgggggtatgcatgacactgg

SEQ ID NO: 65864 - DNA, 360 bp, Zea mays
  Clone ID: MRT4577_16006C.1
attcggctcgagtgcagggagtacgggctcatttttttttacttcctagtcaccaaagacttgaaggggctgcccaagatcgaattctctgaccccatgcgagtgagcgacggcatctacgaggtcgatcagcacctgctgaacgtgatcataatcggcacgttcgacatggtctccacgctggtacctgtcatccctggcacggagacgggcaaggaggccctggacaagctagacaatgaggtggcagacccgaaggacgacaacgttgtcaagaagaaagaggtagactatgacccggtgcatcacgttaagaagaagggacagacccaacaacaggtgaataatgaagacagccct

SEQ ID NO: 65865 - DNA, 284 bp, Zea mays
  Clone ID: MRT4577_160070C.1
ttatttacgcaccaaactgaaccgcacgctgataatatgcaacaaaataccactacagggcctacagattagacatgcacctatctctcaacgcggctatactacgtgcacaacctggctcaacgcaagacaacatagggacgggcaccatgaagggtgcagctcgaggagcatgttaagacagatgctacggccattggaggcatacttatggccaggaaacccgtaccctagtgagagctttcacacgacttactccctaggagcgcaactggccaggtgag

SEQ ID NO: 65866 - DNA, 615 bp, Zea mays
  Clone ID: MRT4577_160071C.1
tgtactgatgtagatagctctaacaggaagtctaatttactgggaaagaagcccacgggaagttggtgctaagagaaaaagaggacatcacaatggagagcaaaatgatgatttatctgactcctcagtggaatgcatacctgggggggagatctctccagatgaaattgttgctgctattggtccaaagcatttctggaaagcaagaagagctattcagaagtaagtatatggtgcttgagtagctgttttgtagttttgtaccaagtatttgtagcattctttagacaatactattcatatgtttcactctgcttatttcctttttcttttagttttcagttaattgtcatatggaagacaaaagtatgaagatgataagtctgttgtttggttttcagtacctaactattctgttgtactattaaatataaactgtggataataatgaatgccttcaattttgattcttttaagtagaaaacatgggtagtttcatccaaaagaatagtatgttgcttgtaagactgatattgtggaatatttctttcttgcttcctggattgctgcataatgccttttttttatgttttacactctgtcctgttaaaatct

SEQ ID NO: 65867 - DNA, 826 bp, Zea mays
  unsure (1)..(826): unsure at all n locations
  Clone ID: MRT4577_160072C.1
cattgggtacctcgaggccggccggggcgtcgcgttccgttcctcgcactcgatctttttcagttgcagtgatactgtgtagtcttagtctacacccatggtgatggaggaggtagtaactgacgcgagccgagccgaggtggacacctcccggccgttccagtcggtccgggaggcagtggaggcgtttagcgagcggcggcaggccggtggcaacgggagcagcgcgtcgtcgtccagcgtcgagctcggcgcgcctgagccggcggcagcctcaccatcgtccgtgatgctggagtgcctgaagaagctggaggaagagctggcggaggccaagggcgagatggtggagctgaggcagaggcaggcccagatggaggtggccgtgtctagcctcagcgtgcagttcagcaagggtctggccgtctactccaggctcagcaagggcaaggaggtggccgtcgtcgtcggagaagaggacagtgcccgcgtccgcagcgaccggtgggacgagagccgggccgaggagtgggtggcgagcctcgagtacctgccgagcctgtcggaggcgctggcaatcaagatggtcgaggatgacctgggccacgacagcaaggcaagaagaagaagaagagcaagaacaaggcggccggtgccagcaggaccaagaaacacaagagcgggatctcactgcaattggtcggnggcatgttgtgcaccaagaaagccaagtccaggtgatggtctcagagatgcagccttttcagtttccctaccctttttttcnntgtganaatctgcctcgtgtataagctggcatctagtc

SEQ ID NO: 65868 - DNA, 461 bp, Zea mays
  unsure (1)..(461): unsure at all n locations
  Clone ID: MRT4577_160073C.1
aatcgtagcagccaaggcaaccgtgggcatgggcttcctgggtcctagcgtggtgacccttgcaggaacagcaacaggaggccaagccccgcaaaccgggggggggggggggggggtggcaagaggttgagcaanaaagaaataactggggggggggggggtttcgggtggcggtggactaaccgcgggacaagaaggggggatattagggcattccggagtggggggtggaatgtttgttttttggaatgggcttttcgttggcggggacctttttgggaagagggaggttgtcatgggtgcctttttctgttctgggcagtactgatgaactgtatgtttgatggagttgtagattgaaggaggatatgcataaggagtcgagattgttnttgtnggatttaccattttacgtatattagatataggatatagtgatttttttatttattattttgtta

SEQ ID NO: 65869 - DNA, 502 bp, Zea mays
  unsure (1)..(502): unsure at all n locations
  Clone ID: MRT4577_160074C.1
ggccttgcacaccaaatagatgctctcaatcccgctcggctagtccaaatgcccggggcacggaaccgcccaggggagggagcacacggcgggcgccaccctgcggaacaacctcggcaaggaggcctgggagaactactcggtctggtacgacagccccgagggggagctgcactggcgcactcatggagcaggagttctcgggcaacgacacgcacaggagccaccactagagcaccccgtgcctggaccgcnacgagcgtgacggctgcaagaagaagaagaagctcctccgagcccagcacgaccggtacaacaaccagatcctccacgagcagcacaacaagaagacgctcacgcagcgaggcccacccgacgccggcaactacgcggcggaccatgaccagccccacttgctgctgcagttggaccactacgaccacgactagcacgacacgacagacgccaagatgttcacccccgacggcgggaaagcgttcgt

SEQ ID NO: 65870 - DNA, 574 bp, Zea mays
  Clone ID: MRT4577_160075C.1
aaaggaaccaaacgggcccaaagttatattacaagattaggagttcaaaattaacttttaaggcatgccatcttcctaaaattgaaaagaccaagtatgtttctgtctccttttttctcgtttgcgattctatctgtgctacactgctgtttgttggtttttttaaaaaaaatatgtatctctacttaatctaaaatgtaaaaaaatgggcctacacctaaagcattgggccattcagtaaaactccagctccacatcccaatacgcctgacagaaacatcatgatctgtgttgtgtttcttgaatcttgatctctactttcatttacagccaaccttgatttcttgttcatcacacgcaggctgaatgtcatctggaactgaggcatctgactttgaggcatcaactcctttttggacatcggtctctgtcttcatctgctcatattgttctgtgatgtctgatggttccttagaactctgctgctcatgctgctcactatttgcaggatttggctgatctctggcgcctgatgttatcttgatcttatcagacactgttgcatcagtattct

SEQ ID NO: 65871 - DNA, 767 bp, Zea mays
  unsure (1)..(767): unsure at all n locations
  Clone ID: MRT4577_160076C.1
agggaaaggatgaaaaaaaaaaaaaaaaaagcggccgcttttttttttttttttttcggtctcatactaaaaccttagtctcagaactaaaggaaccaaacgggcccaaagttatattacaagattaggagttcanaattaacttttaaggcatgccatcttcctaaaattgaaaagaccaagtatgtttctgtctcattttttctcgtttgcgattctatctgtgctacactgctgtttgttggttttttttaaaaaaatatgtatctctacttaatctaaaatgtaaaaaaatgggcctacacctaaagcattgggccattcagtaaaactccagctccacatcccaatacgcctgacagaaacatcatgatctgtgttgtgtttcttgaatcttgatctctactttcatttacagccaaccttgatttcttgttcatcacacgcaggctgaatgtcatctggaactgaggcatctgactttgaggcatcaactcctttttggacatcggtctctgtcttcatctgctcatattgttctgtgatgtctaaatttccatacccacgatataagatcatggccagtttttttaagtgtgtgaaacattgggatcatatatcacctgatggttccttagaactctgctgctcatgctgctcactatttgcaggatttggctgatctctggcgcctgaagaaaacccccacttaatggtcacttttaagttttaacaaaataataggaatcagaaatcaggagtataaa

SEQ ID NO: 65872 - DNA, 391 bp, Zea mays
  Clone ID: MRT4577_160077C.1
gggacgcgtagcatagagcaataccttacgagctgttacgataacgatgaacacagacctgacctaggtcggatacgcgttgacgaagaccgtggattacgggcatttgtcacgctacaacgcatcattgacatgctacgtggccttgctcttctctttgaactaggcatcatattaagggcatgagtgttcattgacgacatgatgacttaccaagctatgactgagataatacctagagaacatgatgctcttaggagtctgaatccgatcacagacaccctggtacgcgacagatgacggccgccactctggcatgggaacggtgcaggcatgccgaatggcatcatgcactgatgctgtatgcgagctatgggtgtgaacaatttgg

SEQ ID NO: 65873 - DNA, 366 bp, Zea mays
  Clone ID: MRT4577_160078C.1
gctggacgcctgcaggaccgggccggatggcggggaaccaccgacccgggacagttttttaaattctgaggcgggacaaccatcggaagggcgcccaaacttgcagcgggaccccacagtcaggcgacggtttgcccaaaggaccttgcaggcactggtccagggagcatcaacggggcatgaagctctggagtgaggagggggtcgaccatctgggaagaggggccaaggtggaacaaggaatctggattgacccgccgatggcaggaccctacgccagactgagatgaaactccaggccacacctgtgggaccaaaaagagggggagggcagcaaaactgggctaagcatctggtggacatact

SEQ ID NO: 65874 - DNA, 260 bp, Zea mays
  Clone ID: MRT4577_160079C.1
cacgcttgtaccaaactatcgagagcatccaatctagatctacactatatgcaggtaacgtgtgatgtcttgatgattatcttaccttcattgaatctgtattgatagatgctgatctgcgatcgaagccaaaggatgtaaatgtgtacctaggattccatgtgaaggttaacgtgcctgatatgtaacctgtaaaaacgtactatcaaatatatacctaatcaggacaaatacctgaaaacaaacaaaaacatggcata

SEQ ID NO: 65875 - DNA, 583 bp, Zea mays
  Clone ID: MRT4577_16007C.1
tgggtacctcgaggccggccgggccgggatagcaagcgtagtctgtcatcacctgtgtctaggttgcgagcaagcagggagagagagaggaaagctagctatctagcatgcagagcgccagcaataaagtcgcagccgacgtgtaggtgctgctgcttctccacctgatgtgagctccgacgacgggccacctcctgcagaaggcgcatacctcccccgtggtacgcctgaacatcatggccaggtagattgtacatccagatggatccatcccctgcggggaatcctgtgtgttcataccatgcgctacgttagcctttggtggccgatggaaaaacaaagtcggcgtgcacgactgaataagccttcttcaagcgggacgagactaggtaatatctctgatctctgtctcagcatttgcgtgctaagaaccatgtcactaatttgcgcatgggagaaacagaaagaccgagtcgctcaacttattgtgcacggcgatgtactaataatatatcataatcgctataccttgaatgagtgcaagacacctaaaaaaaaatgaccctagggccctccagctcca

SEQ ID NO: 65876 - DNA, 600 bp, Zea mays
  Clone ID: MRT4577_160080C.1
agcacggctagccattgccgcactagccgtcccattgcttcctccccgccgcacagagcaatggagaggcagaggagctcctcctcctcctccccgtatcagtttcttagtcccaagagcctcctcctactgtccttcgcctcctcctccctcctcttctccttcctcttcgcgctcttcgccatccgccacggccgccccctcaacctcccattcaccacgcccaacacctcatactcattcgccatgcccaacacctcatcctcgttcgccatgcccaacacctccaccgcggcccttgcaccgttgccgcctcctgggaacggtgggggttccatgggcggcgcggtggcgctggcagcagaggccggttatgcggtccgtgggcacgggagtggagattcagtggcggatggagcccgccgcgcggttaccggagacctgtccgctcggggcgtgggcccgccaatggaggtggaaggagcggttactggaggaggaaatggtggagcaccggcgactggtaaggttttggaggcgcaagaggttgcaggagctgggaataactctactggaacctcggatttggctatgcatgct

SEQ ID NO: 65877 - DNA, 524 bp, Zea mays
  Clone ID: MRT4577_160081C.1
tccacgcgttttcccacgcgtccgagaatctttaacatattgtgaacactaccttctattttgttccttttactagcaattgaactcaatatgctgatcacttttgaatgttcaatgtttttcttcaacttagttatggcgtttggtgcaatataaaaatattattcaaatagctcacatgtttctcagtttctgctgccattgaatcaggtcttcctagtctgttccttttagtaaccattgaaatcagtgatctggtgtctcctgaaagctcaatgttttaattgctgtttggtaatgatgtgagtaatgcaatgcaaatagttgacattttcctattcccaactactgtggcactgtgatagcatgtactctttttgctagtatgtggttaccttttctttaagtataattcttgggattagtgtgcctcctgcaggaatattaacttaatttgcgggtacagatttgaacattattgccgccattgtttctatttgaactcattgatattggtgcaacat

SEQ ID NO: 65878 - DNA, 2800 bp, Zea mays
  Clone ID: MRT4577_160082C.1
gcacggcgcatgcctgcgcgagcgcagccggcagccgcgcccaaggtcctagcggcggcggctggcggcgcgccgctcgccgcagccccagccccagccgccgccgtgctgtccgttgggattggcggcggctagcgtcgtagccgacggacaaaggggaaagaatcgaacatgtgctgctgggccagatggcagtgggccggaggggagtgtttggttctttgaactcttctttcttcttctcttaacaaagcgagacagtttttatttaactctgtctgaccggagcagggcaaaccgccaaccgggaacacagtacaatggtgggggcctgaccacccagtcacccacccacggacccacccgactcttccccagtgattctcttctacgcttactaggctatactttgtgtgtttccattccacagaggaagggatggccgggagcagcgtccgcggcggcagcaactgcccaccgctgttcgtgacggagaaaccaacgcggatggcgaggtacgcttaccggctgttcgcgagcacggtcctcgcgggggttcttctggtatggctgtacagagcaacgcacgtgccgccgatgagcagcggcgcccggtggtgggcgtggcttgggctctccgcggcggagctctggttcggcttctactgggtgctgacgctgtccgtgcggtggagccccgtcttccgccgcgccttcccggaccagctcttgcgaaggtacaaggaagagcagcttcctggggtggacatatttgtgtgtacagcagaccccactgttgagccgccaatgcttgtcatctccactgtcctatctgttatggcttatgactacccgaaggagaagttgaacatatatttgtctgatgatgctggttccatcataacattgtatgctctatatgaagcatcagagtttgcaaagcactggcttccattttgcaataagtaccaagtggagcccaggtcaccagctgcctactttggtacagaagctagccctccagatgcatgtgaccgtaaagagtggttttctttgaaggagatgcacaaagatttggcagctcgagtgaattcagttgttaattcagggaagatccctgaagtttcaaaatgcaagcttatgggcttctccaggtggagcgagaatgcaagttttagagatcacccttcaatagttcagattttaattgatggaaacaaaaggaaagcaactgatgttgatggaaaagtgttgcccacactggtttatatggctcgtgagaagagacctcaagaacatcatcacttcaaagctggatcactgaatgctttgataagggtatcatcagtgataagcaacagcccagtcattatgaatgtggactgtgatatgtactccaacaattcagggtctatcagagatgcattgtgcttcttccaagacgaacagctaggtcaagatattgcttttgttcagtatcctcagaactttgaaaatgtggtgcaaaatgacatctatggcaatcccatcaacaccgtcaatgagttggaccatccttgcttggatggatggggtggaatgtgttactatggcacaggatgcttccatcggagagaggctctatgtgggcgaatatacagtccagactacaaggaagattggactagggtggcgaggaaaactgaagatgtcattgacttggaaggaatggctgagtcacttgtgacttgcacatatgagcacaacaccctttggggagtcgagaagggagttatatatggttgcccactggaggatgtcattacaggattgcagatccagtgccgtgggtggagatcagtttaccacaacccgccaagaaaggggtttttaggcatggcccctacctcactaggacagattctggttcagcacaagagatggacagaagggttcctccagatctccctctcaaagtacagcccgtttctgctaggtcacaggaagatcagcctgggccttcaaatgggttactccgtctgcgggttctgggctgctaacagcttccccaccctttactatgtcactatcccttcactttgcttcctcaatggcatctcattgttccctgagataaccagtccctggtttgtaccgtttgcatacgttgctgtggctgcatactcctgcagcttggtggagtccctgcaatgtggcgacactgctgtcgagtggtggaacgcgcaaaggatgtggcttttcagaagaatcacctcatacctcttggcagccatcgacacaatccgcagaatgcttggcgtcaccgagtcggggttcaccctgacggcgaaggtgaccgatccgcgggccctagagaggtacaagaaggggatgatggagtttgggtccttctccgtgatgtttgcgatcattacaaccgttgcactgcttaacctggcgtgcatgatgctcggggtggcaaaggttctgttgcgtaaaggagcggtgagtctgggagctatgtttgtgcaggccgttctatgtgcgctgatagtagcgatcaattttccagtgtatgaagcaatgttcgtccgcaaggacagtggcagattaccagcttctgtcagtgtcgtttcgctctgcattgtattaccattctgtatacttccaaccaagttgtagatgtggagctggtgaaagatgatatatatatttgaaacccgatggtgaaagttataagaactgtactgatataatatatttccaagagaattataaaaatctataacatgtccctttacaaaaaaaaaaaaaaaaaaaa

SEQ ID NO: 65879 - DNA, 223 bp, Zea mays
  unsure (1)..(223): unsure at all n locations
  Clone ID: MRT4577_160083C.1
ggctcgngggcgngggcntgcctctgtctgtagtgcgcattttgcttatgtttggagatcttctgctctcgcctggctttcatgcagctnggcctgggacgtgttgctgtcgctgcggacgtagctttttcttgcgcttctcgcggtgagcggggcgggtccgtccacggttcacttgctcctcgccgggtcgggcctggtgcttccgttctctgtttctcca

SEQ ID NO: 65880 - DNA, 295 bp, Zea mays
  unsure (1)..(295): unsure at all n locations
  Clone ID: MRT4577_160084C.1
tggcacgacgccgttcgcccatcgtgcgccgccgtctntcccggncgtcgtcatactgcaccggtccccactccggcctncattctcaacccgtcctcgtcgagcactttctttaccttgtgacataagacccgactngccatctnccttctnaagtnttccctgtcgtcttcttccgaccagatcctntncatttgccgngccgtggtactgaccctggagacacacatngaccgnattgcgctgtcgttaggcgnattaaagntnttgttcgntccggacaccattcgtgacc

SEQ ID NO: 65881 - DNA, 286 bp, Zea mays
  Clone ID: MRT4577_160085C.1
cgcgtgcagcgcgtccgtgatgccttggatgcgtacagcggccgccctactgtttttttttttttttttttaaggggtttgaggtcatgttgtcagatcagcactacaagttcatggtcttacaaaccgtttacaccaagctcgggccggcctagacagctgccaccggcgttactggcgctctacgccggctccgacgtgggcgtggacaaggatgcagacgtcgacttcaacaccgctcttttgaaaagcttcatcgtgcagatcctgttagggttgttcgaca

SEQ ID NO: 65882 - DNA, 677 bp, Zea mays
  Clone ID: MRT4577_160086C.1
cgccagctgagacgacccggcagtccggcacaccgcctctttccgtgtaggctggccgccgccaccagctcgaaaccatggaagtcgcggccgtggcgtgccgcgccgggctgcttgcgcgggcccgtccaagcagcagggcgcgtacgtgggccgttgccgtcggccccgccccgtccgccgctagaagaaggttgctcgtcgcgtcgctcggggtcggggagccactcccggcgcaatccctgggcgaggaggccgtggcgctggaggtgggtgaggaggaggatgatctgaactccattgtttccgtcgaaaacctgcctcccgctgctgctcacgttcctgaggcaaggaggacaacagtgcgcgtcaggttcgtgctgaggaagcagtgcgccttcggccaccagttcctcgtcgccggcgacgacgcggcgctcgggctttgggatccagctaaggcgatctccttggtttggtcagaaggccacgtctggacggcgaacacggatttgccggcgaacaggtcgatcgagttcaagttcttgctgcgagatgcctcggggcatgcgcattggcagcacggcgctaacagaactctgcgaattactactgaaaccccaaacaccgtagttgtccacgaagactgggatcacggcaacaaacagaaagtgtca

SEQ ID NO: 65883 - DNA, 236 bp, Zea mays
  Clone ID: MRT4577_160087C.1
tctcgctttgccaaaggcccacacgacatactttagctgctccaagctgacagtcacaaaagcttttgtcactctagtggcttttgatgctctattttcacccccttgcataaccttgcagctagctcaaatgactcggcaccccaggaaggtcatttagtttgaggatgcataattcttggtcagacttttctccaattgaccgttcaagaaaggcactttttgaaagtcaaggg

SEQ ID NO: 65884 - DNA, 833 bp, Zea mays
  unsure (1)..(833): unsure at all n locations
  Clone ID: MRT4577_160088C.1
ggcccgctcgaggcncggccggggccgggganttcccacacagaggttcgaaatccatccatccatccatcctaagcagcggaagaagaagaaaagaaaaggagaaaaatccacgcgaaagcacaagcacaggacagggaggaacaaccttgcgtgcgaggcgaggccgctccgattcgacagacgcgcagggaagatggacgccttctactcgacctcgtcggcggcggcgagcggctggggctacgactccctcaagaacttccgcgagatctcccccgccgtgcagtcccacctcaagctcgtttacctgaccctatgctttgccctggcctcatctgccgtgggtgcttacctgcacattgccctgaacatcggtgggatgctgacaatgctcgcgtgtgttggaaccatcgcctggatgttctctgtgccagtctatgaggagaggaagaggtttgggctgctgatgggtgcagccctcctggaaggggcttcggttggacctctgattgagcttgccatagactttgacccaagtatcctcgtgacagggtttgtcggaaccgccatcgccttcgggtgcttctctggcgccgccatcatcgccaagcgcagggagtacctgtacctcggtggtctgctctcctccggcctgtcgatcctgctctggctgcagtttgccacgtccatctttggccactcctctggcagcttcatgtttgaggtttactttggcctgttgatcttcctgggatacatggtgtacgacacgcaggagatcatcgagagggcgcaccacggcgacatggattacatcaagcacgcgctca

SEQ ID NO: 65885 - DNA, 353 bp, Zea mays
  Clone ID: MRT4577_160089C.1
gttttagaggcggattttaagaaagtggtaggcataagctggtacttgtgggtcttcgtggtgatatttctgttgctgaatgttaatggctggcacacatacttttggattgctttccttccccttattcactgagccatgccgacgtcttcatcccactgttgggaggcagcagccgtggcttctttaacagaggcatctcgtgaagccaacacagagccgctgctgaagctgaggagtgtgacacatgcattggagcagcaaaggcgcaggcggcgtgggcagccgctagctgaggtggccagagcggcgacgaccgtggcccagggtgctatagccgctgcagctaatct

SEQ ID NO: 65886 - DNA, 511 bp, Zea mays
  Clone ID: MRT4577_16008C.1
ggcgatttttctttttctgtggtcgtccttttttttttttttttttttttttttttttttttttttccccaaaaggaattatgccccccggaacctaaaaaggggccagaaaaccacccacctgggttgttttgatctggggggaaccatcaaaaaaaaaacctctttttttgaaaacaaacaactaagtgctggaagaccctccccttcaacccgggcggaaaccccttatttaaagtgaaagaaagggggtcccccaaacccaaacaaagggccaaggggggcgcatttctaaaggggctagaacatgtggggccgggccccatgaaaacccccgacgggaaaaatcccggaggctcaaaggaaaaccgccccctttttttttttcgggggggcccaacatagggggggggaaaaaccgccggcgcatcacatttttgtttaacaagaataaacagtttccaggagggtccttacctttggaccacggaaagtcggggggaggccccca

SEQ ID NO: 65887 - DNA, 291 bp, Zea mays
  unsure (1)..(291): unsure at all n locations
  Clone ID: MRT4577_160090C.1
aaaaaacaacattttggttggttgaattaaagggccagcccgtgccnncccanaaacagaagagagagaaggagagcaggcaccggggacaccgnggcgccancagagcaggcgacacaagcagaaagacagggaagaggcgcaccggagccgaaggggggacacgggggacagagagaacacnngcnanacacaccnagaacgcggagacggcccgaaagangacagcaaaaccgcccaaggaacacacacagaggganaaccanccaaccaggaaccgggcaacgagag

SEQ ID NO: 65888 - DNA, 387 bp, Zea mays
  Clone ID: MRT4577_160091C.1
gccataactggggcggggatatattccattcgcaaaggttcgtaaacaagggttgactacttgactcactgtatacaattggacagttctgccaaactcggacgacttgttaaccgagggcggatggggtgctaaaaaccaacaaatacaatccactacacaggctctgggtataattttctatacataatatatatgaaggacgcatagattggcgccaaagatgatgtcttccatgtaaaaaacgtatacacaagcactagctttgtacatcaatatcacccccatgactgatactcatcggcatcttttgcattgaaattctcgagaggctcatggcccgctttttcttccgtggcagctggttgtcatccgcgaaagagatga

SEQ ID NO: 65889 - DNA, 243 bp, Zea mays
  Clone ID: MRT4577_160092C.1
cgacccacgcgttcgctgccccttgcgttcccttgcgttggtttttctattcatcgctgacgattgaggctatgttgcctttaccctcggaatttcatttcgcggttggggcatggatgaagaggaactcacctccggcggctgcgactctgcgttgctggcgccggaaccgcgcgaacaggctgtcgaagaggggaggtcaccgcgagacgcggaggcgttcgaagactctgtggaagaggc

SEQ ID NO: 65890 - DNA, 179 bp, Zea mays
  Clone ID: MRT4577_160093C.1
gaaaacaaaccaccaccatcacactgaataacatggcaagtctgccagccatagaattacgcaaacagacagggcatgaataacggaccaaaaacgcatccagccatcataaggggcatggctgcgcaacgaggacttgaaaacagaactagactgaaacagatcttggcagcactagc

SEQ ID NO: 65891 - DNA, 360 bp, Zea mays
  Clone ID: MRT4577_160094C.1
aactacctcatgtctcactagaactagtgacaatttaaccttataatactaaacctatacctacttctctaattactatccaacaacatcttttcaaacatcctcaaaatctcaacactaaacctaaaatccaatataactctaaccactatcatcaccccataacaattcttcctcaatctcactgtccttccatttcaaactctcaactaaactccaacttcctttttaaccacgatcacctttacattccacaactacctcaacttctaatcgaaaaacatttccctaaaattaaaccaaaaattcctcttctaacccaatccttaaacctttttttactatctataaatttcacat

SEQ ID NO: 65892 - DNA, 375 bp, Zea mays
  Clone ID: MRT4577_160095C.1
ctccgcctcagcactgatccatccaagaggggcatcgacatgggggactcagaggaacagccactttgaatagaacggcggcgctgtggcgggcaagacctactccgaaatacgctggcaccgacacgagaaacagctttaattgtcataggaacatgccactagcaagggtgaggagtgatggctccgccaagactggcaacaatggacagtgcaaatgcgattgagcggccatagacataaacaatgggagaaagccagaagaaattggatgttaatcacacaactgagacgttccgtatgtaaaccgtactgctgatcaatgtgaacgatcatcagtgaggatggactttgtgagggttcttacttaaagat

SEQ ID NO: 65893 - DNA, 684 bp, Zea mays
  Clone ID: MRT4577_160096C.1
agcaaatgcaagctcatatgcatgcattgttgcttgcgaaaaaagccctttaaacagatggtccgatcctaaacgcaaacgcgctcgatctaacacaacaactccatccattacacacattgcatgtggggggagctggctttcgaacgatcacctcactctaccactactaccactaccaccctagagctagctgctgctgatgctacacctttaatcctttttcctggctgctgctgctggtgtctgtccatggcctagcttcttttaacgatgaaagatgcatatatgctgcctctctctctctcgctctctctctctgggaccatgagtgcatcctccgtcttaacacgatcccatgaacacgcacgcacgcaatgcaaagcaccccgtcttatatagtagcctatagctaatcctcctccgattatatcgtcctctggtcgctttgcacgctagtgcctgatgcgtgggcctagggtgaactccaggttcaactcgctggcacacgacgtcgtctccgacacgcaggaggagttcatgtccgagaggatctccaggctcttggactgcatcgtctgatccttgagagatcgagaatgcatgctcatgcgcccggtgttggactcgctgggaaagccggtccagtcttccctgtagcccacgcgtccgcccacgcgtccg

SEQ ID NO: 65894 - DNA, 280 bp, Zea mays
  unsure (1)..(280): unsure at all n locations
  Clone ID: MRT4577_160097C.1
cggacngtngnggttgatncagaacgccagcttntgctgatnnganngcnccacgccagntcaaaccacgacagcctccgcagcagncagcagcaagacccagnagatcagcacataatttggcatctccccgatcagcatccgcgcgttcaaagtcaaaccgccacccgatcgccaggcagccgaatttcagtcgccgtcgccggncagcgcattgnggtccaaggacgcggcgnngacnacgtggaaccgcttgtagggcccngtgtcnntgncgccc

SEQ ID NO: 65895 - DNA, 468 bp, Zea mays
  Clone ID: MRT4577_160098C.1
cggacacgacgcccctatcgctcgctgcttccggtgccgcgtgtcagcgtgcgcaaagctcaccctcatcgccgtcgccaccgccgccgccgctcaacccatcccgccggccccgccctgttccatggccgccaagtgggcccagaagaccgtcgtcatccctgcccagcgccgcggctgccacctcatcacccccaaggttttgagggagattgagggcgatctctccgggttcaagtgcggcttggcgcatctgttcctgcagcacacaagtgcttccctgaccatcaatgagaactatgactctgatgtgcaggctgacaccgaaacattccttaacaaaattgtcccagagggtcgatctgctccttggaagcatactatggaaggaccggatgacatgccagcacatattaaatcatcaatgtttggttgtgctctgacaattcctataactgatggacatct

SEQ ID NO: 65896 - DNA, 317 bp, Zea mays
  Clone ID: MRT4577_160099C.1
taaaaaaaaaaaaaaaaaaaaaaaaaaaaaaaaaaaaaaaaaaaaaaaaaaaaaaaaaaaaaaaaaaaaaaaaatttttaaaaataaaaaaaaaaaaaaaaggtttgtgcctgtggccgacctttgggcgggccccccctaggggggaattttggggatttccttcaaagggggggggggtcgagcttgcttttaagggggcccattcccccttttatgaggggggttccaattccctggccgggggtttaaaacaaaataaatggggaaaacctttgctttccccaactttagaaatttgggggaaatcccctttt

SEQ ID NO: 65897 - DNA, 640 bp, Zea mays
  Clone ID: MRT4577_16009C.1
tttttttttttttttttttttatatgaacatgtatatgtattgattaatcgacgattacacaactatctgacgtgattgagcaagagctatgcagaagatcaactctcaagaacaatcagaattaagaaaaacagaagaaaaaaagatactgtgacaatggctttaaaaaccaaattagtagcacggggcggcggttccttgttaattacgtccttctcctcggcatggacacggcgttgccgtcaaagagctcctcgatgatggcctccaggtcctcgccactgagcttgacgtatttctccgcctgcctccccgcagtgaagtgctgcgagaaccttcccaggaaggaccggtacgccggcacgatgacggcggcgatggatacgcggagctccgactgcagctgctcgtcgctcaccacccagctcccctgcgtccgctggatctcgtctatggcggcattgaattgcttgaaccggtccttgagcacctgcttctgcacgtggctcttcacggtgatcacgccatcgtcacgcgtgcggttgagcacgcggctccacgtctcccgctggtagttcttgtggtactgccgcaggtccgtcgaccgctttcgcgaccacgcctcgcctaccacggcgt

SEQ ID NO: 65898 - DNA, 415 bp, Zea mays
  Clone ID: MRT4577_1600C.1
catggccttcctggaccgcatcttcgccggcgatggggagggatggtccgcgtgcgccagtgcagcctcgtcgcgcgaggacggcggcgtccgccgggggctcgagcagctcatgcgacacttggccgcgtgcggcggcaggaccaggaagcccgccgcctgcccgcgctgcaggcgcgcgctccagctcctccggctccacgcctcagtctgcgaccgcgccggcggcgagccttgcaacgttcccttgtgcagcaacctcaaggccaagatgcaggaggaaggagtgggcaagacatggaagcttctggtgaagaaagtgaccagggctagggtgatgtccgccctggccagcagcagcagcagggaggtgccagaggttgtcaagaagtcttgggcgaaatatagcagcagt

SEQ ID NO: 65899 - DNA, 291 bp, Zea mays
  Clone ID: MRT4577_160100C.1
ccaggggaaaaagcccccttttcgccacccctggggtgcccaaataccattgtttaggcccaagggtataccccccccccgcaaaaacccctaggaattttctgactggtgtttatcaaaccctttccctttaaacatcctccaagggcgggtgttaaaaaccagacccccttttttggggtggccggccctttccaaagggcagggcccaggtcttagggggcccagggatcgggggggtcttgggggggtattcctttcttttttattaagggggggcccccttctggg

SEQ ID NO: 65900 - DNA, 510 bp, Zea mays
  Clone ID: MRT4577_160101C.1
cgagtacaagctttttttttttttttttttttttttttatcttttttttttttttttttttttttattttttttttgttttttttttttttttttttttttttttttttttttttttttttagttgattttcggttcttttttgggggtttttattggataccagcttgggtccaattttgggggaaccggggccctggcgggaagcggtgtgaaattgaaatccccccccaattccggccaaatacaaaccgggaacaaactggggaaacccgggggggcccaaacgggggggaaacgcccgggaatcacggggcgcccaccacccggttaaccgggggaaaacccggcgggccaggggcggcaaaaaaacggccaacccccccttagagggggggcgccttttcgccccctttccaactgaaaaaaaaggggcgccctttcctctggggctaggcccccccgagcaaaaaaaggcggcttaaaggggggccaacagttccccccaaaa

SEQ ID NO: 65901 - DNA, 487 bp, Zea mays
  Clone ID: MRT4577_160102C.1
cctcgaggccggccggggtgcctgtccgtcgccgctctcattctccctgcggaagcagcacctcttacagctcctacccaatgtcgccgacgaagaatgtggcgatgcctatcaagcgcgcgacgcgcactaaaacgtaccaccggcgtgcattctgcgccatctacgacatcaacggagtcgtcttcccgaaggctgacaacgccgccgacgacgtggaaaccaagctgtaccccgccgacgacccaaatcctcgcggtcccagcagcctcaagcctaatcccaccaagatcaagctgagcatcacgcgtgacacagggctgatcctcctcactgggcgcttcatggatgatagatagctgtgtcctcgatgaacacgactccggcgctgactcctcattctctgatacattccagagctatgaagtactaaccgccgcattgacagatctatgccaaaggtacgtctagcaaaggtgacatccca

SEQ ID NO: 65902 - DNA, 378 bp, Zea mays
  unsure (1)..(378): unsure at all n locations
  Clone ID: MRT4577_160103C.1
ttttatttttgggacgacggcttactagtcggcggccgccctnnnnnggtgttttttttaagaaggaccggggtttccccccgacaacaaannnaatncaagccaaaacccctgagagggtcattgccaactcacgatgtgagggaacaaccgaacaagggctgacatggcacaggatgatgttcaagagcacccataagaaaattcaggcacgaaaataaaggaccgacaagcagctccgggggctaacatgaagccccaacataagctctgcatgaaacaggcagcttacaatacaaaaatttcacaccagcgagaggtagagaacctcatcacggccttgaccatggcacggcactggtggtctattgacacgga

SEQ ID NO: 65903 - DNA, 193 bp, Zea mays
  Clone ID: MRT4577_160104C.1
gcaggtacctcgcgcccgagacgcagccccgcgccaggagtaagtttgctcttttatccatattatcgatatggcgagggaggagaatgtctacatggccaagctggctgagcatgccctaaggtttgaagaggtggttgagtatatggatgaggcggcttcaacttgcaaatttgcgagacgcttacagatt

SEQ ID NO: 65904 - DNA, 270 bp, Zea mays
  Clone ID: MRT4577_160105C.1
accatggctcaccgtactcttgtgtaccttttgatggccaagaatctcactgtaggtgtgctatactatgggtaaggtgttatttactagtggaaagcatgaggaaaagtttctgaatctaaaaaaaaaaaaaaaaaaaaaaaaaaaaaaaaaaaaaaaaaaaaaaaaaaaaaaaaaataaaaaaaaaatacaaaaatacaaaatcatagctcggtcggtatacttcaaaaggaacctagcttacctgattctacacacttatataataa

SEQ ID NO: 65905 - DNA, 448 bp, Zea mays
  unsure (1)..(448): unsure at all n locations
  Clone ID: MRT4577_160106C.1
atatgttcaaacggggcaacgatggatgaccacacgttcgttcgacacgacgggttcgcgatcctcagggancagacccccgcgcggtgggcggcgcgancctcactgcgcagcgccgccctgcgcgggagtggaggcggcggtgccggagtccttcccagcgtcgtcagcggcgctggcggccttcttgacgccggccggggcggtggcggggtcgacgccgggccagtcgcggcaggcgcagtgctggccctccgagatctgcgcgtgcaccgacgcgacgtggcggccgcacccggcccacgtggtcttgccgcaggtgccgcacctcacctggtagcacatggcgtccgacggtggcttcgctgagagactctcggctctgcctctgctcctgatggggtccggtccagatgggaagctcgatgggttgtgggggtcaggtgct

SEQ ID NO: 65906 - DNA, 1945 bp, Zea mays
  Clone ID: MRT4577_160107C.1
ccgttccgccatgcgcgcaccgaggcacggcagcatgcgcgcccacgtcggccctggcctttcgcggcgctggtgctggccggcgacgccctgcacccggcgctggccggcggctgcgggcttcgactacaaggaatgcccctcagcaagaccatcatattcctggaggcgcagcgctccgggaagcctgccgcgcagcaatcgcgtcaagtggcgcggcgactccgggctcgacgacggcaagctcgccaatgtggatctcaccggcggatactacgacgccggcgacaacgtcaagtacgggctcccgctcgcgtgtacggtgacgacgctggcgtggacggcgctggcgttcaagcccgagctggagtcgaccaaggagctgaagcacgtgcaccaggccatcaagtggggcaccgactacctgctgaaatgcgccgccaggaagaacaagctgtgggtgcaggtcggcgatcccaacctggaccaccagtgctgggtgcggccggagaacatgaaggcgccgcgcacgctgtacgagatcgactcgaagacgcccgggacggagatcgccgccgagacgtcggccgcgttcgccgcctcgtccatggtgttccgcgacgacaagaagtactcgcgcaagctgctgaacaaggcgaagctgctgttcacgttcgccaagagccacctgggcagctacgacggcgagtgccccttctactgctcctactcgggctacaacgacgagctgctgtgggccgcgacctggctgtacctggcgacgaggcggcaggtgtacgcggacttcatcgcccacgaggccatctcgtcgagcgtggccgagttcagctgggacctcaagttccccggcgcgcaggtgctgctggccgagttcaacatgacctcggcgggcggcgcgcagaacttcaagtcgcaggcggacaacttcgtgtgcgcggtgctgccggacacggcgttccaccaggtgttcatcaccccgggcggcgtgatccacctccgcgacggcgccaactcgcagtacgtgaccagcacggcgttcctgctggtggtgtacgcggacctgctgctgcggacggggcagacggtgctgtgcgggaaccagccgctgcccccggcccggttgcacgagttcgcgcggcagcagatggactacctgctgggcgccaacccgcggcacagctcctacgtcgtgggcttcggcgccaacccgcccacgcagccgcaccaccgcggcgcatccacccccgtgctgccccccggcacggacgtcaactgcggcctcagcttcggggactggatggcgcccgacaagcccaaccccaacgagctcaccggcgccatcgtcggcgggcccgacaagaacgacggcttcgtggacaagcgcggcaactcctcctacaccgagccctgcacctacatcaactccctcgccatcggcccgctcgccgcgctcgccgtccgaggcgtgcagctcgtcgccacgcagtgatttatctccatggaccatggcccatggccatgcgtgtgtgtcccgcgcgctgtttcgtttcttccctgacatgacatgatttctactccgttactgatgattcattgattccggccgcccccgcattgttcattatattaggtcgacgtctgcgggcgcgtgcggggggtccatccaaatctctcactctgctattgtttctgtacgtacgtgtacgtccaagattataatgatactcataataatctcgtcgcaaatttcgcgtgaaaaaaaaaaaaaaaaaagaaaaaaaaaaaaaaaaaaaaaaaaaaaaaaaaaaaaaaaaaaaaaaaaaaaagggcggcgctcgcgatctaactatgggggggtctttctataggatccaagttttttttccccgggctttgggaagtcatattttttttattgggcccc

SEQ ID NO: 65907 - DNA, 251 bp, Zea mays
  Clone ID: MRT4577_160108C.1
gtcaggcatccttcatccattgctcgtgtttaaaccaacatgtgtatgcattagggtatgggagttatcaatccaggtctgggttcaacctgactaacatctcattacagcttactgttgaaacaaacatctgtatgtaatattcattcctcaattgcatgatgattgcctaggatctctgaaacttatatccattacatcatgagatacctctttctctgtgctatcactatataactacttattcctca

SEQ ID NO: 65908 - DNA, 241 bp, Zea mays
  Clone ID: MRT4577_160109C.1
gggcgcttcgtcatgggagggccccaaggagacacccgcctttccggcccgaagacataattttacgtccagtggctggggagcccacagcaagtggcgccttctgatggcgaggacccctccaaggtggaccgtaggggcgccctacgctgggcaggcaggccggcaggagcatcgcgggcagcggcctctaccgccgatgcctcgtgcaggtgctgtacggcattggcttgccggagcc

SEQ ID NO: 65909 - DNA, 383 bp, Zea mays
  Clone ID: MRT4577_16010C.1
ataacagaacctagctatgttgctgcttagttgtgtcattcaggaaagagcaacctctctattgcctacattaccaacacataagataagcagctgagcatgtagctggacagttgcttgtgttcaacggtcttgattcaaagactagacccaagcatcatgctcttttggaatgctcatgggttcttagatgtttggattcttttataatgggtatacttatcaatatgcgtggaagaaaaagtgtacttactaggtactgctgtgtattgctccttggttctcatgtatgtgattccgcacttgttgccacttaaaaatcctaactttgacgagttgcatgtatttttgattagctatgtaaaacaaggctgcaattattg

SEQ ID NO: 65910 - DNA, 398 bp, Zea mays
  Clone ID: MRT4577_160110C.1
gccgaaattttatatatggacgtcggaagtgtagtacagtagctaaaaaaaaaaaaaaaaaaaaaaaaaaaaaaaaaaaaaaaaaaaaaaaaaaaaaaaaaaaaaaaaaaaaaaaaaaaaaaaaaaaaaaaaaaaaaaaaaaaaaaaaaaaaaaaaaaaaaaaaaggtttttccttcccgggggggcctttaaaagggggaatttttgaaaatttcaataaaattggcggggggtttaagatttattttaaggggccaatttcgccttttagggggtggtataaaaattaattggccgggttttaaaaacttgggaattggaaaaaccttgggtttcccaaatttaatggctttgaaaaaaatcccctttttccaagttgggtaaaaagcaaaaaggc

SEQ ID NO: 65911 - DNA, 421 bp, Zea mays
  Clone ID: MRT4577_160111C.1
cccacgcgtccggaagaacacagaataattaaagaatcgcacgggtagacagaattaaagaaccaagacctcatcggccggaactcaacctgcaaatgactcttcacatgcgctagcgtcagatccttcacgtccatcagctccagcaccgacttgggcgtcgcccctgttgtgcgcgcgcagagaggccggccgccggccgtggagagggagattaatcacatcccgcatgaaatgatccaagcagatctctgtgaactgcatggttttttttggggggagttgtggagctgaggatggaatggatgcaaagcggaggaattaacgactcacgctcgtggccgccgaggagctcgacggcgtggacgaaacgcgcctgcaggctgctcgtccaccggatccgcggcgcgcgcatgccgcg

SEQ ID NO: 65912 - DNA, 139 bp, Zea mays
  unsure (1)..(139): unsure at all n locations
  Clone ID: MRT4577_160112C.1
cggaaannnngggaagacccacgcgtacgcaaccgggatgatactgctggggggtgatagtactggacacacgactattgcggcggcccatgtcctgccagggtcgtatctgaactcccaagacaccgacgacggcaga

SEQ ID NO: 65913 - DNA, 1461 bp, Zea mays
  Clone ID: MRT4577_160113C.1
gaccgtggaagcaaagaggcgcaagcgagcacggaacaaatacaccttcaggtggcctccctccgactgccgactgaatcttccacctcgcttcgcgcctccggctccgcgccgggcccgcataatctgtgctcgggatcgcctcttcccgcggcaaatgggggccgactccgaggacgccgtcaagcagctcagcctcctcatggagcaagtggaggccccgctgaagagatcgtttcagaatatgcaccagggctatcctaaagaaacactggtgcgtttccttaaggctagagagtggaatgtagcaaaggctcataaaatgattgtagaatgtttgaattggaggattcaaaatgaaattgatagtgtgctagagaggcctatagtcccagtagatttatacaggtcaatacgtgattcacaacttattggcctgtcaggatacacaaaggagggtctcccaatttttggcattggtgttggacatagcacatatgacaaagcttcggtccactactatgtgcaatctcatatccagattaacgagtaccgtgatcgtataattttgcctaggctgacacaacagtttgggcggcctgttaccagctgtataaaagtgctggatatgactggtttgaagctatcagcactaagccaaataaagatgttgacttccatatcgacagttgatgatctaaattaccctgaaaagacagagacctattatgtagtcaacgttccatacatattttctgcttgttggaaggttgtgaagcccttattgcaggagaggacaaaaaagaaggtcaaagttttgactggctgcgggagagatgaacttctgaagatcatggactactcatcactcccccatttctgccgccgggaggcctccggatcatcgaagcattcgtctaccgacgtcgacaactgcttctcccttgaccatccattccacaaagaactgtacggtcacatcagagagcaagcgtcgcgcagggagctcatcaagatgggatcgttgcatgtcagcatccccgagccggacccagacgacgcgaagatcgtcgaggtcatccaggccgagttccaaaagattggcgagcaggacgagtccaccaacagccacaaagattgacatcatgaccctctgatgttcatttctgtatttcggttaacagtccccccggttgcctggggatttatagcagcaaaagccttgcagtcgcatggtgcaagtgcaagcttgagttcatgtagctggagaggctgagagataaaccagccagtgtatattagatgcacaagaagcgataatcacctttttgttagtatataaccaacacatatatgatatatttagctgtttattaaaagaggaagtccatggaagcgcctttggcaaagtttttcgccctattccatgcaagtgtttgtggtcttctggatgataaattc

SEQ ID NO: 65914 - DNA, 462 bp, Zea mays
  Clone ID: MRT4577_160114C.1
acgcgcccgccccgtcgcgcttcgcgcctccagttccgcaccgggactgccgaatctgtgctcgggatcgtctcttccagcggcaatgggggccgattctgaggacgccgtcaagcagctcagcctcctcatggagcaagtggaggccccgctgaagagatcatttcagcctggagtatgaaggcacatatccatctcaactaggttttcatcaccgcttaagagatgttctaaaggccatatgttttacatgtgtgctaaatcagttccattcattgctttggcgtgaatggaaatcttcagaaaccaacaagaatatgcaccagggctatcccaaagaaacacttgtgcgtttccttaaggctagagagtggaacgtaccaaaggctcataaaatgatctgtgattctttgaattggaggattgaaaatgaaattgatagtgtgctagagagacctatag

SEQ ID NO: 65915 - DNA, 309 bp, Zea mays
  Clone ID: MRT4577_160115C.1
attttatttgattgtgtttcttcttttattttttttatttcttttttttttttttttatattaatacatttttattaaaaatttattatattttttttttactgactttaacttatttgtttatcctttttcaaaagggggggacataaatcgtaaaaaacctactgagggggataaaggtggtgacaaaaaaattttttaatgggaaaaacccctaatggctttgcgcggggcgggagtattcgtggaggagtgagggcgccagcccacaatatttatggggattggggcctgctgtaaaaaatagcc

SEQ ID NO: 65916 - DNA, 2465 bp, Zea mays
  Clone ID: MRT4577_160116C.1
cattgggaccctcgaggccggccgggcgactgattctacctcgcttcgcgcctccagttccgcaccgggactgccgaatctgtgctcgggatcgtctcttccagcggcaatgggggccgattctgagaacgccgtcaagcagctcagcctcctcatggagcaagtggaggccccgctgaagagatcatttcagacccagtgctggagtcttccacatgagcgtggtttgaggaagggatgaaccgaggcctgccttcccctgcaaatgctgagagactacctcaagccctcgaacccatgatccggtgactcagtgagacaactctcaccactgcaccagaatatgcaccagggctatcccaaagaaacactggtgcgtttccttaaggctagagagtggaacgtaccaaaggctcataaaatgattgttgattctttggattggaggattgaaaatgaaattgatagtgtgctagagagacctatagtcccagtagatttatacagatcaatacgtgattcacaacttattggcctgtcaggatacacaaaggagggtctcccagtttttggcattggtgttggacatagcacatatgacaaagcttcggttcactactatgtgcaatctcacatccagattaatgagtaccgtgatcgtataattttgcctaggctgacacaacagtttgagcggcctgttgtcaggtgcataaaagttctggatatgactggtttgaagctatcagcactgagccaaatacagatgttgacttccatatcgacagttgatgatctaaattaccctgaaaagacagagacctattatgtagtcaacgttccatacatattttctgcttgttcgggggggctctcggtcaccgcccaagcccgcaccccacgtcgccaaccacttctccaccaacaagccactgctgacagtccctcgaggccggccgggagtcagagcgctgggcgcctgcgcgatcgaacggaggaaggaagaccgtggaagcaaagaggcgcaagcgagcacggcacacagaacaaatacacctcaggtggccttcctaagaccgccgactgaatctacctcgcttcgcgcctccggttccgcaccgggaccgccgaatctgtgctcgggatcgtctcttcccgcggcaaatgggggccgattctgaggacgccgtcaagcagctcagcctcctcatggagcaagtggaggccccgctgaagagatcatttcagaatatgcaccagggctatcccaaagaaacactggtgcgtttccttaaggctagagagtggaacgtaccaaaggctcataaaatgattgttgattctttggattggaggattgaaaatgaaattgatagtgtgctagagaggcctatagtcccagtagatttatacaggtcaatacgtgattcacaacttattggcctgtcaggatacacaaaggagggtctcccaatttttggcattggtgttggacatagcacatatgacaaagcttcggtccactactatgtgcaatctcatatccagattaacgagtaccgtgatcgtataattttgcctaggctgacacaacagtttgggcggcctgttaccagctgcataaaagtgctggatatgactggtttgaagctatcagcactaagccaaataaagatgttgacttccatatcgacagttgatgatctaaattaccctgaaaagacagagacctattatgttgtcaacgttccatacatattttctgcttgttggaaggttgtgaagcccttattgcaggagaggacaaaaaagaaggtcaaagttttgactggctgcgggagagatgaactgctgaagatcatggactactcatcacttccccatttctgccgccgggagggctctggatcatcaaagcattcgtctgctgatgttgacgattgctactcccttgaccatccattccacaaagaactatacgaccatatcaaagagcaagcgtcgcgtagggagctcatcaagatgggatcgttgcacgtgagcattcctgagccagacccagaggacgccaagatcgttgaggtcatccaggctgagttccagaagatcggcgagcaggatgagtccaccaccggccacaaggattagcatgccccaaggacggtcatgtgcggagcgccgccggtgacctcccatgaagttgatcgctgctgtccgtttctattttttttggttgacagtccccagttgcgtggggaatatagcagcaagctcatgcatttgcatgatggagtttatgtagttggaggagaggctgagagataaacgagccagtgtatattagatgcacatgaagccataatcgccttttttgttagtatataaccaacacatatttagctgtatattaaagaagccaaaatccatggaatcgcctttggcacagtttttcgccgttttcaaaa

SEQ ID NO: 65917 - DNA, 185 bp, Zea mays
  Clone ID: MRT4577_160117C.1
gccgccctgccgtccctatatctaaagtcgtctactacgacccagtgaaaagtccacagggtttggttagaggaaggaaagggctgcttcaccagccacaactacaattcgccggccagccgcgtgacactttggcgctccacagggatcgcggggctccgagacgccacattgaaggaagggcc

SEQ ID NO: 65918 - DNA, 348 bp, Zea mays
  Clone ID: MRT4577_160118C.1
gaaacccggacgacccacgcgtacggaattcatgaagtcgtgatcgattactattgtcgatgccacccttgtttcccaggcgagaggcatcttcagcttacgcttcttcagtttggaggcagagccgtcggtggttgctgcgatgaacgtgatttggttctggaagatacttacggggatggagaaaacctattctaggaggaagctcagcgataatgggataacacattataagggattaaggaaggatgctattttacttcgcacacattatcatcactgttttacgtattcgcacttaccgaatggtactcatactcactcatattctacacagatgtaatttct

SEQ ID NO: 65919 - DNA, 392 bp, Zea mays
  Clone ID: MRT4577_160119C.1
ggttggggtttttttttttttttttttttttttttaaccaaaacccaagtttcccttggaaaaaaaattaccaaggttccatgggcaaaaaatccattcatccttcccaacacaacaacaaaaaaatttaaaaaaaccaacgttgtccaaaaaaaacttcactccaaacccatgggccctggcacggcccccataaaaaatgggtgaacaggaacattaccaagccccgggaaaagtcccactgctcatttattggccccaaaaaaatgggttacccaaaacccaaacaaaactttttaaaaaccatgtttttgcccccatccacccccttaaaaggccttttcacccgaacctttgggaaacccatttcaaccaagttttggacctttttt

SEQ ID NO: 65920 - DNA, 510 bp, Zea mays
  unsure (1)..(510): unsure at all n locations
  Clone ID: MRT4577_16011C.1
gggataataatcnantaaaccaagattccagggcancacatgagaaccagtgcacttggcctaaaccttgacgagttccactcacaggaagttgaagttcagaaacaaagtaacggagcaaactggactactggagagcagaacaaggccgaaacaacaggaatggccagatgatgttataatattaggccagttcggaagtgagtcaaagttagtacctctatatatttctacattcacaggaagttcagagataaatctgctagcacatgtggcatttgctgagatttaagacttcattcgctagacaaagaggtagcaacctggaacagatatgattccttgcttgccggagcttaagtcaagaggtttgccaacacaagattacaagcagatggtttccaaagtcccagggctccacacaatcgagctttcttcagaaaatttctgcatcgcaaggaggagcctgtcacttcctaagaaaggcgaccgccatcccggccgggtgcg

SEQ ID NO: 65921 - DNA, 261 bp, Zea mays
  unsure (1)..(261): unsure at all n locations
  Clone ID: MRT4577_160120C.1
gagggagagaaaaacccaggccccccgatctcctcctcccactccgatcgcccgaccgatcgccgagcttccctgttccctccccggccccgcgacgccgngacgccatggagccgccgcacgccgagcaggccgtcttctctgtagcagcaggaggagagggcggcacctcaagcccgggcaccggcctcnaagggccggtgcttangcggnggctggacngcggtggggaaggggaggacggngagctgggggcggggc

SEQ ID NO: 65922 - DNA, 668 bp, Zea mays
  unsure (1)..(668): unsure at all n locations
  Clone ID: MRT4577_160121C.1
gggaacactgtgctctggctctacgcagggctccgcgggcccaatgattcaagaatcacgcgcacgcacgggacgaggaagagaagtgcattcgatccactatgatactccttccatcgcccaacaacagcgatgcnacnagtaacgcagtcatagacctgtgccttcgcgtaatgtatcatccacgacgtgctatggagcacacaatctttgtcatattatcactgcaggaaggatgaggccaagaattcacaaaacactatggaataacacaaccactggacgcttctaaggaactgtcctgcttgacattgcagcaactgaactgaatgctgaggaccagctctaccttgatgaagaaggaatgtccctagatggcagcactgattccatgcgagcccaaagagaaactgcctctgcagctaactgggaggcacgcatgaacgacaaagactattccattggacaacccctctcaacgctgggtatatctctcatgaagcgcctccgaaaccttgctctgtgcgcaaacttgcagtcccagttctgcatcggaaggaggtcgcaagaggcagtgccacttggcctgaacaacaagctgagcctgcagatcactgtcaggacaagcacctcagagcaggtccagatcgcacttctaggtctcgtac

SEQ ID NO: 65923 - DNA, 745 bp, Zea mays
  Clone ID: MRT4577_160122C.1
ttgggacctcgaggcggccgggattcttcttcctgaccctcacaagtcacagccgccagcgacatgacttgcgccacccggagccccggcttcctccgcgaggccgagctccgcctcctccgctgcactctcccctcgctgccctcttccccgcccccacccgcttcccctccccctgcgcatccgctcggtcccgccgcggcctctgcgatcgctgccgttgaggccggcgactacgaggctgcgctcgccaccgccgcgccgcacttctttccggcattcgccccctctaggcctcctggctcagccgcgcagttctacgccgacctaggtgccgcagctcgggcgttcctgctggtcgatggggacggggcagcggcgggagaggggttcgattgcaggtgcgcagttgtgctttccgctgcagtggccgcgctgctcgcgttcacgcaacagaacgtgactgggcctccaaggaagtttcccacttttcctttttcaatgtcatcttttgatgaaagatgctatagtaatcttggagacacatgggatgcatgggcttctgacaatttagcttcttttggctctcatgttcatgggaaattttcactcttgcagttcattgtatttgcaaggcttttgtttaacagcgtacagagtctggatctctctgattgctggagcgtgtcatggtgggtggttaaatatcaatgttgcagcagaacatcttggaggagttatcatc

SEQ ID NO: 65924 - DNA, 737 bp, Zea mays
  unsure (1)..(737): unsure at all n locations
  Clone ID: MRT4577_160123C.1
wmthmmmaaaacacctmmaaatttaaataaaawwtaaaaaawaaaattwtaamyttmtaaaaaataaaaaamwaamaaaahaataawamycttmcaatytyyttttctyctttttatytttthcthamcaaaaaaaaaaaaamtmaaaawtttyactwtyycaawtttytmttttwhamwtmwhaaamacaamawacatctmtaamcamwacacthtatwawccccaytwwcytacawatcccactaatmacccaaaaaactcacmatacatcacwaaatwtcwcaaaaymtctcatccaaycmmaaccccycmaaawctmtawaymacymccaaccwacmacacccaamccccccamaaccccaaamamccwmamaaamacamactmacccaccacracccacccccacccaccaacccccmcaaacccmcccmtacmcaccccatacccaatcrcacccmgaymccwcacgcaaacscccccmaaccccccyccsccaccmcccrmmcaamcmaamammmamacccnccccmcccccmcccccccccacccccccccccccccccccmcccmcmccccmccccccccccccccccccccccctccccccgcccccccccgcccccccccmcccccmyccvcacacccscccgwacgcccccskggccgsccgckaccycycsmsaragmbhgmbagagagagagagagagagagagagagagagagagagagagc

SEQ ID NO: 65925 - DNA, 235 bp, Zea mays
  Clone ID: MRT4577_160124C.1
ggctggacccacccatgcgtccttgcgtgcggccaagtcctatgatccatgtggacccacctcataagttgttcttgtgtcatttactctctaatggttcaagtgaatgcatccagaccagcataccatgccatgccaattgacagaaaaatcatcaaaacaacgagccgagtccaaaattcaactcaaggaactcattaagtcagctgttaaaagtatgttaagggcagctctc

SEQ ID NO: 65926 - DNA, 658 bp, Zea mays
  Clone ID: MRT4577_160125C.1
cgttgccagatcgagctagcaaaacacacagccagagcaaaagcccacgtgagataaagaccgttagctgactcgaccgccaccacgccactagcagcagcagataatggcggtagcagcagtggagcccgacagcagcggccgggcggtgcagcccgcgcccgccgcggcggggcgcgccggcggcagcacggagccagggctcgggaagcgcctcatgaccgtgctccgcgccgtctaccacatgctgcggcggggccgcaagcgcctcacgatggacgcgcgcctcctgctcggccggggcaacaagctcgccggtaaggcgctccacgaccttctcgccgccgccgcgcaccagcaccagcaccaaatggtcgagccgtccacctcccgcgccgccgccgcggcctcgtcgtcgggcctctcgttcgtcccgccgtacggcaccggggacgtggagttcagctgcaccaccacgccgtcctactcgttcggcttcggcgccggcgcggcggcgcacccgggcaccggccgggcgctgttccccttcaggatccgccgccgcggcgccgccgcacgggccagcggtggcggtggcgccggcctcgtcgacttcgtcgaggtggcgcgcgagctccagatgctgcaggccgccgac

SEQ ID NO: 65927 - DNA, 325 bp, Zea mays
  Clone ID: MRT4577_160126C.1
cccaaggacgccttcgacgatcacaatttcttttcctaaggtcgcaacgtgttcgtgtgcccgtgttctttctgtccgggcggggctttgccccccgatcaaaaccgttgcgtcggcgaaaacgtgcttctggctcactttaattttaccaagtttgtttcaaggtggatcgcgtggtcaaggtccgagtgctttaaaaaccaaccggcactggaacagagtgttactctttatgtagactttgatacgcattggctttattcacttttggatgttgtgtactacttacttttattgaataattatgaccagccacctatttaaa

SEQ ID NO: 65928 - DNA, 349 bp, Zea mays
  Clone ID: MRT4577_160127C.1
acgcgtccgatcaaaaccaatccgggtcttaaggacaggatacttattgcaaaaacaatggcgtgtctactgcggggctcctcggcgctcctcgtcgctgctactgtctgcgctgacggcgcctccacgttctactactcccaccccaacctcgcatccgctcgcgtcgccttacaaactaattatactgatattgaacttagcttatctcctcatataccacctaaaactgtctaacacattttcaaactcattcggctagtatgctacattacaaatcacttcttacggattgacaaagatttcatctcacaagacgctgatgctatgtaatgtcaaaccaccccta

SEQ ID NO: 65929 - DNA, 606 bp, Zea mays
  Clone ID: MRT4577_160128C.1
ccggtcgacccagcgttttgtgctaaaacttcagtccagctatctaacaagagtctacacataaaacatcagcactagttctgtttctgagaaagacaatccaaaccaaagatgtctgggtccaggaactcttcccgcaacgttaacattgattccaactggagcaaaaaggagaacaagctgttcgaggaggccctgggcggctatggtgagggcacacctgaccgctggcacaaggtggcccgtgccatgggtggcatcaagacagccgatgaagttcgccgccattatgagatccttaatgatgatgtcacgctcattgaatccggcggagttccattccccaattacaacacacagggagcttggaactaaggagtcaaggatgcatgtgaagaaccaccagacaggaactactgctacatgaactagatatcttaggtattgaaggaaatgtcctgatatgatgttgtattaagaagttattatgattgctcgggtaagaaataaaaggagctacagaatatagataagtgttttatgtgtaaataactataggttgtgagaaaatcatcagttatgctatagaaaccagggaaccctatc

SEQ ID NO: 65930 - DNA, 852 bp, Zea mays
  unsure (1)..(852): unsure at all n locations
  Clone ID: MRT4577_160129C.1
cattgggtacctcgaggccggccgggnaagatagcgtcacccacattggttcgtcgtccccaaacaaataaattntggggaaaaaactccaattgcggcgggtgggaaaaaaagagagaaagaatttttttctccgttttctgaccccaattctgactgactcgccgccggcggctcgatcacgccggaaccctagtcaaggtccagcttgactcggagccaacatatagctacgaaactgtacggacaattcgtttctctgcatctcagtattcttccatagtgatttgggatgtgtttgattacaatgacaagacgggacgaaataggacgatccctcaaataagtttgtttggtttaggattaaggattgggacagaactatcccagtgttatcccagtgttgttcccagttatccttcaaaattggagggacgagagaggacgtcaggggacatcccagggacgtccctgtcctgactgtcccgcaaccaaacacaccattgatttctacatggtgtcttctgtgctgttctactatcctgaacatgtacgtgcactccgatgcaggcgtcggggttttatctgcattgtgaggacccaagatgcagaaagctgaagatatgattcggcaagtccaccttgtcaggcattcaggccttcgcagaggattctggtgagcatgaagcggtcgctcccttctttttttacacgggcatcgaaaccaaatcaccatggcaaattcttttattagagacactgaaagttcttttttccacgactatataaatgtgtaaacgggacgggaagcattttctatctctggtctctacggggacgcgttaaacatgc

SEQ ID NO: 65931 - DNA, 629 bp, Zea mays
  unsure (1)..(629): unsure at all n locations
  Clone ID: MRT4577_16012C.1
aatctcttctcacttcgcaccctgccattccaaaacctctcaaaaccctcgttctccccactccccgcctccgccgccgccgccgccggtgcctagcaagatgagtcggcaccctgaagtcaggtgggctcaaaggattgacaaggtgtatatcacagtacaattgcctgacgcaaaggatgccaaggtcaagctggaacctgatggtgtattctctttctttgccactgctggaactgatgggaactcctatgaatcaaaactggatttgaatgacaaagtgaatgtcgaggcaagcaaagtaagtgttggtgtcaggtccatattctgtattttggaaaaagccgacgccaaatggtggaataagcttgttccagatgatcagaaggcaccacacttcgtgaaagttgattgggacaaatgggtcgatgaagatgatgatggtgctgatgttaatgttgatgggatggacttttcgaatatgggtggcatgggcggtatgcctggcatggaaggtttgggcggcatgggtggcatgcccggcatggaaggtttgggtggcatgggtggtatgggtggtctggctggtatgatgggtggaatgggcggntatgggtggtatgggcatg

SEQ ID NO: 65932 - DNA, 277 bp, Zea mays
  Clone ID: MRT4577_160130C.1
ctcaaggcggccaagcactcccctccgccgcccaatacctgagctgccggatgcatgcgttgctgctgtacgagactcttgtgtctgtctgtacatatgctgcctctgcgtgtgatgtgatatactgaacctactgatgcgctttgtttatagcttgctcgctctagtctagtgtgtctctagtaattgtaatgttcacttggattggactgttatgtacaagtagaaggcgacaaacttccagttacagatatgaactgcccgcagagcttccttc

SEQ ID NO: 65933 - DNA, 514 bp, Zea mays
  Clone ID: MRT4577_160131C.1
ggggcaaggagaagagctggggtcggaggccctagtccggagctgaacgcgcccccatcgcccgtcggcgagaagagctcagtctgtttcagcttcatgagttctgggaaagcacctggcctccaacatcgtgttattcaacagcgaacagcatcatgatgtatgtctggctttgggcgggatactagtgaattcctggtggaagcttccttcaaggaagctaatttagtcgtcagtgcgctagacggtcggcctatgagtgggtgggctgtcaagcttcagaaatggttactgatgagccatgctatgtgactggacttctcgcacatggtcccaaccactgcccagacagtatactccgcccagcggggccgccagactgcgagtcctcagatgctgtcgaggaccattcactcgtgatgttgggtggttctaccccggtgcaaacaccaacacacctactgtggcttcggaccggagaggcctgcacctactgctgagtccaatgaagaat

SEQ ID NO: 65934 - DNA, 447 bp, Zea mays
  Clone ID: MRT4577_160132C.1
ggggttccacaggggggggggggttttttaaaaaaaaagtgggggggggggggggggttgaattgatcaaatcccggttgcaaagggttctaaaaatacccaaatgggtttaggcggcgatgcatgcatgcctgggatgcccaagagccacccatgtacttgtccaaaaggggggggagcggggactttgggacggggccaaaaaacctttcctttttttccccccccttgaaaaagaacacgggggggatgcttgggatgccctagggggaccccacgttgggggtgtggtccgggtttaccttgcaacacgggattttgccggggtggtccttggccagcttgggaaacaacggggggataattcgggaagggccgcaccacggggcccaaaaattcaccaaaaccggggttttggacgccattaacaaacccgcccaatttttt

SEQ ID NO: 65935 - DNA, 161 bp, Zea mays
  unsure (1)..(161): unsure at all n locations
  Clone ID: MRT4577_160133C.1
ggtgaccatgaacacggtttgcacctgggtgccgcgttatctaaaaaggacaagatctgggaagacaaatgaataattatgggagggncctctacgtgagagatgacatcgtggccttctacctccagtacatcctccgggcagacgccataaaggccctc

SEQ ID NO: 65936 - DNA, 348 bp, Zea mays
  Clone ID: MRT4577_160134C.1
ccggttgcatgttcccgaacctgttctccctcaccggattaaacttcggcaaggccgtgtggttcaaggccggtcagaaaatcttcagcgagggtgggctgaactacctaggcaacccaatcctgatccacgcgcagagcatcctcgccatctgggcctgccaggtcttgctcatggacgccatcaaggggtaccgcatccccggcggcccactcggaaaggtcatcgacccgctctaccccggcggcagcttctacccgctcggcctggccgacaaccctaaggccttctcgaagctcatggtgaaggagctcaagaccggccgcctccccttgtcctccatgttcg

SEQ ID NO: 65937 - DNA, 227 bp, Zea mays
  Clone ID: MRT4577_160135C.1
aggattgcaaaatactattacagcacaagcattatatatactatggtggagctcaaatgtttatcccacactttcgactatcattagccactcagaccacaaacttggcaaatggcttgttctcacgccaccgaggcaattctgacaccattcataaatagcactggatccataatacaccattagctcttctactggcaaaatgtgactggtgatctaaacacccc

SEQ ID NO: 65938 - DNA, 523 bp, Zea mays
  Clone ID: MRT4577_160136C.1
acacagcattttatttaacatggaacaatagtaatatgattacattttttttagacatccgaaaacaaaacaaaatatgttcttaacactttaatattgaaatcctaaacaaataaataatcatgataataatacactataaaattgaacaacatatggaatgtttcagtgaaacgaaaactaaaaccaaaattaaatttgtacacctttatatttcttatatggaattgaaaaaaaaaagaaaaatactatgacacacacatatcattctttgttagctgtagctttaaaatttttgtgcaactctggtttgatgtcataaaccagttcaagaatttgatcaatgactgcctgtttattaacaattacagccttattcatttcttcaatctttattttagtgtcagcatctattctagcagcaacatcctcccgggaacccatgtgtttaatttcaaattccttgaattgtttttccctttcttgtctgtatttttcaatttcatcttgagcttcttcttta

SEQ ID NO: 65939 - DNA, 484 bp, Zea mays
  Clone ID: MRT4577_160137C.1
ttttccaacaatccatgcatcaagttcgaattataatttacataattattacaagcggtgaataatagataaaggtacagttaaaaatgcaaaaagccatgaagctcgagacatcaaacggggaacaaagatgaaacttgaagggacaggacacacaagtgaatagaacaagaagtcatatttttcaagttgaagctcaagggtaggtttcagaggctgggacagccgcatatgaaccaatgaagacgtctccataaatcaagccagccaaacctcctccaatcaatgggccaacccaatagatccagttagcagcgaagtctccactgaccacagctgggccgaatgagcgagctgggttcattgaaccgccactgaatgggcctgctgctaagatgttggcacccacaacgaacccaatagcaatgggtgcaatgatacccaatgaccccttcttgggtctgctgcagttgcatacacagtg

SEQ ID NO: 65940 - DNA, 246 bp, Zea mays
  Clone ID: MRT4577_160138C.1
cattcaaccaactggcagaaattgctgcgggtaggcagcacgtttctggctgaatgctacttgttgacgcgggggatcacacgcacacttcaatgccgctagtatgccgcatggtactacctgatggcgtttagagcacgcagtacggctttggatacactcctgtacatccgctgccagcgctgccgcggccagctcctggcggacctagccgcgggattcggcgccggcctgcagcctacaggc

SEQ ID NO: 65941 - DNA, 216 bp, Zea mays
  Clone ID: MRT4577_160139C.1
ctcccaaattaaactttattgctcaaacgacatcatgcgtcctctctcaaaaaaagaaaggggtaaatagcagtttgcaattcggaacccccataaaccctcgactattgtacctagagataaagtgaacggatatcaagatagaaatgcattaatgtttttgggatgtgtagtataactgatatttaccccttttctttttttgagagaggaccc

SEQ ID NO: 65942 - DNA, 646 bp, Zea mays
  unsure (1)..(646): unsure at all n locations
  Clone ID: MRT4577_16013C.1
cctcgaggccggccgggaacgctacccgcgcgcaatccgaccccagacatgctgtacgaaatgatcggagtggtacggcctggccgcctctccgaagtcaaagaaatcgccaaaaccgccggaaaaatcgttctcgatcagcagggcgttgtgcgcggcgtctccaactggggaacgtttctgctccccaagccagccaagaagctgcaatcgacacatcactacggccaccacttcattatgcgcttcgatgccagtgcccgcgctcagcacgccctgcgcaggaccatgagtctggacccgcgtcttatcagatacagtgtagtcaagatgggtaccaagtttgaggagatcaaggatgtaccaggcacagccaagtttaggtgaggggcagcaagcagaaagaggcgggatgtatcatacagcagagggaacatgcattgcaatatggcgttttgggtggtattcatgaagaaggattgggcttgctatcaaaggtggggttatcacagttgccatggtggtcatatacaacaattactatccgagacgatcgagctacaaagacgacgggctctcatcgcaaattcnnnannnnnnnannnaaannnnaaaaaaaacccaaaaaaaaaaaaaaaaagcggcc

SEQ ID NO: 65943 - DNA, 1915 bp, Zea mays
  unsure (1)..(1915): unsure at all n locations
  Clone ID: MRT4577_160140C.1
acgacatgatgagcattttctcaaatgacggtgtaggacgctctatagattcaagcagcagtgaaacaaggaggagtcacagaaggatcctgtgggatgcattttccaggcgtggctcaagaggttatccagaatctgatgctgatgaaatgggattttttagtacatggctagaccttggtgatgatatttttgaagagttgggggaatcaagatattttcatcgcaggcgacatggttcaatcagagtaagccagtattcaagatcccggattagggagcatcgccgtgctgtttttgatagtggtaatgaacaaaacactgctgcatgtcctttggggattcatcaaattggccgatgcacctgtaattctttctttattggtgaagaatctagcgccccatatattccttaaagaattggcggattgactgaggcgctatttgaggtgttggatgaaattcaccgtcaacctgcatcactttcactttccatggtctctgttcaggctcctgaatctgtagttgattcgttgccatgtaagagctacagaaagcttgagacaccccaatgcagtgatgatatggaacagtgccatatctgcctaaccgaatatgaggacggagaccagataagaacccttccgtgcaagcacgagttccacctgcaatgcgttgacaagtggctgaaagaaatacacagggtgtgccctctgtgccgtggagacgtctgcgaagtcgcctcgtgaagaccttggcgctgccatccttccgatgtggcgccggtggatagggcaccaccgccaggcgccagctgttccgtggttgaagctggttcggtcaggcaatggtgatcttgtcaacttggacagttgacaccgcaagagcacgtcaactttgactgtctccctgccgaagagaatggccaaaccaaccctgcgaccgatgagtcgctgttcctgtcatcaacttttaagataccgagactttgtatacagtagcttttgtagcctcccgcctcgtgtatgacagcctgtacatatttgtaaattctggaatcaaatgtcacaatcccctgttctcgtgaaaaaaaaaaaaaaaaaagagcacttggctagaccttggtgatgacatttttgaagagttgggggaatcaagatattttcatcgcaggcgacatggttcgatcagagtaagccagtattcaagatcccggattagggagcatcgccgtgctgtttttgatagtggtaatgaacaaagcactgctgcatgtcctttggggattcatcaaactggccgatgcacctgtgattctttcttggttgctgaagaatctagtgcccgagcaagtatatcaagaattgtcatgttaactgaagcgttatttgaggtgttggatgaaattcaccgtcaacctgcatcactttcactttccatggtctctgttcaggctcctgaatctgtagtcaattcgttgccgtgcaagagctacaaaaagcttgaggcaccccaacgcagtgatgatatggaacagtgccatatctgcctaaatgaatatgaggatggagaccagataagaactcttccttgcaagcacgagttccacctgcaatgtgttgacaaatggctgaaagaaatacacagggtgtgccctctgtgccgcggagacgtctgcgaagtcgcctcgtgaagaccttggcgctgccatcccttcctcacggcaccggcagatagcgcatccttcctgccatcaactttttaagataccgagactgtatatagctcttgtagcctctccgtgtatgacaacctgtaatatatgtaatttctagattccaatgtcccattattctgtcctacattcagatcttattctcgcagccctgatgctcaaactagctttaccagantc

SEQ ID NO: 65944 - DNA, 412 bp, Zea mays
  Clone ID: MRT4577_160141C.1
actattttatttttttttttttttttttttttgtttgttttttttttttttgggtttttttttttttttttttcccccccaaaccagatttccattggcattccaaattcaaacagggcgggatttaaaggcaaccccctcgattggccttccattaggccccaactttaggtggccgacgttccaaacaggactgaaacaactctactggggctttatccagatgggtttaccgcctacataccccattgaaaagccccgcctgccaaatgcaagacatcaagtcaaacaaaggtaaaatgcaaggggtataattattttcgccaaaacccttgggggaaaaagggatccccaagggcctctcgggctgtaaaacggtttgggggaacatacttaagcagcccttgaaaag

SEQ ID NO: 65945 - DNA, 699 bp, Zea mays
  Clone ID: MRT4577_160142C.1
agcaagtatatcaagaattgtcatgttaactgaggcgctatttgaggtgttggatgaaattcaccgtcaacctgcatcactttcactttccatggtgtctgttcaggctcctgaatctgtagttgattcgttgccatgtgccatatctgcctaaccgaatatgaggacggagaccagataagaacccttccgtgcaagcacgagttccacctgcaatgcgttgacaagtggctgaaagaaatacacagggtgtgccctctgtgccgtggagacgtctgcgaagtcgcctcgtgaagaccttggcgctgccatccttccgatgtggcgccggtggatagggcaccaccgccaggcgccagctgttccgtggttgaagctggttcggtcaggcaatggtgatcttgtcaacttggacagttgacaccgcaagagcacgtcaactttgactgtctccctgccgaagagaatggccaaaccaaccctgcgaccgatgagtcgctgttcctgtcatcaacttttaagataccgagactttgtatacagtagcttttgtagcctcccgcctcgtgtatgacagcctgtacatatttgtaaattctggaatcaaatgtcacaatcccctgttctcgtgacctgatgttgtagggaacatattcggtgctgatggagccgggaacagagatgtgctgatggagatgg

SEQ ID NO: 65946 - DNA, 1329 bp, Zea mays
  Clone ID: MRT4577_160143C.1
tagggagcatcgccgtgctgtttttgatagtggtaatgaacaaaacactgctgcatgtcctttggggattcatcaaattggccgatgcacctgtaattctttctttattgctgaagaatctagcgcccgagcaagtatatcaagaattgtcatgttaactgaggcgctatttgaggtatcgtttccttcgtcttcatttgattatcatcagcattaacattctacgtgattatgacacataattggcaacaacagagaaacctttttaggattgaactccagttccaggctttagtcttataatgctataatctactctggccagtttgaactggtgttactcatctgtgctgtagttttgaagtttcatagttaaaaaaacatatattcatataggaataacatgtcagaacaacaaataaatagtacacccaaaacttagatggttttatgacaattgaaaattttgtgaggccaatgcacatcaataaagtttgcaggcaatcatgggatggttcaggcatgtttgaagcacagtagatagaacgtttttaaaagtaaagttgtactttagttctgaaatttcaaaggaaattgttgcagtgtttggactatgaactccattgctactgtcacattttcagtacattactagttattactctaggtatgtgataatggcctacacgattcttttcaggtgttggatgaaattcaccgtcaacctgcatcactttcactttccatggtctctgttcaggctcctgaatctgtagttgattcgttgccatgtaagagctacaaaaagcttgagacaccccaatgcagtgatgatatggaacagtgccatatctgcctaaccgaatatgaggacggagaccagataagaacccttccgtgcaagcacgagttccacctgcaatgcgttgacaagtggctgaaagaaatacacagggtgtgccctctgtgccgtggagacgtctgcgaagtcgcctcgtgaagaccttggcgctgccatccttccgatgtggcgccggtggatagggcaccaccgccaggcgccagctgttccgtggttgaagctggttcggtcaggcaatggtgatccaacttggacagttgacaccgcaagagcacgtcaactttgactgtctccctgccgaagagaatggccaaaccaaccctgcgaccgatgagtcgctgttcctgtcatcaacttttaagataccgagactttgtatacagtagcttttgtagcctcccgcctcgtgtatgacagcctgtacatatttgtaaattctggaatcaaatgtcacaatcccctgttct

SEQ ID NO: 65947 - DNA, 277 bp, Zea mays
  Clone ID: MRT4577_160144C.1
ccaccaaacagtttttagctttttaacagcttgcagcctacagcagctttttccacagctcacagcccacagcaacttttttcacagccacagcccaaccaaacagaccctaactcttattctctacaaactatggaaaaattacagcattcctctgcagctcaagacctcggatctcagaggcacaactcgctcctcgtacttactctctctagcgccggtcgcggtcgtcttctatctacttgaatcccatagctaccactgggattctgacgag

SEQ ID NO: 65948 - DNA, 151 bp, Zea mays
  Clone ID: MRT4577_160145C.1
atgacaattaaagtagactttatatcaacttctaatgcttcggctgtttcacgaggaaacacatgccatttgacaattgacatctaacaatgtaattcctaggcggccgttaaatgattcactgtttattgtgtgtcccattcccatatat

SEQ ID NO: 65949 - DNA, 217 bp, Zea mays
  Clone ID: MRT4577_160146C.1
gcgagagggcacggtggttcgttcaacaccctagcatgctcagccctagtccggagcccggagccacggcgcggttagggagccgtccccggcggccgtcggatccgtcgcgcggaccatgcggtgggtcgtccagtgtcgtcgggactcgcgccatgacttggtggagcgcgcgtttcgtttcttcggttcgccgcgcctggctggcctttttctc

SEQ ID NO: 65950 - DNA, 1054 bp, Zea mays
  Clone ID: MRT4577_160147C.1
ggtaccctccgaggtcgtccgtgtgatgagcattttctaaatgacggtctaggacgctctagggattctagcagcagtgaaacaaggaggagtcacagaaggattctatgggacacgttttccaggcgtggctcaagaggttatccagaatttgatgctgatgacctcggattttacagcacatggctagaccttggtgatgacatttttgaagagttgggggaatcaagatattttcatcgcaggcgacatggttcgatcagagtaagccagtattcaagatcccggattagggacatcgccgtgctgtttttgatagtggtaatgaacaaggcactgctgcatgtcctttggggattcatcaaactggccgatgcacatgtgattctttcttggttgctgaagaatctagtgcccgagcaagtatatcaagaattgtcatgttaactgaagcgtttttgaggtgttggatgaaattcaccgtcaacctgcatcactttcactttccatggtctctgttcaggctcctgaatctgtagttgattcgttgccgtgcaagagctacaaaaagctagaggcaccccaacgcagtgatgatatggaacagtgccatatctgcctaactgaatatgaggatggagaccagatacgaattcttccttgcaagcacgagttccacctgcaatgtgttgacaaatggctgaaagaaatacacagggtgtgccctctgtgccgcggagacgtctgcgaagtcgcctcgtgaagaccttggcgctgccatccctttcctcacggcaccggcagatagcgcatcccccgcctgctccgttgttgaagctggtttggtcaggcaacggcgatcacgtcccgtcaatctgggcgtccctgccgaagagcgtggccagatcctgcgaccaatgcgtcgctgttcctgccatcaactttttaagataccgagactgtatatagctcttgtagcctctccgtgtatgacaacctgtacatatatatgtaaattctagattccaatgtccattattttgtcctacattcc

SEQ ID NO: 65951 - DNA, 282 bp, Zea mays
  unsure (1)..(282): unsure at all n locations
  Clone ID: MRT4577_160148C.1
gtacaagcttttttttttttttttttttttttttttttttttttttcctccttttttctttttttttgactattcatacttcttgttttactccatttactactcaatgtcaatnctctnaanaaacatcctctnanttnacaatntntctncntnnaaacaacacttcctncaacctcaaaatccatctcctnaaataaaactnaaanncanataatttaatgggcatgctccccnnntnttntnttnctnttatnctaaactttaatactccccctcccc

SEQ ID NO: 65952 - DNA, 295 bp, Zea mays
  Clone ID: MRT4577_160149C.1
gcgaaacaaacaacatattcaaactcgtgcgaaaggaggcataaaactaacggattgcgtggatgtactcaaggacaaaacggggctactgcaattgctgtcagacatgaaaagggcctatagttggtgccaccagaagtcattcgtggaagcccgcacacttgttctgctgatatctggactgttcgctctacggcacttgaaataggtataaggaaagtctcatagacccatcaatatcaagaggggtctctactttatgatgtggcgacgacaaaatgacacccacctatac

SEQ ID NO: 65953 - DNA, 257 bp, Zea mays
  Clone ID: MRT4577_16014C.1
ggtgttactggcggacgtttttcacgttatatccggactttaggagaagaagagatggttgcaacgacgcacaaacactaacaatcaggcggggaacacacgggtggtggataaacacacggccggattcaaaatagtatttggatatgttgcaaaaaaacaagcagatgtagggtgtattgacgttcatcaaacgtgcagcgaatcgagaaacaatcgtggcgtcctgcgaggtattgattgctaccctgacgtgt

SEQ ID NO: 65954 - DNA, 306 bp, Zea mays
  unsure (1)..(306): unsure at all n locations
  Clone ID: MRT4577_160150C.1
ggnagnaaaatatccanaaagaggggggtgctatcaagggcgcggatggaagtacggctccgggttcgtcgacggagtgttcccagtgctgagtccgcctgaaccggcaatgggagccgatcatcacagtctgcgagtgggtccttgtgcctgagctcgttccgccccgacatcatctgctacaacctgctcatcgacgcgtacggccagaagcgtcagctgagcgaggcggaggcggcctacatggcgcttctggaggctcgctgcgtgcccacggaggacacctacgctctgctggtgcgcgcg

SEQ ID NO: 65955 - DNA, 2264 bp, Zea mays
  Clone ID: MRT4577_160151C.1
attgggtacctcgaggccggccgggagctcctgcgagtcgcaactcgcgtcctctccaaaaaacagcccacagctgaagcgagaacacgaaagctcagtgatatttctctccagggctgcacactcgtctcctaccgagaccgtcggcggccatcatcgcccacgctgtgctcatgctaagtgtcgaggctcacacgtactactactacccgaccgcgaggccgagacggaagctatgcgcctgcagaaacgtcttgcaagaaaccgccccgcgtgacgcggaggcaaatccctgccgccacggcgagaggaagagcaggagaaggggcgacggtgcttattacatcgacaaggacggcggcggcgtagccaggaccttcgaccggaagaaaatatccagaaagagggggggtgctatcaaagggcgtggatggaagtacggctccgggttcgtcgacggagtgttcccagtgctgagtccgatggcgcaggatgtgctagaactcgtgcagacgagggggaccgacgccgccagcgtctgggagtcactggacaagatccctcaagcacacgatctttgggacgacatcgtcaacgtcgctgtccagctccgcctgaaccggcaatgggagccgatcatcacagtctgcgagtgggtcctgcgccggagctcgttccgccccgacatcatctgctacaacctgctcatcgacgcgtacggccagaagcgtcagctgagcgaggcggaggcggcctacatggcgcttctggaggctcgctgcgtgcctacggaggacacctacgctctgctgctgcgcgcgtactgcggctccgggcagctgcaccgagccgagggcgtgatttcggagatgcagaggaacgggatccttcccactgcgactgtgtacaacgcgtacctggacggtctgctgtaagcgaggtgttcggagaaggcggttgaagtgtaccagaggatgaagaaggagcgctgcagaactaacaccgagacctacaccctgatgatcaacgtgtatgggaaagcaaatcagccgatgtcgtcgttgagagtgttcagggagatgaaatcggtcgggtgcaagcccaacatctgcacctacacggcgctggtgaacgcgttcgcgcgggaaggcctgtgcgagaaggcagaggaggtgttcgaggagatgcagcaggctgggcacgaacctgacgtgtacgcctacaatgctctgatggaagcttacagccgcgcagggctgccgcaaggggcgtcggagatcttctctttgatggaacacatggggtgcgagcctgatagagcctcttacaacatactggtggatgctttcggacgagctggtcttcaccaagaggcggaagcagcgttccaagagctgaagcagcagggcatgcggccgacgatgaagtcgcacatgctgctcctgtcggcgcacgccaggtccggcaacgtggcgaggtgcgaggaggtgatggcgcagctgcacaagtccgggctgcgcccggacaccttcgcgctcaacgccatgctcaacgcgtgggcgggccgggcggctggacgacatggagcggctcttcgcggccatggagcgcggcgacggcgcgatcgccggcgccccggacaccagcacgtacaacgtgatggtgaacgcgtacgggcgcgcggggtacctggaccggatggaggcggcgttccgctccctggcggcgcggggcctcgccgccgacgtggtgacgtggacgtcccgcatcggcgcgtacgccaggaagaaggagtacgggcagtgcctgcgggtcttcgaggagatggtggacgccgggtgctacccggacgccggcaccgccaaggtgctgctcgccgcgtgctccgacgagcgccaggtggagcaggtcaaggccattgtcaggtccatgcacaaggacgccaagacgctcttcgcattgtgaaatccgcgcaggctaaattccgatcctgctgcgtgatcacatacgaaccttgacgagagtcacctagcttgcatactggttaacaagtcacaaggccccgtttggttacatatagaataatctactttttagtcccgtttagtacttaattgtatttagtctctagcccttcactgtaagggcctcacatcacatgggtgctaaaggggacgaaaggacatcatttactctaattaccattgcatagagaatatgcaccgtatacatgcaataaaaagagaggcatttcagtctgtgta

SEQ ID NO: 65956 - DNA, 609 bp, Zea mays
  Clone ID: MRT4577_160152C.1
tcgcgatctagaccgaggtgcgaggaggtgatggcgcagctgcacaagtcggggctgcgcccggacaccttcgcgctcaacgccatgctcaacgcgtacggcagggccgggcggctcgacgacatggagcgcctcctcggggccatggagcgcggcggcgacgacgccggcggtgccgcgccggacaccagcacgtacaacgtgctggtgaacgtgtacgggcgcgcggggtacctggaccggatggaggcggcgttccgcgcgctggcggcccgggggctcgccgccgacgtggtgacgtggacgtcccgcatcggcgcgtacgcgaggaagaaggagtacgggcggtgcctggagatcttcgaggagatggtggacgccgggtgctacccggacgccggcacggccaaggtgctgctcgccgcgtgctccgacgagcgccaggtggagcaggtcacggccatcgtcaggtccatgcacaaggacgccaagacgctcttcgcattatgaaatcaacaggctcgcttgttaggcttaccaatatcctgtcgagttgtattattggtaaacttttcttctgttttcataatgaaatacgtgtttcagccc

SEQ ID NO: 65957 - DNA, 844 bp, Zea mays
  Clone ID: MRT4577_160153C.1
cctgcagttccggtgccggactcccggggtttgtgccatcatctcccgcgccgcgcgcgagtgcaacctctataaaagaagccacagtgggccgccgggccggacaagcagcgagatctcgatcaaacagcttctctgatctcgctcagaagcgaggacatcagacattattgcaattgtatttgcacagcagcgagatctcgctcagaagagactctgaagagataacgagctgcgcttcttcgtcctcgatcaactagcttctctggtcgcttccatatggagagagctgcgtcaagctgcgctagcctcctagcacaaaggaggtgctactccgtggccgcggtcgtggtgaagggatgcgggcggaaggccgtggagaaggtggccaagcgcatcatgggcaaggaggtgaacaccgcggctgcctccggggagaagacgccgtgggtgccggacccagtcactggctactaccgcccggcgggtggcgccaaggaggtggacgcggcggagcttcgcgccaggctgctcaccaagaggatcgccaactgaatcaatctagctgcagagcagtgcggctgagattatttagcgccagttcatctcttgggcctagagcatgacggtgctgtatctttttgaggcataactaggtgagtgcccgtgcgttgcaacggaaacacataataacctaacgtagtctgaaacaaatattatggtctgaaacatatatagagttgcaaagatgggtccaggaattgaggcgaacacagatccgaatttcccaggacaaaaaaaaaaaaaaaaaagcggtatagaaaacataaggattcccattttg

SEQ ID NO: 65958 - DNA, 2492 bp, Zea mays
  Clone ID: MRT4577_160154C.1
ccggccgggaaaaaaacagcccacagttgaagcgaaaacacgaaagctcagtgatatttctctccaggtctgcacactcgtctcctatcgagactgtcggcggccatcgtcgcccacgctgtgctcatgctaagtgtcgaggctcacacgtactactactacccgaccgcgaggccgagacggaagctatgcgcctgcagaaacgtcttgcaagaaaccgccccgcgtgacgcggaggcagatccctgccgccacggcgagaggaagagcaggagaaggggcgacggtgcttattacatcgacaaggacggcggcggcgtagccaggaccttcgaccggaagaaaatatccagaaagaggggtacggtaaatgattatgacagtgtgccagtgtgccacaccactccttaattttagttcccacacaatgctgcagatcaatgccagttcttagatcttcttctttttttttaaaaaaaagcaagaacataaaggtcgttccttttccggattcactcactgttccatgcattggaagttcaaggacaacatggcgtaggttctagctctgaatggcatggcatggcttgggcttgggcgtgcagggggtgctatcaaagggcgtggatggaagtacggctccgggttcgtcgacggagtgttcccagtgctgagtccgatggcgcaggatgtgctagaactcgtgcagacgagggggaccgacgccgccagcgtctgggagtcactggacaagatccctcaagcacacgatctttgggacgacatcgtcaacgtcgccgtccagctccgcctgaaccggcaatgggagccgatcatcacagtctgcgagtgggtcctgcgccggagctcgttccgccccgacatcatctgctacaacctgctcatcgacgcgtacggccagaagcgtcagctgagcgaggcggaggcggcctacatggcgcttctggaggctcgctgcgtgcctacggaggacacctacgctctgctgctgcgcgcgtactgcggctccgggcagctgcaccgagccgagggcgtgatttcggagatgcagaggaacgggatccctcccactgcgactgtgtacaacgcgtacctggacggtctgctgaaagcgaggtgttcggagaaggcggttgaagtgtaccagaggatgaagaaggagcgctgcagaactaacaccgagacctacaccctgatgatcaacgtgtatgggaaagcaaatcagccgatgtcgtcgttgagagtgttcagggagatgaaatcggtcgggtgcaagcccaacatctgcacctacacggcgctggtgaacgcgttcgcgcgggaaggcctgtgcgagaaggcagaggaggtgttcgaggagatgcagcaggctgggcacgaacctgacgtgtacgcctacaatgctctgatggaagcttacagccgcgcagggctgccgcaaggggcgtcggagatcttctctttgatggaacacatggggtgcgagcctgatagagcctcttacaacatactggtggatgctttcggacgagctggtcttcaccaagaggcggaagcagcgttccaagagctgaagcagcagggcatgcggccgacgatgaagtcgcacatgctgctcctgtcggcgcacgccaggtccggcaacgtggcgaggtgcgaggaggtgatggcgcagctgcacaagtccgggctgcgcccggacaccttcgcgctcaacgccatgctcaacgcgtacggccgggccgggcggctggacgacatggagcggctcttcgcggccatggagcgcggcgacggcgcgatcgccggcgccccggacaccagcacgtacaacgtgatggtgaacgcgtacgggcgcgcggggtacctggaccggatggaggcggcgttccgctccctggcggcgcggggcctcgccgccgacgtggtgacgtggacgtcccgcatcggcgcgtacgccaggaagaaggagtacgggcagtgcctgcgggtcttcgaggagatggtggacgccgggtgctacccggacgccggcaccgccaaggtgctgctcgccgcgtgctccgacgagcgccaggtggagcaggtcaaggccattgtcaggtccatgcacaaggacgccaagacgctcttcgcattgtgaaatccgcgcaggctaaattccgatcctgctgcgtgatcacatacgaaccttgacgagagtcacctagcttgcatactggttaacaagtcacaaggccccgtttggttacatatagaataatctactttttagtcccgtttagtacttaattgtatttagtctctagcccttcactgtaagggcctcacatcacatgggtgctaaaggggacgaaaggacatcatttactctaattaccattgcatagagaatatgcaccgtatacatgcaataaaaagagaggcatttcagtctaagaaaaaaacggcgaccgccgacaagagagctc

SEQ ID NO: 65959 - DNA, 792 bp, Zea mays
  Clone ID: MRT4577_160155C.1
cattgggtacctcgaggccggccgggaaagcgtttctacgatctagtccctctctcggccgagggagccggagaagtacgttgaggatagtaataaggctatgacgacgtctatcacgactgcggggaacgtgcgcgagatgcacaatgatctcgaggtccagaacaacgccctcagcatgatccataaacacttcgccaacaaccagatgtccgctagcagaacaccatccatcacggcgagaacgagctcaacctctgagaactgcatgtgctctgctatgtttgctgcgggtactcagcgcatcatacctgtgatgttctgatacgacctcactgaggccaatgccaacgatgataagcgcatcggagaacatctcgctcagagctgaaaagcataggatcgccgctcttagacttgaaggaaaagcaaaagaccttgatggaatcgatatgccatttgcaataaatgatgcaggctcgtgacaatctatggcttatatgactgtgtgatggctgcaagtatgccaagagtcatgcttcatttcatatccaatgccctccagggtttgtttttttggtgtacagaaatcagagggtatgatggtctcgactccactacgaacatgaaataaaaatccccctgatgaaatactaggttattctgaatgccctagtatacaagtgttgctctatgagaactgaataacaagcccatatcagtatcgcatatgaattattggcccagcaatacttctcaatcgaatatttatgcgattcatgtttgatcacg

SEQ ID NO: 65960 - DNA, 104 bp, Zea mays
  Clone ID: MRT4577_160156C.1
caacaatggtctgacagcacatactttcgctgcagtttatttgcccctcctttattgcggcattcgacggatatcagatacaaccaggttgcgttcggagcctt

SEQ ID NO: 65961 - DNA, 297 bp, Zea mays
  Clone ID: MRT4577_160157C.1
attattcttagtgtggtctttttttttacaaaaacgcgggtttttgatttgtctggccccatgcgtggatacgtccatacccagggaggattttacttaacgctgatgatccgggcgagactaactggcataatagggagaagcgggcaatttggcatccctggccgcctgtggctatcttcttaaacagcgttcaagaatatcagaaccaagccgcaggtgctgcagtagggccagatcatcgacaagaaggaggccctcgtctgatgattattaaaccttatgcacatgcctcat

SEQ ID NO: 65962 - DNA, 945 bp, Zea mays
  Clone ID: MRT4577_160158C.1
ccggccgtgtgcctcgtcgcttggcggccttcagcggcgtcacggcgttctgcagcgtcgagtgcaggagcgcgcagatggaattcggcacgaggcgcatcaccacgcatttgacgcggacgcgcgaggaagcaagcaccgccggagtcggagggaaaaagaaaaaagagcacggacgattcgcagctgcagcctgcacaggcggaggcgaggaggaagagagagcccccacgatcggctcgccgggacggccgacgggccgagggtgcggtggtagtgcgggcgcgtggccccgcgcgtggagtcgggatccgtattgctctctagcagccggccggtggcggcgctcggcgtccgaggccagagcccagagggtgactgacagagagagaatcgtccatccatgggaggatccgggcgcggcgcgcatttcttggacgcgtgcttcctctgccggaagccgctcgccggcaaccgcgacatcttcatgtacaggggcgacacggcgttctgcagcgacgagtgcaggagcgcgcagatggcggcggacgaggcggcggcggcgaaggccaaggccaaggccaaggccagggcggtgtcacgtggggccctgctgaccgccagggaagcggaaggcccgcagaggcgcggcaaggtccgggccggctccgtcctggccctgtgaccccgaggggggtctctcactcagggacagcctgtgtctgccgcgcatggcatttttctttttttcttttttcctctgcgtttacgagacgcgccaccggagggcatcaatttcgtgtacacggccgggtttgcgttttttttaagagaaaaccttgggaccgtccggtggtgctgctggttgcgttgattgctggtccatgtaaaccgcacgtacatggaacaataaaaataataataatcaagatgactagtgaagta

SEQ ID NO: 65963 - DNA, 144 bp, Zea mays
  Clone ID: MRT4577_160159C.1
cccacgcgtccggtccttcgttttcggttcatcgctcacattcgttcgtgtgctttatactccaacgacctctcagagtcagcccatctttttgtcaacactcccaacaaaaacaaacacttcagtcaccatgcgtttctccgt

SEQ ID NO: 65964 - DNA, 241 bp, Zea mays
  Clone ID: MRT4577_16015C.1
atacattggttgtttttctaagaatcttttggggggttttaacggcacaccaaaaacccataccataccatacaaaaaaattgccgagaattaaggggaaggccaaagtcaggacccagggaaagacccaattcccgcaccgggacaaggcccacgaaattttttcaccccctattaaaaggcatcccgcaatgccccaatgaaaagcagtaagccccgcgcaatcctttgaggttgggga

SEQ ID NO: 65965 - DNA, 410 bp, Zea mays
  unsure (1)..(410): unsure at all n locations
  Clone ID: MRT4577_160160C.1
cgaagccatcccggttctcgtgcagagaggagcggacgtggaccagcagtggggcccgctgcaaaatacagctcttcatgaagcaactctgcttggccgggcaggaagggagtgcatcgctgccttactgggatgcaacgccagcgtccagaagaagaatgcgagaggccagacggcatacgacctggccctggaaagtggggatgagcccatcacctcgctctttgctgctaagcttggcctggatgaacgctaagcctgaaagccccacgggcatcattcagagaagtcacccagctccggctgtgctgtgttcgcttccttccaaatgcatattcgaggtttggaaatcgagcttgagagccactcataagatnttaaaaactatgtgacagtgtaagccacccatg

SEQ ID NO: 65966 - DNA, 822 bp, Zea mays
  Clone ID: MRT4577_160161C.1
agctcgaaaatattgatgttgccaggataaaaggtttactgatgaagagaaagagccggagagagatccaaaaccaagccaatgcttcagatggcctcagtgaagaagcctggattgagagagagctggagtctgggattgtcacaaaacaagaagccaattgtgccgccatctcagatgagctaagtgatgaagcctggattgagagagagctcgagtcagggattgtgaccggaccaacaaacgagcaggcgatcacttttgatggtttgagtgaaaatgattggatcgagagagagcttgagtctgggatcatcattgagccagcacctgctatcaagaagcggaagctggagtcaagctgttagctctttagctgctgcattcagaggccagattccaagcaggtgaataattacagatggaggtaccctgcgactagggcacatcgaagccaaaagatgtcgcatagatgggaggatcaatattttccttttttttatttctttaaccaaacacctcggaatactttggcacgagggttgtgtgtacagtgggatcttcccagtttcttgaattcagaatcacacgagggttgtgtgtacagtgggatcttcccagtttcttgaattcagaatcatatcccctgtatctgttccttgtttgtgtaaatctagcatgcccgaagttcggctttaattagattgtaggtgtaactgtagcagggattgtctcgtgttaagcccgacgaaaaaatgattcagtgtaactgttaatggtacccaaagaaaattagttattccctatagacttattgttccc

SEQ ID NO: 65967 - DNA, 472 bp, Zea mays
  unsure (1)..(472): unsure at all n locations
  Clone ID: MRT4577_160162C.1
gccnggccgggttctgggaatccccaatatatcccccatctcttcgactcctttctggagcagctagggttccgtcctcgatccgatccgccgagtgcacaccacctttccccactccgatcgaatcgatggccgccgagggcgagaagaagatgataaccctcaaaagctccgatggcgaggagttcgaggtggaagaggtggtggccatggggtcagcgaactgccgcgctctgtctgtgttcgccggaatgaaaagactgttgttccggccactgtgcgtggccccaaggccgaagaaatccttgaacgtggcttgaaggttaaggaatacgaactcaagggtcgtgacttttctgaaactggtaactttggcttcggcattgacgaacatattgatttggcgatcaagcatgatccctctattgcgatctacggcatggactactatgttggcctgggccgtcctggt

SEQ ID NO: 65968 - DNA, 259 bp, Zea mays
  Clone ID: MRT4577_160163C.1
atatggacctgaggagctcaggagcatgaaacgaatgacggttgaattggagaaactacgcctgttgtgtgagagaataattaagagagagaaggtgaagagagagacggttatgtgtgatcatgatatacttgccaaaacaaaggacactgttattttctccaacaaccgtcagccctattacagcagttacctttggtgcatttgttggcacaaaacatcaaggcacaacaactacaacaacttgtgctaggaaacc

SEQ ID NO: 65969 - DNA, 216 bp, Zea mays
  Clone ID: MRT4577_160164C.1
aataattcgtctgcctgcgaagaagatgaagaattcgaaagtgtgtatttgctcaggttatctttagagcaaagaggttgtatgtatctctcatcagagatcagacagacagagaacttaaaaaaaaaaaaaaaaaaaaaaaaaaaaaaaaaaaaaaaaaaaaaaaaaaaaaaaaaggggggcgccccaaaaaaaggcccccgccccccgggaaaa

SEQ ID NO: 65970 - DNA, 784 bp, Zea mays
  Clone ID: MRT4577_160165C.1
gcggcgctcgagccggccgggtccggaccaacacaccaacaaaccactctccactccactaccacaaccctttcttgaaaccgacaccccgggacgaacccaaccagcgataagacaacaacccctccaggagaaaccaggaagcgcatcttttatgtccggcccaatcgaaaacctcaagtctttcgacccgttcgccgaagcggatgaagacggcggcactgaaaagcagtctcagaactacatccacatccgtatccagcagcgcaacggtcgcaagaccttgaccactgtccagggtctccccaagaagttcgaccagaagaagatcctcaaggtgatcaagaagaagttcgcttgcaatggcaccatcgtgagcgactccgagatgggtgaggtcatccaactccaaggcgaccagcgcaaggatgttcaggagttcctcacggacaagaaggaaggtctgggtctcgaggccccgaccgtgaaggtgcacggtttctaaacgagaccgttgcgcgaagcgactctgaccgagcgctctctccgccggcaatctactccaagccgcacctcaggccgattgattttgcgacttccaggcaccacgagagctcggatatgggcgctcaccacgccgtgcctgttggctcttcccaggaaactggcaacacgcgcacgaaacatttccggctatgaacttggcgtataccagcatgcttacgatggaatgcttagcggttgtgaatggacatggactgtctttggcgattcttcttctttc

SEQ ID NO: 65971 - DNA, 139 bp, Zea mays
  unsure (1)..(139): unsure at all n locations
  Clone ID: MRT4577_160166C.1
gaagagccctaaccagcttagaagagcagtttttggggtcagtatcatccattcatgtttccttgttagctgttcatgcccacagtctctaagaaacatnggtcttatgcagggtgataaccagctaacagcatctctc

SEQ ID NO: 65972 - DNA, 374 bp, Zea mays
  Clone ID: MRT4577_160167C.1
atcctcccgggcaaggggagcttcaatagtatggttttactgggtacaactcaagcacgttaattttgatatggcattgcagggacacatttacaattttcggcttccatgacatatcaccatctccaatacacgtccaaaaaaaaggggagagaaaccaacacgggtacctgaatataatggtacgcagtatattagtcccaacccttttcggggggagaattccaaacctttctgtgaagggtgtcatgatatcgtacttacactttgcaggtttccagattgacaggcgtcatgagctttcaggacgcacaccaaaccatgatcagatctatacatcctgtctcttactttgaacatctataggtaccaat

SEQ ID NO: 65973 - DNA, 281 bp, Zea mays
  Clone ID: MRT4577_160168C.1
cccgtatcctgtataccggtcgaccggccgccctttttttttttttttttttggtggcttttttgggggaaaacaagtaccgtccttagaaacctgtaccatttatctataccgctatgttttttaacattctttgaactacagccccttatttgtgtattaaaacatcgcgattggccttgcctctcctcggatcttaattatgtgggggactaataaccacacgggccctagtcaacccgacttttgcgaaccctggacacattgtcaaccccgtgtat

SEQ ID NO: 65974 - DNA, 654 bp, Zea mays
  unsure (1)..(654): unsure at all n locations
  Clone ID: MRT4577_160169C.1
cgcaaacgnagaagagacacgggagagagggagggctcgctagctaaacaataaccctcactctctactctctagctagctagcctctcagctcagctgtggtggggagaaagaccggaccggaggagagggcgatcaagaaaggttaccggccggcctagaggtagctgctagagccgccgagctcgatcgtccgactccgagagctagcttccgcttccgcttccgcccagggcagtagaagcgtttttacggcaacgctagctatagctagcgctgagagagagagaggtggaagtaacaaggccggtagagcaggcggaagcgagggagcggcagctgcaggcaggggtgggggcagcaaaatggtgggctccggcgcggctgggggcggagcggatcacgcgcggagcaaagaggccgcggggatgatggcgctccacgaggccctccgcaacgtctgcctcagctcggactggacgtactccgtcttctggaccatccgtcctcgcccgcggtgccgcggcgggaacgggtgcaaggtcggcgacgacaacggcagcctgatgctgatgtgggaggacggcttctgccggccgcgggtggcggagtgcctggnagacatggacggcgaggacccggtgcgcaaggcct

SEQ ID NO: 65975 - DNA, 432 bp, Zea mays
  Clone ID: MRT4577_16016C.1
cggtctaggccgcttcttttttgcttcttaactcccccgccggcaaaaggagaagcggcgtttaaccgaacctttcaaccctttgaccgcttgtttcggatcccgaacccgaaaggatacttttcccccccttttttttcagagcggccattggggcgcgaccatgtcggagttgggggaggcggagaccccaaccggcgtggggtaaggggttatccctcacagccacctggcatggtaggctccgccgaaggaatcgccatctgcaccattgggtaaatcgtagctggaggctggtccaaagatttcggaccagaagccgccggggaaatagtcgaacccataagggccggccttaatgaaacaataaggacaacagggcttataaaaatttggtttttttagagaaaacggagtttctccccttaaagg

SEQ ID NO: 65976 - DNA, 225 bp, Zea mays
  unsure (1)..(225): unsure at all n locations
  Clone ID: MRT4577_160170C.1
gtttgtggcttcccaaaaataagaaaacacagggctaggagaaaaaaatagtttttttggncaaaaaacaaaaaaaaacaaaaaaaacaaaaaggcggccccccactatggaacatcacgacccgggaaaaaaataccgaacgcaacctgcaagcaaaccaactatacctataatgaggcgaataataactcggcacaatcaatgacataacagtgtacctcgcg

SEQ ID NO: 65977 - DNA, 579 bp, Zea mays
  Clone ID: MRT4577_160171C.1
ctcatgctacatgtagactgacaaaaaccctaccaggatcatcatcaacttcccggcgcgacggaatggacgaagatcgattccggcgctgcagctcgaagacagcgaggcgtcgtctgcgcagcctcctcgtccttgccgcagactacctcaagtacctcttcacgaaccggcgccgactcctccacaaggtggcgaggcgtacccacgccgtcgtctcctcctaccacggcaagagcaacaagcgtctgccgccatactgccctcctcgcgcgttaatggagcacgagttctcgtgtagcgacagccctagccccgcgttccttgcggccaagagactccagtcacggctgaagcggggtgccgccgccagcgctgccgtctcttcctgctttggtgccaccgttggggcctcgtacgggtcgccaccggcgacacaggaggacgatgtggttgaggaggaagatgaggctgatgggtcggcctgctacgagcttgagcctgacgtggactacagggcggaggagttcatcaatatgttctatgagcagctcagggcgcagaactttcccccagttt

SEQ ID NO: 65978 - DNA, 642 bp, Zea mays
  Clone ID: MRT4577_160172C.1
ttttttttttttttttttgaaacgcgtataatgtttattggtccacaagtgtcctttttgcaagacaaacaattctatggtcaggccaagtcttctttctccgcgccattcaacccatttgcagtggcatactcaagagatactgagcgccaagactagaaagtgcctcgttggctatcaattcggccaggcgggtttgggtattcgttcttgtttccaccgactccaagcccaggttccattacaaggctgttcatttcgagacgttttggattaatgagacgttgtctcccttcaacatgatttgaccaagaggtctcctggtctccttctcgttagtcttagtgacctgcttgacctccacggcttcatcaatgactagattcatgaactcgtcaaatcctctgatcttgccctcaatacggatagagagctgctcgtacagccagatgctgactgtggcgtgttctcggagaagctcgaagatatacttgatgggaggcagcataagacggcgaccaccgccaccaccacgaccagtcattttgtgaggggtagcgcaaagtatcgagaaactggttgagggtgctcttgcgccgaggatcgaggttggaatggggggtagagaggttctatggtttg

SEQ ID NO: 65979 - DNA, 428 bp, Zea mays
  Clone ID: MRT4577_160173C.1
actctcgcgcgttctccgagagtacgacgacccctcgtccggcgcctccggcaggctctcctagagctccggtatcatcaccactaatgcttgacggagctccattcagccgcttgtttgtgagaacggaactggcatgatcaaggctgactttgatgacgacgatgcgccaacggctgatttccccagcattgctggacgcccccgtcactctggcgtgatggatggcatgggccacaaggacggctctgttggtgactaggcccagtccaagcaggcgcatcctgtctttgaagctacccaatcgaacatgacatcgctcaacagtgtgaacgcatgccctaagatgtgccaccacatcttctatagtcgaactccgtgagaccgttgaacatccctctgtcggtgctgaaagaagcccccctcac

SEQ ID NO: 65980 - DNA, 183 bp, Zea mays
  Clone ID: MRT4577_160174C.1
acaaaagctcgcacagtgcattgcattaagaaagcctacacatagccttagaaagaccaaatatgcaggcacagcagtacacattcaaggacaaacagcagttagatcatagtaaccacagaccaagctccaaagatagaaacataagccacaggcacaggcctctaactgctaaggtgggac

SEQ ID NO: 65981 - DNA, 276 bp, Zea mays
  unsure (1)..(276): unsure at all n locations
  Clone ID: MRT4577_160175C.1
gaacccggggcgacgccaccacgcgcgtgggaggaaccaacaaccgangggaagggggagggggacgaaccaacacccgccggaaggaaggaacacggggagggggagagaaccaggggatgcacacgcggcccccaatggggacggggcccggcggaaagcccggcgccggctacaaaaagaagggcgcggcggacagcggccaacaaacaaacggaggagccaggcgaggaggggctaagcagaccccccacaccacagagagaagggggcgag

SEQ ID NO: 65982 - DNA, 370 bp, Zea mays
  Clone ID: MRT4577_160176C.1
acgctacctctaggtagcctcacccggggccgcacagatacctccggctctggccatgggcgcccgctaccatcatccactaggagttagcacgctcatccgagctgcgggtgccgccccatcagtcgacatgccaccgcaggctccgccgccggaggccgccagacacatatcccgacggggccctggtcatgatgggcgagcgcgtctcggtccacgccttctgaagaatccccccgtagagctcgaactcccggatcctatcgtgactacgtcgaaacagcgagttctgcagagaagaggtgcaaatggggtttcttggaacggccacaccatgggtgctgtatggtagcaatcgtgagaggcttgc

SEQ ID NO: 65983 - DNA, 161 bp, Zea mays
  Clone ID: MRT4577_160177C.1
ctagtacacagatcaggcagtggtaatactaaaggtcatcatacacatcttgatcatagggcatgtgcggaagtttactgggccatcacagacttttgttctagtgattgaatgtataaggagtcatagcatgccctacggcagatctggattctaataca

SEQ ID NO: 65984 - DNA, 648 bp, Zea mays
  Clone ID: MRT4577_160178C.1
gcaaaccgttccgattgtggaagcgacgtcgtcgtcgcaaatggattcgcagcgccgtgacaagacttccatccgcgcaaggcggtgtttgcccaacgcccatgctgctactggtagccggcagccgcattgatcgatcgatcgatcgattcccccctctcccacctgcctggattgaagccggcacccactcgcgtccattgcgcggcacggctcgccactcgcgtcccacctggcagtggctcagcagccagcacgacgcctcgacggtcgtgcagtgcacaagggttgggatttccgcccgccaccggcgaccacatcccccaacggccccgtcattatttcggctcatcaaacccgacctgccaagtgccaaccccgctgtccccttcgtcaaggcccagccaagatgcgcatcaaatccacagttattacagcagagctggaggagatgcgcccggtgcaccgtggactcgtgttgcctctgatctgcatctgctccggcctctggatgccatgccagtcaaccctatacccgcgtttggttctccgccgccgctgtcgcctccgcagctcgccggttcatctgccacgcgaataggctgatgacttggcaggtgagcctaccaaacacgtcaacggttacgt

SEQ ID NO: 65985 - DNA, 2185 bp, Zea mays
  Clone ID: MRT4577_160179C.1
tgccaaagccagaggagcgttatcggagcagggaggaagaagagcgctgtgttcgacgcaggagcatttcgagggacagcgactcgactcggagctctggagagatctagcggggctccggtacagccagtgcatggcaactcgcaagggctgagctgctcgtcactggcgtagccgcgtaggaaccaaaatcgggcgtcaggaaagtgccgtcgtccaactgggagcgtgacagcagcgggaggcgccatatggacagggacagcagctcgtcggtctcggcgtcggacgggagctcggaggcgggggagcgcggcgggtgctgctcgtcgccgccgtccacgcggagccgcaccgcgtccgacgcgtccacgtccctctcggaccggtgcagcagcgtcgacgtcgaccacagcgggccgttccagcctgccgccgccgtggccaagctcatcggccggtcgtccccgccgtccgccgccgcgtcgctcagacggctcagcatcaagccccgcgccgacgtgctcgaccgccgctccaccgaggacgagatggagctggtgaaggaacggttctctaagctcctgctgggcgaggacatgtccggcggcggcaagggcgtctgcaccgccgtcgccatctccaacgccatcaccaacctctacgcgacggtgttcgggagctgccacaagttggagccgctgccggcggggaagaaggcgatgtggacaagagagatggactgcctcctctccgtctgcgactacatcgtccagttctacccgtccacgcagaccctgcccgatgggaccaaagttgaggtgcattgcgcttcatcatggccttcttccttcttgaaaatttcagcaccaaccaataaacttgagcaataatgtcgtctagctctcttccaagtaccaatcgacattgttgcgctgctgatcaggatggatcgattcgtgcaggtcatggcgaccagaccaaggtcggacatctacatcaaccttcccgcgctcgagaagctcgacgccatgctcatcgacattctggacagcttccagaaggcggagttctggtacgcggacgccgggacgaggtcgttcggctcggtcacctcgtcctcgtcgtcgaggatgtcgtcttcgtcgtcgttcaggaggtcggctcaccggaacgacgataagtggtggctgccggtgccctgcgtcccggacgcaggcctcaccgacaaggcgcgcaaggacctccagcagaggcgcgactgcgccaaccagatccacaaggccgctgtctccatcaacagcggcgtcctcggcgacatggaggtgcccgagtcgttcatggccgtgctccccaagagcggtcgggcaagcgtgggggactcggtgtatcgcgtcatgcttggcgccgacaagttctcgccggagttcctgctggacacgcttgacatctcgtcggagcacgacgcgctggcgatggccgaccgggtggaggccgccatgtacgtgtggcggcgcaaggctagcggcagccacggcaagctgccgtggagcaaggtcaaggagctcgcggccgacgacgacgacaagaacgtgacgctggccaacagggccgagagcctcctgctctgcatcaagcaccgcttccctggcctgtcgcagaccaccctggacaccagcaagatccagttcaacaaggatgttgggcaagcgatcctggagagctactcgagggtgttggagagcttggctttcaacattgtttcgtgggtcgatgatgtccttttcgtcgacaggtcgataaggaaactgagtgataacctcaagtcctgagttctttatcctgcactgaagcttcccagcaaaaaggttttagatgtctgttggtgaagctgcagaagaagggtgcgtgactgtagtagcggtagtagggtgattttgctgacctagagagatgcaagcctctagctttgcaagaatgcacaatgcagagtagcgtgtctgaccaacagtgaacgtgtgtgattttcgtgtcctttttatttttcagctctcgcgctcttagcttggcagcacgaagattggtgaaagggatcaaaatgtccaatagcataaatgactggtcctgcatatgtaattgattatgatgttatgtcgccatgttagttgatatttcctctccttgt

SEQ ID NO: 65986 - DNA, 239 bp, Zea mays
  Clone ID: MRT4577_16017C.1
gcgcccaacgacaccaaaggggtgttgtggttcaaatcgctcctcgggaaatgactgcccgtcaacgcaagcgcacctgctcccgtacagtgcttgcaattgcaacaaataaaaccaagcctgaattaattaaggttgggaatttaaccttgtaataaccgtccccccaaccgtgttttgtgaaactgttgacggtctgttaacgttatacgtgcatgttattttaaagatttcaaaaa

SEQ ID NO: 65987 - DNA, 2598 bp, Zea mays
  Clone ID: MRT4577_160180C.1
gccggccgggctgggagtgaggtgagctcgccctcctgctcctgctcctgctcccgcagctgcgctgtgctgccatcgctttcccctcctcccagtcccacccccagattcgcatgcgcgcttccctctccaccgccacaggcacagcgtcagcgcctagcttagccagctcgccgccgcaatggcgaccgcgtcggaggacgaggccgcctcggaccgctgcagcggcagctacagccccagcgccgatgtcagcgagtccgagacctccagcgactgctccgcgcccaccacccgccgcttcgcctcctcttcctccgcctccgcctccgcctccgccaccgtctcccgccgcctcgcgtcctcctcctcgtcgctgcccaccccggcatcggccgccgccttctacctctccaagccaccctcctccgacctctccgagatcgacatgatgaaggagcgcttcgccaaactcctgctcggcgaggacatgtccggcagcggcaagggcgtctgcaccgcgctcgccatctccaacgccatcaccaacctctccgccaccgtgttcggcgagctgtggaggctggagccgctcgcgaaggcgaggaaggcgatgtggacgcgggagatggagtggttgctctccgtctccgactccatcgtcgagctcaccccctccatccaggagctccccgaaggcggcggccagttcgaggtcatggtcccgcgcccgcgcaccgacctctacatgaacctccccgcgctcaagaaactcgacgccatgctcctcgccatgattgacgggttcaaggggacggagttctggtacgtggacaggggggttatggtcgaagacagcggggggccattcccgtcctcctcctcgtcatcgtcttgtggccggccgtcggtgcggcaggaggagaagtggtggttgccctgcccacgagtgccacccaaggggctgtccgaggattcgaggaggaagctgcagcaaagcagggattgtgcaaaccagatactgaaagcagccatggcgattaacagcgatgtgctcgcagagatggaaatccccgaaatgtacctggagacactgcccaagagtggtaaatcttgcttgggtgagataatttaccgatacataacagctgagcagttctcaccagaatgtctactggattgcttggatctatcatcggaacaccacacactcgaagtggcaaacagaatagaagctgccatccatgtttggaaactgaaaggccaaaaaaattcgacacctcaagccagatcaaagaaatcttggggtggaaaagtgaagggtcttgtcggagataaggaaaagagccacactttgtctgaaagagctaatggtctattgcagagcctaagattgagatatcctggtctgccacaaacctcccttgacatgaacaagatccagtataacaaggatgttgggcagtccatacttgaaagttactcaagggttctggagagcttggcatttaacataattgcaagaattgatgatgtgatttatgttgatgatgctacaaagaaatctgctgctgccgagtctgtttcgatcttcaatcgtggcaccggtgtgccaattcagaagaggatctctctaagcccattctctattcagaatacgccatatgcctctccattcgcaacacccactttctgctcctccaccccagttacatgcagccctggaagagtacagcccccgttaaacaaaaccaatctaggaaggccagaaatcaaggtcgagaagcttttttctggtgatctagagaaggtctggacatatgctggaaacctgagcgctaggaaagacgctggcgatgctcccgagagagactgatgggcgatggaggaaggtagacttgttatggaaacattatcgctatttagcagcgtactcgttcgtgtttatactgcaaggctgggttcatcagcaagtgactgaattcctcctcctgctgctgctgctgctgctttttgtcgctgaaggtgttggtctgctgcctgttagtttttgtatatgcatgtcaatgaatttgatctggccctctttaatgctcactactattgtactgagccagatcctgtaattgctagtttgagtatttttttttttattgtgaatggatgatacaggtcgataaggaaactgagtgataacctcaagtcctgagttctttatcctgcactgaagcttcccagcaaaaaggttttagatgtctgttggtgaagctgcagaagaagggtgcgtgactgtagtagcggtagtagggtgattttgctgacctagagagatgcaagcctctagctttgcaagaatgcacaatgcagagtagcgtgtctgaccaacagtgaacgtgtgtgattttcgtgtcctttttatttttcagctctcgcgctcttagcttggcagcacgaagattggtgaaagggatcaaaatgtccaatagcataaatgactggtcctgcatatgtaattgattatgatgttatgtcaccatgttagttgatattttctctccttgtaaattatttaaaacgttttaaaaaaaaaaaaaaaca

SEQ ID NO: 65988 - DNA, 554 bp, Zea mays
  Clone ID: MRT4577_160181C.1
ctagaaaacgaaacgccgctccctcgcctcatcccttccctcctcctgcatcctacctccctggtacccgtcacgttcaccacgttcgcccgctcattcaccggcggcgtcgcccagctcggcctcccgccgcccacggaggccaggtccccgggccgcccgctcggtccgccacagaggcaaggcatggtggcgtctttagacaatgtgaggggcttgactttagccatgtcatctagtgcattcattggttctagctttgtgatcaagaaagttggattgaagaaggctggggataatggggtgcgtgcagcttctggaggcttctcatatctatatgagccgttatggtggttgggaatgataactatgattctaggcgaggtagccaattttgcagcatatgcatttgcccctgccgtacttgttacttctctaggagctctaagcatcatatttaggtagagctttactgtcatcgtagatttccttacacctagtgtgcgttcctggttaatgtttgctcatgcaggcagtgctcgcacacttattct

SEQ ID NO: 65989 - DNA, 247 bp, Zea mays
  Clone ID: MRT4577_160182C.1
tgtcatggtttcgttcacatcggacaccatggggttggtcgatgactaaccgataatcggttctggaaactgaggtacattcgtgatcaccaataaatactaaaccaactcatgtatggtttgcaacgatttacgttgcaatgcattgcagatatatagtcgaaggagaagcaagaccagaatgcgtacacagccatatatgcggctggactatttacaatcgacaaggggatggtgagatgcaggg

SEQ ID NO: 65990 - DNA, 348 bp, Zea mays
  Clone ID: MRT4577_160183C.1
gagagacgtcagaggacgtgctgtcccccaaccaaacgtacccttagctgccgacgttggaacaaaggcgcttatttggccgatcgttgaatgtggggcgagcatatttagttacaggcttaaaatcactctctgggatgtttttccacacctgcagaatttcactgcgaaccaagttgattgaatgaaaagcgggagcagaggatgtccatttctgtcaaagatcgatgacatattgatatatgtgatagggttaatagttactgcgaggtcgaatttggaaaccgatgcgctgagaacatgcgtcagtggccgattctcttgcggtctctcccgtatgctgcgctt

SEQ ID NO: 65991 - DNA, 209 bp, Zea mays
  Clone ID: MRT4577_160184C.1
ggtatcccaacctgttatttccgcaaaacaaagtttatccaatccggttcgcatcaagagtacgcaatcaacgaaaacagtccaaacctctctcagtctcggcgccatacatgcaatatgtctacaacaacatgctgacttgatttgtgtttccaagccatcttcgatctggtagcattattcttcgatccccgggccggctctttaat

SEQ ID NO: 65992 - DNA, 1615 bp, Zea mays
  unsure (1)..(1615): unsure at all n locations
  Clone ID: MRT4577_160185C.1
gggtacctcgaggccggccggggagagctccgaaacgccgctccctcgcctcatcccttccctcctcctgcatcctacctccctggtgcccgtcacgttcaccacgttcgcccgctcattcaccggcggcgtcgcccagctcggcctcccgccgcccacggaggccaggtccccgggccgcccgctcggtccgccacggaggcaaggaattggttcttttagtacttgacagaaataaatatattccaggcatggtggcgtctttagacaatgtgaggggcttgactttagccatgtcatctagtgcattcattggttctagctttgtgatcaagaaagttggattgaagaaggctggggataatggggtgcgtgcagcttctggaggcttctcatatctatatgagccgttatggtggttgggaatgataactatgattctaggcgaggtagccaattttgcagcatatgcatttgcccctgccgtacttgttactcctctaggagctctaagcatcatatttagtgcagtgctcgcacacttcattctgaaagaaaatttgcacatgtttggcgttgttggttgcatactatgtgttgttggttctgttggtatagttttgcatgccccaaaggagagaaaaattgattctatgaaggaaatatggcatcttgcaacacagccaggttttattgtttattcatgcgtggcagtggcctgcgttctttttttgatatttcgggttgttgagcgctctgggcacagattgatgcttgtttacatagcaatctgttcattaatgggatctcttacggttatcagtgtaaaagcagttgctattgctttaaagctatcatttggtggatcaaatcaattcatctacgtccagacatggttcttcatagtagtagtcactatttgctgcttggtgcaattaaactacttaaacaaggctctggactcgttcaacacggctgtggtttctcctgtatactacgtgatgttcaccattcttaccattgttgcaaacatgatcatgtacaaggactgggcctcgcagactgcaacgcagatcgcaacacagctatgtgggtttgtgaccattgtcgcggggacttttctgcttcacaagactagggatatgggaaatccaccaccaccaccacctgaccaaatgtgcctgcaagaagccggggaatgtgctccacggtcaatgaccagttctagctgaacacactaagatgtcaaaatctcacagcctctatggactgaattggaattttgagctatatggtgacctttgtagatatattaggaaggagtaaagattggagtgcccagcagttggacataccgatgaagttttacgtttctgcaaaagaaagaatgaactgtatgaaggcatcggaatcttgtgaagacatgagattcaaactagctacctaactttggtaaatagcttgttatgccattttaaaacgatcatgatgctcaagaggcagggcgaattaggcttctctataaaattgtgataattaaaccctagttacaaatttaactttacccgagtgtccaatatnnnnnnnnnnnnnnnnnnnnnnnaaaaaaaaaaaa

SEQ ID NO: 65993 - DNA, 4395 bp, Zea mays
  Clone ID: MRT4577_160186C.1
gaaacaacctgcagctcgcggcgtgtcgcgtgtgcctgcgcccgctgccacatgttaacttcgggcagccggcaaaagtcaggcctgcctgtaacctaaaccgcaccgccgatgaccgttccattcccgtatctgtttgccccgccgcgacacgactcgggcttggtggcggggcgcctgacggcatccatgcggcagttgaacaacgacagctgagccgcggaactgggaacaacacgcgcgctcgcgagtcggcagcaacccaggtgaaaagcaggactgcccgcccgccagcggcaacgaccaagaaacatactgatgtcccgggccatgcaacgagttcgtcgtcgcgccccagggcatgggtcttgacatcggccaggccatcgtgtcaagcccgttggaacaggcagagaatgcacatgcacctgttcgaccagaccgggtccgggccgggccgcacatgcatgacgcaccgcatcaaaacgaaaccttgcatgttccaccgccccgccgcgcccgtcggtccacgaacagcacgacgccgccccgccacgtcgtcgcgtgcgttggatagtatggcgcgcgtcgtcccgtccgtggaaaaaagtacgtgtccgggtcggggaaatgccggccgtcggccgacctgtcgcggcggcctgcaggtgcaggtgaaggcttgtcgctgtgaggccgcgcgcgggcaggtcgccccgtgcaccaaccgctgccgcctcttcagtccggcaagggctggatcaggcgggggcgccaggcgagggaggccatgcgatgcgagcggatatgcgtcattgcgtcggcatcgacgggccgaccgcatgtcttatccggtttctgggccagggaccgtgcttatctggacgccaacttggcaccgcgccgctctcgctaacatattatccggtgcctggtgcccgatgagaaaaaacagagagatcagatcatgcataattgcaaatagagtctgacctcagttgggtactaactccgttctcaaatatttgtagtccgctagttcattttcgaactaaaccgtcacaaataaaaaagagcagagagaatattacttagagggtgtttgaatgaaatatagctaataattagctgctaaattttgatagatacatctaaaaatcctagctaatagatcagctattagttattttttagtaaattagttaatagttagctagctaattccactagcaattttttagccaactaaggtctagtttgaaacctctaaaattaatagttagctattaaaaattagttattggattctaaacactatcagctaattgttagctacttcacaccaaaaaattagttcattagctgacttaaccatataataatttattagctagctaactattagctctataaaatctaaacagggtctagctattagctacggtgcattcaaacactatcttaatatctgacatggcacgtcgatgacgcgtcagggttggaacgttccactgggacgcttgcacggttggacctgcatctgagttttttttagaaacttctcgggtatatatagccattgtgcctacgtgtacatgcacgggatgaacgcaactcactgccgtgtagtattacttttcgttattaccgtggcagccgtgtttgtgtgttctcccagtttcccgcgcctatagaagcagccagcaaacctcactcctcaagacctcaacaaagcaagcaatcgaacgggcacggctggtttccgacgagttctgtcgtgccatggatccgcgacgcgcatgctgggagagctcgacggaggacgtgacgaggccgctgctgcccgtgcacgacgacaggcctgcgggacgctgctcttgctccgggctcgggtccctgctcaccaccaacaagtacctggccgtcgcgtcgggcccgctggcgtgcgcggtggtctgcgcgctgggagacttcggcggccacccggcggcgcgcaacatgctcggggtgctggcgtgggtgttcctgtggtggatcacggacgccgtgccgctcggcgtcgcgtccatggcgccgctgttcctcttccccgcgttcggcgtatcctccgccgacgccgtcgccaaggcctacatggacgacgtcatctccctcgtcctcgggagcttcatcctcgcgctcgccatcgagcactacggcatccaccgccgccttgccctcaacatcacgtccctgttctgcggtgacccggtgaagccgcacctgctgctcctcggcatctgcggcacgaccgtgttcatcagcatgtggatccacaacacgccgtgcaccgtcatgatgatccaggtggcgacggggatcctgcagcggttcccgcgcgaccagcagctggagggcggggccgacgcccgggagctccagcggttctccaaggcgctggtgctcggcatcatgtacgcgtccaccatcggcgggatggccacgccacgggcgccaacatcatcctggtggggatgtggtccacctacttcccggagcagcgccccatcaccttgctcccctccccatgacgctcgtcctgttcgcggcgctctgggtcacgctctgcctcaggtactgcaccaagaacacggggagggtgctctccgcttacctcgacaggaatgacctcagaagagagctcagcttgatgggtccaatggcgtttgcagagaagatggttttggccgttttcggggctctcatcgtcctatggatgaccaggagcctgacggacgacatccctgggtgggcggtcctcttcgacggcagagtcggggacggaaccgtcactatcatgatgacgacgctgctgttcatcatcccgagcggcaagagcggcggcgagaagctcatggactggggcaagtgccggaagctgcagtggcacatcatcctgctcctgggcgcgggcttcgccatcgccgacgggttcaggtcgagcggcctcacggacatcctctcctcggggctgggtttcctgaagggcgcgccggcgctggccatcgcgcccgtggcctgcgtcttcagcggcctcatcacggagttcacctccgacgacgccaccaccacgctggtgctgccgctgctcgccgagctgggcaagtccatcggcgtgcacccgctgcttctcatggtccccggcaccgtcggcgcgcagctgtcgttcctgctgcccaccgcgacgccggggaacgtcgtcgggttcggcaccgggtacatcaccatcagggacatggtggtcactggcatgccaatcaaactcgtcggcgttgcagctctcacgatactactgccaactctaggttctctggtttttggcatggattcgaaaatgtaggaacttggacgttagtctagtagcagttgtagaacgttcaggctgtacagtttgtcaaattcgttgcctcaggaagaaaatgaggttgtattgtgttgatcgtattccttgcttcaggtccgagttagaagagagatttgtacgcaaatgatttcatatgtaaacatgagatttatagcttaaaaaaaaaaaaaaaaaaaaaaaaaaaaaaaaaaaacggtgaagcacctgctcctcggcatctgcggcacgagttcatcagcatggatcacaacacgccggcacccatgatgattttttttttggcaaactacgtccatgttattacttggagtatagtacacagaagtatatgttggttgcctcaacgaaataagcaagggcagcaccgcagcagcatcaaaaccgcgttgtaaagtggcccggaaaaaaatctaacactttttgttatctaagaacggcatgccacatctccctcatctgctgttggcttggctgcacaacttggtgatgcgcgtcacatgtgctacgaatcgtgataatatctcgccttgctgcttctcatcctcccaaaccgaggatcgtttgccgatagagacggcccacagagagaaaagcgccccacggaactagctatgtagctgctgctcttgatctgccaggccactgaagctgcagtgctcaatctccactgcacccttcttcgaggttcgagcgatggagaccggcgccggcgggagggcatgcgttttcttgtgcacgccgcagctggccccctgcagcgcaggccggccgacggatccgacgccggcagcgcgaaatgttcgccgtgccatcttgatcacgaccggccttcctccaatatctccgtgtggctaagcttcctcgcgccgtcgcgcgtcctccgattacagtcgtgcgcgattattggggcaccgtgtgttcgcttcacaagccaatagatggtgttggtggaggagttgccagaacgccagtttcgggcctcgtgccgaatt

SEQ ID NO: 65994 - DNA, 250 bp, Zea mays
  Clone ID: MRT4577_160187C.1
atgaaaatgaactgattcatataagagggttacacgggttctggaagggcactatgctccaaaggagtcctaaagcgtgaaagccaacgtacaaccaaaggaaaagtatatttgaacaataaccgagatgagaaaggagcaccacattttaaacagtatatacttttttagatgaacctcggaaaaagtccattaagtagctcctgaaagcatttatttgacatcaacctgagcacatctggcgataaat

SEQ ID NO: 65995 - DNA, 314 bp, Zea mays
  Clone ID: MRT4577_160188C.1
cccccctcttccggacgaacttggattttatctcgagaagaaaatcttgtcaaccagtccgttataaagattgggccaaccacattaagtttctattctttttctttttcctttcccttaaccccttatctagctatataactttacattttctcatttttttctttttttttttttaaaatttattttttttttttctttttcttttttttttttttcttactctttatttttttttttttttttctttattttattttttttttttaattttttttttctattttatcttgttggtgtggtttttttttttt

SEQ ID NO: 65996 - DNA, 285 bp, Zea mays
  Clone ID: MRT4577_160189C.1
cgggggtgtttaataatagggtttttcgggacaaattcacaaaggctaaaaataaaatttgggggaggtaattaatttccctcctccgggttttcaaaaaactgaagtcccaaatgcctcccaatttacattttgggggccgcaaagtagcccttttttttgttcttggaaaaccccctttggcttttaaccggtgccccttaaggaattgcattgtccctcggggggcaaaaaaaaaaaaacttgccaaactgtttttggaggaaacatttttccccccccgcg

SEQ ID NO: 65997 - DNA, 263 bp, Zea mays
  Clone ID: MRT4577_16018C.1
aatggtgtgggtttttactaatgtgtaagttttgcaataaagtcttacaccggatgttgtgaactacacgaaaacagatgggtgaaaacccacatagtcatcttacgacaaaagccacttagggcggatcacaggaaagaagaggaacattttcttttaaacagagggtaaaagagcgtagagtcttaggaaccctcgggggcgttctaaggcttgggattgtaaggaccgacctactggtaggcggtctcaatcggttaaca

SEQ ID NO: 65998 - DNA, 604 bp, Zea mays
  unsure (1)..(604): unsure at all n locations
  Clone ID: MRT4577_160190C.1
ngacggctccagcagcgacgagcagnagactgagttcggcttttccttaccaccaccggnacaagttagcaacaaggcggattggaaaaagacacttcagaggtgaagagttctgataggtgctgcaatattgcctcatccgtcaaaggtagcaacatgtgngagaagatgcatatttcattgcagccaatggctggtttggtgtagcagatggagttggccagtggtcatttgaaggaatcaacgcagggctttatgcaagagaactaatggatggctgcaaaaagttcgttaccgagaatcaaggggatccagatcttagaccagagcagatcctttccaaagcagtagatgaagcatgttcacctggttcttgcactgtattagttgctcattttgatggccaggcccttcaagcatcaaatattggggactctgggtttatagtgataagaaatggagaagtgttcaaaaagtctaaacctacgctttatggtttcaatttcccactacaaattcagaagggagatgacccctcaaagtttgtacagaattatgctattgatctagaggacggcgatgcaattgtgacagcaaccgatgg

SEQ ID NO: 65999 - DNA, 2361 bp, Zea mays
  Clone ID: MRT4577_160191C.1
cctttattttttttttttatcaaattagtttttatatatatatataacacatacactaagtattatatgaatccattagaaaccaaaacgaattttaatttatgacagaaggagtacatgacattggtttaatggcaagggcaacatctaaatgccttatatttttatagcgaaaccaaaaatcaaaatgtggcgccggtgcactggcaagggcaacaggaaggggcttcgctacaatgctgatgtccaatggttattggcccgcctattgatgatcgagcacggtgtatgatgctgatgcatacgcccttaactttccagaaatcgccacatagctgcagttctagcagtacagaatactgatagggcaacccgcgtggtcgcttggtgttgagcttccacaaaacatgagcttcttttctgcatagtcatcttagcctatcctcttgaatttcagtccggacaattgatacaacgacggctatgtcatccagtttgcccccactgtagccaaggtacccagccgagagagcagcatctgaaaatgggcttctcccagccccagacctccctacttcctgggccttcacagccaagtgttccgcaatctccgctggttctagatctgcctgtaacgatttggagacaattccagctatttcatgctcgtatacattatcaaaaaggccatcggttgctgtcacaattgcatcgccgtcctctagatcaatagcataattctgtacaaactttgaggggtcatctcccttctgaatttgtagtgggaaattgaaaccataaagcgtaggtttagactttttgaacacttctccatttcttatcactataaacccagagtccccaatatttgatgcttgaagggcctggccatcaaaatgagcaactaatacagtgcaagaaccaggtgaacatgcttcatctactgctttggaaagaatctgctctggtctaagatctggagccccttgattctcggtaacgaactttttgcagccatccattagttctcttgcataaagccctgcgttgattccttcaaatgaccactggccaactccatctgctacaccaaaccagccattggctgcaatgaaatatgcatcttctccacctgttgctacctttgacggatgaggcaatattgcagcacctgacgataacacacgtgtccgttgagctattggaatcatcctatcagaactcttcacctctgaagtgtcatttttccaatccgccttgttgctaacttgttccggtggtggtaaggaaaagccgaactcagctctctgctcgtcgctgctggagccgctggactccgtttcaacgtcggtgtagaaatcctgtgcagtggagccttccgatgcggcttcggagtcctccaaaccggaagtcgccgcctcatccaagccaccactcacatcaactgctgagtcatcctcgcttgccccgcgcccctccaaagcagtctcaatcgtatccatggcagcaccactggtcggcatgccagcctcaacagcgacgccgtcgccctttggcccatcctctgatctcgacgggacaagagactctgcggatgatggcctggtgtccacctcctcaacggcagcattggaacccgcctcctgctccggcgcctcctctagcgcagcggaagtggcaccggttaccgcgccggcgtcaggaggtggaggtgtcggccaggcctcggctgcggcattcgggctcggcttctcaaccccagccgtggtgcctattcgcacgccgtctaatccatgttcagagtcaatctccggctccatctggctgccgggcacagcgcccgaggcaggggcaactctggagtaagggctggtctttacgctcgccggctccggctccagcgccttggacttaggatggccgaaacggaagacgatgctcccgtccgccagctcggtagtggagtggagttcggggaccgcatggcgcggggacggggccgtcgtagccgtggcgcttgtgtgcatgcggcggagcgcggggagtggcaagggcggcgctggcttcggagagagcttgcagttgcgaaggtccatcagccccgctgccaaaggcaactctgccatggcttacctcctgtgagagagagagagaaagagagagattgatttgaatgctgtgactgcggagcttcagcctccagctgtggagtcgaatggtggtgaggatggatcgtttgagctctcgagaactcttgaccggaaggtgcgggtcgctgctgactgctgagtgggctcgacgtgccgtgaggagttaccgcaggccgaggtcccaatagacgtatcccggccggcctcgagg

SEQ ID NO: 66000 - DNA, 1205 bp, Zea mays
  Clone ID: MRT4577_160192C.1
ggccgcgggttttttttttttttttttgccaaaacgaattttaatttatgacagaaggagtacatgacattggtttaatggcaagggcaacatctaaatgccttatatttttatagcgaaaccaaaaatcaaaatgtggcgccggtgcactggcaagggcaacaggaaggggcttcgctacaatgctgatgtccaatggttattggcccgcctattgatgatcgagcacggtgtatgatgctgatgcatacgcccttaactttccagaaatcgccacatagctgcagttctagcagtacagaatactgatagggcaacccgcgtggtcgcttggtgttgagcttccacaaaacatgagcttcttttctgcatagtcatcttagcctatcctcttgaatttcagtccggacaattgatacaacgacggctatgtcatccagtttgcccccactgtagccaaggtacccagccgagagagcagcatctgaaaatgggcttctcccagccccagacctccctacttcctgggccttcacagccaagtgttccgcaatctcctgcaagtagaacaaccattgcaattgagtcattttattacgcactggacatttttatttaccaagataattgattctgaccgctggttctagatctgcctgtaacgatttggagacaattccagctatttcatgctcgtatacattatcaaaaaggccatcggttgctgtcacaattgcatcgccgtcctctagatcaatagcataattctgtacaaactttgaggggtcatctcccttctgaatttgtagtgggaaattgaaaccataaagcgtaggtttagactttttgaacacttctccatttcttatcactataaacccagagtccccaatatttgatgcttgaagggcctggccatcaaaatgagcaactaatacagtgcaagaaccaggtgaacatgcttcatctactgctttggaaaggatctgctctggtctaagatctggatccccttgattctcggtaacgaactttttgcagccatccattagttctcttgcataaagccctgcgttgattccggccatggggaagaggagaaaggtcgccaaccatggggaagaggcagggaggtgcatcaagggcggcacatcagaggtggaggcgccttgggcagcgcatcgtgggcgcctgggcggtttgtc

SEQ ID NO: 66001 - DNA, 503 bp, Zea mays
  Clone ID: MRT4577_160193C.1
ccggccgggattcaatattgaatacctgctgaggttttgatgtgaaagttcgaatgtattttctgtagggttcaaggaggtgctcatggacggtggagctacttacgcgtacgaatgaggatgtgccaccaacaccccaattgtatgtagaagaagaatggaaccacgacgatcatagtgtgctctgatgctgaactctacaaaacgcttagaccatttgtattcaataactcaactgatacttgatctgtactgcacttctgatcaataacgtcttatacgtaatgatcaaatacctagcctcgcgagcatactacgtcctcctcatgatccctttatatagagttaaatgtacgcttgatagacacacgtgtcaaacgggcctcctgagtgaagaagttatccgttacaatgacgcactacgttggatatctgcgagtacctatgctgaaactgtgaacacggtatgtgacttgagctgccgcagctgaagtgggttattg

SEQ ID NO: 66002 - DNA, 312 bp, Zea mays
  Clone ID: MRT4577_160194C.1
gatcacactctttgagagaaggaaaaatgtccggaaaccctacctgccgatctggatggccaaccctcacgttttcttcgacatgaccgtcggcggcgccccggcgggccggatcgtgatggagctgtacgccaacgaggagcccaaaaccggggagaacttccccgcgctgtgcacgggcgaaaagggcgcgggcaagtccggtaagtcagtccactacaagggctccaccttccaccgcgtaatgcccgagtttatgtgccatggcggcgacttcaccacgggaaacggcaccggaggggagtccatcta

SEQ ID NO: 66003 - DNA, 500 bp, Zea mays
  Clone ID: MRT4577_160195C.1
ccccccccttttttttttttttttttttttttttttttttttttttttttttttctgtccccgggggggccctcttgggggcgattggcggcacaggggggggcggcccgggggggcccccacccggccccaacccgggcggggggggggggagaggtgaacccgggggcaacccgcaacccccccaaattcccacaccacatacaacccggggacaaaaaggggaaacccaggggggaccaaagagagaaaaaaaaaaaaaaaaggacggcccgccaaccccccgggaaacccgggggaaccccggcggcaaaccccccacaaaaaacccccaaaaggccgggaagagggggggcgggtaaggggccccttcccgactccccccccacgcccgggcggcccgcgggcgcgcgcgggccgcgcgccctccccggccgctctgggggggtccaccgggtccccgcagaacccggggaacacccggggaacaacatggggcc

SEQ ID NO: 66004 - DNA, 392 bp, Zea mays
  unsure (1)..(392): unsure at all n locations
  Clone ID: MRT4577_160196C.1
gcggtatgatttaagatatctgaattggctattttatttcttgatatatttgttttattattttggggtgggaccaattttgggccgtgacagatcctacccccttaacagaaatctcgtcctcgagatttgtaagaaaagggtgtataactatgttacctcaaagcatatgcacaaacaaaatctcagcatgatgcataatttattagcaacacatggggtcaggtagaccttattattcctcctaaattagtatcataccgactacaaactagagtaacacttagatcttacaaatagtagtacatatatatatatatatatttatgtatattggnggagctcgtggtggcggaggtagtggaagttgttatcttatcttttcattcatg

SEQ ID NO: 66005 - DNA, 292 bp, Zea mays
  unsure (1)..(292): unsure at all n locations
  Clone ID: MRT4577_160197C.1
ntcacgtttttatatcttatttatattttagagagccacatctgtatcaaattactctcatgagtttctgtttatgtttgttggtctagatactctcatgatttctaaggcaattttgtttctgtcacaaactagatatgcatgagaaactggatctggatatggaattacaaattgtttctggcagattctatttatgtttgttggtctgccaacaaattgtttatgttgctactatagttcatatgattgtaattcaaatgattggatattcacaaattgttggtctgcc

SEQ ID NO: 66006 - DNA, 863 bp, Zea mays
  Clone ID: MRT4577_160198C.1
attcggctcgagatctctcctcaccgcacacctcctctgctctcatttcgttccccgacgccaccctcttctgatggcactctcctagtacctcctccctaagctcagttcggcgtggaggccagccaccagacttcgcacaccaatctcgccggctgctgcccttcttggtgcactcgccctcacctctactccagcggcgctcggcgcacgtgctcggccatggcgtcgggatcccgcactctgtccatgtcgagctccctctacgtcacgccctcagcgcctcgctgtccttaggcgtgtgttcctcagccccatggccacacccctgctcctctccatccatggctgcgctctcccctccgtgctcaagcttgccctcagctcctggccatggagcttgccctggcccctgcgcgctcattgtgggcgctcgcctgccttgttcctctccccaactagagctcgacgtcggcacctaggtaggccgtccctgtttcccctcgtttctccctagtggatggtcctcggcgctgtcggcctcctctttagggccactcctgccagctcccttagcccacaagccctacccctctcagctctggtgttgtcaactccggctgtgcgccgtcggccatgcctccccatgtcgtgcactcgccggacctctgcctcatcgtcgtcctcgtctctagccgcgcctctcagctctagtgtgatctatcgatgttatgctttaaaacttaagatctgtgtttaattattgttgctttctgtttgagttaagtccgattatctcgaagattaaaaaaaaaaagaaatgagggcggccgccggggtggataacacgcggcccaaaaatt

SEQ ID NO: 66007 - DNA, 842 bp, Zea mays
  Clone ID: MRT4577_160199C.1
cattgggtacctcgaggccggccgggatgccccttccagtccgtcaccatcacgcggcgcctccaactacgcccgagccatcagcgcgcccgctgccaaccacgcctcccatcaacgccgcgcctccactggagccatcctcgccccaaatcccaacgcccttccccgaatcctcgccgcagtcgacgccgtgtctcccatcaccatacgtccaccggcgtcaccatgcctccacccttgccctccccgccccctcgccaatctcacagcggcacgccatcctagctcggcaaactctcttccccaccacatccacacccgagcctgcctccctcgtgctccctactgacgcctgcctcatgctcctggtcgcccgtcactccctctcctccatcgtcgcctctcgcacacgcacagaggtgagtcccccctccccctgctaggtctctgattcttcttatcgacgagcaagtacggaggagctagcggagcccacaagctcgacccgcgaccgaaggtacaagagacgctgatgttcaggctcttcatccgcgcgtagaaaggatggcggcagcggcagacctactcggcgtcagttgcgttgtctactgcgaatttttgtttggtgatccatactttcgagtgcatccccgtgccggaagcggtcccctctaacgactccgccacgccgactgaggccgacctgttagatccccccatcgaggctcctactgagatgactccggtcgcgaagaggagcccagttgagctcctttcgcgtgtctacgtcaaattcaagagggatctgtagaggtttaccaacgttatcacttcagcacctg

SEQ ID NO: 66008 - DNA, 127 bp, Zea mays
  Clone ID: MRT4577_16019C.1
agctagtccgcccataagtacgcaacgaggtgagcccgagggagatggacaaggtgaacgtgctcctaggcatcctatacaacaacatagttttccataggtgctcggcagcaccagtgagtagttc

SEQ ID NO: 66009 - DNA, 685 bp, Zea mays
  Clone ID: MRT4577_1601C.1
ggcgattgggtacctcgaggccggccgggagaccggaaaaccccatctccccccgccgccccaccacgcacgatggccgccgtaaggtcgctgctccgctcgtcggcctcccttcttcgcgccgcccccgccctcgcgagatcctcggctaccacgcgtccgtctcttcggcgcgcattggctgctcctcctcgccttctccggtcgcccgtcgagtcgagcttctgcgtggagtcgcttctgcctctgcacaccgccaccgccggtgcacgcatgacgtccatgctcgccgctcctggccaaggcctcggctggctcacccaagctgaaactgacggagtataacgccccctgtgggtgctttaggaaccaggacatcaattgtgcttcgagttcttctgtgcctggaggaaacaggaagagttgattggaaaaagaaaaaatgggatgtgtttttctttttgttcatgtgaactgagatacgacttaataaactagatcttcgaatgatgctctgacccccccccccctttttttaatgttttttcattgactaaaacggttatgtaatgataactatgtgacacttgttttgtttggtgtgattcttcagcgtagcctggtgatcgagactcatgcaggcattcgcttttgatcgcaaaaaaaaaaaaaaaaaaggccccta

SEQ ID NO: 66010 - DNA, 599 bp, Zea mays
  Clone ID: MRT4577_160200C.1
gaggggccggccgggagatacattttactcagacattcatcctaaggaacgacatgtgggacacatcttcgctaactgaaaccaatgatagggaatgatggtgaacactcggaataggcggcatgctccgcaagtccctcgaggtggactgcttactgacttcggacgtcatggcgacgaaggtctgcgaggaggagtacaacgacgctggcgcacatctactcgatacgcaatgagctatggtcatacgatgttcaacgtcttgagtactccacacaagcgagaagtacacacccctgtgcagatctacaacaaagtgatctctcatactaagagagaatgtctcaagaacgtgaaagacccaatgcagaggcacttcatcgagaagtgcctaacaatcggcatgtcagagagtgacatccagagaactgctcgaggatatcttcctacaaagagataagatggttgcttctttgcaagctgagaaattaccatgagcgaaccaattatatacctcagcctgcatatatgaggcataactacagtgatggctccatgaagagtaatctattctgccaaagcattgatgcagatgctct

SEQ ID NO: 66011 - DNA, 451 bp, Zea mays
  unsure (1)..(451): unsure at all n locations
  Clone ID: MRT4577_160201C.1
ggccggcccacgcaaccgatngataccaactagcaacatacatagtttatatcattagcaacatcttaccaccaaggagactcattatttatgttttttcttgccctccaagctctttcaacaagtgttgctaccgtaactattatattacaatgctcacaacaatactctctttcctgtgacagccgctagatttgaatacccaactataacaatcctacaggctacatgaggccatcacagcaagcatcttacggtcattagcattttactgtccaacatccatttgctctattgcaacaaccatccttagtgaatttatatcttcaaagaaatctctattcatcaactacaacatcatattgctttcaactaataatccaaattattttcatcgtaccatgctgctttaccttcaataataatcaaattcttttcattcataacaact

SEQ ID NO: 66012 - DNA, 559 bp, Zea mays
  Clone ID: MRT4577_160202C.1
aatcaaacttgtccccctgctcctctcttgccttgtccgatcgacaacagcagccaagcactaactagccgcgcgcagggatggctcgccaaggtatggtcacggcgctgttgctggtggtcctcgccgccggctgctgcgcgtcggcgggcgccgtggcgtacctctccaagctgccggtgaccctcgacgtcaccgcctcccccagtcccggccaagttcttcacgccggcgaggacgtgatcacggtgacgtgggccctgaacgcgagccagccggccggcaaggacgccgactacaagaacgtgaaggtgagcctctgctacgcgccggtgagccagaaggagcgcgagtggcgcaagacccacgacgacctcaagaaggacaagacctgccagttcaaggtcacccagcaggcctaccccggcaccggcaaggtcgagtaccgcgtcgccctcgacatccccaccgccacctactacgtgcgcgcctacgcgctcgacgcctccggcacccaggtcgcctacggccagaccgcgccctcctccgccttcaacgt

SEQ ID NO: 66013 - DNA, 139 bp, Zea mays
  Clone ID: MRT4577_160203C.1
ccaactaaatctgggttggtcacaaagttttaggaaattccaggttcaattagtggtgtatcctttttcccccaaccaataaaatctattgttttccggtggaacctaatgtgtctgtaataggatggaattgaaaccc

SEQ ID NO: 66014 - DNA, 362 bp, Zea mays
  unsure (1)..(362): unsure at all n locations
  Clone ID: MRT4577_160204C.1
gtaatatatcatcgatagcccaacggcacatgcgggagtatagagcagtttttcagggacaaaaacatggggccggtgagcaaaaatggaagggaaggaagaggacctgcgccagggcgccaacaagttatccgagcgggaggccaatgggacggaggaaaaggtaaccggggccgggacgacgacaaggactacaaggagcccccgccggcgccgatgatcgagcccggggagctcaagtcctggtccttctaccgggcgggcatcgccgagttcgtcgacaccttcctgttgctctacatcaccgccctcaccggcatgggcgtctccaagtncacctccaagtgcgccaccgtcggcat

SEQ ID NO: 66015 - DNA, 122 bp, Zea mays
  Clone ID: MRT4577_160205C.1
tgttctacgcggcgagggccacgcgcatgtcgccgtttttgagccgtctctggaggctaacgcctacgatgggaacctagccttgcgcccttactgcgagggacttgcgcacatcttcgacc

SEQ ID NO: 66016 - DNA, 551 bp, Zea mays
  unsure (1)..(551): unsure at all n locations
  Clone ID: MRT4577_160206C.1
gattaaacccggctctgactgataccccaccgtagacctttagattttcgcactttcttccccgtcttggctgcgagtacattggctctatgctacgcggtgcatgatggacaaggaagggatcggtaggcttcacactatacgcacactctctgcagcttcaaggctgtcctacagataaggcccctatgatggacagcatcctaagggcgcgatgtattcggagtgagcaaggagcgtgcccactgtctacctctctagagagatgctatacctggctgctgacgttgtttacatggtcaagcttatgggacgcgacagccagaagagcgtgctcgacgcgccacaatacagctacatcctggacgcgaccgagaaggccggtcttgacctgccatactgatgctgcgctggcggcgtgctccatgtgcacatgcatgctcttgtagtgctgcagaaagcaggcagagcaagcgctcatggtgaggctgtngatcgaggcctaagtaccttgactacctgctggtggacgtcccaggatgcctgcgtat

SEQ ID NO: 66017 - DNA, 277 bp, Zea mays
  Clone ID: MRT4577_160207C.1
ccccccctcccccccccgggggccccttcaaagggaaaattcaaaaaactggggggcctttatttgggaacccccccccgccaccaaattggcggaataaaagccaaaaactttctcccgggaaaaattttattcccttcaaattccccaaaaaaaaccgccccgaaaattaaaattagaaagccggggccccccatggggcgagttaaccatattaataggggtggggcaacccgccctttttccgggcgaaaaacctggtccccccttttttttt

SEQ ID NO: 66018 - DNA, 666 bp, Zea mays
  Clone ID: MRT4577_160208C.1
ttctcttccactgttccagccatgttcttggatggcgggggggtgagtaccacacaaccctattagtctccctcaaatcgtgtgaacaggggtatcttcttagatgaagtggcgccaagtcttcataggcagcagtttatcccttctctatgatctggtagagtggacgagttggacctgggggggagcgacatggagttctagaacattgcatcatttcaagaccttcgtctgtccaagttcgctgccaactactatgctactccggttcgtgatggtcacaggggtcgcagtcattctcgattagttggattttatcttattgactcgggttaccctaaccatgaaggatacctagctccttacaagggaactaagtatcatgtgccagagttttgaagaggccctagccaaatgggaaggagttattcaacttttgtcactcgtctcttcacaacgtcaccgagcatccgtttggcgtgttgaagatgaaatataaggtcttgttacccttcataacttcattagagaaagcgctatggcacatgctgattttgaaatgtgtgacaacgatgagaactatataccgattcagagcaacaatttgtttgaagaagatggcgatgaagaacaggcatgaaagttttttgtgatacattgcaaatg

SEQ ID NO: 66019 - DNA, 344 bp, Zea mays
  unsure (1)..(344): unsure at all n locations
  Clone ID: MRT4577_160209C.1
ggcgcgcggattcggcttcgtcaccttctacacggaggaggcgatgcggaactccatcgagggcatgaacggcaaggaagtncgcggtcgcaacatcgccgtcaacgaggcccagtcccgcggcggccgtggaggcggcggcggctgcgggtacggtggtggccgttgaggcggcggctacggcggtggcggtcgccttgattgcggcggccgctacggcggtggcggcggctacggctgtggcagcggcggttacagtggtagttgcggcccattcgtaagtggcaacagtggcggatagctatggttacttcaactggtacattattatctgaacttttatg

SEQ ID NO: 66020 - DNA, 220 bp, Zea mays
  Clone ID: MRT4577_16020C.1
ctggggacatttgccgttccttggatcctcaaaaaacaacaaacacacaccttcttacagtttactagagtgcaaaacccaccccctctcacgctcaaaaaagctgttgcgtccagaaaaccaatgactttccttcaaatcaaaagcccaacccatccagccagccagccattgcttatcacgagaaggtttcgggcagaggctggcccttcaggaaccc

SEQ ID NO: 66021 - DNA, 192 bp, Zea mays
  Clone ID: MRT4577_160210C.1
gccggccgggtcaggggattacacccgatacgttaaccgtgctctcaccccgcgatgcgagatccattaccgcaggtgagacgcaagtgttcccgactgcaaaggatggagcgaaaggaaaccaatgaatgcgacgtagatcacttattaagccgcccagcgtttacaccttatgccctccgcttctatgat

SEQ ID NO: 66022 - DNA, 444 bp, Zea mays
  Clone ID: MRT4577_160211C.1
cccaacccaaagtttatataggggtggaaaaatttttgaaaaaggtttaaagggaggggggggggggcaataattgaaaaaagggataaataaaatcaaaaaaaaaattggggaaaaaaaaagaaacaatggggggggaaaaaaaaaaaaaaaagggaaaaagggaaaaaaaaaaccaaggaggaaaggggtaaagggggacccaaaaaaaaaccaaaaaaaaaaaacgacggggggaattagttattagttaaagaaggaattagttagttagttagccggggggggggggccggggggcgcgtttaaatttttgccggggggtttggagggaaaaaaattaaccaactgggtttgttgaatgttgcaaaaaccaataaccggggggagggggtccgggaaggaattaagggcctcctgaaattttttgaaaaccgggggggg

SEQ ID NO: 66023 - DNA, 166 bp, Zea mays
  unsure (1)..(166): unsure at all n locations
  Clone ID: MRT4577_160212C.1
gccggattctctactgccgagagtctgacagcaatcagtaagagaaatgcacatgagtgcgggaagaaataggaggccagcggacacatcactccgacgccggaaggataacccccgccgcgcgagaagacaacgattcgaggaaccancgcctatcctgacctaa

SEQ ID NO: 66024 - DNA, 600 bp, Zea mays
  unsure (1)..(600): unsure at all n locations
  Clone ID: MRT4577_160213C.1
ataattctatcataatctagttgaacaatgatcaaaacacaaaatctgtcagtatgaaaagtttgatcttcagtatgcaaacagttgcttttaattaaaatgttataatgagaaaaagacaagctagtgcattgtgaaatgttttgtcatgctaattcaacatggccaacccgcatatttcctttaaattgtcaatcaaattagatatattagctatcttggaattactgccgtaccactcagctccttgtatctctccttgaaaactttagcatagcgttgaacttcctcttctgtcttaccctccatttcagaggatatacttttaatatcattgcgaccatatttctcacatgcacgaataaatgtgttgaagtctctccttgtccatgatgcaaaaccctcttctaataactgctccttctcttcctgctcctctgctgttaaaggctccaattgatcttagcatcacattagaaaaatggagtcagcaagatccacttggatgtaagacaacctangaaaaccaagaaaaaccttcgtcttcaccatcaatggtatctttcttctggtttgcttgctgtatcaaaatttctaatg

SEQ ID NO: 66025 - DNA, 380 bp, Zea mays
  Clone ID: MRT4577_160214C.1
tacacaacacacacacaaatactctccattttattccatctcaaaggataaaataatggtgtgtctctccaacaagcttttccgcttcctcctcctgctcgttcgatacacacgaacgcaatgcagaccgctgactatcttctccgccaggaagtcccaatctcatagcttccacttcaagggaccttactcgatggacgccaactgcgcaaacgtctgcctgaccgaatgtttcaccgtctgtatatgcaaagccctacgccaccgctacttctgcaccatggactgctaatactgcctaatctctccatccctcagctcgtgtcctgcgtgtgcatagccgcaccatatcagtaaaacatgcatgcatgcattaccta

SEQ ID NO: 66026 - DNA, 455 bp, Zea mays
  Clone ID: MRT4577_160215C.1
ccaaaaaggaaaagaaaggaaaaactcccaggcgcgacgcagacgggggggcagcgccatccacccgctcccctccgagcccagacggaccggtcccctgcgctcgggctacatctccccacagacgcaagagacgggcgccatatcccaccctgatcattcgtcccttgttgagggcagcaacagcccagcaccacgccaccgcgggggagcctgcctccgaccgcgagctgacccagcacccgaagatggccacgcgggcacaccaggaccgaatgctctcctgcgtcctgcaggcgagtcgcgcgatccaaggcggccaggcgaggaacaaacgcacgcgagaactagaactggatagcacgctggcataacgcagaagaactccgcccctcacaagatgccccttgcggaggacaagtcccgggtggaaggctcgccaacgaagccaacag

SEQ ID NO: 66027 - DNA, 1046 bp, Zea mays
  Clone ID: MRT4577_160216C.1
gtacaaaaatgagcctatttccagtatataacgctgataattgtatcatacacttgagacaaaactataataatgtatgggcatagaatgatgactattgtatcataagtgtatgggcaaacatgcataagacccgcaataattatatcgtaaacttcggacagaaacatgcatacttcgaggttattgacagaacaatattgtacaggaatctggcagaatcaaatgcaagaaacacacattactatcaaacacatttggtacaatattccagtttagaggttagctgatccccaaagttgtcattgacataaactaagaaacgtctactgtggcagaacctccaagttatcgggcccacatgcacctgtccttgtcccaaagacctcagacagccatgcaggtgcaccagataactcaacaggatctgtccgattgccccaaggacatcggataaaccactttcaaccagaaccgcgggattaagtaacacaaatcacacacaccaatattattgcagcggaaatcttactaccaaattttacaagttacaaaaattttatattattttatcggagtgattacaaaagtataagttcgaaatatatgctagcttaagtgaccatcctcaataagaagtatagaaggagtacttagacttataagaaggccgagcccaccggcacttaacaccatcaatagcatcacaaagttaggacctgagtaacactaggttagtgtttgttaggcgacgtccacttgatgatcatccttgtcctagcacttgatcaggcagagtagcccacgcttggggtcgacttgtgtcttcttccgcatcacgcgattatttaacgtaccattctaaatttgacgtgttatccactaacacgacaaggattctggttccgctcttgtgtcgagcacttggggaataccacactactagcttcgtcttcatccgattcttgggattccttgatgacgcacgaaatgatgacgaccttcgatcaaagtcttcgaccgagcacttgataagcgatgcacat

SEQ ID NO: 66028 - DNA, 325 bp, Zea mays
  Clone ID: MRT4577_160217C.1
tggtgacacgccgagtcactacaaatgtgctagtataaatgttggtggctatcccagtaatggcaaggtccaaacaaagacttgtacgttttacttgtccattagaaagtgtaagtatggtgagaattgtcacttttcccttgtgtgcggttacccagagattaatgacatgaggcaagttgaccaccttggttcattgcaaatgttggagatggagatcgatctcctgttgctgcagccatcatcacaagtcccggtagatcatcttgaaaaaaaattccttgagatttatacaaagcttctggagattgatggatccatacag

SEQ ID NO: 66029 - DNA, 1152 bp, Zea mays
  Clone ID: MRT4577_160218C.1
ggccgcttttttttttttttttttggtaatacaaatcacacacaccaataattttgcagcggaaatactattaccaaattttacaagttacaaaaattttatattattttatcggagtggttacaaaagtataagtttgaaatatatgctagcttaagtgatcatcctcaataagaagtataagggagttacttagacttataagaaggccgagcccaccgacacttaacaccatcaacagcatcacaaagttaggacctgagtaacactaggttagtgtctgttaggcgaccacttgacgatcatccttatcctagcacttgatcaggcaggttcgttcatcagcatctccatgcggagtagtccgcgcttggggtcgacttggctcgtcttccacattacgcgatcaattatcgacgtcaaggtgaagaccgagcgtcagcacgatggagatcgatggtcggcaacagacatggcagggaggacatcggcgagattgaggtcagggcgcgacatggtagattgaagaccgacatgtgttggagagaccgaactcgatcgatggggaagaaacccagatgcggcttggatggagcagcagcagggagcatcagcaacagcgagcgagcgacgctcagcgactgcaggagaggctgacggtgccggggaattcaaagcagagaccaagggcacacgacggcttgcccgtccacgaccatcgcgcccgcagccaccagcgcttcccggctgcgtccgtgcacgaccaaagatggaactggagggcaagcagagaggggcgaccggcagaggaggagcagaggccgactgaagagggcgcgccatgaaatcgagctggcgcggcaaggaaacttccatggcggggtcgtggcgcgccatggaaccgagcagacagagtaccgtgagatggagctgggcagtggagagctcggctgggcgagcagggacgctgcgagcagtggcaaacagccatggacggagcaggagagaaagagccgcgagcgctgagagagagaagcagaaagtgagcgccgccaagagaagggcacgcgcgccatgagatatccggccgggtgctggacgccggcaggggaggagcttggggacgccggtcatggaaacagggggcagggc

SEQ ID NO: 66030 - DNA, 783 bp, Zea mays
  Clone ID: MRT4577_160219C.1
ccggccgggaaaacccggaatccgcccatctccatctccccggagtcaccccaattgagcctctaccagccattcaaaatgctcatccaactctccagggctacgcgcgctcgctccgccgttgcggctgtttctcgtgtcgccagacccaatgccgtccaggtgaggggcttcattgctcctaccgtctccaggaaagccgattttgttcaggagctttaccttaaggagctcaaggcctacaaggtccccgtcgtcaaggagtccgatgccgagggcaacgtccagactttcagcgtccccaagacccccgcttcccccgaggagaccgacctcgctggcaacctgaaggagtacgagagcatggccgttgagatcgagggtcaggacacctccgctcagtctgccggcgcccccaaggttgccgactggctcgaggctgaggaggatgaggagcctcaccactaagcggtttattttctctctccattaccatatgagggtggctcataaaactatctgtaccgcagcaatttttcgggggtgtctcatttctcaccgcccagctgccgttacttggggatagcaaaaagagggagggctgacactaaaactcagcccggggatgaagagccggaagcgaccaggaaggagctgaagcaagtggattgtggacgagaatcctgtgtacatttttcctaaaatacagccttcggttgcctgtaggaactaattgcgaaatgccaacgttaaagaaactcaagcaaaaaaaactacgcggcc

SEQ ID NO: 66031 - DNA, 277 bp, Zea mays
  Clone ID: MRT4577_16021C.1
cagaaaataatcttatggcttctgaatccttgaaattaattatgaactatgaaccttcatgcattatcaaggctagagaataatatccaagggccagtgaaattttattttcttatctattgtttccatttcagctactaaaaaaattctaatgtgagaggataaggccatctggtaggcagcagaccaattggccgatcagattttaaatggactgtaaacagggatatgttttatacttattgatcaataaaaatgagatccttcctttctgaca

SEQ ID NO: 66032 - DNA, 457 bp, Zea mays
  Clone ID: MRT4577_160220C.1
ttatttgtgggaagcgcccctcatcccacaaaagactttattattgagctatccctcattgaaacttaaggaggcaccaccaatgatggattgctggttgaactactgttaggttggtcaatagcaagaatggattgaatggtatgacattgattgcaccttgtggagacggtgctcgcgtcaggcgcagcgtgctggcagaaccgacacatctgtgcgttgagtacactgaaggtaccacggttaacaccagctagctggttgatatggtactagttgctgctgctgacaataagcaggagagttcaatgctgccagttggttgaatggaagaaattgctgggggtccgcaacaggtagctggctgaatggcaactggtagtgttgcactatcctagttatgttcagtgccgccagctgcttcgatggaagcaactactgtgggtgagacctgcta

SEQ ID NO: 66033 - DNA, 348 bp, Zea mays
  Clone ID: MRT4577_160221C.1
ttcgtttcaggatgcactgctgtgggcagatcctgctcagccagcacttgaggcccaccagatcctgaacttgctcgcgcgcaagcttgcggacggcactaatgtttttcttaagcctggtgatagggcccttagctgcacttctggtccaccaggccatgtggaacccaaggggcgacctggggatctgcgatggatactacttgttctgaaaggcaacatggagaacatgactttgtataaccgagcctccgaggtgccatgggtgcatagagctgacactaagccgtatgcccatacccgtctgttcttatagtatacctgcgatatacacataaccatactgca

SEQ ID NO: 66034 - DNA, 450 bp, Zea mays
  Clone ID: MRT4577_160222C.1
cttgttctactttttttttactttttctgggcttttactctttttttcatggttttttatgtttttttatcccattttaacattgttttccctgttatctacatgagagaacactacccggggacgggaaaccgacaagagactaaatgggcttccatcctgcaaaccaaggaggggatcctacagggaggtgcccaaaaccgcgcacaagggggaaaaaaagggagaaggagcacaccgttctggaacccaatggcccgtatcgcccgcgcgaagaaaaaaacgggaatgggggggaaacacagcaaaaacgcgcgcctgggggacccgccgagcctttttatctttttcttttcccccgccaaagagaagaacgacaggaccgggcttgccgagttcaggaacatgtgggggcaaaacaactggacaaaagggggggcccccccccct

SEQ ID NO: 66035 - DNA, 479 bp, Zea mays
  Clone ID: MRT4577_160223C.1
gaccactttttctctgtgatctcacttcatctcctcagaaacctcttgctccacagggcgaacgcgccgccgactccgacagccccgtccaggacgagtcggatcaaagccctcctctggtgcggcgctgtgctccctgcgaagaaacgaaaccccgcactcgcttatcaaagatccgcgaccaccgccatgaccgatgattgggggattcaaagaaacaaatggagaaacttctgtaacactaatatagcgaacaatgacttcaacatcatgacacatgatcttggtatgcgactcaagaaccatgtcgcgaaacgactcgttactgtgaataatgagagagagaccgaagtaaacgaaaagaagcaagtatgcacaactcctgcagcagattgaagccaaattaaaaatagctatctagaagacctagagaagaccgcaggaatgttgatgaagtcacttctgcagcacctggagat

SEQ ID NO: 66036 - DNA, 1650 bp, Zea mays
  Clone ID: MRT4577_160224C.1
tttgctggtcgcccttcctccccttagcctatccctgtagacactccccacccactgctaatcccggcaggagggagagagatacagagagagaaagagagggccaggctgagcttactggcggcgagctggagaagaaggaaggagcatggccatgccggcggcgctgcttctcttcctcctagtcctctccgccttcgaggccggggagcttccacgctgctcggctgctgctgcaggtaaaccggcagtcctcgtccatgatgacttgagtccggttcaagacaccagccccatcgcaacagtcccctccacgaacccgtcgcccgccatcatcaccgtgccttccacgaatcccaccatcaccatcccttccttgaaccctctgcccacacccatcacagccccctcaacaaacatcccttctccttccaccatgctgccgccggttccggtcatatatccgctgccaacgccgtcaacatcctccccaccagctgtgccggtcaccaatcctgctgtcaccacgccttccacgtcccctccgtcgacaccaacaccattcaacaacccaccattgttgaacccaacgccgacccctgctcctacagtcacggccccagctgcttcaggccgggaggtctggtgcgtggccaaggctgctggctcaagtgaagccgcgcttcagaacgcgttggactacgcgtgcggcattggaggagtagattgttcggcgattcagccgtcagggagctgctactatccgaataccatccaagcccatgcatcctacgcgttcaacacttattaccagagaaaccctgtttcttccagctgcgactttggggggacggcaatgctcgtcactgctaatccaagctctgggagctgtgtctttgcatcatcattgccatcgtcgtcaagctctactgttggatatgatcccgcgtccacggctactccatcgtcaccgtcgtctggttccgactcgggagcacccgtgctgaatgccagtggggcaggttcttctgaatcatcagattttggctttgacatcccaggagctgtcaatttgggcagcggttggaggtcagtctcaccacccaactggccctgggcagccctggtctggattctagtagcattgtgtgtgcacaaagaagggatggtctgaaaacctgtgagagcatctgcagtattttggagacagattgcaaagtagccaggtggtgtagagaccagtagagagctacaaagctagagaatcggaccttagcatggctaagtttatcgatgtatgtatgaagtatggtgctccagttcgtagtagcaactgggaactgatgtagtcctgatggatggacttggactcaccctgatcggtcactcaggcactctgtagtgtagatgtaggcatgtagctgctgctagtagtagtagtaatgcaagtactgctttgcatcgtatgggtgagagagttgaacaactaatggaatgcaaatgtgccgttttgttttagctaaaagttctattaaccgtaacagtaagcctgtaaagtatagatcgcaaggaaggaagggaggggaaatctctaacccaaggcgctcgtaaaaatgttaaatatcatcaataaattaacatgtttgaatc

SEQ ID NO: 66037 - DNA, 197 bp, Zea mays
  Clone ID: MRT4577_160225C.1
gattcctgatgagctggtcatgtacattggcgttcggcgttcatctcacgctgccgtacaccgtcgtggagaccatgtcggtggcaggccgcgcgcaaaaacggacctgcgcgctgcggcgcatgcttaccattctaaatttccaagggcctgggatagctccaatagtggggaggctaacgaggcttgtcctgggg

SEQ ID NO: 66038 - DNA, 128 bp, Zea mays
  Clone ID: MRT4577_160226C.1
aaaagaaaggaactattggtttcggggaggaaataccaacaatcttaattctatatatcattgaccttatactatatatatgcgttggcaatatccatagtaataaaggataataatcggactcgtgg

SEQ ID NO: 66039 - DNA, 383 bp, Zea mays
  unsure (1)..(383): unsure at all n locations
  Clone ID: MRT4577_160227C.1
cttaacaaaaaaaaaaaacaaagaacaaaactaatattattattaaaaaaaatttaaaaaaaaaaattttaaaaaaaaaaattaattttattgttttttccttacttatagaaaaaacttttggttttttcttcttccgttccccccccactgggcgttttgtcctaactttcccctcccccggcggggctgatgtggtcttggctctttgggggcccaatctcctcctcttgcggggtcctgtaaaacatcggtgggcctncccttcttcattccctatgtgtttgtaactcttctctttgccccttactcttccgctttggcattcactacttttggcccctctctttgttttttcgttttagtctctctcagtccccctt

SEQ ID NO: 66040 - DNA, 828 bp, Zea mays
  Clone ID: MRT4577_160228C.1
taccctccgggttggccgggattccagctgtcaccatgtcattgagcgtcactaccagattacctgcgctgcgagccgcacggagaattgtaccgaagtgtcaatcgacaacttcaacacaaacaagacagttttcattccgttcgttttggagcaagtcggcaagttcggcagagcaatcggaatggcgccccgcgattgatggtcctcatcgacagagcaagctgcaaataaaggaacaacaagagaaagagcttgcagaaaaggctgcacaggaatccccagctccagaagtatcggaatttgggcaggctaatggtgctcctgccaaacacattgctgttgaaatagacggaaatgctcgaggcttcgataccgcgtttcttcgagacagctgctcatgcacacaatgcaaagaccctcacagcaagcagaaagtctttcagacctccgacatcccagaggatctagaagggagctacaggctcgtagaagatgaccagaagggcccttcaattgagctccagtggaagaatgacgtcagaggttatggaccagaccatcgcactcgacactccatcgactggctacggagagcaattcaccaggaggtcgaacttcgaggcggtgttcgacacgacgacagagtgctttgggacaagcaaaagataacgagagacaacaaatggctcgactacaacgactatatgaaccaagacgaggttctctacgatgctctcacgcacttgcacaaatacggcctgctgttcatcagaaacgtgcctgagtcggaagagtcggtggtcaagctctcagagcgcattggca

SEQ ID NO: 66041 - DNA, 581 bp, Zea mays
  unsure (1)..(581): unsure at all n locations
  Clone ID: MRT4577_160229C.1
cccctggggccgcggnnnacgtggcagnagggnagaaagtgggcgnnngcatgcctttggggcgtgggnncgtggaggggccgcgggccccaccgcgcggtggggccgagggagctacttactaggggcgcgagnaannatgcgacgnnngccgaatnngcgtgtgctttnnattagttattcnntgttagcnnngtttggctgggcagtgctttcttctttatggnagcnnntccgacnncccggaacctggggaattattctcnnngtaggcccctttccaaaggtgctacntctttacttnncagctgctttgtcccttgtnngcaactcgtccccgggcaagggttttgtnnggcttcgctttcgtggtttttttgtagcnttagggtttaagnncgagtgggaagttacccactcggtnngcgccagtattttccttggcgagattgtnttatttcttcttgttaattgtaccttaccttacnntatttcgtttggattattggatannctgggtgcattccgnttcatgtttatttctcctggtaatctgtagctttaaaaaaaaannaaaaata

SEQ ID NO: 66042 - DNA, 337 bp, Zea mays
  unsure (1)..(337): unsure at all n locations
  Clone ID: MRT4577_16022C.1
ttgtttaccattcctcctccgaacagtcctgcgatccttcgcaagctctccgtccgcanatcgcatcatgtgctgcctactgcggcaagcacgcggatgagctcatcaagaatgctgcctacatcgggacccctgggaagggtatccttgctgctgatgagacaactgggaccattggcaagcgcctttccagcatcaatgtcgagaacgtggaggagaaccggcgggctctccgtgagctcctgtgctgctgccctggggccctccagtacatcagcgatgtgatcctctacgacgagacgctcaactcgacgaagatccctcctggtgtcctaca

SEQ ID NO: 66043 - DNA, 669 bp, Zea mays
  Clone ID: MRT4577_160230C.1
ttgggtaccccctcgagggccggccggcacacgccgaaacggcgagcccggacgcgacgtcgcccacgaggccggggagcaccttgcctggccgcaacaaccttttcttcttcctttttgtatatcgcgttacgttcctaccatgcgatgctaggccggcgcctctcctactgaatgtgcgtcgctctcggcggctcgttcgcttggcctccgccccgccccggcccgagcagagcgcagacctagccggagctgggatggcaggacgcgaagcagcaagagcagcacgagcaccagtcacagcaggcggcagacggcagccaccggcgcgtggaacacggtcaagcccttccctaacggcggctgcctctgggatgctagcgacctgggcaatacacgctatcgacacggtcaaggcgaggatccaaccggcgaaggctcagcagaccaggccacaaggaacatgctctgcaaacgagggcgtccgatctttctacaagggcacggccgccggattggtgctgcaagcgaccgacaccactgttcgtcttggagacttcagggtcataactcacaaaggagctcacaacgaatgaagggaagccactggctctatatcagactgcttgtatcggtacgactggtggagcacttggtgcttgcggacgt

SEQ ID NO: 66044 - DNA, 398 bp, Zea mays
  Clone ID: MRT4577_160231C.1
atgtctgttgtcttttttttttttttattaatatttatttattctgggccccaaagtttggaacatgacccctaaaaaaattttttcaggagggggcaaaaaactaaaaaaattttttgaaggttttactaaggtaataaaaaaaattttgggccttaatttcggccccaaaaaaaaggaaaaaaaaaaaaaaggccccaaaattctgcctttacctccccccccttgggttagttcctttaaaagaccgggagggggttcctgttaaaaaaggaggaaaccatgtttttttgaaacggggggctttaaaaaaattaaactttttttttttgactggtgaaaaaaagaataaccaagcgaaaaaaaggtaccccttaaaaagggggggtgcccgcaaa

SEQ ID NO: 66045 - DNA, 906 bp, Zea mays
  Clone ID: MRT4577_160232C.1
cccacgcgtccgcggacgcgttggcggacttttttgattcaaaacggataaagagaaatggagagctttaccttaatgtgggctgcaattttgccgagatatttggagaaaattctgtagcttctattcttgggtctcttctagatatcttgcttcttaagaaagatgtgaagcaaaagtcgcgtttattacaacctcttttccagattctatcgaagcttctttctgatcaatgggtctcagatattggtagtcagtataacgaccaacaagatacctcatctgaaatccctgatttatctagttttgtaaaagaagttcaacacttggtactgctggccctcaaagatattacagatacactacaatcgggtcaccatgatgcaatggtcagcagttccgatgtaggtcttcttattgattgtgtacggtccatccaggacataggaactcggaatcggggctattcctcgaccttgacttagactaaggcttgcgctgaactggtctcggagtgtattgttgatttgtgtgtcgctattggggatgctattaaacaggcatatagccactcgcaacgtgttttggaggatttattatctgtcttagtcccatgttggttatcaaggaccacaagcatagaaaagcttcttcagatattcattaaagctttagcagatgtgcctgaacataggcgattgacgcttatggtttacctcttaaggaccatgggaaaagaaaataatttgagtactgtgatcatgcatctgttacactcggtggttgagcggatttcacactcgttttctgtacatcatggggacgattattgattggctatgtcacaggagtgggagtatggattggttataaatgttctttaccagtttattgttaaatttgtta

SEQ ID NO: 66046 - DNA, 834 bp, Zea mays
  Clone ID: MRT4577_160233C.1
gccggccggtccggatttcccagccgtaagcctcttcctcacgcacgcccttctatcttcaacctccagcagctccattgtccctggtggccggcgcacctacatggattccccctccctgtaccctctcggcgccccagccctcctccatcccctccgctcgacagccccttccctggcgtcttcccttaggcagccagccactgccatgggaactcatctccctcgagctcggctcccctgcaccttcaccagtttcgtcggtttcacccagtcttcatcgacctcggcatctactgagctccggtcaatggcgccccatgccatttccccacctccggcggctgatgtatacacggctgaccggcagcagggacattggctagggacaccaacagctgacaggaagctctccagcagggcatcccttcccagccaaccccagcagcgcagcttgcctggcacggctggagtggccctcgcgctcgcgtctggcatggcctgcgtagccccagctcgaattttgcgcggccctagcacagcagcagtctcgctgttctcgagccttgccgcgagctcatctggttgtccgccgtcgttgcgagactatgatccgtttccgagctttgagggatcaaagatcaagcgttgcgaccaagtgatctggctcttcgagttctacaaggttgaagaccctgagcacctgtttggtgaaggttgcctttggcgtaatctatgctcaggtaaagaagaaggcgtcgaagcggatctccaagagttccagggcttccacgagttcgaggattaagctagcgaccctccccagtcagctgc

SEQ ID NO: 66047 - DNA, 362 bp, Zea mays
  Clone ID: MRT4577_160234C.1
ctcagatctattcgaccgtctccttcaccccgctagccagcgagctccttagcacgagccaggtgcgatgagtcgcctatcctctgctctcattttcctcctttatctcgctggccagcgagctcttcagagccaggcgcggtgagttcctttcccctctgctctcctcttcccctctgatcccctatgctctcttctgtgcggtgagcccggcgtggtgagctcttccccttaggctcggtgaccagggcatcaggatcaggctccatggccagcaactcttcgaccccttcctgatgcctggtgcttggatagagttattttgccaaaaagatgcacaaatctaatttcgacgcgctcgc

SEQ ID NO: 66048 - DNA, 605 bp, Zea mays
  Clone ID: MRT4577_160235C.1
ccggccgggaggtgcgtgcacggcgggacatggagaatcgcaacaaactctagagaaggggaacatctgttcgctgcgataaggaggaagatgcagctgggatgtgggtcccacgatggcagccgatgtatcacagacaaactggtcccaccgaatggaaatgcaggcgcgacgtgattctcttccccctgggccgagcgcgagtgtattactaggccaggagcttgggtgggctgcgcgggtggatgaagggggaaatgggccgagggtgccagaatcagcccaggttatctatacaccattgcccactggcttcgaacatgaactattttacagaaggcagagttgcgacctacggtcatagaggctactcagtacttggtacaggtggccaaggacttttctgagacacatgggtggcggtctaatcattaaaattgactaccattaaagtgtgtgggttatcgtcttttgttgttttaagccgtgtgttgtttaagctgaggctggaagacgtttcaagggcttgtatcacctcgatgtaatgtagttgaaaatatgataaaatcttcctttaccaaaaaaaaaaaaaaaaaggggcggcc

SEQ ID NO: 66049 - DNA, 310 bp, Zea mays
  unsure (1)..(310): unsure at all n locations
  Clone ID: MRT4577_160236C.1
ctgcagttcgagttatgttaattatcgaatttgtttctgttttatttctttatttacaaaactatgtatatagataattgggttgggttcctttatngaatgcgtntagcagtatatgcagtactactacctgctgactcgcatacaatgcaagagggtgggtggtttggtgtagcgtcgtggtgggtgggtgtgggtgcaaattctcagctagtggatagatacggggttccttgagtctacaacctttccttgcatacacgtatcctcctcctatgtgtccctaccgaccatccatagatactcctct

SEQ ID NO: 66050 - DNA, 178 bp, Zea mays
  Clone ID: MRT4577_160237C.1
gtatcttacacgacccggaacttggacgaaggaaccgaaggatcgggggtattgtctttacacttgcgccggttcaagtgcatgtgcttgacatatcgaccgggggctcgcatcctgttagaccataacattttgttgataaggaccaggtgcaatgctcgcgagcgggacatggtat

SEQ ID NO: 66051 - DNA, 349 bp, Zea mays
  unsure (1)..(349): unsure at all n locations
  Clone ID: MRT4577_160238C.1
ctctaggcgnctttttctttctttanggnccacacgcgcaccacgtggagggtggatattatgagaatcattacgacgcaccacctccaaaccaccagaatcaacccttgggccgtgcccaaactaaaataaacctccttctcggccgactccgggaggtcctaaatgctgtactacaaaggctgatcgccgcatacgatgagcttttttacgagggcccaaaatccactggcgctactcttgaccctcacctggcccgacatatgcaccactttggtggatcctttgaatgagaccgtgctctttctgcacgaagagccgttccttgcggttccaccatcattgcctc

SEQ ID NO: 66052 - DNA, 508 bp, Zea mays
  Clone ID: MRT4577_160239C.1
cccacgcgtccgggtgattggagctcgaaaacggagaaagcgaggggtgtgataggtcgaacacaacaacaaatgacaattagcactggaggatgccaagtattcaaagggtgcattattataatgccaacagagcaattactgtcttcatgatgccaatagtctgaagtccgatgaatcgagtgccaaaattgcaaaaatctctccatcatgcgggagttagtttcatttcgcaacagcagtgattcttaggttcttatttctggtggctattgtagcacttatccattaacgatgtcattatcacattagtgtattttgggaacagtaatctatgacatggacgccggatggcactggcagagggatggtgtacggtgagtggcttcaatctatcgctgatgcaatctgccattggtgctggcgtgctgtaggtctgttttgcgtatatttcatttgacatgctacataaaaatttccaacaattcctggtcggttgttgacacca

SEQ ID NO: 66053 - DNA, 414 bp, Zea mays
  Clone ID: MRT4577_16023C.1
atcttcattgcgacctgcagagagagacctgagccctagccaccaaaaaaagaaaagccgatcgagagataagagaaggcacattattattgatccggtatgcctagcgggtggctgccttcacccgtgatcgtgaacgtgaagcttagcgtgcatgactgcttgcacacacgtgtctgctgcttcctgctttgcacgttacatgtttcttagcttctatatagtactctatgtacgatgcatgcatgcatcatccatcctaaagcttgtgtcgtcagtcgtgtccacgcataatgcagcatcccactgtttgtttattatgcatctttatttgacagcttgtgttttttttttgtaattggacgtccgttctcaaaataaagtgcaacaagatacgaaggcggcaagttatat

SEQ ID NO: 66054 - DNA, 686 bp, Zea mays
  Clone ID: MRT4577_160240C.1
ttctacggcggcctcgtctccaactactcggccgccatcaggggcctgcacgcgctgggcgtgcggaggctggccgtcgtcaacgtggggctcgcagggtgcctgcccgtggcgcgggtgctggacgccacgggcgcgtgcgccgaggaccggaaccggctcgccgccggcttcaacgccgcgctgcgctccctgctcgccggcctcgcgtccccctcctctaggtccgggctgcccggcctctcctactccctggccgactcgctcggcctcatggcggacaccttcgcccacccgctggcgtcggggttcacggacgtcgccaacgcgtgctgcggcggcggccggctcggcgccgaggcaccctgcgcgccgaacgcgacgctctgcgccgaccgcagcctttactacttctgggacagcgtgcacccttctgagcgggccgcggcgctcagggcccaggctttctgcgatgggccggcccaatacactacgcccatcaacttcaagcagttgctccacatgacatgatcggttttagcccgtttgcttattcagacccagcgaaacaattatacaaagatgatattatgtcaaaagtgaaccatggtacatcccttgttacatggacaattgaccggaaaaataaagaaataatattgaacaaaaaaaaaaaaaaagcggcc

SEQ ID NO: 66055 - DNA, 221 bp, Zea mays
  Clone ID: MRT4577_160241C.1
aaggcgcggatggcggccacggcaaggaggaggtgaacatcgaggaccagccgttggtgcggctggtcgtgatggggaggaagagcctgccggatccagctaagcacagccggccgtactggggttacgtgtagctcgtcaccaccaaggtcgactacattaaggacgcgctcaaggaagaggagtacagtacggcgacgcggggtaagcggcacagggct

SEQ ID NO: 66056 - DNA, 452 bp, Zea mays
  Clone ID: MRT4577_160242C.1
cggacgcgtgggatcgcataaaaggagatcagcaggaggtggagccaaccgacgacggatcggtccctgcgacggaagagaccgagacctagcattggccgcgcgccggagtgggctgcactgcagtgcaggtgggtctcgcatcgcacgcgaggaggatgtaggctgtcgacgcccgggagaaaaggtgaaggtggagcgggtgggcaatgagccggcacctgcaccgctgcttcgcgtccacggggaccatgttcctgtgggcgctcttcctggtggccatgacggccacgtacctgagcgtgcactgcttcgtcgacagcacctccccgcgctacttcgcggcgtcctgtggcgggctgcactgggagcgccagatccgggcgtcggcgtcgacgcggcggcggtcggcgcctgggccgcccgcggggctgtccgtgctcgtcacgggc

SEQ ID NO: 66057 - DNA, 161 bp, Zea mays
  unsure (1)..(161): unsure at all n locations
  Clone ID: MRT4577_160243C.1
cgccaaacttctttggtccctcggtcaagtcctagcacttgccttcgtcgctcccaatccatcgacattataagggaaaatggacctcgnaattatttggctaagtcattttggtgtttgatggtcaacattaccttgtgggactaatgttcttcaagtct

SEQ ID NO: 66058 - DNA, 314 bp, Zea mays
  Clone ID: MRT4577_160244C.1
cggggcacccaatttgctgagtctgcttgcccgtgccgtcgctcgacgtttgcccctcgtctccgtaccgcgcgctgtggtccatccttgcgcagcaaaaatgacggctggctacattgtcgggtcactggccggatcctctgctgttgcatacctgggagacacatttatctatgcctagaaggcatttcgaggtggctcctccaagactctgtatgagatggagtggtggtaagccacagacaccaaggttcaggcactgggctggaactgctgggccccaggttgtcatgaaccccatgtgccgccagacc

SEQ ID NO: 66059 - DNA, 709 bp, Zea mays
  Clone ID: MRT4577_160245C.1
acatactaggcgacccccgcttcccgtcccctctctcctccacacgcctcgtcccctctctcctcgtccgccgccgccgccgccgccgccatgggcaggggcaagttcaagggcaagccaaccggccgccgcaacttctccaccccggaggagatcgcttctggaacttcagggcgtccacggtcgtttaagaagaatgtagctgaagcagaagaggaagaggaagaagtggaagaatctgaagacgaagaatccgaagacgacggtgaagagaagaaacataaaggaactgaaggtgttattcaaatcgaaaatccaaacctggtgaaagcaaagaatataaaagccaaagaggctgatcttggagagacaactgaactctcgaggcgtgagagagaggagatcgagaaacaaaaatctcatgagcgctatatgaagcttcaggagcaaggcaaaacagaacaggcgaagaaagatttggaacgtcttgctttaataaggcagcaaagagcagatgctgcaaagaaacgcgaagaggagaaagctgctaaagaacagaggaagaccgaagcgcgcaaataaccgcgtaggttgtggaggctgtgctgtgttggctggacatttatttctatgcatcttagtatatttaaaccctggtctctattgcatcatctacatttccataaaaaccgtgcattgacaagtgtaa

SEQ ID NO: 66060 - DNA, 160 bp, Zea mays
  unsure (1)..(160): unsure at all n locations
  Clone ID: MRT4577_160246C.1
acgtagngnagaggcgaaagatggcggcggcagtactgggacagttgggtgcgtaacctgaggagccgggggaagctggccttgggtgttttacctcaatcatatatccacacaagtgcttctcttgacatttctcgaaaatgggagaagaagaataaaa

SEQ ID NO: 66061 - DNA, 235 bp, Zea mays
  Clone ID: MRT4577_160247C.1
gcacgaggcgaagtgtgccgtggtgacgatggcggccgtggtggtggcggcgacctcgtgctctgtaccggcggctgcggaggaggccgctttggccgcgagcggggcgaagtggctgctctcgaggaatggcacgaagacgaggtggagaggcgagcggggcgaggtggctgcgctttgtggtttctgtagttctatatgcattaggtggcactagggtccagattcagaatat

SEQ ID NO: 66062 - DNA, 474 bp, Zea mays
  unsure (1)..(474): unsure at all n locations
  Clone ID: MRT4577_160248C.1
ccgggtncgacccacgcgnctcctgggcgcgtgggctggncgcgtgcgcgcagcgcagcggcnccatcgntttctaccagcactgagccaacttgctgtggtggaccctgtcgcctacttgcttcagcagttgcttgcctccaacccacttgctctggcgnacatagttgcattccttcatccccnccaattgcaacagtttgtgccggcgctcagtcagcttgccctggtgtaccctgccgcctnccttcatcagcaacaactgatttcatcttgccctctcgctgtggtttatgcacctacattcctgccacatctgttgctgcgtcagttcgttccagctctgactcagcttgctgtggcttaccctgctgtcttcttgcttccgctgcttcctttcatccccctgtctgtggctgtctctgctgcgttccttcttccgcggcgactgttacttgtttcacttgcggtggc

SEQ ID NO: 66063 - DNA, 352 bp, Zea mays
  Clone ID: MRT4577_160249C.1
acaaaaaaaatgcattgggaatttttttttttgggaaaccaaacccaaaatggttgggccaaaacaccaaaactgggtttgaatccaaatcccaaaaataaaaaaccctttaactgggctgggcaaatggggccccaaaaccaaaacttttcccaaattttgaacaaaggattggggcttttactggcaacgggtgaacataaagcaatttgggtcaccaaagggccccattttttttaaaatgggaagggaaaccccggggacccccatcggtgtaattgtttgcctcccccttggacaagaaaaggaaggggtggcccgccaacatttggtccctgggggttttgaaccc

SEQ ID NO: 66064 - DNA, 855 bp, Zea mays
  Clone ID: MRT4577_16024C.1
aataaagatgcgtgataaacaaacagagggatgctgcattatgcgtggacacgactgacgacacaagctttaggatggatgatgcatgcatgcatcgtacatatatatagagtactatatagaagctaagaaacatgtaacgtgcaaagcaggaagcagcagacacgtgtgtgtgcaagcagtcatgcacgctaagcttcacgttgacgatcacgggtgaaggcagccaccgccgccaccgagcccactgccaccgccaaggccgccgctgccgcccagacccgatcctgagccgccaccaaggccgccgccgccgccaccgccgagacctgacccgccaccaaggcctgatccgcctccagcaccaccaagcggtccaaaccctccgagtccaccaccgacgacacctccgaggccaccgccagtcataccgccaatgccgcccgcaacgcctccgatgcccccgaggccggcgccggcgccagcgaaccctccgacgccgccgacgtagcccggcaggaaggtcttctggtcggcgttcacgccggcggcagcagctctctgaccatgcttctgctggctgtcgttgctgttagtagtagtgccgcctatggccgtcgtagtcgtcgttggcatggctctgctggcctcggcgggcgtcagcgccaggatgacaaccaggagcaccaggctcaggctgctgctgctgcagcacgccacgattccggcggtgttgcgccacccgctaggcataccggatcaataataatgtgccttctcttatctctcggcttttcttttttggtggctagggctcaggtctccgtctctctctgcaggtcgcaacgaagatgg

SEQ ID NO: 66065 - DNA, 556 bp, Zea mays
  unsure (1)..(556): unsure at all n locations
  Clone ID: MRT4577_160250C.1
aaaaggggccgggtgggaatttttttttttgttttggaggggccctgggaacccccggccacccacaaccattggaaggacaccgcccccctttccccaccggaaaccccaaaaaaaaaaattccgtttttccgcaaaacttcccgggggttttttaaaaaaaaaagggggttcctttcaaggtcgcccggaacccttcgggttggggcttgggccccaaccctttaccgggggccccttccgcaagggaggggtttttggggggggcctttttggcccggggggggtttccggcccaattgggggtagcctttggggcctggaaacccaactttgccgtcccggtccgggtctttgaccgggagggccccttcttggggggggggggccccagcccttccgggggngggggccccccggggggggcccgcccaaaaggccttaaaatttgtttaattgaaaaaacccgnncggggtccggggtggggggccgaaattttggccggggaggtctgttttttaaacccggtccccggggggggccccgggggggggg

SEQ ID NO: 66066 - DNA, 800 bp, Zea mays
  unsure (1)..(800): unsure at all n locations
  Clone ID: MRT4577_160251C.1
aattcggcacgaggcgcctttgttcccatgcgccgcaacaagcctacctcacctatcacttgctcacgccaccgagaatctttcaccctcctcctcctcccatcctgacctctctctctctctcctcttctccctccctcccgtgagtgagtgagctggagccaagctagccgagcgagtgatggcatggggagcttgcactgctgtggcagctgctctcctgctgctcctcctcctcgccgccgccgcagcaggtggtaatggcggcgtgcattgccttgaccttgaccttgaggaggggaggcggcaccacctgagcaggagagccttgcaagggaggcagaggcggcaccacctgaggtcgagggcggtgggtggcgccacggtgctcgagctgaggcaccacagcttcagccctgcgccggccaacagcagggaggaggaggcggacgctctcctgtccaccgacgccgcgcgcgtctcgtcgctgcaagggcgcatagagcactaccggctgacgacgaccagctcgtcggccgaggtggcggtgacggcgtccaaggcgcaggtgcccgtcagctcgggcgcgaggctccggacgctgaactacgtggccaccgtggggctgggcggcggcgaggcgacggtgatcgtggacacggccagcgagctgacgtgggtgcagtgcgcgccgtgcgagtcgtgccacgaccagcagggcccgctgttcgacccgtcctcgtcgncgtcctacgccggggtgccgtgcgactccccctcctgcgacgcgctgcagcagc

SEQ ID NO: 66067 - DNA, 971 bp, Zea mays
  Clone ID: MRT4577_160253C.1
ttgggtacctcgaggccggccgggacccacagccacaggccacagcgagagcgaagcgagtacaccaccccaccccacccccgacccgacggccagccgccagctgctgcgcctttgttcccaacttccggggcgccgcaacaagcctacctcacctatcacttgctcacgccaccgagaatctttcaccctcctgacctctctctctcctcttctccctcccgtgagtgagtgagctggagccaagctagccgagcgagtgatggcatggggagcttgcactgctgcggcagctgctctccttctgctcctcctcctcctcgccgccgccgcagcaggtggtaacggcggcgtgcattgccttgaccttgaccttgaggaggggaggcggcaccacctgagcaggagagccttgcaagggaggcagaggcggcaccacctgaggtcaagggcggtgggtggcgccacggtgctcgagctgaggcaccacagcttcagccctgcaccggccaacagcagggaggaggaggcggacgctctcctgtccgccgacgccgcgcgcgtctcgtcgctgcaagggcgcatagagcactaccggctgacgacgaccagctcgtcggccgaggtggcggtgacggcgtccaaggcgcaggtgcccgtcagctcgggcgcgaggctccggacgctgaactacgtggccaccgtggggctgggcggcggcgaggcgacggtgatcgtggacacggccagcgagctgacgtgggtgcagtgcgcgccgtgcgagtcgtgccacgaccagcagggcccgctgttcgacccgtcctcgtcgccgtcctacgccgcggtgccgtgcgactccccctcctgcgacgcgctgcagcagcagctggccacgggcgcgggcgcgggcgcgccgccgtgcgacgccgggcggccggcggcctgcagctacgcgctcagctaccgcgacg

SEQ ID NO: 66068 - DNA, 505 bp, Zea mays
  Clone ID: MRT4577_160254C.1
gtccttttttttttgttttttttttttttttatctgttttttaacacggaaactttggagttgatagtccaaaacctaatatagtttcatgttgcatctataatcacgtgtagattatgagcggactattttacgaaaatgattgcgctacgggggaaaaaatgtttgacctatgtacagatactgacattctcaattgaaagacttggaaagacttatgccgcgagcagtttctggatgtccttctaaatctggacgggctaagtcgttggaggatatgtctaatgactatgacattcttattcgctaacaacttctcaaaagtccattttacgagatcacccaaaaatcctcctggaatggacttaacaaattcttagaggggaccatgtttaggtacattgacatcaaccttagctagaaggggaaatggcaatttgagtcttgtgcatgcaaactgcttaatctgactatttgatccaagttcttgcgcaccaaattgatt

SEQ ID NO: 66069 - DNA, 231 bp, Zea mays
  Clone ID: MRT4577_160255C.1
gaacaggtgcatactcaggctctttttgacttaacactgacgctgcaacatgtttgacaccatgaactaaaatcttgcacctattgaaaaaacggattaagctaccatgcttgaggaggacacccaacatttgttggtaaacgaccatcagggggctttaataccatcaaacccaattcttagatgatactaaagctcagtccacaggggggactaaaacaggtccatgag

SEQ ID NO: 66070 - DNA, 317 bp, Zea mays
  Clone ID: MRT4577_160256C.1
acgcgtgtaccaaagcctcctccctacttgaccaccttttttttttacaggtcgagcaagggcggcgccggccgccgtttcttctgtaaccgggccttgcttttcccattttttcgatcacttctgtcctgtgaaaatggcggatgaactacgctcaacgtctgtgggtcaaaagttccatgggccgtccgggctttttagcaaaatctctttctattccgccatgaacaaccctgtttttaacaatgcctatttttcttacaatgtgccccaaagggcatatcatgggatgaatgcaactgctggactcttatttt

SEQ ID NO: 66071 - DNA, 199 bp, Zea mays
  Clone ID: MRT4577_160257C.1
acctgtattcatcactagaagaacgtaacacttgagtacaagtaggtgttaacccacaccacagccacacaacatactgtataccgtgcatcgagtaacagtagcgaccatagcagcagtacacacactcaccatggccatgattcctcggaggttgtctcggccttgtgtagcccgtaccctacaactcgcaggtcag

SEQ ID NO: 66072 - DNA, 932 bp, Zea mays
  Clone ID: MRT4577_160258C.1
agccaacccaaagtttgataagaaactaagcatcaggtatcaacaagtagccatctggtaataataccaccatttgcacgtcctagcaaactgatgcctccaccaaatttacaaaatccagaggcaatcactaaaatgtggacagtggaaccgctctatattcctaaatcgcaaaagaacatgaaatgtcctgcaatcactaaaatgtggacagtgtaacggttgttcagacgttgtcatccttttgctgggtgatggtcaaaacaagcccaaagtggtcacttggaaagacaggcagttcaatcctttggttctctttccgaatcttcttctccttgaagtaggagacaccaggtattgcctccttcccgatcatctcaatgctgtccatcttgaagtctgctagcttgcacacaaaccggtccaatcgcttctgcagcttgcggttgcctgacagcatgccattggccttggtgtcgtaggtccagccatcctctccaggtttcagctcaacccaagcatcagtccacccatcctgcagagggaaagggccgtctcccttgtcgtcccagttcatgtccccacagagtatggcattggggaagcctcccagaattccagggattgctttgcctgagccacacgttctttgctatacatctgatccccacttgggaggtgcagggcatgggctctcgaggtgggttgtggccaaaatcaactttgtgatctctcctgtcctaacacttgcgatgcatagttctcttcccattgttgaattcgaaaatgggatgcagtcagatggcttcgtcggcattttgctcaactgcatgcagtaatacggcatctgaatagcattctcatgtgacaacaagcatgtgtattgttgccaccagtcagatttttgcataagcatatatatgtatggtgta

SEQ ID NO: 66073 - DNA, 298 bp, Zea mays
  Clone ID: MRT4577_160259C.1
atctgatgtttgtggcttcccagaaataagaaagtacatttctaaaaaaaaaaaaaaaaaaaaaaaaaaaacaaggaaccaaaaaaaaggtggtacgctcggcacaacaccaccgcggagggggcaatgccacgtaactggcatggcggggagtaggggctcggggtctaaggcccaagcctaccacgcagcacgggctccggggaccgcggccacaaaggatgtttcgaccacgtttccggaccgacaccaactcgcatgcacgaaagggaccagctggggggtgggcagaggggcc

SEQ ID NO: 66074 - DNA, 1002 bp, Zea mays
  Clone ID: MRT4577_16025C.1
atcaaaatcatcctcataaaaagtatatatataacttgccgccttcgtatcttgttgcactttattttgagaacggacgtccaattacaaaaaaaaaacacaagctgtcaaataaagatgcataataaacaaacagggggatgctgcattatgcgtggacacgactgacgacacaagctttaggatggatgatgcatgcatgcatcgtacatagagtactatatagaagctaagaaacatgtaacgtgcaaagcaggaagcagcagacacgtgtgtgcaagcagtcatgcacgctaagcttcacgttcacgatcacgggtgaaggcagccaccgccgccaccgagcccactgccaccgccaaggccgccgctgccgcccagacccgatcctgagccgccaccaaggccaaggccgccgccaccgccgagaccaccaaggccgccgagacctgacccgccaccaaggcctgatccgcctccagcaccaccaagcggtccaaaccctccgagtccaccaccgacgacaccgccgacaccaccgccagtcataccgccaatgcctcccgcaacgcctccgatgcccccgaggccggcgccggcgccagcgaaccctccgacgccgccgacgtagcccggcaggaaggtcttctggtcggcgttcacgccgggcgcagctgctctctgaccatgcttctgctggctgtcgttgctgttagtagtagtgccgcctatggccgccaccgtcgccgtcgtcgtggtggtcgtcgttggcatggctctgctggcctcggcgggcgtcagcgccaggatgacaaccaggagcaccaggctgctgcagcacgccacgattccggcggtgttgcgccacccgctaggcataccggatcaataataatgtgccttctcttatctctcgatcggcttttcttttttggtggctagggctcaggtctctctctgcaggtcgcaatgaagatgccggcccggccctcgtgccgaatt

SEQ ID NO: 66075 - DNA, 938 bp, Zea mays
  Clone ID: MRT4577_160260C.1
catggggaaccccgaggccgcacggccggcctgcctctagtcgtcgtcgtcgtcgtcgtggtggtgcttgcggcagctccggagtccaggcagcacgctagtcggggggcgcgggggaggagatatggatcggtcgtatctccccgtggcggcggcggccgtcgccctggtcctcgtgtgctgctccggcctctgccgcggcgagcggctcggggcgagggagtgcgaggacctggggttcaccggcctcgccctctgctccgactgcaacgcgctctccgagttcgtcaaggaccaagagctggtggaggattgccataaatgttgcaccgaggattcagatgattctatcagcaagctcacattttctggtgcaattattgaggtgtgcatgaggaaactggtattttatccagaagttgttggcttcctcgaagaagataaagacgacttcccatatgtggaaacccgttattcttatggttcgccaccaaagctcataatgcttgacaacaagggtgaacagaaggagaccataaggattgataactggaagcgagagcacattcggcagtttctcaaggagaaagtgaagccagtgaaattagacagctgagttcttgcgataagtgcctgaatatttccagtttgacgttccaatagaacctacgtaacctgtaccttgctaccaaaatcgtagctgatgtatgagattggcgttctcatatttacacctaaaaatgatcgtacgagaagcctgtgtgtgcggcatactttgtaacctgtttgttactcttacagtcaggtagtaagtatctggcactatgatccgtgaagagtagttaatgtgcgagttgttttgagttagtctctttttatgtgaccgaatttatataaaaagtagcatggatacttctgaaaccaaatatattttatgt

SEQ ID NO: 66076 - DNA, 820 bp, Zea mays
  Clone ID: MRT4577_160261C.1
gcacgtgtgtgcaaacttccaaggaacccgtgtcagctgacaccagaaaaccataggagctgagagcattcagcatcatgggcttggagaattcagcatcaagtgaatgcagaggtgtaaccgctctgctgtgttcatcccatttataaatattccaaaacccactccttcgatcggttatgaagaacagctccccttttgaagaccacttgggttcagtaggagattctactattgttgggtctccaccagcaacacagatcttttcttttatctctctttgacatccggatcacttattcctacagcaacaattgtagtgatgggatttgagctattgtgccgatggtcttccattatagttacgaaacgatggaaatggggatcaaagacaccatcagcatagcgtactactggtccataatctggtgtcagtggtagtggtgaattatctcttcacatccatgatcctgtgacttttttctcatctcatgcctccggcgggtggcgatgctccttcctctcccgtgctcggctccgaagaccgttccttctctagcctccccgcagcgaggtcaccacctcgagcatagccttggcctggccaccgcgggcgagcatgacctcgaccgctatacaggcgagcgtggatccgccgtcgcgagggagcacaacctcaaccggggatccacccagaggccagaggaagaagatgaggcttacgtatggggttttgtcactaagagaagctgacaatattttttccaaaaaccaaagctgttgaaccaaattgctttcagctttcgcacaacatgaactt

SEQ ID NO: 66077 - DNA, 858 bp, Zea mays
  Clone ID: MRT4577_160262C.1
cattgggtacctcgaggccggccggacaatccaacgtcgcacctgggggcaaacatcccaaaaaccgataatcgtgaaatcccggagcagacgcctcgatcccgctgctccttcgtgaagagccgagggattagttgccttttccgcgccaatcagcgctggccgaaactaattggtcagagcaacagggtcgcaaccatcatcgaccatcgaaaaccgccaaaggtcactcccaccactccgctctccactccacggctaccgccatcatgagcttcgccaggatgcgtcgcatgcagttcgccagccagctctcgaagagcatccgtacaccatcgcgagctttctcgtcgacacggcccgccgcccgcatcttcggtaccgagcacctgaaggctaaggaggcttctgggttcatctcgagcaagtaccccgtcatcgatcacgagtacgatgccatcgttgttggtgctggaggagccggtctgcgtgcggctttcggtctcgctgaggctggcttcaacaccgcctgtatctccaagctcttccctacccgttcgcacaccgtagccgcgcagggtggtatcaatgccgcgctcggaaacatgcacgaggacgactggaggtggcacatgtacgacaccgtcaagggatcagattggcttggtgaccaggatgctattcactacatgacaagagaggcgccccagtctgtcattgagcttgagaactacggctgccccttctcccgaacagacgacggcaagatctaccagcgtgctttcggtggtcagtctcagaagtatggcaaggtggacaggcgtaccgatgctgcgctgccgccgaacgaaccggtca

SEQ ID NO: 66078 - DNA, 185 bp, Zea mays
  Clone ID: MRT4577_160264C.1
ttatttttttttatttttttttttatttttttatttttggactcttgggtacgatcccgggtatatttccggtaccggttacctggcaggccgtaccacgctttcccctatgagggaggtccgtattagaagcgtgggcggtaatcatgggccataggcgggttcccggggggaaaatgggtata

SEQ ID NO: 66079 - DNA, 740 bp, Zea mays
  Clone ID: MRT4577_160265C.1
cctcccggccgggccgggatcaccaatctcaactcagcgagctctccaccagttttacagccaagaaagaaccaaccatgatcagcaccaagaggatcgctcagctggccaagaagtggcagaggatggaagcgctcgggaggaagcgccgcctcgcctgggggacggcggcggcggcaaagaaagccgacaggtgctgcgcctccgtggcgagcaagggccactgcgcggtgtacacgactgacggggcacggttcgaggtgccattggcgtgcctcgggacggaagtcttcgccgagctcctgcacatgtccagagaggagttcggcttcgcgggcggccacggcaggatcttgctgccctgcgacgccatggtcatggagtacgccctgtgcttgctgcggaggggcgcctctgcggacctggagaaggcgttcctcagcaccatggcgatgtcgtgccactctgcagaccacgcggcggcgccatatgtggcggcttgctgttagtttgcagctgtataagtagtggcagagagttcatcactgtatatagtaggacaaagagaggtgttgttcagatcctgcgacccattaaggaaggtagcgattagcaagttagcgccagtgctcttgtttgagcagtgagcatattacagcttaatttcacgcccaaaaaattaatttcctgagcataattttcaggttattgccaaaaaaaaaaaaaaaaaagcggctagg

SEQ ID NO: 66080 - DNA, 256 bp, Zea mays
  unsure (1)..(256): unsure at all n locations
  Clone ID: MRT4577_160266C.1
agggcgatgtctcgcggaacccggccaatcagccggatgtactgtgactctcttgaggggtccgtctgctgggtttcgcgaaagaacttctagtctccggacgccatgtagcatgaagtngtaggacgtggcggctacgtcgagtattcagccgatagcgcggacgtcagtgtaggtgtggcgtagggactggagaccggacaacttntcggagtctcctgatttctntgcacatgaacgatcgagctgtaccact

SEQ ID NO: 66081 - DNA, 222 bp, Zea mays
  Clone ID: MRT4577_160267C.1
cacagatccccagggccaagattttggtgatgaagactatccataatacttcagacaagaatcagctcaacagtgaggatctggagacttatgccaagctgttctgccatcctctttcctattcacagattcaagcccttgcagcacttttcggttgggcagtcccagatgacttgggtggagcggccaccatggtctgctaatttgatgaatgggtgttgg

SEQ ID NO: 66082 - DNA, 377 bp, Zea mays
  unsure (1)..(377): unsure at all n locations
  Clone ID: MRT4577_160268C.1
cttcgctccaaaggcgccctcactgctagacgccatgtacacgtgggccggcctanccttttttctcttgcctctaggagctgcccacacccgacgggctggacttttctttgccgcgcttaagtacgaccctgccaaggtgactttttataactaccgggttctcgnccgcctggagcaaaaccctgagaaacctgccggcggcgagctgctaccaaaatctgctgttaagaacgagagatatctcacgggtgagattctatcgatcgaggctgaagtgagcgaaactgaagctggcaagaacgctctcttctcaaacatcaacgctcatgacgcggagcacaggacccccgacgagaaaaactgctactgcccag

SEQ ID NO: 66083 - DNA, 400 bp, Zea mays
  Clone ID: MRT4577_160269C.1
cacccaaaaaacttcattatggaactataactaaaaagcaatcaaaaagggggcccccccaaggaggggtggggggaaaaacactggggggtttgaaaaaacaagtgggtggaagggcaccaatggtggcagttgaaaaagggggccagcgttaggcatagcgggcaggaaaaacggaaacaactgttgttgggtaaaaaaggcagaagggctaaaataacctagcgggctaaagggaagaagttgttgctgctgaaaaaaaccagcaaagtcaaaggctgctagtgggttaaaggaaaaaaattgcggggggtaggcagaaactagcgggctgaagggaaattgtggtggcaaataaccagcaaagttcaatgcacccagttggttaaatcggccccgg

SEQ ID NO: 66084 - DNA, 2157 bp, Zea mays
  Clone ID: MRT4577_16026C.1
gagacagtgaaggtgcctgatggttctaatgttctgactaatgaacagctggatgcttatgtagtgaacccttcactttctcaagaccaactattcagcattctcgatgtttcaccaagttgtgcatatattggtacaaatacaaaggtttcagttactggtacattcttggtgaataaagaacatgtggaaagtcacaggtggtcatgtatgtttggggatgttgaagtaccagctgaggttttgaccgatggcaccctacgctgctatgcaccagcacaccaatcaggaagagttccattttatgtgacctgttcaaacagggtggcttgtagtgaagtgcgagaatttgagtatcgtgattctgaagctcattacatggagacttctcgttcccaagccaatggtgtaaatgaaatgcatctacacattcgtcttgagaagctactcactttggggccagatgaccatcaaatgcttgttataagcagtggtaatgagaaatatgagataatgaatgctataaattccttaatgcttgatgggaaatggtcaaatcaagaatcttctgtcaaggaagtagtttccactgctagggtccaaagtttaaagaaactggtgaaagagaagctgcatcaatggctcatctgcaaagtaaacgatgatggaaagggtcccaatgttctgtgcaaggaaggacagggtgtgattcatttagtagcagcactgggttatgattgggctataagaccgataatgattgctggtgtcaatgtgaacttccgggatgctcatggatggactgcactccactgggctgcatctttgggaagagagcggacagttagtgtcctcatagcaaatggagctgcagcaggagcactaactgatccaacttctgagttcccttctggaagaagtccagctgatttagcttcagtaaatggacacaaggggattgctggttttctcgcagaatctgctttgacaagccatctgtcagcacttactattagggaatcaaatgatagcactgtagaagcgtgtgggctaccatttgctgaagatctcactggcattgattctgtccatctcgctggagagggtcctgatgctgaatcacttgaaggttctttaagtgccgtgcggaaatccactcaagctgcagctcgtatatttcaagccttcagggtggagtcattccacagaaagaaagtcgtggaatacggagatgacacctgtggattatctgatgaatgcacactttcacttgtttctcttaaaaatgtcaaaccaggacaacatgatacacatctgcattctgctgctgttcgcatacagaacaagtttcgcggatggaagggaagaaaggaatttatgatcattcgccagagaattgtcaagctacaggctcatgtacgaggacatcaagtgaggaagaactatcggaaggtagtctggtcagtcggtatcgtcgagaaagtcatactgagatggaggagaaagaggcctgggttacgcgggtttcggccccagaaacaactagaaggtccatcgcaaatccaacctgcaaaggctgaagacgaatacgatttcttgcacgacggcagaaggcaggccgaagccaggctacagagagcacttgcccgggtgcactctatgtcacagtacccagaagcgagagagcagtaccacaggcttacaacctgcgttgctgaaatgaaacagtccagggtatgctttcgaagcttgctgcaggacgtgttttattttccctcggggtttgatcatgatttgatgctggctactttggaacagatgatgcaggatgagatgctaagccaggcggctggtggtgcggacgatttcatggctggactggaggacttgatctgcatagatgatgccccgccccgatgtctgccattcggtgaagctgagcctttttacatcagataggcagggaggcggtttccttgctccccttttgtcagactagccctgtaaatattcttcagctagttgttcaccccgactgtttactcgctttctgctagtgtacaactataacatagtttcaatgcactgattatcggtagaataatcgcctcttatttgatatatagtttatattaattcaacgtattttatggtttt

SEQ ID NO: 66085 - DNA, 690 bp, Zea mays
  Clone ID: MRT4577_160270C.1
atggcgcagcgcctcattaaaaaaaatgtggacgccctcatctcgactaatccacccggtttcattccaagagaaattacaaatctactggaaaagtctttcgagtggaatgttagcttcaccgagagcacaattatttatagcactgtttccttccaagtgaatgctataaacgcggaaattgatggtggcaacatacttccaactacatcgtcctcacatccatcgtcgaccatactttcgcaagcaggacaaggatcaggtgtcgcacaaaacaagggtgctgccttcatccgcgtgcgcgtcgctgacaccagagagtcacaaagtttcgtctagcgccaagtgtgacatacagacagtcccacatcagggagccaatctgctgctaggaacagagattatcacttctccacctaacgtgcaggcaccatcaggagctgcttacagtgtgctagatgggtctacaaacaagactcacaaaagtgttactggaaaaaggtctcgcacatcgccttccaagaaggttgccaagaaactttttagagatgatggcacaggagatgacgatgctgctggttccgcagacgttgatgctgagtaacgttgcagtgcttttggacacgagcaccaccagccatggagacccgcttttgggaactgaggatcgcttttgggaactatcccagt

SEQ ID NO: 66086 - DNA, 824 bp, Zea mays
  unsure (1)..(824): unsure at all n locations
  Clone ID: MRT4577_160271C.1
aatcttactttagtagtagtcgtcgtttacttgttgtaaacgtcctcgctcccctcgccttccccttgcccgtctccgcctcaatctccggcggcgtgcgcgagcgcgctcgatcccctcctcctctccagccccaggtgcgatctcctcccgactcgggtcgctccacagtttttagatggacaaccatacttcatcaccgccccatgaagtaacaatggacatctcatcggcatccgggagcaaaatgtgcagaggtgcttcttgcgacttcgccgactccaccaacacctccaaagacgcaaaggagaggtctgcgtccatgaggaagctcctgatcgccgtgatcctctgcgttatattcatggcggttgaggtggttggaggcatcaaggcaaacagccttgcgatcttgactgatgcggcccatctcctctcggacgtcgccgccttcgccatatctctcttctccctgtgggcagctggttgggaagcgacgcctcggcagtcatacggatttttccgtatagagattcttggggcactggtttctattcagctcatatggctcctcgccggcatactcgtctacgaagctatcatgaggctcgtcaatggaagcgnnggcgaggtgcagggatccctcatgttcgcggtatcagcttttggtctgttcgttaacattgtgatggcagtgctgcttggtcatgaccatgggcacggtggccatggncatggncattcacatgaccatggtcatgatcatggtgactcggaagacgaccatgggcatgatcatgagcaggggcacgcacatcaccatg

SEQ ID NO: 66087 - DNA, 144 bp, Zea mays
  unsure (1)..(144): unsure at all n locations
  Clone ID: MRT4577_160272C.1
gagcagcttctcctganagctttttgaaacgccaccgccttgtctgccccgagatattgagaatgaccatctctatgcggctggcgatccctgctcctgacgtaaccggcgacgcgccgacacggctgagggtgctagaggcaa

SEQ ID NO: 66088 - DNA, 347 bp, Zea mays
  Clone ID: MRT4577_160273C.1
accacgcgtccgatcactcgttcggccgtcctttaatctttcatgtggaaatgagtcaaatgagtcatgtcatggattaccatcaaacgcatcagggtattccatgaccgccgtgacagacaatggcgcgtactagtatggaccaccaccactactcgcacacgtacttctgccccatggttgtctgcatacatacacgcgtacacctgcacctaagactgcggcacacacgacttgtgctgcactcacgcacgccagaccaggccaaccatattttggagtaggaaccaggtatccagcgcggatctagcggaagaggtgccttaaggcggtattattaagggagg

SEQ ID NO: 66089 - DNA, 537 bp, Zea mays
  Clone ID: MRT4577_160274C.1
atctcgagcctcatcctatagatacagagactgattgccaatcctagaaggtcgccaaccatacatacatcgccggggttccgccgagcttcactgctgcatgtggatgtcatggaagttcctgctacggccatggcctgccgatcatccctagggatcccagccggagggctccctctccagcacgcccaaggcgacgatgttggccgccaacctctgctacaaggttgacacatgtcaatacattgggtgcctcactcctgcttgctcctgcaactatagtgatcgtctatgctacatcatatttactcctgttgcttgaggacattccgcgaagccacaaatcttacatggatgcgccggccgacaactacactgcctctcgcgagcttctggtcaagtgatgcatgtttcaagggatccatggaagctttatggatatgatatgcgcattattaattagccgtggcagggaaccgggcagaaggggggggtgtgttatttacgtcttctggcgatgaaatacaagggaaatat

SEQ ID NO: 66090 - DNA, 666 bp, Zea mays
  Clone ID: MRT4577_160275C.1
atggccatgatgggttcaacatcggataagatgtacctctgtcaggtaaggaacacaaataccgaacttgtcaagtggtcaggtgcatctacagggttgtccaaagtccattggacaaggacaactttaggtgggcctaatgacttgggaggttccgtcactgatatggagtatccttacaatgcaatcattggtcgaggaacattaaatgccttcgaaacaatacttcatccaacatatctatgcatgaagataccatcagaccaaggtcccatagatgtgcatggaagtcaagaggctgctagaagggccgaagggaactggatagattcaaaggctatccatagcatagatgaagctgaagctcaccaacagtataagcataaaagagataaagctgcctcaacagatcaatcgaagcccatgcttttatgcgaagacatagctaagcagaagatgttgttaggatctcaattgtctgttgaacaagaaaaaactctactgaggtttctattcaacaacaaggatgtctttgcttggtcagccaatgatctttgtggtgttaacagagatgttatcgagcattcacgtaatgtagatccagctatcaggctaagaaagcagaagcttcagaagatgtccgatgacaaagtcgaaggtgcatga

SEQ ID NO: 66091 - DNA, 439 bp, Zea mays
  Clone ID: MRT4577_160276C.1
aaaccaaaagttgatggctgtgggttaaattctttggccttttattcctttacaaagggaccataaagtccaaccttttcaattaaggaaccaaaaaagaggggtctaattttttctttcaaaaccaaaacaaaacgggctgcccaaacatgcgttttggacacctccttccccgggttcgcaagggcttttttttgggtcccggaacaaactgggagttctggaggcccccctcggggaagtggcccgccttcttcgggaggataaacccggggagggcaaaccccgggaggaaggcccagttgccctcccccccccggggaaaaaaaaccgcccacgggtcaaacgttttaatctcctccccctccgccttgctgaaaatctcctacctccgttcctccgcctccgcttttgttttgggggaccctcggcccaaatt

SEQ ID NO: 66092 - DNA, 770 bp, Zea mays
  unsure (1)..(770): unsure at all n locations
  Clone ID: MRT4577_160277C.1
ggtaccctcgtggtccgccgggntaagagtcatttaatctaccttaatcccctcttattcctatgcaaccgaacaatgcctaacatgttgcacaaattattcttcagttcctttatttccattatcggaagcaatgtgagttttcagacgagcacgacaatgcagataaatcctaactgacagaaatggtttcttcttcggtacaaaggtctggttctcctattatatcatgttgcattgtagttctggactgataggaatcctttatgtacagaaatcacattttgagtataatgtaaatcttgaatgatgtgtcaaactaaagtatgtagggagatgagatagaatgtaggtatattcaacaagtcactctatattgttgtctacgtgtgtatgcagaactgaagctgaaatgagtacttcggtagcagcatcattctgacctgaataccaccgctcacgctcaggacagatttggagcgtcatttcaactggttggttgctgcttgncagggtagttctcacggcgtcatgtcttgtggataggcttgtgcacttgtatcaaaacgtcgnagatgtgccaccacatttttttctaaagttggctttgggttgttttaatttcaaggatttttaaaataaattggttttgttttgacaagttggtctaatggaaggtttaagacatgtttntaacagttacctcatttacacagggatctatntatatgatatatttaaaactgtagcaatgcacgggtacataacta

SEQ ID NO: 66093 - DNA, 219 bp, Zea mays
  Clone ID: MRT4577_160278C.1
gtatacagtgagagagagcagggccagctgaatgcgatctgttaatctgtactatagtggacaggagcccttttttgggggtattggttactcatgtactcatgtgtgtattactgtgtggatggatgccaagatgtaaagaagtatagcaaggaccatgagacttatgattaggtcatcttcgacctcacccatgctaaaactactctgcaaggctat

SEQ ID NO: 66094 - DNA, 368 bp, Zea mays
  Clone ID: MRT4577_160279C.1
gtggtgagctgttctttctttattcagcgcgcgcgcacaccctgtctttctgtggtgtgcccgcggctattaaccccgatctggatgagtctgtgagggaggacgacaaggagagcctgggacatcggatcgctacctagggttctccgcctgagcgacatacaggaggaggtggtggtgactgtgccagtgcttgcgtacgtgccaaacaatagggccttcaaagagcaggcgtaacacatgggccaacatcatctgtaggcgatatacgcacggaaagtgcatgatctaaaaccagatctgctgcatccacgatgatttacttgcattacacaaaagcctatcaacggagaggtcatggttgggca

SEQ ID NO: 66095 - DNA, 1107 bp, Zea mays
  Clone ID: MRT4577_16027C.1
gccgccttcgtaacttgttgcactttattttgagaacggacgtccaattacaaaaaacacaagctgtctaataaagatgcatgataaacaaacagagggatgctgcattatgcgtgcgtggacacgactgacgacacaagctttaggatggatgatgcatgcatgcatcgtacatatatagagtactatatagaagccaagaaacatgtaacgtgcaaagcaggaagctagtgcgtgagaataggaccggagaatttagaagcagcggacacgtgtgtgcaagcagtcatgcacgctaagcttcacgttcacgatcacgggtgaaggcagccaccgccgccaccgagcccactgccaccgccaaggccaccgctgccgcccagacccgatcctgagccgccaccaaggccgccgccaccgccaaggccgccgccgccgccgagaccaccaaggccgccgagacctgacccgccaccaaggcctgatccgcctccagcaccaccaagcggtccaaaccctccgagtccaccacctacgacacctccgaggccgccgacaccaccgccaatgcctcccgcaacgcctccgatgcccccgaggccggcgccggcgccagcgaaccctccgacgccgccgacgtagcccggcaggaaggtcttctggtcggcgttcacgccggacgcagcagctctctgaccatgcttctgctggctgtcgttgctgttagtagtagtgccgcctatggccgtcgtggtggtcgtcgttggcatggctctgctggcctcggcgggcgtcagcgccaggatgacaaccaggagcaccaggctcaggctcaggctgctgctgctgcagcacgccatgattccggcggtgttgcgccacccgctaggcataccggatcaataataatgtgccttctccttatctctcggcttttctttttcttttttggtggctagggctcaggtctctctctgcaggtcgcaatgaagccggttcgtcttcgccgcgtctatcttcgcggcgatctccttcgccgtgtgcttcttcggctgtgccttccccgttatggccgacccctgcttctgctgttgctctcgcgccgga

SEQ ID NO: 66096 - DNA, 613 bp, Zea mays
  Clone ID: MRT4577_160280C.1
aactatctgggtagcatcatatccaatgatcgactgctacagaccccaacgatcggctgacgtggtagtgcaccagacaatgagaagtgcatgtccggtgtgcactggattgtctggtgtgcccgtcgacagaaagttgttgctttatgtccaacggctataattgtggtgggggctataaatacaaccccaaccacctccattcagcacacccaagaattcaatacatccacattcaatacaagagcaaagaattcattccaagacacattcaaagcttccaatcctctccaagtgccacaattaagacaagtgatcaatagtgattagtgacttgagagagtgtgattcgtgtttcatttgttgctcttgttgcttggctttttaatcgtgctttcttcatctccttctaaactctctaagtgacttataaagctagcaagagacacctaagtatgtggtgatccttgtggggtctttgtgatccttgagattaagaagaagcactcaatcggtctaggtgatcgattgagagagggaaagggttgaaaaagacccatccttagtggcctcctcaacggggagtaggttcattggaaccgaaccttgggaa

SEQ ID NO: 66097 - DNA, 520 bp, Zea mays
  unsure (1)..(520): unsure at all n locations
  Clone ID: MRT4577_160281C.1
gagctgttctccgacaggggggcaccgccgcggcagcacaaggacaaacccgccggcgttgccaacggccggaagcccggcctgagtggcggcgtccggggcctgaacctgagcgtgaactcgtgcatcgggtaccggcaccaggttagctgccggcgggtggaagtcggcgccgcccgcggccctggccccgggctgttcggtatcaaggggctcttctccaagaaggtgcattgagtgagcctgttttgtgttcacccaccctcgggctctctgatcactcgtgtagtaactcctcttttacccttccttttactagtactttttttaaccttgtgggttatatatatataaatggtacgatgagatgtgtgttcgtgagcgaggttgttattacatgtaaaaaattgcatggttagccagtaaccggtttttgtaaggctaatgcttgcttggtgacatgtactgtaaaaagttcgccaacgttaacaacctctgtttatgatgtgagcnaacaagt

SEQ ID NO: 66098 - DNA, 206 bp, Zea mays
  unsure (1)..(206): unsure at all n locations
  Clone ID: MRT4577_160282C.1
cgggactcgcaggaaattcgcgcacgaggatacttactactcncgcgcctcgctcngatggttcgactgacgatttcggactcgggcgtacatactgttcgtcacaggagccgcttactacganaagttgcatcaactacgancagaattactgactcggagactgctacaacactcactgaatagacaactgactggacgggtcg

SEQ ID NO: 66099 - DNA, 725 bp, Zea mays
  Clone ID: MRT4577_160283C.1
ccggccgggatcaccatcgactctccatcatcgcatcaccaggagtcctcgaagctagtaccacctctctaccccccacgaccgattcgattgctgtatttccacgcttttatttaaacacgacatcatgtctgcccagaactcggtcggtatcaaacagcttcttgacgctgagcaagatgcttccaaaattgtccagaaggctcgagagtaccgcaccaagcgcatcagggaagctcgcgatgaagccaagcaagagatagccgactacaaggccaagaaggaggaggaatacaagaagttcgaggccgagcacagcaagggcaacgagcaggccgaggccgaagccaacaaggacgccgagactcaaatcaagagcatccaggaggctggtaagaagggccaagctggagtcgtcaagaacctcctcagcgctattttcgacgtcaaccccgttcctcccaccaacaccaagtcttgagcgggtccccggcggagtcacggtgtttataatcacgagcgttgttagctctgcactttggaagacgatagattatgtacgaggaggatttgttataagagagcaagaccatgcgttctataccggtcaccctgcggagttccacctggacgcctttttgatcattaagtttactgaacaaactcgactagagtgctcaacatgtccctcagagtctggatctcctctgtggtatctagaccct

SEQ ID NO: 66100 - DNA, 431 bp, Zea mays
  Clone ID: MRT4577_160284C.1
ccggcccggaatccccgggcggaccacacccttccgttaccagcaactaagcaggcgaaagcagaccacacccacttggttagaaccaccaccaggggcgccggcaatggcggcctgcataacctcctcgtaagttttggcgggggcccttaagggcctgccgcccttgggccgccggccttcttctttggccgtggtttgttcaaaaaagaaaatcaagaccgccaggccctacggaatgggggggggcctgcccgtcaacttcaaccccaccggaagaaaggccaaggccagggccttgtcccatttcgtcaccaattccggctcaaccgtggacggttccggccaattttccaacaaggataactgttttccaaccgggaacttttccttcgttggaaccattggcctttttatctgggcctcaacct

SEQ ID NO: 66101 - DNA, 343 bp, Zea mays
  Clone ID: MRT4577_160285C.1
agattttagaaaggatcatgatttagtgtttccaccaaatcctgaggtgccaccaccttaagaggttaaaaatttcttcaacctcattaaggttgcagaagagcagttgcacaaacacataacagtttccatcctcgctttcgtgtctcgacttatgactactaaatccaagaccatgttctcgaacaattgttacaacgagctcttgaatttgatcagcgaagtgtttccaccaaatcacaaagaagccaaaagacgtgtatcagtgctggaaacacctctctggttaggtatggactatcagaaaatcgatgtatgtccagataattgtatgcttttctag

SEQ ID NO: 66102 - DNA, 875 bp, Zea mays
  unsure (1)..(875): unsure at all n locations
  Clone ID: MRT4577_160286C.1
tgtgactgtctggaggcacttcgtcttcaccggcttgcagccatagaactgagcttgtcagtgcactctgctcctctggtgctgctctaggttcagccggcgtcttcgtcacgttgccggtcggcaaagcttgcctaggccccagctgtcgctcaccttgaccgtccccagtttctcccttctctacacagcgcctctgctagctacgtgcggggggcagctacggcaatttttttaagctcgctggtggctagcactgtagtcccggctcccccacgtcctagccatcgcccactgccaaatcaagttcgtcggccagtcgccggtccgaccatgaacccctgcagactcctccatatccacagcgcgtcattgaccttgccgtgcgccgttgagccttcatctccatgtccgacatctagctcgcgtccatggatgtcatgccgcgccgcgagctcgatctgcgctgccatcgcttcaccgtgctcactggccatgcgcccctgcagctccctgttcggtaaaatgagtggactcgtgctcgtcgtgtgttgggaagatcgacactgcgatgctgattgtttgattttggggagaacgacacacacatggtgttcagtgaatagttcaaaccagatagcctcatcgaaatcacgactccgagtcgattcagacatggtaagctgatccatttgtttcccgttagtatgaggaatgattggatgcgttggattaaattactggtcgtaatgatagtcattatatgctatttttatttaaaaatagggtattaatgtttatgtaatttctggtaataataattaattagacatttttatatgtatatggtaaagtttgggcgacaatgtanattt

SEQ ID NO: 66103 - DNA, 422 bp, Zea mays
  Clone ID: MRT4577_160287C.1
cttctttttttgaaacgccctactgtgcattgaatttatacagctccaggaccgaaaacttttgtcccttacagggcgggatgttggcaccttcggtagaatgcgggaatgaaaaccagacgtttgtgaaatgccaacaggaccaagacatgattacagcactaagcgtcagatgacacgaccaccacgatggcgaaattaacatgaacgatcgatatgggctaactgcgaactttgataggtactcctgctggccaaccaagtgcacggaggggatgaacacgatggtgtagacgagccactccaggccaacgaagacgagggggccgacccaggacacccagatgcaggcgaagttgccggcctgcatggccgggcacaaaagagcgggccgggttcatggtagacgccgctgaaggggc

SEQ ID NO: 66104 - DNA, 292 bp, Zea mays
  Clone ID: MRT4577_160288C.1
cccacgcgtgcgtccgcctgcgccttcgccccggcaaaaagcaaaacacggtcatggaaggctacgaccgcgagttctaccagttcagcgaccagttgcgcctgcagacggacgtcttctctggcctctcgctcggcgactccatctggtcccccgtcggccggcgcaacatcagcaacgacgttctcttcggcgtctgcgcgtcgtccgccaactccgccgccaagagcaacgccgtcgtcgggctcaagctcaacgactgatggcccggcctcatcggctccgggaagct

SEQ ID NO: 66105 - DNA, 798 bp, Zea mays
  unsure (1)..(798): unsure at all n locations
  Clone ID: MRT4577_160289C.1
gtttgatggtttctgcaacagggaactaactgtggccgaaatcaaacagatcgctggtagggctgggagatatggatctaagttccctgttggagaagtgacctgtctaaatcctcaagatctcccattgctgcactcgtctctgaaatcagcttcctccattatagagcgtgctggactttttcccacatttgatttattatctttgtattcacgattacatggaactgacttttttcaccctatactggaacgtttcttggagaaggctaaactatcaccagactatttcattactgattgtgaagattgttggtaatttttccaatacctttttctttattgggtcaaattttctacaaggaacactatataaaatcaagatgagatcatttgagtagaaagacactgaatgtctgctngaaaaaacatcaagagacaattcagcacctcctagcctcatgcatctttacctgtcagttttggttcaatattttatctccttttggcttgggccatcttactcctgctgttgatgaaccctctttcgcggaatggtggagacgcctggttcttagagtacccaatggcagggaaaagggactcaacagtgtcatcattttaggggtgtggtgtgtttggctgcaccgcaacaaagtgatcttcaatggggaaccccttccttggccaatctacagagaagcttcttagatgaatgtgtatgttgggtgatgactggagctgaaaatctaggttctctagacctagctatagacctagctagtgccttgaatgtag

SEQ ID NO: 66106 - DNA, 444 bp, Zea mays
  unsure (1)..(444): unsure at all n locations
  Clone ID: MRT4577_16028C.1
ccctagcgtccggccttgcctcgcgcaccggtctggttctggtgggtgccctcttcgccggtggccggaaggcgagggggaagccggaggacgctgagggcgggcgaggccnncgtncccagatctaacttncgccgnccgtctgtttttttttggtactactcttcttntgttccaggggattgagagaggaaggaaggaaaggaggtgcttaaatatgaaggcgctaattnttgtagggggtttnggaacccgagttnggnctttgaattttaatttactgaagnctgttgtggattttgnaaacaagngaatgattntgnatnagatctaagctttgaaagaagttggggttatagaggtggttttggttattaagtaccgtctagaggtaatgattaatttattgaaggattttgaggataatattgggataaaaattat

SEQ ID NO: 66107 - DNA, 357 bp, Zea mays
  Clone ID: MRT4577_160290C.1
cttttctttttttttttttcccacctttttggtgaacctttttttgagaggaaaaagccgggcgttgcaggagaataatctctcactccattcttttctaaattttttatttagcgatttcatgaaccaattttgaagaaaactttacccaactgccgaagtttatgaattacttttcaaaacctcagacttgttcacatgatcaaatataatggggttcttaccgctttgccctggtacatttaccttccgtgaacagctacaaatttcaaccgccgatgagggatcgttcccggttttaacctaactaaaaagaaccaattcacggggctaaaaagggtcctggacattattaca

SEQ ID NO: 66108 - DNA, 612 bp, Zea mays
  unsure (1)..(612): unsure at all n locations
  Clone ID: MRT4577_160291C.1
cncttcccttattctctctcccccttcctactctctgtcccccgtctgctccatttctgctctgcgcgctcccctccccaccccacccactccccccattccgtcggcgcagcaggcgagcggagctcactcccaagagaagatgtccgccatcccctcgaggagctgattcaaggtgtaggttgtactatgtgagaaggacagctgtgtacatcaagactcaaattagcttcgcttgattacactacagctggttgaataatagtatatacttgattttggtggttcagaaacatgggttctagatttccatcacatcagctgagcagtggcctttatgtatctggccgacctgagcaacctaaggagaaggccccgacctttggatccaatgtgatgccatacactggtggtgacaccaagaaatctggggagcttgggaagatgtttgagctccatgctgaaagatctagaaaatctggtcctctaggcagtgcgccttcgagaaatccttcatttggcggtgctgcttccaactctggacctgtgtctaatgctggcggtcggaccaactactctggttctcttttctcttcacttcttggcgccgga

SEQ ID NO: 66109 - DNA, 615 bp, Zea mays
  Clone ID: MRT4577_160292C.1
acccccctcgcgctgcattattttctctctctccctcccctctccgcctccccgcttattctctctcccccttcctactctctgtcccccgtctgctccatttgtgctgtgcgcgctcccctccccacccactccccccattccgtcggcgcagcaggcaggcgaacggagctcactcccccccccctcgctgatttcctccctcccaagagaagatgtccgccgtcccctcgaggagctgattcaaggtgtaggttgtactatgtgagaaggacagctgtgcacatcaagactcaaattagcttcgcttgattacacttcagctggttgaataatatacttgattttggtggttcaaaaacatgggttctagatttccatcacatcagctgagcagtggcctttatgtttctggccgacctgagcaacctaaggagaaggccccgacctttggatccaatgtgatgccatacactggcggtgacaccaagaaatctggagagcttgggaagatggttgagctccatgctgaaagatctagaaaacctggtcctctagggaatgcgccttcgagacatccttaattcggcggtgttgcctccaaactctggacct

SEQ ID NO: 66110 - DNA, 598 bp, Zea mays
  Clone ID: MRT4577_160293C.1
tgggccgcgacaatctcacacagcaatctacacaattcctgtctacgtcacacaggacggtgctcacagacacaccaatcgtggggaccaatggcttactactatcaggtgcactactgcttggaggaggcgaggtcgtggcgcccggtcggcttccgccgccacgccgcgggacgacagcagcaagtcgtcaggaagacagttccaggaggtcgacacggtagcacgcgccggggccaaccaccaccagcctagcatgtgcaccacgtgggccacgacttcctggtgtactagaccagggatctatgaggacatctacacctgcaacggcgaggtcctcgagcgcaagcagagcttcctcgccaggaataactgagtagaccggatggactccatctgcgcccggtcgtgcctgcctgcgtgccttatgtatgactgggattgcgcaggctcatcgtacttggctagcgtacggacgtgcacggactcatctcctgtactaattacgacaataatgtcgtgacctgaataacacttcttcgtaatactaataactacatcagcatcagtcagattctgtgaccaaaaagataataaa

SEQ ID NO: 66111 - DNA, 195 bp, Zea mays
  Clone ID: MRT4577_160294C.1
tttcctctgacaccggcacattatggttcagagcgggattgactgggtcctcagcaggatgaacgacaggaggctacttgttcaggtcattgtccacgaactggaggggcagcactcttgctgggccagctacagagcagggggcactgcgtactactgcctgggacacaacctcacggccaggtctgtcatgag

SEQ ID NO: 66112 - DNA, 486 bp, Zea mays
  Clone ID: MRT4577_160295C.1
ccggccgggatatatatagacactgcatcacacggaggaatgaggaactatactaatccacaaacaaaactgcctgctttcagatatacatagcattaacaagaccatggatttcccactgcattgccatctccctgctcttcgcagcgaacactgcctggcagcggacatcggcccacgatgactgctcaggacaacagaaagatgatccatcaccggaacaacagatcgcgaatccagctgacgctggaccacctccagagcccctgctcccaggggccgatgcccgcccacctccccttctacatggtggtccacaaccaccacatcggctgataatatataagctagacgctatttcctttccttgccccagaacttgaaataaatatatatacgatgaaataacgcgggcatgccgtataatggatgtgtgaattctcactaattaagtaatacaaaaaaaaaaaaaaaaaacccgcggcc

SEQ ID NO: 66113 - DNA, 176 bp, Zea mays
  Clone ID: MRT4577_160296C.1
agggtcgtcgaacaaaacaacatgaaaatgggcattggtctcgtcgggtggctggctctgtcaacttgcaacgccttttgaatgcaaattcccttgcccttcgccgggctgtaaggctttgaccgggcttgcgcccggcttaccaccattattggcgcccgcgggctttaccccta

SEQ ID NO: 66114 - DNA, 192 bp, Zea mays
  Clone ID: MRT4577_160297C.1
cccacacaatcaacaacacgtcttacttttgcttatactacacacccaaaaattgaccaagcggatgtctaaatttaatggcacttctttctatccccgaccttaatacatgcggcaattgcgcttcacaaacaccaacatgtaaacaaccgcctacacactatatgcctctcttcattctatctcatcacc

SEQ ID NO: 66115 - DNA, 426 bp, Zea mays
  unsure (1)..(426): unsure at all n locations
  Clone ID: MRT4577_160298C.1
aaaggccgccgcgcacgcgccccggcgggggggagcggcaaggcgccgcaaggcagaaaacaaggagcgggccgacaaccggcgcgggggccngggcaggggaagagaagagagcgagcggagggccgcagggccgaggagcaaagaggaccaagacnggcgggggaacgcggggcggccacaccacgagccgacggacggcgagccggacggcggacaccccgaagcggaggcgcacagagccggccgagcgacgagcaccncggggaggacgggagccaagggcacaagccgaggcaacgggcgccgnncgcgacgngccgggagcacgggcggcacaagccgaaccnggacaacgaggacgacagaagcgggggcagaagagaacgacagcggncccgggagcggagaggagagcagggggcc

SEQ ID NO: 66116 - DNA, 233 bp, Zea mays
  unsure (1)..(233): unsure at all n locations
  Clone ID: MRT4577_160299C.1
gcctggcaggtacccggtccggnaacgcggagcggcacgaccgcgacatagaactagtgacgcgcacgggcaccgttacactcgcacagcgcgcctgaatcgcccggctacacttgcggcttcatgtctcgcttgcctgtctctcaacctgcgcgcgcgtgttccccgtacagcctgtcagtaggaggctagctccagggttcaggccaacggctttctcggacctgcccccc

SEQ ID NO: 66117 - DNA, 839 bp, Zea mays
  unsure (1)..(839): unsure at all n locations
  Clone ID: MRT4577_16029C.1
aattcggcacgaggcaaatccccaacaggcaaacaccttcagcccctcgtgcgcccgtggaccgccagatccccacggccgccgaggcactctcctcctccttgcaccgagtactctccttgcacccgctcggcccctaaaatgcccgcatcttcagaagccgtgggcgctcccggcggcgggggagacgtcgagcaggagtacgagattcgcaacgacgagggctttgtctacaaggttcccagagggctctaccacgaggccgcaccctccaccacccagtcggcggcgggcaccgaccccaaggccgccggcctgcgccgccgctgccgcgcgctcctccgcctccgcgccaagcgcctccgcgacctctcccgctgggaggccctcgcctccgaactcttcgccccgctttccgctccccagccaccggctccaccatcccaagcccctcccgcctcatctcattcagtcgctgcctcctcctcctcctccccgacctccgttcttgacgagctcctcgcacaggttgacattcaggcggagctgatgaagaaggtgcaccagtggtgcgacgaggccaacgccatttgcgacgcaggagagtctgccatcgttgcttctatggttgcgctgccgttgtggggtggcaacccagcggatctggtaacggcgctgtgcagccctgatgaaaaggcccatggtaacttggatggacagagtgggcgccaagtagcttctggactgtcttcagcagctgctgaaatgataaaaaattgtgccaagaaacaaacaatgggtcatgaccttnctcacaatctcactgagagcaggatgat

SEQ ID NO: 66118 - DNA, 417 bp, Zea mays
  unsure (1)..(417): unsure at all n locations
  Clone ID: MRT4577_1602C.1
ccacaaatttgttgaaattgatccattcctcgtattattgctaattattagactataagaaatgaaatggngatagcacaaaccaaacaaaaaagtgaggggaacttattcctcaaatcatacacgctataattaaactctctctagntgtgtctgctctctgagcatgaacacggagaagagagcgtctgattacactcgtcttctcggcctgttcctggtgcgtggaccgacaacggtgggttccttgacttccttctcctccaccggtaccggcggcagctcttcgtacttcctctgcgtcctcctccgcttcgttaatgtacgtcgtcttcctcaccggcgccgccgtcatcggacgcctcgttctcttccagtatcgctcggtttatctccatctcccttaggaagcggtcg

SEQ ID NO: 66119 - DNA, 790 bp, Zea mays
  unsure (1)..(790): unsure at all n locations
  Clone ID: MRT4577_160300C.1
cctgccgggataacaaagcccgttagccgagagctcctctgctcctctcgtgtctggccgaacaggcagagcgaccagtctcaagagcgctccccatggcgtcaggagatgcggcggcccctgtcgttcagactgtggtgctgaaggttgccatccactgccatggctgcaagaagaaggtccggaaggtgctcaggggcatcgaaggcgtgcaggacgtgacggtggacgcctcgcagcacaaagtgactgtgacgggcaccgtggacgccgacacgctcatcaagaggctgtacaagtccggcaagaagggagtgccctggcagtgtcacccgcccgccaagaacagcgagcccgcgccggaggccccgccggctccgcagcctgccggcgacggcggcaaggatgctgctgctgctgctgctgtggccgcggcggacaagaagtcggaggaggcggtgaaggagccgcagggcgagagctccgaggaggaggagaagaagaagaagaagccggagcaggagcaggaggacggggccgcagagaagaagcagcccgaagcagagtcgtcaaaggaggtggagaaagtggaggcgaagacggacggcggtgacagcgagggagctgagacgaagcagtccaagggcgctgccaatgacgaggacgaggcannagaagagcgacaggccaaggacgccggcacggcggagcctgccgccgtgacgacggagaggtcccttcctttgncgccggcgcccgcgccaaagcacgcgtacgagcatgactaccg

SEQ ID NO: 66120 - DNA, 550 bp, Zea mays
  unsure (1)..(550): unsure at all n locations
  Clone ID: MRT4577_160301C.1
gcccgacgggcaaagccgccacgtaggtaggattgtgctgtgccacatgaccgcactttgagcgcctgcgacatccaacctaaatgagtgctgctgtggctccttcggcttataggagcgcacgatgcgatagtttggcgacatggactgcgtggttcctatgcccaatatcatgacaacatctcccgccggatacctggcggtccttgagcgcctaaccgcgatgcataagggcattataaaacgtgcggactgcggccttaagaatccaaggcccttttgtgacatcgagctcctggcacatctaaccctactgcccttgaacgcagcagctgctactggctctgacaccgctgctgcagcgatcattgctggaccctgtggtctacctgcagcagcagntggctggcgttccacccacttgccctggcgaacgtggcggtgtacccccaacaactacagctggaccacgctatggccgcgctctgtcgactagccatggtgaaccctgccgtctacctacaactgcttgcatctaacccgctcgctg

SEQ ID NO: 66121 - DNA, 877 bp, Zea mays
  Clone ID: MRT4577_160302C.1
cgttagccgagagctcctctgctcctctcgtgtctggccgaacaggcagagcgaccagtctccagagcgctccccatggcgtcaggagctgcggcggcccctgtcgttcagactgtggtgctgaaggttgccatccactgccatggctgcaagaagaaggtccggaaggtgctcaggggcatcgaaggcgtgcaggacgtgacggtggacgcctcgcagcacaaggtgactgtgacgggcaccgtggacgccgacacgctcatcaagaggctgtacaagtccggcaagaagggagtgccctggcagtgtcacccgcccgccaagaacagcgagcccgcgccggaggccccgccggctccgcagcctgccggcgacagcagcaggtagttggggggaggcggcgccgctagctaccgcaatagagaaccctctctctctctgtggttgtaagtagagtagcctgttgctggcctcttccacttagtatagaggtcaaacctctctccatgcacgacagagctttttcttcgtttccttttaatatcttttttactgtttctaatgataatgagatacgcacgcgcgtttacctgtagtgatgttcaccgcgtctacgcccgccggctacttcaagaaattttgtactatgggctaggacaaatagatatacgtatatggctagctagtagttttctctgtctagagaaaggcaaatgcgtattttgtatctccttattagtatatattactcctgcctgaccgaatatccttccacttctactcgtcagttgaaacatcagtgatcactgatcagtcttcgacctgccatttggtttttttaaaacaacttagaaaattgggtctttggacctgccgt

SEQ ID NO: 66122 - DNA, 1384 bp, Zea mays
  Clone ID: MRT4577_160303C.1
tgggtccctcgaggccggccgggttcctcccttaacacagccagaaagccacgttagccgagagctcctctgctcctctggccgaacaggcagagcgaccagtctccagagcgctccccatggcgtcaggagatgcggcggcccctgtcgttcagactgtggtgctgaaggttgccatccactgccatggctgcaagaagaaggtccggaaggtgctcaggggcatcgaaggcgtgcaggacgtgacggtggacgcctcgcagcacaaggtgactgtgacgggcaccgtggacgccgacacgctcatcaagaggctgtacaagtccggcaagaagggagtgccctggcagtgtcacccgcctgccaagaacagcgagcccgcgccggacgccccgccggctccgcagcctgccggcgacggcggcaaggatgctgctgctgctgctgtggccgcggcggacaagaagtcggaggaggcggtgaaggagccgcagggcgagagctccgaggaggagaagaagaagccggagcaggaggacggggccgcagagaagaagcagcccgaagcagagtcgtcaaaggaggtggagaaagtggaggcgaagacggacggcggtgacagcgagggagctgagacgaagcaggccaagggcgcagcagagccggcaaaggaagcccctgccgctgccggcgctgccaatgacgaggacgaggcaaagaagagcgacaaggccaaggacgccggcacggcggagcctgccgccgtgacgacggagaggtcccttcctttggcgccggcgccaaagcacgcgtacgagcatgagtaccggccgccctactacgtcgcgcccgcgcagccggtgctgagctaccacgcggcgcagcgcagctcgagcgtgtcgcacttcgcgccgcaggcgcagccggcgtactccacgcaacaggcgcacccgcatcaagcgtactactccgcgcagccgcagccggggaagcagtggtcgccgtcgtacctgtacatgccgtacccgcacgccgcggcgccggagccttactaccagcaggactactacggcccgcccgggatgcacgcgtcgcctatgcacgactcgtcatgtgagaggagagcggatcggcgcggcccgggccgccgtggccagcagcagcagcagcagcaggtagttggggggaggcggcgccgctagctaccgcaatagagaaccctctctctctctgtggttgtaagtagagtagcctgttgctggcctcttccacttagtatagaggtcaaacctctctccatgcacgacagagtttttcttcgtttccttttaattcttttttactgtttctaatgataatgagatacgcacgcgcgtttacctgt

SEQ ID NO: 66123 - DNA, 352 bp, Zea mays
  unsure (1)..(352): unsure at all n locations
  Clone ID: MRT4577_160304C.1
gccgtacattcaactcatatataactcggagggtgatactcatgggggagcgttcatacattatatcaattcttctgtacctttcttaaaaaaanactttctttttctgtggaatagttatgttacatttcactcttcataatgtgacattaagttttatgtttaccaccaagcatacttttgtaactttatcatccattgcataaattattcctcttcctttattttgggatggttgcatttgactattataagtgggaattagctagttacatttcttaaaaaccaatttctttaaagtcaaatatttttggcttggttttggtttgaagagccgccattttattccctt

SEQ ID NO: 66124 - DNA, 437 bp, Zea mays
  Clone ID: MRT4577_160305C.1
ggaggtggtaggctggtagcctatataaacgcggggagtggctcggttgaagtggcaacaccagcgcaaccacgttacgcaccatagaacatacccgtgagaagctaagacccggccgttgctcaccacagcatcatcgccgcgccgtgctagctcaaggatggagaacaacaggcagcagcagcaggcgccgccgccgccaggctacccgacggcggctgcttctgcaagagagatctgcttaaattattctatcgtccagagctgcagcaacacctgatatgtttgtttggggtgttattagtagggagagctagctcagctttattattgttaataataattctgtgctgtacgtagctatagcaagcatacgtatgtatacacgtatatgtatgtgttttaccgtgacttgaatgtttggaaatggtgatttc

SEQ ID NO: 66125 - DNA, 962 bp, Zea mays
  Clone ID: MRT4577_160306C.1
ggtaccctcgaagtgcggcgctcgagcagcccgccgggctcagaagttgcaacggccagaaagccacgttagcctagccgagctcctctgctcctctcgtggccgaacaggcagagcgaccagtctccagagcgctccccatggcgtcaggagctgcggcccctgtcgttcagaccctggtgctgaaggtggccatccactgccatggctgcaagaagaaggtccggaaggtgctcaggagcgtcgaaggcgtgcagaacgtgacggtggacgcctcgcagaacaaggtgactgtggtcggcaccgtggacgccgacacgctcatccagaggttgtacaagtccggcaagaagggagagccctggcagtgccacccgcccatcaagaagagcgagcccgcgccggaggccccgccgactccgcagcctgccggtggcggcggcaaggacgccgctactgctgcggccgcggtggacaagaagccggaggagccggtgaagaagccgcagggcgacagcggggggaagcggcaccgctagctaccgcaatagagaaccctctctctctctgtggttgtaagtagagtagcctgttgctggcctcttccacttagtatagaggtcaaacctctctccatgcacgacagagctttttcttcgtttccttttaatatcttttttactgtttctaatgataatgagatacgcacgcgcgtttacctgtagtgatgttcaccgcgtctacgcccgccggctacttcaagaaattttgtactatgggctaggacaaatagatatacgtatatggctagctagtagttttctctgtctagagaaaggcaaatgcgtattttgtatctccttattagtatatattactcctgcctgaccgaaaaaaaaaaaaggaagggcgcccgccgactaatcagctcgtcaagaaagttaattcagtccgggcgcgtg

SEQ ID NO: 66126 - DNA, 592 bp, Zea mays
  unsure (1)..(592): unsure at all n locations
  Clone ID: MRT4577_160307C.1
gccgcccccagaccggcaccgcccgcggggcgaacccgcaccccacgcccgcaggccgggaccggngggcgcgcgccgggcagnaggagggagaggaagggcggcanggcggcgccgccggcgagggcccgggccgacnacgacnaccnnancaagcnncnncncanngggganagcggggggggggggaggngccnccngnngcggnncncngangcnnccnncacnacaagcgngannaccacaannggganngacnnnaagaaacggacaanagaanngganggcaagcgnanaaagcnacagannnggganacagcgggccaagaacgcnnccgnacnannaccacngcgnacnaccgnggagcnangggnancnggcnggnnnangangncaccgangaancnncnnncaacaacagccgaaacggganncggaacaaagagcaacangccncnngaaagggcaacaaaannnnggggggcaacaaggccgananggacgaaagcaagagggcngaaccnacngcgaaaggacaagcacnngcggangagaangggaacaagnnagnngaaacgagggccaagacaa

SEQ ID NO: 66127 - DNA, 676 bp, Zea mays
  Clone ID: MRT4577_160308C.1
cctcgaggccggccggggaaaaaataaaaaagaacaccaacgcaaccacgttacgcaccatagaacatacccgtgagaagctaagacccggccgttgctcaccacagcatcatcgccgcgccgtgctagctcaaggatggagaacaacaggcagcagcagcaggcgccgccgccgccaggctacccgacggcggctgcaggcttggagcaggagcagggaggcaggaagggacgacgccgggagaagacgacctcgcgcggggataaaggcttcatcgaaggatgcatcgcggcgctctgctgctgctggatctgcgagatgtgctgcgactaggcacgcagctagcggtcagctagctctccgtctccggcggctatacatacgaaatacgatgagagagctagcctgccacagcttctgcttctgcttctgcaagagagatctgcttaaattattctatcgtccagagctgcagcaacacctgatatgtttgtttggggtgttattagtagggagagctagctcagctttattattgttaataataattctgtgctgtacgtagctatagcaagcatacgtatgtatacacgtatatgtatgtgttttaccgtgacttgaatgtttggaaatggtgatttcattgcaaaaaaaaaaaaaaaaaaaaaaacctaa

SEQ ID NO: 66128 - DNA, 1329 bp, Zea mays
  Clone ID: MRT4577_160309C.1
ttcgacacgctcggaattcggctcgaggttagccgagagctcctctgctcctctcgtgtctggccgaacaggcagagcgaccagtctccagagcgctccccatggcgtcaggagctgcggcggcccctgtcgttcagactgtggtgctgaaggttgccatccactgccatggctgcaagaagaaggtccggaaagtgctcaggggcatcgaaggcgtgcaggacgtgacggtggacgcctcgcagcacaaggtgactgtgacgggcaccgtggacgccgacacgctcatcaagaggctgtacaagtccggcaagaagggagtgccctggcagtgtcacccgcccgccaagaacagcgagcccgcgccggaggccccgccggctccgcagcctgccggcgacggcggcaaggatgctgctgctgctgctgctgtggccgcggcggacaagaagtcggaggaggcggtgaaggagccgcagggcgagagctccgaggaggagaagaagaagccggagcaggaggacggggccgcagagaagaagcagcccgaagcagagtcgtcaaaggaggtggagaaagtggaggcgaagacggacggcggtgacagcgagggagctgagacgaagcaggccaagggcgcagcagagccggcaaaggaagcccctgccgctgccggcgctgccaatgacgaggacgaggcaaagaagagcgacaaggccaaggacgccggcacggcggagcctgccgccgtgacgacggagaggtcccttcctttggcgccggcgccaaagcacgcgtacgagcatgagtaccggccgccctactacgtcgcgcccgcgcagccggtgctgagctaccacgcggcgcagcgcagctcgagcgtgtcgcacttcgcgccgcaggcgcagccggcgtactccacgcaacaggcgcacccgcatcaagcgtactactccgcgcagccgcagccggggaagcagtggtcgccgtcgtacctgtacatgccgtacccgcacgccgcggcgccggagccttactaccagcaggactactacggcccgcccgggatgcacgcgtcgcctatgcacgactcgtcgtaccgcatcttcgacgacgagaaccccaactcctgcagcgtcatgtgagaggagagcggatcggcgcggcccgggccgccgtggccagcagcagcagcagcagcaggtagttgggggggaggcggcgccgctagctaccgcaatagagaaccctctctctctctgtggttgtaagtagagtagcctgttgctggcctcttccacttagtatagaggtcaaacctctctccat

SEQ ID NO: 66129 - DNA, 625 bp, Zea mays
  Clone ID: MRT4577_16030C.1
ggtctggtcagtcggtatcgtcgagaaagtcatactgagatggaggagaaagaggcctgggttacgcggttttcggccccagaaacaactagaaggtccatcgcaaatccaacctgcaaaggctgaagacgaatacgatttcttgcacgacggcagaaggcaggccgaagccaggctacagagagcacttgcccgggtgcactctatgtcacagtacccagaagcgagagagcagtaccacaggcttacaacctgcgttgctgaaatgaaacagtccaggatgatgcaggatgagatgctaagccaggcggctggtggtgcggacgatttcatggctggactggaggacttgatctgcatagatgatgccccgccccgatgtctgccattcggtgaagctgagcctttttacatcagataggcagggaggcggtttccttgctccccttttgtcagactagccctgtaaatattcttcagctagttgttcaccccgactgtttactcgctttctgctagtgtacaactataacatagtttcaatgcactgattatcggtagaataatcgcctcttatttgatatatagtttatattaattcaacgtattttatggttttatctgt

SEQ ID NO: 66130 - DNA, 444 bp, Zea mays
  Clone ID: MRT4577_160310C.1
ttttttttttttttttgttttttttttttttttttttttttttttttttttttttttttttttttttttttttttttttttttttttttttttttttttttttttttttttttttttttttttttttttttttttttttttttttaaataaaaaaatctgaatctgaaacgcaggcagaatacacacaggacggacagatgtttggaacacagcaccacgactgcggacgcccagaaagaatacacgggaccatgttccatggatataatttcgtgaaatcaagggggtgtttggtttatagggactaaactttagtcccttcacttaattccattttagttcataaattgttaaatagggaaactaaaatagagttttagtttctatatttagtaatttagggactaaaatagaattaagtggagggactaaaaattagtccc

SEQ ID NO: 66131 - DNA, 836 bp, Zea mays
  unsure (1)..(836): unsure at all n locations
  Clone ID: MRT4577_160311C.1
gggtnaccctcccggccgggataacaaagcccgttagccgagagctcctctgctcctctcgtgtctggccgaacaggcagagcgaccagtctcaagagcgctccccatggcgtcaggagatgcggcggcccctgtcgttcagactgtggtgctgaaggttgccatccactgccatggctgcaagaagaaggtccggaaggtgctcaggggcatcgaaggcgtgcaggacgtgacggtggacgcctcgcagcacaaggtgactgtgacgggcaccgtggacgccgacacgctcatcaagaggctgtacaagtccggcaagaagggagtgccctggcagtgtcacccgcccgccaagaacagcgagcccgcgccggaggccccgccggctccgctgcctgccggcgacggcggcaaggatgctgctgctgctgtggccgcggcggacaagaagtcggaggaggcggtgaaggagccgcagggcgagagctccgaggaggagaagaagaagaagccggggcaggagcaggaggacggggccgcagagaagaagcagcccgaagcagagtcgtcaaaggaggtggagaaagtagtggaggcgaagacggacggcggtgacagcgagggagctgagacgaagcaggccaagggcgcagcagcagagccggcaaaggaagcccctgccgctgccggcgctgccaatgacgaggacgaggcaaagaagagcgacaaggccaaggacgccggcacggcggagcctgccgccgtgacgacggagaggtccctgcctttgncgccggcgccggcgccaaagcacgcgtacgagcatgagtaccggc

SEQ ID NO: 66132 - DNA, 779 bp, Zea mays
  Clone ID: MRT4577_160312C.1
cctcgagccggccgggccctccgaagttgcaacggccagaaagccacgttagcctagccgagctcctctgctcctctcgtggccgaacaggcagagcgaccagtctccagagcgctccccatggcgtcaggagctgcggcccctgtcgttcagaccctggtgctgaaggtggccatccactgccatggctgcaagaagaaggtccggaaggtgctcaggagcgtcgaaggcgtgcagaatgtgacggtggacgcctcgcagaacaaggtgactgtggtcggcaccgtggacgccgacacgctcatccagaggctgtacaagtccggcaagaagggagagccctggcagtgccacccgcccgtcaagaagagcgagcccgcgccggaggccccgccggctccgcagcctgccggtggcggcggcaaggacgctgctactgctgcggccgcggtggacaagaagccggaggagccgatgaagaagccgcagggcgacagctccgaggagaagaagaagaagccggaggaggcggcgaaggagccgcagagcgagaagaagaagccggaggaggcggcgaaggagccgcagagcgagaagaagaagccggaggaggtggtgaaggcgccgcagagcgagaaggaggagccgcagagcgagaagaagaagccggatgaggcggccgagagctccaaggagaaggagaagaaaccagaggagccagtgaaggagccaaaggccgagagctccaaggaggaaaaaaaaaaaaaaaaggcccctaa

SEQ ID NO: 66133 - DNA, 1507 bp, Zea mays
  Clone ID: MRT4577_160313C.1
taacaaagcccccttgcgtccgagctcctctgctcctctcgtgtctggccgaacaggcagagcgaccagtctccagagcgctccccatggcgtcaggagatgcggcggcccctgtcgttcagactgtggtgctgaaggttgtcatccactgccatggctgcaagaagaaggtccggaaggtgctcaggggcatccaaggcgtgcaggacgtgacggtggacgcctcgcagcacaaggtgactgtgacgggcaccgtggacgccgacacgctcatcaagaggctgtacaagtccggcaagaagggagtgccctggcagtgtcacccgcccgccaagaacagcgagcccgcgccggacgccccgccggctccgcagcctgccggcgacggcggcaaggatgctgctgctgctgtggccgcggcggacaagaagtcggaggaggcggtgaaggagccgcagggcgagagctccgaggaggagaagaagaagaagaagcctgagcaggagcaggaggacggggccgcagagaagaagcagcccgaagcagagtcgtcaaaggaggtggagaaagtggaggcgaagacggacggcggtgacagcgagggagctgagacgaagcaggccaagggcgcagcagcagagccggcaaaggaagcgccagcccctgccggcgccggcgctgccaatgacgaggcaaaggcgagcgacaacgccaaggacgccggcacggcggagcctgccgctgtgacgacggagaggtcccttcctttggcgccggcgccggcgccaaagcacgcgtacgagcatgagtaccggccgccctactacgccgcgcccgcgcagccggtgctgagctaccacgcggcgcagcgcagctcgagcgtgtcgcacttcgcgccgcaggcgcagccggcgtactccacgcaacaggcgcacccgcatcaagcgtactactccgcgcagcagccacagccgcagcaggggaagcagtggtcgccgtcgtacctgtacatgccgtacccgcacgccgcggcgccggagccttactaccagcaggactactacggcccgcccgggatgcacgcgtcgcctatgcacgactcgtcgtaccgcatcttcgacgacgagaaccccaactcctgcagcgtcatgtgagaggagagcggatcggcgcggcccgggccgccgtggccagcagcagcaggtagttggggggaggcggcgccggtaccgcaatagccaatagagaaccctctctctctgtctctctctctctgtggttgtaagtagagtagcctgttgctttgctggcctcttccacttagtatagaggtcaaacctctctccatgcacgagcacgacagagctttttcttcgtttccttttaatatcttttttttactgtttctaatgataatgagatacgcacgcgcgtttacctgtagtgatgttcaccgcgtctacgccggccggctgcttcaagaattttgtactatggcctatacggc

SEQ ID NO: 66134 - DNA, 300 bp, Zea mays
  Clone ID: MRT4577_160314C.1
atccggctccatcagatccaacgccaccagctagcagcagcagcagcagcatggccaccaccagcacgcctcgcctcgccaccctcctggtgctcctggcggcggcgtcaccgctgctgagcgcagctcaaaaggacgcccccaaggctcctgctgcggcgaaggctgcgcctgggccggcagcgtcgtcgtcgtccggcgctggcgctgcgtacgcggcccctctcacagacgtgtaccaggcgctcaaggacgatcagttctgcgagttcaatcagctgctgcacgtctcgtcgcggg

SEQ ID NO: 66135 - DNA, 1615 bp, Zea mays
  Clone ID: MRT4577_160315C.1
cgttacctaggggaccctaagcgggcgcgttaacaaagccacgttagccgagagctcctctgctcctctcgtgtctggccgaacaggcagagcgaccagtctccagagcgctccccatggcgtcaggagctgcggcggcccctgtcgttcagactgtggtgctgaaggttgccatccactgccatggctgcaagaagaaggtccggaaggtgctcaggggcatcgaaggcgtgcaggacgtgacggtggacgcctcgcagcacaaggtgactgtgacgggcaccgtggacgccgacacgctcatcaagaggctgtacaagtccggcaagaagggagtgccctggcagtgtcacccgcccgccaagaacagcgagcccgcgccggaggccccgccggctccgcagcctgccggcgacggcggcaaggatgctgctgctgtggccgcggcggacaagaagtcggaggaggcggtgaaggagccgcagggcgagagctccgaggaggagaagaagaagaagccggagcaggagcaggaggacggggccgcagagaagaagcagcccgaagcagagtcaaaggaggtggagaaagtggaggcgaagacggacggcggtgacagcgagggagctgagacgaagcaggccaagggcgcagcagcagagccggcaaaggaagcccctgccggcgctgccaatgacgaggacgaggcaaagaagagcgacaaggccaaggacgccggcacggcggagcctgccgccgtgacgacggagaggtccctgcctttggcgccggcgccaaagcacgcgtacgagcatgagtaccggccgccctactacgccgcgcccgcgcagccggtgctgagctaccacgcggcgcagcgcagctcgagcgtgtcgcacttcgcgccgcaggcgcagccggcgtactccacgcaacaggcgcacccgcatcaagcgtactactccgcgcagccgcagccggggaagcagtggtcgccgtcgtacctgtacatgccgtacccgcacgccgcggcgccggagccttactaccagcaggactactacggcccgcccgggatgcacgcgtcgcctatgcacgactcgtcgtaccgcatcttcgacgacgagaaccccaactcctgcagcgtcatgtgagaggagagcggatcggcgcggcccgggccgccgtggccagcagcagcagcagcagcaggtagttggggggaggcggcgccgctagctaccgcaatagagaaccctctctctctctgtggttgtaagtagagtagcctgttgctggcctcttccacttagtatagaggtcaaacctctctccatgcacgacagagctttttcttcgtttccttttaatatcttttttactgtttctaatgataatgagatacgcacgcgcgtttacctgtagtgatgttcaccgcgtctacgcccgccggctacttcaagaaattttgtactatgggctaggacaaatagatatacgtatatggctagctagtagttttctctgtctagagaaaggcaaatgcgtattttgtatctccttattagtatatattactcctgcctgaccgaccaccaaaaaaataaaagggcga

SEQ ID NO: 66136 - DNA, 236 bp, Zea mays
  Clone ID: MRT4577_160316C.1
ggctgatctcactatgcggccactgaccatggccgacccgcctagcagcaaccttggcataggcctacaatacatcgacctaggccaagaacacaaatgaggagtgccaacgctcgtccatggctatgtagacgaacaaagcgcaccgcttcacgctgtacaccaacgacgagcgaaccgacgccgcgcttgtctaccagggacagcctccaccagctaaggatacatcgagctcg

SEQ ID NO: 66137 - DNA, 312 bp, Zea mays
  Clone ID: MRT4577_160317C.1
attcggctcgaggggatctgtgggacaggattgggctttcgcaccccggataatcaaagaggcgtgggtgattatccatgaccagtgggccatagcgtgattcacgggtcttaaggtggcaagggagagacaccatgacctgagggctagagcgtgatgaacagccagcacctggttacatgtgtgtacgcagactctaaggatcaagcccccctggtgggatgggctaataaggagtagagaggttatcttcctaagagggaaaagactacttaatccttgacaactcggtgggcaatcgacagctaatga

SEQ ID NO: 66138 - DNA, 333 bp, Zea mays
  Clone ID: MRT4577_160318C.1
ctgcacgcgagagtgagcataacaacctcaaaaagaggtccatccttaaagagaggcctcctcttgacgatgtgtctaacaccaccattgagacgtccatcttgaaagacaaatctaccctgtgtagccatgaagctattatgaacccacagaatatttttgctgatgacgacgagaccaaagggtgccataaatgggctaaagatggtatggagggcactcactttactgcgaatgattctcacaaaaatgataaatatgttctacacaaacgtcttattaagaaaaaggcggaagttaccatagccaatggtggctggtcacatgacgtat

SEQ ID NO: 66139 - DNA, 1153 bp, Zea mays
  Clone ID: MRT4577_160319C.1
tggtaccctcgaggccggccgggacacccgcgccgcgcccctttccctttctcgcttctgcccctctgcggctctgctgcctgcgcccctttttctattcccaaaaactcccatctcgcggcggaaagagagagagagagaggagaggtgcgagctggtgagatggatcggttggaggagcggaacattaagaagggggagagggagatggaggaggcgcgcaaggaagaggagcggaaggaggaggcgggggacaggaatacccaggagccgcagcaaggtcaaggcctcagcctctcactcgccaacggcagcgacagcggcaggtctggaatgttgccgatgtcgaacccttcagctaatcccacacagcttacaattttctatggtggatcagtatgtgtgtatgactcggtgccaccagaaaaggctcaggcaatcatgcttatagctgcggctgcagcagctgcggcagccaccaaaggcagtgctgccactgcttttaatcctccaatgagcacttctgtagcagctggacaagctcaggttgttgctgaccctagctcaataagcaagcttcaggctgatctccccattgccaggaggcactctctccagcgcttccttgagaaacgtcgtgacagggtcgtgagcaaagctccgtacagccccgccaagtcgttcgatggcatggagtcagcgggaatggagatgactgcggacggcaagcagggcgcaaggcccagtatcttgaaaggttggggagccgcgaagtctgaagtctgaacggtgaaaggctggctgacgctgtggggaggaaggggcagggacgtgctgttggttttattatattggtatttatgttattatatatgtggtagcagcagcgtggaaccgcactaataatggggaccttaacacctctattttactgtcgttgctttgttgtcgcgtgctaggttgtattctgaagtggattcctcaataccgcataccgtactgctacgcctgttgactttgttacattgattgatcgttgtccacttgtaatggaatgccgcaccatgttttctgtcgtgccatcaaaaaaaaaaaaaaaaaaaaaaaaaaaaaaaaaaaaaaggaaaaacaataaaaaaaaaaccaaactata

SEQ ID NO: 66140 - DNA, 1140 bp, Zea mays
  Clone ID: MRT4577_16031C.1
agcaaacccacttgggggccagaggaccagcaaaggctggcaaaaaattccttaaagctgaaggggaaagggccaaaacaagaatcttctgccaaggaagtagtttccacggctagggcccaaagtttaaagaaactggtgaaagagaagctgcatcaatggctcatccgcaaagtaaacgatgatggaaagggtcccaatgttctgcgcaaggaaggacagggtgtgattcatttagaagcagcactgggttatgattgggcaataagaccgataataattgctggtgtcaatgtgaacttccgggatgctcatggatggactacactccactgggttgcgtactttgggaaggtatgctcgcacacattaaagcaatttgaaacagggatgtccatgcttagctagagttttatgtaaaggaagctacctctatttctttcacatccctttatcttgcactttgtttgtactttagtaggagtttggtcctttttctattattgaaccttatattctatgcttttttagagagcggacagttagtgtcctcatagcaatggagctgcagcaggagcactaactgatccaacttctgagttcccttctggaagaagtccagctgatttagcttcagtaaatggacacaaggggattgctggttttctcgcagaatctgctttgacaagccatctgtcagcacttactattagggaatcaaatgatagcactgtagaagcgtgtgggctaccatttgctgaagatctcactggcattgattctgtccatctcgctggagagggtcctgatgctgaatcacttgaaggttctttaagtgccgtgcggaaatccactcaagctgcagctcgtatatttcaagccttcagggtggagtcattccacagaaagaaagtcgtggaatacggagatgacacctgtggattatctgatgaatgcacactttcacttgtttctcttaaaaatgtcaaaccaggacaacatgatacacatctgcattctgctgctgttcgcatccagaacaagtttcgcggatggaagggaaaaaaggaattcctgatcattcgccggagaatcgtcaagctaccggtaaatcctaaccataaatgtcctttatggaac

SEQ ID NO: 66141 - DNA, 1119 bp, Zea mays
  Clone ID: MRT4577_160320C.1
aggccggccggggctgcctgcccctttttctattcccaaaactcccatctcgcggcggaaagagagagagagagaggagaggtgcgagctggtgagatggatcggttggaggagcggaacattaagaagggggagagggagatggaggaggcgcgcaaggaagaggagcggaaggaggaggcgggggacaggaatacccaggagccgcagcaaggtcaaggcctcagcctctcactcgccaacggcagcgacagcggcaggtctggaatgttgccgatgtcgaacccttcagctaatcccacacagcttacaattttctatggtggatcagtatgtgtgtatgactcggtgccaccagaaaaggctcaggcaatcatgcttatagctgcggctgcagcagctgcggcagccaccaaaggcagtgctgccactgcttttaatcctccaatggtacatacagccactgtcgccccagcagcagtcttctctcctgtgcttacacggtctccatcactgcagagcacttctgtagcagctggacaagctcaggttgttgctgaccctagctcaataagcaagcttcaggctgatctccccattgccaggaggcactctctccagcgcttccttgagaaacgtcgtgacagggtcgtgagcaaagctccgtacagccccgccaagtcgttcgatggcatggagtcagcgggaatggagatgactgcggacggcaagcagggcgcaaggcccagtatcttgaaaggttggggagccgcgaagtctgaagtctgaacggtgaaaggctggctgacgctgtggggaggaaggggcagggacgtgctgttggttttattatattggtatttatgtgattatatatgtcgtagcagcagcgtggaaccgcactaataatggggaccttaacacctctattttactgtcgttgctttgttgtcgcgtgctaggttgtattctgaagtggattcctcaataccgcataccgtactgctacgcctgttgactttgttacattgattgatcgttgtccacttgtaatggaatgccgcaccatgttttctgcaaaaaaaaaaaaaaaaagtactctgcgttgttaccactgct

SEQ ID NO: 66142 - DNA, 671 bp, Zea mays
  Clone ID: MRT4577_160321C.1
agttcttccacgtctccatccatccccaaaatagccagaccagcagcttgtcttcctcccactgtcttcatctttccatctgcaaccaacaaagatccaagagcaataagcaacaagatccaagagcaataagtagggatggtgacctaagaaatcaccagtagactgaaagggacaggctggagcatgaaaccagcctactggagtggagtttgggcgtaggagcagcaagaatagggccaacaaagagtgcaaaaagaagaaaggaagcgagtatagtctggaaaaggaggtgctacagaagcgaatcgagtccggatctgagtacgaaaactcaggcaagctcttcttgatcatgagcaaagcttgtatgatattcctactggaccaagtgagggaagcaatggtgatggctacaactatacagaggacctagatgtggattcatctggtgctatgtacaatctggatgccacctatggggtttgggatgaataagtaacttatgatctagctatgtaatccaggaactattttatcaccacctatctagtacagctagttggaaactccagtgtcaggagatgtaataatttcgtgaacatgtgagaagcctacttgaaacttttagccatgtgtggcatggtattgtaatataaacgaccatctct

SEQ ID NO: 66143 - DNA, 351 bp, Zea mays
  Clone ID: MRT4577_160322C.1
atgaggtcgcggtttccccttactgttttccccccttgtgttccgtctcgcgccgacccatctgggctgggacacgcagcgacaatttactcgtcggtccagggaccccccggggtcgaaacgccgacacaatacctcaattttagcgtgtcctccgccactgggtacaataaactacacttgttaccaactacattatactcaacaatgtggacttcagtacctgtctctatggaaggacacatctgcaactgcagcaagacatatgtcacgtccaagacgtgccaccatgtacgactacatgtctatgacaagataggggtagttgagcatctacgtaatagtgcgtaa

SEQ ID NO: 66144 - DNA, 245 bp, Zea mays
  unsure (1)..(245): unsure at all n locations
  Clone ID: MRT4577_160323C.1
cccaccgccgtccgggcaaccataagaaaagcgacaatcaggtgtacccaacaactgggcagcccaacattatctttgcgcttcctttatgcttcctttggcctttncttgcaaggtgcctgctaacggcgaaccacttntccccgcaattgctacggcaagctcctataagctnccccttcttccccccgtctctcttcacccagcgggcgattccggaatcgcgaaaagccccatcttttcca

SEQ ID NO: 66145 - DNA, 282 bp, Zea mays
  Clone ID: MRT4577_160324C.1
aaagtaaaaaacggtaagagggcatgcatgaaacattaattttactcatgatcgaccacgacacacaacaattgagcacgcatgcaagctgtttttttttattcaaaaaattccgagggggggggacgacgacgacgtcctgctggtcctgcatgcatgtagtcctttacccacgacgggggtcgccgaaatttggggcgggcttcttcttcttcttgggggccgtgccggcgacgaggggcttgtagaccaccccggaaaggccggcgccaaccatgggcc

SEQ ID NO: 66146 - DNA, 248 bp, Zea mays
  Clone ID: MRT4577_160325C.1
ctcgagttcttgcgtgaacagtatagctacagccttttgggagtcaggactgacaaggcagagctgcagaaagtgtcgcagatgctctggcgctagcagagcagccatgctgaatgagccctgaatatttctcctgtatgaagtagttaatattcttgtctggctttggatccttaaataatgttaaagcttactgttggtgatgcaaggagatattacctttccactgcgaaagatgaacttggagt

SEQ ID NO: 66147 - DNA, 243 bp, Zea mays
  Clone ID: MRT4577_160326C.1
tttcgacaccatgagggtgttgctcgttgccgtcgctcttctggctctcgctgagagccccacctccacgcatacaagcggcggctgcggttgccagccaccggcgacggtttatgtaccgtcgtcggtgcatctgccaccttcggttcacctgccacctccggtgcatatcccaccgtcggtccacctgcggacgccggtacacctgccaccgctggtccatgtgcctgcgtcggttcattt

SEQ ID NO: 66148 - DNA, 161 bp, Zea mays
  Clone ID: MRT4577_160327C.1
gggtatccgagcccttcatgggtgccctcctcgacggctacagcgccggcggcggttttcgcgggtcggcacactcgtagacgttattagaagctacggcgcctgcctcgtgaagatcattcgcaaggtgcccacaattaccgatggcattaactttgacc

SEQ ID NO: 66149 - DNA, 432 bp, Zea mays
  unsure (1)..(432): unsure at all n locations
  Clone ID: MRT4577_160328C.1
agcagtggtaacaacncagantacgggggttttttttttttttttttttttttttccacttctccccctcttcccccacaattatacggcctccaggggccacctcgaacttctcgtcgtcgtcatcgggggcagccctcgttttccctgctgctgatttgagagccaggggggggggtttcttntcaantaaatctannnnntccccatttaaatggtcaataaacttttctantantttcttatctccttnncccctccnactcaaccnatttaaaccttttnattcaataccaaatccaaaantaccantattttnnttaaaaaaannaccatctnattcatcatcacttccaaantccnaaaacatttntntntnattccacctactttnccttttanctcctnancccatanacattnnatcccccc

SEQ ID NO: 66150 - DNA, 215 bp, Zea mays
  Clone ID: MRT4577_160329C.1
agagggggggggagatcgcttttttttattccactaccggaaagggttcctctcaccacaagcagaagtttcttttattacacgacccacgtattacaaagggatcttccccgggttctgtgtttttgtggtgtacacggggggtgataatcaaacaggtaaaccttagaagggggcaggggaacccatacctacccgtgggggtggacataccc

SEQ ID NO: 66151 - DNA, 708 bp, Zea mays
  Clone ID: MRT4577_16032C.1
tgttaattcaaattgtgccgttgttacatttaggaactaaagataatcaatattacaaagtgttgggtatctgagaatcgggtacccaaagaaggcctaaaggcctcccaaagacgggccactaatcgaccggtgcacctgccaaacaactcggcgtgaagttccaaaaggcatcccgatgacggtccgctaagccgagcgacccgacgaggcaggattgccgaccaacccgcccgtcgaacaaatactgccgagcaatccagcgaggtggggctgccgatcaatctgcctgccgaccaacctgtctgccgagcaacccaacaaggcggggctgtcgaccaacctgcccgctgagcagcacaagacgacagccgactctcaggcgaacacctctactgaagggaagagccgacctagtactatgaagccacgactacacgatgggacagatcatcaccaagccatgtccagatcgtggaagcggtaccgaagggtctctatcaagcacaacgccggatacgtatccccgctgaccagtgagaccggaccaccccagccgcggggacctcaacatcggggtctctacagtaccaggcatgcgcctatgcatgatgaaaggtgacgctaagtggatgacagaagatgaagttgtactgaagacatccataaatctcacctccagctgacttggcaggaccaccaaacacc

SEQ ID NO: 66152 - DNA, 306 bp, Zea mays
  Clone ID: MRT4577_160330C.1
gtctgcaggcactcagaatggtccagcgtttgacataccgacgtaggctttcctacaatacagcctctaacaaaactaggctgtcccgaacccctggtaatagaattgtttacctttataccaagaaggttgggaaagcaccaaaatctgcatgtggtgtgtgcccaggcagacttcgaggggttcgtgctgtaagacctaaagttcttatgagattgtccaaaacaaagaaacatgtcagcagggcctatggtggttccatgtgtgctaaatgtgttcgtgacaggatcaagcgtgctttcctta

SEQ ID NO: 66153 - DNA, 234 bp, Zea mays
  unsure (1)..(234): unsure at all n locations
  Clone ID: MRT4577_160331C.1
cgcgtccgcggacgcgtgggatcgagttggatngggtttatagttgggcttttggacagctgtggtgtgcacggcagctctgtgacttgtgaggagggaaggaggaagaaaggcgatccatgccgtcaaaccgattcttaaaggacctaaagacccgccaaaaggtccttccaacttttggcaccccagcccctgttcccaaaatattttttaactgccagccaccaattttgg

SEQ ID NO: 66154 - DNA, 321 bp, Zea mays
  Clone ID: MRT4577_160332C.1
tgtagttgtacatatatcaacgcaagaccacggcatcgaaggcgctgctgatgcataccttgttggcctgtttgaggacaccaacctgtgccccatccatgctaagcgtgtcaccatcatgcccaaggacattcacctggcaatgaggatccgccgcgagagggcctaatcgacacctcgaacatcgtgacaaaaaaatgacctcctgcggttattgttaatctgatgccattgtgatgacatatgagtagggtttgttttgtggatctcaggtcaaaacggcggtccaccagtccaggtcgattcgggaaggcactctca

SEQ ID NO: 66155 - DNA, 201 bp, Zea mays
  Clone ID: MRT4577_160333C.1
cccacgcgtccgcccacgcgtcctgcggcacttgcccccgcgatcataacctcacaccgcccgctaccagctgcgcacgctctgacagcctcaccatccgccatcactcgctgcagtacacggtcgccgggactgggagagttggagtgagacgctgctgctgccgagtgcgaggagacactactactcactctcaagact

SEQ ID NO: 66156 - DNA, 2373 bp, Zea mays
  Clone ID: MRT4577_160334C.1
atgaggggaagatattttcgagatgtgtctatcgtgagggctgacaacggagataggacttctcctgctcccgaagagaatgaagtcgtgatcttccgaagcttcttcaaggctgggcttcggttccccctgagcaattttgtggttgaagttttaaaaatatatcaggtttaccttcatcaaattactcctgaagcaatcataagaatgggaatcttcgtctgggccgtgaggagtcagggcttggagccaaatgcaaaaagtttctgcagtatgcacgaactgttatatgagacgaaaccctggggcaaagagcaataccataacaattttggctactatagcttcgttgctcgctctgggtcaagctgccccgtgccgacttttcggaagagatggcccagagattggatgaaggaatggttctatgtgaaaaatgatttaaaagcacgagaggatattaaggaagtcatcatgcaccctatctggcagcatttcggcctccggaaaccgaaggtggaaattgatgaagcagccgaagaatgtcgaaaggcctttggcatagtttgctctttcatcgggacaagggatttagtgcaggaacacatagccttcagagtgtggccacttgtagagaaatgggaaatgccaaaggagactatcaacaaatctgacgaaggtgggctggtcaggttgaaatacaccttcagatatgaagctgctccaagcgaacccgcgccgaagaggaaaaaggtgaaggtccttactcaccggccgcgatatattgaaccggccgaagtgcccgaatttggcggtgagacctcttcggctactgaagccaaagaacttgcgtttacacaggagattgaagaaccggctgtaaagccgaaggttaacaaaattgaagagcctggagtcgaagacaaaatatcagttctgagcccttcgacagaagtaacagtgccgaaggcacaaaaagatcttatagtgaccccaaaaaggaaaaggatggtcaatgtattagatgtactggagacgataaagagttcaagctctactccaggaaaaactgccgaatctctgaaaacgcaggctaagacaaaactgactgaagccgaagctgcaaagagccaggccgagactgaatctgggccttcaaagcctgccaaggagaaatccttggaaaccggagaagaagaaacgaaaagagaggctgcaaaacaaattttgcctaaaagaactgtctcttcaactcctgaagcatcttccaaagtacctgattatattgtacgacatgcttcgagaaaaaggttatatgaggaggaaaagcgagaagctcaatattatgatcggaaattaaaatatcaaaagggggcattaatatttaacgggagcggagaagaagatttcttatattgtctcccagacagcaaggaaatttttgtctgccgggagatgggcaaaagcttcggattcccgacgctagaagatgggctttcagtgctatcgaaagatgagctggcggacagcttagcatataatagcttaaagattttaaactcattgttgaacaaaatacaagaagacgaggctacttccaaagcccaggctgaagcccagatatgcgaaattgaggatcttcggaaacagctggctgaggcgaaattaaaatgtgctattgccgaagctgaccgagacgccagtgactactggaaaaattactgggaaaaaatagttgtagagcttcgttcttcaaaagaaagatgctatgaaaaatctgtagcatgtgtacaaaagataaaaaccagcttcgccaatattggcgcatattcgaatgaagacaacttcgtactgggtaatcccgaaggcccaatcgaatggatcaacggcgaagccgaagcctttgaggaagttttgaatggtcgtggagatgtctgcgccttctcaggtgccagaggaattgcggctattttggagaaggcaggatgcgaacacgtgaagattctagcccaagccgaagctgctttctctattgatgacacgaaggatccctcggccgaagcaagcttagttggcggagaattctttactgatatttgggaaaatggcggccgagggatagcccatgagataataaaaaagaacgaaaaagatactcacgatacaagagaagcaacgaaggcagttgagaaagctgcggaactcgaaagacggatagctgaactatcttctcctccagagcccttcgagtcaatggccgacccagaagcagagaaagaagatgaaattactaaagtggccgaagctattatggacgaagctgtttctcgactgctaaacgaagctgcggaaatagttttaaaagaagaatag

SEQ ID NO: 66157 - DNA, 714 bp, Zea mays
  unsure (1)..(714): unsure at all n locations
  Clone ID: MRT4577_160336C.1
cttctccactccactccgagccctattctcccccggcaccgccgcctcctccacctccgccctgccgccgccccgtcgaccgccgctcgcgggagccctcctcttcctcagcctaggagccgtagcgggttgcgccctctccacccgccgtctccccttcctccgggcaataagctctgctcgaatggagtctacttccacgaccgtgccttccattgttgtgtatgtgacagttccaaatcgggaagcaggcaaaaagctatcagcaagcattatcagtgagaagcttgctgcttgtgtgaacatagtgcctggaattgaatctgtttactggtgggaggaaaaggtgcaaaccgatgctgaagagctgctcatcatcaagaccagagaatctcttctaaacgccttgactgaacatgtgaaagcaaaccatgagtatgatgttcctgaagtcatcgcgctgcccatcagcggaggtaacctcaagtacctggagtggctcaagaacagcaccagggagaagtgatctggctagagctttccatggacctcatctgtgagtagagtacctagntggtgtggnnattgtggagtgtctggttctggtttgagacgccgagcttgttcataaagactttagtagcctctctgcctcgatggcgttgccgtgacaaatcggtcgatctgtactgtctcctagggtcaaataaaatt

SEQ ID NO: 66158 - DNA, 247 bp, Zea mays
  Clone ID: MRT4577_160337C.1
attcgaggcacgacccacgcgtgcgatcacacatccgtgctcaaactttttaaatttatgagccatacaagaatctatgagcctcagttaacaccaatgtgatggtgagacaaaaatcaaagtaattcatggtgcatgccacaaggactctctcataggtgatcctgatattactcaccttgtggagaaacgctacctctacaagaccactctatacattttccattcctacaccctttaaatcata

SEQ ID NO: 66159 - DNA, 242 bp, Zea mays
  Clone ID: MRT4577_160338C.1
gggaaggatgtgggtctctagtgccttgccctggcttagctgcaggagaagatggctgctttcacttccccccattgagctctgctccctctgagcctggtcttttgtccttttttattttggtctccaagatgaatgctcatctttggagggtgccaggtagaagctagggaggggagtgtcttctctctccaggtttcaccttccagtgtgcagaagttagaagggtctggcgggggctt

SEQ ID NO: 66160 - DNA, 1061 bp, Zea mays
  Clone ID: MRT4577_160339C.1
acgcgctgtcagccggcgggagcttcacgcctcatgtcatcatcgtgggtactggggaggatgtggcggcgcgcatcatgtcgttttctcagaagggtccacgctcggtctgcatcctctctgccaacgggtcaatctctaatgtaacactgaggcagccggatgcatctgggagcaccttcacctacgagggccgtttcgagatcctgcagctgatgggctccttcacaatggccgaggaaggccggaggagaaccggcgggctgagcgtctctcttgctggccctgacggccgcgtagtcggcggcgtagtggctgggatgctgcgtgctgcaagtcctatacaggtgatcgtcggaagcttcctgcccaacagcctgaagcagcaccagaggaggaggatgagcatgcagcagccttcccccgttccggcgttaccagcacccgtggcacccccgccgccggtgcttaccgcggccaccccgatctcgcaggcaggtcccgggaacgggttccacgcaccgccgccgccgcactccgcagcacctccccagccccacgccaacgccatgaacctgaacgcgacgacgacgggcttcaccatggtcggctggcctgcaagctcgccgcagcccatggcgtacagggcttcacctgacatcaacgtcagcttgactccccaggagtaggatcgctgggctcgtcttcttcctttttctttcttttttttttctttccctgggctgacacgttttgggtgggagagaggaaacagagcgtggctgatgctctgaatgagattatggactaatctggtgttaattttagggtagggcgtgccaacttgtttgggttgctgctttcggccgtcatggctgtggatgttgatttagttctagttctagtcagtcagtcctattcagtttctgtctttctgcgctgcagctatttagcatgtcctgttattggtgaatcttttctgatgatagagggaggaatcatcttctgatgacagaggaatcagttctgttatttgtgaaaaaaaaaaaaaaaactcgaga

SEQ ID NO: 66161 - DNA, 662 bp, Zea mays
  Clone ID: MRT4577_16033C.1
cattggtacctcgagccggcgggaatctaccagatccctccatactgagcagtttttcatgctgacgcgcatcgctatgcttatctagcggagtgctggacgctcaacgtgcggagctgaggcgagagacgcttcacacagcttgcttgagtctggatcctgctgccgagctgtttgtctctctactctacccgccatcacgtacctcggcaggctatagggatactctgtggcctcctttccggagcacttctggatggagagcaatttcctggccgtgatcggcaaggagcagcactacccgcacaacgtatgatcaggagcgcaggaatcaacttacttcagcggagcaggagtactgttagcactcccggcaatggactgctcctatcgctagctatcccaaggaccgccccggagatgatgtcgctccgatctgctgccttcccccagtgctcctccttcgacggcgacaagaagccggccccccgtatactcgcacaccagatgccgaccggtcccgtccgtacgcactatgccgtcgcgcaccgcacgcagcatgtgctgaacggcgatagagacactccggtatcggcgcactaccagcagaacactccggtgattgtggtccagagctctcctagccttccgatcggtactgc

SEQ ID NO: 66162 - DNA, 179 bp, Zea mays
  Clone ID: MRT4577_160340C.1
gaagcacgaacacggccgagctgccccccagccatcctatgcaccacaggcgcccgcaaggccggggggggtaacagaaaaggaggacccaacccaccacaacgccagagaagcaccgcagacaccaaaggcgagcgaaaccaaagccgaagatggggaaccgcgcacccggcgcgagc

SEQ ID NO: 66163 - DNA, 551 bp, Zea mays
  Clone ID: MRT4577_160341C.1
caaaaagaagagtagagcccagcgatcctactcctggggagtcaagctgacgttgatgtcaggtgaagccctgtacgccatgggctgcggcgagcttgcaggccagccgaccatggtgaagcccgtcgtcgtcgcgttcaggttcatggcgttggcgtggggctggggaggtgctgcggagtgcggcggcggcggtgcgtggaacccgttcccgggacctgcctgcgagatcggggtggccgcggtaagcaccggcggcgggggtgccacgggtgctggtaacgccggaacgggggaaggctgctgcatgctcatcctcctcctctggtgctgcttcaggctgttgggcaggaagcttccgacgatcacctgccatgccaaaggtttatgaactgaaccggcagagacagaacgtttcctgctctgctatctatgcttatgttcagtgtgtgtgtgtgcggtgtgcctgtggctgcatacctgtataggacttgcagcacgcagcatcccagacactacgccgacgactacacggacgtacagggccagca

SEQ ID NO: 66164 - DNA, 243 bp, Zea mays
  Clone ID: MRT4577_160342C.1
aggcaacaaaacatttttttaacagggacattttacaagggccacaagggaaggggtttatgcaaaaaccccgggtaaaaaaaagaaaggaatttcagttagggacctgacaaagggggaaaaactgggggggttcttttaaggtgagaggaaagccttaaatcctttgggaaaattttaaaaccgaccaaaaactgggctgaggccccaagagggggggacaaataagtccttggaagggga

SEQ ID NO: 66165 - DNA, 407 bp, Zea mays
  Clone ID: MRT4577_160343C.1
gttaattcattcattttatttagtagattatgcacagcaatacaccgtatgctgtagcatgcggtatctagcagtaaacgacgactactgcatgtttgcacaaatgcctccaccgagatcatgcgttgaacacggtgccacaacccccgccacaggcttcggcgccgcagccaccttcggcaccggaaccggcgccacagccgccggacttggcgtgcctgccgttggagcctttagcgaccatgctgccactggcacagccttcaccaccgcaggcagagccgaagccgtcggatctggactggacttggtcgggcgcagcgctggagctgaacagggtgccggagccaccaccaccgcagccagatccgcagccaccagacttggtgtggttggccttggagcct

SEQ ID NO: 66166 - DNA, 513 bp, Zea mays
  Clone ID: MRT4577_160344C.1
cctgtcgctgacgaggaaccgcctgcagccccggtatgaccctgcccggggggttcccgctcccgcccagcagggtgcgggtgctggtgctggtgcggtgggagctcgagaccccggcggcgaggtggcggtgaggatggacatcgaggtcaacgactaccctgggtccggtgccaacaaccgccatgaaccgagaagccctgggaggccatgaccatgaggtttgaaggcttgaagctagcgtacgtctcagacaggaatcaggaatgaagaccatggcatggagctgctgctgctgtcttgagagttttataagtagcgaagcgaaggagagtacattgcttgttgttagctatagaggtcaagggagagccttatcgtgtatttaattagcttgttaattattgctgcgtactccttgttaagagtcttcaacttaacggcggatcggatctgcttgagctagctactagcttttgctatctctgatctagaacaaaagcatcagttagt

SEQ ID NO: 66167 - DNA, 899 bp, Zea mays
  Clone ID: MRT4577_160345C.1
acatccactgcatgcctggcgcgcctagaggcaccagccacagcccacagttcccccatttcatttgtgtggtagccgaggactgggagggacctactcaaccttttttttgtgtgtgtgaaagatcgagagcgccgctcaacgaatagagcggtttctctgccttgtgtctttcctctgtcctgtggtctgcggtggccgcagctgcggcgcgcggtgatggagttcacatctaagaagacggcttcgcttgccctcctctgcctcaagctctcctgcctcctcctccttcttcttcttccccggtcttcctctgctgcgcctctgtccagaagcctgtcgctgacgaggaaccgcctgcagcccgcggatgaccctgctccggaggttcccgctcccgcccagcagggtgcggatgcgggtgctggtgctggtgcggtgggagttcgagaccccggcggcgaggtggcggcgaggatggacatcgaggtcaacgactaccctgggtccggtgccaacaaccgccatgaaccgaggagccctgggaggccatgaggcttgaagctagcccatcgtcccctgcgtacgtctcagacaggaatcaggaatgaagaccatggcatggagctgctgctgcgctgtcttgagagttttataagtagcgaagcgaaggagagtacattgcttgttgttagctatagagaggtcaaggagagccttatcgtgtacttaattagcttgttaattattgctacgtactccttgttaagagtcttcaagcggcggatcggatcggatctgcttgagctactagcttttgctatctctgatctagaacacaagcatcagttagtaacgtagcatcgtcaacagctatagtactcttgagatatttactt

SEQ ID NO: 66168 - DNA, 235 bp, Zea mays
  Clone ID: MRT4577_160346C.1
ttttctaaaaaaagaaaaaagaaaaaaaaaaaggggggcttctaaaaaaagaggggagcggagaacacaaaaagtaaaacaccatatgaaaaggcccgggggggttgcaccggctgctcttccccgggcacttgtccgagccggaatgtcccggtgggcgccccgctcatggccacgggctgcggtctttccgcatggcttgcggccgggggacccgtttctggctcctgtggga

SEQ ID NO: 66169 - DNA, 1335 bp, Zea mays
  Clone ID: MRT4577_160347C.1
cggtaccggacttcccgggctgccatggcgacctcgaggcaggccgggaccgcccaatcagtctcccagcatttaccggctcctccgcacctgctgctccagttccagctctcccaacaccaacatgctcggcctccggcgcctccccgctgtctccggccgcctcgcgccggaggtcacctccgtctctgcggcctcctcccacagcgccgtcttctttcgcaccctccaaatcctcgtccagcaggggcccgtccgcctccaaaagctctctgctccggacaccgggatcgtggagctgaggctggagcggccggaggccaagaatgccatagggaaggagatgctccaggggctgcggagcgcgatccaggaggtggaggccgacacggctgcaaacgtcgtcttggtgacgagctcggtgcccaaggttttctgcgcgggcgctgatctcaaggaaaggaggttgatgggtcctagtgaagttcgggacttcgttaattccttaaggtctacattttcatcctttgaggcactgtctattcctacaattgctgttgtcgaaggggttgcttttggtggcgggttagaattggctctgtcatgtgatcttcgcatatgtggcaaggatgcaaaattcagtttgccagagactggccttgctattatcccaggtgctggaggaacacagcgccttcctaggattgttggaaggtcaagagcaaaagaactaatattcactggtcgtagattcgatgcggtggaggctgtaactatgggagtagtaaactactgtgttcctgccggcgacgcttatcaaaaggctcttgaacttgcgcgggagataaaccagaaaggcccgttagcagtaaaaatggctaagaaggccatcgatcaaggggcagaggtagacttgccctcagcattggccgttgaagaagaatgctaccagcaagtcctgcacactgaggatcgtcttgagggtctagccgcattcgccgagaaaagaaagcctatatataaagggaagtagggccgtgtatggtcttagattcataataatagaaagtcgcattaacatgccatccaataatagtggcatgattgcatgacattgatatgtgcaaattcatgtctctctgtaactttcaggaaataagataagatgtatcagcgctgctacctatgtgttctgaactgaggtgaatttggctgcggctttaaactttaagatagacagattagacagctaggctgtttagagtccctttcccttacgaaaatgtgagatttgagttgggcctcaataatcattactgataaaaaaaaaaaaaa

SEQ ID NO: 66170 - DNA, 136 bp, Zea mays
  Clone ID: MRT4577_160348C.1
tattaacattttgccctcctccaactttctcattttcttgcaatagcatgtcactgttcgtcatgatagcacctcaagtatgcatctatgtcatatcagtgagtcttggggcctgtaatatcagctgcacaatctt

SEQ ID NO: 66171 - DNA, 403 bp, Zea mays
  Clone ID: MRT4577_160349C.1
tcagtctcccagcatttaccggctcctccgcacctgctgctccagttccagctctcccaacaccaacatgctcggcctccggcgcctccccgctgtctccggccgcctcgcgccggaggtcacctccgtctctgcggcctcctcccacagcgccgtcttctttcgcaccctccaaatcctcgtccagcaggggcccgtccgcctccaaaagctctctgctccggacaccggtctgtctgtaccgaccccatctcaacgaaattttgcatttgcttgtaggcccagggattgtgtttcccagctgtgattcgttggttacagggatcgtggagctgaggctggagcggccggaggccaagaacgccatagggaaggagatgctccaggggctgcggagcgcgat

SEQ ID NO: 66172 - DNA, 185 bp, Zea mays
  unsure (1)..(185): unsure at all n locations
  Clone ID: MRT4577_16034C.1
ggcgtcgggcgggacgcaggcgtcgccgccggccccgcagaaggcggcgccggcgcccccgggccccaagaagccggctttcaagctctacgagcggcggagcagcatgaggagcctcaagatgctctgccccctgctccctgacgnagattacagctccgtctgatgatggtaatacatgctag

SEQ ID NO: 66173 - DNA, 159 bp, Zea mays
  Clone ID: MRT4577_160350C.1
gaccttctgggaagctaggtggacccggtctttccagcatactatgtcatgacgcgaacggggctagtgcctcagcgtgtgggagcacgtgtagggcttcgcggtggccgacaccgtggtgcctactttcctggggcagcgagagcgctgctttagttg

SEQ ID NO: 66174 - DNA, 193 bp, Zea mays
  Clone ID: MRT4577_160351C.1
cacagtcggggggcgggcacggtttccagcacacagggttaaggcatgcaaacgagcggccgagacggctaccccgcattacaaaatccggaggaactctcacgaggcgaaaagcagatccgtttcccccgaccggcgatcgctatcgacttggagctgttcccatggcggaggcagcgctaatctgcaggca

SEQ ID NO: 66175 - DNA, 442 bp, Zea mays
  unsure (1)..(442): unsure at all n locations
  Clone ID: MRT4577_160352C.1
aaacaancgagggcggncaagagaaacgagagcggcagacaccagggagagcncgaggancancgncgccnccctccnccnccnccnccgggccnncgcagccaccgccgaggcccgcgncgnccgcgagcngancggcgagagcgggggccagcagacangcaaccaggngcacnncaagaagaagngccagagcnngacgaagcncccgaaggggacgacgccgcgggagcnccggcnggcgncgangcgcgncgcggcggagaaggcgaaggaggccaagagccgngnggacgaggacgcggcgaggncccacgagggccggccganggagnccaaccncagnnccggcagcgccgggnacgacaacgnggngcagacgcnggaggagacggagaagaacgncgncacgcagggaacccaggnggacgngaacaccaag

SEQ ID NO: 66176 - DNA, 381 bp, Zea mays
  Clone ID: MRT4577_160353C.1
tttcttttttttttttttttttttttttttttggtggtttttttttttttttttttttggccgggaaaggagccctccttaggctttggtctcatggcccggcgaaggaacccacaagggtgctcaacccggcctggcctaaccaagctttttacgtagggggggcatcccatcccctcgaaaaaataaaattacctcattatgcgacccttaaggggggggggggctttttgactcccttcctggggcccttgaaccaccttttgttgccggcctgggccttgcaaaattaaagcttgcccccggaaaccggggccccgataagctggtgcttgcccccccctttgccgtcccccgtcctggggagcacggacaccgggt

SEQ ID NO: 66177 - DNA, 1039 bp, Zea mays
  Clone ID: MRT4577_160354C.1
cgggtgcgtgggtccattcgtgaacagaattcccctccctctctagatctccccctgctaacgaagacagacgcagaccaccaccagtaatgccgaccgcgaggcgcacgcgcatcccggcgttcggggagtggaaccaccaccaccacggcaacggcggcggcgcgtgggcgccggcggtcatgaccccgtccttcgacttcggccacgcaataacaacgccgcacaaagcgccgcagacgcaggggaggcggcgaggcgccgccgacggtgtcgtccacgcggccaagctggatgcggctgcggcggcggcggagcctcaccaaggccacacgcagaccacgaggcggagcaaggtggccgactccggagcctacgcgcaggccgcggcggcggcggcgaggaggtcctgcttcgcgctggccaagcccgtcgacgacgacctgtacggagtccctcccgacatgctctacggaaagccgccgccgccgggagcgaggaaggatgatggctggcggaggatcctgcggctgctggggtgctcgtgcttgagttgagcccgtcgtaatgaccgccggacacagccgagcattattgtcacggacaacaaggctgctggctaatcagggcgcgggctttttggcttccatcctcctgtacgtactacaagatgtctcaacttttggcgcctgctgtgatcgattgatgacgggccggcaggcaagacgtgactgacgtgccggccttgcgttgcgtgggtctgtgcgtaggtgtgacgttcgtgttgtgactgtgttcgctgctgaccgcctgtcctttgtgactgcttcaagctagtagattctaggatttagaggttctttatttatgtgtgtgcgttctcgtttgtcgctcaccctcaccgcctgtaaaaccccacctaaaatggtcgtgctatccgacaaataggcttttcacatcgtactactatttagcatcggacagtactgacacaagtatatataataagaccctgttcagtaaaaaaaaaaaaaaaaaa

SEQ ID NO: 66178 - DNA, 543 bp, Zea mays
  Clone ID: MRT4577_160355C.1
cccggggcttgtactctacccatgagaacctgacttcaatagtgcaatactcaggacgcgttaccagcggttcgccgtgtacactcccctgtttcctttccggtccgggcaattttttgtcgccgtgcatcatttgcctaacaactatggacgacgtcgcctctgatgtgtacgaggcatggatcgccatcattattctgttacctttggtaatgcttgcaatgcgactgagaatgcattcggaaccatatatgcactgcaacgttagcagctctacacagacaactcggaacgaagtcgacgacagaaaaaaagctcgctgtcataccgaccatcaaaggggggtgccgtttttaagaaccaagctaattgactcgtggttacaataaaatatttttttaatagggtcacttaaaaaaaaataaatggccaggtttttacaacttcttgattgggaaaacattaccgttaccgaattaaattattatgtgctacatccccttatctccagctgttgaataagcaaaaaagcccgggccggtc

SEQ ID NO: 66179 - DNA, 180 bp, Zea mays
  Clone ID: MRT4577_160356C.1
ggggaggcccagaacaaaacccctaagcccattaaacagacggggaacagggcccaacataagggtttggccaaattattcaaaggggggggataaaaaagggtataccgggggggaaaaccgtgctccaaccaaaaaggggggagcatgcctaggaaggtaaacaaattaccttacagc

SEQ ID NO: 66180 - DNA, 555 bp, Zea mays
  Clone ID: MRT4577_160357C.1
atcttcattgcgaccatgcacagagatacctgcagaccctaagccaccaaaagaacgagtcgatctagatataacagaagggacattattattgatccggtatgtctaccgcttggtgcaacagcgccggaatcgtgtggtgctgcagtagcctgacgctcctggatgacatcctgacgctgacgcccgccgaggacagtagaggcatgccaacgacgaccaccacgacgaacgtgacagtggtggacataggcggcactactactaactgcaacgaccgacagcataagcatgtgccagagagcaggtgcgcccgacgaggacgccgaccaaaagaccttcctgccgatctacatccgacaggtacagaggattcgctgccgccggtgccggcctcggttatgtcggaggcgttgcgggaggcattggcgctatgactgctgcaggtgcacagcgtgtcctacagcgcgtgtcactcaagatggtttgcatccgctatggtggtgctagctaggcaccatcaaggcttggtggcggaacacgccccggcgtgct

SEQ ID NO: 66181 - DNA, 1602 bp, Zea mays
  Clone ID: MRT4577_160358C.1
gtcgtccgggtttcaccaatgtggatgagattctacatacgggcaaaagtgcttcagcccctggaatctggctcttggctcaattagctgctgcgaaagttgtagcaacggcactttgcaaaggttctggtcttgttggtggcctttatgctccaagtttgatgattggcgctgctgttggtgctgtttttggaggctcagcagcagaattaataaactctgcgattccgggtaacactgctgttgcacatcctcaagcttatgcactggtaagtttcttattttttgtcagtcagtttaacgcgtgactcctatattgggctaactttccatacgatttaagtgggaatggctgctacgctggcttcagtgtgttctgttccactgacatctgtgctgctactctttgaattgaccaaggattacagaattctacttcctctaatgggagctgttggtttagcaatatgggtcccatctgttgtaaatcaatctggtagcaaagatacattcgaggcaacatcacctcgtcatggctattcgtcattgttacctcccacagataggaatgagacagattggaggcgacaagatggagacgatgtggaactcacaattctagacgttgatccctaccactatggtagtaacaatgaggagatgcttcttgatgacttgaaggtatcacaagcaatgacaaagcattatgtgaaggtcacacctacattcaccatcgaggagacaacaaggcttatgcaagagaagcagcaaagctgtgttgttgttgtagataatgaagattttcttgagggaattgtaacattaggtgaccttcgtcgtaaaggatttgtgccaagtgaaaactctgatagtacccaggcaaattcatcgaccgtggatgcaaattcttctcttgtgtcatcatgccttactcgaggttttcagttccatggcaatgaaagaggactggtgacctgctttccagatacagacctgagtactgccaaggttctcatggaagttaaaggtattaaacagcttccagtggtcaaacgtggtgctggccgtagaaatgatgggaggcgtaaggtccttggccttcttcattatgattcaataggatggtgcttaagggaagagcttgagcggtggaaggcaatataccagagagagaatttccagcagactgcagttaatgggcactgaatatgcaaaattgaaggcttgtttacctcgtagcgaagaagataagatacgaaatatataaagtgacattccgataaaactagggttaacttaggaacactgctgttaaagagtctcctcatcaaagtgtaaattcttgagttttgccaagatatgcattctgtatcaaacatacacgatgaggtttaagaggtgatcgatatataagagatgtgtcatgtgcggtgtgctgttgtcagatttcgttgtggagtgctgaagttcggacacgaaatatgtacagtaacatgctttgttcctttttgggttcatttttgtgggtacattttttatgtaaaaaaaaaaaaaaaaaaaaaaaaaaaaaaaaaaaaaaaaaaaaaaaaactcgagaagggg

SEQ ID NO: 66182 - DNA, 182 bp, Zea mays
  Clone ID: MRT4577_160359C.1
ttttcacattcctgctacacctctaatcgccgggtgacgtccaaatccaccttgttaatacattactttatttccaaactgtaacaacactaaaccctatactacactattcactacatccatatatcaccctacctgatacgatgcaattaccccgacaaaacctttttccaacacatatg

SEQ ID NO: 66183 - DNA, 386 bp, Zea mays
  unsure (1)..(386): unsure at all n locations
  Clone ID: MRT4577_16035C.1
ggggggcctttaaancagccgcccttcagttttttttttggaacaactttcaaggggggaggcgagcgcacatggggcatgttaaagagacataccgatggacctcaaaaagaaaccacacagccaacaggacttggccggctatccggctactctgtgtctcaacaacacacccaaacacaaggacgacgtgcgccgagagggtttttattcaggaggaatacacggagcagtagtagacatgccaggcgtgaccacccatgcgaaggtagctagatatggtcatgacgggccgatccgcggccgccgacgaacagcgggaaagatatggatcgtcttgaggaggccgccgccccccatcgggggtcgattaaggttcagatcac

SEQ ID NO: 66184 - DNA, 283 bp, Zea mays
  Clone ID: MRT4577_160360C.1
caacttctgtttcagtccttctaaaaccatggaacattggtgaagccgggacgagttcgacgcaattatgcaagcagctagtgcttgcatgtatggcgacatctgctcgtggtttcagtagcgccccctgcagggatgtgccgggcacgatcagccttgcgctggtggacgccgatcaggacctgctggacttagtgtactttcaccgcgaggaaaagctcttggagtcctgcgtggaggcctgcgggtacaacgtggtgctgttgattatgagcccgagcac

SEQ ID NO: 66185 - DNA, 472 bp, Zea mays
  Clone ID: MRT4577_160361C.1
gaggggaacaaacttttttattttgggacaagaaaaggggttgccttaaaatattactaaccggggcccccccccttggacaatttgggcctccaatcccaaaaaaaaaaaaaaagggggccgggaaatgaaccccatcgtaaaaaaaaaaccaccattcccatttagtcccgggggaaaacacaggccccccccaaccacaaatgaatcccccggtggaaccaacccccccttgtaaaaactaaaaacaacgcatgcattcctgccggggcaacacccattgaaagaaggccccctttgcaaatctggaccccccacggggtttgacacaaaaaaaaaaacattcttgggagggggagcccccgcagcaacgaggcgggggtaaccgcccccccccccgaagcaaccgcgggggggggctttaaaaataaaaggggaaattgggcaagaaccggttggggggggggggccc

SEQ ID NO: 66186 - DNA, 406 bp, Zea mays
  unsure (1)..(406): unsure at all n locations
  Clone ID: MRT4577_160362C.1
gggcgacccacgcgtgcgttcacgcgtccgcccacgcgtccgcttttatgtgggttagccgatctcgaggggcgaggcatcgcccgagaggaggttttttggctgtcagatggatgcgcctcctccgccccgggcggaggtcatgtgacgttatgaccaccggaccaccctgagctccgaataccttgcggcaaccatgagacaacccctccacttgagcagcgccgagtgctccgcgcctttgataccctagcgtcgcgccagacgagatggccanctcagcaagaatgactcggatggagattcgagcaggcaggggggcttattatacggctaacatcctatactcgctgacaacncctgtatccatgatccacagtttggtaaaagactgccatccttttct

SEQ ID NO: 66187 - DNA, 238 bp, Zea mays
  Clone ID: MRT4577_160363C.1
agagaatcctgataccaacgtactacatgcagtacatatcatcgaagtgcaccgcgacaaatagtatcacggtgatcactggcatggcgcttgctgtggatggtctccatcggtgatgccgatgtcgcggttgtggccgagcatagtgatgatctgaaccggctcactgactacatgcacggacgctactaggaccgcgtatgaagagacgaacctctccgatcccgacagtccgtga

SEQ ID NO: 66188 - DNA, 559 bp, Zea mays
  unsure (1)..(559): unsure at all n locations
  Clone ID: MRT4577_160364C.1
gttgaagcatattatagctctcgtgtgtgggggttcttttgcgctctcaagcgttgctcagtattaaaaccctatatgaaaaanaattactataagaataaaagatgattcaaaaattacaaatttccaaatatacaattctcataccttcagactattatatgcaaggctatccgcaggagggggcttcgtcatagcgcagagcccagcttcaagcttcggaaactccatacttctagccatctcccagcagacagataattctttgttgtctgggaggcagtataagaagtcatcttcatctgtgtcgttgaattctaaggcccctttcggatacttcagttctcgggcatagtgattagcttcaaaaatttcttcttcagataatttcttccccgaagcatgtcgtacaatataatcaagtactttggaagatgcttcgggggcagcagtgccagtttcttcagccaaaatttgttctgctatttctgttttttcggcttccaaagatttcaccttggcgggctctgaaggcccggcttcaatttcagactgttgc

SEQ ID NO: 66189 - DNA, 721 bp, Zea mays
  Clone ID: MRT4577_160365C.1
tttttttttttttttttcgacatgaaaaatctttattttgatatccaaaggtcaagaacaattcatatgaataatgctattgacaaaagtcaccgttacaaaggctgcaccagacatacataggcatccctcagttccagattccctttttcatcacactaacggcagatgtgcaacgctagttaattaagatcccgaaccctgtcatatccttggctcaccagagttggatatatgtatacaagagttccgttggctaaactgatggcgcctgaagatttgaccgtttatctcattattaatgtaatcttccgtaaatgccactttacatgttggcaaagagagcagcaccacccataagagcacccatagcgacggcagcagtaggcatggcaccagcgttgtcgccagtggcgctgctggcggcagcaccagcactgctctcgatagcaccctgcttagaggtggcggcagcgatcttggactcaatagcctcgctggcagtaccagtagcagtggcgagatcagagctgagagaagcaagctggtcgtcaatggcgctggaagcactggcaagagcgctggtcacgctggcgagggcaccggtgtcgacagtgttggatccggtctcactctcgctctcggtctctgcggaatcggtggcggtggaagcatcagtgacagttgtagaagcaccagtctcggtggcggtgctgatgcg

SEQ ID NO: 66190 - DNA, 561 bp, Zea mays
  unsure (1)..(561): unsure at all n locations
  Clone ID: MRT4577_160366C.1
nanatagggagctttctatcgatgagtagtctgcttccgagttggtaacttggtaccacaaggagcagttatggctggagcatcactttcattttggttgcatgatgactctcgtcagaacagcaaacccctgcattttttgtgttatactgcctccatcctttcataattgacgccaaacagtacggaaatgaactacaaaacctcaaatagaaaaaaattatggagggagtaccatgggtgcagcggtaatatttatcttgaccttgtcgtttaagattcaagttgtagtttttttttcttcttcaaaagattcaatgtatatagtcggttagtagcagatgaagcggtctgatgaaatctggtttaatggcacttccattcagctcacctctttgttgggtcaggataagcttggctctctcttttccagtctttatcttccactggatattttgtgctttactagagataatcttccactcccttcagccaatatttgactacaccctagatattttgtgctttggatgcatcatcatcatcatcatcaaacctgac

SEQ ID NO: 66191 - DNA, 368 bp, Zea mays
  Clone ID: MRT4577_160367C.1
cgcgagagagctgaagcgtagggccggctcccacagctcgaactaccacccggcttacggctattgctactggagacgcttgccggacggcgcgcgctgcgagggagccggccggggggcacgtgacggccgcctggtggactgggcgcgggccatccggatacggcccaaaaagatggagcggatgcagcacccgcacatgggcagaggtgtgctcggatatccgcctggcacgcgtggaccagctcgcggacgactggctaaatcagaacgcccatgtccggccgtacatggacagggtcgtcaccactctcgaggcagtcctcgccgccggtgccggtgcctcctacgccccttcacggtgagac

SEQ ID NO: 66192 - DNA, 375 bp, Zea mays
  Clone ID: MRT4577_160368C.1
gccaggacaaaaaggtgaattcggcgaccagggaccaaatgcaggcttatgtaaacatgcgacggtggacaaaaccaagttcctgaaaaacaccccaatatgaccaacgatattactggaatcaaacgaaaaatcacgaaggggtgcgcacaaactggtgggaaatctcagcctgaattccaacaagtattaactcagatgatcccccttcagtcggccacatcaaaggcttagaattagggctgaccaatgaacataaaccggctaacatccatcaggccgggccagggtgaaaaccccaaccaggggagtgccatacatcttttagagtgcagccaccatcctcgtatgggtggcctcggaggcaacattcaa

SEQ ID NO: 66193 - DNA, 389 bp, Zea mays
  unsure (1)..(389): unsure at all n locations
  Clone ID: MRT4577_160369C.1
ccctccctcctctcctccccgggggggggggtgcggcncgcccagcatccatcgcgggtggtcccctgctccggctccggctccggctccgccntgggcctttcaacagtttactccccggccggaccgcgcctcgtgtcttttttttttcggccgctgccgctctgcctatgggggggggcggcgccnagccccgctcgccaccgtccggtgctccggggggggcaccaagcatgcgcaggatggcgtggcgactgcggtcgcgacggaggcgccggcgtctcggtaggagtgcttcggggtcttctgccccacctgcggcctcctggcgggggacacgaccaaggcgtggctgatgcttgtgaatgttgctgggtccggcgcggccg

SEQ ID NO: 66194 - DNA, 638 bp, Zea mays
  Clone ID: MRT4577_16036C.1
aggcttgccgcaagttttccttcacggccagtcaacaataattgtaaggatgatggtaccacagaagacaataaacaaaccaccaggatgagtgagctagtaggagagaaaagtgtgtttgaccttttctacaatggtgttagacctgatctagaagtgggatgtgaggaggtatcaatgacttgtatgaagacacacatggaaccaacagacaatactagggatagtgaatttattgaaggtgaaacctattcctttgattacaaatcaacagatgaaagcgtttgcaatcacaaagggataggtatagaacataaagaacaacaattaccagatttctcctcagcagaattaactgtgtctacagaactcgtgcagcagatacaaatccagaagatctcatcctctcaaattttaacttcagaaaccatacaatcaagattatctttgagttctgagatacctagaaattttgtttgtggtggttctgctgcagcttatcagcagctgggaagcaatttcgaccagggaagctcattaacaggaaatgatgccacagccagtgaaattgaatgtcacagactccaaatggctgcaataaatgattatggatttggtaaacctgagatccttttagt

SEQ ID NO: 66195 - DNA, 633 bp, Zea mays
  Clone ID: MRT4577_160370C.1
gcgttcatttgcagatctctcggcggctccgcagcgagcaaccggcgctagctgcccccccttccctcccgcgtgccgacggaagctgcaggcaccatgtcgacgttcccagggatggatcttactaaaatggatgctccaactcttaccctccttggagcagcttgttgtgtaatgttatctatgcatttcacagtacagttggtatcacaacatcttttctactggaaaaatgccaaagagcagaaggccatactcattattgtgctaatgcctccactgtatgctataacttccttcgttggtcttctggatattaagggaagcaaaacgttttttacatgcttggagtctgttaaagaatgctatgaggcactggttattgctaagtttctggcattgatgtacagctacttaaatatatctattagcaaaaacattgtacctgatgaaatcaaagggagggtgcttcatcattctttccctgtttctcttttcctgccccgcaatgttcggttggagcacaagacattaaagcttctgaagtactggacctggcaatttgttgttgttaggcctgtatgctccattctgattattgcacttcagcttcttgggctgtaccccagctgg

SEQ ID NO: 66196 - DNA, 305 bp, Zea mays
  Clone ID: MRT4577_160371C.1
ctcgtgcacagcaccttcctcattgacgctgcctccactaagcaaccgagatagggggggtcgaagcaccacctcgacgtcgccggaacgcttcaacgcgaagatgaccgccgtgccaccatggcgaagaaggcaagccctgccaaggcctctcttggctgcaccaccacgatgccgccgtgagatgcgtagagccaccgaggagaacagagccctagggtgcgcgtgtcggacccgcgaccgttggaccttgccgccccggacgacaacgatcttcccgagaggcagcgcctgcccagatccac

SEQ ID NO: 66197 - DNA, 924 bp, Zea mays
  Clone ID: MRT4577_160372C.1
aagcgttggataggtaacagcacttttgcagatatgctcatcattttagccaggaatgcagagacaaaacaactaaatggatttatagtaaagaaggggctcctggtctgaaagccacaaaaattgaaaacaaaattggactcagaatggtgcaaaacggtgacatagttctaaatgaagtatttgtccccgaggaagacagattacctggcatcaattcattccaggatgtaaacaaggtcttcgccatgtctcgcgtcttggtgacatggcagccaataggcatatcaatgggagtttttgacatgtgccatcggtatctgaaagagaggaagcagtttggggctccgctggcagcctttcagctcaaccaagaaaagcttgtccgaatgctgggcaatgttcaggccatgcttctcgttggctggcgactgtgcaagctttacgaggcaggcaaattgacaccaggacagagtagtttaggaaaggcgtggacgtccagaaaggccagggaggtagtttctcttggccgggagctgttgggtggcaacggcattttagctgattttctggtcgcaaaggcgttctgtgatctggagccgattttctcgtatgagggcacctatgatattaacagcctggtgactggcagagatatcacggggatcgccagcttcaaacctgccatggtagcgaaatcacgcatgtgaattgtgaattgaagcttctcgtttcccttatttatctacttgaggttgatgcgctgaattcatcgctggagcttatgataataggataacttgtgtgactatttattaagtatgcttcctccgtccttaaaagaatacaatttcagaatagtgccatgttttagcataccaagtttaactaattataaataaaatatatataaatatttataat

SEQ ID NO: 66198 - DNA, 227 bp, Zea mays
  Clone ID: MRT4577_160373C.1
caattccccctgtcccgctaggattcccccgataccctcccccaataccccagagcggagatgagcgcaagatgttcggcttcgtgcaccacggccaccacggtcagtacccgccggcgcacggctgcgtgcaccagcccaccttctttatcttcttcaaggtctactatgggtactgcctcaccgtccgcgacggctacgtggtgctggcccccgctaacccgcgc

SEQ ID NO: 66199 - DNA, 352 bp, Zea mays
  Clone ID: MRT4577_160374C.1
gcagcttgtagagattgagaaggttgttctacaccctaactactcccaggtagatattgggctcatcagactcaaacagaaggtgtctgttaatgagagagtgatgcccatctgcctaccttcaaaggattatgcagaagtagggcgtgtgggttatgtttctggctgggggcgaaatgccaattttaaatttactgaccatctgaggtatgtcatgctgctctgtgcctgaccaagaccaatgcataaggcattatgaaggcagcacagtccccgaaaagaagacaccgaagagccctgtaggggtgcagcccatactgaatgaacacactttgtgctggcatgtctaagt

SEQ ID NO: 66200 - DNA, 198 bp, Zea mays
  Clone ID: MRT4577_160375C.1
aatctaacttttacttggggaggggggtatgggtaagggtaatcctcacatacatgatacatcacactacatatagatagttcggaactcaggacttaatcgtttacatgtacagcacaaaagttgatgatacaaggatacagaaaatgctaatttatacatttatacacaaaagaaacataatctggatcacgccta

SEQ ID NO: 66201 - DNA, 535 bp, Zea mays
  unsure (1)..(535): unsure at all n locations
  Clone ID: MRT4577_160376C.1
acatgtgatatgataacatcaagtagctaaaagatagtgaacctcttgagcttatccctacgtaaccctcgccgacttatcctcgcatggctccgctgcatgggggcttcagcgcgggaaagtcgggtctctgttgcgatttattcgttcgacgttgtgggccgtccaggtttgcaccaatccagtctcacgtcttctcttctttgtcggntgtctttccctaggcccacgaaagaatgaccttacgaattattgggcccttgggcctttcgtgaggccttttacttctttagtggacccaggggatatctatcccccacaagcccccgatctttgggttgatttagaggtaatcaactcaaagatccaaggtccaaaaaatgattccctgcggtcttctctggctttgatcactcgtccgaccaaagtttggctttgtgcttgtgccttagaggtcggcattttggattgtaagactccggattcattgggtgcaccggaggtgcacccaatgggtgtagcccccgacctttga

SEQ ID NO: 66202 - DNA, 617 bp, Zea mays
  Clone ID: MRT4577_160377C.1
gggtacctcgaggccggccggggcgccgtgcagagctccctccgcgtagttctcccaattccttccccacctcctcggtcgtcgcttcccccagagagcaggagccgccccgatacctgccggctctaaccccaagccccttcgctcccatgcccagacgcgatgaatccctgacgattactacatatttcagctgctcctcttcgaggactacctggtcgggaaagccagcccgatgctgaggctctcccgtgatctttacccgcagagccatatctccagtaatggagttgatcttaatctccgctgcgtcggatctaccgctacgactacaactgctaccgacttcttatactgctggcttgttatgttctacgaccatctgaagctgctactaccggggaactcatgcgattattgctgcgtataaaggacctgaccagtagagcttacacactgcctcgcggagattgaatgaaatcgataaggatgccagagaaaatgggaacaagcttttcgtgggcaacttgtgtgacctggctgagaacagagtagtttcttacgaagctggcaaggcacttgctgatgacatcggaatacccatctccttgatacta

SEQ ID NO: 66203 - DNA, 386 bp, Zea mays
  Clone ID: MRT4577_160378C.1
aatatagcgagcatacgaaaacacatatatagtagagaactaacaatgacctaggcgcaatggtcaggatgaaattgctggtactggatctacttgctctcaatgcgagtgcgatataagcgcttactatcttacactgcacatttgatcagagtgctattaatcatgagaaaatgcaagtagatactccaacgggattcaaccagccagctgagcaagattataaactacatcacgatcttgcgtcgaacgtccgacagcaacattacagcacatttactacagcacatttatgggcatataacattatggcacaacaccactcagcagtagcgatctgagacccagctaactactctgaatgctatcagctacttgcattaaca

SEQ ID NO: 66204 - DNA, 211 bp, Zea mays
  Clone ID: MRT4577_160379C.1
gaaagctttatctttttgtccctgggatgcatcatatagctaggctgggcggtgctatcccaactactaaagcatggcttccactgtctctatatactgatgccatcaaaggtccctgtctgacatgtcaccgtatagtacactgttccacaagaacaattaacacatattatgatggaacaccacgctatgcatgtcagttactcacgcg

SEQ ID NO: 66205 - DNA, 418 bp, Zea mays
  Clone ID: MRT4577_16037C.1
ggagaaggaagggtaggaggcccagcccaccagccagccatagtccttggtctggcaaccccaggttgcttctctcccctaccattcagttgctgccccgattgagccaccgccgcctcagattcatcgtcgtcgccgacgatttggatgctaccgccgacgattcggatgtcgccgccctggatttggcctccgccaccctggatttggcctccgccgctcccgattcggcgctgccaaccccgaaatggcgccgccccttccccttccccttcccctatgtcatcttgttgattcttacctaggcggcggggacgccttggatctttcgggcgtctgaacgcctaggtgacgcctttaaaacaggggggaatttgttcccacatattacttgcagtcaaagatcgacaacttagtt

SEQ ID NO: 66206 - DNA, 1476 bp, Zea mays
  Clone ID: MRT4577_160380C.1
ccttcacaaaaaataaaataaaataaatgaataaacgcaacggatggaaggatatcttcgagtaattaacgggaggagatgtagggagagagagaaaccaccagaggcgagcgagcaggtgtgggcgtggcgtgggggaggcgccgaggcggtcgggcccgtagataagagtcgtctcacctcgtcgtcgcacccgggcatcgcacgagaggagaaggagaggggaagggctagagagagaaacaaaggtggtagtagatgtgagccaccctctttgtatccctcgtcaacttctcctaccaacttctttttcctcccccaccccttccttaccgtctcgcgcccgctccgcagcctcgcaccacccgccgccgccggccgaccggccggcaccgccggtggcatttgaagtatggttagcttgaggcgacgccgactattgggtctttgttctgggaaagactcattgccagttgatcttcctaagccgattgaaaatgaaaaaactgtggaagttgcacactccaatgtgaagccattcagtgtgcatccactacccttggcaaagacttctgatgtgctcataaaatcctcaaatggttctgatgattcaaaggaagagaaaacccagtactatccaggcaaggaaatcaagtgcagaaaacggcatagaagaaagcagtatgtggatcaagagccatgcattatgaggggggtttatttcaaaaatatgaaatggcaggctgccataaaagttgacaagaaacagattcacttgggtactgttgggacacaggacgaagcagcccggctttatgatagggctgcttttatgtgtggaagggagccaaacttcgtgctttctgaggaagagaagcaggagctacggaggtacacctgggaggacttcttagcagtgactcgcaacacgataaccagcaaaaaacaaaggaaagtcggatcactaaggcgtagcaaggcagacctgttcatgggacagagtgacggcgacaccgagatggccaatggtggcggttcatcgaattccgacaatggcgacgcggggacgtcggcgtcatagatcgctcccaggggttctgccgttgtggcaactcaaagtggagtcctccagcacattcatcccggtcatgcatgatacgagctccgtctaggattttgttctctcaataattaatttccatgtgcataaggccccgttggtctaatcaaatcaaaggttagggaaaccatgccatctcagacgagaattagaggtggtccattgttagaaaacagttcatctgaatagtaatgtataccggttctgaaaactgtgtatatctaccgataggttcaccttacattttgcccagtgtaattagtttaccttataatttaccaaaaaggaataatttttccctttccgttaataccatctctatactagtgggaagaaaaaaaaaaaaaaaagcggcc

SEQ ID NO: 66207 - DNA, 179 bp, Zea mays
  Clone ID: MRT4577_160381C.1
aggggcgacgacgcgtccgcttgcttccatgcttgacattgaacacggagcatgctcctgaacttgatgcctatgaggcgcgactctttctctaccttggcagtggaggaagttgatgctgaatcctccctggccctggagctgctcttcatcagctctagcaggcctgcaaacggcct

SEQ ID NO: 66208 - DNA, 167 bp, Zea mays
  Clone ID: MRT4577_160382C.1
tggtacgcgtccgcggacgctagggcccacgggcggcctttgggatccaggggcgtgcgacccacagaaggcgggatcttccagagcatcggtcagacgccaatagcaagagcggaggaactgaaccgaggaatgggcgtggacacccccattggggcaagatacaa

SEQ ID NO: 66209 - DNA, 241 bp, Zea mays
  Clone ID: MRT4577_160383C.1
tttaatcgatagcctccgatcattctgacgggtgccgggtacaaggtgatgcctatggccaccgccggtatccactggcctgagccgctggagcttgtagaaaaatctccagccgacttacctgctgccagcgctcgccatgcaacagacaatgaggttgcaggcactgatgcctgtacgtccgctgagacagagcaggacttccacatactaccaggccgagcttatgcgtctcaactca

SEQ ID NO: 66210 - DNA, 608 bp, Zea mays
  Clone ID: MRT4577_160384C.1
cgctgttgtcatgattggttcaagacaatacattgtgatgccgggcaggtatatatacacacagagactgaaaggtgccaatgtcaatgatcagatcatattaaacaaggtgctactggtgtcaactagagaaaaagcttacattggcatgccagtggtgaccaacgctgctgttcacgcagtggttgaagaacagggacgtgatgataaagttatagtcttcaagtacaagaagaagaagaagtaccagaggaaacttggtcacagacagccaaacacaaggttaagaatcacaggcataagtggatacgaagagtaccctgctgacccaatacttgaccctgctgcagcttaagctaaattgtaagttatgtagttacaaatcggctggtagtacagtagcatgcaagttttgttcttgtttactttttttctctggaaggaacacttttcatcaacaagttgttccatgtatttatttcatgaactcttattcttgttccttttcaacttgtgtgtgctagccagttgtattacatgacgttccataaagaagagatttctttttactacaaaaaaaaaaaaagggcggccgccaccgcggtgga

SEQ ID NO: 66211 - DNA, 987 bp, Zea mays
  Clone ID: MRT4577_160385C.1
gcacgagcctatccacaatggcacaatattatcgctgccctcccctttcgtcatccatgacttccctccccgccgcggtcatggccaccgcgacgacgctgcccctaggcctcctcccctccaaaacgctgaccctctcccctctcccttctgcgcgccgatccctctccatcgccgccgtggagccccggcgctggctcctccgagccgccgctgaggaggcgcctgaggccgtggaggttgagttcgtggagcccgacgcggaggcggaggaggagcccgcggtaccggagcccgtagaggcgcagctcgccgccgcgggggctgggaaggacgccgacatcttcgctgttgtcatgattggttcaagacaatacattgtgatgccgggcaggtatatatacacacagagactgaaaggtgccaatgtcaatgatcagatcatattaaacaaggtgctactggtgtcaactagagaaaaagcttacattgggatgccagtggtgaccaatgctgctgttcacgcagtggttgaagaacagggacgggatgataaagttatagtgttcaagtacaagaagaagaagaagtaccagaggaaacttggtcacagacagccaaacacaaggttaagaatcacaggcataagtggatacgaagagtaccctgctgacccaatacttgaccctgctgcagctttaaattaaactgtaagttatgtagttacaaaacggctggtagtagagtagcatgctagttttcttgtttctttctttttttacttctctgtcttgaaaaaggaacacttttcatcacaattttccttgtttttgtgtgttccaaatgctgccagtcaaccaactgtaccatgagctatcttgttcttgttcttttttcacatcgtgtatgctactagccagttgtattgcacgaccggtcctaaagaagaggtttctttccaaaaaaaaaaaaaaaaaaggggcggcc

SEQ ID NO: 66212 - DNA, 1559 bp, Zea mays
  Clone ID: MRT4577_160386C.1
tgttctcgaaatggcacatattatcgctgctctcccctttcgtcatccatgacttccctccccgccgcggtcatggccaccgcgacgacgctgcccctaggcctcctcccctccaaaacgctgaccctctcccctctcccttctgcgtgccgatccctctccatcgccgccgtggagccccggcgctggctcctccgagccgccgctgagaaggcgcctgaggccgtggaggttgagttcgtggagcccgacgcggaggcggaggaggagcccgcggtaccggagcccgtagaggcgcagctcgccgccgcgggggctgggaaggacgccgacatcttcgctgttgtcatgattggttcaagacaatacattgtgatgccgggcaggtatatatacacacagagactgaaaggtgccaatgtcaatgatcagatcatattaaacaaggtgctactggtgtcaactagagaaaaagcttacattggcatgccagtggtgaccaacgctgcggtccccgctggcgtcccagtgctgcggcgcgcgcagtgggtgatggtctgcgacggcacgagcaagttgagtcattgggtccctcgcgggcggccgggactccttcgtcatccatgcgtcccctccccgccgcggccatggccaccgcgacgctgcccctccgcctcctcccctccaaaacgctgactctctccactctcccctccctgcgccgctccctctccgtcgccgctttggagccccggcgctggcgcctccgagccgccgccgaggaggcgcctgaggccgtggaggttgagttcgtggagcccgagacggaggctgaggagaaacccgcggtaccggagcccatcgaggctcagctggccgccgcgggggccgggaaggacgcggacatcttcgctgttgtcatgattggttcaagacagtacatagtgatgccgggcaggtatatatacacacagagactgaaaggtgccaatgtcaatgatcagatcatattaaacaaggtgctactggtgtcaactagagaaaaagcttacattgggatgccagtggtgaccaatgctgctgttcacgcagtggttgaagaacagggacgggatgataaagttatagtgttcaagtacaagaagaagaagaagtaccagaggaaacttggtcacagacagccaaacacaaggttaagaatcacaggcataagtggatacgaagagtaccctgctgacccaatacttgaccctgctgcagctttaaattaaactgtaagttatgtagttacaaaacggctggtagtagagtagcatgctagttttcttgtttctttctttttttacttctctgtcttgaaaaaggaacacttttcatcacaattttccttgtttttgtgtgttccaaatgctgccagtcaaccaactgtaccatgagctatcttgttcttgttcttttttcacatcgtgtatgctactagccagttgtattgcacgaccggtcctaaagaagagatttctttcaaaaaaaaaaaaaagggcggccgccaccgcggtgga

SEQ ID NO: 66213 - DNA, 263 bp, Zea mays
  Clone ID: MRT4577_160387C.1
ggccgggaacagcaagtttatattaactgggcgctggccggcgtggagaccacatggcctgacacatgaagatttgggcactgctggtgaaaggctgagcaaggtagtttcggatagtcttgctggatcttgagcacgtccaggctcatgggtacaggaagactgtcaaagagtgaggcaaagaaggaaaaattatgggatggatagggcgaagaaaacatagagggtgatgattgtcatgcaggatcacgatagagaacatt

SEQ ID NO: 66214 - DNA, 436 bp, Zea mays
  Clone ID: MRT4577_160388C.1
gggaaggaaaaaaattttgggggacccctggtggccggacaatctggggaaaaaaaaaaaggctaattttttttttgggacatttttaaaatctgtacccggggtgagggaagaccccaccttgacagggttgtccatgcccatgaagccccccaacctgggggggcggaaccccgggggtttgcccccggagaggaacttttttgacgggccaatgaggcattttggggggggcataaaaaatggggccccccccgtcccccccaatgtttagctggtcaccacgcggggctaaacgcttttaaaaaatccggggggcaccacctcaagttggtggccaaatttgacaacaaaggccccgggcatgggctcaacctttatccactttcccctgtaggcaacctcaaggccctaaacggacccttggaggaggagg

SEQ ID NO: 66215 - DNA, 326 bp, Zea mays
  Clone ID: MRT4577_160389C.1
atccggacgcgtgggcgagaccaagaccaccagcaggactcgcgaggagagcgcgcccggaaggaaaaaaaaaaaccctatccccacccgggcctccgcttagcgatgtatagaacggaggccattccgagctcgttagtcatatcaaacaaacgcagctcactctcctgcatggtcgtgtctgccttaccggagccaacagtcccctcctctaccgaggtgaccgcccccgtggacgacgacggaacgccgttgcgccccatagcgctcccggcactgctgggggaggaggtgtccccgtctgcggcgtcccagacgagctcttt

SEQ ID NO: 66216 - DNA, 508 bp, Zea mays
  unsure (1)..(508): unsure at all n locations
  Clone ID: MRT4577_16038C.1
gtgggtagaagcagcggacaagctggagttgaggcggcggagagcaagccgctgggcgccgcggcgccggcgtccgtctcgagctcggtcgttgaccccgtcgagtacaacgcgatgctcaagcagaagctggagaaggacctcgctgccatcgctatgtggagggtacggccacttgcctttagctgcagctcacctgcaatactgtttgcttcgaatagtcagagctcgtagtagcttacttgtgttcttatgtggccggtgtatgatgtacatgtactgtactgtactgctccgcgtagttttcttagagatttatagtggactggaggataagaaacagcgagcagtccagcacagtatcttgtattcctagccctttgcaatgagatggcggtgcaagcgatcatgtgcttttaaaaaaaaaaaaaaaaaanaaaaaaanaaaaanaaaaaaaaaaaaaanaaaaanaaaaaaaanaaaaannaaaaaanaaaaaaaanaaaa

SEQ ID NO: 66217 - DNA, 1732 bp, Zea mays
  unsure (1)..(1732): unsure at all n locations
  Clone ID: MRT4577_160390C.1
ctggnccgggataccacgggtctctcgaagctcgtttgcttctctcgcgctccgcctctcccttgacatggcggctgcgacggcggcaggggccgccgccacggccgccgccgtatccctaatcgcctgctacatcctcctccacaagagtagagccaaactctcgtggttccctacggttgggttctcccgcgcgagcggccggcgggtgcgacggaggggtctcgtggaggccatcggcaacacacctctcattcgcatcaacagcctctccgacgctacaggatgcgagattctggggaaggctgagttcctgaacccgggtggcagcgtgaaggaccgcgtggcggttaagatcatcgaggaggctctagaatctggagatctcgtatatggtggtactgtaacagaggggagtgctggaagcacagcaattagcttggctactgttgctcctgcctatggttgtaggtgtcatgttgtaatacccgatgatgctgccattgaaaagtctcaaataattgaggcgcttggagctactgttgaacgagtgcgccctgtttcaataactcacagagaccattttgtcaacattgccagaagaagggctttagaagcaaacaagttagcagctgcacagagagaatcaagcgagaaacaaactaatggtttaacacatgtcgattctgagatgctggatgacaaattagcggttatgcagagggaatcaaacaagatgcaaaatggtggtccagcacatgtcaatactgaattttcacactgtgggaaatgcgatgtgaattctgattcaaagggaggtttttttgctgaccagtttgagaatttggcaaactatcgagcacattatgaatgtactggtcctgagatttggaaacagactaaaggtaacctgcatgccttcgttgcagcagctggtactggcggtacaattgccggagtctcacgatatcttaaggaaaagaacaggagcatcaatgttttaattaccagaggggtgatgtacacaaaagaggaggccgaggggaagcggcttaagaacccttttgatactattactgaaggaataggaatcaatagggtcactaaaaatttcatgatggcggaactggatggagcctatcgaggatcagatagggaagctgttgagatgtcaaggttcttgctgaaaaacgatggactatttgttggcagttcttcagccatgaattgcgttggcgctgtaagagttgctcaagatttgggtccagggcatacaatcgtgacaattctttgtgacagtgggatgagacatttaagcaagttcttcaatgagcagtatttggctgatcatggattgacaccaacagctactggtctggaatttcttgataaatgagcatttcacagggacttttcaatttcaggaagttggcatcctccctgtgactgcgatgataccttgacacaagggtgaacgctgaataggtcaaagcatgaatatatgccatacaaatggtgaacctgatgtgttttaagtactaattgtagtctagtataggcattgccattggataggattgggatagccagtgttttgatccttgttttgatatatatctattgaggctcaggctgttaccagttagaatgctgcactgagcatctttgctgtaaacaactgcaacatatgcattttttttgttaaaaaatgtttcaataacaaatctcccgt

SEQ ID NO: 66218 - DNA, 344 bp, Zea mays
  unsure (1)..(344): unsure at all n locations
  Clone ID: MRT4577_160391C.1
tttttcctggatcggttcaagctatattggtagcgccaagatacttatagnagaaccaccattctgaaacatagtaacgcccggaccaaatataggatcgtccaaaaacatactcttaacaaaagcataattcaataaaacctcggtgccaaaacctaccagacttcacaaaaaagcatactcacaacaccccgtatggcttcaccatgctttctcggcatcagaggccattaacaagcagattgcccacttccacggtgctgccctcaacaacatacacaacatccccaacctgcttactaacctggaactcatgaaccccaacgtcaacgagactaacgcaa

SEQ ID NO: 66219 - DNA, 1273 bp, Zea mays
  Clone ID: MRT4577_160392C.1
ctgccattgaaaagtctcaaataattgaggcgcttggagctactgttgtcacagagtgcgccctgtttcaataactcacagagaccattttgtcaacattgccagaagaagggctttagaagcaaacaagttagcagctgcacagagagaatcaagcgagaaacaaactaatggtttaacacatgtcgattctgagatgctggatgacaaattagcggttatgcagagggaatcaaacaagatgcaaaatggtggtccagcacatgtcaatactgaaatttcacactgtgggagatgcgatgtgaattctgattcaaagggaggtttttttgctgaccagtttgagaatttggcaaactatcgagcacattatgaatgtactggtcctgagatttggaaacagactaaaggtaacctgcatgccttcgttgcagcagctggtactggcggtacaattgccggagtctcacgatatcttaaggaaaagaacaggagcatcaaatgttttttaatggaccctcctggatctggtctgttcaataaggttaccagaggggtgatgtacacaaaagaggaggccgaggggaagcggcttaagaacccttttgatactattactgaaggaataggaatcaatagggtcactaaaaatttcatgatggcggaactggatggagcctatcgaggatcagatagggaagctgttgagatgtcaaggttcttgctgaaaaacgatggactatttgttggcagttcttcagccatgaattgcgttggcgctgtaagagttgctcaagatttgggtccagggcatacaatcgtgacaattctttgtgacagtgggatgagacatctaagcaagttcttcaatgagcagtatttggctgatcatggattgacaccaacagctactggtctggaatttcttgataaatgagcatttcacagggacttttcaatttcaggaagttggcatcctccctgtgactgcgatgataccttgacacaagggtgaacgctgaataggtcaaagcatgaatatatgccatacaaatggtgaacctgatgtgttttaagtactaattgtagtctagtataggcattgccattggatgggattgggatagccagtgttttgatccttggtttgatatatatctattgaggctcaggttgttaccagttagaatgctgcactgagcatctttgctgtaaacaactgcaacatatgcattttttttgttaaaaaatatttcaagaacaattcacccgt

SEQ ID NO: 66220 - DNA, 330 bp, Zea mays
  Clone ID: MRT4577_160393C.1
agcgcaagcggtctatgcgtttactagtatggtacacataaataatggggcgcaatgcatgtgccgggccatgaattctgctggccatacctatgcacgctgctcaaatcggacatgcatattgtcggcaccaatgctatcgtgggcaccaaacagaccggcttgacatcttatgaagattgaagcgcatggcgttcttccgcagataagcgctttgtactgcctggacgtgcggggccaaaatggtttcgcttccagacctagatcagcatacatgaaggccatagaaggctgtttaagatcgttcttaatgttctttatgtttgccat

SEQ ID NO: 66221 - DNA, 555 bp, Zea mays
  unsure (1)..(555): unsure at all n locations
  Clone ID: MRT4577_160394C.1
acaagttgcagttccaggcagcagatcagcagagacacacccacaccgtaccacacacactagcgacctgcagtctgatctgcaggtacgctagaaaccaagctacgactgctgtgtgctgcgtacgtacgtaggagtacgtggtggtagcgagatggcgaagaaagtggccttggtggcctcgctgctggccctgaacctcctcttgttcggtttcgccgacgcatgtggctgcaggtgcggcggctcctgccctagtccaccaggcggtggtggcgggggaggtggaggcgggggaggcggaggatctggtggtggtgggagcggaggcggcggagggagcggtgggggcggcagcggcggaggaggcggcggcggcggcggaggaggaggaggaggcggcggcggcggcggcggcggcgggacgcgcggtcgttgccctgtggacacgctgaagttgggcgtgtgcgccaacgtgctgaacgggctgatcaacgtgaacctggggacaccgncgaggacgccgtgctgcacgctgatccaggggctggcgga

SEQ ID NO: 66222 - DNA, 398 bp, Zea mays
  unsure (1)..(398): unsure at all n locations
  Clone ID: MRT4577_160395C.1
ccaactccaactacgttcttgttaattgtcgaaacacacgttggggagatgggggactataaaagcctctatgaccccatccttattttaggccctttggtactcaggagcgatgcaaggacctgctgcgccgaagaaccattacttttgctgtgtgtgcaccacctacatttgcatgtagacctgcgactacctactcaccaagtgcgccaccacctgcaagaactgcattcccgtatccacagacacgggcgacaccaagtacaggcgctcttacttgctcatgcaaaactgctgctgctacatccactagactcatacacagcggcacagccgatggatcctttcatgctcctncgtccgtccgccttgctacaagcaggcagccatcaataagc

SEQ ID NO: 66223 - DNA, 345 bp, Zea mays
  Clone ID: MRT4577_160396C.1
ggttagacagtttcacccagtgtctcacacccttattccatcagggcatgtgttcgaaccccacctttaaaaaaaaaaaaaaaaaaaaaaaaaaaaaaaaaaaaaaaaaaaaaaaaaaaaaaaaaaaaaaaaaaaaaaaaaagggcggggggttcatagaatacaagctaacgtacgctgccctgcgacgcgataacttatatatagtgtaacgaaagttaaattcaatggacgggcatttaaaatacatggatagaaaaaacaaaaccgtgacctaactaaattgacttgaaggacataacattttcgttaggtggggtaatataaaagaggaaaggcccgatc

SEQ ID NO: 66224 - DNA, 420 bp, Zea mays
  Clone ID: MRT4577_160397C.1
ggtaaaaggaccatcctgcacaaaggtaatttaataggatataaagcgaagttgggacgctaaagaggtgttaaaagaagttagccaattgttggaattgatgaacggtaaaacactactcgagcaagcgaggttaaatttgctagaaaacttagaacacgatacacttactaaatagtgaagtcatatcgttatattcaaatggtactacgaagaacgagatgcagtcacgagcttatcattgtgcccttggagtcaagttgtgctaacaatagaactctaccttagcaagggtcatgacatagtattagtatctatagtctactccggtgtatagatctgagtgtattttttgggagttcatcattaaaatgctggtgatgcaatctgtcgagagttggaacatggtgatactccaga

SEQ ID NO: 66225 - DNA, 427 bp, Zea mays
  Clone ID: MRT4577_160398C.1
ctccattaggcgtgcctttccctctcctttccctggccacaccatcccacaaggaccggggccaagcgacagcgccgccagcaagcaccccatgccctgaaccaccccacaccatatctgcagtacaggtacaacagtccctgccgccggggacgttagacccaccctgctcgcgcgcgcagtctgatggctaattcgccacgtcatcggtcctgctccggtgagctgtcgacgctgtctcctgactggcgaagccagtgacgcacccgccgtgcccttgctcctgcgccgttctcgtgcacaacatcacagatcgcgattcgtttctaagcttcaaggaatcgacggtcaagcttcggcgaccaaatgatccagttcttcgagttctacaaggctgaagatcctgagcatctgtttggtgaagtga

SEQ ID NO: 66226 - DNA, 1128 bp, Zea mays
  Clone ID: MRT4577_160399C.1
ttttttttttttcttttttttttttaaccacccttgtcacattaacatacatctctttcacataaacagaatacaatgtcgtatattttctctattgtgagtaccattcagaaactaagcttccatgcatagagccccatgtattgagaaaaaactatctgatactacaaaatcttgaccatgtggtgattactgattagttttacaaatcgaaaatcacaccaatgttgaactaaagagtgagctggaggtgtgagaggcccgggaaaacactacaatgttgctacaattcagctgtacatttttcatatcagggtgagttgcagctttgggcgatgaggctgaggttcaacaacctccatatgaatcctgacagtctggaggatagcatagctgatgtttgttccgggcttggttactctctggtgcacctcgtcaacaacccaatcaccgcctttgtcgcccttcggagtaaggtagatgggcccttctatgccaaactttgggacaaatactatgaaaccatttgccttgatctttactatcctagcttcagtgtcagttggccttgtcttgaaatatatgtgggtgtggagttcaactgatgctctgcttgccatctgggcatttctgtgcctgtaattcaggttgtcagcaatgcctgtaagttgtggaccatcctgaaagattggtgggagctttgcaatattcagagctgcagctagcaatctatgaacaacaacatctgcatatctgcgaatgggagaagtgaaatgagtgtaaagagaagcagcaagcccataatggtaatattcagaaaaggtcaaatctccactgcagaaataaacagcctgtgtcatgcatctagtcgccaaaattctaataagcttgttgaagtatgggttattgctctttgcgttgtcaagtgattcagctaatgcctttgaggatgacacgtccagatttaggccaattgaagaggcagtacggagtaatggctcaagcatctcttttgttgggctaggatggcgccttagcaatgaacataaggggaaatgcttcaaaatcttctcagcaacagaaacattagctgaatcacttgacaacgccaagagccatgacccatac

SEQ ID NO: 66227 - DNA, 368 bp, Zea mays
  unsure (1)..(368): unsure at all n locations
  Clone ID: MRT4577_16039C.1
gacccacgcgtccgccttaccctcgaagccgaaagcctggagccttctctttcttccttctaaggagaaggacctgtaaaggggtgagcggggccgccgtagtgctgtacaacaatggcgctgacgctgcctcctgcactggcgtccctatcgcaacaatacaccttcctgacatagagaacatcaatggggatggttccacgatcacctcgggcgcaaacaaccaggtagaggcgttgctcagtgtcagagaatacaccaaggacgaaggccatcggttgacgtttgattgcataagtcccgtntcctggaggagcccttccactcgcatgaagcgcgaggcgttcatccttttagggaaatgttcc

SEQ ID NO: 66228 - DNA, 559 bp, Zea mays
  Clone ID: MRT4577_1603C.1
ctcgagttttttttttttttttttttttttttttttttttttttttttttttttttttttttttttttttttttttttttttttaacaaaaaaagacctgggggcttttggcctttaacccgggggcaccttcaccttaacctttataggggaaaaaaaaggggaaaaaaacctttggtttttaacccggggggccggccaggggcccccccaaggggacgcccggggagccacagccaaggggggcccacgggccgggtttaccccgccccccccccccaaccaaaaacacatcccggccgttttaccccatttttgttgggggggcccgcccgggggtagggcccgggaaaacatttttattacaggacctgaaagagggggggcgggggtttttttttgcccaggccaaaaagggaggggttttaaaaaaggggccccaaaagggggccggggggctttatggggaaaaaggggctttgaaaaaaacccgggggcggtgggcaatggcccaaaaaccccaccggggcgcttgtttcccccggggccccgggacggg

SEQ ID NO: 66229 - DNA, 190 bp, Zea mays
  Clone ID: MRT4577_160400C.1
gttcttaactgattttataagcaaaaaaactctgcgattacaacagacttatggcatatgttcagatgtcagtgacatgagcctaagacataaatatgtgctgcctggtcctagacccccaaatttcaagcacaaaatgtcctataagtaggacgatcccccctgatcagtgcttatcaagcacgcttat

SEQ ID NO: 66230 - DNA, 270 bp, Zea mays
  Clone ID: MRT4577_160401C.1
cgaattggaccctcgggccggccggacaaagaacgacagagcccggccataggagagctgtacctcgcagaccaccaccttggcctgtagaggcctaggaaccgcggactggccccgccaacaacgaatcgcattgagagtcaactaatcaacaaaccatcggaccactctgctcaggccagggcggcggtaacgccatcaaatggaagcgtccctctggtactctacccgttcgctctactggcttggcgggatttgcctgcccgcctt

SEQ ID NO: 66231 - DNA, 581 bp, Zea mays
  Clone ID: MRT4577_160402C.1
cgcagcggctgccccccgaaagcaaccacagtcacgtcgctataattcggcacgagggaaaaacgcatcccacgcagaacccctcgcactcctactccctctctgcctccctttcctctccttgtgcccgtcgcattgaaatggagcagcagcagcagaagcacttgcgccggtgctagctgcgacgtgagcccgcagcagccactgccaaggacttcctggcccgcccggcttcgctgttgccggaaaggcggtggctttgggggaagcaaaagcaagcgacggttgcggaaggttcttgcggattcgcgcgcgggaggaatggcagcgcggtcgtcggcggcagcggtggcggtgctgcttcttgcggctgcgggggctgcggcggcagcaggaggagcggagggcgatggggacggccaggcgctgatggcggtcaaggcggggttccggaacgcggcaaacgcgctggcggactgggacggcggccgcgaccactgcgcctggcgcggcgtcgcctgcgacgccgcctccttcgccgtcgtcggcctgaacctgtcaaatctaaacctcggaggggg

SEQ ID NO: 66232 - DNA, 461 bp, Zea mays
  Clone ID: MRT4577_160403C.1
aattcggcacgagggacgcgcagtcgcccattccgcatctcgccctgccgtccggtccgtccgttctccgattggccggcgcccgcctggccctcctcggcacaaaagcccaccgaaggcgagcgagcgagccaccccgcccgatagccagccggcgccggcccgcccccacccgtttcctcctgaccgacgatgttatgtgcccggccttcacgtacgggaactactcgatccccgcagagtgcgcgaacaccgtgcgctcggtgcgagaagccagtcggatctgcggactcataagggataaaagaccattaccgtaaacatggatcattaattctgtgctacattacctgtagaagatgctctagaactttctgcttgagtacagcgagacgagctgatcacgaccccgtgatatagacatacatatcttgatagcgccagacttatcttgtagagga

SEQ ID NO: 66233 - DNA, 484 bp, Zea mays
  Clone ID: MRT4577_160404C.1
accgaatcttcatttgcgggttcaaatcacaaaatccccattgaatctcacatgttgttttttgcctgttcaaaaaattgttcatttttccggacgaatactttccgatacatacaaacttgggaagttaaaacacccccggagactatcgatctagacaacagtacgcttattacactactaccccgcctagcccccgtccgtcacctttttcccgggagcctgccgtcacctccttttttgtttgcggtcgtaatcgtggggtccatttggacaacccgtttgagcaccttgacaacttcccttattgccggccgttccttggggtttttgcccaaacaacggtcggggagcctggccaccttgcgcgcgggggccagggggtaccccccccccatccccgggtccattatggcccggaacccggggcccttcggggggtgcttgtccacccaccccaacattttttgctccttcggggggc

SEQ ID NO: 66234 - DNA, 468 bp, Zea mays
  Clone ID: MRT4577_160405C.1
acatttctagaaaaaaaaaaaaaaaaaaaaaaaaaaaaaaaaaaaaaaaaaaaaaaaaaaaaaaaaaaaaaaaaaaaaaaaaaaaaaaaaaaaaaaaaaaaaaaaaaaaaaaaaaaaaaaaaaaaaaattaaaaaaaaaaaatttttttccttgggggggaccccctttaggggaaatttttgaaattttcctaaaacttggggggcttttgactttttttttaggggcccaatttccccttttagggggggttttaaaatttattggcccggtttttaaaaagtttgttttgggaaaaccctgggtttccccaattttattccttttgaaaaaattccctttttcccaatttgggttaaaacaaaaaaggccccaccaattcccttttcaaaaattttggcacccttaatgggaaatgggcccccccttttaggggcctttaaacccgggggggtgtggggtttccc

SEQ ID NO: 66235 - DNA, 414 bp, Zea mays
  Clone ID: MRT4577_160406C.1
ctcggtaagagcggggccaaaggaagcagggggcatttttgagtggagttgcgttctcactgaccggcaggtggagcctgtggggtccatggctatgtctaggagagccgcagcgcagatgctcgcgtgctctagtctgccgtgacagccgcagcgctggcggacggcgcgctgctcccgaggatcggcgacagacgcagcggcctcaacaaggcaacggcgaccgacgtgggcctgctggcggccgacccgacacggatcctggagcacgtgccctgcggctcagcccgaaccgacgcggccacggcacccatggcgcgcgcggactggcaccagaccccacacgcgcacgagatcgaggtggacgtgcccggacagcacacggaggacctcaggatcgaggaggaggacaac

SEQ ID NO: 66236 - DNA, 533 bp, Zea mays
  unsure (1)..(533): unsure at all n locations
  Clone ID: MRT4577_160407C.1
gggatggcttttgactcaattgkttctgcaatcgacgrtggtgtcatgttgratgggrgttcttgcccccctgcccctccgcggggaatgcggvcattcacwarggtctacaggcgtggggctgtgggccgntccattgacatgggcgggttctccggatatgrrghwttgaygcatgctgtggcccgcatgtttggtatggagggcccmcttggggmccgmcggggmatgggatggargttggtctacccggbtcatggggatgacgatcctacttcttggtgmcgccccatggggggsgtttgtgaattgtgtgragtgcattrggktcctstccccccragargtgccgcagatgygcttsgatggtgytttggggsccratgtcctctccgaccgggcttgckgcbgctckgttggtggggrtgcctggtbgcctcgccgcgcccggssccctggtngcccttccatcgggttctgcggccsgtttgggtgscctggtcccgggggttcggggtgggggttttggctgc

SEQ ID NO: 66237 - DNA, 178 bp, Zea mays
  Clone ID: MRT4577_160408C.1
ctcgatctgtcccattcccgtcagaaaacccagcgaacctaggtccggcctcgctcttttcccgcgtgaaagtcacgatgcgcaagagaaccactccgggggcctggctggcgggcccgtacgcgccggggaaccgcggcgcatgcgcgaggtcgacacccaacgagcgtggcctggg

SEQ ID NO: 66238 - DNA, 355 bp, Zea mays
  Clone ID: MRT4577_160409C.1
ggaaagcttgccataaacattttatgattttattgggtgtttataaattctatgggtgcatgcctgaacctttccttctcgcagatgatatcacaatatttagcaggtcgtcttgatgtgaagttggacccccttcatttgagaaaggttagctgggatatttgtctcttgagccaaattgcaagaattgcttgtctgggcaaaaagtgatgatataggaagagagatattaaattgctaaagatgttattgatggctatgttgttatggtggataaattaccaatagatgacgggttagtgaggatagaggcctacagatcttgcatatatcatcctttgaccatgagaggtat

SEQ ID NO: 66239 - DNA, 1269 bp, Zea mays
  Clone ID: MRT4577_16040C.1
ccgggccccccctcgagtttttttttttttttttgaaccatgaaaactggtattttcatatagtagagataattacatagcaacacagaaattcaatgaaaatggaccaaccaagtgttgctatgattcaaaacttcattgccattaattgcacctattatgcatttctatatatgtcactcaatttagtgttccagctatgtctaattcgtccaatgcctcagaaacatctactgatgctgattcactttgggtgttgtctaattcgtccaatgcctcagaaacatctactgatgctgattcactttgggtgtgtccatgtgtgtcctttagcttatccagagcatccttcgcagcacggttctgagctatctccttctttggaccataaatagcacttccaactacctcaccatcaatcaacacctgaaccttcaaactcttatcccattcgtctttcagaaatttcaccccctcggtgagtcttttggcaaaactcaaaaagctcgcttacagggtgcttgcctaatgtctctaagccaataagtggatcagccaatgttcgaaagacccgccaaacctcctcttggtcgaagttggagtccaagtatatggcaccaataagagattccacaatgtcacacagaactttaggaggatccaatagtccatttgagtgaactggatatttgcgcatttcttctatgaaaaaacagatctgatcttgaagtttaggtgccttgtgtctcaaaaaacggtagagcccgcggtggacggcgacgcgcgcgagcttctcagtgtcgacgttagcggcgcggagccttgtgagcgggccgggctggagcgtgcggtaggttcggaagacctcgcgcgacatgaggcaggtgaggacgccgtcgcccaggtactcgaggcgctcgtaggtatccccggggcggttgggccagtagaaggagccatgcgtcagcgccagctcgacaagagatttgtcgatgaagcagtatccgaggagggcttcgatggcggtcacgtccttggcgctcatcggcgggacttcccctggcggcccgtcctgccgctgctctctcggtgcgtacggcggcattgctgatgactgcttgtggtttcctcggtggcggagggcggcgcggacgatgtggtcaatggccatacgccgatggggagggcgtttatcagaaaggagggcggcggcggcggcacgcgggtgtggatggggccgtggcccggccggcctcgaggtacccaatg

SEQ ID NO: 66240 - DNA, 219 bp, Zea mays
  unsure (1)..(219): unsure at all n locations
  Clone ID: MRT4577_160410C.1
attagctagaaaaagaatgccgatcatgcttcacataagccattagatgcctaacctcggggagggccaggaggcttcttccaaaaggaaaaaacctaggcgtgcaccacccggtttctaactattctttcaatatatactgagtactgactcgtacaatatagctttttactgtctttttgcnncaaaaaaataaaattataaaaaaataaaaggggg

SEQ ID NO: 66241 - DNA, 501 bp, Zea mays
  Clone ID: MRT4577_160411C.1
gttgggggtttttttttttggagaaaaccaaaaccccttacggaatatttcgggcgcttttaaaacagaggggctacgggggatccagggggggttttttaaaaaagcttcccccccccaaaaaaaaaaaaaacactttggggggggcaaactaaacaagggggggatttaaaattccggggcagggaaaaagttttgccatgccccttcgcccggggggggggaattttttttccccccggaaaagttattcccttgtttaacaggcggaaaagggggtatttaagggttgggcacaacccaaaaatggggggaccccatggggggggtttttccggggcataataaaaagggatcacacccccacccgggtaaatggaccccccctttttatcctaaaaaataatccgaaagggtttttttcaacccttcttgggaaaaacccccaaaaggggcccaagctcaaaaaagcggatttttgggaaaagttaacgggcccaa

SEQ ID NO: 66242 - DNA, 407 bp, Zea mays
  Clone ID: MRT4577_160412C.1
ctcttacgatgaggatccttatgctgaagagtttgtcattaacaccagcgtgcgttaggcttaaattgacgcacggtttttacctgctccttgtctcaaatataaggaaaccgcttgagagtaatgactcggtgcctatagctgggctgtgctatctgatgcacaatgaaattggttaacggcggcatagtgacgagctggacctgtgtgaattttgctcgtaatgtgcaagagagcgttgatattggatcctgccacgaacttgctccgatgtgccatgcctcccgaatggactttgagcttgtgcctatgcttacacgatatatacacgcatcctgataaagtggagcgagctatcaaagcctgcttccatgacgcgatgtacttactcggaccacagcgcatag

SEQ ID NO: 66243 - DNA, 686 bp, Zea mays
  Clone ID: MRT4577_160413C.1
gagaacgagacgctcaggttcctgccgccgccgtcattcaacctctcccagctcgtccagagcttcaaggtcaagggcatgagcgtcgacgacctcgtcgtgctctccggctcccacaccatcatccgctcccactgctcctccttctccgaccgcatctccacgccgccctccgacatgaaccctgccctcgccaccgtgctgaagcggcagtgcccggccaaccccaacttcaccaacgaccccacggtggtgcaggacatcgtcacccccgacaagctggacaaccagtactactggaacgtgctacgtcacaatgtgctgttcaaatccgacgcggccctgctgacgtcgacggagacggcgaggatggtgctcgagaacgccggcatccgaggaaggtttgagaggaagttcgccagcgcgatgctcaagatgtcgctcatcgaggtcaagaccgctgccaccggcgagatcaggaagaactgccacgtcgtcaattagttttgtttgatttgattcttcgttgttggattaatggattaacgcgggcttgacccaaattagctttcaataatagccaatgataatggctcactttaatgctatggtgtattaataatttaaaaacacattaaaagttcaagtgacaaagcaatcaatttaaataggtgaactattagtat

SEQ ID NO: 66244 - DNA, 641 bp, Zea mays
  Clone ID: MRT4577_160414C.1
ttgggtacctcgaggccggccgtggaatacctcttcctgccctggtctgtgtgtcgataactgagactgttatgacgattgcataacttcacctttaggagaggacctactccacctgtgacgcctcgccacgcaaacccttgtgaacgacctgtaactgtaggaactatgcgagtccagcacctgtgtctagataccctgtctggtgctaagcactgagcgtatgcatcgcactcgaatgctatcctaggtgaccagctaccacccatcgctaaatattgctgccgatgaatgggaatgcctctcctaactctcatagcactgtttccaggactatgtcacagcgttcttgttagatagacgggttataggtgctcctatgagtagggaatgtgcggatgcacatcatgtataggtcttatggaggatcgccaatcttatggtacgcctgtagtcggactcatcatgatactcgagttgctgatcgaggttctggtgatgacatatactgtctccgaatgtatggaggaggtatacatgaatgcataggagcttatgcgtgctacggtatgcgataaatgcttggccttgacatgagtacatacgatgactctgatccttattatatggatcctcctgaa

SEQ ID NO: 66245 - DNA, 181 bp, Zea mays
  Clone ID: MRT4577_160415C.1
gtcgcgggtttctcacacggcactcgagttgctaaccctgagtctacacaggctcgaggggcccatctccagctgacccgggccgaataacgtgtgctgtgcagacgaccttgttagccacttgagaacgcgccaccggatccgacccatcctgctctggagcacacagtgtaccacatgg

SEQ ID NO: 66246 - DNA, 334 bp, Zea mays
  unsure (1)..(334): unsure at all n locations
  Clone ID: MRT4577_160416C.1
acataatatgtcggcatttgtcaactccgagacgtgcgacgacccgaccccccgggggagagagggaggtacgacctctcaagatcacgtgcaccctggacatggaatgctgctatgttactcctgaactctagatgctaaaccacgagggatttgggatggctgtggaccaccatgtggtgtcttcactggaacggcttatctttctccaaggatgacgggggatccacgaagctgactgaggatgcatatgactcggatccggctgctgcatctttgtcaccaactgttgtcttggtccaaaaggaaagaaggcgcgagggccctcccnaaa

SEQ ID NO: 66247 - DNA, 319 bp, Zea mays
  Clone ID: MRT4577_160417C.1
cgtcccggaagatatggccgggacaaagtactcaatcatgtggcagtaaaaatgccaagagactaggatattgcccttggataggtgggctgctatgagccattacaacgaagtctcagcagcatgcgtcgatagcaactcattacagactccgctcggctgaagagagcctcttcctccgtggttgccaagctggccaacgatggatctggcattggagctgctctccttgcagcctcacactcccagtgtggcgagagtgactagtcttgaaaaccggtgtggatcggacttcgagcgctactctcatgttgatctt

SEQ ID NO: 66248 - DNA, 312 bp, Zea mays
  Clone ID: MRT4577_160419C.1
gcggactactttttcttgaagattggtcgatgtgcggcgacgatccaatcagcgatggcgtgcgagatctttgacagcagcgggaacgatacagtagatgccgaccgggtgtgctaataggaaaccttcggaaggacacctgtagtcaccggagcatgcgctggcgactatgaagctctggagttgatggatggctgctttgactatccggtgaagagagcttgccagggtgggaaccgtgcgaattgtgggatcggacctgctctgattggggaagaccctacgaggcatactgagatcgttaactggatg

SEQ ID NO: 66249 - DNA, 144 bp, Zea mays
  Clone ID: MRT4577_16041C.1
gacctaaaaggtttgtaacaaccttcatcacccgttggttagacaataataagaaaaattatttggagattcggaagaaacaaattttgatgttcatatttgatgttatagtgtattactggtgtatgggggtcagtgccactt

SEQ ID NO: 66250 - DNA, 629 bp, Zea mays
  Clone ID: MRT4577_160420C.1
ctcagtggctgactgatgttcagaccagctattctgctgatccagatgcacaaaaaatgctgtctaaattatcaatcaatgttgcagttgtacctaattttgtgctaaaggatggtttattgcgctacaaaggtcgcctctggcttggtaatgacgtgcagcttcaccacagggttctgtctgctctgcattcttctcctttgggtggccactctagggttccagtgacctaccgtcgagtaaagaagctctttgcttggaaagggttgaaaacttctgttcagcactatgtaaaccagtgtcaaacatgtttgcaagcagaggccgaccgtgcggcatacccagggaagctccaacccttaccagtcccttcatggccatgggctactattaccatggattttattgaaggacttccccgttccggtgctgctgattgtattctggtaattgttgataaattcaccaaatacgaccacttcttaccactctcccatccgtatacatccagttcagtggctcattgcttcaagactcatatttacaagctacacggactccctgctgccatagtctcggatcgcgacccagttttcacaagtcaattctggcgccacctgtttaaaatg

SEQ ID NO: 66251 - DNA, 517 bp, Zea mays
  Clone ID: MRT4577_160421C.1
ctacaaaagagctgtttttattactaaattaagttaacacacacatacacattaacatgagtttacatgaacccgccacgatatgggaacactggggtcaatctttattcctagttataatatatagtgtgtatggtgtacgtgggtcatgacaaactgccaaaccatttttatagtgtagcagagtgttgtcgactgtgaccattgggctatgtgcatgtgtgcgtacgtacagtgcttagcactctacacccgttgaatgaaatttcccttttgtcgtcagcagcttggaggatggaggtgacgagcacttgctgtaccagcagcattggcttgaagctcgggaacaagcatgaccttctcctttggatgcaccgcgtgtgcaaacacctccgttatgtgtaagtgcttctcctccatgcccatgggcaagatggcactctaagaagtacacgaggtctggtatcatgatcttgaccgtttgccatcccatagttgtaggcctggcaaatgctta

SEQ ID NO: 66252 - DNA, 632 bp, Zea mays
  Clone ID: MRT4577_160422C.1
agatatggaaattatccattttcatccgctgtttgaagtttggcatttagtttgatgacatttgaaagttggcatcatggtagaactatatttattttaaatttacatgcttatttaatcttcatgtggacagagtttgaagatttgttttgtttcatttattattgtttctgttatatggaaattgtttctttagtagaattatttcttactaatgtctaatgataatgaattattggagtacctgttttactacaaaagtgcttgcattttgtattgttgtgcggatcatagtcacaaagttcccgggtcgtcggggtcgtgggacggggtcgaggttcgataattttaaaaagtacgggacaaggggggtatacctcttcggggacgtgaatcttaatttgggtacatgaatctgtgtatgatggatcgatgttccctgatcggttcaacacgattccattgtttctctttctgaaaattgctgttttactatagatgtcacctaatatgtggatacaatgaatgtgagatgctactttttcatacttgaatcgtgttgcatgattctactttcttctgtgttagttttcagtatgtcttagtatcagtggtcatctttgaacttagtc

SEQ ID NO: 66253 - DNA, 379 bp, Zea mays
  unsure (1)..(379): unsure at all n locations
  Clone ID: MRT4577_160423C.1
cctctctttntatgtaatgcacctacatactttcaacatcaattgctgcaacatatattacgagctctggctcatctatctgtggcaaaccctacttcctacttgcaacagctgcttccattcaaccaactgactgtttctaactctgctgcttacctacaacagctacaacagttacttaatccactatcaattctctaacccatttttcactgccttcctacatcatcaacaattgctaccatacaaccagttctcttttattaaccctgtcttgtcaaatcatcaacccatccattatatgttccatcttttaaattacttattaaatgtaatctattattgtgccctctataccccttgttttttctaaaaataa

SEQ ID NO: 66254 - DNA, 378 bp, Zea mays
  unsure (1)..(378): unsure at all n locations
  Clone ID: MRT4577_160424C.1
acgcccgtccgaagcacgttctttttatgagattcttcnntggcgcnacctacccgaggaaagggcgttatgggggactgtatatctcactgccctttatcgcaccataccccatctctcatctataatacgttggctttcatttcggctagccagcaacatgcctaccttncattatagggactttcgaccaaaacgacatttcattcatcatctaaagtccgacagtcagtcaggagtactcattatgaaaaacaattcagacctcgagcctcgaggaccgtcagttcattctatataaaaaaaccgatgctgtatatataacacattgtacctaaatatagttaaagaatatcaataatcaatctttacgatcaa

SEQ ID NO: 66255 - DNA, 398 bp, Zea mays
  Clone ID: MRT4577_160425C.1
gtcagtctagcagttagctcatcgactccagattgcagaactcgacaccatgatggagctgatcgttgcccttgctctactggcgctagttgcaagcaccgccttcagtacaagctacgtgctgaagctgccagacaccaccgatccatctaccgactgcgttctatatgccgcctccgttctatctgccgccgcagcagcagccgcagacatggcaataccccactcaaccaccgcagctaagcccgtgccagcagttcggatcctgcggcgtctgaagcgtcggaagtccgttcctgcgcgagtgcgtatagttcctgaggcaccaccgcagcccggctgctacaccatacagttcgccacagtgccatgtgctgcatgagcagtgctgccaccat

SEQ ID NO: 66256 - DNA, 449 bp, Zea mays
  Clone ID: MRT4577_160426C.1
aaggcgggtcaaatttatttttaattttttccaatctcatctaatccatgggtaataggaataaccgaacagggccttacaaaaaataaaaaaaaaagatctggtttctggacatgtttatgtatggagtttaaggtttgagtctgacggcagcgcttttccaggggggttgaaaatcatgaaatccaggttagccgggagcgaaacgatcctattttcataaaaatggggaacccccgaaagaaatttaggggaaacagaaagacctgcccacatgcacaaaaccaaccttaagagcaactccatcatcacatccatgggcggccggaaaaactcctcctccgtgatcttgaccaccgcgcggtactggatggtggcttaggcggcgtggccaaggatggcccccccgaggacccccactacgtacccgatgcccatggcaactgccg

SEQ ID NO: 66257 - DNA, 297 bp, Zea mays
  Clone ID: MRT4577_160427C.1
tgctctgcagtacggtcggaatccgggtcaccacgcgtcgggacgtggcggccaggacctgattgggctccagggcgcgatctttgagcgcagatttggtgcacgcgatctgccatggatttgatttaaggtgagctccctttacttactttggcgtcttgcttgcctggctcggattcgtgttatcggtcgacctatggcggagctgagagttagagatttggttctttcttcgcagatttagggagatcggtcgtgttcgcgtcgcgctgcgagattcgattttttatgcctgtt

SEQ ID NO: 66258 - DNA, 140 bp, Zea mays
  Clone ID: MRT4577_160428C.1
gcgtgcttactgtgtaaaatttgtatgtactcacatttctacactatatacaaatcgcaatcttaaaatgtgaagtttgaggtaactaaccagtaacctaactcatattaattagtttcagctcacttgatcgcttttga

SEQ ID NO: 66259 - DNA, 2193 bp, Zea mays
  Clone ID: MRT4577_160429C.1
ggggggggagcgacgcgtgcgccaataatatgcgttaatgcaacatgccataaccgaacaaaatgggcccttctccgccaggaaagcaaattcacagattggcagcgggtcagaatgcaggagacatcaaaagagatacctgctggatcacttcctcgttcccttgatgtcattctgcggcatgagattgttgagaaggctagagctggggacacggttatatttactggaactgttgttgcagttcctgatgttatggcactaacttcacctggcgaacgagcagagtgtcgcagggaagctcctcagcgaaaaatgggaggtgttcaagaaggtgtaaagggcttgaagtcccttggagttagggatctctcttatcgccttgcttttgtagcaaattcagtgcaggtcgcagatggcaggagagaaggggacatcagggatcgggacacagatggtgatgacagcgagagacagaaattcacagaagaagaggaagatgaggttgttaggatgaggaacactcctgatttctttaataagatagttgatagcatatgtcctaccgtctttggtcatcaagaaattaagagggcagtgcttcttatgcttttcggtggtgttcataagataacacatgaagggatcaaccttagaggtgacatcaatgtctgtattgttggtgacccaagctgcgcaaagtctcagttcctaaaatatactgctggtattgttccaagatctgtttacacgtcaggaagtcatcatctgctgctggtctgacagcaactgttgctaaagaaccggagactggtgaattctgtattgaggctggcgccctgaatgttagctgataatggcgtttgttgtatcgatgaatttgaataaaatggacatcaaggatcaggtcgctatacatgaagcaatggaacagcaaacaattagcataaccaaagcaggaatacaggcaactttgaatgcacgaacatcaattttagctgcagcaaatccgaccggaggccgttatgacaagtcaaaaccacttaagtacaacgtggcattgcccccagctattctttcaagatttgatctcgtctacatcatgattgatgaacctgatgaaaacactgactaccacattgctcatcacattgtaagagtccatcagaaacgtgaagaagcacttgcccctgcatttagcactgcacaactgaagcgttatatatcttttgcgaagtctttgaaacctcagctgagttcagaagcaaagaaagttctggtggagtcgtatgttaccctccgtagaggggacagtactcctggaactagggttgcttacaggatgacagttcggcaattggaagcattgattcggctgtcagaagctattgctcgaagccatttagaaagagttgttctcccagctcatgtccgcctggcagttaaattgctcaagacatcaatcatcagtgttgaatcaagtgaagttgatctctctgactttcaagatgctgaagatggaacaaacgtaccttctgagaatgatgctggacagccagctgaagaaggtgctgctcaacagcaggatgcagaaaatgaccaagcagcggataacggtaagaagaaattggtaataactgaagaacacttccagagagttactcaagctttggttatgagactaaggcagcatgaagagtcagtcaagaaagatggagatggtatggctggcatgaaacaaggggatcttatcatttggtatgttgagcagcagaatgccaaaggcgcatatagttctaccgcggaggtgaaggaagaagtgaagtgtatcaaggccattatagagagactcatacagcgggaaggccatcttatagtcattgacgaaggcacagcggctactgccgaagatggcagtcgctcaagaacatcagagagcagaatattggcagttaacccgaactatgttattgattagcaacagcatcgtaacatgctactaactcaattcagctgatctggttaactaacagaagctataatttgggtgatgtgtctgttgtgccctagcattgttgtaccatctccgtgactgatgtcgtcattgcaagggatcacatgatctccaaaactatataattcgtacagtatttgctttcttaagttcacccttttgggtccattgttcgtttc

SEQ ID NO: 66260 - DNA, 221 bp, Zea mays
  Clone ID: MRT4577_16042C.1
cagacacgcttcttcatactcacatatcttcgcgacccaaatcgtacccgcttctctgagtcttatctcatttatcaccaatcgcgccgttaccgcatttcgacaacaccacgacggagtgcatctagctccacataggccaggccgtaattcagctctgaaacacatgctgtgagctagctctgtatcgagcatggcattcaagctgatggtcaaattcc

SEQ ID NO: 66261 - DNA, 2469 bp, Zea mays
  Clone ID: MRT4577_160430C.1
cgttaatgcaacatgccagaacagaacaaaatgggcccttcttcgtcaggaaagcaaattcacagattggcagcgggtcagaatgcaggagacatcaaaagagatacccgctgggtcacttcctcgttcccttgatgtcattctgcggcatgagattgttgagaaggccagagctggggacacgtgaggaagcttttttttggcctcttcctccttggaatgacttcatttgactgaatgttttgtttctggtatttccagggttatatttactggaactgttgttgcagttcctgatgttatggcactaacttcacctggcgaacgagcagagtgtcgcagggaagctcctcagcgaaaaaacggaggtgttcaagaaggtgtaaagggcttgaagtcccttggagttagggatctgtcttatcgccttgcctttgtagcaaattcagtgcaggtcgcagatggtaggagagaagtggacatcagggaacgggacacagatggtgatgacagtgagagacagaaattcacagaagaagaggaagatgaagttgttaggatgaggaacactcctgatttctttaataagatagttgatagcatatgtcctaccgtatttggtcatcaagaaattaagagggccgtgcttcttatgcttttgggtggtgttcataagataacacatgaagggatcaaccttagaggtgacatcaatgtctgtattgttggtgacccaagctgtgcaaagtctcagttcctaaaatatactgctggtattgttccaagatctgtttacacgtcagggaagtcatcatcagctgctggtctgacagcaactgttgctaaagaaccagagactggtgaattctgtattgaggctggtgccctgatgctagctgataatggtgtttgttgtatcgatgaatttgataaaatggacattaaggatcaggtcgctatacatgaagcaatggaacagcaaacaattagcattaccaaagcaggaatacaggcaactttgaatgcacgaacatcaattttagctgcagcaaatccgaccggaggccgttatgacaagtcaaaaccacttaagtacaatgttgcattgcccccagctattctttcaagatttgatctggtctacatcatgatcgatgaacctgatgaaaacactgactaccacattgctcatcacattgtaagagtccatcagaaacgtgaagaagcacttgcccctgcatttagcaccgcacaactgaagcgttatatttcttttgcaaaatctttgaaacctcagcttagttcagaagcaaagaaagttctggtggagtcgtatgttacgcttcgtaggggggacagtactcctggaactagggttgcttataggatgacagttcggcaattggaagcattgattcggctgtcagaagctattgctcgaagccatttagaaagagttgttctcccagctcatgtccgcctggcagttaaattgctcaagacatccatcatcaggtgattcagttgaactggtaacatttatgaattgatgtgtgcataatgatgccgctgatgctaatctcattgattttgtgtagtgttgagtcaagtgaagttgatctctctgacttccaagatgctgaagatggaacaaatgtaccttctgagagtgacgccggacagccagctgaagaagatgctgctcctcagcagcagggtgcagaaaatgaccaagcagcggataatggtaagaagaaattggtaataactgaagaacacttccagagagttactcaagctttggttatgagactaaggcagcatgaagagtcagtcaagaaagatggagatggtttagctggcatgaagcaaggggatcttatcatctggtatgttgagcagcagaatgccaaaggggcatatagttctactgcagaggtgaaggaagaagtgaagtgtatcaaggccattatagagagacttatacagcgggaaggccatcttatagtcattgacgaaggtactgcagccgcagccgaagatggcagtggcgcaaggagaacatcagagagtagaatactggcagttaacccgaactatgttattgattagcaacggcatcttaacatgctgttaacccaagccagttgatgtggttagctaactgaagctatgattctggtgatgtgtccgttgtgctctagagttgttgtaccatctccgtcactggtgtgctcgttccaagggagcacatgatctccaaaactacatactacgtttagtgatgcaggataattagcatctgtagtcttactaattttgacccgtgtttccctagtgaattttcgtagcaacagctttgatttatcagtcactgagtgctgcaattttctatttgctttctcaagttcaccctttgttgatccatctagatgggatcagagaatagctgtgctaatttatgttcat

SEQ ID NO: 66262 - DNA, 256 bp, Zea mays
  Clone ID: MRT4577_160431C.1
tggtcggaacattgggctgatttagtgcttgtctgccttctcgtctttccccgtaattcttcgctacacaggttatcgcgattcgtcctttcggtgtagccgtgtactcttacagttattctggaagtctgaggttgaggacttatacacacagtactcgctccccacatcaggccccagcccccgggagaactcatatggtgtacaagtcaggcagtccctcctaacaactccggcttagcttaataagtccttt

SEQ ID NO: 66263 - DNA, 496 bp, Zea mays
  Clone ID: MRT4577_160432C.1
tttttttttttttttttttttttttttttttttttttttttttttttttttttttttttttttttttttttttttttttccagggggggaacctttttttttccggtttaaatcttaaaaattttagaagggggcccccccatgggggggcgttggcaataggggggtgggtttcgtcaaagcttgttggttaaatggcaaaaattgttgttgttgtaaaagggcaccattgtttgccactttttgtgggtagaagggcaaaatttgttgttgttgcaagagggctttattgtttcccacaccttgtggttaaaatggcaacatttgttgttgtcgaaagaaaaaagcatttttttccacagttttcaaatggaatggcaaaatctttttttgccttaaaaaggcttcggggctccccccaggttggctaaaggaaagcagttgttgtcccttcaaaaaaacagcggggttcaccccacttcgttttatttaaggg

SEQ ID NO: 66264 - DNA, 355 bp, Zea mays
  Clone ID: MRT4577_160433C.1
gtgttggggcaacacgtaaaaggggacgggctcctgtttcaaatttttgtttgggctaaagtacaatcgggggtttgttgatctatttagtagaacatccactgatgaaaaagccttgcttttttttcgggtgttggacaacccatggccttgggagcatttacttttaagccttgcccaatgttggggccacaatttttttataaaaaaaacaagcttttattatgccacatcattttaacttatctttctttcaaagaaggccactctgaatgtgtggtgctgatgtgtttcacctgattttaatgttcttcaacatgctggttataaggggccgccttttatgaaacctgct

SEQ ID NO: 66265 - DNA, 345 bp, Zea mays
  Clone ID: MRT4577_160434C.1
gattcttcccaaatcttagaatctacccaaacacaaaagagtataaaacaacgcaagggaagggaggaaaggacagacagacagacagacacacacacccaagcaggggggggacacagattccggggaggccagaaaagcatgaaaaggaggcatagcccaaagaggagccatagcccaacccacacaaaaaagcccgaaggcgtacaaccccccgaacgggatgtaaaggaagccccccacggacaggaaccccccctagaggggggacaccaaaaaaaggggaggagggagggcagcccttaccaaaaagaagatttccaaaaaaagaaaaaattggatccg

SEQ ID NO: 66266 - DNA, 378 bp, Zea mays
  Clone ID: MRT4577_160435C.1
caacgaccttgatggcgagttctgcgatgtgtcgtaccaggccggcatctctagggagctggcgcacacctagagcatgatcctaattaccatccatgtttttccagaaccgagttggtctcacagtcagatagatgttcacacaatgtacctatgtgtatcattctagcagatgaccaagcaagaccaagggtatatgtaatgtatatatgcatgtcttgggttggctcagctgccaaggtatgtagtagaaactaagatgaaatggtactggtgttattcaccgttttacgatatcagaagatggaacagagagctgtggaagtactgtgctacgacccaaaaaaaaaaaaaaaaaaaaaaaaaactcgagcccgg

SEQ ID NO: 66267 - DNA, 510 bp, Zea mays
  Clone ID: MRT4577_160436C.1
ggggggggtggtttttttttattttttttttttttttttttttttttttttttttttttttttaaaaagctcctttttctaaatctgaaaaatcgggcaatactacccctagcaagaggctaaaaaaaaatcccatcacaaaatttttgccgattgtagggggccccttttcttggcctttacaaaggttaaggtttggcttggaaccaatctttattcttctaaagccacctcctaccccgtatgtacactctaatcatttcaaacaatctcccccatcataatcccgttactttggacctttaaaccaaaaaaaaaaggggcaatctcctttcctttcttcgttttcttcttcccccccttaccacctgggccacagtcttcaaattcggaggcattttaccgcaacggaagcttcctctaactcttcaaccctctccttaaagacttaccacaagcattttaattgttggtggcttatggcattccatacccccccctctttttttt

SEQ ID NO: 66268 - DNA, 712 bp, Zea mays
  unsure (1)..(712): unsure at all n locations
  Clone ID: MRT4577_160437C.1
agggcaattgggttcatcgaggccggccgggaatccacgacctcacctgcagccatctcctccatcccaccagactcgagacagccagctcgcgaaataatggagagacgcacgatggcatcatcgtggcgcgctctgtggtgctagctcctcttcgctagatggagggcaccgccccacaggtgcctcgtggccatcatcaacatagctgagccgatcgcagaggcggatgaacgccgaaccaacatccagccacagaattgctgctctcacttcgtgtgccaggcctcagaatatggactgcaccgtgcnacgatgtgcaatcgagacactgcgacgctctcccggaagtcctacctgtcgctgtactgctggatccgctgctagggcaagtgcacccattacaatggcatcacggcgccgcccatgaaggtctgccatgacgagtgcgaaacgattacgtgaagaaggcggccgaggtctccatggtctcgctggattcctgcgcccacgagaataacccgcgcctctgcgagaactgaaagaggtcctgcacccctcctccttcttgaaaccccttgatatgattgaaccatgtacgtcctgagcgagtctataccttcctcgacaccgtgtggccacgcatgcgaatgccataagacgatctgcatctcacatggacggaactatatattgaattccttccaatctg

SEQ ID NO: 66269 - DNA, 182 bp, Zea mays
  unsure (1)..(182): unsure at all n locations
  Clone ID: MRT4577_160438C.1
tccggattcccggnaaaatggcggnatgccctgttcctgttgacaaacccacttacatatcatttggggaaggtactgaggaaaaatttcaaaaaacgggtaattgttgcagtgcggcaagggaaacatcctcgcaactgctttccacccagaaatgacatcagactccagatggcatcgtt

SEQ ID NO: 66270 - DNA, 417 bp, Zea mays
  Clone ID: MRT4577_160439C.1
gacccacgagtccgctttgagaaagacagctttttcaggaacatccttatcaggacgcatcacaatatacctgagatacttctgagtaagatactccctgtcatgctgtcctctgtcgagtctgcctcacttgagtttcgatcagtagctgctctatccataactgtttcgtgacatctgagtgcctaacttactatcgacgacttgactatcattgtcatgctatctgctgtcaatcattgtgctaccagtgaatgtcctatgcgacaaagtcatcagtatgagaaatctcagtctgctgaatcagtgtctgctcaaattgttcatcaagtagtatttccacatgtagcaactgaatgtaccgacactgatcgtacattacgttcactgatcatattatcaatgctcatatcacaa

SEQ ID NO: 66271 - DNA, 447 bp, Zea mays
  Clone ID: MRT4577_16043C.1
gatcctattgttcatcctgtacaggtgacaattggaagtgttgattcacttgttgctaatacttctattactcagggatgtgttcatggcagtcttttccttctgtcattattatcatttatataagatgcatggacagtgagtaattcggttctcttacacaaataagcctacattacatattcatgttatcttattttcttttcccgtgcagtatatagagatgataacacccttagaaaaacaacggcgcctggagcagatattacgatcccaggattcaggcattttggagcttcggccattcatggtgacaagtcccaaagtgaaagggagaaggctctgaatcagcttagatctgggcggtctgccatgttagcgccaactgatgatgctgcgcgaggttgggacatcaaaaatatcagggtagcgatcaactatgacttt

SEQ ID NO: 66272 - DNA, 254 bp, Zea mays
  Clone ID: MRT4577_160440C.1
tcaatcgtgcgctctggatctaaactggcacagcactgaaccctatattgacctactcatatgatgggtgaaggctattgccgttttgggccaaaacgtacaataatgtactgtattatacaaatattagcgcctgatctagcaaaatcttaacgcgtccaatatatgtggcacttctttaggatatgtgcgctggaccacgatttgctatactgatacttcgctcaaatatatatatcgactggatacaataa

SEQ ID NO: 66273 - DNA, 370 bp, Zea mays
  Clone ID: MRT4577_160441C.1
ccgggggcaccgcgggggggcacgcgtacaaacaaaccttgcaccgtggaagagggaatgggcgtacctatccacggggcgctccacgggcgactgtggaggggggagaggggattcaacaacctggttgcaggaattcctggacgttcatctggtccccttttggcaaaacacatatgtgatcatgtcttgatggactataataccctgaacgctgtacaatctggattgggtacccaaggtgttatctggatggacacatctacgggtgtacatgactcgattgctaagctggactacttctacaaccatgacaattgcgggcagagcacaccttgccaagaggggacaccctggctctggatgatca

SEQ ID NO: 66274 - DNA, 547 bp, Zea mays
  Clone ID: MRT4577_160442C.1
agggccctttttttttttttttttgtcgtgaagcattttggattccgttgtcgcatgttcacatggtgccaggccagtcaaaggcaagcatccacagcgggacgcgaaccggtgttagagagaccgtcgtaatctcatgttcaagtaaactcccagagaacctcaacgtgccacatgggcaattgaccagcctcccataacgttcctcaacccggcacaatcgtttcctcccgagaaaaatcattgatagctcgcgtgtggcatccgaccgtatgacgtaacggggggtcggaatgcgcgttgcagcaagatggcgcaaactaggcggaaggctgtgcgcaaaaaacaagtcgttcgtccatcattttggatcagagttgaggcgatgggctgctgagatcgaggggcgagtagtttatttggaacgagccctcgtctttcttctcttgcgcttgagacgtcgaacacgcttcttcctccatttggctctcatcttgtcggcgggattgctgtctagatgagtgtcgtgagttccggccaggccggc

SEQ ID NO: 66275 - DNA, 467 bp, Zea mays
  Clone ID: MRT4577_160443C.1
aaaaaaaaaaaaaaaaggcccctttcatttttttataaaaaagcttggcaaaacaccccatccttaggggtcctttaaattaaaactaaaaaccaccggttggccctaaggtaaaccctacttttttttttgaataaaggcccccccctttttgggccccccaaattggaatttttttttaagttttccggcccaccaattgggggaaacctggccttagcaaaaggctccaagcagcaaaggcggccctggggcttctccctgtttttgaggcccccaaccccctgggggttcctcccgccagtcaccatgaccttgttggcgacgtaaaacttggggaagcccatgatcttgtgggtccccaaatcgtttttgagggggccgttgcccttgatgagcggttcggggtaccggttggcccccccatcggaggggttcaggtgggggttgcttttttggcaaattga

SEQ ID NO: 66276 - DNA, 171 bp, Zea mays
  Clone ID: MRT4577_160444C.1
cattaacaaaagatatgcaggttcaagaatgtagtgatgctttatttcacattttcttcattccctcatctaagattatatacaaagtcatttacattacggtaacattcttagatgagggaatgaagaaaatgactttgcatataatctttttcaggatagttcttgtgc

SEQ ID NO: 66277 - DNA, 562 bp, Zea mays
  Clone ID: MRT4577_160445C.1
gggggggggggtttttttttttttttttttttttttttttttttttttttttttttttttacagtttccaaacatccctttaccccatagatcaccccgtcccattccaagggggcaaacagggcattgcacacactgccacccacggggggggggggggggccgtaacccaacgccgctaaacgagggaacaagcgagagccccatagggagctagccagaggctccaacacattattactacagaacaaaaggccccaaagaggagacaccgccggcaactgcgttgaaagggcagggaccgggctgctgcagctgcaaaccgaacaacgccggcagctgctgcgctacctgggccgccaagagcgccgggagctcaccctggggctgctggtgcaggaaggactgcaagaccacaccggatggcgcccggtaccggggcagcggctccacctgcctgaactggggggagcactggggctgcagggcccggcactggggggagccctagggggacgcccccgggctccaccggggccccaggaactcgacgcactggccc

SEQ ID NO: 66278 - DNA, 458 bp, Zea mays
  unsure (1)..(458): unsure at all n locations
  Clone ID: MRT4577_160446C.1
gatgcacttagacgtcgcacgggcgctgttcacagacacacctagcgtgcggaccaatggcttactaccaggaggtggactactgctcggaggaggtgaaggtcggtggccccgnnnnncttcggccgccacggaggcggagtccagcatcacgtcgtcaaggagaagttcgaggaggtcgacacggtctcacgcgccggcagccaaccaccaccaccaccgncatggtcaccacggcggccactgcttcgtggtgcgcgagaccagggtcgaggacgacatcaacacctgcacacggtgaggtccacgagcgcagggagagctttctcgccagggctaactgagccagctggcggncggatgcactcccgttcgtgcctgcctgcgtgccttatgtatgtctgtggatgacttggtgtgcatggtcatcgtacttggctatgagacgtgcacgcact

SEQ ID NO: 66279 - DNA, 328 bp, Zea mays
  Clone ID: MRT4577_160447C.1
aaactcgttctttcggagcgcacacacacacaaccagatctcccccaaatccacccgtcggtttctccccttcaagatgcagatctttgtgaaaaccctgactggtaagactatcggcctcgaggtggagtcctctcgacccctcggacgacgctactcctacttccccgtgctctgctccaagaacaagatcgagacccacacgccctacgtgattgggcgtgccctgaccgtctacgtcctacggcaaggcgaccaaatctcctttgtttgtttgcttaccacttcgtcgacgaggacggagggattgtttttttttccccccccc

SEQ ID NO: 66280 - DNA, 536 bp, Zea mays
  Clone ID: MRT4577_160448C.1
gggaccccaagaaaaccggacaaaaaaaccccaaaaagggcgaagaaaaaatggcccccctccaaaaaaaaaacaggggaaggaggggggtcccgatttgggcgggggccaaaggggccaaaaattggggttttattccaaaaaaaaccgaaaaaaaaaagggcggcaaaaacggggcccctaaaaaaggggccccccgggaccggggggacccgggccaaaaacagggggcggggcccacaaaagccccgggggcgaacaaaaccccaaacccgggggggtaaccccacacgttggcaaaccaaaaaacaaggtttaaaaaagaagaggccaaaccaaaaccccccctgggacaaaaaaaacccggccccgaaacacccacaaaaaaattgggaacaacacccccggggggggaaccaaaaaaacccctgagggcaccccctgaggcccccttgaaaggggctttcacaaaaaaataagaggggcctttttcaaaaccgggagtgaaaaacacaaaaaagagaattggggggggg

SEQ ID NO: 66281 - DNA, 844 bp, Zea mays
  unsure (1)..(844): unsure at all n locations
  Clone ID: MRT4577_160449C.1
tcccgggntcgacccctcgtccgccncggacgcgtgggcgacagcagcggcgggcgacggggaacggggaacccctgtactgtatttcgtcgacctttgccatggcgtcgatgatgagttctcgcgcgggcgcggcggcggccggaggaggagaacaccgccgtcagcacgtcaccgtggcgtgcggtgggctgacgcggccgagtaccaggcccgtgccgggcgcagctggcccacggcccgggacgccgaggccgcggggacctgctgcagctgcgggcggctcttcgtcttcgtcgccgacggggcgcgcggggccggagtgcaactggtggggcgctgccgcgcggcagcaggcgacgccgaggcggtcgaggagcggcagggccgcgggcgcgcgcgtgcccacgggcaaggggaaccgcgagctggtgagacgggcgctcacgccgcccgccgcgcgcggccgaggccgtggccgcgccggaggagccgtcctcctcaggaggtggagcttccggcccgcgcccagccgcctgcgcaacgcgtcgtcgctctcctcgcagccccctgcctcgccgcggccacgtccgtcgtgatcgaatgtcgcgaccggattctttgattcgttgttttgtgggaaagaaatctttggtctgcgctgcagtttgtaaaatgttttgtttaaacgcagtttagaattttgaccacctgtacgtagtgaaaatggtcgattgtatgacatgtaacaatcgcttcatgcaaatgcttccatccggatccgacccacgttttgtgccattgtggcatgtcatcgtgcaactagcgtgccaggtaggcacat

SEQ ID NO: 66282 - DNA, 1069 bp, Zea mays
  Clone ID: MRT4577_16044C.1
ggaccctcggaactccggaaagctaccatcattccatccacagccccgacctccatcccaatcccatccagcatcggcggcctgcagatatcctctagcttgacccggcaaatctcgcacaggcagctgtggtgcgctactacagtactatggaggtgcacgcggcggtggggaagcggctgtggagctacgtgcgcgcggccttcttcatggcgcgcaacggcgtgctctccaacaagcgcaagctcctcctcagcgtgccgcacctcctcgccaacaggcgccgcggcaccacgcgcgccgtcgccaacctcctctcctctcaccgcggcagcaccgccgccgccgcctatgcgctgcgccgccgcgactacgagttctcctcctgcagcaacagttcggcgggcccctcgtccttctcatccagcaggcgccgcctcccctacttcccctgcctcagcgcggcggccgaggaggacgagcgccagtacgacgggtacggctccctctccctccccgtcgagcccgcgccgcccctcgccaggatcgactaccacgcctccgccgcggcatcatcgcccgggctcatgctgcggggccggggcgacggcgacgacctcgcgcctgaggacgaggaggagtacgtgtacgccttcgcggtcgtcgtcctcgtcgcccgcgctgctgctcccgggcgcggccagcggcgagttctctgtgcgtgtgtccaactactcgtccgaggacgaagcagcgggctgcgactgtgacgccgtggacgccgacgcggaggacttcatccgccgcttctacgaccagctccgccgccagaacacccacgcgctgctcccctgctacatgcagcaggaatccgtcgcctcatcctcttgatcagaaatcaggatcaaccccacgcggacacggtcggcacgaacgcacggtgtgtcattgcattgcttggtgtgcatgccatgcatgggatccggtgtacagtgtgcacagtacgtgcctaggcttttgcatgtacatgcgtaacgtgatgtgaagaacaagtcccccgttgtttttg

SEQ ID NO: 66283 - DNA, 165 bp, Zea mays
  Clone ID: MRT4577_160450C.1
ccaagacgtttctgaccaggcaagctctgacctgagcatgttactcctaccagacaagatcttctcgacactaagcatccactggcaataaaattccaaccgcccaaaatccaggtcctccgccttttttatagcgcggggttgtccaccatcgccagtacatct

SEQ ID NO: 66284 - DNA, 265 bp, Zea mays
  Clone ID: MRT4577_160451C.1
caaggtaatcaaatcaaccacctctaaccctaacataaacaggttgccggcattattacagttactttttttagaaacgtttaattaccttgtgccgacacacagtgtgggacatcggatcccagagagaaccagatgctttatcacagctacgattccttcaccgatgcatgtcggtggcagggcgatcggttcagaattggctctggttaaatgctcaatacgattcgatagtgttgttgctatccaaccgacattttgtttt

SEQ ID NO: 66285 - DNA, 409 bp, Zea mays
  Clone ID: MRT4577_160452C.1
taccctcgggcctgccggggtaataaaaaagccttgctagaacaaaccctactccggctgtccttttatccagtcgagtctgaccacggcgcagtatgatggtggcaggggtgccctacgagagcattaggggctgtgcctcttacaatacttactacgcacgtggaacagggtatcgtactacagcatccgaagagtacacgctgcagacgcaggccaggccgtcctatccggcgaaaagccgagcccgtcgcactatgcgtcgtgccgaacgatcgaaggcgttgcttggctggggagagaagccagctatgaggtatgcagaagcgagcaagacggtgactttgactttcatgtactgcccccagggtcctaaaaacgaggaagcgagtaacaaggaagcatgtga

SEQ ID NO: 66286 - DNA, 854 bp, Zea mays
  Clone ID: MRT4577_160453C.1
ggtaccctcgcgggccgtgtccgggggaaagaaggacgacggaaagtaaagaggagagagagaaaagtatgacaagaatgagaaagaaatcagacaacaaccttcttagcctcctccatatcctcctctccacttcttctccttcgccatgagttctatgctaggccagcaagaaccatagcgagagcaagcaacagctagtggcagcactcgagaacgagctaggggaggaaggtatcgacaagagaagcaaagtcatctcccttttctcgatcactttggttcttttctatacgtgtggattttggtgtttgcgagcttttgctcgcggtcgccttttctcgcttgttttcgagtgcaactgcgtgccttggatttcctgcgctccttgttgttttgttgttcttggacgagccctaatcccttgttgtttttccccccacagcttcgtgcgggttcctttgttgtttcagatcaatttgcagccagccacacactcacgcgcttcttctcccttcaattcgatctccttttgcgccttccttttggttctttcggaaaaaaaagagccagcttttctgacatcttcttgcgcttgcttgctcgctcgcatgacgtccagcagtagtgacagtctcttggttcttgcttggatagtttgggtttgttcttgccttgcctgaattggagaccgctgcttgttttggtgaagggagggtagagagaagatcgacagccctgctagtgtccaaccacccagaggcaagggcggctaccgaaagggaaaagattcccttgttcttgaccggcttctcagggacaaatctggaggcggcgatggcatccaattcatc

SEQ ID NO: 66287 - DNA, 928 bp, Zea mays
  unsure (1)..(928): unsure at all n locations
  Clone ID: MRT4577_160454C.1
gccttccactccacggttccacgtatcgcaagaattcaaataatttttgcgctctcgcgtcgatctgcttgaagcaagccccgaccggagccatggcttccgccaaggagagctatcgcgccgagctccgcgcctcctcccggcagctcggcgagcgttgcctctactccgccgctaaatgggccgccgagctgctcgtcggcgtagagctggatgggaccccggtcccttcggccgcgacggactccccatcctcctcgtccgcggcctccgcggggcggctattgcaccttcaccgtagcgggggttccagcttccgccaccgaccccgccccggcggcggcagtagctcggaggccgggaccccgctcggtggcgtgtcatacgtcagcacgcccatccccgacgacgacgcgttcgattcgggcggcgacaaatacctgctggccaagacctatttcgactgtcgggagtaccgccgcgccgcgcacgtgctgcagaaccaggttgggcgtaaggcagtgttcctgcgatgctacgcgctctacatggctggagagaagcgaaaagaggcagagatgatagagcttgaaggatcgttgggggtgagtaatgctgttaatcaggaactagttgctttggagaaagagctctcaacacaccgaagaactggctctattgattcatttggactctacttgtatggcattgttctacgtgataaaggatgtgaaggtctagctagaacaatcttagtagaatctgtcaatacttatccttggaactggagtgcttggtcagagttacaatctttatgcaccagcagtgacattttaaacaacttaaatctgaagaatcactggatgaaagatttctttcttgctagtgcatatttggaactttaaaatccatgaaaaaactcttnaaa

SEQ ID NO: 66288 - DNA, 348 bp, Zea mays
  Clone ID: MRT4577_160455C.1
ggggggcaaagcccccctatttttcgaaaccctcactctagcaaattccacaaacagaagttaaaagggacccaactatgcctgggtagcattttctatgttgcaggaaaaaaggatacattcccagttggcgaggtcgacccagcttgctatttcccagcttggcgcctgcaaaaccaaaaatcactcccatgctttaagggcaccaccccccccaattgccttgatgatagactgcttactgttgcgcgcactgtattttttgggctaggcccggaatcccgttgccctccccggacgctttctgagaaccgttagctttcttcctgcgcatcctttgctccatgg

SEQ ID NO: 66289 - DNA, 168 bp, Zea mays
  unsure (1)..(168): unsure at all n locations
  Clone ID: MRT4577_160456C.1
cggtccggaataccgagtcaccacgcgtcgtcatttttggctttggtcggngcccgatactccgactgcccgatgtactgaatcatccaagggtgggtgtgcaccgccgtgaggaacatggagcacaactgccgaaaccacgcctgttagaactactcgctcctggac

SEQ ID NO: 66290 - DNA, 434 bp, Zea mays
  Clone ID: MRT4577_160457C.1
tcggtgtgcatgcatgcatccatacgggctattgggaggatgggggaacaatcaggtcattctttgatgcaaacttggcccttactgagccatcttacaagttcgattggtatgagcccaaaacacctttcttcactgctcgcggctgcttgcctgcatcgctgttgggcaagtgctacattaacgaggcatctatctccaatggttgcttaccgagagaaggcctcgtttagcattctgcgactggagcctgctcacttgccaaccctggatgtgaactcgaatacttcaagatgaccggagcggccacccttgaaactgaccaagaagcttcaaagctactgctattctggtgcaggttccctagttggtgatacgcaaggaacactaccataacgaactgtcttattgacatgacagctccgattgggaag

SEQ ID NO: 66291 - DNA, 518 bp, Zea mays
  Clone ID: MRT4577_160458C.1
taggggccttttttttttttttttttcggattacgatttgacttaaataaataaggtttaatgttatcagttatctatcacattacaaatatataaatcaaacaacacctcaatgtaacttaaacaatactacaattatgaattgacagcatctaagagaagcttggagtttggaaacaaagatgccggagcatgattttcatcgtagtgttcatccacaagcttcatcggaactatatttccgcaatgttcgcacttctgaaggttcctagcgcagtgcgcgctgtgcaatgcaatgtttgaagatggaatctcccgctgacagtgcgggcaggtggagatggagatggcggggtcggagtcccggtcgccatggagcggtggtcggagatccacgtctcgcctgtgccgagtcggggaatttcgcggcggcgatggtgcggagcggagcggagcagaggatggagcctggaggcgccagaaacggaataggatttaggagcccggcccggcccgcc

SEQ ID NO: 66292 - DNA, 371 bp, Zea mays
  Clone ID: MRT4577_160459C.1
gttcggatcgctctctctctcttcctgttctcccccttatcctcccgtcggctgctccgcttcaagatgcagatctttgtgatatccctgtccggcttgactatcaccctcgaggtggtgtcgtctgacaccattgtcttcgttttggccatgatccaggtcttggtgggcttccccccagtcctgctgcggctcatcttcgctggcatactgcttgaggacgggcgctcgcttgctgtcttcatcatcctgttagtgtgctccctccaccttgtgctccgcctcaagggtggcatgcagatctttgtgtaaaccctgtccggcttgactatcaccctcgatgtggagtcctctgacaccattgtcaacgt

SEQ ID NO: 66293 - DNA, 253 bp, Zea mays
  Clone ID: MRT4577_16045C.1
attcggctcgagcgaccccctacactgtttttgccaagttgacaagcatgacatctggggcgaaatgaccggaaaaatgaccacggcctcctctgtcaggggcactaaaaagatggaccagggtggatctgttgtaataacgaaccatccatactagtaagatgacgaagaggctactgagacactattcgtggagaaagacgcactggagcgttatatctgatacactaggcattcagacggaaaatgttat

SEQ ID NO: 66294 - DNA, 349 bp, Zea mays
  Clone ID: MRT4577_160460C.1
gggaaatgttcttttttttttttggggaggcccaaccttaggcaaaaaatttttttttggacttttacttcttagaaattttaaagagggcccccccaatggtggggtgttggttgaatgcttttgggtttgtcaaagcaagttggttggatgggggcaattgttgccgttgttagagggggcccgcgtttggggccccgtgcttgttggacggccaccattgtggttgtttttagaagggtgcaggggttccacccgcttgctggcttaatgggtgttgttgttggtgctgttaatttgccggggagttcaaagctgtcagttggttgaatgggcgaaattgctgggg

SEQ ID NO: 66295 - DNA, 317 bp, Zea mays
  Clone ID: MRT4577_160461C.1
cagactatctgagactattcaggcccgaacgtttgaggattcagagaattctcataagtcaactaccgtgaccttggccagcataaaggagtccttaggcatggacgttgaccagaaaagtttagagcaacttatcaagataaatggctggtggaccaaaagcagctgggcatttctgaatgaaccgccagtgatagaagctgcttccaataagtatgcatcacagtttcacgtggccaacttggggtctacgagacttaaccccggagatggaattaatgcttgatatgagtttttttcacgttttatagtttcgt

SEQ ID NO: 66296 - DNA, 2410 bp, Zea mays
  Clone ID: MRT4577_160462C.1
tcctcggtgtcgttacccccaccatggccatcgtgctgctggcccttctcctcttcccgtccgcctatgcccaaccatggtcagtttgcggcaacacgggcaactacacggcggccagcacctaccaggacaacctcagccagctcgcggcaagccttcccaagaaagcctcttcgaacacgagtcccctcttcgccacgggtaccgcgggtgcagtgccggacctggtgtacgctcttgcactctgccgtggggacatcaacgcctccgcctgcaaggactgcgtcaccataggcttcgaggacgcgcagcagctctgcgcgttcaacaaggaagccaccgtgtactacgatagctgcctcgtcagcttctccaacgaagacttcctgtcgactaccgtcaacggcaacgagaacgaggtcaccgtcctcatggacgcccagaacttcacggagagcgcggactacatcaggctcctcttgttcactctgctgaacgacacgtccgagtccgcgatcaacagcatcaggaggttcacgaccgcgcggatggacattagctccctgccgacgatttactgcgctgtgcagtgcacgcctgacctcaccgccgacgagtgcgccgcctgtttgcaagacttcccgcaggtgacgctccagtacctcgacgggcagcgaggaggtcgacttctcggggtgcggtgtaacatgaggtacgagatctacaaattttaccaaggggaccccatgcttcgtattatctctttggcttcggcagtgccaacgatcggtaaaacccctcccggaacaccagtcacggtgtatccgcagcctccacctgcagcgccaccagcgccgcagatgataaccacgcctatcgcagcacaagaagagacaggacgcaaaggtaaactgtggattattggtatagctattccactggtagcaattctgctatgttcaacctttacctttctgtggctgaggaggccaaagaaaggagtgctgagttcgcaggacagagctggtgctaataggattgaagaaaacgccttggtttggacaattgaacagaagagttcagagtttactctttttgacctttctgagttactggaggccacaaaatcctttgcagaagaaaatagacttggacagggaggtttcggccctgtgtacaaggggcaattatcagatggtcaggattcggaattgcagttaaaaggcttgcttcgcattcaggacagggtttcacggagttcaggaatgaagttgaacttatagctaagctacaacacacaaatttggttaggctcttgggatgctgcattcaagccgaggaaaaaattttggtgtatgaatatttgccgaataaaagcctggacttctttatctttgatgaaagacaaagcagtttgcttaattggtataaacggcgtgccataattgaaggcgtagcgcaaggtctcctgtacctgcacaagcactctcggctgcgcgtggtacatagagaccttaaagctagtaacattctcttggaccaggatatggaccctaaaatttcagattttgggttggcaagaatctgtagctccaatgatgctgaaggaaacacaaagagggtagtcggaacatatggctacatgtctccggagtatgcctctgaaggcatctactcggtcaaatctgatgtgttcagctttggtgttctacttcttgagatccttagcgcgaaaaggaattcaggttttcaccaatatggagactttcttaaccttctcggatatacatggcacctgtgggagataggaagatggcttgatcttgtagaagcatccatttcgaaagagatgcatgaagcagaggctaggcggtacattaacatcgcactaatgtgcgtccaagaaaatgcggacgatcggcccaccatgtccgacgtagttgctgcgctaaatagtgagagtgtggttctacctgagccaaagcatccggcttacttcaacctcagagtatctaaatctgtggaatcagcagttgttgttgaggcgtgcagtctgaatgagatgaccatcacccaagatccccaaggcagataggtcttccacctgatttcgtttcgctggtcattattgtacatgataatgtggacgtgaatggctatccttgttccagctttgaaactaatcattatggtcttcatagtgtcttattttaaggtgttgctttttcaatgccttagtctaagttattttagtatcctataaaatataaatacaaacaatatcagaacacatgagtttatcaacattattagcttgttacctcttaattagtattgggtgatcaagcaattctaatatgttaggattacatttttatcttgcttaatataatgatttcagtggtcaaaa

SEQ ID NO: 66297 - DNA, 412 bp, Zea mays
  Clone ID: MRT4577_160463C.1
aatagttctagaacgcgagcggcccttttttttttttttttttttttttttttttttttttttttttttttttttttttttttttttttttttttttaaaaaaaatggttttaattttattgttgtttttttttttttttattttttttttaaaaaaaaaaccccaacttcaataagggggggggggggactttaagtagggtcttaactttttaacccaccctaaaaaggtaagctctcaggacctttactggcgatcctaaatgttgaagaaagagctgaccaacgaggagagggaacaagcctttcgtcgggctcctgatcgtcaagccttttgtccgggacccctgtgtccacatctttgtgtccgccggcagtagaatcgctggggggtgcatgcttatgcgccagc

SEQ ID NO: 66298 - DNA, 240 bp, Zea mays
  Clone ID: MRT4577_160464C.1
aatcgggggaaaataatcatctcatctccttcctcagtctgggggacccacccccaaaaaaagaaaaaaagcgtttcgacttcccctcggcaacccaggaccaaattattttttaaaaccttaacgacgaccaccaacaacgaccaagccccccccatgataacttaacttaacttgagagtttttttacggccccaaccaaatttgaaaaaggcggcccctcccgatctaaaactagtc

SEQ ID NO: 66299 - DNA, 1314 bp, Zea mays
  Clone ID: MRT4577_160465C.1
ctgttatttggctgatatatttcaaacattttctagaatttggtttggactgaattatcgagattatgtgctcagacgtgttcatgcgtgttgtgaggggtactttcgatggaactaactcattgtgaagattgccacatgtaaattttattgccttggaaattgttttcaagaattattctttggtttattcagattggtccggatacatataataatgtttacaaagcccgtgatcttgaaaatgagaagattgtttctttgaagaaagtgtgatttgataatttgaaacctgagagcgtgaaatttatggcaagggaaattctcattttgaaaattgttgcttagatttttaaaagtgtattttgttataggacttccagtaacttgagttacatgattccatatataccccagtttagatgctacttcaaacatctatatatttttggactgaagaggtaatggtttgcaattctattttttattaaatatgactgatagtacatatggtaccggagctgaaactttgtacattgcaacctagaggcatgcaatgttcaaccagaacgcatgtggacacaaatgactgttgaaacatgattatattttaggagtggagctgtctatatgaagagtgtaggtagaggcaattggctaatagtgtacatgtttattttacaggatcgtagtaccagggttcaaagatgtgcatttgacagggcagttactgacgatcaacatgatgagaggtggtgagttccattgttggtttaagctggagcagcttttaaagtccggtaaggtctctatgtgttacccttttttaatttcatttcatgagaagagattattatccgttccttgaattgtatttggtggtactcatgaataaatgttttgacatggttgttcgtggataaggcgcgagcgaggagggaccatggacatcaccagggcggtataagacctggcgatttcggcgccatcccagtcttcccttccagccgctccagctatcaggctgtgcagcagtaaggccggcgctcgaacaagatcggttggcgttggaacctccgatgtgtctcggtcccacgctttgtccgggaggggatgtgtagcatacgctatgctatgctgtgctatgctatgacctatgtacagggacaggaaggcagcagcagcagccgtgtagagactctgaaggtgaggagagggggaggtgatttgtttattggcggcgattcgagtgtctcggtgaccaaactcgtgtatcgtcaggtggttttgagatgttcgctgcaactgcaatgc

SEQ ID NO: 66300 - DNA, 291 bp, Zea mays
  Clone ID: MRT4577_160466C.1
aaagacgaggctgtgtatcaggccatccacgaagggatccagagggtgaacgcgaacgcggcagcccggtgctaccacatccagaagtgggccattctcgaacgtgacttctccatttcaggtggagaactgggacccaccatgaagttgaaacggctcacggttctggagaagtacaaagatatcattgattccttttatcaagagcaaaaacagtagtcaggagccatgcttgtggcttctgctgaagaccagcctggcaagttcctccacagggctcctgacaaactg

SEQ ID NO: 66301 - DNA, 294 bp, Zea mays
  Clone ID: MRT4577_160467C.1
gtctgttgtcttctatcccgactagccggaccggtcagcttctgactacacatagaggactcagctggcaaagccgcgcagacgaagccatggcaacagacgtccgtcgcccgtgccctagctcgcccacattacagccagtcgcgctcctgttcacatggcgccagctgaccagcattatcgcctgcagctcggccatagccgggcaccgtgcacagcatgcgtcaaacaccgtcgccgatgagcacctctcggcttccctggcttcatggccacccactaccctctctatca

SEQ ID NO: 66302 - DNA, 1707 bp, Zea mays
  Clone ID: MRT4577_160468C.1
aattcggcacgtgcggcacttctcccctcacaaacacataccacctcccgcttctcccctcccggtcgacggtccgctccctcccaaaaacccacagcccgctccgccgctccctcccaaaacccacagcccgctccggcgctccctcacaaaaacctaccacctgccactttcactccaccacacacccacacccccgcgccatggcctctcctcccccgacctccctctcctccccccacctcatccatctccgcctccaacccctacccagcgtcccgccgctccacctcactaccctccccttcccgcgctccctcccgctccacctccactcgctccgcctcaaccgaccccacctccctcccctaccgctcgcctcttccggcagcggaagcgacatcaccggaagcggcggcgaggacgaccttcctccctcgggcgggggcggcggagggggaggaggcgagggcgatggtgagggcgagggcgacggcagcgagggcgactcggtcaacaggagggaggccctgtttgttctggcgcaactcggacggaagctcgagagcctgccggccgacctcgccgcggccgtggagggcggccgcatcccgggcgagatcgtgcggcggttcgtggacctcgaggcctcgccggtgttcaggtggcttctgcagttcggtggcttcaaggagcgcctcctcgccgacgacctcttcctcaccaaggtcgccatagagtgcggcgttggcatcttcactaagactgctgcagagtatgagaaaaggagggagaactttgtcaaagagcttgactttgtgattgcagatgtggtcatggcaatagttgcagattttatgcttgtatggcttcctgctccaaccgtgtctttacagccaccactagcgatgaattctggagccattgctaagttcttctacaactgcccagataatgccttccaggttgctttgtctgggacatcatactcacttttgcagagagtaggagcaattttgaggaatggtgcaaagctttttgctgtcggaactagtgcctctctgattggcactggtgtgaccaatgcactgataaaagcaaggcaggctgccagcaaggattttgccggtgaagttgagaatattccaattttatcaactagcgttgcatatggtgtgtacatggcagtttccagtaacctcaggtaccaggttttagctggagtgattgaacagcggatgctcgagccactactgcaccagcacaaactagtattgagtgcagcatgttttgcagttcggacagggaatacgtttttgggttctctactgtggatcgactatgccaggtggataggcgtacagtaggctcaagcatgggtacacaaatgcagttgctcggagttccagcaatatgggttcttcgtgattttatattaccacgcttcctccaactggcaagtactcgtttgcttcatgggagactcttaggacagattttggtatcattctttaaacaatgccttgaggaaagcgtgatttatcgaaattattcccgcaagcaagagagtgaatttgttttgagggcttaaggttgtgttgtgcgtgttggattggattgattaaaatcgtagtttcgtacagttttgtcaaaaaaaaaaaaaaaaaaaaaacgtgggcggacgcgtgggcggacgcgtggatacaa

SEQ ID NO: 66303 - DNA, 771 bp, Zea mays
  unsure (1)..(771): unsure at all n locations
  Clone ID: MRT4577_160469C.1
ccctgtgtcgccggctaaaacgctactccagttagctcagcctccacatgtccagcagcaagcttacccacaatctcaggtctatcctcaacagacacatcatatgcactcccagaatactacatatgcacagcagcaaacccaaggtgctttgatgcaacctgtacatgtgtcccaccaacaaacacatgtttctcatcatcctgcaccgatgcgtcctccattgtcaggccatcagccagctttgcagcatcctcaggcccagggaattcaacatacatcacaacatgaaaaacatattgggtttcatgctcagtggccaacaatgtattccaacattccttcccaagcaccaccacagggattgtctgtgcactcatctgtttcctcacaatcagttcaatcataccagcaaggaatgtcttcatcacaacagatgcattcccaacctggtcagccatatacacaacagcatgttactggcaatactggacaacatgttcaaacttctgctggcagacctatggcccatcttgcaccaacacagcaatttcagcagcaacatccagcaatgcttagaactgagtcacctgctgctgggcaccctattgggcagggtccttttagatcttgaaaaacatacttcaaatcagggggagttggataatgcaactattgctngctgtcggtgaaaaaaaaatagtggtcctgaagtcagttgtcatgagaccttacaagtcacaattgggtgatgaaaacatgaacagcgac

SEQ ID NO: 66304 - DNA, 250 bp, Zea mays
  unsure (1)..(250): unsure at all n locations
  Clone ID: MRT4577_16046C.1
cccggcancactcagcaccagcttcgctttatggccacccacgcagctctcgccgcctccggcatccccgacaacgccccactgcacagcatatcggccgcgtcatccatgcacggcgtgcagaggctggacttctccgacttctccaggctcaagcctgagtcgtgctccgtgagcgctgccgcgcgggaagcgtccttctccgacatccttggcgcgcagctcgtctccaatgccacacgagagaacg

SEQ ID NO: 66305 - DNA, 641 bp, Zea mays
  Clone ID: MRT4577_160470C.1
tcgcccctctatcccgtcatctctttcctccccccctcggcgcagcaacagaggtacgagatggcggcggtggcgacgacgacggcggtccacgggagccaggcggccggcgcgcagaggctgctgcttctcctcgctctcgtgattgaagctgtaaacaatggagcagatatcttcactgaagaccagcaagaaattatcaagcaatttggcagaatcaaatccgagactgttcctgagaacaaggatgcagggtctgatgacgatgatgacgatgatgaagatgaggatgatgaaactggtgatgctgatgatgatgatgccgatgctggagaggacttctcgggtgaagaaggcgaggacgatgacgaggatgatgaccctgaggcgaacggcgacgacgctggcgcggggagcgatgatgatgatggtgacgacgacgatgatgatggtgaagacggcgaggacgacgatgatgatgacgaggatgaggatgaggaggacgaggaagatgaggaccagccaccggccaagaagaagaaatgatctgccttcctgctgtcagtgtttcagtccgttagtttatctgctgtctagatgttgattgagcgggtctggtacacaccgacctatgtagcttc

SEQ ID NO: 66306 - DNA, 329 bp, Zea mays
  unsure (1)..(329): unsure at all n locations
  Clone ID: MRT4577_160471C.1
aattcccgggctcgcctctagcaggtatcctaagtcttacgtaccgcgctgccagtgcgacgtcatagcgtctttctattagtgtcancctaatattcaagttgacgttggctcgtcgtttatacaaactgtccgtgacttggaggaaaactcctggcgattaccccaagcttaattcagccttgctagacacatctccctcttatcgcccagtctgtgcgtagatagacgacagaggctccgcacacgtatcgcctctatcccaactaggttgngccagccatgaatgggcgatatgggaacgcgccactcgtagcggctgcatttac

SEQ ID NO: 66307 - DNA, 379 bp, Zea mays
  Clone ID: MRT4577_160472C.1
attaactattgaagaacccaccgtgtattacatattcatgaaaagaacaggcaatgcacagtacggatcaaccaatgggctagttatcaagcagagcatgctcacacataagcactcatgtttgaccatttacgatacatcactgaacaaccaaatcgacctttacagagctgcgacactaccctttctaggtagagaggggagtcctttccatgccgatggctatggtcagggcagtccctcatctgtacagactgcccgttcatcagaccagacacccagggcttcacctgaggttatacggttataaccaaagcttaaggcttttaacccaggcagggattcacagacacatggttcatgtaggagaagcatgtcg

SEQ ID NO: 66308 - DNA, 242 bp, Zea mays
  Clone ID: MRT4577_160473C.1
gccgcggcgcttgccccacctctctcccgcccggtagtagcctcgtcgtcggtggccgacatacgggtcgtgtccttcgtcgggatggtgctcttcgtcgccgatttcctcctgtccgcctgccacgagtttaatgaattcggtactgatggtggtccagcagctaaggcccttcgggccaaattcaacgtgtcgtcaaaactgtaactgctcatctgggagtagctgtgccacacattgag

SEQ ID NO: 66309 - DNA, 909 bp, Zea mays
  Clone ID: MRT4577_160474C.1
gcccggggttatctataattggacatctggtccacagggattgcttgcgtttttttgggctgggctctaaagttgctatgtttcggtactcatctgttgagatctacactacctgcaaaccacaacctactctccagttcgtcaaccccatcagacaggattggtttgaaggacaaaggaggaatgttcatgctaaaggtatggcgcttttctctggggttgcaagatttctacagaacttgaagaatgaacatcctgatgcaataacgttagcaatccattgaggccttgcattccctgttaaggacttcactgaactggaagagttgttgataaaagaaaaggcccagtttgagagttctgtggacaaggccactgatcaaaatggggtaccaacctcttctgtgcatgaactgttgaatataaattggtactatcaggaccttctacttgagctttacatttgggaccggccgtctacatcaattattctattgtaaatctgtcaaactagaaagtgtttctaattacaagaatcttgctgatactgttgatgggatctgtggtgataaattcggtgttgataagaaaattgatgaatttacatctgatgaaattacggcagctttgggggtatccagtaccacagagtctgcaagtaacaaacttgatcatcaatcaggtgacaccgcagcactcttacttcataaaagccaggaagctgggcactcggaatttccttgcaatggaggtagtaaagctgaagaatcttctattgctcatggtcaaataaaggtagatggtacaacagaaaccacaaatgatccttgttttgaaatatccaatgatatggaggtccaggccaatcttacagtagcagatccaatacccatggaacaggagcgttgt

SEQ ID NO: 66310 - DNA, 320 bp, Zea mays
  unsure (1)..(320): unsure at all n locations
  Clone ID: MRT4577_160475C.1
agcgggccgagaggaggggtgcttgtccggttcgcgccggatttagtgggaggttctggggggaggggccggggaacctgcccggggagttcagcgtggcgtctgggggggacaacattgggttgtggggggggggggagagattctgtncgcgggcgggatgttggtggggagcgtacgcggggcgtgtcgccgcgcgcggggggcagtgtggccggcggtgagggggccgtgctgcggggttgcgccggggagcccgnggggcttgggcgggctctgcggccctgccgcgggggggggggttcccgccgggggggggg

SEQ ID NO: 66311 - DNA, 1440 bp, Zea mays
  Clone ID: MRT4577_160476C.1
gttttctagtgtttgtgtttgtagttcacaggatgcgaagagaattggaccaaggcaatgaggatgcaacacctcaaagaagacataaaaagagcatagaagtccaagactcaagaacaaagaagcccgaagaaacagcgaagaaatccaagaaagggctgtcagccagcgccaggtggcgcaccggacatcggtgtccggtgtgcaccggactgtccggtgaggcaccggacagtctgcgcagagaggccgcagaaaggcgctctctggctgtagcaccggactgtccggtgtgcaccggactgtccggtgtgccaacgggcagaaaggcaacggtcggatccaacggtcgactgctacaagcgccaacggtcggctgacgtggcgtgcaccggacatctactgttcagtgtccggtggtgcaccggactgtccggtgcacccgacgacagaaagctgctgctttctgtccaacggctagttgggggtgtggaggctataaataccaccccaaccggccattctctagtgtgagagcccaagcaacattccaatacacatagtgcatatttccaagtgctcaaacacccaagtacttaatagaatcactcggtgattagcgtaggtgctttgcgaagtgcttaggttagttagaccgctttagcgcttgctctaggtgaatcctagttagttgagtgagtttagataaacctcacaacccctcggctcttgcgtgagtcgttgtaattgtaccgagtggggcgagagtcttgcgagaccgtggcaaccgcgtttgtgccacggccgccaccgtgtaccggagggaacgaggcccgcggcgtttcggccggaagctcgatagtggagacggcggggagcgtccgagaggagccggaagcggagcaccacttgcgcgtggagaaggcccgcggctctctacggagttactcgaccgaggtgcttggccctcgcgtgggcttccctttgcgtaggggcaccaacgaggattagtcgggaccttgcgcggttccggatacctcggtaaaaataccggcgtcatccacgagagtttgcttctctacttagctctttacattccgcatttatattaagcatttaagtttcaatcttgttgtcatacttatttagtgtagattgaaacttagcctttgcggtagagatagcaacacttagacaaaacctagtttgcacattctagttttgattcttgcataggttttgctctagggaattaattgtggccaagtttagtaaaagttttagaagtcctaattcacccccccccctcttaggcgtcacccgtttccttcaattggtatcagagcctggtttggctcatttgaaactttttagcttcaccgctaaaagagccgacgctttttaaaggaagggatggatacccatacgccaccacacttc

SEQ ID NO: 66312 - DNA, 1891 bp, Zea mays
  unsure (1)..(1891): unsure at all n locations
  Clone ID: MRT4577_160477C.1
aagaagacataaaaagatgcatagaagtccaatactcaagaacaaagaagcccgaagaaatcagcgaagaaatccaagataagggctgtcagccagcgcctggtggcgcaccggacatcggtgtccggtgtgcaccggactgtccggtgaggcaccggacagtctgcgtagagaggccgcagacaggcgctctctggctgtagcaccggactgtccggtgtgccaacgggcagacggcaacggtcggatccaacggtcgactgctacaggcgccaacggtcggctgacgtggcgtgcaccggacatctactgtgcagtgtccggtggtgcaccggactgtccggtgcacccgacgacagaaagctgccgctttctgtccaacggctagttgggggtgtggaggctataaataccaccccaaccggtcattctcaagtgtgagagcccaagcaacataccaagacacatagtgcatatttctaagagctcaaacacccaagtgcttaatagaatcactcggtgattagcgtaggtgctttgcaaagtgcttaggttagttagaccgctttagcgcttgctctaggtgaaccctatattgttgagtgagtttagaaaaaccacacaacccctcggctcttgcgtgagtcgttgtaattgtaccgagtggtgcgagagtcttgcgagaccgtgacaaccgtgtttgtgtcacggccgccaccgtgtacggagggaacgaggcccgcggcgtttcggccggaagctcgatagtggagacggcggggagcgtccgagaggagccggaagcggagcaccacttgcgtgtggagaaggcccgtggctctctacggagttactcgaccgaaggtgcttggccctcgcgtgggcttccctttgcgtaggggcaccaacgaggattagtcggaaccttgcgtggttccggatacctcggtaaaaataccggcgtcttccacgagagtttgcatctctactttgctctttaagtttccgcatttatattaagcatttaagtttcaatcttgtattcattcatatctagtgtagattgaaacttagcctttgcggtagagatagcaacacttagacaaaacctagtttgcacattctagttttgattacttgcataggttttgctctagggatttaattgtggcctagtttagtaaaagttttagaagtcctaattcaccccccccctcttaggcgtcacccgtttactacactagggttataaatacaagtgatgccaccttctagggtttagggtcatttgcctttatctctagtctattttctactgccgtgaaaactttgcctctacttccacaacctaatttcgttgtgctccaacctaaattcctccgcccaagtgtgggaggccatggtatcgtcacatgctcacgggttcgagaaatctattatcgaggcaaaggatttagcatcatccaatggaagcttccaaacaagataaaacccttaattatgtatgttgctgatcaaatagtagtttttatcaataattctttcatgggttggggatcttagcatctgatttcttaagggagctcttcgaatattacaagatagagttgattcatctaagccccaattctatactccacatcgccatattcgctcatttgtgtgaggccttcttaggaactccaccattgttttctttattccaatatttgtttttctttgtctccatcctaataaggaaaaatcatccatagtgagtggtgtttggtgtgcaattgagggccagcagggtgtgcctagattgccccttcaaagctttctaaaaaacatgacacanaaatggtttttcattggcaaccataccaccaaaattatgagttccttggtcagc

SEQ ID NO: 66313 - DNA, 440 bp, Zea mays
  Clone ID: MRT4577_160478C.1
gtgtcgcaacagacgcccgcggcgaagactcgctgcgcggactcagtgccgcatctacatcgcgactgagcacttctgcatgaaactgccgatgagacggctgcagcacatgcgtagtagcatgtgcatagccgatgcgactgggagacctcccgctgcaggcctgcaccggttgcgctgcacctctaggagaacaacttgagacgagctgtctgtacctgagatgccaagacccgtatgcgacgtgccgcactgcgtctggtagatcgcctctgggacgtcctctccgggtaacacttcgagggggccagccctccgtcgcgcgccgcgcgccgcgcgcaccccctggctggcatgccctgactggaatgcgccgagcatgaacccctgagagtgtgcacctgcaatgtcgtggctgctatgctatgatcgctcgctat

SEQ ID NO: 66314 - DNA, 1142 bp, Zea mays
  unsure (1)..(1142): unsure at all n locations
  Clone ID: MRT4577_160479C.1
gtatgcactatgtgtattggaatgttgcttgggctctcacacatgagaatggccggttggggtggtatttatagcctccacaccctcaactagccgttggacagaaagcagcagctttctgtcgtcgggtgcaccggactgtccggtgcaccaccggacactgaacagtagatgtctggtgcacgccacgtcagccgaccgttggcgcctgtagcagtcgacncgttggatccgaaccgtgcctttctgcccgttggcacaccggnacagtccggtgcacaccggacagaccggtgctacagccagagagcgcctgtctgtggcctctctgcgcagactgtccggtgcctcaccggacagtccggtgcacaccggacaccaatgtccggtgcgccaccaggcgctggctgacagcccttatcttggatttctttgctgatttcttcgggcttcttggttcttgagtattggactcctatgcatctttttatgtcttcttttgaggtgttgcatcctcattgccttggtccaattctcttcgcatcctgtgaactacaaacacaaacactagaaaacttattagttcacggattgtgttgttcatcaaacaccaaaactcaattagccaaatggcccggggtccattttccttacacctcctccctcccttcttccatttgtgtcgcgcgtgactaagtcaccaaccattgctattgcctaaatcctatcacttggtctaggactttggtggatatcgacctccacctttcctgacaacctagagcaaggtaataggtcaattttacactttcacctttcatttgagaaagaatgtcttcaaaaaaggtgttgctttcctcaattacagagtccgagtaaatcttgcatcatgtgacttacacacataaacactagaaaacttattagctcatggattgtgttgttcatcaaacaccaaaactcaattagccaaatggcccggggtccattttccttacaagcccaatgtttcatattttagagtctttgagagtaaatgctttattcttattaaaagaggtagaagttctaaatttgctcataaggctgtagaaggccggacgcgtttgtggcgcgtggggccgacgggaagattccgtacc

SEQ ID NO: 66315 - DNA, 263 bp, Zea mays
  Clone ID: MRT4577_16047C.1
gccacacgcaacagacaagagcggctttctattttagaactcgacaaccttaaggggccgatcgttgcccttgctttactggcgctcgctgcgagcgccggcttcagtacaagccgcagctgtggctgtgcacacacacgtttatataccgcctccgttctatatgccgcctacagtctatctgccgccgcatcagcacccgcagccatggcaataccccactcaaccaccgcagctaagcccgggccagcagtttggatcct

SEQ ID NO: 66316 - DNA, 144 bp, Zea mays
  Clone ID: MRT4577_160480C.1
tcgcagtccgctatgttctatgatcgtcgagcagagccagctctagagagatcgcaaagcttatcgtatcgcgtagcatagcgacagtcattatgcttcttctatagtagtcatcctaatattcatattcactaggcgcagtca

SEQ ID NO: 66317 - DNA, 444 bp, Zea mays
  Clone ID: MRT4577_160481C.1
tggcttggaacctttgggctgatttatgtgcttgggtatggtggtgtagggtatggatgatacggatcataaggagtttttgttggtgttgtctcctgagtttggggagtctaagcttcggcttcctcattgtgttggtactgttgagcctgctgttattccttctccttctcatactcttacttctattgctacgggtgctcttaagcttattcttaagcgtgttattgctggtacttagggtactgttcggcttcctggtggtacgactcctgtttctgctcatcgtattgctggtactcttggtgggtatactaatttggtggcgattcctgggtcgccttcggtgaggaagccgctttctattagggtggggccccatactactacgtagcgttcgcgtgttacccgtggtgtgggtgcggctaacgggccctagtaggg

SEQ ID NO: 66318 - DNA, 132 bp, Zea mays
  Clone ID: MRT4577_160482C.1
gctttgttcgactttgatctcgctctgacgctctcgctcgcaactcacctctccctctccactcgcacctcgccgccgtctacccgtctgctgtcctagccccgcttctgccgcagccatgaacccttccat

SEQ ID NO: 66319 - DNA, 331 bp, Zea mays
  Clone ID: MRT4577_160483C.1
cgcgtccgaggcggaccatcattaaggccgacttcccgccctactgcaccgactttcataaccacataggggctttaagggtctgcaactgcaggatacccaccgactttattgtcttccgcctcggcattaaggagcttttgccgccctacctctcctccgagccgttcgacaagcacgacctcttcaccggcgtcagcttctcgtccggcggcacgggctttgacccgtttaccccgcagattgccttcgtgaactcacttccggaccagctcaccattgttcacgactacctgtgcaaaggtgcccgaacccctccgggaccccaggg

SEQ ID NO: 66320 - DNA, 452 bp, Zea mays
  Clone ID: MRT4577_160484C.1
tggacctttgggctgatttatgtgcttgtatgaatgctggtgtggttagtctgatgcatattgcggaggcgaatgcgttggtgctggcgatagcgggggcgaatttgttgaagtcgatccctaaggtgtcggaagaggcttcgaatcatctcgctataactaagctggttaatggttaggtgtccattggtttcgctgagggggagtctaagcggccgcttggtaagcatgctgcgtgtagcttgacttcagctatcaatgaacttgggtttctattggtggtcatatacagattgcaatttctgacagtagtcggtaaacgttcatccaccatgcatacggcaatgaccagcctgttacacgacttagtgtccgaaactgacgggaccgttagtcctacctatcccagacctggcggatcaaaccaagtacgtagacgtagagtaaacctt

SEQ ID NO: 66321 - DNA, 464 bp, Zea mays
  Clone ID: MRT4577_160485C.1
ttttgttgataaatgaatgattataattttgccccggaatcagggatattattttggggtttgtttttttttttaagggagaacatccgcccccactctccagatactcaacagtcaatgcgcgaatatgaaatgcgcatgaagtccgaaacaggacggcacaaaaaaaagaccaccccccccccctcaaacgaatcacacccaacaaaaaggggaaacccccggggcgcccccccccaatatacgacactggggagaaaaaaaaggcaacaagccccatcacccgccggcgtacaaacaaatgtttactaactggaaggaggacccccccccctatggggcacttaattctgcctaccatgagcggtcagacccgccgcggccccggcagccctagggagagcatcaaacaacaccaagggggcggcggagcccccgctgctggagaccatgccatggaccac

SEQ ID NO: 66322 - DNA, 330 bp, Zea mays
  Clone ID: MRT4577_160486C.1
aaaaacgagaacgggtaaatacctttcaactatatggacagccatcccaatcataagttcacttgacactctaagaattacaaacaaccttttccttctcacatgtccatggtgtgtctgaaggtaccagacacatggcccatgatcaacagccaatatacagggaagctcaaagggcaccacctaaaccggggtaaaaactgatgctattaacattatatctgccaaatcgggcgcccaaacaaaaaaaataaacgttcactttgtgcatcagagaaaattcacaaatattgtttttcaacaacgttcttagattagacgaacttcata

SEQ ID NO: 66323 - DNA, 478 bp, Zea mays
  Clone ID: MRT4577_160487C.1
gcacgagtggtgggctcgttcgtttcgagatccgtgctacaacagagatggccaagatttcctctggtcggattgcagtggcttcgacagatgtccacggccctgggaatataaatcctggatctccgctgaagctataaatccatgatgagagcacctccttccccatctctgctccttggatcgatcatcaccgccgtgagactccgccgcacagaagagggtcgatagccgaaagccaccgccaccgtcgaattctcatccacgccaccactcgagacccgattgctcacctgtgatcttcaccgtgctggtggggaaattaccgaagccttaccaaccaggattaggcgcagtggccccaggaattcctcgttgtagctcgtgcttcgtcgcggacctgtgtgacatcgtggtcagcacctcaacccacttcaataccggtcaagaacaagtaccactggatgaggcacatgaa

SEQ ID NO: 66324 - DNA, 292 bp, Zea mays
  Clone ID: MRT4577_160488C.1
gccaaaaacatggttgctttcaatgaaattcagtttcgccattgggacagtctttcatgtgcccccgttaaattttaaaaaaggggaaaaaccccaagcttggtttaacgcagagatggattatccgcgtaacctccggctcaccgggtgcagctacgaccttattgggctgggtgtccaaaaggttgttgtttggcgccgcagcccgcaggtgtagcacagccactgaacgctttactaataggactccacaggcttaaaaagatgatatcctcctcgtccctggagccga

SEQ ID NO: 66325 - DNA, 166 bp, Zea mays
  unsure (1)..(166): unsure at all n locations
  Clone ID: MRT4577_160489C.1
gtccgcccacgctttcgcaccaaccaaactaatatggggtgcaactaaacatcncntctnctacncctctcctncaagacnaccaatggcttccangaagttcttcntgggtggcaactggaaatgcaacggtactggcgaggacgtgaagaagatcgtcaccgtg

SEQ ID NO: 66326 - DNA, 118 bp, Zea mays
  Clone ID: MRT4577_16048C.1
cggacggtcacagacacgctaaaagtgcaggcccaagcttcagaagctaaaaatatcatgctaaacaacatagcaaagactttggcccgcggcgcaaagccgagcgaactccacgcca

SEQ ID NO: 66327 - DNA, 822 bp, Zea mays
  unsure (1)..(822): unsure at all n locations
  Clone ID: MRT4577_160490C.1
ctcgaggccggccgggaccgaccaagaatcccgacttcccgaggccgcccggcccgagagcaccgagcacgcttctcccaaactgcactgctccgtccacggcacggcgaggcggggacgccaaagcaaaaaggcaataaagccagcggccagggccagggccagggccaggaccaggagccggcgtacgtcggtggaggctgaggcagaggcgccgaagcggcggcggcatgggggtgctgcggagcacgcagagcctggaggccgaggtagaggagatgcgcggcgcgctgctgctccatggcgcgtgggcgtggaggcccggcgggggcgccgccaagcgcgcggcccgcgccgtggagcccgccgccgcggaggcgcgcaccgtgtgcgtcacggggggcacgtccttcctcggctttgccgtcgtcgaccgcctgctccgccacggctacaccgtccgcctcgccctcgagacgcaagaggaccttgacaagctgcgggagatggagatgtttggggagaatggcagggatggggtctggactgtgatcgcaaatgtgatggacccggagagtttgcatgaggctttcgacggctgtgttggtgtctttcacacttcgtcgcatgtggatccagcgngcatctccggttacacgaaacacatggcaggcttggaggccaaagcagcagagctggtggtggaagcatgtgtgaggacagattccgtgaggaagtgcgtcctgacgtcgtcactgttggcatgcgtctgtaggcagaactaccctcatgaccgccgccggntccccatctacatcgatg

SEQ ID NO: 66328 - DNA, 715 bp, Zea mays
  Clone ID: MRT4577_160491C.1
ttttttgaaagcgattgaggcaaagtaaatcttctttatgaggccacaccgtctaccggcgcgccgccgcctgtccacgcgtcgatctcgcccgaggtggccgcggcgtgcgggtccacaacgcccgcgtgcttcgcggccggccaccacgttgtccccggcgtcggggaccgccgcaagtgccggcctcggggaatcctggcgatcgcgggggaggggttgactagccaggacctcgacgaggagccgtctcgcgcgtccatccactggctgtcctcgccgtcgggggcggtggcctggacgtcctcgacgaaatgtggcaacgaggaggcgtcggtgaactggctggtgtccccgtgtaacacccggattttaggggtccaaaacccggggttaacataaacaccaggagttctttacaaaataaataattacattataaggagacaacggtccagcaacccaaagttgactgggagacgacgacctagacctctcacgaactcatcaccgcatcctccatgagcatcatcctgcagtacctggtcctgacctgtggtgtatgtgagacagcaagagtgagctcacatacgttcatcgctcaacaagttgtggggaataatgtgcatgaactcgccaaagatgggagctcatgtgaagtgtaaggcttaccaacggagatggttgaagctgagcattgcttttagagttggtc

SEQ ID NO: 66329 - DNA, 125 bp, Zea mays
  Clone ID: MRT4577_160492C.1
acgagatcgtactggaccaacctgggtttaatcgttgatcacacacagacacaacattctggggcaggggcctggcgaacccggggccacaaaacggccccatcgtggcccgtttcggttcgggt

SEQ ID NO: 66330 - DNA, 347 bp, Zea mays
  Clone ID: MRT4577_160493C.1
aattcggcacgaggctcagcttcagccatcctctttggtaagccttacacttcacatgagctcccacctttggcgagttcatacacattattccccacaacttgttgagcgatgaacgtatgtaagttcactcttgctgtctcacaccccccacaggtcaagagcaggtaccacaggatggggcgcatggaggatgctgcgatgtgttcgtgagaggtctaggccgtcgtctcccagtcaactttgggttgctggaccgttgtctccttataatgtaattatttattttggtatagaactcctgttatatagtaaagatgtgacattcgatcctgtgccatgattca

SEQ ID NO: 66331 - DNA, 303 bp, Zea mays
  Clone ID: MRT4577_160494C.1
cggacgcgtgggtacaagcatgcattcatgttctttgggttgtaaaactaggtttttataaaatgtattcacaaatattttaaaagactccccccccccccatttgttgttgaaacataatgtacagctatcctccacaattctgatttctgaccatataactgaacatgggtctgcacagtatttcaaactcaatagtgtaccgcagcaaactttttaaaaagaccaagtggatgtgagtgtaatcatataaattgcacttagctatgcctaaaactgatccatgaaactaaacataagtcc

SEQ ID NO: 66332 - DNA, 575 bp, Zea mays
  Clone ID: MRT4577_160495C.1
gaatcatggcacaagatcgaatgtcacaactttactatataataggagttctatacaaaataaataaataattacattataaggagacaacggtccagcaacccaaagttgactgggagacgacggcctagacctctcacgaacacatcacagcatcctccatgcgcctcatcctgcggtacctgttcttgacctgtgggggtgtgagacagcaagagtgagctcacatacgttcatcgctcaacaagttgtggggaataatgtgcatgaactcgccaaaggtgggagctcacgtgaagtgtaaggcttaccaaagaggatagttagagttgagcattgcttttaaagttggtcaaaattttattaggagttactaagtataagtaaataccaacccaattaagaaaagtaataacttcacctgcgatgcaatgcatatgacaaattgaatttagttccataaattaatcatgtgagggtccgagctgctcatgaccgtgagcacggctagtataccagttttacactctgcagaggttgcgcatctttacccacaagtcatgttacccatctgc

SEQ ID NO: 66333 - DNA, 608 bp, Zea mays
  Clone ID: MRT4577_160496C.1
gggacaaatttgctttattattaatcaagaaaaataaacaatgagttgccgaagtttcctatgacccccctgccattttagggtcacacccgggttttcggggcaccaaaacccgggcgcgaacataatcataaggggggctgggaccaagtctcacacatatgatgaatcatggcacaggatcgaatgtcacatttttactatataacaggagttttatacaaaatagataattacattataaggagacaacggtccagcaacccgaagttgactgggaaacgacggcctaaacctttcacaaacacattggagcatcctccaagcgcctaatcctggggtacctgttacctgttcttgacctgggggggggggagacagcaagagtgagctcacatacgttcatcgctcaacaagttggggggaataatgggcatgaactcgccaaaggggggagctcacgtgaagggtaaggcttaccaaagaggatggttagagctgagcattgcttttaaagttggtcaaaattttattagcaattactaagtataagtaaataccaacccaattaaatagtagaacaaaagtaacaacatcacctgcgatgc

SEQ ID NO: 66334 - DNA, 1409 bp, Zea mays
  Clone ID: MRT4577_160497C.1
actacataatagaagttctatacaaaataaataaataattacattataaggagacagcggtccagcaacccaaagttgactgggagacgacggcctagacctctcacgaactcgtcacagcatcctccaagcgcctcatcctgcggtacctgttcttgacctgtgggggggtgtgagacagcaagagtgagctcacatacgttcatcgctcaacaagttgtggggaataatgtgcatgaactcgccaaaggtgggagctcacgtgaagtgtaaggcttaccaaagaggatggtttgagctaagcattgcttttaaagttggtcaaatttttattagcaattactaagtataagtaaataccaacccaattaagtagtagaacaaaagtaacaacatcacctgcgatgcaatgcatatgacaaattgagtttaagttccataatttaatcatgtgagtgtccgagccgctcatgaccgtgagcacggctagtataccagttttacactctgcagaggttgcgcatctttacccacaagtcatgttacccatctgccaagggatcgcgacttcccatacacctctaccgaggaggcgaggcagggtaacactacgaggcctttacaaagttccactagcttcagaaaacccgctacagtttatgggaagctccaatgcaggaaatcccttgcaggaccgccatcgcagcaaaatcctcccgagggccttcctacactgaccactcccctactgcccttgccccttcgggtaaggtagtcctccactagctttcctaattagtcagccaagggcgtccataaacccttgtggtagcactgttttcccgggtggttgctccatgttccaattaacataatgatcttatcatgaacagtaataataaatagataataacagtgtgatcatgaataatgtatcttcatacccaaaaccacataaagcactagcaagtactacccaaaaagttcagtggtaaacaaggtataaagataatcaaactagggtaacctattgggtcccatcaaaattaacctatgcagatcattataattaattagaacatgattgggtaaaagaagtgatcaagggcacaacttgcgtggcacttgagattccaggtaccaacttgctcttcaggtgacacgtgacctcgctgctagcaaggcagttaacacttgctgcggcgctgcgacgttgccgacccgcggaagggaatggagtcgcagcggagcttcgactccggcaagaaattccctcgcgcaggacaccaatcagtcgaggcgagctcccaatcatacccagcatggcccgacgatgctcccgcgcagtggatttggttccttggtggggactggtggacaatcggtgttcaaccgcggcagaaatcctg

SEQ ID NO: 66335 - DNA, 1239 bp, Zea mays
  Clone ID: MRT4577_160498C.1
ttgggtacctcgaggccgccgggataccaggctgaggcccattaatgatgcaatttgctgggcttctttattttctccgtgcttccatcctcttctccgtcggcggggagaagtgaaatgccgtggagatgggcggcggcggcggcgacggcggcgacgagaaagctcaccgggatctctcagtcgcgagtttcagtagcctttaccggccgtcttctctaccgctcgttcggaagcgactccagtgaaagccgcaagaggtcactgccacggggggtcgtatcgatcggggccatcagccttgctggaggtctcgtgctcagcgccgtcaacgacctcgccatcttcaatggatgcacaacgaaggcaattgagcatgctgctgacaaccctgctgttgtggaagcaattggagtgcctatagtcagaggaccgtggtatgatgcttctcttgaggtgggccatcgacggcggtctgtgtcatgcacattccctgtatctgggccacatgggtcaggatttctccagattaaggcaacccgagatggagaggatggtctgctttcgtttctgcggcatcacgactggaagatcctattgctggaggctcatcttgaagcaccatcagatgatgaggaccagagaaagctggttaaggtgaatcttgcaagcagtggccgtggggaagatggggatccagagagtggttaatcttttgtactgaattccatggtgagtggaagatcgtgtcatctgaatggactccaaatattaaatgacatggagatctagggaaacctcatagtcgccatgcaccccagcgccgacctggaaaacctcaaccccatggtcttgaaatgtgagtatgcagtccgtggcgagattgtcatccatgctcagcgcttgcagcaacaattacaaacacaaccagggtctcttccttttgatgagatcctgttctgcaacattgggaatcctcaatcccttggtcagcaacctgagacgttcttcagggaggttcttgctctttgtgatcatccatgcctcttggaaaaagaggaaaccaaatcattgatcagtgctgatgctatctctccagcaaagcagattcttgcaactattcctggacatgcaacaggtgcatatagtcacagcccaggtatcaaaggattgcgtgatgcaattgctgctgcgatcacctcacgtgaccaaattcctgcaaatgcacaagacattttc

SEQ ID NO: 66336 - DNA, 1470 bp, Zea mays
  Clone ID: MRT4577_160499C.1
aatcaccaggtgtgctgggaccaagtctcacacatatgatgaatcatggcacaagatcgaatgtcacatctttactatacaataggagttctatacaaaataaataaataattacattataaagcgacaacggtctagcaacccaaagttgactgggagacgacggcctagatctctcacgaacttgccacaacatcctccatgcgcctcatcctgcggtacctgttcttgacctgtgggggggtgtgagacagcaagagtgagctcacatacgttcatcgctcaacaagttgtggggaataatgtgaatgaactcgccaaaggtgggagttcatgtgaagtgtaaggcttaccaaagaggatggttagagctgagcattgcttttaaagttggtcaaaattttattagcaattactaagtataagtaaataccaacccaattaagtaatagaaccaaagtaacaacatcacctgcgatgcaatgcatatgacatattgaatttagttccataaattaatcatgtgagggtccgagctgctcataaccgtgagcacggctagtataccagttttacactctgcagaggttgcacatctttaaccacaagtaatgttacccatctgccaagagacggccaatcccatacacctctaccgaggaggcgaggcaaggtaacactacgaggcctttacaaagttccactagcttcagaaaatccgctacagtttataggaagctccagtgcaggaattcctcgcctgaccgccattgcagcaaaatcaacccaaggacctccttacactgaccactcccctactgcacttacccctttcaggtaaggtagtcattcactagcttttctagttaatcagccaagggcgtcccattatacccttgtggtagcactgttttcccgggtggtcgctccatgttcgcattaacaataatgatcttaacatgaccaataataataaaaagataataaaaatgtaatcatgaatagtgtatcttcatacccaaatccacataaagcaatagcaggtactacccatgaatttagtagtaaaatcagtggtgaaacaaggtataaagatagtcaaatctagggtaacctattgggtcccatcaaaattaacctatgcagatcattataattaataagaacatggctaggaaaaagtaagtgatcaagggcacaacttacctggcacttgagattccaggtaccaacttgctcatcaggtgactcgtgacctcacacaatggtgaggatgccgatattctccgaccacggcgctagtggttccgcggcggagcagcggcatgggtgagaaattctggtggccacgaggtccttctccgccccccgacgacaacgcaagcatcgaagctcgccgtcgaccaacgaaccgagtgcatccatcccaatacctcgcgcgtgaagaagatccgtaccgccggtcaccac

SEQ ID NO: 66337 - DNA, 143 bp, Zea mays
  unsure (1)..(143): unsure at all n locations
  Clone ID: MRT4577_16049C.1
gctatncntacggaaatttttctgctctctcatactcccactcgtgcgctcgggagagcggctcgcataacggaagaacccaaatccaatacaactgcaaaccttctaacattcaaaatacaaacacaaggtagtcgactcac

SEQ ID NO: 66338 - DNA, 405 bp, Zea mays
  Clone ID: MRT4577_1604C.1
atgtctcgatttttccagaagctgaagcgactcgacatgctttccaaggaatccaaaggagccatgacctgcttgagtctagagtccaggctccagagtccccccgcgcaggcagagaaccacgacggcggcagcggcggctcgactgcttatcccaagcaccccagggcgatgaagaatataccacaacctgtgtgtaagggttgccttacttttagttttaccggatcagtatttcgtctacaatttctccgaggacctaagtacatccactcgcaaatgtcctgcacagggaccttaggccgagcaacatgctgccgagtgctgaatgccaaatgcgatttgaaaatcgaggactttgggttcgcaaggaccacgactgaaactgacttcatgatagactaa

SEQ ID NO: 66339 - DNA, 652 bp, Zea mays
  Clone ID: MRT4577_160500C.1
gtgctcagcgccgtcaacgacctcgccatcttcaatggatgcacaacgaaggcaattgagcatgctgctgacaaccctgctgttgtggaagcaattggagtgcctatagtcagaggaccgtggtatgatgcttctcttgaggtgggccatcgacggcggtctgtgtcatgcacattccctgtatctgggccacatgggtcaggatttctccagattaaggcaacccgagatggaggtttgttttcagttttctcctttgctgtgccctgaatagtcacattatacaaaaacgatggtgttgtgtagaggatggtctgctttcgtttctgcggcatcacgactggaagatcctattgctggaggctcatcttgaagcaccatcagatgatgaggaccagagaaagctggttaaggtgaatcttgcaagcagtggccgtggggaagatggggatccagagagtggttaatcttttgtactgaattccatggtgagtggaagatcgtgtcatctgaatggactccaaatattaaatgacatggagatctagggaagcagatgttttttgctccaaaaatagcagcagggacggcagcaacctgtaagcacgcgggcaatatgctatttgtggccacattggcccagttttggcgt

SEQ ID NO: 66340 - DNA, 638 bp, Zea mays
  unsure (1)..(638): unsure at all n locations
  Clone ID: MRT4577_160501C.1
cctcgaggcctgccgggcaccacaacccgacgtgaaggactccagctcaatttctgcatcactaaacaaaaaacaacagtaatgcatccaaggtgctcactcaggtccttctgttctcttaaaattttatatgtgtaaaatatcatgctgactgtagttaataatcaagtgcattagtcctaggaaagctttgggcatttggtgaggagcgcaaggcaaaatacggcaaaaacatcatggctggtgtctaaatttatttccaatcttcctatcactaatgcgttgcccttgcactattgggctcaccttgccatgccatgctggggcagtgcagttgtgcaggcttggagctgaagtttgggagctgaaggcaaagaggcagggactatgtgcagaaataagaaataatgattagatcagtctaggctatacatgcttcccattgtatgaatttttgtgctataatatttttccttccccttctttgaaatgcgatatttgcacatctcttctcaactttgcattacttattcctgtcattntgtatatattaacctgttatattttctatgcttcattttttcagttctgaaccctgaacactatgaagatgcaagggctttctgcatatggatatt

SEQ ID NO: 66341 - DNA, 1676 bp, Zea mays
  Clone ID: MRT4577_160502C.1
ggcacaagatcgaatgtcacattttactatataataggagttctatacaaaataaataaatatttacattacaaggagacaacggtccagcaacccaaagttgactggagacgacgacctagatctcttacgaacacatcacaacatccttcaagcgcctcatcctgtggtacctgttcttgacctgtgggggtgtgagacagcaagagtgagctcacatacgttcatcgctcaacaagttgtgaggaataatgtgaatgaactcgccaaaggtgggagttcatgtgaagtgtaaggcttaccaaagaggatggttagagctgagcattgctttttaaagttggtcaaaattttattagcagttattaagtataagtaaataccaacccaattaaatagtagaacaaaagtaacaacctcacctacgatgcaatgcatatgacaaattgaatttagttccataatttaatcatgtgagggtccgagctgctcatgaccgtgagcacggctagtataccagttttacactctgcagaggttgcgcatctttacccacaagtcatgttacccatctgccaagggatcgcgacttcccatacacctctaccgaggaggcgaggcagggtaacactacgaggcctttacaaagttccactagcttcagaaaacccgctacagtttataggaagctccaatgcagggttcttgcctgaccgccatcgcagcaaaatcaaccaaggacctccctacactgaccactcccctactgcccttgcccctttcgggtaaggtagtcctccactagctttcctaattaatcagccaagggcgtccataaacccttgtggtagcactgttttcccgggtggtcgctccatgttccaattaacataatgatcttatcatgaacagtaaataacaactgataataaaagtgtaatcatgaataatgtatctccatacccaaaaccacatatagcactagcaagtactacccaaaaatattgagtggtaaaacaaggtataaagatagacaaactagggtaacctattaggtcccatcaaaattaacctatgcagatcattatgattaattagaacatgagtgggtaaaagaagtgatcaagggcacaacttgcctgggacttgagattccaggtaccaggatgatcttcaaatgactcgtagcctcgcgctagtcgtagcaatacaaacaaacagtgtatatgcaaaattaacattacaccaaacatatatgcaaattacacattaataattaacatgatgaaatatgatcacaggaacaagaattattaattttggagttataggttttaagtgatgaatctccaaagattatatgtgcttattacaagattagttaagataacaattttaatgtgacttttatgtaaaaccagtgtcactaaatgataaacaataatattacaaaattataggaactggaatggactaaaaaggagttaggatgaatttactaagaattaaacaagttttaacatttatttatgcactaaaaattaatttctgatattaatatctgattttcaaagttttacgactcaattggcattcatggatgagggtgattagggatcctcgaggttacgactcaattggcattcatggatgagggtgattagggatcctcgagg

SEQ ID NO: 66342 - DNA, 2036 bp, Zea mays
  Clone ID: MRT4577_160503C.1
cctcgaggccggccgggtgaacttacagttgtctacttgttttcatctgcccctaaattttgtctggaaacaagtttaaaatttaagattattcgcaacaagtgtttaagattaaaaaaaaaaaaaaaaaaaaaaaaaaaaaaaaaaaaaaaaaaaaaaaaaaaaaaaaaaaaaaaaaaccgccaaacatctggtctcgctgccccgattcgccacgaagccgcactgtgagagagggacgcggcccgttgtccccggcttgtacgcaatccttccgtcgctgcgaagctgatccctcgtgttcgccatggcccccagcgtcgccgtggaaaacctcaaccccaaggtcttgaaatgtgagtatgcagtccgaggcgagattgtcatccatgctcagcgcttgcagcaacaactacaaacacaaccagggtctcttccttttgatgagatcctgttctgcaacattgggaatcctcaaccccttggtcagcaacctgtgacgttcttcagggaggttcttgctctttgtgatcatccatgcctcttggaaaaagaggaaaccaaatcattgttcagtgctgatgctatttctcgagcaaagcagattcttgcaactattcctggacgggcaacaggtgcatatagtcacagtcagggtatcaaaggattgcgtgatgcaattgctgctgggatcacctcacgtgacggattccctgcaaatgcagatgacattttcgttacagacggagcaagtcctggggtgtgcattttttacttctctttcagttgtcctggacgttttatgaataaacatgataccactgtagtctcatcatgaccctattcttccttaaggtccacatgatgatgcaattactgattaggaatgagaaagatggcattctgtgcccaattcctcagtaccccttgtactcggcctccatagctcttcatggtggagctcttgtcccctattaccttgatgaaaaaactgggtggggtttggagatctctgatcttaagaaacaactcgaagatgctcggtcaaaaggcattgatgttagggccttggtggttatcaatccaggaaatccgactgggcaggttcttgctgaagacaaccaatatgatatagtgaaattctgtaaaaatgagggccttgttcttctagctgatgaggtatatcaagagaacatctatgttgacaacaagaaatttaactctttcaagaagattgcaagatccatgggatacggcgaggatgatctccctctagtatcatttcagtctgtctccaaaggatactatggagagtgtggtaaaagaggaggttacatggagattactggcttcagtgctccggtaagagagcagatctacaaggtagcttcagtgaacctgtgctccaatatcactggtcaaatccttgcgagcctcgtcatgaatccaccaaaggttggggacgaatcatatgcttcctacaaggcagagaaagatggaatccttcagtctttagctcgccgtgcaaaggcactggaagatgcattcaacacgcttgagggattttcatgtaacaaggctgaaggagcaatgtaccttttccctcagatccatctgccacataaggcaattgaggctgctaaagctgccaagaaagcacctgatgcattctatgcgctccgtctccttgaatcaactggaattgttgtggttcctggatctggatttggccaagttcctggaacatggcacgtcagatgcacgatcctgccgcaggaagacaaaatccccgcggtgatcacccgcttcaaggctttccatgaggcgttcatggctgagtaccgtgactgaactgttacagtggctgagtaccattgtgtagaccgaaacaaaataaagctcccccctctctctgtctctgtgcgtgtgtgtgaactgatctctgaatggaagaacaatgtactctgttggcgcctttaatggcaattgaggaaaattttgatcaaatttctcaaaaaaaaaaaaaaaaagcggcc

SEQ ID NO: 66343 - DNA, 413 bp, Zea mays
  Clone ID: MRT4577_160504C.1
gcttgagttgcatctagcaacagttcccgggtacttatagaattgtgtagtatagcactacctatgtacataaatgcgtgagaccacatacattacacggaagtcatattgaggaaggaatacgaaatgagatatagcataatggcacatttatgacaaagatacgtcactatcaacatttgttgcaagaaccctgcaatccattggcaactttatgaacccaccgtgttaacgcctgaaacagcgtagtggcgaacaacctggctaattcagtcacagctgatagggaattcccactgtattggattctatgcccttcaaacaggactatgtaacctagacatgtggccgcacgggatacatagcgccttacacaggggcattcatacatataacacaaggaccaaagggat

SEQ ID NO: 66344 - DNA, 521 bp, Zea mays
  Clone ID: MRT4577_160505C.1
caaacaagtaatgcattttacggtctttgcagcatatcacttgatccttgaaacatctttctttgaagacaaaggtttttctaaatgataaaagtcccccaaagaaatttctgttactgctacagaaggggcatcaccaactgcttatgatgttgctgctcttagtggtgctatccctagctttccttcacatggtgaccctccagcacttagactattccatgccacttctaatagctatgctgatgtgaacaaacctttgacatatccagaaaatggggatgcattcagttcagtatccagcagctctgcaaatgaccttgaacaaggtacaagtatcaggcccaataatgctgagaggttaacatcactagtccaagggccactaagaaaactgttcactgacatgttacgtcaccagaatatttacttacctgttacatcattgcgaagaggaaatgatattagcaagggaagtacggctgaatcaagtcaagaaactgttattaatgggtttccat

SEQ ID NO: 66345 - DNA, 2037 bp, Zea mays
  Clone ID: MRT4577_160506C.1
ccttctccttcactcgctttccggcgggcgactggcctaaaatcgcctcttgtttgtttgcttccgtcgtcccctctccacgtagagcacgcccccggaccaccttttataagcaccaaccatctggccttgccgcgccgattcgccacgaagccgcactgtgagagagggacgcggcctgttgtcccggcttttagacgcaacttccatcgctgcgaagctatccattcgtgttcgtcatggccgccagcgtcaccgtggaaaacctcaaccccaaggtcttaaaatgtgagtatgcagtccgtggggagattgtcatccatgctcagcgcctgcagcaacaactacaaacacaaccagggtctcttccttttgatgagatcctctattgcaacattgggaatccccaatctcttggtcagcaacctgtgacattcttcagggaggttcttgctctttgtgatcatccgtgcctcttggaaaaagaggaaaccaaatcattgttcagtgctgatgcaatttctcgagcaaagcagattcttgcaactattcctggaagggcaacaggtgcatatagtcacagtcagggtatcaaaggactgcgtgatgcaattgctgctggaatcatgtcacgtgatggattccctgcaaatgcagatgacattttcattacagacggagcaagtcctggggtccacatgatgatgcaattactgattaggaatgagaaagatggcattctgtgcccaattcctcagtaccctttgtactcagcctccatagctcttcatggtggagctcttgtcccctattaccttaatgaaaaaactgggtggggtttggagatctctgatcttaagatgcaactggaaaatgctcggtcaaaaggcattgatgttagggccttggtggttatcaatccaggaaatccgactgggcaggttcttgctgaagacaaccaatatgatatagtgaaattctgcaaaaatgagggccttgttcttctagctgatgaggtatatcaagagaacatctatgtggacaacaagaaatttaactctttcaagaagattgtaagatccatggggtatggcgaggatgatctccctctagtatcgttacagtctgtttccaaaggatactatggagagtgtggtaaaagaggagggtacatggagattactggcttcagtgctccagtaagagagcagatctacaagatagcttcagtgaacctgtgctccaatatcactggtcaaatccttgcgagcctcgtcatgaatccaccaaaggttggagacgaatcatatgcttcctacaaggcagagaaagatggaatccttgagtctttagctcgtcgtgcaaaggcgttggaggatgcattcaacaagcttgagggattttcatgtaacaaggccgaaggagcaatgtatcttttccctcagattcatctgccacagaaggcaatcgaggctgctaaagctgctaagaaagcgcctgacgctttctacgctctccgtctccttgaatcaactggaatcgtcgtggtccctggatctggatttggtcaagttcctggaacatggcacatcagatgcacgatcctgccgcaggaagacaagatccccgcggtgatcagccgcttcagggctttccatgaggcgttcttggccgaataccgcgactaaactgttacgctgtgtgtgagttaagttggaggttcagtagaactgtagaagagctcagtgacagcgcagaaagaggcagtgttagaaaggcttaggtccttcttcacaggagcaacagttgtcttgtctccatcaaggagaaataaaaattttagttttacaacttctcattgacactgttgggttcttgacatggtagagaattgtgtgcactgtgcctggcactgggtcctactagcggcgcaatttaagcgtgaccaggatggcgccatcagccatctctgtcgatattacactgctagctgaaaatgccacttggtccctttcaggtgtttgtggaccaaaacct

SEQ ID NO: 66346 - DNA, 190 bp, Zea mays
  unsure (1)..(190): unsure at all n locations
  Clone ID: MRT4577_160507C.1
ggggggtgtggttaagtaattttacttgctcaacgggngatctctacttctnaaaaccgcgtgcnttacccatgagatggaggacaaccgacngcagggaaatttcacctggctgtttgcgatgatgagacagaactacacctaatctacttggagggggttgctgagtcctgccttctccgagcgattc

SEQ ID NO: 66347 - DNA, 1256 bp, Zea mays
  Clone ID: MRT4577_160508C.1
ggatcgaagggcacatttttactacataacaggagtcctgtacaaaataaataaataattacattatacggagacaacggtccagcaacccaaagttgactgagagacgacggcctagacctctcacgaacacatcgcagcatcctccatgcgcctcatcctacggtacctgttcttgacctgtgggggggtgtgagacaacaagagtgagctcacatacgttcatcgctcaacaagttgtggggaataatgtgcatgaactcgcaaaaggtgggagctcacgtgaagtgtaaggcttaccaaagaggatggttagagctgagcattgcttttaaagttggtcaaaattttattagcaattactaagtataagtaaatacccaacccaattaagtagtagaacaaaagtaacaacctcacctgcgatgcaatgcatatgacaaattgagtttaagttccataatttaatcatgtgagtgtccgagccgctcatgaccgtgagcacggctagtataccagttttacactctgcagaggttgcgcatctttacccacaagtcgtattacccatctgctaagggatcgcgacttccccattcatctttgctgaggagacgaggcaaggtagcactacgaggcctttacaaagttccactagcttcagaaaatcgctacggtttctaaggagagcgatataggaatcctcgtctgaaaagccatagcagcatgatcaacctgacaatctccctctaccgacaactctcctactgtccttgcccctttcgggtagggtagtcgtccacttgctttcctaattagtcagccaagagcgtcccataccacccttgtggtagcactgttttcccggctgttcgctccatgttccaattaacataatgatctctggcctgagattccaggtatttcaccaagttggtcttcgggtttcccatgacctcactgtgagagtcgtgttgcagggcgtctatcatcgcaattgagcggatccgcggctgtgcccgtccaccggtgaggaattccggccaccgcctaccccgggatgctgggactcctcctcgcacaggtcctgcatgtctcggagaacacatgggcacgatctcgtgctccaaaccctgtcgagggcagaggatcacgttggcggtccacgattgctctctttcgtcgccgctataatcccctcccctcacagttccgtggcgcttggacaagatcccggccggcctcgaggtacccaa

SEQ ID NO: 66348 - DNA, 2308 bp, Zea mays
  unsure (1)..(2308): unsure at all n locations
  Clone ID: MRT4577_160509C.1
tttaaaaaaaaaaaaaaaaaaaaaaaaaaaaaaaaaaaaaaaaaaaaaaaaaaagacaacgccaaacatctggtttcgctgccccgattcgccacgaagccgcactgtgagagagggacgcggcccgttgtccccggcttgtacgcaatccttccgtcgctgcgaagctgatccctcgtgttcgccatggcccccagcgtcgccgtggaaaacctcaaccccaaggtcttgaaatgtgagtatgcagtccgtggcgagattgtcatccatgctcagcgcttgcagcaacaactacaaacacaaccagggtctcttccttttgatgagatcctgttctgcaacattgggaatcctcaatcccttggtcagcaacctgtgacgttcttcagggaggttcttgctctttgtgatcatccatgcctcttggaaaaagaggaaaccaaatcattgttcagtgctgatgctatttctcgagcaaagcagattcttgcaactattcctggacgggcaacaggtgcatatagtcacagtcagggtatcaaaggattgcgtgatgcaattgctgctgggatcacctcacgtgacggattccctgcaaatgcagatgacattttcattacagacggagcaagtcctggggtccacatgatgatgcaattactgattaggaatgagaaagatggcattctgtgcccaattcctcagtaccccttgtactcggcctccatagctcttcatggtggagctcttgtcccctattaccttgatgaaaaaactgggtgggggttttggagatctctgatcttaagaaacaactcgaagatgctcggtcaaaaggcattgatgttagggccttggtggttatcaatccaggaaatccgactgggcaggtttatactgatcatttctcctcttgttaaagaacatctctgcttatccacaccatactctttataattgatgtaataacatgagatgtgtatttattgtactcctattttaagtcagtgaatactttgtatacttgtattgtctagggaaaggttttggttgaaaaaaataagtgtttttttgtcgttctgcaatgcgaatgaatgtttttcaatgctggtgaccaaaacacaaattttattgaagtggttcatttatttgtaggttcttgctgaagacaaccaatatgatatagtgaaattctgtaaaaatgagggccttgttcttctagctgatgaggtatatcaagagaacatctatgttgacaacaagaaatttaactctttcaagaagattgcaagatccatgggatacggcgaggatgatctccctctagtatcatttcagtctgtctccaaaggatactatggagagtgtggtaaaagaggaggttacatggagattactggcttcagtgctccggtaagagagcagatctacaaggtagcttcagtgaacctgtgctccaatatcactggtcaaatccttgcgagcctcgtcatgaatccaccaaaggttggggacgaatcatatgcttcctacaaggcagagaaagatggaatccttcagtctttagctcgccgtgcaaaggcactggaagatgcattcaacacgcttgagggattttcatgtaacaaggctgaaggagcaatgtaccttttccctcagatccatctgccacataaggcaattgaggctgctaaagctgccaagaaagcacctgatgcattctatgcgctccgtctccttgaatcaactggaattgttgtggttcctggatctggatttggccaagttcctggaacatggcacgtcagatgcacgatcctgccgcaggaagataaaatccccgcggtgatcacccgcttcaaggctttccatgaggcgttcatggctgagtaccgtgactgaactgttacagtggctgagtaccaccgtgtagaccgaaacaaaataaagctcccccctctctctgtgtctgtgcgtgtgtgtgaactgatctctgaatggacgaacaatgtactctgttggcgcctttaatggcaattgaggaaaattttgatcgaaaaaaaaaaaaaaaaaaaaaaaaaaaaaaaaaaaaaaaaaaaaaaaaaaaaaaaaaaaaaaaaaaaaaaaaaannnaaaaaaaaaaaaaaaaaaaaaannnnnaaaaaannaaaaaaaaaaaaaaaaggggccccaaggccccccgagccccagtttttttccccttaagggggggaaaattggcccctgggggaaaccggggcccaaacgttttccgggggaaaattgtttccccttccaaattcccaaa

SEQ ID NO: 66349 - DNA, 586 bp, Zea mays
  unsure (1)..(586): unsure at all n locations
  Clone ID: MRT4577_16050C.1
tagtcnncacnnagctatggggcggggggggggggccaaataaanagcaccccctgcggagggcggaacagcgagaacaaggcgttggcggactagagcttccttttcacctcagagtgcgcgaacgacgggagcagccccnacaatgcgtgtgccgaccagggtgtcaacaccccctgcttgaggggggggcgncacaatatccctactttaaagggggctactatacctctaccaaaaccaacatggggagggggggcagcgagatcacgaccaaggcgaccgtgaactacaagaagatcgtgcgcgacacctgccacgagatcagcttcacctcctgggaccggggcctcaactcccaccgctgcaaggggcgtgggaacatcgagcaacaatcccccaacatcgcgcagggggtgcacggacacttcacgaagcgggccgaggagatcggcgcgggcgaccatagccacatgttctggtacgccaccgacgagaccccctagctgatgccgctgagccacgtgctgtgcaccaagcggggcgcgcgcctcaccgaggtgcgcaagaacgggacctgcgcctg

SEQ ID NO: 66350 - DNA, 1700 bp, Zea mays
  Clone ID: MRT4577_160510C.1
taccctcgaggctggccgggaccacgcaccagctagagcagcggcagagcgcgcggcgcacaccacacatcgtcctagctcacgatggcgggcgcctggtccttgctcgcgctcgccctatcgctctgctccgtcgcggccgtcgcggtgcagcaggtgaacacggtggccgcggcgcagcaggcggcggaccgggtggcggggctaccggggcagccgcccgtggggttcgcgctccgagccggctacgtgaccgtgaacgagacgcacggccgcgcgctcttctaggcggtcttcgaggtcaccgcgtcgcccgacaagaagccgctcgtgctctggctcaacggcgggcccgggtgctcgtcgattgggtacggggaggcggaggagctgggccccttcctggtgcagaagggcaagccggagctcagatggaacaactactcctggaacacagaggccaaccttatgttcctggagtccccggtgggcgtcggcttctcctacacaaaacgagctccgacctgctgcaactcggcgacaagatcaccgctgacgacgcttacaagttcctgctcaactggttcaagaggttcccgcagtacaggtcccacgacttctacatcgccggcgagagctacgccgggcactacgtcccgcagctgtcggagaagatcttcgacggcaacagggcggggcccaaggagagctacgtcaacctcaagggcctgatggtcgggaacgcgctcatggacgacgagacggaccagacgggcatggtcgactacgcctgggaccacgccgtcatctccgaccgggtgtacgccgacgtcaaggccaggtgcgacttcagcatggccaacgtcaccgacgcctgcaacgccgcgctccaggagtacttcgccgtgtaccgcctcatcgacatgtacagcctctacaccccggtctgcaccgacgacccggccggctcgtcggcgtcgtcctcctacgacgcgcgcggccaccggaaggtcgccgtccacggcgccgcccccaggatcttctccaaataccgaggatggatcatgaagccggcgggctacgacccctgcacggcggagtacgcggagacctacttcaaccggcccgacgtccaggcggcgctgcacgcgaacgtgaccaagatcggctacaactggacgcgctgcagcgatgcgatctacacttggaacgacgccgccttctccaccctccccgtcatccgcaagctggtcgccggcggcctcaggttgtgggtgttcagcggcgacaccgacggaaggatccccgtgacgtcgacgaggctcaccctccacaagctcgggctcaagaccgtccaggagtggacgccgtggtacgaccatctgcaggttggtggatggacgatcgtgtacgagggcctgacattcgtcacgatccgcggcgctgggcatgaggtgcctctgcacgcgccgcggcaggcgctgacgctcttcagcaacttcctggcaggcaccaagatgcccccaacggcgttcccctagtttcaaaagaattaaaaaaagagtgcgtcctcttgcccggcaaagccggctgatatgtttctttccccccttctcgcttctaccaaagttgcaagtgtacttcgattggaaaaaagttcagaaataaaagtcatagtgctgacctcaatgctcagtccc

SEQ ID NO: 66351 - DNA, 1500 bp, Zea mays
  Clone ID: MRT4577_160511C.1
actatataataggagttttgtacaaaataaataattacattataaggagacaacggtccagcacccaaagttgactgggagacgacgacctagacctctcacgaacacatcgcagcatcctccacgcgcctcatcctgtggtacctgttcttgacctgtggggggtgtgagacagcaagtgtgagctcacatacgttcatcgctcaacaagttgtggggaataatgtgcatgaactcgccaaaggtgggagctcacgtgaagtgtaaggcttaccaaagaggatggttagagctgagcattgcttttaaagttggtcaaaattttattagcaattactaagtataagtaaataccaacccaattaagtagtagaacaaaagtaacaacatcacctgcgatgcaatgcatatgacaaattgaatttagttccataagttaatcatcagagagtcctgagctgctcatgaccgtgagctcggctagtataccagttttacactctgcagaggtggtaccctttacccacaagtcatgttacccatctgccaagggatcgtgacttcccatacacctctaccgaggaggcgaggcagggtaacactatgaggcctttacaaagttccactagcttcagaaaacccgctacagtttataggaagctccagtgcaggaatccctcgcctgaccgccatcacagcaaaatcaacccaaggacctccctacactgaccactcccctactgcccttgcccctttcgggtaaggtagtcatccactagctttcctagttaatcagccaagggcgtcccattaaacccttgtggtagcactgttttcccgggtggttctccatgttcccattaacataatgatcttatcatgaaccgtaaataaacagataataaaaagtataaaaatgagtgatgaatatctttatacccaaagccacataaagcaatagcatgtacgacccaaaaatttagtagtaaaaccagtggtgaaacaaggtataaagatagtcaaaatttagggtaacctattgtgtcccatcaaagttaacctatgcagatcattatgattaataagaacatgaatgggtaaaagaagtgatcaagggcacaacttgcctgggacttgagattccaggtaccaggatgatcttcagatgactcgtgacctcactgctagtcatagcaatacaaacaaacagtgtataggcaaaattaacattacatcaaacataagaacaactgtataataatattctacgcgttgctacgagatcgtagaaacaaaaaccactaaattcggagctacggttattaagttatgaatttctgaaattatttagtgcttagaatagattaatccttatgaacaattttaacccaagtttcatggttacaccaaggtactaggtgataaacaatattaatacaaaattattgcaactggaatgactcaatttggcggacgcgtcggcgaacgggaattaaaacg

SEQ ID NO: 66352 - DNA, 390 bp, Zea mays
  Clone ID: MRT4577_160512C.1
ctttgttctccattacaaagatatattattgaagtgttaagccttatatgctgagggagagctgataaatttcagttgatgcaactagctaactagatgcaatactgattacacgtatactggatcgaggcacatcaaccttaatgggcctcttatgtacgaaccaatgcttgacttattggaacgctatggttcctgtggtctaaactatatttaatggaaatcgtgcaacactcatagctaaggagaatgaccgcttattgaagcatattgattttcatcttttgcgaataggctgtttccgaaacgatttgattagaaaaagaactgttgatgggctacagattcttcgtatgaactcattcaactattgcaaaaacactacaaggt

SEQ ID NO: 66353 - DNA, 568 bp, Zea mays
  Clone ID: MRT4577_160513C.1
atgaatacagcatctgtcggtctcatgcttgttaaatttctcagtttgtctccccccccccccaaacagcaaactctgccccaggatcctctatcagcaatcataggtcccgtaaggcttgagccacattccttgatatcctttcatgaatcggttcctgtgcttccaggatctcgaatttcgtctttgtgattgtctcgaacaggaaaatgtatcgccaggccagctcacaaaccaactcttctggagcttctggcagaaccgcgtcttcatatgggttgcagttgtccttgaaccaaagccttaaaaactccttatcaacattttcaggttcaaggccagatttgaatctatcttcgtatgaattagcaatccaatatctgctagagtcaggagtatgaacctcatcaatcaacacaattgttccatcaggtgtttttccaaactcatactttgtgtcaaccagaattaatccattctctaaggccactttctgtccatatgcaaacaagcttaaggctttgcttcctgcctcatgaaaatcttccttcgacatcaaccctgactc

SEQ ID NO: 66354 - DNA, 1628 bp, Zea mays
  Clone ID: MRT4577_160514C.1
cccacgcgtccggtacagtatagttagcttgattgacaaggattacgttgaaacccaactgattgctttagaaggcaattttttttgtccattcgactttgctcagcaaggtaccttatatattattatgaaatgaatactttgtttttctggtcaatatactgttggagaaccaacatgtcttacttctgttatatctgctattgcagggttgatcttagtactgctggaacttatctaaacaaaaacttttctgatataagcacagagcaaggttggagaacaacacacaaccacacaagtaaattacccatttcgtttatgggtaatataactagcagttccggatgggaatctggatcttctaccacacgatctaatcaaaaccatggatctgctggaggcaatcatagctctgttagtggagcaaacataatagttcctgataagatagggaataaaacaataatgcttggtagagaaaggagaaaacaaacctcaacttcttcccatattggtgaaagctctagtgctgctgacgaacctagaggtgatcttcaatcgtcaaaaatatcagctggcccaaaccatagcagtcatcagcataatattcctgtaataaacattgatgacatatcccctgaagctagacctagttcgagtggattcactaatagaactgttgatcctaccatagaagcacaattggagtcggatgagttattggctcgccaactccaggagcagctctacaatgaatctgctcgttttgccccaacagaagagattgatgcaatcgtagcaatgtcacttcaacatgaagaagatactcatcggacatctaggaccttaaggaggttccaaaaccatactagaggtgctcgggctactcgtttgagttcttatcgaaatgctcttagggctgaattagcaacagcaaacaatatgatttcccgtcagcggaatactgctccaataaatttgggattgagagctgctttagcaagatatcctggtgctttgcacattcaaccaaacattgacttaaatgactatgatgcactgcttgctctggatgaaaataaccaccagcacactggtgcttcagaaagccagatcaataatttgccacagtcagtagttcagtccaatagcattgaagatccatgttctgtctgccttgaaaatccttctgtgggagatactatccgccatttgccttgctttcacaagttccataaagagtgtattgacgagtggcttaggagaaagaaactgtgcccagtctgcaagtttgggattaactgaagtttgccgtaccagtctacagtggagttctacttggtagtggcagcgacgaggtgctgcaatttctcatacgggatgctttcctgcagagatttttttttgtctaagataaaaaaaacaatgtattgctgtgatctgcgcttttgggcatcattttgtatgcacgcacgttttgcttgctatttttgttgtcgtaatccaccaattcccatgaattggttaccagcatcttgtcaatcatttatgtcgccgcataaaaaaaaaaaaaaagggcggcccccgacttatagctcgtcgaccccggaaataattccgggccg

SEQ ID NO: 66355 - DNA, 508 bp, Zea mays
  Clone ID: MRT4577_160515C.1
cttcactgagaaccgcatagactggccggtgaccactcgactatatgcgtgacccaagacggaacaacttgtaccattgttttgtcattagtacacgcgccgacgttcacgggtgggaacgcaccatgaaggagtgcgtctccatcgatatccgtcaggccggcctcaacactgggaaaccgagcagcgagctcgactgcctcctgcatctgatgcactctgatggacacatgcccgccgacaaaaccatgggctgatgagaagaagcttgcaataccttattcactgagactgaatctgacaagaacgtaccactggctggcgttgtcaaactcaagcccagtgtgatctataagatgatgactgggacttatttgcaggtctgtcatgactacacaaatcatgactggcatacgtggttgcagtcaacccattatgtcgaaggacctacaccattgacagaggaatcgctgacataggccttgaccgcctcctgaaacatgcagac

SEQ ID NO: 66356 - DNA, 541 bp, Zea mays
  Clone ID: MRT4577_160516C.1
aaaaaacaaaaaaaaaaaaaaaaaaaaaaaaaaaaaaaaaaaaaaaaaaaaaaaaaaaaaaaaacctggtttccaaaaccccatccttattttattgtggatccaaagatagaggggggggccgaccaaatccgggtggggggattttaggggacaacaaaaaatgcccaagttattgaatttttcccgggggggagaattcctttacagggctttttggggtgccgaaaagagtaaaaaacattgcccgcttaaggggattttcaccggttcccggaaaaaaaggccccattggggttttacaggggttaaaattggaccagttcattacgttggcaatacgagggacaacttgccttggggggtttaagaacccgccggggtgggggggaatttcgaagggccggaaacacccactttttggggaaaccccaagggggttggttttggggggagggtccaagaacttattgggaaacaggggtttggaaaccgtaaccatggcccggcccaaaataaccagggccgtaaacaacttggc

SEQ ID NO: 66357 - DNA, 2117 bp, Zea mays
  Clone ID: MRT4577_160517C.1
cagcttcctgttcaccatggactcgagggagtgcatcgtcccgtcaaacaatcctgctccaatcttttgacgtcttcgctgggcctgtgccgcctccccgtacccgccgttcctgcaccgtcaaaccgccagccaagagtccatttttttttcttatcaaaagtttgcgtttgatcggtttcgtttctaagagctgcgcgagatgtccttgttccgggaagggaggaaacgagaggctctgttcctgtcgcgattgttggaggacctcaccatagtttgaggcggtgaggtggaggcgatagagaagacgagacaagaagcagccgccaggagctgagctgaggccctgccgccgtcttgccccaactccaagcgatgtcttgcttccgctgcttcagcggctgcaggaccaagaggggcaagggcgagaagcgccgggaggggtcgacggcgccggcgtccccggcggccgcctcgttcccgtccaccgtctccacgggcgcgccatccaacctcaccttctccacggcgtcgtcggccgtcgtcacgagccactccgaggactccagcgcggtcatgcggccggaggcgaccaagtcatcgggctcggcctcggtgtcgtcggcgcggagcatcccggagctgtacgaggagaggggagccagcagcctccgggagttcgggttccgggagctccgggccgccaccagcgacttcagccgcctgctcaaggtcggcgagggcggcttcgggagcgtttacaagggcgtcgtccgccttcctggcgggcccgccggcggcacggtagttgccataaaaaaactcaatcccaatggtcatcagggccacaagcaatggttggcagaagtccatttcctgggggttgttgagcacccaaatctcgtcaggctcattggctactgcgctgctcaaggcgagcgaggtccgctgaggctactggtctacgagttcatgacgaacaagaccctggacgatcatctattcaataaagcataccccgtccttccatgggacatcaggttggagatagcgctggatgccgctgagggattgctgtacctccatgagggattggaagttcaggtcatatatcgcgatttcaaagcttcaaatgtcctgctggacgaggagtttagagcgaaactttcagatttcggattggcaagggaagggccatcagctggtgatacccacgtctctacagcagttatggggaccttgggctatgcagctccagattatgtcgagacaggccatctcactacaaaaagtgatgtgtggagctttggagtagttctatatgagatcctcactggacgtcgctcaatagagaggaaccggcccaagaacgagcagaaacttctggaatgggtcaggctgtatcccgttgaaagcaagcagttcagcaagattatagatgcaaggcttgagggccactactctaagcagggcactagaaaaattgccaagttggccaatagttgccttgcaaagcacagaagggaccgtccaacgatgagagaagtggtcgagagcctgaaacaagcaatgcagcacaaggagttggatgggaaagcaggggctttgaatgagacttcaccaccagaggaaatgtctggaaaaccaagcacagaggatgttgccgtggcatcagcaaggcggaggatgcttcatttggctgccctaggtgagaatgcaaacagcattgcgaggaggagattcatgttcatgaggactgcggcttctccaactcctacgtaattttgagttgtagttgtgatcttttctctctctttttgaacaaatgtgatcttttcttttgactttgtactttttgaagtggttatgaaggtaggatcattggggatgttttcaccatgtcatgtataaatctattagatggccagacattgtttttttacttgtgttctttgtataggtagggtagatctgagacccaagagttactatgtaaaaaggtttcactgctataaggatcataggtgtgaaatgtaattcagttctctatgtttgactgcaactttggacatcgttaaggtaaatagtattaaaggtccccccttcttcctttcaaa

SEQ ID NO: 66358 - DNA, 407 bp, Zea mays
  Clone ID: MRT4577_160518C.1
ctttgattgagaatacgatgaataagcttcggctatggtcaaattttttagcagcggagcagtgcaatagtaataaatggtgtggtaacttcacacctacccatctatttatatagtgctgcaggtgggaaggtgaatcgtcaagccgctcgcacacgctgaacagtcgcccgcacccactgaacggtggaccacaatgcacgagaaggtgaatcaccagatcgctcgtacccgccgtatggtgggaccacctcgcacttggaatatccaatcgtttctcgacaatgagctcacggaaggtgtttttcggaccttcggcgttctgaagcctaagagaatttttcacgggtcgagctcatcacgaaaaacgatctgggaccgtgaaggggctactgttgagggtttgc

SEQ ID NO: 66359 - DNA, 402 bp, Zea mays
  Clone ID: MRT4577_160519C.1
gagcatgagaacgagcgtaacatgaggatgggccaccttaggaactcctcgctggactccaagcgagaaaatagggaaatgcctccaagagcatcatttgtatctgagttggcctccaaaggagtacgtgcatgcgcttcccaagaagagcgagatgagggcaagcacgcggaacatgagtttttacctctcaaccttgcatcaaaagtacagtcacttatttctaagatatcaaagatgggagggaggctttcatcaggtctttcgtgtccagaagttaaggaatatcaatatattctaacaaatgagaacctgacagcactgagagggtgacaacaagactcttgtattttccagtagatgaagattgatatgctctcaagaatgacatcgatcttgaac

SEQ ID NO: 66360 - DNA, 499 bp, Zea mays
  Clone ID: MRT4577_16051C.1
attcggctcgaggggggggcatggagcatggttttttcgcaccgggcactgccgttctggctgggaactacctcgaaggatgcggctccacgtatcagtgccctgaaggcagaccttgcatgactcacctcttgtcagtggcttgctggtcttcggctccaaaaatcgaagggacttttgggccactccccttggattggcaggtggccgaggcaacgttcgtttttgggggatggcccataaaaaggatgcagcttggggtgctaggcaccccaacgtggtggatgcatgctgctactgactgctcatgtgtggaatactatcttcataaacggagtgatcatggtgcaccctccttgctggcacgctctcgctgttcggaccttgtctggcgcaccggtgatggtgctgaatttgcggtattcagaccctccgagattgatgcccgtgttgcacttgctgctaccggcgaatgcaagagttctggaattgagagagc

SEQ ID NO: 66361 - DNA, 320 bp, Zea mays
  Clone ID: MRT4577_160520C.1
ttgtttaaacacgccactgatcaagccttacaagttctccacacaacgactcaatgctctgggtatgaagttcactactttgaaagagagtttatacaacacagtggttagcctacaagagaatggtcatatcccagtactgctacataagtcgtctctatgaggaataaggatataaaaagatggatttccacaagatggtgtcaatgccttagttggtaaagttggactttgtatgaacatgaaaagatgattcttaaagtgaataaccactcaaattgtccaatgaataaaataattcaaagttgaagttattgttc

SEQ ID NO: 66362 - DNA, 188 bp, Zea mays
  Clone ID: MRT4577_160521C.1
aaaggcacccaagcgggattctttatgttaacaaaaatcccaaacgttaacatttagttcaaactgcataccaaaaaatttggttggtttacgttcacagcttaaaccaacatagtaaacctttggtcctccgacaggcctttaccatgttcatacaaaaaagcaacatttcctcataaatttaagtg

SEQ ID NO: 66363 - DNA, 501 bp, Zea mays
  Clone ID: MRT4577_160522C.1
ttcagcatagtggtgttgatccagccgctgttgcagcaatacgaaggcacgagatctcatcctggttcaatcctcacgtgcctatctcccaaggccacattgatcaaccgcatccctcaaccaataattcttctgttcttgagcagcatactattgttgtggcaaacacaagatggagtttggagagtactggtttttttattgctatctgcctggttgtcattattcttgcatggttggtcgctccacatgttggcaagaaagctgctgtaatctgtcttcatatgcttcttggaggtctatgcatattgactgtagtaatatccctgagatttgttttcccgagaatccagtatgggtctatgcaatattgggcaatcttgtttgtgtcctggttccttgtgtttggtgtttgggcttcacgaacacgcggcgcgcgttcctcatgagtatattcttgtgtacttgctatgtaaaataatgcttgtcttttctcccact

SEQ ID NO: 66364 - DNA, 596 bp, Zea mays
  Clone ID: MRT4577_160523C.1
tcactatagggtaagctcggtaccacgcatgctgcagacgcgttacgtatcggatccagaattcgttattgtcttttgtttttttgtcacatctggaaattcagttatttgttcattaatcgctgacatcatcatcgacattgcgaaaagctgctgacttactgaatcatgcaactcccttgctaaacgatgcctttcttgagaaatcgcttcttgtctcatctcttcattccaatgagctcgttcattcgttactttttgaaagagtccagcttgctcctctaatcgacgagccagaacgattacttttcgttccacttcatgaaattcatcatctgcagtaaacgaaacatcgctcggaaaattccctcgctctacttcaaatagaaacgtatttaatccttgtatacgctgctctatatagtaaccgattgcatatcctacaattcccccgataagtaaacttgtagtcataataaacaagccaattggaacagaagcgatggattccttccataataaatcatacacttgttgctcgcttttccatacatatacaattgtacatatgagtgcgatactaacagaggacaaca

SEQ ID NO: 66365 - DNA, 352 bp, Zea mays
  Clone ID: MRT4577_160524C.1
cctgccatgactcatcgacgcacgcgaggttctacgcgtaacacttttcaaaaactgctgggggtgccttctgaacggacggagcacttgcactaaaacaactcaaccacaaacacatacataatcttgatcaatgatctaaaggccctgctacaccaacaccaaagaaacttactgatgaatatagagcaacattccactgagcaacagaagctagacccatatagacagaccactctacacattctatccagctgcatcttctgaaaactccaaatgacaagtctgtaccatatttctaagataactgtcgctcacgttactcacacgatgttgagatcaacccaatacc

SEQ ID NO: 66366 - DNA, 471 bp, Zea mays
  Clone ID: MRT4577_160525C.1
ggtcttggttttttttttttttttttcttttctttttaaaaaaaaaaaaatggatttgggaacccccggaaaacctggataaagtaagttccgggcctcttttccggcaaaattttttggggtccccccttgcaccgggtgggcaaaaaaaaaaactttttgggggaaaatttccctttggcccgaaacaataaaaaatttttttgggcccttaaggcccttggggccaaacttttgttccagagggaaccctgtgtaggggggggacccacccccccgtgggggaaaattaaaaaaacgggggggggggggccgcctttggatataccaacaaaattcccttttggcggggggggcctcttttttgccaaaaaaaaaccccaggcttggttttcgcccccatgggaatcttaaaacacccccccccacactcgggagggggacccggttaaaaacccgggggggggccat

SEQ ID NO: 66367 - DNA, 324 bp, Zea mays
  Clone ID: MRT4577_160526C.1
aacttatatcaccacctccgagcccgagtggaaagggaaggcaggaatcgacccgaacgcgcgctcatccgcctgacggcgaccgcccacatgccgaccgcctacagcctacgcgcgccgacattcaccgggcaggagcgcctaaggctgacatcgccggcgctgccgatatgcccgacgggaggaggggcctgccctccgtatgagggttgacatactagcgtccgcgtgcgcgtggcccttcgactagctgtacgcacggaggaggcacacacattgacccttcaagaaatacatgctctgaaactggatccaggatataca

SEQ ID NO: 66368 - DNA, 323 bp, Zea mays
  Clone ID: MRT4577_160527C.1
ctttttctcagctgatgactgagactgaggcaaaagctgagaaacagggggaagtgccgaacgaaacccaatgcatcagatacgtgcggtcgccgaccacaaactccgaggacaacattgcctcttgcttggttgcatcaacacctctatcatcttccccttcacgctccccactatcaacccttatgatatcatcatgcacatgagggcacatgctatttctctaacccttgctcactacctaaggtatatatgcatcgagcactatgaccagaagtatcctatttttatcccacacgagtacacatacacaagccaatacc

SEQ ID NO: 66369 - DNA, 367 bp, Zea mays
  Clone ID: MRT4577_160528C.1
cacaaatcaactttactgctacctctgctagatgtcatacttccactaccttaacgagggctatctactccttcgccccttaaattacaacatcctgtttaaattaagacatgtaaaggtctcataaataatgcttacacctgcaattcttcattttcaaaggattttaaacacttctatattatctgaagtgcaaaaacatcaatcctttatttttttctcaaccactttatattacttttttttagggaaaaaaaccaaacagttattttatgtattaactctattaaatttttttacgcttggcctattataaatctttttacattttcattattcttttctttttaaaataaatcgtctttat

SEQ ID NO: 66370 - DNA, 435 bp, Zea mays
  Clone ID: MRT4577_160529C.1
aaaaaaaaaaaaaaaaaaaaaaaaaaaaaaaaaaaaaaaaaaaaaaaaaaaaaaaaaagaaaaaaaaaaaaagggggaaagaaaaaaaaaaaaaaaaaaaaaaaaaaaaaaaaaaaaaaaaaaaaaaaaaaggggcgccccttttaaaggacccaagtttccttccccttccttccaacgttttacttttttttttgtgcccccaaatttaatttccctgcccgcttttttaaaccttgggacctggaaaacccttgggtttccccaatttattccctttgaaaaaattccccttttccccagttgggttattaaaaaaaagccccccaccgttcccctttccaaaattttgcccaccctaattgggaattggaccccccctttttccgtccctttatccccggggggtttgttgtttccccccatttttcccct

SEQ ID NO: 66371 - DNA, 497 bp, Zea mays
  Clone ID: MRT4577_16052C.1
cgggtcttcgacaactggagctccgcaacaccgtcaatatggtcattaaccctacctacctcgcccagcgcacgcgctcatcggtcaactgggccgatgcgaagaagagggtcattcacagctaccgggactggctgcggtcggctcccgagatccagaccatgtattcgctcaacatgccagtatcccaacttcggaccaaaatgcggcaggaattcgagcggcatagatacgtgaatcagctgaaaacagtcgacgtgctgttatttaacagccaccaagaattccaggaaacactcaacttctggaagcaactgtcacacgtactcaagtacttccgtaccgaagaggatcccaaggcacggctgccaaacaacttcatcaacggctttttggaaggtcgcaactgagtgggctgtcgtcgcctgaaatcggaattgaaaaacaagtccaggatgcgatgtaaatagccaaagacaataccattttcctttccg

SEQ ID NO: 66372 - DNA, 1499 bp, Zea mays
  Clone ID: MRT4577_160530C.1
agatttcacctcctacgtgccgaatggctcctgtgtctcacaacaatgattccgattcgagtgatagtgacgacaacacaatcatactggccactcttcttaccctatgcatcgaagctaccaggcgtaggcgcaggcagtcttctatccctcgccgcgtgatcgctagggatcattttgctagggagaaccttatccgccatcactacttcggccctaaccccgtgtatccagctcacatgtttcgccgaaggtttcgcatgagtcggccattgttcctccgtattttgcaaggcctccagcagcaggatagttacttcactcaacaggtcgacgctacaggcctcgccggtcttggaccacttcaaaaagtatgtgcagcaatgcggaccctagcttacggcttacctactgatgccatcgacgaatatatacagataggcgagtctacggctagacaatgccttattcgtttctgtcgcgcactcattgcatactttagtgtgtggtaccttcgaactcctaaccaggccgacattgcacgcatcatgcaacatagcgagtcgagggggtttccaggaatgctggggtccatagattgcatgcattgggagtgtaggaactatcgtggtcgaaattctagacctaccatgatacttgaggcggtcgcatcgtacgatctatggatttggcatgcttttttcggcatgcctggtacaaacaacgacatcaacgtgctacataggtctccggtttttgacccaatgacaagcggtcaaatgccccccgtgcattacacagtaaacggacatgcatacaactttgggtactacctagccgatgacatataccctcactggccaacttttgtgaaagccattcggcacccctgggaggaaaagaagatctatttcacgcagatgcaggaaagtcaccggaaagatatcgagcgcgcattcagtgtgcttcaagcacggtgggcagtgctacgtggtcttgcttacagacgggatcgtaaccgtctaaccgagatcatcactgcttgcataataatgcacaacatgatcattgaagatgaaggggagtttgctgccaacaccgactttggagacaatgcttctgccactgcacattgcgaactcatacaagagggaaggtcggattgggtcatcgatcactttgatctacgtcgccaggaacgattttgcaatcttcaaaatgatcttgtcgagcatttgtggaccaaacgtgggagtatgtgatgaaacttgaaccttagtcctttaaatgatgtggctccgtagtgtatgttccatgtgtgtggtggtcattgtgttatgtttcatgtgtgtggtagtgggtgtgctatgttccatgcgtgtcttagtttgagttaggggttctgtggtcacgggcaatgagtacgaattcatttactcttagtggtcaaatgtgtactcttcagtatgaaatcaaatgtggcaccatctatgcaagag

SEQ ID NO: 66373 - DNA, 350 bp, Zea mays
  Clone ID: MRT4577_160531C.1
cgttgctgtcgaagcaagtaatcgatggcgtcgagctcaaacttatgcacctccctgtagcaaggggtagaagcacaggtttagaaagagaagaaacctcgcaggacatgtaaagatgacaagggcctggagttgaagaggagtataggatgggcacgaggccgacaaggaggcggcggctgcaggagcggcggtacgcggcggagagccggagcttgacgcagtgcttcaccagcggattcgccacgctcgccacctgcttgcgcttttgctcgcccagggaggaagctgcagacttcgccgcgtcagcggccgtagcaacaccggccgacagcaacggaattcgagct

SEQ ID NO: 66374 - DNA, 245 bp, Zea mays
  Clone ID: MRT4577_160532C.1
cttcaaacccaaaaagaggagatgccctttttttaaccggttttggccgcccctccaaatttttttaccccacccctgctttttaagaagaccaagcagtattttttttcattccacccggggggcccgcccttgaggccagatttcctgcagtcttattaactaatggggtctgcgtgctcccctggcgtcccctgcacccccagctttttgtttgtatgccagtttttgtcctttttattctc

SEQ ID NO: 66375 - DNA, 266 bp, Zea mays
  Clone ID: MRT4577_160533C.1
ccctgccggaccggaacgcatgcccggccgacccacgcgtacgcctgttcaagctctagccggtcaccatatcggacagtccgatagcatctatgtattcgaggtggcgctacacactcatccgacagcgggctaactcgctgtccgcttgacgctgaagacctgtacaggcttaccagcacacaaggatctgctaccacgcccaacaagatgaaggcccgcaccgaggagaagaccgggcatgcagtggtggcgaccaaagacac

SEQ ID NO: 66376 - DNA, 281 bp, Zea mays
  Clone ID: MRT4577_160534C.1
ccatggtacaaacctcggcggtgcgattgtgttaaatacgcccaccggaggcactaccgtctgaatagttagctgctgaggcaatatgttaccaaggcgatgatcactgactcgagcacgaggatgaccacgcacactggcactgcgacaccgtccacactcctattggaggcactagtaatgtatgccgctaccctgaccgtgctgctgctgtgcttgcccgtttcagcactcgtgtgctctactccaagtttcttatatactccaggtggtaccaggtg

SEQ ID NO: 66377 - DNA, 1868 bp, Zea mays
  Clone ID: MRT4577_160535C.1
ccggccgggaaaatccaatttctcgtgaatatctcggcgccgagcgcgagcccgcagtctgccatcccctttcggtggcaaccaaatccggcttgcctgcagcggatctccatctggtcggagtggatcgggtctccggtggtgtttctcgcctccgtggcggttagtggcgccggacggaccacgtccccgcagcagcggtcagcggcggctggcctagctgcggtggcttgaggcggctctcggacgggtgcctcgagctggcaccagcgggtgggtgccgcaactctcaccgctagctggtgtagaggcggcgagtcccggcgccatggagggtaggccgcaagtgtccgcttagagaggggtcaacaaagggacttgtcaagctacgacactgcggtcttcggttgccctgctcagcttgttgttgccgtacatgatccttcatgatttgtgagagatctatattccccgaatcttcaccggctctgccagatcactggcgatcttcttgccagccgcctccgctaacctgcgcggcacagtagagctcaggaaaagcggtgggactgagggagaaaagaggagatgactagcctgtcgatcacagtgatgacgctgaacttgcatgaaggcgagcagccgagcgagagtcccaacagctgggagaagcgccgggacatctgcgtcagcgtcatcaccagctactctcctaccatcctttgcacccaacaaggcttaagatggcaactggactacctacaacagtgcttgccaggttatgaacagtttggaatctcaagaaaaggctcacaggacaacactgatgaatactgcacaatattctatgaaaaggaaaaggtggagcttactgaaggtggcactttttggttgtcggaatcaccatctgttccaggaagcatttcatggggagcaaatgcaccctgcattgcaacatgggcaacgtttcaactcaaaagattagaaccacctggattcagttttcagatcgtaaatacaaatcttgatgaagttagccctcgtgctcgacgaagaagtgctttgcttacatggcaacatatagcatcgctggcccccaatttgcctgttatctattgtggaggcttcaatacacagaaggaatctatgactgggcggtttttgcttggcagatccagagaacatggtgttgttggtgatatgagagatgcttggccaaatgctcgagtgcgaaaaaatgtgtcaataatacacacatatcatggatttaaaggggagaaaaaaggtgccctagaatttcttaaattaatatttagagctctttgcctctgctgggatcgacagacacaggacttgcatgttgactggatcctatttagaggacgcccactggttcctgcactttgtgaggtcataaatgacaatatagatggcgtttatccgtcgtcgcacttccctatctttgctgagtttttgcttccacgctcagttcgcctagccgagacaccttcatagccatcgtgtcattttttttatattttttcccaatctcattctgattacggctgattgttcctttcgacgacttcaccatgaaattggggtaccacccttcaccacaattgctggtcacttcattccgcaaaacaagacaatatacacgtgcatcctttttatatatgtttccagtcagtagtcactattatgtgttgcctcagccttgctatctttttaaagttcaccttttccatatggcgttgattttcatgtatatatactgtacctttacatgctatttatcacaactgtgagagttcaagtaaatctgatgtaatgaaatttccaagctgctcttttttcacattctt

SEQ ID NO: 66378 - DNA, 178 bp, Zea mays
  Clone ID: MRT4577_160536C.1
atgggctgtgtcccgtgcctataaataggtgaacagtacccccgtactgcgggggctgacttggcatttgctttagcgtcacgcttgtactttcgccttctttcaagccgaaggtacatttgtaatttgatattatttctaattttctataataataatacagaaacgagttgataat

SEQ ID NO: 66379 - DNA, 2229 bp, Zea mays
  Clone ID: MRT4577_160537C.1
taggggccttttttttttttttttttggcattgaagagatagtatgagattttctcttaatatagagaatcaaagttatatcaaacggtattttaacggtctcccctacctctctagacaaccgaaacagccctccctaccgaaacagcttctcatgttgtacatgccctaaaactgattgcacatcggtcgttgaataaaagggcaatcatctcagcgcagagctcgagcccgcagcctgccatcacctaccaaatccggcgggcgtccagcggatctccatctggtcggcgtggatcggatcttcggtggtgtttctcgtcttcacggcgattagtggcggcgagccgaccacgtccccgcagcagcagtcagcggcggcttgacgcggtcggacgggtacctctagttggcatcagcgagtgggcgcggggcgccgcaagtctcaccgtccgctggtgtagaggccccgagtctcggcgctatggagtgtaggccgcgtgtctccgcttagggagggccaggggtcaacaaagggacttgtcaagtgacaacatcgcggccttcgggtgttggaggtgtccggcctgttggtgccgtaccacaggattggttcattatttgtgggagatctatatttgtcttaccattttgttcccgcttctagtccccaaatcttcacgggctttgccagatcgctggccatctccttggcagccgcttccgctgtcgccagccatcaccaacctgcgcctcatagtggagcccaggaaaggcggtgggactgagcgagggaagaggagatgactagcttgtcgatcacggtgatgacgctgaacctgcatgaaggcgaacagccgagcgagagccccaacagctgggagaagcgccgggacatctgcgtcagcgtcatcaccagctactctcccaccatcctttgcacccagcaaggcttaagatggcaactggactacctacaacagtgcttgccgggttatgaacagtttggaatctcaagaaaaggctcacaggacaacactgatgaatactgcacaatattctatgaaaagggagagcgtggagcttactgaaggtggcactttttggttgtcggaatcaccatcggttccaggaagcatttcatggggagcaaaggcaccctgcattgcaacatgggcaacgtttcaactcaaaagactagaaccacctggattcagtttccagatcgtaaatacaaatcttgatgaagttagccctcgtgctcgacgaagaagtgctttacttacatggcaacatatagcatcgctgccacccaatttgcctgttatctattgtggaggcttcaatacacagaaggaatctatgactgggcggtttttgcttggcagatccagagaacatggtgttgttggtgatatgagagatgcttggccaaatgctcgagtgcgaaaaaatgtttcactaatacacacatatcatggatttaaaggggagaaacaaggtgccctggaatttcttaaattgatatttagagctctttgcctctgctgggatcgacagacacaggacttgcatatcgactggatcttgtttagaggacgcccattggttcctgcactttgtgaggtcattaatgacaatatagatggtgtttatccgtcgtcgcacttccctatctttgccgagtttttgcttccacgctcagtccgcctagctgagacaccttcatagctattgtgtcaattttttgttctatttttcccaatcttattttgattacggctgattgtttctttcgaccacttcaccatgatcttgcggtaacccccctttacaaccattgttgggtttctttctgttatcccattccgcaaaacaagacaatgcacatgtgcatccttgtatgtttcctgtcactagtccctattatgtgttcgccttagctttgttatcttcttaaagttcactttttccttatgtcattgatttttagactgtcatatataccgtgtatatatatggtatgaatatgttgtcatgtatagtcggccgatccttgtatatgttataccgttatatatgaagtgtgtatagagatattgggagatttcatttggttctgtttccataaaccatgagatctctcctctctttatatatattttccaaagctggctcttttttttttaacattttctttaaaaaaaaaaaaaaaaaaaaaaggggggg

SEQ ID NO: 66380 - DNA, 454 bp, Zea mays
  Clone ID: MRT4577_160538C.1
ctcctttcgatctccattcgtttttgagttcctcgtgggctccgtctatctttcactcatgggcaagattaagatcggaatcaatgggttcggccgcatcggcaggctggtggccagggtggcgctgcagagcgaggatgtcgagctcgttgccgtcaacgatcccttcatcaccaccgagtacatgacatacatgttcaagtatgacaccgtccacggccagtggaagcatcatgaggtcaaggtcaaggactccaagaccctcatctttggcacgaaagaggttgcggtgttcggctgcaggaaccctgaggagatcccatgggctgcggctggtgctgaatacgttgttgagtctactggtgttttcaccgacaaggacaaggcagcagctcacttgaagggtggtgccaagaaggtcgtcatttctgctcccagcaaagacccccccatg

SEQ ID NO: 66381 - DNA, 645 bp, Zea mays
  Clone ID: MRT4577_160539C.1
gaattcgcggccgcgtcgacgtaaggaggaacgatgccgccgaagggaggcggtcgccgcgggcgaacggtgagatgtctgcatggtcatttcgattttcgtcacacatgcgtgcacttcaccgccatggtgttcgacaccacggcctgcgagcggcaagacctgctgctcggcaccgacccgcgccgtggccggcagagcaacaagcggcggcgcgcgagaggaccgggcccttcgcgtgatgatgacgccagtgcgaagcgggcggacaaggattattccgtcgggaaggagttggtgccgtaccgtgcgtcaggtgagcacgcagcaggtctcaggctccaatcggacgccgccagaatcggacggtaagctgcctaaccgcccaatgtatgtgctcgcagtgaagaccgagatcgaggacggcgacgaggtagcgctgcggttgatgatccccacaccaccgccgccgtcgaaggagcacgcaccgaggcgcgggccgccggagccccaggtccaggacggcgcggaaacggtgaaaacgcggagcgtccatgaggacccgcaggcgctccggggcccgggcggcatggcgtgggtggtgctctacatccccagcagcacgagggactggctgtcgcgcgg

SEQ ID NO: 66382 - DNA, 478 bp, Zea mays
  Clone ID: MRT4577_16053C.1
cggacgcgcggccgtattcgatgtgagccgcacagaccaggcctgccgggatgggcagaggacgctatggagagacacatagccgtggacggggccgaggcgccggaggaaccggagggccgggaagacggacccgcttaccgcctggggccagggccggcagaagcgaacctgacagatcgcgggaatgagacgatggcaacgatagagaatgtctccccgaatgtcgagggcgccgaaaagcccgaaagacatgacattcttgggaaccaccgtgacgcatggacgctcggggcaaatgaacccaacaggggaacagcagcaatgatggaggaaaccaaaaggtgctcaacgcagcgaatacacaggaggaggcctcggcgaaccattatctgctcgagctgggacgcgaaaaaaaacggaccgacagggacaactgactgggctgaagaaaaccgcgggagggacgaattactag

SEQ ID NO: 66383 - DNA, 355 bp, Zea mays
  Clone ID: MRT4577_160540C.1
agtggccgtatgtgaccagccggacggtgggcgaacgctgtgggtgatcgatcgggggcctgcccccgttggactttttttttgggggcgctttttaaaactggaagcttacctatgatctccgatcaatgaggtggagggggcccatggtggagttgaagtcctacgggagggttctttggtgggcccgctgccgttccgggtaaggttgtagggtgaaactctattccacggtttcggcaagggggtttggccggaaccacgtgagcgattaacagctgcggtccaaggcttaaaacaaaaaggggcgcttcgggatttggttttcgaaaatggtcattttttacccccattt

SEQ ID NO: 66384 - DNA, 202 bp, Zea mays
  Clone ID: MRT4577_160541C.1
tccgcacgcagttcttctgcgagatgaagaaggggctgttcaggcgacaacactaccttatgcacacgcgcggatattcaaaagtgcgctcccactgcgctgggcccaaggaccgacacacttttctcgtcgttggcatctcatgttccacacagacaccactgtttaatgaacacagactgattgttataggccacaacta

SEQ ID NO: 66385 - DNA, 389 bp, Zea mays
  Clone ID: MRT4577_160542C.1
aaacccaattgcaatgggggggaataaagtctttacaacataagttgtaaaccacacaacgacagatagataagaaccgacagaaacataacacgataggagccactttgggcagataacaggttaacagaggcacccaggcccaacgacctcatgccagtagagcgtttagcactcattaccctagttggcgtcctcaccctggttaaacttagaaccgacctcctagtagtccttctcgagcgccgccagatcctcacgaggcttggaaaactggcccttattcattcccttaccgacgttccattgaacgaaggcgcccttggcgtacatgaggtccaacttgtggtcaatgggggagaaaacccccacaacactggcggagttgg

SEQ ID NO: 66386 - DNA, 2163 bp, Zea mays
  Clone ID: MRT4577_160543C.1
ccacgcgccgtgcagccgtctgccctcttcctcctcgtgttggcgagtctcgccgtcgtcgtaaccatgcaggacagcaatccgttcacatcggtcgattgccaatcctcggggtcggggacgccttctcctgccccctcgtcgtcgtcgtcctccaacctcaacaacagcgcgttctggtccaacgtcgtcgcgctactggatgcgctcccttcggccgcggcaccctcgcgcttcgcctccatctccagcggcaacgggaccacccgcgcctttgtccggggaatctgccgcggcgataccttgccggccgactgcgccaagtacctccagaacgccacgctgaccatccagagccgctgcaacagaagcagccgccgcgccggcatctggtacgacaagtgcttcgtcagctacgccgacaccaacgcgtcgacgtccgaagagcaatcattccgctccatactctacaacacaggggaggtcggcgacaaagacgcctttgagaccacctactacgcgctcatgaggcagctcaccgcccgcgtcgtcaacggctccggcaccgccacctcgccgtcgtcgacctcgtcctctttgcggtcggtgtcgcccatgttcgctacaggggaggccgtctatgatgctgccgcccccaacggcaccatgtacgggctgctccagtgcatgagggatcgaacgcaagcggagtgtgagcagtgcttgaaggactcggttgggcagctgccaagctgctgttatggtcaccagggcggggtagtgctcggctacaactgcaatctgcgcgtggagatatacacctactatgatctcgcgatagatgcgccgcctccatcaggctcaggcttcatcgggcaaagtcaagtaaagaaaagggtccatacgaggacgattctcgctgtcgccctccctgttggaacagtgtttgccgcagccgccatccttggagttttcatgcaaaggagaaagaccaatcggaagaaaacacaacgactaggcaatgacatcaaagaagagaacatcagttttgttgcgccgggcaaacttagtatagcggtgttaagaactgcaacaaacaatttctcagaagaaaacaaacttggagagggaggttttggtgaagtgttcaagggtacattagaagacggggaagagatagctgtgaagagactttcacatacttcctcacaggggttcaacgagcttaagaatgagcttgttctggctgccaaattgaagcacaggaacctggttcagctccttggcgtgtgcctccaagaagagaagctgctcgcctatgaatacatgcccaacagaagcctggacaccttccttttcagtggcaatccagggacgcggcggcaactggattggagcaagaggttcggcatcatatgtggaatcgcgcgaggactcgtgtatctccacgaggaatcccggctgaaggtggtccacagggacctgaaaccgagcaacgtgttgctggatgcggacatgaaccccaagatctctgactttggcctcgccagggctttcagcaacgaccagtctgtagatataacaagacgaccggtcggaacccttgggtacatgtcaccagagtatgcctactgggggaacgtctcgaccaagtcagacatgttcagcttcggcgtcattgtcatcgagacggtcaccgggcgtaggaacaacagcccatacgatcagtctgcaggatctgtgtctgtgctcagccatgtctgggacaagtggagaactggagcaacaacggacgtggtggatccaactttgggcgccgagcactactcagaaagcgaggtcgtcacctgcatagaggtcgggctcctatgcgtccaggagaatccggcggaccgcccggacgcctccgccgtggtgcttatgctcagcagtcccacctccacgcccggtgataggcgagtcccatccagaccggcctttgtcttcagcactgcctcagcttggagctccggcggtgtgcagattggcaataataaacacacatccacgtccatggtttcagtttcagataacgaggtgacaatcacagaacttcagccgaggtagctaaaaaaaatggacatatataagctttgaaccgatgggatgaaacagattgtattg

SEQ ID NO: 66387 - DNA, 589 bp, Zea mays
  Clone ID: MRT4577_160544C.1
cccacgcgtccggtacatacagagattatatgcaaagtcaattcagcatgtccgatagacgtccatccgacaaagccatggatggtcatcactcaagctaacaagtttgttcatgtttgggactaccatacaaaggtagtggaatggacgattcagattaagggagcgaaagttagttcagctaaatttatagccagccaggattggattgtggcgggtactacccgtgggattcctccacgtgtacgattgcgaatcgaggaaggaaatacgccgtctttgtgaacacccgaaatctatcacgtctttggctgttgacgatgatgcccttgagctggtgctgtcagcgtccatcgatggcaagattttgatctggagctactggcactactaccgcgcacgtagaggtagacgtagtacctggcatttggaaaaaacatttgacgcgggaagccagtgtctgaagcaagtcgcgtttattgctccaagtgtccatcgcagcagcagcactatcatcgctactgctcgagactgaacaattaacattttggatcccgatcgttctgaccgatgccgtgagctcacattg

SEQ ID NO: 66388 - DNA, 751 bp, Zea mays
  Clone ID: MRT4577_160545C.1
ctctgagcattctaaagctcatagtcctctcctcccagagcatttggcatcgggctcatctccacctgcttgtatccagcgcctcgtcactctacaaaacactgatttcaacgtttgatggatgcagacaacacatacttccaaaacacagcacatacctccaaaggatgagccgcagcaacaagaagagctctaggggccttgacctgaaactgaacctctcacttcctgcaacaggggactcctccgggatggtgatggctgatgaggagtcgtccccgagctcctgcctgtcgtcagagaacgagcatggcctgcagtggtccaacagccccgaggccacatccatggttcttgctgcctgtcctcgctgcttcatctacgtcatgctcccacaagatgatccttggtgcccccagtgcaagagccctgtgctccttgacttcctgcaggacaacagcaacaacagtaataatagcagcaggaggagcaggaagggatgaacgatatggttccattaggctgagcatcatgaaaaagacttctatgaagtcctaggtccagtagttatattttctccggtcatttcttcagtgtgactgatatatacatactaaaataacgaaaaaaaaaaaaaaaagctagtatcacaaaaaaaaaaaaaaaaaaaaagggaaaaaaaaaaaaaaaaaaaaaaaaaaaaaaaaaaaaaaaaaaaaaaaaaaaaaaaaaaaaaaaaaaaaaagggggg

SEQ ID NO: 66389 - DNA, 1338 bp, Zea mays
  Clone ID: MRT4577_160546C.1
attgttttcctattgtgtgaccatgatacaaagtcataagcacccccttgctattaatatttttagtttgactggatggcttgtgctaacccactacaatggctcaatagtttttttgtattatgtacagtgacacgagatgccgccgaatgaaatatgatacatgccctagacttttttcaacaattatttttctcatgctttaatattttaaaatacggccctgaatatcttccttgtttggagtagttaatatttttggctagctttggatccttgaatgatgtctaagcttaggcatttcaaataattcattattctttttagatgctcaagacatttcccaatgcgacaaaatatctgaaaaagtaagttcgataaattttttggctatgtggataagctacaatgtactgacaatatttcattcttgttttaagcaattataagctttggtaaggttggtcctaggcacaaggaaaaagttgaacagagtgtcttgtccatctgctcatgggaagagtttctgcaactaataaggttctccctttctgaccaaatcacagatggaatgaataaatgcttagtcacaagaatattagtaatgtgttaaggcacattttccatttcaaatttatacatttctgggatatccttgcgagaaaaataccttgatatattaggttgaaaaataatattttctgttctaccaacagggaggtgaacataaatttgaacttccacccaaggaaaatgatggcatatgcatgataatgtacatcagtggaacaactggtgatcctaagggagttgtgatcttgaataagagcattgctaccattaattcaacagtagatgagttcctcaacaactcaaacgagtagtaggccattcatattttgactttcagtggatatgcttgcgacttcttcaggtgtgtggcctcgagctatggctgtggaattggtgcggtgtggtggagaagggccatttagtcttgatggcaagttgctggatgttaagctgccgccatcttcgtggagagaggaccaggatctagcaaaccaacttgattcttttcccaaatcattggttccacctctagaaggtagaaggggaagtttaaatgggacccaatatgaaaatgggcttttctccagctctcttccagatttttttgacaagaagagtgagctacttgtttcctacattttatttgaatgggtgtattttgtagtactaaacaatgagctacttgtttcacctgcacggtgcatgaacataaaaagaaagaaagcgtctaggagcatttgggaaaagaatcttgcttctttattc

SEQ ID NO: 66390 - DNA, 270 bp, Zea mays
  Clone ID: MRT4577_160547C.1
tcgttgtcaccatgaaaaaacaagaaggcgggggggactccttaatacaaggggagcaaaaacactaccccaatggcccatatgggggcccgttttttgggaacaaagataacgaagccgggcatgaaaattattatagaaactgaagagcgccctcaacggaggtcacaggtgggaaacttaaaaggccccaattaaacatggctcaaggacaccaatgtaccttggataacatccaactggcattccacccagaggggttttccggtt

SEQ ID NO: 66391 - DNA, 1514 bp, Zea mays
  unsure (1)..(1514): unsure at all n locations
  Clone ID: MRT4577_160548C.1
ggggtaccctccgggtctggccgggaaattgtggaagcgatagataaactgcaagaaagacttaaggttgtacctggtgatgatgctatgagcattgaggcccagaagaatgcaaccttgttctttaatatcctacttcgtagcacgtttgctagcaagagggtcttgaaggaatacaggcttacaaaggaagcttttgaatgggttattggtgagattgaatcgaggtttcttcagtctttggtggcccctggcgagatgattggatgtgtggctgcacaatctattggagaaccagcaactcagatgaccctgaataccttccattatgctggtgtcagtgccaagaatgtcacccttggagttcccaggttgagggagatcattaatgttgccaagaagataaagacaccatctttgtctgtttacctgaagcctcaggtgaaccagaagaaagaattggctaagaatgtccagtgtgctttggagtacactacactgcgtagtgttacccacgccacagagatatggtatgatcctgatcctctanggaccatcattgaagaggacacagagtttgttcagtcctattatgaaatgcctgatgaggacattaacccggataaaatttctccttggttgctgcgtattgagcttaaccgtgagatgatggttgataagaagttgagcatggctgatattgccgagaagattaaccgtgagtttgatgatgatttatcatgcattttcaatgatgataatgcggataagcttatcctccgtatccgcatcacaaatgatgaagctccaaaaggagaaatacaagatgagtctgctgaggatgatgtcttcctaaaaaagatagagggcaatatgttgacagagatggcgcttcgaggcattccagatatcaacaaagtgttcatcaaagaagggaaggtcaataccttctatcaagatgacggtttcaaagcagctaatgaatggatgcttgatacagaaggtgtgaatcttttagctgtcatgtgtcacgaggatgttgatgctacaaggacaacaagtaaccatctgattgaagtgattgaggtacttggaattgaggctgtccgtcgatctctcttggatgagcttcgggtggtgatatctttcgatgggtcatatgtgaactaccggcatctggccattctttgtgatacaatgacatacagaggtcacttgatggctattacaaggcatggtatcaaccgcaacgacactggacctcttatgagatgttcctttgaagagactgttgacatcttacttgatgctgctgtatatgctgaatctgaccacctgagaggtgttactgaaaacataatgcttggtcagcttgctcctattggtactggaggctgtgcactatatctgaatgaccagatgttgcagcaagcaattgaacttcaactcccaagctatgtcgaaggcctagactttggcatgactccagcacgatcacccatcactgggacacc

SEQ ID NO: 66392 - DNA, 399 bp, Zea mays
  Clone ID: MRT4577_160549C.1
ctaccaactcaccaaccaaaccaacaagcaacgatgtctacctacaagcccaccgagcacgacggcctcaagcaggacggaacccccgacaagcgggtgtccagcgagcatggcttcggcggatccgatggtcccgacccgcacgtcgagggagcaaagggcggaaaggcctctggatccactggcgagtcctacaagccctcggagcacgacggcctgaagaaggacggcacggaagacaagcgactctcttcggagcacggcttcggtggctccgacggcccggacccccacgttgagggccagaagggtggatccaagtaaatggacgccgcgaccggatcatcttgtatgacttagtgaagccaaagtgaagaagatgcaagaagtagcccgtgg

SEQ ID NO: 66393 - DNA, 659 bp, Zea mays
  unsure (1)..(659): unsure at all n locations
  Clone ID: MRT4577_16054C.1
ggccgggagtagtagcatcctagcaatgcattaggaggagggcttgtagcgatggctctgatcatggatagcgacgcgatgctcgtcgggtctgtcgcagccgaagcgcagcaggcagcgcggaacatgatcacctcggtcccataggtaccagagatgatgacacaccgactggactactccgtgccatggtgccttttcacacctacgatgccttcagagagtgcgccacgaagttccccgtcattcggcaccaccagtcgactagcagacgcgccactccaaagctcgccgccatcttcaggcagacgacccacgaaaccaccgacctcatggacgactgctcctgatgcaacgtttgcctgacgatactgccgcgtgaaccaacagaaacagacggacccaccctactaaggacgaggacccatacagctaactcataagtacaactacacgctacccgtgcaagcgctgaacctgtacctggtgcacgacccggacctgggggcgagacaccccgggctagccatcaagacggccatctggatctggatgacgccgcaatcaaccaagacctcgaggcacgccacgatgacctccaactgaaggtcctccgccaccgaccgcgccangnggaggctccccggatacggactgac

SEQ ID NO: 66394 - DNA, 389 bp, Zea mays
  Clone ID: MRT4577_160550C.1
aagttagggtaggcagccccaaacgtttttttagaaaagggcacatgcatgtacacaatccgactcacccaccggccggggggggaaaggggcctccgaggggcgaagtttttccttccttaataaaagacaaccgaaagcttgtctaccacctgccaaaaccttttttggccgtggggggaaaggccgcagcccatttaaaccgcgcggggggaaagggaatgtttataacccccgggagtagaaaccgaaagttttgctaggactccttaaaaaggttgtcaaacggggggggggtaaagtaaaactggggcaccaattaccgaaactattgcgaggccttattctggggggcaactaaaaggacaacttgcgcctggggcgtggaa

SEQ ID NO: 66395 - DNA, 430 bp, Zea mays
  Clone ID: MRT4577_160551C.1
cgtgagaaacgtacacatctaaacatgttaggaaatcaaagaagtatacaattatttcaggtcctggtaccacaaacatgcacaagcacatatttacacacacgtagtgacatgggatacaataacatagacacacttatttgtgcattatactagccaatacatacatacgggcgcccaaaaatgctggtgcatatataatcactattacactcaccacatagaacaggtggagggacgaacatacggtaggatcaataatcctaaaaagagaagttttttttacgaaacgggactagttgcctcctatgagggccctctagttgttgatgcgctcgcagaaagcgaagacaaaggagtctattggcggaaatacgtgaccttctaatgcatctagacggggggcgggtgcttcgagcacttcttcctt

SEQ ID NO: 66396 - DNA, 278 bp, Zea mays
  unsure (1)..(278): unsure at all n locations
  Clone ID: MRT4577_160552C.1
tatanttttttttttttttttttttgttttttttttttttttttttttttttttttttttttgtttttttaataacggacccacataatatgagcgggatttgtcccacccaagagcaagagcacgcgaaccgcccccccgcagcgcgtggttaggtgttgggagggggtttatccccagaggcggcccagggggtcggcccagggatatcggccggatcccgaagggctgcgcgttttccttattgcggggctcatgccagtcgggggtaaacaggg

SEQ ID NO: 66397 - DNA, 641 bp, Zea mays
  Clone ID: MRT4577_160553C.1
gcgggagggcacgagcgcgactcgcttgatcctgtctgttcctccttagtatctcctcgccattgccgtcgccgtgccaggattggggccctactcgccgagatccgaccggggctctgattttccaaccgacgcaagatcggggggtctgaccggccgcgagccgtcttctcatgggcgatacagcgagatccctgcggttcggttgtaaatacgcgatctttcggggcacttgcttgggttgcttggcggtgccggtggtgctgtagtgtggagggccgcggagatgggcgtcgtgggcgagaagttgcagctggggacggtgggggcgctgatcctctccgtggtgttctctgtctccgttgtcatgtgttacaaggcgctcatgatctccctcggctctagcttcacctctgccttgacgagctgtgatctcgctgttacattctgctgccttaatggatcattatggatgacgttttgtgatcataagccttttgagttcagacctgccatggtatctggagtacttgacggaatcttcattgtgctgataaacgtgagtgttggcttcgactctgttgggtttcaccagatgacttagctgtcactgatgccctgcactgagcttgtagagacac

SEQ ID NO: 66398 - DNA, 632 bp, Zea mays
  unsure (1)..(632): unsure at all n locations
  Clone ID: MRT4577_160554C.1
gttgccttattaacaacaggaaagtacaaacattacgagtactgccaataaagtttgctgggcaaatactgatggcttgctatgccgctcatgtagaccaacaaggctgttattgttattattcatatattacgcaaacatgcgtatcattagccgaccgatccactgccggtacggtcaaagttctgtggcgtgctggtgctggtgctggtgctcgctgctcagcagtcgatgtggatactgtgccagccgaagtcgccgcaggcctgggtgtcctcgaacacctggtacggcgtgccgacgcagccgggctgggagtagagcgtggccgtctcgccccggaagttgaactcgtggccgccgtggaaacggaggtggttgcagccgcacgagcccgcgctcgcgatgtgccccttcgtccccgtcgtgcaccctggcccgccccaggaagtcaggtagctcctcgggnccgacccgtccgaggccaccacgcccgtcgctgcggcgacgactatggcggcgatggccaccacggctgtggcaacaaacattgtcgcggctttctttgaggccatgtcaccctgcccttgctacgtactagctagtgtgcgtggtggccttgcctcgtgccg

SEQ ID NO: 66399 - DNA, 548 bp, Zea mays
  Clone ID: MRT4577_160555C.1
agcgtaaatcagactttgtagtatgtatttaaggctagtggcaaaaatgtttagtaaaattgacccaggtggtgacacagggtccttatcagaggaaactcagtatacaccaataaaaaagatctaattggcctatcctaattcttgcattcctcgagtgaactttgataaaaaagtattattgacgcacaaacctaaaaagaaaaacatgctgttaagaaaattaatgtaacaatgttttattcccaaaagacatgtatagaaaatgaagcattccatattccgtaaactagcagagctaaggacttaatgtgcttccaatcaactggatgtgagcgcaaaaaaagtccctatacatttctagtagaaagatttcccattttccaataactatttaagcatctggctgtgagcgcaaaaaagtccctatacatttctagcaaaaagatttcccattttccaataactatttaagcatctgccattatacttgggggatcaggaaattcaaatccatcaagccaattactgacaaaagcacgtaattc

SEQ ID NO: 66400 - DNA, 421 bp, Zea mays
  unsure (1)..(421): unsure at all n locations
  Clone ID: MRT4577_160556C.1
ccgccctttggggtggggtggttttaaaaaaaatttttttttttttttttttttgacacaaatgctgaattttattggatcattttttcctacaaaatttgcaaattacattaatgaaaatccactccatatttatttggccccaaactaaaacataaggtagaaagggttttttttttttacaccnaaaaccaannannaaaaaagacccaagcctccccaaaagaaaccaaagcaagaacaccactgcaccgagggccactccatggaaactaaaaagggttgaccctcctccaattgtgccttatcttccccgccctcccggtgagcggcgaaattttgcccatttttaccattgacttggcgaaatggtcgaaaaaaaagcccttgtcggcggcgtaacggtggacaaagtccatct

SEQ ID NO: 66401 - DNA, 366 bp, Zea mays
  Clone ID: MRT4577_160557C.1
gaaagaacgggccagagtctcagctgatactcaggatcatcaaccagaaactggaaaagatagtagtgagaacactactgaatttcgttatgtgcctgagggtgaggagagcacctctcaggcattgggtgctgcaacagctgaccagatcaattatgacaatcagattaatcaatctttcttggaagatgaaagctgtatcaggaatttggaacatagtgatgagagaacacctgataaccctgaggtgccttaccttcaaacttcacaagcacttcccaacaagtctgaaaatgccaatgaattggatggaagagaaattcaaactgatgcatccgttcaaaatttagttgaaagaacagatca

SEQ ID NO: 66402 - DNA, 225 bp, Zea mays
  Clone ID: MRT4577_160558C.1
tagagttgttctcagagaatccccatgcaaacaaacatgttagagggagaggagaggagaggcgagtttttttttcactctatatccccttgtttctttttttcctacacttcatggttttgttccatgccttcattttttccctttggccctttacttttgcttttcttgactccttacttttcacgctaacccccataaccaactttgttttttcccttcacc

SEQ ID NO: 66403 - DNA, 1218 bp, Zea mays
  unsure (1)..(1218): unsure at all n locations
  Clone ID: MRT4577_160559C.1
tgtaggaagtgatggtctagtgaagctatggacaattaagacaaatgaatgcattgctacttatgataagcatgatgggaaggtaagatatcattgccatgcatcaaggaagagttatttttctgtcttattgctggagggggctcaaactcactattatttgttccaataggtctgggcattggctgttggcaggaaaactgaaatggttgctactggtggaaccgatgctgtgctcaatctgtggcatgattgcaccatggaagataagcaggaagatttccgtaagaaggagcaagaagttttaagaggccaggaattggaaaatgctgtgtcagattctgactatgcaaaggcaatacaacttgcatttgagcttagaagaccacacagacttctagatttattctcaaagcttgcaaggagagctgatgcagaggatccaatagaaaaggctcttcttggtcttccaacggatggccttcgcgtgcttcttgaatacgtccgtgaatggaatacgaagcccaagttctgtcatgttgcacagtttgtgctttttcggttattgaggagtttctctcccactgatatcctggagatcaagggcatcagtgagctccttgagggccttattccgtattcgcagaggcatttcagccgagtcgatagactagtccgaagcacgtttctgttggactatacgctgatgcgaatgtccgtggtagatccagatgtagatgcgggaacaatcaaagatgaaatgaacggttcgtctgtggagaacggtgaacttgcagagcctcggcctgcttcacctgtaccacagaagtcaagcaagaagagaaaatctggcaaatcaggtaaaaagggcaaggagaagaaggtgaaggttgcctcgagcggactactcagcaaggatgtttctgttgaaccctaaatatctagctgagaatctgtttttttatgcatgccgccaattttgtagctgctgttgcaactgacgttgcccaacacacgaatcccatatgatgtaaatgcatttttgctgatttattaggagggcgaagtgttatcaaaatctgccatgccaaatgttctggtaagcaaaagttgccaaaagttggatggaataannnnnacatagatttggtaagccaagtatnnnnnnnnnnnnnnnnnnnnnnnnnnnnnnnnnnnnnnnnnncccnnnnnatccgg

SEQ ID NO: 66404 - DNA, 182 bp, Zea mays
  unsure (1)..(182): unsure at all n locations
  Clone ID: MRT4577_16055C.1
nccacgcgttcggcttcttctactacacgacgacaaacatggggaagcctgctaagatcggagagaggggcgaatacgccggctagcgtcgagatccgagggctactccggaccgtctgatcgaggagaaggtcagagtggacaacagaatgctgtatgcgttctatgtccttaatctacat

SEQ ID NO: 66405 - DNA, 325 bp, Zea mays
  Clone ID: MRT4577_160560C.1
tggggagccaaaacattatttttgatttttttttgcaaatgagcaaattgaaggccctgacatgaaaacatgttaggtggggaacctacctaacagggcaacagtgattgatcaggaaaccgttgtcgtttttacaagaagaatgaaatattcttttcacctccatgttttattatattacaaactttattttagtttgctttaaacacatgcttgttgatacagaccattaccctgtttactatacgcatcatccattagtgtccctctttccccctttttaatatttacaaagaggcgtattgaacagtccttcgttttaaaa

SEQ ID NO: 66406 - DNA, 365 bp, Zea mays
  Clone ID: MRT4577_160561C.1
gtgtactgtggccacacgcatatatctctcattacgtgctgccagccatgccattgttccagctgaagtaacagtcctcaacattgctccatgtttcaagggtttattggctgcccgccacaaggccatacgctgagactgttgtttgacgacagcggcttctcgccgcatccacagatatgccaccggaccaccgtatccatctctgacctacacaatctgaattgttgacggcaacttatttatgtgacatattagggcctgctgataatatgacatcagacaaatacctatagcgcttactactactagcctgggcaaaaggtccccttatacaacgctacaaattatgtgacgtattctac

SEQ ID NO: 66407 - DNA, 214 bp, Zea mays
  Clone ID: MRT4577_160562C.1
acatggccgattatgaggttacggtccgattacttgctttgcatgctcttgtctggcgtgcagatgctgtttacctcgacaaggtaactcgggaaacattaccaacaggcattcacgatttccaaggttaccagacctacagggagcaacctggcccagattttactctgacaacgtgcgtttgctattgcggacgctgtaagctacctcccgc

SEQ ID NO: 66408 - DNA, 646 bp, Zea mays
  Clone ID: MRT4577_160563C.1
acttcaatatattcacgcttgattcaataaatatatgttcctttgcacagaccgatagaagctaaactgaagtaaacatgtgtacaattcatctacctgattcctatccgttaaacatctgatccaccacaacattcatacagtcattgccaaagctatgtgtaccctttggtgaaaggcctggcaaattggcagtacttatctacgtccgggtgccctttgcaagtcgtaggcacccaagaaccatgcgctgcaccagttccatactgggaaccataatcagtggcagcacttgcccagagttaaaagggtttgcagcataattggccttagggttcccatagcttccaatataaccttgattgcctgaagacacaatggcccgtgacctcttctacgcgttaccaacctcagctcgaagtttctccacacctgggtttacccctttcagtcaagaaactccccaaaaacacttttctagaactcattgacaagatagctgataaactaaccggatggaaatctgccctcattcacacagcaggccggctgaccttggttaaatcagtgctcacagccattcctatccatcaccttatagtgcttcaatgccctaaatgggtgatcaaggctattgacaaaattc

SEQ ID NO: 66409 - DNA, 183 bp, Zea mays
  Clone ID: MRT4577_160564C.1
ccgtcatccttgatctgaagtgaagttgcgtggatatcgacgactgctggatgcacgatcatgtcttggtcatctgatgcgtttcggggcatctgttgcgcagtgctccatggcctgctgaacgtgtatgttggcatcgacacgagcttcgaccgtgacgtcgaattccgctgacgacgagga

SEQ ID NO: 66410 - DNA, 354 bp, Zea mays
  Clone ID: MRT4577_160565C.1
ctttttcttcttccaacccatttttccttccttttgctattgagaaggtctttcaacacagggtgaaaacccccttcctatatttctttatatcttcacccccaatataaatttcctttttaacaagatctcattccaatttctcatccattctacatcttatctcttctatacttctacctatatttcattcacttctccgtcctttttacaacatcttttcttgtaaaactcctgtcattaccctaatttaatcagtttttcctataaatccttctttctctcaacttcctttattatctaaaaaaattaaaaaaggtgccccctttcttaaaaattccaaatttactttcc

SEQ ID NO: 66411 - DNA, 404 bp, Zea mays
  Clone ID: MRT4577_160566C.1
atcttaagagcttttggtttacgagcggggcttacaggccagcacagtggttcaggggggggggggggtaatccaaatttaaaacatcggttccaaaaacgtctcgagggggaagggtgcctgaaaagggccataaaaaagctccgggtttaatacttcgacaaaagggccccgaccagcaggcgggtatacttcactggttccttggtgggacaatggtggcagccttttttttaacaggcttttccttttctgacaagaacacctcaatggggcaggggggggacatgtagggattgatgccccccggaacacggggggggcggcccctctttgaaaccgaatccatggactctccaacccccttgggaaacattttttcatttggccaccaaactttgatc

SEQ ID NO: 66412 - DNA, 639 bp, Zea mays
  Clone ID: MRT4577_160567C.1
ttttttttttttttttgacacggatgcagtagtggttagcctttctttgttaataaaaagagtaggcaaatgatgaatgatgctcatacatcagaaatcaagcaaatagtaagaacagtattttgatgtactatttgtccacttaatatgaatatttaaattgtcgtgtctctaggcaggccgcaggtatacaatattggcaccatagatttggccttatcggtgagtgctgatcccctgctgcccgctacactgagagcttggtttagtggacagagaaatggagggaatttatggggagggatcttcttgttattcaaaatttaatagcaagataaacctttcctatagatcttttcattttcctatccaccaagcccgccctgatggtgacgtgtaggcccctaaacgtcagagaagtttcgtcacctacctcaccttcagtttcccatctcgagaaaacggtaagccaagaacaagagaaccgaatctagttcatacgttccatattactactattatcgggcggtgcaggtggtgggatggacaaaaacttaaagttttgctttattaaattcctgggccggcttgaaagcgctacggcagtgctccctcccgtcacggaacgggctcgtgccg

SEQ ID NO: 66413 - DNA, 3293 bp, Zea mays
  Clone ID: MRT4577_160569C.1
gcgtatatatataacccatagcacattagcagaaccgtcaaagcacatatatacatgcctgccgtcgtgctacagtactacaccgcagttggggcatggtggcccgcgagggagagtgagggccagcgcgccatgcccgcgcgacacgcactggcactgccggcagtggcacaggcacacccccacgatctccccacctgggtcctgggctccacagctgcctcgccagtcgccaccaccatgcatggaacggacggctacgggggtcttgtttgctctctttgactcggcgcctgcctcgggaaacgtggtctctacatgcttccgcttccgcctatatgcattgcctggctgcctgctatagtagtaccagcagtgtaatatgtacagttctgatggcctggcactggcaggtcctggatgctcgtcggtggcgtatggagcgtcggaggagatcggcccgttccggatcaaaccaaacgggacaggcctgttcctcaacaagtactcatggaacagaggtcagaaagaaagaaagaaagaaagaaagaaagaaagaaaaacccttaaaactcttaattaatcatcatcaactgcccgttccattgtcgcagaggcaaaccttctgttcctcgagtcgcccgcgggagtcggcttctcctacgccaacaccacctcggacctcaagacgtcgggcgacgagaggaccggtacgtacgtagtgaactctgctgctgggccatcgagctagctagcagctagctcctcagactgatctgatgcctgaaatgaaacgccattagcagctgtgtcactggtcaggtagtcccccagctagctgacgccgttgcgaaatgtgaataattgttggctgctgcagctcaagacgcgctgcagttcctggtcagctggatgtcacggttcccgcagtaccggcaccgagatttctacatcgccggagaaagctacgcgggtgagtcactgtcactcgctgccattgctgatccacagggacacaccagctagctgtccaagagttttctttttttgctgcttcaatctgttcactttgctcttgcttccacaggccactacgtcccccagttggcaaggaagattgtcgagtacaacgaggcctcgcctcaccccttcatcaacctcaagggaatccttgtgagtatcgtatcgtatctatgcatgctgctgccaaacacgagcaggccgccggccggctccagtctaatcttaacccccctccaaaaaaaaaaaacatcgatcaggtgggcaacgcggtcaccgacaactactacgacaacatcggcacggtcacctactggtggacgcacgccatgatctccgaccgcacctacaaggccatcctcaggtggtgcaacttcagcagcagcagcatctcgcgcccctgcaaccgcgccatgagctacgccatgaaccacgagttcggagacatcgaccagtacagcatctacacgccgtcgtgcgccgccgccgcggccagggccaacgccaccgtgctcaggttcaagaacaccctcgtccgccgccggcgctcctccggctacgacccctgcacggagacctacgccgagaggtactacaacaggatggacgtgcagagggcgatgcacgccaacaccacggggatcccctacagatggactgcctgcaggtaaggtatccacatacagcttcttttcggtggttgccaggccatttaatttaagagtgccactgaatgttgttgttgttgttatttccctatactgtcagtgatgtgctgatcaagacatggcaagattcagagttctccatgctgccgacgtacaagaagctgatgaaagcaggactgaggatatgggtgttcaggtaatcgatcaagagtctaaatctgaaacgggaaaattatatatatatacttgctacttggtcgcataacaacactatgtgacctggcaaaactgcagcggcgacacagattcagtcgtcccggtgaccgcgacgaggttcgccatcagtcatctcggtctgaagatcaagacccgctggtatccgtggtactcagctggacaggtacggaacttgccattgctgctgttgttgcttgtaacgtctttctgagtttggggcgcatgtgcaggtaggaggatggtctgaggtgtacgaagggctcacgtttgcgtcggtgagaggcgcagggcatgaggtgccgttgttccagccccggagggcgttcaggatgttccggtcgttcttggccggggagccattgcccaagtcctgaaggttcctcacatgtgtgaggccatgcctacctgatcatgtctagctacggtcctgacggaaatgtagaagacgggtgagaaggtgacgttccccaggtagagaatgacttgtttgataggcgcgcagttcatagctgaggagtgattgattggtctcgggagaaggatgtagagaataataaggatggttatgttatgccatggaaacccatgagcattgcaatgattagcgaataattttcagtgatctcactctcaagtgcttatgttatgttatgccatggaaacccatgagcaatgcgacgaataaatttgaaggatctcactcttgaaccaaatatgtttcatcgcaacacagttttcacatcgtgattctttgcccctccaattataaacgtagggcgttttaggattctcgttgttcaagttctttagcgtggctcgtcaacactggttgatgttactagactcatcatcatagaaattacttagtaataatttatagtcgtctctatgtgaagtactatacgtttacaaaaatttaagttatactgttatattggacatagtgtctcttatggttgttatggcagtgatcagtactaataagggagcgtaaggaggccgaacgaaggccttgcctacgaccgagtaagatataaggatttttttcttaattattgtttaattagattgatatatctcttcttatacagagcaacttatttgacctctatgaaatatcataaccaaattgatctagtttatcttttttttcttatcctaagtaaccaaatcaacctaacttatcttttttcattatatcctaactaaatcaatttaactttttttttctaacaaaccaaaccaatctaatctctcttttcaaacaaaccaaaccaatataatctttccgacactcagtttatcctcgcgctatactgatggctggttgcagatgtcgacgttcccctagagacacaaggcttagag

SEQ ID NO: 66414 - DNA, 386 bp, Zea mays
  unsure (1)..(386): unsure at all n locations
  Clone ID: MRT4577_16056C.1
ngctgaagcaggcacttcaccttggggccatacagaaaaggaggattcgggcgcgtgcacactaccgggggggggcgtcggtacccgcggcaggccagcccggcgaagcaggcgctgtggtgtgggggccagggccagcgctgggcagaaggcgaaagcgcccggagaggcggggtcggaaggaaatggcgggccgcagaaaatcgacctcaaatccccgcacgggagcgaggctgagactgatacagccggagcgtgtagcacttgcactaaagagcctaacggcaaagacctgctctttggccgaccagatgcagcgggaaaaggacagaaacccatcagcggaggaatcgcacagtgggacggccagtatggcccaggtccca

SEQ ID NO: 66415 - DNA, 344 bp, Zea mays
  Clone ID: MRT4577_160570C.1
cacagacgtgtagaccattttcttaaattcttcctttccttttctttttctacaaatttattattctctagccaagcaggttttatcataacatttctccatcttccatcacatcctttttatttactttattaatcctttctttatactaataatatccaatattatatttacataatacccccctctaaaaaaaaaaataaataaattcctccctttttatattatccaaccttacctactcatacattcaacaacaatatctctcctataattttaacctaaaattcaattcactttcctaaccctttaaaaaccttctttacttaaaaaaacccctttcc

SEQ ID NO: 66416 - DNA, 553 bp, Zea mays
  Clone ID: MRT4577_160571C.1
cctcttgctgccttttttttgggtggggttttgtttttttttccggtttttttttttttttaaaaaaacaaagggggcttaattcccaagacccccacccggttttatccccctaaccctttggcaagggtttttgcccccccccaaaaccccccaggaattttccttctcacaaaaaaaacttttattcccctctcggggggggccccacaaaaaaatttcccttgggaaaaaccaacttggggggggttctgggcaaaaaaccctccccaggggggtggacccccgcggtactcttttggctccccaaaaaaaaacccccccccccccccccctggggggttcacccccccctttaaaaaccccccccccctgcgcccccgcaaaagtgttccccccccctttcccaaaacaccatatatccctctttttggggggggggaacccctgataatctaccaagggcccctcccgcgcggtgtttttttaaacacccgggggtagggggtgggggaccacccacctcgccgggggggggccccccccccccttt

SEQ ID NO: 66417 - DNA, 256 bp, Zea mays
  Clone ID: MRT4577_160572C.1
aaaggaaaaggggtaaatgcttacgtgttaaaagtgaaacacacgctacacatatgctcgacaggacgactatgggggccccgggttccaacaaagactacaaattttaaaattacctatccatacaggcacctcctccaatgcaaatgcatggaagaaatctatcctccttactacatagaacattcagccgatctaccatatctggcgctaccacagggggcgccccatgtagcgataccagaccaccaacacc

SEQ ID NO: 66418 - DNA, 191 bp, Zea mays
  Clone ID: MRT4577_160573C.1
gtgtactcatttcatcttatactacaatatttgaacacacaaacttcacctaagacttctgtgacgttcaaaatacattttcatcccaacaacgagctcactgcatatcactctactctaattagcaataactcccttctcacacaaaaactaaacaacatgcatattacacacacattcctcttcaccta

SEQ ID NO: 66419 - DNA, 317 bp, Zea mays
  Clone ID: MRT4577_160574C.1
tacagtcgtgcatccttcttctgtttcagagacggcactctaaggcagccagcgactgtatacacacatatagctggagcaagctggtacaatcggaaggaggacgctggcaccacgcactgcacgctgtagacacaactgggtatataggatgtgtgtatatgagcgaaagctttataatcacagaaaagacaaaacatctaataatctgcagcaatttgcaccggcttacaactccgggcgccaaggcaccggatgagccactgatggttcagaccgagctgtcggtgaggggctgacgcttgtttcatttatac

SEQ ID NO: 66420 - DNA, 1036 bp, Zea mays
  Clone ID: MRT4577_160575C.1
aatacatgtcttgaaattgctaatggaactgaagcaaatgctaaaaagagtgataaacagttaaagaaggaagcaagaaaacaaagggaactagaaatcagtgctatggaggaaagggctttgcaggaagatataccacaaactccagatgattttgagaagttggttaggagctccccaaatagtagttttatctggataaagtatatggcaactttgttagatcttgcagatgttaagaaagcacgtgcagtagctgagaggatgctgtgaaaaaggtattccaaagagccttgcaatattgtgatcccaaaaagctgcacttggctcttcttgcaatgtacgagaggaccgaacagtatgagcttgcagatgaacttctagacagaatgaccaaaaggttcaaaacttcctgcaagatatggttatgccgcattcagtttgccctcaagcaaggcaaggatgttgagtacatcaaagccattgtaaaccgtgcacttctaagtttgccacacagaaagcgcataaaattcctctcacaaactgctattctagaattcaaatgtggggtgcctgaagaaggaagatccagatttgaactaatattgcgggagtacccaaaaagaacagacctttggagtgtttatctagaccaagaaatccgccttggtgacgtagaagttatacgggcattgtttgagaggagggtggcttgtctgaccctacctccaaaaaagatgcagttcttgttcaagaagtatcttaacttcgagaagtcactgggtaaagacaacgaaagaattcagcttgtgcaacagaaggcaatcgaatatgttcagagttcactgccgtcacaagacaactcttgaactacatggagacttaataagcccacaaacaatcattaggaaatgccagtcgtactgtagatgtgatctctttgatgacattattgtgaaaaggtcaatgtaaaatgtgggctattcaaaattttgtttgaaaccgttatataagttatgaggcattaagtctagcg

SEQ ID NO: 66421 - DNA, 143 bp, Zea mays
  Clone ID: MRT4577_160576C.1
atagagttcttttagctgatcagaggctgcactgggtcgggtttctcagggtctgaggaaatatcctccaggagataatggtaaaggagggcgcctacctcagaccgctgattgtaacgcataaaggcgtctctcctgaatgg

SEQ ID NO: 66422 - DNA, 2361 bp, Zea mays
  Clone ID: MRT4577_160577C.1
gtgcacgagttcaaaaaattctacctggtgttggggggctcgtcgttcagattggccctcatctccatgggagggttcattatactgaaattgttgactcttgggtgtctgaacccttgtctggattccatgagggcccgtttgtgaagtgcaaggtcctgtctgtgagccgctcatcagaaggatcacttcgagttgatctatcactccgttcatcaaacctgatcagagactctaacaactcaagactagatgatctggaaacctgtacctcccggattgagaagaaataatattgcgggagtacccataaagatcagacctttggagtgtttatctagaccaagaaatccgtcttggtgacgtagaagttatacgggcattgtttgactctatcaaatttatgacatgactatgttgaaaatccacagaaggatttaagaaatataataatttcgagaagtcactgggtaaagacaaagaaagaattcagcttgtgcaacagaaggcaatcgaatatgttcagagttcactgccgtcacaaggcaactcttgatctacatggagacttaataagcccacaaacaatcattaggaaataccagtagtactgtactactgtagatgtgatctctttgatgactccttgaacattattgtgaaaaggtcaatgtaaaatgtgggctgttcaaaattttgtttgaaaccgttaaataagttatgagtctagtaagtcatgtttctcccaatttatgagaaggggcaatgattaagcctgggaatgaagaaatcttactttgattctgatctgactgctgacacaaatgatgatgaaagtgctcttatggacatcagcgttgcccctcagatggttgaatatcataacagaaatttagttcaccgcaaagcagaaccaagggcttctgttccgccgcctcagtcacctggatgaatcggaagggcgccggcggcaagaccgacctgcgtcccgaccgtaagcagttcaaaaggcaccacaaggaggatgcagcagctgagcagggggatggcaacggagagccgggttctgacctagaggataatattagtaatacatgtcttgaaattgctaatggaactgaagcaaatgctaaaaagagtgataaacagttaaagaaggaagcaagaaaacaaagggaactagaaatcagtgctatggaggaaagggctttgcaggaagatataccacaaactccagatgattttgagaagttagttaggagctccccaaatagtagttttatctggataaagtatatggcaactttgttagatcttgcagatgttgagaaagcacgtgcagtagctgagagggctttaaaaacaataatccccagagaagaagaagagaaactaaatgtttgggtagcatatttcaatctggaaaatgaatacggtagtccaagggaggatgctgtgaaaaaggtattccaaagagccttgcaatattgtgatcccaaaaagctgcacttggctcttcttgcgatgtacgagaggaccgaacagtatgagcttgcagatgaacttctagacagaatgaccaaaaggttcaaaacttcctgcaagatatggttatgccgcattcagtttgctctcaagcaaggcaaggatgttgagtacatcaaagccattgtaaaccgtgcacttctaagtttgccacacagaaagcgcataaaattcctctcacaaactgctattctagaattcaaatgtggggtgcctgaagaaggaagatccagatttgaactaatattgcgggagtacccaaaaagaacagacctttggagtgtttatctagaccaagaaatccgccttggtgacgtagaagttatacgggcattgtttgagagggtgacttgcctgaccctacctccaaaaaagatgcagttcttgttcaagaagtatcttaatttcgagaagtcactgggtaaagacaacgaaagaattcagcttgtgcaacagaaggcaatcgaatatgttcagagttcactgccgtcacaagacaactcttgaactacatggagacttaataagcccacaaacaatcattaggaaataccagtagtactgtactactgtagatgtgatctctttgatgactccttgaacattattgtgaaaaggtcaatgtaaaatgtgggctgttcaaaattttgtttgaaaccgttatataagttatgagtctagtatgtcatgtttcacccaattttttggaaggaactattctaagctggatctggttcgaatattgaccttttccatctgtggtattaactgttgaggccctaaggaaaatggatcccgggccatttagctaagtac

SEQ ID NO: 66423 - DNA, 374 bp, Zea mays
  Clone ID: MRT4577_160578C.1
aacacgcattcgaccacgcgttcggcagaccattacctgttaggctagtacggaaaaaataacatggccttgcaacgagcaggtacagctttctatgcactgaccaacgaccgtaaggagaagagcgccaaagtcgtgctgcgccagacaccaacgggttgtagcatgcggctgaaggcgcatgcgccgaaaccaatcgacggataccactctcatggcggggaagctgagaacgctatggacctctcattctccctgtcagagaacgccgatgtcaaggtcgactgccaccgttgcgagctactaaggatcgacgagtctcatctgacagacgtgatgtagagtgattaagaggaggatgctgtcggaggcat

SEQ ID NO: 66424 - DNA, 145 bp, Zea mays
  Clone ID: MRT4577_160579C.1
ttcgagctcgcgtcacgcactagcagagagagacagagcccatatctccatacctagacagacggatagagattccgtgccgggtacagtgcagatactgaagacgcctaggttgaactatagacagtcacttgagacagccttc

SEQ ID NO: 66425 - DNA, 1139 bp, Zea mays
  Clone ID: MRT4577_16057C.1
accctgggtgcaaatcgcttattagctcccttctgttccgtgagactcatcgacttgtcgttctctcctcgtcgtacgccagatctggtacccttctccggcggccggcgcgatcatggtcgggcctgggcaccggaacagtcatggaaagcggcagtctgattatgctgaaaatggaggtgtcaagagaagaaatcctggtggtgatacatatgctcctggtccagatgacactgtctatcgctacctttgcacgtctaggaaaatagggagtataattgggaggggtggagaaattgccaagcagctgaggagcgatactcaagctaagattaggattggtgagagtgtccctaactgcgatgaccgagtcataacaatattcagctcaagcagggagactaatattattgaagatactgaagataaggtttgcgctgctcaagatgctctctttagggttcatgagaagcttgccacagatgatggtcctgtgaacgaagaaaatgaagagggtttaggtcaagttactgttcggttgcttgtgccatctgatcagattggatgcattattggaaaaggtgggcatatcatccagggaatccgcagcgacactggttcacaaatacgtgttctcagtaatgaacaccttcctgcatgtgctactagtggtgatgaacttctcctgataattggggatccgattgtagttagaaaagctcttctccaagtgtcatctcgcctccatggcaacccatcccggtcacagcatctccttgcgtccggcttaacccaaccttttccagcgggctcccgccttggtagttcctctactgcaccagttgtagggattactcctatggttggtccttatggacgatacaaaggtgatatggtgggagattggccttctatataccaaccacggagggaggtgagctctgcaaaagagtttaccctgcgtctgctttgtgctgcggcgaatgtcggaggtgtaattggaaaaggaggtggaattatcaaacagattaggcaagaatctggagcttttatcaaagtggatagttcgagtgctgaaggtgactgcataattacagtttccgcaaaggagttctttgaagatcctgtctctccaacaa

SEQ ID NO: 66426 - DNA, 343 bp, Zea mays
  Clone ID: MRT4577_160580C.1
ctcacggcggcgtccatgacggtaccgagatcgtgctctggaagttgaggtatatgttgttgaccatgccgacgcagcaattagaccttgccgaccttttagctattcactcaaagcactatcttgagctgttattcctgtttgcatgaaagcaacatcgacgaacaagttgatttcattcgataaagcaaataaagacttattccttatgaatgttgaaagcgtaaaggattatttctttcagcccattacaagactagacaatcgggaggttgtttttgataaaatgatcgatgatttcaatacaatgatacttattacgaaaataaaatcaattttgtac

SEQ ID NO: 66427 - DNA, 306 bp, Zea mays
  unsure (1)..(306): unsure at all n locations
  Clone ID: MRT4577_160581C.1
ttctcaacctggcggcactcnnctctcccttctcttcccgcggcgcgagtcgagttgggcccacnnccatcgagtcgagccgacgggaaggagagattccagtgccgggaggaggggctcaattgcgagtcggggcggggtgctggnntgtgggtgggcacccatgggcggccacatgaggcgctcggcgagagcaagaacgcgcgtggcttccgcaagcgttcgcatccaaatcagacagcangggtgtgcgttcgagttgtgaacgccaaggaaccccggcgctgggccgtcccgtgcacctac

SEQ ID NO: 66428 - DNA, 718 bp, Zea mays
  Clone ID: MRT4577_160582C.1
aaatacatagcgagtgtcaggaagaaagggccaacggccgcctctctcggcacggaggctagagaccagcctccggagatccaaaattctgaatcgaagaaggcgacaaacgcgactaatcgccgactggatgcgcatcgacgctgacgacaatgacccagacgacctcgaccccatggacagccaagagcaacaagatctggttcggactctggaggttaagcaggtgcagcaaggccgccgtaggaggtacgacttctcgtccttccgcctaagctacgcggccttccttgtgtactccagcttccgtcatgattgcgctcccagtaagatgctggagcatgctgacgtcatgaaagatttgcctgtaccgatgggcataactgcatatcgtgtagctgctctatgatgactatttgctcgcgttagcgtttactacagaattcaggcccgtcccataagtgcatgtggcatctcttgctatgttgctatattgagagccatctgttggacatactacatcttgaggatgccaagaatctcgatgggatgtggcatgcgtcccactcggccctttgatgactggcgcattgagtctgtatgtggaccatgtgctgctgtagacaatgctagatatcagtacattgagaagttacatggataacttcaaagtcttgtagactggagcataagttgccttgcagctatatgcaactat

SEQ ID NO: 66429 - DNA, 370 bp, Zea mays
  Clone ID: MRT4577_160583C.1
ttcttctttcttcgatgacaatttttgcgtcgtgtgtccaccgtgggcgggtgctcgatccaaaatctcttcgccctggctcccatcgtgcatgcgtccaggctgtgctactagtcgggggaggcggtcgcggtcaacctcgccttcgcactctcccatgtgcccgacgagagcgtctctccggccaacccccgcgacggcgcgggtgcatccgcggcggccatggcgcgcgggcgtgcccgcacgtggctggcgcggcgtccctggccccgaccacggagcgggtgcggtagatcctatcatggtggcaccggccccgagccctagccctggaggcgacgcaacattaagccccggccaaaccggtggt

SEQ ID NO: 66430 - DNA, 428 bp, Zea mays
  Clone ID: MRT4577_160584C.1
atacgttatgcatggatcacatgggctaggagaagggaaaaaaaggtctattctcagcccgtctattgggagagcaataccaagattagtttttttgggcaccaccctcccccctaaacaccattacaaaatttgggttggttacgggcacttcacgtatacggtccccaccaccatttacaggtagtaggggtcgacagggacaccgcctttggcatcaccaccgggggcgctagccgaccgctggtttacgggccaaacaagggggttggacacggcctgaacctctttgaggtactccgcgtaagccttcatcttggcgggctgggtagcggccagccactcaagcgcctacgtgagggcattctcaacatttttattattattcgtctcaagctaggccgcgagctttgtcttgtcgcccaccg

SEQ ID NO: 66431 - DNA, 264 bp, Zea mays
  Clone ID: MRT4577_160585C.1
ggaagtcagctaaattcatttttaataggctttactatagcaaacatgcgggtcatgtatatcttaaagtccctgcaaacccttgatcgggttcagcaggtatgaaaccagaggaagcgagggttgtctcctttcaatgaaagagatggatgggattggcaataattgtgtttatagggagtagtgatttgtgcaaagatttggagcagggtaccatcgggaattgcccagcgggaattggtgcgttgctggcttgcttgcttc

SEQ ID NO: 66432 - DNA, 170 bp, Zea mays
  Clone ID: MRT4577_160586C.1
attcggctcgagctccagcccagcgactttatttttggcggaggacatctccaggtcatcgggggggctacttgctcaggtgtgccagggctaactatcctgacgacagactgagctatgcttgcatgggtctctccaaaacaagaactgaagggcggcctccggctagg

SEQ ID NO: 66433 - DNA, 374 bp, Zea mays
  Clone ID: MRT4577_160587C.1
cccagcgccacggtttctccctcccccgagcttgtcgccatggccacgccgtccctgcccatctccctgcgcgcgcctgctgctcgtcgcgccctgctccctccgtctgggtccgaagctccctggcgcgttcgcccagccaagctccctcgccaaaccgcgcccccgctactcgctggtgctcgccgcgcgcgcccagctctctgttcgcctctgcgcacagcttcccaatctccatggtcggttccctgctcgagtcgtggtctcccggctcgtcaatacttattcagtcatctcggcttgcttggcctcaaattctagcgcctcaccctgctctcgtggttcagcgacagccggtgtgagcttggccatga

SEQ ID NO: 66434 - DNA, 425 bp, Zea mays
  Clone ID: MRT4577_160588C.1
gaagaggctagcgcatgcactacagactcccttgcgagcggaggaaatggctggcgcgtgaggaggacctataggttccgcatgcaccgctcctgtgaaagatcatccaacagtgtagcgcatgcaacatagtccatcagagggaaaaaagaaatgaaactgaaaaaaaactaaaaacgtcaagccccctgggagttatcttacttgtatgctcttttcagttcggatccgcattattctaaaactaacctaaccgactacatccttgaattccaaacaaactgccacacctgccgcgccgggttcgtgaccaacgtaacctaatacatcgtgggcgccaaggtgaggctggagtgcaagcacttccgcacctgcaagctcgagcgcgccatctacggggtcactgatgcgaccggcacctacac

SEQ ID NO: 66435 - DNA, 341 bp, Zea mays
  unsure (1)..(341): unsure at all n locations
  Clone ID: MRT4577_160589C.1
ccctcgcgtccggcggcctcctcgcagcacgtggtggttggcgagccggccatctactccacgcctcccacgccaccggcgctgcccgcgccgcgccaccaggtcctctcgggcggccgaggcgacctaggtgcgctggcgcgcctcgaggacagcgtcaagcgcctcaagtcgcccgtcgggtcaccggggtcgatgctgccgcgccaccaggccgacgcggcgctcgcgctgctcgcggactggttcctcgagtcgtccgggagcgtctccctggccgctgtacgcgcaagcggtgcaagtccggcagcccgacccggcgacgntgaagatgaaagatc

SEQ ID NO: 66436 - DNA, 1315 bp, Zea mays
  Clone ID: MRT4577_16058C.1
cctcgagccggccggggaatactgaaactgacaatgcacagcggtctggtctcatcaatcccaatcgaagtttaccctgtggtggtcaccaaccatcaatcgtgcaaatgtctatgttggtttccaggtccagctagatcttacgggcatattcatgcatggtaaaatcccgacattgaagatttctctgatccagatcttccgtgcacatctgtggcagaagatccatgaaagtgttgttatggatctttgccaagttttagaccaggagttggatgcacttgagattgagactgtgcagaaggagacaatacatcccaggaagagttacaagatgaacagttcctgtgctgatatccttctctttgctgctcatagatggcagatgtccaaaccaagcttagtttctgagtcgaaggatgtatttgatcagaaagcaagtaacaagtattggattgatgtgcaactgcgttggggagactatgattcacatgacatagaacgttatacaagagccaagttcatggattacacaacagacaatatgtccatatacccatcgccaactggtgtgatgattggaatcgatctagcgtataatttgcactctgcttttggcaactggtttcctggatcaaagccactacttcagcaggcaatgaacaagatcatgaagtcaaatcctgctctgtatgtcctgagggagccttttagggtgggtctgcagccgtactcttctgaaccactgattcaattcctgtcttaacggactatgttttgttaagcgctattcttttcgaaattttgctttaggtttcaagtgaatttggttttctgtaaaacccttaacataggtaggttttaactgaggatggataataatgtgcaggttatccccccaagtgtatgggcggggcaaaagcgttttgggcaactggccaagtggaaaaccccttaggagggtgctgcaatggttcgatttcttcctgtagaaaaacagcccaaacaaattgtttttcaaagaagggcatgttggatcccttggagggccatttacctgacttccctaacattgttattaagggcagtgagctgcagcttccttttcaggcttggtttaaaaattaaaagtttggtgattttatactgaaggcaaccgaacccccaaagggtctttataaaaaaaaagaagattggttgaaaaggaaatcatcaaacccaacattttcccccacatggggctaatttttttttttttttttttttttttttttttttttttttttttttttttttttttttttttttttcccgg

SEQ ID NO: 66437 - DNA, 430 bp, Zea mays
  Clone ID: MRT4577_160590C.1
gttgtctaagatgtggtttgttttggtgatttttgactgttcactgtgggcacagccaaagggggcaaaccattcggaaaataggccaattaatgggggggaggaaaaaaaaaattgatggagagcaagggagaaaaaataacatattgggagttaattattggtcggagctggacgataagcttcaacggtttatgagaaactacttgaagagggtggggaaattattgtgcactgggatggagattgaatttcgattttacaggcttagaagaaatagaaccataagaacattgaagagatagaaagtgcaggctttctcagggcaggaattggggttatatggggcctgggatagaatactttcgcaactaaactttgatagcaaggatattttctgggaggggggcagaaagagtcggggcaaact

SEQ ID NO: 66438 - DNA, 387 bp, Zea mays
  Clone ID: MRT4577_160591C.1
ggtaatgctcttgatgctttagattcaggctgccgttgctggcacttttaccttgatttctgacagcaagcccttgtatattgtctggtatatgatttcaatgagttgccaaagaggcactttgaccatgcaacccaccattaccgctaaagtctttggcccaaagaaatcaagtatgatttatccctttgtgtacttgggattctgtatttcaacattagcagcttcttcttaacaagatttggtcaagaaactattggatggaattctatgttttggattgtatttggaatatcgcttgccccattccccttggtttatcttttcaatgagcattccacctttggtaaacccactgctaaatttcaccctgatgaagaaaagaag

SEQ ID NO: 66439 - DNA, 243 bp, Zea mays
  Clone ID: MRT4577_160592C.1
atacacatcacttgtatttgacattataaaacgctttccgctactaagggatgcactcacgttgctcgtcggcatgatacaaatactcacttgtacgatgagtatcgcgacaaacgcgcgatgagatacggatatgatcattacagcgattattgaccaactaatagcggtcgacgacacacaaggctggacatactgatgtacagggaggataagtgtaaacgtattacctctgctaagttg

SEQ ID NO: 66440 - DNA, 2089 bp, Zea mays
  unsure (1)..(2089): unsure at all n locations
  Clone ID: MRT4577_160593C.1
cctgcggctccggtccggncttcccgggtatttgggtcctgacgagtgggcactggccacttagctgcggggcgattctttttcaaattttttgggtgccaaatatttgccctccagtgctgtccacggctcagcctcacacacgcgcgagagcaaattgcagagctgctcgtcgccggcgatcgccgcagggttcgtccgagaggggagaggctctctgtatcggggcatggtgatcctggaccgcactccggccgcggcgcagggggccgcctgtagcccgctcccgaagtcgcctaggttttcgtgggaggtggcctcgccgccctcggaccccatcctcccgtacctcaggtctattagcagggccatggatgagctcggaacagggcctcagtatgacacgacagccttagacaggctcaagcattacttgactgaatgcattgcaaaatatggggatgactaccaatactccactgatccacggttgctcaagatttggatcctctatgcagatgcaattgaggacttccccagtgtttacaaccagctggaggagaaaggaatgtttcaggagcatgcactattgtatgactcatatgcacaatatctaattgctcatgggaaattggttgaggctgataaggtgtatggaatcggtatttctaggaaagcagagccccttgataatttgaagaagatgcacttgacatttctaaaacatctggagaatattttagaagaagcagatgcggaagaacagtgcaaatcatcaaacatacagaagaatgaaccttctgtgatagatccatggtctccttctactaggaatactttactggagaaaattaatggtggcttgaggaagttttctggctattataagagtaacaaggtgtactgtggaaaggtgcctttgacttcttcgttgaatgttttaagaaacaagggcatcaagttaggtggtagaaagtatcaaatcaaaggatctactggcactggtgcttttgctaaagtatacaaagccactgttgacagtaatgcggaagaaatggttgctttgaagattcagaatccctcatttactttggaattttacatgtattgccaacttgatctgcgtatatctgatgtcgagagaccaagctttggctacgcacatgaaatgcatatcttctctgatgtcagtgtgttagtttgtgattacctgccgtatggaactctcctggatgtcataaattctcacttagtagtcggtcgatacatggatgaagttctatgcatgtattataccatagagatgctgaacatgctggaaacactgcatagtgttggcataatccatggtgatttcaaacctgacaacatccttgtttgctacccgagtggagagatcacagaggacaatttccgaagtgaaaaacgagtagagaggaatcaggggctctgccttgttgattggggccgtggcattgatctggctcttttcccctcctgcacggagttccacggggactgtggaacctcaggattcagatgcatcgagatgcaagaacatagaaactggacttatcaggtcgacacatacggcctctgcgtcgttgtgcacatgatgctacacgggtcaggcatgaacgtcaagaaggttcccaggattggtggaggctacgaatggcaacctaaacagccgtttaaaaggtactggaacgttgatctgtggcagaagctcttctcgacgctgctgaacccgccctcgaacgacagcgacgtggccgcgctccagagcctgcgagcgtcattccggcagtacatgtgcagcaaccggcagctggtcggcaagctgaaccagctgctggcgaaacaaaaggcctcgctgtgctcgtcctaggctgcgtgacaaagccgaaacgcggctggtgcctgtgccccccatgtaatgtaactccggctaggctaatacgaactcacatgtatccttaagtaatttactagctagttacccgtgatttggtagggttgttatatatcattaaaataagtattaagatatttatttaaatataattattgtttatttttataccct

SEQ ID NO: 66441 - DNA, 545 bp, Zea mays
  Clone ID: MRT4577_160594C.1
ggccgggccggggattgcaacactggttgcgtgctgatctacgtatctcgcgacgacgggggcgtgctctcctcctccggcagtgggcgcggacgagggcgctacctcatgctcgggatctgccgtgtcctcactggcctgctcgtgctcgcctccgcatccgacgcctaccgtaagtacaaaactgcacagccggttgagctgttgcatcgtctaaaggtgagccgtacaacatcctcgagaaactcactgctactacagccgtgcattctgaccatgcgtatgagaaccctacacatagacggtgcgttgcttggagaggcacggtgtgaaaatgggatgattgatattcgtcttgagagaagggacatacacaacgaggagacggggttcgatttgcacacttgcatgtagatgctagaaatagtcagtagagtagctgatgccattgtatgctcgtatgtggtttgaattttttatagacgatctgcctctttggggttttgttggggagactgacaagaacagtgattacacgcatcctt

SEQ ID NO: 66442 - DNA, 386 bp, Zea mays
  Clone ID: MRT4577_160595C.1
agaagctcttctcgacgctgctgaacccgccctcgaacgacagcgacgtggccgcgctccagagcctgcgagcgtcattccggcagtacatgtgcagcaaccggcagctggtcggcaagctgaaccagctgctggcgaaacaaaaggcctcgctgtgctcgtcctaggctgcgtcagccgaacatcatgaactgtgacaaagccgaaacgcggctggtgcctgtgccccccatgtaatgtaactccggctaggctagtacgaactcacatgtatccttaagtaatttagtagctagttacccgtgatttggtaggtttgttatatatcattaaaataagtattaagatatttatttaaatataattattgtttatttctataccct

SEQ ID NO: 66443 - DNA, 164 bp, Zea mays
  Clone ID: MRT4577_160596C.1
ctatctactctttctttttttcttctaaaaaaaagggccagcccgttaacaggtgggcccccaccctccttaaaccatatggttttgcccttggggttttcccaacattcccgtaaacccaccttatttttcaaccacctaaaacatttttatccttcccaaaa

SEQ ID NO: 66444 - DNA, 282 bp, Zea mays
  Clone ID: MRT4577_160597C.1
ataacccattgctatatcaaagcttaacaaaatcccataaggttgtttatattggtttattcttaaagttatttgtgtcactatattcttacctagcgaaagaagctataccattcaagtgttctaactcaggtggtgtacgatgtaccaaagctcaaccaaaatctcagttgtttctgttgctatatatttaccccgtgaaagaagctaggttaacataaatatacgatacaattggagtgttctacctcatttcatgtgcagtttactttttttatatat

SEQ ID NO: 66445 - DNA, 272 bp, Zea mays
  Clone ID: MRT4577_160598C.1
gcggggagccccgcttcatcgcagtgggctacgtggacgacacccagttcgtgaggttcgacagcgacgccgcgagtccgaggatggcgccccgggcgcatggatagagcaggaggggccggagtattgggaccgggagacacagatctccaagaccaacacacagacttaccgagagagcctgcggaacctgcgcggctactacaaccagagcgaggccgggtctcacaccctccagaggatgtacggctgcgacgtggtgccggacgggc

SEQ ID NO: 66446 - DNA, 277 bp, Zea mays
  Clone ID: MRT4577_160599C.1
tcaccattcgcctacatgtacaaagcgaaacccagaggatatgctgccgtctctaactgtctgatggatatcgggccggtcgctgatcagacgacaatcgacctgaacagcgagcaaggctgagactactgctaggataagcgctgatactttatagcgaccaagagacgttgggacgcaaccgggagctgatggggatccacctctccgtgtaagaatctgggctcgctgggctgcgtgctcggggcaatactggtgaagaacgttgatatgttcc

SEQ ID NO: 66447 - DNA, 217 bp, Zea mays
  unsure (1)..(217): unsure at all n locations
  Clone ID: MRT4577_16059C.1
cccgcccacgcgtccgtggagcttttttttagcgagcggtttttttaccacgcgcccgnccacgcgtgcgtccacgctgtcccgagatgtagggcaaggactagttcggtgttgtgtatggaacggacctcactgagttatgcacgatttggtatccgtgttgattatgtttaccggtttgaggacaccctccaacaatttaatattaactcacacc

SEQ ID NO: 66448 - DNA, 1706 bp, Zea mays
  Clone ID: MRT4577_1605C.1
gcctcactctctagttcggccggcgaggaagccttggtctgccgaccaaatcatgctcgcgcgccgactcgcggcccccgacggcagtaggctgttctccgcggcgtcctccgcctccgcccgaggcggtcacgcgggtggcgacacactagggaagcgcctgctgaagctcatctacccgaagcggagcgcggtggtggtgctgcagcggtgggcggacgaaggccgcaccgtgcagaagtaccagctcaaccgcgtcgttagggagcttcggaagaacggtcgcttcaagcacgccctggagatatgcgagtggatgcggacccagccggagatgcggctgctgccgggggatcacgcggtgcaccttgacctcgtcgctaaggtcaggggactcgccagtgccaccaagttcttcgaggacatgccggagcgcgccaaggggccgtccacctgcaacgcgctgctgcacgcatacgtacagaatggcgcaagagagaaggccgaggccatgctggcggagatggcccgtgttgggtacctcacctgtgccctgcccttcaaccacatgatgtcgctctacatggcgactggtgagctcgagcgggtgccagaaatgatcaaggagctaaggaggtacacactccccgacctcgtcacctacaacatatggctgacatactgctccaaaaaggacagcgtgaagagtgccgaaagggtatttggtctgatgaaggatgactgcgtggttcctgattggatgaccttcagcttgctcggtagcatttacatcaacgccggactccatgtcgaaggtcggaacgcgttggtggagatggagaagagggcctccaagaaggagcgagctgcttactcatcgctcctcaccctgtatgcaagcttgtcagatagaggtaacttggacagggtatggaataagatgagaggaaccttcaggaagttcagtgacacagagtacaagtgcatgctcacttccctcttgaggtttgacgacatagcagcagcagaaagcatttttagtgagtgggaatcaacatctggaacacgtgattcaaggatcccaaacacgatcctttcatattacatcaagaatggcatgataaaaaaggcagagagctttcttgaccacattgtggagaaaggagtcaagcccagctatagcacatgggaggcattcgtctggggttatcttggtgacaacaagacggacaaagtccttgagtgcatgaagaaagccctgtcatgcttggagaaatgggagccgaaccatgagctcgctaccgcgatcttttctcagatcgagaagacaggtgacattgaagctgcagagaagctcctggtcatattccgggatgcagagtatgttatcactgagatgtacaactcagtcttgcgcacttatgcagaggccaagctcatgcctctgatagttgacgaacgcatggagcaggataaggtggccatggatgtggaaaccaagagattgttgaggttgaccagcaaatatccaatcggtgaggtttcagtatcgatgtcttgaggtgtgccaacaatagaaggatgtttcaggatgcaatgtgtacttgcacttacgttttcatgcactttagttctgaagtacaatgcaatgcaaataacaaacatttagttttgaagtgcaatacagatggttgtgttttttgcat

SEQ ID NO: 66449 - DNA, 338 bp, Zea mays
  Clone ID: MRT4577_160600C.1
atacgcctacacatacgctttatttaaattggcatttgcgatcgacacttccaccattaacacactcataaccatttaacctggggcactcacaaaacacatggcatagatgaaaaaacataagcagaaaatcgttcagcccccggcaatgactggatgacgacggttctgcaccaacactcctagtctgagagctgccacggcgaggtcgatgaccggtgctacatcccttaaaaagcacggagacaccgaacaaaaatgacgacctttggcatcggaaaacccacggacacccaaaaagaggcgctcgaggcctccttactttatcagatccaaaa

SEQ ID NO: 66450 - DNA, 220 bp, Zea mays
  Clone ID: MRT4577_160601C.1
ggatgaaaccaggggggggaatgttgtatacacaaacaaagggagtatctatacaccaaaattacttacatcatatcatataaacaataatataacttttaaataataattcaagcacaaaaattacactttttaaatcattaaatattccccaataaatcaaaactggctagacttttaagctggttcaattttaagttcctgaaaacggccatttttt

SEQ ID NO: 66451 - DNA, 268 bp, Zea mays
  Clone ID: MRT4577_160602C.1
ggcccctcaagcttatacaccatggacagggtcaagatggtgaatttcacgttaatgcatttttgaccacaattttaaaaaacccatctgggtctgtcctctgtccttgttctggcctccactgccccatctgtccagttccatggccaccacgtgtgatgggagaagctggtgggcccaccgtcctccgtcactcacccacctcacagccacatttccaacctccggtgggatcacaccccggacgagcagggagctgcctccgtgc

SEQ ID NO: 66452 - DNA, 597 bp, Zea mays
  Clone ID: MRT4577_160603C.1
ctcgtgcgctcttcctgggacgaggcctcgcggccggcgcatcggcaggttctcctaaatctccagcatcatcagtagacaaatggctgacggtgaggacattcagccccttgtgtgcgacaatggaactgcactggccaaagctggctttgctggcgacgatgcaccatagggctgagctcccaatcattgtcgaacacccccgctacactggagtgatggtgggcatggggcaataagaagcgtatggcggtgaccaggcccaacccaagaggggtatccagacttagaagtaccccatcaaacatggtatgtgtccagcaattgatgatgacatggagatagatctgagcaccacaccttatataaagaactacttgtggagcctgaagagcaccctgtgctgctcacggaagccccactcaaccccataactgacaaggagataatgacccaaatcatgaacagagaccttaaatgttcctgccatgtatgtactgcatccatgctgtgactttccctgtacaccattgagcgtacaactggtatcagacatagactctggcgacggagccagccacaccgtgccaatctacg

SEQ ID NO: 66453 - DNA, 441 bp, Zea mays
  Clone ID: MRT4577_160604C.1
cacccgtcccggcatcagcacctacccgcttctccataacgcggccgacctttttattttctgggccgccaagctcaagccagggcacggggtcgacgccggcttgtctggcttcctcgaccacatctggtggctcatcgagctctacattgtctacaagagggggttaataaagaccgggctgggctggcgagtcttgtactccttcgtggcctgcttcaggttcatatacataggacttggttgatctctcgtgttcgccgaggtgctcctggcacgcgacatcctctccatgtatgcgcacgctggcgtgatgttactactgctcgtcaaggctatctgtgaggcatgcggtgtagagcaccgtcaacggaacggagcgccacatatgagcctgggtaatgctcacgtgctatgggacgtaagacagttgatagccat

SEQ ID NO: 66454 - DNA, 253 bp, Zea mays
  Clone ID: MRT4577_160605C.1
gcacgagctgcagataatcttctcagtcctgattcccgagtgtttggtttctctctgtcccattcgaaaatagttatagaatagttatctcaagacatgtgaaaaatcagtgtcagcatacttgttctataattgtccaactggtccattgtgcactgtctacactctacattcttgcatcgagaatacatgatcttattatcgtagtagcccagaccttcagatttttaatttgttctgcaggaaccaccgt

SEQ ID NO: 66455 - DNA, 140 bp, Zea mays
  Clone ID: MRT4577_160606C.1
gttacaaagttcactttacattttaaaacttaagttttacatgggggaaagagaaggttaaatacaagtcctgatagaactcgaagggcaaaacttattacaataattggaagggggaagcctattctgaccccggggaa

SEQ ID NO: 66456 - DNA, 864 bp, Zea mays
  Clone ID: MRT4577_160607C.1
cccaactgattttcgccatccgcgcgcgggtatggtcaagatccgctcgaccggtcttctccatgctcgcattggggtgaagctaatcccgcatccatcgcgggctcaactggtcagcgcaacagacgacgccgatcccgcgctggccgtcgtggcttccgctgcggaccaactacctgaaccgcgtatcgctgaccctcggtccgccccaggaacagctcttcttcccggccggaagattaggccaggttgttgcgtcgcccggcaatcgcgctaaccacaggtacacctcgtcgcagcttcaaaagaggacaggcccctggttcttccccaagtcgcgcgcacctcgcatcccttggccacaccaaatccgaccctgagccacaccagtaaagctctgtgtgcttgtcgcggacagcagtgatagaaagcgaggagagagggactgggggaagccgcctccgtcgttcatcgtccacaatgccgatggggcctggggtcaattgctcgccggtgaagatgcttcgtcgggggaccgcaccgatccgcggatggggtatcgccacgctatgcactgctcggatgggcacgtcaccggcggggccatggccacatcaccttgaagctttttcggccactgcgaactcgccctctgttctcctagccacggaatttgtgatcgatgacctgtccaccgtcgcgcgcgggtggttcgctgaacgccataggcgggtccaaactcgacgccgtcttcatctgcgcctccctcgccaacgggttcgccggctttgaccactggatccgccctcaaaaggttcgagacatggggaaccaactcctttgtgttcaagaacaacaagaaaa

SEQ ID NO: 66457 - DNA, 840 bp, Zea mays
  unsure (1)..(840): unsure at all n locations
  Clone ID: MRT4577_160608C.1
atctatgcatgtatccagaagactacacatcaaaaagaaactttgatctggaagtggtcagcagaaggttttatcaaggaggaaccggggataaggcaatatgagcttggagagagatacttcagtgagctggtgaatagaagtatgatacaacccatctggggcggttctggctcatgtttcgtgactggttgtcgtgtccatgatcttgtgcttgatatgatatgtctattgtcaaatgaagagaattttgttagggtatgggatgttaatgatcaaaggatatcttgccaaagtaatgctcgtaggttagccatccaaaagatagtcttggagcaggatgactctctggctaacatgtgcaccccacaattgaggtcattcagtgccatcggatgtgatgttcatgtgatgccatcacttataagttttggagctttacgtgtcctagatatggaagattgtagttctagtggaggtggcagttatcatttggaccatcttgggagtttactccatttgaggtacctaggattgcggagaatagataaggtacctgaaaaaatagggaatctgaagtttttgcagacactggacttggaggatactaggataaaagaattgccacaaagttttgctctgttaaggcaactcaagcgcttgcattttgtagtcgctgaaggaatagttgngatgcatttgctgnggaacctaacatcattggaagatctacagttgagatttgacacttggtctcctgagttngtagtanagctgcgcaagctgacgatgctgaggaatttcatccttatcattatgccctacaaaggcttggatgat

SEQ ID NO: 66458 - DNA, 452 bp, Zea mays
  Clone ID: MRT4577_160609C.1
tgtcccaggtgcagctcgccttcaaaaacaacacgctggagggatctttcataagaaaggacgtcccttattatttttgggccttctttccaaaaggagacctcacaggacggaagggctttgcgctatcgtcctacagcaacgaagtgagccccatcgagccgttcctgatggatgagaagaggataacggccaagtacgtggtgttctgggtctacaagaggcgcgctgggcaaggcatccttccggtctggaaggaagaggagggggaggaggaggccgcgaagtagtaggttgcgcaggcgcatacgcatacacatacacacagggtgctgccgtgaacatacacatgtaacgctgtaaagttcatctgctgtgaacatacacatgtaacacagatacttcagtttcagcagttaaaaacctaccgtcgttattaaaaaagagaaaaa

SEQ ID NO: 66459 - DNA, 141 bp, Zea mays
  Clone ID: MRT4577_16060C.1
gttctacacacataaacacgagaggttatgaccgaccatgcatgcatggtcggacaaaccacacaggttttaagggtagaagaacctaggccaggaaacagcctgtgcgtcgatcgcgaccacgcggggggggaggggccg

SEQ ID NO: 66460 - DNA, 1289 bp, Zea mays
  Clone ID: MRT4577_160610C.1
ggaacgcgcagacacactactcacaggtacacggcgccctcgcggggaggccccgtccgtcccaactcacgtgtacgtactcctcctgtcctgctgactgatccgcatgctgccggtcgtccaccgccgatcgtgaaacgcaaccgtcgccgtacgttcgtcgctagcttgccgccgatcgccgacctcgcgcgcggacactcacacacatggtcatggcgcctcagccttcgcgcgctctgagtccgaggctgagccgcgcccccggcgccggccacgcgtcgtgcaggtgctcggccgcgctcgcgccgctcttcgggaagcggccggcgccgcccctcgtggtgtcgttcccgcgcgccggcagcggcggcgccgtcgcctcctgctcggccttgccggtgcaggagtcgtccacctccaccgctgttagcaagaagaaggacggtgccaataaggaggccacagcggccaagccgaagaaggccgcggcgctgccgcttgccggagatgatgcagcaggagatcatcccaccgctgaaggatgccttggaggcggaggacgacgtgtcccaggtgcagctcgccttccaaaacaacacgctagagggatccttcataaaggacgacgtcccttattgtttctgggccttctttccaaaaggagacctcacaggaccgaagggctttgcgctatcgtcctacagcaacgaagtgagcaccatcgagccgttcctgatcgatgagaagaggataacggccaagtacgtggtgttctgggtctacaagaggctggctgggcaaggcatccttccggtctggaaggaagaggagggggaggatcatcaggacgccaagtagaacacacgcagcaggaggcaggagggtgctgctgtgaacctacacacagtcatcatgtctgaaactgttaaagttcgtctgctaatatatatacagatgctaagagctgctgagacacatgcatttcagcatttggcttctgctgcataggcgcatagccattcgcagtcgcaatcccttcgtaatcttgtgctgcagaagccagtcaaatttgttgaacaatcgaaaccttcgtgggccgggatcgacgacgagtcccgtctgaaagctatggtatctgaatattattatttgttatcgccagtcctgcgtgccgtactctatccgtccagcccttcgccatctgtttagaatagaataccttcatgtaaatcaagagatttcagagattattaatttaagcgaaaactgttatcttaaaagcggcc

SEQ ID NO: 66461 - DNA, 2241 bp, Zea mays
  Clone ID: MRT4577_160611C.1
cctcgaggccggccgggtccccttcttcctcgccgcccgcggcgacctcaccgagaaagagaaatctcgctcgcggtcgcggccaaacggcggggtcgccctcgcctctgcctccgataaatacacgcgctcgctccccctcctcccccgagcccagtcgcgtcgagtcgacgctcactctctctctcccacgtccttccctctccacatccagctgcgtatccaccaatcgacagcgacctcctcctccacgcgctccgctccccctccctccctttcccttcccttccctctccctccctccctccttagccgttaagcgtcctcccctccgcaccgcgcggcgaggctcgtcggcgccgtcgaggcccagctgcccctccctacaggaagcgcccgtccgacgccgcgagcacgcgcgcctcctccgctcccgatctctccacgcgtgccggagatcggccgcggcgggctcccgatcccgcccgatctacccccgcccgcccgcgccgcggcgctcccggccgagatgtggggcggcgactccaacgccaagcagatgctcaagtcccggggcggcacgggcgtcgtcggggggttacccgcggccggggacgaggagtcggactacttcccgcccaccccgcgcaaggactactggtggtccacgggcctcctcaagctcgtcaccgccaccgtcatcttcatgggcggggtcgtgctcggcctctccgtcagcggcagcgtcgcgcgctactactacaacgcctcccacgccgagctcttcttcccggccaccacctacggctgcgacccgcgggaccgggactgcggcatgggcctcgccttcagggccttcgtccacccgccccgcctcgcgcactccatgaccgacgacgagctcttctggcgggcctccctcgtgcctagggccgaggagttcccgttccagcgggtgcccaaggtcgccttcctcttcatggcgcgcggccccatccccttcgcgccgctctgggacaagttcttccgcggacaccaggggctctactccgtctacgtccacaccgtgccggactacaagctcaatgtgtccaagagctccgccttctacggcagacagatccccagcgaggaggtgtcctggggatcaattaccttggtggatgctgagaagcgcctgctggccaatgccttgctggatttctcgaatgagcgcttcgtgctgctctcagagagctgcattcccgtgttcaacttcccgacggtctacgagtacctcatcaattcggcgcacagtttcgtcgagtcctacaacatcgacacccctcagtgtgctggccggtacaaccgtcgcatggctccccacatcatggcagatcaatggaggaaagggtcagagtggtttgagcttaaccgcgagctggctgtccagatagtagcggactacaagtactactccatcttcaggaagcactgcaggccatcctgttatccagacgagcattacataccgacttatcttcatctgttccatgggccactcaacgccaacaggactatcacatgggttgattggtcaagaggaggcccgcacccagcaagttatggtgccacagacatcacagaagacttcatccaggccatcaggaataatggtacgcagtgcttttacaactcgaagcccacctctgtctgctacctcttcgcgaggaagtttgctcctaatgctttgccacggctgatgaacctcacctcgaccgtgctggacttctgagccggttctcaccatgcgggcgggcgggcatcgttgtcagcatctcgctactgaggtatatctatggatgcatgtgccggtcgggagctagaacttctataccctgctagattggagtctgcgacatgtgtctcacatgaatgatcagaggtgggttttggtgtatgcgtctctcgcggatgatgacgctgtgtgggacagtgaaaacagccttttcactcgccctgaagctgatctccgcgagtgatcgacagatggcgccgcctacggagatgacgtttctttcacctcccattcttttttaatatatcatagtcatatgatagaggatgtcttcttctcttcttctccctatctatctactgtattgactcagtcagatactaatttctgtgaatataacttatccatcattgctttacttccaaaaaaaaaaaaaaaaaaaaaaaaaaaaaggattttaaaaa

SEQ ID NO: 66462 - DNA, 380 bp, Zea mays
  Clone ID: MRT4577_160612C.1
aaccacaatggtttcagcagcaacctggacacaacagtcaacaactgggcagcaccgtctgattccaagactgttgggtgtgttgttggctcggggacatgagcagagggggggcggtcccttgcgcgcgtgcggtgcttcttttgagaggctttacatcgctctctccttctctgcgctcggtgctgatcgaatgggccctgtccgccggggttcccccggggcgtgcgcaggctcttttgcactgcctcgcgcgtgggtgcactttgttcccttctctagtgggcgtgcccctctctgattgggggtgccccatgttctccatgggggtcggtctttctgtttcttttctagtttgtgtggctggcgctgctctttgg

SEQ ID NO: 66463 - DNA, 688 bp, Zea mays
  Clone ID: MRT4577_160613C.1
ccggccgggagaggaatccatttatgtatatgcccttgttccggttcctttccccattgccaacttcgttatgttgcttgatccttgctctcatagaggaagatcagagctataattgcaggacatcagcagctctatcacttacgcatgagggcacatgaaggtggagatggcgtcagagacgattcacaaggagctcaaggatctgcagaaggaccctcccacctctcgcagcgcaggttctgctgcaggagacatgttccgctgtacatgaaataatagtgttgccatctgatatgccatattctggtgaagatttcctagctacacatatattttcctcctgagtatcctttactgccaccataggtgacatttcacactaccgagatccatccgaagatccactccaactacaccatttggctcgacatcttggatgaccagagctgtccgcctataaccatctccatggtgctgctgtccatctgttcactgctgactgattcaaaccccgactaccctttggtccccgagagatgttcacctgtacaagacggatcgccacaagtacaagaacaccgcgaggacctggacccaaatgtatgccatgtagaattttctctagctgctctgtgccgtctctgatgacggaagctgaactggactccatgtattcgatctatcc

SEQ ID NO: 66464 - DNA, 494 bp, Zea mays
  Clone ID: MRT4577_160614C.1
aaaaaaaaaaaaaaaaaaaaaaaaaaaaaaaaaaaaaaaaaaaaaaaaaaaaaaaaaaaataaaaaaaaaaaaaaaataaaaaaaaaatgtttttacttttgcctcctaccccccttaagggtgaattttttcataatttccttcccccttggggcgcggtgtccggcttttttttaagagggccccattttcccttttacatgtgggggtttttcaatatcactgttgccggtttttacaaccccctgttttgggaaaaccccttctttccccagtttttttttttttggaggaggccccctttttcccttctggcttaaaattaaaaaggcccggtccgaacccccttcccccttgtggggcacattaaatggggagggggcgccccctttcctcggccattatactcgacttgtgggggggttaccccccccttatccccttctctttccttggcttttgcccccgggcctttgcttttcttcccttgctt

SEQ ID NO: 66465 - DNA, 279 bp, Zea mays
  unsure (1)..(279): unsure at all n locations
  Clone ID: MRT4577_160615C.1
catactaaagaggggncgggataactgcatatttccccccggagagagaagcggtcgcatgactcgcccccactcccgagtggccgaagccccgaccggcgaggcggagaccccgcagatctgccccattgatctccgtcctccccgtcgggtcctccacgatacaaacttcaaaagagaagtggtgacctcgccccatattcctccggtagacctactgaggagacgggagcataaatctgcccacccatgcaagctacgctcttgccagtctccttc

SEQ ID NO: 66466 - DNA, 249 bp, Zea mays
  Clone ID: MRT4577_160616C.1
atacaatgaataatacaatatttatatttcatcaccttcttccgctaaaagcgtacgcatccaaatcctgcatgatctcacaatacttactatcaacaaattccattattacacacttttctacaatctcttacttcaatccacttctaacattcaactaaataaatatattcaatactactagcaatttccactatcatcttataccatccaatttactacttactacatcaattcatcacccatata

SEQ ID NO: 66467 - DNA, 295 bp, Zea mays
  Clone ID: MRT4577_160617C.1
tttgtttttttttttttgtacttttttttttttttttttttgcttttttttttttttttttttttctttttggctctactgtgttgaacgtaagatacaaattccaacaaaaaaaaaaaaaaaaaaaaaaaaaaaaaaaaaaaaaaaaacaaaaaaaaaaaaaaaaaaaaatattgctccgagtccttttccagcagcccggtgaaattgccagcagcgagtctcgctccgcccctttgttttgcagcttcttgttttctttagccggacccgttaaatttttgcccctttggtc

SEQ ID NO: 66468 - DNA, 103 bp, Zea mays
  Clone ID: MRT4577_160618C.1
ggcaagcacaaagctggagtggacgacagaaggaagcaatgccgattgttggtgctgcagagatgatggtcttcccaaagaccggcggggctaattgtggcgg

SEQ ID NO: 66469 - DNA, 185 bp, Zea mays
  Clone ID: MRT4577_160619C.1
gagatggcccagtctgcgcgaacgtctcgcagacacaccgcatggcttgacctaccccttactatcgtctagggggctgctgcttctttgttgatgagctgcggctgcccatgcgcatctgacgcctcacaattatcgacctgtaacacgggattacatcgcattactgagcgcactgattcttt

SEQ ID NO: 66470 - DNA, 775 bp, Zea mays
  Clone ID: MRT4577_16061C.1
gattacaaatcgggcgtattcctttttatttatagaggagggggctggacccgttacaaacaaactcaccgaactaattccgtgaatctagccaacaaacacagcaagaaactcggaatcctaatcggttctgcgcgcgcggaccgtccgaaccagcggcgcggaccgtccggcctcaatttggtgctcaacaccagtattaattaacagactatttcatcttttggtgtataaaagaaaacttgaccttctaaaatttgagaaggcacgggctactttgcaataaaagttataagtgtcaaaatatgagtcaaaaatatattgtaaagctaagacaaggtatctgatttgggctttgtttgttttagcttctggtcaccaaaagttgttgcagtgctaaacactcaatttttcagcctgtttttaatgaaaatcacttttgtcaaaattgtctaaaatcaacgtaacacagaatcggtcgagccgttgtgatagtaggaaaccatcactttctacctcctaaatattatggacttttttatctcctcacgtctcgattctcatattcttttccacaaccaaattctcttcaaagccagattgtcagaaaaagcttcttagaaaaaagttgaaccgaataggcccttagaatagaatatcgctcactaatttgtaaaaatcaaacaggtttcctttatttatgcccgtgcataaaaatagagtatgagaagccacgaaaacagcacgcgggtgatcaacgttaccgtgccggacg

SEQ ID NO: 66471 - DNA, 251 bp, Zea mays
  Clone ID: MRT4577_160620C.1
ctgcttcctttttttttttgaagcccaagcccggccacaaatgggcgcccagcaggccatgagatgatcaagatgacgaaccccaccactatctagaacagacgcgcggaaaccgaatacaaagagggagaccagaggagggcacagcgagacctatgaggcaaaaccacggagggacccggacccgcgtggaaaacaaaatctctgggccgacccacggagggcacaccacgtcggggtgccccgcggca

SEQ ID NO: 66472 - DNA, 209 bp, Zea mays
  Clone ID: MRT4577_160621C.1
cggccgctcgagccggcctggccggagatacgcacctgtggagacgctggtcactcctctcccgagatgcgccggcgccaaccgtcttgcctgctcagacttagatctagaactctccgccctcggcgttcgcgcctccggatcaaagcccacgacggcgtcgttctccagatcgacaaagtgccaccccatcggatcagtcgtcactg

SEQ ID NO: 66473 - DNA, 246 bp, Zea mays
  Clone ID: MRT4577_160622C.1
gacaaaatcatgatgcaagggctggcggaattaagagtgagctatatttaccagctgagtgtttgagcagggatttctgggttggtgggcatttttgagattctttctgcacaatgtgattgtcctttaagcaagattttatatcagttgggcgagggttttcagttttctcatatattacgtcttccagtttcactggattgtttgtggtgcacctgatagcatgtaagatattgcctttgatag

SEQ ID NO: 66474 - DNA, 1682 bp, Zea mays
  Clone ID: MRT4577_160623C.1
ccggcctcctcatgtaagtacgacaaattaaaaccaggattatttatttagttactactactatatgaaaactgcttcgttattactactagctatgaaatatattcatgaggaccacgtactgttttattagctgcgtagattgcagacaacagtgtacacttttgtaccatgtcgatcatgatcatatgaaagagatacacaggaggatacatatttgcagctagaaaaaaaaaaaaaaaaaaaaaaaaaaaaaaaaaaaaaaaaaaaaaaaaaaaagtcagacagaagttcgcagtgcgcacctccccggccgccggccgggtgctgcgtagtgtcatcttatctcttcctcctaccttcactctcaaaatcttcagggagccgtagaggagcagcaggtgcaccaaaaggatggcagcgccaggctccctgcgacttctccaggccccgtccttcgctgcggccaagtgccagccggtggcgggccgggcatcggcgcggcgagcgccacggccactgttcgccgtgcgcgcctcggctgctgacgccgccaacagggatgccgtgctcaaggccttccgcgagaacagggctctcaagataatttccgggcttcagaactttgacaggagcagtgttgcatctgttgtcacagctgcagataagggaggtgcaacccatgttgacatagcatgtgacaaggacttagtaaagcttgccatggatcttaccaaccttccgatctgtgtctcatctgtagatccttcagcgttccattctgcagtacaagcaggagctaaaatggttgagattggaaactatgattctttttatgagatgggcattgagttctcctctgagcagatactgaagctaacaagggaaaccaaggaagatgcttccagacatcaccttatcagtaacagttcctcacacacttagtttgccagatcagatgagactagcagagctactcgaagaggaaggagctgatataatccaaactgagggtgggaaatgttctagcccgacaaaacctggagtgcttggattgattgaaaaggcaacaccaacactcgccgcagcatactccatctctcgggctgttagtattccagtgatgtgctcgtcagggttaagctcggtgactgcaccaatggcagtaactgcaggagctgctggagttggagtcggttctgctattaacaaactcaacgacgttgtggcaatgatcgctgaggtgagaagcattgcgcaagcaatggagcttgcgccaagaatcgtgtccgaaaccctgagaacaattagttactagtggctaggaatacccttgccatttctgagcaaacttgagcagtcaataagaaagcaaaagagaggcatcgactctgcattttattctctctacgctgtcttttgcctgtggcagtgaatagcgcattagcatcatagaagtattagcttgatcaatggaagttgttcatgcgcttcttcatcgctgcaagtgttgtcatcttgtcgaactcacaataagcttagataagtgctgggtttgtgggaacatcgtttgtgcaatataaatgagatcttgcacctacaaaaaaaaaaaaaaaaaaaaaaaaaaaagaaaaccgccaccgcggtggatggcagatctcatgtatattgcacaaacgatg

SEQ ID NO: 66475 - DNA, 2331 bp, Zea mays
  Clone ID: MRT4577_160624C.1
gccggccgggtccggagaccgcttcttcgcaaacctccccctctcccatcgacttcctccgtcgtccgtcgcactgccacggatcaccctcttccttcgtcttcctccacaaaacctacagcgctggtgcgccgaggagctagctagctagcccggccggccggccggcgccatgcctcccgtgaaggccgaggacctggttgtgcacgccgtcaaggagcagttcgccggcctcgactactgcatcaccagccccccgccatggatcacgacggtgctcgttggcttccagcactacctggtcatgctcggcaccaccgtcctcatcgccaccatcatcgtcccgctcatgggcggcggccatgccgagaaggcgatcgtgatccagaccatcctgttcctctccgggatcaacacgctgctgcaggtccacttcggcacgcggctccccgccgtgatgagcggctcctacacctacatctacccggccgtggccatcatcctgagcccgcgatacgcgctcctcatcgaccctctcgagagattcgtgttcacgatgaggtcgctccagggcgcgctcatcatcgccggcgtcttccaggccgtcgtcggcttcttcggcatatggagagtcttcattaggttcctgagccccctcgcggcggtccccttcgtcacgctcacgggcctgggactcttcttcttcgcgttccccggggtcaccaagtgcatcgaagtgggtctccccgcccttgtcctcctggtgatcttcgcagagtacgcctcccacgtgttcgctaaggggagcttcgtgttcagccggtgcgccgtgctggtgaccgtcgtgatcatctggatctacgccgagatcctgacggcggccggcgcctacaacgagaggggccctgtgacgcagttcagctgccgcgccgaccgctccgggatcatccagggctcaccttgggtgaggtttccttatccgttccagtggggataccccattttctgcttccaggattgcttcgccatgctggcggcttcttttgcgtcgcttattgagtctaccggcaccttaatcgcagtgtcaagatactcaggcgcgacgttctgcccaccctccgtcttctcacgtggaattggctgggagggtatatctatcatactggacgggatgtgcggtacactgacaggaacagcggcttcagttgagaatgcaggtctactggcagtgacgcgagttggaagccggcgagtcattaagatctcagccttgttcatgattttcttctccttgtttgccaaatttggggcggttcttgcatccattccattgcctattttcgctgcactgtactgcgtcctcttcgcttattcagctggtgcaggcttcagcttactccagtactgcaacctcaactccttgaggacaaagttcatactcagcatctcgttgttcctggggctgtccatcccacagtacttccgggtctacgagatgttcttcggcttcggaccagttcacacccattcagtagcgttcaacgtgatggtcaatgtcatcttctcatcgccggcgacggtggccgccatactggcctaccttctggactgcacccacctgtactgggaggctagtgtgaagaaggacaggggctggttctggtgggagaagttcaagtcctacaagtatgatggcaggagcgaggagttctaccgtcttccttatggcttgagcaggtacttcccctcgctctaggacgccgggaggaagacgacggacccaagttctatgtagctgctcgagcgtagaagctgaacatcagttgaaggcaacagaaccatatgttattttcatatatcaagcagttgggagggagcttgatgttttgatttaccttgtaaaacattttggatgataaacttttgcaattactgggagagtaggatcaaccaggggagaattctgcaacaattcagtcaccgtttttgcttcagattcgaaacagaacacagatgccttcacaggcttcgattattttcccacatcatacatggaaggcaagcgtgattttgctccagtcagagcagagccttataccaggtgtgcaaactcttgtcatcggtcaagagtttgcagatgttgacacttgtcggagggctgtcaaggacatggccattgctttgcactatgagctccgtgtggtgaaatctgatcgtagccgttttatcgcaaagtgctcaaaagaagggtgcccttggcgtgtgcacatcgctaagtggcctggtgttcaaacttttacttgtaagacttttgatggggacaacaaatgt

SEQ ID NO: 66476 - DNA, 725 bp, Zea mays
  Clone ID: MRT4577_160625C.1
tgacgtgttagggaattgttggattgacgggtatcgaattagttactaaaaagcccagtgcatctttgcattgagagccaatccaacatgcgcctccatcatgtcgtgactgaataaaggaaaataagaaacttgagtcgcgcccgtgccagtcgtaaaatcagcatccagcgccaagcgcggaacaccggcgtaaggtatcaaagcgaggaaaacaatctgcacagctcttcacagcgtcatcgacatacagcatgcgcccggattgctcggcagtcattggtgtcttggccttggccgtcagacgaggtgtcgcatggataatgacaaccgatggctggccagtcttggacaattagaaagcggggcagccatcattgaagcgatccgagtagcgccgccgagctgaggagcgaggtgcgaagaggcttagtacttcagaatgatgtacagagcgtggatgataccggggatgtaacccaagatggtaaggaggatgttgatgaagaagtcggcaccgcagccacgctcgaggaagacacccacgggagggaggatgatggcaaggaggatcttgcagatatcgctagcagtgaaaggcatgttgtcagttgtgaaggcgaggtattactcgaatgtgtgtatggcaggtagtggtagtgtttggaagtgagaagattggatagcttcgttagacagagtttctcgagccgaattccgaggtt

SEQ ID NO: 66477 - DNA, 324 bp, Zea mays
  Clone ID: MRT4577_160626C.1
tactgctagcactcctctacagccgccctccttttttttttttttttttttctttttaactaaacgcgggtctaatgggggttccaaaagactcgttcagcgggaggtttcataccgttccacagaagaccatgaacgtctctgccccattacatttggtatcaacggcccttcaaattaaacaatcctctccaatccgtaaaaaacccttacaatacatgttcattgaaaattaccttacaatcctttacagcaaaaccccaagctcgtcttcaccaaaatccagggtatgaacactcaccatacccccaataaatttctccc

SEQ ID NO: 66478 - DNA, 392 bp, Zea mays
  Clone ID: MRT4577_160627C.1
cggacgcgtgggcgtctctccaagctgtggcatcatctgccctttgttatgccggcctctttgaattgatcttgtgctgctctagcattgttagacgagcatagacggaaaacacaaacaaagccgccgcgatgccagggagctcgcgcattcctcagagcctccgcggcagtctggagagcgtcaagcgccgcagacaggcgctctccctcagcgtgatcaacctagacctcctcaaaaacatcctcttcttcttcttcgtgctccggtatacccggcggctgtggtggaagctcaagggccgaggcatcatcggcgccatcctcgagctgtaccgcgacattgagcggacgctgtatggctacttcttgcgggcgccgggcgtgcgccgc

SEQ ID NO: 66479 - DNA, 418 bp, Zea mays
  unsure (1)..(418): unsure at all n locations
  Clone ID: MRT4577_160628C.1
agcagtggtaacaacgcagagtacttttttttttttttttttttttttttttncctctgtcctaatcggatgaagggttggggaggaacaaaagctcgctccatatcaacaagtgcaaccaccatctttttttgcatcacttttgaaagcatctaatgcattagatgcaggggggggggcctcccgcttgaatggagggtttcttcctagtcctggtgtngcatttgcngcagcttttactttgtctaacaaanctcggtgtccctcttcaccaccccgtcgtgttggctccttggccatttnaagaactccttttnttnnggggcgtnaacccttctctggnntttttctntngggttgtttgcctttccgtttccngtgttcttttttttttttccccttgtttgtgggcgttttt

SEQ ID NO: 66480 - DNA, 629 bp, Zea mays
  unsure (1)..(629): unsure at all n locations
  Clone ID: MRT4577_160629C.1
ccaggatactccttatgcctgnggcatatattattcatggnaaacggtgctngattctatgattctatatctgatgtactttcaacttgttaacaccatatatcctattttacagatttttgcagaaaacctgctgtccgtagagcatatttagattttgttccaaaaaagtaagacctatatatgttatcaatgtcttagcatgaactgtagaaaattcagtcataaaatgttcctagtgttattactgttgttgtatgagtcgattctgatttctcattgtactccatacattctgctgtattttgtcataatcttctcgtttcattatattttctgaggatagatgtcagaaacccgattttgggaaaaatactgtagagctgagtatctagtcaggacaaaaaacactgcagcagcaacagctgaggcagctggagatgaggaattagctatcttcctgaagaatgatgatatactggccaaggaggcaaagttgaagataaaacgagtcgatccaacattagacatggaggcagacactggagatgattacattcatcttccggaccatgggattcaccgtgatggtagcaaagagacagtcgatgctgacagtgagttggcga

SEQ ID NO: 66481 - DNA, 450 bp, Zea mays
  unsure (1)..(450): unsure at all n locations
  Clone ID: MRT4577_16062C.1
aattcccgnnnnccgagctcactagtttttggccgccccggccgccgaggaggactgccgcagctactgcggctcctcgtcgtcggtcctctgcgaggacggcgcgtcgggtccgggctgcggcgacgaggccgtcgcgccgccgtcgttgccgttcgatctgaacgtgccggacccggtggccgacgacatggactggcgctgcgacacgctgctccgcctctagccgccgacgtctgaggcccgcaaccactccttcccagactggtgcccccaggatatctcgctcgcttcgcgtggccggccgacgcttatccggcggaactggatcggagctattgcgtgcgtgcgtacccccaccccgccaggaagtggtatacgtggctattttcgctattcttctccatagaaaatgaataatttctagcctcttctctcttttttttttac

SEQ ID NO: 66482 - DNA, 144 bp, Zea mays
  Clone ID: MRT4577_160630C.1
aatatatgcagaatgggccactttaagagagattacaaacgacaccagacctactaaaatgatactagatagatctcaacacaatcaaccttatgataagcacctcctccataagaacaacattaatcaattataccaactact

SEQ ID NO: 66483 - DNA, 228 bp, Zea mays
  Clone ID: MRT4577_160631C.1
gtaatctaaaagagggcacctccaatgatgggttgttggttgaatgctgctgggtttgtctgggccgctcgcttgcatggcggcaaatgttgggggtccaacagggtgtcaccaccaggcgctttttgccggtggacccgcaaccactgtggttgggtcaaaaacgaaggagggttttcaccagctccctggcttattgggggcccccgggggggccgcccctcccca

SEQ ID NO: 66484 - DNA, 641 bp, Zea mays
  Clone ID: MRT4577_160632C.1
gccggccgggtcgggacatattctctgtccacacatactgcttggagcgtgacacaagtgcctgagacaacataacaagcacatgttgttatacccactgaataaataacaatagagtgctacaccgcctgcggagcgtagatgtcgaccatctcaccgcgctgcgctatctgcctctgctactgaaagctgcatgaagacttttgctatgataacactcatttaaataagcttctctcttctagcatctacaaacacaacttctctaatgtgatcctaatgctcccacattgctatatgtgaccgaacatcccagaggatgtattttacacctcggaaatattgtctccccagataccagagtataaatttctattctcaagataactgaatcgtacgaagcacgtaatccagcaaccgctggtgcttgcctgaaagacgtatagatgaacgagagagatcgggaaggagattgcatcccgctcctttctcatatgaacagggagttgtatgatgcttcatatacgaacaatgagctgtatgctgccaggaacttgatcgtgctactttttattgcatcttgatggtcaacgcgaacagaaacgacttttcaaataaagaaaaacaaaaaagggccctaa

SEQ ID NO: 66485 - DNA, 199 bp, Zea mays
  Clone ID: MRT4577_160633C.1
gcgatcaataaggaatatagaaagtgtgggagtcaagcaacaatggagaacaactattcaccaaaacatatactctcttgataatcttaatgctttgtacacgtgttgcgatcacgctactgttcactaagatgctacaggactcctatatcttccattttttccacatatattttataaaatatatgtcaagcgtgtg

SEQ ID NO: 66486 - DNA, 370 bp, Zea mays
  unsure (1)..(370): unsure at all n locations
  Clone ID: MRT4577_160634C.1
aacaagccaacccacggcagcgcgcggcaaccaagcacagccacggaccaaccagacggcacacgagcnggacncgcccccaaacggcacccgcggcgccggaaacagacgccaaaaagcccacaccgagttttttttcacagagggttgcaacagcaccggacccgccacgcacgtggacaacaagacggacggcggagagggccccaaagaagacgagcaagcgcccaccaaaaaaaagaacaaggcaaccagcgaagaccaagcggccccagagcgacaaggagaaccacgaccgcgcggcagcccgcagagagacccgcaaccccagaggacaagaaccaccccccaaacccggagacgccaagca

SEQ ID NO: 66487 - DNA, 243 bp, Zea mays
  Clone ID: MRT4577_160635C.1
gtgtaacctatatggatcccttattcatatttataaaacccactttggtttttaatggataatatacatattttatacaatcttaaactattggggccgaagccttattgccttttttagaatgcttattgcccgcccaaagaatgaagggagggtcctcctttttttgccactatgtagcacaacctttaaatttttaaccctttggtttgggcctttttttccaacatgaaggttttttaa

SEQ ID NO: 66488 - DNA, 610 bp, Zea mays
  Clone ID: MRT4577_160636C.1
ggtacgcctgcaggttccggtccggaattcccgggtcgacccacgcgtccggcgacagtggcggagcagtgggtgctggtggagatggtgcaggcgctgtacgaggctccagcataccatcttattttggaaggaatcctaatactttggataatcagactcgttttctctaaaacttacaagttgcaggagcgttctgatcttacagccaaggaaaaggaagaactgattgaagagtggcagccagagcccctcgtccctccagtctccaagaaccaccctgctctcaactacaacatcgtgtccggccctccaacccacaacatcgtggtgaatggaaaagagtgtgtcaactttgcctcctttaacttccttgggctgctggccaaccctcgagttaaggccgcagctttttcatctttaaagaagtacggagtgggtacctgtggtcctcgagggttctatggcacatttgatgtccatctggatttagaagagcgcctggcaaagtttatgaagaccgaagaagccatcatttactcgtacggcttctccaccggagccagtgccattcctgcgtactctaggagaggggacatcatctttgtgg

SEQ ID NO: 66489 - DNA, 297 bp, Zea mays
  Clone ID: MRT4577_160637C.1
aaggaagcccagccaaatataatagggcttagtcctgagccatagctaaagcacatctggggagaaatttcaaacacatttgggtccccttgactggaaaaagattcgattacctggaaacagaattatttttcgtaggcatggggttttaggttctgaacagcgaaattggaaaacggggcaccacacgacacaaagccaaggcagggggggggggccgttcatacatttttgggctttttcatcttggacgggggccacctgccctttttcctaagctttcttttggggacaaac

SEQ ID NO: 66490 - DNA, 113 bp, Zea mays
  Clone ID: MRT4577_160638C.1
tccgcctactcttggggtgcatacggccgcctttctcaaggcctgcggactcttctgtccctcctgatcactggcttgaaccttctcatacataggaccaggcgaggcttctg

SEQ ID NO: 66491 - DNA, 371 bp, Zea mays
  Clone ID: MRT4577_160639C.1
ttattagctcacgcgctcagctagctagcacgcgggattttgacccgttaaccctggatttcagcctaccccagtcgactatgaaggcggccagacatgcaagccctgtcgagcagcttagcttgagcgatgcatgaatgcttagcatacctagccgacaaggacaaagataaagagggcgcgcgtgcgctggtcaatgccctactctggtgtaagcgagaggccggaccagcaagcactccttacccgcatggggtgacaaaaaccaccaatgcacgggggtggcggagaacgtccacaacgaggctgaaggaactagctaacaaggtggcgtgagcgcagctgctgtgtgtgtaagagacctaactcaa

SEQ ID NO: 66492 - DNA, 308 bp, Zea mays
  Clone ID: MRT4577_16063C.1
aattttacatcttccagctgtttatgctttagcttggcatgtgcttgtgtagatcgcaggtaggtggcatgctcatgtttgtacttcaaattttgttaatattcagtttgctattcagtaatcaatatagctttgacaaactaaccaatatgtgatgtattatgagggaaacccatgaaattcaggaattgctgtagcaaactataccgaatccagataagcaaggctagtgatttgaaccaaataaagtcatttagacatttatctaattgtgctctgaatttctgattcaactattatagctgaat

SEQ ID NO: 66493 - DNA, 644 bp, Zea mays
  Clone ID: MRT4577_160640C.1
ggtacacccgggttcgttgggtacctcgggtaccctcccggcctgtacacggacgccgagggcgtcgccgtggagaagttcaagcaggtgttcaagccccatacgttcccgccgggagcctccatccacttcacgcactcgcccgccggagtcctcaccgtcgccttctccagggactcgtcggtgcccggtgccggcggcgtggcgatcgacaacaagcttctctgcgaggccgtgctggagtccatcatcggggagcacggcgtgtcgccggccgcgaagctgagcctcgcggcgagggtgtcggagctcctgaccaaagggaccgccgcagccgcgctgcgggcggagcccgtctcggttaccgcctgagcggtccagcgaaccgcgaggagaaagagaaccgatcaagcaatcacgtctgccgcccttgcgtgctcctgctccgaacagatgccgcgacggacggtgacgctgtcgcgtctgtttgcgctgtggcgttggcgtcgtgtttctgcctttctggccgcatgtgttcgctgtggtaacatttgaataaaagaaaacgcagatttgtttgcactgcacccccttaaaaaaaaaaaaaaaaaagcggccagcgtgtgtggatcaatatttgactc

SEQ ID NO: 66494 - DNA, 317 bp, Zea mays
  Clone ID: MRT4577_160641C.1
aaacaaggtacaagaatatgtttaacagagttgtgacctgtgcccacccaaacattgtcaaagcctctatcaggttactgaagcagacgtagggttgctgtaccagctttttcatggacatctcttgtggtggatacgttgattatcttcgtctagagccacgaggggcctctgcgagtgccagatcatatcgtgccatgcctgcttcttctagtcgtctcctggggcgacacttgagcgtgcgcgcgtgtgtttggacgttggaacttgactggagagccgaggatggaaacagccacccggcgcgggtagcatgg

SEQ ID NO: 66495 - DNA, 1094 bp, Zea mays
  unsure (1)..(1094): unsure at all n locations
  Clone ID: MRT4577_160642C.1
aagcaagtaatatggcttggtcttgtgctcgtccgatgagcatcgccctcgctgccgtcctcctgctgtgtggcggcgcgtggctgcagcaggcggcggaggcgcgcccccaccacatggacgacgacagcaggatcgacatggaccgcggcagcgacgacttcttcttcatcgtggggtactcgccggaggacctggcgcggggcgaccggctcgtgaggctgttcaaggagtgggtggtcaaggaccggaagacggcccgcactgtccaagaagaagtgcggcaagacggacgacgagctcgcctccgacgccgcattcttccgcgacgacgtcacgggcgacttcgagaagttcacgagggtgacgatgatcctcccgctgacgggcgagcagtacgcggagaacgtggcggagaactgcgtcccgctctggggcgagcagtacgcgaggacggagaactgcgtggcgttctggaaggccgccggcctgtacacggacgccgagggcgtcgccgtggagaagttcagggaggtgttcaagccccagacgttcccgccgggcgcctccatccacttcacgcactcgcccgccggagtcctcaccgtcgccttctccagggactcgtcggtgccagcggccggcggcgtggcgatcgacaacaagcttctctgcgaggccgtgctggagtccatcatcggggagcacggcgtgtcgccggccgcgaagctgagcctcgccgcgagggtgtcggagctcctggccaaggggaccgccgcagccgcgctgcgggcggagcccgtctcggttaccgcctgagcggtccagcgaaccgcggggagaaagagaaccaccgatgaagcaatcagatagatgggcggcatggcatctcacgtctgccgcccttgcgtgctcctgctccgaacagatgccacgacggacggtgaccgctgtcgncgtctgtttgcgctgtggcgttggcgtcgtgtttctgccttttctggccgcatgtgttcgctgtagtaacatttgaataaaagaaaacgcagatttggttgcactgcaaaaaaaaaaaaaaaagcgggccctcgagc

SEQ ID NO: 66496 - DNA, 430 bp, Zea mays
  Clone ID: MRT4577_160643C.1
tgaaagtggaggaggaggtagggaggataaaggaggagatgaataggataggagagaagaagaaagatggatgttataaggtaaagaatggagaaatcttaaaggaagaaaggtgagaaaatatatttgaagaagtagatgagaaattgagggaagtaaagaataggaagatgttgaactaaaagggagaggtgattatgaaaggaggaaatgaaaaggtggagataaaaatgttgacaccacctgcatatgctgacgcttgaagagaagagaaccatcaagatctcgattccatacaactcgaatgattgtattatggcgggcctatattagattctctccgaaccatttggggttacttgaaaactgatatcgggtgatgtatgaattgacggagaatcaagaaaattggcattggcttggaatatgg

SEQ ID NO: 66497 - DNA, 967 bp, Zea mays
  unsure (1)..(967): unsure at all n locations
  Clone ID: MRT4577_160644C.1
cattgggtacctcgaggccggccggagctggtggctgctcctgttgcattgcgatggcaagtggagtgagtgattgcgaatgtgaccgacgacaggctcatcttcttctcttttacactagagcatgatgcatgggcaggagctgtcctatgactcctatccctcctccttccaatccatggacgacatgcaccgccaactccaagcaccaccggcctgccaaagccgccgcagcagcagcagcatcatcttctttttctttttcttagcagcggccatcatctactgcgtcgtgatcatcagacgattgatcaaattccaagggaggaggaggagggtgaagaatgatcatgcagcagcagcagcagcaccaccaccaccaccaccaccgagaaggggtagccgctggtggtggtccgtcgtggagacgctggccttcctgtccgccaacagcagcggcaggggcttctaccacttcgtggaggctcgccaccgcaggtacggtcccggcccctgcttccgcacctcgctcttgggcgccacccacgtgttcgtctcgtcggccgacgccgccaggtcgctcctgggcgccgagccagccggcttctcgaagcgctacgtgcgcaccgtggcggagctcctcggcgagcacagcctgctgtgcgcctcccacgccacccaccgcgccctgcggcgcgccgtggcgcccctcttcaacgcgcaggccacggcgtctctggccgccaccttcgacggcctcacgcggaggctcatgaagcgcgactggagcagcagcactgggggcccgtggtggtgctcgacgccgcgctggacctaacattcgaggccatctgcgacatgctcatcgggaggacgctgcggccccgatgtgagaagcggctgcagagcgacgtgctggccgtgacgcggnccatgctggcgttcccgctcaagctgccggggacag

SEQ ID NO: 66498 - DNA, 679 bp, Zea mays
  Clone ID: MRT4577_160645C.1
acctccccaaagcactagctatattactctagcacaccacacaatcacaatggcacccaaagctgccctcttcgtcgccctgagcctcctcctctccgccgtcgccgcccacggctgcggaagcacctattgccaaccgccggtcgtcgtgccgacaccacccgtcgtcgttccgccgccataccatgaaggaggagggcacggccacggccacggcgggcagtgctccatcaacgtgctcaacctgagggtgtgcgccaacgttctcggcgaactgctcggcctcaagatcggcgttccggtgcgcgaccagtgctgcccgctgctccaggggttggccgacctcgacgccgccgtctgcctctgtatcgccgtcagggccaacatcctcggcctccacctcaacgtgcctgtggacatcagcctcctcctcaaccactgcggcaagacgtgcccgtctggtttcacttgcccagcccattaacggacgtattgttttgcatgggcgccgaataagatttgccttccgtactttgtttttttatttcatcaagtgtggatctgttccactcccacattttaattgtgtaaccagtactactttttatttttttggcaaacaagcatgtactcttcgtattgataaatatcaacagtgagcaataattattactccggg

SEQ ID NO: 66499 - DNA, 186 bp, Zea mays
  Clone ID: MRT4577_160646C.1
agacttactgcgcatttggcagctagagcaacagaagagctcgcagttactgagagtgtgtgtgagagagaggatgggtgtcagcggacatgttgttctgctgctggtactggtgacttttctgcgccgcactctactcatgactagttcctcgttgatatccccgccttccatcgcctccatccg

SEQ ID NO: 66500 - DNA, 1397 bp, Zea mays
  Clone ID: MRT4577_160647C.1
cgctagccaatccgagcgctggctccccagtccccaagcgtggctcttccagcccagcgccaccgcagccatgccccatgtcctctccttcctccacctccacctcccgctcaacactgcccctttgcattccttccgagtccatcgcactcgccactcccaccctcacctctccctccgtactcggcgcgcctcagcgacggcggcggccgccgaagcagagaacccgtccgcatcggcggacgtcgagatggtccgcgggcgggacggtgtttggacggcgcggtccccaactgtggtggtcctgtgggatctcgacaacaagcccccgcgcgggccgccgttcccggccgcaaccgccctcatcggcgccgcctctctcctcggccgcgtcgtctcgatttcggccttcgccaaccgccacgccttctcccacctccctggctgggtcaccgccgagcgccgcgcccgccgcgccctcgaccgctccgagcgcgcgggggtcgtcgtcccttccgtgccctactcctgctccgtctgtggccggcgcttccctacccgccccgatctcacccgccacttccgccagcttcacgagcgcgagcgaaacaagaagctctcccgcctccgctccctcaagggcaagaagcggcagaagttccgtgagcggttcatcaccggcaacaccaagtacgaggatgccgcgcgggagctcctcacccccaaggtagggtacgggcttgcctccgagctccggcgcgcgggcgtccacgtccgcaccgtccccgacaagccgcaggcagcagaccacgcgctcaagcgtcaggtgaagcactccgtcgcctgtggcgtcgattggctggtgctcgtctctgacgactcggatttcaccgatacggtgcgtaatgcacgcgctgccgacctgaggacggtcgtggtgggcgacggttgccgcgctcttggcaaggttgctgacatttggttgccatgggaccgagttgagaatggggaggttgatgaggagatgctgaggagttgcacgttttcagagtaccgagaagatcagggaactgagcgggatgggcagttcataggggattgggatgcaggtgactttgatgatgttgttgacgatattgttggaactagaaccagtttgcttggagctacgacaatgtctgcgtttgctgacgaggacattgcagatggcatatttggagttgaattgaccggggataacatgttttggagtagtgacgatgaggaagaggatgattacttgtgaggttcacatgtgtattgagcagtaaacatttagggcttgtttgctttttcttaatccatgtggatcggatgatattgggtgaatttaaatcctaaacaagtcaaaattcttc

SEQ ID NO: 66501 - DNA, 303 bp, Zea mays
  Clone ID: MRT4577_160648C.1
aaacgcaaataaagcataaacccgggtttttatggttgggattaaaaccaggcgaccgccccataaaaaaaaaaaaattcagatggccaaatgggtcatacatatccttttggggttttttagaaaaagggtttaatctcctagggaggccccagatgcaaaagcttttttttaagcccagggccaaataaagagttttactgaaacatgtcacacatttggggggacttggcatactcctgcactttgttaaggccctcaaatttttcaccgtagtccttgacgaccacacaggggcaggct

SEQ ID NO: 66502 - DNA, 226 bp, Zea mays
  unsure (1)..(226): unsure at all n locations
  Clone ID: MRT4577_160649C.1
atggggcttccnaacaaaaaaaaaaaaaataaaaaccattaacctgcgggaaccgccaaaaattggggcacccatgcatacatgtataaccgacccgttaaggccaaaaacccacccccaggacaagaggggaggaaatacctacgaacccaggggcaaaagccgcggaggggtatgcccttgcacaccccaacagtaaaaccttgcggaaagcgaacctttgccc

SEQ ID NO: 66503 - DNA, 117 bp, Zea mays
  Clone ID: MRT4577_16064C.1
atcttagagcgcacattggacccacaactcaccacagcacaggaccacaggttgctttcgctgccgaaggctcctagtgcacctcagatctggaacaaaccatcactttgaagaaag

SEQ ID NO: 66504 - DNA, 363 bp, Zea mays
  Clone ID: MRT4577_160650C.1
tcttgctgtccctccgttcgagccgtcgacgccctaaccctatcaccttctggccgcccaaatccctttcggctcctgccgccctctgtttaaggcgcagaccatggagtcgtcggttatggcggcacagaccatggagtcacaggctatgatggcgcaggtcttagtctttaggccatggagtcgcagtcaggcgttcaagatgctctgagacttgtgtcaggttcttccaacatgcatgatggattcagtacaccaaaaaaattaatatccttctgacatcgctgtccatctgtgtacctgattgggatgactaattgaagccagttattggaaccgcatttggttctcctagaggaggtg

SEQ ID NO: 66505 - DNA, 352 bp, Zea mays
  Clone ID: MRT4577_160651C.1
tacgatacgagacctcgacgtcgaccaccacacagacctaaccgagagaatggcagcagcagcgatgaacgggcactatttgcatgcatttggcagggagaggacgacgctccacgccgccctcggtgggcgcagagccgcggacgtcatcctgtggagggacaaggcggcctcggcgtgcatcctggccgcggcgacggcggcgtggggcctgttcgaggtggcggagtaccacctcgtcacggtggcgtgctacgtcgccatggtcgccatgctcgtctccttcgtctggaccaacgcttctgcgttcttcaacatgtgagtgagcaataaaaataaaaagcatccttcg

SEQ ID NO: 66506 - DNA, 774 bp, Zea mays
  Clone ID: MRT4577_160652C.1
cgaacagatccaccctcaccagccgcctgacgttcgagccgcaccagccctaaacccttccacctccagccgccataactgtaatcccttccaccatcagctgcccctccgttcgagccgtcgacgccctaatcctatcaccttctggccgcccaaatccctttcggctcctgccgccctctgtttgaggcgcaggccatggagtcgtcggtcttcgagtgccaggccatggagttgtcgatcttcgagtgccaggccatggcggcacagaccatggagtcacaggctatgatggcgcaggtcttagtctttaggccatggagtcgcaatcaggcgttcaagatgctctgagacttgagtcaggtttttccaacatgcatgatggattcagtacaccaaaaaaatgaatatccttctgacatcagtgagctgctctttgctttggtttgttctgctgccatattgataaattcatgtagtgcctcgttacagctgtccatctgtgtacttgattgtgatgataaattgaagccagtaattagatagtcatttggttctctagaggaagtggaagaattgtacaagatatatgctcttgagaattttattggctgcaacattccagaacatatcgaaatccatccaccatccgatgttcactcccagtaaaaacatcaagaaatccaaagaactatttaaaatcgtgtaaagggaaaaaatagtaaagtgagaccgaagtagtcaaacagtcatattgctaaagtattacaggta

SEQ ID NO: 66507 - DNA, 548 bp, Zea mays
  Clone ID: MRT4577_160653C.1
ctttgtcttcttctttttttttcttttactacactgtctactttgaaccgtgctgtttatttgctttttcttctattaccttttattcatttatctactgtctacttttattatcaacaacttttttcatttaaccaattgttctcacagaaccaaaaagcttatcttctgtaaaaaagactaccaccatttagccagctagctgcagtaagctgcgcttccttcgggacacagtaacagggggctgcctttctaccagcagttagcgggtaaccccgcaaccctcttacaactacaacacctgttgccctttgggcaacttgctttgacaaacccagcagccttctaccaacaacacatcattgaaaaacgccctcttttacatagcttattagttgtaaaacaataccaaatttttttggatgatgtatgtggacaaccagaaataagaagttacctttccagattctaatgtaaataaaaggaaaaaggacccccccctgagggggaaaaaaaagcggggggggggggggggttcccccccaggg

SEQ ID NO: 66508 - DNA, 117 bp, Zea mays
  Clone ID: MRT4577_160654C.1
ctgcaggtccggtgccggactcccgggcgacaatcggtggtgtagactgtagagtagcagcctagtacttttctactgtttcagtgatgctccaatatatcactatatgcaatgtgt

SEQ ID NO: 66509 - DNA, 311 bp, Zea mays
  Clone ID: MRT4577_160655C.1
aaaaaacatctcccacccaaaccaaaccatttaaaaaaacatttcttattcataatcacccccctaaaatgtaaaaaaaacccccggaggaaaaaaaaagtgcaaatttacataacctttcttttcatgtacactaaggcccacatttttttccaagaaaattcaaaaacatgacccctctgaaattaacccccacaaatttggggtttacccaaccaaccacaaccactcttttttggcataaaactgggggggggaaaaacactgataaaaacccattgctggggcaaatgcaaattggggccatcaca

SEQ ID NO: 66510 - DNA, 221 bp, Zea mays
  Clone ID: MRT4577_160656C.1
gcgaagcgcactaacaacgacctaacaccaatggctaccaagatattagccctccttgcgcttcttggccttttagggagcgcgacaaatgcgttcattattccacagtgcgcacttggtcctaagggcattattccacaagtcctcccgccaaataatttaatggggtttgaacaatcaagcggggcaggcttcaaggtatcaataaggcctggggggaa

SEQ ID NO: 66511 - DNA, 275 bp, Zea mays
  Clone ID: MRT4577_160657C.1
attgatatgttttatccctgctgcaaaaaaaaaaaaaaggaaaaaaaaaaaaaaaaaaaaaaaaaaaaaaaaaaaaaaaaaaaaaaaaaaaaaaaaaaaaaaaaaaaaaaaaaaaaaaaaaaaaaaaaaaaaaaaaaaaaaaaaaaaaaaaaaaggggcggccgccaactattgacctcgtaaacccggaaattaattccgaaccggtacctgaaggcttaccactttccctaataggaagtcattttaaaccttggggaaacaatggccaaaat

SEQ ID NO: 66512 - DNA, 284 bp, Zea mays
  Clone ID: MRT4577_160658C.1
ctcggacgcgtgctccatacgctgacaacctgtcctggggcttagaccccggcgggtgtgggggagtcgaggacggacacccacctctcggcaaccccagggctcggttcgcgggtccagacctatgcaacagggttgagaccgaccatgggccgccaaatgaccaggcgtaacgacctgcaaaaaaaaatgcacctgagagagaggtgcaatcatcaatgccgagcgtgtctgcgcgcgcgcgtgcccacagccacacaaacagctggaactggggcatgggt

SEQ ID NO: 66513 - DNA, 295 bp, Zea mays
  Clone ID: MRT4577_160659C.1
catgaagattatccatctgttgttcgggcactttaaggatggggacctcattcaacacataggctacgacactatctctcaaccaagatatttaagataacatgcatcacacctgtcgccaatcatattgaaccacgtcgagaacaagcaaatgcactctgtcaagtactcctaccatctcatgctacagatcttcctgctatggatatacttcattaccttctgccatcaatacacaatctgctaaaagatctgcatgctctagaccctgcccacacagaggctctacaaatca

SEQ ID NO: 66514 - DNA, 205 bp, Zea mays
  Clone ID: MRT4577_16065C.1
gtatgaagcagctgagtagctcggaatcggccgtatcagcacagcagcctccttcctcctctactctcgctcgtgtggtcgctcctcgttcgcatccgatccaaagagggggggaaggaagatatacgcgagagcttccgcgtctagagctcccacgtgcggtacagcccgatgaagatcgagtcggagtaccggtacgacacga

SEQ ID NO: 66515 - DNA, 338 bp, Zea mays
  Clone ID: MRT4577_160660C.1
aacgattcgaacctaatctatcgaacgaatactgcacagtttctaaccatcgatacctgagatggcacataaggcaggcctgaagctggttgtataaaatccagtacaggaggagcccgagacctagacagccgcaatggctcctaccgagatgaagcctatggccgacatgcgcctcccgacgggcaagtcccactgtaggacggccgtcagagccataaggggaacaagaaagcgattgaacgtcgtggagacactcgagatctacaactgctacgtgctgcagcagcggcacctctacatctgcatctagtccaaggccatgttcattcatgaac

SEQ ID NO: 66516 - DNA, 384 bp, Zea mays
  Clone ID: MRT4577_160661C.1
aaaaaaaaaaaaaaaaaaaaaaaaaaaaaaaaaaaaaaaaaaaaaaaaaaaaggaaaaaaaaggaaaaaaaaaaaaaaaaaaaaaaaaaaaaaaaaaaaaaaaaaaaaaaaaaaaaaaaaaaaaaaaaaaaaaagggccggcctttttaaaggaccaaattttacttccccttacttgcaacatatttattctttttttgtgtcccttaatttaatttaattgcccttcttttaaaaacgtttcatttggaaaaaccttgcctttaccaaattaaatcgctttgcaaaaattccctttttcccaatttggcttattaccaaataggccagcaccttttgccttttcaaacatttccccaccctaaatggcaatttgaaccccct

SEQ ID NO: 66517 - DNA, 105 bp, Zea mays
  unsure (1)..(105): unsure at all n locations
  Clone ID: MRT4577_160662C.1
gttctccattganatggntccggtgtggcacatgttccactaaggaagggtcatccacagggctcaacatcaccataaccaacaggacagaaaccgcttgcatgc

SEQ ID NO: 66518 - DNA, 807 bp, Zea mays
  Clone ID: MRT4577_160663C.1
ctcgaggccggccgtgcgcctccgccctcaaccctacccgtatcgcgcccttgccctgcctccagccccgcgcagtatgctgctcgctccgggctccggtcatctaccatgcgtcgttggctactcgcctgctcccatgctcccttcggatctgctgctctcggtgatttagcgccgcctcctcgtgctccaacggcttcacctccgacccatcgcctcccccgcctcgcggctcgcctctgcctcctgcttcagcggcgttcagcgccgccggtatgggcgatcttcgtcgctctggtggaccacccgacggcggtggcggagagcaactcaactaggaagtacttcgccacgacggtgatggacttctggcaatggttcgtgtcggagtccgttgctggcatctcgcgagatgcccccgacccatcatccatttcacgcgccagcaagaaagtagataagaacacattatctacaggttccgtccaaagcatttgaagcagctgctggaaaggcacaccttaggcttagatttgtcatgaatttgcagacaatttcattacaccaccctgtttcaagaagcatctcaattaacacggagtaaaccccaaaaagcgggcaagaaaatataaagatacccaaccaagtgcaatttatcttttcaaggagatgcattgtagcaagaaaagaattagtggaactattcagaaagctattgatgatatggtagcaacggttgcaacaccggatgaagatggacagtttgtgatgtcttctgcacaatttgtttcccatgtcttgccgagc

SEQ ID NO: 66519 - DNA, 280 bp, Zea mays
  Clone ID: MRT4577_160664C.1
gaaatgttattagattcgattgcaccaaaggggcccgggattaccgatgtgttcttctattttaggactccagggggccttttttactagagaatcctcttgttttatgaatggatctcttttacggaatcctttgcgggccttgttacataagggggagccaaggtcgtaaacaataacccaacacccaatgtcgaaaggtgcccatttcctccgcaccaaatttgccgctcgttttgaaatttggttggctctaaagcccactggcttacgtaagccc

SEQ ID NO: 66520 - DNA, 313 bp, Zea mays
  Clone ID: MRT4577_160665C.1
tcccgactccacccacgcgtactacaaaccttaccccaaccttatacctcttttttacactaacatactctccaatatttcgctaaataaataatactggtcggcaccaaaaacaatattttaaatctacttccttattcaattccttcctaaactaacttaattcatcaaacttttccatcacttctctccttttccatgctgcccactcttcacacaatctttatcctatcaatattcttcaaacactgtaaactatacaactattaatacactctatttactctttcatttactcctataaaaacatttt

SEQ ID NO: 66521 - DNA, 391 bp, Zea mays
  Clone ID: MRT4577_160666C.1
gccggccgggctgggcactccagccagtcactcgctgttgggtctttgctcgctcgggcgtatccctggagatccatggataagaacggcgtcaagttccgcgaggcgctgtgctccaaggccggcgcgcaaatcttctcggagggggcgctggactacctggggaacccacaacctggtgcacgcgcagagcatcctggccatctgggcgtgccaggtggtgctcatgggcttcggcgagggctaccgcgtcggcgtcgacccgctcgcagaatgcgtcgacaaggcgtaccccgggggagccttcgacccgctgggcctcggctacgaccctgacaacgccggcggagtacccgtgaacgatctccaagaaggccgacatgtaatggtc

SEQ ID NO: 66522 - DNA, 354 bp, Zea mays
  Clone ID: MRT4577_160667C.1
tagtctgcacgccgcccttgtttttttttttgtattatccctgtttcttcgttctcttggggttttttacttttttggccttaacaaggaccatttggaaaaaaaaacgggctgtgcgattcccaccagttttttgataaactgcataacgtccaatttaacgaaaaagcggggtactctgctaaccagccgctgcaaggagaggggacttatcgctcaaaacaaaaatcattttgtggcccaaacacacaatgccacagggagcttaatgacacactgcctgtggaaaaacccgagtgaatacatctctaatggtgttgcaaaggtggtcattccccagaagggcggccatgg

SEQ ID NO: 66523 - DNA, 157 bp, Zea mays
  Clone ID: MRT4577_160668C.1
aaccgcatatgcggcgacccacccgacgcctctctgactatggctggctcctgggagatctcgctttaccaccaccggtacacacgaactacgctgcgtcacgacgttgtgaacccgacgcacggacctcggacggaaccaccctacagtcgatgcg

SEQ ID NO: 66524 - DNA, 338 bp, Zea mays
  Clone ID: MRT4577_160669C.1
atggagagcattcacaaccacagagcgccaatgtcgaccacgacactttacctacttaggctactagcacattatgcatgcgtggccaacgcgacatttttgcgtgcgcgctcactgcctccaatagctcacattgctcactcacacctagcatcaatgttcgatacagtatgtgaaaacctacttctataaccctataagatccaactagcaatggctacatgctacataccgcgatcaccgttggcgcaacaatcgatagacctatctaaggtgcactccttggcacagaccatctaggcacaccaactgtagcaactcatgctacacgagatcaa

SEQ ID NO: 66525 - DNA, 515 bp, Zea mays
  Clone ID: MRT4577_16066C.1
ggcttgaactgcttgagagattagattctcccgtcccagattatgtgttcgtcccagattatgtgttctgatgcatcttatacaatgtgcatgcatccttttttccttggaggatgtctctggtcaattggatgattagtggccacatgtatacatatgttttagtatataccccctccaatttaaattgcatgttgtcttagttttctcccatgtgaaacttgtctgagtttagtgaagtgtatacaaatttgaaagcatctaggcccctggttggttttagtgattaatgacaacgtaatgttatatgtgactaacgtgtgttttgcagagacaaatggtaagttaggtcgcatgataggtagaagtactacaacggtgaaaacaatcccagagataagaactctaagcgacggctaaaacgacgaaacataaggtgaaggactaccaagtccgagtgtaaggagatgtggacactcgcatttagttaggtctttaattctttttagccgact

SEQ ID NO: 66526 - DNA, 536 bp, Zea mays
  unsure (1)..(536): unsure at all n locations
  Clone ID: MRT4577_160670C.1
nccggcgggagtgggtattgatttttggtggggcatgatcaaggagggggggagggggtaatcttcctaggattctaccttttgcccgcctctgtcatcacccaacagcttctccccgctcgaccaccatggcttcccacgatcatgataccatgccctaggagactcaggactacaagctctctcagcccaagcagaggctggatgagtaccaacagatggacgctggcgatgagtctctccagcgatacaaggagtcccttggtctcggaggaggtaccgacatctctgaccccaacgacccccgagcctgcgtcattctctccttgaccatggactcccccggccgtcctcccggcaccatcgatctctctacccctggaagcgagaccaccctcaaggacaagcccttcaacatcaaggagggtgccaagttcaccatgagcgccaagttcaaggttcagcaggagattctcagcggtcttcactacgttcaggctgataagcgaaaggatatccgcgtactccaaggactc

SEQ ID NO: 66527 - DNA, 289 bp, Zea mays
  Clone ID: MRT4577_160671C.1
gtaattgcagttgtgagtatactggctgcatgtgatgaatctggctcccttgcccttggtaagaggattcaccggcatgtgcgccagaggaagctgagtagatcaaccctggtatgcaatgccctgatggacatgttctgcaagtgtggatgtgttaaccgagccgactacatatttgacactgagattgttgaaaaggatttagtgtcatggaacattataattggagggtttgcaatgcatggcccaggtgaaaaggcgctggaactcttcgcacaaatggagcagc

SEQ ID NO: 66528 - DNA, 597 bp, Zea mays
  unsure (1)..(597): unsure at all n locations
  Clone ID: MRT4577_160672C.1
gtaccctncgagggctcggccccgggccgggaatacgaacagtacaatatgagtacccaccagtggacatagcaaagcacaatgccgcacctacgctggtggccaatatagagggctgcttatgctaccaggtctttacgcaggtgatgatacggtaaccatttcctcgttacgctggaccgctcactataggttgccttcttcccgcgaaccctctaaccagttgaacgcctataggtatgcaacaaacccaactcttcaaccatacaacattcatcacgctagcacatccgacatttaacattcataacactggagcctcctacagtgaatagacctattccatacattaccttacaagcactacttgacccagagcatgcagacccagctgcctcactctcttgagctcacaaaccttgatgcctactacttagctgcatcggactctgccatttatccgcatcaccgacttgtaccatgcatcctattagctgcagcccacctaccattcagcctgctatctgccgactaccagcagtgaactcttccgttcaaccacatgagagccaagtactaccatgcatacagacagca

SEQ ID NO: 66529 - DNA, 419 bp, Zea mays
  unsure (1)..(419): unsure at all n locations
  Clone ID: MRT4577_160673C.1
cccnttnnngggtgngnntncccgattgtgtacctcgagagcggacgggnactcagttcccaagagaagagggataagcggagacggcagcgaataggctaggagccgttactcgcacggatgaggtggagacacgcgagtacactatcaacctccacaaaagcctccacggatgcagctttaagaataaagcaccaaatgcccatcaacgagatcaggaagtttagctcagaacgccatgggtaccactgacgtccgcattgacgcgaagctcaacaagcacatctgcaacactgccatccgcagtgcgacgagacgcgtccttgcaagaattgcccggaaacttaacgtagagcccgaccccatggcgtaactctactctctggacaaagtcgatgacatcccaccggacggcctca

SEQ ID NO: 66530 - DNA, 846 bp, Zea mays
  Clone ID: MRT4577_160674C.1
cattgggtacctcgaggccggccgggcctcagtcctcaggacccctcgtcccctccagttgtggaggccgccattgcgccagcgccacagtgcccgtcgaccgccacctgcactctgcgccgcacctgccgcctgcgccgctgcgcgcagcgcgcaagcaacgccgccggccgcccccacgcacgcaagcagctttgcgccctcgctttgcagcttgcttcggcaatggcgctgatctctggcgctcccaacgaagacggccgttgatgacaaaactaaacaacctgccacattttggtcttgtctccaagacatgcaagagggtcttcaggaacttacaatatgactttcactttgggctcaagagttcagatgatgttcaccttttggctgcaacttgcaaggacaagtcaagtacaagaacaattgactagcatcctgcatcattttggttctcatgccatttgtcagttgtaacttgtaatgaacttgtgattggtgtgcggcgtgtgcttttggatctcatgtcactatgcatttcatttggttatgtaatgaattctggtactatggatttctggtcatgtaggaacttgaaatgacattcagttgtgaaaaaaaaaaaaaaaaaagcggccaaaaaaaaagctatcatcgtcgccggcttgtccaggcgtaaggtctgtgtctcacgccagaagcctactactgccactgctgcatcacccaagaaccagcgccccctgtgtctctgcctgttcctgcagctgccaaccgtaacactcggcgatcacctcttggttgtaagctaatttatttatgttctacatagttgatgacaaaact

SEQ ID NO: 66531 - DNA, 637 bp, Zea mays
  Clone ID: MRT4577_160675C.1
gccctcctcgagtttttttttttttttttttttttttttttttttttttttttttttttttttttttttttttttttttttttttttttttttttttttggtttgtttttttttttttttttttttaaaaaaagagttcccggtattaacaatgtccaagggttctcgaggcccaggggccttggcaccgggggaaaatgagacccgcgagtacatacaccagacgggggcgctccaaaggagggggcgggccaacggggggggcggcggggagacacttggccgctgatctcacacgggccaccggggggccccaccaaacaggggaaccccggggcggagggccggcaaacccaccgggccctggggcccaccggcccgaggggcccacccccctcaaacagggggggggggccttgggggcgctaaaccccttgggtttccggggccccgaattacagcagccccggggttcccccaacccaaaagcgcccgtcggcggggaggagccccaacttttgcccccttaaaaaatgggtaaccgggggcgaggcctaattgggggcggggcggcccccggggggaaactgttatctgggcacaattgaaaaggggatacaacccccccgcctaaaaa

SEQ ID NO: 66532 - DNA, 702 bp, Zea mays
  Clone ID: MRT4577_160676C.1
tcggccgggctcagtcctcaggacccctcgtcccctccagttgtggaggccgccattgcgccagcgcccagtgcccgtcgaccgccacctgcactctgcgccgcacctgccgcctgcgccgctgcgcgcagcgcgcaagcaacgccgccggccgcccccacgcacgcaagcagctttgcgccctcgctttgcagcttgcttcggcaatggcgctgatctctggcgctcccaacgaagacggccgggacgccacggtgactgattgccgcacggatccggagcaaggggagccaccaccaggtccaccacaggcagcaccagctgctcctgcgccttcgtcacatcttatagcttcgcctccatccagagcagttgatgacaaaactaaacaacctgccacattttggtcttgtctccaagacatgcaagagggtcttcaggaacttacaatatgactttcactttgggctcaagagttcagatgatgttcaccttttggctgcaacttgcaaggacaagtcaagtacaagaacaattgactagcatcctgcatcattttggttctcatgccatttgtcagttgtaacttgtaatgaacttgtgattggtgtgcggcgtgtgcttttggatctcatgtcactatgcatttcatttggttatgtaatgaattctggtactaaaaaaaaaaaaaaaaaagcggcc

SEQ ID NO: 66533 - DNA, 1528 bp, Zea mays
  Clone ID: MRT4577_160677C.1
ggaccctcgaggccggccgggccggggtgaaatcgtcaccgcagaaaaaatttctgtttcccttcatcgagatggaggcggatccgagaatgggataagaccgcgccgcgcgcgctctcctctccgccactctcaccgtcgcctgccccgccatgacttccttgctgttgccgccgccgcaggcggctgccgcagcgtacggatgctgccactgtctcctgctcgcttctaccaccgtgccggcgaggagtgggtgcgtgggacgcgccagcagaatcacgctcgcgctccgctgcctcccgattaccgggcacaggctgaggagtcgaaaggttgcgtgccaagcgacgactgagaccgagcccgagggcaatggcgacgaggaggagaagaaagagtttggagatgatgcttcatcaccttcagtttataatgttgcagaagcaaatgggccgggagaaaatgactcgagtatagacaataagaaagatgaaaccacgaatgcagaagcagcactgctgagctccggcgacacggttcaggacatggatggagatgctacttctaccaatggcatacaagaaaatgtggaagttattgaagttgctagtggatctccattgccaggaatgaagcaacagcttgatgattctgtcaggatccccaaggctacaatagacattctaaaggatcaagtttttggatttgacacattttttgtaacaagtcaggagccttacgagggtggagtattattcaagggaaatcttcgtggtaaaccagccaaaagttatgagaagatcacaagtcggctacagaacaaatttggtgatgaatataagctttttcttctcatcaacccagaggatgagaagccagttgctgtggttatacccaagcagacattacagcctgaaactacagcggtcccagaatggtttgctgctgctgcatttggattagttaccatcttcactctgctacttcgaaatgtacctgttctacaggagaacttgctatcaacatttgacaaccttgagttgttgaaagacggactatccggtgctctagtaactggccttataataggggtgcacgaaattggacatatccttgctgccagggaaagtggaatcaagctcggcgtgccatattttgttcctagctggcagataggatctttcggcgggattaccagaatcgtcaatatcgtccgcaaccgtgaggacctactgaagctagcggctgctggaccattggccgggttttccttgggattcgttcttctgctgctgggcttcgtcttgcctccaagtgatggccttggccttgtgatagatccaaccgtcttccatgaatcgttcctcgttggtggtctcgcgaaacttcttctcggagatgttttgaaagaagggacgcagttatccataaacccgcttgttctatgggcctgggccggtctcctgatcaacgctatcaacagcatacccgctggggagcttgacggcggccgccgactaaagaactc

SEQ ID NO: 66534 - DNA, 356 bp, Zea mays
  Clone ID: MRT4577_160678C.1
ggcaagccaaacacttttgaacactgggggggtggtctatacatgaaacaaatcagaccataatgatttgatttagggggggacaaatcgaccttttttccctttagctaggaacacacgtttttatatattggagtggtctatacatgaaccaaataaacacacgccatcagatgacccagcccaactagggaagcaccgaattgttcttacgttgggccttttttatcgaatcggcagcccaaaacctcccagatggtaaagaatagcccggacatgctgaatatgatcctagaaagttgaggggaaacggaaaaataatttcctattataaaaagcttttaaatgttagaatt

SEQ ID NO: 66535 - DNA, 276 bp, Zea mays
  Clone ID: MRT4577_160679C.1
gcagtgggcaattgctttgccttgagaaaagatcatgagactgctttgaagaattttcaacgttcggtacagcttgactcaagatttgcatattctcataatcctccagtgcagaatactcatgaccacatagagtgtgagcatatgcaaatcttgagtcaagctgtaccggacgtttatgagaatattatgaagttgtacagatctccacttcatctagaccaaaggcactacaaggcctcgtatgaccttgcagatgttttttttctatgcagc

SEQ ID NO: 66536 - DNA, 392 bp, Zea mays
  Clone ID: MRT4577_16067C.1
aacggccctcacgatcgaagattttacaggttaataatggttgaagacaaatttggtgtaatactatactgtttccgcccatggttaatgcgccgtgggttgaacaagtaaaattagactttggttggaacaaaaaaaaaacagtttcatccactgcattttatttgaggcgttttgatttgcggttaagagggttaatacttggaaccttttttattcaacaccctagggaagtgtcctctggtctatgggaagggcttccagtgactgactcttggggctttccttttttaccaacgccaacatttttcccaaatattcttttaatggaacctggtttgcctggaggttcttagggaggtccttggtctttatgggaaggttcatgggat

SEQ ID NO: 66537 - DNA, 1050 bp, Zea mays
  unsure (1)..(1050): unsure at all n locations
  Clone ID: MRT4577_160680C.1
cttgctttttcgtcattagttcaatgttagagttgactgtatatagaacatttttttctgcttcacatatctgaactctgcaatgtgaagagatgatgatacaaattatttttataatataaatgatctgcagcaacagcttgatgattctgtcaggatccccaaggctacaatagacattctaaaggatcaggtttttggatttgacacattttttgtaacaagtcaggagccttacgaggtaaatatatgagatgcnnnngattaacttctgtataaatcagatttttaccttactaactgtgtttatacaagacaaactcatactcaaatactcaattgatgcatgctacaccagtaagtatgctcttggtctgactaagccaagtgctctcacagaatattgtttaactttactctaggttgacattttgtcatgtaaaataaaggtctcaagtataatggccttgaatgactaagttctatttaccaacttactttgtctgaataagggtggagtattattcaagggaaatcttcgtggtaaaccagccaaaagttatgagaagatcacaagtcggctacagaacaaatttggtgatgaatataagctttttcttctcatcaacccagaggatgagaagccagttgctgtggttatacccaagcagacattacagcctgaaactacaggtgacaaaaatttatcagtaccttcggtggcgtcggtagtgctcagagtggtccgatattttgcttaactgttaggcatctatgattttattagtatatttattcagtgcaaaggttgctgagttgatatattaaatttcagcggtcccagaatggtttgctgctgctgcatttggattagttaccatcttcactctgctacttcgaaatgtacctgttctacaggagaacttgctgtacgaggtttctctttcatttattcaccagtccattttgttttagattgcttgtttccattttcatgtttccccgccttgatgtcatgtttgagttgctatatatgcttactcttttctg

SEQ ID NO: 66538 - DNA, 748 bp, Zea mays
  Clone ID: MRT4577_160681C.1
gggtccctcgaggccggccgggatgccatttcccgacagacgatatctcctctggtcttctcgagcactggtctacaagagatcgtcctcaggctcgatagcactccccatgacctacctagatacgtagctacctgacactcaaaatgcgtccgtgactgctgccatcctctcccatgtctgtgagaagacggctggccttgcgctcaggcgactacgaaagtgcgacccgtccaggcgaagaacgccttcgaagaactcctcgactgagagtgctgccgagtccgaccatgcactcatctcgaaactgctccctgcccccgaaaatgaacagccctggtaaagctccccggccgacatgaactgatggcccgggcctcaggccgcgcctcctccacacactggcgcccattccaagagggatgctgctgctgctgctgcagtgtgcacttgggacatccactccataaaaggcaccagaaggtatcgcacggagagagctccgatgagtctgcgaagagtcataactgaccgaagcgaagcccaacatgacgattccgcagagacgaaagcgttcctctccaaaggagcacaatgaggcgtcgaccgcctccgcaaacacgtacggccctgacagaccataagctgacacgatcccatcctcccgcgctacatgagaaacggcatagtaaggcctgacactgccagcgctgacaatgacgatgactacgccgacatcacgtacatg

SEQ ID NO: 66539 - DNA, 579 bp, Zea mays
  Clone ID: MRT4577_160682C.1
gccggccgggccgggacctgctcaatgagaaccagagtggtcgtcctttcgcgctgcctgcttcagctccttccctggcctctccctctcgttgccataaaagattccaagcttgcccggcccgccgatcctactgccattaaagtcggcttctgcttctgggcgctcttctggctcgccggctccgccaccgtgagcacgaccacccccgccctcgccggcggcggcgaggcggtggccgtggacgcccggtcagccgtcgccgtcacggacgacgacttcgtctgcgccacattggactggtggccgccggagaaatgcgactacggcacctgcagctggggcctcgcctccctcctcaacctggtcagtcagcagtagcacgcacagtagcatcttgccaggttggttcagtgcttgattgagctgtctgtggtacgacaaccccctagaccgtggacggggatctcaaggaaatatcttttctttctgttggtcggcatggattcttcattaatttgagggctctgttggattgaaatttgaatttgacaaaaaaaaaaaaaaaaaaggccccta

SEQ ID NO: 66540 - DNA, 1171 bp, Zea mays
  Clone ID: MRT4577_160683C.1
gccgtttcggggccgagaaccagagtgctcgtgcctgcgcgctgcctgcttcagctccctccctggcctctccctctcgttgccataaaagattccaagcttgcccggcccgccgatcctactgccattaaagtcggcaagcggcgtcggcggcagcagcctgaaaccaggggaaaccgaaccaccacggtcaactatctatctatctgcaatctccatccatctcctcccacacccactgaccaaccacagcacagcagcctcaagatgctttacatggtgtagccggcaagaaccttccctcccgggcgcaaaggggctctctcctttaatttccttcaagaggggatagatagcccctctttccccccacctgcatcttccctccggttgcgcgctgtccctcttgttggttcttggcatcgatcgtcggttttcgcgcggcctgcggaatggcggcggggctgctgctcaagatggtcggcttctgcttctgggcgctcttctggctcgccggctccgccaccgtgagcacgaccacccccgccctcgccggcggcggcgaggcggtggtcgtggacgcccggtcagccgtcgccgtcacggacgacgacttcgtctgcgccacattggactggtggccgccggagaaatgcgactacggcacctgcagctggggcctcgcctccctcctcaacctgaatctctctaacaaaatcctggtgaatgccgtcaaagcgttctctcctctgaagctccggcttggcggctctctgcaagacatgctgatatacgacaccggcgacactcgacaggcgccctgcgccccgttcgtgaagaacgcgtcagccatgttcggtttctcgcagggctgcctgccgctgcgtagatgggacgagctcaacgcgttcttccagaaaacccggccaaggatcgtttttgggctgaatgcgctgaatggccgggtcccgatgcctgatggttctttaggggggccgtggaattacacgaacgcagcttctttcattcgctacaccgtgagcaggggatacgatgtacatggatgggagctcggaaatgagctcagtggcagcggagtcggggctcgaatcgacgcggacagtacgcagcagacgtgatcgctccgaaacacatcgtcgacagcgcctac

SEQ ID NO: 66541 - DNA, 659 bp, Zea mays
  unsure (1)..(659): unsure at all n locations
  Clone ID: MRT4577_160684C.1
atcagctcatgttcgattcaatttccgcgcttcagaaaaggtcagttacactctagattcccttgtacctggcattctgcgtgtgttacatgagtcactagtgaaaattattgttacgagcacacctccagcatttggggaattagagcaaacgttaacttcagtcacatcatgacataattgtacacatatttcattgtgattagtgtattttcaatgtagtttaacattcgcaatctgctttcaccattcatcatgcaactgtcacagaaatatactctaaaccagagtcaagttttgtctctgttgtagaagtctcagatagggagcatcaatggaagacctgaatctgtgtgtcacccttagatatttttaggaaatgcaagttagttttcaggtgggagacgggacaactgatgaccatcatgccatcatgggtggaataggggggggnngggggggggagcatgaaacgagttagtttgagttggacgtgaaattgatctccggtgaacgccctaaacttaggaaatggcttactgagtggcattttaccatgaaatagtgaaaaggataatgagacagaatgcactcaggtcgaagtgcttgagcagactagttgtggtaactatagctggtctggcaacagatcttcaaaa

SEQ ID NO: 66542 - DNA, 578 bp, Zea mays
  Clone ID: MRT4577_160685C.1
ggccgctttttttttttttttttttttttttttttttttttgataacaagaacgccaaactgcataacccagtaaccaagcgggggagtgggggattacagcgtaagatggaaaccacacaaccacacatcgacagaaaccgacaaacccatagaaccataggagccacggaggccatatggcaggataacagggtaacacaggcccacagaccccgcgccagcggaccggttaggcctcgagaccttggtacccgtgctgaccctctcacaattgagaaccgaactactggcctcccttttgaagtgccgacggaccctcagaagcttaggagaattggagatcttgcattccttcatcgccttaccagtgcaccaaggcacgatgggccgccaggaggacaaactggcgaacttgggggcagaggacctgaacacctctgcaggagtgggggatcatacacacatacccctggaccttggccagttgaccggatgaccccatgctgcgaggctgggaggtggctacgtacttgaagcctggaggccaccaggccaccaaccgaatggcgggctggg

SEQ ID NO: 66543 - DNA, 437 bp, Zea mays
  unsure (1)..(437): unsure at all n locations
  Clone ID: MRT4577_160686C.1
ttgctgtcgcctagtgtatgttgctttcacgagcatgttaatttctctgacctgaatctgcaggactgaactcttcatccttgaacatcaatgccctggcactatcagctgacctcgcaacagtcctgtgcctccttggcagactttaaagaactttccagttctatctgaagccgagacttctcctgtttaagcaatgatatctctgtttcggctatttctttcgatctgcgcagataactgatgacactttgtagatcatcttctgcatgtgaattatcagtacgatgtgatgaangcccagcaatattccgttctttctcggctaaccgaatgtgtaaagcttctaactgattgtgtagaattctattctgatcattaagctcattatatttctgcagggcatcgtccttctctttcaataagcctatcttttc

SEQ ID NO: 66544 - DNA, 1144 bp, Zea mays
  unsure (1)..(1144): unsure at all n locations
  Clone ID: MRT4577_160687C.1
cggccggggacgctttcgtcccaactctgcgcaagccactgttgctgccgctgccgccgccgccgccgccttcagtctccgtctccaccggtgccctcgtctcccagccgctgccgccgccgccgccgccgccccgtgagagccggcgcagcaatccggttgcttggggacgcagcgaggatgggcagcaccagcgcgttcgtcatcaggtggatcaacttcttcaccatgatactggcgctactggtggtgggcttcgggttctggatgagcacccacgacgacgagtgcaggcggaccttgaccgtccccgtcatcgccctcggtggagtgatcttcctctanatcgctcgtcggattccttggtgcctggaagaacatctcctgcttgctctggacatatctgatcatgctgttcgtggtcttggtggcaatcatggtgttcacggtgctcgcgtttatcataacaaactccggaagtggccatactgttcctggggctaggtataaagagtaccgtctccaggactacagctcctggtttgtcaaacagctcgatgacacggagaaatgggctcgcctgaaaagctgcctggtgaagacagatgactgcaatagcctgtcgagaagatacaagaccgcgagagaatacaagctcgcggacctcactcccatggagtcgggttgctgccgcccgccagcagagtgcgggttccctgctctgaacgcatcctatttcgatctgagctatcacccggcgagcgccaacgccgactgcaaactgtacaggaacgcgcgctctgtccggcgctacgactgcagctcttgcaaagctggtgtcgcgcagtacatgaagacggagtggcgagtggtggctatcttcaacgtgatattgttcgtcatcctgtcgttcgtgtacttcgttggctgctgcgcgcggcgaaacgctggaggaggcgacgcgaaaggccgtggcaggtgacgggatcacttcttcgaggtgaagtgaagcgcttggccatcctatgtggagttagttaagcttagtatcaacacccccccctgtaaaattgttccatcaaatattcaaagttcctttgatgaagtaccaggacctgtcgctgcctagtaatactctgttgca

SEQ ID NO: 66545 - DNA, 590 bp, Zea mays
  unsure (1)..(590): unsure at all n locations
  Clone ID: MRT4577_160688C.1
gggccgaacaagcccttaaagtgcccctgcctgcgcatcataaatacactgaagcatttcaaatgttctatgtaggtataaagagtaccgtctccaggactacagctcctggtttgtcaaacagctcgatgacacggagaaatgggctcgcctgaaaagctgcctggtgaagacagatgactgcaatagcctgtcgagaagatacaaggtgactcctgtcctgtccttcacatgcttcagtccttcacttggttcaactctgctggagctgtgctccctttttgcagccgttgctttcgttgagatcttaattaccagtccccaacttcgcgtgcagaccgcgagagaatacaagctcgcggacctcactcccatggagtcgggttgctgccgcccgccagcagagtactgcgcctggatgcccatctcaaccttttcttttcattagtggtcagcgtagtctctcaggcacgggcatcatcacaagattgctctggttttttcaggtgcgggttccctgctctgaacgcatnctatttcgatctgagctatcacccggcgagcgccaacgccgactgcaaactgtaccg

SEQ ID NO: 66546 - DNA, 583 bp, Zea mays
  Clone ID: MRT4577_160689C.1
ttccaaatccgcgtatagcccactgtgcaatctctcatcacatcgccccgttgcaagggtgcttctgccttctggtgtctctctcgctttccctctctagattccaatactttcccctgttcctgggcaagccctttttacttttgtcgggagacgctgcccagtctactctagcctgggtttggagagagatgggcagatgagggtgggagtgggagtaatacaacagagccaaaccgagggaggagagagagggccagagaacacaaagaggcaaggcaaggaagcagggacagactccaagattgggggcgactgataagagcgaggagcagaggcgctgttttctctctccgattccctcagcttcctgtggcgtggtggggtgtgtggcgacgaagggaggctcgccggggcgcggacggacgcccgcgatggccggcgtcgacgttgccaggcacgcgcacagcccggcgcaccacgccgtggcggcgcgggaccacgtcgcgctgcgccgcgtgctggaagcgctcccgccggcccgccggcccgaggagatccggacggaggcggactccgtcgc

SEQ ID NO: 66547 - DNA, 360 bp, Zea mays
  Clone ID: MRT4577_16068C.1
ggggtcgatagatacacattaataaggtgcatatttgtacgtatacattggtcagggtcataacggaaacattgatagtctgacctaacaatttgccagggaaatatcatgaaggaaatccccaccgtagcatctggcatcatcaacaggaagccagtcaccattggcaaaggaaggcacccaatactcgggaagagtgatgggtgactcacaacaataggaccttgatttggggaatgctgatgggagcccggacatgagatcatgtaaaacttggaatatgcgtgtgggccggttaacgttgcatgatagcgtgatgcgcatcttggtagaggcacagcttatgtggagccgaatatc

SEQ ID NO: 66548 - DNA, 318 bp, Zea mays
  Clone ID: MRT4577_160690C.1
ctcagttccaaccccagctcctcagttctcgtcatcgtcctcgcgctcattgtcatttgcagtttccggtagcaggcatggcttctgtgcatctgtctgggccgcgggtggtggctgctgctaaacctgctgcgttgggcgggctcctcctgacgccgtcccttgtggtgccaaaggggctgagggccatgggcctcttgttgagggccgtcactgtcgtgtcacctaagtattctttcataaaaccattggtagacagagttcttgtgaaaatcaaaacctttgatgctaaattctgatggaggtattttacttttc

SEQ ID NO: 66549 - DNA, 230 bp, Zea mays
  unsure (1)..(230): unsure at all n locations
  Clone ID: MRT4577_160691C.1
gaacaaagcggntttaaatttttgaataagcccctttttattacatacaataatttaacactttaaataatgggaaaaccttaaccggtgcttaaaaacattttaacgttttaaatgtcaagtttaaattaactgaaaaactaccacctttaaataaaagggcttttattttaatggataataaaggaaactttttggtccctttttatattaaaaaatttttttctttc

SEQ ID NO: 66550 - DNA, 2598 bp, Zea mays
  Clone ID: MRT4577_160692C.1
gagtgggagtaatacaacagagccaaaccgagggaggagagagagggccagagaacacaaagaggcaaggcaaggaagcagggacagactccaagattgggggcgactggtaggcaagaaaggaagctcttctttttcgagtatcactgggcgattgatttccgccgccatcctttccgctcaattcttagctgccgcagataagagcgaggagcagaggcgctgttttctctctccgattccctcagcttcctgtggcgtggtggggtgtgtggcgacgaagggaggctcgccggggcgcggacggacgcccgcgatggccggcgtcgacgttgccaggcacgcgcacagcccggcgcaccacgccgtggcggcgcgggaccacgtcgcgctgcgccgcgtgctggaagcgctcccgccggcccgccggcccgaggagatccggacggaggcggactccgtcgccgaggaggcccgcgccgaggccgtctcggcggtcatcgaccgccgcgacgtgccagggcgggagacgccgctccacctcgccgtgcgcctttgtgacgccacggcgaccgagatgctcatggcggccggcgccgactggagcctgcagaacgagcagggctggagcgcactgcaggaggccatctgcgcgcgcgaggaggctctggcgcgcgtcatcgtgcgccactaccagcccctcgcctgggccaagtggtgccgccgcctgccccgcgtcgtcgccgccatgcgccggatgcgggacttctacatggagatcaccttccacttcgagagctctgtcatcccattcatttcccgcgtcgccccctccgacacctacagggtatggaagcgcggcgccaacctccgcgccgacatgaccctcgccggtttcgatggcttcaagatccaacgctccgaccagaccatactcttcctcggggaagggtcggaggatggaaaggtgccgcctggttcactgtgcatgatcaaccacaaggacaaggagattatgaacgcgctcgagggggcaggcgccccggcctcggaggcagaggtccagcaggaggtcgctgcaatgtcacagaccaacatcttccgtccggggatcgacgtcacccaagcggtgctgctcccacagctcacatggcggcggcaggaacggacagaggccgttggcccgtggaaggccaaggtgtatgacatgaatcatgtgctggtcagtgtcaagtcaaggagggtcccgggagcgatgacggatgaggaattcttctcatctagcaacgacaatgatacagagagcgaggggtttgacgatgttctgacagaggaggagaagaaacagctggaggctgcgctaaaaatggattctccggatgccggtggagaagaccagtcggactcatttgctggccctcgacatagttgctttgagccaagggagagggagatacccatcgagggcatgagtgtttctggaaatgtggagagtaagcatgacaagaaaggttggttcagtaattggggaaagagagctcaagttagcaagccagaaagggtgaagaagatggcacctccaaggagctcgctctgtgtagatgagaaggtgagtgacctcctctttgaatcaccctcaaatgcacaaacaagaccaggaaggcattcagtagatgtagtcagagcagatgacaacagaaggatcagggaaagggatagtaggaggtatgttccttctgcagagaatgggcataggcgcaaagaaggttccaaagaaagtgagtataaaaaaggcctaaggccggttctctggctctctccaaatttccctctgcggactgaggaactgctgccgttgcttgatattcttgcaaacaaggtgaaggcaattcgtcgtttgagggatctacttacaacaaaactccctccagatacatttcctgtcaaggttgccatcccagtcgtgcctacgatcagagtgcttgtgacattcacgaaattcgaggagctacagccgctagaggagttcggcacaccaccttcaagccctgacaaaagcaagagcccagcagtgcagcctccttcgagctcctggattcaatggatcaaggcgccttattaccgccaaatgaacttgtttacggcgccaggcccgagcagccgcgtggaggacatccaccaccaggacccgttcgccatcccttcggattacgtgtggaccccacccgaggagaagaaaaagaagacccaggaaaacaagaacaggtccaagaaaggcaggaacgggtgatagagcattggtgggatgggatctaacaggagggacgagtggaagggaaggtttggagatttcggctgtgctggtctgagtctgacgtcgaatattgggaagcgaccgcttgtcttcttttttatttgtgttaacggatttgctgccaacattctttcgtttaacccaaatcgtttcggtcccgattactgttgcaatctgttggtagattttcaaatgtggtggcttctataaaaacaaaaaagcaaaaaaaaaaaaaaaaaaaaaaaaaaaaaaaaaaaaaaaaactcgaggggaggccccggtac

SEQ ID NO: 66551 - DNA, 270 bp, Zea mays
  Clone ID: MRT4577_160693C.1
atgaagatccctcaagaagagtcttcctccttgagtaagcagtggtggaccaagtgcctatacaatacaggtcgtcgtctgggctgccagcccgccacgccacaagagtggagaggcggcgggtgccagctgcttcaatgcacgttcgccaagtgctccatcgtagcttccctgttcgtcatcgaggtatccctcgcctcccagtggggggacctcgactgtccgaggttgggtcctgcgttggtggcagttcccggcattacaggttga

SEQ ID NO: 66552 - DNA, 2682 bp, Zea mays
  Clone ID: MRT4577_160694C.1
acggcgcttccgtcttgttcacttttcaagctcccacgtcgccccatgggccatggcaaggctgcttcgggtgtccctcgctctctctctcgctttccctctctagacttcaatacttttcccctgtccgtgggcaagcccatcatgacgtgagggagggggaggcgatgcccagtctactctagcctgggtcttgagagagaggggagacgagggtgggagtaatacaacagagccaagccgagggaggagagagggagagagagggggagcagggaacccaaagagacaaggcaaggaagcagagagaaactccaagattgggggcgactggtaagcaaggggaggagtagaggcggcgtttgttctccttcgattccctagtcttcctggagggcgacgaagggagatttcgccgggcgcggacggacgccgcgatggccggtgtcgacgccgccaggtacgcgcacagcccagcacaccacgctgtggcggcccgggaccacgccgcgctgcgccgcgtgctggacgcgctcccgcgggcgcgccggcccgaggagatccggacggaagcggactccgtcgccgaggaggcccgcgccgaggccgtctcggcggtcatcgaccgccgcgacgtgcccgggcgggagacgccgctccacctcgccgtgcgcctctgtgaccccacggcggccgagatgctcatggcggccggcgccgactggagcctgcagaacgagcagggttggagcgccctccaggaggccatctgcacgcgcgaggaggccctggcgcgcgtcatcgtgcgccactaccagcccctcgcctgggccaagtggtgccgccgactgccccgcgtcgtcgccgccatgcgccggatgcgggacttctacatggagatcaccttccattttgagagctccgtcatcccattcatttcccgcatcgcgccctccgacacctacagggtctggaagcgtggctccaacctccgcgccgacatgaccctcgctggtttcgatggcttcaagatccaacgctccgaccagaccatactcttcctcggggaagggtcggaggatggcaaggtgccgccgggttcactgtgcatgatcaaccacaaggacaaggagattatgaacgcgctggagggggcaggcaccccagcctcagatgcagaagtccagcaggaggtcgctgcaatgtcacagaccaacatcttccgtccggggattgacgtcacccaagcgctgttgctcccacagctcacttggcggcggcaggaacggacagaggcggttggcccgtggaaggccaaggtgtatgaaatgaatcatgtggtggtcagtgtcaagtcaaggagggtcccgggggcgatgacggatgaagaattcttttcatcttgcaatgacaatgatatagagagtgaggggtttgatgatgttctgacagaggaggagaagaagcagttggaggctgcgctaaaaatggattctccggatgccggtggggaagaccaatctgactcatttgctggccctcgacatagttgctttgagccaagggagagggaggtacccattgaggacatgagtgtttctggaaatggggagggtaagcatgacaagaaaggttggttcagtaattggggaaagagaagtcaggttagcaagtcagagggggtgaagaagatggcatctccaaggaactcgctctgtgtagatgacaaggtgagtgacctcgtcattgaatcgccctcaaatgtacaaacaagaccgggaaggcattcggtagatgtagtcagaccagatgacaacagaaggatcagggaaagggatagtaggagacatgttgcttctgcagagaatgggcataggcgcaaagaaggttccaaagaaagtgagtacaaaaaaggcctaaggcctgttctctggctctctccaaatttccctcttcggactgaggagctgctgccattgcttgatattcttgcaaacaaagtgaaggcaattcgtcgtttgagggatctacttacaacaaaactccctccaggcacatttcctgtcaaggtcgctattccagtcgtgcctacaatcagagtgcttgtgacattcacaaaatttgaagagctacagccgctagatgagttcaccacaccaccctcaagtcctgacaacagcaagagcccagcagtgcagccttcttcaagttcctggattcagtggatcaaggcgccctacctccagaacttgtcgacggcacctggcccaagcagccgcgtggaggacatccaggacccattcgccattccttccaattacgtgtggacaacacctgaagagaagaaaaagaagacacaagaaaacaagaacaagtcgaagaaaggcaggagcggcgcatagatagtacgtaggtgatagcattggtgggggggggggggagttaaagttatgctgtgagtgggtgaaaagggctatactcttcaggatctaacaggagggatgattggaagatttggagatttcggctgctctgacgtcgaatattgagaagcgaccgcttgtcttctttcattgtgataacagatctgctgtcaacattctttcgtttaacccatcgtttgggtcctgattatcattgcaatctactgtattggtagattttgaggtgtggcgccttctg

SEQ ID NO: 66553 - DNA, 351 bp, Zea mays
  Clone ID: MRT4577_160695C.1
gggccgacccacgcgtccacccacgcgtccgaggccccctggtccgacttctgcgagaccatgaacgccacccatctggagctgcccaagaacctgcacgggtcacccgtgaatgtggccaatttccgccaggcatgacaccacaacccgttctcacatgccgagctgcaactgcagaactttctgatcgtgctcttgttcccaggtcgcaccgacagtcccatcaactagtcgtctgagaatatggacgtctactcgcgcctcgctctcgtcaacagtctccggtgacacacgattacgacctccagtgagcgagaatcatcgttctctgacagtctgtatgctcttatg

SEQ ID NO: 66554 - DNA, 530 bp, Zea mays
  unsure (1)..(530): unsure at all n locations
  Clone ID: MRT4577_160696C.1
cagcaaagaaagaatcgaagttggactggactatagtaggtctattagactattcttactagagggtcccctaaaactggcataaccgtcaaggtgcctggcaagtcagaagtcgcaggattgcattataaagggctaaagcgagttcacgtcatagtagagcaaattcttgccataaggtatatatacatacatcagcatggccaccgtagtagccagcccgaatgaagctgtctgcgttaacgcttggtatatagatgcgcgcctgctcatcataatagtgcgctctgaagatagtcattgccaaagacgagatcgttagcacacgcgtgatatttatccttatcccgtagcatagcatagttggctatctctatttcttgagccttctgcaggacagcgcctaatatcaggatatcctggtctaggtaggcggctaaatactcttttcttcgctcggctatcaattagaggcgagggtcacacctttgnggtcaatcgttccctttcctcaacctattcaaaaagac

SEQ ID NO: 66555 - DNA, 466 bp, Zea mays
  Clone ID: MRT4577_160697C.1
aaacttaatattttttttttttttttttgttttttcatgtacagtgaggttttagtgaggttttgggcacacagaaacccataaaagctttagcaaaaaaaacagacaaggggggggggcccccacacactctcaccacaacccgatcgagtgcaagcggagtattattccaacaacccaaaggaaaagcctgacctgaaagaacgcacaagcaaaaatcccccactagctctacagaaacacatgaccaccatcccaaccaattggtgccaaaaaccaacaaaaataacaccgccacccggaaaagaaacactcttagctcttcccgaagaaccaaaagaaacctaagccctgcctgcctgggtgcgggcggttggggaatgaggaagacgaagaggaccaggatcgatgcttccgccgcttgcgggggaaaggagaaaggaaagggctaacgtccgcgtcagaa

SEQ ID NO: 66556 - DNA, 1083 bp, Zea mays
  unsure (1)..(1083): unsure at all n locations
  Clone ID: MRT4577_160698C.1
ccctcggcctccggatctgctgttggtaagaccagatatcagtactcgtcaagccaaggttagtcaaggccacgggtgcgctgtccactttgcaggcaagctcacggcctcacgggaggccgacgaagtcgtagcagagatccgatacatgggagaggaagagggcgcgcccaccgtggcagcagcggcagagagcgctccgccgcacctgctcctgatatgcttcccggggcagggccacgtgaacccgatgctccgcctggccaagcgcatcgcggccaagggcctcctggtgaccttctcctcgatctccagagtcggggcgatgctcgccgcgtccgtgggcgtgtcggccggcggtgacggcgtgcctgtgggccggggccgcgtccggttcgagttcatggacgatgaagaccccgggcctgacctggacgacctcttgcggcacctcgcgaaggacggcccgccggcgtttgccgagctgctggagcggcaggcggacgccgggcggcctgtggcgtgcgtggtggtaaacccgttcatgccgtgggcggtcgacgtggccgccgacgcggggatcccttcggcggtgctgtgggtgcagtcgtgcgcggtgttctccctctactaccaccacgtgcacggcctcgtggagttccctcccgaggacgacctggacgcgcggttcacgctgcctggcctccccgagatgtccgtcgccgacgttccgtcgttcctgctcccgtccaacccgtacaagctgctggtggacgcgatcatcgcccagttccacaccatcgaccgcgcgtcgtgggtgctcgtcaactccttcacggagctggagcccgacgtggcggcggcgctcccgggcgtgacgccgggcgtcacgccctggccgccggagctcatccccgtgggcccgctcatcgaggtcggcggcgggcgggacgacgacgagggcgcggtgcgcggngacctgatgaaggccgtggacggctgcntggantggctggacgcgcagcccnttgctccntggtgtacgcgtcggtgggcaancgttgttgcggnttgaaccccgtg

SEQ ID NO: 66557 - DNA, 147 bp, Zea mays
  Clone ID: MRT4577_160699C.1
gacgcatgctgtgaggatgacgatctattgcatggcaatggcaatgcctatccaacatgagacgttgatgtgattaacctagacgtgatattttcagatcttgtacagatagagaacaaggttgataacctttacatgagttaaacg

SEQ ID NO: 66558 - DNA, 575 bp, Zea mays
  Clone ID: MRT4577_16069C.1
cccacgcgtccggccgaccttcaaggtgaggaaagagaagctcggggacagaatcactgcgctccagcagctagtctcgccttttggaaagacggatactgcatcggttcttcacgaggccatcgaatacatcaggttcctgcatgaccaagtagcttccctgagctctccctacctcgggtgtgggcggcccgtagtgcagcagatacagcaacgacgacaggcgaaggacgacggcggcgccgcggcgaaggaggacctgcgaagccgagggctgtgccttgtcccggtggcgagcactacgacttatgcagtggccgctggtggcgagacggcgccggagttctggctccctaactttgggggcacactacggtagggacagagacagagacatgaatatagtagcgtggacatggagatcttggtagctagctaggtctcgtaggcatgtatttgtagctaataaggccgtattctcatgtctgatgcaaaagcaaatgaataaacctgaccagtcgatccccctaaaaaaaaaaaaaaaaaaaaaaaaaaaaaaaaaaccccccaccaac

SEQ ID NO: 66559 - DNA, 2028 bp, Zea mays
  Clone ID: MRT4577_1606C.1
ccaagtgcgtgctcccgccgccccccccggccgggacgcttcgcacttgcaatagttcgtcatctccaagtgcgtgcgccggccgccccctatcccgccggccctgtgtgtgttccccgctaccagccatggcgtcgccgttctccgtgccttcgctgatcatggaggaggaagggcggttcgaggcggaggtggcggaggtggagtcgtggtggggcacggagcggttccggctcaccaagcgcccctacaccgcccgcgacgtggtcctcctccggggcacgctccggcagagctacgcgtcgggggagatggccaagaagctgtggcgcacgctcaaggcgcgcatgtcgctgccccgcgccgagcgcgcgcgggcgccgtacgtcgacttcctcaagcccatcatcgccgacggcgacacgggcttcggcggcgccacggccaccgtcaagctctgcaagctcttcgtggagcgcggggcggccggggtccacctcgaggaccagtcctccgtcaccaagaagtgcggccacatggcgggcaaggtgctcgtcgccgtctccgagcacgtgaaccgcctcgtcgccgcgcggctccagttcgacgtcatgggcgtggagaccgtcctcgtcgcgcgcaccgacgccgtcgccgccacgctcatccagaccaacgtcgacgcgcgcgaccaccagttcatagtcggcgccaccaacccgggcctcaggggccagagcctcgcggccgtgctgtcggccggcatgtcggcgggcaagagcggcagggagctccaggccatcgaggacgagtggctggccgcggcgcggctcaagaccttctccgagtgcgtcagggacgccatcgcgggcctcggcgtcgcgggccaggagaagcagcgcaggctccaggagtgggaccgcgccaccggcggctacgacaggtgcgtgtccaacgaccaggcgcgcgacatcgccgccagcctcggcgtcacgtccgtgttctgggactgggacctgccgcggaccagggaagggttctaccgcttcagggggtccgtggcggcggccgtggtccggggccgcgccttcgcgccgcacgccgacgtgctgtggatggagacgtccagccccaacgtggccgagtgcaccgccttcgccgagggcgtcaaggcggcgtgccccgaggcgatgctcgcctacaacctctcgccgtccttcaactgggacgcgtctgggatgacggacgccgagatggccgccttcatcccgagcgtcgcgcgcctcggctacgtctggcagttcatcacgctcgccgggttccacgccgacgcgctcgtcaccgacacgttcgcgcgggacttcgcacgccgcggcatgctggcctacgtggagaggatccagagggaggagaggatcaacggcgtggagacgctggagcatcagaagtggtcgggcgccaatttctacgacagggtgctcaaggctgtgcagggtggcatctcctcgactgcagccatgggcaaaggagttactgaagagcagttcaaggatccacggcccacaactgggagcagtggcctgcaagttatggccaaatccaggatttgatgaagactcagaagaagaagaatgatttggagaaggctctaaataaattcgaaaaaaaaataagctgggttcagttcatcagcaatggggaagctgctttccaagttctaaactgaacataatcagcataaatgaatcaacgaatcgtctagctagctacgtacggatggagttctgagttgtgactccaaatgaaaacccaggttgggttgaaagtattggtgtcaatctgtgagattatttatcacttcagattgaatatatgattttggttttggtactctgttctcacggttaaaatattgctttctatttttacgtactcgtattgtgaccacgtccgtgcgttggaacgtgaataatattatgttccgataaattctaagtctgcaaacaataatgctattgtacaccaaag

SEQ ID NO: 66560 - DNA, 270 bp, Zea mays
  Clone ID: MRT4577_160700C.1
cccacgcgtccggtacataaaaccgatcagcgaaagtgctaagagcaatggcgggagtgctaagagcaatgacaccatcaatgctaatgtgaaatccaacactggtattgttgcaaacactgatgccaagagcactgatgaacagactgacactggaagtgttgactgcagcggtgattacagcgctgtctcaaaacaaaacattgggcgggttgctgtatgcattcagaggttggagagcaccatgagttaaggtgcaaatctgggaaa

SEQ ID NO: 66561 - DNA, 208 bp, Zea mays
  Clone ID: MRT4577_160701C.1
taaattttttttttttaacgagaagcgacactccttaaccggaaggagctttcaaaacatcccgacatcatgatccattaagattcaatgcccaatatgggtatacatacctacatttatacatatgtcccacaaaatcctctactcaagaaattgttcaagcacgattccatgtccctcatcaatatgactttccaatgtaaatgat

SEQ ID NO: 66562 - DNA, 626 bp, Zea mays
  Clone ID: MRT4577_160702C.1
aattcggcacgaggtgaacattcaatcaacgtcccccaacaattacaatcaagcaagagaaatataagcaagtaaagtataaataatgacagcttcaactacaattaatagatctttcactgacacacatctatgagtatcaagtaccctaatctccatctttttttaccggagtataatggcttcttcctttgacctatatagcttactatccttggtgaactacataccaggtcatgactgcttagggtaaaaggttatcaacaataatatataagcaacagttgtggtaagtagtggtgataagaattaccattggcataagggcatatgctccatttgttctttatacagaaataacatcattgcataagtgtgtgtttgataagtgtcgtcctagtgttattgttgctgttagaatggctaaggacagtggcggacgtaggatgaaaattcatagggggcaagaaaaccatgtgacaaaatcaagcaagaccgtaaaaaactagtgttgcgtagaatttaggtttcatatcaatagatacaagttcagagaagaaaactgtataaacaaaagaagcaaacatgttgcttaagttcttactgaccgaatctagccatatgta

SEQ ID NO: 66563 - DNA, 510 bp, Zea mays
  Clone ID: MRT4577_160703C.1
atgtctcgtaaaagaaattgctttagtcgagagagtattttggtagtgctctatggttacaggcttacagctaaagcgtcacatggtggcaagccttgctccatcttctcggcatatgttatggcccacaagggcaatgtgacgtccgacgtcaccaacaacccagaggatgggcctgaggcgtacaacaaccctgccgtccatagctgcctcattgagtacactgccatggcaatggaggtccatgggctagattacgatccgaggatcgaagacattgatggagatgccctcatgagggtcggaggaggcaagatgcatgggcgacactggattatcgatgggcaatcgacttgtcctccactcccactctgtctcagaatcaatcggcgacatcaaacaaccttcatggttcgcctagcccttcgacaaaccagtccaaccacccaccccatggacaatcttctcttagtggtgattgtgagatacagtgtgagaaacttggtctga

SEQ ID NO: 66564 - DNA, 347 bp, Zea mays
  unsure (1)..(347): unsure at all n locations
  Clone ID: MRT4577_160704C.1
gcgggcgcccactcatccttccacacgttcgatcgcttctaggactccactccttcaatcncctcccaaaggctcgagaggccccccacaacatacccccatccctactaccatgccaagccacactcttaaatcctagctaggctcacccaatccccccaccaagaaaccgacaaccttacattcaatagcccagacatccatttcaacctctgcaaaaaccccaccgtcccctgaactctgaatctctccaaactctgacccaacagaggactacctgtcctacgaagaggagatcctgctcgaacccttcaaactcaaggggtggtagcgcctacctatagccc

SEQ ID NO: 66565 - DNA, 252 bp, Zea mays
  Clone ID: MRT4577_160705C.1
tgctggcaaaattgtactagcattttatgggaagacaactactgtctctacaccaggagcaggacttacaggtccatcactcgaaacctgtgcagagacagtagttgtcttcccaaaaaatgctggcaaaattgtactagcaggtgaagaaactgacttactagttggtctgcaaaatgacggtgaatcaatcttgactgacgttgcagttcattcaactctccatcttccttttgaccacaatatgtatgg

SEQ ID NO: 66566 - DNA, 177 bp, Zea mays
  unsure (1)..(177): unsure at all n locations
  Clone ID: MRT4577_160706C.1
tcaagttaccaaaactggctaggtgttattttcatcctaaagatttacatggggtccaccgctccagcaggctcccatcttgaatggtgggagcggcataaacctctgggaaaggtgtggatggagtttgcccncgcngactcnngccacagcgactcccatcacagttaaccccgc

SEQ ID NO: 66567 - DNA, 454 bp, Zea mays
  Clone ID: MRT4577_160707C.1
ataaaagaaagcgggggaggacggggggagcaaccgggaaaccgaggcggggacctagcgggacacccatattgcctaaaaggacacgcaagaaaaaaggggggaaaaaagggaaaaagttgtatccggaaaaaaattgcaatcctgtaaaaaccaaaaaaaaaaaaaaagccaaaaggaaaaagggaaaaaccgggggggccaaagaggggaccaaacaaaaataaatggggtggccaaaagagcccgttttaaagcgggaaaaactatgggcacagctgtataaaagaatgaaaaaacccccgggaaaaggggcacacaatataggaccccgaggggtatttttttaccccggggagacgaaaaaaagaggtaacccccatcaaccggggcccgaaaaaagaccaaaaaagagtcccaaaatgtgtcgccccaaaaggaaaaaagaatgggg

SEQ ID NO: 66568 - DNA, 427 bp, Zea mays
  Clone ID: MRT4577_160708C.1
ggactcaagtaggaaccttcggggtctcggataagtgggcgggctggatcgagaaggctgcactctatgatgggtagcgcttcttggcacgggtcctgcggtgtgccagggactatcacttgctacagacggctggactacttaccggaaggtcatctagttcgacatcatgctgcatcgtaagacgctgaggtacagtaggtgccgcttcctcaccttttgcaccgaggatgccactcgcaaccacatagacggcattgacggtgatgaactgagacggccgcaacatgatcagtgacgatgcccatgccctggaagagtcgtcaaggctggagggccaagctactgtggtcatcatgaacacaagctggtacaagttgttgccaacacattaatggcaggctatgatacgattgtgacagatgca

SEQ ID NO: 66569 - DNA, 298 bp, Zea mays
  Clone ID: MRT4577_160709C.1
cgacgcgtgggcgccagcctggtggcggccggcgacctgtttgtgtccgtgggagaggacgggctcgcggggctcaccgaagccgacaagcgtggggccgttgccgtcgtagctgatcaggacctcaacattgagggcacccttgcctgtcgcgcgctggtcattgtagacgacattttgactgcgctccgggtactccctgcctgcttgtacagccggccgtcgatgaacatggctatcataggtgtcactggcacagatggcgtaactaccacaactcacctcgtgaaagcaatgt

SEQ ID NO: 66570 - DNA, 528 bp, Zea mays
  Clone ID: MRT4577_16070C.1
gtacggcaaggcgaattgtgtgcaagtattttcctttacgtgtccgtactctaggtctcgtaatgcataaatattccccctctctctcttttttggttacaatacattcgactttgtaagggaatcctcaactgctagtctttgacccctactctagttttcatggggtcgcagcattagctaacaaaaactcaaagaatgtagagaaagataaaaccgaccttgccttcgtatgcaaggtagcttatataaactaaaaaaagcggtgattacctgtgcgccatcatagatcaccaatgaaccgctttgatcacaggttaatagtcgcaggagatactgggtgatggtggtggtgactaactgaacttatctccagtatgatttccatattttcccactgatcttttgaacttcaactggatgggtcatatctgagttgaagctgggcactgtggtatgctatacttgagaatcagaacaaacagagatgaaaccctcagcaagtcagatattctttgtttctccatt

SEQ ID NO: 66571 - DNA, 429 bp, Zea mays
  Clone ID: MRT4577_160710C.1
ggaatgacccacgcgacccacgcgttcgatttcaagttcttgtagcatcgaagatgataagatctcatatgctatcaatcgcttctttgcccactttgtgaccaacatgatgactcaatcaatcacttgttggtgggctgctcctttgcacgtcttttctggttcgaattgttcaggccttttggactgcagggcttcattccaggacaggatattgacgattttgatctctggtggtgttccaatagtgctcggctagatgggctgagtcagaagggctttgactctttggtcgctctgggtgcttggatgttgtgggagcataataatgaagtggtctttaatttaacttccccaagcctggtggtggcccgtcgactggccagggaggaagcttttctgtggtccttggctggagctaaaggggtt

SEQ ID NO: 66572 - DNA, 660 bp, Zea mays
  unsure (1)..(660): unsure at all n locations
  Clone ID: MRT4577_160711C.1
gtacccccgggttcggccgggataacacaagactctgatcgtggacaaagccaatactgtttatattcaccttcatcccctttgtcaaaaaattcaacttttggtcaaatggatgtgatgcctactgcacctcccagttcaatgttcacctcctatgggttaaaggagagatgtgcagctgctgaaacattatcattggttgctcgaattttgaaccgatctagagcccgtctaaactcagtattgtctaaaaataacagttctgttgttgaggagttctttaggacactggtggactctgttccagatttgacagagcacattcacagaacgagtgcgcgtatgcttttgcatattgatgggtatccagataagattgcgaatgctaaatgggaggtaaaggagcttggattagagcacaatggatatgttgatttgttactgggcgagttcaaacactacaaaacaagattggaccatggaggaatttctagggagctccaacaccttctgctagagtacggcgtaaagagcatatcggaagttctagtcgaaggtctctctagagtgaagaggtgcaccgatgaagggcgtgctctgatgtcactcgacctncaggtactaattaatgggcttgagcacatcgtggcatcaaatgtg

SEQ ID NO: 66573 - DNA, 533 bp, Zea mays
  Clone ID: MRT4577_160712C.1
cttggcacgaccggacggtcttggttttcgcctcctccgtactcgttctcgttctagtgctcgggctcgttcacgcgcggcgccgccttggcgactgcggagcggcgcttggagttggacgggaagttgagcctggtggtggcgccgcggaggtcgcgcgcggagtggtcttaggcgcgcgccaagtcctcggcggtggcgaaggtgccgagccaaacgcggacgccccggacggggacgggcacctcggccgcccacttgccccacggacggcagcgcacgctttaatacgggctgatggaccttctgctgccagaaccggcgaacccgaacgccttctataaaataaaccacaccggctgtttctcggagtcctcacacaagtcccggaacgcggcctcgaagtcgtcatcatcgttggccgcggtcagacgaaccttgacgcccctaccgtggcctggcgtgacgcctcgccgaaccagcacgctgggtatgaactcaagaaggatcgcaccgtcgcacaatgttggtaa

SEQ ID NO: 66574 - DNA, 704 bp, Zea mays
  Clone ID: MRT4577_160713C.1
gaatcatgtgtgtatcattcattcattccaattgtttgcaaggcacattgattttttactgggaatgcaactaccccctaagtacatttcgttcactccacttcaccttactcctttaaaattaaccaacacaatctaaacagcataaaaaaatgaatacagtgtggaaatcaaaaccttttgtcacctgtctttggactctatctgcgctgcaatatagtatttccaaacggctgtaccggagaaattaccagtgaagcctttaccaccactgatgcacgagaacgccactctcccgcagcgagctgaaaaggtccaagcactcctcgtaggtgttctcatacttgggcgaccgctcaccagggcagcacttctgccaccgattgtaatggcactccaggaaaagctcgtcgaccaagcagattgcgcccgtgtcgaacagcctcgggatcaaatcgaactcggtcccctccacatccatcttcatcaccacgtagtcctgctccgtcacggtctgcctcaaccactcggcaaagtcaaacgcagggacactcctgacctcgccgttcatcttcttcccggtagaaggacggatgcgccccatgccacggccattggccttggcctcgtcctcctttcaggatcgccattgatctcgaatctgagtgtctcgttcttgacccaggctgcgtaaggaagcaacg

SEQ ID NO: 66575 - DNA, 232 bp, Zea mays
  Clone ID: MRT4577_160714C.1
ttctttcgtacggcgctaggtgcctgcctttggggtctctggcaaaagtcggccatgttcaaatccaagactgcaaactcgcttctcaaatagacagactccgactcacaccccaaagctatccacactgacattctgtggggaccgcggatacaggagcacttgtggttggtctacagggagggtactgaggatagcatgatagtacagaagcgcggcaccttgcttgccc

SEQ ID NO: 66576 - DNA, 1917 bp, Zea mays
  Clone ID: MRT4577_160715C.1
gccgccgcccggatcctccgcttggccccgcgccggatccaggttcccaagacctccccgctcgccgcactctcgttcccactcccgcgtacggcacctctctccgctgcctcggggcggcggcagcgcttctgcgccgcggcgcaggcccccgcccccgcccccatacgcggcgacagggacggcgggcgaggccgtgggggagttcaggaagcggctgcgggtggcggacgtgaagggcggggaggacgagggcgccgcgtgggtgggcaaggagctcgccgtgcgcgggtgggtgcgcacctgccgcgcccagaggaccatcaccttcgtcgaggtcaatgatggctcttgcttgtccaatatgcaatgtgtattgactcctgaaacagaaggctatgaccagatagactctgtcactactggagcatctgtactagttgagggagttgttgcaagcagccaaggcggtaagcaaaaagtggagttgaaggtttcaaagatcactgtgattggtaagagtgaccccacatcttttcctatacagaagaaacgggcatcaagagagttccttagaactgtagcccatctccgtcctcggacaaacacttttggtgcagtggcaagagtgagaaatgctctggcatacgcaactcataaattctttcaagacaatggatttgtttgggtttcaagcccaattattactgcctcagattgtgaaggagctggggagcagttttacgtgactactttgctttcgaatagcaccgaaggtggttccctactcaaagatattcctgcgaccaaggatggaagggttgattggtcacaggatttcttctgcaaaccagcatttctgacagtatctggacagctcaatggtgaaacatatgcttcagctctatctgatatttacacatttggtccaacgtttagggctgaaaattcaaacactgcaaggcatctggctgaattttggatgattgaacctgagcttgcctttgcggatctaaatgatgacatggcttgtgcaactgcatatctccagtatgtagtaaagtatattctagagaactgcaaagaggatatggatttcttcaatacatgggttgagaaaggcatcatagatcgattaaatgatgtagtagagaagaactttgttcacttgtcttacactgatgctgtcgagctactacttgggtccaagaagaaatttgagtttccggtaaagtggggtttggatcttcaaagtgagcacgagcgatatatcacagaagttgcctttgatgggcgccctgtaataatcagagattacccaaaggaaatcaaagctttctatatgagagaaaatgatgatgggaagacagttgctgcaatggatttgttggttcctcgggttggtgagcttattgggggaagccagagggaagagcgtcttgattaccttgaagcccgactagacgagcaaaatctgaacaaggagagctactggtggtatctggacctacggcgatatggatcagttccccacgccggtttcggtcttggatttgagcggcttgtacagtttgctactggaatagacaacatcagagacgccatcccatttccccgagttcctggctcagccgagttttaggcttcctttcgaatgtaggaattttatggggatggtatatgaatttcacaggaaatggttcaaaaacacatgaattatcttttaatccaaaggaggccttagcgccccgaaagtgttgtcatttgtttcatcattgtacagagttgagctgagactcgtggttaatcgagccaaccagtgttgtggcatgcttctccaaatatatatccagcagggattactcggtcactcccagtgctgtggcaagctttgtcgtttgttgtaattgtcgtcaa

SEQ ID NO: 66577 - DNA, 297 bp, Zea mays
  Clone ID: MRT4577_160716C.1
gattgatcggtacggacgcgcgtaaccggacccgggcgtgataacactgatccgataggacgcgggccagtgctcgagcttatcacgtgccgggcgaccagtagctctcttcacaggcggctacttctgtatttacactacgatagtggaacgacaacaaccaaacaattggacgcccaactggacatctacaacagtcatgccaagaatgtcgactgaattaatccatggctacataattaaaagcgacctgaaggtgacagctatgtggacgctaagttctgtcactgtcggtat

SEQ ID NO: 66578 - DNA, 739 bp, Zea mays
  Clone ID: MRT4577_160717C.1
gcatcatagatcggttaaatgatgtagtagagaagaacttcgttcacctgtcttacactgatgctgttgagctacttcttgggtccaagaaggaattcgagttcccggtaaagtggggtttggatcttcaaagcgagcatgagcgatatatcacagaagttgcctttggtgggcgccctgtaataattagagattacccaaaggagatcaaagctttctatatgagagaaaatgatgatgggaagacagttgctgcaatggatctgttggttcctcgggttggtgaacttattggaggaagccagagggaagagcgtcttgattaccttgaagcccggttggacgagcaaaatctgaataaggagagctactggtggtatttggacctacgacgatatggatcagttccacacgctggtttcggtctcggatttgagcggcttgtacagtttgctactggaatggacaacatcagagacaccatcccatttcctcgagttcctggctctgccgagttttagcgccctggaagtgttgtcgtatacgtatactttagaaacattctttcctaggatgtaatgtgaggaaaggcatacgttgtactgtactactgtttcatcattgtacagagttgagctgagacttgtgattaatcggaggcaagcagtgctgtggcaagctttgtcgtttgttgtaattgtcgtcaaagaatgtcaatggtggatgatgcaattttttc

SEQ ID NO: 66579 - DNA, 296 bp, Zea mays
  Clone ID: MRT4577_160718C.1
ctcgtcatagatggagatgttagcaatagtgattggaatgccatccttgccgcatgaccgtgaaagaacaacggtggtaggattgtccgtatcatgcaaggtatacataagcagccacgtggtattgctgcaaaacactggattgagctgaaatgttttgaaacagaaaaaaccactagcctattcatccaaagggtgtgctgatggaaaaaaaaaccatatataagaaatatttaaaaaaataaataaattgggggtgtattatatagtgtatattggttattaatgagtgaatt

SEQ ID NO: 66580 - DNA, 1668 bp, Zea mays
  Clone ID: MRT4577_160719C.1
atggaccaagggttaatgcctgaccacatgaacaagggtgtttctcaagaacattcaagtgatgaaggatatgaaacgcctaccgacccttgtcctagcatagatagggccgctcggcgtcaattacatcttgacctgaattatgatccacaagagtgtgagaggagcagccctgaattcatatctctaagcgaggcaaattcagaactatctaagaagaacaagtaccaccaccacttaggcacaggtggttacaagcgtcaagtttctaaatggagacaagaagacgccgagaagaaggtcgcagggttgccgacgcctttcgagaaacttggtgaaaggacgacaaattggatccatgctagaaaacctagggaaactgaggctggtgtatcttttgatgatccaaatgtcgaagaagttgcgaaaaacatatatgcaatggcagctaagcagagccaaggatcatttaagccacaaagggagagagacatcctaatggctggtctcggtaaccctgagcatccaggccgtatgaccactccacagcttcaaataattccagcagctcaatcgttggcttccactgattgtacaaccgtcccaagctctgtcgcgtcaacaggaaataagccatcaagggattcacgacaatcaaagaaatctaaattccctctaccaaaattggtgtccacattcgagaaaaagaagagtaaagctactactgctggcacatctcgatttttgaaagggattggacgggacctcacgtcacgtactgttgatttggccgagcacgaggagtctgcagataaggctaaggcaatggccgcaaagataaagatcccaactaagactgattataaaaatgtgcctaaacattatgtgccggccagatctatactgactcttgagaaactgaggaaggttcctgttggtattaaaaggttgcatgactggtacatgcgtacatcatcagttggcattgacgccattagtgtgcatataccagaccatgtttttattgaaactcgacgtgcaacactatttgcactaatgcaacatgaccaacaagagatcatgtacggtaccaagcccgatgctaatgccggtaaaaggattgggtatctaaacccaatactgatatgtgaggaaagccacactttcagaatcgacaaagacaatgaagagttaaagggaaagacggacgaagaagttgagcatcgcataaatactatgaagaaggattttgaagcaagatatgccacctacatagcaaatgcaatgcttaaatttcaagacagggaagctataatggccccgtacaactttaaggaccactggatatgcttcctcatttatcctaaggttggaaagtgccacaagcaaccacaaggatcggtcctacatgggttcaatgcttgcgagtttatgagaataaacggacgatacatcacaaaccctagcaaggaatttcaaaagggaaatccggagaacttgaccgaagctgtattgtatggtatagttgaagacctatgcacattcatattaaaaaaggtcattccagctgaagggaaatatcacgatgcttctagtacattagctatgccagagtttagaatattaacagaagttagtatactatctcttaaacgagatagttactag

SEQ ID NO: 66581 - DNA, 329 bp, Zea mays
  Clone ID: MRT4577_16071C.1
gagacacaaattgcactttatattggacgtgcttgggtctaaacaaacttacaaaaggacggggcgtaaaggattctacagtgtaacaaacacgagcaaaagaaaaagatatgctcatgcatctattgacagggcaaaatagcgacgcccattgaaagcttaatccggttcccaagagtaccaattacgaagggggaaaaagagtgatgaacatggactaacgggacaccatttgtactaagggaacaggctacttgagcctcattggctgatgaatacgtcctttcactattgacgcagaactactcatagttaatcctcgcatcatt

SEQ ID NO: 66582 - DNA, 235 bp, Zea mays
  Clone ID: MRT4577_160720C.1
tcgatcgagaagtggcatagaaccgtctcctgctattcttctcaaagccactcccagatccttactgtgatgctcaatagaagagaggtgtccgccgtccccgaaacgatcaacgaaagacatgctcagactaatatcatcaagcttgcaaataatatgcatttctccattcccgagatccgccaattcaaagctatcacccaccatgacacttgcatgttccgacattaacgct

SEQ ID NO: 66583 - DNA, 480 bp, Zea mays
  unsure (1)..(480): unsure at all n locations
  Clone ID: MRT4577_160721C.1
cctgggattcaagcgataatgaaagtgttgactgtgaaaatagggagacacttgtgttgcgtttattgagatttgagggatggtgaatgcgtgttacatnntgtgcacctaaagtgggggggggtggtgttattnnctagttnntgggcgtggggggaatgcgtaattnaattttnnaaagaatnccttntgggggagagggaaggattnatggtngtggggcttgcgagcgtgtgtaaatggggggttctggaaattgattgcagngctgaggggatgtatgttgaactttagcgtgcggtcatggatttgatactaccatattttatttatgagctggatacttgtgctgaatggacgctttgtgacgtgggataatnatgttgatttggtggagtatgtgggacatgatcatgatgtatgatgtttattaggtggagtttgagggggatgatgatgatgtgggtgagattggattgg

SEQ ID NO: 66584 - DNA, 326 bp, Zea mays
  Clone ID: MRT4577_160722C.1
ccgtggtatgggaggtggcgcatgcggaggtggcggacttggtatcggtggtgggcttggtggcggtggatggcttggaggaggcattgcttgaggctttggggccggcggtggtatggtaggtggggcacgctgaggtggtgggcttggtggcggtggaggcggaggttttggagtaggtaagggcggaggctttggtgccggcggtggtataggacgtggcacgctctcggggccctccctcgatcccgttgcgcggccgtcgtgtgccaggcccaggggcggcagtacaccgccatccaagttcctgatgtgagcaaatccac

SEQ ID NO: 66585 - DNA, 668 bp, Zea mays
  Clone ID: MRT4577_160723C.1
gtacacgcccctctctcgagttttttttttttttttttttttttttttttttttttttttttttttttttttttttttttttttttttttttttttcggccaaaaaggttaaaaaggaaccaaaccaacaaaaaaccctgggggggggaacacccccttggaaaggaaatggggaccatccctaaaacaagaaaacaaaatagaatcccctttacgagggggaccaacccaggggggggtttcggaccgtcccaagggaccaatatccccaaccccaagggggggccccattaaaaaaggttttcaaaaaaaaaagggggtcaacttttaccccttaacccttgtttaatgaaaaaagggatccttctcaaaaaaaaaaaaggaaaccccttttggaaagggggttgggggccacctaaatttccccaaccaattggttcccgggggtgggggcacacaaccaatttgccgggaaaaaaaacttttcctactaagaaaggggccccaagataaaccccccttccgagaaaaaccccaaaaaaaacattccctttataactaaaaacaaaggaaccctaaggaaaaaaagggatggttttaaacaggaaaagccttttcttcccaaagggaaggttcaggggctaaaaaaactggttgacattttccaa

SEQ ID NO: 66586 - DNA, 1994 bp, Zea mays
  Clone ID: MRT4577_160724C.1
ccggccgggaagacacctacaccaccaccccgccggccacactcgtgtttctcatgagtctcagtctcaggtaggctctttagctcaatccacccatcgcagttgatggtgtcttcgttcgccgcgtaaaaggtcccgtcgctggcggccccgacgacaaaaaagaggtccagcggcgacacgtacatgaaggagatgaacgcctacctcggactcaagggtgtgaacaaggcgaacatgctcggcccggccgggagcctgcgggcctggcgctctgcctctccctctcggccggccgtctctctctctctctctcttgtgtcccatttctaaccctagccgccaagcttgagctcccaagtcccaaactgcccgtctgccctccagccgtgcagggcttcaggccatccgggctccggcttccggcatccatcaggcgtcctcataagatggtgtagggcagcgagcgccgagcagagcagcaaggcagagcagcgagcagccgagcagcgaggcagcgggcgtcctcagaatccgggctgccgagccgccgagcagagcagccgagagcagcgaggcagcgagaacggcccacgagaaggcccgtgcgggtgcggtcgccctgggccgaacaaccccggaccgccgtccgctgcttcctactcttcaccgcttcaccccgcgtgcgcgctttctctgttgctctgctacaactgcggcgccgccgccgccgccgccctacgccagttgccgagcccttcatcgctcttctcgccggcgacgagcacccaccacaacaagtctttcacccacagaaggcaaagatgatcaagaggcgctactttaggcaggaccatggtgataacagcggctcctcatcttcctcctcatcggattgtgactcggacaacgatttggcagaagaggcagtcagcagtgaggagaagtagaggagcaggaagaagaggaagcagtcaaggaagaatcaggagaagaagaggaaggagaactagaacaacaaattgtagaagggagttcaggataccaaagtgaggacaactcatggaatgatgttgatggtgcatctatagacgatgatgaacacagcagcccaagagatgaagaacgtcatgaaataagtttgcccattatgaaatcttctggtgctaatgctgactctgccaaaagtgctgataacacagatgacgctgttgatgcagacttccctaactgcattctgaaatgcaaatctgtgtttaagtgcaagctctgtcctaggatcatgtgcttaaatgtggagatggtcaagatacatctgaaatcaaagaggcatgctcgttccgagaaactactaggagaagggaggcttaagctgatgctcaacagcgatggtgaactggaggaagagcaagagacacatgctgaacgacatgctcggactatagccctttcccagcaagtacaaaagcagaagaaggattcaggtaggcagcgacagaatcggagaaagaagaagaggtctcgggttaatctggaagaggcacagaacaacaaaaaacaacgcaaagctaaatgaagtgggtcttgcagaagcttccaagttcttttgtagcttcaactgctgtgttcccaaactttgtagcggccataccgttaggatattcaagtatccaagagttttctcgtcggctgtaccccgtttcggcctaaactgttagtaatttgttgaattttagatatttaattgaagtggatcaaaatgatatttttgagccgagcagctgatataggctcctcgaactacagtgtgtcgcctgtgccaaatcatcacaggttcatgatccacacgaactataattgtgcttctcaaactgtggtgtggagcttgagccattttagaggagtcacacactgtgtgtgtattttaaaaaaagcggatctggtttctcattttgtattaaaccgtttggctgttttcagcaacgtcctcttat

SEQ ID NO: 66587 - DNA, 3563 bp, Zea mays
  Clone ID: MRT4577_160725C.1
aaagagaacagaactgaaaaatacattatgcacgaatcactttttcaagatacagttcagggattagcacaatacttctacagaggccacaggcatcgagttaaaaaggctttatcaatgcctgctttcatataactagttctctctcttgctctctgttactttcttcctgaaaacttcgtattacagtgattgattaattaattaaccccacatctcctggtgattcgcgggaaaaacgaaaaaaaatgaatcaggtcaaggctgtctgtcacgaggcaaaccaaagtggcatgagtcgtggtgtacaatacacaatacagcaccacaatgtgtcagggctcttggctgttcacacgtttctgaagctccaacatctcctggtgattcgggtccaaggagagggcggctctacaatcacggagagcgctgggtacatctccaatgtgctcgtggaaagccgcacggagatgcagcaaatgcaggtccgctttgaaggatatcgcacggctgagctccgctattgcatcattctccttgtggctatccatcagcactgctgctcgatatctgtatggataaacacgcaaaggatccaattgggtcactgtttgcaaatctgtcatagtttgttctcgttcacaatattctgagcgtttctcataagccgaagcattgtttttagctttttctatcaactttgtcatctcttcatatgcagcttccctgttgttcctcagaaaatgtacacgagcaagaccttgatgggctctagtgtgtcgaattttcaatgcacttgtatagcaatcagctgctgaatctaactttccacaatcaacatagacaccaccaaggttattcaatgcctgacccttccgaagccggtctgaagggcatttcaatgcatcttcaagaagtgagataactgtcgcagaataagaaggatcaactcctgaatcagccaaaacataggctttcagaaagaaagcttcaaatgatctttgaatggaaatagattcttccgctttttgtagggcctccccatagtgccccgtgtcatataagagccacccctcatatactagtcgttcatgctcagttgctgcatgatgccttgccaattgcaaactgcgcatcgctgcctcgggacagttcaacctaaggagcagcaaagattgcctaaagtagaggacaccttttgctgcatctgactcaagcatccgatagatcactgaaagggagccaatatcatcaactgatgaccagcgctcataaagttgtagccaacactcagccgtattccactgctcgacatgtgcaccaagaagagtgcctattttggaagcagctacacgtccttccaacatccgataatcaggtgaaagagtaagaatcgcatggatatcacagatagcagacttatagtcttcaagagccaggtatagacagatccgtagctccaggcactccaatgctaacttgaaacccaagagtcggttaatttcctctaaggcatgtttagcatctttttttctcatcaaggatgcagctcgatacatgtaagggtaagtgagagtaggatccagctcgcttgctttgtcaaggtctgccagctttctatcaccttcagaatacaaagacctctccagatacatccaccccagtggcaaatttgatgttatcactgaactgagcttctcataagccaaagccttttggccttgaatgccagcgactctagcaataccagcaattgaatacacatgaccggcagagaaggcaacctcaaattggtgttcagcttcactatattcctttctcaaaagtctaatgcatgcaagttgatgaaaagctatttgcttctgagtaggggtaactgctagctgcacaagcttctctaacaataatacagttgtttctgtcctcggatcaatgttcattgctacttcactaagcaagcagtacagcaaaaaggatgcatgtccaaccatgataagttgttgttgtgcagttgcacctaagaagaggctaattactagatcatcagctagacaatcgggaagttcctgtaaaaaaatttgcaagcaagaagcagcaagaactggcgcattttcttcaaatgccaacggcatgagctcaacagcatcctgccttgttgaaacaaatgaagccagtttcctatcacaagcatcttttagcctgtcacaacaaaatgtgtttgcaaacaccaggatctccaataagatttccacaggaagatcccctaaactacatgtagaactaaactcagaaacagctctcatgccctccaacgaaataccattctctgacaaatcaacaagctcaagctgtgactcattgaacggtccattaagcatggagcaaaatggtattgacaaagacgcaatcttgcacctatcacatgtcaccctaccatcctgtacttggaaggttaccatggaagaaacttgagacgaggagcttgtctcccatgaaccaattacctcaaaattccgcacaggcatctcagaggcaacatcaagtaaaccaaactctcgacagcatttctgacatgatgccggacgcgcagatatgatctcctccccctgcttctcgtaccgcaaccatgccccaaatatgactttctcatggacgctgcttgcacaacgccaggcagagtggaggctcctctggcgcaattttgcttctccaaggccccgaaacacctgggactggaccaagtacaggcctggcagctcgctcggcctacattgttcaagctcctcgtggatccttgacagcacctcaacataatccaaaggcttatacaatggcactacatgtggctcagcaatcttgataagtgactcaatggaggaaggcgagtaggacgacttgggcagcttccctcgctccacctgcagccatgactgcgggttgaaaccatatccatggatgcgctgctcgtcgcacggcgactccgacaggaagctgctcctcatagagcacaggagcgagaagacctcccaaatctccacactcccagattttcaaacgaatcacagatgtaaatcgcgagggactggcgtaaccacgccaaccgcagaagctcacggaggaaaccaggaaatgaacctacaaatcagaatccacactaaccgccgctaattgggggagaagaataaagtgtcgcagaggcagcagcagcaggaaaagattggaatttggtgcctggagccggaacaaatccggcgagggaaggccaaacggcccgtgaaatcgtgccaagaacggccccaccggaccgaatcttggccgggaaaagatgcagcctccggtgcgcacccgcaagcccccgcgcgccgggcagaattcaacggatcaaaccgggaacagggcgattgttagcgggaggaaggaacagggcgcgtggggcctgcagatagtggatgcgagcgagctcggattcagatcctgcaggctcagcgagagcaggaagacgaagagagaaaagagaaagggaggcgactaggcgagcccggccggcctcgaggtacccaatg

SEQ ID NO: 66588 - DNA, 225 bp, Zea mays
  Clone ID: MRT4577_160726C.1
gagacccatgctttcaggtccgacggcgtaatggatttttcctgcggagtcagagccggtggcctaccattggaccttgttaaatgtgcggcgaaacggacccaatcagaaggctaaataggtcctccctttatacggccccaagcctcctaccccggtctatcgccttgatattttttctatcgcggcccctagggggaatcacggggccgggggggaccacct

SEQ ID NO: 66589 - DNA, 448 bp, Zea mays
  Clone ID: MRT4577_160727C.1
cccacgcgtccgtgcacaactacatttgcaaatacaatggtacatacaacatacatttccagtgctagccattcagaatgcagcaacggattttgattgtgcatacaaccctagcttatatgttcaagtctcaagaaaacagtttgaactaaaaaaaaaaaataaaaaaaaaaaaaaaaaaaataaaaaaaaaaaaaaaaaaaaaaaaaaaagaaaaaaaaataaaaagtttatacaaaaaagaaaaacaaagggcctcctctagataataaaaattgaaagatttttaatggccagcaattacatgaaaggtgggggaagaaattaaggcttttttaagtcccggtccctcatattccggccctatgttctctggttgccaaactgtaaaaacccggtgagtcgatcagattccggcctgcggacgcaaccccattgccaaaggggg

SEQ ID NO: 66590 - DNA, 272 bp, Zea mays
  Clone ID: MRT4577_160728C.1
agcttaaaggactgctggccttcctggtgaagcctctgctgccaaggctgtcagctttcctgagcaacatgaagtctcgttcggctggaaaactctgggaactgcagcacgagatcgaggtgtaccgcaaaaccgtgattgcccagtggagggcgctggacctggatgtggtgctgacccccatgctggcccctgctctggacttgaatgccccaggcagggccacaggggccgtcagctacactatgctgtacaactgcctggacttccct

SEQ ID NO: 66591 - DNA, 336 bp, Zea mays
  Clone ID: MRT4577_160729C.1
acggaccagcatttgaacttgtaacacaatgtttttcagctgtctgctgtactatctgagctgcctatacccatcttagcacataacattactaaagctttaatgaatatgttgcacaaacggactcatctttacaagatctgtatcatgaactattatgagatgctgaattgattgactaagaatttatattagctgacttcacagttcttaaagacaacactgcaagaatgcgtgccaacctgcattgctactctctatgcaactggcatataaatttgggtgttaacatgtagataatatagaaactgcgattaacattgcatatgcatgcat

SEQ ID NO: 66592 - DNA, 583 bp, Zea mays
  Clone ID: MRT4577_16072C.1
tccataatgcataaatattccctctctttttttttggttacaatacattcgactttgtaagggaatcctcaactactagtctttgacccctactctagttttcatggggtcgcagcattagctaacaaaaaactcaaagaatgtagagaaagataaaaccgaccttgccttcgtatgcaaggtaacttatataaactaaaaaaagtggtgattacctgtgcgccaatgaatcgcaggttaatagtcgttttgatcaccaatgaatcgctttgatcacaggttaatagtcgcaggagatactggctgatggtggtggtgactaactgaacttatctccagtatgattttcatatttgcccactgatcttttgaacttcaactggatgggtcatatctgagttgaagctgggcactgtggtatgctatacttgagaatcagaacaaacagagatgaaaccctcagcaagtcagatattctttgtttctccattgtctgtgtcacctgattcctctggcaggagacttagaagaggtaagggcagcagcgaactaagattgcagacgacaatcaatagaggtaggt

SEQ ID NO: 66593 - DNA, 219 bp, Zea mays
  Clone ID: MRT4577_160730C.1
tattttattattgtacagtggacgtttcattttaaaggaatccactgggtttaactatatacatagagaacgggacggctaacatatgagccaagggaaccaaggataaaaaacagtgcagagtgcaaaaatacagggccgggttattcctcaaaacaaacaactgatgagcgatcgattaaaataaaaacaccggctctggatgatgcacatgcagtc

SEQ ID NO: 66594 - DNA, 777 bp, Zea mays
  unsure (1)..(777): unsure at all n locations
  Clone ID: MRT4577_160731C.1
ttcccacccgcttggctcgccatggacctgaagctcgcgccaccgccccacgctaacctccgcctcctcccccgctgccccaaggccgcctccgcctccattgtcaccgtcgcgccctccacctcctgctcctcttccgcggaggccggcggggacgctccaccgaggtcccttgtggtggctgtccgcgcggctgcgtcctcggggtcggggcgagtcgggcggcagctgcactgctgcattgtcaaggcgggggcgtgtggtgacgtcactgaccggtacctgacgtgcgtgctgctcgacatgtacagcaagtgtggccggattgacgaggcgaggcgggtgtttgacgggctgccacgtcctcatcggacgactgtcgtggcatggaactccatgttggcggcgtatgttctccatggccgcagcgaggaggcgctggagctgtaccaaaagatgtgcaggactcgtgtcgccatggaccagttcacgttctcgaccatgctaggggtgttctctaggctggggctgctggagcacgcgaagcaggggcacgctggcttgatccagagaggattgccactggacattgttgggaacacggcgcttgtggacctgtactgcaaatggngaagaatggaggacgcgagaaatgtcttcgagaggatgcctaggaggaacttgatctcatggaacactctgatagctggatacggctaccatggcatgggagataaggcgatcgagatgttcgagaggctgatagctgagggtgct

SEQ ID NO: 66595 - DNA, 1389 bp, Zea mays
  Clone ID: MRT4577_160732C.1
ggttttgcatcggtgcgggcacccggcgagacggaggcgacgattggcgcttaggcaacgatcccccggctctccccgtcgatatgatgcaatcagctatctatctcttgtttgccaaaaaaaataagggaggtcttggcatactcgatctagagcgctttgcaagagcgttaaggcttagatgactatggctacgatggacgaatagagacaaagcatggactgggttgcaattaccttgtgataaagcagatgtcgatctatttaatgcatctacgattgtaacaattggtgatggctgatttctggagatcaaactggattcagggcccacgcgtccggtttgctcttgttggccgtgtcataaattttgttgtcactgtgtagatctatctcctgagaacatgtacctcaggagcacaagatatatatgcagatgtaatagcttgttcctgaccaattcctcgctgtattatgctgattgtgggagcacagtgttctgtagtggtcaggcgctaaagaacattgcgccaaccttattcatgaaagcatgccaagcccttacaaataatcgctggatgcacttttgttctccttacacacatgaggaagagataaaagaattcatttccctccggcaagcaaaattcagttcacaacgaatttttgtaaaatcaaaatttctcctatatggaaagcgagaattgagccaaaatgtcgttttttcgtatggaccatgttgtataacataattttgactgcagacaacctacaaaagcgaggatggccttgcaatccaatttgttgtctttgcaacttatcacaagaaactatgcctcatttaggcaaagactgcccgtttttgtagaggtttggaacatgatcctatcttgggccttgtatgattggtggaagagattaaggaatcgttgctgcaaggagtcaaagaagattttcgatggactcctcatctctttctggtggaatatatggttagaaagaaataacagaatctttcatagacttcaaagatctgctatccagagaaacgtcatattcacaactgcaactagtgcgtggtgatctggatgaaaacagtcaggggaaggcagaggtttttgtctaacatggagtttttttcagtgattttagatattcttacaagctgtaacacaatcaagcagataagatcctgctgatatatatgaattaagcttcttatctttttagttccagtagcaaagtacgtttacttgcagtttgttggagggacttgtgatggcttttgatattacttcatgagtcaattgctaattagcaattggctactatatataatctgatgccatgtatgatatatataagaccccaattttttttttcttttgt

SEQ ID NO: 66596 - DNA, 1725 bp, Zea mays
  Clone ID: MRT4577_160733C.1
cctagggggttaacggtcaataaattatccaaaacctttcctaaagtggacttcaaggatgtgaggtccaatattattcatcttcgaacgggtaaattttcaaataataaaagtgatgatttatctcaagtttgctctgaatcatcttagggttataaaaattttttattttgggatacaaagaaacgtcatattcacaacggcaaatagtgggtggttatttggatgaaaacagtcaggggaagccaaaggtttttgtttaacatggagtttttttcagtgattttagatatttttacaagctgtaacacaatcaagcagataagatcctgttgatatatatgaattaagctttttatctttttagttccagtagcaaagtacgtttactttcagtttgttggagggacccctgacgtccgcccacgcgtccgcccacgcgtccgcccacgcgtccgcttttgttctccttacaaacatgaggaagagataaaagaattcatttccctccggcaaggtatcaacagcactcaatgatctcgacgatactattttatggaggtggagttacagttcaagtagtgcatacaaaattcagttcacaacgaatttttgtaaaatcaaaatttctcctatatggaaagcgagaattgagccaaaatgtcgttttttcgtatggaccatgttgtataacataattttgactgcagacaacctacaaaagcgaggatggccttgcaatccaatttgttgtctttgcaacttatcacaagaaactatgcctcatttaggcaaagactgcccgtttttgtagagttgtatgattggtggaagagattaaggaatcgttgctgcaaggagtcaaagaagattttcgatggactcctcatctctttctggtggaatatatggttagaaagaaataacagaatctttcatagacttcaaagatctgctatccaggttatgcaattggtgaaagatcaaattgtgagttttagtgtatgcaattggtgaaagatcaaattgtgagttttagtgtatgttagattgagttagtgtatgtttttctctttttttgttttttcttttgctcagtcttcagtatctatttctcttctaatatattgatgaggcaagtcttttgccgcttcctttaaaaaaagagtaattctaatcttcatacactagttttcagtgtagcctttttcctatgtggttaactgtccatagattatgccatacctctcctaaactggacttcaacgatgtgaggtccaatcttattcatctcgagcggctagattttcatatcatagaagtgatgatttatctcaagtttgctcttactcatcttttgtttatttatattttttatttttggattcagagaaacgtcatattcacaactgcaactagtgcgtggtgatctggatgaaaacagtcaggggaaggcagaggtttttgtctaacatggagtttttttcagtgattttagatattcttacaagctgtaacccaatcaagcagataagatcctgctgatatatatgaattaagcttcttatctttttagttccagtagcaaagtacgtttacttgcagtttgttggagggacttgtgatggcttttgatattacttcatgagtcaattgctaattagcaattggctactatatataaaaaaaaaaaaaaaaaaaaaaacaaagaaaaggccgaggggt

SEQ ID NO: 66597 - DNA, 1054 bp, Zea mays
  unsure (1)..(1054): unsure at all n locations
  Clone ID: MRT4577_160734C.1
tctttacttattttccctgctagctagtttgctcttgttggccgtgtcataaattttgttctcaggagatagatctgcacagtgacaacatgtacctcaggagcacaagatatatatgcagatgtaatagcttgttcctgaccaattcctcgctgtattatgctgattgtgggagcacagtgttctgtagtggtcaggcgctaaagaacattgcgccaaccttattcatgaaagcatgccaagcccttacaaataatcgctggatgcacttttgttctccttacacacatgaggaagagataaaagaattcatttccctccggcaaggtatcaacagcactcaatgatctcgacgatactattttatggaggtggagttacagttcaagtagtgcatacaaaattcagttcacaacgaatttttgtaaaatcaaaatttctcctatatggaaagcgagaattgagccaaaatgtcgttttttcgtatggaccatgttgtataacataattttgactgcagacaacctacaaaagcgaggatggccttgcaatccaatttgttgtctttgcaacttatcacaagaaactatgcctcatttaggcaaagactgcccgtttttgtagaggtttggaacatgatcctatcttgggccaatctgttctttctaagtgtcgtttctaaccccgggtcgttgtagttgtatgattggtggaagagattaaggaatcgttgctgcaaggagtcaaagaagattttcgatggactcctcatctctttctggtggaatatatggttagaaagaaataacagaatctttcatagacttcaaagatctgctatccaggttatgcaattggtgaaagatcaaattagaaacgtcatattcacaactgcaactagtgcgtggtgatctggatgaaaacagtcaggggaaggcaggaggtttttgtctaacatggagttttttttccagtgattttagaatatttcttacaagnctgtaacacaatcaagcagataagatcctgctgatatatatgaattaagcttctt

SEQ ID NO: 66598 - DNA, 1148 bp, Zea mays
  Clone ID: MRT4577_160735C.1
ggtacctcgaggccggcccctggctcgtcatgaagctcctccaggccggctacaccgtccgggcgaccgtgcgcgatcccgcgaacgttgggaagacgaagccattgatggaccttcccgggatgaccggatggatgtacttcgtgtctaaaaccctggcggagaaggcggccctggcgtacgcggcggagcacggcctggacctggtcaccatcatcccgacgctcgtggtcggcccgttcatcagcgcgtccatgccgcccagcctcatcaccgcgctggcgctcatcacggggaacgcgccccactactcgatcctcaagcaggtgcagctcatccacctcgacgacctctgcgacgccgagatcttcctcttcgagaacccggccgcggccgggcgctacgtctgctcctcgcacgacgtcaccatccacggcctcgccgccatgctcagggataggtaccccgagtacgacgtcccgcagaggttccccgggatccaggacgacctccagccggtgcgcttctcgtccaagaagctccaggacctcgggttcaccttcaggtacaagacgctggaggacatgttcgacgccgccatccggacttgccaggagaagggcctcatccccctcgccactgccgccggaggggacggctttgcctcggtgcgcgcacccggcgagacggaggcgacgattggcgcttaggcaacgatcccccggctctccccgtcgatatgatgcaatcagctatctatctcttgtttgccaaaaaaaataagggaggtcttggcatactcgatctagagcgctttgcaagagcgttaaggcttagatgactatggctacgatggacgaatagagacaaagcatggactgggttgcaattaccttgtgataaagcagatgtcgatctatttaatgcatctacgattgtaacaattggtgatggctgatttctggagatcaaactggattcagggtcaggccccaaagaacattgtgccaaccttattcatgaaagcaaagaggaaaaatatctcagtgtgccaagcccttacaaacaatcgctggatgcacttttgttctccttacacacatgaggatgagataaaagaattcatttccctctggcaaggtatcccc

SEQ ID NO: 66599 - DNA, 479 bp, Zea mays
  Clone ID: MRT4577_160736C.1
cccaaacacaaaaatactgctgaggaaaagcaatccacacgattcgattcaaagttttcaggttttctctaaaagtttggattttgatttcgttgctgaacggaaaaagaatcagctcctttcagtttagggttttgggtttctgtttggtctctatcagatgatgtgtgaggagattcttcctctgtttgtgtctgtttcagatggaagacaatgataagtctccccctaaggattactataagattctagaagttgattacgacgcaactgaggaattgatcagactcaattatcggaagcttgcattgaagtggcatcctgataagcacaaaggcgatagtgcagctacagaaaaatttcaagagattaatgaagcttataatgtgctgatggaccctgctaaacgttttgagtatgatttcactggtatatatgagatccacaaatacactttacgggaatatctcgccagattt

SEQ ID NO: 66600 - DNA, 326 bp, Zea mays
  unsure (1)..(326): unsure at all n locations
  Clone ID: MRT4577_160737C.1
gtgctgctcaagttcctcaggtggcgggcggaggcggcgcccggcggcggcaccgtgcgggaggagcaggtgcgcggggagctggagcaggacaagatctacatgggcggcgtcgacaggaccggccgccccatcatcgtcggcttgctcgggggggtcgactggggcgaccncnacntggcggntttcaagagttttgtggtctacttntncgncttgntctgtgcctggttccccttggggttggttgggtttctggtttttttgttttttttgggctgtggtttctgtttgtggtggttttgtgtgttttttggggttttttg

SEQ ID NO: 66601 - DNA, 388 bp, Zea mays
  Clone ID: MRT4577_160738C.1
cccacgcgtccggacgcacacaagtcgcagtttgctagctcccaaccgagccaggaaaacggacgccgtgcagctcgctcgcgcgcgccccacggaaagagagggcaggtaggaataatgtaccaggccatcccgtacagcgccggccagccgtggccgcggccggccccgacgatcggtcctgacgtggcggaggaggaggggttgctggcggcttcgcagcagcaggcgtcgacgccagcggaggcggcggcgagggtggaggaaggagaggtgcggcgcgcggtggcggagtgccccgtgctcgtggtgggcgtgcgcgggtgctgcctcagccacgtggtgaaacggctgctgcaggggcttcgggtgaaccccgccgtgcacg

SEQ ID NO: 66602 - DNA, 489 bp, Zea mays
  unsure (1)..(489): unsure at all n locations
  Clone ID: MRT4577_160739C.1
anccaacgggccatcccggcggccccccttttaatttttttccccggggcgcccaaattccttttcccccgccccacccttggaaaaccttgtttaaagggcttttttccttgaccccgtgttttcccaaaaaaattttttccccctttctttttagggggctttcctcgcccaccccgaaggttaaacccttttggaagagcaaaatacttttccccttttttttgcgtttttttgcactccccggggggggaaaaaaaacccccttcggaaaattttcccttcttgaaatcaaacggccctccccctccctgggggggtcccaaggaaaggggggtttgaagggaaaaccttggggagcaaatccccgtcccaaataagggttataaagttgtcccttcggtggcaaccttccttttttgaaaaaatctactttagtggttgccccccccaagggggggggggggacctttggtggcctcccaaatt

SEQ ID NO: 66603 - DNA, 368 bp, Zea mays
  Clone ID: MRT4577_16073C.1
agaagaatagcatctttaatgagtgttctaatccttgtcatgggaagttttgaaatatatttaccagggtcagatcaatacagagattggttttggataatatagctgattttaaatttcatttaagccctttcatttgtcctcccacagatgctgctttgtttcgatgaaagagaaataagggataaataaatggtcaatgcttgaaactaatgtacctgtgtactcccttaaaactattggactgtatccacagaatagggaaaactattctcaaatgcacagtcactcatgcctcaggcatgaactgatgttctttcaaaagaaaaaagaacaggggcaaacttccagtcctatgtttgacacat

SEQ ID NO: 66604 - DNA, 218 bp, Zea mays
  Clone ID: MRT4577_160740C.1
ggagggggaaaaaactaaaatgaaccaaaaaaaacgggggatggttgaaggggggtgaaataaaaaaaaaaaaaaacaccggatgcaaattcctcccacccgcggacccctcccatgcaaaaaacaaacagccccctccatgcacaaaacggatgcaggaggctgcatacaaccggcttcccacagggaattttattggaagccggcgggtccctccc

SEQ ID NO: 66605 - DNA, 142 bp, Zea mays
  unsure (1)..(142): unsure at all n locations
  Clone ID: MRT4577_160741C.1
aattcggcacgaggcgacgacggagcgcttggtggngagcacttgcgctacggctaccgctacctgcaccaggacgtggactccctcgagacggagcttgttgagagcctcgtcagccccatcacgctggactcgctgttcc

SEQ ID NO: 66606 - DNA, 275 bp, Zea mays
  Clone ID: MRT4577_160742C.1
cggacgcgtgggccgcggtcccgcaccacgggcacgcgccgtcgcctcgcccccacggcctacgccgccgccgcggcagctgcggctgaggccccgctccccatgacgccccgtccgaccattcattcgttcaccggccagcgtcagccagccaggcgtctaactccaacacgtgttgccaaatgccaacactccagtctccaggtgatggtcggtcagccaccagggcctccccgttcggccgccgtgcgtccaacagtcgggcaccggcgggc

SEQ ID NO: 66607 - DNA, 1013 bp, Zea mays
  Clone ID: MRT4577_160743C.1
ctattaggcacagcacaaatgtacacctatagtcgaaccgttccgacatgggaatggggatgagggcgtgcttgcagttgcagggcagtgaggcaggccaaaatccccctttcagctaggcaaacaagacatggcagttatttctccggctgggctggctggctggatgaactggaggccggagcatttacgcccccacccccagcacttgctccgcgatcttttgagtgacctcactcaccatcagcatgcacacagaaaaaggcagcggcaggctagggagctacagtactagtaggcaaaatgcaacagccaacaagtcgcctggtggccacgggcacggagcaagcagtgaatagtgatggtatcccggcagcagcaacagctgctgccgcctgcggcagcagtagcagcgccagcacattcaaaacctgcgtctgcgcgcgcgcagtgttgctgctcccgctacggctttgccccctttggcccgtacacgccgttcagatgcattggccttggccagaaggggggcattcaagcgcccatgagaatgaacgacagggcggcttttttttttttttttttaggaacaagatgagtagtagtagtactagtagggttttaattaccccccaagttttacagcgattttttggatggacacacacgagatgaaggcaacgtgcctggtcatggtggcgctgccttacgatctgaaacctctctccctctctctctatgtcttcagagttcagacttggaacggattttgaacaaaaccttagctcccggcctcacctgtacagtactagtacagtctaacagtaccagtaccgaagaacataaaccctcgcggctggaatggaacggttctctctcactgctcctcgtcgtcgtttagcttccaaggttgtcgctcccagcatcggtcaatacggtgagcctccgcgccgacctgacgaaatcgctgaagccctccccgccggcgtgcttcacgtgaccggcggcgccgc

SEQ ID NO: 66608 - DNA, 311 bp, Zea mays
  Clone ID: MRT4577_160744C.1
gggggggtggggttttgttcgcaatcacatgagtggaggtcggtccaaacccaagcaactgcaactgttcgtcggcgagaccctcgagaagttcttcgggggccctgggtgcacatgagtcacagctcacattatttttctaaagaagcagtgggggggggggggaactcagaatgccgcgtggggttggtgggttcatctggggcttctcgatgtccatgggtgcaggtgctgctgctgctgcttcttctgggcccctgtcctcctgctgcatggggctggcctgctgcgcgggcgcctcctggggggcc

SEQ ID NO: 66609 - DNA, 709 bp, Zea mays
  Clone ID: MRT4577_160745C.1
tggacccggctgggccgagcccgcaccatcccatcctccatcgcgagacacaccccatggcgtccttctgccgcgccgccgccgccgccggggcgaggtcagcggcgctccgctctaggtccccgacggcgagaccgttcctggcggcgacgtctcctctcgcgccgccacgcttaaacaggcccctcgtggcggcggcggcggcgctggcgagtctggagtcgctcgtgccgctgcacagcgcggtggccgccgcgcggctgcggtcctgcatcgccgccggctccgcgtcctggagctgcctctcccaagattttgctctacctcggtaatgaaggttgaagaaggcgatcagttcagacagggctgatcattcacaatcagttacatagctagtgttgatgcttgtgtaacaaagatgaatctgttggagctgctagggtgctaaaggtggggtcccctattcggtagagctcggtaaattctatgtatcgattcgctaaggtgtacctgttgggagttgggaattcggatgtcactatttaccatattttctatatctatctatactactatgaagaaaaaaaaaagaaaaaaaaaaaaaaaaaaaaatactcgagggctttggcagacggtaaattctatgaatcgattcgtttaggctttgttcggtaaaaaaaaaaaaaaaaaaaaaaaaaaaaaatcctgc

SEQ ID NO: 66610 - DNA, 138 bp, Zea mays
  Clone ID: MRT4577_160746C.1
cccacgccttccatttgcccatggagcagctttcttcctgaaggaaaggctgttggcccgggtggccccttccagggtccttgtttttaaaaatggtggcctcttcccattggctattctaaggaaaacctcgttgga

SEQ ID NO: 66611 - DNA, 1022 bp, Zea mays
  Clone ID: MRT4577_160747C.1
gcgaggacacggcgacgccgcgcgaggttcgcaacaagggcggggcgggggaagcggcggcgtcttcccgccgcaggtcagcctcgacgacctcgccgacgagttcttccgggccagggccgagtccgaggacgacgacgacgaggagactgctgcgcgcggccggtcaaggcttccagcggccgcagagcgtgggggcggtggcgctggcggtcggcggagctccaccgcgcggtacgctaggcagacggagtcttcgcggcagcgcgggcgctccgtgtcgcggccgccagccgagcggcgaggcgtagcggccaatgcggtggatggcggccctgcagccaggaggcagcgttatgcgtcggtcgcccggcgcgctgccatggatcgacaccggtggtgcgattcggataatgatatggaagttcctcgccagtatgtttctagggggatgcataccaaaagtagcagtggcaatagcctgcagagttcattccataagccatctaaagcaaatcaagctttgaagaggtctacaagtcaaaaggatttctttcattctagagacagcagctcctttgtatttttacctttaattatgcagagccattcttcaattactgatgatgagtctaggagttcactctctttccatagcagaaatcagaaggctgtctgtgcagtttatggtcttgacaaggagcacggaattgatgatggggctggaaatgtattgtacgatgtaatgcgaaaagaagttaggcaagctgttgaggaaataaggaatcagcttgaagaggccatgacaaaatctgaaccttcagaaaaggcaataaacagtgatgcacaaccaacccaagttattactcagctccgaaggagctacactagtaaattggaagagtcagagaagcggaagcaggaactgttagctcaattggcagcagaagaacaccatgggcatgagctcacaaaaatagttagagaattgctacctactcctaaaaagactgcaaacttac

SEQ ID NO: 66612 - DNA, 240 bp, Zea mays
  unsure (1)..(240): unsure at all n locations
  Clone ID: MRT4577_160748C.1
aaccgaccaaaaaaaacccggttttgaattcccttcttcgcttggacgtcccagtttgagtntacgttttgcagagaaacaatcactccccaacatgtttagcggtcaggaaccacaacatgtgtaaggtccatgatccacaacatgtttagcgttcaggaattcatacagtacaagcaattttgacgctttcaagattgcatcaattaaccacccaagggcccccccgggggcccgact

SEQ ID NO: 66613 - DNA, 940 bp, Zea mays
  Clone ID: MRT4577_160749C.1
cgtccacccacgcgtccgagaacagggagcgggaaatcaaccctaatccagtccctcttccgcatcgtcgaccctgctgtcggccagatagtgatagacggcatcgacatccgcacggttgggctgcatgatctgaggtccaggctgagcatcattccacaggagccgacgatgttcgaaggaactgtcaggagcaaccttgaccctcttggggagtactccgacgatcagatctgggaggctttggattgctgtcagctaggggacgaagtcaggaagcaggagctgaagctcgactcaccagtggtagagaacggtgagaactggagcgtgggccagcgccagctcgtgtgccttggcagggtgatcctgaaacggagcaaggttcttgttctggacgaagccactgcctcggtggacactgcaaccgacggcttgatccagagaacgctgaggcggcagttcaaggagaccaccgtcatcacgatagcgcacaggatcacgtcggttcttgacagccacatggtgctgctccttgacaacggcgtggccgtcgagcacgacaggccggacaagttgctggaggacaagtcgtctctgttctcaaagctcgtagcagaatacaccatgcggtcggtgcttacatagcagaccacagaccagcatacaagagacgactgaagatggggtcataaatatatgatgacaccttttaagttttactagaaaccaaaaaggtctcgcgaaaggccttggacccattattacgcaatgtcatctcttcgtgggccaggggaagaatgtctgacaaaatggatcgacatgagatcagatcaactcaagctcgtgcgactcactgaattcaaacgttttccccaacatggatacgattctcccgcgtagcgccctcagacgttggaactgaatgatgattagtcag

SEQ ID NO: 66614 - DNA, 995 bp, Zea mays
  Clone ID: MRT4577_16074C.1
cggactgttcgaatctgaaatcccaggcccctgatttgtttaacaccgggtcaacaagcgttgcgctgttcaagattggcacgcagcgccggggcctgtgaagaatctgaactgcagtagctgctcatttctcgctaccgttatcgatctctcaaccaagactccacagccaggcagctagcccatgaggagttccgtcgccgccgcgatgcccgcgctgctgctcctgctcgtcccgtgcctgctacacggcgcggacgcccgatctttcaggatcacaagccactcgtccacctccgtgttcagcttcggcggcgacgacttcgccgacaccggcagctccctgaggccgtcgtcgtccgcgccgctcatcgagagccgccgcgacggcgaggccaccgtctcccgccggaccagcggcgacggccgcgtcatcctcgacttcgccgcaaacgacgcctacgatctcccgtccgtgccgtcgtacctggagctggaggacacatcgcacaacttcagcaagggcgccaacttcgccgtcgcgggggcgacggctctggggggtcacgtgggaagctctgtgtccagctttctacagcacaggccgcccacgccgctgagctcgttcggggcccagatcgggtggttcgagcagctcaggccctcgctttgcgccaccccggagcggtgcgacgagtgcctgggcaagtccctcttcgtcgcagggttcggatggaacgactaccttctcctcctcgccgccaacaagaccgtggacgagacgaggacgcacgcgcgcacggtggtcaaggccatcgccgacggcgtggagaggctggtcaagctcggcgccaagcgcgtcgcttgtgccggggatcctgccgatgggctgcgctccggtgatcctgggcctgtacgcgagccccgccgagtctggccacgacaggtacgggtgcctcgtcaggttcaacgacctggcgaggtaccccacgagc

SEQ ID NO: 66615 - DNA, 337 bp, Zea mays
  Clone ID: MRT4577_160750C.1
cacccccggcactgtttcgtcactcttcctgagcctgttggcttgctgactcactccgctccgctccagctcccactccggtcccgaactagctcatcctgtctcatgacagcagaagctggatcccagcggcgaccgctcgctggaagctccgtcagccgtgtccccgacgagaagtcggctcgccgacaaccccgtgcaccccctcggcgcacgacaagaacctcgggaggaccaggtgcgcccggagcccgtgccggacgatgactatcctgagcgccggccagccccgagaagtactggcagcccccagccgcaagaccaggcctcctcggcc

SEQ ID NO: 66616 - DNA, 186 bp, Zea mays
  Clone ID: MRT4577_160751C.1
gaggacaaaccatgaaaagggacaatgcttgtgtcatagtgaaaacataactctaccgggccccacttataacaaaaagggtaaaaacgtctatcttgcccaaaataagggagaacaagatcatgcactgagctcgagctctctacagacacagcacatgacacaaatgatggcacgcaaaagtgc

SEQ ID NO: 66617 - DNA, 491 bp, Zea mays
  Clone ID: MRT4577_160752C.1
gccccagtcagcccgccgtcatggcgcgtctcttcttcctcctcctattccccctcctccactcctccgtcactgggctcaggcgcagcgacttcccgccgtccttcctcttcggcgccggctcgtcgtcttaccagattgaaggcgcttacctagaagacaacaagggcctgagcaattgggatgtcttcacccatattcaaggtgcttccaaaggtctcaatcacgcatacggtgatctaagacatctaagcaactcaataataaggaagtaatctaattttggccgcttgagtgcaagtagctactattatagttaaggatattcttggagatatttttagtgttttttgttaaaattatttggacatatgttgatgtcgatttaggtcaccacccatggctagtaagcccgtggttgcaaacaacattgatcgcaccaagatgtagcagatcaatgaaacaaggcgtcggtaggcgtatattcatcg

SEQ ID NO: 66618 - DNA, 667 bp, Zea mays
  Clone ID: MRT4577_160753C.1
tgggtacccgggcccccccctcggccaccccccccccccccccccccccccccccccccccccccccccccccccccccccccccccccccccccccccccccctttaaaaaaaaaaaaggggttgggaaattaaaccctttttttttaaaaaaaaccccccagcgggggtttaagggaaccaaacggttttggtaggggcccaaacccttgccccattccccatttaaaaaaaccgccgttccaaaacaaaccccctttttttgggggcccccggattcccccttttttttttttaagtcaagggggagggggggccaaaaccaaaagcccccccgggaaaaaaaaatttggggcgccccaaaaaaaaaattatgggccttttgcaaggggttggccctcgggccccaaaaaaaaccctttggaaatgctttgggggggaagggggccctcgccccaaattcctgcccccgggggaacccatttttttaaaagggcccccccccggggggggacccccatttttttttcctttaagggggggaaaatggccccctggggaaaaaaagggaaaaagttgttcccggggaaaaattgttccccctccaaaatcccaacaaaaaaagggcgggaaaataaagggaaacccgggggggcctaaagggggg

SEQ ID NO: 66619 - DNA, 1274 bp, Zea mays
  Clone ID: MRT4577_160754C.1
ctcgaggccgggggggagcagctagctggctaaatacacgtttgcgccggaggccgggggaaagaaaaaagatggcccctaaattagtctttgttcttcctgttgtgctcctcgccttggcgctgcaggcgatcctccggccaccgccgccaaagctctgtggctccccaggtggccctcctctgacatctcccaggatcaagctcagggacggaaggtaccttgcgtacaaagaggatggagtacagagagacaaggccaggtacaagatcatcacagtgcacgcatttgatagcaccaaggacttcccctcgcctgtttctaaggagctcgtggaaggactgggaatttacctccttgcttatgacagagctggatatggggaaagtgaccccaatcccaaccggcatgtcaagagcgaggcgctagatatcgaggagcttgccgaccagctgggccttggccacaagttctatgtgctaggggcctcaatgggaggatactcggtttggggatgcctccagtatatacctcacaggcttgcaggagctgcgctggttgtgccaattatcaactactggtggccttcgttcccagctgaattatccaagcaggccttcaacagactgattgtgccagagcagagaactctttggattgcacacaacataccttccttgctttacctgtggatgacccagaggtggttcccttcttctgcagcagccatgcaccaccctgaaatatttagcaagcatgacatggaggttcttcagaagatgatggcaatgccaagaaccattgagaacaaatcaaggcagcaaggcatttatgaatcgatccaccgtgatttacttgtcgcttttggaacttgggagttcgatccaatgaatgtcaccaatccatttcctcaaaatgagggctctgtgcacatctggcaaggacgcgaagataggttggtgcttgttgagctgcagaggtacattgccaagaagcttccgtggatcaagtatcatgaagtcccagaaggtggacacatgttcgtgatggtagatggatggacagaccgaattctcaaggcactcttgttaggagaagagcccctagatgtgtgacagtagttccattttcaaaatgtcaaaaactgcagctgccagctgttattttacttaattttattcccaatttgtacacttgtattcctacaacaccaagactagtctaattcataatccgatagactttccatcaaaaaaaaaaaaaaaaaaaaaaaa

SEQ ID NO: 66620 - DNA, 921 bp, Zea mays
  Clone ID: MRT4577_160755C.1
ctggccgggggcttctggaagtgctgaggatcggcatccggttcggttcgtcgtcctcgtccccactccccacctgcgcagctgcgctgcgccatctcgaatcctctccttccaccatctcgaacctctccttccatctcctccccggccgattcctccagtctccagccaccttcaactgccggccgcaagtggccccgcgtctcacccctaaccccagtgaagaatctaggcgtcgtctatccagccccgtcatcatcaccatggaggaggcactggatacctaactgcttgctttgcactgatggttggaccagaagggcgagcagttggtgtcgaacatatcccagagttggttgctacttctactgaaaacatcaagaaaagtgcagcagccccacatctaaatgatggatccctcagtatacacgtttctgatggcagggaaggttggccagaactggcaccctatgaagccatccatgttggagctgcagcaccgcagatcccggaggcgctgatcgagcagctgaagcccggcggcagaatggtgatccctgtcgggacagtcttccaggagctgaaggttgtggacaagaaattggatggcactgtcagcataagagacgaaacgtccgtgcgctatgtgccgctcactagcaaggacgcccagttgcacgcaagctgagtgatctatcatgtcaaaaaaaaaagttatcctcacctgacaaggtgaggcattcaatcgaatcgctacccttgtaaatgtattaatcctactgtctcagtaaatgcgctggcttggaaataatgtaaatgatggaacatcatggaacgtttgtttccctacagctgacaaaaaaaactgacttactatgcaacttgtttctcagagcgaaaaaaaaaaaaaaaaaggcccta

SEQ ID NO: 66621 - DNA, 482 bp, Zea mays
  unsure (1)..(482): unsure at all n locations
  Clone ID: MRT4577_160756C.1
cgggcacaatgacaaaccctatgcgacaatagcgggcatctaaaggcctgctgccgcagctcctgctctgcgcgaaacaagcacacaagccgccgccaggacagacctcctcctgccgacaccgagcctgctccgtgctcggctgctggcccaccatgaggaagcgcctggagccccatctcgaccgggcgctgactaccgccaccacctacggggagccttcatcgccctcgaacgcggtccgccccgaggcgccgcgccttgccgtgctcctccgacggagccagagcggacgccagcgcnactactaaaccgtcggctgcgcgcggttccagtcacggaggcgctgatccctgctctccgcgctcccggacgtccgcgacgccgccttcatacaacattgttctcgccgcgctctgcccgacggggggcgaccatgccacaggcgctctccatcctcgccgacatgtagagataggcac

SEQ ID NO: 66622 - DNA, 1705 bp, Zea mays
  Clone ID: MRT4577_160757C.1
ttttattgactgaataaaggaacctgattcagctaatgaggttgtccatactgctctactagcagggttttgttatattgcttgtcataccatgtggatctcccccatttgtgaggttcttgtcctcgtatgatgaaatttgctgcagctttagagcctgtttggttcgtggctaactgtgcacactttgcttaagtttagtcgtttaaattgaagaactaaccttagacagaaaagttagacaaagtgtgacaatttatgcagagaaccaaacatacctttagtattccttagtctggcactctggccttatgtgcattcagcattctcgaggccggccgggctctctgagtcgtctagtgtcatgtgatctggatcccattccggtggcttctgccaagtgctgaggatcggcatccggttcggttcgtcgtcctcgtccccactccccacctgcgcagctgcgctgcgccatctcgaatcctctccttccaccatctcgaacctctccttccatctcctccccggccgattcctccagtctccagccaccttcaactgccggccgcaagtggccccgcgtctcacccctaaccccagtgaagaatctaggcgtcgtctatccagccccgtcatcatcaccatggaggagcggggccagcgacaagaacaagtccatggttgagcagctgcagaggtacggggtcatcaggtcgaccaaagtcgcggaggtgatggaggccatcgacagggggttgttcgtgccacctgggggctcgccataccacgatagccccatgccgattgggtacaatgccaccatatcagcaccacacatgcatgcggcttgcctggagctactggagaagaatcttcagcctggaatgcgagctctcgatgttgggtcaggcactggatacctaactgcttgctttgcactgatggttggaccagaagggcgagcagttggtgtcgaacatatcccagagttggttgctacttctactgaaaacatcaagaaaagtgcagcagccccacatctaaatgatggatccctcagtatacacgtttctgatggcagggaaggttggccagaactggcaccctatgaagccatccatgttggagctgcagcaccgcagatccccgaggcgctgatcgagcagctgaagcccggcggcagaatggtgatccctgtcgggacagtcttccaggagctgaaggttgtggacaagaagttggatggcactgtcagcataagagacgaaacgtctgtgcgctatgtgccgctcactagcaaggacgcccagttgcacgcaagctgagtgatctatcatgtcaaaaaaatgttatcctcacctgacaaggtgaggcattcaatcgaatcgctacccttgtaaatgtattaatcctactgtctcagtaaatgcgctggcttggaaataatgtaaatgatggaacatcatggaacgtttgtttcccttcagctgccccggtgttcttacttactatgcaacaagtttcttcagagcgcgctccttttccgttccctcgcgggtgtcactttgtcctctgcgtcgggggtctgtctgatctggcattgtctgttgtgggtgactgcgtcctgcggttgggtgttgccgcgctgcttctttctcctttctcttgttttgcgctggtcatgtccttcctttttcttgggctt

SEQ ID NO: 66623 - DNA, 593 bp, Zea mays
  unsure (1)..(593): unsure at all n locations
  Clone ID: MRT4577_160758C.1
agtcagaaaagtggagagatgatgacatttttctcttcgctaggaaatgtaccctcctcgaggagtattctcatctcgggagcaccctcaccctgcgcctgcatatgcgtacgcgacctcctcgtcaactgtcatggacatccacgaacaccccatgctgtgatcctttctgcgaaggaaatcccttacccccctaaacaggctgtctctcatggctgtaccggggactacgttcaatgaccacccatgcgacaattacatacccgtgacccttatagaaaaggatcatgcccaactgccatcatgaagaacagcaagactcctctggaatccacgaaggatgattgtatgctctctactgcggttgagtgatggagaaatgctagggatgattatgagatctgacatgactgggaatcatcatagaagacagtgtgattactgttccagaacagcctagcgcattatcatgtaatagtatctgtgattgaaataatctggatcattaaagatgatgacttgacaacgcagcatttatattcacataacntgtgattgcccgtgtatgatttatcccaaaataatggatgtcg

SEQ ID NO: 66624 - DNA, 399 bp, Zea mays
  Clone ID: MRT4577_160759C.1
gtggattcatgaacgcattgattcacacccatctacacgccacaactgatttagcgtgctccattttgacgtcgtcctgtacttacagtagtgctgtttatcagcaactagggaagaagaaagaagattccgagttctctgtacatttgaagtcacatgacacggtcatttacacattatacacattcaggatgcatgtacttacattagatttgtcgaggggttgatgttttttcacctcatcctgagttatttagtcctagctacggattcaagttccaggtccaatcgtctcatcaggcatataggattgttatccaacataaagagacctcccattattttgtggagagacgggcatgtgtatgagtctatgagaactttggttgaatcttctgt

SEQ ID NO: 66625 - DNA, 275 bp, Zea mays
  Clone ID: MRT4577_16075C.1
acataaaggactgagcatagcacgatgcttcgaataacaataaacagtgagtaatagatattacagaccggggccatttacataatataaatcaaaggacacatagtgcaaacgtggccaacctaaacaacccaccacaagctggtgactgggggaggatgtttgcctaaatcttaaactcgtcgaaggtctggaactcctggagatccggcttggcacctgcttgtttacctgagcatagattggaccaaagggaaccttgaccaaacagatgc

SEQ ID NO: 66626 - DNA, 302 bp, Zea mays
  Clone ID: MRT4577_160760C.1
atactgaaagcctttaccaactttttattgatttattgaggaagaaaagaacagggcctttgactttcggatctgaacatttacaatccgggggtgtgcccatacgtcgcccttaggccagagtccctacagagggcataggcatatatgtacagcacaaggctacagtccgtgcgctgagacaggaatagcagctactgttagatagaggtcactaccatagtggtttctacggctggagccaccatggttgacaccgacagtcctatcttgcacatggtgtcgcacctttttcttcgggt

SEQ ID NO: 66627 - DNA, 716 bp, Zea mays
  Clone ID: MRT4577_160761C.1
ctcgaggccggccgggccgggacatgaagcacgcagcctgctatgaggacctcttgctgcactcactgctagctgctctgccggaatactacattccatcaccccatctagcactaatggatcgcgaggctgcggtcttccttgccctcgggctcctctgctctggcgccgcccgtggatgctaagcctactgtcgagtgccagacatgccagcaccggcatccgtgtcgacgacatcgacgaacattctcgagcgctgcccgatcgacgcgctcaagctctaggtgcgccccaatgcgctcgttctcgcctaggtcgagctgccccagcacgattgatgctgcccggtgctgaaggggttgctggacctcaacgccgtactatgcctctgcaccgccatcaaggacaccatcctctgcatccacctcaacgtgccgcttaacctcagacttatcctccactactggggtaagatttcgccgaaaagatttcacttgcccacaactaagcttggcatctgcttgtagtgctccatctcacgattatatttacgagcatgttggcctcgtgcgatattaccgaataacgctgactgattcaattctttcgctggaccttttacgattggatttgtgagctcacatatttgagattatactgatctctacgaaatattcgtgtcacgcaagaaaagaacatgatgaccctaaggccct

SEQ ID NO: 66628 - DNA, 338 bp, Zea mays
  Clone ID: MRT4577_160762C.1
gtagagagtacctgagtaacctgacaaaaaaacagccacctccatttagagaaaagtgtgctaaagcagatcctgattcactcaaacttttgcaaaaacttttggcatttgatcctaacgataggccaactgctctacaagcatttgctcatccgtattctaaaggccctccaggagtaacgagagaaccatcacgccatcctataacaaaaatgcagttccagtgtcagcgatacaaggctacccaacaggatgtcaaggtacttatatgccaggagatattgtagtatcatcctcaacttagcaaggcatacatgaattggacatgcaaaacaaac

SEQ ID NO: 66629 - DNA, 244 bp, Zea mays
  Clone ID: MRT4577_160763C.1
ctttttcctaccattctttcatctttttcatctgcatttggctgtggggttggcaatagtgggttctattgacttcccaaagattttttgtgtggaaacattctggggcatctttcttgggctggccctgtgattaggggcttttgaaattattatcgcgcttgcctcacttcttctttttgggggcgttaagggtaatatttggatatttttggagaggaaattttggaaggcttttgggggg

SEQ ID NO: 66630 - DNA, 1398 bp, Zea mays
  Clone ID: MRT4577_160764C.1
cctcgaagccggccgggtcggtctcgcgagtcagtgcactgtgcaccccgtgcgtgatcaacaggtgaggtccttcctgctgccgcgaccgccctctcccacttcgactgctcccgcacctttcgttcacgcaagcgcaacctgcttctcccgctggctgtctcggacaccccctccctcctgccacgcatcctccccgcccacgagtctcccccgcaaggccgcaaccggataataaggaagaggaagagaaaccgtgcggtgcggcgaaaggaacagtgaaaaaggaagaatctctctgatcgaggttcctgtccggcttgcagaatcttggcggccagccatatatggatgtactgctaggttccgggaggttcttggcgcgacggcctcccctcgcgctcgtccctcgctgctctcgaggctccccggacaaaagcggcagcgacaaaggtgaaacctctgctgactgggacaaggcatggtctgccttcaagaagaaagggaagaggaccctgttttctgatttctcaccggacaagtacgtgacctggaacccacggcgcagcgagtatccattgtcagaagaggtcgatccaatcaagagaactgaaagatctaacttgatgctgtggacaagcccccagttcaccttggtcggggcgattatcatcgtcttgacattgctaatctatacactagttgttcctcctcccaagtaactgcagaggtgacaactactaggggggtgagctgtaaactagtagtatttcaactggggagtctgtactatggcaactatgagtagcaaaacagtggtccatgctgctgacaccaagactttcttccccctgtgtgaacggaatagatggggtcatatagtatagtgtggcatccaagtcaactgctctctggatgaccagacaatttcttctaacaactttggccggtctgcacctgtatttcagtggctcattgaatgtgcattattgtacagattatcagcagatgccttttaggtgacgtctagttctggggcacttgccaggtccgtgactaacaaagaaccagagctgcatagcgttagtgaatctctatcttcctctcctgttcttgtctggagacctaatcccattgctagatattgatttcagtacttgttagaccatgtacagtcagcatgggcaatttgggcagccggacaagggctatagttttctatggctagccagatggattgcttatcgcagaatctagccagtcgtagtccttttttttcagattagccttgtgactactctacccaaacacggaaacgccagattggctggacaccgttgttcttgtaaatctgatttcattgctggtaaccaacagaaggtggctgatttttattcc

SEQ ID NO: 66631 - DNA, 284 bp, Zea mays
  Clone ID: MRT4577_160765C.1
acttacaaaaacccggggccaaaaatgctccaacccccagggggggtacccaaacaccccgaaacccaccacaaaggggacccccccacccgggccgggaccccgcaaagggggaaacaaaaacagagcgaacccgggcacacgggggcccaacccggtccccggggggagacaaacacgggccaaccgggtcccaaggggaaaaagccagccgcccaaaagggcaaaccaggaccaacccgggagccaaaaggaaaaaaccaagggggcccaagggacgaccc

SEQ ID NO: 66632 - DNA, 358 bp, Zea mays
  Clone ID: MRT4577_160766C.1
atcaagccgcttgttagacctggtacaggttaagaatgggatcagtggagagcctgccattccttcagctaaggtcaggcccctggggcgctcccccttctgttgatagcatgtgggagtgagaaaacaaagtcattgagcataaggaatgagtgcatctgtgcccatatttaaggtgtgaccttggagaagctactctgtgggcatgacagcaaaggagaaaatcatgcggcatcttaaggtctgacatgctttattatgcatagtacttggggtttgttttgatttgttacgtttcgttactgaggtggagacttgcgctctgttgcctaggctggagtgaagtgctgcgatctta

SEQ ID NO: 66633 - DNA, 414 bp, Zea mays
  Clone ID: MRT4577_160767C.1
ggggcactgatgcaaacactttgcatactggacgcaacaaatttgctggcgaatgagaaaacaaacaattgctagtacggtaggtacgtacgtgctacgtagattagtatatgtacaccagatcgcggcttggtggacacgtacacgttccaatctatatatcacacacgcatgaccgacaccgccaaagtcgtcgtgagtcgtgacagaccctgatcactaaacaaacataaaccaactgagatgctgctgttactaagagctacgattacgaaccctagctgaagaagtcgggctagttattatgcacactgcacgcgaggaagatacgacgccaccgttgctcttgctccttgctcgcacgcacgcgccgacgaccgggccagacgacggatcagccgcgcacgacgccgc

SEQ ID NO: 66634 - DNA, 362 bp, Zea mays
  Clone ID: MRT4577_160768C.1
ttcactcgtgcgcagacacgtgggcggactcgtgggaccaatactgtcccgcccccgcagaacactcgatcttcctagccaactagtgtaatttcttgagccgtgacatccctgaccaccgagatggtcgccatctgccttcactgctgcgaacgccgtgtcctgcgtctcaccccagtaccatcgacgaatctgttcgtcgtttcccggtccaccacaagagttgaaccgttgtcacgcccaatagtcgatctgtcaagtggaaacactcctatctgatgtgaactgagacgctatttcagttcaaatgaaaagcacttgcctgcagtatctgatccagagatcgactctgcatataagga

SEQ ID NO: 66635 - DNA, 400 bp, Zea mays
  Clone ID: MRT4577_160769C.1
aaacggcccggtgcagacagccaccaaaccagagaggagaaaaaggagaccctcgctcgcctaactccattagccgatagccatgcccctcttgatatgccaccggctgctgctgcttctcctcttctgggtcgccgcctcccatggcgattcatctgatgatggggcttacgacccctccatgtgcctgaatcaaacttacacctgcggagaggtgaggatcagctacccgttctatctcgccggggagaccaaagatctcaagggcaacgccaactcctactgcggataccctggcctggggatcctctgcgacgacgacaagcccatcctgcagctcgacggcatcgtcaactacaccgtcaagagcgtcgacggcgcaaccgcgaccgtctctcta

SEQ ID NO: 66636 - DNA, 192 bp, Zea mays
  Clone ID: MRT4577_16076C.1
attaacccccgtgcgatcttcttccctggttcgcttggctctcaccaaaaggacttgcctggcctagggtgaaaccacccccaagggcggccgggccttgggttgtcggttggacacgcttcaccagaagacactggggccaacccgggggtctgctgactggggcaggcttggagatcataccccgaaaaa

SEQ ID NO: 66637 - DNA, 472 bp, Zea mays
  unsure (1)..(472): unsure at all n locations
  Clone ID: MRT4577_160770C.1
ttataccaatgcaaagttacnnnnngcaaatgtatacctaactaaattcaccatccctgtcacnnnnngatggccaaactacatgtggctcgtgcccagcacaagttagannnnncataccgtctcatttgacctaatttccaacagtatatataacgcagtatatgtatagcggcccagcagatccttctgttaatgtaattaatttagtccctccaagaccttttcttgtgaggtgagacgacgacgtataccggtatatgtaannnnngctgcatgtgatcggtcagacaaatcgtcttagcggaacgacgacgtcgagccgctggccccgaagccgtcgccgtggaatagcgggtccggcgcctcgtcggtgacgcgccacaccttgatcgacttgtcgaggctgcctgtgtacactatccaccgtgacgccgacgacgnnnnnnnnnnnnnnnnnnnnnnnccctcg

SEQ ID NO: 66638 - DNA, 638 bp, Zea mays
  unsure (1)..(638): unsure at all n locations
  Clone ID: MRT4577_160771C.1
gtcgccacgcacacgtcgtgggttattcggcaggaggttccatcccaggtcgccaccgcgtctccgcccttccctcctccccaccatcttcagcacgaggcagcacgcgcggacgtccctcccgacacggagaaccccgctccgcgcgctcgcattcatcgcgccgccacccaggtcccagccggccgcgcgcccgcgcccccccgccgccggccgtgccatgccgcggcggggcgagacggcggtggtccccattgacgtggcgtccgccggcggcgggcgaggcgatgagcggcccaagagagagcgccaccggagccacggccccggccgccacggtccgcaccggagtcgcccgccgcccccgcccccgccggcgttccggccgttccggcggtggttcccgttccttgtgccgctattcatcgtcgccaacatcgtcctcttcgtgctcaccatgtacgtcaacgactgccccgcgcacgcgcgggccaccggcgccgcgataggcggatcggtcggcgagagcgccaccgcgcagggctgctggctcgcgcccgagctcgggaggttcgcgttccagtcgttcaaggagaacccgctcatcggcccttcctccgncacgcttgttggaaatg

SEQ ID NO: 66639 - DNA, 465 bp, Zea mays
  Clone ID: MRT4577_160772C.1
gcacgagggcaatacagcataggccagccggatcgttatcttccctaggcgactaggccccctctccaagcatcggttttgcaggtcaaaaggtaaccagctccgccggcctcggagacatcgtccacatcgacccagatttcttcagataccttcgcttcgacttcgagtcgagggggaagcttcagctagaggggcgaagccagcgggagccatcagccatgtgctaccaggtgaagtgcgggtcgtgcggcaagtccacgtgggcgggctgcggccgccacgtcgcctccgtgcaccgccagattccccagggccagcactgcgcctgccgcgattggccgggcgttgccccggccggcgacaaggcggccgccgcggaggggccttcgtccacgtctgtctgcaccatcctgtgatttgagcccgcgcatgttacctctggtgtaggggatgtgcgattgt

SEQ ID NO: 66640 - DNA, 563 bp, Zea mays
  Clone ID: MRT4577_160773C.1
ttgtttagtttagttcttattacttccttattcactttccaatgaaaatttctgtttcttttttttattgcactactgcatcattgtatgattgtatcggtccagtaatgacttcagttttactcgatgttgttaagttttgttaggatcacagaaaggctcttgcagatagggagtttgaagcattacaggataggatttctgggaagatgataaattttcgaagagtttcttgcataaacgggactgttccactgtccccatcattaatgtcagctgaggaactttgttctatgtgcaagttggctatacatgcagtttgtggaggatggaaaagagagattagtagttggtagtttagaccttaatcagtgtctttggctaccagatgaattgactggaaagaggcctggggtacgaccgttgtttcctctttctacgctattgcagaatacttatgatcaaaacatatttttgatagttgttattggtatttttgaacttgcattggtcatcgcttagtagttcctctggcaataaagatagactccctacaggaggaa

SEQ ID NO: 66641 - DNA, 510 bp, Zea mays
  Clone ID: MRT4577_160774C.1
cctgtgtctcggttgcccccgtttcagctacactctcaagccaagtcgccggtgatttggcccacgacgtaaccattccggcgggggagatccacaggaatcatgtctgacgccggaagttgtgatggggccgcagcctctggggatgcagttgatgacaacattcatggacagccacaacaagctaatgaagaacaggcatctcctgctccaacttctcgaatttcagtcagaaaggcagtagaagtaatccagacatttgacgaatacaagcggtggctcattactgaaattgggtttggaggaatgctaaagctacccttgctccagaagcttaatcttaagtttagcgcctggactatgagcaaggtctgcgttgagcctcgagcgattgttctgtcagaaacggagatactaaagttttttgcggaagacatccacaaggtttttggcatcccgtgtggacactggagtgttaaagggcgcgatggtttcatcaagccagaagcg

SEQ ID NO: 66642 - DNA, 275 bp, Zea mays
  Clone ID: MRT4577_160775C.1
gtaacaagcgactaacatcgcacgggggcgtccagttcagtgcagatgctccaggacaaaccactgttccgcttcaccatccccgagggttcttcgctgcttccatttctcaaacgccaagaaggaatgctttgctctggtcttgtttcctgcctgaaaatatattttgttttttttttcttgcgagcacttgatgataagattttgtcagcttaggaacatgcaccatcaatagaaagtttcattctatactttcatagacatttaattttatg

SEQ ID NO: 66643 - DNA, 521 bp, Zea mays
  Clone ID: MRT4577_160776C.1
tcgccggcatgcggccaggctgcgggccccgggcgccatctagacgtggcctttacgggcgccgctgcacaccattgactttcgttcaggcgcttctaagttcatgccgccgattcaggctctctgttgttggcggccatcgttttttttttttttcacgggagggccacctttggggggggggccgacggctatgtctgcgtcccctccggcgccgtggggggggggtccgtgccattgaatctaatgacgtcctactccgaccctttcatttagtgggacccgcccccgggcgagtcctgctctttgccggtcgatggcgggggtgcttgcgggggcgccactctgggcgggctgttcagatggctcggcgcgcgccagaaaacctgcatccatacgccgacctttacacggagcgcgaattcggctaccacacagttcgaagtgccagagcgcgatctagttggaactttacctactgcgacatgacacttatcaggcgcgctatacctgtatctaac

SEQ ID NO: 66644 - DNA, 856 bp, Zea mays
  Clone ID: MRT4577_160777C.1
ctcgaggccggccgggaactctctctcgccgcacgatgcttcgatctaccttactccttgcgctgaccagtactctggccttggcgtcgcctgtcctcgagcctcggggtctccaggcgaacgccgaacaagtcgtgttgaacggggtcagttggggcgcaaacaaactgtcccacgtcgggaccgatgacgcgggacaggtcgggactctgaccaagtgggactggaccgattgcggttctccctctgacgcactccaaatcgattcgatcaaaatctctcccgaccctccgaaacccggacaagatctgaccatcgtcgcgtcgggaagggcgcaatcgaaaatcgactttggaacttatgccgacgtaacagtcaagttgggcttgatcaagctcttgacaaagacgttcgacgtttgtgacgagctcgataacgcgaacgctactttgaggtgcccgattgctccgggtactcactcgatcacgcaaaccgtagcactcccgcgcgagattcctcgcgccaaattccaagtcgacgccctcgtgtacacccaggacgaggaacccgcagcttgtatcaacctctggatcaactttctcgttcccgatcttcaagaagattaaaagccagcgatgacaatctttcatactgcaagcgcgatcagataggattgtccctgttccagattaccgtcccccggtttcctccgctcgacttgccgactttttctccctcgctctctctctctttctcttgctcatggtttgtttgactgctggtcaccactatttccttttttctaccgctcgttccttctgcgtcgttcgctgcccctgttcaatgctgtttttcg

SEQ ID NO: 66645 - DNA, 409 bp, Zea mays
  Clone ID: MRT4577_160778C.1
aaatgttatttgttcacacagtttttatctcacacactttctcttttttgactgaaaggggggggaaattaaaaaaagaaaccccgaatctgcgggaagagcacatgctgaaacaaagaggtattttattagttgaagaggaaattaatcttgcgtaccccccggctaaaaaaaaagggggtgggggaaagaaaaaaccaacatgggcatttgagccctcaccctcgggaggactcaaacaaacctgtgtcgagggggagtctaaccactggcttattacacaggtcctggccgagcgatatcagagactccatgggctccttgggggggatgtccacggacgatgcaaacccagtcaaagtatcatcctatatgcgaaggtacttcttgtcgcagggcacggcctgaa

SEQ ID NO: 66646 - DNA, 214 bp, Zea mays
  Clone ID: MRT4577_16077C.1
cttttttttttttttttttttttaaaaggctggagcccaaattcatttgtattttcctacactaaataagacagggcggcgggcaataaacaccggcagcaaggaaggcagttcacacaacatttttatcagggagggtgctgtaggtctggaaccaccccagaaaaacaacccccctccaaagaaccgcggggagcgccggacttgtgcccat

SEQ ID NO: 66647 - DNA, 140 bp, Zea mays
  Clone ID: MRT4577_160780C.1
gggagaatcctttcccttggagccggcacacgccgtgccgccaccacccttcgaaccatagctgggcgccatcatactgtcccgcagagccgctcactcatcatgtgctatgcgtgcgcgtactctatgatcacgggcgc

SEQ ID NO: 66648 - DNA, 527 bp, Zea mays
  Clone ID: MRT4577_160781C.1
ctattcgcactgcgctcatttctgcatccccctcccgccgagccgactctcgacgccggagaagatggatcgcgagatccgcgcgcacgtaaggtgcgctgctcgtgttcaaggcctacacccaccaccgaaagggactagtgcgcttccaatcactacgacttcgaagagggcaacggggaccacaagggcggagtcaccgaagtcatccacgaccccgaccgtggagagctgctcttctagggaactttccgtcaaccattcaaggatgagtatcagaaggaggtatttgttctactagagggaatgtacacaccgcaacatctgtactgagatttcctggccaccctctgcatcagtaacgggttgcccctcacgagaattgctgaggttgcctccgtctgcatcgtacacgatctacatgaagattgcggtgtattacaaagaggatctgaggagtatctcattgggattacagcataagcctgacaaccgtacatctgaaagttacctgccctctgacgaca

SEQ ID NO: 66649 - DNA, 270 bp, Zea mays
  Clone ID: MRT4577_160782C.1
tctgtccggtgcccccccttgcttcactactctaggtgcggggcaattttaatagattgtggcgctcctaccaacacagaagattgttgaatgcatgtatacgccaaataagaggaccgacctaaaccgctacatgggtgatgaggcaaactcctccactgaaagagttttagactaaacgggcatgatgaaggtcaagggatgcaccttgatgcccaacataggatatgggtctgacaagacgatctgtgcgtagctcatatacaagtg

SEQ ID NO: 66650 - DNA, 881 bp, Zea mays
  Clone ID: MRT4577_160783C.1
ttgggtccctcgaggccggccggagacagaccggccggactcgccttcctcacgtcggttggatttaagcaggcgcagaggagagcaaccactcgcccgctcgcccaccacgatctccctcccctccgcacgccgcacggggcgttgcagacccccagccaaaggcaggccgcgacccggagcacgccggccggtcgcgggcgtcgtcgtcgcctcccgcgccgccgccctgctgctcgctcccgcattggatcgcgctgcggttggcgactcggtgtggtctgctgctggtgactgaagccggcccacgcggagacggcatcaagtttctaacaatttgaagtatcccgaaatgggcgcaagagataacggggaggggagagatgagaagagggggactggatcagattatgtacctgctagagactccttttcatcacaaggtgagtctcgggttccaaagaggctcggtaaaaaggagtcaaaagataatagcccccgaacgaccaaaagcagcgccagccgtcaagctcaaaacaagctgcaacataaaggattaaacaatgtacagaacaagcctcagaaacaaaagaaaacagttagtgctgctaaggctgttgacgttagaaaaccagatattacaagaattccttcccgccctccatcagaattgtctgaggaaacagacgatataatcagtgatgctggaactgttgatgatagaggcactgaggaggctaaggagatcaatgtgttagatgaagctccacgctgtgatcagagtactggtactgatgatgaaattcctgatattgaagacaaggtagttgatcatggaaaatcagtcgtagatcaagccatgaggattagtgctgaaatcg

SEQ ID NO: 66651 - DNA, 291 bp, Zea mays
  Clone ID: MRT4577_160784C.1
gtccgaaacagtctctatacgcttctgcttaaccagcttgttgctagcgactctgaatgctacctattttgctcccagagtgagaccaaaccagctgctctatgtagctactagtggctaagtgagtcttccacacaccgtgtcatgcagataaagcagccatcgtaccatgacactagctagggtggacgaccttgagcagattcatgatgatagtcatgtgcaagctcatccacgtcgtaatgcaaggattgtatcgctgactgagcgtccacatctgtgtgctgatag

SEQ ID NO: 66652 - DNA, 2660 bp, Zea mays
  Clone ID: MRT4577_160785C.1
ccggccggggactccgcgtctccgcctgcaactgcggagggtatagaaggcacgcggcgaagcggccaggagttcctcctcgccccgcgttgagttgccagcacggcccctccctctcgttctcctcgactcctccccgtcgcggcagccagccagcaggcatcgtgatcgtctgccctggttcccgccctcgctccatcccccggcacccccgcacgggacgcgcgtgtggacgttcttcgcctccgcgacaggcttgcgccccggctcggctcgggtctgcctccactgcggccttcctggatctcggccgccgctcctccatattataacaggtcacagaactatcagacaaggatggcgacttacgagcccaagaacattctcatcaccggtgctgctggttttattgcatcgcatgtcaccaactgtctggtgaggaactacccgcactacaagattgttgtcctcgacaagctcgattactgctccagcctaaagaacctcaacccctcacgggcttcaccaaatttgaagtttgtcaagggtgacattgcaagtgctgatctggtgaaccaccttctggtcacagagtcgattgacaccatcatgcactttgctgctcagactcatgtagataattcatttggcaattcatttgagttcacaaaaaacaatatatatggtacccacgtccttcttgaggcttgcaaggtcactggccagatcaggaggtttattcatgtcagtactgatgaggtctatggagaaactgatgaagatgctgtggttggtaatcatgaggcctcacagctgcttccaacaaatccgtattcagctacaaaagctggggctgaaatgcttgtgatggcatatggaagatcttatggtcttcctgtgataaccactcggggcaacaacgtgtatgggccaaatcagttccctgagaaacttattcccaaattcattcttttggccatgagaggtctgcctcttccaattcatggagatggttccaatgtcaggagctacctatattgtgaggatgtggctgaagcttttgaggttgttcttcacaaaggggaggttggacatgtgtataatattggtactgtgaaggagaggagggtgattgatgtggccaaagacatttgcaggctctttggcttggatactgaaaaagtaatcaggtttgttgagaacaggcccttcaatgaccagaggtacttcttggatgatcagaagcttaagagactgggatggggcagagcgcacaccatgggaagagggcttgaagaagacaatcgagtggtacaccaccaatcctgattactggggagatgtcactggtgctttgctccctcacccaaggatgttgatgattcctggagttgaaaggcataactggactgaggatatcaaatctctgacttcttcaccagctgaagctagcacaacagctcctgcaaccagtgccaaaaggaccactgctgcccctcaaaagcctttgtacaagttcttaatctatggcaggactggatggattggtggcctccttgggaagatttgtgacaagcaagggataccatatgaatatgggaaaggacgcttggaggagcgctctcagctgttggaggacattagaaatgtgaagccaactcaagtttttaatgctgccggagtcactgggagaccaaatgttgattggtgtgagacccataaacaggacaccatccgcaccaatgttgtaggcatattgaatcttgctgatgtctgtcgcgagcagggtctgctaatgattaattatgctacaggttgtatatttgagtatgatgccaagcaccccgaagggtctggtattggctttaaagaggaagacacacccaactttacgggttccttttattccaaaacaaaagcaatggtggaagagctgttgaaggagtatgataatgtctgtactcttagggtcaggatgcctatatcatcagatctaaacaatcctcgtaacttcatcacaaagatagctcgttacgacaaggtggtgaacattcccaacagcatgacaattttggatgagcttctgcccatctccattgagatggcaaaacgggactgcaggggcatatggaacttcaccaaccctggcgttgtcagccacaatgagattctggagatgtacaagaaatacatcaatcctgattttaagtggaccaacttcacactcgaagagcaatccaaggtcatagtcgcacctagaagcaacaatgagatggatgcgtcgaaattgaaggccgagttctctcaactgatgtccatcaaggattctttgatcaaatatgtctttgagcctaacaggaaggttccagctaattgaggatttaggataagaagggcatcgaggtattagttactattaaacattaaattagctataatgtttgtcaatttttttatgcatcgtattttaacagaacacgtagatgtcctttgttctatatagtggatgatgtgttgagatgtggttatggacaacacaataagtcgttctgttgtgcattttaattatttgttgcaatgtgctttcttttctttctctttttcttctgaaatttgtttatggtgtttgtatgccaaaatcaaataatctccgtttagat

SEQ ID NO: 66653 - DNA, 307 bp, Zea mays
  Clone ID: MRT4577_160786C.1
cccacgcgtccgcccacgcgtccgcccacgcgtccgagtagaagagcctgtgaccgaggatgctggtgaccagcagatagaagtagctgagcaggagctcattgaaggagaagaacaggtggctcaggaggagcctcaaagcgaggagtttgatctgatctaggtggcgtttccccagttgacttttgcgccaaggatgatctttagttcgttttatatttatcttatattttgtaataagacttcctctatgtgataaatactttgatgatattgtgacatttatctctatacactctgttattat

SEQ ID NO: 66654 - DNA, 2701 bp, Zea mays
  Clone ID: MRT4577_160787C.1
cattgggtacctcgaggccggccggggcactctcctccccgctctcgacttcccatcccctgcggccccgccccccgactcttctcgtcgcggcgcgcccaatcggctcggtggcaggcttgcgcaccggctcggctcgggtccggttctaccgccaacgcgggccgccgcgctcccggatctcggtctagtcagagagttagcagacaaagatggcgacttatgagcccaagaacattctcataactggtgctgctggtttcattgcatcgcatgtcgccaaccgtctggtcaggaactatccccaatacaagatcgttgtccttgacaagattgactactgctccaacctaaagaacctcaatccttcacggtcttcaccaaatttcaaatttgtcaagggtgatattgcaagtgctgacctggtgaattaccttctgatcaccgagtcaattgacaccatcatgcactttgctgctcagacgcatgttgataattcttttggcaattcatttgagttcacaaaaaacaatatatatggcacccatgttcttcttgaggcttgcaaggttactggtcagatcaggaggtttattcatgtcagtaccgacgaggtgtatggtgaaactgatgaagatgctgtggttggtaaccatgaggcctcacagctgcttccaacaaatccatattcagctacaaaggctggggctgaaatgcttgtgatggcatacggaaggtcttatggtcttcctgtgattaccactcgtggcaacaatgtgtatgggccaaatcaatttcctgagaaactcattcccaaattcattcttttggccatgcaaggtctgcctcttccaattcatggagatggctccaacgtcaggagctacctgtactgtgaggatgtggccgaagcttttgaggtggtccttcacaaaggagaagttggacatgtgtataatattggtactgtgaaggagaggagggtgattgatgtggccaaggacatatgcaagctctttggcttggatactgagaaagtcatcaggtttgttgagaacaggcccttcaatgaccagaggtacttcttagatgatcagaagctaaagagattgggatgggcagagcgcacaccatgggaagagggcttgaagaagacgatggagtggtacaccaccaatcctgattactggggagatgtcactggtgcgctgcttcctcatccaaggatgttgatgactcctggagttgaaaggcataactgggctgaagaaatcaagtctctggcttcttcgccagctgaagctagtacaatagctccagcaaccagtaccaaaagcatctctgatgcccctcagaagccttcctacaggtttttaatctatggtaggactggatggattggtggcctccttggaaagatttgtgaaaagcaagggataccatatgagtatgggaaaggacgcttggaggagcgctctcagctgttggaggacattagaaatgtgaagccaactcatgttttcaatgctgccggagtcactgggagaccaaatgttgactggtgcgagacccataaacaggacactatccgcaccaatgttgtaggcactttgaatctagctgatgtctgtcgcaagcagggtctgctcatgattaattatgctacaggctgtatatttgagtatgatgctaagcaccctgaagggtctggtattggctttaaagaggaagacacgcccaactttattggttccttttattccaaaacaaaagcaatggtggaagagctattgaaggagtatgataatgtctgtactcttagggtcaggatgcctatatcatcagatctaagcaacccccgtaatttcatcacaaagatagctcgttacgacaaggtggtgaacattcccaacagcatgacaatcttggatgagcttctgcctatctccattgagatggcgaaacgggactgcaggggcatatggaacttcaccaacccctggcgctgtaagccacaacgagattctagagatgtacaagaaatacatcaatcctgatttcaagtggaccaacttcacactcgaagaacaggccaaggtgatagtcgcgcctagaagcaacaacgagatggacacgtcgaaactgaaggctgagttccctcagcttctgtccatcaaggattctttgatcaagtacgtctttgagcccaacaggaaggttcctgttaattgaggatttacgttgcgtggatgcagaggttatttgtgttggttattggactctaaattagctaatgttgcaccgtggtgcgtactagttgtgttcgattcttttgggacaatagcaagcatacctctttctggtcgtctattatacacgcaatctacaaacaggtagatatttagatgttcttttagtggctgatacgaaggcttggcctggtgaagtggtgagagctttcttgctgagccactaggtcatgctttcgaagcagtctctccgtgtttatggtatagtggctgatatgctgagacacggttatcgatgaacactacgaattgtcttaatatattattatatatattaactaccaagagcagttgtacatggtcttgtaaatttttatcccaaaaaaaaaaaaaaaaagcggtttcctgttttaaaaaaaaaaaaaaaaaaaaaaaaaaaaaaaaaataaaaa

SEQ ID NO: 66655 - DNA, 1052 bp, Zea mays
  Clone ID: MRT4577_160788C.1
caatgaggggcggtgcatcatcactgatcatggacattttgttcttttcaacatatacggcccagctgttgacggagatgataaagagcgtgttcgttttaagctactattttacaagatactgcagaaaagagggaacgtctattggctcttggaaagagagtttttgttgttggtgatttgaatattgctcctgcttctatagacaggtgtgacgcggcacctggcttcgagaagcaaatgttccgggaatggctgagatccatgctgagagaacatggaggtcccttttttgatgcttttagatcaaaacaccctgaaaggacaggagcatatacttgttttaatcaaaaaattggtgcagaagagtataattatggttctagaatagaccacattctcatttccggttcctgtctccatcgctgtgattctgtggaggaccatagcattttttgttgccatgtagaagaatgtgagataatgaatcatttcaaaagagggaattctgaaaatttatcaaagtggaaagggggaagaagcagtaagctagaaggatctgatcatattccagtttatattttactgaaagaaatacctgaacttccggtccataatatcccaccatcagctgcaagatatcttccagagatccgtggaaggcaacaaagtatagtatcgttccttgataaagggaaaatttatgagctgcaaaatgctgcaaatttgattcaatctgaagatacagtacttgatagttactgtagtgatggcttggaaaatacaattctagctaagaaaggactggcaactggtataactgagtttgcaaaaggtggtaaccttcctagtttgatgtgcaaggggacagatctgaatcaatggataaatgaaggtttaatgggcatctctcatgtcagccagaaaaaacactgtctagtaccaagtttgtgccacaaaagaaaattaaacgcaacttatcatcccaaccaacaatcaagtcatttttttcaaagaccaggtcaaagacagtaaatgctagtaccagtacc

SEQ ID NO: 66656 - DNA, 232 bp, Zea mays
  Clone ID: MRT4577_160789C.1
aagcaaccgcaatggcgagcagcaagttggtcctctcctccacggctttcgccggcaaggccgtgaaggtgctgtcgtcgtctgccttcggggacgcccgtttgactatgtgcaattcggcggcgaacgctaaggcggcggcggcgtcagggagctcgtcgtacgggaccgaacgaatgatgtagttgcggtcattgatgggccatctgacgtcctagctgtcgggcgactt

SEQ ID NO: 66657 - DNA, 446 bp, Zea mays
  Clone ID: MRT4577_16078C.1
ttgttttttttcttttttgtcttttgcgccttattttatttattttttctttatcttttgctctttttttttttcgcaaggcggggagacaagaaaacatttccgaagggcggcaaagcaatagaacgaatgatcccccacctgggtcgaacctcatgctcctttaaataggatctgccctagggccccccataactcccctataccgacttgcaccgtttttactgcattgtgcgaatgcctataatatccgaagcccataactattatatacattatctaccataccatccactccaaataaccatagacggaatcgcgctaaaaagggcagattgagtcccactggcgcacgatattctgggacataattccgaaacaaagctcggtgtactagtggtactactcattacgatggatatattaatcatcctattctaatacac

SEQ ID NO: 66658 - DNA, 254 bp, Zea mays
  Clone ID: MRT4577_160790C.1
gcccacgcccacgcccacgccgacccacccggatgcctacctcgcctacaccagagcgatgtcaggctgggacgagggctccgtgttctacagcgaccaggcgcaggtcccacgcagcggccccggcgtgaacccagccagccgcctcacccgtcagtccggccgtttgaagtgcaaggagtgcctccgcgggttcaccggcccgaccagcaactttccttaccgggagagcctactacactagccgaaccatg

SEQ ID NO: 66659 - DNA, 501 bp, Zea mays
  Clone ID: MRT4577_160791C.1
gacacgcctgcgggaggcactcgaaagagacatctccgcaagcattcacgcagacatcgtgaacgtaagcgcgaccagtaggcgcaagaggcggcgtaggaagtcaaatcagaaatcaaaacagatagcaaagggggttagtgaagctgatagtgcagctgatagcacttctgatgatgcttgtggcaatactcaccgccgtagacaccagctcaaggcatcatctaaggcttcttatgaagatcttgatgaagttgttgctttaatggatgctatctaagctgaccactagactgaactacagaggagtacacagcaggatgcatcatacgttctatattgcgtactccatacagatgttcatactgactgagatattgactgaaatgccgatggaatgcctgttgtaactgctgatctaactgactctaggagccagagtatgagccataatctctcagtgagcaactctatgagcatcagtctaagaataagcccaat

SEQ ID NO: 66660 - DNA, 596 bp, Zea mays
  Clone ID: MRT4577_160792C.1
ggaacaagctgttctccccgggggcggcgtctagactgggatccccggctcagaatcgcacagaccggagccggaggacccacaccgactgggaaggggccggacgcccgtgcgacctcaccgtgtaaggacaccactcggaccgagccgactgctctgagagggggcctttcgccctccactatatcgtggcacgggaccgggcggaaccccggaaccaaagaccatcaaggtgcccgagggcttcgactacgagctctacaaccgcaacgacatcaaccgcatcctcgggcccaaggcctcctgcatctcattcaaggactccgcctgccgctgcttcggctacatggtctccaagaagaagtacatctacaccatcgacgacgactgcttcgttgccaaggacccatctggcaaggatatcaatgctcttgagcagcacatcaagaacctcctcagcccatccactccgtttaaacttcaaaaccctgtacgacccctaccgtgaggggagtgactttgtgcgtggataccccttaagcgtaggggtggttgtcaagcgccggctcccacggcctgtgggtgaacatcctgac

SEQ ID NO: 66661 - DNA, 631 bp, Zea mays
  Clone ID: MRT4577_160793C.1
cggacgcgtgggcgcgaatcacagacgcgtctatctcagcttgctgcgctgcacgacccgtccctgccatcatatcgtacgtgagcccggccgagcgagagcgagggagaggcatggctgctccgaagctcgcgacgctggcgctggccgtgctcctggcggcgaccgtggtggctcccccggccgcggtgcgcgcggcgatgtcgtgctccaccgtgctgagcaggcttacgcagcgtgtgtcgataacctagatgacgggggccatgccagcccaacctagatgaggcgcgacgccgagcttgctgcaagtgcggagtacacctgccgcagcagatccgtctcgaggtgaactgcgacacgattaattaggtgctgaggcagcctgagctagatcagccgaggcatgcatgtgtgcagctggcgcagagtcatcctgtcgtgctacagctatattaacgtatattgcggcgcgactagttcaatgcatatattatgtgggctaggactggtctacactgcatgcatgggtgtagtcgtggatgaatgatgtcgcgctactggtacgtagggatgtatcgatgtgtgcgcgtctgtatgcatactctctgtaggtaagaatgggtgtacg

SEQ ID NO: 66662 - DNA, 326 bp, Zea mays
  Clone ID: MRT4577_160795C.1
aacccttcacaagccatagtttttttcataacaggaaacgccgggggaaaaactgtctaatcctcacctacaaaggggagaaacccggccctggaatatacaaccgttggggactaccgtacatggaatttcctttttgactgaaactgcttccttattcaaccacctcgggctgctttggcgataacacaccgtaagaaccaaacccggcaaacataattaccgctccagcatactctttaatggtgctgggatacagaaccctccctctccattagaggccccccggtgcaaacgttgggctcaaaaacaatacaaggtagctg

SEQ ID NO: 66663 - DNA, 261 bp, Zea mays
  Clone ID: MRT4577_160796C.1
ggcatcaccgccgcgacgacgatgggagcctcgctccaagccgcggccaccctggtgcagccggccaaggatcggcggccgggcgccctttgcctcgctggcgtcccgcgcgtcgtcgcaactcggctgcagggcgtgtcggcgtcgacgccggctccgccaggatcaggtgctccctgcaggacgtctcgagcaggtgcggtcgacgccgcgaactcggccggcttcgcgctcgccacgtcggcgctcctcgtctcgggc

SEQ ID NO: 66664 - DNA, 244 bp, Zea mays
  Clone ID: MRT4577_160797C.1
cttcctctgcatcctattcgctattgccgggggggggggggaaccgccggtggcgtccgtgtcgttccggcaagggtaaaaccttaattgcggtccctgcggaatttcccccatcccttgagatttgggccttaggacggtgaactctgggggatcccaaaccccctgctgagcccccgaaaaaagggcgggaatggctgaaaggaataccatcattctaatgaacccatcacagaaaagttcg

SEQ ID NO: 66665 - DNA, 233 bp, Zea mays
  Clone ID: MRT4577_160798C.1
gatccccgctgctgccgccaaggccgccgcctcgtccgggagtgtcggcgaggagaagtaggggaacgacgaggactcggcgccaacggtcatggccgcggcggcggagcacgctgtggagtacatctcgtcggaggagctggatgtcgctgccagtcccaatgccaaggccgcgtggctcgtcgctgacttgtactccaaggtatgcgtcagtgacttcgaggcgctcaacg

SEQ ID NO: 66666 - DNA, 999 bp, Zea mays
  unsure (1)..(999): unsure at all n locations
  Clone ID: MRT4577_160799C.1
cccacgcgtncagccacgcgtccgcccacgcgttttcccacgcgtccgcccacgcgtccgcggacgcgtgggttctacatcacaacccttcgttgagtcctatcaacctttcattgctcaggtagctggcttttttattgttgaggaccgtgtctttcgaactgcagatggacttctatctgagagccaggttgatactatgttggaaacagccatttctaaacttactctgatcttagaggaacagttctctcgcattcatgctgccaaccacctnctnctcataaaaggttatgtcagcctttttggtgcaaccctgaagaagtatgggtaccgatccatgtcgctcactgaaatccttgataaaactagggacaagtatcttgaacttcttctttctgactgccggaagcagctcaacgaggccttctctagggactcatatgagaggatggttataaagaaacaaaatgaatacgacgcaaacatagcggcattccaacttgaccccattgatggagtaccaaatttgccatacgtcgctccattttcctcctctgttcccaatgcttgtcgtattgtgcgttctttcatcgaggagttggtcagctacttgtcactcagcggtggcgtaaacgtctatgatgtggtgaaaagctacttggacaagttcttgattgagacgttgaatgatggttttctgaagctgatacatggtggatccctggaatttccacaggtggtgcagatcgcaggaaatatcgccgttctcgagcggtcctgcgacatgttcctttggcacgccgctcgactttgtggtgtccctaggtgcctcctcgagaagccccattctggattgagtgccagagctgtgctcaaagcctcccagaatgcagcatacaacggnatcggttacttttggtgaattccaagatcgacgagttcatgctgcagctgactagcatcaactggaccccggacgaagctccagagcacgcc

SEQ ID NO: 66667 - DNA, 380 bp, Zea mays
  Clone ID: MRT4577_16079C.1
cccacgcgtccgattttttgttcttacaaaggttcaaagggtaggttgaggtttggggagtctgaaaaaggatggctgcaatcttgtttataccgggggtgcagaaacaacgtgcagcctaattgcaattctcaaggcttccgactatagaatttatgtaaggtagaaagtaacgttggatgttctgttaaatacgaacaatcagaaaatgctgaatttagtctgaaaatagccagtgtgtttgttttagcttgcagattattacaatctacaagccaggggaaactagattattgggctgtaacaataagactttgacattgggactggttcccttttgaaaaaaaaaaaaatctaaaaattttatcttaaaaataaaa

SEQ ID NO: 66668 - DNA, 2143 bp, Zea mays
  Clone ID: MRT4577_1607C.1
gtgctgtgtgcaccgctcactataaatacaagagcgacgacgcaaccccgggacgcttcgcacttgcaatagttcgtcatctccaagtgcgtgcgccggccgccccctatcccgccggccctgtgtgtgttccccgctaccagccatggcgtcgccgttctccgtgccttcgctgatcatggaggaggaagggcggttcgaggcggaggtggcggaggtggagtcgtggtggggcacggagcggttccggctcaccaagcgcccctacaccgcccgcgacgtggtcctcctccggggcacgctccggcagagctacgcgtcgggggagatggccaagaagctgtggcgcacgctcaaggcgcaccaggccggcggcaccgcctcccgcaccttcggcgcgctcgaccccgtccaggtcaccatgatggccaagcacctggacaccatctacgtctccgggtggcagtgctcgtccacgcacacctccaccaacgagcccggcccggacctcgccgactacccctacgacaccgtgcccaacaaggtggagcacctcttcttcgcgcagatctaccacgaccgcaagcagcgggaggcgcgcatgtcgctgccccgcgccgagcgcgcgcgggcgccgtacgtcgacttcctcaagcccatcatcgccgacggcgacacggggcttcggcggcgccacggccaccgtcaagctctgcaagctcttcgtggagcgcggggcggccggggtccacctcgaggaccagtcctccgtcaccaagaagtgcggccacatggcgggcaaggtgctcgtcgccgtctccgagcacgtgaaccgcctcgtcgccgcgcggctccagttcgacgtcatgggcgtcgagaccgtcctcgtcgcgcgcaccgacgccgtcgccgccacgctcatccagaccaacgtcgacgcgcgcgaccaccagttcatagtcggcgccaccaacccgggcctcaggggccagagcctcgcggccgtgctgtcggccggcatgtcggcgggcaagagcggcagggagctccaggccatcgaggacgagtggctggccgcggcgcagctcaagaccttctccgagtgcgtcagggacgccatcgcgggcctcggcgtcgcgggccaggagaagcagcgcaggctccaggagtgggaccgcgccaccggcggctacgacaggtgcgtgtccaacgaccaggcgcgcgacatcgccgccagcctcggcgtcacgtccgtgttctgggactgggacctgccgcggaccagggaagggttctaccgcttcagggggtccgtggcggcggccgtggtccggggccgcgccttcgcgccgcacgccgacgtgctgtggatggagacgtccagccccaacgtggccgagtgcaccgccttcgccgagggcgtcaaggcggcgtgccccgaggcgatgctcgcctacaacctctcgccgtccttcaactgggacgcgtctgggatgacggacgccgagatggccgccttcatcccgagcgtcgcgcgcctcggctacgtctggcagttcatcacgctcgccgggttccacgccgacgcgctcgtcaccgacacgttcgcgcgggacttcgcacgccgcggcatgctggcctacgtggagaggatccagagggaggagaggatcaacggcgtggagacgctggagcatcagaagtggtcgggcgccaatttctacgacagggtgctcaaggctgtgcagggtggcatctcctcgactgcagccatgggcaaaggagttactgaagagcagttcaaggatccacggcccgcaactgggagcagtggcctgcaagttatggccaaatccaggatttgatgaagactcagaagaagaagaatgatttggagaaggctctaaataaattcgaaaaaaaaataagctgggttcagttcatcagcaatggggaagctgctttccaagttctaaactgaacataatcagcataaatgaatcaacgaatcgtctagctagctacgtacggatggagttctgagttgtgactccaaatgaaaacccaggttgggttgaaagtattggtgtcaatctgtgagattatttatcacttcagattgaatatatgatttggttttggt

SEQ ID NO: 66669 - DNA, 606 bp, Zea mays
  Clone ID: MRT4577_160800C.1
agttttcatataagggaggagtagctactgatctccagtgggcaccagcaatttgtaccaatgtaacaaaaagtccagaatatcagctatctcagtcatcagtgtgtgcctaatgccctaattctctacctatagcttcactcagcaatgatcatcatactcatgggcatcatgttttttttaactttagctctgcatgttgatctgaattctcatcagtggagatctccacctgagcaatatgttggcttgaactctcaccagtaccactgcagctatctctctgggcaatttgttgacctgaactctcagcagttgggcgctgtaccagtgcagtctgctgacaacatctctcatcaatagaaggaacaggaggaccatcgcgacggtgggggtagatgatgtcatagtgagcgtttgtgtagagcacggtcacacgggggactacatgaacatggggtagttgacgacgatgactagaccaacatgtacttgttggcgtatagtcttgcgaatcctcctgacgatcgtagaggtcttgaccatctcctacttgtaagaggtactccactcgcagcggcaccccaagagcggtgaccaatgctg

SEQ ID NO: 66670 - DNA, 393 bp, Zea mays
  Clone ID: MRT4577_160801C.1
cctcgaggccggccgggatcacacttcgagcagcaggcagcagtacgagcaaaaacacacctcctcccttcacctgtgatatgtacacttgctgcggcgcgaagagcatgagcggctccgctgctcctgcggacaatgcaacggtgcgcgtgtaccctgactcgaatgccgccgcctgcagcagcggctcgaccacggacctcggcgcgacgaccaccacgccatcgccggcgtcttcgaggcggccaccgacggctgcggatgcgactgcacacctgccactgcggaaccatttgcagctgttcctgctgcaactgcaactgaagcggtccgtatcgtacgatgacgctcgagagaccataggactaccacgaggaggcgtatcataatctc

SEQ ID NO: 66671 - DNA, 388 bp, Zea mays
  Clone ID: MRT4577_160802C.1
caaacaatcggggccacaacattttgatgccgggaataagaacgggtgattttcttgcacgtgtggatctaatccaatcaggacatccttctgtaacggtaccattgtaaccgatgtctcaaatacaccggtgttccaacacaaacccgccaaaacccaagtgtttgaagagggtctttaaaaccaaaacaacggcgggggaatatattttaaatccacccaggaccaaactgtagaagaattacatggcaactgcaggacttgatcttttggatttactgccccggacctgagacaaggtgctttatccccactgttagtggggcaggtccattgctattagggtccgaccccatgttctaattgccgcggatcttaaatatctctg

SEQ ID NO: 66672 - DNA, 382 bp, Zea mays
  Clone ID: MRT4577_160803C.1
gagaatattcagttaacaccattccagggctttttttccccgtgcataatctaacccagcatctaggataagcacaaaagtgaacgcttctataaaaacggatacccccaatacgtaaaatcttattgcccaggggtagaaaaagactgtttccacatcaaaaacaacaaaatctagcgcaaacgtgtaatagcgtattcggaattgaacccaaccccccccaggggttttatacccgattaataactaaaaagcttttttggcccttaattaaccggggttaaaagtcctgaattccaaattcccaaattaggaatagggttggtttttattaaaaaggtccaaaaaaatattatattcgagaagcaaaaacataagtgtc

SEQ ID NO: 66673 - DNA, 254 bp, Zea mays
  Clone ID: MRT4577_160804C.1
cactaagaaagctgtatgatgaagaaaaatgtgaattgctggatcaggtgcaagattgatcttttaaagctgacactctgagtaaagagaaaatttctgctcttgagcaggtagatgactggcccaataaattctcagaatggaagaagaaagcacagtcaagatttacacagcatcaaaacactggtaaagaattgcagatccagcttgagttaaaatcaaaggaagcttatgaaaaggatgagcagataaat

SEQ ID NO: 66674 - DNA, 289 bp, Zea mays
  Clone ID: MRT4577_160805C.1
ccaccaaattaaaccggcggcgcctgcacttgggttgtcgcctcatctgctcccgctgcaggatccggcggggaaggtaagggaagatgtacaccgcgagggagaagatccaggaggataagggccttgagccctccgggttcgaggactccgggggccatgctttcttcgacctggagaacggtacccaggagctgaagagcgacctcaaggaccttgtacatgagagggtgctgttcaggtgggatgttgcatgatagcatggaatgctgttgtcgatccacgttcc

SEQ ID NO: 66675 - DNA, 324 bp, Zea mays
  Clone ID: MRT4577_160806C.1
gagaggggcaaaatctggatcttttatagtggcaatagggaactcaccaccgataatgacgggctaacgcggaaggccacagcgaacctcaccaactggagataaacctctacatatccagctacactcacaggggtttctcaactcaattaccaacacatagattacggacgcgccacattccattacccatggtcgatctatcactataaaactcgagcgagcatagcacccaccgaactgacacatcgcatgcataatgagttcatccctatctaggagggcggccacaccgttctacaactaagaaacccaaaccaacta

SEQ ID NO: 66676 - DNA, 391 bp, Zea mays
  Clone ID: MRT4577_160807C.1
gtgggtgctggcttaatcctttttgttttcctggccgttgctttcgctagggagcttactgccaccatggctctggagtgaaagataatgtgaagtccgcactatagcctgggctcaagatgagactggttctgtggttgatccagcttggggaggttatcgtaaacaaccagccaggatacggtggcgggggaaacagacaacctggatcccgcgggcgacgaaacaagcgcccggataccgtggtaagataaaagcgccatcccctggtggtctggtaccgcctagacaaggaaggcctttatgtagatgtggaagagggtatggaggttgcaatggtcatactgtgtaccgaaaacacaataggggtggaaaaaacactgttggggga

SEQ ID NO: 66677 - DNA, 639 bp, Zea mays
  Clone ID: MRT4577_160808C.1
atgcaggaggcatgcaaccgcaccacggttgtgtaccctttcggcttcatcgcatccggcatggaggcccaggcccacacgtcatgtaaccggcgcgccagttactacgtgctagaaaccgcaccgccacttgcgccaatgccgtgtcttctcgaccgcgtaaccagtgccgcgactcgaggcagccccgcacgtgacccaacagtgccaattaagtgcaatgatcatgggtcagtcagccgcaggggttcgaaggctggccactcggaagggttcgacagccgccccagagcacacatagtgagggatgaccctgggtacgtccgttacatggccgaggctcgggctacgctcccgaggttgggcgatgtggaggctcctccgaggtcgaggtcgagtatgtcttccgaggccgaggtcgagtccgagcccctaggtcgggcgaggcggagaccgtcggctaaggccagggctgagtccgagccctggggtcgggcgaaacggagtttgtcgtcttccggggctgagcccgagtccgagccctgggtcgggcggagcggagttcgccatcttccggggctgagcccgagtccgagccctgggtcgggcggagcggagttcgccgtcttccggggctga

SEQ ID NO: 66678 - DNA, 110 bp, Zea mays
  Clone ID: MRT4577_160809C.1
gcccagctcttgtcatcagcgcctctcctacaccacgctcagcgacttagccctggcactgctctacggaactgtatttgagatcggacatgtgcttctggtgatccagc

SEQ ID NO: 66679 - DNA, 1882 bp, Zea mays
  Clone ID: MRT4577_16080C.1
attattagtttattaaaatgatgtttttatttttgaggttaaagattatgcattatttttgcagatttttcccatgtgaaaattcataggccgctaaaaaggtctcaacgcaggacggatccacaatctcaaaagggaaccagtcccaacgtcaaagtcttattgttacagcccaataatctagtttcccctggcttgtagattgtaataatctgcaagctaaaacaaacacactggctattttcagactaaattcagcattttctgattgttcgtatttaacagaacatccaacgttactttctaccttacataaattctatagtcggaagccttgagaattgcaattaggctgcacgttgtttctgcacccccggtataaacaagattgcagccatcctttttcagactccccaaaccacagcctactttttgaacctttgtaagaacaaaaaatggctcgagacgaatcttcctttcaatttgtactttatggtcaaacttcaaccctgctgactcatcagaatctcaatggcaacatttggatccccatcagctgcagcaagagcaacttcagcctgagtcttttcaaagcccattccaaccagcttcttaagttcttcatcaaatgtatcaacctgctcagctgtcactgttgcatcagctctgactgtgttcacagctgtatgctgtgtattcgttagtgggtcacttggagttgtgttatccaacaacctagcatgcaaatgcgcacttgcctcccttgcagtgggttcagttcctacagaaccaagtgttcgtgctctcccaggaaaccttgtgtcttctccttcctgagcagttgatatgtgtctgctaggcatccatgaagatatatttctcaagaaatttccacttatgagagcacttggtgcagcagacgtgttagagtatgtaggaagctgaccataagtagtgcctccagtacacataataaagccaggacgcctcacacaaacagataatgctgacaagccttcgattttagaataaaatgatggcccaggaagcaagtagttgaacagcccgtaagtgtctggcattgtacaaatttaagtttttttacataagatatgggtctccgatatcatctagtaaccagaagtgaataccatcaacacatgcaaaaaaaaagagtaccattttgcaggaacattgaagaggccgaagacacttcgtgattgcacaccactcagacttgtctcaatgacaatcattgagaatataaatccagcaaaagccaaggagctgcttccggacgccaaaggtaccccagcaatggaacattgcttgcgagaaactgaaatagcactagcaaaatccatgcgtacctggcattgtacaaatttaagtttttttacataagatatgggtctccgatatcatctagtaaccagaagtgaataccatcaacacatgcaaaaaaaaaagagtaccattttgcaggaacattgaagaggccgaagacacttgaaaatgtgatgctacagcagaaggcaagaagcatatctccacataggaatcatagccaatcaacaagcagagcagataaattactccacatatcaagataacaccagaagtaacgaacggaatgctgctccaccactgattcaacctagttggaatcccagcctctgtgataatgttggggcgcatctcgacacgccgctgccgcgagtaaccgaggagttcggatcgatgcttcggagcggaggcgagagggaagagcaccccaccacaccaccaaccgagatctcgagggttttggaggacccgggcaatcgagctgttcttttttcccggatgaagggtcccggcccgccgcctcgaggtcccaatg

SEQ ID NO: 66680 - DNA, 247 bp, Zea mays
  unsure (1)..(247): unsure at all n locations
  Clone ID: MRT4577_160810C.1
taaaattgagctacccctattanaaaccctacctantacatcactatccaatgattantctcaatgtaacttacatgtctaattcttcancttcttaaatggcattctcccggacatttcataatcgcagtatcagacgattataatctatgcatgtataattcccaccataatcccattcttaataccttttctccacatattaacacatagacatttttttattttactccacatagtaccatca

SEQ ID NO: 66681 - DNA, 516 bp, Zea mays
  Clone ID: MRT4577_160811C.1
ggtaccctcgggctggccggaaaaaaaacaccgcatcttacatctccccagcaattcctagcaggaagcctcccatcctcactcgctcgcatggcccgtacgaagcagaacggcgaggaagcccaccggaggccaagtgcgccgaggaagcaactggcgactaaggcggaccgcaagtctggccctgcgaccggcggcagggaagaagccccaccggtttcgccccgataccggcgcgctgcgggagatccacaagtaccactagagcacggagctggtgatccggaagttgccgcttcaacgcctggtgcgggagatcgcgcaggacttaaagaccgtcctacactaccagagctctgctgctttcgcgctggagcaggcggatgaaggctaccttgctgggctcttggaggacacgaaactatgcgccattcacgccaaggacaggaccatcatgcccaagggcatccatgttgtccgacgcattcgggtaaggagtgcctaagcggggccctc

SEQ ID NO: 66682 - DNA, 380 bp, Zea mays
  Clone ID: MRT4577_160812C.1
gactttatccgtctggatgagaccaatgctcctgatgccatgaagagaatctttgtgacaatggcatcgttcagccgtaccctcccatgtgcagacgtgagaggcagctccgtctcacactttgaccacacagtcgtagtgctgccacaacgggcgcaggggctggtgccacccgatctctactgtttgcggctggcagaggcttcttgtaccaggttgagggtatcgcacgccatccggttatggatcacactcgcctgactggcctgtccctccacagctcatgatgctagatcgagctttataataacgctgctgcagatcgtgggctgtccactctagcagaagtccgcgagctgggaacatggacattgttaggc

SEQ ID NO: 66683 - DNA, 375 bp, Zea mays
  unsure (1)..(375): unsure at all n locations
  Clone ID: MRT4577_160813C.1
cttggtgtttatttttttttttttttttttttttttttttttttttttttttnnggccgtaatgtagcaaggggctttttacaaaaaaaacccccaatgttgtaaaatccccgatgggtaaagcctgttctgttctgttctgttcttacccccttaaaaaaaaaggggaaagaattcttttgttttaaacttttaaaaaaaaaaatttttggccggctggctggcttcaatttttcaactcccaaaaaaatcgaaaggcccccctttttcaccgggaccatttttaccgccacggggaagggcattcccacaaaccccatggggaaccaggccccccattttccaaaccttaaaggggtcctttttgaaaaattt

SEQ ID NO: 66684 - DNA, 626 bp, Zea mays
  Clone ID: MRT4577_160814C.1
cccgaccggaatttccgggtcgacccacgcgtgcgtaataaaatcagtatataataaattcaatcgaaatcatgcttacaatttcatcaatcaacatgagtgaatacaactttatctagaatccacgtataattgaagcataaagaatccaacacaagtattaaacatcaaacatatttaaataccctataacttaaatacaaaagcaagtcgattcagctcaacggccaaatgcagagcacaactattacaacataaatataattagatcacctagacaataagtataaggaataaaaaaggtccaatgttgtgggatgtagcttcaaagtttccatttcttgcctaagtctatcttttttgcctcttagtctccagttgagattggagctcttgcacctttgctaaaaacagagcttgtcttggaggtgggctaaaggccaaccattgtgaaagaatttacttgagctcgacaagacatgggaaacgacttgtgtagaagactatgcaagttgtccatcttcaacagagcttgttttggaggcgggctaaaggccaacattgtgaaaaaattacttgagctcggcaatacatgggatatgacctgtgttgaagacttgcaagct

SEQ ID NO: 66685 - DNA, 313 bp, Zea mays
  Clone ID: MRT4577_160815C.1
cttcgcaaagcgccgacgtcttcccatccttcatggctccgaagaaggatggggtcccggccccgtcgtcgaagcccgtcaagtctctgctgtggcaagcagaagaagaagaagtggatcaagggaaagctaatggagaaggtgaacaactcggtgcttttcgaccaggcttcctactacaagctgctctttgaggtgcccaagtacaagcagatcacccttctccattctattctagcgtcctatgatcaatggctctctggctcgtagggctatcaaggaccttatggctcgtgttcttatcctgttggtc

SEQ ID NO: 66686 - DNA, 1121 bp, Zea mays
  Clone ID: MRT4577_160816C.1
ctctcttcgaccttaccaagtccgccacctacgccaacatctcctgttcctcgtcctactgctccgacctctacgtcagcggctgctccggcggtcactgcctgtacggcatccagtacggcgacggctcctacaccatcggcttctacgcccaagacaccctcaccctggcctacgacaccatcaagaatttccggttcgggtgcggcgagaagaaccgtgggctgttcgggagggcggcggggctgctgggcctcggccgcggcaagacgtcgctgccggtgcaggcgtacgacaagtacggcggcgtgttcgcgtactgcctcccggcgacgtcggccgggacggggttcctggacctggggccgggcgcgccggcggcgaacgcgcgcctgacgccgatgctggtggacaggggcccgacgttctactacgtggggatgacgggcatcaaggtgggcgggcacgtgctgcccatcccgggctccgtcttctccaccgccggcacgctggtggactccggcacggtgatcacgcggctcccgccgtcggcgtacgcgccgctgcggtcggcgttcgccaaggcgatgcagggcctggggtacagcgcggccccggcgttctcgatcctcgacacctgctacgacctgacggggaacaagggggggagcatcgcgctgcccgcggtgtcgctggtgttccagggcggcgcgtgcctggacgtggacgcgtcggggatcctgtacgtggcggacgtgtcgcaggcgtgcctggcgttcgcgcccaacgctgacgacaccgacgtggccatcgtcgggaacacgcagcagaagacgcacggcgtgctgtacgacattggcaagaagatcgtcgggttcgccccgggagcttgctgatccggccatggtttgtgaaaaactccagatcatctgcatccaccaaagtggtcagtgtttcacaaatgcagactgaagattcgtacttcgtgtctgtaagatggtacactttgtttgaaaaagaagaacgggataagtttaaaccacctcttaaaaaatttttacaacatcttatacctccttagttcttttttatttattaacatttagttaaaaatacaatac

SEQ ID NO: 66687 - DNA, 287 bp, Zea mays
  Clone ID: MRT4577_160817C.1
tttattttttttttttttaattttaaaacgggggaaatttaaaaaaaataagggggggtaccaacacaaattcatatattgcatttaacagctggtgagaaactttgaaataaacgccctttttatgacaaaaaaaaaaaaacacgacccggcaacggtctaagtgggaccacaaaaaggggatgaaactcctacatacccatgagaggcttaatacaaaacgaaaaaagaacacgggaaaattatactaccaaaagaggactatatttcgggggccctaaaactcc

SEQ ID NO: 66688 - DNA, 354 bp, Zea mays
  Clone ID: MRT4577_160818C.1
gctgctccggcggtcactgcctgtacggcatccagtacggcgacggctcctacaccatgggcttctacgcccaagacaccctcaccctggcctacgacaccatcaaggtacgtacctaccgtacgtggccgatgggcgcctctagccctcgcctagctagggcgcggcatgacttcgccatgacatctcatgacgcgcgcgcgcgtgcactgtgcatgcagaatttccggttcgggtgcggcgagaagaaccgtgggctgttcgggagggcggcggggctgctgggcctcggccgcggcaagacgtcgctgccggtgcaagcgtacgacaagtacggcggcgtgttcgcgtact

SEQ ID NO: 66689 - DNA, 328 bp, Zea mays
  Clone ID: MRT4577_160819C.1
gaccacgcgtccggtagtcgaagctcaagcatcagcggcaggagctctgggcatcttgcgctcgagggagtacctagctcgctctgctagcctaccaaggctgatcaccaccggggtgcgacgggtggaggcggtggctacggcgacctccagcgcgggggcggcatcacggcgaggcgcagcagcaacataaatcaaggcgccaagatgacagggctcaaagccgcgacggccgcgaccttcggcgggtcgatgctggtgccagccgggctgatcctggccggcaccgggatcgcgctcacggaggccacccccgtgctggagatct

SEQ ID NO: 66690 - DNA, 1960 bp, Zea mays
  Clone ID: MRT4577_16081C.1
attgggtacctcgaggccggccggggaaatatttctagctctagccgggcttgaaggagccatgaatgctcgtcagctcgtgagacgtgacgccgtgtcctgaaaaaaaaaagacccgtcccggcgacccccacacccttcaatccgggaaaaaaagcaacagctcgattgcccgggtcctccaaaaccctcgagatctcggttggtggtgtggtggggtgctcttccctctcgcctccgctccgaagcatcgatccgaactcctcggttactcgcggcagcggcgtgtcgagatgcgccccaacattatcacagaggctgggattccaactaggttgaatcagtggtggagcagcattccgttcgttacttctggtgttatcttgatatgtggagtaatttatctgctctgcttgttgattggctatgattcctatgtggagatatgcttcttgccttctgctgtagcatcacattttcaagtatacaggttctacacatctgttctctttcatggttctttgcttcatgtgctattcaacatgcttgccttggtacccttgggcactgagttggagagaatcatgggatcagtccgtctcttattcttgatgctccttcttgcaacaacaaatgcaattctccatctcacaattgctttcttggtggcttacaatcctctgtatcacgttccaaatcttgtgaatgaatgctccattggcttttctggagttatattctcaatgattgtcattgagacaagtctgagtggtgtgcaatcacgaagtgtcttcggcctcttcaatgttcctgcaaaatggtacgcatggattttgctagtgctatttcagtttctcgcaagcaatgtttcattgctgggacacctttgtggcatcttgtcaggatttgcatacacttacgggctgttcaactacttgcttcctgggccatcattttattctaaaatcgaaggcttgtcagcattatctgtttgtgtgaggcgtcctggctttattatgtgtactggaggcactacttatggtcagcttcctacatactctaacacgtctgctgcaccaagtgctctcataaatggaaatttcttgagaaatatatcttcatggatgcctagcagacacatatcaactgctcaggaaggagaagacacaaggtttcctgggagagcacgaacacttggttctgtaggaactgaacccactgcaagggaggcaagtgcgcatttgcatgctaggttgttggataacacaactccaagtgacccactaacgaatacacagcatacagctgtgaacacagtcagagctgatgcaacagtgacagctgagcaggttgatacatttgatgaagaacttaagaagctggttggaatgggatttgaaaagactcaggctgaagttgctcttgctgcagctgatggggatccaaatgttgccattgagattctgatgagtcagcagggttgaagtttgaccataaagtacaaattgaaaggaagcacggtatcgagccattttttgttcttacaaaggttcaaaaagtaggctgtggtttggggagtctgaaaaaggatggctgcaatcttgtttataccgggggtgcagaaacaacgtgcagcctaattgcaattctcaattcttccgactatagaatttatgtaaggtagaaagtaacgttggatgttctgttaaatacgaacaatcagaaaatgctgaatttagtctgaaaatagccagtgtgtttgttgggctgtaaacaagattgagacctttgactagattattgggctgtaacaataagactttgacgttgggactggtgtggatccgtcctgcgttgagacttttttagcggcctatgaattttcacatgggaaaaatctgcaaaaataatgcataagctttaacctcaaaaaaaaaaaaaaaaaaagcggccccccccc

SEQ ID NO: 66691 - DNA, 385 bp, Zea mays
  Clone ID: MRT4577_160820C.1
cccacgcgttcggactggcgagccaaaggtattgatattatatacgacaagacctataatggcgattatgagctagataacggggaggaaaacatgagatttactgaagaaacacgtcaataatatgtagacctagcttctgcagatatactgaccacagcaattaggtcgtaaatgaacgtatcgattgaaggctcgacagagttagtcgcaccggatctaacatcactgtaatatgataaagaccttgaactgctgatcagtgatctgactgtaattgacttggatgatctgaaggtcaacacagtgtatatagcatattcagatgaatcttcggtgatacagacgttattgaaaattgttagatcgtccagtacgtaggaca

SEQ ID NO: 66692 - DNA, 454 bp, Zea mays
  Clone ID: MRT4577_160821C.1
gcagagtggaaaaaccatagtttggtcctagggaacaaaacaggatggaaggactgaacccacctgggttctggtactggggtcgaaatgaagcagaagggctctcccagtcctgaggggggggggtgggcccaggcttattgccgccatcaagtccatgtttccttgcgccagagggggggaagggaccataaacaaagccattttgtttaccctgccccagccgactacgcacaggtaattggcaattcgtcaagacatcaccactactctggacaagtttggctttcttcttatttttggaatctagattacttctatgcatgtcaaggttagggagtttttttcgaaaggctcttttctttgaggccatcttccctggggggggcacagcaactgggacaccattttctgtgttcaggggtgccctacccaaccaacgaaacggaggctt

SEQ ID NO: 66693 - DNA, 436 bp, Zea mays
  Clone ID: MRT4577_160822C.1
ctgtaccattactggggtggctggatcccctgctcgggcgccatctagacgtcgcgggcactactcagggagtatgcaaggcagctcaaagatggacctatcagaaataactgctctggacctagtgcaaacaaatcaaaaggattataggctaacacctacgaacgtgtactccttgcacccccatggtgagatcttgatttgtgaccgatggtctgtgctgttgagacccactgttaggacaggaaactctctagtcgctggaaaaacattatatgcatcacaagacaatgttgcgatcaatctgacaagctatttcgtcccaggggggtgggtgtgtaatcaacctgtaactttaactcctagggtagaatgaagctcttcgtgttataacccatggatacctacaaattattttgactcttaacacaattcc

SEQ ID NO: 66694 - DNA, 236 bp, Zea mays
  Clone ID: MRT4577_160823C.1
gcacgagcaagagaggagctgcatgcacggaaaatgggcgcaaatgtgggagatttgtgtgcgaaggagaccaactggatccgcgcacccacaggctccacaaggccataacccacctctccatacgccaattgacagggcatggaaacggaagagggtgcacacctggttcttggcattgcgccactagaatcttgccactctgcctcttctgttccatcaattaatgcctcttt

SEQ ID NO: 66695 - DNA, 532 bp, Zea mays
  unsure (1)..(532): unsure at all n locations
  Clone ID: MRT4577_160824C.1
gccgccgtgtgctggattcgcccttaagcagtggtaacaacgcagaggactnnnttttttttttttttttttttttttttggtggtttttttttttttttttttttttttttgtttaagtgttgttttttatttgttatttttgttgtttgtttttaaaaaaaaaaatagggggtgtgggagtacagggaggatattggaggagttgttggtgagtaggatagagattgttagaggtagggagggatttaggggggggggggggnaaaggattattttatagagagaatttggtttttgttaggaatagggaatagtgnngattgttngatantttaagaaaaaattgagggttgtaaattttggtttaaattgggnagttaattgaagngttgtagtttgggnatttggttagnaagtagttaaagaatgggattagtattgttgtatttgtagaagtattatnttattggtaggtggtgagtgaaggtgagtttttggttagggttaaatagttgttggtttttagaaaa

SEQ ID NO: 66696 - DNA, 290 bp, Zea mays
  Clone ID: MRT4577_160825C.1
accgcgcgtgcgatagggctagatcgctagcggacagcattggcattggggttgaggaagaaacacagggtgtatgtatatccaaggcgaaaacataacaattcaagtgcaacaaaaaacaaagattgggtaaacaccagacactatcctataactggaacacgcgaagagctacagaatgtgttgtgcaaaaactctactaaaggagaaacgctgtggctgtttgacagcggataccacggtcaaaaaaatggtgagactgacgtataatgtttaggatcatataaact

SEQ ID NO: 66697 - DNA, 472 bp, Zea mays
  Clone ID: MRT4577_160826C.1
cacggacattggacgagagttgcgcaatccataaccaagtgtgcttggaaggtcaatcttagggaatgtgtgttttcctcctagattatataaactggattatagtgaaaataagctaaaataagctagcattgggtaatttatttcagttgcatgcgagttgcaatcttagggtacgagggtacaatatcactttggaaggctaaaataggttatcataatccaacttatataatttagaagaaacaaacagggctgtagtccgtagtattatcctctgtctgtgccagcaacatgtgaaatgtaaagttgcatgccaattcaatgtagatgtattgctttgcgttttttctctctacagctacaggctacagaaacaagcgagagaacgttacaatttatttttacggatgtaaaacattttggattgtgacatgacataacttactggctacaatattactttctagat

SEQ ID NO: 66698 - DNA, 638 bp, Zea mays
  Clone ID: MRT4577_160827C.1
acgcagctgcgtggtgcgcacaaagcgaactattctttcgccttttactaaagaataccgtgtgtgcgccatacaaagcagcatacgcttatttttggagggtgttttctctttttgagaaggccccaacaatgccaacttgaaattttaaatgaaaattttaatctgttgtttaaaagattatttccagatacaatagtccattaaaagattatttggctagtataaaaaaacaactatcaacgtgccattgtcttcacatattttgtttggcttgaaccatggcaggcaggctgttctcctgtgattctactcgccgtcgaagggcacagacggcagctacgacgctggcaaagccctagcacatatgtggcctcaaaattgataacgtcgctgggtagggcctaggtgggcttttgtggagaggcgcgcggaactggaggcctttgtaccctgttgccttgatggcttgttacagtttagctccaccagttcgccgctagttgaagcgaaaaaggtttgaaacgaaacatgagcgtggtgagtacaaagcgaactatttttttcttttaggggtagtttaagagccataaaatcggaagagattgaatgtgtcaaaaaaaccattgaattcctcc

SEQ ID NO: 66699 - DNA, 464 bp, Zea mays
  Clone ID: MRT4577_160828C.1
ggacatcggactaaaatctgcgcaatccataaccatttatacttggaagggcaatcttagggtatgtttgttttcctcctagattatataagttggattataataaaaataagctaaaataagttcgcattgggtaacttatttcagttgcatgccagttgcaatcttagggtacgagggtacaatattactttggaaggctaaaataagttatcataattcaacttatataatctagaagaaacaaacaggccgtagtccgtagtattatcctgtctgtgccagcaacatgtgaaatgtaaagttgcatgccagttcaatgtagatgttagatgtacatatacgaggtctgtttgccttgcgttttttctctctacaggccacagaaacaagcgagagaacgttacaatttatttttacgggtgtaaaacattttggattgtgacatgacataacttactgtc

SEQ ID NO: 66700 - DNA, 150 bp, Zea mays
  Clone ID: MRT4577_160829C.1
cttctttttttttggccgtccatgggttcccgcgtttaaaacaaaagtcttttcggacccgtagtttgaaaccggctcgcttgccctcttgggaaagtcacgagttccgggctaaatccccaactcaaatagagtctgtttgccgttgat

SEQ ID NO: 66701 - DNA, 582 bp, Zea mays
  Clone ID: MRT4577_16082C.1
ccgcaagaaccctcatgaagctgatgacatcgacttctacctacatgcctcatgctaccctgatagcacgccgactttccctaccgatgcccttactaccattacatgcccatactgcatacctgcaaggcaaaagctgatgatgccctttgtttcctatgccacgtacccaatgtgcaagatcatgccgccttcgaaaatcgacacctcgaagaacagtgaacacgtgccctcctgctgcataataacttccatgggcgcctggtcgtgctcacatcatgggaattagacacaactgaagaccacccaccccccctacttgaccattcattgactggatataactgatagcttcatactttagagctaactgaggcgccagtaagccgctgatatctgccgttcgtggtcctatgatagacgcaactgagaccccttcaaagtgtgtacgtattttcactgtaattctttatgcgaagaaaacaaaaatgtttgctgtagttcttaacaccatacatgtcgcatacccaattattctatatatatgacgagtaccttatatttaaaaaaaaaaggccccta

SEQ ID NO: 66702 - DNA, 695 bp, Zea mays
  unsure (1)..(695): unsure at all n locations
  Clone ID: MRT4577_160830C.1
gacaaaattaataactggagggagacagctcttatattgacatccatccttttcgctgcagttgtgttctggttcattggcatatttgtccccagcgtcgaccgtttcaacgaagagagcgaatatggccttactgccgctgagagatcaagtatcaggccactgcttggtgaaaacgagccacggacatctgactaaaatctgcgcaatccataaccatttattacttggaagggcaattttaggatatgtttgttttcctcctagattatatgagctggattatagtgaaaataagctaaaataagctcgcattgggtaacttatttcagttgcatgccagttgcaatcttagggtacgaggttacaatatcactttggaaggctaaaataagttatcataatccaacttatgtaatctagaagaaacaaacagggccgtagtccgtagtattatcctctgtctgtgccagcaacatgtgaaatgtaaagttgtatgcccaacatgtgaaatgtaaagttgcatgccagttcaatgtagatgtacatatacgaggtctgtttgccttgcgttttttatctctacaggctacagaaacaagcgagagaacgttacaatttatttttacggatgtaaaacattttggattgtgacatgatataacttactggctacaatattactccctanaaaa

SEQ ID NO: 66703 - DNA, 480 bp, Zea mays
  Clone ID: MRT4577_160831C.1
cttatgggggccgttacaccgacgagaccctgtggctctggggcccgagaaggaagacggtgtgcttatgagctgcgaagacaaggaccacctgctgctcctggtgccgcccgaacgccagcaggttcctcggcctatccatattctgaagcgttctgttcgagcgcgagaggaacaccttatcgacgacgctggcgatgacttccaagcagaggacggcgaggttcatgacttctgcggcgaacagcgcggtcggaagaccggacgggatcacgatgacggatccctctatgatgcggaatgtaacatgtctgtcgatcctagccttctgcccaccggcaccgacttgatcctcttgccgctactcctattactctcaggcgggcccgcactcacggcacgttgaccaccggcacgaggagacgtgcggacacgacatctgcaagcatccctgtgccttgaagacgatagctatcttgc

SEQ ID NO: 66704 - DNA, 523 bp, Zea mays
  Clone ID: MRT4577_160832C.1
ggtatgttcgccgccgaagagctatagtttctcacaatggaggcggcaatgcgagacatggactcagggcgtcaggtactgagcgccaacttgaccgagtatcagctagccatagctgtctccttattggtccacgagaccgtgttgtttgtattgggactgcccttactcatcttacagcgattagaactcttagacaagatacaagactcataagaggaccaacacctttgattaccaaaacagatgtgagtggagcctgattatgtaccatgtatgtgggaacctggcgtgaatgatactgtcgcatcctgcctttaaaatcatggggacaaagagctgttttcctttggcagattgctcgggaggtggatgtcaagcgcttgtttactttcgtccttgaggacaatatattgtattggaagcacagggcattgcatacgaaatggctatacaaacacgactacatcgagcaccactagtacgccacaccctgtgcattaacatcggaagatgcgcaccc

SEQ ID NO: 66705 - DNA, 125 bp, Zea mays
  Clone ID: MRT4577_160833C.1
taacacgtgagctacaagtacttccccgtctatgtctaggactctcatgtttatcacagtgttgaagataacagcgacgtcgaggacgcgctatatcatgcgggtattgatatgatgtggatgct

SEQ ID NO: 66706 - DNA, 731 bp, Zea mays
  Clone ID: MRT4577_160834C.1
tcccccccctcctcccctcccccgccgccgctcccagatcccgccgccatgtcgacggagaagaagcagctgaaccccatgcgggatatcaaggtgcagaagctcgtcctcaacatctccgtcggtgagagcggagatcgcctcacccgcgcctccaaggtgctggagcagctgagcggacagtcaccagtgttctccaaggctaggtacactgtcaggtcgttcggtatcaggcgtaatgagaagattgcgtgctacgtgactatcaggggtgagaaggcgatgcagctgctggagagtggcctgaaggtgaaggagtacgagctgctcaggaggaacttcagcgacaccggctgctttggcttcggtatccaggagcacatcgatctcggcatgaagtatgatccatctaccggcatctacggtatggacttctttgtggtgctcgagcgtgctgggtaccgcgtctcccgccgccgcaggtgcaaggcccgcgtcggtatccaccagagggtcaccaaggaggacgccatgaagtggttccaggtcaagtacgagggtgtcatcctcaacaagtcccatgcgagctaagaaggatgtagctctcgttagaccttgagttaattaagttcacctggttgctggatatgtatgttacctagaaaccaaatcctttgtcagttttgcctgtactcaagctggatgatttctgtttgatctgcactttcgtc

SEQ ID NO: 66707 - DNA, 296 bp, Zea mays
  Clone ID: MRT4577_160835C.1
actccggcctcctgcctcctacagattttgtttggtagccgccagctgcctggcagctagaatcacatcatacctggccgagatatgagggagatcctccacatccatggagagcaacgagccaaccagatttgcacccaccttctgtgagactcgtgagcgaggaacatgcgactcgacctaccgggctgctcactggagataccgagcttcatagggagcgctgcaatgtctactacaatgaggccatgcttgggacgattcgttccctgcgctgatctcatggatcctagagc

SEQ ID NO: 66708 - DNA, 372 bp, Zea mays
  Clone ID: MRT4577_160836C.1
attcggctcgagcggtggtcgaggttgtttagccccggatctacgtggtagttcaaggacttcttcctcggcatgttgggctgaggcgtgttgctcgtaggcatctagggcgccgtagtggctgtgtttaacttggaggcccacaagcggggctgagttgaatcaactacacggggcacagctatgcatcgcgggcggggcaatggtagcactgtgacatgactgagaactgccgtggtgcttcagtagtggactactgtgccagtgtgaacagcgatgaatctgtgaatatattggcgggtaaatgcgaatttcagatacatgtgcagtcttacaaaaaaatatgaagggcggtcgcctactggtgagctg

SEQ ID NO: 66709 - DNA, 293 bp, Zea mays
  Clone ID: MRT4577_160837C.1
tccttcttgtcccacgggacaagaggagaatgaaggtaacagacacatccttggccaacagctgttaaccgaggaaagctcggccatatggccgagacgcgcacggaagttcttccgcgcgccgcgcgtgatgcgcgcatcacgcgctcttttctcggttaaccgcgagccatgcgcggcctgaggccgcgtgtctcgcggcagcttgttggccaagagatgtgttggaagtttcttgactggcggttgaactcatagaatgattcgcggttacacggtcaacctttccacgc

SEQ ID NO: 66710 - DNA, 694 bp, Zea mays
  Clone ID: MRT4577_160838C.1
cctcgagccggccggggtatcgcgtcgtcctcgccgccgccctacgccccaacagccttggaggctagggttcccaaccaacgcacctccatcctccacctacctagatctcctcctccacttgaagcgttcgtgccggcgtgtggaaggacgccacgaaggcgactcggggggacggcggcctgtgcggatcggcacagtcttcccaatcgcgacaaccggctcagaggttcggttcgagcagagatcgccgaagcggagacatagagtcgaagcggcccaaatcgccgccgggaggattcatcttggtggaggatggactcaggattcgtcagggccagaggaggacgccagcaccagatccaataagacctaactcagaggaagcagcaatcaagcgcagccgtaagatcgacaacgacgaggacgactccatgtctttgcctactcccccgccggacgtgggtgccggcgtgctgtgggtggaggtgctacaggagagcctggggtccgctgtcgacctgagctccgcccaggttgccgctaccactgataatcggcctccagcccattgctttacttttggcgacgagtcgacgactgggcaactgccgccgcccaaggtcaggtgctcgggtatccggcgaccccttcgctaggccattccccgttgacagcaagcatcagaacatgc

SEQ ID NO: 66711 - DNA, 257 bp, Zea mays
  Clone ID: MRT4577_160839C.1
aataaaaaaaaaaggataaggtgagttcccatacattcataataaataacccttttttaatgctaacctaaattcaaaaaaaaaaatatgtcgtaggggtgtacattttacaggtttacggactcctttctcctgcattcaaagttttttttttttctatcgcgtaacctaaattactatccttggctttacattttcaacactgtgaatgcaaataccttaccactctcaattgttattgggtcgcaccctatttc

SEQ ID NO: 66712 - DNA, 441 bp, Zea mays
  Clone ID: MRT4577_16083C.1
aaacccccaataatttctggaaaaatgtttttgggggttaaggtttcttcaattcaggtcacaattgcctgtccaaaaaataaagctcctcaatccttatgggaacccaaaaccaaaccaaccgcaaaattttggggggtttggggcatatttaacctggttcgggtaccggttggttggtactttaacagcgcacaaagcccatgaagctaaaacttgggggtttttaccagtttttcctttttccaaaccatttttttaccgggaaaaacaaaacaacttttggaaaaagcccaaacaactttttgcaccctgggaaatgaacaccgggggcaattagtattgattaaaagtttacttttaagcaccgggttttgttttttttgccaatgggaattaaaacggacaggttttgaacttcataaacaggaaggtggcatc

SEQ ID NO: 66713 - DNA, 339 bp, Zea mays
  unsure (1)..(339): unsure at all n locations
  Clone ID: MRT4577_160840C.1
tcgcccaggtggatacatacatagataatagaaaggcgacgattaccgcacatcttgaggggggcgtggattcgggggagattgggcttggagaggagcacccacttgccctctacgcatagctgccggatctccgcctcggacaggtgcacctggcgcccgcctcggccgtcctccacgaggcggcgcaccatctcgttcaccgtcgcgccctccatcggtcccatatgtgcccgcgtcatcatcatcttcccgccccgcntccttnctgcccagaaacagccgcggcgtgtggcgcatgacgagagatatagagagagagagagagggagagaggag

SEQ ID NO: 66714 - DNA, 434 bp, Zea mays
  unsure (1)..(434): unsure at all n locations
  Clone ID: MRT4577_160841C.1
gaactattctgacacactgtctacccagtgcactgaggcaggctcactctggcaggcgtctggtccttgcaccgtaatcacagcggggccggctgacttcgcgtcaccggtctcccctaccggccctgcgcctcctcacgcgcccatggacggtcggggtccgactgtgctcacctcgcctacggacggagcggccacgcgcgcttaccctttgctgggtgcacgtgcgtgcgggctcgccatgactggtgctctgcttttggctgtgctggccgcctgcacaccttgcgtgttcctgntggcgctgtctgggcgtccgttgttcccgtgntgcgctccgcccgctccttcggctcggtgcgcccggtctccctggtgctccccgccctgcggcttgttgccgcgtgcctcgggcgggctgttcccccgctgct

SEQ ID NO: 66715 - DNA, 883 bp, Zea mays
  unsure (1)..(883): unsure at all n locations
  Clone ID: MRT4577_160842C.1
cattgggtacctcgaggccggccggggctacttactccctttcttcggctgacgtttgcagccttgcagaacccgtcctgatattaccgcgtgnattcatttggtacgcaacccattttagtatccgtagtagaaacgcggcggtatttatagtctgagtttttgagcccccggattgtacgacctgtttgagttgtagcatccccccacctctcccccgagcaacctccgcaatcacgcccgcgcgcgcccatcatgactcccgcccaagacattgctggcagcattagccaaatctcacgcagcgtatccaacagcctcaacatcagtaccagcccaaccctctcgttccacagcccaccctcgacattcaggcaaccaccgtctgccaactctagagatggtcggaccccgaacctacccggcacgtcgcatgcacagcagctggctaaacagctgaagccgtttgacaccaaggacatcaaggtccttctcttggaaaatgtcaacgaggctggtgtggatatcttgaggggccagggctaccaggtcgaggcgatcaaggccagtgtgggagaggatgagttgattgagaagattcgcgatatccatgtgattggaattcggtccaagacgaagctcaccaagaaggtactcgaggcagcaaagaacctcattgtcatcggctgcttctgcatcggaaccaaccaggtcgacctccagactgctgccagcaagggtatcgccgtcttcaactcgccgtttagcaactcgcgctcggttgccgagttggtcatctcagaaatcattgcgctcgctcgncagctcactgaccgctccatggagctcacaacggtacttgggataaggtcagcaagggatg

SEQ ID NO: 66716 - DNA, 442 bp, Zea mays
  Clone ID: MRT4577_160843C.1
cctcattaccagttgaggcatttttaatcttgtgttggttctagacaattttgttgatcttggatattgtgcaagtgcattatcgacctgcatagttaactccactgacgagcaagattccgatccatcaaggctgaggcggcgacaaagagggaacaaacccccggggggagttgaaggaaaccaacccattggtgaaaaaaattctatggagagaacaaaagaggggggccagacaacggggggggaggcctgaagatgcccaaaaagatgggggtcctttgtttagccccccccaaacctttggggacaaaaaaatttccccccaaggggggaaaaccctggggggggggagggcccctgaaaaaacaaaaaaaaaaaaaggggttttctcccccccaaacttaaaaaaaccccaaacgggagggggggggaaaaactt

SEQ ID NO: 66717 - DNA, 473 bp, Zea mays
  unsure (1)..(473): unsure at all n locations
  Clone ID: MRT4577_160844C.1
catgagtcaaagcaaagccgtggnaaaagaaagataggatgttgggtacatcggtcccttggtctcatacaggtgtgaacaagtcggttgttatcatgcccaacccaaagaagccagaagtctttctaaaatacgctcaagaacccgtgtttttgaggcaacatcagccgttctatcacttttgaatgtcattgcccagaaatccttgccttggaaagacgatttgctttagtgaactgacacattgataggtagtggaatccgggcttgggatcagtggtagaatccggacttgggattgggatcagtggtagaatctgttgttatctagcgaggaatgaaagcactcgtttgttccggttcggatccgattctggttcataggttggtaagcctcccgcatacgcgacttgtgatttcacctcatcagaacaaaattcatagggtagggtttcgagatccccaacgaanaa

SEQ ID NO: 66718 - DNA, 355 bp, Zea mays
  Clone ID: MRT4577_160845C.1
tctcacgcgtccgaacgccgcccgccaccgcaacgagctcggcgcctcctcctgcatgtttaccgcccccgacgtcccgccgctcatcgacccctcctgcggtcctgcccacgtcttcccgctcgcgctcaagtccaccaccgcgctccgtgcccagcgccgccgccgcttccacgcgctcgccgccaagtgtggcctcctctccagccccttcctcgtgtcccttctcatcgcgtcctacggcacacacggcggcggcagtggcggagccttctacgaactcacccgccgcatgttcgacgaattgcccgcccgcacgccgtcgtttgggccttggggcgccatggtctcaggt

SEQ ID NO: 66719 - DNA, 414 bp, Zea mays
  unsure (1)..(414): unsure at all n locations
  Clone ID: MRT4577_160846C.1
acccacgcgtccgcccacgcgtccggcgacatgacggcgctgtcgggcgcgcacaccgtcgggcaggcccggtgcgccacgttccgcgaccgcatctacaacgacgccaacatcaacgccaccttcgcgtcgctccggcagcagacctgcccgcaggccggcggcgacgcccgctggcccccatcgacgtccagacccccgaggcgttcgacaacgcctactacaagaacctgatggccaggcaagggctgttccactcggaccaggagtctttcaacggcggctcgcaggacgcgctggtgaagaagtacagcggcaaagctgcccatgtttcgncgncgactttgccaaaggcgattgttaaggattggcgccaatcagcccggttcacggcgaagcaagggaaaagtcaag

SEQ ID NO: 66720 - DNA, 236 bp, Zea mays
  Clone ID: MRT4577_160847C.1
tttttttttttttttttatttttttttttttttggttgggttttattttttttgttttgaaaacaaccaaacaattacatttacaatgaaccacattgcctttcaaaacttaaggttcagctgttgatgatttgatcaaatttacaacattttttcgttcaaggggtacaatttgaatgaatctgtttctcaaagtgcgattttcagaggaaggggattactgctcctattttagg

SEQ ID NO: 66721 - DNA, 416 bp, Zea mays
  Clone ID: MRT4577_160848C.1
ggtgaaccgaggattgggggaggtcgatttgctcagaagagctaacaaaatgcggccggtatcgccgtatgaggacaggcgactggtgggggcacttatactctgatctccaatgatgacatcacccacctcttgtgtgtgcggggggggcggacttctgcttacattatacccagaaaaagtgcctcggcgagcacttcttcttgttgccagattgacgggagccgagctcctgttagtgtggccagcgaccaccatgctatgcacaacgggtgcagaccactgacgaccagaactgcgctctacacaccttgtgcctagtatgggatctgccggcaccgctaaaagcagcacgttcttcacgaatttgatgagagggagaggagctgccaatcacacctggcctagctattgga

SEQ ID NO: 66722 - DNA, 483 bp, Zea mays
  Clone ID: MRT4577_160849C.1
ccggccgggccggagaaacaaaaaaaagggaaaggagtgcaagaatggcgtggacttaagaaaagcaccagtggcatcgagcgcatcgcgcactcgtgctcgggctcggctccgtccgcgactccgccccacccctttccgtcagcggccgcaaccaccacaccaccacccaatggaggccggggaaatcggcggggcccttgtcttcatcctcgccgccgccgccgccgtcgcggccgccgtgtccgtcggcgcggtcgacttcagccgcccgctcaccggtacacgcattcgatgctcccatccgtcatatttctctctcccccacccctctcgctcggacggccgttttacagcgcacgtgatttgacctgccctgcgcggctgcgcccgccgcccgctggttttgtcctgcttcgttccgcagctggggtgccgttcgacttcccaggctgcagccgatctggctcatgctatcctata

SEQ ID NO: 66723 - DNA, 267 bp, Zea mays
  Clone ID: MRT4577_16084C.1
gaacgaaggttggctgtcttactcgtcgttaaatgtaggctgatgtacaagtcgtggctatggtagccatctcgtcgtgctcggtcgtcgctatttacgatggccctagttgtagcgagtcgtactcagagaatgcctgatcgcagtatagacttcaaggcatctaacgggtactgtcgtacacgttcttgtggtgcgtctgtatagggagtgtctgtctaatagtctcgtgtacctacgtagacgaatggtacgctattcgtaatc

SEQ ID NO: 66724 - DNA, 276 bp, Zea mays
  Clone ID: MRT4577_160850C.1
caaatgcaatactaacttggggtcacggcgtttctgaggtgggcaaaaattattttcttactacacatagaactgcagctcatacacgacctttattgggttcatagagaaaacaatgtacctttaaccttataagcttaccatggtaaaaacgggatatcaaaagtgcccaaaccgagaatgtttcgcctcgctaaggtctatgttctaacctaataaataaggcgccccttaagctgcatctataactcccagcaagagtctcacattttgggg

SEQ ID NO: 66725 - DNA, 692 bp, Zea mays
  Clone ID: MRT4577_160851C.1
acctttcgcatacccacagtctctcaccgcatctccggcgaccaccgaccacccccggccaccgctactccttccctctcctgtgatggcgcctcgcgccggcggtcagacctacggcttcccgatctactgcgcctcctggctcccactcgcacacatcatcaagccctccccatccgccgacgacgtcgtggatgcggacgcgtccccggccccgtcctccccacctccgccccccatggtggttcttggtggaggcggaggcgagggccggagcggcgtgcccaacgcgctggtcgtcgccgccctcgaccccgccgctgcaggggcgcctccagcgctctcccccgagcccgtgtttaggctggggacagaggagcaggtaccatacaggatggccgtacacccccgcggcgatggcgtcctctgcgccttccccaacggctgcaggttggtgcggtgggaatcaccagaaggagatgatccacatagcctagttttgagatctgaccaggaggctctagtgaagctaaatgatgttggtttacagttggctgtgtcatttagtggagagggttcaatacttgccactggtggcgaggatggacatttgagggtcttcaaatggcctggcatggaaaccgttattgaagaacctgatgctaaaacatctgttaaggatcttagtttca

SEQ ID NO: 66726 - DNA, 836 bp, Zea mays
  Clone ID: MRT4577_160852C.1
tcgaggccggccgggccgggaccccctccctgagtccctctggccacctttctcccactgcctcgtattctattcccctccctcgccatctccgccgtcgtcgccttctccaatccacttgtcgacaacgcacgcgcgcaccttctcccgcggcggcgacccccgcggcgtcgtcctagggttaggattcaggcgacttccctcccttccgcgtcgcggcgaacgcgtgggagatacgccctatgtcgtctgacccttcgctccacctcccgtcgccggtggctccgccggacgcggcggcggtggatccccagtccgccgagccgccagaggtgatgcaccggacgagagccgtcgacttccttggacgacgcacgcctatcgtctaccagaacgacaacgggccctgcccgctcctcgctatctgtaacgtgctgctgctgaagaatgtgatcagcatgaaccctgacgcggaggaggtgtcgcagcagaggttgctctcgctcgtggcggagcgcctcatcgatccaaacatcgctggacaggtcaaggatgaggagtatgttaacaaccgggagcagaacatagcggatgcgattgatcttctcccgtgcctcacgacaggcattgatgtgaacgtgatgttcaggaagattgatgacttcgagttcacccgagaacgtgctatatttgatcttctggatatcccgctatatcatggatggattgtggaccctcaggatactgaaactgctactgctattggatcgaagtcctacaatgctcttgcttccggacttgttgaattcagtcacgtaaaccaccgaagaaataac

SEQ ID NO: 66727 - DNA, 129 bp, Zea mays
  Clone ID: MRT4577_160853C.1
tggactcaagcatccacagggcccaattactgccctataatgagtcagtagatacaattacacatggtcgctatttatacatacgatgtgatcatgagaaaatcctcgaagccaacaccagattattct

SEQ ID NO: 66728 - DNA, 1411 bp, Zea mays
  Clone ID: MRT4577_160854C.1
aattcggcacgagggggaagggaatacgagagcgagcgagcgagcgagcgagcctgctgcagcgagagggacgagaggcgagagagataagcaagcggcgcgcgttaaccctagcccccgtctccgctctgctccgctccgctagcgctcccgcccgccgcctcgctcgccggaggattcgtacgcgcgccgggcccgacgacctgccgcgccaccttcgcgccgccgccgccgcgcgcgggcgcgcctcggtcgttgcagttgtccttcaccacagcggagtgatggctgttgtcaacccaaccaaccttgctattgacgacgatgacgacgatactcccatttcattcaagaggacgagtaactctacgaagactgccaggcccaccccttccaagcacgaggggtcgtcaggaggtaatggtgcacctgttaggatccccaaacctgtgtctcccaatccgcagaagaacggagccaccggggcttcaaggccgttgcatatgaagccaccgtcatccagtccaaaccatcgtccttctggatctggccagccaaacagtttggcacaacatagttcaaaggctaatagcattgacatgagtaaactgaaaagacctctcgtcaaagatgagagatctgatgactcagatgacgaggtgccgattgggttaaggagaaaggttgaggagaagaagttgaagggagttgatactcgggttcagaagacagatgactcagatgacgatgataagccattgggtctcaagatcaactcatccagaatgtcttccaacagagtgaataagcctgttctgcagagaactgtaccaaaggttgagcagcctgatgaagattcagatgatgataaaccattggcaagcaggttgcccagtaatgccggtccaaaaagtggaggtgatgtctctgaggattcagaggatgagaagccactggctgccagattttcaaaagttgctggtagtggaaacccaaaaatagcttcttccagcaaagggttaaccagtgatacaaatggccaacaaagtttgggtaaaaggcctctagacaatagtaatcaaacaagttcagctcttaagaaggctaaaccttcaaacgtttcagcttctgcaatcgttagaagagaaatcaagacagatgacaacacacctcttgcacaaaggctgaaaatgggagagtcttcgaaaggcaagtcatctgcaaagagtgtctttaagaagagtcctgcttctgtgaagaaggacatcaagaaaatgaaagggaaagggaaattaaagaagaacatgaaaaattctcagttttcaaagataatgaaggtcccccctggatctgggggaggaaagaaatggactacctttgagcacaatggtgttatttttccttccccata

SEQ ID NO: 66729 - DNA, 261 bp, Zea mays
  Clone ID: MRT4577_160855C.1
atgaagctgctgttctgctgctggctggtgctgcccatcttcaacggcgcggcctacatctacgaggcgcacgtccggcgctacttcaagatcggcagctacgtgagccccagctacagcgagcgccaccgccgggtgctgcagatgacgagccttgacgcgcgcagtgcagacatggtacgcgtgcgtgtttgtttgatcattacgtctggccttgccaacacttcaagaaaagaatcaaaagatggcatggggccatga

SEQ ID NO: 66730 - DNA, 903 bp, Zea mays
  Clone ID: MRT4577_160856C.1
cattgggacctcgagccggcgggactgcgctcccttgtcatatacaccgtcgcgaaacaaacaacgggggaaggagatcaagaaacgtacgtcaggccgagcttgtcgccatctggtggcgagccgtcgacaacggatcatgggtgtcctcggtacccttgctagaaatctggacgccctcgtcgggccaggggtgatgctgctttatcctctctacgcgtccatgcgcgccatcgagagcccttcttccctggacgaccagcagtggctcacctactgggtcctgtactcgctgatcaccctcttcgagctctcaagctggaaagtcctgcagtggtttcccctgtggccgtacatgaagctgctcttgtgctgctggctggtgctgcccgtcttcaacggcgcggcctacatctacgaggcgcacgtccggcgctacttcaagatgggcacctacgtgagccccagctacggcgagcgccagcgccgggtgctgcagatgatgagcctcgacgcgcgcaagtccgtcgagcgcttcatcgacacgcacgggcccgacgcgctcgacaggatcatccgagccgctgaagaggaagccaagagggagaaacctgaattgttccgggtggaaaccgaagcaagtctcccatcggttgggtagtcacttgtgcagaaatcgtatcgtatgcgtgtgtgtggttgatcattacgtcgggcttgcccagcagttggagaagagatgcccggcgcccatgagagcatgcatgcatatatgactttgaaagaagccgcgaatttggtgtacttgttaatgaaaatttggcttggacctgtgaaatccgtatcagctaaaatacgtctggtctgatcctgaatgcaaccgcacaagagattgatctgtct

SEQ ID NO: 66731 - DNA, 952 bp, Zea mays
  Clone ID: MRT4577_160857C.1
tgttgtttttgtagcgagaagctcaaagaaggggaagacatctacatctatcagtttccgctgtggcaattaatctctggcgcggccgatttttttccttgtcatgggaaggagatcaagaaacgtacgtcaggccgagcttgtcgccatctggtggcgagccgtcgacaacggatcatgggtgtcctcggtacccttgctagaaatctggacgccctcgttgggccaggggtgatgctgctttatcctctctacgcgtccatgcgcgccatcgagagcccttcttccctggacgaccagcagtggctcacctactgggtcctgtactcgctgatcaccctcttcgagctctcaagctggaaagtcctgcagtggtttcccctgtggccgtacatgaagctgctgttctgctgctggctggtgctacccatcttcaacggcgtggcctacatctatgaggcgcacgtccggcactacttcaagatcggcagctacgtgagccccagctacagcgagcaccaccgccgggtgctgcagatgacgagcctcgatgtgtgcaggtccgtcgagcgcttcatcgacacgcacgggcccgacgcgctcgacaggatcatccgagctgctgagcaggaagccaagaggacctagcagcttagcgtgcgctgtaacttaagggattcagtccatagggctccagaatttagatggggtgaaggcgaagcaatgtgaattgtttggggcaaaaactgaagcagcccgatgctctcctacccctcagttctgtctaactgcttaaatacttcaattttatcctcggttatatgacctttattctggtagtgcattgaagttcttttatgttaggatgcttgaggactgacatgctactggtagtgtattgaagttcttttatgtaacattgggcagcaaaaaaaaaaaaaaaaaagcggcc

SEQ ID NO: 66732 - DNA, 251 bp, Zea mays
  Clone ID: MRT4577_160858C.1
cgcatcccttcgggcagctgctactaccatgattgtgcacatagcaaattctacgtattatatatcgctacaggcatcttacaaggtggcgctgctcgttgctgctctgggcatacgtcaacctatgggcctatcgatcaagatgctttctctgatgtccgagctgcatctgtatgatatcgctaatgtcacgggagtcgctgcagatcatagcgactgcatcacgcccgcttacgtacttgacttcactg

SEQ ID NO: 66733 - DNA, 264 bp, Zea mays
  Clone ID: MRT4577_160859C.1
tagggagcgtccgtcgtctgtacagaggtctgaccagagtcttgggtaagaatgcggtaatacgaggggctagcttgtgggttcctgcctaggaaccagaatcatctatgagcggaaattccttatggagtgtcggaactcgcctgtggccaaaacacccccaaaggacctgccaatcattccagtggtcactagcgctaccagcgatgagcctcccatgcaggccagctagagccatctgcacagcagcccggaagataagcg

SEQ ID NO: 66734 - DNA, 350 bp, Zea mays
  Clone ID: MRT4577_16085C.1
gttggtcaaactagaccgccgggggtaatggacaatatgggacaatcatgcatttcacatgaaaagattcctttctctggaacaaaaacaaagggaagcaccgaagcatatgtttcatgcgcctctgttcattgcgaatgaataatccttttcatactcttgcttggggaaagaaaccttcattcatgtagaaatattcacacatactttattcatacctgatctttcagcccacggagtgactaaagcggtaaacatttaaccatataacatactcgctgatgtagtacattccatcccctcttaccatgtggcacactctatttttcacccttctttctcaaaagggg

SEQ ID NO: 66735 - DNA, 181 bp, Zea mays
  Clone ID: MRT4577_160860C.1
ggcagtataaccattttgcccagtagaggtgaatggggatcatgtttctgtctatgtgcatgagtggctactaaccttgactggactcataacagatttaacacatttaggccatcatttgtcagtattcatcttagtccgatgcaatccggtataacgatgtgatgtgcaatcacgatgc

SEQ ID NO: 66736 - DNA, 293 bp, Zea mays
  Clone ID: MRT4577_160861C.1
tcggtcagttctgctgctagctacagacaacggtttttatattgcactcatgtcaggacgcacggcatatacacagcagtcttataaatacagtgattcctttccatttaagccaatatacaacaattggagagcaagcttccatgtaactgcgatgtcaacatcatccaatcgatcggctatattcatgtcccgaaatactggattatctgaacactttgttgagttcgacttcttgtacccaaccgagggtatccatagacgcttagacaatggcttacgtattactgcaa

SEQ ID NO: 66737 - DNA, 185 bp, Zea mays
  Clone ID: MRT4577_160862C.1
tttaataaccgtgccctcaacacaccagcgggaggtaactgccaacacagagaaaaatgcggtggcttgcccctcttctaaattgttacgggccaacaagggtagaacaatgaggggcggcaaaaaacggagagttttaaaacaaaggaaaaatgggcaacggaattggggtgaacaccaagggg

SEQ ID NO: 66738 - DNA, 436 bp, Zea mays
  unsure (1)..(436): unsure at all n locations
  Clone ID: MRT4577_160863C.1
ccccgcatctcctagccccagctagatgctttggacacatatcgaaacagctctagctagcgcgctcgtcgtctaacctggcttccggcatgggttccaagcagatcggagtcttgacctgcttcattgccatcaccgctctcgccttccgtccctgcgcatccgccgtgcccatggacggtggctggtcnaacggcggctccaccggggacgggccagccaagggtcgctggatcccaccggggtgctcgtgggtacctgcgtgccgtcgacctgcctgcggcctggttatcggtacccgccggcaacctttcgatcttccagtgcgggcagggctgtgccacctgctaccaggagaggggccccggccacaacactgcctcctcttggccggtggcagttgcgatgaccgtcctgggcccttgcgctacgtccc

SEQ ID NO: 66739 - DNA, 1194 bp, Zea mays
  Clone ID: MRT4577_160864C.1
ctagatcgcgagcggcctccctttttttttttaacttctctgccgatctgtcttcaaaacaaaccctgttatatacatgatctgctgcacagaattgaagactaaaaaagtcacatcaacgattccaccaatatacatacacgcgaggaagaatgacacccactgaagcagtctctcactcagtcaatggatacagacacctgagcggcaggctgcatctaatctcgccgcggcagctacctcacaaacaaaaatagagaaaaataaaaactcaagctcggaatgtactgccgccgcccgcccgccgacgcaaatggtggggtggtgggtgtctccaggcgactaggcctccgctttgctgttgatcgccagcgtgaagtagatcagtatcgttgtccccacgctcgacagcgttgcgaacaagaggagaatcttccgagggttgatggacgtgaaccggctaatgaatcttttgctcctcccttccccagaatcaacaagaacaggtgtgcaatgtggagcgaccagcgccttgttctgacccaggggctgctgctccagttgagacggcacaactttgatgacaagttttttcgccaaatcctcttgctccggtccgggggcgcggcgggggggaggccgccccggcgccctccggctggagctccgccgcgccaaggggggatcggaagcggcggcgagaggagggagaggtggggaggcggcggaacggtgtcccgtgacggacgtagcgcggaagagggggagagcctccagccgatggggaggcgatgagagctcgttgcacccgtgggagtgtgcagccgacgccgcagctgtcacgacggactggtgtggtggatggaggaggcgcgtggcggagccccgcaccggccgcgatgtggtgggagcgggtcgaccggaggccctcgaggagagtcgggcgcgggaggcagccgttcgcgggagagcgcaggagaggggcggtgtgctgctcgtgatctggggggccctgtgtcggagtaggtcgatccagatccgtccggttggatctccgccgcgccgtggcgggttcggaggcggcggcgagaggagggagaggtggggcggcggcggaatggtgatgagagacggacggagcgtgaggagggggagagcctacacgagatggggaggcaatgagtgctcctgtac

SEQ ID NO: 66740 - DNA, 896 bp, Zea mays
  Clone ID: MRT4577_160865C.1
ccctcctctcgccgccgcctccgacccgcccggcgcggcggtatatccaaccggacggatctggatcgacctactccgacaccgctttccgaagatagatagatagataacaaggttgtgctgtgcttgctgtctgttgggaagtggaggaagctcaataagttgatatccgcctcgagctcgagggaaccggtgggcagggccccccgatcacgagcatggacagaactgccaataatgcggtattggatatcgagagccttcctcaaccgcctgataaatgctgctctgggagtccgaagatgatcagggccttgtcgcgtaagggttcgaaccggatggagaggaggggcggcggcggcggcgagcaggagcaagaggatttggcgaaaaaacttgtcatcaaagttgtgccgtctcaactggagcagcagcccctgggtcagaacaaggcgctggtcgctccacattgcacacctgttcttgttgattctggggaagggaggagcaaaagattcattagccggttcacgtccatcaaccctcggaagattctcctcttgttcgcaacgctgtcgagcgtggggacaacgatactgatctacttcacgctggcgatcaacagcaaagcggaggcctagtcgcctggagacacccaccagccaccaccaccatttgcgtcggcgggcgggcggcggcagtacattccgagcttgagtttttatttttctctagttttgtttgtgaggtagctgccgcggcgagatcagatgcagcctgccgctcaggtgtgtgtatccattgactgtgagtgagagactgcttcagtgggtgtcattcttcctcgcgtgtatgtatatattggtggaatcgttgatgtgacttttttagtcttc

SEQ ID NO: 66741 - DNA, 138 bp, Zea mays
  Clone ID: MRT4577_160866C.1
aaaacaaacttgacagggaactagacgaacatataagcgaaccatgaagcaacatgcaagagcacctgactacggcgaagggggctagtaagcttaactaacacaagcacatgtagtagtaactgacacagatttttt

SEQ ID NO: 66742 - DNA, 285 bp, Zea mays
  Clone ID: MRT4577_160867C.1
gagcgaatcgcaggcggacggtcatgctatcactatgcaccaccgctcctatacgcatgaagctatactcgaccgtgcagcgcatatgtgcgcgttgatcgaccagacaaacggacgtgaccaggctatatatatgtctagatatatacatatgcctatctatatctatagaggacattgttctaccgagctcttcacgaaacactgttcgcacactctatttactggatcaggtctatcccgccgggatcttgtcagcttgcatggtcatgagacagaacacct

SEQ ID NO: 66743 - DNA, 329 bp, Zea mays
  Clone ID: MRT4577_160868C.1
tttgggctgatttatgtgcttggttgttattaggcgtagagctccctgctactctcctcttggtgaagaatttttagctgtttattagactatccgccaaatcccgccgaggggcgacggtggccctccctgtaaattctaatcttgaggtagggtccaaaaagtccgacgagcattcctctatctgtagtcatactatcggtcattaagtccttaaggacgatccggtcgctcatatcctgcccctggtcgtctttctgcttaagcacactaatgcagtaaggcggcccaattataccgacgtgtctgcgaggtcgagtggaaccatc

SEQ ID NO: 66744 - DNA, 825 bp, Zea mays
  Clone ID: MRT4577_160869C.1
gggtacctcgaggccggccggggccgccatcgtgttgagcccccacgacgcgcacaaggagccgcccagtccagtgcacgtcgagttcctctacggatcgagctctcctctaatggcgtcgttgctccgtcattggaactgctccctgggcgcggccgactttcttccccctgttagccgacccgctcccaaccccactttctgcgcgcgcccgagcccagttcggccgggacctcgctgtccgaatcgcggcaaggaggcctgcgcgcggctgagccctcctgtgcgcgcgagccctatagcttggctgaccggggcccccttgctgcgcgcgcgccctaccgagccgtggccatggcgtccagccaggaaccgcccctgcccatgcgttcctccggtgaagtgcccccttgccgacagccatgcttctcccccactcgccatggccacctgctactctgcgtcctaccgttctgtgcagcagggcagcaggagagtagaccctccccctgcagctgttggtcgtgctctctccgtgtaatcaaatcaaccatggatgacccctttctcctggtcgtgcttttggctgaagaaagaagagaaatgcccatagccacactgatcccatccttccgggatctgttgtggtcttgcttcttgtgaccctttgtgcggccacttcgtcaccagtgagatgcactacatcatcggtaatctgcgattaagtaattattccatgccctttggctttaattactcgtttcaatctgttttagtgctttggaattgcaactaaaaaaaaaaaaaaaaagcggccctccagct

SEQ ID NO: 66745 - DNA, 786 bp, Zea mays
  unsure (1)..(786): unsure at all n locations
  Clone ID: MRT4577_16086C.1
tcgaggccggccggggaatgatcgattcgtctccgatctcctccttcgaccgccgccaccgtcgtctccgagactccgacgatgtcctccgccgccggtgaggatgcgttgtcgtctgacaaggggaagaagagggaggaggacggcactgacgggaggagccaacgtcaggagggtgtcgaggtggccgacgggaaagtggatctaggagacctgtacggcgcggcggcggggtgggtagaggcgcggaccagctgcccgcacatcggcaccatgccacccgctggtgctgacgacctcgcgcgcgtgccttcgcccgactctccgtgctccagatgtaatcaccctgctgaaaactggttatgcttcatatgcaaagatgtgctttgcagccgttttatcaacaaacatatgttgtgccatcatcaagaaactggtcactgtcttgctttgagcttcagtgatctgtcagtttggtgtttctcatgtgattcatacctagatgttcaagccattttagaattgcgcccagtgtatgaagttgcacatttgttgaagtttggacaacgtccaccatttcgatcacttgatgtacaggattctggcactggtgaaagtggaagtgtgtcaagggcttagttatatgtattccagtaatgagtttcttttcatgatacttcaatcagattcagacagacagttgtctactatcctggcatttcttaagctgcagtgcaatataattcatttgagaagccctaaccgcgcnctcaaaaaaggccccta

SEQ ID NO: 66746 - DNA, 1148 bp, Zea mays
  unsure (1)..(1148): unsure at all n locations
  Clone ID: MRT4577_160870C.1
gccggccgggtcggggcacttgcacctgaacgtagttttctacgcattcagtccatacaggtcccttgagtcttgagcagcgaatcagcgaacgaaacagcaggtagcgcccgcggaatccaatcagcaacggcgtcttgtgtggcctcgtggatcgtgatccagcacgccgcgcgcaccgcaacgcccccgcgccgtaacaagcaccaccacttgctcgcacgcaccgcggcaccggtaaaatacgtgaccgccaccggcatactagtaccccgtgagctggcgctggctctggctctggctctggcagtccggctggcaggagagaattggcgagggatttttatcgggagcgaattcccaggcagcccctgtctagagagggacagggccacgcacgcacgccaccgcgctccattggccgccccgttgccatcaccgcgcccatcgccccatcctccgattaaactactccatcgctagtaagcagaatcgatcgatcacagcaagctcgcacacccgcgatccatcctccattagctcctcctcttctccttgctcctccagatcaggtgcatgacagcaccgcgcgctcaggtggccaccggcgagacctagctaggtagggagggaggctgggagggagggagcgatggagcagggggaggaggacggggactggatgatggagccggcggcggggaagaagggcggggcgatgatcgacaggaagaagcgcttcagcgaggagcagatcaagtcgctcgagtccatgttcgccacacagaccaagctggagccccgccagaagctgcagctggcccgggagctcggcctgcagccgcgccaggtcgccatctggttccagaacaagcgcgcgcgctggaagtccaagcagctcgagcgccagtacgccgcgctccgcgacgactacgacgcgctgctctccagctacgaccagctcaagaaggacaagcaagcgctcctcaaccagctggagaagctagcggagatgctgcgggagcccggcggggccaagtgcggagataatgccggcgctgcccgcagggacgacgtgcgcttggccgtggncggcatgaacatgaaggacgagttcgtggacgccggcggggccagcaagctctact

SEQ ID NO: 66747 - DNA, 274 bp, Zea mays
  Clone ID: MRT4577_160871C.1
aacaagaacatatgacgtgctcatataaaaatagcactaacgcgttgtctattaaaatggactacactctctacacatgtgctaacaaactaaacggaacacatgcctactcgacctatactagggccactaatctatctgactgtcctgagtacacaagaaattgggcatagctgtgtcatggggaacggtggaacaaacagaaaagtggatcaaaatctaggaactcactgaggacagggagcgtctaacaaatcctcgccctgacacatga

SEQ ID NO: 66748 - DNA, 330 bp, Zea mays
  Clone ID: MRT4577_160872C.1
atgagactgaagtgcgaccacttgctacggatcccagactgtttgatcttcagcgtgctacagcggcacagttcggccccacccgtcagcgactcgactccctccctctcgcgccgctccctctccctggcagctcgggcccgcctgtcagctccgtcgtctcacccatgcctcaccggcgcgttcgccgccgagcgcctcacgccccgtcgcctcgccattaaggctcgcccggcctcagcgaccaccgcgccactatgcccgagccgtcccctcacccctcgcctgcccgagccgtcccaatcgtcgtttgctccattcccgccatga

SEQ ID NO: 66749 - DNA, 343 bp, Zea mays
  unsure (1)..(343): unsure at all n locations
  Clone ID: MRT4577_160873C.1
ccggtcgaccagcgctcgcccagctccgggagcgtggggggagcgtgggcggaccgtgaataggacggtcttgcgacgtacagctgttatatatggttgtattaattggtataaagtgagcataaagaattaaggtgatttttttanataaagttgatatattgggggggggggggtttttttttttaataattatgtgaaattagttgtgttagttttaaaaaaatggtgaattatcgtatatgttatgtagataaatttttgtaatgtagatgttattttgtttatgtttttgttaaagaatggttgtattttttttatttattatgtgtaatatttataa

SEQ ID NO: 66750 - DNA, 323 bp, Zea mays
  Clone ID: MRT4577_160874C.1
gtggggggggtcatagcttaaggttaaattcattctttggtttgtgggcaaacagaactcttaggtcgggatatttttaacatctcactaaagaccctaattcggcggggggggggcaaccatttgccttttacaattaaaagaaagatcatacccggtcaaaaaaaaaaaagggatggctggcactttcacccccccctaagagaacaacccgcaaagcaagggaccaaaaaatttacccccggcgaagggggctttggcctttaaaagggaagccacaacctatattcgatcacgtgaacttcgaaccgcaaaacaacaaa

SEQ ID NO: 66751 - DNA, 326 bp, Zea mays
  Clone ID: MRT4577_160875C.1
ctgagtggaagatggtccggcctgatcttggaaggattgagaagtgggtcctgaggaaggcattcgatgacgaggagcagccattcctgcccaaggtgtagccaacatgtgtttcagctgcttctactgaatcttccctagctaaaatttagacattcagatagacatctaaaaagattttgccttgcagcatatcctctacagacagaaagaacagttcagtgacggcgtcgggtacagctggatcgatggcctgaaggctcatgcaacatcaaatgtgactgacaagatgctggcgaatgtaaagtttatcttcccacacaata

SEQ ID NO: 66752 - DNA, 308 bp, Zea mays
  Clone ID: MRT4577_160876C.1
ggccaataccggattaaatggattattatcaataaccggtttcaagacttattctacccgctttagaaccttttacaggtggtttcggtcgggggatattaagggggtcttgaactttttacaattggtttcactcgggggatattaaggagggggatgagaaccaccaccttctttggcagcaatcaacccttacaaatttatcataaccccgataaatcttaacatgggtatgccccccgggaggaggtcatgggatcggagcattacgccttggacaagtgaaaccttcaccggcgggcctcttt

SEQ ID NO: 66753 - DNA, 304 bp, Zea mays
  unsure (1)..(304): unsure at all n locations
  Clone ID: MRT4577_160877C.1
gaaagggcaaaagccaaaggcatcaccgtcgcgacgacgatggcagcctgggtgcaagccgcggccaccctgatgcagccggccaagatcggcggccgggcgccctttgcctcgctgccgtcccgcccgtcgtcgcaactcgcctgcagggcgttcggcgtccacacctgggccggcagaatgacgagctccctgcacgatggggggggggggagccgtctcncgagcggaccgcgggcttgccgaggaccgggtcttccagtcggctcaacgcgcacgcgccggacttggtgccgggggggcc

SEQ ID NO: 66754 - DNA, 200 bp, Zea mays
  Clone ID: MRT4577_160878C.1
cgcttccttgctgagctcccagtctcctgaacgacatcttatatcaagtcctaagggcagcagtcatcatcgaactgccagctcaagcagttcattcagtagctcaacagaacttgaacattcaataagtgaagattgtatgctggaaaagaactcaggaagtggttatttcgagcattctgcaagagttgcacagcatc

SEQ ID NO: 66755 - DNA, 218 bp, Zea mays
  Clone ID: MRT4577_160879C.1
ttatggccacatgggcgagcctcgcggcatggaccaggctcccctgccggcagctgcggccctggccccaaaaacgaggaggtgaactaaacgccgtgtcagcaaacgtgagtgagctgccgctgctgcctggcacagacgctgtctagagagatccaaagtagatgcaggtgcgcccgctaaaacttccccccgacgacggttgatacttatagcgg

SEQ ID NO: 66756 - DNA, 299 bp, Zea mays
  unsure (1)..(299): unsure at all n locations
  Clone ID: MRT4577_16087C.1
cggcccggaattatttcccgggtcgacagcactcnatgtcggcggccgcccttcttttttgggggtttttttagattttttttgtgatgaaaccccccaccaaccatgataacaaacccggggaataatttggggggggtgcaatgaaatcgtgtaaagaaaaaacaaattcagcttattactagacactatcctttttacaaaaactatgtctgggaccactcccgcttgtagaaatctgacagtggcggggcctcggggggtctataatggcccccccggagacaccagccatgact

SEQ ID NO: 66757 - DNA, 822 bp, Zea mays
  Clone ID: MRT4577_160880C.1
atatcaaaacccctcctccccatcccccccatccctcgaaccatccgtccgtcggccatggccaccgccgccgcgtcccaggtggccttctccgcgcccgtcggccgctcggaccgcgccgtcaggagctccggaatccagggcatcaacagtctcagcttcagcaacaaatcatggatcggcaccgcattggcgtgcgacagcaaggccgcggcacattcgaggcatctctgcagggcggtccagcagtcgagcaagagcaaggtctccgtcgcgccccttgacctggagagcgccaaggagccgccgctcaacacctacaagcccaaggggccttacacggccaccattgtctcggttgagcgggcggtaggccctaacgccccaggagagacgtgccacgtcgtcatcgaccatggtggcaatgtgccgtactgggaggggcagagctatgggattattcctccgggagagaacccaaagaagcctggaaacccacagaatgtcaggctgtattccattgcatctactcggtatggggattcatttgacgggaagactgccagtttatgtgttcgccgtgcagtttattatgatcctgaaactggcaaggaggacccctcgaagaatggtgtctgcagtaatttcctatgcaactcaaagcctggggacaagattcagatgacagggccctctggcaaaataatgctcctacctgagactgatccaaatgcaacccatatcatgattgccactggcactggtgttgctccctaccgcgggtacctacgccgcatgttcatggaagatgttccaaatttc

SEQ ID NO: 66758 - DNA, 507 bp, Zea mays
  Clone ID: MRT4577_160881C.1
atcccggggggttcacccctatataaaggggggccccaacccctttgttatatgaaatataaacaaaaaagccctgggggggagcaaaaaaagaccgcgaaaaggccgagtttgtcaaaaccagcctatttcgggggggaccccaactctgcttaccaccccccccaatcatgtcctcgccccccaaaacaagggcccgggggggagatgaaggataaaacttctcaccccccaacccaaaaaacaaaacaaagggggggagctttgccttcttgggggccaccctgaaaaacctggcgaacttttcccccttgtttacccccatttggggccgcccaaccctggcccggattgaaataactatcttttccccggctttctcgccttggggggcaaaccccccatctaaaaaatctcggcaggggggtccctgggacccacttttttggtcgggatttcaccccgcttttgcaaaatatccccaactggttcacccgaaatttgccc

SEQ ID NO: 66759 - DNA, 220 bp, Zea mays
  Clone ID: MRT4577_160882C.1
aattaacctttttggataagaatgtcaatgtttgggcctattgtgggtggccgcggtctgtccaaagcgagaaaggaagaaggaagaattagcatggatcattgtcgcgagttcttggatcccctggtgttgtcgttgtaggacttggtccacttgacctactttctgaggctcacatcctggttttctctatatttgaaccttttctttattctttttt

SEQ ID NO: 66760 - DNA, 246 bp, Zea mays
  Clone ID: MRT4577_160883C.1
atgcatccgagtaaatactcttttattggggccacataaaataaattagtgggcggttttttaacaccgtgctggtgggaaaaccgcggggctaaacaaaataaacttgtttgaaaaaatacctttttttggaggggtgattataaagaagagggccccgaacgttcctttttacaaaattttcgccctctttgtgtgtaaaggggccccccctttgtagcgttatataaagcggggggggtgggg

SEQ ID NO: 66761 - DNA, 387 bp, Zea mays
  Clone ID: MRT4577_160884C.1
gagctcactatgtcggcggccgccctttgtttttttttttgttttttttttttttttttttttttttttttttggacgctattttacctttcctcataaatagtgcaaggtacgggaggggagcgtttttacatctgtaaggtaacacaaagtttgaaaaacaaaagcctggtaacacaaagtttaaaaaacaaaagcccctaaaagaaagtctacctgactatctaattggggggtttaatgggaaaaaaaagatgaagaggctaaaagggattcccatgactaaaaagcgggggaaaatcctatcctaaatgtcgctgaaacttggtcaggatggcatcccattactgaagacagatctcgcacgcaatattcatgtaatctttg

SEQ ID NO: 66762 - DNA, 200 bp, Zea mays
  Clone ID: MRT4577_160885C.1
taaaaccaaaacaccccaggccttggtcaccgtcatgagcttatggaaccccaccaccacccccaagctcacctcacggaacaccatcaaaaacacaaaccagacctccaccaaccttattatactccaatccagcaacaactctctaccccccagctcccacaaagcaaccaccacatttaaataacccgaccaaacct

SEQ ID NO: 66763 - DNA, 281 bp, Zea mays
  Clone ID: MRT4577_160886C.1
agcggcattaagaatgcagatcttcgtgacaaccctaacggggaataccataaccctcgaggtcgaaagcagcgacaccattgacaatgtcaaggctaagattcaagacaaggaaggcatccctccggatcagcagcgtatgattttcgacggaaagcaacttgaagatggaaggaccttggccgattacaacatccagaaggaatcaacccttcacctcgtcatcaggcttcgaagtggcatcatcgagccttcactcatggctttggctcgcaaatagg

SEQ ID NO: 66764 - DNA, 706 bp, Zea mays
  unsure (1)..(706): unsure at all n locations
  Clone ID: MRT4577_160887C.1
atcatttcgttctcacaaattcatcggactggagacatgtcgcttctgccagactctgttaagtttgcatcttatatgatggaagagggcaaaaagccttccgttgcagccattcaaggccttgctctgggtggtggactagagttgacgatggcttgtcatgctcgaatatctacccctgaagctcaacttggattaccagagttaactcttggcataattcctggatctgggggaacccagcgtctaccgaggcttgtaggtctgcccaaagcaatacaaatgatgctgcaatcaaagttcattatggcggacgaaggaaaagaacaaggtcttattgatgccctttgctcccctgatgaattgataaagatgtcacgccattgtgccctggaaattgctaatggtggtagaccgtgggtaaaaccactcagcagaacagataagcttggctcaccatctgaagctcatgctgcattaagtatggcaagacagcaggtgaagaagattgcaaaaaacatgccgcagtatcaagcctgccttgatgtaattgaagaaggtgtgctatttggaggccattcangtgttttaaaggaatataaggttttcaaggagttagtgccatcaccaacagcaagggcacttgttcatatcttcttggcacagcgtttgagcacaaaggtgccaggtgtcactgatgttcacc

SEQ ID NO: 66765 - DNA, 481 bp, Zea mays
  Clone ID: MRT4577_160888C.1
cgttgctgtcgtgattctcaacaaaatcatcttcatcatctgagagttcaaggtcatcgtcgtcgcgccgtcagaattctcactatccataaacttatccttatcagtagccttgtctgtttcgccgtctggctcaaaatccatgtcagcaggatcatcatctgcatcgctgtcatcatcattctcatcattatactcatcgtcatcataagcattgtactttgacatcttcatttgtcgtgagccagactttgctgctccaccagaagtggaacagcttgattgcttcatcccgccacgatgcaacgattcaatctgatcctctccgtcctgctcgtaatagtcatctgagagcatttcctcagcaggcacctcaccatttgctctattcagttcatcatcctctctgctaccatccttggcatcatgcgagctagcagcatccattcccctaccgctatttgatgcaacttccttggcc

SEQ ID NO: 66766 - DNA, 693 bp, Zea mays
  Clone ID: MRT4577_160889C.1
atggggggtgaggaccatatgaaggaggatcaccatattcgggaggagcacaaaataggggaagaaatagaggaggagcaccataacatgaagaagtgccatatgggtatcgaggagggtatggataagatcatcattgggaggagaatgggcatctatgaaaggtgggtagagaaacataggaggatatggataaggaaacaagggtcgccgagtgtggagatcgacgaagggcagaaacactctcctgacaattataaaaacagcgccgcctgccctactccgactgttgtgccacccgccagggtgaggctgacagcagctgagtccagcctcaggcgccataggaagctccgcctcgcccgaccccagggctcgaactcaacctcgacctcggaagacggtctccgcctcgcccgaccccagggctcggactcaacctcgacctcggaagacggtctccgcctcgctcgaccccagggctcggactcaacctcgacctcagaagacggtctccgcctcgcccgaccccagggctcggactcaacctcgacctcggaagacggtctccgcctcgcccgaccccagggctcggactcaatatcgacctcggaggagtcaccgcctcgcccgaccttgggctcggaccgaccacgttacagggggatacatcattaccctacccctagctag

SEQ ID NO: 66767 - DNA, 402 bp, Zea mays
  Clone ID: MRT4577_16088C.1
agcgtggtcgcggccgaggtacttcgcgggccagcttacgagtgggaccgccaaaggctaggtgaaatcatgaaggcatgtataattattcacagcatgataatagaagacgaaggatgaactgcaacaaatgtggatttcgccaatgttggaaccattccttctgtgtctacgataactccaaagttcgtatagaatgggtttgttcggttcacaagataagaggccgtgaaggatacaatcaactgtagcatgacctcatcgagcatctttgggcccgcaagggagcgagtgcgtgaaaacaagatagtaatggttagcatcttttaattctcgtctaagtattattagcgtgtaatggtggaattgctatgtgttcgtacctgcccgggcggccgctcg

SEQ ID NO: 66768 - DNA, 720 bp, Zea mays
  Clone ID: MRT4577_160890C.1
atgggcgcgattcaggaaaacagcgccgcctgcgctactccgactgttgtgccacccgtcagggtgaggctgacagccgccaagtccggcctcaggcgccataggaagcttcgcctcgcccgaccccagggctcggactccacctcgacctcggaagacggtctccgcctcgcccgacccccggggctcggactcaacctcgacctcggacgacggactccgcttcgcccgacctcagggctcggactcaacctcgactccggaagacggtctccgcctcgcccgaccctagggctcggactcaacctcgactccggaagacggtctccgcctcgcccgaccccagggctcggactcaacctcgacctcagacaacggtgtccgcctcgcccgaccccagggctcggactcaacctcgacctcggacgacggactccgcctcgcccgaccccagggctcggactcaacctcaacctcggacgacggtctccgcctcgcccgaccctagggctcagactccacctcgacctcggaagacggtctccgcctcgcccgaccccagggctcagactcaacctcgacctcggacgacggtctccgcctcgcccgaccctagagctcggactcagcctcgacctcggaagaatcaccgcctcgcccgaccttaggctcggaccgaccacgtcacaggggggccatcattaccctacccctagctag

SEQ ID NO: 66769 - DNA, 576 bp, Zea mays
  Clone ID: MRT4577_160891C.1
atggccataatgggttcaacatcagaaaagatgtacctctaccagccaagtccagcctcgggcaccataggaagctccgcctcgcccgaccccagggctcggactcaacctcgactccggaagacggtctccgcctcgcccgaccccagggctcggactcaacctcgactccggaagacggtctccgcctcgcccgaccccagagctcggactcaacctcgactccggaagacggcctccgcctcgcccgaccccagggctcggactcaacctcgactccggaagacggcctccgcctcgcccgaccctagggctcggactcaacctcgactccggaagacggcctccgcctcgcccgaccccagggctcggactccacctcgacctcggaagacggcctccgcctcgcccgaccccagggctcggactcaacctcgactccggaagacggtctccgcctcgcccgaccctagggctcggactcagcctcgacctcggaggagtcaccacctcgctcgacctcgggctcggaccgaccacgtcacagggggccatcattaccctacccctagctag

SEQ ID NO: 66770 - DNA, 415 bp, Zea mays
  Clone ID: MRT4577_160892C.1
aaaaaaggccctattagaaagattcaggggttagggcaacgttgccatatgcatagacatgaggggcaaatcctcttttacagggatgctggggctgcccctccacggtcaccaaaaaattactaaaacaaattccacatccatgtccacatatttttagaccaaaccaggcatgtttatggccccccaccagcagctggctaaatttttaatataagaagaaaaagaagccctttgattgggatcaccggccgggcgggcgggcggggtgatgtgtgattagccaaaggggctctggccggggaactggacgtcgagggggtggacgttcttgccgatgctgaggaagttctggccgaccccctcccggcggggggggcccttttccgggaggaccccgccctggggggggggg

SEQ ID NO: 66771 - DNA, 651 bp, Zea mays
  Clone ID: MRT4577_160893C.1
agagctgttggtgctgttatcacactgctgaaggataagctgccagctgcaacctacaaggtattgactgattatcacagcactactgtgaaacttttagcactacaagctgctgctactgacgatgaagaagattgcacatcagaccgaatgcgagaaaggaaggaggatctggaagaaaggctgatgccagaactgaaatccctggtcctcggcacaaacaaagagtgatcaacaacattcttgtgcataccggaccatttcggcgtacatatacaaagcaacactcagcttaaaagtttttttttttttgctctgtttttgcaatttgcaccgtttgaaagcaaaagatagcaggaaacaggtttactgattgtaagaatctgactagtttatactcccgtttacattcctgcactaggtttctactgataacaacaaaattatactatggtgtaatgaggagcatagtggatgttaacagggaatcagggatgaaagtaaaaaaaaaaaaaaaaaaaaaaaaaaaaaaaaaaaaaaaaaaaaaaaaaaaaaaaaaaaaaaagctggaaaaaaaaaaaaaaaaaaaaaaaaaaaaaagggctttgggttgttacccctgcttaagggcgagttccaatcccctggcgg

SEQ ID NO: 66772 - DNA, 777 bp, Zea mays
  Clone ID: MRT4577_160894C.1
gaaaacagcgtcgcccgcactactccgactgctgtgccacccgccagggtgaggctgacagccgccgagtccagcctcaggcgccataggaagcttcgcctcgcccgaccccagggctcggactccacctcgacctcagaagacggtctccgcctcgcccgaccccagggctcggactcaacctcgacctcggaagacggtctctgcctcgcccgaccccagggctcggactccacctcgacctcggaagacggtctccgcctcgcccgaccccagggctcggactccacctcgacctcggaggagtcaccgcctcgcctgacctcgggctcggaccgaccacgccgcagggtggaagcagtgttgcctgtggaaataagtttgaatgctatcaggttcgccaggcaaaatgatctaatcgtcatggattattataattcaatgatggataatattgatgaggtgaccgacaggagggtgatagctttgggagcaatagaaaaggacaagatcaaagtagctagggcctacaacaagaaggtcaaagcaaagtcatttcaagtgggggacctggtgtggaagaccgtcctgcctctaagaagtaaagaccgaaagtttggaaaatggtcgccaagctgggagggaccatataaagtaaaacatgtaatgtctggtaacgcctatttattgcaaacattacaaggcaaagatttacccaaagccttgaatgggcatttccttaagcagtaccatcctagtatgtggcaagatgcctaa

SEQ ID NO: 66773 - DNA, 207 bp, Zea mays
  Clone ID: MRT4577_160895C.1
atggctcttcctccgaggctcggatttggcgccgggtatagaggatggaaggggcgcgcctcgggcggatccgatgatggcggcgtcgatggcgtggggaggaggctgctccttgtgctcctcgaactggagttgttcgttagccgacaaggtttcccaagtcggctctatgatattgccattggaaatgtcagagctatcgtttga

SEQ ID NO: 66774 - DNA, 238 bp, Zea mays
  Clone ID: MRT4577_160896C.1
gtttcgctatacccctcgtgctagatcgccacgcggctctcgacggctctgcgaaattcatagcactcctgcttgctgcgcaatctgtcggtctcgcagctccgtctcacctcgcgagaatccacgcgccgtgctgggagagatctccgccgacgctttcctagatgttgtcgcggcgccgcatccctggcttttatatctccgtacagccccaggagccgactcaccgtttcttctc

SEQ ID NO: 66775 - DNA, 169 bp, Zea mays
  Clone ID: MRT4577_160897C.1
aggggaacatggaattccttctggcggcataaattgcaacgggcaacgcggggcagggcacatacgcccacaagcacctgggacccatatacagccgacgcatcaacgcgtactggtgataaggtcctgcgacccatcagatcaatgcagaccgtcaagctatgccacc

SEQ ID NO: 66776 - DNA, 128 bp, Zea mays
  unsure (1)..(128): unsure at all n locations
  Clone ID: MRT4577_160898C.1
gcttcgcggacattgcattacctggagangacnatcgtgcagggcacgagtcgactagagataggttcaactgaggcaacctgatggaaggatctcgccacagggcatgccttcgaaagaacaggatt

SEQ ID NO: 66777 - DNA, 832 bp, Zea mays
  unsure (1)..(832): unsure at all n locations
  Clone ID: MRT4577_160899C.1
cctcgaggccggccggggctttaactctaatcatcgtgtcgtcggttcttcttccaccccactccatctgcttctctatctagacacacttcagctagtgctttgctgcaagcagcaagcaattgtgcatctcttggggctggttctgagttatcagcatatttggatagtgatactgtccagaaatatgatgatgactttaatctgttgatgtgatggcaggatcacaagctgacctacccatctctttctatgttggctaaggatgtactaattgtgcctatctctaccatttcatcagaaagtgatttcagtctcactggcaggattatcgaggagcgtcgacgtcgactgacctcggagatggtcgagatgctaacctgcatcaaggactgggaggaagggaatgcaaggacccaacatactgttgagaacaaagaacttgaagactcattctctgatctatatcttgatgatgaacaagttccagttgacactctagggtcctctcaatctcaatctcagacacctactgatccacaaccacatgtccaagactgatcttatttagctagtttgcatacttcagcttatgtgcctgtaagactgtaactaaactgtacactgtaaacaatgactctgtgatatgtaagaaaactaaaagagctgtgggctgtactcttttttcctatctagggttttctcacaagggtgagtttttacctagataggtttttaatgaggcagccattgcactaaacagctcagtattaggtattttagtatggttaactgtgtgtttgtgaacagtgaatggatatgggttnctggg

SEQ ID NO: 66778 - DNA, 560 bp, Zea mays
  unsure (1)..(560): unsure at all n locations
  Clone ID: MRT4577_16089C.1
aaattcggcacgaggcccttttctctccttccaacgcgactccgcgcaacaaacgcctaaacaccaactccacgcaacaaggatggatcactttcctcccctcagtcgccgccacccgttacttccaaggatagtgagcaggagggatggcgacgaatacagcactgctgcgtcatgcccagcaagggccagcttaggatgtcatcgtctccctcgccagcggctgcccgcctagatctggatggcaacccatcgcacccctcatcttgcagcgctgacgacttcataccgccgcgtggctctcctcctcgctcctagccccgcatctccgtgctgccgcctcctttgctccgtcgtggggcacggtagtcgagagcggtggagcatcgaggagcatgcccgctttgtcgagtttcagctctgaacgtggcacaatgtgtgtcgcagatacggagccatgcttagaagtacttactcaaagtccagaagctcaagctagtcgtcgggctaccgnnccgatgtactcgaggagccacttcgccatgctgctgcctgctaca

SEQ ID NO: 66779 - DNA, 454 bp, Zea mays
  Clone ID: MRT4577_1608C.1
gctatgtacgtgcggcttgtcttataaagcggcgctgctgctgcttgcctctttctctacgggacaattcgcccgcgagtagggaaccttaagacccggtgtgggtgagagggtgggacgagggaagtggcgtaccggtggtggaggaccacatcatgcttgcactgcactacgcggtctaggggcgctgcgatacgctccgtcactttttcagatggaagatttgtccagaacaacaagcactgagctactgtgggactatgttgctgattaagaacgatatgggtgatctggttgtgggtcgtttgtgaggaagtggctattgtggaatctgtggatgagttattgatgttgattagagtaattgatgcgacaagggggctgtaagcttctagtatgagggattattaagactagggaaatgaagcggtggaggagtatagatcatgttcac

SEQ ID NO: 66780 - DNA, 346 bp, Zea mays
  Clone ID: MRT4577_160900C.1
acccaggcaaatgcccaaattttacaaaaacaaacgggtcccgaattcacggttacaaacaattcaggcgggggggggggactgctggtccaaggaaacaaacaatgcgagcggggcccgcccaacgggggcctgaaacaatccacaattcatgcccctgccccaaaaaaactaaaccgcggcaaacggggaaagaaagctggatgccctaactgccctgcccacccctagggcgggcggcttcggcttttaataatccggggaggggagcttctcctgggtgtgggaaataaaaaacacctcttaaataacccccgcaaggcccccccccacaaggggccccacc

SEQ ID NO: 66781 - DNA, 2375 bp, Zea mays
  Clone ID: MRT4577_160901C.1
ggaccctcgaggccggccgggccgggccggctgacgactgtgcccgtctccttccctgattcatccgcaagcccacccgtcggcgatcgtccatgacggaggatcgagcgcacaaggtcgccgacgagcccgccgcctcaggcaggcaaagacctgaaaggaagaagaggaagtgggatcagcccgcggaggacttggtctccgcggcggtgacggctgctgccgtgtcggggatgcctgtgatgaatttcggtgctctttctgccgttgtactgcctggcgtcaccgcatatggagctgctacattgccaagtgtagtccctgttccgtattcattgccgccccatattgcaccatcggtgctccagaatgctgctgcagcagctcagaaattgagtcaggcaaaaataccagatgaggtcattgcacgggaaattgttataaacgatgcagatccatctgtgcgatataagcttacaaaacgacaaacacaagaagagattcagaaatgcacaaacactgtcatcattaccaggggagaatatcaccctccaaatttacttcctgatggtgagaagcccctctatctacatatctctgctggatctcagttgaaagatactgctgagagcattaaggcagttgatcgtgcagcttcaatgattgaggaaatattgaaacaaggaacaacctcagagtccatatcggtccctttctcctctagtactggacaagctgttcgtccttttagtgcctcagtttttttgggttttgatgcagatccatcattgaatatcacagctcgaatccgtggtccaaatgatcagtacataaatcatatcatgaaagaaacaggggttactgttgtactaagaggaaaagattcggagaatcttggcagttgtcatagtgaagcctcacaacaacctctacacctatacctcacaagtatgcatttaaagaacctagaagctgcaaaagttttggcagagaacctcctggatacagtagcagcagaattcggtgcttccagaatttcttcttcaaaagtatatggtgctgttccacctcctcagcagttgttagctggtgtcgacacctcaggaacaaaatcagatgttcactatattgtagggcccaatgtgttatcgggagctacacattcctttgcatctactggagttattgctcctgttgttgctcctgcagtgacagtgcaatcaggggctccaacatattctggggttccactacccagtaacatggcctatcctattcccccagcaaacggtggggcattttacagtggttatggggacatttatccccaagcaactccgttgcagcagctggcattcacactcaagcatgcctcatcgtcggcaactcaggctgttccagtgacgtccacaccaacaagcatggctacaaaggggaactcaatcttggatgcggagatggataaacgatcccgaaggaaattccaggaactaccggtttcgaagggcccagcaacagaaagtcagaactcacaacaggggtccaaatttgttaagacaggtttagatagttcaggtaacattgggagctcatcaattgcacctccgaagaaagttcaccctggatcaaatggaatgcttccggcagaagaagcggatatgccatcacatctctctatatccactaagatgctaccaccacccctgaagagcatgctgccactgccacccagaagcatgcccccaccaccacctaagagcatgcctccaccgccaccaaaatttccttcagatgagtttttgtcaagaaacgagaacaagttttttcctttaaaggagccaacagcacctccaaggtcctttgatgcaatatcagtcttgccatctgaacgacgaccaagggagcctaaggaggaaaaaacaaaaggcacacctgtgtctgatactttgctgaaacttattgattatggagatgacgacgatgacgacgatattgatgtgacagacaacatacctaagggcaatccaactcctggttcagagcagaaaccattttgggctgtttaaaactgggtctgctaacgtagtctagtgtgaattcttgttgataaggatgcttgctgccttggtgcatcttctgaattgaagaggcaatcgagctccttgttcgtgtactgtagtaattctaacaggcaatgagatttctttgaacttgtattcattctggcgtagtcaaaatgaaccgtttgttgttttggttcagatacgatgatgtttcgtttttagattcgacgttggttgctgaactcgtagcattttattgtcggtattatgtaattgttagagcctatgtcaattttatatccactgtcgtgc

SEQ ID NO: 66782 - DNA, 817 bp, Zea mays
  Clone ID: MRT4577_160902C.1
acaaagttttggcagagaacctcctggatacagtagcagcagaattcggtgcttccagaatttcttcttaaaagtatatggtgctgttccacctcctcagcagttgttagctggtgtcgacacctcaggaacaaaatcagatgttcactatattgtagggcccaatgtgttatcgggagctacacattcctttgcatctactggagttattgctcctgttgttgctcctgcagtgacagtgcaatcaggggctccaacatattctggggttccactacccagtaacatggcctatcctattcccccagcaaacggtggggcattttacagtggttatggggacatttatccccaagcaactccgttgcagcagctggcattcacactcaagcatgcctcatcgtcggcaactcaggctgttccagtgacgtccacaccaacaagcatggctacaaaggggaactcaatcttggatgcggagatggataaacgatcccgaaggaaattccaggaactaccggtttcgaagggcccagcaacagaaagtcaggtattttctctgaccttgtctgaagctcacaggtggcaatagatatacataactcacaacaggggtccaaatttgttaagacaggtttagatagttcaggtaacattgggagctcatcaattgcacctccgaagaaagttcaccctggatcaaatggaatgcttccggcagaagaagcggatatgccatcacatctctctatatccactaagatgctaccaccacccctgaagagcatgctgccactgccacccagaagcatgcccc

SEQ ID NO: 66783 - DNA, 2337 bp, Zea mays
  unsure (1)..(2337): unsure at all n locations
  Clone ID: MRT4577_160903C.1
ttcaggtacacgtataaaacataagatcatgaattgcatgtggaatatgtgctgtgttgcatcanaactcctggataattagaagtgcttcccatgtttgatggtgccatcataaacaaaagggcaaatgtttttgtgcagaacattttaatgttaatagatgtcacaatggcatacaaagtttttagtgtagttgacagcaacagtgtacatctaatttacaaacaaaagcaaatatgctaaaaactttgtatgccattgtgagtttggacaccatttacattaaaatattctgcataaaaacatttgcccttttgtttatgatggcaccatcaaacatgggaagcacttctaattatccaggagttttgatacaacacagcacatattccacatgcaattcatgatcttatgttttatacgtgtacctgaaagaatataatcatcttattgtttagtccttgtttagcactttggaaattaataactactgtataaatctactttctttgaaggaactttgcttgctcttgtagttcttgcagttccctcaacggagactacaattcaaatttgacattactattaaaaacaatagttggattgtcagattggcatcatcatgtttgttgtattcttatacctgcttctaacatctcatttcattccaggtattttctctgaccttgtctgaagctcacaggtggcaatagatatacatgtgggtttttcacaggcttgtaacaaatcggagtttgcattggctgtggagtgtaactgacaagatgcagagctcttcaaatatcttgttacttttttcagcaaatagaaatttaacctttgtgttttatctgtttctgtttgcttacagagttcactgatgttgattaacattgctagcatgccttaagttttgaaattggttggttggtatagtcttgttattagttgttgttagtaggttttgatacattttatttctttccactctttagagaaagttttgcatttgcaaaatcttcacattcagtggaagctccaagcaatataaatatacaaattacacaaggtccttccatatgaaacttcacttagttaagcagactcgactcatctttgttatgttattatagactctcccaatatgaaaattatatttacaggcatctgcttctatattaagataacattctgaacctgtcaagggtcttgctaactagtattgtgcttccatgtcagatatgcttatatttgttctgtgtgcaaaattgtttctgatttcattcttatgcatgccattgcgttacctactctataacacaagaatttgatggatgaatgttcttgttttctttcatctttccagaactcacaacaggggtccaaatttgttaagacaggtttagatagttcaggtaacattgggagctcatcaattgcacctccgaagaaagttcaccctggatcaaatggaatgcttccgccagaagaagcggatatgccatcacatctctctatatccactaagatgctaccaccacccctgaagagcatgctgccactgccacccagaagcatgcccccaccaccacctaagagcatgcctccaccgccaccaaaatttccttcagatgagtttttgtcaagaaacgagaacaagttttttcctttaaaggagccaacagcacctccaaggtcctttgatgcaatatcagtcttgccatctgaacgacgaccaagggagcctaaggaggaaaaaacaaaaggcacacctgtgtctgatactttgctgaaacttattgattatggagatgacgacgatgacgacgatattgatgtgacagacaacacacctaagggcaatccaactcctggttcagagcagaaaccattttgggctgtttaaaactgggtctgctaacgtagtctagtgtgaattcttgttgataaggatgcttgctgccttggtgcatcttctgaattgaagaggcaatcgagctccttgttcgtgtactgtagtaattctaacaggcaatgagatttctttgaacttgtattcattctggcgtagtcaaaatgaaccgtttgttgttttggttcagatacgatgatgtttcgtttttagattcgacgttggttgctgaactcgtagcattttattgtcggtattatgtaattgttagagcctatgtcaattttatatccactgtcgtgcaaatataattttaataaaaaaacaaagataacgacattgcttggaaaccgtttttaatgaaggaaaatggcaggacatatggtatggttataattgttagagcgtaaataaaaaaaaaaaaa

SEQ ID NO: 66784 - DNA, 2877 bp, Zea mays
  Clone ID: MRT4577_160904C.1
cggacgcgtgggggagccaacagcacctccaaggtcctttaaaggaaaaaacttgttctcggtggttgacaaaaactcagcattccgggacaagtcggcacgagggcaaaggggcaacgcgtccaaccggccggacctcaccggctcatccctcacgcccccaaggcccaagtccccaaccccggctgacgactgtgcccgtctccttccctgattcatccgcaagcccacccgtcggcgatcgtccatgacggaggatcgagcgcacaaggtcgccgacgagcccgccgcctcaggcaggcaaagacctgaaaggaagaagaggaagtgggatcaacccgcggaggacttggtctccgcggcggtgacggctgctgccgtgtcggggatgcctgtgatgaatttcggtgctcttcctggcgttgtactgcctggcgtcaccgcatatggagctgctacattgccaagtgtagtccctgttccgtattcattgccgccccatattgcaccatcggtgctccagaatgctgctgcagcagctcagaaattgagtcaggcaaaaataccagatgaggtcattgcacgggaaattgttataaacgatgcagatccatctgtgcgatataagcttacaaaacgacaaacacaagaagagattcagaaatgcacaaacactgtcatcattaccaggggaaaatatcaccctccaaatttacttcctgatggtgagaagcccctctatctacatatctctgctggatctcagttgaaagatactgctgagcgcattaaggcagttgatcgtgcagcttcaatgattgaggaaatattgaaacaaggaacaacctcagagtccatatcggtccctttctcctctagcactggacaagctgttcgtccttttagtgcctcagtttttttgggttttgatgcagatccatcattgaatatcacagctcgaatccgtggtccaaatgtatgactatgtgatcctggttttatttgatcattttgttactagcacatctcagttaattttgttaattactcaatttatgtgctgttgtctttcaattttttgaaagatctaatcataaagctttctctggcatcccaatttggatgggagaaactgcttttctgctgttggtgcttgtgctcttttgttattatataggatcagtacataaatcatatcatgaaagaaacaggggttactgttgtactaagaggaaaagattcggagaatcttggcagttgtcatagtgaagcctcacaacaacctctacacctatacctcacaagtatgcatttaaagaacctagaagctgcaaaagttttggcagagaacctcctggatacagtagcagcagaattcggtgcttccagaatttcttcttcaaaagtatatggtgctgttccacctcctcagcagttgttagctggtgtcgacacctcaggaacgaaatcagatgttcactatattgtagggcccaatgtgttatcgggagctacacattcctttgcatctactggagttattgctcctgttgttgctcctgcagtgacagtgcaatcaggggctccaacatattctggggttccactacccagtaacatggcctatcctattccaccagcaaacggtggggcattttacagtggttatggggacatttatccccaagcaactccgttgcagcagttggcattcacactcaagcatgcctcatcgtcggcaactcaggctgttccagtgacgtccacaccaacaagcatggctacaaaggggaactcaatcttggatgcggagatggataaacgatcccgaaggaaattccaggaactaccggtttcgaagggcccagcaacagaaagtcagaactcacaacaggggtccaaatttgttaagacaggtttagatagttcaggtaacattgggagctcatcaattgcacctccgaagaaagttcaccctggatcaaatggaatgcttccggcagaagaagcggatatgccatcacatctctctatatccactaagatgctaccaccacccctgaagagcatgctgccactgccacccagaagcatgcccccaccaccacctaagagcatgcctccaccgccaccaaaatttccttcagatgagtttttgtcaagaaacgagaacaagttttttcctttaaaggagccaacagcacctccaaggtcctttgatgcaatatcagtcttgccatctgaacgacgaccaagggagcctaaggaggaaaaaacaaaaggcacacctgtgtctgatactttgctgaaacttattgattatggagatgacgacgatgacggcgatattgatgtgacagacaacacacctaagggcaatccaactcctggttcagagcagaaaccattttgggctgtttaaaactgggtctgctaacgtagtctagtgtgaattcttgttgataaggatgcttgctgccttggtgcatcttctgaattgaagaggcaatcgagctccttgttcgtgtactgtagtaattctaacaggcaatgagatttctttgaacttgtattcattctggcctagtcaaaatgaaccgtttgttgttttggttcagatacgatgatgtttcgtttttagattcgacgttggttgctgaactcgtagcattttattgtcggtattatgtaaaaaaaaaaaaaaaaaaaaaaaaaaaaaaaaaaaaaaaaaaaaaaaaaaaaaaaaaaaaaaaactaaaaaaaaaaaaaaaaaaacaacaaactaaatcaacaaaaaaaaaatataattaaaaacaaataaattaaataggggggaggctttttaagataccaaatttaaaaaaaacgcgtacgcaa

SEQ ID NO: 66785 - DNA, 265 bp, Zea mays
  Clone ID: MRT4577_160905C.1
gcaggccccagccggcaacttctaccgagagccatggctcaacaccaaactggacagtagacatcatgatccctccagttagctctaattacagaccccaccagtacagcttgacagctcccggcaccatcccccccttcatctgacttattgaacttttacaaactaacagtcaccagcaccaaagaattaagtcaactaacctgccttgaattttagaccagcaatccatatggctttatctggtataaatcttctgcctttg

SEQ ID NO: 66786 - DNA, 362 bp, Zea mays
  unsure (1)..(362): unsure at all n locations
  Clone ID: MRT4577_160906C.1
gggtattattattattggttttttttttattttttttttttncgccgccgttccccaaaatttaatttttttaggcatccatctttcgcaaccccttttgttttaaaaaaagctaaaaaatggcctgttacccaagccaaattttgttataaaaccatatacccctagaaaaagataccggttttatttggaccccgcccccgcaagtttttctggctatatttctccaaaaaaataactaattgcccaccccaaaattttgtgggacccattgtgaaacttaatccatttttttttggaaaagggttgggcccaaaattatttttttatttaaaaagtcccttgaaaaagcctttttcttt

SEQ ID NO: 66787 - DNA, 421 bp, Zea mays
  unsure (1)..(421): unsure at all n locations
  Clone ID: MRT4577_160907C.1
gcgttgctagtaacggttgctctagatccgttcattgtggtggctttgtgaggttgaaagcggcgagcgaattagaagatgctggacatgctgtgggatgacgtggtgggcgggcctcgcccggagacggggctggagacgttcgcaggtcataccgcccgcccgctcgtcatgaacaaagacgcggacggcggcagtgactagcgggcgcagtcgacgccgtcgacctcgacgacgtcgtcgacgccgtcgttgtcgtcgactccgcgcggcgtcgggaacgtgtgccgaagagttcttacacccgcggaggaacctaggtgtccaggtgatggtgggccatgtttgccaccggccgcagcctgctgccccaacgtctgagactgggctctatggcgacgagaccangactgccaccgct

SEQ ID NO: 66788 - DNA, 898 bp, Zea mays
  unsure (1)..(898): unsure at all n locations
  Clone ID: MRT4577_160908C.1
cccttcttatcgcctcctacctcactccctctcctctcctctctccccccacatctgccgccatggcccaagcttgggccttcctcctcccggtcctcgtcctcggctcctacgtaaccagcctcttcttccccagctatatatccaaccccctctgcggcggcgatgggggcagatccttgttcctctgcgcgcaggctcccaaggaccaggacccgtctcctgctgtcagcaccatgtacaagaccgccttccacttccagcccgccaagaactggatgaacgatccatctggaccaatgtacttcaatggcatctaccatgaattctaccagtataatctcaacggtcccatttttggtgacatagtttggggccattcggtttcaacagaccttgtcaactggatcgggcttgaacccgcgttagtacgggataccccaagtgacatagacggttgctggaccggctcagtcaccattctgcctggtggtaaaccgatcatcatatacactggtggcgacatagatcaacatcaggcacaaaacatcgcgtttcccaaaaaccggtctgacccgtacctgagggaatggatcaaagcacccaataacccggtgctccgaccggacgaaccagggatgaactccatcgagttcagggatccgacaaccggttggatcggaccggacggactgtggaggatggcagttggtggtgagctgaacggctacagtgctgcgcttttgtacaagagtgaagactttctgaattggacaaaagttgatcacccactgtattcacataatggatccattatgtnggnagtgtccggnatttctttgcggtattgncgggcaatacgctggactggatctgtccgcagcgatcccacaggcgc

SEQ ID NO: 66789 - DNA, 177 bp, Zea mays
  unsure (1)..(177): unsure at all n locations
  Clone ID: MRT4577_160909C.1
tttggggcccaagcgcgagaggcgagagctcagggaccatcagaccaccggcaagagggggcaaagggagggagccagggaccaggccgagaccagcccgcacccagagcccaagcaccganngccggcgagaagacgacgacacaacaaggcgggcgacaaagaggggcgagagac

SEQ ID NO: 66790 - DNA, 102 bp, Zea mays
  Clone ID: MRT4577_16090C.1
ctaaaacaatcatcgcagctccccgacgccgattggcgacagccgaatgcaacacccctcttcgacgcctgcacagcgagagacaagacacggacggacaat

SEQ ID NO: 66791 - DNA, 239 bp, Zea mays
  Clone ID: MRT4577_160910C.1
atatttctccccacgaccgttataataacaaaccttaaaatttaagaaaattggcttttttcacccttcaacctatatataccatatatgcatggacacgtacaattcctcttcaccatcaccatcaacaagggtggttagcagcattgactataaacaacataataccctcctcttttatagattttccgacccctgggccgactcttttttctaccctgtaattccttaccggttcc

SEQ ID NO: 66792 - DNA, 398 bp, Zea mays
  unsure (1)..(398): unsure at all n locations
  Clone ID: MRT4577_160911C.1
gagaaatggtgaataagaaaaactaaacacaatagctatccanccaaagctggtgatgtctcataatatcggtcatcatcagaagcatcacatgtacatgaagcacaattaaagaacgaactcagcatgatcaagagatcaaacagtgagtaccataggaagatacaatctcttgagcaggaaaatgaggatctcactataagagttcaaactatggaaaagggattttagcaaatgtcccacgttaaaaagaaccttgtaaagcattaaattggacgagataaccatgcacccattcactcaaaaattgagttattggaaacgaagctctcacatgcatttgacgaaaacaaaatgtacatagctcaacataatattcccatgccttaatggcaacc

SEQ ID NO: 66793 - DNA, 202 bp, Zea mays
  Clone ID: MRT4577_160912C.1
tgccacgcgtgcggccaaacagaaggggtcgatatatcacgttgcggtgcagcccttcctgtctcagaaagacgcccatcacctactacaaacatgactacggtttatactgtcccgagggttttcaacgctagtgcctcctctgtctcacgcattcgttggtgggagtgagcctcgaggacggcgagcactgagctttcat

SEQ ID NO: 66794 - DNA, 694 bp, Zea mays
  Clone ID: MRT4577_160913C.1
taaatcggactcgtcatctgtgtttggtcgtcatagagaacagcttagtgtcaccaagactttcggaaacgaatgactgaatctggcttgtacagcttaatgatgatgtcacaagcaaataaaacacgtggatctatacttagaatcagatgtaacatgcagtgaactgacattcagaatgagtaggaggtatttctcatcaattagatcagactaatctaggttttcctcattatgccagtactgcagaaatgaccgccgacaaataaactaaaacttgtatcaaaacagcgggggaagcagaaaaaaacaagcagtttgttagtgttctctcagacaaatgcctcgattgtccccatggtttaatggaatggattaaatcggactcgtcatctgtgtgtggtcatcacagagaacagcttagtgtcaccaagactatcgcgggcacgaatgccacagcccacggcgaaaacctagaaaatgcctagctccgcaaagctacctaggacacggtttcatcgcatcaccatggaaagaagaacgcagcggaggcgagggaagacgaaccttggcccgcatcgcgtcggcgcaggtggagcgcgcgctcgagctacctgcccccctgattgcggcggctgagtactagtgagttggagacgggcctgatctcccggccggcctcgaggtacccaat

SEQ ID NO: 66795 - DNA, 268 bp, Zea mays
  Clone ID: MRT4577_160914C.1
atgatgatgaggaagagcagccacagtgcgtggagacagacaaaggttgccaacgccaaagcaaaaggagcagaaatggcattgatgagaccatttgcacaatgagacttcgccaaaacattggtcagaattcatcacctgacatctacaaccctcaagctggtagcatcacaaccgccaccagccttgacttcccagcctctggcttctcaaactcagtgcccagtatggatcactccgcaagaatgctatgttcgtgccacactac

SEQ ID NO: 66796 - DNA, 286 bp, Zea mays
  Clone ID: MRT4577_160915C.1
tacataattcttcatcatctacactgtttgagatatacttcctcctcataacatcaagcatgttgatacatttaagccaacatactcccatcacatttaatatattcaacatccttatcaacttaatccttatcgatattattcaattcctaaatagatacctgatcccaaagacataaatcctcaatcatcatatcactattattatcctacatctaatcctacaatgatacctaatccataatacaacctaccatttaatcttaacaaaattcacaatcctaac

SEQ ID NO: 66797 - DNA, 413 bp, Zea mays
  unsure (1)..(413): unsure at all n locations
  Clone ID: MRT4577_160916C.1
gtaccgccactgcagggtacacggntcacggnaatttcccgaggtacgaccccacgaccgtccgagagctattaaaaagatggattaatgtcactgaagttagatgaaccctaggacctaattaagcttaatgcctgtgatacaggggataggatggcaagttagtgggcgggtttgtgttcttttcccagaatcaagggggcgactactataatctacttgaacacacctacagctacaaaaaaaaactatgttgtcggtaccttttctgaaagcaagtggggaatacccccattatagcaaatttactggcgatgtgtatcaatcttcccttttcgccagttggggtaatagcaaaaaaggcccgccccgttcgcccttccaaaaatttgcccaacctgaatggaaaatgg

SEQ ID NO: 66798 - DNA, 249 bp, Zea mays
  Clone ID: MRT4577_160917C.1
caaaaacaccccacaagttcctaacttgttattattccccggggccacaaaaagaaaactgagcgtgccgggccgggggtacccgttcccatcgcaattccctaactcccttggcagggcttctcctattccctggcgggggggggccccctcgtagccaggggttgggcccacaacattcctgaagagggggggggggggcccatgggcttgtggccactggtgttgtgggagacagatactggtttg

SEQ ID NO: 66799 - DNA, 454 bp, Zea mays
  Clone ID: MRT4577_160918C.1
gcctagtccaacttttagttttttaacaacaaataactttccaacaaactagcaaaaagaatcaccaagcgaacggacccaccaaaaaaaaaaccccgcccgccaaaagggggggggaaccggacaagggaaacaagaaagaaaaagggggggaaggggaaggccaccgaaaaagaaaaacctggaggaaaaaaaggaaaaaaaaaggaaaaaaaaaagagaaaagggggaggcccttagagagggggggggaaaagggggggggggcaagccgcacggaacggggggcgggaccaaacccaccgggcgaggggggacggccggcgagtttccccaaaaccaaaccggcttctttctcgggggggggccgcacccccgacaaaatggggggcaaccggcagcacaggaaaaccaggaatatatggggccaacaagaaaaaaaaaggggcccggc

SEQ ID NO: 66800 - DNA, 577 bp, Zea mays
  Clone ID: MRT4577_160919C.1
ttttcaaaaaggggcctgccgactaacggcctccctcactctgagaccgcagatccggtgaccgctgagtgcaagccgcacgaacccatggtctgcggtgagcttgcctgcacctacgccgctctcatcctcagcgacgatggcatgaccatcaccgccgagaagatcgtcacgatcgtgaaggcggcgaacatcaaggccgagacctactggccagcactcttcgccaagctcctgaacaagcgcaacgtcgaggacctcatcctctccagaggatctggtggaggagctgatccagttgctgctgccacacctgctgggggtgctgcggatgctgctgccccgggtgtggaggagaagaaggcagaggccaaggaggagtctgatgacgacatgggcttcagaccgttcgactgaggagaccccctcaaccagccattagcaaatcatactggtgcagagaaagactatcttgccttatgcgatgtctctaggcttatgatacaactacccaacttttgagttgttgagatgcggctatggcatgaactccaaccattttatgaaggcgaaaccc

SEQ ID NO: 66801 - DNA, 369 bp, Zea mays
  Clone ID: MRT4577_16091C.1
cctcttccttctctcatctatctccttagtattattcgatcaaggcgactacgatggaagagctcttataaagcctggtcgtcaacaactacttcaaccttactcatcacttcaacttcttttactaatattgaaccttcacaacaacacctttttacacttcatcattaactgacgtatattaacctctgaacttcaaggataacatctccgactattctcttaaacctgtctccaacgttataaacaacttcaattctattattaaacctgctctaattttcaattaccctacttcacatacttacatttataacttcatgtttcaacatctttattttaccataaattactttatatttttcattc

SEQ ID NO: 66802 - DNA, 192 bp, Zea mays
  Clone ID: MRT4577_160920C.1
cacaaaagggggtggggggaagcattcaaaagttcactcaaaatttcaatcgatccaaaccctaatacctcagtttattagaggcaaacagactggaactgctacatcggacggggccccccgcgaggactggaaattacggcctctttgctgttttaccccctttggggggggggcgctgcttgggcgccc

SEQ ID NO: 66803 - DNA, 266 bp, Zea mays
  Clone ID: MRT4577_160921C.1
gcctaccacaatggcagatccttctccacctttgacaaggacacagattcagccatcaccaactgtgctctgtcctacagaggggctttctggtacaggaactgtcaccgtgtcaacatcctggggagatatggggacaataaccacagtcagggcgttaactggttccactggaagggccacgaacactcaatccagtttgctgagatgaagctgagaccaagcacagcagacatcttgaaggcaggcgcaatcaggcataaatt

SEQ ID NO: 66804 - DNA, 227 bp, Zea mays
  unsure (1)..(227): unsure at all n locations
  Clone ID: MRT4577_160922C.1
agcacggcncgcnccnagacaagancaacgaggggaggcacgaggacaagcacncagcgncggccnccccgccagacacagaagangacaagaaggccaaaaagcccaagaagaagaagaagcccaangggaggaaacanccanagcancacganccgggaggaggcaaagccgccgancnagagccgaggaggaacaaacaggcanccgggagcaaccaggcaggg

SEQ ID NO: 66805 - DNA, 381 bp, Zea mays
  Clone ID: MRT4577_160923C.1
ggagcactgtggtgctccatgacctgagctgattacagcacggggggacaccttcttgtatctgtcagattcctggttgaactgcaccacccaatgtttcctggaccgaatctacagcatatgcactaatgccaccggtactaatatagcaaattactgcagtctaattgctgtcgtcctacctgcagtgccggttccgggtcgcacatggatcctctctcgaatactacataggctcattctacatatctaacttacgacagatgtacttcaaaaacacaactatactgagcgaaataagactctatggatcctcaattgactggcgactgagtaacgctaactagacaactgtgacagctagtcattatactcttctag

SEQ ID NO: 66806 - DNA, 529 bp, Zea mays
  Clone ID: MRT4577_160924C.1
cccacgcgtccggccacactgaagccaactcatagtgatgcagtccttcaggagatcttagacgcgtgggtggctactgaggaaatactgcaaactgccatggctgttgaggatgcacctccaaccaatttgatcaccgagaagtcattaatgaaagatgcttcagaggagccagttcaaactaacgaaccatctgagcagccactgaaaactgaagagattgagaagccacaacaaagtgaaaagattgctacggacacgagagggagtgaagtatctactgaggagatgctagagcttgaaagtaatgccactaaattaaacaaggatcaatcagaacttgaagggctttcatctggtaggaatcctccaaacttccaaagcaatccaaatgctgggcagcgatcagagtccaaaggcattgtggccgagaaggcagctgaccatataatggaagctgaagatgatgtggatgctgagcactcatcagaatctcaaagcgttgcacctgctgaggttcgaaaggagc

SEQ ID NO: 66807 - DNA, 326 bp, Zea mays
  unsure (1)..(326): unsure at all n locations
  Clone ID: MRT4577_160926C.1
aatggacccacgcgcggngggagaaagaggacatgcccgtggtccgctgaatgggcgacatgctgaccctgcggaccggggacctgctgctgctgagcggcgccgccaagggctgctccgggtggggatctgggcggaaaccggtgctgaccacctgcctgcactgaccgcggaaggcgccgggcccacggacacgggcgctggcgcggtgacccatctcgcgcatgtaccactccaccagaaccaggctgcccaacgccaccgtgctctcggccaggaggaacacaaacgcggcgtacaacttgaggcgcgtggacttccccacc

SEQ ID NO: 66808 - DNA, 688 bp, Zea mays
  unsure (1)..(688): unsure at all n locations
  Clone ID: MRT4577_160927C.1
gtctgtcgcgcaggtaaatgacttaatccatatagccgatggcgcgtttaaccggagccagattcttgccgccgagaaggctattctgaacagcatggagtggaaccttacggtccccaccccgtaccacttcctgctgcggttcgcgaaggctgccggtagtgctgatgaacaggtaaagattgagctactgttctgttccctgttctgttctgtcatcattctgaagtcctgtgttacggcggatgcagcttcagcatacgataaacttctttggagagctcgcgctgatggactacggtatggtgatgaccaatccttcgacggcggctgcttgcgctgtgtacgctgctcgcctcacgttggggaggagtcctctctggacagagaccttgaagcaccacactggcctcaacgagcagcagatcatgtaagttgctctcctctccatggatgttgtccgtctgagtgagcttcgagtggtggcatgtatataaggctttcttctgtacaatgatcgtcagggaaggcgccaagacactggtcggatctcatgctgctagtgctagccctgatgcgaggctgaaggccgtctaccagagtacgncacgnagcagttttgggcgtgtggctctgcacccaccgcaccgactgctcttnccgaccttgtctagagtttttacttgac

SEQ ID NO: 66809 - DNA, 241 bp, Zea mays
  Clone ID: MRT4577_160928C.1
ataggacacgatggcaagaaccgggaattaccgccccctaccggaaggctaaccaattttccgtgtagtgagtcatattaaagcttggggcaactatggaaataggttgttttttgtgcgaaattggtatccggtgacaaatttacacaacaaacgagcctgaagttataaatgagaaagcttgggttgcttaatgagggggctaacttacaatagtgggaatgggtttaatgactcgttt

SEQ ID NO: 66810 - DNA, 381 bp, Zea mays
  Clone ID: MRT4577_160929C.1
atacacctctattgttaattttatattgccggtcattttcagctcatcatggcctttagaacgacttcggctcactcaaaaacgaccgtcatcgtgggtgacaggtctttagatgttgctgatctcgaagtaatcaagttggaaagccttactgcgaaggacccagctgagatggcaaaacttttgatagctgctgagaatcaggggtttttctatatctcttgtgatgaacgtctctcggggaaaatttccgaatgtctccgaacctcttacttgaactctcacgaattcttcactaagcctttggacgagaagatgaaggcgtttagagaggatgctaattgctgctacaagcgtgcaggcatggagtcattcggaata

SEQ ID NO: 66811 - DNA, 315 bp, Zea mays
  Clone ID: MRT4577_16092C.1
atggccgagccacagccgcgcacctccacctccgaccctcgttcccacgaccaccatcttgacctcaagtaccgactgccccccgtggacactcgcaccatcatcgagctctccatcgatgactacatctacccaaacaccaacctctacaacgtctccggcctgccaccccttccaaatctcgcccaagatctgtgccgcctcaagtgcctcaagcacaagaccggcgaggtgttcaccgcgcttctcactacaacctcatgcgacagtgacaccaaggaggatgagcaggcctcaatggtcatgtcgctttga

SEQ ID NO: 66812 - DNA, 451 bp, Zea mays
  Clone ID: MRT4577_160930C.1
cggacgcgtgggctacatcatcttcattaaaggtagctagcaagatatggtttatttatttcaagagttagagggcaaggatacgatggagcctcaaatatgagagggcagtttcatggattgcaaagattggtattggatgaaaacccatatgcattttatattcattgttttgctcatcaattacagttggtggtagtttctattgccaaatgttgtgactcagtatatgatttctttaattacatcttattgattgtcaatactgttagtgcatcttgcaaaagaaaagatcttcttcttcagagacatcatgataaaattgtggaagaattagatagtggtgtctatattttctgggagaggaaaaaaccaagaaacttgtctcggcaggtcaggggatactaagtggggcccacattataagacattggtgcgtatctttttatgt

SEQ ID NO: 66813 - DNA, 130 bp, Zea mays
  Clone ID: MRT4577_160931C.1
ctcagagcctcatatcgccatccaagttctgctgactcgaagatcaacgcaacaatatggagaagcactcattcggaagcgtcggcgactccttcagcgtcacctccatcaaggcctacgtggcgtagtt

SEQ ID NO: 66814 - DNA, 496 bp, Zea mays
  Clone ID: MRT4577_160932C.1
accggttcccatgggtttccacgccgtctcctccgaggtggtctcctccccggtgcgcgccctgtcacgcaccctcccccagcgcccaggctgtggtggtttacctaagcagtccgggatgaggcactagacaaaattcgcaagacctcaggatggaccggcgcacttcgctgggaggtctctggttcttggacgctcggacaaaagagcaggccctgcatgcatgccactattgaagaaatcggaagggacaaatcgctcatcgcagaccaagctaaagaaaagatggacaagggaatcgaaacagtgcaatgtaacttcaacactgaggaggacaggacaggcaaacccgggcatgcttgaccgaattgaggatgaggactacgaaactccaggaaaattgaacagcattggagagataaggactcgagatgcaacttctcttcttattcagagatatgataagggaagcctcaagggttattgaaaacactat

SEQ ID NO: 66815 - DNA, 214 bp, Zea mays
  Clone ID: MRT4577_160933C.1
aaatcgccccattccctgactatcactggctcactgcccttccacctacagggtccaggttaaggttaagattgataaaaatggccgccctctacctgagagtagtctcaagcaagcctttaaggaaatatacaatgcattgagcaaattttgttcagagcttaccacataacaagtggcaatggttacttttgctagttaagcccgtttgggt

SEQ ID NO: 66816 - DNA, 450 bp, Zea mays
  Clone ID: MRT4577_160934C.1
cccacccggccgcgtgcccggggctggcgctaggactggcgctagcaatcatgctgaggatcttgggaaggtgcccgtggcggggtccatggcggggtgcatcggcgggggcccgcgccgctacttcgggaccgaggtcgagaaggaggaggagtacacctaggactacacctacatcatgaagcacaggaccaatccgatgaccactgacatctttggggactgcatctttgagccctacactctggacgacagggaagacaccgtgggagcaaaggaatgatgacagtcctactgcttggataagtgctagcatgacgaggagcctgtgaagtagtgcttgagctgctgcaagaattgcaagaagaatgagtatggcattgactgctgcattaatggatgctagaaggcatactgcaggaagaactgaatgcatactgaagagcttac

SEQ ID NO: 66817 - DNA, 751 bp, Zea mays
  Clone ID: MRT4577_160935C.1
ccggccgggttatttcccggtgttatcggagcagcacgagacgtacgcatcttctggctcacgacgatagccgagccggccggggatcggccaccacgtacgtacgcatcttctggctcacgacgatagccgaggaattcgaaggaccgaacgagaagctcctgcgtggtatctacgtctaccccaccagctagccaccccaccacacgcgtagcgcgggaaatgccggcggcggcggccatgacgacgaggcgggtggtgctggaggtgctccggtcggcctcccgcgacgccttccaggtggccttctccttcgcggcgaggccgcccgtgtccaccatgctcaagccggccatcaccaagcccctctaccaccaccaccacgacaacgactaatctggcgcagatctacagcacggccgtcggcatgccttcacagcccggtgggtgtgacgactatatatttcgtcccaattgatgacgtactaccacatttcgtcgctactactctagtaagcaacgcaaaagaaaatgttgtaagattgagcctgagagcttgagtcactaatgtaaattgtatacgactgactatatatagagcatgctctgtaaccatatatattgcccgggcccccttgccctcgcaatctatgctctacagcaatggatctttattccttgtgttagaacataaaaaaaaaaaaaaaaacggtctttaaaaaaaaaaaaaaaaaaaaaaaaaggggcggcc

SEQ ID NO: 66818 - DNA, 683 bp, Zea mays
  Clone ID: MRT4577_160936C.1
actcccggccgcgattgccgtcctcgaggccggccgggtcgatcggccacgtacgtacgcatcttctggctcacgacgatagccgaggaattcgaaggaccgaacgagaagctcctgcgtggtgtcaacgtctaccctaccgtaccagctagccaccacacgcgtagcgcgggaaatgccggcggcggcggccatgacgacgaggcgggtggtgctggaggtgctacggtcggcctcccgcgacgccttccaggtggccttctccttcgcggcgaggccgcccgtgtccaccatgctcaagccggccatcaccaagcccctctaccaccaccaccacgacaacgactaatctggcgcagatctacagcacggccgtcggcatgccttcacagcccggtgggtgtgacgactattgatgacgtactaccacatttcgtcgctcctattctagtaagcaacgcaaaagaaaatgttgtaagattgagcctgagagcttgagtcaccaatgtaaattgtatacgactgactatatatagagcatgctctgtaaccatatatattgcccgggccccccttgccctcgcaatctatgctctacagcaatggatctttattccttgtgttagaacataatataagtgaattgtccacctccaaaaaaaaaaaaaaaattttggcctgcc

SEQ ID NO: 66819 - DNA, 569 bp, Zea mays
  Clone ID: MRT4577_160937C.1
aattcggcacgagggacacacctctccttggtggttctggggtagataacttgattagtgaactacaatacatgcagaattttgagcaggttggtgcctcatcatcagttccagtcactactggcagttttgatgggtcaaggctacatgatacctctggccatcatctgatgacctctttacctagtgttgggaggccccttctgggtactcatgctgctgaagctcctgccatctcattaagtgtcgggtcagaacaaactacgtctctgcttggtggtggcaccgaattaccttgtacggtgaagctaagaatatggcgccacgaaatgaagaatccatttatcacattagggcctgaggcatgcctcttgacaattcctcatgctgtactttgcaggtgcccaatgttccttctttcccctaagtgttcctgtgtgtcaccaccactaactagatcttgtgctgccgcttcttaatgtatttaatgcacgacatgcaaaagtcttggtctttactctttttcatgctaattctgaactgctacaaaactggtggcaatcaacttc

SEQ ID NO: 66820 - DNA, 1244 bp, Zea mays
  Clone ID: MRT4577_160938C.1
ccgggatcgcatacaggggcaagagtgtagtggcgtaggagcaaagttggtctctgatctttcccctgcaagggaaagagaagaacagagacgcaccagtgtatagggtttcggcttgcctgtgcgtgttactgtcgcaatggcaggaggtctcttctccatggagcacccatgggcctctgtttttggcattctaggccgacgttcctccgcgtgtaccggaagaagtcgacggaggggttcagctcggtgccgtacgtggtggctctgttcagctgcacgctgtggatcctgtacgcgctggtgaagaccaactccagcccgctgctcaccatcaacgccttcgggtgcgtggtggaggccgcctacatcctcctctacctcgtctacgcgccgcggggcgccaggctgagggcgctcgcctccttcctcctcctcgacgtggccgccttctcgctcgtcgccgtcgtcaccgtcgtgctcgtcgcggagccgcaccgcgtcagggtgctcggcagcgtctgcctcgccttctccatggccgtcttcgtcgcccccctgagcgtcatcttcgttgtgatcaggacgaagagtgccgagttcatgcccttcaccctctccttcttcctcaccctcagcgccgtcgcctggttcttgtacggcctcttcaccaaggacccctacgtcacgctcccgaacgtgggcggcttcttcttcgggtgcatccagatggtgctctactgctgctaccggaagcgcaagccggcgtccgtggtcgtcctgccgacgacgacggccgccgccgccgtggcacagcagctggaggcggagatggagctgcccctcgccgcccaccagcaccagctggccgtggccgtgctgcccacgtgcgcggccccggtgctggccgagctgcagaagctggaggaggcgatggggtcgccgcgcaagggcggcgtcaaggccatctgaccatggcctgcgatgaaccgcgcgcgatgcatgcatgtcctgctctagtgctagctggatcagttgcgtgcttatttgattattgttatgcatggcttggtagatccgaattattaactgactgcaagtagacagacatatatatatgcgtgtgccttcttttctttactattatatatataatcgttcgtttgtgtgttcttaatcatatatatagctatatataagcttgcttgtattggagatggataaattaatctggtgggttgtac

SEQ ID NO: 66821 - DNA, 2530 bp, Zea mays
  unsure (1)..(2530): unsure at all n locations
  Clone ID: MRT4577_160939C.1
ccaatccaatccttaaagttggtagtgtaaaatctagagctcattcccacccataccagtaaaaaaaactgaaggtccaaatgactcccaacttacattttagaagcagcaaagtggcccatttttttgtccttggaaaacgccctttggcatttaacagtcgaccatcaaggaattgcaatgatcctcggggggcaaaaaaaaacactcgccaaactgtcaagggcagaaacaatttaacagcccagtggggattcacctgggggaaggagataaacagatagggcgctttgaagcttttagactatgagcagtttcttttcctccaaaaaactatgggggggttgttctcctccaagaagttcctggacgcggcgtcgagggccgcaggagacgtcgatccctcgaccggggctgcgaggaggggagtttccattccggttgtgtcggtattgttttagtctgaatctgatggagcagtttggaatgctgaactattgtgcctgatccaaatgaataaggtgtaatgactcgtcttttcaattactgaaactgaacatgtttgaatttatctggtcacttgtatggtaaaatagcagcgttgtcaattgtcataaaaaaaaaaaaaaaaaaaaaaaaaaaaaaaaaaaaaaaaaaaaaaaaaaaaaaaaaaaaaggattgctcgtcgtcgtcatcatcatcagggttttttttacaccgagtgaaaatattcccacaggtttactgacagaaattcccatatgatatgtatcttcctttgttaatttcctgcaggcaacatcatctcatttctggggttcctcgcaccagtgtaagtgcactgtatatacacacgagcatgcatgcattctgccctagctaaaagttgctgtgagcactgctgatgaaatagggatctgcagaccacgtatatgaatgaacgaatgaatgaatgaacttgtgcatgcatgcaggccgacgttcctccgcgtgtaccggaagaagtcgacggaggggttcagctcggtgccgtatgtggtggctctgttcagctgcacgctgtggatcctgtacgcgctggtgaagaccaactccagcccgctgctgaccatcaacgccttcgggtgcgtggtggaggccgcctacatcctcctctacctcgtctacgcgccgcggggcgccaggctgagggcgctcgcctccttcctcctcctcgacgtggccgccttctcgctcgtcgccgtcgtcaccgtcgtgctcgtcgcggagccgcaccgcgtcagggtgctcggcagcgtctgcctcgccttctcatggccgtcttcgtcgcccccctgagcgtcatcgtaagctcgctcgctcgacgcatatatgcgtatatctcatatatatttgcatgcatttgattgacgtgcatgcgggtccatgctgtgcatacgtacgtacatcagttcgttgtgatcaggacaaagagtgccgagttcatgcccttcaacctntctttcttcctcaccctcagcgccgtcgcctggttcttgtacggcctcttcaccaaggacccntacgtcacggtacggtcaccaaatcgccatgcgacgcatgattacgatttacgaacgtgagattgtgagaagcatgcaataataagtcgatggacgtgagtgattctttgttctgcatgcatgcagctcccgaacgtgggcggcttcttcttcgggtgcatccagatggtgctctactgctgctaccggaagcgcaagccggcgtccgtggtcgtcctgccgacgacgacggccgccgcagccgtggcacagcagctggaggcggagatggagctgcccctcgccgcccaccagcaccagctggccgtggccgtactgcccacgtgcgcggccccggtgctggccgagctgcagaagctggaggaggcgatggggtcgccgcgcaagggcggcgtcaaggccatctgaccatggcctgcgatgaaccgcgcgcgatgcatgcatcatgtcctgctagtgctagctggatcagttgcgtgcttatttgattattgttatgatggcttggtagatccgaattattaactgactgcaagtagacagacatatatatgcgtgtgtgccttattttctttactattatataggagatcgttcgtttgtgtgttcgcaagtggctggcagctcaagcatgcagatgcaggcatcgtcgtctgctatagttggtcgtttagttggttaattgttggattattaatgcgtgtctctctcgtgtgcgtcgtagccttgtctcagttcagttcagtgtcgaatcaagtagtagtagctgttgtttgcattggatctgacaatgcatgcatgctaataattatggtggtgtgatggtcttggtcgatctggtgtatgtaatgtacgtacgcgcgcggtacgtacgtagtcgtctacgtacgccgtgtcaacgtcgtagatctctacgggaagatgataagactgtaacatgcaaagcatgcatctatttatacttaac

SEQ ID NO: 66822 - DNA, 432 bp, Zea mays
  Clone ID: MRT4577_16093C.1
agtcgacgctcagccaagacactcgaacctctgggccaaatttttgatccaatgctcgttgacacgatgactagaacccgacctggccatgaggttgttccgacccaataacgggacagatccgttgtccctgaacctgtgggacccatgagagggcttgccattcggctcctgaaggagaacgaggctgttacggtcgatcccgcggaccatctcggataccgctaccttcggtggcgcgcggagcgactgtaccgagactccagaggcggacgtatccacggcagacgtaccgtggctgaagaaggacgacgtcaaggtgaaagtcgaagaacgggagcgcccttagatcagcggcaagctgctaaaaggtgcaggaggagaacgactgacacctggcacttggtggaccggagcaaagggaggtaattt

SEQ ID NO: 66823 - DNA, 499 bp, Zea mays
  Clone ID: MRT4577_160940C.1
tttttttttttttttttttttttttttttttttttttttttttttttttttttttttttttttttttttttttggaaaccccggaacctaagaagcaggaaaagggcataacaacttaacaagaacaagcataaaccagtaggcagaaaggcataaccggggggcaccacccaaaagcaaacaagcatccaaacaaaaggcataagaagaagccccatttccacccaaatccccaggggcttttggggttggggggggtccaactggggcaaaaaaagaaccattttctggacaaaaaggggccttttcccaaaaatttggagcgggggaatttttaaaacactccctggcccggacaaaggtccgggggggcggaaaaaaaaacccacccccaacataagttattttgggaaagtttcggccccaaaaaccgggggggccccaaaggggaaaaacccagccgaacccaatgggtaccccccacctccgagggctcccc

SEQ ID NO: 66824 - DNA, 606 bp, Zea mays
  Clone ID: MRT4577_160941C.1
cagattccataatcgcgcgaaagaagagaagatattccaatcgaagagaattcaaggaggtgcaacaagaatcgcatggaggcgcgccctccggagaagtcacggccggaagagtgctccgatgaagctgaggcagccgaacaggaggcggcagagtgggccgcgccagcgccggttccggcgggttgggtcctccctagccgacggcgtcatctgcaggtacgcgtacgccgcgtgttttaccagcgggtggcgtatcatgtgtatgtccccacagctgccggcgccaccgatgacgcatgccgcacggcgagatcgcgcgccagactgctctgatgtgatacttccaatcttctcttctactttctatcagtcctttctccgaacctcgcagttgcaagagagcgccttcttgttggttgcaccctcatatctgatcttggtaatgccggagaagaactcgccctcccagccatcggaagtggcatcgccgcacttggcgtcgatgtcggccgtgcaggttttctgcgcggcaatcccagcggacaggcagagggactaccccaccaccatgaccaatagctcggcgcccttccttataccgaa

SEQ ID NO: 66825 - DNA, 1244 bp, Zea mays
  Clone ID: MRT4577_160942C.1
ggcggcagctatataaaagccttcacctgacccgggcgctagggtttattcgctcctcccgcccgccgccgtcgctgcctcctctccccagcacccggagctcgcccgaccgccgctcaccatgatcatccccaagaagaaccgcaatgagatctgcaagtacctcttcaaggagggtgtgctgtatgccaagaaggactacaacctggcgaagcacccgcagatcgatgtgcccaacctccaggtgatcaagctcatgcagagctttaagtccaaggagtatgttagggagaccttctcctggcagtactactactggtatctcaccaacgatggcattgagcacctacgcaactacctgaacctcccgtctgagatcgtgcctgccaccctcaagaagtctgccaagccacctggccgcccatttggctctggccctcctggtgaccgcccaaggggcccaggtcgttttgacggcgacaggccaaggtttggtgacagggatgggtaccgtggtggtcctcgtggtgctcctggtgactttggtggcgataagagtggagctcctgctgagttccagccatcattcaggaggcctggctttgggcgtggtggcggcagcggcagcggcttcggcgcgggcccaacctcttcttccatggagtgaagttgcccttggtttggacatggtgtttcccttcgcatgtggcctttagttttgaaggacagatattatgtactagtaatgttactcggatcggccagtgctgacatatgcaaaaaaatgttcttgtcgttatacattggttccagtattattgtcttcgcaaaactcttgggttttcaagttactactttttcactgaaaaaaaaaaaaaaaaatatgtactagtaatgttactcggatcggccagtgctgacatatgcaaaaaaatgttcttggcgttatacattggttccagtattattggcttcgcaaaactcttgggttttcaagttactactttttcactgaaaaaaaaaaaaaaaaaaatgggctactaatgttactcggatcggccagtgctgacatatgcaaaaaaaagttcttggcgttatacattggttccagaattattgtcttcgcaaaactcttgggttttcaaggaactactttttcactgaaaaaaaaaaaaaaaaaaaagaggccctaaaaatggtactcggatcgcccagtgctgacatatgcaaaaaaatgttcttga

SEQ ID NO: 66826 - DNA, 376 bp, Zea mays
  Clone ID: MRT4577_160943C.1
agcagtggtaacaacgcagagtacgcggggctcctggtgactttggtggcgataagagtggagctcctgctgagttccagccatcattcaggaggcctggctttgggcgtggtggcggcagcggcttcggcgcgggcccaacctcttcttccatggagtgaagttgcctttggtttggacatggtgtttcccttcacatgtggcctttagttttgaaggacagttattatgtactagtaatgttactcggatcggccagtgctgacatatgcaaaaaaatgttcttgtcgttatacattggttccagtattattgtcttcccaaaaaaaaaaaaaaaaaaaaaaaaaaaaagtactctgcgttgttaccactgctt

SEQ ID NO: 66827 - DNA, 353 bp, Zea mays
  Clone ID: MRT4577_160944C.1
tttttttttttttttttttttttttttttttttttttttttttttttttttttttttttttttttttttttttttgggggaaccggttcattcagcaattataacaaattctacattggtgcaaaagcaacccaacccaggcccaaatttgaaaattaaacaggatcgtagcaaccggcgggggccccctaagagggtgtaaacttgggaacccccttggccccttcggataccgcgtgcttggcgagccccccggggaggaccaggcccacccaggtctggatctccccggaggggaaggggggctttttgttgtaacgggcgaacttggcggccccggcggcgaacttctc

SEQ ID NO: 66828 - DNA, 1597 bp, Zea mays
  Clone ID: MRT4577_160945C.1
ccggccggattcgctcctcccgaccgccgccgtcgccgcctcctctccccagcacccggagctcgcccgaccgccgctcaccatgatcatccccaagaagaaccgcaatgagatctgcaagtacctcttcaagggtatgtggttcttggtccactagactcgcagtagtgtaacctgggctgattggttgtttcgccttctaggaggtgacagatcttcaaattattttcgtattactaggagggagtgctcgtgtattattttgagttcacttttttggtccaatttcagcatctcacaaacttacgatctgatatattataggcttgacacagcgagcattgtcaaatatttttgtgctccaaatttatttgccccttaaactatggattccttgttatacattcatctgcgttatgttcatacgatttctgttagtttgatgtatttgctgctgcagagggcgtgctgtatgccaagaaggactacaacctggcgaagcacccgcagatcgatgtgcccaacctccaggtgatcaagctcatgcagagctttaagtccaaggagtatgttagggagaccttctcctggcagtactactactggtatctcaccaacgatggcattgagcacctacgcaactacctgaacctcccgtctgagatcgtgcctgccacgctcaagaagtctgccaagccacctggccgcccatttggctctggccctcctggtgaccgcccaaggggcccaggtcgttttgacggcgacaggccaaggtttggtgacagggatgggtaccgtggtggtcctcgtggtgctcctggtgctcctggtgactttggtggcgataagagtggagctcctgctgagttccagccatcattcaggaggcctggctttgggcgtggtggcggcagcggcttcggcgcaggcccaacctcttcttccatggagtgaagttgcccttggtttggacatggtgtttcccttcgcatgtggcctttagttttgaaggacagttattatgtactagtaatattactcggatcggccagtgctgacatatgcaaaaaaatgttctgtcgttatacattggttccagtattattgtcttcgcaaaactcttgggttttcaagttactactttttcactgatatacgagtaatcgtcctgcgtttggtggttggctgatctgatcggttggtcatgctgggatgttgttttgttagtatgttgtgtcgtctagctgtttctgtttggacccaagaagttctaatctgtcaagtaactgtagcagatataatctctgagaactggttgtgtagtgatattagccatgatgttctgatggtacgagccttcctggggttgtcttttatatttgcagatgattgcatgtataacatgttggtccaggattggtttgttttttttcttttgttttttccggcttgtttgcctctatgttccagcaactgatagttgtcttttatattagcggaagcagatgatgtacaagtatggcatatatgtgttgtattgagatgatgtacacgtattgcattccaataaaaaaaaaaaaaaaaaaaaaaaaaa

SEQ ID NO: 66829 - DNA, 1096 bp, Zea mays
  Clone ID: MRT4577_160946C.1
attctatgcagaacagcagaagaccctcgctcgctctgcgcgcatcgaaccaaaaaccacatcgcggcggcagctatataaaagccttcacctgacccgggcgctagggtttattcgctcctcccgaccgccgccgtcgccgcctcctctccccagcacccggagctcgaccgaacgccgctcaccatgatcatccccaagaagaaccgcaatgagatctgcaagtacctcttcaaggagggcgtgctgtatgccaagaaggactacaacctggcgaagcacccgcagatcgatgtgcccaacctccaggtgatcaagctcatgcagagctttaagtccaaggagtatgttagggagaccttctcctggcagtactactactggtatctcaccaacgatggcattgagcacctacgcaactacctgaacctcccgtctgagatcgtgcctgccacgctcaagaagtctgccaagccacctggccgcccatttggctctggccctcctggtgaccgcccaaggggcccaggccgttttgacggcgacaggccaaggtttggtgacagggatgggtaccgtggtggtcctcgtggtgctcctggtgactttggtggcgataagagtggagctcctgctgagttccagccatcattcaggaggcctggctttgggcgtggtggcggcagcggcttcggcgcgggcccaacctcttcttccatggagtgaagttgcccttggtttggacatggtgtttcccttcgcatgtggcctttagttttgaaggacagttattatgtactagtaatattactcggatcggccagtgctgacatatgcaaaaaaatgttctgtcgttatacattggttccagtattattgtcttcgcaaaactaaaaaaaaaaaaaaaaaaaaatttacgactcgctcaaacagtgaggcagtgagccgagcctgagcgaacttgagtcggctggtgagtctgcctaataatatggtgtttgagctggagcgaacttgagtcggctcgcgagtctatctaataatatgagctaataatatggtgctatgttgttaaaaaaaaaaaaaaaaagcggcc

SEQ ID NO: 66830 - DNA, 187 bp, Zea mays
  Clone ID: MRT4577_160947C.1
ggccgcgccgtagccaatattcgtttcgagctcatcaattcacgtaaacctctgccccaaatctgcgagtcgattctcgtcgtcgagaagactagaacctaacctgaccatgtcgctgatccgccgcagcaacgtgtgtcgatcccttctccctctacctctgtgaccccttttaggtctgcctctt

SEQ ID NO: 66831 - DNA, 378 bp, Zea mays
  Clone ID: MRT4577_160948C.1
actactactcttctgcccagttccatttttttttgaatccaaccgagagcatcagacatataacagcaacgtttctagcttctgcaaaccagaaagctaataagacaaatcaaaagaaaacgcaaagaaagaactgatcaaaactcgtacgtataagtaagtataactgatgttttctaggtgaacttggcgtccatgttgagcgcggcctccttcgcctcgagcgggttggtgggcggggtcggtgaccctcctgaccttggcggttgtgagcgagcggtgccggaatccgtagagcctgagcactctggtgtcgggcaagttgaaggcgcgctccatgccccggatgcagcggtcgagcgggtagtcctcgtacct

SEQ ID NO: 66832 - DNA, 180 bp, Zea mays
  Clone ID: MRT4577_160949C.1
atcaccagaactcgtggcccactagtacttacaatcccaataaaagatttgcctgaccaggacaaccagacggttcagaaaccaacttcagttattcctcagccagatgagccaggagctccacctcatacaggattacccggccctgaaccccatccactagttgatcatcgatgaccc

SEQ ID NO: 66833 - DNA, 205 bp, Zea mays
  unsure (1)..(205): unsure at all n locations
  Clone ID: MRT4577_16094C.1
ggttttctnctcgtcgaccgagccgtccgtcgtcctccctggcggtctgaccgactccgccttcctccccgcgcgtctcacccttttactctacagcttactcaacacaaacagcttgtccaatactctcattggaaagactagaactgttaaaatgcattgctaagcattcatggacaactaggaggcaaataacccgaaaagg

SEQ ID NO: 66834 - DNA, 393 bp, Zea mays
  Clone ID: MRT4577_160950C.1
cgtattacagtcgcctagccagcaaaagagatccaagtggcaggaatcatggccaccgtcagcgccgccgtggtgaccaccatcgttgcccgcgccgcgatcgccaggcccactgctctatggctgcctgcgctgagggcgacgagcgagatggtgccgtgcagctacgccaaggacgcggccccactcagcaacagtgggctcatgctcgtcgctgctcgccccaatctggcacggtgaccgacgtcgggagtcgccgcgcttgcgctcgtgggctagctcatgtccactgacggctacgggcttagcctctggctcagcagcagcctcctggggtggatcctccttgagggtcttccgccctcatctgggtccctcgtacaaccatctaca

SEQ ID NO: 66835 - DNA, 270 bp, Zea mays
  Clone ID: MRT4577_160951C.1
tccagtagccgagctcccttgactcctatggcgtgtgccccattttcctcccgcgcccagcctctagctcagtccctgcgcgcatcgagcttcctcgccgaacttctccctacgcgcgccgcagtttccgttcccccgagctccttcagccatggcgcgcctgctctcggcgctcgatgtttctgcggcctctgctctgctccatcgtccccagctcggtcgctcctccctgctcgcccatgtgctcgccccaacgccgagctccccatg

SEQ ID NO: 66836 - DNA, 772 bp, Zea mays
  Clone ID: MRT4577_160952C.1
gccggccggttcggggtccccgaggccgcccgcgtcccgaggagtggaggaggtcaccccgagacagtcgcttcaccaccggtctcctccccacctccacgcggcgcggctcgcggccggccatacaccgcagcactaccttggtgggggcttgcgccagagctcgcgaccactgcccgtgacgcctgtctttgactcgttgaccgcggagtgagcgcgcgcgccggagccggccagccatggaagtgcgcggcggagtggggcagggttcggcggcccggcacccgaccacgccggcgccgtcccgggcggcggcgcgggttcaggcgggggacgcgctgccgctgccgatacggcacacgaacctcatcttctcggccctgttcgcggcgtcgctggcgtacctcatgcggcggtggcgcgagaagatccgctcgtccacgccgctccacgccgtggggctcgccgagatgctcgccatattcggccttgtcgcctcgctcatctacctgctcagcttcttcggcatcgccttcgtccaatccatcgtctcgtccggcgacgacgacgaggacttcctggtcgggtcgggagctccggcctccgccgccgcgccctcccggcagcatgcgcaggcgccggccccgtgcgagctgctcgggagccccgccgcggcgcccgagaaaatgccggaggacgacgaggagatcgtcgcctcggtcgtccgccgggaaagttccgtcctacgcgctcgaggccaggctcggcgact

SEQ ID NO: 66837 - DNA, 326 bp, Zea mays
  Clone ID: MRT4577_160954C.1
ctcctccatccattcgaaactcttacagctcgtacactcccatcttggggcgacactcccttcatctgctgctttccttcccatcctctaacacatacaatttgcatcatcccatggatctcactgattaataacatgctgatctgaacctccttttatgtagacaactaacaacttcaatactagtttccaatactattcatagacaaacgatctctattaacattatatgttggagctcccttaagccttctttcaagttccacagaaagcgcctaacaatctgcccatattttgtactgaccatccatacaactacaaaaccc

SEQ ID NO: 66838 - DNA, 377 bp, Zea mays
  Clone ID: MRT4577_160955C.1
aaaaaaaaaaaataaaaaaaaaaaaaaaagaaaaaaaaaaaaaaaaaaaaaaaaaaaaaaaaaaaaaaaaaaaaaaaaaaaaaaaaaaaaaaaagtttgtacctaacccgggctggcccttgacggggcggtttttcaaaagggccatttctctgggtgcccttcacacctggcgtctggtgggccctttttttcctgggcccatttccctttaaattgagtggccttccttttcaatggccggggttggaaaacccctggcttggcaaaactttgtcgtttcccaactaatccccttttcaccacttccccttttaccaaaggggcctaatccgaaaaagctcccaaccattggcccttcctaaatggggaatggc

SEQ ID NO: 66839 - DNA, 223 bp, Zea mays
  Clone ID: MRT4577_160956C.1
acttgggattccaagaaaaggcaaagaggtataagaactagatcccaaagggtgatgaataagacggaggcctgtaaaaagggcctcaacacagcgtgcgatacaaaaaggttcagcatgttaaacggaaatgggaatccttgcccatagaagccaaatacacgccctagtctactgcaccaagagctattttggaattcaattttaacacacccgtcaaccc

SEQ ID NO: 66840 - DNA, 305 bp, Zea mays
  unsure (1)..(305): unsure at all n locations
  Clone ID: MRT4577_160957C.1
gagcactcnagtcggcggccgcccttggtggtttggtgttttttttttgtgagaagttccttctacagatccagcgcggtcgataacgtctttacggtcgatgcgagcgacacactgccgatgctgccggggacgaaaccccccgtggcggagcaggccacaaccaggcgcgcacgggggaggcccggctacaccaaaaagcagcacttgaggagggggccagggccgccctcgagccagaggccaggcttacgtacaaatgcacgccaggggatagctttcatatagagccacctacattcaac

SEQ ID NO: 66841 - DNA, 385 bp, Zea mays
  Clone ID: MRT4577_160958C.1
tgcatacagccccgtagcgatccgacataccagcctggtttatagcgatccgaatttgtggacaccatattcctagaacaacgggattcatattggctcgtgaatatactgtacaggaaggattatatcattaatcaatctcctaattctgccttctagatatatggctggacacgattagaatcttcatgtcagagacttttttttccttcccgttgctgtgttgatgaaatagcattgagcccaacacacgcccgaggtgaaggcaacctatgaacactaggggcacccctgtgaggataacataaatcattttgcacggctgagacttacaagtcgattcggcaacacgttgtgcgcagggaacagccaatattaccgttct

SEQ ID NO: 66842 - DNA, 378 bp, Zea mays
  Clone ID: MRT4577_160959C.1
ggccgattttttttttttttttttggtgtgtccatcttatcttttaacttaaaactagtacccgattagagttgctacgcagcaaaagggtactaacgcggataccctcagaggggaccaccataaatacaagcatgacacgtggacccgcgcagacacgtgagcagacacgcgagactgaacacaaaccgattgggccactctgctgatcttggggccagggccaccgtttccagccggagcgacctcgtccatgccgtcggagcctcccatgtcggcacccgcgccctggtacatcttggcgatgatggggttgcaaaggctctccagctccttgatgttgccctgggactcctccggctcggcgagctggctggg

SEQ ID NO: 66843 - DNA, 604 bp, Zea mays
  Clone ID: MRT4577_16095C.1
aaaccaaagatcgtggagtatgatctgaaactgcagaaacagtatgttgcttgaaatatttctgcaacaacataattttgctccgtcactgttcgtggcttttggcggtgttagggactccaaagtagggttgcaactgatcttacatgtaggggggagagtttcccagctgatgacgcgtatggaagtaagagatcatgtagaggggcattgttttatgcaaattttgacattcttttgcgagtttcacacattcagtcgttcatgagggtgtaccatgatgtaacatatgaaaaaccgtggacggatgttggtttagcaaatcttgttccaaaagcagtgattagtgctacaaagcaaagggtactaacgtgccaagatcatgggttttgtaccgaatcactatattgagggcgcgtttggattggagggaaaacggaggaaaattacaggaatagcagttctttggcaagtctttcgcacagtacaggtcgtgacaaaaaatcagataggaaggtgtacttttgaggaaaaaattaagagaggaaggtgtacttttcttgaatatgaaaatgagctatctagctgagttagttaggtggtc

SEQ ID NO: 66844 - DNA, 285 bp, Zea mays
  Clone ID: MRT4577_160960C.1
gtagggttagggtgaaataccctaacccaaaatgagatttaaatatatgtcaacagtgatcacaggggctggggatctttagaatacacggccttgatgacagaacaggatagtaaagagacagaaaattatcacacaaaaatctacgttgtatcaactcatgacgcgagcccaaatattgcaggagatccacacattcattacacaacgagggattctgggtgaatgaggactagattcgagttttaaaaggtcaagaccgccaaacgaccgtgtgattttaca

SEQ ID NO: 66845 - DNA, 535 bp, Zea mays
  Clone ID: MRT4577_160961C.1
tttttgttgttttttattttatttatttttattttgttgttttttatttttattttttttgtttataccaataaaaagtaaggctctttttgttttgtgttttatttgtttcattgttttcatttctcttgcccaacacaaaaaaagagaggcaccttgggtgggcgctaacgggcaggcggggcccagcccccgcgcccaagggaggggcacccaaacaaggggtgggccaaggacccctccccgcaaagcccggatttctgattccgcacccctaacaattgcatacaaggggcccccctcgcaaaatcccatatccccaaacccacttttcggttcccaaccgccgaaaacaaagcgggccggtttgagtataccctctcgtttttttcggcccccaaccgaagaaacactgggggacccttccccgtttggccccttggcctccccccgggagaggccgggcttgcttccataggccggcccccgttggctcaacaatgggggaaggggaaggccacccttttttcttttc

SEQ ID NO: 66846 - DNA, 609 bp, Zea mays
  Clone ID: MRT4577_160963C.1
cattgggtacctcgaggccggccgggtatgtgtcgcatcttccgcatatggtgttgttgcttgccagacgcatgcgttgcactcttcactagtcatcttattgtaatgcaaattggacgaccaccacacagggattggttattgatacggcgttgcaaaggtcttcttggatggctaggggacctgtacacagaggggcggtttggagtgaacatgctggtgtttgaatagacgtcggcaacatcaagcaggtcgtctttgctgttctcctttctctttccatcttcttcaagcatcgttctctttggtgttgcgagctagccttcttctttatttctcttttttcttttgttgcgtatctccaagagggttggcgtttcctgccaggtggaggaacatgctattcttcttcttcttttttttacttcttgagaagcagtgttgtcgtaggtggttcatgtggaggaaggtaaaagccgctgcgcgggctttggtggttgctctagatggggtctcggacgctgtagtgctttttcttagctgcagcagaatcagtgataaatatcatatcatcatttcaagccaaaaaaaaaaaaaaaaaaagcggcc

SEQ ID NO: 66847 - DNA, 194 bp, Zea mays
  Clone ID: MRT4577_160964C.1
cagcacggaattcggtttgagcggctcgaggactattaattcaaacagagcagcgcatgtccaagggagcctttgttaaagttcgcccacgaacaacgcaccttaaacctatatgataacagcgctgtgcattgaatactacatgtgggtcaacttacaataacctatgacgtatacactgtttctgaatacaa

SEQ ID NO: 66848 - DNA, 264 bp, Zea mays
  Clone ID: MRT4577_160965C.1
cagacatcccaatgcaaaccaaacaaagaccaaagaacttgaaaacaacccagcaacaaagtacgaagcttacatgcttgcacgccatgcccacaaaagctcgccaggaacaacccggagggagcacgatcttcctcggcgacgaagacccaagaggtttatgacccataccgcccttccttcagcaataagttgcgatgagccaatggccgaacctgcacccccaaaatcgagaccagcaggaaacgcccccccgcccccaac

SEQ ID NO: 66849 - DNA, 1112 bp, Zea mays
  Clone ID: MRT4577_160966C.1
ccgcgcggggtggttccacccggccgggaccgcatcgcatccatccaccacgcaccccaccaacccatacccataccagaggctctctgattttacttctccgcggtagatcggctgagcgagcgagcgaggcacacggagctagctaaacagagcacacgggtagaaaagcaagatgtcggacggcacggcgacctgcatcgacatcatcctcgccatcatcctgccgccgctcggggtcttcttcaagttcggctgcggggttgagttctggatctgccttatcctcaccttcctcggctacctccccggcatcatctacgccgtctgggccatcaccaagtagccggccggagcagatgaaccacggtcccctgccagtgccaggcagctagctgtgactccgtcgcgtgcgttagcatgcaatgcaagcgcagggtggtctcgtggggggacgtggtgtgcgcgtgtcttgagatgtgattccttccttctttgtttagttgctgctgctcctgctggtgtagtactggtgtatccagtccttttaatttcttgattagtttgctcggctgaagaaatcaggacgcgtgcctggtgtcgctcctcagctccatgtacttgtacaaccgttcctccctgcagctgctgccccttctctcttttttgtttaccttgggttgatgggttgttaaattcgttgtttgtctcttttttaaccttcgcgattgtagtactaagttgattgcttgcttggttggtttcggttgggagatcgatgggaataagtctatgatatatatcagtacaacaaaagagagaaagaaattgccgccgtcaaaaaaaaaaaaaaaaaaaaaaaaaaaaaaatagaaatgtgattccttccttctttgtttagttgctgctgctcctgctggtgtagtggtgtatccagtccttttaattctcttgattagtttgctcggctgaagaaatcaggacgcgtgcctggtgtcgctgctcagctgcatgtacttgtacaaccgttcctccctgcagctgctgccccttctctctttttgtttaccttgaatagatggattgtcaaattcgatgaatgccatattttt

SEQ ID NO: 66850 - DNA, 684 bp, Zea mays
  Clone ID: MRT4577_160967C.1
aatactcgtggataaaaaaaaaaatcgcatccatccaccacgcaccccaccaacccatacccataccagaggctctctgattttacttctcagcggtagatcggctgagcgagcgagcgagcgaggcacacgggtagaaaagcaagatgtcggacggcacggcgacctgcatcgacatcatcctcgccatcatcctgccgccgctcggggtcttcttcaagttcggctgcggggttgagttctggatctgccttatcctcaccttcttcggctacctccccggcatcatctacgccgtctgggccatcaccaagtagccggccggagcagagcaaccacggccccctgcaatgactccgtcgcgtgcgttagcatgcaatgtcttgagatgtgattccttccttcgttgtttagttgctgctgctcctcctgctggtgtagtggtgtatccagtccttttaattctcttgattagtttgctcggctgaagaaatcaggacgcgtgcctggtgtcgctgctcagctgcatgtacttgtacaaccgttcctccctgcagctgctgccccttctctctttttgtttaccttggattgatggattgttaaattcgttgtttgtcttaaaaaaaaaaaaaaaaaaaaaaaaaaaaaaaaaaaaaagtactctgcgttgttaccactgct

SEQ ID NO: 66851 - DNA, 701 bp, Zea mays
  Clone ID: MRT4577_160968C.1
gccggccggtccgggatcgcatccatccaccacgcaccccaccaacccatacccataccagaggctctctgattttacttctcagcggtagatcggctgagcgagcgagcgagcgaggcacacgggtagaaaagcaagatgtcggacggcacggcgacctgcatcgacatcatcctcgccatcatcctgccgccgctcggggtcttcttcaagttcggctgcggggttgagttctggatctgccttatcctcaccttcttcggctacctccccggcatcatctacgccgtctgggccatcaccaagtagccggccggagcagagcaaccacggccccctgcaatgactccgtcgcgtgcgttagcatgcaatgtcttgagatgtgattccttccttctttgtttagttgctgctgctcctgctggtgtatccagtccttttaatatcttgattagtttgctcggctgaagaaatcaggacgcgtgtctggtgttgctgctcagctgcatgtacttgtacaaccattccgccctgcagctgctgccccttctctcttttttgtttaccttggattgatggattgttaaattcgttgtttgtctcttttttaaccttcgcgattgtagtataaaattggtttgggagatcggcgggaataagtctatgatatctatcagtaaaaaaaaaaaaaaaaacaggcc

SEQ ID NO: 66852 - DNA, 1327 bp, Zea mays
  Clone ID: MRT4577_160969C.1
gtgtcactgcaggtacgtctacttgggcctgttcgacaccgaggaggaagccgccaggtaaaataattggaccgcactgtgtgcccgcgaggcgtttctcggagcaccgccacccccctctgggccgcgaaactgactgatggatggatgccccgtgtctgtgggattgtcgggtcgtgtgtgtgtgtgtgtgtgtgcagggcgtacgaccgcgcggccatcaagtgcaacggcaaggacgcggtgacaaacttcgatcccagcatttacgccgaggagctcgagccggcggcgtcgacgggcggcggtggcgatgaccacaatcacaacctggacctgtcgctggggagctcggcggggaacaaaaggggcagccttgacgacggcggcggcggaggaggcggcggcgacgacgagacctcggaccagcgcgtccccatggcgttcgacgtcgactggcagacggccgcgccccggagcacgaaagcaaagctggacgcgagctccaagcaaccccagacccagatgctgcctcctccgcctcctgctgtcttgcgagtcgcccaccagctgccgttgccgttcggtcccaggcatccgcaatcgcagttcctgagcaacggcggcgatccggggacctcgggaggcctgtccctcgcgatcggcggcgcgggcggcgggcactggcctccccagctgcagcacctgcagcagcagaggctgcacggcgcctgggccaacggcggcggcacgagctggccgcctccgccgcacccgcacccgcacccgcacccgccgccaccgagcaccgccgcgaccgcagctgcagcatcatcacgattccctccctacgttgttactacgacgcaaggcccggcaggctgggctcagaagaatgggttccattcgctggccaggccaacctagtatgccaagaaccacgactggccggagcgttcattcgtcgtcgatcgtcgacccagggcaaacgacacctccaaccactgcacgacgacgttttaatttaccggatgccattctctctctcccctccccccttcccttctcccttctcccttctcccttctctgtgttcttgattgggtgagacatggatccgaggatggatggacggcctgtacctgaggagttcccgggaagaagacgagtgagtgagtgagtgattggtagggtaggcgactaggcgtcgcgtcaggcagtacgtccttttggcgccttttttcttctttcactcaccattggcgaccaccaatgaatgatgacactgactggggtgtcaacatcgcagctggttttgtttggtcta

SEQ ID NO: 66853 - DNA, 379 bp, Zea mays
  Clone ID: MRT4577_16096C.1
atcgtggagtatgatctgaaactgcagaaacagtatgttgcttggaaatattctgcaacaacataattttgctccgtcactgttcgtggcttttggtggtgttagggactccaaagtagggttgcaactgatcttacatgtaggcctagtttgggtactcttggattgaagtggtttggagggattgaagagtgtttaaatcccgatagatcaaaaactcccccaatacatctcaatccactccaatccgtctcattcctagagtacccaaaccaagccgtaggggggagagtttcccagctgatgacgcgtatggaagtaagagatcatgtagaggggcattgttttatggaaattttgacattcttttgcaagtttc

SEQ ID NO: 66854 - DNA, 697 bp, Zea mays
  Clone ID: MRT4577_160970C.1
ccggccgggagctcattccatccatccaccacgcaccccaccaacccatacccataccagaggctctctgattttacttctcagcggtagatcggctgagcgagcgagcgagcgaggcacacggagctagctaaacagagcacacggatagaaaagcaagatgtcggacggcacggcgacctgcatcgacatcatcctcgccattatcctgccgccgctcggggtcttcttcaagttcggctgcggggttgagttctggatctgccttatcctcaccttcttcggctacctccccggcatcatctacgccgtctgggccatcaccaagtagccggccggtgcgttagcatgcaatgcgcgcgcagggtgatctcgtggcgggggacgcggtgtgcgcgtgtcttgagatgtgattccttccttccttgtttagttgctgctgctcctgctggtgtagtactggtgtatccagtccttttaatttcttgattagtttgctcggctgaagaaatcaggacgcgtgcctggtgttgctgctcagctccatgtacttgtacaaccgttcctccctgcagctgctgccccttctctctttttgtttaccttggattgatggattgttaaattcgttgtttgtctcaaaaaaaaaaaaaaaaaaaaaaaaaaaaaaaaaaagaaaaaaaactcgcccaagggc

SEQ ID NO: 66855 - DNA, 583 bp, Zea mays
  Clone ID: MRT4577_160971C.1
taaaaaaaaaaaaaaaaaaaaaaaaaaaaaaaaaaaaaaaaaaaaaaaaaaaaaaaaaaaattccaaaaaaaaaaaaaaaaaaaaattaaaaaaaaaaaaaaaaaaaaaaaagtaaaaaaaaaaaaaaaaaaaaaaaaaaaaaaaaagttttgccttgcccggggggcctttcaaaggggcaatttttgaaattttccttcacattgggggccgtttaaccttccttttagggggcccatttcccctttttgggggccgttttacatttactgggccggctttttacaacgttggttttggaaaacccttgggtttccccaattaattccctttgaaaaaaatccccttttccccagttggggtaatagcaaaaaggccccccccgttcccttttccaaacatttgcccaccctaattggcaatgggcccccccttttacgggccctttaagcccggggggtgggggggttccccccagggtgcccgttacctttgccgggcccttagggccgcttctttgggtttttttcctttcttttttgcccacgttcgcggttttcccccgtaaagctttaaatgggg

SEQ ID NO: 66856 - DNA, 482 bp, Zea mays
  Clone ID: MRT4577_160972C.1
tttgaaagttgttccttctatgattaaaaggtttaaacagcaccttgtctgtggatttcctgatacgacaaaatgtgcaatggttccagaagtagtttcgaaggatatgtatgcttatttgaaaaggaacacaaggcttgtgctttctgttgaaagtgaggaaggaggacaaaaagatggtgatgctactgaacctgaacaaaaggtacatgaaccaagtttagggacaaagcacaagcaagcgaagaagaaagcaactcaagctgccatcagctctttagttgtttcagttcatcctacccaaaaccaaaagtgcggcaagtcagtggctgccatgttttgcaagacgccagaagaatttgttgctgattggcataaaaataaaaacactcagtcaacttttgaagcttgcacaatgaaaggtaaggaagccaagcatatttgttacgaccatgtcgcagattttttatatgagaacaaaa

SEQ ID NO: 66857 - DNA, 2197 bp, Zea mays
  Clone ID: MRT4577_160973C.1
ctctgcttgtgcttgtgcaatgcagggattgcggcaagcaggtctatttgggcgggtttgacaccgctcatgcggcggctcgggcgtacgatcgggcggcgatcaagttccgcggcgtggaggccgacatcaatttcagtctggaggattaccaggacgacatgaagcaggtgatttatactcctatacggagcatgtagcgagaaagatacatgtaattttttctttccttcgtctaccagcagatgggccacctgagcaaggaggagttcgttcacgtgctccggcggcagagcacggggttcccccggggcagctccaagtacagaggcgtgacgctccacaagtgcgggaggtgggaggcgcgcatgggccagttcctcggcaagaagtacgtctacttgggcctgttcgacaccgaggaggaagccgccaggtaaaataattggaccgcactgtgtgcccgcgaggcgtttctcggagcaccgccacccccctctgggccgcgaaactgactgatggatggatgccccgtgtctgtgggattgtcgggtcgtgtgtgtgtgtgtgtgtgtgcagggcgtacgaccgcgcggccatcaagtgcaacggcaaggacgcggtgacaaacttcgatcccagcatttacgccgaggagctcgagccggcgggttcgtctatcccccgcccgcgatctccgccacgatcgcgccccctcgtcgctgtgcggcgatttcgctacaggctacagcctatacaggcaagctctgacggtccgctgtttcgccgtgcagcgtcgacgggcggcggtggcgatgaccacaatcacaacctggacctgtcgctggggagctcggcggggaacaaaaggggcagccttgacgacggcggcggcggaggaggcggcggcgacgacgagacctcggaccagcgcgtccccatggcgttcgacgtcgactggcagacggccgcgccccggagcacgaaagcaaagctggacgcgagctccaagcaaccccagacccagatgctgcctcctacgcgtccggtcgcccaccagctgccgttgccgttcggacccaggcatccgcagtcgcagttcctgagcaacggcgatccggggacctcgggaggcctgtccctcgcgatcggcggcgcgggcggcgggcactggcctccccagctgcagcacctgcagcagcagaggctgcacggcgcctgggccaacggcggcggcacgagctggccgcctccgccgcacccgcacccgcacccgccgccaccgagcaccgccgcagctgcagcatcatcacgattccctccctacgttgttactacgacgcaaggcccggcaggctgggctcagaagaatgggttccattcgctggccaggccaacctagtatgccaagaaccacgactggccggagcgttcattcgtcgtcgatcgtcgacccagggcaaacgacacctccaaccactgcacgacgacgttttaatttaccggatgccattctctctctcccctccccccttcccttctcccttctcccttctcccttctctgtgttcttgattgggtgagacatggatccgaggatggatggacggcctgtacctgaggagttcccgggaagaagacgagtgagtgagtgagtgattggtagggtaggcgactaggcgtcgcgtcaggcagtacgtccttttggcgccttttttcttctttcactcaccattggcgaccaccaatgaatgatgacactgactggggtgtcaacatcgcagctggttttgtttggtctcatgttgcatcactcgctgctccacgatgccttgctatggttggggggagatttgctccatccaccccacgccggtcaggcgacagagcctccgctgcgtcgtctcatccgtctggtgagttgccactgtcttagaatctgagtggtacggtacgtgtggatctcgcgcgcgtgtaaacctagtattatgtactacaaactgtcatcatcggagatcactcgaataagatatcgatcttgagattacgggcggcggctcctgtcatgtgcttactacagcaaagctgataaactgtccgagtctgaacagctcatgtaatggaacgccgcatagatatttccttcttgttaggggtactttggaaccccaattttttaagagatttttatttttcc

SEQ ID NO: 66858 - DNA, 1175 bp, Zea mays
  Clone ID: MRT4577_160974C.1
acgcatcgatccaccacgcaccccaccaacccatacccataccagaggctctctgattttacttctcagcggtagatacggctgagcgagcgagcgagcgaggcacacgggtagaaaagcaagatgtcggacggcacggcgacctgcatcgacatcatcctcgccatcatcctgccgccgctcggggtcttcttcaagttcggctgcggggttgagttctggatctgccttatcctcaccttcttcggctacctccccggcatcatctacgccgtctgggccatcaccaagtagccggccggagcagagcaaccacggccccctgcaatgactccgctcgcgtgcgttagccatgcaatgtcttgagatgcgattctcgtttcttttaatgccggccggggcgtcctcttgggatgcatgcacagctctgcgcacccgatgctctctgcccacgcatcttggcatgttggcccgctccccgcctttataatatccagcagccacggcagttggagctgatcgcatccatccaccacgcaccccaccaacccatacccataccagaggctctctgattttacttctcagcggtagatcggcacacggagctagctaaacagagcacacggatagaaaagcaagatgtcggacggcacggcgacctgcatcgacatcatcctcgccatcatcctgccgccgctcggggtcttcttcaagttcggctgcggggttgagttctggatctgccttatcctcaccttcttcggctacctccccggcatcatctacgccgtctgggccatcaccaagtagccggccggagcagagcaaccacggccccctgcaatgactccgtcgcgtgcgttagcatgcaatgtcttgagatgtgattcctttcttctttgtttagttgctgctgctcctgctggtgtagtggtgtatccagtccttttaataaaaatctcttgattagtttgctcggctgaagaaatcaggacgcgtgcctggtgtcgctgctcagctgcatgtacttgtacaaccgttcctccctgcagctgctgccccttctctcttttttgtttaccttggattgatggattgttaaattcgttgtttgtctcattttataaaaaacacgattgtagtaaaaaaaaaaaaaaaaggcccctagggcc

SEQ ID NO: 66859 - DNA, 451 bp, Zea mays
  Clone ID: MRT4577_160975C.1
gactcgtacctctatcgggacactgaactcgtgcgccggcctggccaagtaccccaagaaggggatccgcatggactccggcaagaagacggacaagaagtcccgtggctagtgcttcatgaatgctcgcgaattcaactcaccatatgcccaccctgctacaccctctatgtcgactttaaggacgtcgtactcgggcgggcccgacgcgctctacacccggcacaagaaggtcgaggcctgcataggccgacaaggcgcgcctcgaggagaggctcaagaccggcgagaacaggagggtttttaccaagctccggttttaggcgccgggcaccccgcatagcgactgctttagttgtcaattcgctgtatctggaaaccatttaagctatctctgcatgaggattgcgcttgttatggaactaggagaagatcatgtcggaaaaagaaa

SEQ ID NO: 66860 - DNA, 337 bp, Zea mays
  Clone ID: MRT4577_160977C.1
cgcgagaaccgaaaggaagcggggagagggagcaacggcacacaacccaacgcaaggcgagcagccgcagcagcacccgcgaaaccggagagagcagcggccaacaaaaaaccgaggacacaaaaaggcgccaggaccccgccagggcgacagacgccgccaagagcaccacccgacccccaagcacgcacaagaacgagaacgagggcagagcagcaggcgaggcgaagcacacgacccagcccaaccacggcaaagggcgagacacccgcacaacagagaacgagaagagaccccgcggaagcaccgagggcgcccacacccgcaaaaagccgca

SEQ ID NO: 66861 - DNA, 453 bp, Zea mays
  Clone ID: MRT4577_160978C.1
ggcggcggtcgccgcggcggcgaggccggggctgctgtggccaacagggacatctccaagggggagaggctctactacgactacaatggctcggagcacgagtaccccacgcaccatttcggtgatgtgaccacgaggcgaggcaatctcaggccgtgtccaccattgcagctccagctccacagctgccaaaatttcgtgtgatgtggggacctgtttgaatcggctttggctagtaactagttggagcggaaagttaatctatattagctggccttcttgtctggacagattagagtggctaactaaaatgtcgattcttgcataacagtcagggcagatgaagcaatctagatattcatcagcacctaggggtgacaatgctctaaattttatactatattattcattttaaaaaaaaaaaaaaaaaaaaaaaaaaaaaaaaaaaaaaaa

SEQ ID NO: 66862 - DNA, 581 bp, Zea mays
  Clone ID: MRT4577_160979C.1
caaagcttacacttacacacatcgaaccgaagagcacaagtttgcggaaccaaccaaccaactccacacacagatgaattgcgaacaactcacacacacaagctagccactaagcagtaaggaagcacacatcaggccgccagtaatcaccctaatcaaatcactacacactgccactaaagacatgtcgtgtatgctaccttctcctaaacccgatcgccagagccccgccaaacgaggatcatcagctacgacctgagcttgagggattccaggccatggatccctttcttcaggatcccatggagcggcaagccaccgctcctcgccttggacctcttcgccgcaccgtctcgcgcgcccgccgcgtcgtttcccgccacgcagacgcctttgcccttgccgtcgacgtgcgctctcgcgctgggcgcgcgcctgtcgaagctctcgaataggtcgggcgagtgccgcagcagctcgctcgccgacgagtatcccatcagccggtgaagcttgccgtctctgcccatccttccgtcgtcggcggtgttgaaggaagagttcctcgacacgtacagcgg

SEQ ID NO: 66863 - DNA, 2001 bp, Zea mays
  Clone ID: MRT4577_16097C.1
atgggcgccgcggccttggacttcgagtacaagaggagggggggaatgcctttgttggggttccctccgggagctgtggttgatggtcctgaggtttggcgcagggacgcttatggtttcgcggtgcggccacagcatctgcagcgtttccgcgagtacgccaagatttacaaggaagaggaggaggagagggcgcacagatggagagacttcttggacaggttggctgatgcagcgaatgtgcccactacacccagcgtttcaccatatgcatctaccggggatcctgcgtcaggtgcaggacaggcacaagagaatagcggcatcggaatacattgtgatgatgaagaggagggatctgagaatgcagaacataacaacaacttggaaagcccaaaggaatccgatgccagtgctgaatcacgagaagcaaatggtaaatcagaagatctgaaagatgtaactaacttggacaaactgcaagagaagactggtagcagcagctctacagaagcaatcaaagccttagagggcttgatggaaacaaatggggactttgaagaactaaaagatttgaatggaagctcagaagaattggaagaagagaataatggcaacatggaaaagctggtagagctcttcttggataaggggttgttggatgaactgaagcccataaaagttgagtcccagcggcgggtacgtgcagcacttagcatcattgacaaaatgatgagctctcgggtagtgaagggtggtaatggtgcaaatggtattcatggaaacgatggagcacagcttacttctattgaagaggaaggaaggactgcagaagcgagtgatgacggagatccagctgaggttgagtcttgtgttgcagagaaggtggaacttggacaggagacaactcatgattctacaggtactgctttggatggaggcaatgatgggtcctattttccttggagggaggagcttgagagcttggttcgtggaggtgtaccaatggctcttagaggagagatatggcaagcatttgtgggtgttggtgctcgaaggattcctgggtactacaacaaattgcttgatgacaggactgagacattggatgaaaaggatcttgtggacccagtggtcaacgaacagggaagtgcacccagaaaagttacccagcctgagaaatggaaaggacagatagagaaggatttgccacgaacatttccaggacaccctgcattagatgaggatgggaggaatgctttgaggcggttgttaaccgcatatgcaaggcataatccatcagttgggtactgccaggccatgaacttttttgctgggctatttttgttattcatgcctgaagaaaatgcattttgggccttagtaggggttattgatgattattttgatggatactacactgaagaaatgattgaatctcaggttgaccaactcgtccttgaggaggttgtacgagaaaggttccctaaattggggcctgcactagtgaccacaaaagatgccggagatgcaattacactactgcagtctcttgctggatctacatttgacagcagccagcttgtattgacagcttgtatgggttttcaatcagttagagaaatgggattgcaagagttaaggaaaaagtacaggcctgaaattttaactgcaatggaggaaagatcgaaagaccgtggctcctggaaagataagaaggggttagcaaccaaactttatagctttaaacatgatccttcatatgtgtgctcaccagttaagtccaaggaagggctagatggttcaaaggtgaatggagagactgggccagcaaatcttgagacctaccttagtactagttctatactggataatgatttggatcagggtgttgatcttcaagatcaggtgtcatggctaaaggttgaactatgcaagctgctcgaggagaaaagatcagctgatctcaggtttgggttatattttttcttgaatacataa

SEQ ID NO: 66864 - DNA, 588 bp, Zea mays
  Clone ID: MRT4577_160980C.1
cacatgctgaataaaaataaaggcagagaggagaggaggaggaggctttgtcatgttgaccgaccggaggagaggagggatggaggtcatgggcgaggaggacggtgccgcaggctatcgtcatcgccacagccgcaacctcgaaggaggaggaggaggaggtggagtcgcccaagaaagaagcggctctgtcgccggcgccggagcctatcgtcatcgccgccgccttaacctcgaaggacgaggaggaggtggaatcgcccaagaaagaagcggctctgtcgccggcgccggcgccggaggccatcgttgccgtagcagcagtggaagacgtggtggcggacaagttcgtgacggttgtgaaggaggcgatcaagaagcaggaggcggaggaggacgagaaggaggaggcaatgcggaggttccagggcagccgtgtgaggacggcgttggaggcgcgagcggagtcggagcaacgacgtgatcgaggaggcgcgcacgaagctgctggagaagcgtcggagcaaggtccccgcgctcgtcggcgccttcgagactgtaaacgaaaacaagaaggacagcgacgac

SEQ ID NO: 66865 - DNA, 1777 bp, Zea mays
  Clone ID: MRT4577_160981C.1
cccacgcgtccgcccacgcgtccgcccacgcgtccgcccacgcggcacgcctggcctgggctggccgcctccgaccaccgtacgtcctccaccgcgtcgccgccggccggcctctgcccagcccgggctgcctgcgagggcttctgatggccctcgacgccgtcctttcctcctagtgcccagctttattgcagatccagccctctgatcctcgtcttctttcacctctccaacatgaaggtcaacaccaagatcaagctggagccggtcatggcgccgtcgtcgtccctgccgcggagcgccagcgagctacccgacccgccgtcaccgttcagctccaacacggcgcaccaccccgtctccgtgcccaccacacctaggttgtccttatcgtgctcgtcgttcggccacatggtgaccccgcccaccgacacaccgccgatcacgcccaccaagaagcaggacgacaagccgaagccgacgccggaggccgccaccgcggcgaactacgcgtcgttgtggtcgcccaagcgcctcatgcagcgcgctgcccgcgctttccgccgcagcaggtcgcgcgcccgcgtcaggacggtcaaggacctcgccgaggaacgggcctcagtgctcgccgccagcagcaaggtctctgatgaggcggcggcggcggctaccgcggtgccgcctgcaggtgccaagacctccagcagcaacgatgcccgcgacggcgccatgggcagcgtgcaggacgagccgcggcagcagcgccacgatgactatcaccaccccgagatcgtccccgagaagatcatacacgaggacgcgttgccggtcgttgctgcggagaaggagactgccgccgccgccgcaacctcgaaggaggaggaggaggtggagtcgcccaagaaaggagcggctctgtcgccggtgccggaggctatcgtcatcgccacagccgcaacctcgaaggaggaggaggaggaggtggagtcgcccaagaaagaagcggctctgtcgccggcgccggagcctatcgtcatcgccgccgccttaacctcgaaggacgaggaggaggtggaatcgcccaagaaagaagcggctctgtcgccggcgccggcgccggaggccatcgttgccgtagcagcagtggaagacgtggtggcggacaagttcgtgacggttgtgaaggaggcgatcaagaagcaggaggcggaggaggacgagaaggaggaggcaatgcggaggttccagggcagccgtgtgaggacggcgttggaggcgcgagcggagtcggagcagccgcgtcgccgagaggtggcgcggagcaacgacgtgatcgaggaggcgcgcacgaagctgctggagaagcgtcggagcaaggtcaaggcgctcgtcggcgccttcgagactgtcatcgacaccaagaaggacagcgacgacgcggccgccggcaagccggagcaccacaaccgcaacaagtcggcttaaatgattaaacgtatacgcttcgtgtcttctccttaattattataattattactggccagcccatcgccgcatggatgcatgcacggcgctaattaatccttcttgctactaattaactccggttaattggtggcacaccatgtatagcgtcgtggagttctctatattacaccatagagggaaatgtggagaccggtgttgcattctatacaatttcttcttataattatatgattcatcggttttattctcccggacgcgtgggaaaaaaagaagcacaatacgaaaa

SEQ ID NO: 66866 - DNA, 891 bp, Zea mays
  Clone ID: MRT4577_160982C.1
cgacgccgtcctttcctcctagtgcccagctttattgcagatccagccctctgatcctcgtcttctttcacctctccaacatgaaggtcaacaccaagatcaagctggagccggtcatggcgccgtcgtcgtccctgccgccggagcctatcgtcatcgccgccgccttaacctcgaaggacgaggaggaggtggaatcgcccaagaaagaagcggctctgtcgtcgccgccggcgccggaggccatcgttgccgtagcagcagtggaagacgtggtggcggacaagttcgtgacggttgtgaaggaggcgatcaagaagcaggaggcggaggaggacgagaaggaggaggcaatgcggaggttccagggcagccgtgtgaggacggcgttggaggcgcgagcggagtcggagcagccgcgtcgccgagaggtggcgcggagcaacgacgtgatcgaggaggcgcgcacgaagctgctggagaagcgtcggagcaaggtcaaggcgctcgtcggcgccttcgagactgtcatcgacaccaagaaggacagcgacgacgcggccgccggcaagccggagcaccacaaccgcaacaagtcggcttaaatgattaaacgtatacgcttcgtgtcttctccttaattattataattattactggccagcccatcgccgcatggatgcatgcacggcgctaattaatccttcttgctactaattaactccggttaattggtggcacaccatgtatagcgtcgtggagttctctatattacaccatagagggaaatgtggagaccggtgttgcattctatacaatttcttcttataattatatgattcatcggttttattctccaaaaaaaaaaaaaaaaaaaaaaaaacctcgtgc

SEQ ID NO: 66867 - DNA, 604 bp, Zea mays
  Clone ID: MRT4577_160983C.1
ctcgaggccggccgggttccttctcctcccctcccttcccctgccctgcctatttcattcctctcctcccctcccctcccctgccctgcctatttcattctttgtttgtttcagcctttcacggaagaggggcggagtacgtaaggtgaacccggtcgtctgaagagaagcgaggacgacgtaggagaggggaggacagcgagatggccggcgggtttggcagcggcggggcagccgccgggagggccgagctctacgagggcaagatcaccggctacttcatcctcgcttgcatcgtcggctccttcggcggatccctcttcggctatgacctcggagtctccagcggcgtgacttccatggacgacttcctggtgaagttcttcccggacgtgtaccggcggaagcaggcgcacctccacgagacggactactgcaagtacgacaaccaggtgctgacgctcttcacctcgtcgctctacttcgcgggcctcgtctccaccttcggcgcctcctacgtgaccaagcgccacggccggcgcgccagcatcatggggcggggggtctatgctgatccttcttccttctgcgatgccatttgccg

SEQ ID NO: 66868 - DNA, 555 bp, Zea mays
  unsure (1)..(555): unsure at all n locations
  Clone ID: MRT4577_160984C.1
cgtctnacaccattgnacaactgttaagggccaagaatccaggnacaaggnagggcnnnatccccccagaaccaagcagnncggctcaaatcttcgcttttggcaaaccagcttgnaggnacctgggcgcacgncccttgctgactacccaacatccagnaaggnagaannncaccctccacnncttgtgctccnngcctcaggggagnngcatgcagatnncttcgtgaagaacccnntgaccggcaagaacnntatcacccnntcgaggtggnnagtcctccgaccaccattgacaacnngtcaaggccaagaatcctaggacnagaggagggcatccctccangaccaagcagnncggctcaaatctttgnnctgggaangcagcntnntgaggactggnngcgcactnnncttgcnncgactaccaanncatccagnaaggnagaannncaccctccnagcttggtgctnnngcgcctcagnnaggaggncnnatgcagnnatctnntcgtgaagaaccncnntgactcggcaagaactatnnncaccctc

SEQ ID NO: 66869 - DNA, 538 bp, Zea mays
  Clone ID: MRT4577_160985C.1
gccccgaaaatttgttccaaactttaaattggaaccttcaaccccaaaccttgggcccaaggcgaaggagcaagttaacccagaaatttttcctggaaaaactccccgggaacctgccttttgaccctcagttttgactttgcggatggaaaagggcaattgaaaacggacgttcaaacggcgtgtttaacctgccgcttcttccggccgctttttgtgcagggaatatgtccagtgggagaccaatcatggggcccatgcggactgcctataatcactggatataaaccctttttattaaccctttctacctccattgaaaacctcgccttaatacttccgcctgaaaatgcctactgaacaatatttttgtacccaatttttggcccaatacaaagcggaactcccaaccttaacaggcgccatagacatccttgaaaaaataacattttacaaaaaaaatttaacactaagggctaaaggtatgggctaagctcaatccattaagtccagccacttaatccaataaactgccccc

SEQ ID NO: 66870 - DNA, 584 bp, Zea mays
  Clone ID: MRT4577_160986C.1
ttaaaaaaaaaaaaaaaaaaaaaaaaaaaaaaaaaaaaaaaaaaaaaaaaaaaaaaaaaaaaaaaaaaaaaaaaaaaaaaaaaaaaaaaaaaaaaaaaaaaaaaaaaaaaaaaaaaaaaaaaaaaaaaaaaaaagggggggcccttttaagggatcaaattttacttccccttccttgcaactttatactttttttttggggccccctaaattaatttaatggcccgtctttttaaaacgttggaattggaaaaaccttgggttacccaaattaaatggctttgaaaaaaatcccctttttcccagttgggttaatagcaaaagggccccacccgttcccctttccaaaaatttgccaaccttaattggaaattggaaccccccttttagcggccatttaagcggggggggtggggggtttccccccaggggaccctttaaatttgcaagggccttagcccccgttttttaggtttttttcctttcttttttcccaatttttgccgtttttccccttaaagttttaaatggggggctccttttagggtcccattttatggttttagggacctttgccccaaaaa

SEQ ID NO: 66871 - DNA, 461 bp, Zea mays
  unsure (1)..(461): unsure at all n locations
  Clone ID: MRT4577_160987C.1
aaaaccccccccctgcgtttgctttgggaaatccccaaacatggggacaggggggggcgttcttacaaaagggcgccggtggttacagggcccctttttggccggggggggggcgctttaacccccgggggggggtccatttgggtttacaaaccgggcccccccttgttttttatgcctggggccctgggctgggcccaacccgatccacggggaccccccccggcccttgggggaaccaacaaataaagggggggggggggggcaaaaacaggggggggggaacccccgggccctgcccccgggaaaccccttgggccttgaaaccttggggcaattggaccgggggggggggggggcccccaaacctggggtttttggatggggaggttcgggcctttccccaccgggccggggccgaccttttggggcggggannagccttttggcggggggggggg

SEQ ID NO: 66872 - DNA, 478 bp, Zea mays
  Clone ID: MRT4577_160988C.1
aaaccggggcgcgatccaggtcttaagcggacatccgtgcatatcttgatggtagtgtctgttcctgcggtaaaagccaaaaaagaggaacccctgttccgcataggaagaactgttttttgctgtcgccaaataaaacctttggaaaggaaacaacccttgtagacctttctacagggcgggtttccaaaaaaacaggagcctaaaaaaaaaccacccagaacttggccgccttaccctaaaggagctactgttgagacgccatattaccctctaggaagaccaaggtgtcctcctaattgggctctcaccctggaaaggagggaggtttaagctttttccattttccaccttagcaccccacaccttgtggggtgctccctggaggggacggccccagaaaaaagagagggcccaagggttttaggggctgaccttgtcataaggatttaaaataagggggggctacctcctcttt

SEQ ID NO: 66873 - DNA, 273 bp, Zea mays
  Clone ID: MRT4577_160989C.1
aaacggcctacgccccggtgggccctcctcgtccacgaggtgaggaaaccctagcgaccgaccatggcgttgctcccgcgcaccgcgcggctggccctcctttccaccccgcggacgaactccgctgccgctgctgcgggcgcctccccgacgtgcccagcgccatacggtggcgcccccccaccgacgatgacgaaaacggccgagggcgtggactctaaggtggacgacctgatgaactggacgcaaatggagataaaccgaaccatgacc

SEQ ID NO: 66874 - DNA, 429 bp, Zea mays
  Clone ID: MRT4577_16098C.1
tagtctctttccctctagaagacgatgggcaaggacgacatgatcgagagcggcgctggcggcggcgagttcgctgccaaggactacacggaccctcccccggcgccgatgatcgacgcggctgagctggggtcctggtcgctgtaccgcgccgtgatcgccgagttcatcgccacgcatgcatgaccctgtacatcacggaggccacggggatcgggtacaagcaccacacggacgcgtccccgtcggacgcctacgcgacatgcgacggaccgcgggtgctcaccatcgtctgggaccttcggcggcatgatcttcaacctcgactactgcaccgtcggcatctcagcgggtcacatcaaccccgccggcgcctatcggcctcttcctggggcgcaaaggaatccctggagcacgcgcctgctctac

SEQ ID NO: 66875 - DNA, 253 bp, Zea mays
  Clone ID: MRT4577_160990C.1
agacggcgactagagcatggcgttccagtttcggatgctggatcggtctgggctcgagagtcagagtcactttccatcgtgggggatgagcgagcccgttgacatgtgcctccgcacggctctgtatgagtcccacgccatcatcttctgcgtcaaggaccaccttctgcgcatggcgcgcttggacagcgtcttctttagtagagcgtcatcttgaactccaacctgctcagaccctctcaatgctttacgt

SEQ ID NO: 66876 - DNA, 677 bp, Zea mays
  Clone ID: MRT4577_160991C.1
gtcccccgacgacgccgtttctaggctctacgtggaagcagcagcctcggaccgctcctacccattggggccgacgtctaagctgtcgatgggcatcaagcgtgcgtgctgatctcacgtgtaccatccgccgtgggttctgggccatgaaggccaacaacggaggcgtcttccgaaggccgacaaacccgccgccggcgcggaacccaaggtgtaccccgtcgatgaccgacaagcctcgagttgccagcacccgcaagcctaatcccaccaagctcaggtcgagcatcacgcctgggacggtgctgatcctcctcaggtcgcgcttcatggggaatatagtggagttactcatgcatctcaattccggtctggtcctggtatatggtccattcaagatcaatggaataccgattcgtggtgtaaaccagacctatgtcattgctacataaaccaagggtgacatctctggtgttgacggcctaaagcttgatgacaagctcttctccatagagaaaaagcataacgagaagaagacggagggtgatgctttttgagacagagaatgaggcgttcaagtttctgactgagtgcaaaaaggaagaccagaacgccgtggatgctgctctgatcaaggctattgagggtgtacaagagctgaaggcctatcttggcgc

SEQ ID NO: 66877 - DNA, 307 bp, Zea mays
  unsure (1)..(307): unsure at all n locations
  Clone ID: MRT4577_160992C.1
ccctcgagggtgggagtcgtctgggacaccannttgacaacgttaagggccaagaaatccaggaacaaggagnggcatctcccctcagactncagcagcggcttcaatctttnngctggcaaacnagcttgaaggacccgggcgcacgcnnttgctgactacccaacatccagaagggagaagcaccctcnncaccttgtgctccgtctcaaggggaaggcatgcagatcntttgtgaaaacccctgaccggcaaagactattcaccctcgagggtggagtncctctgacanccatttgacaacgtc

SEQ ID NO: 66878 - DNA, 213 bp, Zea mays
  Clone ID: MRT4577_160993C.1
catgtgcctgccccgttttctggttatcaatgagacgattatcttgaatcagatacatcatctcattgattaccagaaaacggggcacgcacatgatcgccgtcacagacaagcaacgtcgaccacgtaccacgacgcgcacatctcctctccgccatcgactccatacatacagacacacgctcgcggtaacatctcacacagacacgcgca

SEQ ID NO: 66879 - DNA, 496 bp, Zea mays
  unsure (1)..(496): unsure at all n locations
  Clone ID: MRT4577_160994C.1
gccgcacatagtcacttcttccccactagcaaccgataatccgccggcgttgagatgtcggttaatcaggtatcttctatctggcgacggagctccctgtctggattcattcacctacaatgagctcgagaacggcgtcctgtgggagggctacggaaagtgggtcacccaaggtcctggggatgcggacattggggccaatccatccgtccagcggtggtgaggacgaaagcgttgattacacagctgagatagtggatgatattggcgacacattcccactacaggagcaacctacttttgacaagaaatcatttgtgtcttacatcaaaaaatacatcaagaatccactgctgtgttggagccagagaaacgcgatgagctcaaaaagggtgtcgagggtgcaaccaattttctacttaacacgctcatagacctccaattttttgttggtgagtccatgaangatgatgcgtctgagcgattcacctattac

SEQ ID NO: 66880 - DNA, 352 bp, Zea mays
  Clone ID: MRT4577_160995C.1
cactctcatgaattggtgtatttggtatgtttattgtgttttactgaacaaaaagtgcgacaagtatgtatcaaacgaggcgttagcatggggaaaaacttctgtggtttgtgcaaactctacaaccatgatgtatctaaacagcagtatcactgcaacggatacagaatatctcgaaaccaaaaggagggagaattccgtacactgttcaaaacgtggatcgagctacacaattgctctgaagaataggcatgcatatgccgaaggggcgatgcatcatgactgtccaatctgcttcgaaaactcggtcgaaaccacaaaagatatttccgagctgccttgaggacatacc

SEQ ID NO: 66881 - DNA, 1515 bp, Zea mays
  unsure (1)..(1515): unsure at all n locations
  Clone ID: MRT4577_160996C.1
ggccaagtatacaagtgtgacctgcgggaacatgtttctttctccagagttttttggtaccaagttcgatgttattcttgtggatcctccatgggaggagtatactcaccgtgcgccaggaatcacagatcacacagaatattggactgctgaggagattatgaatttgaagattgaggctattgcagatacaccctcctttgtgttcctttgggttggtgatggtgtaggccttgaacagggtcgtcagtgtttaaagaagtggggattccgtaggtgtgaagatgtttgctgggtgaaaacgaacaagaaaaatgcagctccaagtctgcggcatgactcacatacattgttgcagcactcaaaggagcattgcttgatgggcataaaaggaactgtgcggcgtagcacggatggccatgtcatccatgcgaatattgacacagatataataatagctgaagaaccaaccgatggttcaacaaagaagcctgaggacatgtacaggatcattgagcattttgcgcttggaaggaggcggctcgaactctttggagaggatcataacatccgcccggggtggcttacccttggaaaaaatctatcctactccaacttcaacaaagaggcatacattaggagttttgcagacaaggatgggaaagtatggcaaggaggcggtggccgaaaccctcccccagaggctccccacctcgttgtgacaacaccggagatcgagagcctgcggcctaagtcgcccccggcaaagaactaacagccgtcgtcaattttgttacgcgggctacaaatttttttttggggggtgggggggacagtagctttgacggctctttctgaaggtccacatgaggccttatgaaccttctgtctacagaataaaggattttgccggatgggccctgtctgttagcaattattagtgacgcgatgcaagaacgattcagtattttctccagtaaggttgatgctaaaaaaaaaaaaaaaaaaaaaaaaaaaaaaaaaaaaaaaaaaaaaaaaaaaaaaaaaaaaaaaaaaaaaaaaaaaaaaaaaaaaaaagggggggcccgggattaaaaaaaagcccacgcgtccgccgatcaaaaagcgagccgacaacaacaagcagggagagaaatgaggccccccatcgggctgttgggggaccccataacggagaaggctttcggggagggcggttggggccctttttttgcaaacaaaaattcccgttccgccaactttgggctggggggttacaggggttaaaaaaccccctggggggggcgggtcgccggcccccccgtggcaaaaatagccggcccggtttgggccgtaaccgttttttttggggcaaaaaaccccgggttgcccaaccggccctgtggcctcaagaactggccccttgccaagaaaaaggaaaacctccgcgccattttggcgctcttaaaaaaacgggggccgtngggggtctaaatactaataaccccccccccg

SEQ ID NO: 66882 - DNA, 313 bp, Zea mays
  Clone ID: MRT4577_160997C.1
cgggcgcgctggggggttttttttgtgcggcccatttattatatatcgcgtagaaaaattatttattggggcctccagcgagagagataccggggagagagcgtactgcgtactgcgccaacttcaatctgtgtaggggcttccttccgtgaaggttcgggggggggtggtgcgtcataaattcctcataatccgtggagccataccggtctttaccggcattcacgaactccggggatgggccaaccctcattttctggcgaggggacaggaacagggcccgcgacattctctctctgggtgggggtaccac

SEQ ID NO: 66883 - DNA, 366 bp, Zea mays
  Clone ID: MRT4577_160998C.1
ttcttttacgtatgtaccaccgtttctgatcatatgagggggcggccagcatatctatgccatcgatctatgttgacatgtgtagttcaaatttcaccgacacatatacatataccctaataaatattgtatcgcctccttttacttataggtctgtacacacacatgcaagttcaaaagctacgtaaaatcctgtagacgagttcaaagtcaggtccgtccgtccataactagaaaccggttacaattattaacgtgtttacacctattgcagcttactgaccgaagtcctcttagttaacggtgacctacgggaagccgagctgcagttgtggcgagagcggctacaggatcaccaacactccc

SEQ ID NO: 66884 - DNA, 331 bp, Zea mays
  Clone ID: MRT4577_160999C.1
tggaaatcctgggaggcgtagctgtatatgttacagctgcacggtggaggtctaggtatatcgaccagccctgtatcctatggccgatggaccttctggacactgatgacccgatggattagggacatatctaaagacgatactgaagtcgcatgtttggtggagatatggaccatggacgcactaggactaaggcagtaaccaacatgctctacatgctcgtgttcctagcacactgacacctgggggctgagctgctgccttagactgcgctcagcggcattaatagctgcgcgactctaccccaggtagaacacacatcgccagtcga

SEQ ID NO: 66885 - DNA, 668 bp, Zea mays
  Clone ID: MRT4577_16099C.1
caggacaccctgcattagatgaggatgggaggaatgctttgaggcggttgttaaccgcatatgcaaggcataatccatcagttgggtactgccaggccatgaacttttttgctgggctatttttgttattcatgcctgaagaaaatgcattttgggccttagtaggggttattgatgattattttgatggatactacactgaagaaatgattgaatctcaggttgaccaactcgtccttgaggaggttgtacgagaaaggttccctaaattggccaaacatatggaattcttgggagttcaagtgggatggataactggaccatggtttctttcaattttcatcaatatgcttccatgggaaagtgtacttcgcatttgggatgtcatcctttttgaaggaaatcgcataatgttgttcaggacgacacttgctttgctggatttatatgggcctgcactagtgaccacaaaagatgccggagatgcaattacactactgcagtctcttgctggatctacatttgacagcagccagcttgtattgacagcttgtatgggctttcaatcagttagagaaatgggattgcaagagttaaggaaaaagtacaggcctgaaattttaactgcaatggaggaaagatcgaaagaccgtggctcctggaaagat

SEQ ID NO: 66886 - DNA, 279 bp, Zea mays
  Clone ID: MRT4577_1609C.1
cggccaattgtgcacgttttgtgagattgttgtgatcccccatgagagggctacacaaagagatgttgctgttgcagtggcagactgtttcaccctggatagtgatgacctgcggaactgtgctgtgtgctgtgctgctatgagctacgattgccagatctagtcgcttggatgcaatcacctgctgttgctagcttgcgtctggagacaccacatttatttatctcaactctggtaggaactgaagttgctaccgcaggactactgcctggacagtta

SEQ ID NO: 66887 - DNA, 295 bp, Zea mays
  unsure (1)..(295): unsure at all n locations
  Clone ID: MRT4577_160C.1
cggacgcgtggtttccttatcccctctccctcccttcgttcgccatggcaaccgtgttcctccgttccctcgccatggccatggccgacaccgcgcttctgnctcaccacaagctcctccctacggttttcctgccgctccttcccctcgtcaacccgggcggggcggttcttcttctgggcaaccgcggcttgcggccggggcccttggttgcttcttcggaggccttcaaaagaaccattgaatgggttaccgacgaggagaaggaggctgaagaagccttcgacgaggaggg

SEQ ID NO: 66888 - DNA, 830 bp, Zea mays
  unsure (1)..(830): unsure at all n locations
  Clone ID: MRT4577_161000C.1
ccggccgggccggcccccatcacaaaacgaggacgtgagagaataggccagcaaacagacgtatctgggaccagaaaaacaatcgccaaaatgtcgaacccccgcgttgaagaacttcccgatgaggagcccaagaagaccaccgtccaggagcacgaggatgactccagcgacgactccgaggttgaggaggtcggcgagggccagctccccgctggctctactgtgatccacaaccgcaacgagaagaaggctcgcaaggcccttgagaagctgcacctcacccgcatccctggcatcacccgtgtcactctccgccgtcccaagaacatcctcttcgttatcaacacccccgaggtttacaagtcccccaacagcaacacctacattgtcttcggtgaggctaagattgaggacgtcaacgccgctgctcaacaagctgctgctgcccagctcgcttctcagaacgctgaggaccactctggtcacaaccacggcgagcccagcaaggctgttgaggccgacgagaagaaggaggataaggaagacgacgaggacgaggaagaggaggaggaggaggaggtcgacgcctctggactcgaggataaggacatcgagcttgtcatgacccaagccaatgtcagccgaaacaaggctgtcaaggcattgaaggagaacgacaacgatattgtcaattccatcatggctctaagtatctaggcatgagtttttgaccggacgatcttccacaaaagcatgtgcatggtacgaacactgggctctgtattagttctgggcgactgtactctgggcggaatggagntgatgcc

SEQ ID NO: 66889 - DNA, 369 bp, Zea mays
  Clone ID: MRT4577_161001C.1
ggcattaaaaaaaaattttgaaattaccggccccccggattggtgggggggggtccacaccatacattttggccttactggggggggggggaggcaaacacattaacaccccggggggggacgaaactactggaggcgttccataataactccctaaccctcagaagactagcttgaccctttgacagattcgcgacgggacactggatagagtagaactcgcttggttcacctttcatcggctgggcaggtcccaagcaaagaagggtctcaaaagggaaaccaacaaacagtccgggatccactgtaggtagtagaggggggtaacccacttcaatctccgggctgtcctgggggcatttgatcagc

SEQ ID NO: 66890 - DNA, 260 bp, Zea mays
  unsure (1)..(260): unsure at all n locations
  Clone ID: MRT4577_161002C.1
tttatttttnnntttttattttattttttttttttgttttgaaaaaagggtgaaattttttttcccgatcttaatacaaagctgtgcttaaaccttttatttgcatatttctagaaaaaaaacttggccctttacatgtaaaaggggaataattttacccggtgccggcgaaaaaccccaacggaattattatttgccacccgttaattgacatgcatatggacagaacgttttctacaatggccggactcattttttat

SEQ ID NO: 66891 - DNA, 401 bp, Zea mays
  Clone ID: MRT4577_161003C.1
agtcctcctactgcttcgagctactctccctacatccctgaatatgtaggcgaccaacatcctacgacttctgtagcttcagcaagtcacctgccaagcctcctaagctcaattaccaccacccccaccaataggcgcctgccccaaaccatgatcagcagccagaaaggcaccttcagcctaaacaacaacctgacctttgggagcagtctgaagctcccacagttaatatcactgtgcccaaatccaggcaaatctactgaagatgacacatccttttggcgaaaaagaacccccaatgtgtgggatttctactaattacggcgttgatatttttgcggcaaaagacaatacagaaaggttgacacctcagctggatgtaacaaacctatgattacacc

SEQ ID NO: 66892 - DNA, 286 bp, Zea mays
  unsure (1)..(286): unsure at all n locations
  Clone ID: MRT4577_161004C.1
ttacatacaggttanaaatgtttatctggctccgtgcactcctgcaatcaggcggagatgccaagttgccaacagctgacaaaggtccttgtcgacgcatgtgcactggaccaaacacacaggctttgccaaaattctaaatgttcaatcaagattatgcaggaaaaaaatatacaaaaaagggcgaactaccaatatgctccttaagatcttaaggcctcattcgggtatttcccattccatggggttagaggggattaggaaaagattttgatttgctagagat

SEQ ID NO: 66893 - DNA, 361 bp, Zea mays
  Clone ID: MRT4577_161005C.1
gcagatccccacctgatccgccttttgctttctcattactcccctctgcagacagtatgagataatttccaaatgctccggggcacacacaattcaagcagcaacattacttccagaacttgaccaagcacacctacctgaaagggcgcttcgacatgatcaccttcgtcaccatcccccttgcactagctgactacatcatgctcatgattggacgtggagtttacaacatgtatcatggcgttgggaagaaagagcgatcttccactggttaactattgcttctgcttggcattgaattcataccgtcaatactgctaaatcctcttccctagcaaaataatactggcaaataacaatt

SEQ ID NO: 66894 - DNA, 729 bp, Zea mays
  Clone ID: MRT4577_161006C.1
gccgcaaaatttttttttttttttttgctttataatatttactagtaacgggtgcgcgcaaagcgcgcgtggtaaatggtatgcaatattgctgtactaataaagcaagcgatttttttaataatacagagtaaaagacagtttagagcatagcagatttgtataaagtaaaatagagttaaatgagcactggcagaaggtagtatgtttgttgcaacatttcaagctaccttgttatatttacatgaaatgtcttcataaaagttgagcagttatatataattatataaaggacattctacaacctaaaagctgctgataatctgagaaaatcttcagttgttggaagatcttgtgtccgacctttctttaatacgtagaggtccattttgaaccttttgggtggagattcaattgtaacggttggaccttttcctttgtcgtcaagtattgcatcatgctgttttggaagtagatgcagtagatatccttccaattggattttgcagtagatggaagagcataaacaccctgatccttcagggtgtagtgcttcatctcaagctctgttttgatccaagtgtttcagcgacctgcacaagctgtggagatggacggagcagacgaggagacaggacgcacggtggtcgccggctctgcggtcgccagcgctgcagacggcgggcctttgagtgacttttcagaagacggcggacgattcccggccgg

SEQ ID NO: 66895 - DNA, 444 bp, Zea mays
  Clone ID: MRT4577_161007C.1
atggcaagggtacgctccactgccagggttacacgtgacggagaagaagccgaagctgctaaaaccgctccaatttccgaagtgatgaaacggtcggggctggtagagttaggggacgtttctgacgaaggtgcacctgccgctgaagttgagcaggttggtgctgaagaaggtggatctgaagatgattatattgtcgtgccgtctaaacccagccacttggagtttgggaggtccattgttaccgaagatgatatgactaagttgatgaagttaggctatttcagtgaagccaaaaaggaactaattcgctttggcggagaggaaattactctgatgccagaaaaggatgaagtggtagtctttaaaagcttctttaaagcaggattaagatttcctttgaatgagatgattgcggatgttttgcggaagtttgggatttag

SEQ ID NO: 66896 - DNA, 637 bp, Zea mays
  unsure (1)..(637): unsure at all n locations
  Clone ID: MRT4577_161008C.1
agagcatagcagatttatataaaggaaaatagagttaagtgagcattggcagaagggaatatgtttgttgcaacattttaagctaccttggtatatttacatgaaatgttttcataagagttgagcagttatatataattatatagagggcattctacaatctaaaaagctgctgataatctgagaaaatcttcagttgttggaagatcttgtgtccgacctttctttgatacgcagagatccatgtttgaaccttttggggggagattcaattgtagctgttggaccttttcctttgtcgtcaagtattgcatcatgcttttttttggaagtagatgcagtagatatccttccaattgaattttgcaggagaaggaaaagcgtaaacaccctgatccttcaaaggctatcgcttaaaaacaagctctgtttgttccaaatgtttctgacctccaccaaacagatgctcagggtcttcaactttgtggaactcgaagagtttgatctcttggtcaccgaagcttgaccgtcaatttcctccaagttcagaaatggatcacaatcgggaaccgccatgtgcagggacgacaacttcttcgcaatttggatntggggaaggagactagagcccggccgg

SEQ ID NO: 66897 - DNA, 602 bp, Zea mays
  unsure (1)..(602): unsure at all n locations
  Clone ID: MRT4577_161009C.1
cttccgcacgcgcggcgccccctccgtcacccgcccattncggcggcgcgccccccccgacgtcgaagagaggcgcacttacccctctcttacaaagctccacccactccatccacgcccgcgaaaaagagaagagagagagtatcgaactcgatacttcggatgaaagaacgagaaatatcgtatactacatcgaaaacataaagactcgacatcttccttatcatctctctcaactctattatcattaaacataaaaattaggtaataacttactaaaatattacaataaccattaattatatttttagttttaacttaggaaactcctgtatgaagaagaactaggaagtagttagtaatattcatatcaactatatcttctacaatattatcttcttcattatcattgaggttgatcttattaacgttctcactcatcatctccttctagagagagtcctcggtttataatttacctacctcccaatctcaatattcagttcagttctctttttagattattgattaggaggtttagatagtattatagatcttttccggtttctgtgtattagatgtaatccggatcgagagggggg

SEQ ID NO: 66898 - DNA, 248 bp, Zea mays
  Clone ID: MRT4577_16100C.1
ttatttttttttaccaagacaaatcacattaatagaggctagtgcgaagaaaaaaagcctactgaatggcctgctgcaatttccaggccagagggacgaatattgtatgcacggtagaagaccgaaggatatggcggctgggtgaggctcactggaaagagggataaatgatacacactgaacactactgtgcagcatggctggtcataggtactaaaaactgaagcgatctacggggtcaccttgga

SEQ ID NO: 66899 - DNA, 225 bp, Zea mays
  Clone ID: MRT4577_161010C.1
gcggcgctccggttttagcacggcgcgctgcacggccaagcaccgccaaggcacggacgctgcgagccccgtcgcgggcaggccgccacgcagcctcgcgggcgcgtctggcccgcctcctgtgcggacaaggcatgggaggcctcgctcccctggcggctcctcggcaagggcgcgcggcacggggcccgcgcgaggatggccggttcccggtgtgggcgcggg

SEQ ID NO: 66900 - DNA, 357 bp, Zea mays
  Clone ID: MRT4577_161011C.1
cacacacacaagcaacatataaagtgttattcaatagcaacaatacatcaccgggggcgaccaaattattttccctccttatcctctttgctctttctacatttctttatcacgccacattttttcctaaatgcgcacaagatcctatagctttccttcttcccccatacctgacatcaattatagcttctatatgtgaaaacccaactctccaaccattttggcttaaacaagcaatcacattaagcaacatacctttatcgcccttgttgtttcaacaatcaccagccctatattttggtgcatacattggtacaaaccatgagggcacatcaacttcatcaactcgtgctacct

SEQ ID NO: 66901 - DNA, 266 bp, Zea mays
  Clone ID: MRT4577_161012C.1
aaaatgtacagtaacagaactacatggcatgtttgttcctgcatacgtatttatagaaaaaaatgatttgtctcaaaaaaaaaaaaaaaaaaaaaaaaaaaaaaaaaaaaaaaaaaaaaaaaaaaaaaaaaaaaaaaaaaaaaaaaaaaaaaacaaaaagggggcccgtcagctcgtgaaatccagtgccccagcttttaatttagccctgcctcctttaggtattactgaatttttttatagcgtggcggcttaaaacttatagg

SEQ ID NO: 66902 - DNA, 375 bp, Zea mays
  Clone ID: MRT4577_161013C.1
ccgggccggcgcatccccctctcgcccaccaccacaccaccggtggccgcggcgacccagtcgagaacacgaaggcgatggcgacagcgttgaaccgtggtctccgctccgggttccgcctcctcgccgtcggtgtcgaggtgttcaagtcagtttctcgtggattccatgtcaccggtgtgaagagaatgtgagggcatggtcatgatgagccatactacatccctgcccagcccctgtataactctgccccccgccgacccaccctcccccgccacccgccactctccgccgctgcgccccccccgcctccgccgcccgcaccccccgcgcccgctcccccaccccctccttctttttccctccccccccccc

SEQ ID NO: 66903 - DNA, 373 bp, Zea mays
  Clone ID: MRT4577_161014C.1
gcaaatcggcgaatggtggccctgcagctaaaaaccttcttgttatgataatggtccttgagaaatttgggagaagggttcagaattacataagaacgcggtgactccactgtgctatggaagcagatcgacctgtctatctaccagaaccaccatatttggatcgcaaaaatgggcgtttggaggaacggagtgacagcccaagatgtacgggtaacacacccatgggcgattatccaaccatgaactcctggtgataggctggaattccagagatgtattgtacagggcctggaacacctgccagtacatgaatgtgtgaactatgctacggcgccagtagcccagagggcagcccccaatacaaccccag

SEQ ID NO: 66904 - DNA, 717 bp, Zea mays
  Clone ID: MRT4577_161015C.1
aattcggcacgaggcacaaatttccctctctcctggaactggaagcagccgtggcatccgccgtttcttgcgtgcttcctttcttggttctcctactagctgtcatcgctggtaaccacggtgatccccgtgctggacaccatggccgtgtcctggtaggggataagcaacccaggaaagcagcaaccttccgctgtgcggatcacaggagggggactgcgtggggaccagaccaagcatggaggcactggcggccgcattcgccaccggccttgtccttgccctcgcggcggcgccagcgggagccgaaaccgaccccgacgacgccgcggcgctggcgaatctctacacctcctggaacagcccgtcgcagctggctgggtggtcggccagcggcggcgatccctgcggcgcggcgtggcagggcgtcgcctgctctggcgccggcgtcaccgaaatcaaacttccagggacagggctcgatggttctctgggatacgagctctccaacctgttctctctgaaaacactagatttgagcaataacaacttgcatggttcaatcccttaccagctgccacctaatctcactaatctgaatctgggtagcaacaatttcaatggcaaccttccatactctatatcaaatatggcttcgattgaataccttaatctcagtcacaactcaatttctcagcaactgggtgatatatttgg

SEQ ID NO: 66905 - DNA, 467 bp, Zea mays
  Clone ID: MRT4577_161016C.1
aaaagggggaaccgttttttttccacaacaaagttttagtttcctttgcgaaaacaacccccgttgttcaattacatagcattttgctagattggtgggtgtttggactcgaaaactgttttaaaaaccttttggtttaaggaagggcccgcaggaccttcccagggcaagttccaaaaccaatgttggaacctttacccttggagaattctgtaaaaatgacctcatttccattttttaaaaacttgggggtcaaattgcccactggtttttttttttgcccgttccatgttagctccaataaacatcccagggggtccggttcagggccactgagggtgccagttgcaaatatttcccccggccttatgttgcatccattgataggggggggggttaactggtgggtcaccggccaatacaaatgcttgaaattagtttttgtgaccattagggcaacattttga

SEQ ID NO: 66906 - DNA, 632 bp, Zea mays
  Clone ID: MRT4577_161017C.1
gttgaggcctttgcgaagaggttggattcagtttggaaggagtcacatattggtggtaatggttctgcacggagatttcctgggtttaatcacatgtgagtgttaagctggtaggatcagaaggcagaagcagaggagatttgtggacatacagcctggaagagagtaaaaaataccaaacagtcgacttgctcctgtgtgtttgataagggcatgtacaaccctgaaatcatggatcggttttgcgaagtacaaaagacatgttaagagactataccctgagcctttggatcataaatgtaagtaagaggcaatgtgtgtagagaattgtgtagagacagtctcttcgcgaaaagagagcctgtctattgtattttttcaattaaccctcaagagacttcatattgaacgaggttgtacatgtcagagccaagcatgcagacatgctattttgttggggaggaggctgcctagttgggatgaagcttagcatggttcaaggaaaaagtgtagttttttttctttggaaagggaggattagaggtctgtcttgtctgtgttgccaggggtttccttcaatataggtggggagggaggagtgttggtgttagatcattcagcagcttactcat

SEQ ID NO: 66907 - DNA, 265 bp, Zea mays
  Clone ID: MRT4577_161018C.1
aatcagccgcgtctcctctccggagtcctcctttgtccatcgcctccgacacgtcgctcttcgttcccgccgtccagcatgggccatcatgaagaggatgaccgcggctcacaggatgcgatcaaggccatgtacaatgcagagaagaggggcaagaggcaggtcatgatcaggacgtcgtccaaggagatcatcaagttcctgacagtcatgcagcgtcatggatacattggtgagtctgagtacggggatgaccccagagctg

SEQ ID NO: 66908 - DNA, 169 bp, Zea mays
  Clone ID: MRT4577_161019C.1
ccgggccggaaagcccggggcgacgccacgcgaacgggcaacgagaagacgaaggaaagggcaccaggaagaagcgaccgaaccagcacgacaagggggacgaagaaacacgggagaagccaaagccaagaggaaccacggaccaagacgccaacaggagcaagggaaa

SEQ ID NO: 66909 - DNA, 265 bp, Zea mays
  Clone ID: MRT4577_16101C.1
cccacgcgtccgcccacgcttccgcaaggttaaacatttatgattgtatgcaatgctccaatcggtgtggaaaaaaaaaaaaaaagaaagaaaaaaaaaaaaaaaaaaaaaaaaaaaaaaaaaaaaaaaaaaaaaaaaaaaaaaaaaaaaaaaaaaaaaaaaaaaaaaaaaaaaaggccgcccattttaaagaacccaagcttactaacccaatcatgcaaccatataattattctataatgtcaccaaaatccaattcactgcc

SEQ ID NO: 66910 - DNA, 465 bp, Zea mays
  Clone ID: MRT4577_161020C.1
gaaccggccgaaatcccgggccgaccacacccttccaatattaattaaggggcctggacctaaatggaaggggtttcctaacaactgcaaatattaagactttatttaaagacgtccgcgggaaatgaattgaggaagggacctataacctttgcttaaaaaacgtgagggatgaaatctggaccatggtaaaacccgaaaatcctttaaggatcttgttataaaacctttttttttgcaagcaaggtggaactgtccccagtttgttattaaatttccgtggttcctggcccaacaccaccaggtaaaatcttttccagtataaagtaatactaagtgaaattggcattaaatttttattttaccaataaactctatctttgttccttaaattataaaatttcttaaaaacttcttttatcctaaattttatattatttgatactaattttttttttaaaattt

SEQ ID NO: 66911 - DNA, 445 bp, Zea mays
  Clone ID: MRT4577_161021C.1
aagaaatcttgtatgaaaagaaacagatggctactttgaggtaaatatttcagggccatttgtatttacttatgaggtttagatcaaatgatagatgatgtcctgcatgattttggaattgcatttgtattgtataaatcctgcttataaatgccattattaaatttgtgaagtagtccgatcgcatcaaaaatttgtgaagtagtctgattagcaacagaaactataattaattgagtcttattactcacactagatcttgtccccctccgtctgatctgactacttttgagctgatttggtcaggataggtgccatttttacccagcggctttctcgccaccaaatttatggttgcattttgtctccggtctcaccattcccattttattctctgcgtgttgctgtctgctccagggcgacagtggtcatgctgctcggcgtc

SEQ ID NO: 66912 - DNA, 159 bp, Zea mays
  Clone ID: MRT4577_161022C.1
cacgcgtccagaaaaaaaaaaaaaaaaaaaaaaaaaaaaaaaaaaaagaaaaaagatcaaggggatgaggacctaaagtcttcaggttaaggtgttcgttaatcttaaatgataagatcattcgatcttgtaaatgggcattaaattttaagttcaggg

SEQ ID NO: 66913 - DNA, 389 bp, Zea mays
  Clone ID: MRT4577_161023C.1
attctatagaagaaattgggatcttccttctgtgttttcctggaaaaactgcagtgcttgtgtcatatcatttcctgttacttccttgtttaatttagttctgtagttacttacatctttttttttgtacggcaatgctgtcatacctcctctcagataagacaatatagcaatcatctttcgagtaggtatgttgttgtggttcaatgttcgtataactcctttttccatttcagtcatgtatttatgtccgctaaacatgttgttgctgtctgctggtctgagatcatgattgtgttccaagtctaacctatcgatcacccacttctgttgatgttcttttataaccatgactactctgcagtctgttttaacctggacatttgtat

SEQ ID NO: 66914 - DNA, 364 bp, Zea mays
  Clone ID: MRT4577_161024C.1
tccggaacgacgttgagcttatgagcaaggggatacttccatgccttttggcgccgcaccaactggcaacgaccaaggagggttttttaccaagccatatgacttgggaaggaaaaaaacctttcttgacaatggtttgtttcacaacaaccaatttttttgtaaagaattggccgacaacaaccgggaagttttcaaccttttattacggggttccgggccccttaccaaaccttgaacaacaaaccttccgaatccattttttttccggtgaaaaagggattgccgattccacggttaaggcaactgggttttgattacaaggtaaacccaagaaccaacttccttccctttcccgggtggg

SEQ ID NO: 66915 - DNA, 200 bp, Zea mays
  Clone ID: MRT4577_161025C.1
cccacgcgccccggcaaatattttccagtgccaacacctgcactatctacctaccaagtcgctacacttccactgaatgcttttattgaaattgacttcatccctactctctaatcagaacatccaacccctcatttaatcatcaataatcacaccataatcagcggaagacctacctgtaccacgacaattttttaaaa

SEQ ID NO: 66916 - DNA, 606 bp, Zea mays
  Clone ID: MRT4577_161026C.1
ccccgcgtccgctctcctctcctcttactcttccccaccaacgccaccaattccaacactccgatggatgttttcaccaagcaggtgctgcccatgcctcaccagcgggaccccaactacccttcctcttccacctcttcctcctcgtcgtcgtcctcctccacgcccccatctcgccctcaccaccgtgcgcaaccccaaccccaaccccacaacctcccccagtccccgagacccgtcccgcgcaccatcgacaccaccccgttccccaccaccttcgtccaggccgacaccacctcgttcaagcaggtcgtccagatgctcaccggcgccgagcagccggccaacaacgacgcgacggcggcgggggcagccgctgccgctgccgccaacggcggtggcgccggcgcccaggcggccagcggcggaccgtgctgccggcccaagaagccgtcgttcaagctgtacgagcggcggagcagcctgaagaacctgaagatgatcgcgccgctggcgatgggctcgccgccgtcgccgtcgccgtcgtcgcggagggccgcgccggagatcctgtcgccgagcgtgctggacattccgtccctacgc

SEQ ID NO: 66917 - DNA, 268 bp, Zea mays
  Clone ID: MRT4577_161027C.1
acctgcaccagcctacgggttacagaaccaaatgaggcccatactttggtgcccaattgacgcaaaaagcttatggcataacttttacaagccctgctcagtcaagtaattcgtcgatcctctccaccaccatgttgtattgctcctggagtcattgcctagacatagacaccactagtccaatgacatgctcatgtttcttgatagtcatgcccccagtgcccttctttgctcagatgacaactccaaggtcaccttggatcactat

SEQ ID NO: 66918 - DNA, 227 bp, Zea mays
  Clone ID: MRT4577_161028C.1
gaggaagatgtcgtcttcgctatggctatatatcggaactcacataaatggggattctgacttctcgccacacatactgatggggcaaagggtcatctatgcccacacatgcaacacataccctacatgtattactatcacaagcaaatttggacttaaaactacgcctggccggttcgctaatccgcatgagctttcactgggatccgactatctttctgcgagga

SEQ ID NO: 66919 - DNA, 369 bp, Zea mays
  Clone ID: MRT4577_161029C.1
aaaaaaaaatgtttaaattatataaggggtgcccccataaaggtacaaaagccaacgaaggggccaaaacaaaacgaccctttccttattgggggctccccaccaaacaagcaatttccccaaaaccaaattcctccccacccttaaaaaaacggtccctggtgaacttaaaaaaaaattatggtggcaacacgaacggggaaaccagggatgggggctccctttccaaggggggcaacaccggggggattaaaaaccgccggtcccttaagaggcccattaggggggggggaccccacctctgggggggattcccacggggaaaggcttaactcctctccctgggaaaaaaacagtgttaaggggggg

SEQ ID NO: 66920 - DNA, 369 bp, Zea mays
  Clone ID: MRT4577_16102C.1
cgactccctctccactccttgacgagtgacgactcacaagcacagcgggggtcgctcgctcgtacacacgaagcacgcatgaccgatcccacaggcgtctcacaggctctccggcgttccccaacgcgctttccccggcgccatggccaggctggcgctagcgctcctactgctgctgaccgtggcggtatgcgtgtggaccggcgccggcgcgagccacctggctctaggcctgggcttgctctgcttcatggaccgccggatggaatgccgcggcacggtggccgagtgcctggaccaggaggagggcctggacctggcggcggtgcccgcgtacgtggagtgccaccgacgcgcgctatactgtgg

SEQ ID NO: 66921 - DNA, 640 bp, Zea mays
  Clone ID: MRT4577_161030C.1
gcgcccaccgcttcagtggccggctccccgcggctgaccggatcgttgagcccggtcgtacgtacgtcgcccgctgccccctcgtcgtcgcaccccggcattccccattcccgttcccgttcccaggcaggtacgtgctcggtgctcgccgcggatcggtcacgattcacgcgctacgacgacgatgtcatgtgatatgatgtatgtacacggccggcgccgccatcgtacacgtactccgtgtagtgcgttgcttgcagttgcggtgggcggctgcggaggcgtcgacgaagcatggggaaggcggggcgctggctccggagcttcctgtcgggcaagaaggacaggcaggcggcgcctcccaaggacaagcggtggagcttcaggcgccccccgccggcggcgcaggaagggacgacggcggaccagcaccatggtcatgggccgccgctcggtctgccggcgccgggcgtcgacgagctcgacttcgaccagaagaagcacgccgtggcggtggccgtggcgaccgcggcagcggccgacgcggcggtggccgccgcgcacgccgcctgcgtggtggcgcgcctgtcctcccgcgccgagccgggcttcgtaccgtcggcgtgcctggtttgagacg

SEQ ID NO: 66922 - DNA, 214 bp, Zea mays
  Clone ID: MRT4577_161031C.1
gtttcgcatgctctagatggtcgtgctcatcgagctcgtgttcagcggctagatgggtagaaactgggcatccagtgagcaggcttctcccagccggctccgtgtggctaggtgccgatagggtggcagacgatgacgacagaaccaggcgctggaccacacggttcctgagagcgaggaccatgatgtacggaggcattttatatatcctgtg

SEQ ID NO: 66923 - DNA, 303 bp, Zea mays
  Clone ID: MRT4577_161032C.1
acccgctaacactcacacaccgatggacccatgcacagcatgctaacaagagctagcatcaaggaggcgtgcttagcagtatctattacctcaagcgatcctccggatgagcgatgtgctgaccagtgactgatgtacactaaatggggtgctgtggctcgcggggacatcttactctcgccttccggtgctgctggaacagcaccttgaacgagagacagctctgatcccctgccagctaccgaccgagcgataggaagggctcctaacaggtgaccttgctcgtggcagaaatggcataag

SEQ ID NO: 66924 - DNA, 288 bp, Zea mays
  Clone ID: MRT4577_161033C.1
ataataagctatgaaaaatgaggttattaattgcacttacaatataatctgattacaatatttacacatgaaaccggagacttgagaatgtgactttattagaataaactacaactactgagttttaggcaaatttgattactgcacataggtttttgtgaatttatactacaataactgactttacaaattttgatagttttgatgaaaggaaagaaccatgcaaggcattttagtattgtgagatcgttttgcaacctttaaataaaatgaacaaacttttttttt

SEQ ID NO: 66925 - DNA, 344 bp, Zea mays
  Clone ID: MRT4577_161034C.1
tgctgcggcccgacggcggcgcgctggtggaccgggccccgagcgccggcagggcgaagaagaaggggacgagcgtgggcgtgcacggcggcggggtccaggtggtggacgtcaagtgcggcaacccgatgagcatgagcagccggctcaggaagctcggcttctccaagctgtcgcagacgtttgcgtagcttcaattctgtgcagtggagcatggcgaggggccgagggcaaaggaccagcgccagcatcggaattgaagggtctgcttgctgctgccctttccttgagggcgtcttctgctttggaggacatctgccatgtgctggatttagtgcagcaat

SEQ ID NO: 66926 - DNA, 403 bp, Zea mays
  Clone ID: MRT4577_161035C.1
aatacatcaagaatctcactgctgtgttggatccagagaaagcggatgacttcaaaaagggtgtccagggtgcacaccaagttcctacttagcaagctgaaggaccttcaattttttgacgctgaacccatgaaggatgatgcatttgtggtattcgactattacaaagatgtgcccactaatccgacattcctctatctctctcatggcctgatcgagatcaactgctaggcgcgcggcgaaattattcacccatgtccggaactatatatgtactatcattatatccaaccctatacttgtcctgtctgaatagaactcaaaagggtttgctcgagaaaaaattctgctaaaattggattgcttgtataagctcagaatgaaaaacgactgtctactcgca

SEQ ID NO: 66927 - DNA, 381 bp, Zea mays
  Clone ID: MRT4577_161036C.1
aggggtaactcataagcatgacaaatattttattcaattaaaaggccccactctgtttgaaaagcaccatatttatcccttgctatagatagggcttaaaatcaacccggttttttgaaccgcaaatgctgcaccctaccaggcaagaaaaatttttggaaaaaagacccaaggattttttgttgccgggctgttttgccattggaaaggtgataggatgctttttagtaatccagcaatccctgggcccaagcaggccctgaattaattgggctgggcactgatgcctgcggatgccatatcgggtgatcaacaggtactttgacatgccacggcccttccacgtgagtttcccaccctgaaaggtttttttttttgggc

SEQ ID NO: 66928 - DNA, 380 bp, Zea mays
  Clone ID: MRT4577_161037C.1
ggaattcccggctggacccacgcgtacgcctactcaaccgccccggccttagccttatccccagccacacccatgcccgggccaagagccgtatccaagcccgtgccagatgcacggaacctgcagcgtttgcagcaccccgatcctgggccagtgcgtcaagttcctgaggcatcagtgcagcccgacggcgacaccctactgctcacctaagagccagtcgttgctgaagcagtgttaccagcagctcacgcaggtggagcctcagcaccggtaccaagcgatctatggattggacctgcagtccatcctgcagcactagccgcaaagtggccaggtcgctgagctgttggcagctcatatagcgcatcaactgactg

SEQ ID NO: 66929 - DNA, 569 bp, Zea mays
  Clone ID: MRT4577_161038C.1
tttttttttttttttttttttttttttttttttttttttttttttttttttttttttttttttttttttttttttccatcccaagggggggggccaagaacattttggggcccaacctttggccagaaagggcttttgggccaaaaaaattttttggaagcccaggcaaccatagggggggttaaaaccggcccccccccagggcaaaaaaataaaaaatggcccgggccggcaaagccaaatttgggcttttaatgggcggagcctttttttttataaaggggggggggcctgggggaaaccccagggggggggtcccgcccaaccaaaaaaatcaaaaccctttttaaagccaaaccccccggaggggggggggaaaaaaccccccctggttttggggggacaaacagggcaacccctttggagctttcacctatttggcccggctgccccgaaggttggaaagggaaaaaacccccctggtgcctttggtggagggggcacccccggtcctcccccgtggttaacccgagtcaaaaaagttaacccccccggtagttgatggccct

SEQ ID NO: 66930 - DNA, 1627 bp, Zea mays
  unsure (1)..(1627): unsure at all n locations
  Clone ID: MRT4577_161039C.1
ctgtatgaaatatggaaagtacttcgacgatattggatgtccacggtgtgggctggaaaaactttagcaagattgcaagggatttggtgcgttgtatgcaaaaaatagatggtgactattatcctgagacattacatcaaatgtttattgtaaatgcgggacctggtttcaagctgatatggagcactgttaagggacttcttgaccccaaaacgtcatctaagatacatgttctaggaacaaaatatcaaagcagacttcttgaagctattgatgcaagccaattaccagagtactttgttgattcgtgcacatgttctaaccatggagggtgcctgaggtctaacaaaggaccctggagatatccttcaatctggaaacttgtaagtagcaagtagatgttgaagtaaattggccaagtatcttgtaaagaaccaacagatataggctccatcatattgcgtgctctcaagttaccagaacgaattagagttacgtcaaatgctgaaaaagaagcagatgttgatgatctttgatcccctgtggctcctgaagatgttgaatatcctagtttggccccagttcgagaggaagcgagggaatcaggatctacaacatatagtggttcaattggcatgtctcgtatggcagataaagttgtaggatacaacggtagatacaactctactggaaatgaaactaggcaggtcaatacagaacaaggttccctgataaatgggggtttacttgcgcccgcaggtcagcgtgccccaaatgatgctgtaggcaatgatgatgggttcttgaaatatatatcaagaagagtcgttgctatatttcttgaagtactctcttttttgcggttcttcattcgtcgacgacaacactcggaaaatgttcattcacatactgcaactgcacccagtagtctggcaaatcttcagacaattaaggaagatcgtgtaaatccttgtctggagcgtcttgatcgacttgagtcaatgtttaatcagctgagcaaaaagcctccagagcttccagaggacaaggaccgggccatacaagattcttttgacaggataaagtccattgagtttgatctgcagaagacaaagaaggtattgcatgcaacagttatcaaacaaatgcagatggcagaaaccttggaagctgtaacggagccggatcttaggcggaggaaattttgtacataatacacttacctgcagtgtacagaaacaagaaaagatggcgatttactaatgtctgctgcctggcagagaattgaactacattgctttgtacatggccgccctttgctgattatctttctcagcttactatagagatgagtgcattggcatgttagcctcaatcagggggcctcaataacaacagatagttgacctgtgataaactgacgagataacagcgtcctggaaaatcaccggacactgcccaatctattgagctaaagagttctgtattatgcatcttttgtgtttcagaacagttagtttcacccataattcgatccattttttggttggtacatgtgaacatctgattgaacttggttttnnnccggtgaatctatagagctaaaggaaatctgactgtgttatgc

SEQ ID NO: 66931 - DNA, 840 bp, Zea mays
  Clone ID: MRT4577_16103C.1
aaatcccacgagtacggccatcgatctatctcctctatctagctagtgcgaaaagaagatggcgactagtaagctcgcagcgttcgtcgtcttggccgcgttcctcgccgggcccgcggcgtgcgagggcgccagcatttgcttcaacggctggctgaggaccccgcggttctgtcctcgcggctccaggctgaaccgccggcagcggggggcgtctccctctgggttgggactcggctacggctactacaacaacaggaggtcgccgtcgtactgccccagagcggaagggatcgtgaggggtgccgtgagcgaggccgtcgccgcgaaccctggcattggcgcggggctcatccgtctcttcttccacgactgcttcgttcgggggtgcgatgcttccgtcctcctcaccatgaccaactccaagaacaacgacacagagagggaaggtcctccaaacaagaacagcctgcgagggttcgaggtgatcgacacggccaagagggcaatcgaggccgcctgccccggcagagtctcatgcgccgacatcgtcgccttcgccgcccgcgacgcgtcctacttcctcagcaaccgcaggatcaacatccggatgccaggcggtcgctacgacgggcgcgagtcgttcgccaacgagaccgaccagctgcccgggcccttctccaacgtcacggagctccaggcgagtttcgcggccaagggactcacctccgacgagatggtcacgctctccggcgcgcacaccatcggccgcgcccgctgcatgttcctctccagccgcttctctgagatggacccggcatttgccgccagctcagggcc

SEQ ID NO: 66932 - DNA, 313 bp, Zea mays
  Clone ID: MRT4577_161040C.1
caagaacctggtcctcgagcgcaagatctccgacgcgtccggctagtatgggcttgctaggcagtgcaggagcggaccggagaaggagaggagcctgtacgcgttcttcgagctggccacagagagctgcaacccgtcgacgtcgatgagacccaacgccaggcagttactccaaaggctccaggagatcgcgcagagaatggatgcaaggaccgactggcgactatacatacatactgagtgtctgcgtggaacggtctgcgaaaagagtactactgcccgccatgcaggatagatgatgaacccaacaaca

SEQ ID NO: 66933 - DNA, 2207 bp, Zea mays
  Clone ID: MRT4577_161041C.1
ctcgaagccggccgggccgggatcgtggaccactcccacggctccacccactcaaacagcggtcccggcaaacaacccccggctggccggttcccccggtctcggtctcggcctcggcctccctccccaatccccatccccaaatcgctttcgctccgccccggtcgccggaccatggccgcctccgcctcaaccacgctcttctcaccgtgcgccctcacctccaagctcggggcaggacacgcgtcctatggctccgtacgccgcgctaacgtgcgccggcgcggccgcctctcggtggtggccgtacaaacgggcccgcagaagccgtcgccgttgtcgtcccaggccgccgcggcggaggatgaggcggacgcgctgcagaagcttctgaagagggagtacaaatacgggtttgtgtccgacttcgagtccttctccatccccaaggggctgtcggaggccaccgtccgccgcatctcggagctcaaggcggagccggcgtggatgctggacttccgcctcgccgcctaccgccgcttcctcaccatggtcgagcccacctggagcgacaacgagtacgcgcccgtggacctgcagtctatctgctactactccgcgcccaaaaccaagcccaagctcaatagcctcgacgaggtcgacccggagctgctcaataccttcgaccgcctcggcatcccgctcagcgagcagaagcgcctcgccaacgtcgctgtcgacgccgtcatcgactccacttccatcgccaccacccaccgcgaggcgctcatggccaagggcgtcatcttctgctccatctccgaggccatccgtgagtacccggaccttgtcaggcgctacctcggcagcatcgtaccgccgggcgacaactactatgccgccctcaattcagcggtgttcagcgacggatccttctgctacgtgcccaaggacacggtctgccccatggaaatctcgacttacttcaggatcaacgacaaggagacaggccagtttgagaggactctgattgtagccgatgagagaagcactgttagctatttggaaggctgcactgcaccagcatatgactcaaatcagctccatgctgcggttgtggagcttgtgtgtgagaatggggcagagattaagtactccacggtgcagaattggtactccggtgatgaggaggggagaggaggcatttataactttgtgacaaagaggggaaggtgcaaagggcggggttcgaagatctcatggacacaggttgagacaggatctgctattacatggaagtacccaagcgttgagctcgtcggggatgacagtgttggagagttctactcggttgcgcttacaaaggattgccagcaagcagacacagggacgaaaatgatccacaaggggaaaaattcacgcagccggattatatccaagggcatctctgcagggaagtcaaggaattgctaccgtggcttggtcctgatgaactctagtgcagagaatgcttataattcttcacagtgtgactcattgttgatcggggataatgcggctgcgaacacctatcccaccattcaggtggggtgcactagtggccgggttgagcatgaggcaagcacttccaaaattggagaggatcagctattttatttccagcaaagaggggtagatcatgaaaaggcagttgccgccatgattggtggattctgcagatctgttttcgagcaccttccctatgaattcgcacaggaggtggacgcactcatgaaccttaaacttgaggggtcagttggctaatttgttggctcagcgatttcgtgtaaaactccatgacagccagttacctagaaaatccatgtgtacagcagtacgagaagaatgaagtgcaggataaatatacatatacatttcctggcttgtaatactgaatgttcacatgatgcctatggcaattggcaacgaactatgaagatgtagcagttgtgcctgcttgtcttctgtttgcccagtttttgctaatgttgtaagccagctcacatggctcgcctagacaagaatgaaatcaatgcgattgtgttggcgttacaaaaaaaaaaaaaaaaaaaaaaaataaaaaaaaaaaaaaaaaaaaaaaaaaaaaaaaaaaaagcctacagataaaggaagcttatattgaaaaaaccaagtcattccctccagag

SEQ ID NO: 66934 - DNA, 363 bp, Zea mays
  Clone ID: MRT4577_161042C.1
aagaccatcaagcagcatatagagtgcaacccagtagctgcaatatagcaacaatggggacgaacatattttctctccttatgctccttgctattactacatgtgccgctaacgcaacaattgtccctcaatgctcacacgctcctattgctacccttcttgctccatacctttcatgaataatagcttcaacatgtgaaaacccaactcttcaaccatattggcttgaacaatcaatctcatcaggcaacatacctctatcgcactagctgatctaacaattaccagccctatctttggtgcagacatcgctacaaaccatcgagtctcaacagctagctcaactcgtgctacctctgatca

SEQ ID NO: 66935 - DNA, 538 bp, Zea mays
  Clone ID: MRT4577_161043C.1
taaaaaaaaaaaaagacaaagaaaaaaaaaaaaaaaaaaaaaaaaaacaaaataaaaaaaaaatttttaggaaaaaattttaaaatgttccttcccccctggcggccctcttaaagggcccttttccggggcccccttgcccccctttgcggccccccttttccccccccttggcccccccttttcccccctttcggtgggggaaccccccccctttcccccgtttttccaccttctttttctggccgttttcgccgtttgggggtttaaaaagggggcccttcccacccgtttttccacctgtttggccaccctaatggccctttgccccccccttttaagcccccttcacacccggcttttcccaggggtgcccccttgtgttgccggttccattgcccccccccctagggcctgcccccttcctttttttgccttttttcccggcccttccccccgtttttcccggtgggggcttccttttggggtcccttttggggtttctttttggggcgtcccgccccctggcccccaaaaa

SEQ ID NO: 66936 - DNA, 437 bp, Zea mays
  Clone ID: MRT4577_161044C.1
tttttttttcttttttttttttttttttcctttcgttcgtcttttttgatttttataaggcagcagctttctgtaattaaaaagaagaagcgggggtgggtcttctttacatgggggttgcgagaatttgtttccccactttgaaaaagggaaaaccctcgccgcccttcttaaaaaagaaatcccccttcccttgggactaaacccggaaagcgccctccttttttgtgtcccctgccctccatttaaaaaaaagggggccggttcctttcccgtaaagggaccttcttacatccataacccgtaaggtaatctacatggcgctttgacacctaaaaacgagagcctcagccctgttaacctggaggctagtttcttacatagcgaaaaaaccaggtaacacgctccaatttcggattaaaacccggggcattctg

SEQ ID NO: 66937 - DNA, 662 bp, Zea mays
  Clone ID: MRT4577_161045C.1
gaaatccccaaggcttctctatctacgagatcatcttcctctcgtcttccctcttcctcgccgaggatacaaggcgacgacacaggtacaggcactcccctcaccatgctgaaggagatgctcatcttcacccgcggcggtctcatcctgtggtcgtactgccgcgcgctcggtaccgcagccctcaaggggtcccccatcaacgacctcatccacttctgtatcctctaggaggaatgcgccgacgacagcttcgcccaggacgattacgtccctcgagaggcacattccacaactactgtcgatacttagtcttcgtgaacgaagacgagaagatactgcacctcctctacgacgatgatctcctcgccgccgctcgctaggagatctcccacattgactaacccgagcgcaactcctaccatgactatgaagaaatcttccgtgcagatccaccgacgatgccgatgctatgcaccgaggaaatgaacgaaccctgggaagacctctctatacgtccgcagactgctctcactcagaagaatgctgaacccaagggacgcgttggtgaatcacgcggcgttgctgataacaagggacgactctgatgacaaggatgactctgatggtctcggctatggcaaccaggaccaccgtactct

SEQ ID NO: 66938 - DNA, 292 bp, Zea mays
  Clone ID: MRT4577_161046C.1
attagatgtaattcaataagcaatctaaaagagggcaccaccaatgatgtgttgttggtaggaggctgttgcctttgtcaaatcaagttggacaaaggtgcaacatttgttgtagtgtgaagaaaataaggaatcccatacttacattatatcttgggcctcatgccctagagggcaagccttatgatcttaaaattcatcactttccccttttttactatggccaccacagattattcttgtgccgttttctaaccgaagccctttgtaaaaaggtggaggttccccattt

SEQ ID NO: 66939 - DNA, 459 bp, Zea mays
  Clone ID: MRT4577_161047C.1
gcagctcgatgtttgctaccacgaacgggatgaccaaccgatcgaccacacggagggcgcacgcttgaatggacatgatgtccagcagttctagactagcacgaagtggcatgctgcgccaactatataggtgcctagcgactgctgctgatcgtgaaatatattgtcataggccatacccgtcaagactgaactatgatgaatttatttgggatatggatttgcacgctgatctactacactctgcaccggttcctgttggacattgagaccacgacctactgatggaacaccgcacattaccttgttaacggaggtcaccatacccaccctatggactcactcatgcacgtgtctggcttatactgcaacagcagttgtgttgctttccgttctggaacctggcctatatatttgaagctgcctataccacacccggactgataggaggcagtatgc

SEQ ID NO: 66940 - DNA, 293 bp, Zea mays
  Clone ID: MRT4577_161048C.1
ctccagcttcatcgaggtgctgcagaacatcccgtccccgaccttcaagctccccgacctcgtcagcaacttcgccaagaagggactcgacgtggacgacctcgtcacgctctccgccgcgcactccttcggccaggcgcactgctccttcgtcaacggccgcctctaccccaccgtcgaccccaccatgaacgccacctacgccgccgggctcaagacggtgtgcccgccgcctggcagcggcggcggcgacccggtcatcagcaacaaccgggtcacggaccccaacgcgc

SEQ ID NO: 66941 - DNA, 1257 bp, Zea mays
  Clone ID: MRT4577_161049C.1
ttccgcccttcctctccctcttcctccgccggcggtcgccgcgccttcccgcgccctccgagctctaatcctgtcccggggcggcgccgccgccgtatgctccagtctgcgccgcggcggcacgccggcatgcctcgtgcgtcgcctgtgctcccaccactccgccgcggcggcggcgacggcgttggaggaggcgcggcgcgggcggaagcagctcggaatgacgcctgcgctctacgactacctcctcgccaacgtccgcgatggcaccccattctccgggagcttcgcgaggagaccgcggctatgagagggagccagatgcaggtttctcccgctcaggctcagctgttgtcaatgcttgtgcaaatccttggggcgcgccgttgcattgaagttggtgtgtttactgggtattcatcattagctgttgcactggcccttcctgaatctggtcacttggttgcttgtgagagggatgacagatgcctagaagttgccaagaagtactaccaacgtgctggtgttgcacataagattgatgtgaaacatgctttggctgcggattctctaagatctcttcttgattgcggcgaagcttccagctatgacttcgcatttgttgatgctgacaagagaatgtatgaggaatattatgaacttctactgaagctagtaagagttggtggtttaattgtaatggacaatgtcctttggtatggaagggttgccgatctactggttgatgaccaaaagacgatcagtataaggaacttcaacaagaaagttttagaggacaagcgtgtcgatatcagcatggtgccaattggagatgggatgacaatttgccggaagctagtagatacttgaattcacaacgtttttgtgtagatgcggaaaacttcttaccaaggtcaagccctgaaaaatcaaactggtatgataaatcaagtaaaaatggttatagatgatgaacctcttggcattgacaatatctgtactgcaaatgttgctagtggcctgggctctactaaccacagtggtggggaagcagttggtggcagtaattttgattcgctgcttagaacgctaagatgagtgtggcgtgtcttgcacacagtataacttgaattcaagtacaaaaccagtgttatggtgttttgttgatagaccacagtttcatctcaggtgtatatggaactatggaagtgtggtgcacatattaaattgtgagtcgtgatcatccattttatatct

SEQ ID NO: 66942 - DNA, 362 bp, Zea mays
  Clone ID: MRT4577_16104C.1
atttaatcattggaagctttttgatgggcgggaagagtggaagagcggtggattttgcttcaaaccaaggtataagtgtcttcgagatgccctcacatcgaatgattgggatgattcacatgatggagtgattgttagggagcttaagttcctgattttgtcatgtttcaatgatgttaaggtgttggttacgtctagaatgtgtaacaaggtagcacatcatcttgctactattggttctgataggtaagaggtgatttagatgtataattttccagacgttgtatcagatttgggcgccagcgatttaatggtgggtgaaggttaatgaaattttcagattgctataaaaagttataaat

SEQ ID NO: 66943 - DNA, 288 bp, Zea mays
  unsure (1)..(288): unsure at all n locations
  Clone ID: MRT4577_161050C.1
cacgcgtataatcaagtagctgcagcgaagcttgctgcttaccttcagcaacaacatatttcttccattcaatcaactaagcgtgtggagaaccctggtgattacttgtaggcacaacagctactaccattcaaccaacttgatnngagcccgggggggtgcttattgcatcaacagttgctgccattccgtctacaaggtgttgcaaacattgctgctttcttgcgacaacaacaattggtggcattttacccacagggtgtggggaacatttacgggttgttgggg

SEQ ID NO: 66944 - DNA, 482 bp, Zea mays
  unsure (1)..(482): unsure at all n locations
  Clone ID: MRT4577_161051C.1
gccaagcaactttccagttattataatagacacatgtgcgagccatctcaggaatcaaggtcaggtcacagaggagcttgcaatctccatagtccacaccacattttataacatccacggctaatacaaagattaataacacagtaactgcccaacgtctaatattcataaaaggaaaaccacatgctaggattgtcatttctccttcaaaccataggatcatgatggatgattaattagcaggttctttgaagtgaactaaacatgctgcagcctcgggattgatcagtgcaactcctcagcagcttcaatacaaagtaccatgcatcacatgagggccaccaagtaacttgaattcaagctgtaactcaaataccacccagttgaagcttcacaagaatgtggctgaagatacatggacatgtgcatgcagccttgctcagacgaacattgccagctntggacggctgaagattttatcc

SEQ ID NO: 66945 - DNA, 370 bp, Zea mays
  Clone ID: MRT4577_161052C.1
ctgcatgttcagtgtacatctagtccatctgatgcccagcttactttgcagcaacgccaagagtttttggaagtcataaaatccaatttagctgcagctcagcaaaatgaagttttatgctgacaccaacagatcttttcgacaatttcagataggtgatatggtctatttgaagttataaccttttgctcagacttcagttgctcacagatcttgtgcaaagctgaccttcaagtattttggaccattcaaaatagttgacaagacaggatcgactgcatataaactgctccttccagagctagctgttatacacccggttttccacgtttctcagttgaagcaacacatgccaaactttgccccagta

SEQ ID NO: 66946 - DNA, 220 bp, Zea mays
  Clone ID: MRT4577_161053C.1
gttatatgcccctgaggcagacaaggaagacacgaagtgttgcaaccaaacttggtagcctgttttgttctgatcagtcatagcgagatgctacttccatcaagtgctcgatccaagaatcttttgggtgctgcaaatagagaccaggcaaatatttgggtgtcctactgcttgataccttgaatttgtttgcgaactcagctatctaatgggtgaatga

SEQ ID NO: 66947 - DNA, 203 bp, Zea mays
  Clone ID: MRT4577_161054C.1
gagctcatcagtcggcggccgcccttgttttttttttgtggacatttgaaaacgaaaagacccggatcgaggaacaaaaaaattacagaaagatagaagatgtcggaagctggcgagtggaaagatctggccaagatacaccttagagacaggggcccctaaaggtgcacaaaagctgggtaagtcaatgcagggatacaagg

SEQ ID NO: 66948 - DNA, 267 bp, Zea mays
  Clone ID: MRT4577_161055C.1
tcggccgacatcattccttacttgccagggccgggcacgggctggcgaagcctctgctcctgcacagctgcagccgataacatggactcaacgcgggtatacggggccagctcccggagctttgttacacgctactaatgttgcaatgaacgagccggaagcgaaaagtggatagccttggataagtagaatgaggacttactccttatgaatgctgagagcttactggatgatttgcaggagcaaattctaacactccagaatggt

SEQ ID NO: 66949 - DNA, 299 bp, Zea mays
  Clone ID: MRT4577_161056C.1
attcggctcgagggtgctgcgctgattttgtatgtacttgggatttccaataacatggcaaattgccatttacaagaatatgcactggcatgcaacaagcttgagatagacggccacctgagacggctgctggtgcacgcaccttcgaccaggacctggataaagcatgcatagagcaatacagccaactgttgtggatcaccttggcgagccaggttggagatggcatgcacactagctagaactaatgagacttccttttttttctgaccagccacctaaattcgatctgtctaccc

SEQ ID NO: 66950 - DNA, 1944 bp, Zea mays
  Clone ID: MRT4577_161057C.1
cattgggaccctcgaggccggccggcgagatgttagtttgtgttggcctcctgctgctcctcctcctgctgctccacggcgtcggcgtcggtggcgccgttccggcgagccctccgaatcctactcatcctagctagcgctgcctgccctgcttcactccctcccaccctcactggcgcctcaccatgatccatgtcgactttccctcctccaccccccagcgccgctaggagccccgtcgccagggtgcgcctcgaccacctggtcccgttcgacggcgccttcaccccggcctacgcgcgcgcagtcgaagccgtcgctgcttccctcacgcgccacggcgccgccgccgtcgacctccctgcagcggatgccgctgtcgtccggtgcgccctcgagtccgcgcgcgccttcttctgcgaccgctccggcctctacgtctaccgcgccgggagggctctggatgatggagagttgtcacctgcttgcatgtctgatgctttcagatgtttgggtaagacagcccgtgctgctctctgtgcaatagcacggaaccttcgcttacgttcagatgctttcagccatttgcttgatgacaacccattgcctcttgatgaggtttcagcttcagaattgatggtgtcattttctcatgggcacccccaaagcagccaggcacctatggtgggcctcaggccatcaatggctgaagttgatagaggttttgttacactggttgcttctgaccatccaggaattgaggtttgcaacccaaatggtcattggtacccagcggatgtgggctcaagccctgatgtcctgttgcttttgactggaagagccttgagtcatgttactgctggcctacgtctaaattctcagtacaggatcattaataatgaaaacagggcatcactcatgtttaggctcatgcctcgtgccaatgcaatattggactgctctccaatttcagctgctgggcattgcacaccacagatccaccggcccatatctgcaagtcagtttatggatgatttgcgtgctgaagagaatgtttaccatcacttagaagcaccgcctgaatcacagggaaactttgttaatgaaccatcgctcagaagtgtactgtcagaccctttgtctggggcttttcttgaagatgctatggttctcccatgtgggcactcgtttggtggcctcatgctgaagaaagttcttgaattggcaaggtgcagcatttgcaacggagatgttgatgaggcctccttatttcctaacctcgcggccgtcgctctaagagcggtagctaccgtggtgaagatggaagacgataggaggctctttcacaatgcggcccttcgaaagcgcaggaaagaagtgactgagcatatggatgcccaaaggcgaaatggaagtagcaaggacagtattgagctggggctagaagctgaaagccctagagcgttcaagggggtgcagtacccgtttgtggtgggtgagagagtcctgatcatgggaaacaaaaggacgcctgataaattcgttgggaaggaggcagtggtgacatcacagtgcctgaatggctggtaccttgtgaaggcagttgatagcggagaaagcatacggctgcagtacaggtcgctgaggaaagcaggggagctacaagtgcaagcactcctgcagagtagacgatgattttttgcactagtgttgcttgtctcgtgttttgtttctgtcctatgcgatgaaaaggaaaaggaaaggatgcagcgtccttttgtacaaatttccattcagttttgccagccaagtcacgtagctgtaaaatgacagatgttgtgtggtgttctgtggcctttgtgcttgtgcactaagtcttgttaattgtcatacatgctcccttcgtaaaaaaaaaaggagtcttaagtacaagattttttttct

SEQ ID NO: 66951 - DNA, 177 bp, Zea mays
  Clone ID: MRT4577_161058C.1
gtcaaaaaaatagcctaaacgggttctttatttaaaggaatctccacctcctgatgtggtacacactattggggggatatccagcatcaaccaactcaattgccaaataactttccgactatataagtccacccggaaattgggcatagctatttaatcgggaacgacggtggctca

SEQ ID NO: 66952 - DNA, 730 bp, Zea mays
  unsure (1)..(730): unsure at all n locations
  Clone ID: MRT4577_161059C.1
gccggccgggtccggcctttatttttcactagtcaaagatggcttctaagattgttaagcaagctggtgccccagctgctaatgagttcgaactctccgttgcccaagctcttgttgatcttgaatctagtgttcctgatttgaagcaactccgtgctcttcaaatctctgctgccaaggaggttgaacttggtgctggtaagaaggctattgtcatctttgttcctgtccccagcctcgctggcttccacaagatccaagctagacttacacgtgaacttgaaaagaagttctctgatcgtcacgtcgtctttgttgctcaacgtcgcatcttgcccgtccctacccgtcgtaccaacggtaagcaacctcgtcccagaagtcgtactttgactgctgttcacgatgccatcttggatgatcttgtttaccccactgaaatcatcggtaagagacttcgtcaaaaggttgatggttccaagaccctaaaggttttcctcgatgccaaggacgctacttctcttgaatacaagctcgatactttctctgctgtttacaagaagctcaccggcaaggctgtcacttttgaattccctgctaacgctgaattctanacaaatgaaaacgaaaaagagaaaagggcatatacgcattgtatggaattcgcttttttaaataaaaattaatacattcccaaaaaaagtttggcaaaaaaaaaaaaaaagcccta

SEQ ID NO: 66953 - DNA, 312 bp, Zea mays
  Clone ID: MRT4577_16105C.1
cgcgcgcggcggcgctggatccatatagacacaccacgcggtcgttccataacacattaagcactccggggggcgtctttatagggaaatactggctacagccatctaaccctatccaatggcacaaggccgttgtaagcggacccccagtacactgaccgagaggagaaaaggctgcttatgctcatgccatctagaaagttgcagatcgggacggcgccgcccaagaacgatttgtacctgatgcgcgagtaccctttggacggacgtataaacgcgcccctcagaatcctcattcagatctacaaggtg

SEQ ID NO: 66954 - DNA, 322 bp, Zea mays
  Clone ID: MRT4577_161060C.1
caagtccaaccccagctacagatggatggtgcaccacggcgccaagttccgcaaggccacgtccatcttcgcaaactccttggacgccgccaagccgggccccgccaaggtcctgcgccagccgaaccccggccaaccgtcggtgcgcaccatcggcccgttcgtccccgccaaggacggtggcgtcagcaaggacaacccgccttgcccgtccttggagtgcctgtaccggctgccggccaagtcggccatcttcgcgtccttcggctccggctgcacgctgcccgccgaggagatgcgggagcttgcactaggcctggag

SEQ ID NO: 66955 - DNA, 346 bp, Zea mays
  Clone ID: MRT4577_161061C.1
agatcaactagaaaaagaaagccaacacacaagagcgtttatgatctataaaaggatgtggaagagaaatgaccaccggaacatggcacacttttggacaacattatcacttttgttggagattcttattttggaaagcatgaattgattttcaagtgcttttgttgatgacatgtgcttgaaaatgtactattttgaatttctattattttgataaactatgctatatgcacttatcatatttggacactaggtggtttgtggtttgatgccaatgtgccatgaatgttgtaagttgtgatacttagtcatatttttatcttatatatgtgcaattgtgatgtcc

SEQ ID NO: 66956 - DNA, 758 bp, Zea mays
  Clone ID: MRT4577_161062C.1
ttgaatttgcaggtgcgctcgttcctatgtacttattcttgtgcatttgagaatagtgtgctacccaatgaattaattgtacttaggaatgaaggaaaggaccagcaaggacatggtgaaggacttggaggcgtggaaggccagcaaggacgttcggatcaatgtggaggaccaaaccgacgtctgtaatctgtctcggtgctgcgacaccgtaattggcctttgggccgtgtgtctttgttgggcccattagggcgcatccagggagggagtcacgctcctaacccttatataatcagtagccgccacaacattagggctcgggttttgcttaagttagatctgtcaagaacagtcgccatagatcggtttgtgagaccccaacttgtgagcttaatcattcatccgtaatattctagattgtgttctttcttgttcttgcttgtgtctttgattctcaggcaggaattagccctcgtggcgaggtcaattgcgcagtgcacggttgataactagaggagaagtggtgctgcgattgcggggttctagtcgtgttgattggaagccggatcgtctgtgtgacatctccactaaatcgatagttaccttcacctgatggaagatcgggcacccccgtttcctatcataatggcttggtaaagatatcggctaattgattcttggtgtttacataagctattttgatatccccctttgttggtgatctctcagaagtgataccgaatgtctatgtgctt

SEQ ID NO: 66957 - DNA, 339 bp, Zea mays
  Clone ID: MRT4577_161063C.1
ccggccgggccgggttcttcacaaaaactcacagatctacctctacctatctactatagggggggaagaggatgccgcttccccgtgctggcatgaatcaacctgcagaccatcctgcgcctaagagccacctagtagggccccgcgatgagagctgctcgctgcaccacctgggcatttcttctccacacagcagcaagacgagctgcaaccttacctgtactacaggggctgcaagactaggcagcccacacgtagcccacacgaggaggccctcgcgaaacgccgctcagggacaggctctccactgcctcctcgccccgcgccgccacttcagag

SEQ ID NO: 66958 - DNA, 112 bp, Zea mays
  Clone ID: MRT4577_161064C.1
gtcgtgcgcttttgagggcaacgacctaaagaatttgggtcgcggtatgcaagaatcctaacgacgttgtgttggatatataaggagccgatcggcaaaaacatcaacatga

SEQ ID NO: 66959 - DNA, 536 bp, Zea mays
  Clone ID: MRT4577_161065C.1
ggaaaggggaataggttatatatatacatgtccaaatttttgaaacgataaaaaatacatcaaatctgcacattcttgtcttgaatattccggatatatacacacagttatactgaattatccggggtcaaacttccatgcgcttggcatctccatgtatatctttgcaaacaaggagataaaaaaaaagataaactatctacaaacaatatataatttatggaaatgaaaaaaagagagagacagagaggagctcccttcattccaagcacgagggaaagatgatggggggttcgtctcccgggtcatgcacacccatgcaagggcaggggagcatctcggccattgctgcaccaaaaaggtatccatgaaccggcagttgcagccgaccacttcccctcctggattggatcgaagggagcttttcgatcgatcggaatcttcttcttcctcctaatggctctccatccattcttcccatagcatgataaactcactcgtctttgctagcttgaaaaggcgcctcgtgccaaatt

SEQ ID NO: 66960 - DNA, 1260 bp, Zea mays
  unsure (1)..(1260): unsure at all n locations
  Clone ID: MRT4577_161066C.1
atagagcatttgtacgtcttccaattcggcacgagggagcctcctcccaggagcaggagaagctatgacgccgttgaggtacgccgcctcacctcacctgcagccgcccttcctgggctacaaatcctccaacgttgatggccgatcaagaacgcggcagcaggccatgatcgccgagcgcagcagcagcagcagcacaagtgggcgaggaggacagctggaggacaggatcagggagcagctcctcaacgccgagctctcgccgtcgtcgtacgacacggcctgggccgccatggttccggcgccggggtcccttgcggcgtcgcggtacccgcagtgcgtggattggatcttgcggaaccagcgcagcgacgggtcgtgggggttggacccttcgctgcgcaaggacgcgctctcgtccacgttggcgtgcgtcctcgcgctcaggacctggggcgtcggggaggagcacgtcgggaaagggctccgcttcatcggacacaactccacctctgtgacggactgcgacaagtgcgacacgccagcagggttcaacgtcatcttccccggcatgctcgagcgcggcattggcatggggctggagatccctctggcccatgcggaccttgacgccatcctccggctgcgtgacacggagctaaaaagcatagctgcttccggaagaagtaaagcttacatgtcctacgtagcagaaggtctgggggacctactggactgggatcaggccgccatggcttaccagaggaagaacgggtccttcttcaactcgccggccacaacggccgcagctgccatccacaacggctacaacaagagagccatcggttacttggatgctctcatcagcgagtctggcagcagctcgtcagtaccggctgtgtatccacggaaggtgcacagccagctccgcatggtggacaccttggagaggatggggatctctcccagcttttcctatgaaataaacgccatacttgacatgacatacagttcgtggctgcgcaatgacgacgaggtaatgctggacatggcgacctgtgcgatggcgttccggctccttcgtatgcacggataccacgtctcatccgatgcgctagctcaattcagcgaagaatccagtttccacgactccatcgaagcgcatctgaacggcacggagggcgtgctagaactgtacaaggcgtcgcaggttcagatcttggaggaggagccggtcctagagagcatctnttcatggtc

SEQ ID NO: 66961 - DNA, 525 bp, Zea mays
  unsure (1)..(525): unsure at all n locations
  Clone ID: MRT4577_161067C.1
cacccccncccactgtgagcaacgcctggaccctcgctctccctgtcccnccactacccaccaggcggatccccggcggctcacgatgacccggcggccggtgcccggagggcaagggcggcaggcgtgcgcctcgtccacggctcgggtgggggggggggggngggcccggctctcaaggcacatcgttcaacctcacccgtgtgccggatatctaccctctcactgcccctagtgccggcatggcaccctccacgagggcggtcatgcgcgcctccctctcctcaacatactcttccgaagaagtacaagagcaacgcgccacaagcaagacaagagattaacagacttctcctgatacacgatatccgatcgtgctcatacttctactaaatccaagccttatcacatggccacatcctggtggacgtagcaattctgtgcactccatctctcctgttcacatgacctcaaggccaccagtgtcatggtcttgtccggcgtctgttaattccaatcaaacgc

SEQ ID NO: 66962 - DNA, 1161 bp, Zea mays
  Clone ID: MRT4577_161068C.1
atatatatagagagagggtgtgagcctgtaagtggttgcgtttcaccggatgtaattatgttcagtactataaaaaatgcatccttaataataaaaaaaacgcaagcaacgtcattaatttgagtgtacataaaatagctaggaaattgacaatcaaagcacatacagatacaacaacatttcatgccgtggtatagataaaatcaaatggactttttgatagacaggagtgtccctatgatcccgccaacagcaccaatgccggtgacaaccgcggcgatggctttcttgtggttgtggagaaacccatgtatcttggtctttatgaggctattttccctgtaaatcgcgatgtcttgcatgatgcgatagtagcgcggtcccatgcgcagattctggaagttggtgaagaagcagagcgcctcctcattggtgagccctcctcctctctggatgatacctctctcccgtagctcctgaacttcctcctccctgtataccaaattagccaggagcagaacgtaggagcagacagcagagtcctcttccttggcacctccaaaactctccaccgcgcacagctcatgagccgccatgttgacgaggtagcttgcacgatcgcggtccagggacagcggcgccaagcaaagctcggtgaaaacagcccctgctttcggacgattgagatgcatgtcaatgagctgcatcgtcttgttggccttgagtgtgatgccgatctcggcaaggtccatggcgctggcagaaaacgacatgttcttgggctccggtttctcttcctcgtcatcgtcgatgtcgcactcgcatcttcggccaacaatgtagtaccggaggaggccaaggagatgaggtggattgtagtcttcataccagataaaaggcttcggttcaggaggctcacgatggtcgtacggcatcatacagcgtctcattctgtgaacgaagctcttgggtatcgtcgatggttgtggcataaatctcatgactgcttcgaccaccatccatgggagctgattctcaagcagcatgatgtcatggaagatgtcgtagcggttatgcctcaagtaaacctgcaagctcttatcaattttggaggaaccagcccgtgaaagcatgaactgcaccaagaacccacgcgtccgg

SEQ ID NO: 66963 - DNA, 131 bp, Zea mays
  Clone ID: MRT4577_161069C.1
gtagattgaggactcagttgttcaagctacctagtctataccaacatcgattctatggttggagtatgtacagtgacttgaaccagaacctagacatcgtcgctctaaggtatagctatgaaaataacact

SEQ ID NO: 66964 - DNA, 381 bp, Zea mays
  Clone ID: MRT4577_16106C.1
tttctcttggtttttttttttttttagtgttttcggttttttcccctttttttttttttgggaaagaaatttgtattaaaccacattgccggccccctccaatgaacccggttgggggcctaaaggggtgaagcttttttaagggaacggtttttcccgggttgacatctttgggaaggggccacacgaactttttggagacaaaccgggggcaccggggggcccctaaaactttggggggtcctttccctttgttgttaaaaaaggggcaaaacggggggggcaacaggggtttttctaaaattttaaattatgggccagaaaattttgatcccccataacctgggtttttttgggcctagtttccctttcccgggaaaa

SEQ ID NO: 66965 - DNA, 335 bp, Zea mays
  unsure (1)..(335): unsure at all n locations
  Clone ID: MRT4577_161070C.1
caactgtgagtgggggtggggagcacaatcccccttttcgccagcgtgggcgtaatagacgagagagggcgccgcaccgaatcgcgcctttcccaacagtgtgcgcccagcctgaaatgggcgaatgggaacgccgcccttgtagcggggcgctattaagccgcggcgggggtggtggtggttaccgcgcagcggtgacctggtacactttgccagcggccctaagcgcccgcgtctctttcgcttntcttccctttttttctccgccacgtgtcgccggcttctccccgtgcaagcgtctaaaatcggggggctcccttttaggggtgtccgat

SEQ ID NO: 66966 - DNA, 434 bp, Zea mays
  Clone ID: MRT4577_161071C.1
cttcggctttcctttagcttaatggaggagggagaagagggcggcgctagcaatgatcgagcagcagccgccattgccgcagcctcgagatcatcatgcgggaggctctggtgaaggaggacaaggagaaggcggaggatgctgcggaggacaaggagaaggccgccgtcctcaagaacggtagcaggatcggcccgatgaatggcctcgtggccaccaggagcatcagcggaacgccccctctgtgctgggaggagacggcccgcgagatccaggacgtcagtgatgcttaccgacgcgagacggaacgtccggtctacgtgataccactagagcccgcggacgatgtcgagctcatcagatggtgcatgcacagactctgatcctacttcatcacctacctgatgctgacgatgctgttcctggacatcatc

SEQ ID NO: 66967 - DNA, 212 bp, Zea mays
  unsure (1)..(212): unsure at all n locations
  Clone ID: MRT4577_161072C.1
ccgggctttcgctcccatacanaagaagtgttcacgacttgttatccaataaaatatgtctatattatgtcaatttgagaaggatttcatggaaaaaaaaaaaaaaaaaaaaaaaaaaaaaaaaggaaaaaaaaaaaaaaaaaaacagacccacaagctccaactaattcaaccctttaataaggaaaaaaaaacgccctccccggacccac

SEQ ID NO: 66968 - DNA, 375 bp, Zea mays
  Clone ID: MRT4577_161073C.1
cacccaaagggaacccttgggtcaaatcccctttttcaaaccaaaaactgtttttttttaaggggacccctcgacccctattcttaggggaacccccccctgggttttttacccccgaaaaaaccccccaaaaaacagggtttcatgtttactttggggtgcccaaacatgggtaaaaattactcccgcccgcaatttgaatttctagggggtgcccaaaaacacaggggggtcacctgtgggactaactgggcgggtaaacacccccaaaaaattgcataaggggaatgcccccctttttaaaaacgcgacttgggggggtaattcctttgggggaatatccaaaccacggggtttttgggggcccctgtttac

SEQ ID NO: 66969 - DNA, 180 bp, Zea mays
  unsure (1)..(180): unsure at all n locations
  Clone ID: MRT4577_161074C.1
ttttcttttnnannnanaannatttttattatgacacctacaggaacaaaccccgggccggggacacaccaagaggccacagagaaaaccggggccacaccccacgcaacccccggggaggacgggcccagtgtgacgggcggcatgagagcgaaaacgcccaccccgtgggcccccccc

SEQ ID NO: 66970 - DNA, 481 bp, Zea mays
  Clone ID: MRT4577_161075C.1
gggggggccactcccaggaaactctgtttttgcctataacaagttaaacaacgaacagtttacagggcctcactaacaccaaacaatctttcagcattttctttgggaggacactcgagttttttttttttttttttttttttaaaaccgaaccaaaataccggattactaaaaacgcgtgccacgaaaatattggtcaccaacaaaaggttttaacggggataccccgggacgaccacgataaatcgagcagggacggggccagccagcccctggggcaaacacacgaaacctgacacaaaccggttagcccacctcctcgattttggggccagggccaccgtttccagccggagcgtcctcgtccatgccgccggagcctcccatgtcggcacccgcgccctggtacattttggcgaagatggggttggaaaggctctccagctccttattttggcattgaactcgcccgcctcgggga

SEQ ID NO: 66971 - DNA, 404 bp, Zea mays
  Clone ID: MRT4577_161076C.1
acacccttccgcggccccttggaacccggaaaaggttcttatttttgaatcgcagggccataacctgaactggggttttaaatgcatgggctggttactttggtaataagggcataaaagttgttttttccaatggccagttggccttggttccaatgaaattaggtgggatggcaaaatcagtaccatttgttgcgaccccaaagggaagggggaggggtttgtttcctcgtccggttcgggctggaatagttggatttccaaatgttggcaaattttccttgattaatcgtttgttaaaacgaaaaatgtgcccagcagaacctaaggccaggtttaacaggaaagctgaagtggtttcgttttggaacagacctaaagttgttggattcacctggaatttt

SEQ ID NO: 66972 - DNA, 308 bp, Zea mays
  Clone ID: MRT4577_161077C.1
ggacctgggctccagcgaagagtgccaatctacggatgatgtgtccaaactaaggaaggagctgcaggaaaccttagcagtctatgataaagcttgtgcaaaccttgttagtgttaagaaaaagattcaggtactttctatcgagtgttctgaagaggctaggaaggtggagcacgcgctagagtgggaggaagctttgaagcagacggtgtctgatgagaaggcgaaacagctcgaggtcatcagtgaagtcgagcaagcaggaaaatcattcacccgagaggcttattcaaggtacaagacagaaa

SEQ ID NO: 66973 - DNA, 213 bp, Zea mays
  Clone ID: MRT4577_161078C.1
catgatcgccttgttaacggtcttcgtgaggctgccatagcaattgagaagcatgctgcgcagctatgcgcgcttgcggaggactctcaccagcctcattacgtcaagctggtacaagctctgtgctctgagcacaacgttcagctggctactgtgcctaacgctaaaactcttggcgaatggtctcggctttgcaaaactgattctgagggc

SEQ ID NO: 66974 - DNA, 474 bp, Zea mays
  Clone ID: MRT4577_161079C.1
aaaaaaaaccatccgccgcactcgattttacggaggacaaaaaaggaacaggggggaaaaggaaaagcatctccgagaggaagcaccaccgaaaccagccataattattctaaaaaccccggaagcaaggcggggaaataaacaactttaacaacatcgggggtggaaaaccacccaatacttcaaaacagacccccataacccgatggcgggagcacctttgggcaaatcacggaaaaggggcagcacactggcctgaggctgggtaatcagaaaacttttttagaactcgacaccctgggcgccatcctcgccctaatggaactcagcaccgacctcctggaagtccttctcgagcgccgccgggtcctcagggccctaaaaaaactcaccttcctccataccctcaccgacgaaccagggcacaaaggcacgctttggcgaacatgaggccaaacttgtggccaaggcgga

SEQ ID NO: 66975 - DNA, 139 bp, Zea mays
  Clone ID: MRT4577_16107C.1
aaaggccctttttccctttaatcaatttaaccttcaactttaaaggaggggggttttaaattccaaaaacgggacgccttttttccccaaaccttaaaaaaattcccggaacagcttgcttttggggaaagccggccaa

SEQ ID NO: 66976 - DNA, 1396 bp, Zea mays
  Clone ID: MRT4577_161080C.1
ctcgaggccggccgggctcgtccaaaaccctagccctcgcgccgccgcctccttcgccacccagcgctcgagctcctcgctccctgcgagcgcgcgccgcaacgtcaccatgaagttcaacatcgcgaacccttccaccgggtgccaaaagaagctggaaatcgatgacgaccagaagctgcgtgccttttatgaccgaaggatatcccaggaggtcagtggtgatgctctgggtgaggagttcaagggttatgtcttcaagatcatgggtggatgtgacaagcaagggttcccaatgaagcaaggagttttgacttctggtcgtgttcgccttctgctccatatgagcgagattggggctgttggatttaccgcatggcaagttggagaaagctgctacaacccaaaccgccttatcctttctgtgacttgtacaatgtaaattagactggcacttaattacttggaaggatagttctgacataattaccgtagtgctggtttactgcatggctaataacaacattattcgtttccatcccacaggaaggaatatcaatggtcttctacaaaggtctatcatcttctctagagggttcataaccactgcgcattagctgtctttgaggagtacaataggaatgaatgatgctcaagggtaccaagaaggagatgaccatgacttagtgctgctgaaacaagaatggatcaaaacacaagacaatgctcaagagtaaacttattcttgaagatgaatttgattggaatttacctttggtggtctcaggttcagattaacatgaaaggagcatgtggggagcgacaatcgtgcatgtggcacgcgttggacttcacgacagagagcgctaggaggaaatgtttgcaatctgttttggatttgtcaagagctatccgcccggtcaacaataagatggcttttgtcgtgctgcactagagcatgagcgtcgtgtagtgcatttgcgcttcgccactgccttcagcaaagagtccatcatcgacgtcgagggcgaaaatctttctccccatggagccccttaaggccaccacacaacaagttcatctgtcttgtctcctgatttgggattcgtctatggcttcaaagtatatccgttacatgttagtattatatttccttagatatctaggttgctgaatattttttctaggtagctaggacgatgaattaacatgagatgactatgttgtttatatatatagactgttgtcagtataaattaggtttgctggtgtagcctaattcacatgcttttgcaaacatggtgaatgatcatatttcaatgtatatggttatgacttacctcttttcgtcaaataatgtgagatattgaggtgaataataaattatgtgtttctt

SEQ ID NO: 66977 - DNA, 290 bp, Zea mays
  Clone ID: MRT4577_161081C.1
ctgactattaacaccatctactccatatagcacaaaaccccgaacaacaccatcaagacggtgagggtgttcctcgttgtcctggctctccttgctagcgctaccagcacccattcaacccgtacaagcggctgccagccatggcagccagttcatctatcgcatctaccgcatctggcacatctggtacacctggtacatctggtacatctggtacatctggtacagctggtgcagctggtgcagccggtacaactggtacatgtgctgcatgtggctcatctggttca

SEQ ID NO: 66978 - DNA, 407 bp, Zea mays
  Clone ID: MRT4577_161082C.1
actgctccatccgtaagcaacgggttctggctcctccgccagggcttgccgaacgggggcctcaccgacctcgagatttggtaggctcggatgccttgagtgacgaacacactgttactccactcggatacaggctagacctgacgccacccttaacgggaacatcctaacggaccccgacacccatggagagctcagacaagggagatgcatttgggagcctgtgctattgcacaaatgcatggttactatcacatgaatgacatggttatggatgatcagcctacaacacttgaactgcaagtgactgcacatgtcgaaggcccgttagatcctaagactgataatcactgctctgagaatggtgccaaggtggacccatcactttagaatgcacatgggctgct

SEQ ID NO: 66979 - DNA, 283 bp, Zea mays
  Clone ID: MRT4577_161083C.1
actgtaaattggaattttaaaaagtttctatagtcagcacaacttgaactatattatagtggtaagcaatcattacattttgccacaggatagcttatcaatatgatgagtgtataaaggactcagtggtcaaaaggaaggctagagtttagaggaacatgagaaagaatgaagcatttctcatagaatggaatgaacaacataaccaatcattgactgtcactatgtttattcttcccgaccatgtcaaataaacttgctttactcccttgtgcctttacta

SEQ ID NO: 66980 - DNA, 212 bp, Zea mays
  Clone ID: MRT4577_161084C.1
aattcgagggacgactcacgcatccggacattacacctgaacgatagcattgtttgatcagagcccaatacccatgcccgtgggctcaggcacaggggatatgtaccaatggtacaaactggggaagtctctgtgggagtcatgttgtcgaccatgatcatgtccatgctcctcgtctcgcggattcccaagaggcgcaaggctctcatgcg

SEQ ID NO: 66981 - DNA, 171 bp, Zea mays
  Clone ID: MRT4577_161085C.1
tcttttactcgatcaatggaactttccaaggggggggtttatcaagacatttgcggacatcaacccacacataaattgcagtgcactgtacaggcggacgctcatggacaaccattcatcttgatggcgctgagatgaactacatacaatgtgacctgtgacagctgacat

SEQ ID NO: 66982 - DNA, 383 bp, Zea mays
  Clone ID: MRT4577_161086C.1
cccttgacatttttttcattatagaacgtttctcgcccccaaagggacccacagaaaaaaaggccccaattttttatgccggcccgccccaagctcttccaaaaaaaaagggccccaaggcccatcagaccccccacaaaaaagccccccaattttgaaggcgggcgcaccccccccaatgaagcaaacagccgcccccggggccgaaggaccgccccaagcccaccaacagggggaaccccaaaggcccccacgggggaaacccggaaccccccccggacctgccccgaaccaaaaaaccctttggggacccccataaaggcccccccgaggcacccccagaaattccccccgggggacatgggggccccccaacattccca

SEQ ID NO: 66983 - DNA, 664 bp, Zea mays
  Clone ID: MRT4577_161087C.1
cattgggtacctcgaggccggccgggatctattccaccctaacgtggtatcagatagcctattccccttcccctagccgccagcctccctgggcagccgctaccatggctggtgactcccctctcctcgtcgacgcccctgggacttctcctttcccggtcagagctatgcctccaccgcggcctctgctcctatctttttcctgtcgtctggctccatgcctctagttgtgcggccttctggcgcaccgtcggcggacccggtaccctgcagcaccacccctcccacctctacagtctacaccacacttgggcacctagccttatatctcataccgcctacggacctccatcgactgctgactgttcccccttgacgctgtcactgctcactccacccactctatctcgcttgtcgttgccaaggcggcggtgactactgcccttacctgaaagcaggagtgtgttgctgctgatgccctcgcccgtttgcttgcagatgttcagggctaaattgggtggtccctctagtgcagacccaccttggagtactagctggtagagtcccacggattattgaaaggttgttgtcatcgccaacctccacgccgcaggcggtgtgtctaggacatttggtccctagtttcaatcgtcctcgatccggc

SEQ ID NO: 66984 - DNA, 1133 bp, Zea mays
  Clone ID: MRT4577_161088C.1
cgaagcccctccagggtaaaaagagggctacaccacgggcctgctagaatcgtggcgtctccctggggataaagtacttctccagctcctctgcgtcttccgccgctcttgctgtcctctgtgctatccgctagggtttatctgctcgaggaatggcgtcggtgcaggtctccggcgcgggggtcggtgccgcggccttctctgtgaaggggaaggcctccaccggtgcgctccggcttcgctctacgttgaccttcggcgaggtctgcccggcgcggcgggcgttccgcggcctcgtcgtcagggccgctaccgtcgtcgcccccaagtatacaacacttaagcccttggctgatagagtgcttgtaaagattaactcttccgaggagaagacaactggtggaatcttgctccctacgactgctcagtccagacctcaaggtggcgaggtagttgctgttggagaaggaaggataattggggataagaaagttgatgtcagcattcaggttggagctcaggttgtgtattctaagtacgctggaaccgaggtcgcgttgaacgatcacagccatctggttctcaaagaggatgacgttataggtatcttagaaactgatgacgtgaaagacatgaagcctctgaacgaccgtgttctaatcaaggttgctgaagctgaagacaaaactccaggaggcctactgcttacggaaactgccaaggagaagccatctatcggaacggtcgtagcggttggcccaggccccctggacgaggatggcgagaggctcgcgctgtccgtctccgcggggagcactgtcctgtactccaagtacgccggcagcgagttcaagggcgccgacggcacgaactacatcgtgctgagggcgtcggatctgatggccgttctctcctgaactgggcttgggctggaggacgaacgaggtgcaggtgcaggagcaggcttagcaataccgtaggattcctcgcggctttcccgtcccctcccccctcctacttggttgtcttgtttgactgtcttctgaggaaccgaacaacagtaataagcacaccgatgccgttcaaaaaaaaaaaaaaaaaaaaaaaaagtactctgcgttgttaccactgct

SEQ ID NO: 66985 - DNA, 296 bp, Zea mays
  Clone ID: MRT4577_161089C.1
actttccgagttggctgcagatttgtggtgcgttctgagccgtctgtcctgcgccaagatgcttcaaagtattattaaaaacatatggatccccatgaagccctactacaccaaagtttaccaggagatttggataggaatggggctgatgggcttcatcgtttataaaatccgggctgctgataaaagaagtaaggctttgaatactacagcgcctgctcctggtcatcactaaccagatttacttggagtacatgtgaaagaaaacgtcagtctgcctgtaaatttcagcaagc

SEQ ID NO: 66986 - DNA, 256 bp, Zea mays
  Clone ID: MRT4577_16108C.1
gggaccctcgaaggcggcccgggttcccttttccgacaaacgcgtcgcatccgctccacaggatcctctgcgccaccgcaaccgtgtgaccgtccgtgccgccggctatcccgatccgccgacccgtcccagccccgctcgcagccatgtcgccgtcggagccgacgcgggaggagagcgtgcacatggccaagcttgcgcagcacgcggcacggtacgaggatatggtcgagttcatggagcgcgtcgcgcgcta

SEQ ID NO: 66987 - DNA, 322 bp, Zea mays
  Clone ID: MRT4577_161090C.1
gtgtttggttgttttttttttttttttgttttcgatcaagccgaatcacactgcactgagagccatacaaacgtacataataacagaccccagcacagtgcaaatatagaaagatactgtatcctcggccccgccaaaacatataggtgggggggggggggctccctgcctacaccacccgtgctgagcccaaaccatgggtgcacttaaggagagctctttgaattgagcaaggggaaagttagttgaccattccctcacgggtgaactagtggggtgggaacaccaaaaaaaacgcccccctttctgcaaacgggggctg

SEQ ID NO: 66988 - DNA, 3408 bp, Zea mays
  unsure (1)..(3408): unsure at all n locations
  Clone ID: MRT4577_161091C.1
ttntattttttttttttgtttttttttttttttttttttttttttttttttttggggagattaaatcaccattaaaatagtgattgggttgcagggcaattaataacaatccacaatcgtaccagttaatctatgcttattctactttttcgtcacctacaattccatcgcttcatacaacatggtaagatgtacaaatcatgcaaggcatgaacacctccagtatttctggtgaaaaaactttggaaccaggaaactagcagtttaaatactgtaatctaataccaaaaaaactacaattcacaccagcttccgtgaaaaataaaatgccacgtccaaacacctatagcagctcatcgactgatattttttttgtagaaccaccgatccagatccattaagtttgtcgtcacttggtgagagcctccatagcttcaaagaagagaggaaccatctccctatttggagttttgactgcacacttcacaccaggaacaccaaccacggctgtaacctctataaggaaggggattccacggggcatcttcgcggagagatacagaacatccatgttcgcatttttccgcttggctataaagaacacatttgatgctgcaaggcgctcaacagtagcatctatgctgctgatgacagagcccgggaattcttttgtaaattcattgtcatcaggcaaagatttccaggcctcaagaaaaccagctcgttccatttttccatcttcaccaaagaaaacatgcagcggaattttgtcattgaagtaccacactggctgctgattatttttcacagcaacctgtagtagcgagtttggtgcaccagggctgatattctggaacgggttcatttgtaaaagtgtccttgttgattggcctggttgcagtggagtaacctgaagtgcttcaccagcagcaagaccaaatgtgttcttgttaaactgaatcataaatccatctaggacaccctgggtgccattctcaaaagatatatcatagtatatctggccatcacgccgtgttagttgtgcactaatttgcagcccttgacctgtagtcgaaggcagtaagacaggtagtggagggccggaaggtgctgcaggttcatcaacagggacaatagcattatccatacccattaaatcacctaaaaggtctggcattgcaggtggggatgcaaccgccagctgtttcacgggtacattagaagaagtaccagcactagatgaaggtgatgccccatcaactccctgggatggggactccgagtaccctgtttcagctgtatcagcaaactcttcatcatcggccctaggagcagccttaacacggctgacaaatgattctgggggcttatgataaactgatgaaagggtagaaatgtttgctagcagctcatcaagaagtgatgagtcaagctggttagagtcatcactgatcacaggtttctccgccaaaacaacatctttcgcagcctcaggatcagtagacagaagtcgccaatatatgtaagctctgtccctcaaatcaggattatctgtttcaactgtggcattattgagaacagcctgtatcatctgttgtggcccctcagttggcttcttaagaaacaatttaacagtagcggttagcagctgcagttgaactaatgctggttcttcagggaatgtttccaagaagctctcaagaagttcatcagcattgtcaattctttcagcatattctccaattatccaaatcatggatgccttagcctctggttcatctaaagtgtccagactttcacaaagtgtagcgatgatagactcatacgtgttagggtagcgtctgaagatgtctttgataacaattatagcttcctgaacaacataattaacttttatcttaatcagctcaagcaaaacgctgatgcacctttcagcagctctctccaatttaattgcacatctcccaatcgcacgaacggctttccgcacaaagtcaacatcaacctctgtggcatattctttgaattccaagagcacctgatctatatttcgatccgaggcaagctttatcataacacccgatctatatttcgatctgaggcaagctttatcataatctccagcttttccatcttaacatatatagggtcattgtacttgcaaaagaaaaccttaatctcatgagcgagtattgtaggcctcttttgaactatcagattaatgttcctcaaggctacatactgaatttcaggctctgctgacaaaagagtaacaagagggggagccattttcttgcagagattcctgactacatccgtgctcgtaatgagctccatttgtagaaggattatcttgacagcagaaagaacaaccgcacaatttgcatgttggagacggggtgtaactcgttccactatgttttcagcttccctggcatctgctgctttatatcttgacaaagaatccaaaatgaaaacttggccccactctgtgcattcattcaaagctgtcagaagctttgacagtgtatggctggtgatttcaaagattggctgaacactactatcttgaatctctgccagagcagcaacagcatttgcaacaaccataggattattgtcagatattaagtccttaagggcctccagaaatcctctgtcctctactagctcagcgtttatatcataaagtttagcaacgcaaatagctgcagtcttccgtacatacggatcgtcatccttgaggcatctttgaagtggatcacagagatactctgtgattttgtccacgcggatacaacccattgtcctaacagccaaagcacgaatcaatgggtttgggtcttgtgaatccttaacaaatgtgttcacagcaagaatggcaagatcaggttgacttttagcatagttgatgagatacaaatatactagtttctttagctccaagttctcagtctgcatgcagttcacaacatcagtgaacaatgatgagacatcctttcctacagtcatagcagcaatcactttcttgacagcatcttttctcttgtccttatactgggagttgagctcctccttgagctcggggatctcccccttcttggtggtagagaagtacttggagtcgtgcccgctcatctcgtccgccccggcaagccgagcctaccctgtggacgacgctcgccgcctgctccggacgccgcagcggcgccggtggtcacggtgtggacgcttgcgatctcgcgcgcggtgtcggtgattggggagaggagaggctggaaaggagttcaatattttgtcaatttgagagatcgagagagggggcgacgacgaaagtcgaggacgccgaagttctgatcaccagctgccctgccgctaaatccccggccggcctcgaggtacccaatg

SEQ ID NO: 66989 - DNA, 370 bp, Zea mays
  Clone ID: MRT4577_161092C.1
cgtactctcatttctagacataccctgattttctacttttttttcatcaaagaggacacaaacacatgctgggttactacatatgggcggccggtaaacgcaactcttcttctatggacacatcttaccaccaccctttactacttcggctttccatgaagaggttgctcttatgcaccttccgatacaatcattctctcattcttttgtagatttcacgtttgagctgctgattctcacatccctactctacctccatgctcctcgattctcttatactgctcctgctcttaccatcttttcacatttttaagttgtagatccactacatgatgctactaaatatagactcttatcatattctatctat

SEQ ID NO: 66990 - DNA, 956 bp, Zea mays
  Clone ID: MRT4577_161093C.1
acacgttccttaaaaactaggtaaactagcatgtttagaagcaccataatttctatagcagtttttttttcataaaatctctatctataatctctatttctatcgattaggtaagatatcagagagacgttactatgatgtttaattaatgctaaacctagaattgagtggcatttgcattcttacccaacactcttaattggtcagtacagaaaaggcagcagtaatcagtcaagggtgaagcaaaacaatattatactcccttcgttcttttttgtttttcgccgtttagttcaaaaataaactagcgggcaacaaatatttgtcaacggaggtagtatcagtttacattagccgtgtagaaaactagtcatatttcatatgctatgcataacaagatgaaaatttccaggtccaacagggtaagatgtacagattatgtgaggcaagaacatctccagtatttctggcgaaaaactttggaaccaggaaactatcagtttaaatactgtaatctaatacaaaaactacaattcacacaagcttccgtgaaaaaaaaaatgccgcatccaaacacctatagcagctcatcgactgataaatttttgtagaaccacatatccattaactttggcgtcacttggtgagagcctccatagcttcaaagaagagaggaaccatctccctatttggagttttgactgcacatttcacaccaggaacaccaaccgcagctgtaacctctataaggaaggggattccgcggggcatcttcgcagacagatacagaacatccatgtttgcatttttccgcttggctataaagaacacatttgatgctgcaaggcgctcaacagtagcatctatgctgctgatgatagagcccgggaattcttttgtaaattcattgtcatcaggtaaagatttccaggcctcaagaaaactagctcgttcca

SEQ ID NO: 66991 - DNA, 255 bp, Zea mays
  Clone ID: MRT4577_161094C.1
ccggttccggtcgacccagcgtcggatagcttaccccatgcggtcggggccgcgggtgggaggcagggtgcgctgacctgaggagaacaggacaaaaatgaccctggacaccggcctaaggacagctgcagcatggacaggggctgggacctggccccgtctgaaccggtgcacagttatcggccgcggtcggggcggcgtcagggggctactgcacgcaaggttcagaatgccgctggaccacgcgaagcgggc

SEQ ID NO: 66992 - DNA, 591 bp, Zea mays
  Clone ID: MRT4577_161095C.1
gcttattctactttttcgtcacctacaattccatcgcttcatacaacatggtaagatgtacaaatcatgcaaggcatgaacacctccagtatttctggtgaaaaaactttgaaaccaggaaactagcagtttaaatactgtaatctaataccaaaaaaaactacaattcacaccagcttccgtcaaaaataaatgccacgtccaaacacctatagcagctcatcgattgatttttttatttttttttatttatttttttagaaccaccgatccagatccattaagtttgtcgtcacttggtgagagcctccatagcttcaaagaagagaggaaccatctccctatttggtgttttgactgcacacttcacaccaggaacaccaaccacggctgtaacctctataaggaaggggattccacggggcatcttcgcggagagatacagaacatccatgttcgcatttttccgcttggctatgaagaacacatttgatgctacgaggcgctcaacagtagcatctatgctgctgatgacagagcccgggaattcctttgtaaattcattgtcatcaggcaaagatttccaggcct

SEQ ID NO: 66993 - DNA, 682 bp, Zea mays
  Clone ID: MRT4577_161096C.1
cctcgaggccggccgggccgggatcgtcgtcgacgtcgatccctctctcgttctctcaacaaatcgacgaagtccctgaactcatttccagcctctccgcgccccaaccaccgccaccgcgtgcgagatcacaagcctccacaccgtgaccaccggcgccgctgcggcgtcctgagcaggcggcgagcctcgtgcacagggcaggctcggctcgccggggcggacgagatgagcgggcacgactccaagtacttctctaccaccaagaagggggagatccccgagctgaaggaggagctcaactcccagtacaaggacaagagaaaagatgctgtcaagaaagtgattgctgctttgactgtaggaaaagatgtctcatcattgttcactgatgttgtgaactgcatgcagactgagaacttggagctcaagaaactagtatatttgtatctcatcaactatgctaaaagtcaacctgatcttgccattcttgctgtgaacacatttgttaaggattcacaagacccaaacccattgattcgtgctttggctgttaggacaatgggttgtatccgtgtggacaaaatcacagagtatctctgtgatccacttcaaagatggctcaaggatgatgatccctatgtacggaagaatggagctatttgtgttggtaaactttatg

SEQ ID NO: 66994 - DNA, 449 bp, Zea mays
  Clone ID: MRT4577_161097C.1
gacgtcagatgacatctttgacttatccattaactactgctggaatatccaatctaaaaaacaaaaatgtgtgaccataatacaatccttagccattgtcaattctttcagcatattctccaattatccaaatcatggatgccttagcctctggttcatctaaagtgtccagactttcacaaagcgactttcacaaagcgactttcacaaagcgtagcaatgatagactcatacgtgttagggtagcgtctgaagatgtctttgataacaattatagcttcctgaacaacataattaacttttatcttaatcagctcgagcaaaacgctgatgcaccttttagcagctctctccaatttaattgcacatctccaaaccgcacgaacagctttccgcacagaatcaacattaacctctgtggcatactccttgaattccaagagcacctc

SEQ ID NO: 66995 - DNA, 176 bp, Zea mays
  unsure (1)..(176): unsure at all n locations
  Clone ID: MRT4577_161098C.1
gacccaaaggaggccgcgagacaagacgcccgcgggnacaacagcagcagcacagacggggacgagcgcaggagagacgcgcggaacgcgcggaggcgagcgcaacccgaggcgggggnccacaacggcagggacagccacaaacaacnccagcgacagccngccgcgggcacccg

SEQ ID NO: 66996 - DNA, 429 bp, Zea mays
  Clone ID: MRT4577_161099C.1
cccacgcgtccgcccacgcgtccgtgcagtggcaacttggtcaggcatagattgtcttggttccaaacccagtaggaatcaaatcaagatgcttcacaaaatatgagaaactggtgacacaagcacgttgatggaagtaccatgcaggcccatgaggagaaaattcagaatagatatgtttgaatgccacgtactgagcagcttggaggacattgacaattggcatgccacatactgtgttgtcaaaagcgcgacaggactcataggcttactcgtaagaagtctgaatctatggcttcacttagtcttggtggagaggctttttttttgttctttttttattattttattatttatattttttattctttttttattttttttttatttttttctgtttttcatatttatttattttttttttatttt

SEQ ID NO: 66997 - DNA, 387 bp, Zea mays
  Clone ID: MRT4577_16109C.1
cccttcttttccccgctgctccgccggctgcttgagggggtttatgcaggatatattctgttccgtcggcaagagagttacttccgaattgaggtgttctgggttcagatttgtaatctttcattggttcctgaaacacggggaaggctaatcgtggcaaattgtgggatcctgatgtcagttacttctcttgcccgtggcaaggatcgccatgtcagactcggcggagcaccactaaggatcgatggtcagcgccggagcggccaagacctacccgcagtaggctggcacctgtcgtaagaaccgttttatagttatgaagaaccgcccctgacaggttgcggaggtttctaactcaaagactggaaagcatggtcatgccaaatg

SEQ ID NO: 66998 - DNA, 236 bp, Zea mays
  Clone ID: MRT4577_1610C.1
acgggacagcacttcaatggcggcggcgcctcctgccgcagaggcagctcttcttctcctcctagcattactggcactcgccgcggtggctctgagacgcggcgatgcgctgagcctggatttgtacgacgtgacctgcccggaggtggaggcggcggtgacggcggccgtgcggcaggccatggccaacgaccgcacagtggcggccggactcctccgaatgcatttccacgact

SEQ ID NO: 66999 - DNA, 411 bp, Zea mays
  Clone ID: MRT4577_161100C.1
agggacaaaacccggccaaccgggggttgatctcaaggggtcgggggaggaagggcactttttcacttaaaaagccccctcgcgttttaaatcgtttgcaaaagattaaaaacccccccccttgggaaaggaacttttaaggggccccccccggggcgttggcccggcgggcttaaccaaaggcacgggccctttgggggcgaaacccctaaacttggttggggcgggcggggaaaaaaagcccccggtgctaacttggatttttacttaaaagggttcaatcataaatcggcacaagggaacttttcgccactggtttttaaaacaaacgcgaagaccaaatgtgtgaataaaaaggtcctcttctactaaggtgaaatactatcgcggggcgggcatcaataggggaaa

SEQ ID NO: 67000 - DNA, 292 bp, Zea mays
  Clone ID: MRT4577_161101C.1
gaacatccaacaggggccagttttattcactcgctatagttcacataaacgaacatgacgttacaagtctaagggtacttcactttcagccaaaacaaatacacagcctttattatctcagttggtgcagggcatcattattaacattgctttgagttcatgcgtggcatcgcccttttaggcacggatggcgatccctccctgctgcatcacggccgagggggcattcttgacggcggcctccgtcgtcgtccgctctccgagcaccggcaggtgttacctttttctggag

SEQ ID NO: 67001 - DNA, 185 bp, Zea mays
  Clone ID: MRT4577_161102C.1
actatatatagatcgcgagcggccgtcctttttttttttgtctgactcgccgacgagggagaaaaggcactccctgcacgatccgtatgaatcaaacggtggttggacccaccgctacctactttatctcggccggtcggactgacagatacatgacggcgggcggttactcacccctgcgcctg

SEQ ID NO: 67002 - DNA, 959 bp, Zea mays
  unsure (1)..(959): unsure at all n locations
  Clone ID: MRT4577_161103C.1
ggcgtcgaaaagagggagggagagagagagagagagagagaggagttgcaagttggtgagatggatctgttggagcggggtattaagacggagacgggggagactcgcatggaacaggatcgtaaggaggaggtggaggctgatgctggggagaggaagacccaggagccgtcgcagcaaggccagggcctcagcctctcactcgccaacggcagtggcagcttacaattttctatggcggatcagtatgtgtgtatgactcagtgccaccggaaaagcgcaccgccgagtccagcgagggctctgcttccctggagtggttcgcggctgtctagtccctcgattggtggcctggtctggaatgttgccgatgtcgaacgtgtccgctaatccttcacagcttacaattttctatggcggatcagtatgtgtgtatgactcagtgccaccggaaaaggctcaagcaatcatgcttatagctgcagctgcagcggcagcggcagctaccaaaagcagtgctgcccctactgttaagcctccaatggtgcctgcagccactgttgccccagcagctgtcgtttctcctgtgcttacacggtctccatcactgcagagcacttctgtagcaactgggcaacctcaggttgttgctgaacctagctcgagatgcaaacttcaggctgatctccccattgccaggaggcactctcttcagcgtttccttgagaaacgccgtgacagggtcgtgagcaaagctccatacagcaccgccaagtcgtccgatggcatggagtcaccgaggattgaggtgacagcggagggcaaggcccagtaacttgaaaggtccccgcggagtcccatcggtgaaggctgacgttgtgggaaggggcaggcacgcgctgttgttgccttatgntatgtggcggcgccagcgtggaaacgcactaataatgtggacc

SEQ ID NO: 67003 - DNA, 2164 bp, Zea mays
  Clone ID: MRT4577_161104C.1
cgacccacgcgtgcggttgccgtgtttgattcccaaaaaaactcccatctcgcggcggaaagagagagaggagaggtgcgagctggtaagaggcgaaaggttcggagcgcggaggaggaaaagagggagagagaggagaggtgcgagctggatgagatggatgcggatggaggagcgggacattaggaaggggcagagggagatggaggaggcgggcaaggaagaggcgcgggcggaggaggcggggggccaggaatccccaggagccgcagcgaggtcaaggccccagcctcccactcgccaacgtcagcgacagcggcaggtctgcaatgttgccgatgtcgaacccttcagctaatcccacacagcttacaattttctatggtggatcagtatgtgtgtaatgcactcggtgccaccaggaaaagcgctcagataatccatgcttatagactgccgctgcggccgcagcgccgctggcccctgctgggcctgcatgcttccggccaatgtccccaatttctggaagagctccactcgctcgttttcttgcaaaccgtcgctacatgggcgtgtgccgaggctcagccccgccgccccaagtcgggctctcccccccattctgcgggaagaaagttcgtggcggagtcctgagagaacccccgtacaccgccgcctaatcgttgggcagcagggaggccgggagagtgaagacgaaggcgcgcggccagcggggcttgaggcgaaagctggggaacaaggggggagtcgcgtggtatgtactctgtgggtaccaacggtgtcggatgctggttgtggggaggggaacggggaaccgcgtgttttttttgtttattttgtgttttatgtgactatatagaatcggtcgaagcagctgggtcgggcacctctaataccggggtctttactgcctctattttagtgtcgttgctttgttgtcgcgtgctatgttgtattccgaagtggattcctcaatacagcgagacagaacgagagaggagttgcaagttggtgagatggatctgttggagcggaatattaagacggagacggaggagacgcgcaaggaacaggagcgtaaggaggaggaggcggaggcggaggcggaggcgggggagaggaagacccaggagccgccgcagcaaggccagggcctcagcctctcactcgccaacggcagtggcaggtctggaatgttgccgatgtcgaacgtgtccgctaatccttcacagcttacaattttctatggcggatcagtatgtgtgtatgactcagtgccaccggaaaaggctcaagcaatcatgcttatagctgcagctgcagcggcagcggcagctaccaaaagcagtgctgcccctactgttaagcctccaatggtgcctgcagccactgttgccccagcagctgtcgtttctcctgtgcttacacggtctccatcactgcagagcacttctgtagcaactgggcaacctcaggttgttgctgaacctagctcgatatgcaaacttcaggctgatctccccattgccaggaggcactctcttcagcgtttccttgagaaacgccgtgacagggtcgtgagcaaagctccatacagcaccgccaagtcgtccgatggcatggagtcaccgaggattgaggtgacagcggagggcaaggcccagtaacttgaaaggtccccgcggagtcccatcggtgaaggctgacgttgtgggaaggggcagggacgcgctgttgttgccttatgttatgtggcggcggcagcgtggaaccgcactaataatgtggaccggaacctctgttaccgtcgtttgtgctgtcgcgtgctaggtttatgctgaagtggattcctttactccgcacaccgaactgtgtctgttgtacatcacgccgtgacgccggtggtctcgtctgtctgacttcgttacatggatcgtctagtagtaacggaatgcagtaccacgtgtggacatgtgtttagtgtgaaagatgatggggctttgcttgcttgtttcccctaaaaaaaaagaaaaaaaaaaaaaaaaaaaaaaggccatcatctttcacaataaacacatgttcacacgtggtactgcattccgttgctacttgacgatccatgttacgaaatcaaacagacgag

SEQ ID NO: 67004 - DNA, 343 bp, Zea mays
  unsure (1)..(343): unsure at all n locations
  Clone ID: MRT4577_161105C.1
cggacgcgtgggcgagcaccataggtggaagaagaacaccaaatggaaaagggggcattgcaaagnaatcaattaatgtgaaggcagatttgctgtgaccatgcttagaatggaaaaattggcattgcaaagtaatcaattaatgtcaaggtgggatagcacggagcctaaaaggactgcggtttttgaacctgcagaaggatcaagatcaatcatgtaaactgatgcacattccgataggtggcacattttatttattacattgaagttggaaacagacaccaatgaggacagaaagatgataaatttgaagggaattcgaaattgggcttcttgacatttt

SEQ ID NO: 67005 - DNA, 359 bp, Zea mays
  Clone ID: MRT4577_161106C.1
cccacgcgtccgcccacgcgtccgcccacgcgtccgcccacgcgtccgtggacgcgtgggcggtcgcgtggggtgtggcgtcggttgttgcgcctgcgatccttgttgttggccctcgtgtctttgttcgctgcgctttcgtgtctgttgtccgttcttgctgtctgtttctggtgcgtgggggctccttgttctttctgtggggtccttgtctttgtccttcttgttttcttctgtctttttctttttttgggtttctttttttgtttttttttttttttctccttgtctttgccctttttttgttcggtttttttttgtttttttgtgttcgtgttgttttcttttttttttttttt

SEQ ID NO: 67006 - DNA, 180 bp, Zea mays
  unsure (1)..(180): unsure at all n locations
  Clone ID: MRT4577_161107C.1
atcagtgctacattttctgtaactacggcggcggnggcatatagacgccggggtacgtttcagcggtccagcacggcatgcctcaagtgaacatcaagggcaacgagtgcggacggtcactgacgtcgtatccaaccgagaaggaatacagtcgctccaaccacaaaaccccttgatctt

SEQ ID NO: 67007 - DNA, 243 bp, Zea mays
  Clone ID: MRT4577_161108C.1
cttgaggctgccttggagtgtcctcctgggtgcggtggtgcacaccgtgtgagtccacagagtggccacccttgtggtcatgaccggcaaagcaggccttgacacagttgtactggtgaacaatagccatcacctcacccttgatgctgacttggagtgtcctcctggtaccagcgcttttggtcacgtcgaagtgtatcctaacaggctgctgcttgtaggttttgacacaatggctgatac

SEQ ID NO: 67008 - DNA, 298 bp, Zea mays
  Clone ID: MRT4577_161109C.1
ctctctagcgcacacactatgttctccgttctctggcggctggttcataatccccacgtgagaataaccatatctccacacctttacacaattccacccctttaacttcatccacacctttagctacaatcatttccgcactatccaacagaaatgctaccactcgttataaaactaggactcacattgatacagccatacataatattctcaacaccatggcgctcatggagctccatcttacacatctttaagacctactttgtaacgagcacgccctcaccttcatccttcggga

SEQ ID NO: 67009 - DNA, 340 bp, Zea mays
  Clone ID: MRT4577_16110C.1
tcccagacatcgagctctaccacatcgactccgtgcacgagctcaactcgtccggtgggctcgacgggtgggcactacacctcactgcatgaacgacctgacagtgaagcactgctgcatgtgccacacggagtctttcaatgaccttcctaatgaccgcctgttgacccagaccaactctgctgcgtcacgcgccaatagtcgctccccatcgccggcgtctgatactcgtccacgggatacacctctgccgcactctctccctactgcgacgccgaggacatccatgacatcgattttcttcctgacaaccgcatctagctcgagcaggtcattcatc

SEQ ID NO: 67010 - DNA, 810 bp, Zea mays
  unsure (1)..(810): unsure at all n locations
  Clone ID: MRT4577_161110C.1
cggccgggctgttcctctacccgccccgcccttccagttccagaagtttcntggaagccaacccaagccatggacgccgccagcatagccgccgccgccgccgccgtggccaccccgccccctggcccggccgtgaccgtgcaggtaccgcgcgggcaggtggatctgattgacttcatcgactggactggcgtcgagtgcctaaaccaggactcctcccacagcatcgtcaacgcgctcaagcagagtttgagggacgacgaggggctgtacctcgccagtgattcggacgagcagctgctgatctacatccccttcatgcaagtggtcaaactgcattccgtgctattcaaaggccccgaggaagagggccctaaaacagtaaaactcttttccaacaaagagcatatgggtttcagcaatgtcaatgactatccaccaatggacactcttgagctatcctccgatcatttgatagagaataaacctttgccgctaaacttgactgtatttattgaggacaatcaatctggaagtgatgtctcgaaaattcaaaggattgctctttatggcacaactgtggacacgacaaatatgaaggacctgaagaagatagaagagcactgagaccatttaaaggctgagcttaatccagtgggtgtatggcatactagaaacagttagatgttgaattgagcaatttccagttgaccccggcagactttttcccctatttttatacacgaggaattaaaagagcgccagtcaggtgatgccgaagctattacctcttgggatcttgtaatcctg

SEQ ID NO: 67011 - DNA, 554 bp, Zea mays
  unsure (1)..(554): unsure at all n locations
  Clone ID: MRT4577_161111C.1
cggncgcgtggnaaaaaaaaaaaaaaaaaaaaaaaaaaaaaaaaaaaaaaaaaaaaaaaaaaaaaaaaaaaaaaaaaaaaaaagagaaaaaggggtaataggaatttaaagttttccgggctgccgttttgagggcttgccggcgtcttgtgctcggggctccgggtcccctttactcggggcccggtgggcccacgttttttcaccgtggggaccccggtgtttccccccccgtttcccgggttttgccccctggccccctctcccccttttgggccggttgcctttctggccccaggggcccgcgcttttcccctttggcgcccgctctgttggcctttttggcccccgccctgcccccttttttaacgcgtggcgcgcggtgggtttgccctttacgccccgggtgttcggtccatcccccaggggccccccgcccgcttttttggctttttttccttcctttttggccccgtttccccgcttttcccgcaatgttgggggtctttttcccggcctttttttttcgggtttcgcgctttcgggcccccaaa

SEQ ID NO: 67012 - DNA, 1146 bp, Zea mays
  Clone ID: MRT4577_161112C.1
ttgggctcctcgagaccggccccattgcatcaaagcaacacgactcatttcgttcagtggttgcttccacccacgcggacccgcgaaaccaaatcagccttagcgtagcaaatacgcccctcttccagccttcccctcgctgtacctactacccgccccgcccttccagttccagaagtttctggaagccaacccaagccatggacgccgccagcatagccgccgccgccgccgccgtggccaccccgccccctggcccggccgtgaccgtgcaggtaccgcgcgggcaggtggatctgattgacttcatcgactggactggcgtcgagtgcctaaaccaggactcctcccacagcatcgtcaacgcgctcaagcagagtttgagggacgacgaggggctgtacctcgccagtgattcggacgagcagctgctgatctacatccccttcatgcaagtggtcaaactgcattccgtgctattcaaaggccccgaggaagagggccctaaaacagtaaaactcttttccaacaaagagcatatgggtttcagcaatgtcaatgactatccaccaatggacacccttgagctatcctccgatcatttgatagagaataaacctttgccgctaaagtatgtcaagttccaaaatgttcgcagcctgactgtatttattgaggacaatcaatctggaagtgatgtctcgaaaattcaaaagattgctctttatggcacaactgtggacacgacaaatatgaaggatctgaagaagatagaagagcactgagaccatttaaaggctgagcttaatccagtccagtgggtgtatgacatactagaaacagttagatgttgaattgagcaatttctagttgaccctggcaaactttttccccctatttttatacatgaggagttaaaagagtgcgagtctggtgatgccgaagctattacctcttggcatcttgtaatcctgcaatttatttcttggggatccgaattcatttcatgaatttaccaaaattagtccatgcgtcgatggtctcgcaaactttgccagcagagcttagttcgttcctggcgctgtgatatgcgtaagattcaatcaagtcgtggctgtacccaaaaaaaaaaaaaaaaaagcggcc

SEQ ID NO: 67013 - DNA, 1090 bp, Zea mays
  Clone ID: MRT4577_161113C.1
ttcctattcctactacccgccccgctcttccagaagtttctggaagccaacctaagccatggacgccgccagcatagccgccgccgccgccgccgccgccgccgccgccgtggccaccccgccccccggcccggccgtgaccgtgcaggtaccgcgcgggcaggtggatctgatcgacttcatcgactggactggggtcgagtgcctaaaccaggactcctccaacagcatcgtcaacgcgctcaagcagagtttgagggacgacgaggggctgtacctcgccagtgattcggacgagcagctgctgatctacatccccttcatgcaagtggtcaaactgcattccgtgctattcaaaggccccgaggaagagggccctaaaacagtaaaactcttttccaacaaagaacatatgggtttcagcaatgtcaatgactatccaccaatggacacccttgagctatcctccgatcatttgatagagaataaacctttgccgctaaagtatgtcaagttccaaaatgttcgcagcctgactgtatttattgaggacaatcaatctggaagtgatgtctcgaaaattcaaaaggttgctctttatggcacaactgtggacacgacaaatatgaaggatctgaagaagacagaagagcactgagaccatttaaaggctgagcttaatccagtgggtgtatgacatactagaaacagttagatgttgaattgagcaatttctagttgaccctgccgaatttttccctatttttatacacgaggagttaaaagagcgccagtctggtgatgccgaagctattacctcttggcatcttgtaatcctgcaatttatgtcttggggatccgaattcatttcatgaatttaccaaaaaaaaaaaaaaaaaaaaaaaaaaaaaaaaaaaaaaaaaaaaaaataaaaaaacgcaagcaaatatacaagaaccagcaatacaataaacatgcatgcaaagacaacagaaaatcaataaagtgacctaaatttaacaaactgacgcctgtgaaaccacggggggaccgcaaaaaccctgcctttacccaaattcatctttttgca

SEQ ID NO: 67014 - DNA, 1697 bp, Zea mays
  Clone ID: MRT4577_161114C.1
ccggccgggctgccccgcgcgtccgctcccttccgcctcgaccccgaaatctcgcatcgatggaaggtcatgcgttgcgccgcctcacccgccccttccatactcctcccgcgtctcctttctcctcgctcgcggcgcctccgcctatacctgttgcggcaggcaacaaggcaggcaggcagcagcggagcgcctttgatctacgaagaggatgggttccagaatatccctcctctgcgctcttccagaagtttctggaagccaacccaagccatggacgccgccagcatagccgccgccgccgtggccaccccgccccctggcccagccgtgaccgtgcaggtaccgcgcgggcaggtggatctgatcgacttcatcgactggactggcgtcgagtgcctaaaccaggattcctcccacaacatcgtcaacgcgctcaagcagatgctaccctcggggccgacacgggcgttctgccccgcgcgtccgctcccttccgcctcgaccccgaatctcgcatcgatggaaggtcatgcgttgcgccgcctcacccgccccttccatactcctcccgcgtctcctttctcctcgctcgcggcgcctccgcctatacctgttgcggcaggcaacaaggcaggcaggcagcagcggagcgcctttgatctacgaagaggatggattccagaatatccctcctctgcgctcttccagaagtttctggaagccaacccaagccatggacgccgccagcatagccgccgccgccgtggccaccccgccccctggcccagccgtgaccgtgcaggtaccgcgcgggcaggtggatctgatcgacttcatcgactggactggcgtcgagtgcctaaaccaggattcctcccacaacatcgtcaacgcgctcaagcaggcaatgacgcagatcctcaagggcatcaacagctataggtcctcgctcaaggtcccgctgtccgagaacaagaatgcgcctgtgatacggtcggtaccatttactattacaccaataatcatgtacagtgagtcaggttcaaggttatttggttttattggagctggtgctacgctagggcaactttttggttcattgttcgctgcaagtatggcatggctgggaccatttctgctcctattttcttcactcttgatggaacttgctgccctgtcatcaaaaggaatgtgtattgatgaaaatcatgcttcggctgaattatgtcaaataggggcaggacaagctcctaataccatggctgatgatgaaatttctgcctcaaatggagacaatgacgagtggtcagaagtttgagcaaaagggagttgcagcctgcagggcttgattcaagaaggtgcaaagctgctggtctgggcagcgagcgtaacgttggatgctcgtgttgtcgatcaagtggaagaggataatgatgatacagagaattaaaagtttggtatagtgatcaactttccggtggaagcccgacgaggattgtctacttctggatcttggccgtgtagctttgttctgcttctcttgtgatgttcttgtccgagtataaggtctacaatggcataatgcttgtaccatctttttctgtggcaacttattttttctcatgcagtgcatgtgacttgaaactttgttaagacatagtttgtgaaagggaaaaggatcccatattttctgt

SEQ ID NO: 67015 - DNA, 365 bp, Zea mays
  Clone ID: MRT4577_161115C.1
gccgccgccgctgccaccgccgcttgctgccgcagccgccatgggggcgtacaagtacgtgtcggaactatggaggaggaagcagtccgacgtgatgcgcttagtgcagcgcgtgctgctgctgggagtacatggcagactcagtcatcgaccagcataccaggcataccatgcatgaccatgctggcattgacgacatcaaggccatacttgaacgtcctttctcctctgtcacatttactacaggagataccacaaagaacgctgccaaagatcttgataatattcttatcatcctaggcatgcgcccgaacctcatgtgctgcatgcctcaaacccctcagcctccagaccatcagactatg

SEQ ID NO: 67016 - DNA, 228 bp, Zea mays
  Clone ID: MRT4577_161116C.1
gctagattaacttcaggggccatatatagcgcaagcggggtaaactttcccaggaaagctagttactataattccattccacatgaccaccctgttgatcgatctaccaatattcagcctagatcaacaaaacaacggaaagcaggtggttataaaccgaacaaaaagagaaaggagcaggtcgatcgaccgcacctgaatgtgtggaccaggttctggtatcacaaa

SEQ ID NO: 67017 - DNA, 1811 bp, Zea mays
  Clone ID: MRT4577_161117C.1
ggtaccctcgggtggggcctgccgggaaatttttttaccatcgcaactggcgtgtcggattcgctcgtccacctacccggacgcgcgcacgcaaagcagaacgctcccctcccggccttcccttcctccccgccctccgaagtccgaaggccagaagcttccggaagccagcccaagccatgaacgccgccagcaccgccgccgcggcccccgcgcctgccgcgaccgtgcaggtgccgcgcgggcaggtggatctgatcgacttcatcgactggaccggcgtcgagtgcctcaaccaggactcgtcccacagcatcgtcaacgcgctcaagcagagtttgagagacgacgaggggctgtacctcgccagcgattcggacgagcagctgctgatctacatccccttcatgcaggtagtcaaactgcattccgcgctattcaaaggtcccgaggaagagggccccaaaacagtaaaactcttctccaacaaagagcatatgggtttcagcaatgtcaatgactatccaccaagtgacaccctcgagctatcatccgatcatttgatagagatgggccttggcctttctttcctgcagaataaacttttgccactaaagtatgtcaagtttcaaaatgttcgcagtctgactatatttattgaggacaaccaaagtggaagtgatgtctccaaaattcacaagattgctctttatggaacaactgtggacacgacaaatatgaaggatctgaagaagatagaagagcactgagacgattttaaggctgagcttattccagtccagtgggtgcatggcatactagaagcagtttagatgttgaattgagcaatttctagttgaccctgcaactttccccccctatttttatacatgaggagttaaaagagtgcgagtctggtgatgccgaagctattacctcttggcatcttgtaatcctgcaatttatttatgtggcttgggagtgacagtcagacgatccggatccatttcatgaatgaatcaaaattgctccatgcataaatggtcttgcaaaaaaaaaaaaaaaagcttacttcgagaccgccgcacgcattgaacaggaacatagtagtgattgtaacgtggacagaatactgcccgggccactattgagatcgagggacagtgacatgtcgttgaatcttgttgtagtggacaaaataagtataggccttttcactgttacaggaacataattgtgtgatgtttcacaagttatacattgtgtgatgttatcaaacaattatcttaaccattcatgatagttgttggattatggttttgcagcgagcgtaacgttggatgctcgtgttgtcgatcaagtggaaggggataatgatgatacagagaattaaaagtttggtaaagtgatcaactttccggtggaagcccgacgaggattgtctacttctggatcttggccgtgtagctttgttctgcttctcttgtgatgttcttgtccgagtataaggtctacaatggcataatgcttgtaccatctttttatgtggcaacttattttttctcatgcagtgcatgtgacttgaaactttgttaggacatagtttgtgaaagggaaaaggatccaacattttctatagtcgattttggtatttgacgtctgtcccaaaagaatatgaacaaaagctatgtacttgtctgtaaaaaaaatatcataaaaatgtaattataaaaaagctataaaatgagtaaaaccaaccgatccatccattttccatgcacacgtcttgtcaagtttattgattagtaagg

SEQ ID NO: 67018 - DNA, 320 bp, Zea mays
  Clone ID: MRT4577_161118C.1
cggactccacctcttttttttctttttttttttcgaaccctaacaaatacacacgggctactcctcggccagcgcagctgagcacacaagactacagtcaagtgccactcgatctttgtgttggaagtctacctatacatggacaaacggaatgatgttcacacgatgggctctactctaacaagacctcaaaactgtaggagaccttggactatgataatctgatactaggggcaccaactacagaacacaaggcttagccgcgcaggctcgcctgtcgttattattgacaccacacttggcaacctgaaggctgagag

SEQ ID NO: 67019 - DNA, 430 bp, Zea mays
  Clone ID: MRT4577_161119C.1
cccacgcgtccgggaattattggagcttgtttttctgaagcaaaaacttgccaacaatcagttgaaataagaagaaagcttgcatcattgattttaaagtcaagagaggatagaattgggttgctaaaaatggaggaggaaattttacaagacattgaatgtttaggtaaaaaattacagatgcaagaactactcttcagtcacaacaactatattttcataaggttgttacttggtgttgctatatttttcatcctttcaaaattcatatgaacctttgttgtgcaggaataatttttaattcgtctttacaatacttttcacgctaataacaacattatccttttccatcacacaagaaggaatatcaatggtcttctaggaaggtagagtttaccacctttttgtacacaaaaattgacttaaaatg

SEQ ID NO: 67020 - DNA, 772 bp, Zea mays
  Clone ID: MRT4577_16111C.1
ccggcttcgaattcggcacttagctctactctcactgcgtgcaagcagcaatctctactgctccccttcctctcactctctccatcgccgcctagctcattagctaagctttgcgcttccatttcacccccaccatgccgccgccgccacggaggcttccaccgcgcctcgcccaccgccgctgtggcatcgccgccgcgtccacgctcctgttcctcctcctgctgctctccgctcctcctaccatcgcccagcaccaccgccaccacgccacgggcgacggcgtggtgatcagccaggccgactaccagggcctgcaagccatcaagcacgacctctcggacccctacggcttcctgcgctcctggaacgacagcgggctcgccgcctgctcgggcgcgtgggcgggcgtcaagtgcgtcctaggcagcgtcgtggccatcacgctcccctggcgcggcctcggcggcatgctctccgcgcgcggcctcggccagctcgtccgcctccgccgcctcagcctccacgacaacgccatcgcgggccccgtcccgtcctcgctcggcttcctgccggacctccgcggcgtctacctcttcaacaaccgcttctccgggaccctccccgcctccatcggaggggtgcgtcgccctgcaggccttcgacgccagcaacaaccgcctccacgggcgcggtccccgccgccgtcgccaactccaccaggctcatgcgcctcaacctcagccggaacgcgctctccgacgcggaaacc

SEQ ID NO: 67021 - DNA, 173 bp, Zea mays
  Clone ID: MRT4577_161120C.1
gtcaagatccagtacggacacgccaagaaggacctgctggacaacgagcgcagcgatcgtgagaatctctacgtgcagctggtgaacaacatcctcagcgccttgactgacaccgacgacctggtcacccttgggtacccggacatgatggagctggccaaatacgtggtgtg

SEQ ID NO: 67022 - DNA, 214 bp, Zea mays
  unsure (1)..(214): unsure at all n locations
  Clone ID: MRT4577_161121C.1
acggtcctnacttatttttttttttttattaccgatcttattaagggttggggaaaacgacaaacttttttaattatatgcataattaggcaatactaaattgaatcaaaccgtttttaaaaattatgcttgtaaagtattctttctctaaaaccttattattgttttaaaaaaaaataaaaatattttctggttgcaaaacataaaaatattt

SEQ ID NO: 67023 - DNA, 775 bp, Zea mays
  Clone ID: MRT4577_161122C.1
ggccgcgggttttttttttttttttttgctggtcaaatatgaaaggcttgttgaaatttatgaggcgctatcatcaaatatgcccgtctctcagagcatcagatcgttgagatgctagtgatcccgatcacctattactatgatcgtggaccaagctacctgcccaacaacaatctcttaccatttcggatgagatcaatgttgttgttcaagacaaccgccctgtttgtcgtactcgacttcgcgctaaacctgataaaaaccctaacgcccgctgcatggtacatcgtctggcaccttgcttcttttagtgggaggccataggacccttgctgtcgttcttgctgccctggcgctcggggaactcagtgttctgagtctcgcccttctcaaggatctgcttaatgacatcgtcatcgacagaggtgccgaactcgttctcaagagcggccttggaagctgcgtcgagtgttccctgggctccttgtccatgtgtacagaagatcttgaaagaggagatgaagtgagccagggggacgctcttgtcggtcttccacttctggtaggtctcgacatcgtcgatgaagatgacaaagtcatcgctgcccttgaagtggaccttggtctgctgagtctcgccgcgagccattgtgaatgattgtgtggagggaggttgttgtgttggtggtatgatcgacgtgaaagagtcgttggtgcttttgatgattgattatcgagaggtgatgttactttgaatgatgacggccggggccgg

SEQ ID NO: 67024 - DNA, 288 bp, Zea mays
  Clone ID: MRT4577_161123C.1
ggcgatccggaacgctgaggagcttgggaagctgttggttggcgtgaccatcgctcacggcggtgctgctccccaatatcaaccctgttctgctgcccaagaagacggcggagaaggcgtccagtggcgggagcaaggaggcaaagtcgcccaagaaggccgctaagtcccccaagaaggcatagacagactgtccgttgtgaacagatgtttatcggggggggggtaccagaatgcggcgatgcggaggctgtagatgggacgaaggagctgctgtgcccatgcgtc

SEQ ID NO: 67025 - DNA, 378 bp, Zea mays
  Clone ID: MRT4577_161124C.1
gaggtcccatggagggacgccggcgacctcggtctcggtgctgctgcggcgacgctggagcggcgagtcgagcttgccgcgcccgcgatcggcagccgccgggtcccggcgaccgaggcggcgccggcagtggcaccggcggtgctgtacgcgaggatcagcgtgcgcttgtcggaaacggcggtgcccgttagccggaggcgagcggacgcgtcggcgcgacagcacggcggtgagagcggctgcgagtggagcgtgggcgacgatgacgcgttcgcggcagtagcttgtgctgttgacgatgcgtttgagtagctactaccacgaattcggcactgatgtcatctcaaagtacaatggatcggatttcagactttc

SEQ ID NO: 67026 - DNA, 588 bp, Zea mays
  Clone ID: MRT4577_161125C.1
cattgggacctcgaggcggccggattcttgtgccctccctccgacgtgtcgtgttcatcccacgatccacagatctctctgctcggatcataggtaagacatacccgaaccgctatctgcgagaacagctcactgtcgtatagattgacctacgcagactccgagacctcatgccccgagaagaggtcgcagccaaatcgtgctccgcctctcgtgctctcgacacataggtgccactcgatccccagaagcggcggaccattcaagacgatgtgacatcagccggaatgggctcgatattgtagacacattctggacatcggagagcctcgttctgagcccatcacggatgactcctcacatcctctcttacatcgataaccaccatgtcgcgttagatgcggacaaggaggacgcacgtcgaaactgatgttcacttcgaccccgagatgctccataagactctgaccgaacctgaagttcgtcttgctgacagcacgaaggactatgagcacgtgatattcgcctatgacaaggatgtggcctctagtcctacatacctcgatgtctctcctggtcgtaacgaca

SEQ ID NO: 67027 - DNA, 893 bp, Zea mays
  Clone ID: MRT4577_161127C.1
ctcgaggccggccggggcgacaatataacattataacccacgcaactccggggtccgggttccggctcgccaaaccctagccgccgagtgccgcccaccgcccgcccgccctccgccgcgcgtcggacggtgccgagggaagaggcaccatgaggttggagaagtgctggttctgctcctctaccatctaccccggccatggaatccagttcgtccgcaacgacgccaaggtcttccgcttttgccggtcaaagtgccataaaaacttcaagatgaagaggaaccctcgtaaggttaagtggacaaaagcatacaggcatttgcatggcaaggacatgacccaggatacaacctttgagtttgagaggaagaggaacaggccggagcgctacgaccgcaatttaacggagcagactctgaaggctatcccgcttattacaaagattaggcatgaccgtatgggaaaacacatctcaaacagacataaacctggtaaacgcaaggagatggaaaaggattccaaggagctggagcaggacatcggcatgctcccgaagaagcttattatcaaccatctcgcggctgagaaaacgaaggtcaaggttgaagttgttcagcagcagacagaagataacgcgatggaagagtagtgcgtggcattttgtgtgcttgtgttttcatgtctgatgcagatccttttgtatttgcgtaagaagctatgtagttgatgaaagatgtttatttaatatatatattaatggatggattcgtggactgagtataaaaaaaaaaaaaaaaatagaatccaggaccgagtatcagcaagtttgttgttctggaatgtaagcttgctctgcttatgctattacttcataaaaaaaaaaaaagcggcc

SEQ ID NO: 67028 - DNA, 670 bp, Zea mays
  Clone ID: MRT4577_161128C.1
ctcccccactcctcccgccccagaaccctagccgccgcgacgccccaggtaagggagagagcccaccccccgccgccgccatgaagcgcaacccccgcgtcacgagctcccgccggaagtgccgcaaggcgcacttcacggcgccgtcctccgtccgccgcgtgctcatgtccgcggccctctcctccgagctccgccacaaatacaatgtccgctccatccccatccgcaaggatgacgaggtgcaggtcgtgcgcggcacctacaagggccgcgagggaaaggtggtgcaggtctaccgccgccgctgggtcatccacgtggagcggatcaccagggagaaggtcaatggatccacggtgaacgtcggcatccaccccagcaaggtgatcgtcaccaagctcaagctcgacaaggaccgcaaggccctcctcgaccgcaaggctcgcggccgcgctgctgacaaggccaagggcaagttcacggcggaggacgtcgccgccgccgctgggggcgccacggccaccggtgcctcgctccaggagatcgattaagctcggtggatctgccggttgccatactgctcttgatatcctagttttattaccatcaccagtcctgttaggatatgctacctgaaatatgcttttatcattcgtaagatgttcga

SEQ ID NO: 67029 - DNA, 229 bp, Zea mays
  Clone ID: MRT4577_161129C.1
cctgtgcggcgctcgaggcggccagtcgcaaacccgtctcttgtcccttctactcctgctgcagacctgtcctacccatgacacgacaccatcatcgccaccctgtcggcatgattcgacactccatcaggtgctgcgtgacgagctgactcgcctatactccaagacatgtcgcgtgatgcgttcatattccactgatgactcacgcatgcgacgtgactggtatatg

SEQ ID NO: 67030 - DNA, 742 bp, Zea mays
  unsure (1)..(742): unsure at all n locations
  Clone ID: MRT4577_16112C.1
cctcgaggccggccgggatttgagcaatgcgtgcaccccttgatcgatgcattgttcagcggatacaatgccactgttctagcatatggccagaccggttctggcaagacatacacaatgggtactaactatagcggtgaagagaactgcggtgggataattcctcaagttatggatacaatatttagaaaagttgacacctcaaaggatggctcagagtttttaattagagcatcttttattgagatattcaaggaagatgtttttgatttgctcgatgcaaatcaagctgctgtaagacttgatgcaggttctatggcaaaagcatcagcacctggcagagtgccgattcaaatccgagagactgcaactggaggcataacccttgctggtgtcacagaggctggaggtgaagtcaaaagaagaaatggcatcatatttgacacgtggggtcgtcgtcgcgtgcaacagcaagcacaaacatgaatatgcagtcgagtcgctctcatgccatctttacaaatgcgttgaacaaaagagaacatctggtacatccgacaagtcagccaacggtgactatgatatactatcgtcaaagtttcatctagttgatcttgctggttctgaagggctaaacgtactggagcagatggacataggcttaaaggaagggatacccataaataaagggcttctagctcttggcaatgttataagtgcattaggtgacgaaaaanaaaaa

SEQ ID NO: 67031 - DNA, 139 bp, Zea mays
  Clone ID: MRT4577_161130C.1
gaaatatgaatctatggattctaggctgattctggttgctgtatcacattcctggtcacatcaaattggtgctaggctcatactgcaaacatcgagtatcaactttcttttggctggactcatagcagtaatgctctaa

SEQ ID NO: 67032 - DNA, 251 bp, Zea mays
  Clone ID: MRT4577_161131C.1
tttccgaacatcaaaccaagctcatgactcttctccgaacacactgacactacacgaatcccgctcgaggcgcatcgacgaacgctcagctccaggagaaggacggtatcgactacgcctcccacaccgtggaggtcctggagggctagcgtgagccggtactcttccacgaagaggagctccaaggcaccgacggaggccgaaaattcggcggtgcctttctcttgcactgctaccgtggtttatccttc

SEQ ID NO: 67033 - DNA, 2971 bp, Zea mays
  Clone ID: MRT4577_161132C.1
gcaccaccgcgccgcgccgccccgccgccacccccctttcccgttcgttcccaggacgagtcacagcagccggccagccgcacagagtggtggagcctaggaacagaggaggcgccgagccatctccgcagcctgcgaccggggaacgggcgggaacggacttctaacttagagagagcgcgggcgagagaggtcaaccgcagccggaggcgatggaggtggtggcgctggtgagcggcggcaaggacagctgcttcgccatgatgcgatgcatggactacggccacaaggttgtcgctttggctaatcttatccccctcgacgacaccgtcgatgagctcgacagctacatgtaccaaactgtggggcaccagattgtggtgagctacgcgaaatgcatgggcttgcctcttttccggaggcgcattcgcggatccacaagggatcagggtctcaggtacagtgtcacggcaggtgatgaggtagaagatatgtttgctctgttgagcgaggttaaacgtcgaatcccatccatcagtgcggtgtcgtcaggtgcaatcgcatccgattaccagaggctccgggttgagagtgtttgctcgaggctgggcctggtctcgctggcgtatctatggaagcaggatcagactttgctcctagaggaaatgataaggaggggcattgtggcaataattgtgaaggttgctgcactggggctaaaaccttcttcccacttaggtaaagaactggctgaacttaagtgtcatctgctccaaatgaatgagaattatggaatcaatgtctgtggtgaaggtggagaatatgaaacactaactcttgactgccctctatttcgtaatgcaagaattattcttgatgactctgaagtgatactccactctgctgattccattgcttctgttggaattcttcatccacgggcgtttcatcttgagcagaagccagattcatctgatagaattggggatggttctgccgttcaagagagttctagttgtgtatatgaggttgatgaagttaccactcacgatgatgtgggagaaaaacaggccctgggtccagctgttgatgcttacaccaatatagacctatgtatctcaaagacagggaacaatttacgttcaatgagctgttggattcaggatccatccagagcttcggaaggcctgaaggcagaccttatagcagttttgagcagaattgaaaatcagctcaaggaagaagggttaggttgggtgaatgttttgtacgttcacctctacatttcaagcatgaaggaatttggattggccaatgaagtttacgtcagctttattacggaaaagaaatgctacctgggtgttccttcgcgcagtacaattgaattgccactagtgcaggctgggttgggcaaagcatatgtggaagtcctagtttcaaatgaggtggtaaagaaagttctacatgtgcaaagcatctcctgctgggctcctagctgcattggaccttatagccaggcaactctttatgaagatattctctatatggctggtcagctgggccttgaccctcctacgatgaagctctgtcttggaggtccaagagcggaactagaattagcactacaaaacagtgaagctgtggccaatgcctttagctgctcaatctatatctcggcaatacactttctggtgtactgctctgctcagttgacgtccagcgagaaggaagaaattgaacagacattgaagagttcttatattactcgtttggatcgctcaaaaggtggatcatatccaactgttctgtacgtattcgcgtcagaccttccgaaaggggcacgtgtggaggtaaagcctatactgtatgtcccttccactgatgattgggttgctgccgaagagacggagaccggagttccactgccagcaccgagcaaaacctggactgattgtaccgcaccatactctgcgttgcgcgattcgtgttgccaggtccacacaaccggcgggagaatttgttccgccgtggtgtcgatcacagatgacatcgcatcgaagatctgctctgcagctggacagctgcaccacggagaggagaatctgaaaataatggctagattctgtgctttccagatcgcgaagaccctggcagacaacagattttcctgggacagcgtaacgatgttgaggctctactactcggtagatctcgccgtggcggcagatgcagtgtccggagcattttccgagggccttggccgagcttgcccaagacaacccttccatgagaactgacgttcctttctacaacgttgtgcccgtagccggagctggccgctctgcgtgtgccaacgacataatggcgtgcgagttactggcatccaacgtctccagtgcgaagtccataccagccgaaccgttcgctgtgacgcctgcttgaatgcagctttccttcggaaattggaggtgggcgcacgttggaatttctgccagaggagccggtggccagtcaactgccagttggacgacgacggttgaccagcttctctagggctggcggcggtagcttcgtttctgtgctggcggtcgattaaaaaaaaagaccgtacggtgatcatcacagatgcacccatactgtattattctgtttcagcgtcctatacaaagtatacattgggtctgaattctgattagcctgtgctgatgcttgcaatgacattggttcttctgtgtacagactacggacagagtcccggtcagtaacgtgtgtgtacttgttcttcctctgtgttgacattcttgctcgatggtggaacctgtcgcagttggcggaggtgaagccgcgtagctcacttaggtctgccaaacacttcacttcttagattgtttctgtgaaaatcgcttctgatgaatgcaaaatctattaagtcgtccggttttgatgggaggaaaaaagaaaagagagaaaa

SEQ ID NO: 67034 - DNA, 765 bp, Zea mays
  Clone ID: MRT4577_161133C.1
ggccgcttttttttttttttttttacatgtaaaatgttatagaaaacaaatgaaacattatcatttacaaataattaaaaaggttttgatgggataaaaaaataatgatcagtggacagtaggtagaacatacctaaagtcaatcattgagtacaacaacaatcttaaacgacaatttttcctccaagggcatctaaactggacatgttggggaacctaacctataagcaactaatgtcaaaaactcaaaatctaacaaaaaaaaagttgtagtgggtcaatggagggcaaggtatattatcctcacatttatgacattgcccgttgatgtgtcaaacctataaccattgttcaactgtcaaatttcagcagctctcccagtagtttgaaaatagaaactgtattaattaatacaataaaagaacaatcagataaaagccaaaagaaacagagcacactaagtatcattccacaagttgagagattcacataagtaatgaggatatatttgctaagacgaagaaaatttggtactccatgctactgatggtcaattaaggaaaatgaacactgagctgtaaactttaaaaaattaccatccatgcatgagagatcgagattcatgatgcttctgcaatttacctgatcaagctgcaatttaataaattgtatatgcggctgaggcaataatattatgaaagcgtagtaaatatatgaatttcaatcatattatgcaactttgactttgatatactaagtgactac

SEQ ID NO: 67035 - DNA, 2904 bp, Zea mays
  Clone ID: MRT4577_161134C.1
gctttctctggagcagaaatcaaagaccaactgttacgcatgaagctgcaagacactgcagaggagattgctaaaaggcttggacaatgccctttggcagcaaaagttcttggttcccgaatgtgcaggagaaaggatattgctgagtggaaagctgctctaaagcttggagatttaagtgatcccttcacatctttgttatggagctacgaaaagttagatccatgtctgcaaaggtgcttcttgtattgcagcttgtttccaaaaggtcacggatatagacctgaagagttggttcacctctgggtggcagaaggatttattggttcatgcaatttgagtaggagaacgttagaagaggttgggatggattacttcaatgatatggtctctgtatctttcttccaaagatgctgtggaacttgaagaagttgcgtgtattgtctttgtcatttcacaacagcaacaagttacctaaatctgttggtgagctgaagcaccttcggtatttggacctcaacagaacatcagtgtttgaattgcctagatcattatgtgctctttggcacttacaactacttcagctaaacggcatggtggagaggttgcctaacaaagtttgcaatttaagtaagttacggtatctgcgagggtataaggaccaaattcccaacattggcaagcttacttctttacaacagatatatgacttttctgtgcaaaagaagcaaggatatgagttgcgacagctaaaggacttgaatgagcttggcggcagtttacatgtacaaaatcttgagaatgtcattggaaaggatgaagccttagcgtcgaagctatatctaaaaagtcgccttaaagagttgatacttgagtggagttctgagaatggcatggatgcaatgaatattctgcatttggatgttctagagggtctgcgaccgccaccccaactgagtaagctcacaatcgaaggttacagatctgatacatatcctgggtggttactagagcgatcctattttgagaatttggaaagttttgagcttagtaattgcagtttgctagaaggcctaccaccagatacagagctcgttcggaattgctctaggttgcgtataaacattgttccaaatttgaaggaactatctaatcttccagtaggccttacagatttatcaattgattattgcccactgcttatgtttatcaccaacaatgagctaggacagcatgacttgagggaaaatataataatgaaggcagacgacctggcatctaagcttgcattgacgtgggaggtggattcaggaaaagttaggagagtactgtcgaaagactattcatctctgaagcaattgatgacattgatgatggatgatgatatatcaaagcatcttcaaattattgaaagtggtctggaagaaagagaagataaagtatggatgaaagaaaacatcatcaaggcatggctcttttgccatgagcagaggataagattcatttatggaaggaccatggacatgccattggttctaccgtcaagactctgtgaactttctctttcttcatgcagtattacagatgaagctttagctatttgccttggtggcctcacttcactgagcaatttaaaattgaaatataatatggcattaactacacttccatcagaaaaggtgtttgagcatttgacaaagcttgacacgttggttgtaacaggttgtttgtgtctcaaatcaatggggggcttacgtgctgctccatctctttcctttttttactgttcggattgtccttttttagagctagcacgtggagcagaactaatgccgttgaaccttgatggagacctccacatccgtggctgcattcttgcagctgattcgttcattaatggcttgccacatctgaaacatctttcctttgatgtctgcagaagctccccatccttatcgattggccacctgacctcccttgaatcattacgtctaaatggtctccctgatctttactctgttgaaggcttgtctgccctgcaccttaagtacctaactctacaagatgttgcaaacctcactgtcaagtgcatctcacagtttcgtgtccaggaatcgctcacggttagtacctccgtattgctcaaccacatgctcatggctgaaggatttacagtcccaccgaatcttgatctttcatattgcaaagaaccgtcggtttcatttgaagagcctgcaaatctctcatctgtcaagtgcctgggattttggtattgcaaaacggagtccctaccaagaaatctaaaatccctctcaagtctggagagtctttctatagggtgttgccccaacatagcatctttaccagatatgccgtcctccctccagcgcataagtatagtaaattgccccgtcttgaagaagaactgccaagaacctgatggggaaagctggccaaagatttcgcaccttcgccggacgcacatcaactgctaataccaaacttgcttctttagacttgccacttgaaataaatgagaaggcacctcgatgtcaccccaacgcgacgctctctcctcttgaagctccagaattcaggatcaagtcagaagcgaatgggtcagctaatgctgttgtccccgcggttccctgttttttccgcttgcatttgctccgctatttcactttttatatcattccttgattgtgaacaattgccaatgtgtatttctccgacagaatgaagtaactaactgtggctatggcttttacttttcatgtggcaattagtcctacgtgaggctaattagaatatggaatgtctcatacctttactatctttctttgaagaaagtaagaatattggccaagacatgtttctaaattaaatttgggcttccgtccc

SEQ ID NO: 67036 - DNA, 510 bp, Zea mays
  Clone ID: MRT4577_161135C.1
gccggccgggccgggagcgaccatcactctccatgacgagattcctctcatcatcactacaccacgacctccctgccgaggtccctgcctctccgatgatgatgctgtctcagagctcaaaaaccggggacaccgacgtgcctccgccagatgatacacgcaccggagaggagttccgggcgccgcttcttcaacaccgggcccaaaaccactaacgctgactgccatggcgatggaacgaggccacggatctaaacaacaaaatgcgccgcacgcagaggattcgcgatgacacggacctgatgtcctcatacatgagagagtgatcccaccctgcgctctcaaagatttagcgacatgaatcttctcgttgtaaagagaggaagagataataagatgctgaggagagatcgtagcccttggatcggcctcttcttgcaatatggaatctttgaaaaaggcacgcctgctgcgatttgggccgaacgcaaatgtcatgcatgctatctc

SEQ ID NO: 67037 - DNA, 530 bp, Zea mays
  Clone ID: MRT4577_161136C.1
caccaaaaaaaaaaaaaaaaaaaaaaaaaaaaaaaaaaaaaaaaaaaaaaaaaaaaaaaaaaaaaaaaaaaaaaaaaaacccttgttggcaaagggggcaaaaaaatttaatgaattgaaaaaaaaaaaaaaaaatttccccttaatttgacccccaaaggactttttttttaacaaacccccctttttttccggttccttgacccggttaattaaaccccatataccaaaagcttccttgggtcccttaaaaaatgcattatttaaaaaaaacctaaaaaaaagaaacccccgtttttttcggccggccaattaatatttaaaaaatttgggtttccggaaagggccccaaccaacaggataaaattttatgtgccaaaaacaatccttttttttgcagaaacaaccaggaggggggcccccaatttttttttttttttcccccggtaaaaaaaagggggccaaaaaaattttcactttggggcgtggggggaaggaaaccatccggaacggttcccccggggaagggg

SEQ ID NO: 67038 - DNA, 1509 bp, Zea mays
  unsure (1)..(1509): unsure at all n locations
  Clone ID: MRT4577_161137C.1
cattgggacctcgaggcggcggaatattattactctctacacttacattactttggttaaaccacatggtggagaatttgcctgacaaactatgcaatttaagaaagctacgacatctaggagcgtactcatcgtacactcatgatttcgtgaatgaaaagcctatttgccaaattctgaatataggtaagttaacgtcgctacaacacatttatgtcttttctgtacagaagaagaaggttatgagttgcgacagttgaaggacttgaatgagcttggtggcagtttaagagtgaaaaatcttgagaatgtcattggaaaggatgaagccgtagagtcgaagctatatctgaaaagtcgccttaaagagttggcacttgagtggagttccgagaatggaatggatgcaatggatattctagaaggtctgagaccgccaccccaactgagtaagctcacaatcgaaggttacagatctgatacatatcctgggtggttactagagcgatcctattttgagaatttggaaagttttgagcttagtaattgcagtttgctagaaggcctaccaccagatacagagctccttcggaattgctctaggttgcgtataaactctgttccaaatttgaaggaactatctaatcttccagtaggccttacagatttatcaattgattgttgcccactgcttatgtttatcaccaacaatgagctaggacagcatgatttgagggaaaatataataatgaaggcagacgacctggcatctaaacttgcatgnaatgtgggaggtggattcaggagttattanggagagtactgtcgaaagactattcatctctgaagcagttgatgacattgatgatggatgatgagatatcaaagcatcttcaaatttattgaaagntggcctagaggaaagtgagatataatattggagaaagaaacatcatcaaggcatggcttttttgccatgagcagaggataagagtcatttatggaaggaccatggagctgccactggttctaccatttggacttgttagtattgttctttcttcatgcagtattacagatgaagctttagctatttgccttggtggcctcacttcattgacaacgttaagactggaatataatatggcattaagtgcacttccgtcagaagaggtgtttgagcatttgacaaagcttgacttgttggatgtaagaggttgttggtgtctcagatcactggggggctcacatgctgctccatctctttccagactttattgtattgattgcccttctttagatctggcaggtgcagtagaatctatgtcattcaaccttgctggagacctctacatatgtggctgcattctggcagccgattcgttcattaatggcttgccacacctgaaatctctttccattgcatgttgcagaagcttcccgtccttatcgattggccacctgacctcccttgaatcattatctctacttcgtctccccgatctgtgc

SEQ ID NO: 67039 - DNA, 1210 bp, Zea mays
  Clone ID: MRT4577_161138C.1
attcatttgaaaaacatggatgatactgagtttttggctctttttaaacaccatgctttctctggagcagaaatcaaagaccaactattacgcacgaagctggaagacactgcagtggagattgctaaaaggcttggacaatgtcctttgccagcaaaagttctgggttcccaattgtgcaggaaaaaggatattgctgaatggaaagctgctctaaagcttggaaatttaagtgatcccttcacatctctgttatggagttacgaaaagttagatccacgtctgcaaaggtgcttcttgtattgcagcttgtttccaaaaggtcatagatatggacctgaagagttggttcacctctgggtggcagaaggatttgttggttcatgcaatttgagtaggagaacgttggaagaggttgggatggattacttcaatgatatggtctctgtatctttcttccaatggtacggttggtactatgtcatgcatgatatccttcatgattttgcagagtcactctctagagaagactgctttagattagaagatgataatgtgacagagataccatgcactgttcgacatctatctgttcgtgttgaaagtatgcaaaagcataaggaaattatctacaagctacatcatttacgcactgttatctgcatcgattcactaatggataatgcaagtattatttttgatcagatgctgtggaacttgaagaagttgcgtgtattgtctttgtcatttcacaacagcaacaagttacctaaatctgttggtgagctgaagcaccttcggtatttggacctcaacagaacatcagtgtttgaattgcctagatcattatgtgctctttggcacttacaactacttcagctaaacggcatggtggagaggttgcctaacaaagtttgcaatttaagtaagttacggtatctgcgagggtataaggaccaaattcccaacattggcaagcttacttctttacaacagatatatgacttttctgtgcaaaagaagcaaggatatgagttgcgacagctaaaggacttgaatgagcttggcggcagtttacatgtacaaaatcttgagaatgtcattggaaaggatgaagccttagcgtcgaagctatatctaaaaagtcgccttaagagttgatacttgagtggagttctgagaatggcatggatgcaatgaatattctgca

SEQ ID NO: 67040 - DNA, 163 bp, Zea mays
  Clone ID: MRT4577_161139C.1
atattgggtttctttttttaaacttaacctttaacctaatgggtcgggggaaaacaataatgccatgccaaaaaaatgggacatacagttttataattatccctgaacaaaaggggctgaccaaacaaggggggggtacgttgccaacacctttagcctacga

SEQ ID NO: 67041 - DNA, 360 bp, Zea mays
  Clone ID: MRT4577_16113C.1
aagacagagggattcctccggggtgcataacaggttaaaacaacccaatgggttgttcatcggatgtataaacatacagtggatgaaaagaaaaaggtcgcgcacattattgattgtgaattactagtaccgcaagggtaagcgtcgggactaaaatcttgaagttgattaataccgggtcgaagtgcatccttaaaactgtacataggttggagggggaagtttgtggcacatcctattagggacaaatctggtcgggtgatactggctcaatggggaagggaacgaaaagttccacgcatgatgcaagctcccggctatgctcataggggaactcttgcaggttgactacatccttgg

SEQ ID NO: 67042 - DNA, 256 bp, Zea mays
  Clone ID: MRT4577_161140C.1
cattgcacaagttttcttcctcctcgccatcatcacgagactgcgaaaatttgccgacctgcaggactcagttctcttcactgctgttctggcagacgagcaggctaacagtaacgcctctagggggagggcccacggtcacattacgaacagtgagaccaaaacttcagcacttcacctaggcggctagcgcacaatacacattatctggcgattcccccggagttattcgagatgtccacggacggaccggtcg

SEQ ID NO: 67043 - DNA, 375 bp, Zea mays
  Clone ID: MRT4577_161141C.1
aaaaattcccttaccaaaacaaatggtaggggggaaaactgaaaatttgcaatcatggggcgctagaatgggcattgtacaaagggggttatactcgtacatttgaacaaacagactttgtttccctagctacagatgagcattagtttatttaccggctgttcctactttagccctcctatgtactcctgccggagcgggagcggtgaaccccaaaccccaggttttgtgttaagaccatcaacaatggacacaggggaaccaaattcggcgggttactaacccactggttctacaggggatgttgcattcccttgggggagattgaagaaccaaccgtttaaccaaaaaaaaggctttgggtgcctggaaaat

SEQ ID NO: 67044 - DNA, 205 bp, Zea mays
  unsure (1)..(205): unsure at all n locations
  Clone ID: MRT4577_161142C.1
atccgaattcgcggccgcgtcgacctgagaccggcccagactcctacggcaggcagagggggaattttccgcatgggcgaaagcctgacggagcaatgccgcgtggaggtggaaggcctacggntcgtcaacttcttttctcgcagaagaaacaatgacggtatctgaggaataagcatcgcctaactctgtgccagcagccgcg

SEQ ID NO: 67045 - DNA, 2356 bp, Zea mays
  Clone ID: MRT4577_161143C.1
cctgccgggaaaaaaaaaaaaaaaaaaaaaaaaaaaaaaaaaaaaaaaaaaaaaaaaaaaaaatcccggccggccggcagccgaaaactcacatggtgggtggagatgggacctggcggacacacatgagccgcatcgcagtcacccccccgacttttccgctttccttccaccagcccctcatttgtcgtaaacatgttctcggcgccaaccggccgatccatcctcgtcgtaagtctgcgctttcatcccttattgttccagaaacaaacaaaatctacacgtttccaagacaccaggacggagacatcgaggaggcggcggagacgccgccgcgtccttccgcttctgagccgtataacaacaaacccctcggccccgtcccctctgtccatcgatcacgtcgtgcctgtgccgcaggccgcagccaggcatctccggcgaatctggtttgaggcgcggagagaggatatttgcatgcgggactgagcaatcaaaacaatggcagtagcgcccatggactgcgctgctggttcgattagtctaggccacaaggttttgggccgtttcggagtacccaacagcagtagattgcgatgggtgggatatgacaggaaaccaaggacagatcagttgattgctagagccgtatccgtggatcggacacagctagacttttcgaatccggactggaagaagcagtttcaagaggatttcgataagcgcttcagcttgccacacttgacagatgtaattgatgtggaaccgaggccaactactttttctctcaagagcagagcccctcttgagaacgcgaatggtaccatgcaaggatcatggaacggctatgtcaatgatgatgacagagcacttttgaaggttattaagtttgcctcaccaacttctgctggagctgactgcattgaccctgattgtagctgggttgaacaatgggtgcaccgtgctggtccacgcaaacaaatatattttgagcctcaatatgtgaaggctgggattgtgtcgtgtggtgggctctgcccaggtctcaatgatgtcattcggcagattgtgcttacacttgaaaaatatggggtgaaaaacattgttgggatacagcatggattccgtggattttttgaggatcacttatcagaagtgccactttctaggcatgtagtccaaaatatcaatcttgctggtggtagcttcttaggagtctctcgcggtggtgcaaacatttcagacattgttgacagtattcaggctaggaggcttgatatgctatttgtgcttggtggaaatggaacacatgctggagctaatgctatacatgatgagtgccgcaagagaaaactgcaagtatcgattgtatgtgtccccaaaactattgacaatgacatattactgatggacaagacctttggatttgatactgcagtggaagctgcacaaagagctatcaactctgcatacattgaggcacattctgcatttcatggcattggactggtcaagctgatgggaagaagcagcggcttcatcacaatgcatgcctccctgtcaagtggccaagtagatatctgtccgtgggctgaggtaccattcactgttgatggaccgaatggagttcttcgacatctcgaacacctgatagagaccaagggatttgctctggtttgcgttgctgaaggagcaggacaggaatactttcaaaagtcaaatgcaactgatgcatcagggaacatggttcttagtgacattggtgtgcaccttcagcagaagatcaagtcccattttaaggacataggagtccattctgatgtcaagtatattgatccaacatacatgctccgcgctgtgcgagccaatgcatccgatgccatcctgtgcaccgtgcttggtcagaatgctgttcatggtgcctttgcgggttttagcggcatcacaaccggggtgtgcaacacacacaatgtgtacttgccgataccggaagtgatcaaatccacgaggtttattgatccaaacagtcggatgtggcaccggtgcctgacctcaaccgggcaaccagacttccattgatcaattattaaggaagcttgtagtagcatccgagtgtaaaggaaggttgtgtatagtatagcgaaagggacctaattgctttgtcaggccttgtctagcagcatatggttctgcaaaacattgttttgcattgtagataggctaagtttgaaataagaggtgagataggcaggatagccttagtatggcaaaatgatcatcttgaaggattcatgagtgaatgatagctaataaaatatttacgcttgatcaaaaaaaaaaaaaaaaaaggccccta

SEQ ID NO: 67046 - DNA, 679 bp, Zea mays
  Clone ID: MRT4577_161144C.1
gtacgcctgcaggttctcggtccggaattcccgggtcgacccacgcgtccggccattttgtgttggtgactgtggccggctaggaggaggtggcaccgagtttccttgggagggcaacgcgtcggtcgcgtctcccctccccctttcctcctttttgctcccagtcttggacttggtagttgcatgcattggctcccatttgaactaacagttctgaaggaggtggtggcgggcggaggtgatgcctgggagccctcccttgacagcccgggccgagaagagtctctgcaggaggtatcacccagacgggcagatcatgctggcagcaacaggggtggctgagaagtgaaaggagccagctactgaggaggggccccagcagcccctaaaactcctatcaggacatggagtatgaaagacgaggtggtcgtggtgacaggactggccgctatggagccactgatcgttcacaggatgatagtggagagaaccgcagccgggaccatgattatagagacatggactaccgctcatacccacgagagtatggcagtcaggagggcaagcatgagtatgacgactcatctgaagagcaaagtgcagagatccgtggacagctgcagtcccatggtgtccaagcacgggaggtccggctgatgcggaacaaatcctcaggtca

SEQ ID NO: 67047 - DNA, 392 bp, Zea mays
  Clone ID: MRT4577_161145C.1
aaaaacaaaaaacccattaggggtggaataccaaatttttttttttgaaataacccccccccgggccaaataaggggggggcgaatttttaaaaggtgcttttttccccagggtttttttttaaaccctttttcagggggggcctttggggaaaaatttaaaaatttttttttttttttcccaccttctaaaatgttttttcaaggggcgagtttgggaacgctttttttttgccttaagaagacccacatttggggccgccttttttcctctaataaccaggggcctgtttttggattttttcccaaaccctccccaggtttgttttgtttttacgccccccctgttttttttttttttgggggcaaatcttccccttttttttttggggg

SEQ ID NO: 67048 - DNA, 304 bp, Zea mays
  Clone ID: MRT4577_161146C.1
ggggtggggggttttttttttgttttttttcacaaatccacacctaaaccgttaaattaaactgggggcgatccatgataaactaagacccccccttagatcaccaccattttattcaaatccaaaggaacggacccagggggggttgacaattacggggggggggcggccgaacagaccaaatcagagagatttaggagagctgtccgcagtcagcgaccttgaccaccttggaggtggagccgttgcgggtgcccaccttttcgatggccttgacaacgtccatgcccttgacaacctggcc

SEQ ID NO: 67049 - DNA, 285 bp, Zea mays
  Clone ID: MRT4577_161147C.1
cggacggtggggtgaagatgggtgtaggccagacgatacgtggagtagttagaatattcacagtggctgtcactattgtggtcgtggctgttccagaaggactaacgttagctgtcacactgacgcttgctttctcaatgcgcaaaatgatgaaggacaaggctctggtcaggaggctttctgcatgtgaaacgatgggttctgccacaacaatctgcagtgacaagactggcaccttaactttaaatcagatgactgttgttgaggcatattttggtggaaaga

SEQ ID NO: 67050 - DNA, 725 bp, Zea mays
  Clone ID: MRT4577_161148C.1
gccgtccggctcttgcagatactgagctggcacacctgtgcctacgacctatgtcgtcgtccagcacgcagaacgtcgcggagcatcacatccacgtagcacttacgcaccactcctgttcatacgagcatggcgccgtccagcaagcagaacgctgtgcaggccgccgtctcgatcgccctgctcctcacttcgcatctcgcagctggagcagaagaagcagaagcggaaggaatagcgccgttgaacacatgcgaaacgccgatcgcctgggctccctgcttcgtcaagacctgggtctgcgttcccctctgcgttggactgcgccacaccctgctataatcggaggcgccatctgcgtgtgcaccaagcagtgtcttttgcatgtggaggcggagcaaggtgcactggcaccgtcgcagccgcccgtcgccgagcctccgcgggggatgcgtggagttcggatgctcagctgctgagcgtctgcattgcttggtagcgcaaagctgcttgcttgggagtgtgttacacaagcgttttttgccaaaaaaaaaagatagaggaaagctgctggctcgagaaaatgtctattaagcgtctttttatataaaaaaaaagatatagataactcgctttatcaaaataaaaaaaaaaaaaaaaaaaaaaaataaaaaaaaaaaaaaaaaaaaaaaataaaggaaaaaaaaaaaaaaaaaaggccccta

SEQ ID NO: 67051 - DNA, 273 bp, Zea mays
  unsure (1)..(273): unsure at all n locations
  Clone ID: MRT4577_161149C.1
ctcttgggctgaagcagaccaagttccccccaggcaccccagttgtgggggagcctgtattttttttaacaacatccccattccccacctggtcctcccccttcccatgctgccaacttctaaccgcaatagtgactctgtgcttgtctgtttagtnctgngtataaatggaatgttgtggagatgacccctcctgtgccggctggttcctctcccttgttccctggtcacggctactcatggaaagcaggaccagtgaggcgactttcggat

SEQ ID NO: 67052 - DNA, 257 bp, Zea mays
  unsure (1)..(257): unsure at all n locations
  Clone ID: MRT4577_16114C.1
gggacaactacaaacgcgacgagagagtggattatctcctgatcgacgaccgtaccggtgaagatgagggtctcatcgctgttcagcgcccaaagtttccttgcggagaatatattcagcatcccttggcaccactgggcacgaagcctcacgttgagcagggtacagttcatgctcagattgtaattttcagcggagattggtcttcgggaatcttgacggagcactgnctacagaatgcatattcggagatcatc

SEQ ID NO: 67053 - DNA, 276 bp, Zea mays
  Clone ID: MRT4577_161150C.1
gcattacaaaccaagacaccttctggcagatggcacaataattctagccaagatggggaacaaccatcttagcggaaaaatgaggcaacctgtttcttacgccgaaattcttgacactccccttgccggtgacttatgggcgaaacggggccctgaatctaagcctgaactgcggaagctcgagcttcctttaaaccttctggatcgggagagcctcgttggccgggactcaaacaatgacgaaggcaagcgcgggcacggacaggcccccaaaga

SEQ ID NO: 67054 - DNA, 698 bp, Zea mays
  Clone ID: MRT4577_161151C.1
ggcaagtgggcggcgccgtccacgccgtcgtccacgaccacgaggcggcgctgcggttcaagggcaccaaggccaagctcaacttcccggagcgcgtgcagggccgaaccgacctcggcttcgtcgtcacccgcggcatcccggaccaccaccggcacccgcgggcggcggcggtgaacctggcagtgcatggccgtacggtggggagcaccacaggaataaaaaggacgcgtgatcgtccagctggccggccgatcgaggatatggatatgcatgcatgcaacttgcagtgcgaggggatcagatcaagaagtagctgtgcggaggaatggaatatgcatgcacgcatgcaatatgggcggggtaagtggcagcgacgatttttggtccaagcataaccatttcttggccctttagtttccacgtcgatttcttcttctttttttttctcacgagatgatcttcttttgttcatttcttggaggatcttgatcactttggttaattagagagctagctcgctatagctgcttgcttaggtgcttttactactaccttccttttgtataatggcctgctctaggtgctcatatctttaatttgttcaagtgtcaactgagattaactacctgtgtgcaaactaatccaaagcaaagaagagtggaaccttatgtatatggggcatgttctccctctct

SEQ ID NO: 67055 - DNA, 723 bp, Zea mays
  unsure (1)..(723): unsure at all n locations
  Clone ID: MRT4577_161152C.1
tcccatcgactagtatagttgttactgtattggtatcttgtgttatggtaggtgtctcatcggacatgctagtgagtatattgctttgaggtgcatagttttagacctctatgagtgctcgttcgatgtcgtatcatgtgcctcagagaacatgtccagtgagtattcaacctcttacactcatctgcatccttctctatatgtgttatataggtgcctcactgaacacgtccagtgaggtacaacctatcacactcatctgcaatgctctctaggtgccctgtccagtgcaccaacccgatgcatatgaggcatgccatttctctctttatactaaacatgacaagcttgtgtttaacgcaaaccaaacatgtttggtgtaattgcagcacaaccaactcatccatttcaaacanctttttgttttattaaagacatataccatgagtatacaagaagaacatagcaaacaagatcatgacatgtgggtcgatgggatcgattgtgatgcccgaggtttcgagccacatgttagcgagatattctacatgcgaggaagctctatagatgtaaagatggtanaagatcctattagattagaatataaaattgatatccatgtaaatatggtaaaatcaagatgataagggtaatctacatgtaaagatagagataagcgtcttggtatttaaggatatacttggataggggtgatcattatcc

SEQ ID NO: 67056 - DNA, 413 bp, Zea mays
  unsure (1)..(413): unsure at all n locations
  Clone ID: MRT4577_161153C.1
ctcgaggccggccgggcttccagttcctcacattggcctcctacggnagtggtcttcctcgcccgctaacccgacagcgtcgatcatgtctccttactgcagcggagaccaggaccagctcgtctcgactgctgactacatcgccacctgcggcaagggaggacctgctgctaactcgaccgctaggcaccattgggaaggtactttccagtatcgatgccgatacgaccgaggagaacatccgtggcctccgtaagctccgatgctggtgacctgctgctctcctttacatcagtgctagtgatgccgcttgcaggagaccctgtaccagaagagtaaggatgtgacgtccttgtgatgatgacctcaaggttggaggctgcctagcgggtatcttaggtgatcaaggcgac

SEQ ID NO: 67057 - DNA, 494 bp, Zea mays
  Clone ID: MRT4577_161154C.1
gatagaaggtatagtcacctgtctatctatctacccagagacagagaggaaagctagcttgttactatgcactgcgggagcaagaatgcaccacgcggtgtgttggtgctgctgcttctccacctgtcgttagctccgacaaaggggacagaccacctcctgcagatggatacctccaccgcggatggcctgtacatcatcgcgagggagcttggccatgcagcgacacggatcctctgtggtgaaacctgtgtcttcctagcatgctatacggcagccatgggatgccaatggattggacaaatctgcatgatcgtgatatcatggactatcgctatttgcatgttgcgtggggataatgactaggacggtacagcgctgatcaacttattgcctgtgtatggtgatataattaggaaagtataataataacggataactgttgatgtgtgccgacatgcctcatgactactgagatagctcatcctgacaaa

SEQ ID NO: 67058 - DNA, 345 bp, Zea mays
  Clone ID: MRT4577_161155C.1
ctacacaaaggtgggaggtgatgcgagtggacggtcttacaaacgatgaattgaaagggcatcgccagatttcatctggcgtttatccaggtagtaacactgcaccgcggcggctgtttccgtgagccagtcgaacacgctggcggtgggggtcagggcttctcatgagagaaacgactggtcgcagaccgggtctatgggaggcccgctccatgtatacgaggcaggtatggccggcggtggcggcgactacagcagcagcatgcgactacgacgaaaacaacgacaatgtggaggattgctacatgactaaatgcgtgtgtggccgtctcatgctcctttttg

SEQ ID NO: 67059 - DNA, 314 bp, Zea mays
  Clone ID: MRT4577_161156C.1
cttttctttttcttgctgaatacagacgtgggagtgggaggctgcccatgaagacgagagaagggctgcaacgcgctaatggaatactcggggagctacctcgatgagctgagtctactagattatggctgactccgcttcttgccatcagtaatcgatgtttaagtaatagttaatgataggctgaccattgatccaaataccaattcctggaacacaaagctgcataacatgactgactacaaagtatatgaacttaaagattgcatcggagccatacataacttgcaacttaacaagaaaagtctcatcat

SEQ ID NO: 67060 - DNA, 782 bp, Zea mays
  Clone ID: MRT4577_161157C.1
actcctatgggcgattgggttcctcgaggccggccgggatcatagcactcgtcgatgcgcccggccggggcctcgaagacgcgcgcgacgccttcgtgcgcctggccgcggagcgcccattcgaaagcaccttgcgcctcttcgccgccgcgctctgccacgtgctgggccaccacgaggaggggggccagtggcttcacgattccgccgtgcccgacctctcccgcctcgaccacaagaatcagttcgcgcaggccgtccttgccgccacgatcggttccgcgccgcgcgccgtggtgggctcggaggagctggtcttggtcagcgcgcttggcctgctcgagaggtcgatgtggtccattttcacgcacggtgatctgccggcgaggcttcatgtgttggcgttcatggcattcctgcgggccgttgtggcgaggaagttacacagagatgatgccaccccaaactaactaggtgaattgtcttcagaactccattcaggttcaggtaaacgtgtctgaaaattccttggctaaggcggagtactaaagtgaagtggtgatcatttttcattagctgttatggaagttttgtgcagagatcctcaactaattgcatattgtccaaatttgacttttatcttggcgctgccattatacagaggtaatggtttggcagccaaggtgtgaatagcaatgctaaagctgtatgaaatgaactggtagaaacattacatgtttgggacatgcaactgcaaaaaaaaaaaaaaaaatttgcggccc

SEQ ID NO: 67061 - DNA, 539 bp, Zea mays
  unsure (1)..(539): unsure at all n locations
  Clone ID: MRT4577_161158C.1
gccggcgcggcgggccggngggccgcgcccgaccgggcnnncgcccccgcnccgagccccggcgcacggccggggcggcgggccnangcancgcagcaggagagggcgncganggccccggccggccccaganaaacccgcccgggggggaggcagcanaagaggcgccgaacnccggcccgggcccgcccggcggaccaaagacagcggggccggacaccacggaagagaaggaagacaaggaaggggccgaaaccaacnggcnggagccggggcaaggacgagancgagggcagccgagccgggacccgaaacgcaaggcgaggcgaanccggagggaggggggaaaggaagggaaaaaaagacannggcaacaacgagnnangggcgacanggaaaacagagnggaanngggaacncaaggagaggcncngagananggcccccggaacccggaaggccgaannaaaggagggggccaacaggngngagnggggcacgagngngggnngggagcagggggaccccaanaggaggag

SEQ ID NO: 67062 - DNA, 237 bp, Zea mays
  Clone ID: MRT4577_161159C.1
attcggctcgagcgcgaaccaaattttgattttaagcacatggacgatgatgaagggacgctttttaagaaggcaggcttgcaaacagaagggattgaacaggccgtggcgggtctaaatacgaacaaacaactgctcttgactgagtggcccaagaaatacagcggtaggaacaggtatctaaactaacaaccactgtgttacaaggagactaaacataacattttagagcttaaa

SEQ ID NO: 67063 - DNA, 280 bp, Zea mays
  Clone ID: MRT4577_16115C.1
atggtaatgatgcaactggatggttctccaacaaaagtaggtctggtgtttaggcacagataatagctgacctaaacgaagacaggagctactgtctctcaggcacgagagcaggatctagggacgaattgttcgtgaccgcccaggtgcataacagagcgggttgtatttgaacctctactgtgccggtggttattttaccaccccacgctgataacatatttcccacagggtgtaaccaatgttctgtgacggctcgtccacggatactccaaacgct

SEQ ID NO: 67064 - DNA, 704 bp, Zea mays
  Clone ID: MRT4577_161160C.1
gggtacctcgaagccggccgggaaaattttcttccccacccccagccgccacacctcttctcttcctcctctgccattttccagccgcaggctccacgcacgccagagcttggctccttgccatggcactcggcacccatgcagcagggtccttcttccccaggccggtgagcaggagcttttccctctggtcaccgagctccctcccacggctggcctcccttctcccctcggctccttcctgcaggggcgagttccatctctgcagcagccgagcacctccacagccatggcgcccttccccagcgacgcccctctgcagctcgtccctctcctcccctctgtttttcctgtgcgtgcgcagaagctttcttccccgttgcgcgcagggcagccgacgcccctgcccttcttcttccatgggcgccccctcctccttgccatctatggacaaaaaatcttttcgccctcctccctgttctctgctccacagggcgagctcgggcgtgctcatggcgctccccctctcccagcagtcgcttcttcctccctgcgctcagccctgcgcactcggcgtgcttgctacccccgagcagcagctccgtgcgaattgcccccacagcaaccttcccctcaatccccctgccaacgctcttggtgcagcgccgggaacgcagcaacagccgggcgctgcacccctgcgc

SEQ ID NO: 67065 - DNA, 176 bp, Zea mays
  unsure (1)..(176): unsure at all n locations
  Clone ID: MRT4577_161161C.1
gacccacgcgnccgggcgcctgtacgnggaggaccccggcgtgctgcccgnggggagcttcccgaactacctgacgctgtaccagacctccagcgccggcgactacgaccagtacggctgcctgaagcgcgtcaacgcgcttgtcggcgcaacacaactcactgcttcaggccaag

SEQ ID NO: 67066 - DNA, 709 bp, Zea mays
  Clone ID: MRT4577_161162C.1
tcgacttctgttgcggcagacatgcatgagttggagaggaaactgtgcatcgttgggctacgttgcattcaaatgaagccgcaggatcgcccgaccatgagcgaggttatagagatgctcgagtgtggcactcatggcctgggcctgcaaatgccttctaggccattcttctgtgatgatgatgatcctaatatgcctgcagcagattcttaccatttctcatcggagcttactgcaatatctgaggaagatggttgaagaaataatacatgtctttatgcattcagatgaagccacatgatcgtccaatgatgagtcaagtcgtagggatgcttcagtgatcatatggttcatacagattcttaccatttctcctcagacctgaatgcaactaaggaggaagatgtctaaaatatttacatatctttgtgctctggtagttgataagatgagcagagcattagcttgtgaaacctcaggtagcccgttatgtgtatatcctattcgttttcatgatagtccaataagttttatggtgcatagttttctgattcctgtaaatgtttatgagaaaacatgaatagcttaagatggaaaaaaaagaaaaaaaaaataaacaactaaaacaaagaaaaaaaaaaaaaaaaaaagacaacaataaaaaaaggaaaaaaataaaaagaaaccaaaaaaaaaaaacacaagaatc

SEQ ID NO: 67067 - DNA, 2538 bp, Zea mays
  Clone ID: MRT4577_161163C.1
atggtgccgaatcccaagccatcagtacaaactcggtttgtactggacgtgatggcaacgaaggaggaggaagcagatcgctgggagaagatgatggcgaagatggatcgactggcggagaagcaagcagcagaggagcacatcctgatcgcgcagcagatggagaggacggagaaggtggttgcggaattgcggttggagcagatggcccacgatctcgagtctgctgatttgttgggggaaaacaggtttcggggaggagtaccgcgacctgtgccaccagaaccgcagcaaaggtgtgtcgaggagatggagttaccaacaactgcagtgcctcgtcaaccgtttcctaggtttgatggaggagccacggatctgtttattaaaggtttaaagcacaaattacaagctccggtgcagtctcatgtgccgtcatcagtgggaagggttgtgttccttgctaggttgcagcaaagaattatggataagcaacgacaaaagtcattgaagggggccagtcctagcaagtttgtggcaactggatcaagaacggaggtcaggggaggtaccggtatggctgagctttctaaagaacgtttggtgaaggaatatcgacgtcagaacgttttggacttgggagcttatgatatgattttgggttttgattggcttcaaagtcatagtcccatgaattttgattggaagggaaggattgttagttttgtggacagggggcagttagtacagttggtaggggattcggatgatgttcgagaggttaaggaggtgtccaagatgcaggtggagaagtggctgaagggaaatgaaatttgggttttggcagtgttagaggaggttcaggtggctgacaatccggttgattgcaaggaattacaagggttgttggaggaatttaaggatgtttttgagttgcccatagctttacctccatcttgtcttttgatcaccatattcctcttgtaccagattcgcatgggggaatccgaggaattcaagacagtgtttaaaacacaccagggtcattatcaatttcgggtaatgccgtttgggcttactaacgccccggctacatttcagtgtgcaatgaatatggtgttggccccatatcttcgcaaatttgttatggtgtttatagacgatattctggtgtacagtcccagttggcagtcgcatttggagcatttacgactggtgtttgctgctttacgtagtcatcggttctttctcaagcacaagaagtgtgtttttggtcgcacagaactgacatatctgggtcatattatttcatctaacgaggtggcaacaggtcctcagaagacaactgctatggtaaattggcctcgacccacaactattattcagctgagggggtttttaggcttaactggttattaccgaaggtttgtgcaaggttatgggggtatagttcggccattaactcgactgctgaaaaaagggatgttttggtggacagaagaggcagttgtggcttttgagcgtcttaaacaggcgatggtaaccactccagtcttggccttgccagattttatgttaccgtttgcggtggagaccgatgcttgcgatgacggtgttggggcgtttcgggtggtgtataagcagggtaaggaaaacaaggtggctgatgcgctttctcgtgttggatattgtatggctatttcagtggtcagtgttgttcagctagtttggttgcaggaggtgttaaactcgtatgtcactgatggggaggcacaaaccttgttagctcagctgtcagtgcacagtctagatgaacatggtttctcgctatctcaagtggtgatccgaaaggagcaccgtatatggttgggcaacaactctgctttgcgtaccaagatcgtggccaaaggggagtggattcatccagcagggctgcttcagccgttgccagtaccacaaggagcttggagggatattacgatggattttatcgagaagttaccgaaatcatatgggtatgacacaattttagtggtggtggatcggttttccaaatatgcacattttttggctctcaagcactcgtttactgcggctcaggttgctcagttgttactggacaatgtggtcaaacttcatggcttactacagtctattgccttgtacggctatgatccaccatttgttgttgcccctcttattccatctgatactgataattcagtggcccaggtgttggttgagcgtgctcactttactgagatgttgaaagaccagttggctgttgctcagaacaggatgaaactcaaagcggatcgattgcggtctgagcgcaagtatgaactggttccattggagatagtcgatcgtcggctggtcaagaagggtaatcgtgcaattcctcatgtgctgatgccattgcttggggacaagccaattctgcagggggcagatgttacacataaagcagacgccagcactgatgaaggtgtggagatggcaagggaggaagacgttcaggagctggcggatgtggaatag

SEQ ID NO: 67068 - DNA, 591 bp, Zea mays
  Clone ID: MRT4577_161164C.1
gccggccgggtcggggtagcagggtatgcattgcgtctgagttcctgcgtggcggtggtaatgctcccatggctcttctctacgcgtgagctacctagactaaagcgatatccggaggaacaaagatgcccagctgcgaaggaaactgcggccgcgagagtgacatgcaactgcgaaagcgatggcggagggggctacatgaacccggacatggttgaggaggtgaccaccaccaccaccatcatgtgtgttgcaccatccaagggcgggctcgaggcgcccgacggagttgacaactgcgggcgcaagagcggctgcgacagctgcacctgcgacccctgcacctgcaagagatgatgaccgagtgtatcatgcaggacgagacgatggaggaagtagatcgtgaaggacacccttcatgatctctagctagatcaagctctgagagaatgttgtaccagcgccgtctgtgtctgccgccatgagtagctagctagctagcgtcggtaaacgaataattgacatgatcttcttcctccactgaccctgacaatgttgagtcgtgtgtcccgagcgtccgcatgcacagca

SEQ ID NO: 67069 - DNA, 579 bp, Zea mays
  Clone ID: MRT4577_161165C.1
atggaggaagggatacgagcggatagtggggaaaaggagcgctggagtgcggaggagactgagaactgctccaccgcgagcttaagcaggcaggcacggcgcggtcaaggcgtgcacgtgtcacacccggttttggaaggcaaaccgaatgcgaaccatttattacccaaatgtactccctccaagaggaaataccagagatcagaatcatcattaactatcatcataaaagtatccaaagttcttctaatcaaagaggatcccaaggctgctcttaaccgaagggtgactaacaaaaacaaatcgaaagaacctcggcaaccagcctcggcagagcaagtactatgcccggaccccattgacggccctacggtgaagctgactacacctcgagttcctctaattaatcagctaagggcgttccattccaccctcatggttgcactattatcccgggtggtcactcaacgaataggtccagaggtacggcggcatacgacctggcagatgactccatgggggctacgaggcctagaagcgcgacccaacaaacgagaccataggggctacaaggcctag

SEQ ID NO: 67070 - DNA, 281 bp, Zea mays
  unsure (1)..(281): unsure at all n locations
  Clone ID: MRT4577_161166C.1
tcctcttcctcgatcgatctcctctggatctggcagaggacgctggagcaaactattgcctcctgctctgctcctcacgtcaccatcgccgtctcagctcaactgtacgactccgtatatattataaccatcggttgtcatcaaaaaaaaaaaaaaaaaaaaaaaaaaaaaaaaaaaaaaaaaaagagagggaggggaaagaaaaaaaaagaggggggggggggtttngggggtccgggtttgggttcgggggcttggggggtgttggtttttttttgggg

SEQ ID NO: 67071 - DNA, 544 bp, Zea mays
  Clone ID: MRT4577_161167C.1
tccaccgcggtggcggccgccctttttttttttttttagaatttgggagctgtgtgtgattaagcaaaacaaggttactggacaaatatgcgtaactcaacattggaaatagaagcgcgcacagagagagagagagacgatggcagggcggtgtctgaaaactccacgcttacatgaactgcgctcaaatgaaacccaagcagtacgtacgcgcgtactcaaattacacacaacgacacacagagatatatagagagagagatggatgggcatgattatgcgccggtgagctcctcctccttgtgcgtctcgatgacgacgtcagaggtggggtaggcgtggcaggtgagcacccagccgtcggcgatctggccgtcgtcgaggtagctctggtcggactggtccacggagccggagacgaccttgccggcgcaggaggagcaggacggtggccattgttgtggagggtccggtcggggtggtgtggcggccggtgcagttagggagctagatggagagagtggggctccccggaccggccggc

SEQ ID NO: 67072 - DNA, 1440 bp, Zea mays
  Clone ID: MRT4577_161168C.1
ggccgcttttttttttttttttttcagaatttgggagctgtgtgtgattaagcaaaacaaggttactggacaaatatgcgtaactcaacattggaaatagaagcgcgcacagagagagagagagagacgatggcagggcggtgtctgaaaactccacgcttacatgaactgcgctcaaatgaaacccaagcagtacgtacgcgcgtactcaaattacacacaacgacacacagagatatatagagagagagatggatgggcatgattatgcgccggtgagctcctcctccttgtgcgtctcgatgacgacgtcagaggtggggtaggcgtggcaggtgagcacccagccgtcggcgatctggccgtcgtcgaggtagctctggtcggactggtccacggagccggagacgaccttgccggcgcaggaggagcaggaccccgcgcggcaggagtagggcaggtcgatgccgtcctcctcggcctggtccaggatgtacacgtcgtcgggcacctgcagctccacctccccctccggcgtgatcagcttcacgttgtaggtggcctgcgcgcgcagcctgcgcctgctgctggcgctacggcccatgatgcccaccttggccgcaggcagcgccacggcggtaggcgccggcgcggcgcggagggaggacgacgaaaagaagaaggccggcgcgcgggggctgcccaggacggtggccattgttgtggagggtccggtcggggtggtgtggcggccggtggcagttagggagctagatggagataaatggagaattagaattttagaaacaaaaaaaaatgtaccgacgacggctacgaatcaaggcgcgccgccggcagctaatgaatggtaaaacatactatggacgatcgggaatcgggaatccatccatccatccatccatgacggaatctagcttaatcgtccttgggagggtcggcgaagaaggagttgatggaggccatgatctcgggcttcttcccgcggacgaacttcctgaggccgtgcatagcgtacctctcgccctcgtcgtggttgtccaggacgccggccgccctcttctccttggtcacccgcacctcggggttgcccgtgatgttgcgcacaagctggtacgagcagatgcccaaggccacggccatcggcacgaacagcgggtacacctgatccatggacgcgcgcgacaccgggatcggcaaatcccgtcagatccatccatccatccccgatgacccaattctccgatcgatagaaaccgaatgaacgatcagatgggaaacagcaacggcgtacgtacctcgggacggatccaccgcttggaccatgaggcgtatgcggaggaagccatcttcttcttcttctcctcctcttcctcaaccgccgcctgggtatacgcgtttctctcgcgcgcttcagatgag

SEQ ID NO: 67073 - DNA, 343 bp, Zea mays
  unsure (1)..(343): unsure at all n locations
  Clone ID: MRT4577_161169C.1
acagctattacgtatcatccacgccgacatctgctatcctccactacagccgcccccctttttttttttttataaaaagnanacctattttaggtgggtttttaaacaaggctgctttttccaattgttacaaaacctgattcacctattccttaactttggagctttattttaactcttccttaaaaacaaggaacgggctaaggtccttcatcactacataataatccttactcccacgatagctttacaagacagcatgtttactttttaggcatcaaaacaaaattcacattcttgccaacactaacataaaaccggctttaaatttgccttacctacc

SEQ ID NO: 67074 - DNA, 154 bp, Zea mays
  Clone ID: MRT4577_16116C.1
gagctcattaatctcggccgccctagttttctttcgggtgggttaataaaaaaccaacggcgttacatccccaaccatcaaacatacccttaacactttcaactattcttctatctccaacttccccaatcccctacataatcatactctatca

SEQ ID NO: 67075 - DNA, 1332 bp, Zea mays
  Clone ID: MRT4577_161170C.1
cctcgaggccggccgggattacctggacggggtcgacgggctatcaagaaggcccgtggcctaggtcaatggcccacattgcacttggtgggtgcgttggcttaccatctccccaagtgggagagtggacgtcataatttgtggtagagggggtacgcgttcgcgcggcccctgctaaaaaaataaaaaaaaaaaaagtaaaaaaaaaaaatctggggcggggcaagggaagctatctattggccatttatccagcagccgctctccccagccccactctctccatctagccccctaactgcaccggccgccacaccaccccgaccggaccctccacaacaatggccaccgtcctgggcagcccccgcgcgccggccttcttcttttcgtcgtcctccctccgcgccgcgccggcgcctaccgccgtggcgctgcctgcggccaaggtgggcatcatgggccgtagcgccagcagcaggcgcaggctgcgcgcgcaggccacctacaacgtgaagctgatcacgccagagggggaggtggagctgcaggtgcccgacgacgtgtacatcctggaccaggccgaggaggacggcatcgacctgccctactcctgccgcgcggggtcctgctcctcgtgcgccggcaaggtcgtctccggctccgtggaccagtccgaccagagctacctcgacgacggccagatcgccgacggctgggtgctcacctgccacgcctaccccacctctgacgtcgtcatcgagacgcacaaggaggaggagctcaccggcgcataatcattcatgcccatctatgtctatctctatctctgtgggtcgttgtgtgtaatttgagtacgcgcgtacacgtactgtactgcttttgtttcatttgagagcactgttcatgtaagcgtggagttgccctgccatcgtctctctctctctccatctctactatttccaatgttgagttacgcttatttgtccagtaaccttgttttgccgaatataatgcatgggggtgttggcgctcaaaaaaaaaaaaaaaaaaaaaaaaaaaaaaaaaaaaaaaaagaaaataaaaaaaaaaaaaaaaaaaaaaaaaaaaaaaaaaaaaaaataaaaaaaaaaaaaaaaagggggcggccgttttaaagaatcaaagtttactttcccgtgcttgcaaaataaaaaattttttatagggaaaccaaaataaaattaattggccgccttttaaaaacgccggaattggaaaaaccttggggttaccaaattaaatcgctttgaaaaaaatcccctttttgcaagttggataaaaaacaaaaaggcc

SEQ ID NO: 67076 - DNA, 665 bp, Zea mays
  Clone ID: MRT4577_161171C.1
ggccgcttttttttttttttttttggttcggtatctgttttatttcaccaatattaacagtgatgtacaaccatttcagtttctcaaacattgtgtctgggagacccagtgagtaaggtagtgttgaacccgatttagatgtgtttaggttcatcttgaactttggagccaggataagaaaacagcttggtagcattcttgtaactcagctccgccaattctgactctggcatttcaaggagtgatgcgacatactccaaaacctggaaacaaggggctcccacagtttggtagaagtattttctcatctcattattgcttaatatgaagtaaacatgcctcttcttttaagatggaaagctcgatgcttaaaactggcactggattgcttcagcattttaaacaaaaggacttaagcattattaatatacaattatgctgtccaaattgcacacgggaaggagagaaagcatattttgttgtgtatttttcttttggttcttgtttttgcctctaagactactttattgttgaaaaagtacatggacacataaaatggaataagtcacgaaaaagcttctcgaaagaaattttagacaagagcatacaacaataaagtctttttagtcacaaacaagttagggtatgcttagagtttttgaaac

SEQ ID NO: 67077 - DNA, 312 bp, Zea mays
  Clone ID: MRT4577_161172C.1
aatagcacctggccgagcggccccgacccctagtcctccccaccgatggagcgacaagccagtcctgtactgcaccggctaggttgcgtctcctgcccccccgctcttaagaacctgaccgaccacgtaagacgttcttaaccggaccaggggcacctacatgcccggggccggggactgcgcaccacacaccgtgacgctcatcccaggcgacggcaaggacacctagtctcacgggcgcgttccggaaggtcatggaggcagatgcaccctctccagctacttgaagacctactacgttgaatgaagaca

SEQ ID NO: 67078 - DNA, 670 bp, Zea mays
  Clone ID: MRT4577_161173C.1
cggcttagcatcagaggacagagtcgctttttgactgttctctgtagtcgctttagcatctagaggacaacagtcgcttttgactgtcctctgtagtctctttagcatctagaggacaatcctgttgtgtagtgtgtgtgagaaggtgtggtagtgcagcccctagggctataaatatgtgcccccaacccctctaagggtatggcattgtgtagtgtttgaggaaataaacagaaaattgccccaactcatagtgtcatcctcttgatgagagttagagtccctctacttacacctgatccataaatacatgaaagtgaaacagtattttcccccatatgtgctgtggatagtggcgattttctgggacttgtgcttcatggcaagacggagtccctagttttgttgtgtgcgtgataacctgaaacttccaagtaagattccatgctgtcactagtaattgtacacatttgttgctcacattttaaatggatgccatattctgcatctcaattgatccctttgttattatggtagcagtattgtttatgctgaattgcagtggtcaagctaggaaaggtaacaaaatgggttagaaatgaaaaaaagtgcttgtagtagtcattaatcccattcttctatactgctgctgtagtgcatagcaagcttt

SEQ ID NO: 67079 - DNA, 986 bp, Zea mays
  Clone ID: MRT4577_161174C.1
ggaccctcgaggccggccgggtattctgttgtcctaggcgtagaggaaccacaccaatccatcccgaatttaggtggttaaactctactgcggtgacgatactgtaggggaggtcctgcggcaaaatagctcgatgccagaataaggagaagctatctattggccatctatccagcagccgctctccccagccccactctctccatctagagctccctaactgcaccggccgccacaccaccgtaccccgacccctcgacaacaatggccaccgtcctaggcagcccccgcgcgccggccttcttcttctcgccgtcctccctccgtgccgcgccggcgcccaccgccgtggcgctgcctgcggccaaggtgggcatcatgggccgtagcgccagcagcaggggcaggctgcgcgcgcaggccacctacaacgtgaagctgatcacgccggagggggaggtggagctgcaggtgcccgacgacgtgtacatcctggaccaggccgaggaggacggcatcgacctgccctactcctgccgcgcggggtcctgctcctcctgcgccggcaaggtcgtctccggctccgtggaccagtccgaccagagctacctcgacgacggccagatcgccgccggctgggtgctcacctgccacgcctaccccacctctgacgtcgtcatcgagacgcacaaggaggaggagctcaccggcgcataatcattcatgcccatccatctctatctctgtgggtcgtcgttgtgtgtaatttgagtacgcgcgtacacgtactgcttttgtttcatttgagcactgttcgtgtaagcgtcgagttgccctgccatcgtctctctctctctcgatctctactatttctgtgtgtgcgcgcttctatttttccaatgttgagttacgcatatttgtccagtaaccttgttttgcttaatcacacacagctcccaaattccagtcgaaaaaaaaaaaaaaaa

SEQ ID NO: 67080 - DNA, 2377 bp, Zea mays
  Clone ID: MRT4577_161175C.1
ccggccggaattattttatttgattgtgttaaccaggattcgaaatcatgacatctagctctgatatcatattaagttgcatgcaccaaacaattcaattcaacctaaaagcttaagctcatagaaagatgggacaattcacttatattatattccaacagtttcaaaaactctagcataccctaacttgtttgtgactaaaagactttattgttgtatgctcttgtctaaaatttctttcgagaagctttttcgtgacttattccattttatgtgtccatgtactttttcaacaataaagtagtcttagaggcaaaaacaagaaccaaaagaaaaatacacaacaaaatatgctttctctccttcccgtgtgcaatttggacagcataattgtatattaataatgcttaagtccttttgtttaaaatgctgaagcaatccagtgccagttttaagcatcgagctttccatcttaaaagaagaggcatgtttacttcatattaagcaataatgagatgagaaaatacttctaccaaactgtgggagccccttgtttccagttgggtacctcgcggccgggggacagcggcaagctggccaccgcgtcaccgcctctactagccccaggctccactgctaaacgccggtaatggcccaggctccggcgcgcgccgcttccgccgtacgtctcttcgacgcgcactgccacctgcaagacccccgcatcgcggccgtcgcccctgcccttatacgagccgccggcgcatccggcgtcgcacgcttcgctgtcaacggcacctccgagaaggactggcacctggtgaagcagatggccgaggatcacccagccgtcgtcccctgcttcggcctgcacccttggtgtgtacccgagaggtcgccggattggatgaatttgctccggcggttcttcgccgaaaccccggaggcggctgttggggagattggtctggacaaaggttcacatggaaaaaccatcaacttcggagaacaggtccataacagcaaagtcttatcacaaggttgaagtgttccagcgacaactcgaactagctaaggaattggagagacctgtttctgttcattgtgtgcgggcatttggtgatcttctggaagtattgaagcaaactggacctttcccagcaggcgtgttgttacattcttatatgggatctgcagaaatggtgtctgcccttgcaaatttaggctgttacttttcactatctggcttcttgacaggcatgaaatccactaaagctaagcacatgctgaagtcgattcccctggataggattcttttagagacagatgcacctgatgcattaccaagattggacaatgtttctgtatcaccagtccatgttcacagttcagatgcagatactgaaaagcatcacatggattcagagtcacaggctgctaatgcatcaaatgagtccttgaaccatccagaaaatatccatattgttttggagtatgttgcatcactccttgaaatgccagagtcagaattggcggagctgagttacaagaatgctaccaagctgttttcttatcctggctccaaagttcaacatgaacctaaagacatctaaatcgggttcaacactaccttactcactgggtctcccagacacaatgtttgagaaactgaaatggttgtacatcactgttaatattggtgaaataaaacagataccgaatcaaagtagtgcaactggtttccttcaaaaaaaaaaaagtctctgattttttgtttgacgagaagtacagcactagttagcaacaagacatccaaatcagtggtatccattgttttcatgttgccattgaatgatgaaccgtagagaaaacagccagcgttcctttttcctactggggcagtagtttttggccctgaaggttacaagagagagagagacgctgattttgccttaaaaatagtaacctgaaaacagtctgcgtaatgaggatttagttgatagtacctctagttttttatttgatgctggttagttcaattttgtactaaaaatcgtcaaataaaatcagatggagtactacattgtaggtttcagtggcaacgtctgagttctgacttgataacctgttagcagagttgacttgcatccctacaggctacggtctacagggatgggctggttctggttgtaacgaaacagagcgagaggagggacatagggcatgtttgttcagcttttttgtgaccagcttttccaagaatttggctgtatagagaatctggctgtatagagaatctgagtatcattaggattacgtgcggaggaagataaagttgtccatgaggctcagatctataaagcgacggattactact

SEQ ID NO: 67081 - DNA, 458 bp, Zea mays
  unsure (1)..(458): unsure at all n locations
  Clone ID: MRT4577_161176C.1
gttgggggtttttttttttatttttatattatttttttnntttttttttnntttttttttttttttttnttttttttttggggaagcgaaaacacggaaaacagtttaacctatgaaagattgccctccttttggggctgggggaacccttacaacccgggggggggggggcgacccatcattcccatcccaaactcaaacttcataattcattcaaaccccgcaatggggcccccccccaaaccaaaggaaccctggggcaaacctccctgaccccccaaaaaaagcacagtttggggcttgaaaccctaaaactcccggacaggcaaacccggcgggagccactgcttgagcctgttggccctgtccgcctcctggaccccaagggtgtggagggccccggggccgccccccttgaacctgacggcgtccctggcccccttgatccccaccgaccg

SEQ ID NO: 67082 - DNA, 336 bp, Zea mays
  Clone ID: MRT4577_161177C.1
attgagaccacatcgcaagatgaatcgaggtttcccatcccagcaacagcgccggcgggggggtcatgatattttacgttcttatgcttctcggtctgtgtggatgacgcgacaacgctacaataatgcttacatgctcacaaacttctattgcttccctcattcctccattccatgaatgcttgattacgtagaaaatccaaaaacccaactctataaccctatacgcgcaaacacgcaatgcaacatagctacatcactctatcaccaataatcgaacactctatcttcgtatctgtcatgcggacatagcaacaaaccacagcggctcagcaa

SEQ ID NO: 67083 - DNA, 183 bp, Zea mays
  Clone ID: MRT4577_161178C.1
tcgcctccacgttcggctcgatgtcaatgcgctaccactatagtagctccaactgcacattgcttctctgtgcctctgcggcatcataagcattgacaaagcattatgtgaaggtcagacctacattcgacgtcagttgagacaacaaggcctatcgctgagaggcagcgttgctgtgctgtt

SEQ ID NO: 67084 - DNA, 336 bp, Zea mays
  unsure (1)..(336): unsure at all n locations
  Clone ID: MRT4577_161179C.1
taatcgtaggctgtaaaaatttttgtgtgggcttnaataacattatatcatggggaacaacggacagtcgagaccacatagttacaacaatgtacatataaaatcgctaagaacacagcacagcctaactgacctatacaaagctccatgtcaagaaatatgccacaatccggcatcggcaacatcccatgctagctccttcaaatcagacatgaaataacccacatgcgcgccagctgaatcagccagcatcctgccctgcatggactgggactaccctccactgctaacacaagcttgcagcccgcttactgatctcttgctttagatactgat

SEQ ID NO: 67085 - DNA, 499 bp, Zea mays
  Clone ID: MRT4577_16117C.1
aaatgaaagcgggagaaaaccaaaaaaaaaacaaaggggggcgggggggaagagggggggggggggggggggggggggccccggggggaacggggcccaccccaacagggggccacgaagaaaacgcggcccccccgccccaagaaaaaaaaaaaaaaaaaacaaaaaagaggccaaccccaggggccaacgaaggggcaaacggggccaaccacgggcaccccccagaaagcccggcccgcccggccccgccccgggccccccaagccggccccaccagcccccccgagggccgggggggccccccggacccaaccaacaaaaagggcaaaaagcttcccacaagccaggggggggaaaaggggggcaaaagaaccaaacgccggcggggcggccaaacaaagttaaagcaggctctgcgggaaccgcccgaagaccgcaaggaggggaaccagggccacttcgggcaaaaggccggaggggaaccggaggggcccca

SEQ ID NO: 67086 - DNA, 304 bp, Zea mays
  Clone ID: MRT4577_161180C.1
aagagacaagataaacaatcacataacattattaattcattgtattatcctggaaagacagaaacaataatgaattacaaatgtaccttcggcttgatagaagacaaaaagtacaagcgtgacgcaaaagcgagtacaagtcagtgtgaacagtacgaaggtactgttcatctatttataggcacatgacacagcctgtgagaaattacattcatgccctttacatttattattaacttatagacaattctatgaggactagatagcatttttctctttaagtcggtttctttttccgccattt

SEQ ID NO: 67087 - DNA, 334 bp, Zea mays
  Clone ID: MRT4577_161181C.1
gcacgagccacattacggctaccgataggagctaaaggaagagggtgggggcaggcacgaaaggcggggagcgcgtaggaaaggaaggcgaggaagctagcagacagtgagggtacggatccgactggcgcgcgagtcgcggtgccgaaatcggcccttctacgcgtgtgatcgtgttcgtggatagacgatcccatcgagaccggaggcacacattgaggtgcctagtaataactagtagaccccgttaccaaggaatagggattggaggcacatgtaggtattgggcccctgctgttggagcgaaggcaagtattgggtgtcagtctgtggg

SEQ ID NO: 67088 - DNA, 601 bp, Zea mays
  Clone ID: MRT4577_161182C.1
actcctaagggcgattgggttcctcgaggccggccgggacacaaactccgctcgatgtatatgtctagcttcggacatctagtggtctaccaaaatcccaagtccatggacagcacatacacaactcaaatccgatcggacagactgcttgatgtgtattttactcatttgatttaactgatgatgtatttgtatgggtggctggatgacaaacataaaggacacgccgcggtcggaattaaagattaagtgataatgcagcctatgctgtgacaactgcgccgataagtatgtatgccattgacatggttaccatgacgagctgatctgataaacggcctatacagtctgaatcactgactggaacaacatcaggagccccagcaacaacatgcatagaatctggaagaacccctggaataatgccaggacctgtatcctgccatcactataaagactactgcgagactgccctctccttccgaaaacgaatcaacccactccctcgacttccagctaaaggtatctagacggacttcgaatctctacgctctcaagaatcatcgccaatgtctgcaacaggggtatcaacgcgaccccg

SEQ ID NO: 67089 - DNA, 956 bp, Zea mays
  unsure (1)..(956): unsure at all n locations
  Clone ID: MRT4577_161183C.1
agatccgctgctgctcacgtgtccacgttgcatcgcctttaatccccacatgctccatccatacgctgctggtgctcgtcgctattctcttcatcgtcgggacttgtcggcactactaccatcgccatctgaaccgagctcatgtgcatttacagcggtgaccgagcttggatcctagcgaggacagaactccccacgagtctcatctcgcttgtctcctccatagcagccaggcagccagcatggcggcggatagggtttgcatcgccggtgcatcttgagatccgctgctgctcacgtgtccacgttgcatcgcctttaatccccacatgctccatccatacgctgctggtgctcgtcgctattctcttcatcgtcgggacttgtcggcactactaccatcgccatctgaaccgagctcatgtgcatttacagcggtgaccgagcttggatcctagcgaggtgtctgctgatggtacttacaaggtggacatattgtactggatttacactagcctgcttgcaggtcgtcatccatttttgggacattgttgtgaagattggcatgagaaccacctgtatgaactttggaatcgttaactttggagtgccttctgccttgtggcaatttatgtaatttgaatttgtatggaatgttttgttcgattcacgtatttataccgaacaaagtttatccttgcaaaaaaaaaaaaaaaatgtaacaacattttagaattctttgttttttcctgtttttcaaaaaaaaaaaaaaaaaaaaaaaaaaaaaaaaaaaaaaaaaaaaaaaaaaaaaaaaaaaaaaaaaaaaaaaaaaaaaaannnnnnnnnnnnnnnnnnnnnnnnnnnnnnnnnnnnnnnnnnnnnnnnnnnnnnnnnnnnnnnnnnnnnnnnnnnnnnnnnnnnnnnnnnnnnnnnnnnnnnnnnnnnnnnnnnnnnnn

SEQ ID NO: 67090 - DNA, 315 bp, Zea mays
  Clone ID: MRT4577_161184C.1
atggccagcctgctccgccccctgcgttccctccgatgcagcctggccgcccgcggtgcagcgttgtactcccgacgcggctgttcgcggccttgcgcggcagcaggcgtggcagcttgcgcggcttgctcacggcagtaccggcgtggctcgcccggcgtagcctgcgcgacgtgcccgcggcaaccccgacgcagtctgcgtggtgtagctgcagcctcaccgtcgctcgtgttgtacgtcgtgctcacagcacgtcgtcgactcgcctcgccgtccgccgttggcaaccccgatgcagtctgcgtggcgtag

SEQ ID NO: 67091 - DNA, 133 bp, Zea mays
  Clone ID: MRT4577_161185C.1
cggacgcgtgggtttctggcgggcaatcgcttcacgccggcacggaggccctggcggctcaggccgttgactctacacgctggagcaagctcggcactgttggcgtaagcctcgacgctttcacgtggccttg

SEQ ID NO: 67092 - DNA, 509 bp, Zea mays
  Clone ID: MRT4577_161186C.1
actggttaggagggggcttttttgggatttcttcaattggccaaaaggggattttacccaaagcgaataagtttaggaaccccaggggttttccaatgtcaattgtgtaaacaatttttccctgggaacacctatggacctgaattcgccctaactttgaatgccatcccgagctcgggtcccctttaaacggcccccacagtggtggaaatctcccccaaagggggcggcccaggggccctttttttttttttttttttttttttttttttttttttttttttttttttttttttttttttttttttttttttttcagaataagcttccatgcatagagccccatgtattgagaaaaaactatctgatactacaaaatcttgaccatgtggtgattactgattagttttacaaatcgaaaatcacaccaatgttgaactaaagagtgagctggaggtgtgagcggaccgcggagggaaaacactctaatgttgctacaattcagctgt

SEQ ID NO: 67093 - DNA, 360 bp, Zea mays
  Clone ID: MRT4577_161187C.1
ccccaaaccccaaaaagaaacgggggggcggggcccaacaattttccctccaacaaaaaaacgggtggaacatgggcccaaaaacccctacaagggggaccctaaccccagcagggggcaaaaatttttacaagggggaaaccaaggggagagcggaccctttttgctggaacaaaaaaaagatcccaactggcacccgggtaagaggggggagccaaccctttgggccggtttaaaagggggcccccaaatggcagggctgacccagggggggcccaaccccctgttaaaacctgatgatcccccaaaaaacgctcaataaagccctaaggccctaggggaaagacattaaaaactccg

SEQ ID NO: 67094 - DNA, 378 bp, Zea mays
  Clone ID: MRT4577_161188C.1
ggtatggggtttttatttctttttctccatcccaccttatataaataaacattatttataaaacaacttaacaacacacaaatcatccctacctaggaagcaaacccacaaaaaaccatacataaaacgtgcctaaaaaaaaaaaaaaaaaaaccccatcctaccccccaataacaaaaaatcccccccaacccaaccaccctacagtccttttggtttcaaacacccacacccacacaagcccaaaaatacccaccaccccgggggccccaaaaaataaacctccatttaccaccccaaaaccctttcaaaagggtgggaccccaaaaagccccaccttcccaactattcaaataaaatctcctcttcgaacccccc

SEQ ID NO: 67095 - DNA, 402 bp, Zea mays
  Clone ID: MRT4577_161189C.1
gagagtcgaaggtatgaccttttttgggatcacagggacatgcctgcccccattcgacacatgccaagaagttagaattctctatttgaactagcggtggaagaccacaccgggcaacatggacaggggcccgaacaagccggtcacatagcctgatatgaggaaagaaaattaagctatagggcatgcatacccgggagccgcctggtataggtggaataaccaggtgaagaggacgactggcacgttcgatacgaggaccaagcaagcaaagcatgtggggaccatgccaagtgaatactgtttcgggggttcagttgggggaaataaacggcccaggcgttggcgtacatgccggacgccttgaacccgcagatgccgaaggcctttgcgagcttgggg

SEQ ID NO: 67096 - DNA, 891 bp, Zea mays
  Clone ID: MRT4577_16118C.1
gaaacaaaatagacaagcagccaacctggcactgttcatcatgtgctgacagcgatacttctgcttttttaatatcaacatcggagatgaatttcaaactgaattattgctgttgcacttaggtgtgttgcatacatatttttttgtgatgattttttagaacattacaacatgatgttttagggtctgtttggttcacaactatagatttatgaaaatatgaatccaactgtgagctgtgaaaaatctgcttcgagctgagggttgtgagaaagttaaaatatatttgattaaaacaactatcaatggtagattctacaagagtatgatagctgtaacatgaataatgtaatctggaaaatttggggtagatagtgattttgaattgaactagagaaatctatagatttttaaaaatctattctggtgttgtaccgtttgggtgagattttagatttttggcagcgaattggttcagaaaactgaaccaaacacacctggttaaagagggtgtcggcctacttgcgcaccatataattttctgttcttgtgtttctgctgacattttccactcttgttgaccggcacaatcatttcctctgcagctgtttgcactgaagatcaggacacgaagatcacgagctttatcaaggctcgccttgtgcggaaggtgtatttcagtgagatctccaagatgaagcattagggggtcaatcgccccagattttacatgtagctaacttagcagggcacccataatccataatttattctctgtagttgtagcagcgacctaaaggtgtcattctgtagcacattgtgtaacatgtaggagagagataaacacatatccccattctttctattgaaacaccagaaatagttgctctt

SEQ ID NO: 67097 - DNA, 492 bp, Zea mays
  Clone ID: MRT4577_161190C.1
gttgcgcgagcccagacggctgcggctcgtcgggtgcatcatcttggtgtgcagtagtcaaactcttcaaatgagtaacttctgaagggccgaagtaggcataaaggttccatgtgaacggcacttgctcatgggtaatccgttcctcatggacgggggatacccggcagatagcgccatcactcccgttacccgaaagggaatcggcttaagatttgccgtgccggtacgtggtgtcctacggaaacgttaggaagtccggctacgcctgagggggcctccggaagagttatcttttgtgcttaacggcccgtcacccctcgaactcgatcagaccccagtagggtccatgtggcaacaagagcaccttgcatcagccgatgtcctgtgctgccacctcaagccttgctaatccggaggacccaatcccgttcacccccgtcacttcttataaccccttcacggcttccacgccgaacatcctcttgccaa

SEQ ID NO: 67098 - DNA, 209 bp, Zea mays
  Clone ID: MRT4577_161191C.1
ccccccccttttttttttttttttttttttattttttttttcttatatattatttcctttccatttcaatggttcattcatgtcatggctcacactgccacccatggccaatggccacactacgcaactcatcccccgtccaggaggaaacaatccaacccagagggaagccagccactccattacattattgcagtaactaagaaaaa

SEQ ID NO: 67099 - DNA, 210 bp, Zea mays
  Clone ID: MRT4577_161192C.1
ctggactttagtgaagatcatatcaacggaactggaacccatccatgtcacagtgctattgacgtgctaaaaaattcagacacatggttagaggatgatcaacttgaggcaattctgcatccagcgtgtatgacattgactgaaaatcaatggttcaggatacatgaggtttctccagaatcagcgttttcttatgaaagtacaaaggtt

SEQ ID NO: 67100 - DNA, 209 bp, Zea mays
  unsure (1)..(209): unsure at all n locations
  Clone ID: MRT4577_161193C.1
cccacgcgtccgcccacgcgtccggatccggccttggcctggngcgcttggacagcagcagcagcagcattcgagctcgaggccgctccgccaccccgcaactcgccttgtcgcttcttcttctgtttcgccaccggggcagcgattccgcaatgggcgggacctgctgttctaaatgagcgtaaccctttcttcccatgtcccaagaa

SEQ ID NO: 67101 - DNA, 262 bp, Zea mays
  Clone ID: MRT4577_161194C.1
tccgtgccggattcctgggtcgcccagctccggaattgcaaattcctcgttcaggagaggggtaccaacgaatcattaccatatttggtatgccacacaagacattgagtcttgagatcttacagagggaagagctaggagggcagagtgctaggtttcgtctactttgtcactttgacagttggaggagagaaggaccattagggagatgtagttatacgagtgggctgattaaaggatgtaatgagagagataaagaggc

SEQ ID NO: 67102 - DNA, 280 bp, Zea mays
  Clone ID: MRT4577_161195C.1
caaacaacaaacttattcatgatttggccaaattctggggaggacccccccccaacacaaccgggccattattaaaccaaccctggccccactcatgacacgaacaggagattctttgacaacccccatatggggagagggccccaaaccgcccaggcacattgggaggttaaacgacccatgacttactgaccaccccgggaaccgaacccaagggggagggggctctccttttggatgttgtacactgctagggggcggccatcccccagatttttgc

SEQ ID NO: 67103 - DNA, 394 bp, Zea mays
  Clone ID: MRT4577_161196C.1
cacgcgtgcactcctcttgcctatctggtctgtggtggctcccaagcatcacaggccgcactagcagttgggacagattcctggagggcttcgcccccaaacccatcttttggcatgcggttggtagcttggtgggaaatccgggaaggtgcacctgcagctcgcgctgtcgtcagggtgctctcgcgtgccgtgcccgatccgcgcgttcaccgaggaggccgtggaagcccccaaggggttcgtggccccgcagctggaccccagcacgccgttcccgatcttcggcggcagcacgggcagggcttgcttccgcaaagggcgcagggtgggaggagttctacgtgcatcacggtggacgtcccccattgagcatgtgttcgagatgcccacc

SEQ ID NO: 67104 - DNA, 484 bp, Zea mays
  Clone ID: MRT4577_161197C.1
ttgtttttttttttttttttttttttttttttttttttttttttttttttttttttttttttttttttttttttttgggaaaaacgaacgggggcattattaaacccattttgaatcacccgggacagggggaaaaaggatcgccctgactaccaacgggggcgaaaaggacaacggggggaccccatggggcttattattggggggaacagaagaaggcgccatgaaacatcgaaatcgatcgaaagaaaaaacgggatcgagtaaacagcaccgcgggggggggaccgatatgcttgaattgggttgggggcccacaacctgtttgggccaacaagcaaagcctaggctactactaacatatttttttgcaaaaccacttgcgcggggcgccctccgccttgcactcgccgggggggaagttctcgggctggcacacgtgggcgcaggggttggtgctaatgcccaggcccttgaaccgggg

SEQ ID NO: 67105 - DNA, 317 bp, Zea mays
  Clone ID: MRT4577_161198C.1
tcccttctctcgagaagaaagaaacagacagacctatgtggctatgccttcgaaaagaaagaaagaaagaaagaaaggcaaacaagaaagaatgcctctttcctagcttcgttaaaaaaaaagtaaatcttgatctccgaacgactacggacacatccatccagggcagcaaccgcgagtgtcactgcgaaagcggcaagaaagcagagagcacagcgagcagcggcagcagccacgccaccgccgcgccgccgacggggcacgcccccgacggcaagaaccccgggtcctgagggaacatcgccaccgacggcggc

SEQ ID NO: 67106 - DNA, 310 bp, Zea mays
  Clone ID: MRT4577_161199C.1
gtctggcgggcgcacgccgcgcgcacgcgggggggctagcgacaccaggggccaccaagcaccggcgagggacgagacacgggaacccgtcaacgcggaagccgaagacaacggcgacacgccggaacagccgagcgagggggaggcgcagcaagagggcacctacaagcagacggaggacgcgcaggagaaccggcgccgactcgggggcgacaaggaggacaccgccacggacaagcgcgagggaagccaccagaagaagcgacacgaacggaacccacgcctgcggcgaaggcgggccgcataaggg

SEQ ID NO: 67107 - DNA, 477 bp, Zea mays
  Clone ID: MRT4577_16119C.1
gcgaggaaaaaggggccccgcattccttttttttaacccaccccggcccatcgggcgggaacctccccgggggggggcccccccccccgggccccgggggggaccccggttttcccccaccacaaatgggacgcccgacctgcccaactcccggtttttaaaggggggtcctctccccggggggggcccccccctttttgtggccacacatacccttgccctgccccaaaatggctctgggggccccaggccctttttttgggggaagggttagtcccccaaaaaaagaactgccccccaacatttaaaaatggccggggactgtcttaaaacttttttcctttttggcggggtccccctttttccccccccccccaggtttttttttgggggggcccctcggtttgaaaattttttttttttggcaaaaaagggccctcccccacgcccccctggcccccgctaaatttttggggg

SEQ ID NO: 67108 - DNA, 616 bp, Zea mays
  Clone ID: MRT4577_1611C.1
gccggccgggccggggagcacttcccccagcacgcagctctgagctccatggcgctttccctgctcctccatggtgcccagatccggcgaccccctgctggtcaagttcccagccgcgcaccaggacagcgtcgacccccgcggcggcctggtactcgcgctgctccccgagccgaggaccttgcacgcaaccttgcacgcagcagcaagccccggatcccctgcgtgtacgcgtgctgctcgtcccgcgccgtcgtctttgtgatttggacatctccaatgcgatgtcacagacccttggtgagccccttgattcggtcgtcctcgctgcgcaggttcccagcgccctcgcctgctcgacgggatgccccgtcgatctgtgcagccacggcgcgatgtcactgactctgatagctgtcgatgtcgtccctcgcgcatggctcgttcggcgaaaagcccaagtcgacatgcatgcatgcgcaggtccaaaaatcctatcctatcgccaggttgttcgattggtatttttgtggattaatctatttatactttggtggatgttgtgcatgtgtgtatatgagtaaaaaatgattcggtatgaatgaagttcgtatag

SEQ ID NO: 67109 - DNA, 454 bp, Zea mays
  unsure (1)..(454): unsure at all n locations
  Clone ID: MRT4577_161200C.1
agagggaaaaagcttccacgaggtagctgatgngggaaagctaaaatatgcttggttgaaataactgtcaactgtagactctatataagagcattgcagcttgttaacatgaatgacatgatttttttaaaaaaaaatctggagtagaaagtaattcagaattgagctagaggagtctgtagatttttataaatctattatgatgatgtactcgnttggttgagattttagatttttgttagcgaatctatagttcataaaactaaaccaaactcaccctgctcattatatattacacgtttgcaatagttggtgcagnttatcgcggttgaggatcttgcattttggcaataaatatatttgcaccctaatcgctgttctcctaccaattggctagcgtgtgattgttcatgcatgcatggcgcaggagacattggaatccacgcagcagctg

SEQ ID NO: 67110 - DNA, 285 bp, Zea mays
  Clone ID: MRT4577_161201C.1
gcaaacccagaaaggcactaggacagacagaaaacaggagcgaggggtgcgtggcagacggtgcggagacagaagcctcactcctgcacactatgagtcttgttccagttcgagcgctttcttggatcgtgaggctactactcgtgctgtttgcagttgcatagaactgcatcggccgaagtgtacagcacggtttgttggccttgcccatgcgctacggtagggtactgagacgagcagcttggagacagcaatggatgcactcattgacgctgctatcgctgt

SEQ ID NO: 67111 - DNA, 338 bp, Zea mays
  unsure (1)..(338): unsure at all n locations
  Clone ID: MRT4577_161202C.1
cgctcatgcccccgagncgcatggatacgctcgtgctcgctccgccgccaccgacctcgcccgtcgtcggtcgccttaacgccggccgccccagccccgcccgcgcctgactgccccggcatcgcccgacgttggccgccctatcccttcggtggccccgctcgacaccagccgccccggaaccatcggccgtcccgacctcgcctgcagtcgtcttcctgtggccagcgctctctgctctctattattcactgctctctattgttcttatgaccaatgaagtcaaacatggtaggctcattacacattgcatgcagtaggatttaacttcgacagtc

SEQ ID NO: 67112 - DNA, 362 bp, Zea mays
  Clone ID: MRT4577_161203C.1
gtttctgcagatttgtggtgaacagaatttgagactggcaggttagccaccattggggacctgaagaccgtcgggattgctcagaattttactatactgatactaaaaaataagtaactcatattggtaagggcgtaaggcataattcgtttttcgtattcgctcgatcaaggcaacaggacaagggttttgtttttgtcccaggtctcattgtcctagccacgcccataacacaaggtagcattcctcatgttgtatataatatcgtcgtggatgaatgaaacacttttggacttttttttttgcgtacgagattcctaggcaccgtttgtttttggtcagaatgacttcacggagccttt

SEQ ID NO: 67113 - DNA, 849 bp, Zea mays
  Clone ID: MRT4577_161204C.1
tttggggggttttttttttttagtctccgatcaccaagttttagcttgtgttcttgtttgttgagtagcaaccagacgcagccaatcaactgaacacaggttaaaaaagcatcaaggtaaaaaaaaaaacccccacgcgcttccttcttcattcttccttcttagtaagaagctctcctctatgtgcaaggtaaaaaaaagaacagcctcgaccaacggtgaatcaaggagagagaaaaaaaggccgagcccacaacttaaaaacaaaagacccttttcatacatgtctatctctattacttatatatgagcagtggcatcgtcagcacctcatgtatgtatacctagtacgacatcaggtggcgagggacgcggggacgcacgggcgtcttggacgggctcacccttattggcaaggatcccagtaccacaccgctacagttgagagcagcagtagcactttctgccatcacgaattccacaaaagcgatgcgggtagaatgatggtagtcgccaagcaacctcagccgaaagacctcaccacatatggactcaaagaataattttagatctgcttgagtgacctgcgtgtattaaaacagaaccatgacagaatgaatacatagtggtagtagcatgagtgtaggtaccaaaccttcttgtcaatgtttgtgcagtagatagtccttgcacacatttcacgttcatcgtcagacctcatctgtgaactctatgaaagcaaacctaaggactgaatttgggtccccacacatgcgacagtccacaacctgtccgcaatttataaatagtgttgcgatgttttcttcagtaaccttcgctgctcattcc

SEQ ID NO: 67114 - DNA, 186 bp, Zea mays
  Clone ID: MRT4577_161205C.1
tcctggctctcgctccgagccccaccttcacgcatacaagctgtgcgtgcggctgccagcaaccgacgccccctcatctactccagcccgtgcttctcccaccttccgttcacctgccaactacggagcatctcccaccgcccgtccatctacccgcgctggtgcaccctccactggtgctccatt

SEQ ID NO: 67115 - DNA, 579 bp, Zea mays
  Clone ID: MRT4577_161206C.1
gccaaacttctgaaagcgccaaccttagctagctagtactactactagtgtcttgtatctggtcatgtgctagctacgacgacatgcctgatataaagccaaccaaggagagaagaaaacgaccggtccgacctgacctggctcccatgtttcgtcgatcaatcaattaatgagggagcagctgtcaaatcaggacacagcacgaacacaccacagtccccacaaaaagggggtggggctttgccatttctttacgagcgggcgtggcgttgcgttgcgtcgtccctcgccgatcgagccgtcaacttgtgatgcgggaggacatctgaagcatgaggacactggcaaaacgacgacgacacctccgccgaccgcgcgcgcacgcacgctgcccctgcccgcctggaacctggacctggacgagccgcggcgagtggcgacacgtcgcgccgcgtcgcgtcgagaaccttgtacacgcgggcgcgctgccggccggctcctgattggcgcggcgggactggacgaattatgaatgatgatgatagatagatctcccctgcacatgatgaatgatggatg

SEQ ID NO: 67116 - DNA, 952 bp, Zea mays
  Clone ID: MRT4577_161207C.1
ggccgcttttttttttttttttggtctccgatcaccaagttttagcttttgttcttgtttgttgagtagcaactagacgcagccaatcaactgaacacaggttaaaaaagcatcaaggtaaaaaaaaaaaaaaaaccacgcgcttccttcttcattcttccttcttagtaagaagctctcctctatgtggaaggtaaaaaaaaagaacagcctcgaccaacggtgaatcaaggagagagaaaaaaaaggccgagcccacaacttaaaaacaaaagacccttttcatacatgtctatctctattacttatatatgagcagtggcatcgtcagcacctcctgtatgtatacctaggacaacatcagctggcgaggggcgcggggacgcacgggcgtcttggacgggctcacccttattggcaaggatcccagtaccacaccgctacagttgagagcggcagtagcactttctgccatcacgaattccacaaaagcgatgcgggtagaatgatggtagtcgccaagcaacctcagccgaaagacctcaccacatatggactcaaagaataactttagatctgcttgagtgaccttcttgtcaatgtttgtgcagtagatagtccttgcacacatttcacgttcatcgtcagacctgggtaggaatgtttcgttgaccggtgcaatggcagtttttgacggcagaaccttgacaggataatatccaagcacggttcctgacagattcagagcagcccttgccccctctgggacatcgatgtttttcacccgataaacagtagatccattacacagagtaagcaaactgaaacatggttggatatggatatattaccctcatcagtgaactctatgaaagcaaacctaaggactgaatttgggtccccacacatgccacagtccacaacctgtccgcaatttataaatagtgctgcg

SEQ ID NO: 67117 - DNA, 399 bp, Zea mays
  Clone ID: MRT4577_161208C.1
aaaaaaagggttaatagagcttttgctttgcaaaccaaaaaaaaacaaagggggggagggaacagcttctaaaatttttttggcgggggacggcaaacggccctgggaattcacatttggaaatgaaaaaaaaaaacttgggtagtcataaggcgccctgaacccaaaaaattgttggcttgacgggctccgggattttgacggacccctccaggattttggacacttttcccataaacgggcggatttgggggcgggcctggaggcaccaaatggccgttttaaccatgccctccacgggggggaccctggggggttttttatagggggggggaaagcgggggcccaagatgttttatatgcggggctccaagtcacctttttgtacccccacttggg

SEQ ID NO: 67118 - DNA, 322 bp, Zea mays
  Clone ID: MRT4577_161209C.1
acatgcctaagcacccggagctggaagacaagaatgtgcccaaccttcatgtcatgaaggccatgcagtctctcaagtcccgaggctacgtgaaggaacagtttgcctggagacatttctactggtaccttaccaatgagggtatccagtatctccgtgattaccttcatctgcccccggagattgtgcctgccaccctacgccgtagccgtccagagactggcaggcctcggcctaaaggtctggagggtgagcgacctgcgagactcacaagaggggaagctgacagagatacctacagacggagtgctgtgccacctgg

SEQ ID NO: 67119 - DNA, 393 bp, Zea mays
  Clone ID: MRT4577_16120C.1
acgtaagctcggaattcggctcgagagcctactaccggccggctctattgagccggggcccgacgtcactagagggggggtacctgtagcaagaccgaagctgaagcgagacaccggccttagggggcacaacagaaacagcggcccgaaccgtgaataggacgcataagggtgtttaatcttgaccatgccaacatgggttgggatcccaggcaagggaagacggaagcaactactaggcggatgaacgcaaatgaaggcgcaaacgaaacaaactacgcgacgccaataggaaatactggcaaagagccccatggtgctttggaatgccgggtatggcccagtaacaacattgacggggcaaacaaagtcataggctacacgcaaagccca

SEQ ID NO: 67120 - DNA, 288 bp, Zea mays
  Clone ID: MRT4577_161210C.1
caagagctggtactcatggatactttcttctatgacaagctgtgtgtacatgtgtgaattgattatgatgtgccggcaattgtgcttatcatacttaagtgaatagatagagaaaccgaccacacggaggaaaagtacatacctaaggcacttaattgcaatggcatcgtactatttactattattctgtgacaagctgcacgaacatgtttgttctcattacgatgagccccctatagtttatgaactacaacttgtacacagatgatgatatgccctacatacata

SEQ ID NO: 67121 - DNA, 503 bp, Zea mays
  Clone ID: MRT4577_161211C.1
ggttgatccaacattacatttttttgctttgcttacattgggaaatggtttctcgcgcatactactacaccttttttcagcaggcccacactggcaacgtgcacgagacatcttaattctctacgcatgctgggtgggggcattaatctgacgtcatgtccatccgcttcgttgactatcgtgcttgttcaaggcccagaccgacaggatttcctcatcggttgcaccaaaaaacagggtctctaaaacccattcatctccaggtgattggtgcgcctctccataaaagcctgcctttcaaacctcatggttccatggaaagcgccgtgcccaaaggctaaaacttccttgcgattgccatgaccatccttgacaggcttggtgacaagcaatgttgctccttgcagtgccaagccaccatgcatttcaaggtactgaacgaacttgagtttcatgttgcttgccaggccctgcgtcctgttagaacatggggaggcctgaca

SEQ ID NO: 67122 - DNA, 335 bp, Zea mays
  unsure (1)..(335): unsure at all n locations
  Clone ID: MRT4577_161212C.1
nnnnnntaaaaaaaaaaaaaaaaaaaaaaaaaaaaaacaaacaatataaaaaaacgggagcttacatacacttgtatagcaaataaataaatataaaataaaaaaaacaaaaaaacggggcggccgttctagaggttccaactttccttacccgtaaatcccaggcgttacctttcttattgggccaccaaaataaaattaattgccccggttttaacaacatcgaaactggaaaaaccttgggtttacccaattaaatccccttgcagaaaatccccttttccccaccttgtttaataacaaaaagccccgaacgtatcgcccttccaaacatt

SEQ ID NO: 67123 - DNA, 468 bp, Zea mays
  unsure (1)..(468): unsure at all n locations
  Clone ID: MRT4577_161213C.1
ggggggcgagacgggggtaaacgatttcaagccgggagggttacaaaactttgggcagacaagatccttcccgggtccattagcctacggccatgtttcttcatgtctttcatggggctttaaaaaaaaaaaaaatgggtggctgggggcttccacctttggggggggggggccctgaattgcctattgggaagcaccccatattcgggggggggggggggttccccctggatcccataccctgcaagcaaagccggatttttttcccaggacgaagctttgcgcgggnangttccggttttttgatcctcatcaaacctggggtggggccgccgttcggagttgacgaccacccaaattccctttggctccgcggggttttcagcttgggtggggcgggcaatgcgcttcccagggggccggggtttacttcgagttgccgttgggaatttgggggggcgtgggggg

SEQ ID NO: 67124 - DNA, 1105 bp, Zea mays
  unsure (1)..(1105): unsure at all n locations
  Clone ID: MRT4577_161214C.1
ctatgatgatgaccgatatgatggtggccggtctgtagacagcagggatacttattatggtgctgggcgagatcgttatgctagggatcgccatctgccagcaacagaccaccattctggtgacaggtacagtggtgcagatcgttacacgtccagtggctttgccatagaaaggagctatgagagagatggaggcaggtccactggaacttactaccgtgatgacccgaggggcactggtggctatggcagaggtggttcacgtggcggcggcggcgggcctgctcgctttggtgggagttaccgagataggcctgctccgtatgaccgtcctagcaggggcggggcagctcgtgcttatgatgatcgttactgaagaatgtttccttgaagtagaacagagatgttggtgtatgcgggttttgcatcagtatttgcacttgccagcttgatccttcaattctatgctattcagcagcgcagtttgttttagtggtctctgaagacaatggttcagtatgtcagttactatcagtatgttggtaccataatctgtaggcagtgatcccggtccatttgacatgtttgtgtaattgcttggagtctgcactaaataatgaactaatcgcagcgtgtgatctttgaatcagcctggtgttctgcttactgagatagctgtgccgcattctgcattgtggatgaactttgcaccgataattctgagatgtgctgtgcggcaatgtgcagatcgatctgttcagctcttgatgctgttgggttttgttggtctaatatcaggaaggtttaattctgcttctagtctgggttgagtaagatggtgggaatctgagtctcagaaaaactgtggttcatgcagtcaggtgatggttatgatgttttcctgatgcagatgaatgcgttatgttactgatttactagcgatgtctggtgcagatccgcagataaatttggcttctttgctttgttctctggcttattctaaattttctttcaatggggttgttattcatttgaagattgttattnttttgttcgcggcttgccactgattggagttggattgcacacataagataacgatgtg

SEQ ID NO: 67125 - DNA, 521 bp, Zea mays
  unsure (1)..(521): unsure at all n locations
  Clone ID: MRT4577_161215C.1
caggaaagccagagcacggcgaccgacgaacgccagcggggcggggctcaccaaaagcgacaccgaccccaaccgggagcaggacaccacccacggcaagagccgcagccacgaccacgagggcgacggccacgccaacaccgacncgcacccagccgacngcacgcccgagngcacgacggaganggcggggagggggggggacgccaaggagnacgagaagcgaggcgngaagcngcngggcaacccgagcgacgacggggagncgcacaggcagcggaccaaggacgnggaggcgcacggcgggaagcagcagcagcagcaggcgccgacgaaggagacgnacccgaggcgggcggacccggcgcgggacgccaaccggcagccgaacaaggnggaccccgacgagaaggacgcggcggggcggagcaggccgacccgcgcgcaccacgacggcgggcccgacaaggccgaaaagcngagccaacngaacccgggcaccacggggcggaacagggacg

SEQ ID NO: 67126 - DNA, 555 bp, Zea mays
  Clone ID: MRT4577_161216C.1
cccctcgagtttttttttttttttttttttttttttttttttttttttttttttttttttttttttttttttttttttttttttttttgggcgacaacccttttttttttttttctttttttaacagggggggggggaaaacattcacatgggcggggggtttaacaggcgggtggagcgggctacacataaaaagtcccctcacccaaaaaacaaaacccccggaaacagtaaagttatataagggtttatttacaaacccattttttggggcccaaaaaaaggccccccctttttaaggccgggcaaaaaaaccggggggggggggtaaactttttttccccggtccttttccttttccaggcccggggcctttgtttggggccgcctaaatttttccatttccccccccatggggggttttttttcctttggccttttttgggggaaaaaaaaaaaggggtttgtctccttcaaaaaaaaaaaaggggccccatttccgttagccacgggggatcaacgggggggacccccgggaggtccccctgggggggc

SEQ ID NO: 67127 - DNA, 1285 bp, Zea mays
  Clone ID: MRT4577_161217C.1
ggccgcttttttttttttttttttattttttttttttttaacaatgcaattcatctgcagcagcagtgactagtatactctcattgcaactaatgatcagcattccacagaacaaattctgccaccatttggaccggccaaatatccccacccatttcaggggttgacatctctggcatatactcgagtcatttgaaatgtacctagttaatccaatacattgcgcatatttcactcctgcgccacgatcttgccaacaacacccttcccctgcaaatgctccatctccaccattgtcccagcagatgccactgtgggcaatgcatcataggaggatccattatgcctcctccccgtaccagcgctgctgtcaaccccaaaccacctcgccaccccgaggagcacccccgccacgatggcagtcacgatggcgcagtgcacggacagggcgagatccatgacagcgacggccctgagcctagcctcgtcgacgtcgcaccgcgtggcgggcgctgcggtgctgccggtgtcgaggaggcggtggcaccccgtgggcacgcacgcgtcgacgtaaagattgagcccgctctgcgccgcccagagcccgcccacggcgcccgcgcaggcgagccccgcctcggcgacgaagtgggcgccggccgccgtcgtgcccctcggcgcggaggcgcagagcgacgagacgagagaggccgccgccgcggcgaggaggaggaggcgcgcgacggcgagcgcgtgcgcctggaggtccgagtcagggaacgaggcggcgaggaggtctgccgcgcgggcgagcaggaggagcggcagggtgaggaggagcgggcggaggagcgggaggtggggagggaggaaggggagcgggaggagcgggagcagtggagggaggaggagaagcggcagtaggggcgtggaggcgagcgggaggaaggcgaaggggagcgcgaggagcggcgggaggaggcggatgagcgggtggcggagcaggcggatgaggcggtggtggagggaggagggcgagcggtgggagacggcggccacgatgaggtgggagagggaggcggcgaggagggagaaagagagggcgaggtggcacgcgagaagcagcgcctccgccattagggtcagttggagcaggccgaggtcccgaggaggaggagcgatcgatgcctgaattttttagcagggtaggccggcgagaagtgcggcagagcggaggagcgagagcgcggtcagccgtgcacgcgaggaggacggagccggccgg

SEQ ID NO: 67128 - DNA, 896 bp, Zea mays
  unsure (1)..(896): unsure at all n locations
  Clone ID: MRT4577_161218C.1
tatgggctaccctcgtggtccggcacggnatcctgaggcacgcattcctgctgcctcacacgctcgcccaccagtgtcgtcttcacctagcgctcgacctccagctcacctctgccctctcatgcttgccgagctgctctcagatggttgctcgcgagtttcttcctccccaacaccgtcagcttgccgcgtctctggtccagctccagctcgtcgagtccctctctgtgtgcgccatgcagctcgctcggccgcgaccttgccgagctccgcccctgctccacgtctcctggtcgggctctcgttctgcgcgtgacgccgctgttccctggtgctccctgctcgaccctgcttcttcttccttgagcctcgccgtgcgagttctccctggctcatgtgcctaccgccgtcggccccagtctctcgctcgcaaggtcttcccaagccgtcgtctcctgcctctggctgtcaagcgcgacgaactcgtcccgagctcgtcacaacgtctcagccctgcgtgtcgcgctagctcgcgtctatggtcgcgtccgctgaactcgccaacgccctgttgccagtccgactatcgtcgctactgcgtgcctcgctgcgcgctcgttggtggtgccgtctgttgtgcccctgcatccgcccttgtcgctagtgccaactccggccgtcgcggtatctgctccgtcctggcgccctgcgctagtgctctgcttcctggccccgcctggcctccagcttgctcaacagtactatccatctcgtcgtcatacgtctccgcgtcatgtacaataacgtcgtcgaccatgccttcgcctgctttgacgcgtcgagcttcttcccgttgtgactcgcgcaccatctattcgtcaaatggaatactaatg

SEQ ID NO: 67129 - DNA, 707 bp, Zea mays
  unsure (1)..(707): unsure at all n locations
  Clone ID: MRT4577_161219C.1
gcccgggaaaaaaaaaaaaaaaaaaaaaaaaaatttttgcactcccacccctnagaggacacacagccgccaacagttctttctctccctccccacgccatcctcctctctggttccccatggcgacaagcagggagctcagctccttctcgccatggcgctcggcacccatgcagcagtgtccttcttccccacaggccacagttggtcgtcgtccccctggttctgctcggtgacgcccttcttccccatgccggtgagcaggccttcttcctccccccatccgagctccatccatggctgctcctctctctaccgagtgcccctccccaactctcctacacctggacgcgcgcctccccttccctgctcttgtcgtggccgagccaacccctgctaggagctcgccagcgcttcccccactcggaccttctcccatggcgctcggccccgcgctccctgcatcggtctccagccggcttccccctgcgagctctctgctccactgcacccctcctcccaaacgccggtgtcctccctcccttctctgctccttcccctaacctgctcgtggccagcaccatggagtcgagctccttctctacagcagtcgctgcacctttaccctctgctcctctgtggtgtgcagccccgtctcctcccctcaacacagtagngtcggacagctcctctgctcctccattcat

SEQ ID NO: 67130 - DNA, 372 bp, Zea mays
  Clone ID: MRT4577_16121C.1
atgcagacggcatacaactgcaccaaggggacgcaccctttcgacttcgacgcgtccagcatggaggcccaggcccacacgtcatgtaaccgacgcgccggttactacgtgcgagaaactgcaccgccacttgcgccagtgtcgtgcatcctcgaccgcggaatcggtgccgtgactcgaggcaaccctgcgcacggcccagcagtgccaaccaggcatgccggtcacggggcaggcgacacctttggcaggcgaagcgggcgacgcttcacctccgccataatgtccgtgtcaaaaaagggacctggaaaggggatactccgaaagggatccttccccgcgaaggaagcgggccccgagccctcctactga

SEQ ID NO: 67131 - DNA, 248 bp, Zea mays
  Clone ID: MRT4577_161220C.1
acgcatactgcatacacaacacagatcatcagaacgatctgcgatctgatcgacatggctgccgccaccatggctatcacctctcgtgcgctcatctgcaagctcgcggatggcacaacggacgtcttcggcgagggccgcatcaccatgcgcaacaccgccgcaaatcccaagccggctgcgttcagcagcccctgtttcggtgccgaccgcgtcctgtagctgggcacgctgtccggctcgcccca

SEQ ID NO: 67132 - DNA, 294 bp, Zea mays
  Clone ID: MRT4577_161221C.1
catcctggtacatttgctctttggacgaaagacgtgactgcctttcttcaaatgccatgccgcacggacgtgctccgctgcacaacaagcgccattgcgactgtgttgaacatgaccacggcgacatgatcacccggctggacccaggcaccccacacccgacggatccaggaggacttcaggactttacagacatcttctggagctgacagccgcagatcaagctcacttggcacctgggccaatgatcggacggtcgtgagtcggagaggacagcgcccgcctgagcctgag

SEQ ID NO: 67133 - DNA, 684 bp, Zea mays
  Clone ID: MRT4577_161222C.1
ctcatgaagtgatccatgtttaataactacaatagttagagcttttagctggtctagtgcaattggttatgaataaaacgcatcagattatatgtaagtggatcatctcatttgaatcagttaactattgatccaaaatgcctctggtgtattgtttctattgttgattgttaatagcatcccacacattcccccatcggtcataactatgtaaaagaaatgttcagctgttcattttttgcagttgcatttaccttgatttttcatatgctaaaatgtcttcactggtcaggtttgtaagaaacctattacacaataccattgttacatggacacgggtgcgggtgtctgtgtctagtttgagtttgggtgtctgatttggctttttttagacatggtaaataccacgtggaatctgacagattttgggtaagagtgcaacactcacaattaggttcgttcttacatttgagtgttgatgtgtcaagtaaagaggaatgctacatacacagtaatttatagaaaaaagaaatcaaggaggacatacacatgaaacatcatgtgacttaagctatgttgtaggctgccattctaattgcttattgctgtaccaatgcatggagacacctaggcctaatatcaatcttggggatgaggcttggtatttatataggcttgcaatca

SEQ ID NO: 67134 - DNA, 385 bp, Zea mays
  Clone ID: MRT4577_161223C.1
cctggaaccctataaaccggccgcccttattattttttctcatcaaacacacaacgttccaaccatataggataatttgacaaacggcaccgcatgtacactacagctgcaggatgcaaaggaagaactggtgcgcttatactatagaaactcagccgggtgatctaccggtagcattgtaccagacagcccatacaaatggacgtgtgcctggacgacgatcatgcgagcagctgaacaaagcaaagcgctatgtatgatccccttgcagccactgcagtgtgccatcacagcacgggcccgcgcggtcctgctgatgcaatacgagcttgaacctgccggactgcttacaaggctgcagcagctgctgcgacggccggctcat

SEQ ID NO: 67135 - DNA, 261 bp, Zea mays
  Clone ID: MRT4577_161224C.1
cacaaagacgaaggaatccggcgcggacacaggaccagggctatacataccaggagagaggggttctcgaccgaggcgcagccgaactcaacgaggtaacaccggctaagccgaccgatatactaggcccagagctcacgccgggacagatagtggacaggccgccggatcttcatgtacctctgctaagagtagttcctactaatcaagctacagaacccgatgtacagggaccatcgaagagctgctgacaggcacaac

SEQ ID NO: 67136 - DNA, 627 bp, Zea mays
  Clone ID: MRT4577_161225C.1
cattgggaccctcgaggccggccgggaagcctccttcgctccgcttttcatggtgcctgattttctgccgaccctcctccataatctgccaaacactctttcgccttcctgacgatactcctcgacggcatccgccctctagtgcgtgaacccacagggggcccccaccacgatctctctcgggaccacctactcgggacctcggcggcgcctcctcgcacggagcggcacgatcatttggcagacgcagcatctgccagaccggcagcatagcgcgcgcgcctatcgtctgcgttccctcgatccgccagaggatgcatgcaggatcttccggcagaacaaatgtagcctggatccccgtcaaaaccggactcggacgatcaaagatggtacccgcgacggagacttatatgattggcaacggcacctcgcgctgaactaacgagataggaaggagaaaccggcatacgaggacaagacaaagatcgcagcgaaccccaacgacaacgaggagcacatatgatgctgacagagcgaatcgctgatgctggacactgtgaaagagacggacgaggtctagcacggtgcgatgatctcgaaagctgtaatgaccgaagcgtacgaact

SEQ ID NO: 67137 - DNA, 262 bp, Zea mays
  Clone ID: MRT4577_161226C.1
actcatcctccgccttgcacgcctgccctcaccaaataaggtcccgcccttttccgacattcacaggggggacaggaaatcagcggccatgtcctcgattccggcgacgaccttggccgttatcttatccgtcctcttctgtgccgcggctgggtccgccgtccacaacgacctccccgactacgtcatccagggccgcgtctattgccacacctgccgcgccggcctcgcgaccactgccaccaagtccctcgcgagcccc

SEQ ID NO: 67138 - DNA, 216 bp, Zea mays
  Clone ID: MRT4577_161227C.1
tacacctacgcgtatcgagagcccatgctgactcaatgcggtcacttcttctgctggctgtgccagtaggcgtcgtttgacattactgcgcattcatcagagcgtctaatgtgcaaggctcttgtggacgaagacaatcttgtacccctttattgacgcggcaaggatcgtgttgacccaaaggcaaatgacatgcccaacggtgacattccttaa

SEQ ID NO: 67139 - DNA, 752 bp, Zea mays
  Clone ID: MRT4577_161228C.1
actcctatgggcgattgggtttctcgaggccggccggggcctcgccgaaatccacaaaagggacttccgttccgtgctagcgcgcgatcgcgtcggcctccactccaccttcccgaaaaagcttaccctttgtgtttgtgtgtctgtctggcaatcgatcgatctccatgacgacgtccccgccgcgcgcacgcctgctcgccatggcgctggcgctggcattcgcctgcgtgctgctcgtcaggtccgcggacgccgccacgcccggcggctccgcgtacgggtgcaacccggccacggacaggacgtgcaggcccgagggcgtcggggtggtgctgcccgacggcggcattgacctcgacggcgacggcgacgaggacgagctgccgcagttcgacccacacttcacgatcctcggccatgcccagtgagtgtgagtgcaggtgcagctggctggttggtcatctcagtcggtgtactggacatgcgtcgtaatctctgtcgttcattcgacgcgagaggaattgagtgggcatgtatgtgatggtaaactgttcactgttcaaacttgaaagcgcactgattcaagggcaaaaaatggtgtaaaaaagcgctgcaacgtcacagttttttagatttgtttgagcagtttaacattatgtatgtttggttagatcgtttgtagatctatatatatattcacttaaatccacatgtgttggagtggtattggtttttatatttttttattt

SEQ ID NO: 67140 - DNA, 998 bp, Zea mays
  Clone ID: MRT4577_161229C.1
gcggccgcgtcgacttttttttttttttttttttttttggctctgcgggtgagtcgctcttttcgctcatcttccagacacacacgaaattattccatcggccatccatgtgatcgcctcgatacgtaacgtacgcgaggagttttcaccaactgcgtccaggaatcgttaccacatcccgtataccacacatatgcacgcgccaggacggagtttacggccagacgctgttcttgacatagatgccgaggctgatgaggacgagcaccacggcaagccacagtggtggccatcttcggattgctgaggaagccttggcatgacgacggaggagcgctgctaccgccaccggcgccgtcgttcttgctgctactaccgccggggtctctggccgagctcaccacgcgctgcctcgcttcttgcttccgcggcgtctcgtgcttgttgtcttctcgccctcgcgcggcacggtcaccaccgtcttgcttcgcagcgctggcgacgaccgggacttgctccggcgggacggcaggcatggtgacgcggaagacgccgttttcgaacctggcgtggatggccttggcgtcgcagccgtcggggacgaggagctcgaggccgaagcgtctccagcggttgacgtcgacggggcgctccccgcgcacgatcaggcgccgttggctgtggaccatctgcaccctgacgtgctccttcttgaacccttggccgtagaggttgacggtgagggtgtgggtggccggctcgcgctccgttttgtggggaggcacgaagtcctcgtacacgcgctcgctggaagccatgggtcacccgcttctagctctctcttcagttctgcctcctaattcagagataacggaggacgaacgagcaattaaaaagaaacaaaaaatccaaggaaaatctgggagaggagtatgcacggcacgggacagttttattgagttgaggacatcccggcccggccggcctcgagggtccca

SEQ ID NO: 67141 - DNA, 966 bp, Zea mays
  Clone ID: MRT4577_16122C.1
tgggtacctcgagggccggccgggatcactacccgaacagcacgacatagatccatccaatagcaactcaccaagccattccagattccaaaggacaagtaagcgaagcgcaaacactagcagccagctcggaataatcggaggagccagtccccccacctactttgctctgctctgctcctccatggccagcagctactactccctcatgctgctcctgctgctggcggccacggccgtagcagaagaagcagccgccgaggcgtccggaggcggcggcaacgcgaccgagacgtcgccgacggcgtacgagatgctggagcggtacggcttcccgcggggcatcctgccggcgggcgtgacagggtacgagctcggcgcggacggcgccttcgaggtgtacttcccgcgggcctgcgagttcctgctggcgaggacgtggctggtccgctacgaggcgcgcgtgtccgggtccgtcgccgccggctcgctcacggcgctgcgggggatcagcgtgaaggtgctgttcctgtggctcggcgtcggcgaggtggaccgcgccggggagacgctcagcttctacatcggccccgtcgccacgtcgttcccgatcgacgacttcgccgagagcccgcgctgccgcggctatgatgccgaggcggcggcctcgtcgtgactcatgacgcagccttcagccggcggtgattattaggactgccttgctgatttagctggctatatatacacttgtgcatcgatcgagtcggagccggcgattagctatttttcctcgtcctttaatttttgtttatttcgcggactttgagcaagttatttgcggtgatcttgttgccctgggtgggttggtttgtaggaatttcggaaaaatcatataagattttttacagaacagtttattttcacagaaaaaacgcaacccaggaagtggaaaaaatcttgcaattc

SEQ ID NO: 67142 - DNA, 277 bp, Zea mays
  Clone ID: MRT4577_161230C.1
cactacatggcttgctgcctgctataccgtggtgacgtggttctcagagatgtcaatgctgccattgccaccatcaaaaccaagcgtaccatccagtttgtggattggtgcaccactgtcttcaaggttggcattaattaccagcctcccactgtggtgcctgacggagacctggccaaggtacagagagctgtgtgcatgctgagcaataccacagctgtcagcgaggcctgggctcgcctggacaacaagtttgacctgatgtatgccaagcgtg

SEQ ID NO: 67143 - DNA, 1348 bp, Zea mays
  Clone ID: MRT4577_161231C.1
ccggccggggagagctccctttcaggtagagaaaactgatcatcttctctagatcttctcatcataccgataccggcctcaacgccctctctttcccagcctcacaaccaattcctgtttcagtcgatcgcagttagcatggccgcgacacagagctgtcaggctgctgcttgcttcccggccgccgtggcggtcgacgaggagcacggccaccacagccaccagctgaagggaggagcgcaggaggaggctgagaacgacaataagccggagctccggcgtggcccctggaccgtagacgaggacctcaccctcgtcaactacatcgccgacaacggcgagggtcgctggaacaacctcgcccgcgccgccgggctgaagcggacgggcaagagctgccggctgcggtggctcaactacctccggcccgacgtgaagcgtggcaacttcagcgccgacgagcagctgctcatcctcgacctccacacccgctggggcaaccgatggtcgaagatagcgcagcacctgccggggaggacggacaacgagatcaagaactactggaggacccgggtgcagaagcacgccaagcagctcaactgcgacgccaacagcaagcgcttcaaggacgccatgcgctacctctggatgccgcacctcgccgacgacgtcgataccatcgctgcggccaacgacgacgacgaagaccaccaccaccacctacgcctcctcgtcctgcatcaccaccaggcccagcacctgcagcaagctgctgccgcggccggcggcgctgccaacgaccttgctgcgggcgcctacgacgtccgccagctgcacgcgctgccgtcgtcgggcatggcggcgacgtcgtcgtccgactcgctcgcgtcggagtcgtacgatgacgggggcctgcttttcgcgaacttgcgcgccggcgagatgctgatggacggcggagattgggcggcgcagcaggaggccgaccaagggctgtggccgccgccgccgccgacgtctgatcttgatcagtcggtggtgcaggctgctggtgccggcgctggccagtttcaggacatggagctcagtggttgggtgcaaggcttctccgagagcattacagataacttttgggccttggaggaaatttggaagatgcaatgagcgagcaattttacatcttacacatccatccaaattaaagacaacatagatacacatatacataccatatattctaacaacaggtgccatatacgatatacatacacaagttgttgtatagttgtattccgcttatatatatatatttttgcctctcaatgaagttcattcttatagaggttgg

SEQ ID NO: 67144 - DNA, 1448 bp, Zea mays
  Clone ID: MRT4577_161232C.1
agactaataaattccctcacatgctttactctctcctcgcatcttagcctataaaaggactgaggaattgcgatacggctgctgctaactgatcatcttctctagatcttctcatcataccgataccggcctcaacgccctctttttcccagcctcacaaccaattcctgtttcagtcgatcgcagttagcatggccacgacacagagctgtcagatggccacgacacagagctgtcagagcaggagcagcgcctgcagcaaggctgctgcttgcttcccggccgccgtagcggtcgacgaggagcacggccaccacagccaccagctgaagggaggagcgcaggaggaggctgagaacgacaataataagccggagctccggcgtggcccctggacggtagacgaggacctcaccctcgtcaactacatcgccgacaacggcgagggtcgctggaacaacctcgcccgcgccgccgggctgaagcggacgggcaagagctgccggctgcggtggctcaactacctccggcccgacgtgaagcgtggcaacttcagcgccgacgagcagctgctcatcctcgacctccacacccgctggggcaaccgatggtcgaagatagcgcagcacctgccgggaaggacggacaacgagatcaagaactactggaggacccgggtgcagaagcacgccaagcagctcaactgcgacgccaacagcaagcgcttcaaggacgccatgcgctacctctggatgccgcacctcgccgacgacgtcgataccatcgctgcggccaacgacgacgacgaagaccaccaccaccacctacgcctcctcgtcctgcaccaccaccaggcccagcacctgcagcaagctgctgccgcggccggcggcgctgccaacgaccttgctgcgggcgcctacgacgtccgccagctgcacgcgctgccgtcgtcgggcatggcggcggtgccgacgacggcgacgacgtcgtcgtccgactcgctcgcgtcggagtcgtacgatgacgggggcctgcttttcgcgaacttgcgcgccggcgagatgctgatggacggcggagattgggcggcgcagcaggaggccgaccaagggctgtggccgccgccgccgccgccgccgtctgatcttgatcagtcggtggtgcaggctgctggtgccggcgctggccagtttcaggacatggagctcagtggttgggtgcaaggcttctccgagagcattacagataacttttgggccttggaggaaatttggaagatgcaatgagcgagcaattttacatcttacacatccatccaaattaaagacaacatagatacacatatacatatcatatattctaacaacaggtgccatatacgatatacatacacaagttgttgtatagttgtattccgcttatatatatatatatttttgcctctc

SEQ ID NO: 67145 - DNA, 395 bp, Zea mays
  unsure (1)..(395): unsure at all n locations
  Clone ID: MRT4577_161233C.1
ggccgggnatcacncaccactcggtgtcttcattaccatcgaggtctatcctactttcagagtcgcagaagaacccgaacgacaccatgagggagctgctcgctgacctagatctcctggatctcgatgcgagcgccagctgcacgcatacaagcggcagatgcaggtagccagccacgctgcgcacggaacataaacgcggcggcggagcatctgcacctgcggatcacctgccatctgcagagcgtgaacgcaccgccggagcacctgtcggcgtgcggcgcatcggccaccgcacggaccatgtgccgccggcgggacatgaggcgtcgcacccatgccactaccctaatcaatcgcatgggcctcagactaatacgaagccacaccgatgc

SEQ ID NO: 67146 - DNA, 642 bp, Zea mays
  Clone ID: MRT4577_161234C.1
aattcggcacgaggctcgaccgctcgaggccgaaaggcacgaccttcggccagtcgagcagctgggcgcgtggcgcggccagggacgagggcgccatgagctcgccggagaatggcgccgccccggaggccagcgggaagaagaagaagaaggcggaagaggaggaggtggtggccaaggtgccgttcctgaagctgttctcgttcgcggaccggtgggactgcgtgctgatggcggtgggctcgctgggcgcgtgcgcgcacggcgcctccgtcccggtcttcttcatcttcttcggcaagctcatcaacatcatcggcctcgcctacctcttccccaccaccgtctccggccgcgtcgccaagtactcgctggacttcgtgtacctcggcatcgtcatattcttctcgtcgtggaccgaggtggcgtgctggatgcacgcgggcgagcggcaggcggcgaagatgcggctggcctacctgcgcgcgatgctggaccaggacatcgccgtcttcgacacggaggcgtccaccggcgatgtcatcaacgccatcaccagcgacacccttcgtcgtccaggacgccatctccgaggaggtgggcaacttcatgcactacatcagccggttcctggccggcttc

SEQ ID NO: 67147 - DNA, 737 bp, Zea mays
  Clone ID: MRT4577_161235C.1
agttccttccctcgaaaaaaaaaactcaccgctcagctcagcgcctcgggcggaagaaggaccgaccgaccgaccggacgtgcgccgccgcggttctgccggcgacctgagctcgtcgacggcgccggccaccgaccgctttgcctccagatttgagtgggagattggcgatggtggatgctgatgagatgccccaaccgatctatgccgagaataaaccatgtgcggaaatcgagtcgcggcgccattcccccactttgatgctggccgtggtaaccaaggtgctcgatgacgacgacctcctcgccgagatcctcctccgcgtcgtgttccccaccaccctcgtccgtgccgccctcgtctgcaagcgttggtaccaccacgcctctgaccgccggttcctccgccggttccgcaagctccacccgccctgcctcctcggcttctatgttgttttcaagggtgcacgcttcataccgatgcagcctcaaccacccgagctcgctgccgtcgtccgccatgttgcaggctacaggtttggcaacttgattgacttgaaggactgccggaatggcattgtcttgaccagggaccggaaacaaggagtattgacatataaagtcccgttgtgccctgagagaggcatgcccactgtcccaccactcccacgcacccagggcggcagcatttttctatttcggtgaaatcctctccaaagaagaaggcgatggcctgtc

SEQ ID NO: 67148 - DNA, 764 bp, Zea mays
  Clone ID: MRT4577_161236C.1
atcgcgctccatgagacgacgctgttgagcacgttatagaggcgaacgacaacgatgatggagtagcagctaggggtttgactctaaggcgatgtcatgctcatgctgaggaaggtttgtggcctggccacgacaagcacgaccaacgcagcggaggagaatcgagtcgctggcgatgatagcgtccaccaacagtagtgcgcgaggccggtgaacaggagcaagatccgagctaggaccgggatcactgtcgacctcacgcgcgcatgggagggagataggcgtgagcaggaagctcgatggcggccatgggcaacggcgagctatagaccggcccaacagcgagaacaacagagagggacgagctggagtagagggcagagccgagctcaagtagggaccaggcgcggccatggaggagactggacagagcgccgacaaaggagagaggtggggcgagggtggccggacagagagagcaggcgcgcgcgttaaggctggagcaggagcacgccggctagctcgcgcagccgacgagcaaagcaggagggagctccggccggactcgacagaggaagctgggggttgcgatttccatggccgagcagagaaccggcaagggcgcagcgggaagggactcgacgagctgaaggccgagctgggtagggaagcaagcaagcgcgcgggagatgagcagggacggagagaggagcagagagtgtcatcggctggggtggatgccgagtactgatgcttagcggctc

SEQ ID NO: 67149 - DNA, 1012 bp, Zea mays
  Clone ID: MRT4577_161237C.1
ccggccaagaattcgcctgcaatcttcggggtgatcgattacacagcattatgggtcgcgtgaagctacagatcaagaggatagagaacaacaccaatcggcaggtgaccttctccaagcgtcggaatggcctcatcaagaaggcctatgagctctccgttctatgcgacatcgacatcgcgctcatcatgttctcgccctccaatcgcctcagccacttctccggcaggcgcaggatcgaggacgtgatcacgaggtacatcaatctcccggagcacgacagaggaggagttgttcggaatagagagtatctgatgaagatgcttggtaaactcaaatgtgagggtaacatagccgaacaactcacacctaataaagagccaataaattccaacgtagaggagcttcagcaggagattaagacgtaccaacaccagatggaagtcttaaaggagcaacttagatctgacaacattgatgtcgatgaacgatttcgagacgtgtgagaaattcctcatggacaccctcacttgcgtggaggagcgaaagaaatatttgctgtgcaaccacgtggccccgttcgatccgtcggcctccaacatgcaacaacacgtagacgtacgtaggtgtctggtgtctttaataattatggttggaacacataattacttccgttgattcggttcagcgagtacgtaaccgtaattagtagagtacgtaattaacgattcaacgtggaggatgatcatgggtccagatgttcgccctgccgccggcgccgcctcaccaacaggagcaacaaggggacgacctaggaggcgccgccagcgcgttcggtggcgatgtctcgtggttcgccgatgggatgccgacgtcgtcgatctttgctgcgtcggacccaatcttgtactttaggtaggagaaattccattggatgggcgacatacagatatatatcacctctttttcgcttaagattgattatcacactattataaaaaaaaaataataa

SEQ ID NO: 67150 - DNA, 641 bp, Zea mays
  Clone ID: MRT4577_161238C.1
attacgcgcgagatcagatggtgagcgtgttggtgctggctacgggcatggcgacgcccaccagcaccgtcgcccgcgggggcaacaggcattgggattgtacccaagggcttgcgctgatgttgctagtaccactatggttctggcttctggttgagagcgtcgtgatccccacgacgctggacggaacgattccggcggccacgtgcgggttccatcgcgcgctgcgggagggcagcaaccacggcccgctcacggatccgcggcttgcgccccgagagcatgccccggcgcccgagcagattacggtctccggctccgccgacgccgactcattatgtgtctcttgtgccaaggtacgcgaagcctgtgggatactacaacctctagtcggtcgaccccgacgacgtcggcaacccagactgcaacggcgagcgcaacatcgccgaccacacaacctatgcgcacgggacccccttgcccggcgacgtgtcacggcagctggagccctaccagggccaggtcgagtacacctctgttgccatcctgtgcaggcgtctgcccggactgaacactgccatgcgctactactacctgctgcgttgtatgatatgctatgccgtcgtccatcgtcgacgagc

SEQ ID NO: 67151 - DNA, 424 bp, Zea mays
  Clone ID: MRT4577_161239C.1
attcggctcgagaagtggcaatgcttttttacttcgtgcaccttatgcatgaatggcattaccacagctgcgagagctttacctactgcgaacgaaacttgctgaattgcctaatggacagctggggctaacactgcttaggcttctagacctgtggcagaatcaccttacaactgtaccgtacggcatcaggagtatcactgacctgattgcgctcgatctgtgtgacaaccatataacaccactctgagcactgctgggactgcctgacgctaacctggatgtgctggaactgcacggaaacccggtaagaagcataggacgaactctgttgcagcgaggaacgaaagcacccctgaagtacctgaaagagaaattgccgcctgaataatatggatagaacatactatcgttggcagtatgg

SEQ ID NO: 67152 - DNA, 171 bp, Zea mays
  Clone ID: MRT4577_16123C.1
caaaaaaacgggggggtccaaaacagcccaaaaatactggggcaaccaccacatatttataataaagcatagggaccacacaaaccattaagcaacccatcaaacaagaccggaggggtaagcaaaccaggttgaaacaacccaacacaacgaataggaatacagagcgga

SEQ ID NO: 67153 - DNA, 2935 bp, Zea mays
  Clone ID: MRT4577_161240C.1
gtggctcttcctcctcctatgctgtgactcgaggagtatggcggatggggctattgtggtagccatttgccagtacggcggagagttcacttctggccccagtggtaatctgatatacagaggtggagaagcacatgccgttgatgttactcatgattcatcgctggagagcttcaaggatgagctgtccaaggtgttccatgttgatgtcactgacatgtcactcaagtactttcttcccaataatatgaaaacactcatcacaatatcatgtgaccgggatttgcaaaggatggttggttttactgcaaatgctgcgcatgtggatgtttttctgataagtagacaggagaacaggagtactataacacattctggagctacatctggctctgttgctagtggcgacaaaaggaaaagaccaacacccaaaaacaaggtaatcagaagcagcaaaccagctaccagtgctgcttgcaatgcacttcaagctatcacagataatgtgagacaaccaatttcagttattactgaaaatgaagacaacagggtttttcagttggaatttgggaatgacatcacatttaccaccacagctggaggtgcttccttcacatcagatattctcgatcagcaaaagcttgttcttgttgataatatccccaaggaagcagttagtttgtttgatgatgcattcaatccatatgttagttctgagatcatgcatgagccgcctcaggaacctaacaatcctattgtgttgtgggatgacattatcaaaggagttggtcaagaatttgataacgtgaaagatttccgtgctcagttgtgcaagtatgctattgggaaaggatttgtgtaccggttcataaaaaatgaaactactcgtgtcactgtaaaatgtggtgcagaaggaggctgcacctggcggttgcatgcatctgaatcatctcgtaacaagaaatttattatcaagagattgacagatgaacatacttgtggtggaggaagtggagagggtcagcgtcgagcaacacgacagtggttgactactatcattaaggagaagctgcatgataacccaaagttcaagccaaaggaacttgtaaaggaattatttgaagaatacggagttacactaacatattcacaggtctggcgaggcaaagaagtagcagagaaagagctgtatcatgctgtcagagagactcgcgatcagttaccttggtattgtcagaggctcgaggagacgaacccaggaagtataagtgtgctgtctccagtgttggatatgaaaacccgtcgtttttttgttgcattgcatgcttgtttgcatggctttataaatgggtgcaggcccctcttatttttggacaaggtcccactaaaagcaacgaatgagtacaagttgcttgtggccgctgctgttgatgcagatgatggtgtctttccgttggcatttaatgtggttgaagatgaaaattatgatagctggggttggttcttaatgcatctgaaaatagctctccaaactcacaactacccttgcaatggcatgacattcttgtccaacggacaaatgggtctggatgctgctgtttctcacgtgtttgaggatggcgaacatgccttctgtttgcatcatatcattgaggaattcaaaggagagctgaggaagggaccatggtcacaacaaattagggaggggatggttgaagatttcactcgtgcagcccaagcatgcagcatcgaggattttaatgcatccatcgagagcataaggaatatatccagtgaagctgctgactggatcatagcgagcaagccagagcattggtcagatgccattttccgaggcttccggtatgatcatttctccttgaacattgttgatgctttcgataactggataccagccaagaaggagagttccatagtgctgatggtagactcgctgagaattaagattaaggaagtaatagaatcaaggcttgaagcttgcaaggtgtggcaagggcctttaacacctaccatggaatacaaagtgcaggatgagatgctgaaggctggtaaaatgactgtgctgtgttcctccgatactgtatttgaagtgaggggcaacgcagttttcgtggttaatattggaaactgggaatgcacgtgccggcggtggcagctctccggcctcccctgcatgcatgccattgctgtgttcaacaggcttgggcgctgtttctatgactactgcccgaagttctttagaatagaaagctaccatctgacatactcgggaataatcttcccaatacctgacttggatagcgttgatttcagtgctggggcaaatctactcccactgcctcccaagcggcgcacgtcagataaaccgaggaggaagcggtctaaccccaacaagataagcactctcacacgactctgtagcaggtgcaaacaaacaggacacaacaaggcaacatgtgaagttcagttctagtggaaggcaacctcagaattaattcagcgtcaaaggtctcaagtttaggtatattgcagagaacatggtttcttttctcagagaacaagatctcaagttttttttaggctagtcagtttgactttttgatccatgcatcacacgaagatacgactaatgaattaaggatagttagaaggtttattcactcctgatgaatgctgtacttgtccataggatcttggtgaccactggtagaagccacggtacaaaccaccgtaagcagctgccacaactcttgtgtcaatttaactagtgtgggtgctcccttggataaagaccctaacgtggagttggcaatctgacaaaattaaaaagcacaggcaacttgctttgctttgttcagaacaccaaatattcattttcaaggtttaggattttgaaatttattttttcattttt

SEQ ID NO: 67154 - DNA, 244 bp, Zea mays
  Clone ID: MRT4577_161241C.1
cccgacgatgggttgaggtagcgacggacggaggcgcaagcatgtgagcgtggttctactcattgaggccatcgttgacttctgcgctcctgaacgtagacaccgtctctgagggagctcaccgcgctctactcttaagggttctcctcccattcatacctatttgctactaccagcctaccagccactttggtgtcgagactgatgagccaatactatggatctctatcacagagggtccact

SEQ ID NO: 67155 - DNA, 539 bp, Zea mays
  Clone ID: MRT4577_161242C.1
ggttgttggtgttttttttttttttttttttttttgtgttttttttttttttttttttttttttttttttgggggaaggggggggcctttttataaagaaaaaacccaacaacccttatcaacccctaagcaaagaggacccgcaaaaagaattttcagggggggggaacccaaggtccaaaaccaacccatgagggggggagggggcccccccattaaggtggaaaacccccaggaaaaaggataggaacccccggcccggccccgacaaaaccttttttttaattagaaaaccaacaaatggccctttcccccgcgtaaagcccccccctgggtttttttctaagggaccggctgaccaactggaaagtctcccttttaaaagggccccccccggggggggggtaagctttccttctcacccccctaggtggcaagggccggcaatgggaaggggaaaccccctcggacccaccattttgtctgcctctttttacccttctgtccccccaaaaaaaatccgggggggcccctttacc

SEQ ID NO: 67156 - DNA, 172 bp, Zea mays
  Clone ID: MRT4577_161243C.1
gcgagataaccaaaaaaaagtccgggttaagactctccataggatcaatgaatatgaggggggaccaaaaaatatatggtaccaggagattcaatcggaacaaccaaaaagcaggagggcacacgtcctcaacagccagctcaaagaccgaccccaaacatgcaccagagag

SEQ ID NO: 67157 - DNA, 242 bp, Zea mays
  Clone ID: MRT4577_161244C.1
tgcggcttaccggctagcctctcgtacagcggcattattgaattaaatccgttgatgctgctggattctttgatgagctcatgtccgttcagctcggaaattcatggcctttctaggacattgttgctctgacgattgattgatcacaaaagatgaactaagtggcacccttccctcgatgcatgagactgtgaaccatgatgacatcctgactgagacaaagtaggaactgatgcaccttg

SEQ ID NO: 67158 - DNA, 814 bp, Zea mays
  Clone ID: MRT4577_161245C.1
acacacatcataattaatagtgttaattactcttgtagctagctaggtagatcgagttttatttgctaactgctgctgctgctgcttgcactcttatggaagagagcaagaagggcgaactggactactggtgagtcgctgctgggttttcatgtgcagctagcgtcactcagctaaccccctgtcatcgtgtcaggcaagatggcatttttcacgggccatgcatgcatgtatacacgcgcgtgtggagtccacagaagtttgtggatacgcgcacaaaaggtttacggtcaatttaattaatttgtgctagtcaggcatatatatatattatatatgtagtatgcatcgtcttattaaatgaaccaatatgcaactattaattagctagctacctatgagcttgctgattttaatcttctctgttttggtcccttccctttctctctcccggccatacacatatcatcatcatcatcatcatcatcatcatcatcatcatcatcattgacctgttatcctcatccgtactaagcaaagccagacatggttaggccaagccaagcttctgatagatcattcatcatcatcagatgaacgattacgtactagtacgtccttatgatgatgacagacatattatcattacttactgttcgcgaacgattcatgtaatagacgctatatatgaagtgatttggcttcctgcaaaaaaaaaaaaaaaaaattaatgtaccatacatatctatctcttgagtatcgcttggcatatgcagtattaattgattacgtgcctaattaaaaaaaaaaaaaa

SEQ ID NO: 67159 - DNA, 675 bp, Zea mays
  unsure (1)..(675): unsure at all n locations
  Clone ID: MRT4577_161246C.1
gtcgctgttgggttttcatgtgcagctagcgtcactcagctaaccccctgtcatcgtctcaggcaagatggcatttttcacggnccatgcatgcatgtatacacgcgcgtgagtccacagaagtttgtggatacgcgcacagaaggtttacggtcaattttgtgctagtcacgcatatatataatatatatgtagtatgcatcgtcttattaaatgattcaatatgcaactagtattaattagctagctacctatgagcttgctcattttaatcttctctgttttggtctcttcccttccctttctctctcccggccatgcatatatcatcatcatcatcatcatcatcattaacctgttctcttcacccgtaccaagcaaagccagacatggttaggccaagccaagcttctgatagatcattcatcatcatcatcagatgaacgattacgtactagtacgtccttatgatgacataaatattatcatttacttactgttcgtgaacgattcatgtaatagacactatatatgaagtgtatttagctttctagcttctgatgatcgatcgagaggctaattaatgtagtgtaccatgcatatccatctcttgagtatcgcttggcatgcagtattaattgattacctgcctaattaaaaaaaaattatcacaac

SEQ ID NO: 67160 - DNA, 378 bp, Zea mays
  Clone ID: MRT4577_161247C.1
tttctttagccccgacatcggcgatgagctcggcaagtggtacggccctgacaggaggatcttcttgccggagggtctcctggaccgctcagaggtgccggactacctcaacggagaggtccccggagactacggctacgacccttttggcctcagcaagaagccagaggacttctccaagtaccaggcctatgagctgatccatgccaggtgggcgatgctcggcgccgctgggttcatcatccccgaggcctgcaacaagtttggcgcaaactgcggccccgaggccgtctggttcaagaccggcgccctcctcctggacggcaacaccctcaactactttggcaacagcatccccatcaacctcatcgtcgccgt

SEQ ID NO: 67161 - DNA, 730 bp, Zea mays
  Clone ID: MRT4577_161248C.1
tggtcaatggcgggagcagtggctgcaatggtgggcttatggatgacgcctttgagttcatcataaagaacggtggcattgatactgaagatgactacccttacaaagccgtggacggcagatgtgatgtcctcaggaaaaatgcgaaggtggtgagcattgatggctttgaagatgtccctgaaaatgatgagaaatcgtcgcagaaggcggttgctcaccagcccgtgagtgttgccattgaagctggaggccgggagttccagctctaccattcgggtgtcttcagtggaaggtgtggcacgcaactcgaccacggtgtggttgctgttggctatggcaccgagaatggcaaggactactggattgtccgcaactcatggggtccaaaccggggagaggctgggtacctccgcatggagcgcaacatcaacgtgaccagtgggaagtgcgggatagccatgatgtcatcataccccaccaagaagggcgctaaccctcccaagccagccccaacacctccctcaccgccgacgccgcctcccccagtcgcccctgaccacgtttgcgacgagaacttctcatgccctgcaggcagcacctgctgctgttcgtttggcttcaggaacctttgcctggtgtggggctgctgcccggctgaaggggccacctgctgcaaggatcattccagctgctgcccaccggactaccccgtctgcaacatcagggc

SEQ ID NO: 67162 - DNA, 319 bp, Zea mays
  Clone ID: MRT4577_161249C.1
cccacgcgttcggctcattggggaagggagggtcatggagctatacagtgtactcggggccttgttccatgtaagcgccatccgagaccgagagttctctagcaagcctgatgtggggcaacagtgtttctcagaggcatcttcacgtcggccagctgacttgttgtcatctttcacaacaatcaagagtgttatgaatggcttgtatgatggccttaaagatgtccttttaatccttctaaaaaatttggatactcgagaaaaggttcttgagtatatagcagaagtgataaataaaaatgcatccagatctggcatg

SEQ ID NO: 67163 - DNA, 139 bp, Zea mays
  Clone ID: MRT4577_16124C.1
gaaaacaaaaaatacaccgctttttctgcaatcagcaaggaagagcgcacgggtgcacaaagataaaccgactccagacggcctgcggggcacagagaacatgcgcgggctctacacgtaaacatagatcgagtgcaaa

SEQ ID NO: 67164 - DNA, 832 bp, Zea mays
  unsure (1)..(832): unsure at all n locations
  Clone ID: MRT4577_161250C.1
agttaacttgagcgcgtatgcataaaattgatggagtgccatcccaggaaactctgtttttgcctataacaagttaaacaacgaacagtttacagtgcctcactaacaccaaacaatctttcagcattttctttgcgaggacactcgagtcctcactctaagttaacaacattctctatacctagaagttggttccgtgctgggaatgaatagcagataatagaatactttcagtaggtggtaaaggaaccacaatatttttccttctgttgaggcttacacctgctccgccgttagagcaaagagcagcactcaccaccagatcagattttatcgtgaaggttaacaaccaggtcatgtgcatcatctagcagcctccagacgtcgagctgcccagccatgctgttgcactctcgcagtatctcgtccatgctgctatacttctcaattattagcttcctcctctgcaggacacaagcggcgatggcatagagtagcaagtcgtcagttgggggagcacgcagtcttatccttccccaggtggacctcccgatcccggctcgtatagctgcctggtcagcccacataacctcccacaagcacacagtctgctcaaaagtgagctctctcctgaagagaactaccaccattctgtacacaaagaaacagtcctcagcctgcaacttctgcagatgcctatacaggtgtgaatctttgcgcttgataatctgagagacgatcttcaactgccttcttattccgnacctcatcgagcctgagttgtgccttgctttcctcatgaaacccacaaaacaccaaaatgcctcatcgt

SEQ ID NO: 67165 - DNA, 962 bp, Zea mays
  unsure (1)..(962): unsure at all n locations
  Clone ID: MRT4577_161251C.1
catgtactaacttgtcacanaaaaagacatatggacggaggaggaggacatagtgcttatccaagcccacaaatcctttggaagccactggtcaacaatagcgaagttcctcccaggctggccagagaacgccatcaagaaccactggaactcaaccaagcgcagcctaggctcaaagcgccgactgaagaagaagaagagccaacaagcgccacccgggcagctctccgtcctggaggagtacatccggagcctggaatcggactccagttcggcagcaccaccggcggcaacgtccagaccagccatcggtcgtccgaggagggccgtccacacatcggcggtgcctgagatggaactgcacctcagtgcccccaataaccaagatgcaccggtgcgccaccagccccgggccatcagtcaaggcaatccgatgcttccagacctgaacgtcagctatgatccagaggagacgcactatatggggtaccctatgtatgatcccgcggcggcgccgcagctacagctggttagccaagagccccggcaagccaccttcacttggctcccgtttggtggacctcgcatggcgctgaacggagagcacgcatctggtccgtcgtcgtacgacgtcggtggatcctccggcaacgccggctactacagtgaagcagggccaagcaacgtcggtggcagcggtggtgacggccaagctgatgacgacaccaccaacaatgacgaccttgacctagcgtcgagggagttcttcatgccctcctgtgacgaggtgcgtcttggcttggccaggttcaagtgagctaggcagacgaccgggggctccggccggttgttgcttcgctacctattttgcaaaatggtaagagtatcttggtgtgcatgagtggcagaacactcgtactttaatgatttagaactccttttgtgagccgtggattttgttt

SEQ ID NO: 67166 - DNA, 412 bp, Zea mays
  Clone ID: MRT4577_161252C.1
cccccaagggcggtttggccccccccttttccatttaaaacctcgggggaaaactttgcggggggttaaaaggcggggggaaggttaccccgtcccctaaactcccaatggaaaaggggccttttccaaatttgctttaggggggggctggccaaaattcgggggccggccaaatgcccagggggggaaaaagtttcttttaaaacattggggattttttaaaaaaatttttttaagcggccggtttcaaaaaaaggttgtcttttaaaagcatatctccaaagtttgggaagggggaattttccccggggaggaaaaattttttgagtttccaccggttttaaggtcccctcccaaattaagggcccatgagtcatggaagggacctccctttttaaatttccaattccct

SEQ ID NO: 67167 - DNA, 2371 bp, Zea mays
  Clone ID: MRT4577_161253C.1
gaccaaaacattgaccatactatttctactaattaactcccaagtgcggatgcatataaaattaactcccaagtgacttcccaggaatctcttctcattcctactataacatggtaacccgagcctcactacacgggaacaccaagcaatatttcagcctttttattgcgagggcactctaagctacaacattctctatacctagaattgggttctttcttgggaacgaatagcagctaacagaataccaccatttggcctccttagggcttcgtttcaccattaatccatgtagtggtttaaatctatagcaaaaatctatcctaattccaatacacttgtcttaaacgaacaagccgcttttttttctttgtttttcattttgttgaggcttacatctgttctaccatgagggccgagaacagtttccattaccagatcagaatttatcatgaaggttaacaaccaggtcatgtgcatcatctagcagcctccagacgtctagctgcccggccatgctattgcactctcgcagtatctcgtccatgctgctatacttctcaattatcagcttcctcctctgcaggacgcaggcggcgatggcgtagagcaacaggtcgtcagttggcggagcacgcagccttatccttccccaggtggacctcccgatcccggctcgtatggctgcctggtcagcccacataacctcccacaggcacacggtttgctcaaaggtgagctctcgcctgaagagaaccaccaccattctgtacacgaagaaacagtcctcggcctgcaacttctgcagatgcctatacaggtgcgaatctttgcgcttgataatctgagagactatcttcaattgccttcgtattccgaacctcgtcgagcctgaagttgtgccttgctttcctcatgaaacccacgaaacaccaaaatgcctcatcgtccgcctccattaccgcaatgataggtgacaacagatcactcataccttggcagtagccaatctctggatcatacaccgcatatgcttcaagcaacccaactaatcgagccgcgtgataaatcatactgggctctaagtgatcataatctttcaacccaacagatgctgcagactgcaatgctctctccttgggaacttcagcctggttgccggagaacataatccattcactgtttgatcggatggcatccaaccttataatgcgttgccatgtggcgaagtcctctggggttctgctagacctaaaaagatctgccttgaatgaagtgctcctgataaatttaggatctggatcacagttctcctcgccagacacagacatccttccagggtcatcctcatcggatgattcagaatcagatgattctgactctgctatgcatggatatgcataagctaactcatctgcatcttcttcaatacattcaacaacagcacagggaatgttctctggttggtcaacttcattctgttcaggcttcagctcctcgagtgaaacaggagcacgtatagcattggcatcttcaaaacaaggtgattctgatccatcagcagtaccttctaaactagaacacacctcattattaacttcagttattgccttcaacgaatttcccttgtagccattcagaatttgttggcactgcctcctcagcttttcatactctttccttttctttatcttaacagagttcctttcctcttcagagctattcaaatcatagactcctagtaagaagggccaaacttcactcctaatgcttggctcaatgccaccgctgcgaactttcttgagaaacttcttcccaccatcacgaagcttcccatttgctgaaaacagactctcccactgttcacgagaaagtgctcgttttcttttccttcgggaccatggagatttaataccaccccgatccgagtgcggcgaggacgacgccggcgaggaagaagacggggcggcgaccgcagccgacaccacagccaccgcgctcccagccgcagccgctgcgaaggaggaggacgaggacgaggacgcggcggcggcgaggagcgaccggatgtggatccacgatgaggacggaggggaggacgcggccgtcggcgaggacgacgacgacggcgaggacgaggtgctggatcgccgcagcgccttcatgtccttctcactcttacccaccaacccaacagctgcactccgctagcaccaccactctgccgaggcccgccaccgcaggacctcgccgccggcgtacgatctcccgcgccctgcttggccacagtgctgtccgattaggtttttctctaagcttttagcaacgggacacgggggagaaagcccacgcgtttttcccggccgggtac

SEQ ID NO: 67168 - DNA, 284 bp, Zea mays
  Clone ID: MRT4577_161254C.1
cgggttaaatctcaatccattttttgattatttctaggaaacacatgtcgggttgagggcacccttggcgagttcatctcatttgtaatctaaaaaaggcacccccaaccatggggtgctgcaaggccggggccctcaaaaaaaactgggtgggtggcagcaattgttgttgctgctgcaggaagggagcgaccaatggggtagccaccgccaatgggttaaagaaccgggggccccgccggaggtacccaagagagtttggccccccccgttgggtgaatgga

SEQ ID NO: 67169 - DNA, 703 bp, Zea mays
  Clone ID: MRT4577_161255C.1
gtcgcgcagccgtcagccctctctcccctcccagccaccacctatcctcctgccctagctctgcccctccgccgcccgccggaagctggagagcggattctccaccaccgcctccaccccgccctcacaacgtgaatctggagctaatctcgtgcgcggattccttctcaccgccccgcgatgctatgtcatagggtatcgacctcttcgtcggaggaacaagaagaccaagcacacctattgttgtagcccgggacagaggatgcggaggccgtcgcgctcgggctccgacttcccctccgctgggaaggcgatgcgggatgacgaggactcgttcgtgtggctcgcggcgacggactcgtcgtgcccgcggttccctctcctggacgctggagcaagaggagggtgggggcgtgagtcctctttctcccctattgctgcccaaatccactagagaattgtttccttgcatatcgaagattcctagagatagatactctccattcttctcggcaactctacttgtgtgagaaaatatctcttactggtgagatgtactttgccatcacccttgataggaaaactactgatccttaattgtcagtacacgaaaggagtcccttcaacacttcaatgaaccatggggtcatgagcttaaaccatgtgtcctgctgactgagacttttgcaaagacctaccatat

SEQ ID NO: 67170 - DNA, 2117 bp, Zea mays
  Clone ID: MRT4577_161256C.1
cattgggacctcgagccggccgggaaaaaataaaaaggcagtagtgatggtggagaaagaggtgacatcctgaagtcaccagaatgaggaaccaaaaccaaacaacaccaatgggcggcgcggcgatatagctagggcagagtagttcacttcgccatcaccctctctcggtctcggtctctcctcccctcctacgccaattgctacccgtcgtcgcgtcgcccccctcctaccgtcctacgtcttccacctctccccgcttcctcttcctccctgctgagcggaagcgcgcaagcaatcgctgccttttcttggcgtgcgcagctcctggtcggcacggcagccccccgcgggatctcgcttgctggcctggccgcgcgacattgaggcggggcgcctggagctcggagccgccgtagctggtgttggtgcctcggagccgatcgggtgtctggttcctgatttgatctgcagctgcagctgcggcggcggcggccgacatggcggcttcgggagggctcgagcagtggcagaaggacgggttcttccaggcggccgaggaggtgcaggagtccgcggacttgatggaatcagtctatagaacttggatgcgtgagcgtagtaatggatctggctcagaggaggtagacgatttgcaaagggagcttcagacagctttaggaactgcaaaatggcagttggagcagtttgagagggctgtaagttcaagcaacgataagtattcattggaagaaggtacagtagcacggcgtcggcagtttgttgtagccattgaggatcagatatctcgtgtagagaaagaaataaatggttctttaatggacaatggcgggcaagggctcaactgggtgaagttagatgacgaagagcgagatgatctagttgctttcctttcagcacctgcagagttctattcagaaatgaagagcacagacatcagtgaccgtgttctatctagacaaaagaatgtgccagttggcaggaacgatcagagtgatccacctttaatcattaaagacatatatgttctactgttaagagtgatgtttgtggtctagctgaggagttacatggccttagaaggaatttgagttcagctaatgatcattggaagattgaccttggttacaatatggatgatgatagaaaatcgtcaactggggttcaggccgcaagtgagacaactgctttatcaagcatccggagaagcgcagaatctataacaagagtgagatggttttggaatagcttgtggaaatccaagagggatgaacaacgcccattaagatatgatatgtcatataatcttgacctcagggttctatccttattaacacagagatttaatgggctagcggagagaagcagaaattatttgacaagttggaaggaaaattccaggacttctggaaggacgggtgggcttcatatacaaggccaacaacagaacattcagtttggccgttctattcggatcaccctcttactggtgctgagtatctttctgattgtgccatttctcgcctcggcatgacaaggcatgtattgcttcaccggtgaggaacattggggcagctaaccatggtcctgctcgtactacatacagatcatgactggtggtgttctctggtcggcaaatgcagcaaaccaaccatgtctttgctgtgtggtgtggctgctgcatgtgacaggaaaagaagcacggcggtgaaggtttcgactgtccaatgcgtgatgctccgataccataaactcctcaccgggcgcataaccatgctaagatttatcagggttatgatcaatttgtgatggctgattgctgccaaatggaggtggctgttctcatctcactactctatatcccacgagtgaaagcaattgtaaaaagttctagagccactctatatcccacgaacgaaagcaactgtaaaaagttctagagctggtaggataagtcctgaatactgttattgataataatacatttaatactgtatttgccaaaccgttaaaaaaaaaaaaaaaaaagcgctctttagaggtgctctgttgatccaggtttctgcacttgtcctcattttattgtatgcttgcca

SEQ ID NO: 67171 - DNA, 1932 bp, Zea mays
  Clone ID: MRT4577_161257C.1
tttttttttttttttttttttaaagtcattttttttcttcatatatttctgcaacatgtttacatgtacagtctgtgatagaaggcactgctcccccccagtccctctactcgttgcattggcaaaaacagcagcagcagcagcagcaaagagccaacctatacatatatacagctatacataaagaatgggtgtcgaatccggttgagtctctagctaagacctcatacacggacatacctcttccttgatttcctgcggaatggaaagttcgtggctatcttgaaattgccatcgtccatgtaaatgatgttttggctgctgcaagctggacctctaacagccagcagctctgaggaaattgtcatatgggctcgccgccggtaacttcagggactgttgttggaagtcctggcctggctgtgcgttgtcgccgttgggccccttcgtgtactgtggatatccctgaaggctgtcatcagagaatgggttcgtgctatgtgccccggcctgaggcaactgcaggtcttgggaaaggtccagctccatctggttgggctggctgctcggcagccctgccgcttgcacgctttgctggaagctcatgaaggcggacattttctgctgtttcccaatcgtcagggcttcgcagtggctagtcatatccttgaacccaatgtctgctgacactactccagcctgaggtgctggttctgcaccaaccgtttcaagaagctgatcgatactcagaagatctgatgcaggtatagaagatgcggaagcttctgcgctttctgaagcttccccaaaagcatcatggtcattccctaggtcaatcagcaagccctcttgatggtgaccagtctcataagaccctgatgaagggttatcagcatgcacttcaaagaactgagtgcttgtaggacacatgtcatcgggagtgaaatcacttagcaattggcttctcacattatgcaattccgcatccagcatatttgcgatgttgttcatgattgtggagactatgcattctcgagattgactttctgatagttctatttctgaaagggacttcagtgcattattgttgtcctctggtgatccatatatttttgaaggatcatttgaagaatccttaacagctgtaagtctgctctcatccaccaaatgaaggaacggatcggccgcacgatcattgatcatttgtttacagatcgggatgagtggcaagacattgtaagctcttgacgagaaaataatcatggctgtcgacagagtaaacaatgaccgacgccgagacggttgtaatgaatctgcttcagtgagcgcatagctcctcaaagaaaatgcaacctgaaaactctgggtaagagcctcaaaagttgatgccttggatccagagaacagtagaagcaaactgtaagtatgagcaatggcttcatagttcacaggagtattttcaggggatgttgcttgagcccaaatggatgatagcaaaagtgtgatctgacgggcgctcagcttcaccaacactgattccgtttcctcgtctgatttctttggggaaatttggtcttcctttacagacacagaagatgctcttgaagacattgaaggacctctcagagatattgaaggagctctgatagctactgaaggagctctcatggccattgaagggcctcttttcatggaaaaattagaaattctcatgctactacgtcggctttgagacacatgaaggttttgattctttggttgtccggtcccttcaccaacgctatgcaaaatattgtccttgctttctccttgtgaattttctgagtgcttgtccttgttcatcttgtcaaagatagcagccgaagatgaaaacacagagacggccatagagagtgtcctatgcatgtcgttggacgcttgtgtcgacccgcg

SEQ ID NO: 67172 - DNA, 200 bp, Zea mays
  unsure (1)..(200): unsure at all n locations
  Clone ID: MRT4577_161258C.1
ttaaaaaaaaaaaatcctaacgtggttttcctttaaaagctggtggttggccttcacctntttacatttttagtctagggctccttttaaattgtttgcatagtggctcgatttttttaccccaaaacaattctcatgttcgtctgcatcttcttcttccaccttatctatcaaccttatgttcatcttcatctatatat

SEQ ID NO: 67173 - DNA, 472 bp, Zea mays
  Clone ID: MRT4577_161259C.1
aaaaaagaagaggggggggggcaaatttcattttccatttttttttaggacgtaaacattctttttatacattaggccggtcgggtcccttccaaatacacacaggcaggccattttacactttaacaaacagtacacgcctccccagggctgtggtttcgtacacccttaactggttaaaaaaaacccgccccgtatttaaaccaagcacccggccctacctgcttttgtttttaggtaaacccctaaaccaggcccccgggtccttattttcttacacacaccacaatcgggaaacgaaaaacccccccgaggggtgaagcccacctaatttttaaaaaccatcccggccgggttacttactccactccaaggcctgggaacccacgaggggggtccctttgcgggacttgttgtgcccgtaccgtttgcacccctgcttgatgaccccctgtcccttggggagcgggcc

SEQ ID NO: 67174 - DNA, 326 bp, Zea mays
  Clone ID: MRT4577_16125C.1
aaaaaacggggaaatttgatttattttcgccggggggatacatgtaatctgaaaatttgggaatccggggcagttgtttcgttaaggggttccacctttaaatatttttcattggtatctcacttacatggttgggtcacatgagtaaatgatttggggggccaatagtttttttttaaaggggcaattttttaaggggttagacccaatttttcaaagaaaaaaggggggcttgttttgtcttgaaaaaaataccaaaagggtttcaggcaaagaggccttaataaatttgggggggaaaaaagccggggatcacttctccaaaa

SEQ ID NO: 67175 - DNA, 142 bp, Zea mays
  Clone ID: MRT4577_161260C.1
cgttttatattgtgttcacgaacatgttcatgtacactgggggggggttggggaacaaggaggattcctccatcaggacccacaaaagtaacacaaccgacctaggagaaaggggccagggccaggcccagtggagtgacca

SEQ ID NO: 67176 - DNA, 181 bp, Zea mays
  Clone ID: MRT4577_161261C.1
tgtctatgcgtcgtccgtcagctcggcattcagctcacggcgaaagccacgtaacgttcatgatcgataaatgcgacggcatcctcggtctcggataccccgagatctccgtcggcaaagctccagaaaactggtcaagcatgcaggagcgcgagctgctggcggaggacgtcttctcctt

SEQ ID NO: 67177 - DNA, 285 bp, Zea mays
  Clone ID: MRT4577_161262C.1
attcggctcgaggtaatatccagggccttttttatcgtagctgcctggaggcggcaaggcgagattgttgtgctgcacaggtctgctgcctggcgagcaaacacctgtccagtggcggagggctgtctggctggtgcaagttcggattggatgagggtctggagaaaatcttagagaagattcagatgctcggttgcaaaccaaacacactgtacgtgctgaacgtggaggacaaagacaacaacgacctagacaacgagtacagacagagattcaaggaagaag

SEQ ID NO: 67178 - DNA, 263 bp, Zea mays
  Clone ID: MRT4577_161263C.1
acataaaagtttagtgcacatgatttatatattaaatgatcactagctattttagatctaaataaaaagagccgaaaaggaaagagagacagaaaatcattagatcttgtaaatgaacctcaaactaaaactgagagtaaaaagtaaccggcgaggtcgtcggcctcctcgggcccatcgacgaagaggccctcgttgagccggagcgtcataggaggctccgcgggggccttgagcacgtaggcgtcgtcgttcatgaacct

SEQ ID NO: 67179 - DNA, 183 bp, Zea mays
  Clone ID: MRT4577_161264C.1
gacaatgtatacatggatgggatcgggggtcgacagggtcagattcagaccatgtatatgttactacgcatacatactgtcaagaacaagaaccgacattgcatatatgggcctatgacgagcaatggaaccgacccatgcaccatgagcttcaacaccatgtgcaccttcgaccacagcttg

SEQ ID NO: 67180 - DNA, 669 bp, Zea mays
  Clone ID: MRT4577_161265C.1
attcggctcgaggcaggagctcgccaggaacccgcgcctggacctcttcttcgtcaaggacctcaacaaggagcagcggctggagctggagagcggcaccttcgatgccgtgctctgcaccgtcagcgtgcagtacctgcagtcccctgaaaaggttttcgcggagatcttccgggtgctgaagccagggggcgtgtgcatcgtcagcttcagcaaccggatgttctacgagaaggccatcagcgcgtggcgggacgggaccgcgtacagccgcgtgcagctcgtcacgcagtacttccagtgcgtggaggggttcacgcagcccgaggtgatcaggaagctgccgtcggccggcggatcgccgtcctcgccgctggacgccgtgatgaggctgttcggcgtggcaggctccgacccgttctacgcagttatctcgtacaggaacttcaagccaatgtgacaccctgattgacagaacccgtgcagcattgcgatatgcagtgcatacgatctatagaatcactactggtgcaaagctagtttgtacttgtacatgcacacttcagcattagctgtctagctcagcggcgggcagatgcaagttcgttcagaagctcaaaacatcatccaccgaccatctgattcagaaacatgctagcgatccttctt

SEQ ID NO: 67181 - DNA, 385 bp, Zea mays
  Clone ID: MRT4577_161266C.1
cttaggctgttcatccacagtcttcagtgtaaaggggtgagttcgtgctctggcagcaggctgtgtggagccgcgtcaccgtgggactgggcggccatcacacagcctggggccaggtggctgcacctgcacatggggactgggtttggatcgtcagttcccagggtttctgtctgaaacagctgtttgaaggtgcactgtgcagatcgttgtcgacagcgcacttggatggctttcagttgatccatggagccatgcgtccatccctacgacccatttcagagcatttacatcaccccccaaagaagcccccatcagcagtaccctcccatcttcctgggcaccactaacccactttctctctctctggattggtctgatctag

SEQ ID NO: 67182 - DNA, 653 bp, Zea mays
  Clone ID: MRT4577_161267C.1
cattgggtacctcgaggccggccgggatgcagagtgcagtagaacggcatcagttacactagtagtgctcatctcgctggtactgctgagctgaccaccgccgatccttccaagatggcgaggcagggtgtcgtcgcttccatgcatgcgctggcattgcttctcggagcattcgcagccattcctacaggagtccaatccatcggcgtgtgctacggcgtgaacggcgacgccgccaccgcggccaacgcgcagacctacaaccagaacctcatcaaccacgtcggccagggcacgcccaagcgccctggccccatcgagacctacatcttcgccatgttcaacgaggaccagaagacgggagccgagtcggagaggcacttcggcctcttcaacccggacaaatcgccggcgtaccccatcaatttctcctaattcctaaacaagacggcgaggtccattccaagacatttataaggcaatacacacacatagatatatacatacacatacatacgggggaaaatagaataaataaactgcctgcagtagaatgcaaagtgtattcatgtaaggcaactgcttcgattatttcctaaagatcaataacaagaagtacatttatttccaaaaaaaaaaaaaaaaaagcggcc

SEQ ID NO: 67183 - DNA, 1410 bp, Zea mays
  Clone ID: MRT4577_161268C.1
gcacgaggtagaacggcatcagttacactagtagtgctcttccccccgctcccgctctcccgccctccggcgccggccggcatgcagagtgcagtagaacggcatcagttacactagtagtgctcatctcgctggtactgctgagctgaccaccgccgatccttccaagatggcgaggcagggtgtcgtcgcttccatgcatgcgctggcattgcttctcggagcattcgcagccattcctacaggagtccaatccatcggcgtgtgctacggcgtgaacggcgacaacctgcccccggcgagcgacgtggtgcagctgtaccagtccaacggcatcaacctgatgcgcatctacttcccggacgcgaacgcgctgaacgcgctgagcggcaccagcatcgggctcatcatggacgtgcccaacacggacctcgcctcgctggcctccgacccgagcgcggcggccgcctgggtgcagagcaacgtgcaggcgttcccgtcggtcagcttccgctacatcgccgtgggcaacgaggtctccggcggggacaccggcagcatccttcccgccatgcagaacctcaacgcggcgctggccaacgccggcctgggcggcagcatcaaggtgtccacggcggtgcagagcgacgtcacccagggcttcccgccgtcgcagggcaccttctcgcagggctacatggcgcccatcgcgcagtacctgcagagcaccggcgccccgctgctgtgcaacgtctacccctacttctcctacgtcggcaacccggcccagatcgacctcagctacgcgctcttcacctcgccgggcaccgtcgtgcaggacggcagcaacgcgtaccagaacctcttcgacgcgctcgtcgacaccttcgtctccgcgctcgagaacgccggcgccggcaacgtccccgtcgtcgtgtccgagagcggctggccgtccgccgggggcgacgccgccaccgcggccaacgcgcagacctacaaccagaacctcatcaaccacgtcggccagggcacgcccaagcgccctggccccatcgagacctacatcttcgccatgttcaacgaggaccagaagacgggagccgagtcggagaggcacttcggcctcttcaacccggacaaatcgccggcgtaccccatcaatttctcctaattcctaaacaagacgccgaggtccattccaagacatttataaggcaatacacacacatagatatatacatacacatacatacgggagaaagtagaataaataaactgcctgcagtagaatgcaaagtgtattcatgtaaggcaactgcttcgattatttcctaaagatcaataacaagaagtacaattatttctaaaaaaaaaaaaaaaaaattgcggccaaaaaaaggggcggcc

SEQ ID NO: 67184 - DNA, 240 bp, Zea mays
  unsure (1)..(240): unsure at all n locations
  Clone ID: MRT4577_161269C.1
atctattcagtaacatcttgctctgtggagggtcatgatcaattctgctactaatggatctcctgaagaatgaagcattggcagagactgctcaagctgctactgtcaaggctagggctgcgtaaacgcatcagatgtacgtttcagnnttggcatgtgaggagcatttagcatctcttgtgtcgttccagcagatgtggctctccaaagcagtatatgaagagcatggggtttcctata

SEQ ID NO: 67185 - DNA, 256 bp, Zea mays
  Clone ID: MRT4577_16126C.1
cccacgcgttcgcccacgcgttcgcccacgcgtccgtctgaatataacgaggaagataagcgaggataaccagagtgtgctggtttattgcttctcatgggttgtaattttcgttgttttactcgttatgaagaccgtgtgcgtgctgatcctgggctggatcctgtttgactcggtcctcaccgtgaagaacatacttgggatgctgctcgccgtgatgggcatggtggtctacagctgggccgtggaagcggag

SEQ ID NO: 67186 - DNA, 189 bp, Zea mays
  unsure (1)..(189): unsure at all n locations
  Clone ID: MRT4577_161270C.1
tctcgcgtccctccccgtcccacatcccattcctcggcagccggtcagtcccatccatctgcaggacctcattccgtcacccgccttcccctttcnctctcgtcggcgcgcgatggatggtctcatcaaggggttgttccacgtggccatcgacgctctggaggacgcctttagggatagggaccactg

SEQ ID NO: 67187 - DNA, 961 bp, Zea mays
  unsure (1)..(961): unsure at all n locations
  Clone ID: MRT4577_161271C.1
cctcgagccggcgggcggaaatanaaaaaaaaaaaaaaaaaaaaaaaaaaaaaaaaaaaaaaaagcacgaggtcccaccgtccttctgctccaccctccgcccagaacccacaacgccgccgcgttcgtctgccactgcctgcccgagccgccgctccccttcctcggtctctcctcgcttcccagtcccagtcctagcccagcgcgccgcggcgctaactggccagctggtagtgatggcaaccgagccgccgccggcagcggagaagaagaaggcgccgctccccaaggtggtcacgctcaataaagccctcaagctggcccagacatgggtggacaaaatgagtgcatcggagccggatgaacccaacgataaggatttcgagggccggccaccaaagctcggtcttggtgctaaagcggcacctggtgtgaagcgtgtggttcccactgacccagttgagaggaggttgcttgggaaggtgaatgcgcagaagaggaaggccttggaggatgatgatagaaatgctcaggtggcgaatgaggctagcgacgacgatgagcctgaaagcaggaccagtgcctttaacaagaagaggccagtgccttcagttacttctacacctttagggaagaaggctaagtgacaagctatatgcatagactacctgagtgatctgcttgttttgatcacgtttcgtactaactcccagactgatgctattttcataaggcatagtataccttctcatactccagtttgtgattcctgaatttaaagggatagctgtgcttgatattgttaaggctcattgccgattcagaaattcacatactctctgtttaaagctaaatacactgtgatattcatttgattatttttttttaaaaaaaaaaaaagggggggggggggggggggggggggggggggggggggggccgcggggggggcccgggtacc

SEQ ID NO: 67188 - DNA, 721 bp, Zea mays
  Clone ID: MRT4577_161272C.1
ggtaccgggccactttctcggttttttttttttttttttttttttttttttttttttttttttttttttttttttttttttttttttttgaagaaaaacccccccgccctttccttttgggaaaaaaaaaaccccgttttggagggaggggttatccctttctttaagtttttttaacctataccccttggggctacaactaaaaaaagcacccccccccgcccccttgctggaggggggcgcaacccgtttttttaaaaaaaaaaaaggcccccttttccaggaaaaatggcccccccccaccgggggcccccccgcggggccctggggttgggcccgtgggggggggccctgaccccggaaggggccccccccccaacccgggggaaccgggggggggggggggccccggcggggcaaaacccgaccccgccgccgggccccgggtttttacccgcctccccccgttcaagggtttcccccacctctttaataaggggccggttgggggggcccccgcccagccacccaagcgtaagttgccccccctgaaacccctcccgggagttgaccggcccctcaacccgggggcccatgacccgccccaccctccgggggccccccaggaccggttccccccagggggccaggttaaattccccgctcggccggttggggtccagggtttgttgccccaaaggtttttccagattcccccccc

SEQ ID NO: 67189 - DNA, 152 bp, Zea mays
  unsure (1)..(152): unsure at all n locations
  Clone ID: MRT4577_161273C.1
annnagccattgcatagtcttatttaaattacagcagtgaaaacccagctacataattatttgaccaagggcgcaaactacataaacctgcacatttctacaacttttagccagacagtgataactgaaaactgctactactactttcacct

SEQ ID NO: 67190 - DNA, 365 bp, Zea mays
  Clone ID: MRT4577_161274C.1
atcttcaaaggcaatgaggactcgtgccagggactcacatttaactatcatattactcaaatacaactgtgttttaggaagccatagtgtacctttagatcttcaactactgtacaatgcacatacctcaaactactgctagtcacatcaatgctctggtcatcagcaaccatttcaacttctgatggccatatgctactagaaggaataactgctatgataacctgcctggtagaacctcaagcatgctgatactaggatccttcactatcgagcagaccatatgctccaatttaaatagcttgcatttgtatcctttgctggactgacatgtaaaactttaatctgcagaattctcactgggc

SEQ ID NO: 67191 - DNA, 411 bp, Zea mays
  Clone ID: MRT4577_161275C.1
ggggcgacccacgcttacgcggacgcatggggctccatggtttttaatgtaataagaagcacgaacgagggtgatggtacacatttttcggtttcgggcaccgaagcaaacaaacaacattcctgcctctccatactgcaaactgacattgagaaggcgaaccaacacaacactatatcagaaataaggcagggaccctcaaaggctatataggcattcctggtcgatacccacaactctgttttacaagtcaacttcaaacaggaagacatcaaggtgtgcagtacatccttgcagtatcaagccactcacatggctaaaccccaaacgaagctgaaccaaccaatacgggagctgtgacagctcctccaatatataacacacctaaccgcttgcagtctgaatgaaccc

SEQ ID NO: 67192 - DNA, 437 bp, Zea mays
  Clone ID: MRT4577_161276C.1
gccggcccggtccgggcatcaaacaaaaaaaaaaatgaaattcactcttgctatccttggttccttgttcgcctttgctatgacctgtgaagccttttgtgaaggtgggtgcaagacaggatgtgtttacaatggtcccctttctagtacagctactagagacagacaatgtgaaaatgcttgtggctctggtaaaaggtttactggacaaagatatgaagactattgttggggacctaccagcgatttgtgctgtagataagtggaagaagaatatggctctaggattacattgctttctttctttgcttgcgttttccttcacatcctctcttcctttttatttgtatttttttttttttggtattctcaaatagctatggaaataaagcttattttggtattctcgataaaaaaaaaaaaaaaaaaggccccta

SEQ ID NO: 67193 - DNA, 584 bp, Zea mays
  Clone ID: MRT4577_161277C.1
tggtattatttcttgtgatgtattatcactgcatatcttgctaagccaatttgctccaagatctgcctcttgtagtacaatcttttctagactaaggtgtgctacccaaaataggccttacatggcgcttgttcaaaactgtgtgcattctgttttcccagtcaattggccaaatcgtagagaagaaaaaaaaaaaatcccaagtcgctccaatcgatccatccataccattgattccaaaagggagaattgccaagccaagcgtgcgaggcgctaaaggaaaggcgccagatgccaagagagcgaacattccctctccctcgagtcatttcatgcagctttttgatagcggctttggacttgttttatgcgttgtgtgtgtcgctgaaaactttttttttcaagtagtataatcataacggtagctcgctcgtaaaaaaaaaattatcacgctaaatttccgaatgtgtttgtgttgattacccttccttggctgtcttaaggagaagagggaatgtcgtggaagtcatccttgtggtcaccatcgtgctcaccccagtagacaggtcccagctttaacaccc

SEQ ID NO: 67194 - DNA, 347 bp, Zea mays
  Clone ID: MRT4577_161278C.1
cttcctttttttttttttttttttttttttaattctgggaaaaggatttatagggcttgtaggacatcacatcatttttacaaactaatttttttttttaagggcacccaacaccagcccggaaaatttgaatcttttttattaaaaaaaaaaaaaaacctccaaaatttgaaaaacaaaaaggggggcaaaaaaaaagtgttttgtgtgaaaacaaaaaaaaaattttaaaaccagaattttttcttaaagggggggaggtataaaccttttaatctttccacaggctaaaaaagaccctttaggggacaaaactcccacaacattttaattacgaaacccctttt

SEQ ID NO: 67195 - DNA, 285 bp, Zea mays
  Clone ID: MRT4577_161279C.1
aacatatgatgcgattgccattccttggaatcgtgattactatcgcttgattgctattctataaagagaactaatgcggcttagtcctgctgacacaaactaaaaggagcgtattttaaaaagaatgtggtgcaacactggatctggattttatgaaaaaggaacttggagcaatgaaggcatgaatcgcgatcatgaattcattatttaagtatcgtaaccatgttaggcacatgtgcagggtgttaaataatactatgagaccaccacgttcgccgggatagg

SEQ ID NO: 67196 - DNA, 255 bp, Zea mays
  Clone ID: MRT4577_16127C.1
ctttctcattccacctccttctcaatcacctctatcttcaacaccaccatactctacccactatacatcttctataccaacatccaatcccaacttcacacacaaccattctcacacaataaatctactaaccttccacatattttctattaatctatatttaaaacacaattatactccctatatcctcaccttaacactaacaacatccattcttatctttcctacattccttattcatatacctatacatat

SEQ ID NO: 67197 - DNA, 586 bp, Zea mays
  Clone ID: MRT4577_161281C.1
ccctcctcgagtttttttttttttttttttttttttttttttttttttttttttttttttttttttgggaggcaaaaagagatttttttgattttggccccgggggggttattcaggatttcaggttacacaaaaaggatagcttttttaaagagtaaagtcacctaggggcgaaacacgacgatttagcaagctacaatttgaacttttttgggtcctttcacaaccagcaaactgccggtatccaaaatagttcggggtactagctattgccggggcatgtgatgggagcaaaaggacacatcaggccccggggggcttttcaactagccaaaagggcagcatatatcgctactttggaggaaatgccttgctgatgcttttttccaggtcataaaattcaaattttgatgatgatagggagctggagctaggttcaaccccaacctcaatctaaaaaattggctgggcatgccctaagggcagtttataatgtttgttggcaaaaaaaggccatttttttcatcaatgtcatacaggcaatgttctcaacagctgaattgcactactccattggggggctttt

SEQ ID NO: 67198 - DNA, 277 bp, Zea mays
  Clone ID: MRT4577_161282C.1
tcgctccgcgctagcttaagaccgtacatctgcacagaagtgcgacctacgactaccacagggcaaggtccacacatggcattccaactctacttcatcgtgccccggtttcactgtcttctgggctactcctcgcccagatcctcggtggcagagctgttcgtcctgatggtgggcataaataaggtttcgtatcagggcattctctgcgactacatcggctctgacaccaacacgttcattgtgactacgacgactctcatactgttctcggggc

SEQ ID NO: 67199 - DNA, 3106 bp, Zea mays
  Clone ID: MRT4577_161283C.1
ggagtcaaaaagagattcttttgatattggcaccgtggaggttattcaggatttcaggttacacaaaaaggatagcatttttaaagagtaaagtcacctagtgtcgaaacacgacgatttagcaagctacaatttgaactttcttgggtcctctcacaaccagcaaactgccggtatccaaaatagttcgtggtactagctattgccgtggcatgtgatgtgagcaaaaggacacatcaggccccggtgtgcttttcaactagccaaaagggcagcatatatcgctactttggaggaaatgccttgctgatgctttcttccagatcataaaattcaaattttgatgatgatagggagctggagctaggttcaaccgcaacctcaatctaagaaattggctgtgcatgcactaaggggctgtttggttcgtggctaaatgtgccacactttgcctaaggttagtcgttcgaattgaagaactaaccttaggcacaaaagttaggcaaagtgtggcaagttagccatcaaaccaaacaggccctaagtgcagtttataatgtttgttggcgatgaatggccattttcttcatcaatgtcatacaggcaatgttctcaacagctgaattgcactactccattgtggggcttctgtacgaacaatccgcttcaacagaggcactgctccagcagcaattattgctgggtgattctctggatccatgctcagattatataagatagataagatagcctccagtgcatctccatccgcctcttcaagcattttcaccagtggaaatatgcctccagaatctgccactgctcttgtatattccagcacaccaccagatattatcttgttgagctctattacagcacttcttttattttcaaacgaaagtgatatcatcatttgctcaattagccttggaatagtctcatagatagttatctccatatctatactactaacaccatgatctcctgataagccagctctggattctagcttaatgaggcatgccgcaagacaatcctttgactgaagggggaaatttgatttgagcgttcttcttagcaaagaagtgattttttcaccgtttatgctgcggatgaaaagatcaaagttcaataactttgagagtaacctcacagctgcagacacagcctcactgagttcttttataactacactaggaatttcaaagttctcagagtcacttctggtcccatgaataacccctatttcaagaatagcttcaattactgaaccagtgcaagcagcagtcattgcggtggcatgttgctccgaagctgctatatggtcaagtacacaacagacttttgcttgcaaccttggcgatgcttcctttagaacttccgttaagtgtgagatagcatcaaaatcaaagatcaactcgctggacatctcttggttaacagatgtctttgcactgttttcactatccttataaccttcagtatccggcacagcaaccatgcaaatccccatgtcaaacattcgagaaagtatataaattatcttctctagtagttctactggagtatgtcgatccttgactatatttacaagcaattctagtccaccttctgttttgatattatggcagactgtggcacttacacataatttttccaacgcataagcaccagcttctctaacatgtacatctttgtgcttgagcagctgaagtagaggtttaacagccccagcttccttgaatgaggtacgcatatgttcatttattgatgcatcacccattgctctagcagcctttttgattgcagagacatcttcaagtccaaggattaaaactaaccgtgcaacaccatctacccatggcaaaatggtatacatgtcattcttttcagatccagattcctcttgtccttgatcatccaactcaatagctccaacacgtgcaaggaattgctgattagaacgtcctatcatagcattaattttagcttcatctggttttgtatcgttctcattgacactcaagccaaggagcagttcggtagcaccgtactttgggggatgagaactccgctgaatcttagagccatcaggaaaagagggccatgaatgagggagaggtttaaaggctttatatgcagctgagccaaccaaaggaacccgaactagaccctcctctattataaggctgtagtaacaatcatcagtggccagctgtattagtgaacttttagcttcctttctaataatcttatagtcatcttctttggtttgcaaaagatgaaccaattttgggatgacgcctacttcaaccaaagctccatgactagaggaactcaaagctaaatttgatatgataccaccagcggcttctttgacttgtatgtcttcttcatccaggtaaccaacaatcttcattaggacatcgctcttcagaaccttgtacctccatttttcatcaatagaaaagttccaaatggtacacaaacactgctctagaatcttgggggttattgtagatttacagagaagattaatgatttcttccattgctccactctcaccagccatcttcctatatatgtgaactgacgtaatgttacgcagaagacctgtggctgcttcgcaggcaagaatggactctgatttcaggaggctaatgatgagaacaatacaaccagggaattgcattatctcatcgatgctcttccttccaccaagggagtattgatagagtgtgcaaacagcatgctccctatcacgggtgtcattatccaagccaagcaatcgaacgaagagaccaaggtatgcagacccagaatttgtggcaccagcagagtgatcaacatcctgtcctgaagaaccctccccttttgcgaacgcgccggcaaggagaaggcggcgggcgtgggtggccccacacgatagcctggccggaatagcaggtagaaggcggtggcggcggaggtgaaagcgacggccaaggtggtggtagcgcggcagatgtgagaggccgggggatgcagcggcgaccgccggcagcatggcgacagagagagttcagcaaaggcgcgtcgtgtgctgtgggaggcctcgtgccgaatt

SEQ ID NO: 67200 - DNA, 481 bp, Zea mays
  Clone ID: MRT4577_161284C.1
gcgaagaaagcgagcacagcggcgccggcggcgatttcctcgccgaggaagaccaggagtggcacctccggcaagcgggtggcgctggtgtctgcgccgccgaaggcggcggtcgccaagaaggtgaaggcttcggcggcgaagggcaaggccaaggagccggccggctcgaaggccaagggtaatggggaggcaccctcggcagaggggtcggccaagaccatcatcgtggaggcctgcaaacaatgttcttccttcaagataagggctgaggcggtgaagaacggcttagaaagcgctgtcactggaatcactgttgttattaatcctgagaagcacggcgtggatgctttgagattcgtcaactggtggtgaagtcttcgtctcacttttggccatgccaagacctttcactaagatgaagagtcttgatatggatcaagtcatttctgatattgccaagaaacttgcttgaatgagg

SEQ ID NO: 67201 - DNA, 253 bp, Zea mays
  Clone ID: MRT4577_161285C.1
aagtagagttcacctgaggaaattaacagcactttagatagcaaagctcacaaaccgcggagaccaaacaaagagaacgatggaaacaatcatgggcactagtagtgaagaagatgggcggcaaactgaacatggaaaggaaggccagaccacaggagcaagctgccctgtcctgagcaagcatccaacaagaacagcggtgagaaaccagcaggatatgaggattaaattaatggggaacaggctccccaac

SEQ ID NO: 67202 - DNA, 828 bp, Zea mays
  Clone ID: MRT4577_161286C.1
cctcgaggccggggggtgaatacatcatcaccatattctccagaaccagaaagagcacacatggcagagaaggtgtccacgctggtcgtcacactcaaccatggctgctgccgctgcttcaccaggatccggaagaccgtgtgcaagctgcaagaaaccgaggacatccgggcgatttccttcgacgaggtgtccgggacggtgacgatctcgggagccttcgacccgctggtgctcccctgcaagctccggcgcaaggcgggctgtgtgatcagggacatccagctcgtggcggcagaactgaagctcacgccgcaacgaccagccatgccgtcgaaaccgcccgggccggctcctgctccgccgtgctgctgcggtatgtgcatatgcgggtgtggaggctacggctacggctacggctgccgttgccagttcgtggaccacccgccgtgctacgaagggctgccgttgaggcagtacccaaagatcgaggtcacctgcgactgcgaggaggcgtcgtctgcagcgtgcaagatcgtgtgatatttgttaagtgagtttgtttgctacctagtctgtcttgacttggagttgtgttactgtggttctggacggaagaacatggaagggtgatttattagacataaattcagagctaagcattattcatacttcatagaaaggtgattaggcataaaagataaattcagagttggtcatttgtatctaggatatcactgtttggtttaagaattggatctacgtagttcatctaaaaaaaaaaaaaaaaaagcccctatcaatggcagagtttggctttctgaaaaa

SEQ ID NO: 67203 - DNA, 821 bp, Zea mays
  Clone ID: MRT4577_161287C.1
accctcgaggcttgccgggccccttgagacatcatacctattctccgaaccagaagagccacatggcagagaaggtgtccacgctggtcgtcacactcaaccatggctgctgccgctgcttcaccaggatccggaagaccgtgtgcaagctgcaaggtgataatcacttgccttgcctcccggtcgattcagcatctatatcgtcgtcctgtgcttgtgaatcgtgatcgaaaagctctttaactcccccctcttgagtcttgcgcgcgcgcgtgctggcagaaaccgaggacatccgggcgatttccttcgacgaggtgtccgggacggtgacgatctcgggagccttcgacccgctggtgctcccctgcaagctccggcgcaaggcgggctgtgtgatcagggacatccagctcgtggcggcagaactgaagctcacgccgcaacgaccagccatgccgtcgaaaccgcccgggccggctcctgctccgccgtgctgctgcggtatgtgcatatgcgggtgtggaggctacggctacggctacggctgccgttgccagttcgtggaccacccgccgtgctacgaagggctgccgttgaggcagtacccaaagatcgaggtcacctgcgactgcgaggaggcgtcgtctgcagcgtgcaagatcgtgtgatatttgttaagtgagtttgtttgctacctagtctgtcttgacttggagttgtgttactgtggttctggacggaaagacatgggagggtgatttattagacataaattcagagctaagcattattcatacttcatagaaaggtgattaggc

SEQ ID NO: 67204 - DNA, 281 bp, Zea mays
  Clone ID: MRT4577_161288C.1
aagaggctgagtgccatgcacattctcacgtgtatatatgcaaatgcaactttgcctttggtttttttttcccactacacatattttggacaaaagaacatgcgaagaaagaaagtttaaaagaaaagaaaaagaaaacaaaatagcttcgtactagaagatcagtttcacacaagactgttgtccagcaccagcagtagcaacaacaggagccagcaggtcccttttattgtgcagggttaaaaaaaaggggcagggtccctttgcatttttgccctttg

SEQ ID NO: 67205 - DNA, 187 bp, Zea mays
  Clone ID: MRT4577_161289C.1
ctccccacccaccgggggtacctgggtggtcagggggggcacccaacaatgtctgttgggtctgatcttccaaccatctcccacgttttcccatatgagattccccggggcctgtggattttcgacaaggcttacatagtgcccagggtaggggccactttcaacttgggccacgaccgcaaaaagg

SEQ ID NO: 67206 - DNA, 286 bp, Zea mays
  Clone ID: MRT4577_16128C.1
gaaaaaaaaaaacatttcctgcctataaaaacataaacaactcgggcttggggattttaggattcccctaccaagttcagttgactgggggtacacaaccacaaaatgggggggccctggaaaccctttgaaagcttctacacaaaatttgattccagggccctttgcccaggggggtcaaaagccccaacaaatgtccaaaaagataacaattgttttaactcaaaggggcgggggacaaaaaaaaaatcttgcccatgaaaccccatggccctcaaatttaatt

SEQ ID NO: 67207 - DNA, 170 bp, Zea mays
  Clone ID: MRT4577_161290C.1
ctttggaggctcagagattgtggtggcaggaaaatttgactctgctacattggatcagatagagagcgttatcacggcgacttcggctaacacgcagttagtcttggagatcctggctcagatggacgacttgcaggattttctatcgaaagacaagcatgcagatcccg

SEQ ID NO: 67208 - DNA, 347 bp, Zea mays
  Clone ID: MRT4577_161291C.1
ttattttttttttttttttttttttggggaacaaaccatacttgatgattcatttagtagttcattctttacacaggctgacctggcagcgggccagacgtagtctttacatacatgggtgaacaatatgtgtgggagaaaacagtcccacggtctaaaaatggtctttggaaagaatcagggggtgaaagccccataagttatctagattgaacaacaggggagaaacagagatcaaaaagcttcttgagctttcaaaacctcccataaacaaatgccatcttctggcgtgtgaatggtttaacgctccaagaacgaaataacgcttctcacgtttggcacttgat

SEQ ID NO: 67209 - DNA, 1535 bp, Zea mays
  Clone ID: MRT4577_161292C.1
ccgtccggtttggcttttggcttttaggggtagtgctttgtgtgaggtgtcagctgagggatttacggggcctcaccagctcacctccaccaaaaaaagatccctagtagtagtaggatatagtggagaaattcttcgacagaactgaagaactgaacgaggagagacaccaaaggaggagaggcatctctcaggcatggagctcaatccgaccgaagactctgtgatctccgagttcgtgatcgttcagagatgaaacatatagtccactctttctgtcatgtgagtgaacaatttagcccccaaaaatttactctctgaaacatgggtgatcttcccgagccagaagctgccatggccgtgccggagccgtcgtccagcctagcactccgagtcttctacctgcgggtgagcaggtgcgaggtcgacgagtccatgctggatactctcgccctcacccacaccccgctcacccctgacaccatcctggacgtgagcggcgccgagcaccagccaggcatgggcaaaggcaacggcagcgtgtccttctgcctccgccgagaccgcgtcgacaagagatcgggggaagccaccttcgtctgcacggcgaccgtcagggtgtcgggcagcgtgcggttcgaggtccagagcaaggacgagaggatcgtcgtcgggatcctggaggcgtgcgacgtggacagcaagggcaccaagagctgggcgatgaagtgccaggcggcgacgcagcgcggctcggggttcctcaggtgcggcggggagaagagggacacgaagccgccggtggtggaggtgtacgttgcaggcgtgttccggggcacgcccgtcgtgttcaccaaggccacgcagctgcggttcaggcggcggcggcaggtgagggcgttcatggacccgatcccggagtgccgcgagcaggtggaagaaacgcatcacccagaggaatcgggataccggtgctacaagcccgatccgaactgggacgacgacgacgtcgacgacgacagcctctacatgagatccgacgggaccgacgacggcgaggagtacagcgagctgtcatggttcaccgccggcgtgagggtcggcgtcggcatcagcctgggcatctgcctcggcgtcggcatcggcgcgggcctcgtggtccgttcgtatcagtccacctcgaggaccctgaagcggcgcctcatctcaaacctgctctgaaacgaccacactgtgagcgcttatccggtggttcgaaaactttcctactgatgatgatgaaaaatatatgtatgtagatgctgcaacgttgtgcgctgtgccgaatgcatttgatttatagatcgaggaaaacaatctcttctccctgtaaactgttgatacggaggtgttgagcactaaaaatgccaccagaaagtccgcggtccggatgatccgcgttgccaatacgaacggttcatgcgtgcacaaaattagttaggttttatgtatttgttactgcaggattaattgtgaaactgacttttaataggtcc

SEQ ID NO: 67210 - DNA, 164 bp, Zea mays
  unsure (1)..(164): unsure at all n locations
  Clone ID: MRT4577_161293C.1
tnnnaaaaggttcaaataaaataataataatgggtaaacgccgagacatgataatttggaacaattccatttcagacattaacttggaagacagccctttccattgggcacaggcgcaaagctgttaattggttattatttccttgaaagttaaacataaggcc

SEQ ID NO: 67211 - DNA, 640 bp, Zea mays
  Clone ID: MRT4577_161294C.1
gggggttgggggggtttttttttttttttttttttttttacgcattggcaaaacagtcccatttgaaaccgaaacaaacagccaaaagagaaacagaatcccggaaagaaaaaggataacggtaaggagaggcaaataaaaaaagtgataaggtaaagaaagacaaataaaaaagaataaggctaagaaaaagatttaagtatgcggttgtcgtcgtcatcccatcatctgatcagaccagaaagtgtgaaccatggcatgtccgtccatcctagagttgcttcttcttccggatcctcttgctcctccacgagatgagagcggcagctgccgcggtcggaccacctcgccttcgcttcatttgctttttcggcttcctctcctgcctcttccccgtgaagcagggcttcaggaatgccccgtgcaggctgaagctggtggtagcttcctcgtgtgtctcttctctcttgacaccgacaacaggggcgacgctctcatcctccgagtgtggcccagcttctcgcttcactgatacccttagccgcttgcttgggtggctgatcacctcgaagtttcggtacccttcctctgctgcctggttgtcaatcaatactcttcagaacttcaccggacgcgtggg

SEQ ID NO: 67212 - DNA, 413 bp, Zea mays
  Clone ID: MRT4577_161295C.1
attccagagtggtgagccaagaatttacattccacattctgcaatccatacaagcttctatctgaaagacttgagattgagcttgagagaactagaccacatacaggtggtgtttatacgggacagagatgcccacgtattgttttgctatacacagctgctgctttcaccttgtgcggaaaacaagcatttccctgaccctttgaagatcgaacacgatccgttttagttaattacatgccaggatgacagcttggtttcagatcctgcaggaaattctccagtgcagatccgacagtcgcaccagctgtaagtcccccgacagtgaccaatgccgccttacctaaagtcatatttttctttgccagaaaatacagtgatgcaccaaattctgttgctaggataaaacctgg

SEQ ID NO: 67213 - DNA, 467 bp, Zea mays
  Clone ID: MRT4577_161296C.1
tccaaagtcaatagatgttccttataaaaaatagaggttgacagcttgatttcagatcctacctaacaaacagtgatatcaacaattggaagacagaataaattcactgacaacgacggcaggggagtggatgcttagaaagggcacgatatcaacctgcaggaaattttccactgccgatccgacagttgcaccagctgcaagtcccccgacagtgatcaatgcaaccttacctggacaggaccaagaaagtgttgattgcatgctaaatgtatgaatgaaaattggtacaagagcagaattgacctaattgttgaaccaggtttcctccaataaacaaacaatgccataataagcacaaaagcaggtagggggtttctagacttatatgcagcgaaacccacatgctcctcccattgtcagcaatattatctccgttctaaattataatatattttagtttttct

SEQ ID NO: 67214 - DNA, 600 bp, Zea mays
  Clone ID: MRT4577_161297C.1
aagcagtggtaacaagggaggagacggggttttttttttttttttttttttttttttttttttttttttttttttttttttttttttttttttttttttttttttggacaacattgcaaatacccccaaaccaaaaaagattgcagtctttatgggctcccaatcataaaaggggggggggggcaaaaacctaccaattttatgggtgacccaactaaaaagtttgccttttaccctccccctccctgttcatcaatgaagtccgaacaccggtgggtttttaccctcgccaccatgccccaaaaaaaattgccctgcccccgaaaatttcattaacgcctcccaatattaaaaacacaatgcactgttttaccaccttgaatttttccccactatcatcctttaaccccccccaggaaccaacaccttggggggcccccccctcacggtcctggaggggccagacaaaccaaatgcccctggttgagaagcacacaaggggcctgggggcgccccccttttggctggcctttgcgtcccgcggcttacccctccccccccccgcccccaattctttgctttggcgccccccggtttggg

SEQ ID NO: 67215 - DNA, 424 bp, Zea mays
  Clone ID: MRT4577_161298C.1
atcgataagctttgattagttaattgcatgtgaatctagttaataggacttatgtgtgacacttttgaaatgtgataggtgaatctataaggatctattagtgcatgtaatcaaaggggtggacttgcatgtcaatttcccccttttaattagtagaggccggccatgacattgaggatagacaaaatgtgatgggtaaaacacattaaaaacaatttgggataacatgttgtgggaaaaacaataaaattgaggggagtgggaggagaaaccaaagttgtttcatccttgctcccccattttgccgtacctagaagaagaaaaagaaaaaaaaaggcttcatcctctttgatcttcttgaccgacaaatcaaatgaagaagaaaggagttctcttgattcattttcggtttggatgacgatta

SEQ ID NO: 67216 - DNA, 2329 bp, Zea mays
  Clone ID: MRT4577_161299C.1
cttgctttttgaaacagttttgtcgtgatagtttttttaaaaaaactaatacttcttatcaaccatttaattattggagacactttgtttctaatatagtaacaaaacatagattctaccacagcactactaagaaaggtgccacctagatctaccacttaatccttgttggctatagtggtggggacttgctagaattccggtgcctggattttaggttcctttcaggcaacagttattccacagattttatagtaaaattgcaacattagttcattgcaatttatgcagtcataatctgtgattttcggttccgagaattaaaagaactgttagacaaaaccacaaccctgacaaattctgacttgtgttggcacaaagacaattaacaattgttcctagtcagacaaggacaaaattgatatattgcgagacaaatacaaatagtaaatcacaaaagtaacaatttgcttgtactagttagttgtacaagaatattgcctaaaattatcttaaaattcaggcatcggcaatataaaaaaaaactcggccggtaggagaaagaccgcccccacaatattatatattaagaagaagctcaatcggagccgcgaccgagaaaggtcacgaaagtttaatctcagcctgaaattcgctcccactggtattcgaaatcaggacctaatgagtgttactcagaccacctaaccaactcagttagagaccctttcgcgacatctgcaatatagaagtggaaaaataaaaattagctaatcttaatggtgcacacagtattaggcctcagaaacatatatacagatattcagttaaggtaatagaaactatgccagctttctggtataaagagctacacatatcaataatcctttagcaaattgattatgaactacatgtgtagatagagtgctgacaatgggtgaccatgtggatttcgctggcatataagtctagaaaccccctacctgcttttgtgcttattatggcattgtttgtttatgagaggaaaccttgttcaacaattaggttaatgctgctcttgtaccaatattcatgcatacatttagcatgcaatcaacattttctgtggtcctgtccatctagcaacaggatttggtgcatccctgtattttctggcaaagaaaaatatgaacttaggaggaaacctggtccaacatttaggttaacggtcctcttacaccaatcttcatgtgtcgattgagcctgccgtgatcccctctgagggcgcgtatcaaggtaaggcggcattggtcactgtggcggtacatgaagccctggcggctaacaactccgtcctggcgtacttcatgcatgaccaggctgccgtcgaccagttcgaatcaccctttgtcatgtgacttgtgcagagcttatcccaccggagggctggaaaatgtgctattaacagcatacgttgtggcagtgttaaacctgtaaagagtgcaggagctggggcagtcccacagtggatgcaggcaaccatgaagaatgcacctattacattcgagactccatcttcgagtagcttgggcatccagtcttgtgtttatggtgcactaatggttttcacgtatgctagtggaagctcgacatctttgccatctgcatacactagccctgatgtcccaggttttatcctagcaacaggatttggtgcatcactgtatttcctggcaaagaaaaatatgaacttaggtaaggctgcattgatcactgtcgggggacttgcagctggtgcaactgtcggatctgcagtggaaaatttcctgcaggttgatatcgtgccctttctaggcatccactcccccgccgtcgttgtcagtgaatttattctgttctcccagttgttggtatcactgtttgttaggtaggatctgaaatcaagctgtcatcctgatcatggcatgtaagtaactgaaatggttcgtgttcaaacttcaaagggtcagggaaatgcttattttccgctcaaggtgcaagcagctgtgtatagcaaacaatacatggacatctctgtcccttataaagatcacctgtatctagtctagttctctcaagctcaatctcaatctttcagatagaagcttgtatggattgcagaatgtggaatgtaaattcttggatcaatactctggagtctggaatatcgtagcctcctgttttttttttcaaaatacacatagcgtatgggaacacctctacctctactttttgtataaggaacatatattgactttggattgagctgatccttactctttaaaaaaaaaaaaaaaaaaaaaaaaaaaaa

SEQ ID NO: 67217 - DNA, 304 bp, Zea mays
  Clone ID: MRT4577_16129C.1
aagagaaccctccttcatggcgttggttattttatatcgaccgacacatcccatcccctaacaaggccgtatattttcaaacctataatcaaactctttctccaaccccaaccgatccttgtaataaatattcgacacaggctttaactcctcctacaaaaagcctgtcctaaacacaattttgacatcgaccaagaccttctttaagccgtacacgtgttccgagcacttcttacagtcaaaaacactgaaccccctccccccaaatcggccctaaactcgaacattcccaagatcctccctc

SEQ ID NO: 67218 - DNA, 571 bp, Zea mays
  Clone ID: MRT4577_1612C.1
aaaaaagggggcaaattaaaatattaaaaccccgcccgggcacacggggttgaaattttggggaccgccggggggtaaaagaaaataaaaaattttttccccccggcccgccccaaaaaaaaaggaaattggccaccgggccgggacccaattaaaaaaaccccatttagggggggcgggccccctccccccaaaaaaaaaaatttggggtaccccccaaaaatccggggggggcggggcgggccctttgttgggaaaaaaattaaaaacccctggacgttgattttgggggggggggaaaatttgaccaaaaacccggggtttttacccccggggaaccccggggaaagcccggggggccatttaaaaaaaagggggtatttgcggaaaacccattggccacctttccattggggggggccgccccctttgacctggaggggaaaaaaccccgggggaacttcttttttttgggggtgggaaactaagggggaaagggacacggatttggcccaaagcggggggaaccaaacgggaaaaccgggggggccctggtcctgggggggaaaaa

SEQ ID NO: 67219 - DNA, 729 bp, Zea mays
  unsure (1)..(729): unsure at all n locations
  Clone ID: MRT4577_161300C.1
gctgaacttagttattaagaagatacaaaaactgtctattcatgggcatccattcatgctggcatcatttctgctggcagtttacaagtacctccacctacgcaatccgttgctcagttaacctagagcgtttcaccatcttccgagtctgaataggtcacaagcgtcacaactggtcgcagctcatcgtgacaagaaaccagcttgtcagcagaatcatccttgctcttcaccttcgcgttattatcatctgaactgtgagttccagatgcctcattcttatcaccaaatgcatctgtgccagcatctcgataattaccatccctcatcgtcatttcgacttcttcaacttctcttgcatctttaccagcaggaggatcaatattgggcaactgtggttcctcgaaaacactcccaagctgcaaggctcttcgcattgcttcatacaacctgttgctttgtgtttcctcgatggtttctgtctgctccacggatacggattcatcagatctgtgttctggttggacgtcgggacgattgtactggaatttgctgccatggcctatttcaaaaatcctcgaaggccgtgaattcgaggcgccgccaatgccatggctggagttgtttgcatttgaattacgtagttccttctcgaccttctttcggtgtttctgaagatgagcagagatctgtttgcgactaacgnagttcacattcatgagcaactgt

SEQ ID NO: 67220 - DNA, 1225 bp, Zea mays
  Clone ID: MRT4577_161301C.1
cattgggtacctcgaggccggccgggacctccgtgggccttgtgtgagggggaaaatcatccgcgcagagggacagggcacacgcactccgagggagcgcagccgaggagaaataatggccacggcgacgaccctctctttcagcggcggcggcggcggcactaccctgctccgcgggcacgtggccttggcctcggggcggtgctgcacgttcccgcgctcgcggtggaggccgccgcgcttgtcggcctcccgcgcggatgactcctcgccggctccgttcgagatgacggtggaggacgcgctgaagctgctcggcgtcgcagagggcgcgtcgttcgacgaaatcctgcgcgccaagaacgccgtcctcgcctcctgcaaggacgaccaggacgccgtcgcccaggtcgaagcagcctatgacatgttgcttatgcagagcttatcacagcggagggctggaaaggttgctaataaccgcatccgctttgctgatgttaaacctgtaaagagtgcaggagctggggcagtcccacagtggatgcaggcaaccatgaagaatgcacccattacatttgagactccatcttcgagcagcttgggcatccagtcatgtgtttatggtgcactaatggttttcacctatgctagtggaagctcgacatctttgccgtctgcgtacagtagccctgatgtgccaggttttatcctagcaacaggatttggtgcatcactgtattttctggcaaagaaaaatatgaacttaggtaaggcggcattggtcactgtcgggggacttgcagctggtgcgactgtcggatctgcactggagaatttcctgcaggttgatctcgtgccctttctaggcatccactcccctgccgtcgttgtcagcgaatttattctcttctcccaattgctggtatcactgtttgttaggtaggatctgaaaccaagctgtcatcctggcatgtaattaactgaaacggatcgtgttcgatcttcaaagggtcagggaaatgcttgttttccgcacaaggtggaagcagcagctgtgtatagcaaaacaatacgtgggcatctctgtcccttataaagaccacctgtatctagtctagttctctcaagctcaatctcaagtctttcagatagaagcttgtatggattgcagaatgtggaatgtaaattcttggatcaatattctggaatataccgatccctc

SEQ ID NO: 67221 - DNA, 1229 bp, Zea mays
  Clone ID: MRT4577_161302C.1
gcagaaaccgacgcgcaggcacacgcacgccagactagcggctctccacgcaagcggagccgaagagaaataatggccacggcgacggccctctccctcagcggcggcgggggcggcactcccctgctccgggggcacgcggccttggcctcggggcggtgctgcgcgttcccgcgctcgcggtggaggccgccgcgcctgtcggcctcccgcgcggacgactcctcaccggcgccgttcgagatgacggtggagggcgcgctgaagctgctcggcgtcgctgagggcgcgtccttcgacgaaatcctgcgcgctaagaactccgtcctggcctcctgcaaggatgaccaggacgccgttgcccaggtcgaagcagcctatgacatgttgcttatgcagagcttatcacagcggagggctggaaaggttgctaataacagcatccgctatgctgatgttaaacctgtaaagagtgcaggagctggggcagtcccacagtggatgcaggcaaccatgaagaatgcacctattacattcgagactccatcttcgagtagcttgggcatccagtcttgtgtttatggtgcactaatggttttcacgtatgctagtggaagctcgacatctttgccatctgcatacactagccctgatgtcccaggttttatcctagcaacaggatttggtgcatcactgtatttcctggcaaagaaaaatatgaacttaggtaaggctgcattgatcactgtcgggggacttgcagctggtgcaactgtcggatctgcagtggaaaatttcctgcaggttgatatcgtgccctttctaggcatccactcccccgccgtcgttgtcagtgaatttattctgttctcccagttgttggtatcactgtttgttaggtaggatctgaaatcaagctgtcatcctgatcatggcatgtaagtaactgaaatggttcgtgttcaaacttcaaagggtcagggaaatgcttattttccgctcaaggtgcaagcagctgtgtatagcaaacaatacatggacatctctgtcccttataaagatcacttgtatctagttctctcaaccccaatcccaatctttcagaagaaagtttgtatcgattgcagaatgtggaatgagaattcttggattaattgtatggagtctggaaaatggaatgtacattcttgaaaaaaaaaaaaaaaagagcgcgccctctatagagagat

SEQ ID NO: 67222 - DNA, 667 bp, Zea mays
  Clone ID: MRT4577_161303C.1
aattcggcacgaggctcacactccgagagaagcaaacacaagaagaagaaaaaaaagaaaaccgtccgcagaaaaaagaaaacggcagcgccagccagtgaggagaaaagctccgcatccgcgtccgggtccccctcctccccaatgcctcgcccgtagccgcgtccgccgcacgtcgcaatggccggccccagcgtgcccgcagcggcgctggcggccctgctcgcggtcgccgccctcacgtgctgcgccgtcgcggagccgccgccgagcgagcggtccgctctgctggcgttcctcaccgcgaccccgcacgagcgccgcctcgggtggaacgcctccaccccggcgtgcggctgggtcggggtcacgtgcgacaacgccaactccaccgtcgtcgaggtgcgcctcccgggcgtcggcctcgtcggcgccatcccgccgggcacgctcggccggctcaccaacctccgcgtgctctcgctccgctccaaccgcgtcctcgggaccgtccccgacgacgtgctccagcttgccagcctcaaggcgctgtttctgcaacagaacctgctctccggccccatcccgacgggaatccagaagctcggcggcctggagcgcctcgtgctctcccacaacaacctctcgggctccatccccttcgcgc

SEQ ID NO: 67223 - DNA, 240 bp, Zea mays
  Clone ID: MRT4577_161304C.1
ctccatcttttgctttgagaccgagtcgctcgcacagatcctctgggagactgatgagaagatgatcgcacggatcgatccaggaagacgagacaagctgcttcttctgctgccgccgccactggcagggcggtacctaataggtgggccctgcggtgcagcaatgctcactgggagggggatggtggcaaacacgtagcgtcgatgaccacgcgcaccggcaggtgacattctgggaaa

SEQ ID NO: 67224 - DNA, 517 bp, Zea mays
  Clone ID: MRT4577_161305C.1
tactgcgttcgaatctgcgctgcgcggaagaagggaaggggaaaagcagataagcttgaacgcgcgcgacagggtcaagtacagggccggggaattgtcggataatggaagtgggcaaggctccgagacgactgatgtccccatcggactttgctggggctgtgcctttgatgcttctgttgatcgttctattctcgggctcggtgcggcggagatcggccacctgcaaggcaccatcgcgaccacgctgtacaagcacacgttgttcttcaaccgctatggggacagggtcgtcttcttcttggagacgtatcggcacgtttcgggcactcggtttaggattcggcctgtccatcgtcagcgctgcctttatgaatggctcccttggtagcaagtgcatacctcaaaacgcagcgttatggaacttggacatctacctagaggacattctgtaaggacttctcagaagcgattcttgctcatacgacgcctaaggaaggtttggtcctgagaagtt

SEQ ID NO: 67225 - DNA, 269 bp, Zea mays
  Clone ID: MRT4577_161306C.1
gattgtaatcagcagaaccacggcgcccactcagtttctcacacaaacccataaactcggaagtgggcaaaattggacaatgggataagctggaacatgcgtaaagacataggtgctcaaagcagagaaagagcttataacatgccaccagattttggtcattcatacctcgcactagttctgaacttgatccgaaaaatacagtgtcagagtggcataacgcgctactcaccggcttggacttggcgggcctgggtgcttggtcccaa

SEQ ID NO: 67226 - DNA, 668 bp, Zea mays
  Clone ID: MRT4577_161307C.1
aagtcgcgtcgcaacctgctcgctccacgcgccatcctctcctccggatcctcgaatgtcgatgagcaagctcgcccgcgggtgggccgacctcccgcgcgacctgctcgagtccgtgcccgcccgcctccccgtgccggacctcgtccgcttccccgccgtctgcaccgcctggcagtcggtccacgcagctgccgccgcgcggcttcggcaggccacgccgtcgtccccgtggctcatgctccccttcaatccgaccgcacgggccggcggcgtcgccaaactctcggtggcacggttcctgagcctggcggagggccgggtgtacgtgatccgccagccggcgccggccgcccgcgaccgcctctgcgtcggctcgtcggccgacggatggctcgtcaccgctgacgcccgctcggagctaagcctcctgaacccgatcacgggcgcgcagctccgcctcccgcccgccgccacgctcccgttcgtcgacgcccgccgcggcgcggacggccgcgtcgagagctacggtctgcggtcctgcttcgccgacggcggaggctgcggcgaggaggcgctggtcccgacggagacgctagggcccgacaggctccgtacgaggtatacgaaagggccatcgtcgtgtcggcgccgcgaaaggtgccccc

SEQ ID NO: 67227 - DNA, 592 bp, Zea mays
  Clone ID: MRT4577_161308C.1
gacaaaacggggctggtattcagttacaggggtctgctgatgaatacggaacaattgtcgcaacagagactggtactaatcccgaccaaacctttcgtgcagtaatctatagagtaatggccaagacagactcggttgtttgcgctcgacagattggaaccaacatgctacatgcggcgcaaggtacatataagccaccttcacccatgcctcaggttcaacttcgtacatgtcgaagtaactctcacagcgttatatccttttttttttattatccccatcgaacacagttaatggcaattttggtaacttgcccagagaactcatcgacatatctaaattacgagtgcgactacccacatgatcaaaaacagaaccatggtaacgaggagagggcggtagaaggggcacatgatgcatacccttgaccgggccaggggtgatggtcaccgacccatacccctgcttcgggtggcgtgattcttcgcggtgcccagtggggccgtcatgagtcggagcctgtagacgaggatcgagtagcggatccggcttgtcgaggatgctagaatctgcacccgccatgtaacgcgct

SEQ ID NO: 67228 - DNA, 402 bp, Zea mays
  Clone ID: MRT4577_161309C.1
attcggctcgaggcagaccaggacgcttatttctggtgaatgattctgaaggcaatggacggaagagcctgcactctgttcttccccaccggagaccaccgcccacctatcttgctagctgggcctcgaccgcagctaaagccgggaccgagctaacttggtgcatgcgtgacagaactgcaagctggacgcccttgtaaggatcgacccgaatgtcgcccgccgctcccacaccatataccaccggatgtccttgatcaacagggccacctacaatggccagctgcagatgctttccatgtggacgggcaatgacagagcacccgctggtaactagcaccagctgaaccggacgaagcacacgacgaagattctcgcaggcatgcatggccggacggactg

SEQ ID NO: 67229 - DNA, 266 bp, Zea mays
  Clone ID: MRT4577_16130C.1
gagctcactagtctgcggccgcccttttctttttttttctggggggcattttaaaacaacgcggcggtgcttatactacacacatgtaggacatgcccggcaactacctaatggcgtcggattacaccggcggaccatacaacgtccctaaggaacgatgtctccagccaaccttaccttgtttgcgcaagctgcacatgacgcacaaactgcataaacgtgacacgaggcggaacctagcccggcccacgcgctcactaggggcc

SEQ ID NO: 67230 - DNA, 221 bp, Zea mays
  Clone ID: MRT4577_161310C.1
gaggtccaattttaagcaaattaaagactaaaatgaaataaaaggaagcgatccaaattagtttcctagaaattaaacccccactaactcactggttgcatgcaaaagggcatgtcccgggcccacggtacaccaactttattttaccctagatgttttaaagttcaaacgcggcagaaacttatttcctcacccttcccaggaggggggggggggggggg

SEQ ID NO: 67231 - DNA, 144 bp, Zea mays
  Clone ID: MRT4577_161311C.1
taatgtttgatgattgttagatgtgtattgtattggtaaatggatgttgatggtatttgtagatatatgtatgtatggagattaaatgaggatatattggatgattgttttttttttttattggtttgggtggggggggggggg

SEQ ID NO: 67232 - DNA, 359 bp, Zea mays
  Clone ID: MRT4577_161312C.1
acacaagtttaggctggtgtattatctcgagcaaattgccgatgatggtgttaaatatactttgtagcgattccgctgtgaaaaaaacttaaatctgaggcatttgcagagtattgccgtacattttcatcttccctttacatagtgaccctcacaaaaaaatttcatcgtctataggtttgtgtttcattttctacagactttatacttcctacgatgttatattacattctgatagttaattgactggatcgtgtgaacaactgcaaaaaaaaaaaaaaaaaaaaaaaaaaaaaaaaaaaaaaaaaaaaaaaaaaaataaaaaaagtaaataaaaaaaaaaaatcaaggggaggccg

SEQ ID NO: 67233 - DNA, 569 bp, Zea mays
  Clone ID: MRT4577_161313C.1
ctctacttcccgatcaacgcggcttcgccagcagcggcagcgcaagaggtagattggagtatcaccaccaccgcgcaagatatggcgaccgagactttcctcttcacctctgagtctgggaacgagggccaccctgacaagctctgcgaccaggtctccgacgctgtgcttgacgcgtgcctcgcccaagacgctgacagcaaggttgcctgtgagacatgcaccaagaccaacatggtcatggtttttggtgagatcaccaccaaggccactgttgactatgagaagattgtgcgtggcacctgccgcaacattggcttcatctctgatgatgttggccttgatgctgaccggtgcaaggtgcttgtcaacatagagcagcagtctcctgacattgcccagggtgtgcacggacatttcaccaagcgccctgaggatattggtgctggtgaccagggtatcatgtttggctatgccaccgatgagacccctgagctcatgcccctcagccatgtgcttgccaccaagctgggtgcccgcctcactgaagtccgcaagaatggcacttg

SEQ ID NO: 67234 - DNA, 466 bp, Zea mays
  Clone ID: MRT4577_161314C.1
caaccaccaaagaggccacaaggaagggagcgggcccaacacaagacacaggaaacagaagaaaaaccaccacgcaagaacacagaacaccgcagaagacaaaagacgggaacacgattgttcgagaggggggggaaagacagccgggaatcgcgggcgacaaacaggctcacagatggacgcaaaaacaaccgagggatatggctgacaacgggagacacgcaaaactgagacccggcaggggaaagaaagggcaaaccagaacggacatggggctttactcggagatgcgaaaaactgggggaagaccagagactgctggccacaatgcgcgaaggacagcgcaccctcgcacaccgggacaacaaaaaggctccggcaaaagccaccggctacttccaaaagaagaaaggaagggagcgctgcaagcccaacacaggcaccaacaacaaacttaggagagcgc

SEQ ID NO: 67235 - DNA, 492 bp, Zea mays
  Clone ID: MRT4577_161315C.1
actaaggagcaccctcctcatctcattatctgcctgttagatgaataatgtgtgctgcaagagagccatgcactaactcctgcctctataggggaaaacatctagatgcactaccggtgatatttgagcacaaagcacaggcgaacacttggcgctggcctatgggctccacacacactctgttataggacgacgatgatcttcgttttacacaaggataccagatgttttattcactacgactggtcccactagtatatagttcaaaaaacatggccggcggctagtatgccaagggcaaagacctatgggacgcacaaagattgctgtatgtgaacacccataaatttttgtagaagagcccgacaacctttagttccatgagcatactcgcgaacttgcctacaccagacagttcattgaccgaaaactctccgactgcctaccctatatattacatgggaaatgcaaacaaaagacgcgggggttcag

SEQ ID NO: 67236 - DNA, 637 bp, Zea mays
  Clone ID: MRT4577_161316C.1
gctcgctgtccggtgcgctctctctcactattcgttccccgcctcaccccaagacaggcgtctcgataggggttcaccgccgccgccatcgccgccgacgctatgcctcaccgcagatcaagaagggctgccccacaaccaggtacccgtgatgctccagagaagaacgcgccacagccagcacgccaggatcctcctccaaatactgatcgaaatgggggcggctccatgttaggaggagttgaatgcaccattgctcaacgtatgacggttgactagtcaagtgccatggaacacaggactggtgatagctgtattacgccaccggaccaatcatgatgagactgtggactcagaaactgctgctgctgcccctgcccctccagtgatgaatgctgacgctggcacaatccattctagggctttccaacactagtgtcaacaactatggtagcgagatcaaaaagcgtgatgtctacctagacatgctgaacgaacgacaccgtgaggcagagtctgcctaaactgcctcagcaactatgccaggattatctttcagagatgctatctcattaataacatagcgcgacacttttgtcaccacagcttgagagtaaacttgctgggatgaatacat

SEQ ID NO: 67237 - DNA, 119 bp, Zea mays
  Clone ID: MRT4577_161317C.1
gtcggtgcttgtactctgcaacaactgggttgtgttggcactttgccaagggcgggagtagaagtttgaggagagattagataactgttgatgaggaaagggtgaggcttctcaatgaa

SEQ ID NO: 67238 - DNA, 541 bp, Zea mays
  Clone ID: MRT4577_161318C.1
gacgacccaagccaaaatatatcaattctatgcagggggggaacccccttggcacatttttttaacaacccactaagtgtattcatccacaaaaccatggctaattttcttatagaatactcaacatgaggctaaaactggcacaaggtatcatgcccggcataaaatcaatgattcatggtacactgaacacacaacagcccatcacctttaacgggaaagatgcggaacacatggccttaaaaaaccaacatggaaggccaccccccaactgatgggcgatccggagccaaaccactatttatccgcgcatcagctgatatctagaaatgtaaacatgcggcccaacacattacgcatacggggcagagactatgaggagccccctcctagtaatatatatcccccgaccactatattattcaggggatgggcaaaacttggacatgttccggcatccattatgcaaaccaaaccaccgattcccttgctgggcaacaaaatgccgattgggcctttgattgcaccttcttgctttggg

SEQ ID NO: 67239 - DNA, 144 bp, Zea mays
  Clone ID: MRT4577_161319C.1
aagaaaatcactatcacgaactttaacttgcttatgaataacacacaccgtaacggaatttcgcagttttcaaacttcgataatgttactcatttattcatctacaactacaaaccacttactccttatcggtttggcattaat

SEQ ID NO: 67240 - DNA, 379 bp, Zea mays
  Clone ID: MRT4577_16131C.1
ctcgattcaccctccctccctcacacaaataataaggaaaggttccgcccttttcctccgacatccacaaggggggaggggaaaacacgtacattcacccggcggctataatggccatcgttccggctccggcgacgacgaccgccgccgctatcctatgcctatgcgaggttctcttctgtgccgcggctgacgacccgaacctccgcgactacgtcatccaaggacgggtgtactgggacacctgccgcgccaggttcgtgaccaacgtcaccgcgtacatggggggctccacagcgaggctaaagtgcaagcactttggcaccagaaagctggagcgcgccataagcggagtcaccagcgcaaccggaacctacac

SEQ ID NO: 67241 - DNA, 429 bp, Zea mays
  Clone ID: MRT4577_161320C.1
caaactcgtcatcccaagcgtccgctctttctattatcgcttatgcgtcgccctttttttttttttttttttttttttttttttttttttttttttttttttttttttttttttttttttttttttttggtttttttttttttttggtaagggcaaaaagggtttcccggttgaccctcccggggttttgcaattgtccctcccgagagttcaacaaacccgcattttattacgtaggccaccctgtcccagcataggcacgattaaatgtcccttaccaggctgttcacgttgcgcttttcaggggggtacacgtccataatttttgtggggcattcgtccttaattcgatggctgcaatggccaactccatgttcattttggaatcctggtcctctgccctatgaggcgtgcatgtcttcaaaggtt

SEQ ID NO: 67242 - DNA, 677 bp, Zea mays
  Clone ID: MRT4577_161321C.1
aatacaaaaaaaatttctcttataatcagggccgggacctccgaatttactgatccatccatctccatccccatcccgtgacccgtgcacgccgccgcttcaagtcctaacaagccgcatcgcatcgcatgcgtgtgctgtccgaccgccatctccgcagccggctggcctagctacctcacctcacctcacgcaggcacactgcacacacaccgcccgtctccacctgcacagccctcggatatcacgtccgcgtgggcccagctgcggcgcccatgtcagggtctccctcgcccatgtcaggcatctctccctccggggagggcccacagttcccaggaacatcgccgaccgcctcgccgccgtcctcgaccagcaccgcggcgcgccgctcctccgccggcgcgggcagccacctcgtggccctcgccatgctgccgttggccgccgccgtcagcgggatgctctaaggtcgacgactccttcgtctccgcatgcattgcgcagctggacattgttgcgtagtataagctttcactgtgttttctattctatgctgcctctgttgtactatacacataccgcggactcgatcgattatcataaggcgttagccttgcttcttgccagccgagatgagaatgagaatacatgcatgtcatgtcccgttcatgttt

SEQ ID NO: 67243 - DNA, 188 bp, Zea mays
  Clone ID: MRT4577_161322C.1
cttcaaacaaattcatcaacaaataggaactattgcacctatgaaccggggcacacacacttcatcaaacatggagcacgattccgccaaggaacaaagggagcttgacccgctccgttaacaacacatcgggaaatcatggggaaacacatgccgggatagcactccggggccctgggcccgccacc

SEQ ID NO: 67244 - DNA, 922 bp, Zea mays
  Clone ID: MRT4577_161323C.1
cggccgggacctccgaatttactgatccatccatctccatccccatcccgtgacccgtgcacgccgccgcttcaagtcctaacaagccgcatcgcatcgcatgcgtgtgctgtccgaccgccatctccgctgctgctggcggcggcgacggcgacgctagtgcttctgtcaccgtcgagcgcgcagccgatgccgtccccggcggcggcgccgggccccgcgggcgggaccgggatcgactcggcgtgcctgaactcgctgctcaacatgtcggactgcctcccgtacgtgagccaggggagcacggcgcggcgccccgacgcgccctgctgcccggagctggcggttctcgtcggctccaaccccgtctgcctctgcgagctcctctccggcgccgccgactcctacggcatcgccgtcgactacggccgcgcgctcgcgctccccggggtctgccgcgtcgccacaccgcccgtctccacctgcacagccctcggatatcacgtccgcgtgggcccagctgcggcgcccatgtcagggtctccctcgcccatgtcaggcatctctccctccggggagggcccacagttcccaggaacatcgccgaccgcctcgccgccgtcctcgaccagcaccgcggcgcgccgctcctccgccggcgcgggcagccacctcgtggccctcgccatgctgccgttggccgccgccgtcagcgggatgctctaaggtcgacgactccttcgtctccgcatgcattgcgcagctggacattgttgcgtagtataagctttcactgtgttttctattctatgctgcctctgttgtactatacacataccgcggactcgatcgattatcataaggcgttagccttgcttcttgccagccgagatgagaatgagaatacatgcatgtcatgtcc

SEQ ID NO: 67245 - DNA, 114 bp, Zea mays
  Clone ID: MRT4577_161324C.1
aacataatcaattcatatttattcaaacagattcaaatcgtaccagtcacatatgttttactctaaaaactacactcaataccagaaccaaactaaaatctccacacaacatac

SEQ ID NO: 67246 - DNA, 688 bp, Zea mays
  Clone ID: MRT4577_161325C.1
gccggccgggccgggactcctattcaggcggctggttttcagtatttttttagatctcaaagctttggtcaacaagtttaatttttacccaagcaaaaaacatatatatatatcgccaaaacactgtctagattccatatatagctcaagcaaaagcacttcatcatagaagctagctggctaagtatttcttgatgggccaaagttgtggtggtacaaactagaggacgatctgacgctcattctatacgaatgacaccttttaatcggagaagtatttgtccctctttgactttgctgctctgcaccttagagctataatggttgctacagtgaactcctccccacatgtgctggataggcacagtgcacaccaagcaagcatcctttagggtacggaaaagggaggggagagaagaccttacatttttcgatgacagctgacagatattagaggacatgatatcttcggcggttgagcagtatcttgattcataaatatcttccagatctttcgttgtccccgaagaaatttccttaagcatgtcactgtaactcttaatcataaagcctccatggttagaaccgtatccaacttcaagagcagatttctcatcgtgatgccttgaccgtcctaaattgaagtcccatatctgccacacaaaaaaaaaaaaaaaaaaggccccta

SEQ ID NO: 67247 - DNA, 1263 bp, Zea mays
  unsure (1)..(1263): unsure at all n locations
  Clone ID: MRT4577_161326C.1
ngaaataatttggagagtgccgggggacctccgaatttactgatccatccatctccatccccatcccgtgacccgtgcacgccgccgcttcaagtcctaacaagccgcatcgcatcgcatgcgtgtgctgtccgaccgccatctccgcagccggctggcctagctacctcacctcacctcacgcaggcacactgcacacacacccatggtggtggcggcgatgcggcggccgtgcgctgtgccagcgctgctggtggcggcggcgacggcgacgctagtgcttctgctgctgctgtcaccgtcgagcgcgcagccggtgccgtccccggcggcggcgccgggccccgcgggcgggaccgggatcgactcggcgtgcctgaactcgctgctcaacatgtcggactgcctcccgtacgtgagccaggggagcacggcgcggcgccccgacgcgccctgctgcccggagctggcgggcctcgtcggctccaaccccgtctgcctctgcgagctcctctccggcgccgccgactcctacggcatcgccgtcgactacggccgcgcgctcgcgctccccggggtctgccgcgtcgccaccccgcccgtctccacctgcacagccctcggatatcacgtccgcgtgggcccagctgcggcgcccatgtcagggtctccctcgcccatgtcaggcatctctccctccggggagggcccacagttcccaggaacatcgccgaccgcctcgccgccgtcctcgaccagcaccgcggcgcgccgctcctccgccggccggcagccacctcgtggccctcgccatgctgccgttggccgccgccgtcgtcagcgggatgctctaggtcgacgactccttcgttcgtctccgcagattgcgcagctggacattgttgcgtagtataagctttcactgtgttttctattctatgctgcctgcgtgccgctcgacctctgtcgttgtactatacacataccgcggactcgatcgattatcatataaggcgttagccttgcttcttgccagccgagatgacaatgaatgagaatacatgcatgtcatgaaaaattcatgtctaactagctagtggcagtgtgtcgggggtgactgggacataactcggacgagcgattcgtcgtcacgccccaccttgctctttcatttatgccctttattggactggtcaagccgatctttccccnnnnnnnnnnnnnnnnnnnnnnnnnnnnnnnnnnnnnnnnnnnnnnnnnnnn

SEQ ID NO: 67248 - DNA, 173 bp, Zea mays
  Clone ID: MRT4577_161327C.1
aattagctccttaaccacgggggtcagtcaggaaaggagtgctggttctatgttatagcaccctgacacatttggcacccgcataatgtacgctttttatgttactgtatcgaggataagcccatcatacttgagaactattatatctatagtggaaacttacaacatagact

SEQ ID NO: 67249 - DNA, 439 bp, Zea mays
  Clone ID: MRT4577_161328C.1
ttttagcttggggttgtcgtttataatataaatttaaatatatttttaatctaaactatcaataaaatgccttatcaagatattttctaacggttctgcaggcctaggattttctggaccacctaataaacctaataacctgctatgccagctccaccaaattaattttttaaagatagatcagtcccaaatagaacctaagcagaacatcaaagcaagtcctccatgctatgacgcttcctctccttgacaaaaccttaaagccactctcactcggcgtgactattgcctaataatcctccagacgtccacgttcagttacttcaacaaagtccgccacttctgcaagacaggacaacttcgtacagaactttatcataaggtgtgcacatcacctagactacaattgcaaagataaagattttgaaatcatctaacc

SEQ ID NO: 67250 - DNA, 422 bp, Zea mays
  Clone ID: MRT4577_161329C.1
cgtccgacggctactcgcccttcagcttcctctctcactgatgacaaatgagctagctgccgcgcgcgcatggattgcattgcatctgctgcgcacgtaatgtagatcgatcgatcgatcgatcaccagttagcctagctagctagtttgcttatcatgcatggtgatcgatcggtcctgatcatcggttcttccgatccctgctgtttaattcctttcgagagagtacgttgggtcgaccagtgtgagagtgagcagtatagtagtgttagcatttagcatcagaagttgagggaggagcgatcgagagagaagaagagagagtacgtagctgcgtgccctagcttcttcatgtgtactccgtcttcgttctagtacgtcctacaagacctacgtactctcgatctgtagctttaaccatc

SEQ ID NO: 67251 - DNA, 316 bp, Zea mays
  Clone ID: MRT4577_16132C.1
ggccagcccccgttagtgttttattcccatgctggagtttatacatctttatggggcaaggcatatacatttttggtctacatgttcaaaaaaatgtccgggatgcattgaactttgcactggatgaaaagatgtctgctgatccttatgattttctgatggaagaaaaggaattgcttgcttgggttaaaggatatcccttgaatgggttgcgcctctgtgggggcttaatattaacctgtttttttaaaattgaaaagagatagaattaggtctaataaatgaagggcaacctttaaactgtgttttggaaaaa

SEQ ID NO: 67252 - DNA, 371 bp, Zea mays
  Clone ID: MRT4577_161330C.1
tcgttttacccacaggttgcgctaaacattaacgccttcttgcaacagaaacaggggctaggattctacccacaggatgtggcaaacaatgtctgcttcttacaacaacaacaattgctgccatttaaccaactcgctttcacgaatcctaccaccttattgcagcagcccaccattcgtggtgccatcttgtacaatctttatgaactatactgtaataataaagttctaatgctgctaaaaccaagccgggagcgggtgcgagggcaagaacttctacacccggagcgcgttcctgatcgccgacaacaagtacccggacttaacggatggccgttctgaagaatccagctttcgtcagattgctggct

SEQ ID NO: 67253 - DNA, 1184 bp, Zea mays
  Clone ID: MRT4577_161331C.1
cggacgcgtgggttttgctgccgcctcattgcttcgcttctcccctccctcgccgccgcctcctcgtggcgagcgagtcgaatccattccctcccaccccacgggcgccggccgataccgacccagagctcggacgcgccgaggcgaggccaccgccggaagcattctcgcctgcttgccgcggggacggtagctacctggggggggggggggggggggtaaggaggagcgccgcggccgcgtgggccggtcttcgtgtgctgtgttcagcagctagcagtgcgtgccgagatgttcgcgagccggccggtggtgcacccgctggaggtggcggcgcccgcgcatccggtgcagcagccggcgccgggcgtgctgatgaaggacctgcccggtatgccggggacgcccggaggcctcggcctccgcgtcctgcagctcctcttcgcagccatctcgctggccgtcatgtcgtccaccgccgacttcgccagtgtctccgccttctgctacttaattacaacaaccgtcttgcaatgtgtgtggagccttacggtagctattgtggacatatatgcactgcttgttaagcgttgtttacgaaatcgtcgggctgttactctcttttccattggagacgggatcacatggctagtgtccttatctggagcatgcgctgcggcaggaatcaccgtcctgatcgacgcagatctgatcatgtgctcagagaacccttgtgctagttttcagactgcagtggcaatggggttcatgtgctgtttttctctcttaccatcctttctcctgaacttttattcgatcgcatctagtcacggctagctgaaaagaaagaggaggatagaacctgatctcggagcagtttgagcatccaattgcggttttagtgacaacaggatagagtggcacagctgttagtattagaattggaaggtgaagtatgtgtatggctcaccatatctagtttaacctgtaaaaaagaaatagggaacggcctgtttggccgcagctgcattaccttgcagttctgtggtactactatgtaaaatgcttgaaaatgttatagttttaacgtgtcctgactcttcaaccatgtatattgcgagtgaagaggatgggaaatggtgctgaagaatttcgtagcagttcatggcaggactcacttccgt

SEQ ID NO: 67254 - DNA, 2157 bp, Zea mays
  Clone ID: MRT4577_161332C.1
atgtctcaggaaaagaaagctgttgccgaaatgaagctgagcctctctgaggagaagaatcttagctttattgaatcaatatcaaagacaaatacagagaagattacaagggagattttggaaggtttatctgaagataccggtgatagtgatagttatgatgtggaaagcggaggtgaagactccgaagaccgatcatggcgaccaagccactcagtcttcggaaaatcagctattaaacagagtcatctcgataatatgaggggaagaaattttcgggacatgtctattgtaagggctgatgacggagagaggactgtgcctactcccgaagagaatgaagttgtgatcttccaaagcttttttaaagctgggcttcggtttcctttaagcaaatttgtggttgaggttttaaagatttatcaagtgtaccttcatcaaattacgcccgaagcgatcataagaatgggaatcttcgtatgggccgtgaagagccagggtttggaaccgaatgcaaaaagtttctgcaatatacacgagctagtgtatgagacaaaaccgtggggcttcggtgctcgctctggttcaagctgtcccgtgccgacttttcggaagagatggcccgaagactggatgaaggaatggttctatgtgaaaaacgacttgaaggcgcgagaagatattaaagatatcattatgcgccctatctggcagcgcttcggccttcgaaaaccgaaggagcacatagccttcagagtatggccgctagtagaaaagtgggaaatgccaaaagagactatcgccaagcctgacgaaggtgggctagttaggatgaagttcaccttcagatacgagggtaaatttgtcgagccagatgatgattggctgaaatgtattgaagctacaagcgatgaattgcccgggccatactcaaaggcagaagatactgcactatcagtggccttcggaggctggaaaaagaagaggctgaacagagttttcgatgctatcggattcgtctatcctgactaccgttacccgttgaggggtcagaaaagaaaaggtacagtttctgtgaaggaagttgcttcggccgctcctagtgaaccagcgccgaagagaaaaaagaaagctaaagagctgactgcaacatcgaaggctgcaattattgaagagccgaaagctgaagggacaaaaatatcagaaattttaagcccttcggtagaagttggattgccacaagctcagaaaggtccagcggtgacccccaaaagaaaaagaatggtcaacgttttggatgtactagagacaataaagtcttcaagctctactccaaaaaaagttgccgaagctcaaaaagcacaaattgaaacaacagcctctagaactgaaactacgaagcaccaggccaaaattgaaactgggccttcagagtctgccaaggagaaatctttggaaaccgaaggagagaatacaaaggaaattttaaagcaaattctgactgaaaaaactctttcttcaactcccgaagcatcttcaaaattgcccgattatattgtacgacatgcttcgggtaaaatgctatctgaagaggaaaagagagaagctcatcgttatgcccagaaattaaaatatccaaaaggggcgttgatattcaatggcagcggagaagaagacttcttgtattgtctcccagacagcaaggagatctctgtctgccgggagatggcaagaagcttcggattcccaactctagaagatgggctctcggtcttgtcaaaagatgaattggccgacagcttagcgtacaatagcttaaagggccttattcttagcaatgccctcagagcgcagaaaagcgctgaagacgaaggatgtaccatggcattgaataaccttcgttccgaagtgattgagctaaggaacgaaggtcttgataaagataaaatattaaattcattgcttaacaaaataaaagaagacgaagctacttccaaggcccaagctgaagcccagaagtgcgaaattgaaaatcttcagaaacagctggctgaagcgaaattgaagtgtgcaactgccgtagctgaccgagacgctagcgattactggaagaatcattgggagaaaacaactgcagaacttcggacttcaaaataa

SEQ ID NO: 67255 - DNA, 658 bp, Zea mays
  unsure (1)..(658): unsure at all n locations
  Clone ID: MRT4577_161333C.1
ccgccgggtttcttagtgagtgcccattattttccagcagccataagaagattttgatgtttgctggaattccacctttgcatagcatcctataattattgccagcctcattcaacgtcaaaagcattgtacagacttaatggtgaaactgccatttttgtcaaacttacaggagataacaccattgtcctcctgaaccacaacctttttgtttagagattggatgtgctgccaaatagaccgaatgtcccaaggaagccaattcctaatttactggaaatcctcctctttggcttttgtaacagaattaacttactgctcacataaacagatcaaaatatgatatttatgaagcaagaaatcttcactcaatcaagggtccctccaaaacagtctttttcaacattcctcatcaaaattccctttcacagaagatagattggcttgatttttagcagatctatctaaactggaaacttgtcatgctttttagttatcagacaaatggattgcacttcaacatatttagcattggcaatttcttgccagaatccctttttatgntcatgtttccaccaccacttgactaagaggctgatattaagcttcctgaggtattttatgcctaatgccctaaaccacccttttttttttcatt

SEQ ID NO: 67256 - DNA, 2538 bp, Zea mays
  Clone ID: MRT4577_161334C.1
ctattcttctcttaaaactgcttctgcagcttcgtttagtagtcgagcaacaacttcgtccataatagcttcggccacttttgtaatttcatcctcctcctctgctccggggtccgccattggctcggcgggctctgggggaggagatagtgcggctatccgcctctcgagttccgcacttttctcagcggcctccgctgcttctcttgcatcgtgagtacctttttcgctcttccttattatctcgcgagccatctcccgaccgccattttcccagatatcggtgaaaaattttccaccaaccaaacttgcttcggctgaggggtcctttataccttcaatggataaggtagcttcggtttgcgccaaagatttcacatgttcgcagcctcccctctccaagatagtggcaatccccctagcacccgagaaggcgcatatatccccacggccactcaaaatttcttcaaaagcttcggcttcaccgttgatccagtcgattggaccttcgggatctcctagtacgaagttgccttcattcgaatatgcgccgacgctggcgaaactagtcttaattgtctccacacatttcatggatttttcataacatctttcttttgaagaccgaagttctgcagttgttttctcccaatgatttttccaataattgctggcgtctcggtcagcttcggcagttgcacactttaatttcgcttcagccagctgtttttcggaacgaaggttattcaacgccatggtacatccctcgtcttcagcgcttttctgcactctgagggcattgctaagaataaggccctttaagttgttatacgccaagctgtcggccaattcatcttttgacaaaaccgagagcccatcttctagagttgggaatctgaagcttcttgccatctcccggcagacagagatctccttgttgtctgggagacaatacaagaagtcttcttctctgctgccattgaatatcaacgccccttttggatattttaatttctgggcataatgatgagcttctcgcttttcctcttcagatagcattttgcccgaagcatgtcgtacaatataatcaggcaatttggaagatgcttcgggagttgaagagagagttttttcagacagaatttgctttaaagtttcctttgtagtttctccttcggtttctaaggatttctccttggtagaccctgaagttccagtttcgatttcagcctggtgctttgtatcttcggctccagaggctgttgtttcaatctgagctttttgagcttcggcaatttttctcggagtagagcttgaagtctttattgtctccaatacatccagaacattaaccatccttttcattttgggggtcaccactggacctttctgagtttgtggcactccaacttctgccgaagggcttaaaatttctgatatttttgtcccttcaactttcgactcttcaattctttcagcctttggtgttgcagtcagctcttcagttttctgcgcaggtataggttttttggcttcagtagccgaagaagcctcgcagacaaacttgggcactatggccggctcaatgtaacatggccggtgggtaacaaccttcaccttttttctcttcggcgttggctcattaggagcggccgaagcaacttccttcatagaaacggtaccttttcttttctgaccccgtaacgggtagcgatagtcaggatagacgaatccaatagcatcgaaaactctgctcagcctcttcttttttcggcctccgaaggccgctgatagcgcagtatcttctgcctttgagtatggcccaagcagttcatcgcttgtggcttcaatacatttcagccaatcatcatctggctcgacaaatttaccctcgtatctgaaggtgaacttcatcctaatcagcccacctttgtcaggcttggtgatagtttcttttggcatttcccacttttcccagagtttcgtctcatacactagctcgtgtatattgcaaaaactttttgcattcggctccaaaccctggctcttcacggcccatacgaagattcccattcttattatagcttcgggagtaagttgatgaaggaagacctgatatatcttcagaacttcaaccacaaatctgtttaaggggaaccgaagcccagctttaaaaaagctttggaagatcacgacttcattatcttcgggagttggcacaatcctctctccgtcatctgctctcacagtagacatgtctcgaaaatatctccccctcatgttatcaagatgactttgtttaatactcgattttccgaagactgagtggcttggccgccatggtcgatcttcggagtcttcacctccactttctacatcgtaactatcactttcaccagtatcttcagataagccttctaaaatttctctagtaatcttctctgtatttgttttcgctatcgattcaatgaagcccagatttttctcctcagaaaggctcagtttcatttcggcaacagctttcttttcctgggacat

SEQ ID NO: 67257 - DNA, 611 bp, Zea mays
  Clone ID: MRT4577_161335C.1
agggcattgctaagaataaggccctgcaaaagaaatgttgtattaaaaaaataagcacacgaagttttaagcacacaaaaggtttttttctcacctttaagctgttgtacgctaagctatcggccaattcatcttttgacaaaaccgagagcccgtcttctagagttggaaatcagcagcttcttgccatctcccggcaaacagagatctccttctgtctaggagacaatacaagaagtcttcttctccgctgccattgaatatcaacgcccctttcggatatcttaatttctgggcataatgatgagcttctcgcttttcctcttcagatagcattttgcccgaagcatgtcgtataatataatcgggaaatttggaagatgcttcggaagttgaagagagagtattttcagatagaatttgctttaaagtttcctttgaagtttctccttcggtttccaaggatttctccttggcagactctgaagttccagtttcgatttcagcctggtgctttgtagcttcggctccagaggctattgtttcagtttgtgctttttgagcttcgacaatttttcttggagtagagcttgaagactttattgtctcca

SEQ ID NO: 67258 - DNA, 1679 bp, Zea mays
  Clone ID: MRT4577_161336C.1
atctgccgatatgcgaacctggagagtggttcggacggacgaggaagacggaagtgaggatcctcctctcgctcctcggcaacgataggtggggcagctgtctcgtggtctcaccccgccgtaagcgcctagacctagcaaccatggctggcaagacgttttatgagccaaatagccccgcctcggtactagctggcctggtgctgatgtcaaatgcatataggtgagccggacctcgcgtccatggtggccacgcgcgctcaagcaggaggcgccggcatcgcgacaccgctcccctccgcagatggactcctcgcaaggatatgccgcttgggcgcgatgggctgcgcccgtgatgcgctcgacggaatgcgggaccgggacgtcgtctcctggacgacgctcatgtccgggtacgccgccgccgcccggccccgggacgccgtgtccctcctccgcgccatggggtgcagcggcgtgcggcctaacgcggtcaccttctcggcggccgcctgcgcgtgcgcgcgcctcgcggacgcagaactcggccggcaggtgcacgcccaagtggagatcgccgggtgcgcacgcgacacagtcgtcgccactgcgctcgtcgacatgtacggcaagtccggcggtgtcgaggacgcgcgcgcggtgttcgacgccatggctgcgccagcgaggaacgctgtgtcgtggggcgctatgctggccgtgtacgcgcagaacgcgctcgggaacgaggcggtcgagctcttcgcggagctcaggacgtgtggcggtggcatggcgcccaaccacttcatgctggcgagcgtggtgagcgcgtgcgcaggcatggcacgtctgggcatcggtaggtgcgtccatggcgctgtccttcggcttgggtatggaaacaatgacgtgatttcggtggctttggtcgacatgtactccaagtgcgggcgctacctcttctcggggttcggctcgggcaggatcaagcaaccatccgtcgtcacttacacctccatcattgtcgccgcagcaaagtacggccgctggacgtgcgcgcttactttgttcaacgagatggtagatcaaggtgtgcagccaaatgatgtcactttgctcggtgtcatgcatgcttgcagccattctggccttgttgacactggccttcagctcctccgctccatgcagagcagatacggcgttgctccgtgccccagccactacacatctgccgttgacatgctgggccgggcagggcggctcgaggaggcattcgagctggccaaggaggcgcagcttgaaggcaaccatgccctcaagctgcggactccttgctgtcagcttgccggacacataagcgcctagacctagcaaccatggctggccagagggtttatgagttcaataaccagcaggatgtagcagctgggctggtagtgatgtcaaatgcatatatttcagccggtcagatcgataatgctgccgctgtgcgatcaagcatgaggctgcgtggcatacggaaggatcccgggtgcagctggattgaagtaaaggataccccccatgtgttctatgctggtgcagtatcatgcgctggtgcgtgggcagataaagttctgatgttgctagatgaattggagagtaagatgagggagagaggttacagggggagatta

SEQ ID NO: 67259 - DNA, 271 bp, Zea mays
  Clone ID: MRT4577_161337C.1
ggaggtgaagcatgagctggacgacattgatggcctgaccggaggaaaggctgaccaagggggtgacaccttccttccggaacttcaaggccgcccccctgaattcccgcggttggccgacggagttcgccgcgtccaaggtggccaaggccgccctgacctcttactcaggggtcctggcaaggcggaaccccaagttggccttaaactggccccacccggcttccttaagaaccaccttaaccagccaaacgggcttgttacacccccg

SEQ ID NO: 67260 - DNA, 622 bp, Zea mays
  Clone ID: MRT4577_161338C.1
ccggccgggaacgcaagcagaagctacaatgctaaaaccatctgcttcaggcttcagatatccccagtttagtcgggcgatcgatcactgaacttagaatggcctccgccaacaggtggaccctcgagatcgtgtcgccggaggctccgtagcgcctgttccgcgccgccgtgatggagtggtacaccctgttcgcccaaggtcgccgtctcgcacgactccgccggcgcacaacccgtgaaggactacggtgagcgttggcatccgacaggcagatcgacttcacctcactgatgacggtcaacttcatgaaggagaagctcaagttcctggacacgctacaagtgctagtgcaagaacactctcatcgatggcgccggcatcagcgacgccatctaaacacgcgacatctcacatcaaggtggagcccaggaacaccggtcgaatcgtgtcgaacgtcgaatccacttacaagctgctgacgtgcgtagacgtgaatgacgagatcgccaagggcaaagagtccatcaccgccatctgcaagggcgcctaagtctacctcatatccgaccccgacgcctactactataccagtggactgcgatgagcttcatttcccttc

SEQ ID NO: 67261 - DNA, 272 bp, Zea mays
  Clone ID: MRT4577_161339C.1
ccggaccccgggcacaggtcacgctgctcacgtcatgtctctcctcgcctccccacgccgttcggggaccgcatcgcgcggtgcccgttcttcctcctgctggcgcgccgcctgacgtggccctcgcgcccggggggtctgtccgaccaggggcctgaggaacagaggggggaggccggggggcgggccccactggacagaccggcgagcggggtggctgatggaagggagcgtgggtcgagggtcacgacccatgcccggtgcagacccga

SEQ ID NO: 67262 - DNA, 302 bp, Zea mays
  Clone ID: MRT4577_16133C.1
gagaaaatcgtgaagaccttttagaaactgaaatggcaaggcttaccgttacagaagtgaagcgattaggcactgtctgtccaatgcagtctgcgctttagacttcagactgactgtgtcatatgatctcaaatattgaaccagtgactgccgtgaatatatacaagtactgatgagaagatgaacagcaatgatgggatgaaagatactttgatgccaaacactgactctgcaatattgaatgtgtcaatattcgaagacttgatattatagagcaatcctacaatggccttgtacttata

SEQ ID NO: 67263 - DNA, 348 bp, Zea mays
  unsure (1)..(348): unsure at all n locations
  Clone ID: MRT4577_161340C.1
gccaaatgttccagtntcatttttgcctcggccggtccagtgtctagcagccacaaaggggggcagcagcatttttttcttttttttttttnaaccacaacattgcangatcatcgggctgccggggtttttttgccgcggaattgatcccagccgcncttccggttgttacggcagacaggagtgtccatgcagctttgggcatatttcaccaggtcccttgggggaggccggcggggcgcccaaccgggttcattagcttttgccgccacggttggggctatgcgcgccgaggtccttctctcgttggcgaaggcgcggaagattgctcccttgtggaagttctcc

SEQ ID NO: 67264 - DNA, 413 bp, Zea mays
  Clone ID: MRT4577_161341C.1
ctttgcagattacaacatccagaaggagagcaccctccacttggggctgcgtctcagggggggcatgcagatcttcgtgaagactcttactggcaagacgatcacccttgaggtggagtcctcaaacaccattgacaacgtcaaggccaagatccaggacaaggagggcactccaccggaccagcagcggctgatcttcgccggcaagcagctggaggatggtcgcaccttggctgactacaccattcagaaggagagccccctccactgggggctccgcctcagggggggcatgcaaatctttgggaaaacattgccgggtaaaaccatcaccttgaagggggagccgccggacccattcgataaggccaaagccaaaacccagaacagggggggcattccaccgacccacc

SEQ ID NO: 67265 - DNA, 188 bp, Zea mays
  Clone ID: MRT4577_161342C.1
acccacgcgtccgccgacgcgtacgcttacgcccacaatttacgctaacgcacactcacccacactacacgtacggattaaacgaaaagggggccagaacacgagcctaacggagacaaaccagctctcctgggcgcccgtaacccctgctagcctcgccagggtcggaccagctctccgagtcgact

SEQ ID NO: 67266 - DNA, 239 bp, Zea mays
  Clone ID: MRT4577_161343C.1
ttctgcgacaccatgtattttaacacgcatgacaccatctgctcttctggaccggtcataacgttcgagggcgcctgcacctccaagatcatgctgcaactcttcgtccaagacttttactcgtgccaccgtccctttacccaagcctcgcgttcccaaccccattgggaaattttaccaggagctcaacccgattgtccacaactccatggctctttccaacattttattaaccactc

SEQ ID NO: 67267 - DNA, 225 bp, Zea mays
  Clone ID: MRT4577_161344C.1
cactctcgcaggatcctacgggaagcccggcgacgctatgtcgttggcgacgctggcggcgtttgcaatcgcgcacgtcctgtccgcttgcgtcctggtgacggccgtgttccacgtcgccttcggccatctgattctctcggtgacggcggggctcatggtgcttggccacatcattaagctccggtctgcgctgtacgccgccgctcagccgttggcctcttc

SEQ ID NO: 67268 - DNA, 390 bp, Zea mays
  Clone ID: MRT4577_161345C.1
ccggatggcatagccggcgacggcacatcaaaccgcgctctaatttacgtactagccagatactacctccgggggcgaggaccatgtagacctcactcgcacaacctcgccttgctccaaccatcaactattaagtataaacaccatattgtaccgccggctcatatgactacacgctgcaccttcgctaagcatcttatacagatacccctccttcagcggacaacctatacaatacaagtgtccatcaccactcccatagcacccatgcctgccactcgatcatgcgctcggcacaccagcacactaaaggttcaacttcctaccaacaaccgtcagacactgtctataacaccacagaccatacagccaattattactcaaccactg

SEQ ID NO: 67269 - DNA, 312 bp, Zea mays
  Clone ID: MRT4577_161346C.1
cctgccataactaacaaccagagcacgcaaaacccggaggggcacgagctggcttgaccctggtcggactacgatctaggaaaacgaagatgagctactacagccagcatgcacgcgttggcgtcccgccttatctaggatatccggggaaggaccgttacccgccagacgggtacccgccgagcagctaccatccggcggcgcactgctacccatcggacggctacccgcagaatggctacgcgacgcagtacgctcagacgcgtgcacaggagctgcagatgaactggcctttctttatggaaagatgct

SEQ ID NO: 67270 - DNA, 317 bp, Zea mays
  Clone ID: MRT4577_161347C.1
cccacgcgtccgcccactcgtccggccagtccttctgacaaactgtaactttgcagccacgtacatgtggtatctgctgaatccacgttgggatgcaacaatccatgtcgaaaatgtccctgacttctaatgcgacaaactcttgttactgtcctgttctcaaacagcttgcgtctgctgtcatcagagactattatctcaatgctgatcgtacgaaaacactctctgatggttcttctactctaaagtatcgcaacccagaatatttgctcacgctcaattatctaacattttacctctcactagtatatgctaag

SEQ ID NO: 67271 - DNA, 522 bp, Zea mays
  Clone ID: MRT4577_161348C.1
ctggccggggaagcacgtttctgttggactatacgctgacgcgaatgtccgtggtagacccagatgtggatgcggggtcaatcaaagacgaaatgaatggttcgtctgtggagaacggtgaacttgcagagcctcggcctgcttcacctgtgccagagaagtcaagcaagaagagaaaatctggcaaatcaagtaaaaagggaaaggagaaggtgatgaagcttgcctcgagtggactcggcaagggtgtttctgttgaagcctgaaaatctagctgagaatctggttttgcttatgcatgcatgcatccaattttgtagcagctgttgaaactgacgttgcccaaggcacgaatcacatttgatgtaaatgcagtttttttgctgcgtttattagaaggccgcagtgcatttaatgcattggagtgtataacttgctatcaaaatttgccatgtcaaaggttttgataagcaaaaattgctgaaagttggaccaaaatatgttatatagatttagcaagcc

SEQ ID NO: 67272 - DNA, 350 bp, Zea mays
  Clone ID: MRT4577_161349C.1
atattctaagacaactgccactgcatgaatgggactcagccatatgtgagcttcactatagacaaactgatgttcaaacaaagggaaacaacctcaagcatgaccatctgatcatatgtacaacctgcgccgacagacatattcatacaaaaagtcaacgtatccccgaagctcgtcagatcagcgtgatcacaaaactgcaccagccgtcctacattatgacaacaaatacaagaccgaaaggcacactaaccctacacatttaactgctcaacccatgtagcatgcgaatgaaaaagccgatcagaccgctgtctcatgcgatacaaagatctcaccacatccttata

SEQ ID NO: 67273 - DNA, 747 bp, Zea mays
  Clone ID: MRT4577_16134C.1
cctcgaggcccggccgggacgaatacatccggcaccacaccacccccttccctgcgtcccggagacagaaaagtctcctcccatctccgccctggccccttctaaacatccccgcggcgatggatctccgtctcgcccactagcccgccagcgcgaccgtgggtgtgggtgggtacggggatgggactcctcgggcggagaccgtggctgctgctcctcgccctcgcttccgcggccgtcgccgtcgccgtggaagcctccgagggcgacgctgatccgctctacaggtacgagatcctccctccctccctcatccgctgcttggcctcgctctcgctcccgctcccacgggtggctggtgctttgtgtcgtcgtagtcccatctgctctgaaatggggcactttggctctgaggtgggggcgggtggggccactacgatcgtggccctgtgacgccaggcgcgatgttgtaatgaaacctagcagactacgttcgtccgattatgcgcgacctttcgaagtttgcttagctttttagttgcacggtaccaagcagagcctctctggagcatggcattccagtgctgtcagtttccgccggtctctggctaagcctcttttgtatcgatgtatcctgcttgtattttcactcaaaaaaaaaaatctcttctccttccatactcaatacatgctgggcagagttctgccagcggttttggtatgaaaaaaaaaaaaaaaaaagcggcc

SEQ ID NO: 67274 - DNA, 601 bp, Zea mays
  unsure (1)..(601): unsure at all n locations
  Clone ID: MRT4577_161350C.1
gccggaattcccgggtcgaccccgcgtccggaggaattctatgatgtgaaggagagggatgatattctcatagataaactcgatgctattgaaaagaagattgaggggaagctagaactgttggatcataccttcggtaagaaaggcagagctttggaggaggaaatcaaggatttggtggaggaacgcaattccctgtccgagaagagcaggagacctatgtacagaaaaggaggccaaatagcaaaattcacagcgctattggccactggaaattacaatggtgttgttggcttcgctaaggctaaaggcccaacagccaagattgcaatacagagagcgtatgagaaatgcttccagaatctccactacatggagcgatacgaggatcacacaatcgctcatgctatccaggccaaatatgagaaaacaaagatatatctctggcctgngccaatgaggagtggaatgtctgctgctggtaggactgttgagactgtgctgtacttggctggtttcagcaatgtcaagacaaagattatcggatcaaggaacccacttaatgtgattaaagctctcttcatagctttgaatgctattg

SEQ ID NO: 67275 - DNA, 184 bp, Zea mays
  Clone ID: MRT4577_161351C.1
atatggactattataaggacacgttttcattacaaactttccatactttattccggcatagacatgctattctccttagcaacctatactccttattacaaaccaacatccatcatacaatacctacatcaccagatttacacatatcaacttaccatcaaatcaaatataaccatatccattt

SEQ ID NO: 67276 - DNA, 368 bp, Zea mays
  Clone ID: MRT4577_161352C.1
ctcacgcgtccgcccacgcgtacggtcacgcgttcgactacgcacccgctcaggtcggagccgacgcggacggtgtcgagctggaatgtagacctacgaagctgcagtcgtacgccatcgatatgagcaccgtgtcgagagctgttacatgagcctctacgtggtgtatccaagcagacgacgcgacgggtggacatatctacgatgcactgttacacggtgacctctagtactgcttgaacgttagtcagtgcttcctgaatccaatgagctactacgtgttaccatttttggactgcgtctttcggaagcacgtcaagcgcgcttgatacgacctcaagttcgggatcaccatgtactagggcagg

SEQ ID NO: 67277 - DNA, 2074 bp, Zea mays
  unsure (1)..(2074): unsure at all n locations
  Clone ID: MRT4577_161353C.1
gggtacctcgaggccggcctcgagacgaattcggcaccgggattttgttgcggtgcagaatcccacccgccggcaaaaaccctcttctccttcttctctccgccgccgccgccatggccgccgccgtcgcacgctcccgcgccgccgcggcgtgggtccgcctcctttccttgcgtccgcatagcctcgcgggttccaccgcactcccacgccacggccatcacctaggctcgcggatcacgccgccgcgccgccacctggcattctccgcctcatccggggacgccaggccccaccagaagttccagagcgagtgggtcgtgcacgagctgctcgctgaggtcgagcgcgagcgccagcgggagcgacaggaccgccgcgcaaaggacggcaaagaccaggaggaagagccggaggaagacgaagaggactacatgggcgtcaagccgctcattgagaagctcgagcgacgcaagaccaaggatatggccgccggcgaaggcttctgggagcccaccgactccgacagcgacgaggacgacgagcgctacacgcccgatgccatcaagcagcgcgtcgacgagttcgagcgcaagtgcaagcgccatgaggagttcctgcaatcattcgcagaggccgacaccctagacgaggctcacaaatggatgaccaaaatcaacaactttgaggagcgccatctcaagctgccactggagtacagggtcatcggcgacatgatgaaccgtctcaaggatgccacggggaaagagcgcttcgttctccttcagaagctcaaccgagccgtcaggatcatggaaatcaaggaagcctacgaccccagtaaccctgcaaactttgggatcatccagcaccagcaggttggttctcctgaggatgtcgtgctcaatgccggctttgataaggagaagcagatgatccaaggggcagaacttgaggatgtcgacgaggaattcaatgatgtgaaggagagggatgatattctcatagataaactcgatgctattgaaaagaagattgaggggaagctagaactgttggatcataccttcggtaagaaaggcagagctttggaggaggaaatcaaggatttggtggaggaacgcaattccctgtccgagaagagcaggagacctatgtacagaaaaggttttgatgtgaaagttatcgatgttaacaggacatgcaaagtcacaaagggaggccaaatagcaaaattcacagcgctattggccactggaaattacaatggtgttgttggcttcgctaaggctaaaggcccaacagccaagattgcaatacagagagcgtatgagaaatgcttccagaatctccactacatggagcgatacgaggatcacacaatcgctcatgctatccaggccaaatatgagaaaacaaagatatatctctggcctgggccaatgaggagtggaatgtctgctgctggtaggactgttgagactgtgctgtacttggctggtttcagcaatgtcaagacaaagattatcggatcaaggaacccacttaatgtgattaaagctctcttcatagctttgaatgctattgaaaccccgaaggatgtccaacagaagtttgggcgtactgtcgtcgagtcatatttattgtgatcatcatgattgtttggaggacacagaggcgagcggagcctgtataggttttgccatgagaagaccaaagaggcaaatgccaggtccaaccaacgtgagccctctttgttttggacttttggtggtgatgttgaccagaccattgatgttgaagtggcaagaatgtcagtgtcaacagtaatcggataaatagatggtatttccctgaccctttgtttgtagaacttgaatgaacctggggacagaaacacatttgagggttcttgtataaatcaaggtcaagatcagaattgcctcgtcgtgcctttgttttgttaccatagcttcttctccctacatactgttgtttggatgataaatttaattgaatattaatttctcctgaaaaaaaaaaaaaaaaanccctgggggggncgttncccaat

SEQ ID NO: 67278 - DNA, 229 bp, Zea mays
  Clone ID: MRT4577_161354C.1
tcgcactctagaggcggtctcagaactcagcttatccagtgaacacgcaacccttccgggtcggcggcaacagcttcgaacagatgttcaatatgacactgctactttgcgctacttgactgtcgtcaaggctctgttcatgagcacgatgccaaaaaaggattcggcggtccagactccgtccttagacaagagcaaggggacagtgttcgagattccatggtttttc

SEQ ID NO: 67279 - DNA, 312 bp, Zea mays
  unsure (1)..(312): unsure at all n locations
  Clone ID: MRT4577_161355C.1
ctcatnngaattnccagggagggaggtgggngaggaggggaggaagaaggaagagcgaggcgggggggggntcgggaggggaaggggagaggaccgcaaaatgtcagatgcttgctggtngnnngnccgtgcccgttgatgtgacaatacttgtcggaagagcacaatacaccgccctctcctaatcaagggggattggataagccacaagatgagggatggtgagtgagggtattcgattacggataaaatatgaggaacaaagggttcgaattcaatgacaaaatactcggattcataaaggggataaaa

SEQ ID NO: 67280 - DNA, 262 bp, Zea mays
  Clone ID: MRT4577_161356C.1
taagctcggaattcggttcgagccgtattttccaacacaattctcttaggccctactgtagtttttccttcatcggggtgttttaaaccggtgccggcggtggtccccacttcttcctacaacatgaccaataagctcgtcgagtccccaccggaactagacgatcgtcccaggaacctgatatccacggcctcttgcaatacactgaagtgacactaacatcttagcgtatggataccagaatgtagctaaccacctaact

SEQ ID NO: 67281 - DNA, 173 bp, Zea mays
  Clone ID: MRT4577_161357C.1
aaggaattgaatattactaaggaagcaataggttgccgaaggcccactaacataacctacgaaacgaccggtgataactccataaggacaatacattcttattggagtcgacggcgtaccagttgtattctatatgaaggaggttagcaagctctacttttacgaataaaagc

SEQ ID NO: 67282 - DNA, 345 bp, Zea mays
  Clone ID: MRT4577_161358C.1
agaatctcggccttagttttttttttttttttttttttttttttttttttttttttttttttttttttttttttttttttttttttttttttttttttttttttttttttttttttttttttttttttttttattttttttttttctaactggggggggggggtggttaatttagttcatgccgttatggttgtttttcaattgctagcagattattaatgacgattatgttgtcttatcatgatatctatttatactttgttgcttcccaaaaaaaattttgtgaataataatttttttaaatatccgcgctgtttgaatgtggattttattaaaactttgggg

SEQ ID NO: 67283 - DNA, 643 bp, Zea mays
  unsure (1)..(643): unsure at all n locations
  Clone ID: MRT4577_161359C.1
ccggccgggaatgaatgggataaatgattgtcccgagggcgaaactcgcggtgccaaagagcttgtcgtcaaactaatcgtcgcccatctcaccgcagtcgttgcattttgtcatcttcaatcgctccgcaatgagcgcctagtcagcatcgaaccagtacttttcctcctctctccgttcacagttgccgtccagacagccctcggcatatctctcattcaattctactttattgatagcttggccaggtcacctcaatctttgtccagccatgttcgtacttatacgcgccagtggagcatcttgtttgcaagaaaaccacagtctggaccaaagaaggacgatgacacacgttctcagcctgcggaagcatgcgtgaatntggggagattgctagtcatgtctgcgacactattacagttcgtggcaaccatctttttatacagacgaaggtggaatctttatggctgggagtctctctccatcgtcgaccaccgcacgtttgagttgtctgttggcggtgctgctgctacagtcttgtccatcttattggtgctcagacttccaggcttcgntgaagctccttcaatcccatatacccaagaacacggcacgacaccagaacagaaacttctattctgt

SEQ ID NO: 67284 - DNA, 793 bp, Zea mays
  Clone ID: MRT4577_16135C.1
aaaaaaaaaaaaaaaaaaaaaaaaaaaaaaaaaatcacgaacggcgtccacctgcacgcaccgccacgcaggttctctccaccaaacctccccttccagaacccctccaagagctcaaaggaatagtgagccgccccgccgctcctcagccatcctctgaattcctctccgtctaggtgtcacacactcccacgtgacacgcatacgcacctacgagagacagcgagcaaagccatggctctccgcaccctggcatcgaagaacgccctatccttcgcgctcggcggcgcggcccggccgtcggcggcgtccgcgaggggggtgacgacggtcgcgctccccgacctctcctacgacttcggcgcgctggagccggccatctcgggggagatcatgcgcctgcaccaccagaagcaccacgccacctacgtcgccaactacaacaaggcgctggagcagctcgacgctgccgtcgccaagggcgacgcctccgctgtcgtccagctccagggcgccatcaagttcaacggcggcggtcatgtgaaccattcaatcttttggaagaacctcaagcctattagcgaaggtggtggggagccgcctcatgggaaacttggctgggccatcgatgaggattttggttcatttgaggcacttgtaaagaagatgaatgcagaaggcgctgctttacaaggatctggatggggtgtggttagctttggataaggaggcaaaaaagcttcagttgaaactacagctaatcaggatcctctggtgactaaaggtgcaagct

SEQ ID NO: 67285 - DNA, 363 bp, Zea mays
  Clone ID: MRT4577_161360C.1
ttatttttcccaccctgcaaaaaatacagagctgggctttggttaaacattcttggtttccaatgcatgtttctattcatttgatatactgtgttctttcaccgacacatgtatatctttatatgtggccaaagcttcaaaatgaaatgatttagcgctttgcactgaaaaacgaacattctgcatgctaattctataaaatgtgtatggctgagatcgatatatttgcaacatacgaatgaccttttttaacaaatttgatggagcaagaatggagggtaatctaccagttaatgttcgggaatattaagaacttgcttagaaattaattctaaaaaaaaagttcattacacgcttagaaaa

SEQ ID NO: 67286 - DNA, 284 bp, Zea mays
  unsure (1)..(284): unsure at all n locations
  Clone ID: MRT4577_161361C.1
gccggggctnactggattttttttttcattgcgtggtcccttcacccttgcttttgtnttgcgncgcttttcnccccggttccttggggccgttcggtgccctggccgttggattgctgcgtttgttcttctcttgcgcctggggatttgtgcgttgtntctttgtgttgtctttgctgggggctttgttcttggtcttctttttcttctgcgccggcttctgtttcctttttttgccgttcttgcccgctttgtggtttttggggtttttttttttttttctt

SEQ ID NO: 67287 - DNA, 248 bp, Zea mays
  Clone ID: MRT4577_161362C.1
gcacagaggaggacaatggataaaaattcgctatcctgaacggataacgccggcgcgcatgtgttttagacaaattgtgggaggttaaactacaggaattgcaatgcacaccggcttttggggctcgcttgaaactggccccgatttaggtggttaattgcaaaaggttgacccttgttcacccccgaataccatgcgggggctggctttaaggaacatggtggtcataaaggcctacatggtcctca

SEQ ID NO: 67288 - DNA, 725 bp, Zea mays
  unsure (1)..(725): unsure at all n locations
  Clone ID: MRT4577_161363C.1
gctcatcgctcagtcagcttcagcagctcgagcaggatggccgtcgcgctcgccggtcgccacgtccccactcgcgcacaacgcccttgccccgcccccgatctccgcctcccagtcctcgctgctgctgctgctccagcgccgcgcgtccccgtctccctctccctccctctccccctccggtcacgcctcatcgcggccgtcgcgaccaaggagcctgagctcggcggcggtggatcgggggccggcgacggtgctggaggaggtggcggtggcagcggcagcgacccgaggggaggaggtcaggaaggggcggggaggcagagaaaatggggcatgaactgtccatgtcgcagaaactcagtctcgcctacgccgcgctcgtcggagctggtggtgtaatgggatatatgaagagtggaagccagaaatcctcagccctggtcctgtacttcgtccacactcaactccctgttagacctgtctttgcatcgtcgattggtttaagtatatctggccgcgcttctgtcggtgatggggtcgcgcttcaagaagtccgngaagatgttcccagctggtgtcgtgtcccatgtatccctggtcatggtcggaggctactaaccacggcattttttttttctggttcctcatgcagttttgctccgccttggtgtcttttagggactgcttctttnttactcctctgtggatgatttgttgactgg

SEQ ID NO: 67289 - DNA, 1413 bp, Zea mays
  Clone ID: MRT4577_161364C.1
tcaaggcaaagaatatgagaatatagataatatacaagcagaaaatcaagttgaatttgacgaaagaaatcaacatggtggcagcgatgtttacatgcgcgatcagagaacagaggaagctactggttttattcccaatattgatgagtatgatcagaacagtgcagttaggtctaatggattgggttctcgccaaagcgcattgcctgctagtggaggtaaagagtcattagtactggggtatgtaagaggagcttctgaaataagaagcagaagattgatagcccaggggccacatgctggttcaggaccaagaccatctgaaaagacccaaaatgtttctggtaacactaacatgcagaagcttccaattcatgtaactggagatgccgttgcatttgatcatcaagtgccaatggagaaggttgctgatgcaaggaacggccatgtgaagaccgcacaggctaatgatgtatccatgatgactgataagtccaaagatttgatacagccgagttcaatgctgcaggcacagaaggcttctggtgctgctggatcaaatactacaggccaacctgaaggtggccctgattctagaactgtctttgttagtaatgtacattttggttcatcaaaagatgctctttctcgtcacttcaataagtttggagcggtcttaaagacccatattgtgactgatggtgtcactggtcagtcaactggctcagcatatattgagtttttgcacaaagaatcagcagaacaggcattaaccctgaacgggacatcatttatgtcacgcattttgaaggtcgttcggaaaagctccactgaagtaacccagctgcctgtcttgccccgtgcttcttggggatcaccatttgcttcaaggctcattagaactgcatacccaaggccgaactatcccggtgcaattcgtgggcgactatcactcaggggtgctgcccggagtttacagtggaagcgtggtgttgctgattcaggagatgttggaaaacctagtccaactgcacctgggaatcagttggtcaccccggccacacgaaacttcacctacacacgcacggagccaaaaacaaatgcgggagcgatggcatgactgatcagctgtagcatgccgcagcgtcgcagaaagagatcgtgattgatgactgtttcgtagtccattcagctgcttttggtaaatatttaagtagctgcagatcttagtttgtagcaggctggtttttgtggacctcaaccttgagtaatattctgtgaggttttctgtgctgatttttcaccgtcagcacacccgttgttctgctggctgttcggagttcgtggatagagggtaaaatatataaaaagtagttttaaatgaaaaacaaaaaaaaataggaaggttgcaac

SEQ ID NO: 67290 - DNA, 997 bp, Zea mays
  Clone ID: MRT4577_161365C.1
gatgaggctgataactaacaaaatagatgtctttcagttcagtttgtatactgtgatgtccactcaaaaccttcaaacatttccctatatgacagtcaattaatttcgcagtatggtcacctcaccactaacaaaataaatgtctttcagttcagtttgtatacaatgatcttgtggacgcaagtgtttttccatctggactgaaagcattagcaatagttgacctaggaggtggcaaaagagggcaaaacttggcaagccaacgatgcagggactgtgattctgccttgtatgtacatagtgaggtttaaacgaatcaaccaaaaaaaaagaaagatgtgaacactcagatgagagtgtgttgcacttctgttagttgatgcgcattgtttttttgtgcaggaatattggagatgtgccttcaacaatctacgctcgattgtctctagatgagcaactcactgcagaaacaagatccacctcttgacatcgcggaggcggacgccagcgagattgaggtggttgacgcgaccgggacgccagcgagggggccccggccaccgtcgcggcggggcgccaggagcgctcctgcaccacgagcgcgcatatctgagaagggaggactacggctggcttcgtccgcgaaccgagtcgtcgtcctggtcgaggcgttcccaggaagtcagcggcgagctccgccatgagcgcgcgcacctcggtgcggctcaggttcgtcgtgcccaccggccccgactcctggaacgtgtacccagggcagcgccacggcaccacttcgaagatcctgctgctagtagtggtagcgacggtggtgctagcggtggcggtggtttgagcggaggatttcttgagccgcttgaggcgacgaggtagggaagcagcgggggacgcgggcagggcgagcacccggcgggatctgatttgcggggaggatccgagggggagggggatcggtggatctgcgcgacgaccgggaggt

SEQ ID NO: 67291 - DNA, 490 bp, Zea mays
  Clone ID: MRT4577_161366C.1
ggccgcttttttttttttttttttgggggtttttttttttttttttttttttttttttttttttttatggaattacaaactacacatctgctagcaaacaaaagggaaaaaaaacagaaacgaccaaaacaattggcaaaaaacaaaacagacaaaagaggaacacacggaaagggggcataacgaggggggccggaacgacgggggaacagctataacagaggtaaaaggccgcgggaccaagggctcaagaactaggaccccccagaggacgggaaacgcaaaccactccggagcgggggagcgcccgaaatattaaggctgaccctaagactcaaaggcgctaaaaacctcgaggatagaacgccaggggagggaaggaatgctggccgcaagcctgagcagagagcgccaacacctgctcgggaaggaagccaggggcgcagaagggtgggaaggaccggccggggttcatgccatactgagccaa

SEQ ID NO: 67292 - DNA, 1973 bp, Zea mays
  Clone ID: MRT4577_161367C.1
gtttttccatctggcgagaaagcattagcaatagttgagataggaggtggcaaaagagggcaaatcttgacaacccaacgatgcagggactgtgatttttcctggtatgtccatagtgaggtttaatcgaatcatccaaaaaaacaagaaagatgtgcacactcagatgagagtgtgttgcacttctgttagttgatgcgcattgtttttttgtgcagggggccggtgccgccgagggcgagggcgcggtggactccaaggaccttcagcagcagagcaaggcgctcgacaagctcactgatcatgtcgaggaccggcagctcgattcatcccgtgtccaatccgaatattggagatgtgccttcaacaatctacgctcgattgtctccagatgagcaactcactgcagaaacaagatccacctcttgacatcgcggaggcggacgccagcgagattgaggtggttgacgcgaccgggacgccagcgagggggccccggccaccgtcgcggcggggcgccaggagcgctcctgcaccacgagcgcgcatatctgagaagggaggactacggctggcttcgtccgcgaaccgagtcgtcgtcctggtcgaggcgttcccaggaagtcagcggcgagctccgccatgagcgcgcgcacctcggtgcggctcaggttcgtcgtgcccaccggccccgactcctggaacgtgtacccagggcagcgccacggcaccacttcgaagatcctgctgctagtagtggtagcgacggtggtgctagcggtggcggtggtttgagcggaggatttcttgagccgcttgaggcgacgaggtagggaagcagcgggggacgcgggcagggcgagcacccggcgggatctgatttgcggggaggatccgagggggagggggatcggtggatctgcgcgacgaccgggaggtggggagtccctcgacactcgacaccaaatacccggaccgcgaacggccgcccgcttcgcggtcgcgcaaaatgccgccgaaacccgcgccccagctcttccagtacatctccaacaagtcgcggaaaccaccgccgccaccagtcgcgcgggatctccggatctggtggttgtgttagggttgggcgcgagaggcacgagcacgagcgttgccgcgatttgctcggggtaaaactcgcgctccaggcaagtgggctgctgctgctgctgagagggggaggcgggggcacccggacggtctacactaatgccttaatagttagtagagatttacagagtatgatgtacttgagggaaagcattggatcagcattaaatggccctcgattgtatttgcttggataacctttctattcacatctgattcttatctgctcattgcaacggtcttggactcttggggattattttatagttttatgaatattaaagtcatagataaaagtagcgtcaaatgtagagttacggagaaatgttgtgtttgtgattcagctatgtttttaaatactaaacatgtttttacatgctttgtttatggtgcaggccatggcggcacttgcttcatccaaggaggctgactggaacgcgatgaggctgagggagaaagaattggctgctgtgaagatcaaccctgcggatgtcgaaattatcgctagtgagcttgagctggacaagaagatcgcggagagaacgctccgtgagcacaagggtgatgccgtggctgcggttcgattcctgctgcgctagttccgagatttcgtcgccagcatcatatgttccccttcagttccacacaagaggtgatgatgtgaagtgaagcactagtacttttgtctgtgtgcctgttttggaagtttgctattagaactatgttgcagaaaatttaagaatgagaataccatgcaaaaggtgtaatatgaattgtattagttaaaaaaaaaaaaaaagggcggcccgctcgcgattctagaactg

SEQ ID NO: 67293 - DNA, 331 bp, Zea mays
  unsure (1)..(331): unsure at all n locations
  Clone ID: MRT4577_161368C.1
cacgccgccagacggggcgcgacgcgncggcnccgccgagaagagggacgggccaggccccgacaccgagaccggcaagaagaccagggacccgccgnacaaggacgaccagacagaccacaagggcacccgcacaaccaacagcnccaacggggccgccggggcgggggggaggacaaagaatgttgaccngancgngagngagacccagncacaggccaagaacaagaacangaccgnagacgngagagcaaacgcagaggcgaacancaggaccacagggaccgggaaggagacngcgacaccagggcggaagacgagcggaagcagc

SEQ ID NO: 67294 - DNA, 374 bp, Zea mays
  Clone ID: MRT4577_161369C.1
aaaaaaaacaaaaagaaaagggttggtttcccttttgaaaatttacacggggggggattggaaattttttaaacccttaaatacaggttttttttccgggaaaaaaaaaaacgggttttaacaacccattatttgggtttttttggggggggggggtccgtccttacagggttggggttcttttgggggggcccgaaattaccgggagcaagttttttcccaaggggttccttaggggcttggggaggtttttcaaggggcctttcccggggacctaagcctgggttaaaaaggggaacatgggaaaaatgggccgcccgcccctttttattttctttaccttggggatgggggcctggtcggggttccttgcc

SEQ ID NO: 67295 - DNA, 329 bp, Zea mays
  Clone ID: MRT4577_161370C.1
cccaacacgggtttttattttttttttaagacccaaaccgggggtttttggttcaaaaaatcctgggggtggcccttagcggtgattcaaattgggccggccaaaacaggacccttaaaaggttttcccgggttgtcttacacttccacccattcaattaaccccttaatttttccaaccagggccagggttttaaattatttaaaaaaaacaccccctgggttttttaaaaaaataaggcctgcaagtagcagggccccatttttgcgggtggatccttgccacatgtaattttttgcaggggggtaattagtatttggcggttggcc

SEQ ID NO: 67296 - DNA, 422 bp, Zea mays
  Clone ID: MRT4577_161371C.1
cctttataatttcttcttttttttttttttttttttttggttttttttgggggaaaaacttgtttttacctaaaaaaaacatcttaaaaatcatatgagaattctataactttccaaatttttggagcatagaatatccatttaaatgctagtttttttaatttgggccttactttataccgggtctgcccaaacatgatccatctagccgggtcgggctggaccccccatcgggcctaatttttaggcacgacctaacccgaccattcggaccgggctggcctaacctattttttttcgtatcggggcgggctttggactcttattttggggaaccattttccgatgagtaattctccggcccaaactgtcaagtttacccgtggatgttcgcgcggactaaaatgaggagcccattttcg

SEQ ID NO: 67297 - DNA, 418 bp, Zea mays
  Clone ID: MRT4577_161372C.1
gggggtgggtgtttttttttttttttttttttgggggggttttttttttttttttttttttttttttttttttttttttcccgggagaaaaaaggggttttttttgggggcggagcccgcctgcaaaacaccaaaaccttattggaacttggtgccgccggggggaaaattatccccccccctttacaacaaatgccccccagggccgaaggggctgggaaattaccaatcgggagcccctcccggcccgccctgtgttgcatgcctgcaacccctttcggccgggggaaagcaatcaaacgggaccctgcctcactggaacggaaccctgccatttccctggaatgggaggggggccccccaaggggattaaaccggaaggcccccaacacttgaagccggggggccccggcccccc

SEQ ID NO: 67298 - DNA, 833 bp, Zea mays
  unsure (1)..(833): unsure at all n locations
  Clone ID: MRT4577_161373C.1
ccggccgggaagattgctcgtctcgagccacacttgcaccaaaacaaactgacccaaagctttgcaacaatatgggccgccaaaatcatcgacattcgtgtcgatacagctgaatcagatatcctcgcagatatcaaaaaaggccttcggccggatgctggtgccgagaaaaccttgcccacgttgctgctctacgaccaggaaggactccgtctgttcgaacaaatcacataccaggaagagtactacctgactaatgccgagattgaagtacttgagacgtatacagataaaatagcccaatgcatttccccaggatcaatcgtggtggaattggggagcggcaatctgagaaaagtcaacatactgttgcaggccattgatcgtctgggcaaagatatcgaatactacgccgtcgacttgtccctacctgagctggaaagaaccttcaaagagatacccatagaggggtatagccatgtcaaatgcttcgggctccacggaacgtacgatgacgctctggagtggctcaagtcccccgccgtcgaagccaaacccaagacgatcctttggctaggctccagtttgggcaacttcaagcgtcatgaagtaccgccgttccttgccgggttcggcaaagtattacaaactggtgataccatgcttatcggcatcgattcctgcaaagatcccaaacgtgtgttccatgcctacaacngaccgcgacggtgttacccacagattcatactcaacggactcaagcacgcaaacgatctcatgggggaaactgcctttaacttggacgactgggaagtcattggcgagtatgata

SEQ ID NO: 67299 - DNA, 598 bp, Zea mays
  Clone ID: MRT4577_161374C.1
cttcaggctaggtttcgtctttttccgttcacaggcggccgtcggtgttcggtgcccctctcctgccaaacgatcccgagcagtgccaccggtgcggtcgtgcagagggagcggccggggtacagtacaggatgcgggggttgacacgcgctgcgaaacgcgcaggggagatggcgttcaacgccggtggtggcgccgtcaactggttcccgggccacatggccgcggcctcccgcgccatccgcgatcgtctcaagctcgccgacctcgtcatcgaggtccgcgacgcccgcattccattatcctcagcaaatgaagaccttcaaccagtgctctcagcaaagaggcgaattcttgctctaaacaagaaggatctagcaaaccccaacataatgaataggtggctgaatcattttgaatcatgcaagcaggattgtatctcaataaatgcacatagctccagttctgttaaccagcttcttggttttgctgagctgaaactaaaggaagcaatctcaaaggagccaacccttctgattatgctgttggtgtccttaatgttggcaagtctgcactcatacattctattcatagaatt

SEQ ID NO: 67300 - DNA, 725 bp, Zea mays
  Clone ID: MRT4577_161375C.1
atctcaagcagcaagcctcatatacgtaaattcaatcatcgtccccgcctgcaaaagatctgtcgtggcctcctcgtttacctattgctagtttctcaaatcgcacgccctcactgctaatgctaggttccccttcgcgcgcgagcgcagttattaccccgtccacgagacgcgcgctcgcgagcagacagatccgacttcccacctccggagaacaccgcgtacagaacaattccggatcaacgctcaaaccccgcgataaatcgccacgcccatcgtgtggcgtacccccacaccagcgaattcaccaatgctggaggaaacgtctgaaaggtgagagtactttatcatctgcttcctctgggcttttcgacccgttactagctcagtgcaggaacgaaaaaaaccctaaacctaacctgaggccacatcgttgatgctttgatggccatcatttgagaggattcttgcgacgtctccgtgtatacatgagacgctaatcaataaatctcctgtcatgttcaagctgcgcatggaactactatcatgcgaagcgtctgtgattggccctgacgagaagccctcactgataacaatcgacgtcctattctcttctgtccatggaagctattgggtcttgcgacgactactgacgctaagatactactcgaggtccatcgagcacccagatcaagaagcacttcgtgagcttacgcgacttcttc

SEQ ID NO: 67301 - DNA, 341 bp, Zea mays
  Clone ID: MRT4577_161376C.1
gttcttgacttattagcacgggccgacaaaccgctcctttttgttgggcatctaccatacttaccataatgctaatttaaatacgtttaccggtccctaatttttaaaaagccccaacactcggtaatccaatgggtggaaacggcttgtttttagatgcacttcttgttgtaaaggtaaaaaaaaaaaaatttatcttctacctgaataaaaaaccaaaaaaaaattccccttcctccagtttttgggcacttttggggggcgggttagacaattgatcccacaggaggggatttattcaccaaaaaaaagatggggaacagattttcttttttgggggg

SEQ ID NO: 67302 - DNA, 311 bp, Zea mays
  unsure (1)..(311): unsure at all n locations
  Clone ID: MRT4577_161377C.1
accaaaccatacgagtcgccgagnaaaacagggagggaagggagtataaagtccgattgtgcaacatgcggcgccggtcatgctttgccggtggacnngcgcgtcctcacgctttcggccgcgnngcgcgtcgggccgcggtggttgtcgctgcgcggcggcgacgccgccttcgggcgcgcttcttcgcggnntcaagtccgtcccccgcgggngacgcgggtccgcgtgagagcctgcgngcgcgagggtgagcattcctgtccgcgctccggtccccgctcgtggtcccctgcctgggcctccgcgcc

SEQ ID NO: 67303 - DNA, 442 bp, Zea mays
  Clone ID: MRT4577_161378C.1
ggtatcttttttcttatttttttttttttttttgtttgctgttttatttggtttcttttttgatacttgttataactagaggaaaaggtttgtaaaaccccggacccgcctttttttgaaactcttagccaagagcgagtccccctttttttgccggggggggctccggttctggttctggaaaaatccctcacctcccccccaactctgggattggaacaggggattttttttgtgccccaaaacggacaagggggggagcccaattctgtatagagttcacaacccaagccccaagagactatgtcgggatgggagctgagaaacgccaacccaggggggcctgctcctccctagcgcccggataacgggggatggcatctcgcaaaaaccccgactagggaggaggtaggctccccggaactgccgggcctcccccccc

SEQ ID NO: 67304 - DNA, 569 bp, Zea mays
  Clone ID: MRT4577_161379C.1
taccttcttactccgaaggtagctctggggccctttggacggtgcacacttccctttgccgcccgcaagatggcgagggcgcctaagaccaaggaagcgtcctgcatgatcatggagcgcaaggacccacactccaagggggactcaatctaagaaaggggcatggatagcctgtaggcccaggcgctacgcgccgttataaaccgcaagcggtctagatatggtggccagaccaagcctggcttccataggtaggccaagaccaccaagtaagatcgttctcaagatgccgtgctagatctgcatacactactcacagaacgcctatcatgagatgctatgcgttttgagattgatggagacaataagggcaaggacacatctcttttctaagcttaccgaccacctgtctggtactagagttgaatctgtgggtatactactactgttataaatacatgtcgtctaatttaaatgttaatgtagcactgaaatcataccatgctatgtatccaaattccaacgcctgacatttgccttggggtgttgccctacttttggctaaatga

SEQ ID NO: 67305 - DNA, 2784 bp, Zea mays
  Clone ID: MRT4577_16137C.1
cctcgaggccggccggggtcatcacttcacaactatgaaactgttcgatcgtatgctggaagatcgcttacaaaattgttgaaacgttggccttctctaatttctaattgtgttctcacacttacgggaaatttgcgtgacccaaaagctcctgaacatgttgttcttggttcttgcagcattctgatctcacagactgttttaagacacttgaccactgattctgtttccctctcttcctttatcatgggaattctggaaagctctcatcatgaatcgttgaagtgtcagaaagctattactgagctctttgtaacatataatatacgtttctctggaatatcaaggagcttctttaaaactcctgaaaatcaagctgacaagccaggatttctcagtctaatttctcaaattaatgctttgggctttgagactaatggactacattggaggtacaatttgatggccaacagagtattactattactaattttggcatccagaagcgaatctggcatatattcacaaatgcttgcaaaaattgctggtcatttcttaagaaatttaaagagtcaactgccccactcaagaatgcttgctatatctgctttgaacacattattgcaaggatcacctcataagacatctgcacaaaattctaagcaaccaatagatcaccctgaagattgcaatatttcatcaacagaagagattttgaatgagataatccgagaggaaggattcatgaatgagacactgaacagtttatctcatgttcatattatttccgacaatgatggttcgtcaaaagcgagttatggggcatcatcttttcaaagcggatctgacaaagcaataacttacttctattttgatttctctgcctcatggccacgtactcctagttggatttctttactgcgtggtcacacattctattccagttttgctaggatattcaaaaggcttatacagcaatgtggaatgccagtaatctcttctcttcagagtacactagaagagtttttaatttcaaaagagagaccaaggcaatgtgtcgctgctgaagcgatggctgggatgctgcactctgatatcattgggaatctggaatgtgagaacaactggttgatggcccagttgcataagattatgttagcaccatctgtggagtcagctcctgaatgggcagcttgtattcgatatgctgttacaggaaaagaaagagctggaactcgtgctcctgttctcaggcaaaaagtattagaatgcttatgtactcctcttcctcattccatggcaactagcgtacttgcgaagagatattcttttctgtccgttgctctaatagaaatttctccacccaaaatgtccccagcagagaagcaataccatgttaaaattcttgatgaactacttgacagcatgaaccattcatctgctcaggtaagagaagcaattggtattgccatgtgtgttacaacctcaaatatgagactttctgggttatttggcactggatgttcaccgcaaggccttcatggggatgtaagcatgattgaacaaacaggaaataaatattggtctgaacgtttgacagatggagctaatgaattagccgtaagtatacaaaatagtactcaatctaagcaactagaatcaacatcagattcggctgaagatagcatggatgatagagagcaggctgatgctaaaaggatggaaacgatatttcattttatgatcgcatctttgaagtctgggcgatcttctgttctactggacactattattaggcttgtgtacccaattctctcactacaggaaacatcaaataaagatttatcattgcttgctaagtcagctttcgagttgctgaaatggaggattctacatcggccttttcttgaaactgctattacgtctattcttcctttagtcagtgatcctaactggcgtaccagatctgcactgttatcgtatctcaggacctttacctacaggcacacattcatactttctggctcagagaaatcacaaatctggcaaacaatagaaaatttacttgtggacaaccaagttgaggttagggagcatgctgctggtgttcttgcaagcttaatgaagggtatagatgaagatctatcaaaggatttccgtgaacggtcatatgcacaagcccagcatatttttgttgcacggagaagaaatttgaagttttctgttggtaccatccatggtgcagtccttgctttgacagcttcggtcctttctgttccatacgacatgcctagctggcttccttctaatgtctcgctacttgctcgcttcatccgggagcctccccccataagatcaacagtcacgaaagctgttgcagaatttaagcgcacccatgctgacacatggagcatccagaaggacgcattcactgaagacgaactggaggttctccgtgatacatcttcctcctcgtcgtacttcgcttagattaaaatttcaaaggccataggatattctctggtactggtgttgtgtatatgaatttataactgttgaagtgtcggtgtttttcataaagtatatccttgtacgtacctagttttatttcatcaacagatgccttcgtacaactgagatgaagttatgcagtctactgtataccgtctggacatagcggaagcattatggcatgtgggatccttgcgtgggctgagaaattgttaacatccaaatcttttgcccagtcaacgacgtgaataagatgctgcctagtttaaccgc

SEQ ID NO: 67306 - DNA, 558 bp, Zea mays
  Clone ID: MRT4577_161380C.1
aaagccacaatacgacttgaccccttttaggaataattttactaaactttggaaacgatttatgggatgcggaaaaccctgaacaggaacccacgatttacgacggaaaaacggtggagaagcctatgcagttaaaaaaggtttgaaacttgggttgggggacccaaaccatgcaaggaaccgattggggaagcttaagtttttaatttttttttttgccctaaggggggggggggggccacacttttttttgggggagttaacagcccgggggggcagccgggcataaaatttgggggaaataattttggcctgggtgtacttgggggcaaacccctggggggaaggttcaatgatgcccccgggaaggggaaaaacaaggggaaggggggcccccttttggatgttggattcggccaagggggggccgtttttaagctgtttccccggaaaaattaatcggtggggggccggggaaataccttccttggccgggatcttggccttgacattggcaattggatcgctgctctcaacctcgagggggatggtctttcc

SEQ ID NO: 67307 - DNA, 813 bp, Zea mays
  unsure (1)..(813): unsure at all n locations
  Clone ID: MRT4577_161381C.1
gctccgggagcgagtggtgctgcttgatatcgcgctgcacgagaccaacgccaggctccgctcccccatgctcacgacggcagatctcgtcccttcctgcggtcacgaagccacagctttcgacgactcgtgacctcccttgtcgagtcccctcccccatcggtccatagcgtgtgcatctcagcgtggcaccggcgctctaccccacccacccaccacaagggcccttcgcgtcgtctgagcttggccccgacggcattgcgcgtgatgaaggtcctcctcgatcagcagaccttcctcgcgctgctgaggtcggtggaatgcctatccacggggaggcaggtgcacgcccatgtcattgtgagtggtttgcactcgcgcgtgtacctgtggaactctctgatcaagatgtacaacgacgctggggatgtggagaccgccgagctgatgttccgttctgcactagttgatatggcaagccggggaatttttatcagtatacggttgttgctctgctcacttgctgtgggcgcctaaagaacgagattattgggaggagcatttgaagacgcagaaattactcatgttgacgatacagtagatcctgttagagacatggaaactattagtgaagatctcagactaaagttttcattggattttgttgatttataagatcagctgtacaacacttaaaccttttttcgacactattttgtttctattttctgcaggatatagagttcatgaaaaagatacttgangaccttgataagtcaatgaagaagagcactgataagctgctcaaaattg

SEQ ID NO: 67308 - DNA, 257 bp, Zea mays
  unsure (1)..(257): unsure at all n locations
  Clone ID: MRT4577_161382C.1
ttctaatcncgaaggccgccctttttttttttttttggttgggtaccatggcatgctgattttctgaggggagacgtcctatanactacagtaacaaaaaccaccttcaagccggcaagcttcaacccactttcacaaactattgagcaccaacatttttgatggcaatatatacacacttgtatttacaacttcaacgcttgaatctgaagaatcacaactcaaaaccaccattcaatttaacaaataaccaccgc

SEQ ID NO: 67309 - DNA, 1262 bp, Zea mays
  Clone ID: MRT4577_161383C.1
ctcgcagctgacgtggttgcaatcctcgatgggataagcgtgtgaagtactacccccaacctccctgatgaggaggcgccggcctgtgggtcgggccttggctggtccttcccctgcgcctcggggggctgttgtcattgggggtccaaatgtaactaaaggctatttcaaggatgaagctaaaacaaatgatgattgtgagcccatttgagctgaacagcagaacttcccctgaacctttccacacttcaagtgctccgcttgtggcaaattcctaaagtttgttgtagaagtaggcttccgaaaaaggagttatattaacaatacctcacatcattgctagaagcaactgtctgttaaagaagtgctctttagcaaaggtttcgtcattcttgcctaccgcatttcctttactacaaagtacgggaaaacaggattctttcattggctcttcttatcttgtctcagatgcggaacttgatgacctgtttctatcttatcacacaagtgttgaatatgagagtagattcgttttctataggatcacactttacccatgtggttgagcaggcacctagctatacatttcacagtcaatcatctggttctagctgtttgtcaaatattattgctagcatggctcaaatccaaatattattgctagcatggctcaaatccacggtcaaaaattggcatccctcaagttgtcagatttgaaagctccctcgcatcccctaaaagattgggttatcatgatgaagaacatgtcacgtggacagaaaaacacaagaactatatttatggatatactatttttttcttcttttgtattattatattcatatccttttttacctttatattattattttttatatatgttgtatttgtctaatattacttcatcataatgaggaagctaagattgctagggaggttgaggctcatgaaaagagaattaaaaaggagcttgagagttgagaagcaaggtctactaaatagaaagaaagaagaacaaatgtagagggaaatggagagacatgatcacgagagatgtaatgaagagaggttcatgcgtgaaaggcaaaggaaagaagaaaattccattagcaacagagacgtatacttataactattatggtagataaaaaatgttacaatgtctctcttctatagaacgaaactgggatatcattcattgatatatgttcgattttattcaataattattatataattgtgcaccgtcgcaacgcacgggc

SEQ ID NO: 67310 - DNA, 169 bp, Zea mays
  Clone ID: MRT4577_161384C.1
tgctctctttttttttgcagagctcaagaccacgattctcgtgctaacagcagtgaattcttggtgctttatctacgacaatgaaccttggtcctcttacaactgccaaaatgaaccttgatcataggacacttctgtcctcaataaaaatggttacgtttctaaccta

SEQ ID NO: 67311 - DNA, 607 bp, Zea mays
  Clone ID: MRT4577_161385C.1
aatggggttttttttttgaacagagtttttctttgcttgtaagataaatgggttgggcaacctataatataggttgggtcgtggtttctcggtcaagttggtctaagacaccaattcagatttaaatctcgtttatcggaatatggtttagttaatacttgaggtagatcagaattttccgtttaaattaaaacaaaggatttatgcaaccatcggatggttaaggtagttgcataaggccgagttggtcggttattcttaatttagtgccaagtgaatcacgttaggacaggtggatagggtctaatccatgttacaagtattattaacctgcttgagtgggtcacattgggttagttcagattagatgggaactagattagtttagcataactagatttgactaaataagacctaatcaattttggattagtttaggttgaatggggtctagatatgaccagattaatctagataagatctgcttattttattttagaatagattatgtcggtcacaccattacgagataagcaaagtggtggccgataagtatgcttattaggacaagagaagtctctaagaataaatagaatcttttgagact

SEQ ID NO: 67312 - DNA, 490 bp, Zea mays
  Clone ID: MRT4577_161387C.1
aacctgcctgttaacctcacacatcatccaatccagacctcccactcgatcgcgcagcgacagcaccctctcccgtccatgggcaagatgcgcgcgctcttctcccgcagccgcagcggcggccgcgccagccgctcctcctccaccaagtcatcgtcgacgccgccgtcgccggcgcggtcgccctctgtgcgggaggacgagatggagcgcgtgttccgcaagttcgacgccaacggcgacggcaggatctcgcgggccgagctggcggcgctgttcgagagcgtgggccacgcggtcacggacgacgaggtgtcgcgcatgatggaggaggccgactcggacggcgacggctacatcagcctcgccgagttcgccgccatcaacgccgcgcccgacgccgccgtcgaggaggacctccggcacgccttccgcgtcttcgacgccgacggcaacggcgtcatctcccccgacgagctcgcgcgcgtgc

SEQ ID NO: 67313 - DNA, 269 bp, Zea mays
  Clone ID: MRT4577_161388C.1
gttgaaatacttgtatcaaaccttttgcaaaaaacattaaaccgatagggggtaaaatcaaaaccgacacgaaacaaaaacccaggggagccaacaccaaaagccagcacaggtcaatacagccgaagccacaggggccaaatgagaaaaactatgaaaacaaaacagcgacgaacgtatatgacgatgtgtccggaagggcaggagacggtgctgggaaccgcccgaaagggccccaaaaagcacccccaagggcggccaacgatgcc

SEQ ID NO: 67314 - DNA, 636 bp, Zea mays
  Clone ID: MRT4577_161389C.1
ctcaactcccccgaagggagcagaaccggttgtggcatgtgtgcggcctcggcctggacgaggctacgaataaggtgggggctcccgtgctggagatcccgctagggtctgctatggagtgcaccacggataacaggaggaggcgaatgcggtcgaggagggcgacgctacagggagagcgacgacaatgaacaggcagaagattaggaagaggatgaaggtaaaggtgccggcaatagagattacagcgaccaacgggaccttatcctctgcctgctgtcaaacaagaggatggctactctgataccagttcaagggcaggtctctggtgtccatacgagaggtctccatgaacgacggcaatgagataccctcctgcaaaggtgttaccttaacaatggatcaaagagaatcctttcgcagtgctgcacctgcgatcaaggatggcatcaacaagctcaaagattcatactgagaacttgttttaggagcctattctcttggcaaggacctgcacgtgatgcacaacatatatatgactgtgacatacgttgacttatttaccaacgacttctgcgactttgaagaaacctttcctgtgccttgcaagggaagcttggctggtgatccgaacct

SEQ ID NO: 67315 - DNA, 507 bp, Zea mays
  Clone ID: MRT4577_16138C.1
ttcccggttcgaccccgcgtccttttaaaaaaaaaaaaaaaaaaaaaaaaaaaaaaaaaaaaaaaaccccattaaaaaaaaaagggtcgaacaaaatggaggacccaccctaagatccaagttcttgtaacgtgacagccaatttatagtctcgcctaaatgcattccactgtccaattttttaaacccctgtgactgggagaggggggggggtaacccatgttatcccccttcttcagcttccccctttccccagcggtcttcacagctgggggttccgcacagatggcccttccgaacggcttcccaacctcgccggcaaccgggacgccccctgggccgccccttttggcgccgcgtttggggcggtttcgcgcggggtgacccttaccttggcctgttccctggcccccgcccttgtgcctgttccctctgcttttttccccccgttcgccggttttccccggggtgctctcaggggggcgctcccttgggggctccgttttg

SEQ ID NO: 67316 - DNA, 384 bp, Zea mays
  Clone ID: MRT4577_161390C.1
gcggttgtctcaaccgcaggcgagctcggatcatgtcacccgtggatccacgcaaccatgtgtaggaggaagaccagcgagcccaaggaggagaacgttacccttgaacccattgtatgtgaaggacagtttgactttagggttgctcatatctgtgtatacatcaatgacaccttcattcatgtcactgatatttatgggagggaaacttacgtacgcatcactggaggcatgaacgtttacgctgatcgtgatgagtcgtcttcttatgctgctatgcttgctgctcaagatgttgcatcatgatgcaaagagcttggtatcaccgatctgcacattaatcttcttgctaatggaggcagcaagaccaataccgatggacct

SEQ ID NO: 67317 - DNA, 415 bp, Zea mays
  Clone ID: MRT4577_161391C.1
tgcactgctgttgccgccgctgccgcatctatcgcagatctatcccacgtacctcgacgcaagacggatgtacaaaacgacttcgatccgatctacccctcgtcagaactccagaagctctcgcgcagctcaaacacactcgtacaagactccaactgcttcttaattgatgttaaatgcctggggtgctccagcgtagccactgcattcccactctcccaaactgctgccatactccctgtgtgtgcaactgctctctgactgcccactggcagaaaggcagaggtaactgaaggctgacttttgcctaggattggcgactaaagcgagactagacctgaagttgtgctctatgccagatactagccacatgcactggctttaaactagattttgcataaattgttcataagca

SEQ ID NO: 67318 - DNA, 643 bp, Zea mays
  Clone ID: MRT4577_161392C.1
gctgcaggccacgacgaggcacgtcctcgagagcctcctgacggccctgagcaccttcagctccctcgccactcgcctgtggcctgctcggatgctctggagcacgccggagtacctgtcgtggatctgcctgaagctgcctctcgtcgtggtgcggaaagggttgattctggcgacgggctcgccggccgtggtggcgtcgtctgctgccatgctcgaaaggaaggtgtccatggatcggtagttgctctgggtgctcttgatgttcctgagcagctgcctgcacatctccgaggcctcggcgctggcgtcgaagtagtccgccatggcgagctgaacccatgcggatgttctccccccgtgaaggactggagagacgaggtcctgttggtgagtagtgcgctcctccatttctgcatcaggttgccttggcagagtgctcctgtactcttcctctatgcccaaggatccacggacgctccccggcggcatctccatggatcccttctgcaaggcacatagaaagtagaaatctaccgcatgcttcatttgaactaggtaatcgcattcccaatgcaagcatgttcctaaatcttagtattacttttggacgaaccagaggtggttttctgcggacgctggg

SEQ ID NO: 67319 - DNA, 1902 bp, Zea mays
  Clone ID: MRT4577_161393C.1
cttgaacttgtcctccttgtcctcctcgaaaacaccagccggcggccgactcgactcgactaattgaatcctcgagcgggtgggccaagaaaaaacagcgctctcgctctccctctccccgacggctgctagctagcgacaacagatcgacggcaacaccgatgggcgaggccaacgccacaggcacgccagccaccgcgacggtgcgcgtgctggccgtgtcgcgcgtcgcgccggcgccggcgccggcagcggcggaccccgtcgtcgtcaagctgtccttcttcgacacgccctgggtcgtgctgccgcccatccagcgggtgttcctgtacgagctgcctggtggcgacggtgagttcacggcggcagtgacgcgcctcaagagctccctcgccgccacgctggcggtgtacctgccgctggccgggaagctggcgtacgtcgccggcaccggggacgtggtcgtggactgcgtcgacgaccccggggtggccttcgtcgaggcggaggcggacgccggtatcgacaccatggacgtccgccggctggcgagcgacgaggcgcacgacatcccggcgttcctagcgctggtaccggagctccccaccaaggtgctcccggcgccggttctgtccgtgcaggccacgcggatccccggcggcggcctcgcgctcggcctctccgtgcaccacgccgtcgccgacggccaggccgtgtggaggttcatgggcgcctgggcctccgccgcccgcgacggatcccccgtcaccaagtccctccccgcgccgcactatagccgggaggccgtccacgtccccaacggcgacgagttcgcgcgccagatgctcaagatggtcgcgcccaacctgcccgcggtgcgctcgcactatagccatgcacggaacacctgctgcaccatttttctgtgcctcggtcacggaacctcttgcatgtgtgcatgcaggcgggcaccgttgcggactacgacttcagccagcgcttccgcctggcgcgccggacgttctacctcggcggcgacgacatcagggcactgaagctccgcatctccgcgctcgccgaggccgaggccgaggccgaggacgacgtcgtcgccgacggcagaagcaagaagaagccggtgtcgacgttcgtggcgctgtcggcgctgggatggacgtcgttcgtgcggtgcaagggcctgggcgccggcgacgacacgtacctggtgttcctggcggacctgcgcgcgcgcatggacccgcccgtggcggacggctacctgggcaactgcatcaaggggtgcctggcgacggcggacgccggggacctgctgggcgagcgcggcctgctggtggcgtgccgcgcgatccaggcggcggtggcggagatggaggcggcgccgctggccggctcggagcggtggatccagaagatgatggggctgccgttcgcgcgcctcgccaacgtggcggccagcccgcggttccgcgtgtacgaggcgtccgacttcgggttcggccgccccgcgcgcgtggagctcgtgtccatgaacaacgacggcgagatggtgctcgtcggcggcaggggcgacggcgaggtgcagctgtccgtgtcgctggaccccgcgcgcatggaggacttcaaggcgcacgtcttcgccacctccgcggcgccgtcggactcggcggcggcggcggccaactgatcgatggaggcagaggcgtgtggtggacgagaggcatacggatcatgtgagcagattatgcatgtgtgcagctattgtcgatcgaacgaagtattttccacgaacaacaaaaaaaaaccaagtatttttcagtttacgttggatatatatatatatatatacaattatatacaagaatctttcaattatttgtt

SEQ ID NO: 67320 - DNA, 237 bp, Zea mays
  Clone ID: MRT4577_161394C.1
agacagcttatgattgctccatttctatagctccactagatgctgatattatatgggtcccgcaatatcataacttgatacatgcattccaatctgcatattacagctgtaaatgttactctacgctatgaatcatatcgtcaacataatgcttgaaaactctcacattatgaacatccttgcatgcaaaggatcaaacaccatcattccttaattatatactctttaaccatcaaa

SEQ ID NO: 67321 - DNA, 403 bp, Zea mays
  Clone ID: MRT4577_161395C.1
gtccggcgtaggattcagcaaaaaagagcaccgagtttggtaggtttaatagccccctctaggtggacaccgactgacccaactttaaagctaggttggatacaaacgaatatatacttggtttagattgcacccacctattatgaataggctggctcatggtaccctgcaatggaatgcagatgctcctggtctgctcttgacaggtccacatttgcacggcctggggtgagctaaggatgcgcctggatcctagctgtgtttcctggaccgagcttaatttggcgcttagcctataactcccagggcctgagatatctcttgtcttcctaaataaatgccaggaatgatctccctatttaaatgtctcataccactccatctttttagcttgatccgacat

SEQ ID NO: 67322 - DNA, 323 bp, Zea mays
  Clone ID: MRT4577_161396C.1
gtggatggaggcgatcgcccatacttttaccctaggaatgggaggagcaatcaggaggagaagatggtaatgtcccaaagtctccatctacctatctctggttagtcatcaggctttagacaggaagagagcatttgggaacagagaaggcttattgcagtgccatcgctagagctggggggggggcaagtaggcaaattcgtcaacttagtgtgtcctctgcccatggctgagctttgggtagtcccaagttgtttttttttctcgtttgcgtgctagtcgtggctgttgtaggctttgccggtgtgggttgtggtgtgatt

SEQ ID NO: 67323 - DNA, 2200 bp, Zea mays
  Clone ID: MRT4577_161397C.1
tacctcgaggccggccgggactactttccccaaacccagaccagagcagcttgcgttgcgtctctcgtttcttttcttgttggccttctccttgccttgcttttgcttgctcgttgcttcttgagctcgaacccgccccttgtgcgcgccttgcccaagtctctgtgtgtgttttataggcttgagagcttggaatagcggggggtggaggaagcggaagaggagcttcgttttgtgttctagaggggagtcatgttccatggcggcaggcctctgtccctccgggggtctctcaaggcgcttgaagctgatatccaccatgccaacaccctgcttgagagcttggaatagcggggggtggaggaagcggaagaggagcttcgttttgtgttctagagggagtcatcagtcatgttccatggcggcaggcctctgtccctccgggggtctctcaaggcgcttgaagctgatatccaccatgccaacaccctggcgcatgctatacacagggcgtatgggggtgcctgcgtgcagatgaggctgtcctacagctccatggctccaatctttctcaaccttatccaatggatggactgcagctgctccctgtcatacacgctccctagctaccttggcctgctcgaggttctcgtctacaaggtttatgtcgatgaagatgcctccatatccaccatagaaaggagggcgagcctgaaggaattctacagtatgcttactatccaccatagaaactagtgattaagaagctttttttttctgttcaagatttttttttgttgatgctgctgctgctgctgcagcagtggtttaatatagttttgggaccccatggaatgcagctatcatataccctttcttgcaacaactggaggacaacttgatggacaaggactgcaaggacaaagggtggtctgctgctgccgccgccggcggcggcggcggtcggaagcttgttgccgaagatgacagggaggatgagtgtggcatttgcctggagacctgcaccaagatggtccttccgaattgcaaccatgccatgtgcatcaactgttaccgagactggtacacaaggtcccagtcatgcccgttctgccgcgggagcctgaagagggtccggtccagagacctgtgggtgctcaccggcgacgacgacgtgatcgacacggtgacgctggagaaggagaacgtgaagcacttcctcagcttcatcgacagcctgcccctgatcgtccccgacaacatgctgctggtctactacgactacctagtctagcaaggctcctccccccaccccccactctgaagctctggaagaggaagggggtctgggaagaagacgcggcgtacaagcgacaagggttacccgcagccgaccatcctctgcggatcgagttggcaaagcgaagccgttgccgaccaacagacgatactctcgtgggcatgccacgccgttgcgctggctttattgcatggtggcgttgctcgctgtaatggttgtaaataaagaaggaaaatgtctcgggttttatatataatatactagcttgacatttctcgtctggcgaattgccggactgttcagaatgaagaaatcagggggcctctacttctctgctctaaaaaaaaaaaaaaaaaaaatatggatctgcaataggaaaataactaaaaaaaaggcccctacacttcatatatatatatatgcatgcatgtagcccgacagctatatattccggaatgtgcttgcgcccaaaatgtaaaaaaacgttgtacactataaatcagttctatgcgtaaccaggttggaatttttccaccccgtatcatgtataccctacaaaagtgcaaagtctagtacagttggtttttggattggctagagcttagttctatgcgtaagcaggtgaagccacggacggcataactatttgtacactcggtttgcataagaaccgactgcacatctgcatttgcaccgtcggttgcaagttgtgatagactcggcgggaagttttatgtaatataaaataaagtataggtgaagtacatgtttttagtataaatttttatcctgtaattttatagttattgaattttatgactaagagaaaaaaaacatgctagtagagttttatcatggatcactgcaaatgtcaccttgaagcagttaatggttgttatc

SEQ ID NO: 67324 - DNA, 2500 bp, Zea mays
  Clone ID: MRT4577_161398C.1
ctttccaccaggggtccacggcgcgccattagcgaaccgcgacctattcgccgtcgccaatcgccatctcctctccatctcgacatccgcagggcgttcgacgaaatgcgacgcaaacgccgcgcggcgcgcgcccatgtggccaggcgtctcccccccgcacgctcctcctcatccggcctcgcgagcgcgcgagggagacgtcgctgtgccagcgcgaggcggacgtcacctcacctccccgccccgcgtagcttttctgacccggatgctacgctgcgtctccactactccgcctcccgccctgccgtccatgtcacgcctcggctccttcctttcgcctcccgactcctgcctgctgccccttgtcctcttccccacctcctccggaatctggccgcgcacctactcgtcgccctctcgttttcccgtctccgctttctttatcctgcgggcggagcgggtagggtggggcggtcgttgctctcggatcaagagaaagggaggaaaaaaaaaacagcgctttctttctgtggccggcggttcgcccgtctctcactggctgtgtggccactggccaagcgggacacggaactcgagctccgtttggggattccggatcacttcgaggctaaagggattctgatcatcacttaagctcaagatcatgagttggttaaacaaaatttttaagggttcagtaaacagagtttcaaggggtcactatgatggagactggcatgaaggtcattcatctgatcacaccagagatacttacgatgacagtgataatgaagatatagatcgtgccattgcattatcgctagctgaggaagatcagaataaggggaagtcggtggctattgatactgactataatctggaggaagatgaacaacttgcacgggctctgcaggagagcctgaatgcagagtctcctcctcgacagaatgttcctattgaggatgtgccagtgcctcaatggaatattcctgttgagcgggtgcctcctcgacagtatgttccagcaaatgaaccaaccccacatgtttacccacggggtggatccaggatttgtgctggatgccaaaacccaattggccatggacgtttccttagttgtatggattcagtttggcatcctcaatgcttcagatgttttgcttgcaacaaacccatatcagagtatgagtttgctatgcatgatgatcagccataccacaaatcctgctacaaagagttttttcatccgaaatgcgatgtttgcaacaactttattccaaccaatagagatggcctcattgaataccgagcacatcctttctggatgcagaagtactgtccttcccatgaagatgatggcactcctcggtgctgcagttgtgaacgaatggagccaagggagatcaagtacataacattagatgatgggaggaaactctgcttggaatgtctcaattctgcagtaatggattctccagaatgtcaacatctttacatggatattcaggaattttttgaaggtttgaacatgaaagtagaacagcaaattccattacttttggttgagaggcaggctctgaatgaagccttggaagccgagaaaaatgggcaccacctaccggaaaccagaggtctatgcctttctgaggagcaagttgttagaacgatcttaaaaagaccacagattggaccaggaaacagaatcttagatatgattataggaccatacaagctgtctcggcggtgtgaagtgactgcaatccttatattatatggtctgccaagattacaaactggttccattcttgcccatgagatgatgcatgcatatcttcgtctcaaaggattccgaaaccttagtattgaggttgaagaaggcatctgccaagttttatcccacctgtggttagagtcggaaatcatcgctggttctagtagcaacgttgcatccagttcagaagcatcatcatcttcatcatcctcagctcctacctcttcaaagaagggtgcgaagaccgaattcgagaagaagcttggggcattcatcaagcaccagatcgaaacggattcttccgaggcatacggaggtggttttagagctggctatccggctgttgagcgctatggcttgaaaagaacccttgatcatatgaagttgacagggtctttcccatattaaagcaacagaagtaaaggagggggctttcttccagttgtgaggatacactccacattggaggttttggtttgggttatacataactgatatgcataccaaacgaggggaattgtctgtaaatcaggagaaccctctgctgcgcggaaacttattgcaaactgtctttttataggaaaacgatacatgcaagttttcagacagggaacttgagaggatcatatgtaatttttgggcacttgtttttgactcctttggttatcaaaaacaaggcaacataataagattgaaatttatcttcatctttaaattcaaaaaaaa

SEQ ID NO: 67325 - DNA, 258 bp, Zea mays
  unsure (1)..(258): unsure at all n locations
  Clone ID: MRT4577_161399C.1
ttaagagcataatgcatgaggagggcgtctgtccaccttcacctcatcctcgcanccttcttccttctctccgtactcacggctgccagctccatcatcgggacctactgcgtgccaaattggtccattccgcacaacccgctccctaccttcctctacttcattacccgcctgacctttttcatcatgccgcgcctccccctccccaatctcaataggagatactgcctccatctcccccacatcctcttttactaa

SEQ ID NO: 67326 - DNA, 246 bp, Zea mays
  Clone ID: MRT4577_16139C.1
tcgagcggccgcccgggcaggtgcttttttttttttttttttttttttttttcgagtcaaaaacaggagatagcttctgctgcccccactttctttcttttttttttagttacagggaacgtggaggattgcaaacaaagaaacaacaaccagtaaatgtaacctagacgggcaggaaaagctgaaaaaataggcaggctgttcagtgcttgttattgttgttgtggccgatgaaattgttgcgga

SEQ ID NO: 67327 - DNA, 558 bp, Zea mays
  Clone ID: MRT4577_1613C.1
atgcggagttcgtcgtcttccggggccgagcccgagtccgagccctggggtcgggcgatgcggagtttcctatggcgcctgaggccggacttggctgctgtcagcctcactatgtcgagtggcacagcagtcggagcggcgcaggcggcgctgtccccttgtcaggccgccattgaacggacgccaccgttggccccggcatccaaaatagcacctatcgcaagtgccgaggctactgccgaagttgatacttctggcgaagctgcagctgccgccgaagctgtcaatcttgaaagtactctgtcagggattgataaacttcttttagatatggctgaagaagagacagctgcagctgcagagaaggtcatggacgcagtgcctgacaaagggaaaaagattgctgatgttgctatggaagaaaatgactttgaccttcggaacctggtgggtcaagaattgtccgaggctgagaagaaggagctacaagaatatggtatatcctgtggctaccatccaggagctatgctctttggtggaatagacgaaggggcctga

SEQ ID NO: 67328 - DNA, 356 bp, Zea mays
  unsure (1)..(356): unsure at all n locations
  Clone ID: MRT4577_161400C.1
gggggcgntgttggtctccggnggtcgggcggcgctggcggtggcgggcgtgctctgcgcggtggcggccttggcggcggcgccgctggcgtcgttcgtgcgggcgtcgtccctcctgttcttcccggcgctnnncgggtgggtcctgggccgggtgagcgcgttctgcgcctcgtgggacgccgtctagccgctgtcgtggcggctgaagctcggctggacggccttctgcgggcccgccgggccgaagggccaggccgtctgcggtctgtgcatttgggtgaagaaccgtgcgacgggcgcgtccttcgtggcgtggttcgtggtccagtgctgcctcggcggcctggtcctgg

SEQ ID NO: 67329 - DNA, 923 bp, Zea mays
  Clone ID: MRT4577_161401C.1
gtaccctccaggccttccggggcgcacctactcgtcgccctctcgttttcccgtctccgctttctttatcctgcgggcggagcgggtagggtggggcggtcgttgctctcggatcaagagaaagggaggaaaaaaaaacagcgctttctttctgtggccggcggttcgcccgtcgctcactggctgaagcggctgcacccgcgccctcttgctgtgtggccactggccaagcgggacacggaactcgagctccgtttggggattccggatcacttcgaggctaaagggattctgatcatcacttaagctcaagatcatgagttggttaaacaaaatttttaagggttcagtaaacagagtttcaaggggtcactatgatggagactggcatgaaggtcattcatctgatcacaccagagatacttacgatgacagtgataatgaagatatagatcgtgccattgcattatcgctagctgaggaagatcataataagggaaagtcggtggctattgatactgactataatctggaggaagatgaacaacttgcacgggctctgcaggaaagcctgaatgcagagtctcctcctcgacagaatgttcctattgaggatgtgccagtgcctcaatggaatattcctgttgagcgggtgcctcctcgacagtatgttccagcaaatgaaccaaccccacatgtttacccacggggtggatccaggatttgtgctggatgccaaaacccaattggccatggacgtttccttagttgtatggattcagtttggcatcctcaatgcttcagatgttttgcttgcaacaaacccatatcagagtatgagtttgctatgcatgatgatcagccataccacaaatcctgctacaaagagttttttcatccgaaatgcgatgtttgcaacaact

SEQ ID NO: 67330 - DNA, 535 bp, Zea mays
  Clone ID: MRT4577_161402C.1
ggacccaaaccaaaaagggcttttggcccccccctttaacttagggtttttaattcaaaaaggggccaaccggttttaaaaaatggttaagggaaaccctgcctttttcaaaaacccgaaaaaaacaaacggggggcccaaaaaaaggggcaaacccccctttctggattttttggaaaaaccagaaaaaccggtcccccccccaccaagggggggccccgggcccctgaaaaatggcccttttttcctttaaacaaggggggaacggggtttaaaaaaaaacaaggggttccccagaaacaaggggggtgggcccccaaccccccttgcccgttgtaagggggcaacagggaacaaccaacgggggggaaaaaagggggccttaaaatttttttcgggggcccccggggggcccaaattttaaaatttttgccccagtttcttgaaccaaaggccctcccataaaagaaccccccggggcaatttaaccggccttagggggagtttggcgggttccccaattaaagccccccct

SEQ ID NO: 67331 - DNA, 912 bp, Zea mays
  unsure (1)..(912): unsure at all n locations
  Clone ID: MRT4577_161403C.1
aattcggcacgaggggcgttcgactaaatgtgacgcaaacgccgggcggcgacgacgcctcatgtgaggcaggacgtctgccccccgcacgctcttcctgattcagcctagcgagcgctccagggagacggcgctgcgccagctccaggcggacgtgacgtgacctcccctccccgcgtagcttttctgaccctcgaggccggctgggccgggactactccgcctcccgccctgccgtccatgtcacgcctcggctccttcctttcgcctcccgactcctgcctgctgccccttgtcctcttccccacctcctccggaatctggccgcgcacctactcgtcgccctctcgttttcccgtctccgctttctttatcctgcgggcggagcgggtagggtggggcggtcgttgctctcggatcaagagaaagggaggaaaaaaaaaacagcgctttctttctgtggccggcggttcgcccgtctctcactggctgtgtggccactggccaagcgggacacggaactcgagctccgtttggggattccggatcacttcgaggtcacgaggtatgccctttgctaatactgtggtacagaaacggtgcctactgctcagtgatgaatgagatcttttcaatttgtcactgcaaaggtttctccaatttcttctggatccattctgttcttggctgcaggctaaagggattctgatcatcacttaagctcaagatcatgagttggttaaacaaaatttttaagggttcagtanacagagtttcaaggggtcactatgatggagactggcatgaaggtcattcatctgatcacccagagatacttacgatgacagtgataatgaagatatagatcgtggcaattgcataatcgctagctgaggaagatcagaataaggg

SEQ ID NO: 67332 - DNA, 1251 bp, Zea mays
  Clone ID: MRT4577_161404C.1
accggaaaccagaggtctatgcctttctgaggagcaagttgttagaacggtgagttctttgttgcgtttctctgctgatttgactactaccacaggtaaagtataagggatgcatgtactgagtgatataattcgtccagatcttaaaaagaccacagattggaccaggaaacagaatcttagatatgattataggaccatacaagctgtctcggcggtgtgaagtgactgcaatccttatattatatggtctgccaaggtaaactagcccttacatttaatttttttctcgattgttttattgaggtcatcattcaaggtttctgccacttccattgtgaatgaacctttaatggatcctgaagtcgtgatgttcttatgtttgaagcataactaggtagatctacttcttgtttatatgatggttacgcagattacaaactggttccattcttgcccatgagatgatgcatgcatatcttcgtctcaaaggtaatttatttatgctaatacttttttgtgattcacatgtatcactatcactttctgcactaattttcttccaaaaaagatagacagttgctactgttgttgctgacatgattttctctttttaggattccgaaaccttagtattgaggttgaagaaggcatctgccaagttttatcccacctgtggttagagtcggaaatcatcgctggttctagtagcaacgttgcatccagttcagaagcatcatcatcttcatcatcctcagctcctacctcttcaaagaagggtgcgaagaccgaattcgagaagaagcttggggcattcatcaagcaccagatcgaaacggattcttccgaggcatacggaggtggttttagagctggctatccggctgttgagcgctatggcttgaaaagaacccttgatcatatgaagttgacagggtctttcccatattaaagcaacagaagtaaaggagggggctttcttccagttgtgaggatacactccacattggaggttttggtttgggttatacatatactgatatgcataccaaacgaggggaattgtctgtaaatcaggagaaccctctgctgcgcggaaacttattgcaaactgtctttttataggaaaacgatacatgcaagttttcagacagggaacttgagaggatcatatgtaatttttgggcacttgtttttgactcctttggttatcaaaaacaaggcaacataataagattgaaatttatcttc

SEQ ID NO: 67333 - DNA, 540 bp, Zea mays
  unsure (1)..(540): unsure at all n locations
  Clone ID: MRT4577_161405C.1
cctcgaggccggccgggtttgtgcgcacttgcggcgggcttcgccctatatctacaacccgttgaaggaggacgccttccgctctatcatggaccactacaatgccgcccaagatccgcgtggagatctccggcaccgacgtcgtcgaagttcctcgacaactacgcccacctcgacgacgtctgatacgcatccgatctgaacacgggactctcgaacgtcgcaggtatgaatgaatgaccaaacaataataaccaatgcatgcttatggatatcgacatggacatgtcccacgaccacacgagagcataccgcgcgaactatgattatattatgaagtaatatataatggccacctttgcttgtagactactaaagcttatggattgaagcacgagtcctcatatgtctttgattttataacacttgagcgatggctgcagacgactaagcactcgtgtatttatctggcaagatgtctgcattatgattattcgngccactgtgacatgcacatttgaagaatgacatgagcagctc

SEQ ID NO: 67334 - DNA, 331 bp, Zea mays
  unsure (1)..(331): unsure at all n locations
  Clone ID: MRT4577_161407C.1
aagaaaaaaaaagggagaaaaaaaaaaaaaaaaaaagncctttttactaggggggggaacccctttttgtggcgcggccggaaatcccgggggcgacccacaccccccggtcgggctaacggcaacgaactgcgatgagctggcaaaaatgagaagaagaaagacatacaggcaattgagcacaaatggcaggacatgaacgagaacaggctgctgccggaaactggggacacagccaccagggctgctaactttagacaggcggacacacccatcggacacatcatggcctgggctaaggcttagggcacaatccaaccattgaccgctc

SEQ ID NO: 67335 - DNA, 720 bp, Zea mays
  Clone ID: MRT4577_161408C.1
ccgacccaagacgacgacgatggcgaaactgaaagtccgaaacctagcgtctctctctctctctctcaggctgttgagttcacgggcggccgatgctgagctgcgccaggcgcgcggcgatgtccgccccgccaagcgccggcgcggcctcctccctcgccacgcgcagcctcgctagcctctccgcgacgccctcgacccctgcagcggggctcaccctcgacgacgcggaggcggagatggccccgcagacggcggcgcacgcggcctcgtcgacgaagcagagcgcgaactcggcgccggactcgggctccgcccacgacagcgtcgcgccgtccagcctctcgaaggcgtcgccggggaggatcgggtacgcgaacacgatacgcccctgcggatgctgctgctggcactggccgtcggcgtcggggcccgccgcgtacaggaccagggatttcccctgcgggcggaggaacgtgacggcggcgtatgcggcgccgaggttgctccagtggccgcctcctccgccgacgccgccggggaggtgcaggagctgcacggggaatgcgccgccgctcgccatccgataggctcgattcgtgggagtgggacggcggaaaggaccgcggaaataatgtcgtctggtgcgtctgatctctgccgcttgtttcccatccgacgtttgcatatcatttctaatagttgtgacttttgtgtgat

SEQ ID NO: 67336 - DNA, 149 bp, Zea mays
  Clone ID: MRT4577_161409C.1
ttcccggtcgacgcatcgtactcccacacatacactcccataataaaaagcttctaatactccattcatcttactagccccagtttaacatcgagcggtgcttgagcccataatgttgcaatcgaaacccattcacttattcattcccc

SEQ ID NO: 67337 - DNA, 630 bp, Zea mays
  Clone ID: MRT4577_16140C.1
ccccctcgaaattttcttttttttttttttttttttttttttttttttttttttttttttttttttttttttttttttttttttttttttttttttttttggaaacaaaaaggggggaatgttttcctccataaaacagggggaggggttacatcaaaataaaacgaagggcccccgcccacaaagtttacaaaagtaaatgggggggataaagaaaaagttccccagggaccaaaaacaggaggccaacaaaaaaaaaatttttgttgctccgccggaactcggggaactgggcctactttttttcggccttccccccaaacaaaattttggaaccgggccggaacaccttggggtcggggaaaaccctggccgtcccctccgggggaagggtaaccaccaagtttcgggcctccccccccttgggggggggaagaaaaaaaaccaccccctcgccgggggccccccccacccggaaaaaaacgccccccggaaaaaccccggccttaaactccgcgccgaacatgggcacggggtccaaccccccgcacgttaattccggcccaaaaatttggaaaggggcgtttccctgttggtgccggggggggagccactccagggggcgccaaa

SEQ ID NO: 67338 - DNA, 392 bp, Zea mays
  Clone ID: MRT4577_161410C.1
gacgagatgaccgctgcatatgataaaaccaatcactggtcaacaccctcgtgggatggggcatcatgcatattacgagaggtatatccgctctgtaaacattgacacgctgaagatgcacagactcgacccaaagatggaagagggcagcttgagatagccatgaagtgaacttagtgcactcatgcggctgacaaaatcatatatgctagtgagactattaagcagatagctcgacagcatagaccagtagccacatttgttacaaagcctgatttggaagacagcggatactgaatctcacgagaatctgagcttgcgggagaacgatcagaatgtttctacggggacaagaaaaaataactctcatggaatgtcaaaaaccggagaac

SEQ ID NO: 67339 - DNA, 961 bp, Zea mays
  unsure (1)..(961): unsure at all n locations
  Clone ID: MRT4577_161411C.1
actcctaagggcgattgggtttctcccggccgggaagaacccacttctcactctcttactctcgagcgcccatttctaaacgactttgtcctttcgcatcgtgagactgtttgttcctttcttcatccacactctaccttcgcccgaccacccctcatcctaaacatcccgtctcctgacgtagaccgcaatcatgtctcaatccggagccaccgtttcccaggactgcattactgctttcaacgacttgaagcttaacaagaagtacaagttcatcgtctacaagctctctgacgattacaaggagatcgttatcgacaaggcctctgagagccgagattgggaggacttccgtgagacgctcgtcaacgctaccgccaagagccgaactggcgctgttggcaagggtccccgttacgccgtttacgacttcgagtacaacctggcctccggcgatggtatccgaaacaagatcaccttcatcgcctggtctcctgatgatgctggtatccagcccaagatgatctacgcttcctccaaggaggcccttaagcgatcgctcaccggcattgccaccgagttgcaggccaatgacactgatgacatcgaatacgactccatcctcaagaccgtcagcaagggtcttgccgcttaagcgcgtcgtcatgaaatcgcctaatcgccgccccgcgctcccttatagaagcgggtggttggatggagtttgaacatacctatggccgtttcaagagttgagacgccaaaataagcaagcaatcaaatgagtaggagtgcatagtgtgcggatggaaacaggcgcgnggagaacatggnngttttcgtttctttttgggacgtaaccaacgagtttgctttcaggagcgaaacgtaaatcgcatattgccagccctgacatgtatcgtacgtaaccccggaaaataaaacgcatgctggtatatat

SEQ ID NO: 67340 - DNA, 491 bp, Zea mays
  Clone ID: MRT4577_161412C.1
aaaaaccacgtttcgatcgatggacggagcggaccaatggcgggctaaaaaggatcctccaacgtgtcaaaaatgggggtatggagggggtccctaagggggggggcccagttgttgaggggccccttgccgggggggggggcctgcacgggaaacccgaggaaggcaaccatggcgaggcccccgtgcttgatctccgccagctgcagccgttcctttttttccgggtcggcccccagggcgagcgggtaaaagtaggacccgccggggtacaaccttttttccgggtcaagctcggcgttgcgctggaactcgatgtacccgatcacaagcacttcaatccaaataagcgtcaaaatggtaaacggcatcggctggcccaggtaggaggacccatccaccagttccaccttgccagggtcctgccaggtgaccccggtaagccactcaacggtgagggccccaagggtggcaagcatggcccatcggcc

SEQ ID NO: 67341 - DNA, 485 bp, Zea mays
  unsure (1)..(485): unsure at all n locations
  Clone ID: MRT4577_161413C.1
ccggccgggggccgaaatctactaggcttggcgtgcgcgcttctcccagcctgctgctgcaccgtccctgctccgcggagctgcttcgcttcctccgttagtgcgaaggtaatgacacgcaagctggtcgtagattggtgagctacggactgcggttccacttgcaccaaggcccaggccggagccgtggagtggacgcctacgttccgtgggatggactccggcaagagcgccagcctgcagtcgtccagcggcggcgacgacgagttcgactgcagaagcggtgccgactcctcgccgctatccgccctgctccggcagccgccgccgccgccatctgtgccgggcttcggcggcggctccttgatctacgggctccaggagctccgcacgccaccgctgtcccactggtgctcgacgacggcgcccctcccggccggcgcanaggcctcggcgccgtccctggccggcctgggtgtctggcg

SEQ ID NO: 67342 - DNA, 258 bp, Zea mays
  Clone ID: MRT4577_161414C.1
gggcataacacccacaatttatagttcatccgttcgacaacaaatttaaacagaacttccaccggtcaagtgcatgactgcatgaacaatttaagttgccaacaaatggcattttaagcttaaaaaaaagtaagaaatacccatgggatttttaggccatttttactccaacaaaaccttaaatgctggtaggggacatgaacactttgaccttgcgccccataaactcaggggggagggttgactcccacgcgttcg

SEQ ID NO: 67343 - DNA, 302 bp, Zea mays
  Clone ID: MRT4577_161415C.1
tgtatacttccgacacatacctcatgcagcggggcttgtttgagcaggcgctggacctattaccaactctcatgaatgaagatagtggtggagcaaggatactggatctgtaacatgaaacccgatctgatgccgagcagatagcgaatactttaatcctcaacacatgagggatgggacggatcatcattgagcgaaaggcactactaccgacagaaatgagtgtgttaaaggggtgcacgattaatgacacgatcaggggaatactcgggatatcgacagtgttacatatgctgataatt

SEQ ID NO: 67344 - DNA, 507 bp, Zea mays
  Clone ID: MRT4577_161416C.1
ggaaaaatgggcatcgaactcacatttcataaacccagttagacccacaattcataaacacaggggtaattataacaagaacacaatattatgatggggaaaaatctaattatttccaatgcagcaggctttgtttcaaacaaaaacaaaaaatggaatcggccgaaagcttatttgcttggtaacaaccccgggtaggaaggccccactaggctttagccacaatatcaaaaggcctgaaacggacgggaggttgacagctgaatgtcaggcttaaaaaatctccgcaagctggagctggcaccaacggtatattgacaagcacaactgccaaaatttttgacttggtggtgacacatcttggttaaaaggggcaactggaatgttaaaattcttgacttggcgctgacactttttggctaaaaggggcatttggaaaactggcggggggggccttggttcctttctgcctgaaggggtcgaaccagggattcgagcttccccttt

SEQ ID NO: 67345 - DNA, 352 bp, Zea mays
  Clone ID: MRT4577_161417C.1
aggtcgacggtatcgataagctttgactgtgatgacacacttcatgtcatgatatatattatgaaatcgacgacgatcctacatagagtagtacgactgtactacacacacatttatatcatatatgaacacttaacgcatcaagcaatccttgaaccaaaaaaacacataacgctatactactaaatacacgtggaacaaatcttattgattcaacaaagaaatctatattgttgatcgagactatcaagtgtatactatgcatgatgaaggacacacacagtattagagcagtcgccaccgttatatatctacggatcttaatatgaatacagacggacacaatgatgct

SEQ ID NO: 67346 - DNA, 463 bp, Zea mays
  Clone ID: MRT4577_161418C.1
aaaaaaacaataaattccaatttttcttttttttcaaggccaactttttttttagtcctgggggctgggtcgatcttcgacccagcccgtaatccaccaaaaaaaagggaaacgtttaggggggggctaaattaacaccctcaaaatagcgcgcccaaagccttttccttccttaaatatacccggggagggggttcgttttcgttttcggcgttctcctcggggttttttttttttgcatgccctcgatcatcacccccaaaaaaaaaaaaaaaaaaaaacaaatcgacgggcccggaactaattttccaatagctagcccccccccccctagctgttaatcctaaaaactggcccccctcaaaggtttggccaaactgccacccgggggggacggccccttttctggtaacggggcggccctccttggcggtgacctgaaacaagagcccctgcctgtcca

SEQ ID NO: 67347 - DNA, 408 bp, Zea mays
  Clone ID: MRT4577_161419C.1
ccggatcacctattattgagaccacaagcaacataaaagtggaatccgtagcaacaacagagcaacaatggcaccaagatattttccctccttatgctccttgctctttctgcatgtgttgctaacgcgacaattttccctcaatgctcacaagctcctatagcttcccttcttcccataccttccataatgatagctcagatgtgaaaacccactcttcacctatagctcaacaagcatccagaagcacaacctttatacccttgtgttaacatcgccaccctattttgtgcgtattgtacaaacatagggcacacactgcacactcggctacctggacaacaatacttgcaaacctttctccctacttagaacaacatttttcatcaaccactgctcactgaaccc

SEQ ID NO: 67348 - DNA, 498 bp, Zea mays
  Clone ID: MRT4577_16141C.1
aaaagggggggggggaattttgtaaaaacccctttttaccggagcctgacatttattttattcaaacccccctgggaagggccccccaataaaacttgcaaaaaaacaagggcttgtttattgggggctgccttctttaaacaagggggacggcccgcccggggaccctccttttggaaggacccattggttttccccttttggcccccggccattggggaattggatgagtctttaggggattttgaacccccattttttggggaggaattttcggcacctttttttggggggccccttttccggggacaccgggccccatttttttgtaaggggcggcccctttttggggggggtttttttaattccaaaatccctaaaaatttgttcctttttcggaaaaaaaaattttttttttcccctaaaaattttttgtccccgcccaaaaacccaaaaggccttgaaaatttataatcccacaaaaggttttttttattt

SEQ ID NO: 67349 - DNA, 376 bp, Zea mays
  Clone ID: MRT4577_161420C.1
gacaaacggccgaaatgtcgtacgtgtgatgccaatgctgaaagccattaagcaactgaacgttcatgatgtgccatccatattaccagttgttcttaaaagatttcagtcatgaaaacattgcaagatcatcatatgtgttactttccctgatatcttggtcatggatccatttgtgactaagtctggtgagaagccccatcttaaggtcatgtacgtcgtggctgtacatgtggtcacaaaaaatgtatcattctctgggcactagatatcatatgtcaaaaatacacacggtacaaggttgggaattgaggagtcaaaggtccatgcagttccagtgaaacatcttatgtcagaaggtgcatagatgcctttc

SEQ ID NO: 67350 - DNA, 428 bp, Zea mays
  unsure (1)..(428): unsure at all n locations
  Clone ID: MRT4577_161421C.1
ttttcagaatgcaaatttttttatgttatgtataaaattaaaagcattactgcctatttgcaatccatagctaaatcactaagtctaggtactacatgtacaatttatatttatttcaatttaccatgtttgcttgagagaaccttcttgattgcaaggatctcggaagaaaccctgtccatccctggtcggtctttggaagatgtcaccgagcaggacaaccctatttcaatcaagggaattacgcagtcacgcagcacttcggtttcgttgccttgtatcaaaactggatcaacaacctcgnccatattattattattattattatttcgaaacgctctaccaacaaactcatgcagggttgtaccatcactgaacttttcatcggtgggacggcggccttgcatcatctccaacaagagcactcc

SEQ ID NO: 67351 - DNA, 556 bp, Zea mays
  Clone ID: MRT4577_161422C.1
ggggcagggcccgtagcaatacttgagcctgacagaagtcctggcagtagttcgagtagtgttatgctagagaaactgaaccgcttccatacctttctggaagccatctgccaggtgcagtcacggtgagtactggtggataagcagcaggcagtggatctgagcgttatggttgaggagctggttgctccggtctacagggacacagttgagatgttgaaggcaacagaggatgtaggggtttcgtatgtgcgacctgaggacgtgaagtcacggattcagaggttgttcaaagcaatggccaagtcatagtagagtggctttcctggctgctctatgctctatagacaatctttgtgttgatgtatcttgttctcacatgttcaggctagtagagttttagggttacaggttcttccccttcattgctcttctctttttctctctttggcctgcttcagttttgtagcggtgttgtgtaattctattcttcttaatgaaatgcttgccgaggcattatcaaggcatgttccaaaaaaaaaaaaaaaaagcggcc

SEQ ID NO: 67352 - DNA, 305 bp, Zea mays
  Clone ID: MRT4577_161423C.1
gagccctggtacctgaatgcctccttggcaggttcggacggcggggcgacggtcggcaccaaggtgagcgcgtaccctccgtgccctcgcccggacctggtggccggcctgcgcgcgcacaccgacgccggctgactcatactgctgctccaggacgaccagttgagcgggctgcagctgctcaggggcggcgacggccgagagtgggtggacatgccatcactacaccacaacttcttattcaacgtcagcaaccagctggaggtggtcaccaactggctggacaagagcgctgtgcaccttgt

SEQ ID NO: 67353 - DNA, 449 bp, Zea mays
  Clone ID: MRT4577_161424C.1
tgcgtgcgtctactccaattcaccaagatcgggttccgcacccccgcggggctcggccgcgccttccccatcaccgccttccagctcgagcccgcggcggccgagggggaccacaaggccgaggacgccgccgccgccgctgccaactgatctgctctagcttccggcgccggcgccggcggccgtgcgtgggctgctcgatccggtagtggcagtggctttgtgagacagtcgagtcgattgtggtttcccttctctagttctcttgagttgagcctcgactactccggcgggggaaagtgtactgctgcagcagcactggagcgcagacgtcgaagtcttctttgatcaatcgagtcaatcagagaagttgcattttattgtcgtctcatcaggcaggcgatctgatcggcgacatgtctgaatgtcgtatcggactttatcgatca

SEQ ID NO: 67354 - DNA, 245 bp, Zea mays
  unsure (1)..(245): unsure at all n locations
  Clone ID: MRT4577_161425C.1
gcgcggggcnngccccggtcgtcggggcttcccgctgcgtttctgccctctctttgcggnggggntgattctttcgagggttccccttgtnncggcgcgcgctccgggngcngcccntcttgaggttcgggcggcctcgccgcccgggtggggggggggngaggctttttttttggcgggccgggcccnngttctctggcttgggtcgcctgggggggtgggggccccgtccggcccgggccctg

SEQ ID NO: 67355 - DNA, 781 bp, Zea mays
  Clone ID: MRT4577_161426C.1
tggacgcctgcaggtaccggtccggaattcccgggtcgaccccgcgtccggccaccggccacctccccacgtgaagcagttgtgcgagcatcgccacgctgggcagctgtctacccgcgtccgagcgctccggaagcggcgggggaccggaagtggcccgcggaggctgcagagaaccgggaaccctctgtgaggcgactggcagcagcgctacgacggcgccatgtccctgatctgctcgatctccaatgaagtgccagagcacccgtgcgtgtcccctgtctctaatcatgtgtatgagcggcgactcattgagaagtacattgcagagaatggcacagatcctatcaacaaccagcctctctcagaggagcagctcatcgacatcaaagttgctcacccaatccgacccaagcctccctccgccaccagcatcccagccattctgaaagccttgcaggatgagtgggatgcagtcatgctgcacagcttcactcttcgccagcaactgcagacaacccgccaggagctgtcccatgctctgtaccaacacgatgctgcctgccgagtcattgcccggctcaccaaagaggtcactgctgctcgagaagctctggctactctgaaaccacaggctgggcttattgtacctcaggctgtgccaagctcacagcccagtgttgtgggtgcaggagagcccatggatttgggtgagctggtgggaatgacccctgagattatccagaagcttcaagacaggctactgtgctaaccacggagc

SEQ ID NO: 67356 - DNA, 444 bp, Zea mays
  Clone ID: MRT4577_161427C.1
cccacgcgtccgctggacttccttttgatggtgcaagagaaagtagcctaagtggtagctctactttcacttcggattcctttgagaataagctgagctcggtaaactcttccaaggatcgttcttcgggagaatatacatattcagaaaggactgatgtgtcggatatgcaagtgaaaagtgtttcttcttcagacattcgaatcagtgtttccagtgcccttagcacatccagccatggctctggaggtgaagattccgaatcgtttggagatatttatgtatggggggaagtcatctgtgataccatctcaagatcagggtctgatagaagtgcttactctcctggcacaactacagatgttcttgtaccaaagcccctagagtcaaatgtaatgctcgatgtgagttatgtggcttgtggcgtgaaacacgctgcccttg

SEQ ID NO: 67357 - DNA, 383 bp, Zea mays
  Clone ID: MRT4577_161428C.1
cccaaaacaaacccgttggtttaaattagacctccccatagccatagggcttttttgacctagggcccctttgcttacagggcataaactttttatttagggttttatttcccccaacttttatttttttcatccagtttacacactcaccacaattacttgggtaaaaggcgccaacatacaaacccggaagggcctagtcctggtctccagcctgggccgggcagttggaacaactttccccccgtgctggccagggcacggtcgttacacccccatgcgctacggggggagccccctggcgatgcggccgtcggccccctggggaaagaaccccccgtgctgagcggggttgccggtgccgaaaacaatgccggggatct

SEQ ID NO: 67358 - DNA, 723 bp, Zea mays
  Clone ID: MRT4577_161429C.1
ccggccgggggctgccccagcaatcccgcgcacagaaacaccaaagccccaaacctcaccctctcccgaatcccgatggagttctttgacgaaaccctcgcctccgccgccgtcgagaagcccgcgctcaacggcgtcgttgcggaggaggagcaagtccccatcacccaccccgcaaagtcacacgccgcggtcgctgccgagaaccccactcctatcagcagcgtcgcgaacggtgagggtgagggggtccccggcgcccacactgccgccaagtcctacgctgccgtcgccgtcctcgcggagatcgccgccctccgcgccgccaagctcgacctggaagcgaagctcgacgaggcccgccgtgagaacaagttcctcgccgaggagactcaccgcatcgagggtatcttcccgcaggttcgggcggaggccaccatcaccgccgccacctctgccgaggagatcgccgtgctccgcacgaaggtcgaccgcttcaagaccgagaagggcgagcacgagctggacaagcagagccacgacaagctcgccaaggaggtagatgccgtgcgccaggagaagcacaagctcgaggaggagatcagggccctgaaggcttctgccaccgccgcggtcgctgccgagaagcccactcctatcagcagcgtcgcgaacggtgagggggtccccggcgcccacactgccggcaagtcctacgctgcc

SEQ ID NO: 67359 - DNA, 321 bp, Zea mays
  Clone ID: MRT4577_16142C.1
acggccgccctttcttttattccttgcaatgaattccatccatactatccattacatggtccagacatggacaaattataaagaagaaaccacacagatgaacaccctatctcgttcacacaccttacccacatgaaaccaccatcacaaatcagagattgctgctacgctcttctttcgcctacaatctgccaagcaaaacgtatgattccctgtaaaccgacatccctattagctcacccacatcactcaatcaagaactgacttgtttaccggcaacatgcaaatcataagccgaacactcctaactgcgtcttgccc

SEQ ID NO: 67360 - DNA, 1330 bp, Zea mays
  Clone ID: MRT4577_161430C.1
gccgcgtcgacttttttttttttttaacaatactcgagggcggccgggaacaccattcatctcagattcagaagccttcaacttcaaatccttgcattttgaagtttttgcagttttctgactcttgaggatggaggctattcttgaaagaccgaagtacgagtgcttgctgtttgatcttgatgacactctgtaccccttcagtgctggcatcaatctagcttgtcgcaaaaacatacaagattacatgcggcaccacctgcatattgaagaaagccaagttgcagacatgtgcctggacctgtacaaggaatatggcaccacaatggctggccttaaggcattaggctacgaatttgacaacgatgagtttcatgcaactgttcatggtaccttgccatatcacaacctgaggcctgaccctgttttgaggaccctcctactttcaattccacagagaaaaatagtgttcacaaattctgacaaagctcacgcggaggaggctctgtgcagacttggtttacagggttgcttcgatggcgtgatctgcttcgagacactgaatccttgcaatggtccgagcgcgttccgagacggcaacggcatgctgttcccagatgaaacgtcccccaatcccgacttggctgatctgaatgaatccgatgggttcagacccatatcacccatcctctgcaagccctccgttgaagccatggaagctgtaactcggattgcaaacgttgatcccaagaaaacaatattttttgacgacagcactcggaacatagcttcgggaaaggcagcaggcttccatactgtgattgttggcaggccgacacttgttccaggggctgaccatgctttggagagcattcacaacatgaaggaagctctacccgagatatgggacggccaggatcggtctgagtctgatgctcttctttctcccactgctgtcgagactccggtggctgcttgaatctgggggctatgtatccttcctgcgctaccatgagacctgctaccaatagttttgagtttggatagtggatgcagaaggtgcaccctaccttcttcattaatgagaaatagcattgcactcttatgttagttccaaatattaatggaactgtatcagttacattacagcagcgtgagctcaagtcgctgaacaagcaatatgcagtcagtattctgcagatgttcgcaccattctctatgtaccatgattgtacctcagaataaactgacagtactccaattctaccaagcttcaaaagcttacgattaaaaaaaaaaaaaaaaagggcaaccgccgactagtgagctc

SEQ ID NO: 67361 - DNA, 334 bp, Zea mays
  Clone ID: MRT4577_161431C.1
caagagaccgaacataacttgtttgcaagcacttcattattatcttcatcacaggacataccaaaaacatggaggtcttggataacatatccatgtaaaattatttggccggtgctttattgttggaaagacattcagcttctcttgttggcgaagtacatttttatccttgctgaagttatttgtcaaaaaagtcattcctgtccctcactactttttggggtccgcaataccctccaaagaaccatcctttttgtcaccaacataaaatttgagattcttttatccaggttattgagtcttaccatggggtagaataaacatgggcattcgt

SEQ ID NO: 67362 - DNA, 200 bp, Zea mays
  Clone ID: MRT4577_161432C.1
ctatagagggcgccctttttttttttttttatttctttaaccgacaaaactgtaaattataggggatgtttttgacacgtgtggaggatcttatctacaactattaaatgacactcgactatcaatatattttacagagatataaagaactataatgttcaaaagttataaataattttatactccacttttttttttaa

SEQ ID NO: 67363 - DNA, 309 bp, Zea mays
  Clone ID: MRT4577_161433C.1
aaaatggaaagcgtgataagagaagagacattaaacgccttagttgtttcgaactatctcaaaatccgactgtcactcgcggtgtccatcacatatgctggtcttgcatatccagttgacttcaataccaatcatattatcaagagtgtccagtatgtgaaaccgtggtacaataacaatcaccatggactcgttacggctgaggaaagaagacatacagaacatagatcaagacgttatcaaggtttacggagtcgaaaacgagcatcaggtcaaagtcgtcaccctgaagtcgctggacaacaaccc

SEQ ID NO: 67364 - DNA, 609 bp, Zea mays
  Clone ID: MRT4577_161434C.1
tttttttttttttttttttttttttttttttttttttttttttttttttttttttttttttaagacaaacagcaacaccacaaaccatatagaagtttggttaatgaagcagcatcagattttaaaaaaacagcatcagataacgaaacgggcggggggaaaccagacacaacgggcttcacaagggaatacatgagttcaacagggcacaatggtcctaaaaagtccattcatacttgcgacttgactggttatttaggggataaccatttggggtccggcacattcaccagtttggccagcttttaaccttgcttttagcccatggcatacttttgtgtccaggagcgtgcgggggactcatacttggccctgtcggtcttgtacatgtgagcaatctcagggacaaaaggatcatcagggtttgggtccctgagcagagagcaaattgacaggaaaacctttgagatagttaaagcaggactccactgttccttaaaaatgtcaaggcaaatattgcccttgctgttgatgttcgggtggaaaaccttggtgcggaaagaacctttggtggcttgaaaggtaatcccgtgggaagtgaagttcacc

SEQ ID NO: 67365 - DNA, 264 bp, Zea mays
  Clone ID: MRT4577_161435C.1
agcacaactgatagcgaggatagatttaatttatgggaaatatttgatttgaactggcttcaaaaaccggattagcactgcccaacaggggggaaccacattttttaaaacttcaggtttttttaacacaaattggttttacaggaaagccctttcttttcaaattttaatttaaaaaccagggggggaacaaggtcttaaacctttgcggttaggacaaatgggcccccttgttgctttatttttttttttgggacccttgaa

SEQ ID NO: 67366 - DNA, 1096 bp, Zea mays
  unsure (1)..(1096): unsure at all n locations
  Clone ID: MRT4577_161436C.1
tgttttacttaacatttgtagtcgcctatctgtgtgttgcactaactattcttaattgtcaggtcctgttggtgaggacatgttccattggcaagcgaccatcatggggccatcggacagcccatttgcaggtggggtattcttggtgaacattcacttcccaccggattaccctttcaagccaccaaaggtgtctttccgcaccaaggttttccacccgaacatcaacagcaacggcagcatttgccttgacattcttaaggaacagtggagccctgctttaactatctcaaaggtaaattgtctacattgtttatattgtgagttctggctgcactctgatccacctgaatccgggaggttttgaggccttacttttggctccaccccaacaaaggtggattgagatggatttgggtgcagccaaacaagaactgagacggatagtggattgcaaccaaacaagttcttggcatttttcggactaattttctttactccatgaggagnttgtggttagctaatgagnatattgtgggntatgttccttgagaacagtatgttcaagaatagttgtctgtttactgatctgttctgttctgtattaacaggttctcctgtcaatctgctcactgctcacggacccaanagcagtgtaacaacgtagagtacgcgggtgctcacatgtacaagaccgacagggccaagtatgagtccaccgcacgctcctggacacagaagtatgccatgggctagaagcaaggctaaaagctggccaaactggtgaatgtgccggaccccaaatcgttatcacctaaataaccagtcaagtcacaagtatgaatggacttttgaggaccattgtgccctgttgaactcatgtattaccttgtgaagtccgttgtgtctggtttctacctgaccgtttcgttatctgatgctgtttctttaatatctgatgctgcttcattaaccatacttctatatggtttgtggtgttgctgttnaaaaaaaaaaaaaaaaaaaaaaaaaaannnnnnnccccnnnnnaaaaaaaaaaaaaaaaaaaaaanacttttttttgttacaacctgct

SEQ ID NO: 67367 - DNA, 378 bp, Zea mays
  Clone ID: MRT4577_161437C.1
cccacgcgtacgatcacatctatacgtatgagatggcttactaaccatggcaagacgagtggattctgcatataggatgagcaccgactccttgtttacgaattcatgccccggggggacattcgaaaacatctggttaggagaggttaatacttccaacctgtgtcttggaaccttaaaaagaaggttgcagtgggggccgcaaaaaggctaggttacctttttagggcggaggcaaaagatatttaccgagatgttaagaatttgaacatactgcctgacacatattatttttcgaagcatttataattttggattggctgaggatggttctttccgcgagaagagccatgttttcacaaaatttatgggaacata

SEQ ID NO: 67368 - DNA, 231 bp, Zea mays
  Clone ID: MRT4577_161438C.1
aaagcaggaaaaaaagccttttaaaaataccgagaacattaaaaattcgcatttgaagaaatcagcatttctaactgaagtgagccaaaaggaaaattatgctggggcaaagtttagtgatccaccttctcctagtgttcttccaaagcctcctagtcactggatgggaagcactgttgaaaattccaaccagaacagggagctgatggcagtacacttataaacgctcct

SEQ ID NO: 67369 - DNA, 115 bp, Zea mays
  unsure (1)..(115): unsure at all n locations
  Clone ID: MRT4577_161439C.1
atactgccatcttttgataaagtcgttccaccatccatcatgcaccttnncataggcgaacttatctcaatatacagtgaattatgtagacttgagagcccaccccctctgatac

SEQ ID NO: 67370 - DNA, 425 bp, Zea mays
  unsure (1)..(425): unsure at all n locations
  Clone ID: MRT4577_16143C.1
cggtcacagagccntgaactcatgggacggggancgtgtcaagaaaagaattactcgccgagaaaagaaatctgacgaaatgacaatgcaagtagggattgttaacctgctaacacgtggagggctcgccttcaaggggatgcaacatggttgtaatctctaaagaagtaacatatgtctccaacaacaaagggtccatttatgtttttatggtttgaagctcctgacttgcttcaggaagattagtacaagctttgttgttttgatccctagctgtagttagtcctgggtgtagttggtaaatttgtgtttggaaattgaaccagacatgtgcttttagtgtctgtccatgtaaaaacacagttagatcttattactttccattcctggctctgacagaatnacttgcgagactgttctatgct

SEQ ID NO: 67371 - DNA, 397 bp, Zea mays
  Clone ID: MRT4577_161440C.1
ctaagaaaaaatccacaccatcctgcatttatttttcaagccgcgaattatgaaaacctacaaacaggtggccacttggtattggcatagagaaggtaaaaaaaaacttggaaccaacttcatataccattggggggggccaacattaagccccgaactaggtggccgcaaacaggaggggcaagttcatgtttgctttacccaactgaaaccttttcagaacaaatccccaaaatactctcaatgatttatacaatggccctaataaatggttgcggagatggcttatgcctaggggtcccatcacatgagactgggttcagctcccaggttggggagctggctcttcgggggttggggcaggtctttgttgaaggagaggcgaaagccccttaac

SEQ ID NO: 67372 - DNA, 2022 bp, Zea mays
  Clone ID: MRT4577_161441C.1
atgactgagagggtgaagctgactaaagagacgaagttgtttgaggagaagaaggttgcggatccttatattgctggatttattgagttcatggcaaaaacaaacacagagaagattactaaagagatgcaggaaggtttatttgaagatactggtgacagcgatagttatgatgtggaaagtggggatgaagattctgaggatcggccctggcgaccaagccatgctgtcttcggaaaattgaccaataaacagagtgatcttgagaacatgagaggaaggtactttcgggacatgtctatcgtgagggctggccgagacaacaacgtccctgctcctgaggaaaacgaagttgttatctaccgaagcttttttaaggctggacttcggtttcctttgagcaagtttgtagttgaagtgttgaagatctaccagatcttccttcatcagatcacccccgaagctattatgaggatggggatttttgtctgggctgtaaggagtcaggggctagagccaagcgcaaagtgcttatacagtatgcacgaactcttatatgagacgaaggctactggcaaagaacagtaccataacaacttcagttgttatggatttattgctcgccccaactcgagccacccggcaagggaagacattaaagaaatcatccagcaccccatattgtcccgcttcgaccttcgaaggtcgaaggtggaaattgatgacgttgtcgaagcgtgtcagagggctttcagcactgtttgctccttcattggcacaagagatttgattcaagaacatatagccttcagggtatggccgcttgtggaaagctgggaaatgccgaaggagaccaccgccgactctggtgagggtggtctggtccgactgaagtataccttcagatttagggagaaatttgatgagccgaacgatgactggtggaagtgcatcgaagctaccagtgatgagctgcttggagcatactccaaggctgaagataatgccctgtccgcagcctttggtggccggggcaagaaaagattaaacagggtatttgatgctattggcttcgtataccctgattactgctacctgctgggaggacaagagaaaaagaggaagattgttgcttcggtcaccccaactgagccagtgccgaagagcaaaagcgccgaagagccgaccgtaatgccgaagacgcatatagtcaaggcagtcaaagataaggttgataaggccgaagagccaaaggttgaagaaataataaggatgccaaaaattctgagccctccgacgaaggcaaatctgccgaagatgcaaaaggcttttgccgcaactcccaagaggagaaggatggccaacgtactagatgctgtgttggagactataaaggcgttgagccctgctcctgcaaagaaaattgctcaaactgaagccaaatcacaggccgaagccgaaaccgggcaagcagaagccgaagcaacgcaaactcaagctgaagtcaaaactgggccttcagtgctcatcaagacaaagcctaacgcgcctgaagaaaaagcagtagagcaaattgctcctgaaaagatcgagattccagctcccgaagctttgatcgaaaatattgactacatcattcgacacgcttcggggaagaagccgtccgaagaagaaattctggaagccaggcactatgcgcgaaagttgaaatatccgaaggaagccttgatttttaacgggagtaatgaagatgatttcttatactgtcctcccagacaacaaagaaatatccgtttgccgggagataggtagaagcatgggattcccgaagctggaagacgacctttcaattttgtcgaaggatgaacttgctaacagcctaacatataatagtataaaggtataggagttaactttgaatttgaaaatgaggtatttcatttgtcatactcaattctttcctcctcttgcacggcttgattcttagtaatgcccttaaggcacagaaaatattaaagacgc

SEQ ID NO: 67373 - DNA, 502 bp, Zea mays
  Clone ID: MRT4577_161442C.1
agccagcccttttttttttttttttttttttttttttttttttgttttttctttttttattgtttgtatttttcattttttttagagaaccaacacaacccggggggggaggagctaacccacaaagggggtaaaaacgacccctcctgcggccgaaaaaaaaacatattggaagccggcttgaaacattcacaaaagggggggcaaccaaagcatccccgggccgaaggtcgatcacttgcacccaaagactgctttctgggacaacccgggggggttccccccacaacgggaacaattccccccttaaacaaaaaggggaggaaggcgccaactaccgggataacagggaaacccctagggcccaaaaataccaaatgccaaggctcagggccggggccttccgcccacccagaaaattaggaagcgggctttggccggaaacaaaaaagcgcccatattttttgcagggggggggggaaaaaaaaaaaacaaaccgggg

SEQ ID NO: 67374 - DNA, 2666 bp, Zea mays
  Clone ID: MRT4577_161443C.1
aagaaggaagaatttgtgcaaaacgggtggtagttccccatcgtctttgctttgtcttcttcctggcttccttctccttttctgcctctcctccccctctgaattccttgttcggttgttcctcttcccacttcccctctctctctctcgtgcgtgtgtactacttctgaggccgaaaggtcagaagagagtgtccacctttcagttcgattttcgatgatttgagtccttccgccgcggggaatttgagcgttttccttgagaaatttgagtttcttcgagagtaatttgtgtgttttctcttgagagattcgtgcaaggatgtcgccttcgattccatttattgggtagtcaaattgttcctatatagcgtcaaagcatccaactttgacttctccgtggtggcttcttctatcgtgtgtcatccagacaatttgatctttatttaattgggttggatgcttgttcaggttaggtagttggaaagggtagcataagacaccatcaattttggtgattttggtttttctctgaataattgcgggtcaaattagtcaccttcagttatcagtttttcacttctcatttttattgggaggatttggtgaattttagtggcgggcagagctttcttcgatcatcggtcctcatttttatggatttggatggttggggacttgggggtatcttaactttatccttgttgaaaaaaggctataaacttgggagttcctgtgagatattcctttcttgggaggatttgatcttgcttctgttggttcctggtgagttggttgagatgaaaggagtactatgctaactcatcgaggaaagaacagtacagccagtactactctgaggaagagctgacatttctatgctttcctttggagtctgttcctccaagaatctatgcaaaagtgctcctcatctaagtatatctatccagttcaagttgttgtggttcatcttatcatctgtgtatctggatatctcgtgtatctgtgtgtaatgcgcgcactctgcaagaaggaagaatttgtgcaaaacgggtggtagttcagaactttctttgcacaggagaagctcagttccgccttgcagatccaaattggccgatggcgcaacctgaaattccagcatttgaggattgggaaaccacaggaaacaccccttacacacaaaagttcgaggatgtacggaagggcaagaaaacaggaattcctgcacagacaaatgatccaaggaggaacccggaacatcctcgcaagtcgcctttgcatgcaacggcctacaaaaccgatcctcaagaccaaggtccaaggaacccaccacatcgaccgagacctgaaactgatcaacaaagacactccgaccggcctactcaccgtgagcctgcaccacgaagacatgcaaatcctcagagagaacaagggagtaatgctgtggcaccaagaagcccctacaggacagctgctgggtctgcttcgccaatgcagtcaaacaaccaatcaaagccgaatcatagatcgactgcgatgcaggctccagagagaaggcattcttcagaggggcatagccagcatacacctggaaggagtaggatgaagcccggtagttatgagcctgaagaagtggctgtaccaccctttggtgaatgggatgatgcaaatgcagcatcaggtgaaaagtacactggtatcttcaacagggtaagggacgataggttgtcacctacctcttctgctaggcaaccatctaccgcccgtagggaggagaataaggtgcaacagaaatgttcttgctgcatactttgagaaaatgaggacatgatctcaaagagtttggacagcatcctattgtgcttctgtaatgagcaccctatcgtgtaactcttcttggctagttgtcatgtatggtgtgattatgtatctgtaattggattgttccatttaagctcttcacttacaaggaacatatatatgataccatatagatttgtaaagtatggagtgagcaatttccttgtgataataaaaggtttattgaatggggtctagatttccatagttaatgtggatttcagctagacaccaacaatgtggctttcaatttttttatttaaaaaggaaacgaaattgtgctcccttgtaattctcaatagttatgataatattacaaacagaaaaatctataaaattaatcattcgtccttctactacgatttttctagttcgtcttgaagagaatttgtagtataaataacttttgcataaagcctctattggggccttcctcttccgattcctcaaaaacttaactatgtttcagtataacatactgttataggaggcttcggctttgagatgagtgtgcatggtatgaaggtgcggtccaaaggaaggataaaccggcttcgaagttgtggctgaaggagcttcggcttaacaccaggatgatgatgagagacgaaactgacctaaaggagaaaagactctttcacttatggtcaacaaaacatgtataaatgaactgaccactcataaaaaaaaaaaaaaaagccaggataatgctgattaaccaaggctgagtcatgtacgtttcaccgcctttcacatttgttgggcgagttacaaacaaggtcattacaccacaaattatttctg

SEQ ID NO: 67375 - DNA, 133 bp, Zea mays
  unsure (1)..(133): unsure at all n locations
  Clone ID: MRT4577_161444C.1
cccacgcgtgtctttcttaccccgtcaagcgactgggtgcggtgaacatgcgntcaccgaccgtgaagaggcaggcctgatcctgcttcgttgatcccgcaccgtcctcaagtacgccgtgtgggtgaggttc

SEQ ID NO: 67376 - DNA, 467 bp, Zea mays
  Clone ID: MRT4577_161445C.1
gctgttttttttcatgtaagtagttcattttgggtattgagtggaagaaattttttgttgggttattctatgccaagggcattgttctggagaagattggtattgaggtcaagcagtccaaaaaagagagacgtaagtgtgcttgggttcagctcgctaaaaaaggcaaggtgataaaagaatttttttcaaaaaaaaaattgtttggactaaattggggaaaatgctgtggaaaaaattgggggaccctgttttttagaaaaaaaaaaggccgagaatttaaaaattcccgtttaaggtttttgaggaaaaaagaaaataaaaacttggccttttttttgtttttatgaaaaggggaaggcttagaacagtcttgatacctaaatcattaagcgcggagacgaaaaattttggcgatagatggttcttaagaacgaatgcttgctatgaaagccgtgcatttttgc

SEQ ID NO: 67377 - DNA, 305 bp, Zea mays
  unsure (1)..(305): unsure at all n locations
  Clone ID: MRT4577_161446C.1
gttttgcaataccggatatatctccagacacacgtcctgctgcgtgatctgcatcctatgttgctcctactacgcgggtgtttgcggcatcgctcaaaactcccagggctactagcggtcaagccgttgggtgagctcgccctggctttgacgatagcacaatctcacttttgttcactccttcatgcaggtgcatttatgggaatgcggcgcccaatctctgtacgatggactctgctacggcggccaggtccttncctcctctggtnggncttttacctgctggacagcggagctatctcttt

SEQ ID NO: 67378 - DNA, 148 bp, Zea mays
  Clone ID: MRT4577_161447C.1
acgcgtgcgggcatcagagagctcgccagcggacagctgtcgggctcagctcgatccggctctgccagctgccatgagagaaagccgtagaacagtctcggtctgcttgcgcgctcatgcttctattcctactcctcgtggtgggagc

SEQ ID NO: 67379 - DNA, 298 bp, Zea mays
  Clone ID: MRT4577_161448C.1
attgaccaaatttgggaaaacccatatatggaaaacccatatatggtcggacaaaatggttcagtttccaagatgccaaacaatgatcaagttcacagtattttcagcacaggtcccagatctgtaccctgacattccagccagccgctactttatctgaactatccctgtccttgcgagcatctggatcttgtgcatgacttcggggttcttgaggtgccccttggcattcacggggtttttctgcaaaaccgtcaaaacctgctttatgatctgatcaatcaggatgttctggatc

SEQ ID NO: 67380 - DNA, 443 bp, Zea mays
  unsure (1)..(443): unsure at all n locations
  Clone ID: MRT4577_161449C.1
ccgggtcgnacccacgtcgtttcgtgtttgcgagtcagtagtggcatgcctgtttgtgccagtacattcgtgaggcaacgctccaggtttgtgggatgtaggcttcgcgcaatctgtcctggttcatgtggtaacgttgctgagtgattgtcgctcgacaaggcaagacacagctggacaggcttttcgatttaaactgtttttatctgtgatgagcaaagtttatcaatacaggtaacagggtgtgtgtatatgtcctaccagccaattcacccctgattgagcagaagaattcctcaacactgccacatatagtatctacgcaacaaaaaaaacaaaagggccggcgcgttctgagagggatccaagtcttgacgctacgcagtgcgatgcgtacgtgcatagcgtcttcctatagctgtgcgacctaaatgtcaatgtca

SEQ ID NO: 67381 - DNA, 603 bp, Zea mays
  Clone ID: MRT4577_16144C.1
cgggagaaacagacatcgctaaatcggtaataaataaaagctgagagatgtcgaccgccgtctcgtcccgccgactggcgactatcggcgtgatcggagccctcacgcttcagttcgtcgcgtcagcgacggcggggccgatagccctgcctggctgcccggagaactgcggcggcgtacaagtgccgtacccgttcgggatcggccgtggctgctttcacgaaggcttcaacctcacctgcgacgaggcgcagcacccggcgaagctgctgctgggggacggcgccgaggtgctcgacatcttcttgccggactgcacggcgacggcccattaacaacgagacgtttatggtgacttgttaatctcgtctcgaggatttatcaatctagtcttcaaaaatgccccaaaagttgagtcatgcagcggtaatagaggaagtgaaggtgccatattgcaaagtgggatgccaatcaggtattctgatatatatctactagcgcacctcgctccaaaaattgtaccaactgtcaatgtagaacgaagaagaactttgtagtaaatagatgaattcaaatatactctatactcttatgacacctaat

SEQ ID NO: 67382 - DNA, 670 bp, Zea mays
  unsure (1)..(670): unsure at all n locations
  Clone ID: MRT4577_161450C.1
ccggccgggacccatcaatggaagctcataaggcctactaaatccacacgattacccagaactgggcaccaagtcaaaccctaattaagcaaagaaagcccatccgcaaatataggactcgagaactcacctacaccctgcgtccaacggcttcatgtgcgctcgcttacccgtcctcctccagttcctctcgccattgcattgctgctgtcctggtcactgccgccggcaccagactcgctgagttttgcggggacagcgaaaccgtgggcctctgggctcactcgcaccaataggccttccgaccagcccaagtccacctgccaagttgaagaggcctccgaggttcgcccctatagcctagtggacgaaaaaaagagagctagaaagaactgaaagagggagagagtatttcagtattcaacgtcgttatattgttcagatgaatgcgcatctgggacgcagtcgtcgatgaactcatggcaaaacaggttaagcaaaaggaatggacggagtagtctttgcgatgagtttgctcttgtagtttttaggtgaatgtcctcagagaaatcttttcttgngactgttttttttatttttagattttgtacagtttctttcacttctaatagacttaatctacaaaaaaaaaaaaaaaaaaggngcggcc

SEQ ID NO: 67383 - DNA, 107 bp, Zea mays
  Clone ID: MRT4577_161451C.1
ccggccgggataactatagataactcataacaagttgttgcgcagcgacgctgggccgagagtcttgttcctcctgggactttgcagaatcgagcatatgagagaag

SEQ ID NO: 67384 - DNA, 527 bp, Zea mays
  Clone ID: MRT4577_161452C.1
ttggatgatgcccttctagaacgttctagaggcccatgcatgcatgcgccgggccggtcgagaggcatccgaaatgtccagcgcgcggacgccggggcctggcctgggtctcgccagtcgccaccgtcctcgcggatcgacctgccgaccggactgcgagccgctcgtctcgatctgattggcgcaggccaacgtatacggcatgcatgcatcttacggtcggcatgcccttaccgccggggacaaacccagaattttttttaagaagagctgaactaaacaactgtaatatagaagccatttctacattatatatgtaccgtaaaaatcttaaaagaggctctagtgcggctccacagactcggcagtgttagaggggtttggaggcccgcccaccccaccggtgactccgtccctgcttaccctgctttctgaattataccatactcactttctactttttttattgggtatatttagttaaaaataactatcgaactatagtattcaaacagatgggttttatg

SEQ ID NO: 67385 - DNA, 105 bp, Zea mays
  Clone ID: MRT4577_161453C.1
gcacagctcacgagctagcgatcttcctcgtgcaatcgaagcgagttctcatagctgtctacggaactcggaagctcaacgcagcgtgcgcttctggattcgacg

SEQ ID NO: 67386 - DNA, 144 bp, Zea mays
  Clone ID: MRT4577_161454C.1
actagatcggggaggacaagcgcgagcagcggcgccaaacctcgagcgcccgggccggttaccacaacaaagaggaagccgcggtagcactggtagcggcagaagtaagggggagatgtcgccggccgccagcggcgaggacac

SEQ ID NO: 67387 - DNA, 202 bp, Zea mays
  Clone ID: MRT4577_161455C.1
ttgcctagagcccctggcacggtgacaccacacatcccgaaacgccgaaaccccaccccgcaccaatcatggacgccgccgacgcgcgtccatcggaaccgaagaacgctgctgccgcagacgccggggcctccgtaacggacgagccccggaacgcgcgggaggtgcgggagctactgcgctagatgggactcggtgaggg

SEQ ID NO: 67388 - DNA, 279 bp, Zea mays
  Clone ID: MRT4577_161456C.1
aactcaacaacccggggtatttaactctggttaattcgccaattaattccttcttagtttcttacaataaagagcaaacacactacacagtccttggggttatatggggcggggagctaaatcaaaggggctgacccagctagcatgcatgtttgctctaaactgggtcgaaaaatccaatcaggcgtagcccttgaccatgctggggtagtgggagagtttgtcgaaatagcggccccaaatcatgaacccgccatagttgtccgccttttgcgcgga

SEQ ID NO: 67389 - DNA, 657 bp, Zea mays
  Clone ID: MRT4577_161457C.1
ttttttttttttttttaaagtcaggagtacctggcgatttcggtttatcattaaactgcactatataaatgattgtccattaggaacagtggccgtcataaatcctttccttcatcagcatagcaatgtcctcggaagccctctacaagaaagagagacagtgacttttttttccgatgtgaatctacttcactctaagccggacgcggtggttggaaatggatgatgcaaaccgagtcggtgaggtttgttatctcgagtatttgagaatatcggttgtcaagtagaaatcttgaatctctcgattgtcagacttcaagatcgggctccccatcgtcgctcgtcgcgcgacatcttgacatggcctccgtagtattcgtctttgttctcaatcggggtcacgcagtacacagtaggtgtgctctggaagtgaattgccttgccgctggatcgcgacgaggtggaagaggcagagcccttcttgagaatgctcttggcggaactggaattgctgtaggagtacatcgggacagtctgtttggtaaagtctcgcgccgcagcatagactgggctgagaggcgatggagaaacaggtgtccgtggcatggggcctggtgatcgcaaagacagagctggacgagtggtgtttgtcgcagc

SEQ ID NO: 67390 - DNA, 399 bp, Zea mays
  Clone ID: MRT4577_161458C.1
cacttgcatatacacgctttcaggtgcacatctctttttccagccacggaccgcgaaaaacggccgggcggccaccagatcacttggttaaccttggtgaagggtggtggccggttctttcccgaaccttaactccggcgcagcgcttaggacgctggatgcgctactgcttactagcccgggaataggtcggaagcaagcttccagggatgactaggctgtcaacactgggtcatggggtgcctgctcaatgaaatatataagggcgagctaggccgatcaaccacatgtatacgctctgccagctgagccggattactagcgacggacaatgtgtgaaagttgaatcctcagccgttagcatcagcccaactacacatgttgctgcaacacacgccc

SEQ ID NO: 67391 - DNA, 582 bp, Zea mays
  unsure (1)..(582): unsure at all n locations
  Clone ID: MRT4577_161459C.1
tgnaaagccaattgctgcaagtgatgtgttgctaactaaaactagtgagtgtgggagttcttcactgaaagacagctgcacgaaatgcatgatatcatatcactatttatgtgaacagacttagtgttaatgcaatatgtttcattttgatgtgctggctgtgtcgtgtttgtgtgcagagcacatagcatttacagagcagttgctcccatattagaaagctgaaaacgaaaatgatttcaagaaatgacctacgtgagatatttcttgaatggacgtattctcgttgccatttcaactacaagaaatcagtttgagttcatagctactaccattggagtgcttttctgaacttatgtgcactgccaatatatataggtgatttaactgtgacatgttcacaaaataaaattggattttgaactaatgcgtgcatctaacatctatttggtatttaccttccatcttcatgtttttaattttgtaactgaggagagaaatcactttgaatttctggttattcattatgcggtgcatcttctgtcttatatgctctctgctcctctgttggctaacgcattg

SEQ ID NO: 67392 - DNA, 728 bp, Zea mays
  Clone ID: MRT4577_16145C.1
gcggctggaccttccacacacagccgttccggatcaagtatgccagacaagatatctatctgtcggttatggtgtctttcaacatattcaacagtgaagaggaggttggcattttgacataccacctttgtaattgagttgacattactgtaaccttattacagtctgttatatttgtttaagggtccagcagcttcagatgtgatgatgaagtttgagctgatatatgccccaacactagacaatgggtgagtagacattttaccacttgtgctgtcacttcgaaggctttctgcatacttcagtgcacgtttatctgccgttcccgttccgctatgccggtcatgttttcgctctgccgggttctaggtctgagcttcatgcttctagtgccacatcttcagcagctgtgcacgaatttaggatcccacacagagcacttctgggtctacactcatactgtcctgttcactttgatgcgttccactctgtgcttgttgatctgacattgcacatagtgtacctgaaagctagggtcgccacattgcccaaatgaagtcagaatctcgatcagccggaccaaggtttaggtcctacatcatatcatattgtcaaggcattattaacttctagaaagttgttgctggaagaactgaagaaaatcagtggtgctattggtaagacagtagaggaattagatgttgctgacttgaatcttggtagatatg

SEQ ID NO: 67393 - DNA, 949 bp, Zea mays
  unsure (1)..(949): unsure at all n locations
  Clone ID: MRT4577_161460C.1
cctcgaggccggccggggaacgatatcatggtatcttcactatcctctccagccactcattccttacaccttgtcccactgcctttgtccgaaagctcaactattgggaagggtcaagaaaagcgaggaagcaacgagccaccttctccaactaacataaccagagcattctaccgtccgtcgtagcagcgatgatggctgtgacgtctctgcagttgcgcccaacccctcgtctccttccggcgagaaatagctccacgggcactgggccgcggatggccgccttgagctgcagacacaaccagtccaccaatgtccaaggacgaacagggctcagaagccacgtaacgacgcgcagagacgccctgtcattcgtgtcatccgcgctgctggcagcgttgttcgtggtggccggtgcagcagaagctagaacttcgaggttggagaacaaaaagaaagccctggagaagctccgggagaaggcgttgggccgaaaggaggagaacggagccaccggtggcaagaagatgccgcctccgacgaacttgctaatccgataatccctcgtccggccgtcgtggctaaaggcactttgccgaggggccctttgtgttgatggcgatgctaatgtgagtttgtacgttgttggagtcttgtatgactgccaactggaatctgagttttcagtctacattttcttaagcattgctgtactgtttgttcatcaggttatatgcctgaaaatccaattgttagaactgcaaaaaaaaaaaaaaaaaaggtttattagaacatcctccgtccttctcgcttgagagcaatcggaccattggtggcttcttcgcaaatcgacatgtggcgatgcatatttttcaaaaaaataaaaaagatctacactcgggttctagctctaaaaaaaaaaaaaaaaannnnnnnaaaaaaaaaaaaa

SEQ ID NO: 67394 - DNA, 806 bp, Zea mays
  unsure (1)..(806): unsure at all n locations
  Clone ID: MRT4577_161461C.1
gctcctgcccaggctcaggcagggcttcctcatcctctcttatcctcctcttccgcggtcacacttcacatctccgtcttcttctacatcccgcctcgatctggatcgacaagagattagccctgcaatggccagcgttggcggcgatgccaagaagagcctgacgcagtggctcagggagaaagggttcgatgaggaggccatcgggcgcatgtcgaagcggtgcaggaacctgccgaacctcgacgctggcgaggcctccggggtctgggactacctcctcaacgacgtcaagatcgagcagcggaagctgcggtacgtggtgaccaagtgccccaaggtgctcaccatgtccgtcaatgacaagctcgtccccacggtccagtgcctcaccacgctgcaggccaagcccggggagatcgcgcaggccatcgtcaagttcccgccgatactgttccacagcgtggaggagaagctctgccctctcctcgccttcttccagacgctggccatctccgagaagcagctcgccaagctgctcatggtcaacccgcgcctcatcagctacagcatccaggccaagttctcccagacggtcgacttcctcgtcggccttggcatcaacagggaggtcatgatcggcaagatcctgaccaaggagccatacatcatgggatacagcatcgataanaggctgcgccctactgccgagttcctcaagtcgcagntcgggttgcaggggtcatatctccagagggtcatcatgaattccctagcatactgtcacgagacgtcgacaagactct

SEQ ID NO: 67395 - DNA, 424 bp, Zea mays
  Clone ID: MRT4577_161462C.1
cgtcatcaggctatgtcaacagtgactgaagaatatgttagagctctctatgtctcaaaggagaaaaaaactgagataatctcttcagtggttcagactattttggaggagatatatgttattcagctaaaactatctctctatgatactgtaactagatctaacacaatttttcctctttccatgtgtatatgagagttgggttcttttctttctcctacttggaaacatcgactattgactatcttaatgaaactaataaaggagaatttaccttgatgacttgcagcagtctttctgatctaccaacaaaactttattcgacagctgagcttaatatggtacaagagtcactttctgcaaaactttatggaaaatgcctagtgaatctctctgagagaacatagttgttgattcagcacat

SEQ ID NO: 67396 - DNA, 124 bp, Zea mays
  Clone ID: MRT4577_161463C.1
ccttattcttctcgtgacattcatgagcatgagaatgatcaaactctggacagtttgcatgataaggtcagcgatctcaaaagaccactggcgatatcataacaatggaatacataccggatgc

SEQ ID NO: 67397 - DNA, 810 bp, Zea mays
  unsure (1)..(810): unsure at all n locations
  Clone ID: MRT4577_161464C.1
tttttcctgatgtatttatgtttccattgcatgttgcaaaggggggagagtctgattatgtcaaagctgctatattcacacatctctgacatcatcagaactatctagtatggtgttccagttgtactattaaacaaatccatacattctggtcaaaactttgtcccatcatttctgtagccatatgttctggagaggggtatgccctgtgccaggtttttccgtggatcaaggtcatgtcgcttgatgtactcagtattgctgtggcccatagatcatacgtagccttgcatatcttatcttacatatgaccatcataaggcatttatagtcttattttccttttccctaactacatgtataaattcagatcagtgttatagatttttggctgaagataaacataatgagtagctcttcttttctgcactacaacatttgtgaagataataaacatgcataagtcttatgccttacgcccataatcagtagctctaaactgcatagtgatgccaatgacgttaattacacgtttggcagagcatgtgcaccttgtgaaatacttccattccaaactattaagttgttttggcttttcaaggtacatagtttttactgtacactctagaaaagttaaaatgacctagaatttggaatggaggtggtagtactataccttgggcacttgaatcaattgatcggtatgctagccagaatgaaatntagcgagtttaactggctaagcattgaatcatagcaataatatttcatacaatgtggcattgcaaactgcgttcaaccaaaactaac

SEQ ID NO: 67398 - DNA, 597 bp, Zea mays
  Clone ID: MRT4577_161465C.1
ccctcttcgagtttttttttttttttttttttttttttttttttttttttttttttttttttttttttttttttttttttttttggggaaaaaaaacaggccatttttgtttaaggggtggggtcgataaacaaacttccagtatccgaaaaataacatcgagttttttgggacagaaataggcttaatggacccggggcaaccaatttaagtttcgtttgggggcaatcacccttctgggatctaaacagacgatcaaaaaccgcagttgttttgttgaaaaacagggtgaccccgcatttgcacagggggaggcctactaacaccacttggaggggggggacttgccatcctgttttttatttcccctgccaggggcaagaaggccttctccacatttgggggatccttggccctagtctaaaggaaggggtttccgatgtcatcaaaaagggccttgccagcctcgaaaaaaactactttgttttcagccagggcacacttgttccccaccaaaagctgggtcacattttcacggggatacctataaatttcattcaaccactggttgacattggaaaagctctccggggcagt

SEQ ID NO: 67399 - DNA, 942 bp, Zea mays
  Clone ID: MRT4577_161466C.1
aattcggcacgagggccatgtcggcggccgccgtcctgtgccgcctcggcctccgcctccgccgcctctccacgctctccgaactccccgcggtcgcggcgggagcgccgcagccgcagcacccgacctcgaaggacgcctacttcgcggcggtgcaccacctctccaccatcgtgcggcgggacttctacctggagcgcaccctgaaccgcctccgcctcccgtccccgttccccaccgacctagcgctccgcgtcatccgcgccgccgcccccgccgcgccgctccacgccacgcgcttcctttcctggctccgcgccaagccgtccttcgccgcctcagccgagcacttcgacgcgctgctcctcccactcgcgcgcgcgcggctcttcccccacctctggtccctcgcctccgacatgcgaggcctcggcctccccctctcgccgaccaccttctccgcggtcatctcgtcctacggccactcccgcctccccgaccaggccgtcgaggtgttcaatcgcctccctcgatttggccgcccgcagaccaccgaggtctacaacgccctcctcgacgcgctctgcgccaacggcaacttcaccggcgcctacaagctgctccgcaggatggcgcgcaagggcgttgcacccgaccgcgccacgttcagcaccctcgttgactcctggtgcgcggcggggaagctcaggaggcgcaggcgttcctcgatgacatggcgggccgcgggttccgcccaccggtgcgcggccgtgacctcctcgtcgacgggctcgttcgcgctgggcatctggagcaggccaaggcctttgccctccgtatgaccaaggaaggcatcctccccgacgttgctacattcaactcccttgccgaggcgctttgcaatgctggagacgtggacttcgcggtgtctcttcttgctga

SEQ ID NO: 67400 - DNA, 472 bp, Zea mays
  Clone ID: MRT4577_161467C.1
ctctttttgcttttgttttcttttttttttttttttttttttgtctttttttctttttttctttttttctttttggccgtgattacgccagttgtactttcacaaaaaaaaacaagagaatgttttttttttaaaacgggcgggcgggcccttgacgggggcggcgggagaaacaaccacggggggggagcgacaaggaacccccccgggggcgggaaagagttcccaccccccgttcttttaggggccggaaaaagcactttttatctcccccgttacggggggggctgttttctccctttccccgggggggggtaaaacttcctcccccggggggggccgaaagggcaaatcttttttcccggggcgcggacggggaaaaataactcctatttggggcccccccctcccccccccctggggaaaccggaaaccagccgggggaccccccgggaaaacccggccccctccc

SEQ ID NO: 67401 - DNA, 325 bp, Zea mays
  Clone ID: MRT4577_161468C.1
tttttggcacgtgggcatgattttatttttaagtggatatcattattttttttttggtacaggacaaaaaatgtcaatttgctcaatgggagagattcacagagcggttcaacaactttttttttaaaatacaagggaccgaaaaatccctaacctaaactcaccggggagcgcatttatgatcccaggaggaagaaaaaaaaaaaggggggctgaaaatgttgcggagcctgggcataactgcgggggaggtgggggaacccggaaaataaggaggcccgtaaattcacaatgcgggaagcttttaaagggtgtaattttttcc

SEQ ID NO: 67402 - DNA, 491 bp, Zea mays
  unsure (1)..(491): unsure at all n locations
  Clone ID: MRT4577_161469C.1
cgtccgnnaaaaaaaaaaaaaaggggaaaaaaaaaaaaaaaaaaaaaaaaaaaaaaaaaaaaaaaaaaaaaaaaaaaaaaaaaaaaaaaaaaaaaaaaaaaaaaaaaaaaaaaaaaaaaaaaggggggngcggttttaagaggatcaaagtttacttccccgtgtttgcaacgtaatagtttttgtatgggggcactaaaataaaattaattggccgagtttttaaaactttggaattggaaaaaccttggggtaacccaattaaatccctttgaagaaaatccctttttcccctgttggggaaataggaaaaaggcccgaacgaatggcctttccaaaaatttgtgcaccttaaatggaaaatggaaccccccttttaccggggcttaaagcccgggggttggggtgttttttttgaagtttgaccgttaaatttgcaagttccttaggcccggttcttttggtttttttcctttattttttcgcccttt

SEQ ID NO: 67403 - DNA, 416 bp, Zea mays
  unsure (1)..(416): unsure at all n locations
  Clone ID: MRT4577_16146C.1
cggccggaaacccgggcggcccacgcggcccaaggccaagggggggacccaaagaaaacccccggacctcaagacccggaanaaccnggcggggangggccaaccaaggccgggcgaaggaaccacccaacggggaacggccaacaacgggaccccngccccaccaanagccaaagggggccnaaacgggccccnnaggacggacgacccccaacaaancaaccggccaaaggacccnngggaggaagaaaccagggcggcggcccaacnagggaggcggggccaaggggaccggggggaaaccgcaggaaaaccggccaaccagcccggagcccccacacaggccaaaggccaacgggacggggggaaccaccaccagaaggggcccggggggcaaggccacccaccagacaaag

SEQ ID NO: 67404 - DNA, 404 bp, Zea mays
  Clone ID: MRT4577_161470C.1
gggggggggggttaaaagggcaaaaaaacccgggggctcgggaaaacccggggttcaaaaaagagggttttacacaggggcccaaaaccccttttaaaaaaacagggaaaacactagggttctccaaaatcaggggggtaccccaaaaaactaaaaaaactctgggccaaaaaccccccaaaaagggggaaaaaaaaaaaataagacacgcgcaccccttttttttacaaaaacacagaaaagcccctcccccaatatgggagacgcttttggggctcccccccacaacagagggccccaaggggggcgaaaaacccccccacgagatcccccacaaacccggttagaacacaattgggaaaaacattgcgctaagggagaggggcgccggaaaggggggagat

SEQ ID NO: 67405 - DNA, 259 bp, Zea mays
  Clone ID: MRT4577_161471C.1
attaacggaattttactaccggggggatgaagccatttctcccaaaaaaagtttatgcgtgttcgaaacatcagttatccacctaccaaatgaatattttaggggccttgttcacctagcgcttttgttggagttggagtttacagatagttaaaacatggaaggctcacgacagttatctatcagggtgatggagccggccactgcacacatagtacaaacattcaacaaaggctggtttacgataccctatactttc

SEQ ID NO: 67406 - DNA, 291 bp, Zea mays
  unsure (1)..(291): unsure at all n locations
  Clone ID: MRT4577_161472C.1
cccacgcgtccgcagacgcgtgcgctctgccagcgggcggtgatatgggagtagcacgactggcgagccaacgtggcgagaggtgtctggctgctctgaccatacctgttgctggcgctcgtgaacctaagcgctcggtgctcactcgcggcctccgcagatgagcctgctggatgccaacangagctggatgaggagaagaccagtacgagggccgcttaccaggaattcggtggcgctgaaacgtcatgggctatgtctgacatcgcttgggcgtttaatacgacattt

SEQ ID NO: 67407 - DNA, 488 bp, Zea mays
  Clone ID: MRT4577_161473C.1
ttcgcgatctagaactaggttggtgcttggattggaaggagagaggaggtaaccttttctctcccttgcatatcaagccttgagatcagacctcgcctttctgttctgatccctgcctgccccataaacacaaactcccttagtcgtcgtagtcctctcgtttatcggttggtggacagtgtggatactgcgagagatcgatcaaaggacgacggagctagctagggggtgcaacagaagaagaagaagaggaagtggaagaggaagagatctgtctcatcagtacgacgtacttgttgttggatacatacaaagatatatatatgtctcatcaggcgacggcgatgatgtccggcggcggcggtgcggggcagttcggcgacacgacgttgaccaaggtgttcgtggggggcctcgcgtgggagacgcacaaatacggcttgcgggcctacttccatcatttcggcgatgttggtgaggctctctgc

SEQ ID NO: 67408 - DNA, 254 bp, Zea mays
  Clone ID: MRT4577_161474C.1
attctgcaaatactgctagacttgcgtatcgttggatatgtcctatcaggaggtaaatgttgtttcaccatcagtccttaaatgcagacttaacatgatttattgccaagcgccactaccaataccttgctttaggtttaaacacgtcacagttacaggcagcctcagataccatagagtctataaacaagttattcaacaccctctcacatatatcggatcatatttagtttacaacggacaaaccttttttg

SEQ ID NO: 67409 - DNA, 284 bp, Zea mays
  Clone ID: MRT4577_161475C.1
ggctgctgctcccgaggagctcgccgtttactgtgccggaggctcctgctcctgctcctggtgggccccaggagccggccgccgaggcggaggctgctgctcctgaggagcccgagaaggccagcgagtgaggccgtgcgcacgcagcggcggcggccagggcccaggccccaggggatcggcgtgcgcgcatggcgccgtagactcttgcgcgcgtacatgggagactgacacgtgattttgatggtcactacgctacacgttactgtcgggactctgagtgt

SEQ ID NO: 67410 - DNA, 1534 bp, Zea mays
  Clone ID: MRT4577_161476C.1
cgagccggccgggacacactccgacgcagcccgctccagcctccaacccattcttcggcggttcggcccggcctgcaccctgcagccaccaagcaaacccagtggctctgctttctgcattcccccccgccgccactccgtcgggcttgatgagcctctgctccaagctcttcgcgttgctccgcaagtcccgcgccctcgccaccagcaccgccgccgcagccgccgcgacaacctccgcgacggcgtcggccaacgggatggaggaggctgtcgccgcggcgggcccgctgcgcacgcgcgtctgcatcatcggcagcggcccagccgcgcacacggcggccgtctacgccgcgcgcgccgagctcaagcccgtcctcttcgagggctggctcgccaacgacatcgccgcgggtggacagctcaccaccaccaccgacgtcgagaacttcccgggcttccccgacggcatcctcggcgccgacctcatggatcgctgccgcgcgcagtcgctcaggttcgggaccaagatcctcaccgagaccgtcaccaccgtggacttctccgcccgccccttccgtgtcgcctccgacgacaccgttgtgcacgccgactccgtcgtcgtcgccacgggcgccgtcgcgcgcaggctgcacttcgccggctccgacgccttctggaaccggggcatctccgcctgcgccgtctgcgacggggctgcgcctatcttccggaacaagcccatcgccgtcgtcggaggcggggactccgccatggaggaggctaacttcctcaccaagtacggctcgcaagtttacatcatccaccgccgcagcgacttccgggcgtccaagatcatgcaggcgcgcacgctctccaaccccaagatcaaggtcgtctggaactccgaggtcgtcgaggcctacggcggtgcggatggcggcccgctagccggcgtcaaggtcaaggacgtcgtcaccggcgaggtctctgatctccaggtggccgggctcttctttgccatcggtcacgagccggcgacaaaatttcttggagggcagctcgagctcgactctgatgggtatgtggtgaccaagcccggttccacgcacaccagtgtgcagggggtctttgcagctggggatgtccaggacaagaagtaccgccaggccattactgcagctggatcaggttgcatggctgctctggatgcagagcactacctgcaggaggttggagcacaggaagggaagaccgattgactatgtctgggccaagctgctcttgggccaaggaaaacttctccgaaagccgctctctagtggtgtaaacagcacattattatttggttttaggcctcaaattacgttacattggaaattgatttatatgagcgtgcgcaagcttgtatacattattcgcattgtttattactcttagagtcttagtcattaatcacactttgctaagttatatgcttcccttttggagaaaatatctccagaaaaaaaaaaaaaaaaaagcggccatgtgc

SEQ ID NO: 67411 - DNA, 1154 bp, Zea mays
  Clone ID: MRT4577_161477C.1
aacagattcatcctgtcgtttctcgtctgtgtgcttccattcagggcactagtccagctcgtctggctgaatgtctgggccttgattcggctaagttccaaccaagattgactgagtcgagcaaccaagatacatctatgatgctgttatctgtaatcgatgacgaagatgagagatatcgtggttgtgaaccactgcgtttgtcatgcccaagctgttctggtaccttcgactgcccccctgtatctagtctgattactagtgctagtgctacaagtgtatcagatccaattgaaggaaaggatgctactgctaatttctggcgccatatgcggtgcccaagatgcctagataatactgttgagtccaaattttccccttctatgctcgccaaccagatgaaaagacaggctgataatttcattagtctatattataaaggtttgcagatgtgtgacgatgagggttgcaaatactcgactcacagcgtaaaccttagagttatgggggattctgagagaggaactgtctgtcctaactacccacgctgcaacggtcgcctagtaagacagtacaaggagtcagatctgtacaggcaactatcatacttttgttatgtacttgatgcaacccggtgtcttgaaaagctggaccagaaggcaaggctccccttcgagagagagtttgtagcagtaggccaaacaattaaattggcactgctagagatccagaaaatccgagacagatgtgcatttggatgggttcagctaaaggaccttgccgtatcaatatgatgtttttcttgtgtgaaagggctcaattagataagtttgaattaaccgtgcaagaaattcatctctctgtaggttattctagatctcgttggtaaaaggaacaggacacggcaaacggtgtatcgaaacaccagccgtctttggtatttccctgcgtgacagaccttgtatcatctatacatgtgttttagccagtggctgtattgtacaaaaatatgaaaaaaaaaactccataaaaaaaaaaaaaaaaaaaaaaaaaaaaaaaaaaaaaaaaaaaaaaaaggacaaaaaatataaaagatccaaacataacttacacatacattcaacggcataactcttttatagagccacctaaat

SEQ ID NO: 67412 - DNA, 248 bp, Zea mays
  Clone ID: MRT4577_161478C.1
tcgaacaccaacaatcggggggagaacgagaatgccatcaaacgccgtggagaagcggacgcacgcaagatggagaggattccgaaacctaaggaaggcgagggtgtgaaacgtctgaagctggaaacaggagcgggagcagcaattagggtcttggaccatgccatggatatcaacggaccaaggggccgctgcctaccaaggaaggcgacatgagattggcagctaggacagacggaactatatac

SEQ ID NO: 67413 - DNA, 287 bp, Zea mays
  Clone ID: MRT4577_161479C.1
gccagtctagttcctgatgaaccaggctgcctgagcacctcccagcccctgcccctcatgctaaccccgccctaggcctggcatggcacctgtcgcccagtgccctggggctgatctcagggaagcccagctccagggccagatgagcagaagctctcgatggacaatgaacggccttgctgggggccgccccctaccctctgtcacctttccctaaagaccctaaatctgaggaatcaacagggcagcagatctgtatatatgattctaagagaaaatgtaaataa

SEQ ID NO: 67414 - DNA, 180 bp, Zea mays
  Clone ID: MRT4577_16147C.1
cttcggtcctctcccatccgctccgctcgcagcccctcccccttgcccccccgcgatggcggggtcgtcaccggcgacggggcccgacaacgacgactgtgcgcaagatgtgggcaccggcgatgggaggtcgctgggctacagcgaggcggaattctgggacacgcgagacgtggagga

SEQ ID NO: 67415 - DNA, 1054 bp, Zea mays
  unsure (1)..(1054): unsure at all n locations
  Clone ID: MRT4577_161480C.1
cggccgcgtgggcgccaaccggnggagccgcttcgtctacgccggtgccgcctccggctcgcgcagattcttgccgtacttcccctttgacagcgttgtcaaggtagacgtctccgatggatcagcgcggctgtggtctgtcgctgggcgcaagttcgtcggtgagccggtcttcgtccccaccggcagtggcgaggatgacggctatgttctacttgtagagtatgcagtgtacgatcacaggtgccatctggtgctgctggacgcaaggaagatcggggaaaggaacgcagttgtggcaaaacttgaggtgcccaagcacctcaccttcccgatgggattccatgggttctgggcagatgaatgacgccacagacatccattctcactcactgagccctgaagtccaagacccatgttgtcttgatcgcttgaaacctctgaaactgaaaggaacgcaacaatcgggtcttttcttcgggatcgtatcctgtgctcattgcgctcccgcacatgtgagcacttttaatctgaggcatccgtcgtggttctgctcgtcggtcccattccctgcctgtgtcaccggcctcctgcacgccgtcgtcgtcctcctgcgtcctgcacgccgttgctatcctcctgtgtcctgcacgctgccaccatcctcctatgtcctccccgatgccgtcatgagaaaggaactcatgtatgtaagcttgcttccacggattgcttcgacaggttgctaggtatgtcacaactgcgattgtaaactgattgtatagacccatgtgaattaaatagattgtttcatgactggaaacatcttgtatcacagcaatagattggtccagaatatacaaactgaaaacaaaatactacaaatcaacatctacgagctgctggatcatggttggcattctttcgctttcgtgacttagttctttagatttctcaattcttttactccttcctttggatccaacatcagttggtgggatgaatatgtacttgttctagaatttgacaaccaatgaaaccttggtactcttgc

SEQ ID NO: 67416 - DNA, 121 bp, Zea mays
  unsure (1)..(121): unsure at all n locations
  Clone ID: MRT4577_161481C.1
gttaattataccgaggctgaaaattaacccttccaaggagatcttgccagganaggtcatcaacacgtagtcccgttattagcaagatttggttggaagggttaattataccgaggctgaa

SEQ ID NO: 67417 - DNA, 381 bp, Zea mays
  Clone ID: MRT4577_161482C.1
gttgtgatttgcactaaactgcttgttcttcattcccctatcataggcttctagcgtggagtatgaaaatatgtgatatatattgtggtggtattgttttctgatgaaatgaatattattaccccataagtggacacaggccagttgaaccaatacgaacccgatcaactacatcgatgcatcaccaacccaagcatcccaatccaaacaacttgtaatttgaaactagaggtacattatagtaccccttttctttttagggaactagactattaggaacaccttttctctagtggggtacaagactaatataatcagtttgtgtgacccgcctgaaaactatgttctgttatcagtattttgtgccgtcacaattcagtt

SEQ ID NO: 67418 - DNA, 360 bp, Zea mays
  Clone ID: MRT4577_161483C.1
aaagggaacgaaaaacacaggggggaactttgggaccccagttaccaaaaaaacccgggttttccaaccttagggaaaaaaaaagttttgggggttttaaccaaacggaaagggggaacccggggggaaaaaaaattggggaaaccgttaaaaattagccaagggttttccttccagtagggaggaggaaaccgaccaccctttagggggccatgctgccatttccaaagccggccttgcaccaaattggggttttaaggacccccccccccccctggttatggacctttggttgcccgggaaaaaaaaccggttttgggaactccgggggaaaggacgggttttttggggggggggggg

SEQ ID NO: 67419 - DNA, 259 bp, Zea mays
  unsure (1)..(259): unsure at all n locations
  Clone ID: MRT4577_161484C.1
gtaatctgctacgcaagatgcagcttctagacttgtaaaaaactgcagctttataagatacattgatcagccagaggatttcagctttttatatcaagtatttatgcttggacgtggtgaatgacagaaaggaaaggatttcttgtagcagctgtttggagtatctaagatgattaatattgcctatgcaatttctatcccagcaattcctgaacagaatttgatttgatgcatganaaaaattctatcctgtcataat

SEQ ID NO: 67420 - DNA, 179 bp, Zea mays
  Clone ID: MRT4577_161485C.1
ctgctgacatcccactgggtggtggcggccggcgctgctctttccgcggacggctcagtcacctttgcgctgtacgtcgcgacccacacgcctacgaccgactcccaagcggccgacctagagacactcggggggctctttgacacacgcctgtcgtatgatcgctcacatacgctcat

SEQ ID NO: 67421 - DNA, 432 bp, Zea mays
  Clone ID: MRT4577_161486C.1
ggtaaaaaatccgggtttgagatcttgttttctaaaaggatttcctgaggaagacacgacactgttccataccagctaagactgcccgcgccctgctaattggcagagggccccgggacaccataggcacgaccgagacccagtaaaagacccacgagggacgggccactcaaagaaacccctctcacagcggcgggagctcggaaccaaaatggtttacgacgttataaagccaccttagtacaactgtgggcggggaaaaacagaaccgtggggaccggggggacccccggatgggactgagtcttcccctaagcgccaaacaacccggccgaccggagaacctggaagtcaaaagcctgtcaaccccggcgtacctaagaaccggtgagcgagcacccatccacgcgacactggggggggactatggcc

SEQ ID NO: 67422 - DNA, 560 bp, Zea mays
  Clone ID: MRT4577_161487C.1
ggccgcttttttttttttttttttagggagggaacgctgttgtataatttttccattgttcccttcctttacttttttaaaaaaacgcatttatcctttaaaattcagactgaaagaaacaatgctaaccataaaagggaacgtgcaagcccaaaaaccccaattacacaccaacacctgaagagggggggacccactcaaaaccccaagcctttccgggggacttggccgtctactttggggacattggcctccttttccccacccttaaacagccttattcgaccactttttggtcagccttacccgcctgattttgccaaacacccccccgagggcggggggcaacccgaccaaccttttccctaaccccacatacgagggcgaccccaacaccccttggcccggcaaccaagcccaactctttgatgtccttggcagggttgccagcgagctccaaaacctccgggggcgaggtcactccaaaacggcccggaagaaaaagggggcccccctgcccacaccctggccctaacggccctttttgagggagcgcccta

SEQ ID NO: 67423 - DNA, 242 bp, Zea mays
  Clone ID: MRT4577_161488C.1
tcggttacacttgcgaactccatttcgatcccatttgaaatcaacccatgctcggttccttcgtctagcaaccttttacccttatggccaagatcaagatcgggatcaatgggttcggcaggatcggaaggctggtggccagggtggccctgcagagcgacgaccttttgctctttgccctaaatttcctttttattatggccgatttcatgttttatctttttcaaatttgtatttttttt

SEQ ID NO: 67424 - DNA, 297 bp, Zea mays
  Clone ID: MRT4577_161489C.1
tcttttttttgtttttttttttttctttttctttttttttctttttttttttttttttttttttttttttttgtttttttttttctttttttttttaaacgaaaacgggggggtaaatggccctcggggggggcttaaatatttggaggggacaacgcagggggaggcgggggctttccagcctgggttaagggatcaaacccttatgggagcaggcaggcaggcattgggcggtttgggaaaaagggttttcctcccttgggcggccccacacaggccgggcagcaaggggtcccg

SEQ ID NO: 67425 - DNA, 578 bp, Zea mays
  Clone ID: MRT4577_16148C.1
ataaaaaaaaaaaaaaaaaaaaaaaaaaaaaaaaaaaaaaaaaaaaaaaaaaaaaaaataagaaaaaaaaaaaccccgaaaaaaaaaattttaaaaattaaaaggtttgtccttggggggggccccccctgggggcaatttttgaagatttctttcccttttggcggccgctcgggccggcttttggggggccttttcccccttttggggggtgggttgacttttcacttggcggggggttgggcccccttttgccttgggggggccctgttttcccccccttgggtcgctttttaacacatgggcttttggtaagctggggggttatcgaaaagttccgccctgtccccctttcccttttttggcgcagggtgaatggggaaggggcgccccctttttcgcctttttaaccggggggggtgttggaggggacccgccctgtccccgttatttttgcccgccccttggggggggttctttaccctggctcgctttctttttcccccccatgggccggttcccccggccttgtttttattgggggtttctttttggggcggcttttcggttttccccgg

SEQ ID NO: 67426 - DNA, 319 bp, Zea mays
  Clone ID: MRT4577_161490C.1
aaacaacgaggaaccttcaccctactctcggttttccggggcattgggtttttatttcccaaaaaattattacaacttcctccttaccaaaaaaaaagggccttttttggtaaaccaacacaacctttaaacccacccttgccccccaaaaaaactttgacattttgcccgaccaagcctaaaaaagatctatctttccccatggggaactgttgcctctgagggcccgctagaaaaaaaaaaaaataccactcctgaacacacaaggtcgtgataaaaaaacctggcccgggctaatgcggggcccaaataattcccc

SEQ ID NO: 67427 - DNA, 351 bp, Zea mays
  unsure (1)..(351): unsure at all n locations
  Clone ID: MRT4577_161491C.1
cgagccggcgggatctancccaaccctcgattgttcccatggccgccgccattcgcggaagccctacccgcgccgccgcgccgacccagccgcgcgcggtgctgcgggtggcgtcgtccgccgcgccagcctcctcctcctccgcccgcccgcgcaggggcgccgtggcagaggccgcaatgcagccggccaaggcggacgccgcggaggtggcctcccccgctgccgcgctggagatggcgaacggtgccgagagaagcctactggagaggaaaaatattctgcgtccacatagaagtgatccacccataactgaaccaccccaaagacgctgaaaaatggtcttcctcc

SEQ ID NO: 67428 - DNA, 374 bp, Zea mays
  Clone ID: MRT4577_161492C.1
cctagaggccggccgggaaaatattttttcctcaccgagacaccgagtcgagattcaagcagactctacaatatcacacgattttttccccacaattcaagaagtatcaagcacgaattgcttcggcatacgcacgcctgagaccacctgatgagcgcattgaaatgacagcacataagctccagagccttctccaggcaggaagccacgatgaggttgcgcccctataaatccccctattcaaaaactgtctaggtggctgggatgataaggaacttttatgaaactgcaactcttgcagcaactggtgctccctggcgcaggtgtttttttcgttgctgtccaaggcgaagatgttgctcctgtcgaaggca

SEQ ID NO: 67429 - DNA, 185 bp, Zea mays
  Clone ID: MRT4577_161493C.1
gaccgccggaatccggtcgacccactcgtgcggaatgtcgcttgatctccgtccaaattggaatggtaaatcagcctcagcagaatgttacctacatttgcttggatcgtataattattgtagactaagattattagttatggccaataacctttgcttactagccctttcacgtgatgccgatg

SEQ ID NO: 67430 - DNA, 567 bp, Zea mays
  Clone ID: MRT4577_161494C.1
gggttcatccactctcagcatcaccagctaagaacaggtcttcgtctcaataatggaaggcaaaacagggcagctcaggtgctgtttcgtcgccatcgtgctcgtcctgggtcttgtccttgagcagtcccagcaggctgaagctagaggcaaatggtgctgcgaaaccgccaccggaaaataccattttaatcgctgcgttgactcgggttgggtcgacaatattgggttctgtgcgagtaatgccggttgcatcattatggaggacagatgtggaggtcgttggccagtgcctgctcgtgatgcgctttctctggatgtcatttgattaattataagcaagtacgtgaagttaagaaacgagggccagacgactgtcgtccagcgattggttatttgtgaacttgtcgtttgtcttcttatttcaactttccaataagccccttcgtgtaatcgtgtcctccccttcaaagtttgtcgactgttgcgtaatcaaatctatatagcaaataaagacggcgccgtacgtgtatatgtctgcaaaaaaaaaaaaaaaaaaggccccta

SEQ ID NO: 67431 - DNA, 554 bp, Zea mays
  Clone ID: MRT4577_161495C.1
aaaaaaacataacataactttataaataaattaaatgttcaatatttggaccttacaatttaaactagtagttcaaatgttcaataataaatcaacatacatgcaaattcaacgttcaacgacacatgtaaaaggtatttaaccactacctaacaaacattaagttaaaagggtctgcccacggtttgtttttgggcctcaatgtttcaaaggttcgaacggtaaaaaagatttttgtttagcagctaaatcgagctaatgttgtgtgtttagcgggctaaataaggctattagcggctaagtttggttagcgctaaatggtgcatctcttagctccagacctcttgaaaggctatagctggctaaatagccgctattagccggctatttaaaactttggatgaaacccgcgggtaacccatgggtacccgctaacccgatgggtacgggtttgggcaaaatctcaaacccgtcatgggtacgggttttttaatgggcacacatatttttcacgggtacggggtttgggacggcaaaacccagagggtttgtac

SEQ ID NO: 67432 - DNA, 382 bp, Zea mays
  Clone ID: MRT4577_161496C.1
agcatcaccagctaagaacaggtcttcgtctcaataatggaaggcaaaacagggcagctcaggtgctgtttcgtcgccatcgtgctcgtcctgggtcttgtccttgagcagtcccagcaggctgaagctagaggcaaatggtgctgcgaaaccgccaccggaaaataccattttaatcgctgcgttgactcgggttgggtcgacaatattgggttctgtgcgagtaatgccggttgcatcattatggaggacagatgtggaggtcgttggccagtgcctgctcgtaagagacgaacctcgtcgcacgcttttcattcatctttcaccttttattttattttgattctgttctcgtatatttaccgtttcgttaatttatttt

SEQ ID NO: 67433 - DNA, 123 bp, Zea mays
  Clone ID: MRT4577_161497C.1
ttgtttccctcaactgggggctagactatacttttttggttatgaggaaatttacacatcaaggtacatgaaattactatacacttaactacttactactacattggaccattaaagatcaca

SEQ ID NO: 67434 - DNA, 665 bp, Zea mays
  Clone ID: MRT4577_161498C.1
gccgggccggggttcatccactttcagcatcaccagttaagaacaggtcttcgtctcaataatggaaggcaaaacagggcagctcaggtgctgtttcgtcgccatcgtgctcgtcctgggtcttgtccttgagcagtcccagcaggctgaagctagaggcaaatggtgctgcgaaaccgccaccggaaaataccattttaatcgctgcgttgactcgggttgggtcgacaatattgggttctgtgcgagtaatgccggttgcatcattatggaggacagatgtggaggtcgttggccagtgcctgctcgtgatgcgctttctctggatgtcatttgattaattataagcaagtacgtgaagttaagaaacgagggccagacgactgtcgtccagcgattggttatttgtgaacttgtcgtttgtcttcttatttcaactttccaataagccccttcgtgtaatcgtgtcctccccttcaaagtttgtcgactgttgcgtaatcaaatctatatagcaaataaagacggcgccgtacgtgtatatgtctctatttctgatcttgcagtcgtttgcttaatcaattgttctgtcactattttatctaataaaattgcacgcatgtatatggtttcacagccaaaaaaaaaaaaaaaaaaggccccta

SEQ ID NO: 67435 - DNA, 302 bp, Zea mays
  Clone ID: MRT4577_161499C.1
aagagcatggggcacattttttactggccatatttacatgattccactcactgttaagcacacatgcaggtcacacgtcggtgaatctgtgattcatgtgcgtatataagacgacacaccgtgtgtagagacacacgcaaagcaaaagggccctccaacctttcctgccgtctgcacacaggatggccgcaggacaagagacaaaaggcaaccagcccttgatgacactggaagcggacggatcgcttgaatgaggcacccataaaacacgagaaagagggccacaaaccagggctggacac

SEQ ID NO: 67436 - DNA, 265 bp, Zea mays
  Clone ID: MRT4577_16149C.1
cgacatagatttcatggctggctgcacgcgtgagtgggagacgctaggtggaggcacctcgttgcggatgtaaaccggtgggagcagctcctcgggggcgaccatctgcctgtacacgacagggctatacctgtgcctaggaggagaccacctcctctttgtgaacaagtgggtccaggattccatcaccggcctcgtcatggggatgatcataggagtgaccgcatttctgcctgccaaggggaatcactcacacatgctgcgg

SEQ ID NO: 67437 - DNA, 562 bp, Zea mays
  Clone ID: MRT4577_1614C.1
tccgctagtaaaaaactgtgttctctgcctattataatttataagtgatgctttagccaatccgaactaacttattattcgaaatggtcaaacgatacatgttgcatacaattctaggttcctaatacctaccgaaaactttaaaactttatgaccgatagtgaagtgaatcacttcttttcctttccttttgttgcaattacagtgtgatcaatatttaagtgataataattttgactaattagtttactgagtgctaaccttatccttgtcaacctcttgaataatgtcgttaaccaattgctcatcaggctttagttcaccatcacttagagtctccattaactcggacatttcaataaaaccattcccgtctttgtcgaagaactcgaaagctttaggtagatactcgtcattactcatctttttaatgtgaagcaagactgtcacaaattcctcacaatctaatgtgtcagttccatgtatatcgccctgcaaaacgaaaaaagttgtattaggtccttgcagtgttaaactgataattgatttttgtgcaactttg

SEQ ID NO: 67438 - DNA, 663 bp, Zea mays
  Clone ID: MRT4577_161500C.1
gccggccgggccgggatccactctcatcaccagctaagaacagggcttcgtctcaatggaaggcaaaacagggcagctcaggtgctgtttcgtcgccatcgtgctcgtcctgggtcttgtccttgagtcccaccaggctgaagctggaggcaaatggtgctgcgaaaccgccaccggaaaataccattttaatcgctgcgttgactcgggtttggtcgacaatattgggttctgtgcgggtaatgccggttgcatcattatggaagacagatgtggaggccgttggccggtgcctgctcgtgatgcgctttccctggatgtcatttgattaattataagcaagtacgtgaagaaacgagggccagacgactgtcgtccagcgattggttatttgtgaacttgtcgtttgtcttcttatttcaactttccaataagccccttcgtgaagtgtcatccccttcaaagtctgtcgactgttacgtatacaaatctatatatcaaataaagacggcgccgtacgtgtgtatatgtctctatttctgatcttgcagtcgtttgcttaatcaattgttctgtcactattttatctaataaaattgcacgtacgcatgtatatggtttcacagcgaaaaaaaaaaaaaaaaaaaaaaaaaaaaaacaaaa

SEQ ID NO: 67439 - DNA, 355 bp, Zea mays
  Clone ID: MRT4577_161501C.1
cacgattctacatctacgtgcgcgtagatctcggtacttgcgatttccgggcgcccgaagggcggaacggatctactcaagggcggcgccaagcacaaccgcaaggtgctgagcgacaacatacaagacatcacgaaacccgccatacgcatgctagacacgaagggcggtgtcatgcacattactgtgctaatctactatgagaccctcgaaaggctcaagatctccctcgagaacatgattcctaacgcctgaagctacaccgatcacgcccagcgtaagaccgcaaccggcatggatgtcgtctacgcgctaaagcgccagggacgtacgctctacagcttcagcggttagg

SEQ ID NO: 67440 - DNA, 1431 bp, Zea mays
  Clone ID: MRT4577_161502C.1
tcgaggccggccgggccgggaaaccctagccattttcttttcttatccccagccgccacaaagacagccggccgcctgggaacttttttttttcttcttcctggccgaccgcacctcccacttctctctatttttttttctttgcaccatggcttggcaaacggatctaggctggcttcctctctttctgttcttctcctgctctgttctttgcttctttcttccccaccgaacagctcaaaccggtgagctagccggtgcctgagcgcgcagccggctcacatatccgaggatgaccggattaatgttcaggggcatgcgggttttaccgccggtgtgcgcgtcccctcggtagggcgcgccgccgtcggtcaaacgccgacagctgtccctgttgacagcagagaaaaggggtcgacctcttggtcgacttctgtgactgtgcacgcccagatcttatatcccttacctctttgactcgatctcgttctctgtgatgtatgagatggatctaatgtaatattcgggatcgagttatgagttgatagaacgtagatttttctgcgaaaaaaaaaaaaaaaaaacggccctagggccaaaaaaaaaaaaaaaaagggtgtttgcgttgataccactgtttcctgaggaatatcaaatcactcgatgcggacatgtgggggatgtgacttgtcgaagggccaaaccggaatctattcgaagggcgttacgggagcaagcaagatccgctaggcgtccaccccctaattccaatcaaaaccataaggggaagagcaagaaagaaggaacttatccccactacccaagatacctctagctatacccccaaaatacgcaagcatcatctaatcagaaccacaaaatattaagatgccattaacaataagaaaacataaagcgacgctagatatctaatttatggttactgtgtaagcatcaactgtataataaaagaatacgtggaccaagcaaacgccaggatacatgaagacaaagacgacggtatttcgatggtcaaatcacgcgcagagtaatatcaagcataactaggagacactagacataataaactcagaaggagcaggaacccagagcgcaaagaagaagcagcagtcagtcagtcactgctgcctagctcatgcccttaaccgcagtgagagctggatgcagaggtttatcgaccgattcccgcgttgtttgcgagctgctgcaacaataaaacgcttgaaccaccactcccggccggaccagcacaaggcaaggaagagatcgataaaccactgcgcccagacaccacccgtagatgggtctgacaaaaaaaaaaccttgacatcaatgcaaaataaggatggaacaacacaagaaacacctgcgagagatcacatgtgaggctggctgccggctaatacaaac

SEQ ID NO: 67441 - DNA, 510 bp, Zea mays
  Clone ID: MRT4577_161503C.1
gtgcgttctcccgggcgtccccgacggccacatactgaaggggttcgccgtggcggcgctgggcgagtccgtgtacgtcatcggcggccggctctgccggagggagcgtggcgccgcggccggcgagtgccaggacaccgacgtcgccgtgcgggcggacgtgctgcggtacgacgcgcgccggggcgagtggcaccactgcgcgccgctcctggtcccgcggttcgacttcgcgtgcgcgccgtgccggggccggatctgcgtggccggcgggcagtgctcgctgtccggcgcccggggcacggcggcggccgaggtgtacgacgcggagaaggggcagtggtcggcgctccccgacatgagcacgctgcgctacaggtgcgtcggcgtcacgtggcagggcagcttccacgtcgtggggggcttcgcggagaccacgctgacggccgccagcagcgacgccaggcgtcgcaccaccgtgctgcagtcgtcggcgctggagcggagctc

SEQ ID NO: 67442 - DNA, 598 bp, Zea mays
  unsure (1)..(598): unsure at all n locations
  Clone ID: MRT4577_161504C.1
ccggccgggaaacctcatcgcctccacccctttgtcagcaggatcttcaccatgtctcacaaaacacaagaaccggtcatcacaaaaacctcggacctgtcactccaagaagccaagtggataacgctcaagaagatcgaatacgtcgaccaagtcggcaaagagcgaacatgggaggtcgcaacacgaaagacaagaggcaaatctggcgttgatgctgtagcaatgggaaacatcctcctccacccatccaagcccgcctcaactctgctcgtcatccagtacagaccacctctggacgcctacacgattgaatggcctgctgggctcattgatgccgaggaaacagccgaagaagcagctgtcagagaattcaaagaggagactggctatgattgcaaggttttgagcgtcagccctgcacaagctgccgatcccggaatgacaaacgccaacatgcaactggcaatggtcgagggttcattgagtgagaatgangaggagcccgagcagagactggatgatggagagcacattcaacgagagatcattcctcttgctngactgtatggacgtttggtcgagtactccaagcgag

SEQ ID NO: 67443 - DNA, 803 bp, Zea mays
  Clone ID: MRT4577_161505C.1
acagaaattgatttatttatgaacgtaccgggtatgaaatactatagtacacaataaatgtaggcaaagcggaacccctaataataatcaacaatagtgcaggccttcctatctacgcctaaagtattggaacatggaaaactaggagctcatgtgttgagtttctttactccttgaaatcatttttgtcattcgctggaagccatttgtttctccagtaaactgcaaggacactccttccaagagccatgcatgcgcacaacgctgacagctgaagtaacaacaacgagtgcatttgtaaactgcttttgagcaagtaaaaatccaagtgcagaactctgcatcccacattcaattgagatggtcctagaggttgattccccaaaggtagataatctcgataaccagtacccaagagcaaatgcagcaacatgaagcagagtgacagggataataagttgcccaccttgagttttcaacgcttctgcgacttgtcaatctgggacttgagatttcatgtaccaacttgctcttcaggtgacacgtgtcctcacggcccatgagtagtagcagtccttgtccacgaaacaaaggagcaccgcggcggtgatgtactccggcgacgaattcctggtttcccggatgctgtccagaccaaactccaatgcttgtcgatggcgtagacacgaggtgacttcctcctttctctcaccagcatagcaatgttgatggctctcagatttcttctacaagaacatgcggtggcttgttggcggtgacccccggcccggccggcctcgagg

SEQ ID NO: 67444 - DNA, 762 bp, Zea mays
  unsure (1)..(762): unsure at all n locations
  Clone ID: MRT4577_161506C.1
accggccggattccgggcgacacgcgtgcgacgggggagttcttcgcaaatatatcccgcactggatacacgcggcgcggccaagcaagtaagcaacccaaaccctccctcccctcccattcgattcttgcctcccacgccgccgccggatcccgcgatggccgaccctcggctgtaccccacggagtccgggtccgacgaccggcgcgatgccgcctatcccggctccgagcgccgcctctacaacccgtaccaggacctcaacctcccctatcggcagctctacgaccttcccacctccccggagttcctcttccaggaggaggccgtcgcgcagcgccggtcctggggcgagaacctcacctactacaccggcgtgggatacctcggcggcgccggggccggggccgcgctggggctccgcgacgccgcccgaggcgccgagcctggggagcccgccaagatccgggccaaccgcgtcctcaactcctgcggcagctccggacgccgcgtcggtaacacgctcggggtcatcggcctcatgtacgccgggatcgagagcgccatgggcgccgcccgcgaccgcgacgactggatcaacagcgacgtggccgggctaggcaccggcgcgctcttccgcgccgataacgggccgcgctcggcggtcgtcgccggggccgttggtgagggtcttgctggcgccgccgncgctgccaagcagggtgggaagagatacctccccgncctctaaanntgattgcg

SEQ ID NO: 67445 - DNA, 591 bp, Zea mays
  unsure (1)..(591): unsure at all n locations
  Clone ID: MRT4577_161507C.1
ctagctggtgtgtgagttttgtggagcgttcnnatgatccaggggtgggggggtgggggtcctggagtgcacaccgacgagtagaagggtaaaagctgtctccgggaagtgtagtatcagcatgtgatatatgaattcaattgctttcttccatcattgtggtgttcaataggcagtcncttggagcaactttggcggggggggaatanaattatacaaagatgttgccacatnagagtgtgtgacttagcacatctcactcgaatgtgtagcaaagaaatgtgggacccaccatcatgtgtaaacaaggtaagaatatttnaaggaggacttggctgggattctggtcgctggtgcttgtgttgttggggtttctcaagaagaaaactattgtttatgggcacaactagtggcttattttagcttcggcgcaaaaaaaaaacctgggtaggactggggctgcgaggtactggacctntggtgtttgtgtgtgccttgtttgggctaacttagtaacaacgctgnaagctggcctgattgggggctggttgcaggggcacctgggatgcaattacctaggggtggatacct

SEQ ID NO: 67446 - DNA, 305 bp, Zea mays
  Clone ID: MRT4577_161508C.1
aaaaaaaataaaaaaaaaaaataaaaaaaaaaaaaaaaaaaataataaaaaaaaaaaaaaagaaaacacaaaaaaaagtgtacacccaaccaaattcatactttctattcctatctttcactactacatattttattaacattctacatcctactcaaactacaaatatttctatatgcctttccttattttatactatcctcattactactctttatcccatttactttttttcttttttctcctattacatattattattttccctatttatactctttttttacttcaaaccctctatcccc

SEQ ID NO: 67447 - DNA, 617 bp, Zea mays
  Clone ID: MRT4577_161509C.1
taccctcgaggccggccgggccgggaaaattgcagtctcctctagctggctgaacgggtctacaaatatacactactactccactaatgtcacatatccacaaccaggtgatctcaagtaattaacagaaaatatattccatcattgaaaatgagttccgttgttttgggtgctactggtagggagaataagacatcatggcctgaggtggtgggcatgtccatcaaggaggcaagagagatcattcttaaagacatgcccaacgctaacattcaagttctaccggttggctcgcttgtgacccaagactttcgccctgatcgtgttcgcatcttcgttgatattgttgcccagactccaacagttggctgacaaggatatgccttatctataggccaaataaacaaagcctacttttatgtatcatggctaataaatcctacatttcttggttatccttgattggtttagcttattagctatatcgccatcaaaaggggccccaagaaattacatgtatgtctatcataaaaatctcatcccgatggaatatataataaataaataatgatatataaaaaaaaaaaaaaaaaaacctgcccgggcggccgctcgag

SEQ ID NO: 67448 - DNA, 1327 bp, Zea mays
  unsure (1)..(1327): unsure at all n locations
  Clone ID: MRT4577_16150C.1
acgctactccagtaatattttcatgtggagtaggaacctaacaaggaagtgctactgcaaagtgaaagctcttgggttggtcggaagcaatggatgctgctccggcgacatcggcggttgcagttgcagttgccgtcatcttcgcggttgtagcatcgctcccagtactgctccgcctcctctatgccagtgccggcggcaagacgaatccgaaggcacccctgcctcccggctcattcggtctgcctttcatcgggcagacgctcagcctggtccgcgccctccgcgccaacaccgccgacgactggctccggcggtggttagccatgtacggcctggtgtcgcggttgcgcctcttcggctgcccgacggccttcctcgttggcacctctgccaacaagttcatcttcgccagcgccgcggtgaccgccaagacccccgagtccttcgctcggatggtcggccgccggacgatcagggnatgtggtcggcgacgagcaccgccgcgtcagggccatgatgatgcagttcctcagagtggacgccgtcaagaggcacgtcgccagcatggacggcgaggtccggcgccacctcgacgcggagtggcgcggccgtggcaccgtggccgtgatgccgtccatgaagtcactcaccttcgacgtcatgtgcaccgccatcttcggcctcgggacgggtgccgtccgccgggatctttggactgagttccaggagctggtgaggggcatctgggcggtcccggtcaacctgcccttcaccgcatacagccggtgcctcgccgcgagccagcgtgggcgccgcgccgtcgccggggtcatccaggagaggagggccaagctggagcgtggggagagctcgctgccagcgacgttgtcacccttatgctcacggagggcctgcccgacgaggagatcatcgacaacgtcatgtttctcatggtcgccgcacacgacaccaccgccgccctcctcaccttcctcatccggcagctcgacgccgacaaggaagcttacgacagagttgtccaggagcaagaagagattgcgcggagcaaggtggccggggaggctctgtcgtgggaggacctcggcaggatgcggtacacctggttggcggcgatggagacgctgcggatggtgccttccggtgttcaccatgacgaggaagacggtggacgacgtcgagtacggaggctacctcatacccaagggctggncaggtgatccacgcggncaacatgacgcactgggacccggccatcttcccggagcccggcaggttcgacccagctcggttcgagaacccgtcg

SEQ ID NO: 67449 - DNA, 1700 bp, Zea mays
  Clone ID: MRT4577_161510C.1
ctcttctcttctcttctctccgatgcgagcgagatgagagagagaaacagagctccccgaggtgtgtataaatgccaggtcggcgcgttaattctttctagttctactccccgctccccattcacgcactctcactctacctctctccctccctcgccggcgccgcgcgtgctcccgcgggatgctgcgtgcggcgcggtacctgctggggtcgccgggcgcgagcgggttcgggtccaggtcgacggcggaggaggtgaccccggacctgggcgcgacgacggccatcatcacgggcgccacgtccgggatcggcgccgagacggcgcgcgtgctggcgaagcgcggcgcgcgcgtggtgatcccggcgcggagcgccaaggcggcggaggacgtgcgcgcgcgcatcgtggccgagtgccccgccgccgccgtcctcgtgctcccgctcgacctcagctcgctcgcgtccgtgcgcgccttcgccgacaggttcctcgcgctcggcctcccactccacctcctcataaacaacgccggcaagttctcgcacgggcagctggcgctctcggaggacggcgtggagatgaccttcgccaccaactacctgggccacttcctgctgacgaagctgctggcggggcggatggcggagacggcggcggccacgggcgtgcagggacgcatcgtgaacgtgtcgtccagcgtgcacggctggttcgccggcgactgggccgagtacctgcacctcgtcacccgccgcaagataccctacgacgcgacgcaggcgtacgcggtgtccaagctcgccaacgtgctgcacacccgggagctcgccgcgcgcctgcaggaaatgggcgccaacgtgacggccaactgcgtccacccgggcatcgtcaggacgcgccttaaccgcgaccgcgacggcgtcctaaccgatctggtgttcctgctgctgtccaagctgctgaaaacgatccctcaggctgcggcgaccacgtgctacgtggcggcccacccgagagtggccggcgtgtccggccgctacttcgccgactgcaacgaggcgctgccgtcgccggccgccaccgaccgccacgaggccgcgcgcctctggcgggtctccgaggccatcatcgacggctgcaccaacagccaaccccagcgggactgcaccacttctcctctactacgattactgccggcccagacgcagtcacagtcgccgacaggagcttcttcgtcgcctcgtcgtcgagcctgctgagctgatccggccgtccagttccagttccagtatatccgtcccttttgttctcgtccatgcgagatgcgtgtacaatagctagacattatatgtatatccgatcgattatccccggccgtcctagcagcattataaatacagcatatactccttgtcccatatataacaggcactagcatgcagtagccaacgtagtgcagtagtagttctgtgtttgtgtgtgtctcaagtctggactctctctctgaacaaaaaaaaaaaaaaaaaaaaaaaataaaaaaaaaaaaaaaaaaaaaaaaaaaaaaaaaaaaaaaaaaaaaaaaaaaaaaaaaaaaaaaaaaaaaaaaaaaaaaaaaaaaaaaaaaaaaaaagggggggctttttttaaaggaccaaagtttacttccgcgggtttggaaggaaaaagtttttt

SEQ ID NO: 67450 - DNA, 481 bp, Zea mays
  Clone ID: MRT4577_161511C.1
gtccgcaaccaagcgacataaaaaagtggaatacagtggggacaatagagccaccatgggggccacaatattttccatccttatgctccttgctatttttgcatgtgttgctaacgcgaccatttttcctaaatactcacaagctcctatagatgcccttattgccccataccttccatcaatgaccgcgtcaatgtgtgaaaacccagcccttcaaccctacacgctccaacacgcaatcccaccaggcaacttacctagatcacccccgttctttcaacaatcgccagacctatctttggtgcagtcattggggcaaaccatcaggccaccacagctgcaacaactcctgctaccactgatccgccaagtggttctggcaaaccctcctccctactcttagcaacaacaatagctaccattgaatcaactatttatacaaaactctgctgcgtgttttcatcaccagctactacaacca

SEQ ID NO: 67451 - DNA, 647 bp, Zea mays
  Clone ID: MRT4577_161512C.1
ccccgcgtccgcttgcattgtcttgggcgcaatggcatgtgggctggcagaccctacgacgcgacgcaggcgtacgcggtgtccaagctcgccaacgtgctgcacacccgggagctcgccgcgcgcctgcaggaaatgggcgccaacgtgacggccaactgcgtccacccgggcatcgtcaggacgcgccttaaccgcgaccgcgacggcgtcctaaccggtgagggaactgacagcgcgcagtcagcttgctgactcgttcgtctgaaatctgaatggagtgacgagttaaataaatgtctgtgttcgcagatctggtgttcctgctgctgtccaagctgctgaaaacgatccctcaggctgcggcgaccacgtgctacgtggcggcccacccgagagtggccggcgtgtccggccgctacttcgccgactgcaacgaggcgctgccgtcgccggccgccaccgaccgccacgaggccgcgcgcctctggcgggtctccgaggccatcatcgacggctgcaccaacagccaaccccagcgggactgcaccactgctcctctaccacgattactgccggcccagacgcagtcacagtcgccgacaggagcttcttcgtcgcctcgtcgtcgagcctgctgagctgat

SEQ ID NO: 67452 - DNA, 497 bp, Zea mays
  Clone ID: MRT4577_161513C.1
ctcatacatattatcaggggcgaatctatccatctattttatctacttacgcacgaacatgcgtaacatggggcatgtctgtgggctcgttggatctggcgctacgcggtggccagtcgccggtcggcgcagataagaggatgacttgacatggctcacatagggcaagtgctgcgatgctcgggcgagctacgcggaccacaccagagtggtacacgtgcatctactgcgctccgaagatcgacttatcctccgtcgccaagatgctgtacgcgttctacacctatctgcacggtttctccgcgcgcctaacgccaaaggaggtcagagacctggcgtgcgaagagggggtgctcaccgaggacccggaggcgacggtcgagctgcacaccacgctgacgctagaggttctgggcatcgtcggacagagactgtccacgaaggccctcactgtgggcgatgggcacctgcgggtgctgaagacgagcttatgggcc

SEQ ID NO: 67453 - DNA, 192 bp, Zea mays
  Clone ID: MRT4577_161514C.1
gccaaaaacaacggatgcacgctcgtaagctggaattggtgagggaggtacctgtgagcacatggcactggacagggacagagtgtggcgtgtttttttgtaacacacttggatcggagcccggttctgtcggggggtgctatctgtgagggataccagctttgacatacctgcgtgaataaatgatgatcg

SEQ ID NO: 67454 - DNA, 291 bp, Zea mays
  Clone ID: MRT4577_161515C.1
atgaatcatacgacgattcacaagcaagagtataaaatggccttagacagatacatacccagaattacagattagtgcctactacaaaaaaagggagctgttacattctacatcggcgggaccaactcacacgatgtttttttgaggggagactaacgcacaaacaaatataaagataaccttcttcccacatagaaagcctgtggataggatgaccgaaaataagctctaacgagcaaaccacactcctgcctacaagctatgttgtatagtgtgacggacacaggggcc

SEQ ID NO: 67455 - DNA, 438 bp, Zea mays
  Clone ID: MRT4577_161516C.1
gacagcacaatagtgttccaacaatggccgccaaaatatttcgcttacttatgcggctggacctatctgcaagtgctgctaccgcaaccatttatccacaatgctcacaagctcctatagctacctttattaccacatacctctcaccagcagcgtattcagcatgcgaaaacccagtgcttcaaccctacaggatccaacaggcacacgcagcaagcatcttacctttatcacccttgttcctccagacaacacgaacgcctattacagcagtacacctcaggtgcatgctgaggcacaaaacatcatggcacaacaactacagcagcttgtgctacgaaaccttgcagcctactatcagcaacagtagcatctcacattcaaccaactggctgcattgaacactgctgactatttgcaacaacaactaccattcag

SEQ ID NO: 67456 - DNA, 366 bp, Zea mays
  Clone ID: MRT4577_161517C.1
tttttgtttgtgtttttgggtagacctgaatttggtaaagactgacgataggaagcccttggggaagatgtctacatactatgatgtcggcgacacatgtgggacccaaagattaacggctgcaacttgttctcttgcaaaacgaaaactaatcttcatgggctcggcgaggggaaactccacggggttggaacacatgtatacaacaactatgggggctcaatacactacaatggcgccaccgagagggcatggaggtacaagaggaggtgggccacccaactcacttggacaacttcattcgccacacctagattcttagctgaataagaacccatccgaattgacggcagcactgattggaaa

SEQ ID NO: 67457 - DNA, 101 bp, Zea mays
  Clone ID: MRT4577_161518C.1
cgggacaggccctctgccccatgccaactaccaactggcggacgaccggcaactcgcatgacgcgatctctatgggatcggaagggcggtcatgacctgat

SEQ ID NO: 67458 - DNA, 798 bp, Zea mays
  unsure (1)..(798): unsure at all n locations
  Clone ID: MRT4577_161519C.1
gaccgcaaatttttttttattttttttgctaggataaagtctcacacatatgatgactcatggtacagaaatcaatgtcacatctttattatataataggaattctgtataaaataactaaataaattacaccatatgacgatgacgatcctccataaccatagttgactgggagacgacggcctagacctctccgtactcatcgcagcatccttcatactcctccagcggtacctgtttttgaccggagtttatggcgcagaggggcccgaccacgcggtgtggcggcacgaggattccggcgagaaattccggtggtccggagcgcaagtccgcccaggcgaagtcacagtcatgttcagcgcggcctggcgacgccccttgactcggtcccgaggccccaatgaccgcatggacacgctctgcccatgcgcggcggcgctctctcccttctcccttggttcctctgggctgctagccgctgtccaacaatgaagcttcaagcattccgatgccccggttgacatcttcaggctgtctagagtgaacaagcgcccaggagagcctcatcaggctctcggttttctgttcttcatttgcagcctcagcaacctcactctcgaaaccggcgatgatgtcgggatcgcaccagagcaggacgtcgctgccgcggaagatggagcccaccgagtcgattaatttgccgacgtgcgtgtccatcccccagctctctcttctttttctgacgcttttttggggttttccgagagggtccccggccggccctcgaggnngtac

SEQ ID NO: 67459 - DNA, 1279 bp, Zea mays
  Clone ID: MRT4577_16151C.1
ccgggtaggccctactcactgtggaccccaaatccccaactgctcctcttcctcgtcgtcttcctctccgtccccgtccccgtccccctctcggcctccccctccactagccccaaatcctccgtctcctcctgtccctctccgcatccaccggaccccaccgggaatggcggtttgagtaagttcccgtaccagggttcttcggtctgggaggccgaggggacaccgggtcggagtgaggggccgccatggcgagcgacgtgcccatgaccccggagctcgagcagatcgacggagagatccacgatatcttccgcgccctccaaaatggattccaaaagatggataagattaaagattcaaataggcaagctaagcaattggaagatcttactgtgaaaatgaaggagtgcaagcgcttgatcaaagagtttgatcgcattctcaaagatgaggagtcaaataatccacctgagatcaacaagcagctaaatgacagaaaacagtccatgatcaaagagttgaattcctatgtcaccttgaggaaaacataccaaagtagccttggtaacaacaataagagggttgagctctttgatatgggtgctggaagtagtgagcctgctgctgaggacaatattcaaatggcatcagccatgacaaatcaacaactcattgatgcgggaaggaaccaaatggaccaaacagatcaagctattgaacgttcaaaaatggtcgtagcacaaactgttgagactggagctcaaactgctgcgacattaacacagcaaacagagcaaatgaagagaattggtaatgagctagatactgtccacttctcactgaagaaagctagccaactagtgaaggagattggtcgccaggttgcgactgacaaatgtatcatggcattcctctttctgatcgttttgggtgtgattgctatcattgttgttaagatcgtccatcccaataacaaaaacattcgagacattccagggctggccccgcctgctcaaaactatcagattcacaacaggagattgttgtgggcagaagcttccataggcctgtgatggctgaatgtaggcttcatgacagctatccatagtaacaattctttgtgcctgtatatctattttgtcttgttaactccgagccctaggtctgtattcctgcgtctggtgtttgtacaccgctggccgtttggctgtgtatatggtacagagatgagatgttaaaaccaaaccagtaattatgacgaatacttgaaagagcg

SEQ ID NO: 67460 - DNA, 348 bp, Zea mays
  Clone ID: MRT4577_161520C.1
cccactcgtactacacacgcctcctcacaaactatcactgtgctcaataacaaagaaaatataacctataacacgaacgttttccttctaaatcaaactgctccttctactcctccctgcactcctcctactcctacaccaatctcaaccaatactataacgcaccttctatacttcttcaatccactacaaatccctactcccctcccctctccattcttccttccctccacattttcttctccgcctctgttgatgacccacatatcacatccactgtctaataccttttcactgactcagacatctcctaccaacactacaacccctacctccaccaccaccacc

SEQ ID NO: 67461 - DNA, 350 bp, Zea mays
  Clone ID: MRT4577_161521C.1
accccgggcccatttggaaacaccacggggtttgggattcaagaaaaagaaccaagacccttaagtccaaacttgcctgaaacccttttaacttaccacagaaagaaaaaactggaaaaaccactttcgatgggccagccttggtggttttattttttgcaagggaaccaggtcccttgatgaaataatttgcgggagcccggccctggattcctggggaacctaaactttaccaagaccttcggcccgaacccccctaaggccaattctggcaatattccttacaatggcgggccgttgagccttccttttaaagggcccatttggcccttagcggatccgtttaccag

SEQ ID NO: 67462 - DNA, 443 bp, Zea mays
  Clone ID: MRT4577_161522C.1
aggccggccgggcgaatcctgcgaggagatggcaagggcgtgtggaattacatgttcctgcaccagacgacccccgtacgaacgtatactcgtcgatgacttcccagtgcacttcttcaaggatctcacgtgaatccaagccgcgtgcctctacaggacacgcatctttatggtattcggcatcaccacccgcagcgatatccttgcagcgaccatcggagcgcgcgtcaccacgacgacgttcatcatgacagccatactgctggtggaccgaatcggacggaggacgctctacctatccagactgtcgtccatcatcgcctcgcttgcctgcctcaggcttggcctcaccgtcgcgaagcgctcgatgactctgcagtcggcgacgtgctctatagtattgtgcatcgcaacggtcttcaacttcatagcgtccttctcca

SEQ ID NO: 67463 - DNA, 532 bp, Zea mays
  unsure (1)..(532): unsure at all n locations
  Clone ID: MRT4577_161523C.1
ggggggccaccaaaattgaaacctctttgtttttttttttaaccaagcccaaaagaactaaaacttagcgaattcgttccaggacggcggcaaataatttaaacacaaaaagacaaccggggccaaaaccagaatggatccaggggccaggggccccgttaacattttttttcagcataaacaagcagaaaaaatgggctgggaccaaaggccatcggggaccacccttcatagggaggcaaaaatatttttttttactgggtcttgaacatgggggggatcagggcgaagacccgggtggtggacccccactttttgtcccaccaaaaaacgaccttgataaaaggggcgttaaaggcaatcccggccttggggtaaaaaatgcccgacctgctttcaccgggaaaggcgggggaaaccagatcctcctccgcggagccaataatacccttgggtgggccctcaaaagcagccttaatagcttttttgatttcctcggaagaggcccccttcttnattttgacaggggggg

SEQ ID NO: 67464 - DNA, 303 bp, Zea mays
  Clone ID: MRT4577_161524C.1
ggtttacatgaccgtcatggccgtagatcggtaaacggacggtcgagattaactagtggcgcgtatcgattcggtgtagtggggagccatccgatcttgatcggagaggtgcgctcaggtattgtttatttaaatctggtccgtagatctcgggatcaaaagctgttgtgcgtacccgttcacatgaaactctatctaatctggaccgctcagatcagatcttgcggccagggatcacagatacccctttgcccgaaccatttgtcacatgagcccctcgatttctataaacaataaccgcag

SEQ ID NO: 67465 - DNA, 276 bp, Zea mays
  unsure (1)..(276): unsure at all n locations
  Clone ID: MRT4577_161525C.1
aacgacattgcgccactngtggtaagttttcataacgagaacgcggtcggcaaaataaccataactgttattctctgaccacccgccaaagagaacaactgccagcacttggccctgatagccaaagacaattatactatacaagaatatatggtgataaaaacttcaggcttggagaaatttgaagcgtgcaacgcgccaaggcgagtgacaggcaaggcgactcgggcggccttacatcctcctgaccaacccgggcggttttcaaccttgcca

SEQ ID NO: 67466 - DNA, 495 bp, Zea mays
  Clone ID: MRT4577_161526C.1
ataatagccatttgctatcagtctctgatggagagttgactaatgttccaaactaagtaaattaatttcaaagatgacaattgctaagcttctgcttgcatcagttctcaacagagatctagcgacaaaaaaatcattttgatttctaaatcatgcaatggttgatgtaaacttggatgtggcatgacaacagtcacatacttctcactttttggggttctgtctacctacacctgtaacaactgtcaagctaagtatgcaagataagaatatgagctaggtttgacagagcagacacttattgttgttccagagcgaaacagtatagctggcataaaatagtgacaatagtaagccgtggtgtgtgctttgaatcaaaagttttgtcattgccaaatcaacaagtcaactggagattcattgtctacttcggataaatgctttacttttttataacagagacatacatatttcatttacttctacatgaccatg

SEQ ID NO: 67467 - DNA, 302 bp, Zea mays
  Clone ID: MRT4577_161527C.1
acgcgtctacggagactcgcgcgatgacggggctgtacgacatgctcaagactacgtgggcccgggagaacggcagcgtcggcacggagcagcgcaagatcctggtcggccccatccccggcggcgtcagcccgtccgtcagcgacggggacgacctcgccacggtcaggatgcaggccgacggcatcctctccctcgccgagaacccgaactacgcccacctccgggacatcaccgcgcaggagacgctcagagagcgcttcgacatcccacgcgtcccggcctcatgcacgtccacctca

SEQ ID NO: 67468 - DNA, 177 bp, Zea mays
  Clone ID: MRT4577_161528C.1
gttctagatcgtgagcgggccccttttttttctttttttcatggttaatttttcgggtgggtaactttttgatgaacctagctaggaatggcgagcgcgctggagacgctgtgcgggcaggcgttcgacgccaagaagcaccacatgctgggggtgtacctgcaacgctcctggatc

SEQ ID NO: 67469 - DNA, 1885 bp, Zea mays
  Clone ID: MRT4577_161529C.1
cgagaattcagattctacagttaggctgatgagggaccaaattattatggctcgtgtctattctgcgcttgctaaatcaaagaacaagaatgatctatatcaaaaactgcagacccgaatcagggaaagccagcgggctgttggagatgcttatgctgatgctggcctgcatcacagcgcaccagaaaaaatcatagcgatgggtcaagttttatcaaaggctagagaagaagtttataattgtacggcaatcactcagagactaagggctatgcttcagtcagctgatgaacaggtcaggagcttgaagaagcagagtacatttcttagccagttggctgcaaagacaattccaaacagcattcactgcttgtctatgcgtttaacaattgattactatatcctgccccttgaggaacggaaattcccaaggagtgaaaatttagaaaacccaaatctctatcactatgcacttttctctgataatgttttggcagcctctgttgttgtgaactcaaccataatgaatgctaaggaaccagagaaacatgttttccatcttgtgactgacaagttaaactttggagccatgaacatgtggtttctgctgaacccacctggcaaggccaccatccatgttgagaatgtggacgaatttaagtggttgaactcatcatactgtcctgtgttgcggcaacttgagtctgctgccatgaaagagtactatttcaaagctgatcgtcccaccactctctcagcaggttcttcgaacctaaagtatcggaaccccaagtacctctctatgctgaaccacttgaggttctatctcccagaggtctatccaaagttggataagatactcttcctcgacgatgacatagttgtgcagaaagatttaacagggctgtgggatgttgatcttaatggaaaggtcaatggtgctgtggaaacctgtggggagagttttcaccgttttgacaaatatcttaatttttcaaatccacacattgctcggaactttgatccaaatgcatgtggctgggcttatgggatgaacatctttgatctgagggagtggaagaagaaagatattactgggatctaccacaaatggcaaaatatgaatgaagacagggtcctttggaagcttgggacacttccgcctggcctcttgaccttctataagttgacgcacccactggacaagtcatggcatgttcttggattaggatacaacccaagcattgaccgttcagagatagacaatgctgctgtggttcattacaatgggaacatgaagccatggctggagctagcaatgaccaagtaccgaccatattggaccaagtatatcaagtatgatcacccttacatccgtggatgcaacttgagtgagtagatagtcgtgctgaaaaactgacagatgaggaagagcttattggacagaagtgttccactaccatgtccttgcggtgcgttattcgactcagcaaagtggtactacctcaagctcttgattgctttcctcccctcctctcccaagaaaaattcaccggtggctgttctgacgagtgatgtattattatagcgatgcgttttttaattcaattattagtaatatgcatttatattttccgtcaaaattagcaggagaaaaacttataaaatggatttgtggggctggtgtcgcgtgctgcttagaggtatgcctagagaatcgagtgttgccggaattggatccttttttgtatcagacgataaagtgggagtacaagccaaagcggaaggcatgaatcgaatggattacaggtttaaccctgagtcctgaccaatgtgaaactattttacctacagtatcaagaaatgctggtgtccgttttatgat

SEQ ID NO: 67470 - DNA, 378 bp, Zea mays
  Clone ID: MRT4577_16152C.1
ccttgtttttttttttatttagtgtttttgttttgttgcttgaagtgatactagatcttggacagaaaggtggcctctttcaaattagataagattctttttaacaatggctcaagcgcgggatgagttcttggaacaaagtggcgcgatttgaaacatttaacaatttgaaaaagagcaccgggtttaccttcggggagtggttcacgggggacggccgttaaattttgggcaaaactcctaggactcggaagggcttaaaggacttcgcagaaacatttttcacacgaataacactgagcactttttttttgtaacctgtggacgaggggtgataaacaaaaacggtgtggcagttgcacaaaaggggatgccctt

SEQ ID NO: 67471 - DNA, 776 bp, Zea mays
  unsure (1)..(776): unsure at all n locations
  Clone ID: MRT4577_161530C.1
gaccctcgaggctggccggtgatccaatgcatgtggctgggcttatgggatgaacatctttgatctgaaggagtggaagaagaaagatattactgggatctaccacaaatggcaaaatatgaatgaaggcagagttctttggaagcttgggacacttccgcctggcctcttgaccttctacaagttgacgcacccactggacaagtcatggcatgttcttggactaggatacaacccaagcgtagaccgttcagagatagacagtgctgctgttgttcattacaatgggaacatgaagccatggttggagctagcaatgaccaaataccgaccatattggaccaggtatatcaagtatgatcacccttacatccgtggatgcaacttgagggagtagatatagtcgtgctgaaacactgacagatgaggacgagcctgctggacagaagtgttccatgtccttgcggtgcgttgttttactgagcaaagtggtactacctgaagctcttggttggacataacgacatagttgctcatgtgagagtagaccagacttagacacaatcacacaggaggattcactcacgtggaatacatttgccctacgttgaaattgatgctactttgaaaaccagtctgcaagaaattagtgaggagaagataaacctgcgcacggcggcgtaagagcatctccaacagctcctgaattattagctcctaataccttcggtttggaagctccctaaacacattntaaatctaaataaaaaccattc

SEQ ID NO: 67472 - DNA, 389 bp, Zea mays
  unsure (1)..(389): unsure at all n locations
  Clone ID: MRT4577_161531C.1
aattccctgctcgacgcactcaacctnctattgtcatcgaatatccctctttcatttatcttattaagactatatttaaggacacgacnatttattaaagatgaggctcactacttcttccaccatcttatttcatcaataatctacttccattcaatacaagtatcccaccacaatttgaatttgtaaaacacacttctacattccacttactctactcactttaatattttcaatttcaattattccaaatcatctattcttcattcccatccaaaatccactcttcaaacacctacttatatttcacctaaaatcttatttacaaactaatattatggcaacatatctaactttatttcatgtaatttaaccctctattttactac

SEQ ID NO: 67473 - DNA, 136 bp, Zea mays
  Clone ID: MRT4577_161532C.1
ttgtacttccttgaaaccatcggggacccatgtggcttcttgttggctagagccatggccaaactgaacactagactccaagagtacctcaaaagccgctcaagcaaccagcggtggctagctcggacgagcatca

SEQ ID NO: 67474 - DNA, 587 bp, Zea mays
  Clone ID: MRT4577_161533C.1
agtgctccagtcttgacacgttatgcagaatcaatgaatccatttgcaaagaggaaacttattgagcctacggttcctgaagaaaaggttgctatgaagttgaacaatttggcagtgcccaaattatgtgtgaaactcaacactcttcaattcatcagggatcaacttgatgccatagaagaaggtgtcaaacaatcctgggtctctggcctgtcagctggcagctcctcggctgattgctcttccctggcctgcgggtgggccccttccgctcgtccggcatcggcccctgtgtcggctgaggtcctgtttccctcggttgatgccgctagcacagatctattgtttacaattctttttggtataatttcaaacaacctaggagccagatcactcactctctgacccaagagccacttgtctgttcagaacagagtgtgagctccatttcccacttctgaaatcagaacagtgtcgaaaaaagcctttgcctttcttggaatttggaaagggaggtttgcccaaggacgtcctggatcagatttatgcaaccaaagccatctcatgcgaagggcccgacagcaacg

SEQ ID NO: 67475 - DNA, 328 bp, Zea mays
  Clone ID: MRT4577_161534C.1
tgtttttatatagtgttggtgttttttttttttttttgaagggcaaaactttttggatatcaaattgagtctgggcacacatatgcattaagcacccgagggcaaactggatgtggcttcaactaattttattacatattccactttggtcactttatttcaatatcatctactgctcacaatccggaagagctttttccaacaatttctagctaggcaacaaaaacataacctgaaagttctccccaacctttagagacccccccgacgggaatgtcaacttaaccaagggctggctctgggacaagttacccctggcatttacaaa

SEQ ID NO: 67476 - DNA, 177 bp, Zea mays
  Clone ID: MRT4577_161535C.1
tccagccttcttattatatttttagctttatatatattttatatgtgcggcatataatcatacaacacaaaccttatcttgttgcaaatgcaatggaacttttccttaccataattatgttcatttgcgctagagttctcaagttacaaaactactaaatttatttaattctaaaat

SEQ ID NO: 67477 - DNA, 826 bp, Zea mays
  Clone ID: MRT4577_161536C.1
atcccgtacctcttcccctctccacctatctcggcccagccgccgtaaacccaaccgaggatcccaccgcacctcgccgtcggcggctcaccggagacacgagtgccccgctactgccacccatggcgtcccgccgcgtcctccacctcctaacggcatctcgaggcatctcctcaaccccacatctcgcctccctcgggtggatcaacaagatcaaggacaccttcaccggcaagaaggccgccgactcacccttccccccgtctgaatccttcaatctcaacatgttcgcggattcgatggagatggcgaggaaggtgggaactttcaagaacttcgtgtcagggagatgcagcgaggccaccgtcgtagccgcctgcgagaagcacgccgccgttctccgctacctcgccaccatcgacccaatcggcgagaagctcaaaaccagtgacaaaattagtgccaccaagcattgcaactgcacaattgctgatgtggagcacatactggccaagtacacatgggctaaagatgcccaaaagaagattgaaaaactcaaagaagaaggaaagccagtgccaaagacatttactgaggtgcaaaatctaatgggtaatacagcctttgaccttggaagagctaatctggaaaagagtggtcagataagtaggaatgctctctgcccatgcggttctaagaaacgatataaaaagtgttgtggggcttcttgaggtgaaaacccatgctttccttttggttgctagcgctgactggggcagagttctgctctgctgtgatcaagaaaagcacgtcgggattctcacct

SEQ ID NO: 67478 - DNA, 324 bp, Zea mays
  Clone ID: MRT4577_161537C.1
aagacacgtacccatactcatatacatgttaaaggacaagcctagcctcaaggcgggctcctcatcaaatggctggtctgataatagcacaatcgctccacaattatacatcggggacgcattattatcaccattccctctgatactcgcacttcctaaaactgccacacctggaatcgatgtattatttgctacaacgagaaataatacagtgattatctggcccaccttatccaacccatgaacagaaccaacttaaattaataacgccgggtcttttatacgaccaagttttcttactcttgcatgcaaaataatacctct

SEQ ID NO: 67479 - DNA, 1722 bp, Zea mays
  Clone ID: MRT4577_161538C.1
tctgttagttagggacgcggttggttgagggagaagaagcaggggaggggaagcgatgagcaacatgctgcgggctcgccgccgcctggacctcctgcaggtggtgctcttcgccgctgtgctcctcgtcgtcgtcgccgacgccggcgtgacgagccagtaccggcggaagctggaggcgacggtggagatgccactggacgccgacgtcttccgcgtcccgccggggtacaatgccccgcagcaggtgcacatcacgctgggtgaccaggagggcacggcgatgatcgtgtcgtgggtgacggccaatgagctgggcagcagcaccgtcatgtacagcgaggcgtcgccggacccggagaagatggagctccgggcggagggcacccacacgcgctacgactacttcaactacacctccggcttcatccaccactgcaccctcacaaacctcaagcatagcaccaagtactactacgccatggggttcggccacacggtgaggagcttctgcttcaccacgccacccatgccgggccctgacgtgcccttcaagttcggcctcattggcgacctgggccagacgtttgactccaacacgacgctgtcgcactacgaggcgaacggcggcgacgccgtgctgtacgtcggcgacctctcctacgccgacaaccacccgctgcacgacaacacccggtgggacacgtgggcgcgcttcgtggagcgcagcgcggcgcaccagccgtgggtgtggacggcgggcaaccacgagctggacctggccccggagctgggcgagcacgtgccgttcaagcccttcgcgcaccgctacccgacgccgttctggtactcggtgcgggtcgcctccgcgcacgtcgtcgtgctcgcctcctactccgcctacggcaagtacacggcccagtgggagtggctgcgggccgagctggcgcgcgtggaccgcgccgccacgccgtggctgatcgtgctcgtgcactcgccctggtacagcagcaacggctaccactacatggagggcgagacgatgcgggtgcagttcgagcgctggatcgtcgccgccaaggccgacctcgtcgtcgccggccacgtccacgcgtacgagcgcagccaccgcgtgtccaacgtcgcctacgatatcatcaacgcccggtgcacgcccgtccggacaagggacgcgcccgtctacgtcacggtaggcgatggcggcaacatcgagggcatcgcggacaacttcacgcagccgcagccgagctactcggccttcagggaggccagcttcggccacgccaccttggagatcaggaaccggacacacgcatactacgcctggcaccgcaaccaggacggcgccaaggtcgtcgccgacggcgtctggctcactaacaggtactggatgcccaccgacgacgacatcaactgatgagtgatgatcacatcatgcatatgccatcgccaccactcatcaccggatccgggagttcggccgtagattagatctcgcttcgttctcggttcagttcgtccatgtcctctcatgataattgtgtcagcaaactttcaatttatttggcttgtgctaaagcacaatatatcatatgtttattactgcataagttagattttttctgtgatctagtaaaacttttaaagactcgtctgaaataaacgtataagaaaaaccacggccatgggggtcgagtgtcc

SEQ ID NO: 67480 - DNA, 237 bp, Zea mays
  Clone ID: MRT4577_161539C.1
ctgctgcagctgcgcgtgcagggcgaccgcggcggactgctcggagagcgccttggactgccacgcctccaactacacgcggaggctcgccagaagctgctacagcttcctgaaggctaaaataaaagcaaaaagattgcgcgactggatcaagaaacgtgatggacggacactgactggaggaccgccgtaaccaccagcgttagctggtgcagcgcggagaatgcggacacccta

SEQ ID NO: 67481 - DNA, 1551 bp, Zea mays
  Clone ID: MRT4577_16153C.1
tccggaagccctaggctctactcactgtggaccccaaatccccaactgctcctcttcctcgtcgtcttcctccccgtccccctcccggcctccccctccactagccccaaattctccgtctcctcctgtccctctccgcatccaagggttgtagccatccgcatccaccggaccccaccgggaatggcggtttgagtaagttcccgtaccagggttcttcggtctgggaggccgaagggacaccgggtcggagtgaggggccgccatggcgagcgacgtgcccatgaccccggagctcgagcagatcgacggcgagatccacgatatcttccgcgccctccagtgagttcatgacttccctccctcgcctctgctgcttttggactgcgccctggagaagcagcaggcgtttgacgggtcagcggagagaaatggattccaaaagatggataagattaaagattcaaataggcaagctaaacaattggaagatcttactgtgaaaatgaaggagtgcaagcgcttgatcaaagagtttgatcgcattctcaaagatgaggagtcaaataatccacctgagatcaacaagcagctaaatgacagaaaacagttcatgatcaaagagttgaattcctatgtcaccttgaggaaaacataccaaagtagccttggtaacaacaataagagggttgagctctttgatatgggtgctggaagtagtgagcctgctgctgaggacaatattcaaatggcatcagccatgacaaatcaacaactcattgatacgggaaggaaccaaatggaccaaacagatcaagctattgaacgttcaaaaatggtcgtagcacaaactgttgagactggagctcaaactgctgcgacattaacacagcaaacagagcaaatgaagagaattggtaatgagctagatactgtccacttctcactgaagaaagctagccaactagtgaaggagattggtcgccaggttgcgactgacaaatgtatcatggcattcctcttcctgatcgttttgggtgtgattgctatcattgttgtcaagatcgtccatccgaataacaaaaacattcgagacattccagggctggccccgcctgctcaaaactatcagattcacaacaggagattgttgtgggcagaagcttccataggcatgtgatggctctgaatgtaggcttcatgtggacgcactgcctgcgaagcagcagctatccatagggcgaaagatacatagtaacaattctttgtgcctgtatatctattttgtcttgttaactccgagccctaggtctgtattcctgcgtctggtgtttgtacaccgctggccgtttggctgtgtatatggtacagagatgagatcttaaaaccaaaccagtaattatgacaaatacttgaaagagctacagtaccgaaatactccagttggtactcgctgcacttcatgggcgaatatataaagggtgccggttgggccgtgtaacacattctgaattccgaagacccatgaaaagaatgtgaacgtttaaggct

SEQ ID NO: 67482 - DNA, 2229 bp, Zea mays
  Clone ID: MRT4577_161540C.1
cccttgctttattcaaatgcgtgcggcggccgaggcgtgcgtgcggttattaaatatataggagcagcagcttcatcattctaataatcggtgtcaactacggttgatggtgtttgtatagggattcgcggccccgtaccgtacgccaaagcacaatccatgggatattccccgcaaatttcggtttttttaactagaccgactggatcagttgaagcacaaggaggaaaacagttgctagcccaaacccaaacctagagctcgttattagggggagttgttgcatcttctgtgtgactgtgtgtatatatatccccggcagtgggctgtggcgagttctgttgagggaggagaagggggtggccagagaaaacaggggcagaggaagcagagtagtagagccaaggcgagcgtatcaaatgatggggcctctgcctctccgccgccgcgtgggcgtcctcctgttcctggccctcgtgctcctgggcggcggcggcgcggacgccggcacgacgagctcgtacaggcggaagctggaggcgacggtggagatgccgctggacgccgacgtgttccgcgtcccgccgggctacaatgcgccgcagcaggtgcacatcacgctgggcgaccaggagggcacggccatgatcgtgtcgtgggtgacggccaacgagccgggcaacagcaccgtcgcgtacggcgaggacccggcgaggatggagcgccgcgccgacggcgcccacacgcgctacgactacttcaactacacctccggcttcatccaccactgcaccctcagaaacctcaagcacgccaccaagtactactacgccatggggtttggccacacggtcaggactttctggttcaccacgccgcccaagccgggccctgatgtgccattcaagttcggcctcatcggcgaccttgggcagacgttcgactccaacatcacgctgtcgcactacgagtccaacggcggcgacgccgtgctgtacgtgggcgacctctcgtacgccgacaaccacccgctccacgacaacaaccggtgggacacgtgggcgcggttcgtggagcgcagcgtggcgtaccagccgtggggtctggacggcgggcaaccacgagctggacttcgcgccggagctgggcgagaacacgccgttcaagcccttcgcgcaccggtacccgacgccgtaccgcgccgccgggagcacggagcccttctggtactcggtcaaggtcgcctccgcgcacgtggtcgtgctggcctcctactccgcctacggcaagtacacgccgcagtgggcgtggctgcaggcggagctggcgcgcgtggaccggaagaccacgccgtggctcgtcgtgctcacgcactcgccctggtacaacagcaacaactaccactacatggagggggagacgatgcgggtgcagttcgagcgctggctcgtcgacgccaaggtcgacctcgtgctcgccggccacgtccactcgtacgagcgcagccaccgcgtgtccaacgtcgcctacgacatcgtcaacggcaagtccacgcccgtccggaacgccgacgcgccggtctacgtcaccatcggcgacggcggcaacatcgagggcatcgccgacaacttcacgcgcccgcagccgggctactccgccttccgggaggccagcttcggccacgccacgctggacatcaagaaccggacgcacgcctactactcgtggcaccgcaaccacgacggcgccaaggtcgtcgccgacggcgtctggttcaccaacaggtactggatgcccaccgacgacgacacaaactgacgatcaccgccccagagggaacaaattactgatagatcagcgtagcacgttcctgagctagccccgcccccttttatgttctccaattcagtaatgcaatgcgtttttataattactgatgaatgaataagaaaaatggctacgactgcccgccggtcatcccaaccatcatgcatatgccatcgccaccactcatcaccggatccgggagttcggccgtagattagatctcgcttcgttctcggttcagttcgtccatgtcctctcatgataattgtgtcagcaaactttcaatttatttggcttgtgctaaagcacaataatatatcatatgtttagtactgcataggttagatttttttctgtgaccgagtaaaacttttaaagactcgtctgaaataaacgtataag

SEQ ID NO: 67483 - DNA, 117 bp, Zea mays
  Clone ID: MRT4577_161541C.1
aagctgtgacgcctgcaggaaccgggccggaattcccgagacgacccacgggtaggacatcccgtgacatcccataccactaccagcgatctagtctgtccgacgattcgatccggg

SEQ ID NO: 67484 - DNA, 786 bp, Zea mays
  Clone ID: MRT4577_161542C.1
actctcagagcgagagacccgtccccccctcaccccccgccgcctcgtccgtaccgtccgttcggtccgttagggtttcgtcagccatggcgatcctcggggagctcgggaccgagatcctcatccccgtctgcggggtcgtcggcatcgtcttcgccgtcgcgcagtggttcatcgtctccaaggtcaaggtcacccccggcgccgcctccgccgccggcggcagcaagaacggctacggcgactacctcatcgaggaggaggagggcctcaacgaccacaacgtcgtcgtcaagtgcgccgagatccagaccgccatctcagaaggagcaacatcgtttcttttcaccatgtaccagtatgttggtatgttcatggtcgtctttgctgcggttatcttcgtcttccttgggtcgattgagggattcagcaccaagggccagccctgcacctacagcacgggcacctgcaagccagctctctacaccgccctcttcagcactgcatctttcttgcttggagccatcacatctttggtgtctggtttccttggaatgaagatcgccacatatgccaatgccaggacgaccctggaagcaaggaagggtgttgggaaggcattcatcaccgctttccgctctggtgcagtcatggggcttcttgttgtcatcaagtgggctttgtggttctttacatcaccatcaacgtgtttaagatgtactacggtgaatgactgggaaggtctttttgagtccatcactggttatggccttggtgggtcttcat

SEQ ID NO: 67485 - DNA, 472 bp, Zea mays
  Clone ID: MRT4577_161543C.1
ggtaccggttctgttttcccggcgactgccacgcgtacagcgacagcatcagcctgggagtctgtcctgaatggtatttcacgtatctagttgtgcgccgtgacaggacgtaacatttaagagaattgagtttcatgggataaaatcagtttcatccctatgaaaaaccacgtcaactctttctcaaggttgtgggacaccgactgacacctgcaccattgagaggggatttgtcccatcttcaactgtggtatacactaacttgtattggcattgggctgcatagcctatggcaatagtgaagtgagctcttgcacattgaaccactcataggccagtaaacaagacactgtgcatgcagtgaaactccatgctcggttgccttccatgcatacatcatgtagacttgtttcatcgacgccaggccagtacgtagcacttgtacactagacccacactgcattctctcaca

SEQ ID NO: 67486 - DNA, 1119 bp, Zea mays
  Clone ID: MRT4577_161544C.1
atggagaagagcgttggtgatcttactgcgctcctgcaagctatgcaacttcaaaatgagtccatcaagcaggccttggatgcaaataccgcagtggtgagagatctctcatcatggaagccgcagatcgaaactgaagtgttgaatctacgacaagatgtgggatctctgtctgacaaactggatgaattgatggctattaaggatcaacaccacactgccccgaaggtgttcgatcgggagcctctggagcctgggttttctccgtcgacttctctgggattatctctacatcaggcaactcatggacattctgatcatcaccatgcaccccttcaccagagcaatggacttggggtggtgaccaccctgactccacctccggtcacagttacttccaaaatctcgcctcaggaagcttttcgtaccccacttgttcatccgatagatccttatttgtcaccataccagcctcgtttagctgcagccttaccccaacttatttttcccccatttgatggacatcatccaaagatgtggaaagctaagttttgtgctcggttcgaacgtgatcagcacaactctcttattagacagttcttccatattagacaaaatgatacggaagaactgtcgacatctagtggaaatgctactacagctcttaagcaaccaagccgatctctgattactgggaattcttcatcagtggtggctcagtcagatggtcagcgtaaacagcaaccaatggtagccaacagtttgggaggactgaccaaatctgggactgatgagcgtaaagcttcggttctgatggcttaccgtaaagctaaaggtctttgctacaagtgtggtcttcattggggtccaacacacaaatgcagtgacacagttccattacatatcgtggaaaagttgtggcagctgttggatcagcctgtctctccagataactcacatgtcagtcaagaggattcgggaaatgacttaatggtgttatcctttcatgctgtacatggcactgaagctcctcagaccataaaactgatggcaactttgttttccaagaaagtattgatgcctcggggagctcttcctccttcatcagtcaacccttag

SEQ ID NO: 67487 - DNA, 384 bp, Zea mays
  Clone ID: MRT4577_161545C.1
atggaacctttgggctgatttatgtgcttgtttatgtgcttgaattaccgccggatgtgccttttcttcgtatgtaattctactcggctggttagacttaggacggttgcttcttccgagattccgttcttttgagcgtctctggcgagtcatcccgccctgacccactaggaaacttgcccgtcctacgccgcgtaggtctacactcgaccgtcggacctggtaaatttgtgccggacttcgcactggccagcttccgttcgtaaggcctccgccgccccgccccggcggctgagtactgtacgcctcgtcctcggacttagactcggagaaactgtgaagctgctgctgcctggcctggagtggactcgaggtgatgacaga

SEQ ID NO: 67488 - DNA, 281 bp, Zea mays
  Clone ID: MRT4577_161546C.1
ctcgaggaaccgtgcgctcggatccagcgaagatgcagagttcgttgaagcccgcgggctccggggttcttcagctactggtctgcttccttctgctatacagtcgcccaagcagctgcagcgacataaatgcccacgatggtcagggccaagtgggatcagagcagctctggacgttccaaggactctttgcctcagtcttccagtacttacagcttctattccaccacattgtaccccaaggcatgttctggaccgatgacatagcctatgagttaatg

SEQ ID NO: 67489 - DNA, 218 bp, Zea mays
  unsure (1)..(218): unsure at all n locations
  Clone ID: MRT4577_161547C.1
atgcccattctcgagattcaacttttatttttttttccatgcgacttcacatttttccggtggggtatcttaaaaccaatgaagggccccnatttttacaccgtctttactagtaaatccatccttttccaaaacttaatacaatttcaatacatccccatttcatcttttatatcattatccaatagccatgttcctatcgcccatccaaacacttg

SEQ ID NO: 67490 - DNA, 314 bp, Zea mays
  Clone ID: MRT4577_161548C.1
gcaaaaatacattatcattggttggtagggaaaaaataatggaatacaacgggggcttttattttaaatgatacatcaaacctttttattccaactttgaaggggacatggaaaaccttttattaccaaaaccaactttttgaggccttgcactaaaaaattttctcctaaaaataatattactttttctccaaaagtccaaaaaattgacaccacaccccaactcttaggatcaaaacaaaaaatgaaaaactggaacctgatctttgggccctcattctttacaaaaaaaattgctttccccgatatttctt

SEQ ID NO: 67491 - DNA, 163 bp, Zea mays
  Clone ID: MRT4577_161549C.1
gactgcctcggtcgtatgtttttccacgtcttaaacaaccttgagcttcagcacccctccaggtacagcattgtggccaggtggtgctttagtaagtgtgtttcgtaagattttgatgtatgagaaaaatgcacttgtgatgtatacacgcgaccttgaaagt

SEQ ID NO: 67492 - DNA, 602 bp, Zea mays
  Clone ID: MRT4577_16154C.1
atttttcatcacggaaccctacccgagaatctgtcatggcaagcgatgagtacgccctgctgcgtgtcccgcttcacttttctccctcgatttgctgtctccttctgccaggcttcaccgggcgtcgtatcagataactcggcccccggcggagagcatgccgaagtagatgacggcctccggggccaccatacaactccatcccgactgcgggggtcctccatgatggactgccttgactggtatacacatcacgttgcgatctggtccaacgctgagctacatccaggcgcaactaccacgggctagaaggatatcgatcccccagctcccccaagcgtgaggtctctacaacgcggcaggaccgcgcttgacgagttgctcgacaagcgcgctacccacgagggatagttgttcacccacatgctcagcaaccgcgagatcgacaaggacgcgctcctgggctgccacggctacctcgcgccggacgtacagggggatggtccgcatcatcaacgacactaaggcgcggaacatgctataatggcctgtctacaaaaggaaacgagtcggcttactgcttctgctacactaacctaatt

SEQ ID NO: 67493 - DNA, 578 bp, Zea mays
  unsure (1)..(578): unsure at all n locations
  Clone ID: MRT4577_161550C.1
aggcatttttcatgcaagttgatggcacattaaacaaattgacaacgttgagagagtacatcgatgacacggaagattacatcaatatccagctagagttattcttgagttctggtaccgtctgtctgtcgctgtactcattagttgctggagtctttggtatgaatattccgtatacctggaatgacggccacggatacatcttcaaatgggtggttcttgtatcagggcttttttgtgcctttatatttgtctccattgttgcttacgcacgacacaaggggctcgtcggatcctgaatagctgaaataaccgcgtacttgcttccctcaactgtaaatttgagccagtgagcatcgactttgcggggtgattcatctgttgtaccaaattcggtagtatcaaattggggatgttgaataggaactgtaataggaaaaagttaatgcaaaagaaatatgttatgattgcccccggttttataaagtttgcaccgaaagattcaaacaaatatgttattaaaaaaaaaaaaaaaaaaaannaannaaagcccgggattccggcaccggaactgcagg

SEQ ID NO: 67494 - DNA, 846 bp, Zea mays
  unsure (1)..(846): unsure at all n locations
  Clone ID: MRT4577_161551C.1
gccggccgggttccgggtgncacgttctgcctcccagccacgtcccgctcccccgcagcgccggctcccatccatggctgcgcgacgcgagatcggctctcctttccttgcgcgaagcgagatcggcgagattgagcccacaaatcgcgctccccgctcccccagccgcgtcccgctccccccgcagcgtcggctcccatccatggctgcgcgacgcgagatcggctcccctttccttgtgcgaagcgagatcgagcccacaaatcacgggacggcatggcagccttgccccgctcccccaacagcgcccgcctgcccctttccttgcgtgacttgagatggattggcgaatccatggatccgcgaatcgccggtctgccaaatccgccgcgaatcccgcccgcggaggcttccttctatggcgacgaatcccgcgctccatcctcgaatcaccggcccttcatcacggtgactcctgctaaagggagtggatctgcgcggagcatcttcttatccccgcccacgaccgccatccattgcatcagaatcccaagctttctcccctccgtgcaggtgcagcagccagcgcgcgcgtttctacaagaaacagagagcatccgagtcccaaagctcgcagctttgccagcaagcaagaagacttgtggcatggagctggagcttgggatggcgccgccgagcgcgcgacgtcccacccccatgacgatcgaccagcagcagcaacaacgccacctcgctgaggggtaggatagcaacgggtcgaggatgcggaggtcgcgcgcgttgatgtcgacgncgcgcatgatggcgtacttatcggcgtccagc

SEQ ID NO: 67495 - DNA, 262 bp, Zea mays
  Clone ID: MRT4577_161552C.1
atttgctcatcatcctcactagcgtcattgggaacacttctacacctattttaattgtagggattaggaagtgattaagtgattgtaaaacaatatctgataaggttatattgagcttggtcatgcatactgtaaatggttatatcccatgtgacctgtaagttctacaacatattgtctaagaaactttcataagcaacaaatagcgtacctttgaatcaaatttgatggcagctgctcattttacaagaacaatgcagtg

SEQ ID NO: 67496 - DNA, 2421 bp, Zea mays
  Clone ID: MRT4577_161553C.1
ctgattgctcctgctcgtattcgtagatccacccacccatcgccggccgggacagaaccctacagtacagcaagagatcgagcagccacgcccacgcttctctcctctcctctgaaactatcctactatcgtactttcctttttttgttcccttctctttctctctctcccgtcgtcgccatttatcactccttcctcgtcgaaaatcttctgtcgtaataaaggggtcatccgtccaccgtccacgtgggcggcggttgcggctacggcggcggcggcggcggcgtcagcgggcgccggagatgtgagagcctccgtgccgttggagatggctgcggcgggggcagggaccgggagcgaggggaagaagcggggcgcgtcgcggagctggatcctgctcgacgcggccggggaggagcagctgctggacgccgataagtacgccatcatgcgccgcgtcgacatcaacgcgcgcgacctccgcatcctcgacccgctgctatcctacccctccacaatcctcgggcgcgagcgtgccatcgtcctcaatctcgagcatataaaggcgatcatcacttccaacgaggttctgcttagggatccttctgatgagaatgtaatccctgtagtagaggagctccataggcggttagcaccatcgagtgctactcagcatgatggaaaagagaacttaagtggccagcatgatgtagaaggggcagaagaagatgaatctccttttgagttccgtgcattggaggttactctggaagcaatctgcagtttccttgatgcacgcactactgagcttgagaccgatgcttacccagctttggatgagttgacatccaagatcagcagccgcaacttggatagggtacgtaagttaaaaagcgggatgacaagattgaccgcaagggttcagaaggtgagagatgagcttgaacaattattggatgacgacgatgacatggctgatctttatttgtctagaaagttggctggggcatcttcccctgtcagtggttctggtggaccaaattggttccctgcctccccaactattggttcaaaaatatcaagagcaagcagagccagtgcagctactgtgcatggaaatgagaatgatgttgaagagctagagatgttgctggaggcatatttcatgcaagttgatggcacattaaacaaattgacaacgttgagagagtacatcgatgacacggaagattacatcaatatccagcttgataaccaccgtaatcagttgattcagctagagttattcttgagttctggtaccgtctgtctgtcgctgtactcattagttgctggagtctttggtatgaatattccgtatacctggaatgacggccacggatacatcttcaaatgggtggttcttgtatcagggcttttttgtgcctttatatttgtctccattgttgcttacgcacgacacaaggggctcgtcggatcctgaatagctgaaataaccgcgtacttgcttccctcaactgtaaatttgagccagtgagcatcgactttgcggggtgattcatctgttgtaccaaattcggtagtatcaaattggggatgttgaataggaactgtaataggaaaaagttaatgcaaaagaaatatgttatgattgcccccggttttataaagtttgcaccgaaagattcaaacaaatatgttattaaccaggtgcctctttctgaaatgattttcatagctatgcacaaaaaaaaaaaaaaaaaaaaaaggtggcgttgttgctgctgctggtcgatcgtcatgggggtgggacgtcgcgcgctcggcggcgccatcccaagctccagctccatgccgcaactgtcttcttgctttgctggcaaagctgcgagctttgggactcggatgctctctgtttcctgtagagacgcgcgcgctggctgctgcacctgcacggagaggagaaagcttgggattcggatgcaatggatggcggtcgtgggcggggataagaagatgctccgcgcagatccactccctttagcaggagtcaccgtgatgaagggccggtgattcgaggatggagcgcgggattcgtcgccatagaaggaagcctccgcgggcgggattcgcggcggatttggcagaccggcgattcgcggatccatggattcgccaatccatctcaagtcacgcaaggaaaggggcaggcgggcgctgttgggggagcggggcaaggctgccatgccgtcccgtgatttgtgggctcgatctcgccgatctcgcttcgcacaaggaaaggggagccgatctcgcgtcgcgcagccatggatgggagccgacgctgcggggggagcgggacgcggctgggggagcggggagcgcgacttgtgggctcaatctcgccgatctccccggaca

SEQ ID NO: 67497 - DNA, 425 bp, Zea mays
  Clone ID: MRT4577_161554C.1
gtttcagatatcaagtgatgaagctgttgagacagcaaaacagttggctgttcaggaaggattactggtatcataatttttaatgttgcttccttttgtattgtgcctaggacattgttttgacatattgctgttttttgagacatggtccttaatttgcaaacattcaaatttttagtgcaggcaagacaggcctgctaatgtcctcttttttttctcgctgtgtaattgtgttgctatttaagtgcatgcacttgcttctcaaatatgtggatagaatcaatttgtgggcaccattttttagccttaccttatgtgtttattgaaagttagtattttcttagtggttaacttggacaaacctgatcttttgttcttaaagggttctggtcaattttcactgttatattaaaacaaacgcaaag

SEQ ID NO: 67498 - DNA, 156 bp, Zea mays
  Clone ID: MRT4577_161555C.1
atggccattcatcgcttctgactgcacctgctctcaatgcgtgctctaaccatgagcctccgcctgcagagctcctacaacagctatggaggtggttctgacaaactgtccttctaatctctttgtctccagttgtctcatagatccgcctaaaaa

SEQ ID NO: 67499 - DNA, 186 bp, Zea mays
  Clone ID: MRT4577_161556C.1
aacgcggccgtggccgtggacactgtccgttggctataggttcctggggggccttcagtgagcgcttagcggattcggcttacaagacactgacttttgcttgcggacattctctctgagaaccaactggcacttgctacgtgagggggcgagctggaaagaccacctgtttgcacgactgggcgt

SEQ ID NO: 67500 - DNA, 548 bp, Zea mays
  Clone ID: MRT4577_161557C.1
gaagcaataatccacccaattcttgttccttttctatttataaatcatcactttagcacaaaaaaagtcaaattgtgttgctaaggatgtttagttggggcacaagtggagctgcagcctttatccaagagtaggctctttaccaaaacaagcttattacccagaggcacaattcaccatctatatgaagccaaatgtttgtggcaacctaagctaagtacatgctacaaaccctctgtgcattcaaacaaaaatgggtgtggaacattctatgaatgttgtttgatatgtcatctaatatagacgaaatctaataaacctatcacatgataaaccacgctacctgttctttgcagcaaaatccaaagcttacaggagtgatccaccggctgaaatagtatcacaaacctaccagcatttggagcttatatccccatctgcctcttatgcgcctgaatgagtacaaatccgtagaacaggaatagaaatggtttctcacaggcaacaatcacagtaagaatattagttgctttcagtatggtcgggaa

SEQ ID NO: 67501 - DNA, 258 bp, Zea mays
  unsure (1)..(258): unsure at all n locations
  Clone ID: MRT4577_161558C.1
tggtnngtntggggtggnatgattntggtanntatgaaaaggatattaaggaatggnnanagngaggtggagntaatggaagtttaaggttngatgntgagntgagtaatggagnnaatgnnggnntgattaatgnattgaagnttatnnagnntatnaagganaaatannaaggtataaattatgnagatttgttnnagttagaaagtggtanggngattgaggaagntggtggtnnaaaaatttnaatgaaatatg

SEQ ID NO: 67502 - DNA, 435 bp, Zea mays
  Clone ID: MRT4577_161559C.1
ataatccggagctcatttctttttctctgatctaagtcccgacgtcatatagattcggtggaacatatgggctggtatccgatcgagcgctcgctccaggggagcttgataggaatgtgaacgctgtcctcgcactgcgcgtagactagcgatgtattcctggagctctgcatcacccggttagcttgctgctattctgcggtgtctgcgacccctgacaacatgccttatcgttgagttctcttccgagcaacaatactgtttctattagaattagagattcacatgacaatctacccagtgcatgcaatgacattgcctccaacgagaagagcagacaatggtatagcaggatggagctcaatgaaagcatgcaaagcgagcttatactgcactaacagcactaatactgcagacttatattcatgccaacag

SEQ ID NO: 67503 - DNA, 266 bp, Zea mays
  Clone ID: MRT4577_16155C.1
gggggaattcgtggccgacggccgagctcttgccgaccggttgggcccctttcgccctcctctgggggtttggctccaaccagccgccgtgaaaaatgcgcggaaccagaagcccctatccgccctctgatcgaatccgggaattggcggagaccttggtggcactggaggcgggtagcaacggccgcggcggccgctgatggggtggcgggttcccaagtctgatgccgcggaagcaggtggacccccatcgggtccccgcccgg

SEQ ID NO: 67504 - DNA, 802 bp, Zea mays
  unsure (1)..(802): unsure at all n locations
  Clone ID: MRT4577_161560C.1
ccggccggggatatacgaggtccctgtccactcatcaacagtctcgcaaaccacggttatcttccacgggatggccggaacgtgcgtgttgaagaagtcctggcaggcatgaacgccgttggactctctaaacctcttggggccgccttcgccaatccgatcttccaagagcgtgcgccctcaaaattccacgacgatcaagtcacccaaaggtcgcttttgcagaagttatggcagacagtaactgacccgtggtccgtcctgggaaaattcggtatgcgcaagccagggcaggttgactctgagggtcacagagtcttgaacttggaccagctcggcttgcccaacacagttgagcacgacatatccttgacccgtcgggatcatcaacaaggtgataatataactcttcaaaaagatctcgtcgaggatcttcttgctagctcaaaggatggcaaggttatcacggttgatgatcttgttgagtttcgcaagaaacgcatcgctagacagaaagaagacaacccaggtgttcagtatggagcatttgaaaacgatctcgcttgtgctgagatcgcgttgatactaaatgtcattggtactggagatagggtcgagtgtagttatgccagggctttccttcaacaagaaaggctgccgatcgatgaagggtggaagaaagagtcattcggtatagtcagcttgatcaccgagagggacaaggtcaagaaagagttgngaatggatttncagtcttagtaaatctagtacggccttttctggtctaacttacagcagcgat

SEQ ID NO: 67505 - DNA, 297 bp, Zea mays
  Clone ID: MRT4577_161561C.1
aggaccggaggtacatgggccaggctctagtgacctgcctcggggcgggtgaagccgacatgggcgccctcaccagccgcgaggcaaccaaggcctcccccgcctacgacccaggcgtggactgcgcccggtaacaggaccacacatgaccggctagacgggctatcaggtgactataccactgctccaacagaacaacggtatggtgtacttgaagaacgcgaagcatgttacgaccagatgctcaatctcataggatgggataatcactaccaagccgcggatgaaaaccagaaa

SEQ ID NO: 67506 - DNA, 167 bp, Zea mays
  unsure (1)..(167): unsure at all n locations
  Clone ID: MRT4577_161562C.1
gcggttctttagagggggtgcagtgccaagcaggcgtgaccatgtttttggggtggggccnnctaaatcctcgccgcgtggacaacaccgccatggtcgtcaccatggtctgtttcctctacgttctcacctacatcatgtctcttttctgctacaacccttttccc

SEQ ID NO: 67507 - DNA, 560 bp, Zea mays
  Clone ID: MRT4577_161563C.1
aggggccccaatttcccataattaaaaaaagagaggtccttttcgttcacaaaacaacaggtttaacgccccataatttttatgctacgtactacccccctcaagagcaggggcaattaactacaatacaaacatctcatctacctttccctactgggggggcacgcttttcgccaaattccttggtgggcccacgtcaaatccccggaaaacagtcaaatggtccccgagcaactgaaagggaattatgttgatcactggctggaaacagtctgcaacctggggaactttaatgactttgcacgacccaccgttagggcacacagccggggcatttcccctaaagcacataattttaaggccccccctgcgcgaaaggagctgttggatcaccgactgttgcttgctgaaacacgcgtcgcgggtcgcaatgacaatgatggaggaggtttttgtccacaagggccaggggcccgtgctttatctcgccaggggacatgccctctgtgggcataagcgccacctccttgaccttcagggcgccctccagcgcggggggg

SEQ ID NO: 67508 - DNA, 246 bp, Zea mays
  Clone ID: MRT4577_161564C.1
gttccttaacatctttccgtataccggaaggcgtaagagcttgccgtaatcagggtcatagatgatcccggcgaaaaaatgttatcagctgacaacgggaaaaaacatacaacccgtaagaataaagcagaaagcccggggcgcctacttagtgggcaaacccagatgaaccgaatggggcgcacagcccacatttaatgcgggaaacctactgggccagttccattaaggaaacctgcaacgccc

SEQ ID NO: 67509 - DNA, 384 bp, Zea mays
  unsure (1)..(384): unsure at all n locations
  Clone ID: MRT4577_161565C.1
acaaaaatttatcattttttccccacaacaacncccataagggaagaaatgtgctattttaacaacattcatttgacccacaaacataatactagaagacacagacattatttgccaacctatccaacagtataataccattaccagaagaaaaaaaaaaatactacaatgtactattacacttactctgtcccattgcacaacgtctataaagaacccaaccacttctacttattataaacttcaatcaatcacccgcaccagatcctggacgtggatgaaagcaacatacctctcaatatcaacacttaaacaaatataactaatcacgcacactaatgcttttatttcacccgaaaccaaaaaacctacatcatagattat

SEQ ID NO: 67510 - DNA, 366 bp, Zea mays
  Clone ID: MRT4577_161566C.1
tatccgtgttgccttatcgaacggctgatccagatgtctgcgacggcggctctatccccacatatgccgatggctcctactcctctagctctgtgcagacgccgagctcagaggggatgctgttgacccctgaagaatgctacgcggcgacagagctacaattgcctctcgtgacgagatagcactcctaacggtccctctcctgttaggatgagacttacctgcccgctcagatagcaagttagccacaacaaaacaacacccagcgcgacggcactgcccaggttaagggtagatttccagattcccgaaaccacctccttctcgagggggaaaacggggacttgatgggcccccttgccctgg

SEQ ID NO: 67511 - DNA, 204 bp, Zea mays
  Clone ID: MRT4577_161567C.1
cggcttcggtccgctctcggctctcgcccctcatgcctcagccacgccgcacgctgccggcactctgcgcccgcctccactgctccgctccgcggccccagccacgctacacgcggttacgtcgcacgccagcacgctctgccgcgcgcccgcccgcctgctcggctcctcccctgcgcctgctcggctgctccgcggtgcctg

SEQ ID NO: 67512 - DNA, 211 bp, Zea mays
  Clone ID: MRT4577_161568C.1
gtgggacgtattagagcaggtgctgataaatcaccggcatcgagatcagtcagatggacgattaccttcggctttacgtgcatctgaactctacttgtatcgtgctccagcatcaagcgcatctaggactataccgtatgactacgtcggttggagtctcacatgggaccttcactaggttcgtcatcgattcaggttctgacatgcatat

SEQ ID NO: 67513 - DNA, 209 bp, Zea mays
  Clone ID: MRT4577_161569C.1
caagcgaaccaaacccatggcgtccgacggctggggagtggagactgtgtactgtactaacggcgctgtgagctgctggagccgtacaagcaccccaagtgggcgactttttccgctaaggaggggctgtcccaaatactacggggcggggacatcatggacgtgatgaccatagagcaggaccggatcgcggaggaggacggcgggtg

SEQ ID NO: 67514 - DNA, 559 bp, Zea mays
  Clone ID: MRT4577_16156C.1
ggccgcttttttttttttttttttctttttttttttttttttttttttttttttttttttttttttttttttttttttttttaggagttcgaccaaaagaatgacttattctgtaacaaacctaaatgcactttacaaatgaagttgcgccacaggaaagaaccaaacaaaaaaaagggggggggggaccttcatttggggaaaaaaatccaaaattcctttccgtggaaaccaactaatttgggcgatatgccccctaccgcggcgatagggcaataagttaaccctaacggtcttcaagaactgtgccacctttgccatgctaagcactattgacggggcgttggaagggcccaccaggcccagtttgagcacttgaaccagctaacgttggaaaaaccccctgaagctttgatcgaagaacgcccactcagttcctgcctccattacccctctcacggagtgacggagaaccacaggtggagcttctatcccagggctggctacaggtttcctccccgtcacgatctcaagcaaaaccaccccaaagctaaacacg

SEQ ID NO: 67515 - DNA, 470 bp, Zea mays
  unsure (1)..(470): unsure at all n locations
  Clone ID: MRT4577_161570C.1
cggggcgaggcccaggcggtccgcccacccttnccgccacacccttccgttgaaggtgtctgttccggcacaccatttctccaacattgtgaacggagttcttttagatttccgttttgtccccctacacctttaaccaacggggtttttcggtttgtagaaacacccaatttttaacaccttcacaggatccacacaggcatatcgcagttggctattttactttaatacaccctggttcttccaacattaataagccttattccagcagttcccttgggggcattaattggcccaaaacataagggcccaccacctccaacaccttgtgctagcaaaccttgttgcctactttaagaaccagcatttttttccattcaaccaactagctgcattgaactttgtttttaatttgcaccaccaccaactaccattaagccagttttttgttgcctacccccagcaatttt

SEQ ID NO: 67516 - DNA, 345 bp, Zea mays
  Clone ID: MRT4577_161571C.1
ggccgctcgcaggagcctggtgtcggagagaatgagtcctcgacggccaacgccgggttcctgatgatgcggatcctgcacaaccgcttgacctcctcggcgggcggccacaacaagcgaccgacgtcggacgccagctaggaggagccgatgtcaccgtggctgacgtaggaggacgtgagccacttctcgtcggtgttcgagcggactggcttcacggggcccatcaactactaccggaacatgtaccggatctggacagctggcggcgccgttggcggacgccaaggtgcggtggcccacacacgtgtattgtgggctacagcgacctcatgtaccactact

SEQ ID NO: 67517 - DNA, 223 bp, Zea mays
  Clone ID: MRT4577_161572C.1
gcgtgcgtgagccgggacggaggtatactgtgccgggtcgactttcttttagtcggcggccgccctaagttccgtgggggttaggtaaccatcagcggtgggtgataccagcagcgtgaggggcacgctcagcaagtacgagacatacaagggaccagaatgcgtgcgcacggaggtgacaacatgctctgaaaggtgcagggggaggcagccacgtcttcgg

SEQ ID NO: 67518 - DNA, 1009 bp, Zea mays
  Clone ID: MRT4577_161573C.1
catttacaattcggctcgagcgagacgccagcgccatccaccgcggcaaaagccgagacgacccaggaatctcggcactgtcgcgtgccgtgcccgtgcgtcgctcccctttctctctcgctcaaaagttgctgctggagccatctcccctctctccgacccccaaccatggatgaggcgcaagttgtggagtcaaaggatggaaccatctcggttgcttctgcatttgctggttatcaggaagctgtgcaagacagggatcacaaattcttgacaaaagcagtggaagaagcatatcgaggagtcgattgcggtgacggaggtccatttggagcagttgtcgtctgtaatgacgaagtagtagtcagctgccataacatggttctgaagcacactgaccctactgcgcatgctgaagtaactgcaattagagaggcttgcaaaaagcttgggaaaattgagctctcagactgcgaaatttacgcgtcctgcgagccatgcccaatgtgctttggtgcagttcatctctcccgaatcaagaggctggtttatggggccaaggcagaggctgccatcgccattggatttgatgacttcattgcagatgctctgagaggcactgggttctaccagaaggccaacttggagatcaagaaagctgacggcaatggtgcattgatcgctgagcaagtctttgaaaagactaaagagaagttccagatgtactgatgctgagcagaagagagatctcagatttgtacaatgcttactcataaggacaagaaataatacagtgcccaaatgtccattgtttcgggaaaaaaatctcaattccactgttcaacattttgatgatgcctgaatttcttgttaacagacacaagattgttatttgctgtaaaatgtgcagttgatggaatatactttctccctgtctgatggtgccatttagcacattataaatacaaaaaccaaagtgtccaggtttgaaaaaatttacccaagccca

SEQ ID NO: 67519 - DNA, 393 bp, Zea mays
  Clone ID: MRT4577_161574C.1
ctacagttcagctcagccttggatataacctcgcgcacacagcccatcacaagcacgctacgcagcagccctccagctccagccaagcaaagcacagggtccattgcactgcattgtatcgcagcatttctctgcttcgcttcgcttgcttcaggaaagcttgagctagctcgaagtagaaagacaagacagcaaagtcacgcaccatgagaaccatcgcggcgaggaacacgcacgactcgctctccttctccaggcgccacttcaagtggcccgtcctcggcaagagcaagagccacggcgccgcgacgttcggggacgaggagtacatgaagagctcggaggcggaggacgacgacgagacgaccatggccttctcctccgcctgcccgt

SEQ ID NO: 67520 - DNA, 310 bp, Zea mays
  Clone ID: MRT4577_161575C.1
cacgcgtcaggtgatcatcaacagctagtgctagtcccccttccttccatccatccatggcatgcgtcaacaccttcccgagctgccccactgccaaaataacagaggtcaataccaagtccacgggcagcacccatatcctggcaaaggggtcaccatcactagccttccatttccagtgcatggcgtccactttctccgcgggcaacagcctccggcacgagctggacgaaaacgccgaggcgatcatctcgggggcgtagcccgggaactgctccctcctcagctacgacgacttccgctcctacct

SEQ ID NO: 67521 - DNA, 151 bp, Zea mays
  Clone ID: MRT4577_161576C.1
ttcggcgccgcgtcggtgctccaggccatgcagagaggggcacgccgcgctcgcgtccgccgggctcgccggcaacgtccgggtggccacggcggtgaagatggacgcgatcgagaattcctcgccgccgtccagcggcgtgttcaaggac

SEQ ID NO: 67522 - DNA, 431 bp, Zea mays
  Clone ID: MRT4577_161577C.1
tttttcttttttttttttttttttttttctttttatcccttttttggactttttttttttaatttttttaaagccgggtactttattgaattataaaattgcctttaatggaagttccggacaacctttttgacccccttggtggaaaaatacaattttttttttaaaccgggtccaccttttgttgggattacacttccccttaaaagggtaaaacaaaaaccgcttttacaaatggggaactggtctcactttttcgaattatgggtcaaacttatctagtaggcgggttgcagttcttaatttttttgggagggcgaatgaacacctgcccttcttcttggaaattcacccaatgattcgcctaggttttggtggaattacttgacccagaacggaaaacgggttaaagcacaaattctcagtcttgg

SEQ ID NO: 67523 - DNA, 571 bp, Zea mays
  Clone ID: MRT4577_161578C.1
aactgaaaaaaaatctagcatatgtcttaggcaataaggaacgagagttcttcgtccgtctatacaccgtccgagggggcaaacacttaggggcgcaccaatagcatgaggacctagcatctaacatcaaagctccacaagggagcaagagctaatgcacatgtgctgactggcgaaagctggaaataatatttgccggaggcgtctgttcttcggatgctcccaacctcgagcaccaatcgacgggatcctgtttcttcaactaccaaggaattcgaccctagaagccacgttaactcatcaactactcctgccttatgatgcataccgtacgttttataacgatattactgaaaattcaccacactgcaggccttatatatttaaggaggatcactatacccgctcgtgtctgtataagcaaagagaaccaaatttgggctaggtgcctactgcgataaagaagcacagcaacctcttgtacaagagcaacacgccagatgatggatgggcatcaccatgtgatcggaggaataaacctctgcaccaagtgccttttcccatgtcccgg

SEQ ID NO: 67524 - DNA, 624 bp, Zea mays
  Clone ID: MRT4577_161579C.1
cactagcttctgtttctacggtaactacgcctctctcgttttttagcctgatttgttgcacctagttgagatgggtgttcttctcgttaaagaattgagtttgtggagggtttggaaggggatttctgttgccacatagaatacccacgaatctgttatttttgttcctttcttattccggggattaggtttactagtctcctcgttctttcgcggtctccttgactactactccctcaatctaaccatctgaaccctaattccgttctccaagttgctacctttgtccacctttgtgaagcctttctcgggattgcctcacattttgttttgtggaggtatctttatcactgcaagtcgggtatggcgggtggttagcaccaggtggttgggggagccagcttagaacttcgccaaggcaggaagactgggtatctagacatctccttgaaggatagtatcaaggtgtgatgatatgagtggtttactatggaaattcacaataattcactgcctcctcgctctaggagacaggcagatgttcaaatgcctagttggatagagggcccaactgattctaaggtctctgaggcaagggttttgctggccgagattgctagtctg

SEQ ID NO: 67525 - DNA, 287 bp, Zea mays
  unsure (1)..(287): unsure at all n locations
  Clone ID: MRT4577_16157C.1
ccacattccatccatcttcacggtgaggctcgagcgatccgagaagggaaatcatccgcgtagcagcgacgcatgtttgttctctgatctctctgcatcttttatcagcagtgacgcagcacaacacacgaaatggtccgtttcattatgctcttctcntgggccttttagaatcctcatgataagcgtgttcttgggttaggattcttctgtgacctcatcacacctctcctagtacgaacagacatccacagaacctacattctcttctggatccttgacgtctt

SEQ ID NO: 67526 - DNA, 354 bp, Zea mays
  Clone ID: MRT4577_161580C.1
gttagttggctaaaaaattgttagtgaaattagctagctaaaatagctagctaactattagctaatttgctaaaagtagctaatagctgaactattaactagaatgtttggatgtcttcggttaattttagcagcttcctattaattatagtgcattcaaacacccttgttataaaaagaacattctgaaacgatagttgagatgcaccaataactatgtacgaatattgtctcaaatctgaggcctcactgtgtaggctcctaccgaagagggctgctcggggctgtgaagctcctctgatgattgtagatgtagacagctagggagccccgcaaggatcttcggctggcgtg

SEQ ID NO: 67527 - DNA, 576 bp, Zea mays
  Clone ID: MRT4577_161581C.1
ttttttttttttttttttggacgaagaacacaaattttgcatttcagaattgattgaccagttacacggcacactacaggttcaatcagaacctttggtcacttcaaaaacagagcctacatgctcaagccgtttgctgattacaacagtcagtcatgtcagagaccaactaaggcgtgtctcgtcccctcaggacggacagatgtgcagtctcagtgaaggtatggacgcgtctgaggagaggacgccatgaacgttcgttgtatgccatgaatgagtctgactggactctccacatcaagccttccggacgatcacatggcgctctctcttgtactccacctcgtctctttgatgcataatcagaagagctcttctcacaatggattcgttcattcccatcctgtttagtccatcaatcagccgtcgctcagatatgtggcttccaatgcccattcttcgctttatctgtgcttccgcttgcttgatttcatttgcgatctccggcgacaggttcaaatgctcgttgattccggtctcgcacgtcgacggtggagacattgaacagtctgaatg

SEQ ID NO: 67528 - DNA, 584 bp, Zea mays
  unsure (1)..(584): unsure at all n locations
  Clone ID: MRT4577_161582C.1
ccgttttatcccgacagcaagcggaagcacagataaagcgaagaatgggcattgngaagccacatatctgagcgacggctgattgatggactaaacaggatgggaatgaacgaatccattgtacgaacctgtcgcgtatcttatgcctgaaataattgatggtttgtaagttagaataggaccactcatttttccgtataacaccttcaagctttgtttcaggtgagaagagctcttctgattatgcatcaaagagacgaggtggagtacaagagagagcgccatgtgatcgtccggaaggcttgatgtggagagtccagtcagactcattcatggcatacaacgaacgttcatggcgtcctctcctcagacgcgtccataccttcactgagactgcacatctgtccgtcctgaggggacgagacacgccttagttggtctctgacatgactgactgttgtaatcagcaaacggcttgagcatgtaggctctgtttttgaagtgaccaaaggttctgattgaacctgtagtgtgccgtgtaactggtcaatcaattctgaaatgcaaaatttgtgttcttcgtc

SEQ ID NO: 67529 - DNA, 347 bp, Zea mays
  Clone ID: MRT4577_161583C.1
cccacgcgtgcgtccacgcatacacaagtggcttcacataaatgctacatgggaatgcagctgcaatgaaaggggcactcgcatgaagactgacctagctttactaaagtttttaagcccgctcttaggcatgaaggagatgcggagcctcatggtggggctttacgtcgtccgtaaaaccaccatctttttcaagttcaagctcggcgagatcgacaccaccatccccaccatgggttttaatgttgaaactgtggagtacaagaacattaacttgcactgtttgggaggggggcggtaaggtcacgatcacaccttctttggaggcattactttcagaacaccca

SEQ ID NO: 67530 - DNA, 1032 bp, Zea mays
  Clone ID: MRT4577_161584C.1
ccgggccggcccacgcgtccacacattgcattgtaggttataaaccaccaaccctatgatagcaaagcagatgtgttcagctttgccattgttctctgggagctgataacgtccaagatcccatatgataccatgacccctctccaagcggctgtaggtgtgagacaggggttgcgcccaggacttccgaagaagacgcacccaaagctgttggacttgatgcagagatgttgggaagcagatccatccgaccggcctgctttctcggacattttagccgaactggaggatcttttggcacaagctcagggaacatcgggaaagacggtccaagatccatcaaactcgaacgcgaaagattaacccccatgccatgcacatacctgacattttttctcaatccagtgatttgccacatctaggattcgagttgccaattatgaggaaatttgttttgcttgtgtacattcgaacaatcttcttggggcctattttttatgggcacctcattattcttatacaaaagaaattgggctcgacgcttgggataccacacagattcaggggaaaaaaaaaacaaagacggttcagcaaaacgtatcaaaatgaggctccctgccacaggttcagcaaacaaattccagaggccaaagcatgggtttattggagctatttgacttcctgaaaggagccgcgccttcaaagttgcgttccgttatcatttcagtttgtcgaagagctttggtgcaacacacttgtcaacgcatgaccagtagtcgaagtattggccggtgcagtgcttctgcccgcttccgtcgctcccgactctctcataatcatacaatgtttttacacattgcggcttgcaacgttcctcaaggtaattcttctgatcaacaggttcagcatccgccatggattcgtgattgcaagggggaaatccctagtctcgtgcgcccagtaatgccgatacccggtccagcggttggagggtatggccttatgggttgtcttttttttttttttttcccg

SEQ ID NO: 67531 - DNA, 191 bp, Zea mays
  Clone ID: MRT4577_161585C.1
tcgtgcatatttgggacacaaacacaatacatttgctatctgctgactttttgaagtgacatattacaactgttgtccttgatttacattttattgaataagagtatgtagagataaaattcaagcaatttgattcttttatggtatacagatactgatattataaaagaaatgatgaaaaattgtaaggt

SEQ ID NO: 67532 - DNA, 317 bp, Zea mays
  Clone ID: MRT4577_161586C.1
cttgatgcagagatgttgggaagcagatccatgcgaccggcctgctttctcggacattttagccgaactggaggatcttttggcacaagctcaggtatttacaagctcccatgcacatttgacgcttcaggaacatcgggaaagacggtccaagatccatcaaactcgaacgcgaaagattaacccccatacctgacattttttctcaatccagtgatttgccacatctaggattcgagttgccaattatgaggaaatttgttttgcttgtgtacaaaaaaaaaaaaaaaaaaaaaaaaactagttctagatcgcga

SEQ ID NO: 67533 - DNA, 295 bp, Zea mays
  Clone ID: MRT4577_161587C.1
acaaaccacacacaagggggataaaataaccatgaagaaaatcggctccactgtataattcaaataactaaccgatttacacaaaaaaccaaaaaggaattggcttgcaagcaattaacaaaaagaggcctgctaataacctcaggctactacttaccaaggcaataaagaatgaatgggccgacgtaaactacaagcacaaaaaaatcgccaaacactgtctagtggctaataaaaaaaatctgacacgctcggattcactatgctgtgggaggcaaccctttacaaaactcaa

SEQ ID NO: 67534 - DNA, 962 bp, Zea mays
  Clone ID: MRT4577_161588C.1
acccccattccatgcgcggtgcctgtgtttttttctcaatcccagtggtttgccgcatttaggattgaagttgccaattatgaggaaatttgttttgcttgtggacattcgaacaatcttcttggggcctattttttatgggcacctcattattcttatacaaaagaaattgggctcgacgcttgcgataccacacagattcaggggaaaaaaaaaacaaagacggttcagcaaaacgtatcaaaatgaggctccctgccacaggttcagcaaacaaattccagaggccaaggcatgggtttattggagctatttgacttcctgaaaggagccgcgccttcaaagttgcgttccgttatcatttcagtttgtcgaagagctttggtgcaacacacttgtcaacgcatgaccagtagtcgaagtattggccggtgcagtgcttctgcccacttccgtcgctctcgactctcttgacgcatttctcataatcatacaatgtttttacacattgcggcttgcaacgttcctcaaggtaattcttctgatcaacaggttcagcatccgccatggattcgtgattgcaagggggaaatccctagtctcgtgcgcccagtaatgccgatacccgatccagcggttggagggtatggccttatgggttgtctcgcggcccgacgcggggcctcccgggccggccccacgcgtcataaccccaacttcttctgagcggccggctgcgggcatgttcttgagcctgcctgtattctactccgtgtgtgttgagccatatatctgatgctcaaggattggttaatttgaacaagtggtgcaactgcgcgtgtacatggatttgctcttcctctatgtctctgtcctctgtctccggttactttccctgtttcactatgccatgcacatagacattgccatgttctgctgccagctcagggcttgtgaataac

SEQ ID NO: 67535 - DNA, 373 bp, Zea mays
  Clone ID: MRT4577_161589C.1
ataattacgactacgacggcgaaaccggcgttgacatggactatgcaacctacaaatcccgtctcaagagcatgccaccgagtgagccgcagactccgaatcgtagccgtagtaggagtagcggcagaagagcctctgattcctggcagggattcagcagcggcaatttcctgaaaccattgacgtctggaggctcgggaccatctaaagacgagctcagcgagctgaatcgccggattgggactttctctgaaatcgagcaggaaaaagacattaaccgtcgttaactaattcgccatatctatagaattcattggtagcaactagtcatacatacccacgaatggattgttttccagctgtcgttggcttt

SEQ ID NO: 67536 - DNA, 443 bp, Zea mays
  Clone ID: MRT4577_16158C.1
gtccggtgactcctacgggcacagagagccaggctgcgcgccccctccggtctactgggccgggggcgggtacggtaacgtcgtacacgttgcgcacgaggtctgtgaccagaggccttactacggtgtggggcggtggcggtcttggtggcgcctaccgaggcggtggctgcgattacggccaccaaggccgaccgcaccactgctgcggaggatcccaggcgggcacgagacttcccgctccaggatgcggaggcggaggcccctcctgtgaggcatcagacttacaggatctactgcagagctgggtgaggaccattactggctagactatcgcgactggaggggctgcctcgtgcgcactgaccgtgatgacgacccgcatccctggcatcagggacattaagtacagcaccagggtgaatgatgaggaacgctacgct

SEQ ID NO: 67537 - DNA, 389 bp, Zea mays
  Clone ID: MRT4577_161590C.1
tagacgcgcgggcaggcgcgcgtgcggctagggactattgagacagaccgcgtgtccacccactacaactcgatgatgacgctgacgcccggggggcatgaagaagaccgtctagctgtacaaggaggcgcgatttacctgaccggggcgggccaacatgctgtgcatgcacggcaaggcggcgctgcctaagatgcacgtaggccaccgcataaggaagactgaaggggactactccacgcttacaatggacgccaaaggatgcggcgcggctggggcgggctgagccggcgctgatgctggaggtggtggcttacatactggacgtggactctgacaagatcagtctgtggtggagcaaggcccactactacggggacacccccctc

SEQ ID NO: 67538 - DNA, 355 bp, Zea mays
  Clone ID: MRT4577_161591C.1
tgtgacatcagcaagctgaacatggccgactccatggccagggccaaggtcctagactttcacctcctatcaccgaattctgttttatggcaagctccatcagcccaggcacgaaggtgttctgagggctttcattgacgaacgggacaccctcgtggacacaggctatcgcatacaaggtggatggccagatctctgcttcgttcttgtccaacgaagccaggagctcgtccatggtgtccttaagccctgcaaccacgttgctgtacctttcggagttcgtcgtacacatgacgactaccttgttcaccttgtttttttccttgaactccttgatgtccttctttgactggtt

SEQ ID NO: 67539 - DNA, 274 bp, Zea mays
  unsure (1)..(274): unsure at all n locations
  Clone ID: MRT4577_161592C.1
cgactctgcaacttcataacagtttattttctcggacgaaaaatcnggaagggcggttcagattttattttgcaaaaactgataaaaccttaggctgcatgtgcaggcacctgataccgactgacccatatgacacaagctagaagaatgggccactcatgccccaggagcacacacgcttcatgctaataccacatctaaacgaccacatccggtcatccaccgacgggtgctcaatcagggtcacattcttgtcacaagggaaaataggcat

SEQ ID NO: 67540 - DNA, 437 bp, Zea mays
  unsure (1)..(437): unsure at all n locations
  Clone ID: MRT4577_161593C.1
gcaaaaganaaaagaaaagagcacacccgggactctgttctcgtaaatcaaactcgtaaatggggattattaatatttaccaagctatttggtgtagttaattaagtttcgattaagtgaatttgcttgaattaaaagtaattaggtataaggactaaattgtatatagggtgaaaggtaaattatagattaaagaaaaatttaagggactaaataagcaattatgccattgacattaaatgaagcggcgtaaggatgaaaatatttataaaatttaaaggtaaaatatatattatttttagggttttgtgaggatgtggtagttgtttgantagnttgaatggagtggtgtgggttatancatattatattatattatattatattatattatattatattatattatattatattataatatattatattatatt

SEQ ID NO: 67541 - DNA, 431 bp, Zea mays
  Clone ID: MRT4577_161594C.1
gtatacatgctcgagttttcaagcaaactgtgtcagctcagaacaacatacataatgcacacagaaatggagcttttggaccatctgtggtatcctcagtttctcatcagaatggatccattgtaacaggtgggtctaacatagcacaggcgcagccagctcagagtattttccatccagacccatccaccgtttctgtgacgtcaggatcattttgtccatcttctctaggtaaacaccaccttcaggtgtttccggaaagatctggaaacatgagtggtgtcaaggcagcaaaattgtcttcttttaaaccacaagcttacatgaacctctacaatcatggcgataatgcagataccgctgctgccaatatagcatgggattacatgcgctgacagtcaagagtcagcatcccaactgactgcgaaaca

SEQ ID NO: 67542 - DNA, 575 bp, Zea mays
  Clone ID: MRT4577_161595C.1
cccccctcgagtttttttttttttttttttttttttttttttttttttttttttttttcggaaaaaggggggataatcaaaaaaaaagggaaacaaaacacccgcactaaccacgaaacggggccactcaaaacacaacccgctctttgcatagcacagggacagcatcaaattttccgagtttgcgtttgccagcgtacccgattccattggttacacaaaggtatgtggggcgagctttttcctcctcccaggccccagggaaaacatccagcaagcgctgggcaggatcaggaatccatggacagccctccattatggggctaaagctgcctccttgaatatacgggggagcacttcatggatgccgatgtccaaggcctaagggctcctgcacaagggccgcccctttttttttgggctgggcacaaaccatattttcctcagcgccggggcctcaaattgcacaaaaaacccgtcgttctggtaaagcttccacttcctcgacccttgccctttccaaacctgggggtaggaaatgatgctcttaggggccaccatacaagcagccttcg

SEQ ID NO: 67543 - DNA, 168 bp, Zea mays
  Clone ID: MRT4577_161596C.1
gcaagccaatcgggggcggtggggtgttttctgtatatggtgcggcgaagcagctgcaccaggttcagataagtgccgacctcatgaaggctgtcgttcttaatgatgtgcatcaggatgccgtgactgttaaatgaggactcttaggagtagatgctgacagtgggg

SEQ ID NO: 67544 - DNA, 269 bp, Zea mays
  Clone ID: MRT4577_161597C.1
ctgacacatcgttcgacactctctaccttacctaaacacgccttccatcactactatggccggcttccttttgcgccaccgcatccaaaaaaagatagatacaacgcgctccaggagctgaaggccaaggcccagacaggcccaattggatgctctggtttcataaaaagtgcatagaaatgagcattggccacccacccatttgctaaacacctaatagaacgattagacagctggtgacacgtggtgcgctccactatatgatatat

SEQ ID NO: 67545 - DNA, 404 bp, Zea mays
  unsure (1)..(404): unsure at all n locations
  Clone ID: MRT4577_161598C.1
cggcaagccccgagagggaacccacggcacccccggcggagaagaagccggcggcgaccacgcccgcagaggaggagacgagcccccgcaggagaaggcccccgcggggcacaagccgaaggcggacaagcggcgaccggcgggaaganccgccgccagggaaggcggcggaggcaagaaggggcggcagaaggccaagaagagcggggcgacgaacaagaccaacagcgacaaggggccgcagcaggcgcccccggagagcggaaaccccgccaaggccagggccagcacgaacaccaacaacgacgaccgcaggcgagaagcacgacggcgaggcggacaaacgcgcccgggacaacaagcaaccgagcaccaccgcccgggagangcagaccaccgaccgc

SEQ ID NO: 67546 - DNA, 185 bp, Zea mays
  Clone ID: MRT4577_161599C.1
gaagaccatccacgctgcaatttctcaactgcaagacatgaaaagcagtgggaactaccatgcaagaaccgtgtaaaattacctatcaatataaagatttctctagaacatcacgattttaaatatatacaaccacgggttcaatgtggaaattgaacaccttggaatatacttcttcctacgag

SEQ ID NO: 67547 - DNA, 523 bp, Zea mays
  Clone ID: MRT4577_16159C.1
caaattaagtgctgaattattacatagattggagtttttgagtagcaattaagagttcccaagaaaaagcagtggataatcgatgtcgtcggtatcgaggaaatgggcaaggcctagcccactactcctcgtgctcctctcctaccggagcaacatcccactcgaccgtccaacccggtggcagggtggtaggccaagtcacaccatcaaccatttcctgaatggtaccttcaattgctggggctgcggggagatcctcaacagtagcctcggaagcttgctcctggtcctcttcttggacagatccttgctcggggatgagcacgtactctccgtcggcaagattacaatcggcggcgagattgctccggtgaggtggtcgaggacgtaggggaggtctcggggatcacagcgatgtgcgagtcgccgtcggggatggtcggagtcggccagtccacgtgcgcaggcggggatgctcgtcggtggcgaggagtccggccggagagcttggtccacgcgtgca

SEQ ID NO: 67548 - DNA, 418 bp, Zea mays
  Clone ID: MRT4577_1615C.1
taaaaaaaaaaaaaaaaaaaaaaaaaaaaaaaaaaaaaaaaaaaaaaaaaaaaaaaaaaaaggaaaaaagaaaaaaaagggggcggccgttctaaaagagaaccaagggggcgcccccttgcaggccccgggttatctttctctatagtggcacctaaatacatttttttggggggcccataacaaaagtccagggggggaaatttttaacggtccccactggaaaaacctgggggtacaccaccttattgccctgggaggaaatccccatttggccagctcggttaatccttacaaacccttgcccatcctccctggcaaaagggaccccacctggaacggcgaatgaaacccgccctgtgggggtgcttcaagcgcggggagcggggcggttccccccaccttaaccccttctttt

SEQ ID NO: 67549 - DNA, 370 bp, Zea mays
  Clone ID: MRT4577_161600C.1
ctgcatggcggctggagggtaggtgggaggagagaggaaattggaaaagaaaacctagctctatagtatgtgggaaaccctaacttagggttgggagttgcattaatagaccaagtgatgttggacctggcccattacacatgggtatgaatgtaattacaaggggctaaccccaaaaccctaaatgggattctaacaaagttgttttttccgttggtgttaatcatataagtattagcatttcagttgaattttctactctcaattatattgaatgaactggtttacaattctagtatgttaattatctttgggttgatgctttgagcagattgccttgcacatatatagagtcttctctatgtttttt

SEQ ID NO: 67550 - DNA, 215 bp, Zea mays
  Clone ID: MRT4577_161601C.1
ctcggtacccctgtataatactgttggggactcgctcactggcctgcttatactggaaatgaggaaacacagctttggtccttgcattaagatactgagttcctttagaaaaagactatataagcatggggctcttatgtggaaaagcaaaacactgggaccaatttatacgttaaaatggaatcctcgttctattagaatggaacgactaacat

SEQ ID NO: 67551 - DNA, 247 bp, Zea mays
  Clone ID: MRT4577_161602C.1
gagacgggcacgggatgaaaaaaatctaaccctagcatccgcatccctaggcttcggcgaccgactcctgtctggtgccggccccatggcgacaaggccctatagatactctcgactaatcaagaacaagccataccccaagtccaggtactgccgtcatgtccctgacctccctaataagagctacgattttggcatgaaaagaaaggctcctgatgaataacactactgattgcgccttggctct

SEQ ID NO: 67552 - DNA, 455 bp, Zea mays
  Clone ID: MRT4577_161603C.1
aattcggcacgaggccactcttggcgagctgatatgatcaccactatatgtgcttatacttactaaaccgaacggctacaattaggtagatgacagtgaaaaagctgatcactaggagcggcgttggtaggcaccaggaggggcatgaccacggcgcactaaagtgcgggtgctcacatatacacttctacatcttgtattcaacaaccaggacttcaacatggtcatcacgaactggaccacgggggaccccaccaccccggtggtcctgatcatgaaggacgggtggaacgccttctggctgcccgtcgggcccactgtgcacgccaacatctgccagggtcacctgaacactaacacgaccattggggccttcatgaccgggaggatcaccctgcagcgcaggatcctgtacttggagctgcactacgagacggccatcaagcccatctaca

SEQ ID NO: 67553 - DNA, 198 bp, Zea mays
  Clone ID: MRT4577_161604C.1
tcgtatcctcttatcctgtacaccttccgccctttatttttttttttttatcttttcattattttcttaatttttttatttttttctccaactctccacttttttttatttaaagctactacaaattaccaccgttgtggtatgtgatgttcaggtcctttgccggtgcacaattttggcactgtttggtttccacct

SEQ ID NO: 67554 - DNA, 373 bp, Zea mays
  Clone ID: MRT4577_161605C.1
ccaacgacaatgagagaatttactccgattcaaaagggcactgggcacccagccaaagaaagtgacctagcattccatacaggcgacaactccacatgatattctgcatgtttattgccacagttccacacatggtataattcccatcctctccccaaaactggtttaatgccaggagttcggatcatcctctcaacagatgtaatggtttaattccacgaatttcggatctggcagttttacagctacgtaaacacactcaatccagcctcctaagcaagtacgcgacctcaaccttcttggttagcggcatgattctgtagctgtacagctcggcgaccaagctcgggctgatcttgtagactggtgggct

SEQ ID NO: 67555 - DNA, 1390 bp, Zea mays
  Clone ID: MRT4577_161606C.1
ccgggtgcagctcgtcggcgcgaggatataacccacgcccgcggtccaaaatccaaaccctgcgagtgtatagaagaagaaccccccaccccatcgcaacccgcaatggtcgcggcggaagatccggaacacttcttcgccgcctcgccgccgctgcgcgacgctgccgttgtcgccgccagcctgcaggagttcgtcgcgcgcaattcgcacgcatcatcagacggcgtcgggcggcggcgcatcgtctgcgtcacgtcgggcgggaccacggtgccgctggagcagcgatgcgtgcgctacatcgacaacttcagctccggccaccgcggcgccgcgtccaccgagtatttcttaaaggctggctatgcggtcattttcgtccatcggcgagggagttgccagcctttctccaggttcctgcctgatgactcgtttctccacttctttgatgtcacaacagattcgaaggttcaagtggccgagtcccaagcaacggtggtaaagagagcaattggggattatcgcaaggctactgaaggaggctctctgctgaaactcccattcaccacgatatttgagtatcttcagttactgaagatggttgctacatccatgagctgtgtgggtctccacgggatgttctatctcgctgcagctgtgtctgacttctatgttccatgggatagcatggcaaaacataagatccagtcagccggaggcccactggatatgaagctcagccaggttccaaaaatgctccccgttctgcgcaaccattgggcccccttggccttctgcgtatccttcaagctggagacggatccagacattctagttcagaaagcagagacggctctgagcaagtacaggatggacgttgttgtggccaatctgcttgcaacgtacaaggaggaggtcgtcatcatctcgaatggcaaaagcaacaccattcgaaggtgcagcaaaggcgaggatctggaggagcatatcatcaagctcctagagaagagccactccaagtatatttacagcagcacggaagggtgcagtaagaacgactacgaaaagcttataccgttaggcatcaaaagtctggcttaagggaaacattgattggttctggagctcaaattaatagggaagccccatcagcactcttgagaaattaaagctctacatgcagtgtgtacatttgctggtaatgtatatgtaagcaggactaataggattgttctgttctcacacacgcacacaaacacgccaccaaaaaagatggtccaaagttgtatgtatcgtttgctattcacctgttaattaatggctttgtaatcagaaatgattattgttcaaaaaaaaaaaaaaaaaaagcggccattccggcctggac

SEQ ID NO: 67556 - DNA, 406 bp, Zea mays
  Clone ID: MRT4577_161607C.1
ccttagacagccttatgttcacatgaaagatgaatcctattatacacactatacgcaaacattacaatgactttcagctactcctataatctgtcagcaaggcgaccagctacagtccaaatgggaaaatataaacaaaaatacacattgcatccttaaaaatctactttaatactggcataaaatatataatgcagactaaactatgatttctgtccactagaggatgtctctcactctggtcctttaatcacgaagtctctgaagactctgaacctgactgaggaaatgataaacagatacctctaaataatgctgaaagatgacgcttataactttgaataagcgtcatatctcgacataatttaaagggtattgaacatctcatacagacagagttcactgg

SEQ ID NO: 67557 - DNA, 806 bp, Zea mays
  Clone ID: MRT4577_161608C.1
ctccccgttctgcggaaccattgggcccccttggccttctgcgtatccttcaagctggagacggatccagacattctagttcagaaagcagagacggctctgagcaagtacaggatggacgttgttgtggccaatctgcttgcaacgtacaaggaggaggtcgtcatcatctcgaatggcaaaagcaacaccattcgaaggtgcagcaaaggcgaggatctggaggagcatatcatcaagctcctagagaagagccactccaagtatatttacagcagcacggaagggtgcagtaagaacgactacgaaaagcttataccgttaggcatcaaaagtctggcttaagggaaacattgatcggttctggagctcaaattaatagggaagccccatcagcactcttgtagtgtttggatggatggacgaggaaggatgaagagggatgggataggatcattctaagttgacccatgtttggtttggaggtctagagtcacggtcaaggaatatttttcaaaaatagtggatggggccatcccttaaaaaataagggacggagtcaactcagagttgatcccatcccatctctcgttgacaccgaaccaaacacatcataaagctctacatgcagtgtgtacatttgctggtaatgtatatgtaagcaggactaataggattgttctgttctcacacgcacacaaacacgccaccaaaaaagatggtccaaagttgtatgtatcgtttgctattcacctgttaattaatggctttgtaatcagaaatgattattgttcaaattgtttctt

SEQ ID NO: 67558 - DNA, 477 bp, Zea mays
  Clone ID: MRT4577_161609C.1
gtcgcacgcagcgggctactgcagctgagctagccaacgccgaggcccctagtgactttgctcccccgacaccgtactggccggataaaccagctccaaacgagccatggcaatggaaccacagcacgtgagcccgtactagagacatatggcctccgcggatcaaggctgcgtagacctcctcggggcggtctacggccccggaggcagtgcactaggcgccgatatcgaatcagataccaggtgcaaggaccatgccgaggcagcggacgtgtgagggcactggaagggcgggcgccggggaagcttcaggtgaacctgcagcgccggccacgctcaccgtcagagccagatggccgatgccttccgggggaggagaccatgtgacagaggtcagggcgcaaaggcaagacagggcacatcccttgcataaaggcctgagaatcggactgggttactactggggttgcactttgg

SEQ ID NO: 67559 - DNA, 529 bp, Zea mays
  Clone ID: MRT4577_16160C.1
cctccccccgtttctcttggtttcatgccttgttattatttttaattttttttattgttttttttttttattttattttattattttttttttctttttttttgtttttcacagttggggggggggggtacttagggctagtagaaaaaaaatatagcaagggaagggggtttgaaaagcaacccttaaaacgccttctgggacctggagggggggaggaggcagaaggggggggttcaacctacaccctggttgacccactggccgccaaagaggcgttaaaaaatttttggaaaccactgttgctggctcttgacaagggagagggggaaatccggcaccaccccccccctttttctttagaaaaattttgagaacaaaagcggcgccagaaaaagggcaaaaagggggggtttgttatttaaagaacaccaccgggggtcggaaaaaattggatcagggtcaccaccggacaagggggaagaccagagaattcccgaaaggaacccccaaccggcccccctttact

SEQ ID NO: 67560 - DNA, 127 bp, Zea mays
  Clone ID: MRT4577_161610C.1
cccacgcgttcgcgcacgcgtaggcaaacttttgagactttatacaacatgacctttaatagcgaatttgagcaatattatggggaataaaacattagatttactcatcaaacacaacattaaaatg

SEQ ID NO: 67561 - DNA, 219 bp, Zea mays
  Clone ID: MRT4577_161611C.1
ggaagctttgaatgtgatgactgacctgaagaatgcacaagagagaagagaggagaagagaaggagaaggctagaagactgaggggcagcagctgcttggagtttgcgtccttcccgtccacgcagtgcagctcccagtgctgcagtgtgcgtggcgtgggcatccgtccagctgactcatcgtttgacaaaccgttgttttatttaaatatccacagt

SEQ ID NO: 67562 - DNA, 403 bp, Zea mays
  Clone ID: MRT4577_161612C.1
ataaaaaaaaaaaaaaaaaaaaaaaaaaaataaaaaaaaaaaaaaaaataacaacagggaaaaacaaatagttgataaaaaataatatattttgggtcgccccttctaaagtgtccatgcttacttgcccatccatccgaaatgataatttttatttggtggtatctatataaaatctatttgcctagtgtttataaaaattaggctggataaaccgtgtctttctctaactatttatgatgcattgaatttttttttatataagatcttgccatagcaaaaaggcccgaacaaggtcgccttctctacagtttccaagcttaattgcgcattggtaccccctcataactgttcttttaagcacgtaagttgagttgattacccgcagttttacaacttcatt

SEQ ID NO: 67563 - DNA, 448 bp, Zea mays
  Clone ID: MRT4577_161613C.1
agaaaaggaaggaagaagggcctcctgtctcacttccctcagatcctcgtccgtctctgctctccctcctctctctctctctacctagctagctagctagccgttcctgtagcgcggcagatatggctgcgctccaccacggcggcggtggcgctgctgcatgctcctcctagtcgctcgccgaggaggcggacatgtcgatcgagtcctacagggagcagcagcgacgaggacgcgcgacggatgtacactgcactggatggccagcgcacgggcggacctacaacgccactcatgaggaggatcacctgacacaggcggatcgtcacagccctcgtgacatccacacacacaacatcgtccgcgactctacagttcactatgagcgtctaagccttgacaccttgagggatccacgagggactactgccagagcctacaccagaga

SEQ ID NO: 67564 - DNA, 696 bp, Zea mays
  Clone ID: MRT4577_161614C.1
agtcacggtctctctccggccgggacggtctcaccgtctctctcagccagtcaccaccagccgcctgaaaccaagcgccggcctccaaggctccaatccctccatggctccatctccatagttgctctgcggctgtacgcctgtaccgagcaaccgccggcgtcgatcctgccgtccaggcccgtcttgccgcggtgccgcctccgtccctgcccagctatccgaccgccagtctctacctcgttcccttctatctgccctgcaggtttctccaatctccaacactgccggccgcggcagtctgcaatctccttggcaccgtgccaaggtttggattactgaccttgtgttttggggtccatggctatagcactaaaagagcatccgcctttggccttgccgcacgacattccatgcatgctgccatgggttgatgtgattgcttgtgggtgttgattttcctctgattgtggttgtttactctgctccgtgctgcttctgctctatagtttatatgctgctagactgctgctgcttgtagtttaggtgtttgatgaaatgcccgttcaaggtaaaattctagttaacgtgcccatgctgctttgtttttttggcaattatgctgtgatgttctagcttcatgttcgtgtaatagatgctgtgggtatgagaagcggaaaacaagattagtcaacc

SEQ ID NO: 67565 - DNA, 248 bp, Zea mays
  Clone ID: MRT4577_161615C.1
ctggggtgcagagcgcagagatggccaccgacgacggagcaatctatgccacctctaaccgtgttacaacagctaggttgccgtgctggagaccgcggcacatactctgaacagaacagtgcagagagagaacagcggagcccgctactacactgagactctgaacacgctgaacagattgagcgacggactctacactgctgacgacaggcgagggaacttccatcacacgagtgagctccgcgcag

SEQ ID NO: 67566 - DNA, 585 bp, Zea mays
  Clone ID: MRT4577_161616C.1
ccggccgggatctcttcttccactgcctccccaccacttcgtcctcgccggctcgcaactccttgatggcggccacggcgagtctcactaccactgctccctcccctccagctctcctcaaagcatcagctcctttgcttatctcctttcgccccgtctcccgccactgcaagaacctgtgcatcaagaccaaggccacagaaaatgatcagtctgctaaaaagcatcagaaggtgaagagcattctttgccaggactgcgaaggaaatggggcaatcgtatgcaccaaatgtgaaggaaatgggaggcaagcgtgaaatcctatgtgggaactgtaatggtgctggcttcttgggtggatttctaagcactttcgatgaaactgcgcaatagtcatcggtttagcactttcgatgaaactgcgcaatagtcatcggtttaatttatgtttaagttacattgagggacccataatatatgtatcgtgttccatggacacataatcatattatataaaataatatttttaatgaatactccttcgtccacttgatttcaaaaaaaaaaaaaaaaaaacccgcggcc

SEQ ID NO: 67567 - DNA, 641 bp, Zea mays
  Clone ID: MRT4577_161617C.1
tgggttcgttccttccttccttccccgaaataaaaaatagacagagagccctcctgctcggtcgccctctgcccctgcctccgtctccgcgtgcgctccccacccccttcctcccccgctcccggacgtgctctgcttctccagatccgccgccgacgctgctgctgccgcgtcctgagaaaatggcgatgatggtggatcccccgaatggcatgggaaaccacgggaagcactactacaccatgtggcagaccatgttcgagatcgacaccaagtacgtgccgatcaagcccatcgggagaggagcctacgggatagtttgctcctcgatcaaccaggagaccaacgagaaggtcgccatcaagaagataaacaacgtctttgacaaccgcgtggatgcgctgaggacgctgcgcgagctgaagctccttcggcacctgcgccatgagaatgtcattgccttgaaggatataatgatgccgatacataggaggagcttcaaggatgtctacttggtctccgagctcatggacacggatctgcatcagatagtcaagtcgtctcagccgctgtccaatgaccactgccagtatttcctttttcagctgctccgaggactgaagtaccttcattcagcgggg

SEQ ID NO: 67568 - DNA, 805 bp, Zea mays
  Clone ID: MRT4577_161618C.1
tgcaaacataaccgcccgtgccctcccctctgacctcttcggcttggcctccaggccggccgggatctcttcttccactgcctccccaccacttcgtcctcgccggctcgcaactccttgatggcggccacggcgagtctcactaccactgctccctcccctccagctctcctcaaagcatcagctcctttgcttatctcctttcgccccgtctcccgccactgcaagaacctgtgcatcaagaccaaggccacagaaaatgatcagtctgctaaaaagcatcagaaggtgaagagcattctttgccaggactgcgaaggaaatggggcaatcgtatgcaccaaatgtgaaggaaatggggtaaattctgttgactattttgaaggccgatttaaagctggatctttatgctggttgtgcagaggcaagcgtgaaatcctatgtgggaactgtaatggtgctggcttcttgggtggatttctaagcactttcgatgaaactgcgcaatagtcatcggtttagcactttcgatgaaactgcgcaatagtcatcggtttaatttatgtttaagttacattgagggacccataatatatgtatcgtgttccatggacacataatcatattatataaaataatatttttaatgaaaaaaaaaaaaaaaaacttgatttggacgttctgggtttttaaaaaaaaaaaaaaaaaaggcccctaaaaaaaaaaaaaaaaaaagaaaaagaaaaaaataagagtcaaagagagatatcaagagccaaaaaaaaaaagggggggccgccctaaa

SEQ ID NO: 67569 - DNA, 266 bp, Zea mays
  unsure (1)..(266): unsure at all n locations
  Clone ID: MRT4577_161619C.1
ccagtcccagctgcccaattaccggaccaacccctgtggcgtctccgttgacattccgccctactactgtttcatgtgtgttacgcctaatctccacttttcattcctctctttctatatgtgttgatttgcggcnggactactcatattccgatgggttgggagactttttttttttaggccgtaccagtgtggacggtttcccagcttggggggtgggcatactcgcaccatcccctcttttcacccttcttgatcggctccac

SEQ ID NO: 67570 - DNA, 140 bp, Zea mays
  unsure (1)..(140): unsure at all n locations
  Clone ID: MRT4577_16161C.1
gccgcctccgccgccgaccggggcggaggcgggtctgggnaaaggcgagtacgcggtggggctctggaaccgggaggatggccaggcccacgaccgcctggcgctgccgcctgcagggcaagtacttctatccacgagca

SEQ ID NO: 67571 - DNA, 838 bp, Zea mays
  unsure (1)..(838): unsure at all n locations
  Clone ID: MRT4577_161620C.1
gatttcctcttcactgcctccccaccacttcgtcctcgccggctcgcaactccttgatggcggccacggcgagtctcactaccactgctccctcccctccagctctcctcaaagcatcagctcctttgcttatctcctttcgccccgtctcccgccactgcaagaacctgtgcatcaagaccaaggccacagaaaatgatcagtctgctaaaaagcatcagaaggtgaagagcattctttgccaggactgcgaaggaaatggggcaatcacatgcaccaaatgtgaaggaaatggggtaaattctgttgactattttgaaggccgatttaaagctggatctttatgctggttgtgcagaggcaagcgtgaaatcctatgtgggaactgtaatggtgctggcttcttgggtggatttctgagcactttcgatgaaactgcgcaatagtcatcggtttaatttatgtttaagttacattgagggacccattatatatgtatcgtgttccagggacacataatcatattatataaaataatatttttaatgaaaaaaaaaaaaaaaaaaaaaaaaaaaaaaaaaaaaaaaaaaaacaaaaaagaccaaccaaaataaggganccaagctctaaaggacccaaactgaaacaaacttggcttgggggggggggccctttaaaaggaccaacttttacgccctcgacggggggaagtttgacattttttttgggggccccaaatttgaattttccggggccgtttttttcttcgggggtggggggaaaacccgggggtgccccaactaaaaggctttgaaaaaaaacccctttttaaaagggg

SEQ ID NO: 67572 - DNA, 346 bp, Zea mays
  unsure (1)..(346): unsure at all n locations
  Clone ID: MRT4577_161621C.1
gaagaagcncaggcaagaagggggacgaagnnagcagagnngcggagcccaaggaggagcaaagaagnagcgcngaagaagaagagcagnccccgacanggcgnnacaacagnnnnggncgngaagcacnaaggnangcngaggagggggcaccancannagaggggganangggggcaangcaagcncnncaagaggcngcnaacagggnnaananggccaagagaggnannggacaggnagcaccannagcggngangccaanggcngcacagccaccagagagnngngcaananancaggagaccagnncnagancgcgagcggccgnncnagagggaccaag

SEQ ID NO: 67573 - DNA, 437 bp, Zea mays
  Clone ID: MRT4577_161622C.1
tctatcttaagcatgcacttataccggaccagaacgtgtggttatggggcccgaggagggagaggtgtgcttatgtgcttgaagacacatgtccactctgctgttggttgttcactcggacgccagtagatactccggtctatccatcttctgaagcgcgctgaacgtgcccgctaggaacatcttatcgcataagctggcgtaacacttacgaagcagaaggactgctatgatcttgtatgcatcggtcacgaggcggttcgggtgcaaatctccatatcatgatgacggacacttctttgatgccggattttacctgtctgtatcttctaacctattgaccatctcatcagccttggtcatctatacgctactagattacctgtaagccgtgctttggttcacggctcggctatcaccgaactctggtgacgtgc

SEQ ID NO: 67574 - DNA, 354 bp, Zea mays
  Clone ID: MRT4577_161623C.1
acccgatcacttcaacctaaatttgcttacttggccacatgaagttgatctactcataatattgggttgtacaatatacttagggatcggcggcacaagggccccagatttaccatactccacctgcatagatactagcacctggagaccagttctgttaagttctcgttatattcctgacaattcttactcatattttcatctcaatgactaatttttcactaattccatatttttctgcatttagacggacgatgctggaactacatttgtaaatgcaatcttcggtccaccctctggaggcagcggccaaaactacaatcatctgagaggtggcttgtcacactcggattt

SEQ ID NO: 67575 - DNA, 341 bp, Zea mays
  Clone ID: MRT4577_161624C.1
cgggttgtgttttcttcgccctaacggctgacaaaacaacaaatcaattaaaaaacataaaaaaaaaaaaacaatgcctaactaacccgaaagaacaccttcgcatataggcatgccaaaaaacacatgggcaatttaccattacccaaacaaaaggcgacaaaaagccaacccccttcacccatcaaaaactgccaaaccttttgacccccacaaaacacccaccctccttaaacccaacaaaaaaaaccccacaaccaaaacttaaaccacaaccgccgggaatcctcctttccctaaaaaagccaggaaataaccctatccttccacccccggacaaa

SEQ ID NO: 67576 - DNA, 1907 bp, Zea mays
  Clone ID: MRT4577_161625C.1
gattgggtacctcgaggccggccgggggctcgccatatggcaccaacagcaaaacagcgaaacagtgcagagacaagctacaacaacctaccctaacaggccattccttccactgcacttcattcgatcctgagctatagctggctgcctgagctcgctccaagaagtgtatctatagtatagacactaggcttcgtgtggcgtgctcgagatatgcttgcagtgtcgccgtcgccggtgcggtgtgccgatgcggaggagtgcggcggaggaggcgccagcaaggaaatggaggagaccgccgtcgggcctgtgtccgactcggacctggatttcgacttcacggtcgacgacatagacttcggggacttcttcctcaggctagacgacggggatgacgcgctgccgggcctcgaggtcgaccctgccgagatcgtcttcgctgacttcgaggcaatcgccaccgccggcggcgatggcggcgtcacggaccaggaggtgcccagtgtcctgccctttgcggacgcggcgcacataggcgccgtggatccgtgttgtggtgtccttggcgaggacaacgacgcagcgtgcgcagacgtggaagaagggaaaggggagtgcgaccatgccgacgaggtagcagccgccggtaataataatagcgactccggtgaggccggctgtggaggagcctttgccggcgaaaaatcaccgtcgtcgacggcatcgtcgtcgcaggaggctgagagccggcgcaaggtgtccaagaagcactcccaagggaagaagaaagcaaaggtggattggacgccggagcttcaccggagattcgttcaggcggtggaggagctgggcatcgacaaggcggtgccgtccaggatcctcgagatcatggggatcgactccctcacgcggcataacatagccagccatctgcagaagtaccgttcccacaggaagcacatgcttgcgagggaggtggaggcagcgacatggacgacgcaccggcggccgatgtacgctgcccccagcggcgccgtgaagaggcccgactctaacgcgtggaccgtgccgaccatcggtttccctccgccggcggggaccactcctcgtccggtgcagcacttcgggaggccgctgcacgtctggggccatccgagtccgacgccagcggtggagtcaccccgggtgccaatgtggcctcggcatctcgccccccgcgccccgccgccgccgccgtgggctccgccaccgccagctgacccggcgttctggcaccatgcttacatgagggggcctgctgcccatatgccagaccaggtggcggtgactccatgcgtggcagtgccaatggcagcagcgcgtttccctgctccacacgtgaggggttctttgccatggccacctccgatgtacagacctctcgttcctccagcactcgcaggcaagagccagcaagacgcgctgtttcagctacagatacagccatcaagcgagagcatagatgcagcaataggtgatgttttaacgaagccgtggctgccgctgcccctcggactgaagcccccttcggtagacagtgtcatgggcgagctgcagaggcaaggcgtagcgaatgtgccgcaagcttgtggatgatccccggggctgcatagctgctagctcgtccctgcacgcagtgcaacaaaagaaatttgtcgacatgccttttatgttttgaattcccgtgaaccgtttatggagcactcacagctcgttcagggtcagatgaacagaacattataggagtacattctttgaggtttcaggtttgagggaaatcaacctgagtgcatccaagtacagtgtactgccacagtgccacgtcggaaaatgaagtcttgacccgaataaaagggggggcccgg

SEQ ID NO: 67577 - DNA, 420 bp, Zea mays
  Clone ID: MRT4577_161626C.1
ccaattatttgctgcggcggcgcgagcacacgaagaggaggcggtgcagccggagccacctccgtcgccgccgccaccatgggtatctcgcgtgactccatgcacaagcgccgggccaccggtgggaagcagaaagcgtggaggaagaagcgaaagtatgagcttggtcgccagccggcaaacaccaagttgtcgagcaacaagacagtgaggagggtccgtgttcgtggaggaaatctgaagtggagggctcttcgcctggatactggtaactattcttggggaagtgaggctgtcactcgcaagaccccgatcccttgatgtggggtacaattgcgtcaaacaatgagcttgggagggccccagacccttgtgaagagtgccattgtgcaagttgtagctgccccattcaagcagtgg

SEQ ID NO: 67578 - DNA, 250 bp, Zea mays
  Clone ID: MRT4577_161627C.1
aataacactcttaaactggacagagtctaccaaccaccttgactctcgtcaaggtgtcccttcgcaactagcccacctactctcgccgtcctcttctagaacgactacacgacctaaaggtcttcgattgtctacgcacccagcttacatccaacctgctcggccttcaacctgacgttccactataactcaccatgctcctgaactactgctgccagcacggtctctactgcttcctagtgctccttat

SEQ ID NO: 67579 - DNA, 587 bp, Zea mays
  Clone ID: MRT4577_161628C.1
gcgcagacagacagaacttgagagagcgcacgcgagatggcagcctccatgatcacctcgccgattgtggcgccgacgagcgtgccgtccctctcccgccggggctcctccttcgccgtcgtctgcagcggtggcaagaagatcaaggtcgataagcccctcggactcggaggcggcttgacagtcgacatcgacgccaacggcaggaaggtcggcaagaagggcgtgtaccagtttgttgacaagtacggtgccaacgtcgacggctacagcccaatctacacgccagaggaatggtctgagtctggtgaccgctacgccggcggaacgaccgggcttcttatctgggccgtcaccctcgccggcctcctcggcggcggcgtcctcctcgtctacaacaccagcgctctcgccggctaagagagcatctacgtgtaacacagggccgggttctctgcttgcatgcacgtctctgtaatctgcgtaagtacctgctgggaatgtgtgcaatgaacgatgcaaagtgattgatcctgacagatggttgatgggtgtgtacgtaacgctgttgcgatgtactgggctag

SEQ ID NO: 67580 - DNA, 230 bp, Zea mays
  Clone ID: MRT4577_161629C.1
agcgtcggatgtgatggctgtcctgtcttgagccttgcgtttccagctctttctgtagtttgcagccaatagttgtgaagtggtatgaaacgatcgctttgtggtgatcatcacaaaatgctgatactgttccggacaatcggctagaatttgggtcgacacgagttacgggctacctgtgagcttataaacatcagcatctgatagtgaattcactcggttgtttttac

SEQ ID NO: 67581 - DNA, 446 bp, Zea mays
  Clone ID: MRT4577_16162C.1
aaccgagggaacatacaggtggtttattttttatttaggtcgaaaaaagtgggttaaccccgtcgttttttttttttttttacgaagattatttttactggatggtaagttggtcggactaatcagtagtaaaattttggttttgggagggggcgaaccccagcattttttgtggacaaactaaaaagaacttttgggctaaaaagggagggtgggcccttggttgaacccgaactttttgcaatactttttgtaataacccaaccccgcgtttatttgggggggggtgtttccgttgcactttaaggggccgtttatgggccttattgtggggcccaaacccttcgggattaaggggggcaagttttttattcaaaaacaaaacgccgttttgaaagcgaacacggggttctgcgccacccttttggggttggggagccccttta

SEQ ID NO: 67582 - DNA, 2362 bp, Zea mays
  Clone ID: MRT4577_161630C.1
tgctagcaaaaacgaaacggcgatcacgtacaaaacagagactcccttgttgccggctatcgcttttgcctccgtttcgctttgataaaagccagaactcccggccgcggcccgctcgcctcccctccctccctccccgccgctgtctccggcgaccgccagcctcatcgtccatggcctctacatgcctagcccccgcctccctctccacgcccctgctctccgactccatcgcgcgcgcgcccgccgccaacggcctcgccaccaaccaccgacaccaccacgacgacgacagcgacggtgctgcggcagtctccgtttgcgacgacggcggcggggacccgttcgcgttcctctcggaggaccggccgccgagggaccgagggccgtccccggccgacccgttccgcaacggcacgccggcgtggggcggcggcgtgtacgcgtggtcgaggacgctgctgctcctgccggtcgcgttggtgcggctggcactgttcgggctctccatcgcaatcggctacgcggctcacgtgggtggcttcctccgcgggtgggcgtacacgcacggtaggccgcgagtgggcgacgggcctaggccggcttggcgcctccggctcatgtggatcacgcgaatgtcagctcgctgcatcctcatgtctttcgggtacatttggatcagaaatgcagtaaggcccgctcgtagggagctcgcacctcttgttgtttccaatcatatctcgtacatagaacccatattcttcttctatgaattgttcccaaccattgtttcgtcagagtctcatgatgccctatccatttgttggaacaattattctgagatatgcaggttatatatgttgacagattctcaccagcttctcggaaggctgctgtaaatgaaataaagaagaaaggcagcttgcaatagcttcccgcgggtcctgttattccctgaaggtaccacaacaaatgggagattcctgatttcgttccaacatggtgcattcatacctggctaccctgttcaacctgttgttgtccgttatccacatgtgcactttgatcaatcatgggggaatatatcgttattaaagctcatgtttaagatgttcacccaatttcataatttcatggaggtagagtaccttcctgttgtctaccctcctgagatcaagcaagagaatgcccttcattttgcggaggataccagctatgctatggcacgtgccctcaatgtcttgccaacttcctattcatatggtgattctatgattatggcacgggcagtagaagctggaaaggtgaactgctcaaattacatggtagaaatggcttgggttaaagatgtttacggtgtgagcacagcagaagcaatggacctattggaacatttcctggcaatgaatccagataacgatggacgtgtgaaagctcaagatttctgggctcattttggtctggattgcagtcctctgtgtaagaagatatttcactatttcgatttaggcattaaggaatcgattacgttccgtcagttcttggttgggtgcgcgcacctgaggaagcaaccattgttccagggttcctgcgagaccgcctttgagaagtgccggggtcctgaaacgtctgagatctccagggcacagctagccgatctcttgcggttaagcatgctgctgccgtctggtgatagaatgctggacctgttcaagacgtttgacatagatggcgacgaaaagatcagcaaggacgacttcatgacgtgtcttgggaggttcccgttcctgattgcgttctttgcagccccgatcaatggggaagtgtacatcgagatagtctgaaggcaaggcgatgccgtgtaagagcaaccaggcgcaggtagggccggggatccctccgtttatgcaatgggatacccacctgtatttgggttgcatcgagtggctgaccaatatagtgcgtcaattttgtttcgttgcttctttcaaatactcacttcgttcttttttatttgtcgtgttttagttcaaagatgaactagcagacgacaaatatttgagaagggagttagtattatattgtcattacggaatctgctgtgagatacgcgctggactgatagattgtcgatggaactgagaatgcacatagaaagcatttctaatgtactcctgtaagaaaacttttttgaacaaacaatgaccctgtaacctcaaattgtgttttattcttgctagattgattacataacaaagcccaacgtaggtatatccagatacataaccttttgaacattgtaacctcatgttcggcgagttgaacatttgtttaaaccatttagatgtaatgtatatttaga

SEQ ID NO: 67583 - DNA, 476 bp, Zea mays
  Clone ID: MRT4577_161631C.1
tttgttttgtttgtttcttggttggttgtgccgttttttttttttttccaaacaccggaaatttttttacattgggaggagaccgacacacagaatttattggggtcccgaagagactgggaacagtacaaaacccactggggcttcaacaacgcaaccctcaggattaataggtgttttggcgccgtgtatgggcacaatccattcactccaccaaattggttgggaagagcccaaaaaaatgtttattttaaaagaagggttgaaacccaacagacctattaaatttccaaatgccctagttgcttggttaccaaaccaaatggaaactattccttccgtggggataaaagcgctggattgagccattctattgcttgtgcatggggacccgaaatgggaaataaacgggcttgggttcagataggaatcccttggttaaccccgtgacaggaacaccggcagctgcctttatt

SEQ ID NO: 67584 - DNA, 1174 bp, Zea mays
  Clone ID: MRT4577_161632C.1
ttgttgtccattatccacatgtgcactttgatcaatcatggggaaatatatcgttattaaagctcatgttcaagatgttcacacagtttcataatttcatggaggtagagtaccttcctgttgtctaccctcctgagatcaagcaagagaatgcccttcattttgcagaggataccagctatgctatggcacgtgccctcaatgccttgccgacttattattcatatggcgattctatgattatggcacgagcagtagaagctggaaaggtgaactgctcaaattacatggtagaaatggcttgggttaaagatgtttacggtataagcacagcagaagtgatggaactattggaacatttcctggctatgaatccagataacgatggacgtgtgaaagctgaagatttctgggctcattttggtctggattgcagtcctctgtgcaagaagatatttcactatttcgatttagacattaaggggttgattacgttccgtcagttcttggttgggtgcgcgcacctgaggaagcaaccactgttccagggttcctgcgagaccgcctttgagaagtgccggggtcctgaaacgtctgagatctccagggcacagctagctgatctcttgcggttaagcatggtgccaccttctgatgataagatgctggagctgttcaagacgttcgatgtagatggcgacgagaagatcagcagggacgacttcatggcgtgtcttgggaggttcccgttcctgatcgcgttctttgctgccctgatcaatggggaagtgtacatcgagatagtctgaatgaatgcctgaggcaaagcgatgccgcgtaaaaggctggagctgccagtgccaggcgtaggcaggggatccctccgtttatgcaatgggatacccaccgggtgctcctccactttgagaccaaagcaactgtagtattgggtattgggttgcatcaagtggctgaccagtgtagtgcgtcgattttgtttagttgcttcgttcgaattattattggccatttaccgaatctgttgagatacgcgctggactagtagattgtcgatggaactcagaacgcaaatagaaagcatctgtaatctgaactaactgagaaaacattttttttttggctctctaacctgctgaagttgtgttttcttgct

SEQ ID NO: 67585 - DNA, 325 bp, Zea mays
  Clone ID: MRT4577_161633C.1
ggggaaaaaaaatcgggggaaaaaaggggccgggaaaggctaaacccacaaaggccattacatgggttaaaaattagggggagccccccttgacaaggccagggggggccccattggggggggaaaccccgcccgaagggggttggttgactaaaaaaggcccaaatttttggcacccctgggacccccggaagggagaaaaaaggtcatcctttttgcctttgggggaaccacccctttggcgaaaaagggccccccatctctcccctggaaaaaaccgcagggggggttggaaaaaaccaaaaatttccccatagggggggga

SEQ ID NO: 67586 - DNA, 403 bp, Zea mays
  unsure (1)..(403): unsure at all n locations
  Clone ID: MRT4577_161634C.1
gcgcacgcgttcgcccacgcgtncgcagatttgttgtgcgatttaccaacaaggacatcacagcacacatcagctgtgctattataggggggggtatgggtcttgcttctgcttactcncatgagttgccacgatatgagcttgaaattggtcctaccaactatgcagctgcctactgcactggccttctctttgctcgccgtgtgctcaagacccattgtttagataaggaatatgacggcaatgttgaggccactgtgtnttttttttctnatnnctcatcttatcataagaagactttccgtgctctcttggatgttggccttattatgactacaacttggaaccagaggtttgatgccctcaatggagcatttggatggaggcctggatcttcctcaca

SEQ ID NO: 67587 - DNA, 438 bp, Zea mays
  Clone ID: MRT4577_161635C.1
tttttttttttttaatacaatacaatattaaatgtatacaaaacgaacgacgctgtatcttctagaatacattaaaatgaccgcttttgccctccacccccatctaacccttctagttatcgcacactccccgcaatacctccccatctataaagaatgacctcccccttgtgtatcttcatccccgccctggattgtaatacagaatgttctccccttttattttggaaaccataccccggcattggtagtatggccgaccaacccaagcgaggtttgtgtaattgaagtgttctcgcgaacagttggtctggaacgtggtacccagcgaagcggttttcgtgtatgtttttatttttattatgcttgattgagctgggttaaagactcacgcttgaatcgtggtgaaacgtatttgataccattgttgatgattca

SEQ ID NO: 67588 - DNA, 298 bp, Zea mays
  Clone ID: MRT4577_161636C.1
gtaagcttcggatccagcgagacgggccgtccttatttatttattttttttttatgaggggacggtaaaacatagggatccacgcaatgaaatactacactagcatacctaactttacaaccctaatttacttaagtttttaagaacaaatccaaatacatgatattggttcaactagccccaaaaaaaatagctaacatatttcatggctaaagggcagatgaactgatttaactcggtgaggattagtttacaaccacattaactacataactagggcttgattggtttaaggttt

SEQ ID NO: 67589 - DNA, 304 bp, Zea mays
  Clone ID: MRT4577_161637C.1
gactcagtacggtcggatccgggcgaccacgcgccgcggacgtgcgagacgcgatgggccagagtgccagccagcatggtctaacaagaacgtcggtccggtcgtgtcgggatgggttgcaggctgtgggcgcgtgctggtacctgctcggcgtccagcgggccagcaagtgcctggaagagcagtgcctccaggcggccgggtgcactcacagcagcggatggcctgctcggcgccgctgtactacggcggctccccgtctcgcggagtcggcagcggcgacaggctcgcctgggccgcgaac

SEQ ID NO: 67590 - DNA, 416 bp, Zea mays
  Clone ID: MRT4577_161638C.1
aacaacaaaaatgtggtggattcccccttggggggccaggccccatttcttaaaaaaatctaactaaatatgccatttaccccagtttgattttttataaacccatgaaaagagaaaacacggaaaaggctaaattaaaaaaccacctaaggataatggacggacaggggggaaatttatttaagggtcccaagacatgttcttataaaaaaataacctattccactcacgggaaaagtttttggggaaccaacattatagggggaacgagcctaataagaatgctggaaggtcctgtgctaagtaggggctttttttttttcaaaacaagcctttttttaaaaaaaaaagggtttttttttaagaaaaatggggtttcaccttggctggagggagaactcccccttggctgagcc

SEQ ID NO: 67591 - DNA, 316 bp, Zea mays
  unsure (1)..(316): unsure at all n locations
  Clone ID: MRT4577_161639C.1
tccacatcgcaggagctcaaggccaccaccagccacatcaagcagttctcgcaggacctcaccaagggcttcacgtgcacccagagtcgcgccaatctcgcggcgggggagccaccgnccaccgcaccctcggcaccgacaccgccctcgaggcccacacccagcgccgccgctgcgcgtagctcgaccgcaccaagtccgatgcgcaaacctgttgttttctaggcggcggngatggcatgctcgagacggcgtatggcgtgccaactacgaggaaacctaggctacgacaatgatcgttgtccacgaacgcgag

SEQ ID NO: 67592 - DNA, 119 bp, Zea mays
  Clone ID: MRT4577_16163C.1
attgttgttgttgtatctagacctgtacaaggagaaataatcaaataaggacaaacacacaatgtgggaaagacagctgtaatgtcgtttgatctagtttaagttgttgattgtaccag

SEQ ID NO: 67593 - DNA, 449 bp, Zea mays
  unsure (1)..(449): unsure at all n locations
  Clone ID: MRT4577_161640C.1
acccacgcgtccgcccacgcgtccgcccacgcgtccgtctgcattgtcgtcgttgggaccaacggcgcttctgatctgtgccctcctctgcacctttctgtcttcagaggtgggctttgtgcggcaggccacggcgctgggcatcaactacgggcaggtggcgaacaacctgccgccgccggcgcaggtggtgcagctgctctcctcgctccgcatcggcaaggtgcgcatctacgacgtgaacccgcagtgctgacagcgttcgcgggcacgggcatcgagctggtcgtgaccgtcccggacgacctggtcccgggcatggcgagcagcgcgttcgcaggcgctgcagtgggtgagcgccaanctgcggccctacttcccggcgacgcgcgttaagggcatcgcggttgggaacgaagtgttaagggcgaagacgaacaagtnaaagn

SEQ ID NO: 67594 - DNA, 330 bp, Zea mays
  Clone ID: MRT4577_161641C.1
gtgaccaggcctgagctccctgtctctcctcagtgacatcgtctttaaaccctgcgtggcaatccctgacgcaccgccgtgatgcccagggaagacagggcgacctggaagtccaactacttccttaagatcatccaactattggatgattatccgaaatgtttcattgtgggagcagacaatgtgggctccaagcagatgcagcagatccgcatgtcccttcgcgggaaggctgtggtgctgatgggcaagaacaccatgatgcgcaaggccatccgagggcacctggaaaacaaccactctggagaaactgctgcctcataccggggg

SEQ ID NO: 67595 - DNA, 522 bp, Zea mays
  Clone ID: MRT4577_161642C.1
acctctcttctaccagagcctgcgccgcctcaagcacctcctcaagttccaccagtacagcctcaggttcaagctcgacgccgccaggggcaagctgcccaattacgtcgtcatcgagcagcgctacttcgattgcaaggagttccccgccaacgacgaccacccgtcgcacgacgttgccaggggacagaggtttgtcaaggaggtctacgagacgctgcgggcgagcccgcagtggaacgagacggctctcatcatcacctatgatgagcatggtggcttctatgaccatgtccccacgcccgtcgtcaaagtgcctcagcctgatgggattattggccctgacccttactacttcaagtttgatcggctcggggtgcgcgtgcccagcttcctcatctcaccctggtttgagaagggcaccgtgatccatgaaccaaatggtcctgagggaacctcacaatatgagcattcatccatccctgcgacagtaaagaagctatttaatttacgtgctaacta

SEQ ID NO: 67596 - DNA, 468 bp, Zea mays
  Clone ID: MRT4577_161643C.1
agggcccacaaggaccccaccgccccaacaagtataacaccataaaaacaaacccggggaaaaggtgcaagggcaccaagaaaaaaaaaaaagggggaaaaccggggcccaaggggcccccggcacgaaaaacccaaaggcctggttagccgaatttggccccccaaaccccaaagtaaagaaacttccacttccaacccgaacaggggaagcaataagaggcaaaaaacctttttgcgggggggggggccccccacggggggggggcggggggggccacccttgcaggcccaaccccttagagaacctggggggcccctggagggccttcttgttaaccgggggccccgggcccaaaggggccttaagaaaatccgcccttgagaaatgggggggaagaatcttaaaaacgagcccttggggggccagcttctaaagggcgggtgggaaggcccccggggggcccgg

SEQ ID NO: 67597 - DNA, 360 bp, Zea mays
  Clone ID: MRT4577_161644C.1
ttccttaattcccggggggccatcttccgttgattgtatacttcaatgctagcctatgaagtgctcctacccctacccatctgaggggggttctggcctcatgagccctttctccccataacgtgatgaatgctctcctggaggctctatttggtggtgtggggaagggattcaccaataaggttgtgaagatcaagaagtaccttgcagttgctgagccatatgagggtgcccagacccttttgagtcagggcatttgggcttttggtgggaagtgcttccctgatgcgctgaaggatggttccgttggactcaaagccctttacgatggggatattctggacaaggaaaccattgtgg

SEQ ID NO: 67598 - DNA, 659 bp, Zea mays
  Clone ID: MRT4577_161645C.1
ccccctttcgagtttttttttttttttttttttttttttttttttttttttttttttttttttttttttttttttttttttccgccccaaaaaaagggggatccaaaacccccttttttgacccccccaggggaaaacttttttaccaaccccaacctaaaagtggggggcaggaaaaaaagtttttgttcctgcccaaaacctacaacttaacagggggggggggaccaaaaaaaaagtttgttcgttttcagggaaccttttaaagcggccttcacggggcccccgttaataatgccaaaaaccccagccttaaaaaaaccccccccgacaaaaaacccttcgacatcggggggggctgttacctttttgcagtcccaaaaagtaacaaaccccccgaaaagaaccctaaaaaatccaccaccccaagggcgggaatgggtttttacccaacccctaaggggggcggccccttcctgaccctgggcggggggggaaactttcccagttccaaaaccccaaacgggttaaaaggcaaaaactacgtggccccagcccttgattttttaaaaaattgtttttgtttggcccccaccaccccccagggaaaacccaccccccctttgttaaggggtctaaccaacacaggcaaggacctt

SEQ ID NO: 67599 - DNA, 236 bp, Zea mays
  Clone ID: MRT4577_161646C.1
gtccaaacaaaaaaagcaccttctttcctaccttttgtccctgaccaagatcgcttgcaatcgggtgcggtaggaactcgccgagtggcaactcaacccccctgctggattcaagcacaggggctccgataacataacacaagtggttaattgcggtcactggagcggcaatcactctttacgccggcgagacctaccaattgcagggcgacttttctgaacattatcctatggaa

SEQ ID NO: 67600 - DNA, 453 bp, Zea mays
  Clone ID: MRT4577_161647C.1
aaacccaacggaacccttttagcggggggggtcaaaaacatctcagggcccaaattccaaaaaacaatttaacggggggaattttaagcggggccaaaaaacggccgggctcgggggcaaacattttacatacgggaaacccaacccacccctaaatatcccgccccatcataaaaaacataaaccaaaagcccctaaaggaaccaaaccccgctggacaattaaggaattgggtgcaatggtggtggaaagccagtccaggccttaaaacaaaccctaacccgggggaacaaaagggctttgaagggaccaaagacgttggcgaaaggaatgcagtccaagcttatcagggatctcagggggattaaaagaatttggaaaaatttggttgttagcaaaaaaaggaaaaaaggattacggaaataatcctaattaaacattccgggggccccc

SEQ ID NO: 67601 - DNA, 415 bp, Zea mays
  Clone ID: MRT4577_161648C.1
gtaagctcggaattcggctcgagcgactacactcacccccctttcaatttttcagactgaaaccactgtactggcgccggggaagctacagttgatacaggctatatgggctatccggccctgctgctgctgctcatgcagcccatcaccctgaacaccctgcaccggcaggaccgtaccgtcctcaccatcgtcagcatctactttacatactttacaccttacccaccataccaactattcccaaatcgcacacagcctacgccgtctcgtgctggcactgacggaccttacctacgtctcctttgcatcgctcgcactgcgcgccctggccgaccaggcgctgcaggcgctcctgccgtacctcatgcagcccatcatcccggacatcgagtaccgggacctgtacatccac

SEQ ID NO: 67602 - DNA, 2552 bp, Zea mays
  Clone ID: MRT4577_161649C.1
cccccgcctcggcggccgcccgccctcgcgccgctccgcggtcggcccagtcgcggtgcagcgcgcggccgccgcgcagcggcgcgacctcgccatgaacatccccgcgctgcggaagctcgacgccatgctcctcggctacatggacaacttcgcggaccagaccgagttctggtacgagaagggcggggacaacaagcgcgacgacgacaagtggtggatgccgacggtgaaggtgccgtcggaggggctgtcggacgtgacccgcaagtggctgcagtaccccggatcgcacaacaggaacatcagcagcagggaggacgccacctcaggagcggcagccacacggccgagatgcacgagtccctttccaatggagccggcggcaccccgccccttcccaacggtcgggcagcggctgccggggcggcgcggtcgcgcctgggccgcgacgggccgccctccgagctggacgtgatgaaggagaagttctccaagctcctgttaggcgaggacatgtccggcaccggcaagggcgtgccgtccgcgctcgcgctgtccaacgccatcaccaaccttgcggcgtccgtcttcggcgagcagcgcaagctggagcccatggcgcccgacaccaaggagcgctggaagagggaggtcggatggctgctctccgtcaccgacctcatcgtcgagttcgtgcccacgcgccagaccgcggagaacggaactacgatggagatcatgtccacggcgcagcggcgcgacctcgccatgaacatccccgcgctacggaagctcgacgccatgctcatcggctacatggacaacttcgtggaccagaccgagttctggtacgagaagggtggggacaacaagcgcgacgacgacaagtggtggatgccgacggtgaaggtgccgtcggaggggctgtcggacgtgacccgcaagtggctgcagtaccagaaggagtgcgtcaaccaggtgctcaaggcggccatggccattaacgcgcaggtgctcgtggagatggagatcccggagatctacattgagtcgctgccaaagaaagggaagacgagcctgggcgacgccatctaccggagcatcaccgaggaaacgttcgacccgctggagttcttggccgggatggacctttcgacggagcacaaggtgctggacctcaagaaccgcatcgaggcctccaccgtgatctggaagcgcaagatgcagaccaaggactccaagtcctcgtggagctccatcgtcagcttcgagaagcgcgagcagttcgaggagcgcgccgagaccatcctccacctgctcaagctccagttccccggcacgccgcagtcgcagctcgacatctccaagatacagtacaacagggacgtcgggtacgccctcctggagagctactcgcgcgtgctcgagagcctggcgtacagcgtcatgtcccgcatcgaggacgtgctgagcgcggacgcggcggcgcagaacctgacggcgagcgaggcggcgcggcgagcgctggagtcgacgtcggcggagctgcccgcggcgcggaagctggacgccaaggaggagctggagaagctgaacgaggccccggcgtcgatgacgctgttcgacttcatgggctggcacttcgaccaggacgagctgatgaagcgcagggaggacggcacactggacgcggacggggaggccatgctcctcaagaaggcgcccagcatggcccccaagaagttctcctacgtcgacagcctctcctccggcggcatgaggagcccctccgcgcgccactgatagtgcgacaccatccactgaccggccgacgtgctaacagcagctcagtcatctacgatccgacaccatggatcgtcgatcgttcagcagcacaagagacgacaatggagacgacagctcctcgggtccggtccgatcgattcttgcttacgtgtacatagctgaggcgcaggcgcagcacctacttacccattaacgtcattgccagtgagagtttcatcataattttatttttattaaacaagatgatacatcacgatatttgatgacatgacacggtattataataaaaaaaacgaagagaatttaatgcaaaaagaaaaaagaacattgaaagggggcccatgttctctcctctctaactggtttctttcttgtccttgcctctacgttctagaagattctagatgaggggaagaagagggccaggtgatctcatccacgcactacgcactcaagagttgccgctgtgcgtagctactgcttaatatttctagtaagtagtttggacatggctctctcaagtctcaagagcggttctggggtatatgtatcgaactcgcaagtcaggaaaaaacaacatgtatattctttgtttcgtttcaagataatcattttttcctagactcaggttttctagtttcgtggataatacatatgtcctcacataccacgccaacaacaatattttcacctgtacttctcacgatcattgcaagaatgaaacgccacgacaccaatgtgct

SEQ ID NO: 67603 - DNA, 542 bp, Zea mays
  Clone ID: MRT4577_16164C.1
ccggccgggaatatcttacaattcttacaaagttctcttccccaataacgccgacatgctcgtcaacgtcttcactaccgctaccatcgcagcctgtactcttctggctactccaaccctcgccaatcccatcgataccctacccgctggtctcgaatcccaccttcagacccgagccaacgatgttacggttaagttctgggacagcactacatgcagaacttcgcgatccaggaagagtttcaacagtggacattgtatcaaggctctggctggaaaggaccatgctgtgagcatgcaagaaagaaagagcacaaagtgtcacatgatcagatatcgggagaagaactgcgtaggatattctgagaaagttttcaacctcaatgactgctttaacattggagacgagtgggactctctccagttccagtgctaggctcaaccgggtccagtcagttcctttagttagcctgttatagattttctaacatggaagatctgatactattgtcctcaaaaaaaaaaaaaaaaaacccgcggac

SEQ ID NO: 67604 - DNA, 1661 bp, Zea mays
  Clone ID: MRT4577_161650C.1
cgacaagtggtggatgccgacggtgaaggtgccgtcggaggggctgtcggacgtgacccgcaagtggctgcagtaccagaaggagtgcgtgaaccaggtgctcaaggcggccatggccatcaacgcccaggtgcttgtggagatggagatcccggaggtgtacattgagtcgctgccaaagaaagggaagacgagcctaggcgacgccatctaccgtagcatcaccgaggacacgttcgacccggtggagttcttggccgggatggacctttcgacggagcacaaggtgctggacctcaagaaccgcatcgaggcctccaccgtgatctggaagcgcaagatgcagaccaacaaggactccaagtcctcgtggagctccatcgtcagcttcgagaagcgcgagcagttcgaggagcgcgccgagaccatcctccacctcctcaagctccagttcccggggacgccgcagtcgcagctcgacatctccaagatccagtacaacagggacgtcgggtacgccctcctggagagctactcgcgcgtgctggagagcctggcgtacagcgtcatgtcccgcatcgaggacgtgctgagcgcggacgcggcggcacagaacctgacggcgaccgaggcggcgcggcgggtgctggagtcggcggacctgctcgcgccgcggaagctggacgccaaggaggagctggagaagctgaacgaggccccggcgtcgatgacgctcttcgacttcatgggctggcacttcgaccaggacgagctgatgaagcgcagggaggacggcacgctggacgccgacggcgaggccatgctcctcaagaaggcgcccagcgtggcgcccaagaagttctcctacgtcgacagcctctcctccggcggcatgaggagcccctctgcgcgccactgataataatatatgatcgtcgtcgcgccactgaactaacagcagctcagtcatcgtctacgatccaacagcaccatggatcgtcgatcgtccactcacgagaaggagagacgtcaatgggagaggagacgacggctcctcccatccgatccgacccaatcgatccttgcttacgtcgtgtacatagctgaggcgcatgaagcacgtgcgcacccattagtgatccatgttctctcctctcttactggtttctttcttgtccttgcctctacgttctagaagattctagatgaggggaagaagagggccaggtgatctcatccacgcactacgcactcaagagttgccgctgtgcgtagctactgcttaatatttctagtaagtagtttggacatggctctctcaagtctcaagagcggttctggggtatatgtatcgaactcgcaagtcaggaaaaaacaacatgtatattcaaaaaaaaaaaaaaaaaaaaaaaaaaaaaaaaaaaaaaaaaaaaaaaaaaaaaaaaaaaaaaaaaaaaaaaaaaaaaaaaaaaaaaaaaaaaaagggaaaaaaaaaaaaaaaagggggggggccctgggccccaagtttttgtccctttaagggggggtaaatgggcccctgggggaaataagggcaaaagttgttccctgggaaaaatggtattccgttcacatttcccccaaaattacggcccggaacctaaaggggtaaagccgggggg

SEQ ID NO: 67605 - DNA, 421 bp, Zea mays
  unsure (1)..(421): unsure at all n locations
  Clone ID: MRT4577_161651C.1
tacaagctttttttttttttttttttttttttttcctttttttttttttttttttttttttttttttttttttttttttttttttttttttttttttttaatnaaaatttaatttttttaaattttattttttttttttttttgggggggggggggggttnnttattatggggtaggnagtataagaagtgatgttgatttgtgggattgaatattantgnnnggttnggatatttgagtttttttgnataatggttggnntnataagnttnttnntnagatagntttttnnnngaagnatgtngtatgatgtaatnatgnatgnnggnaggtgtttnggggatgaaggtgnnngttttttnaattaatattggttnnggaatttttaatggttnggtttnaaaaggttgttntttgaagg

SEQ ID NO: 67606 - DNA, 293 bp, Zea mays
  Clone ID: MRT4577_161652C.1
ccaggggagtaagttcagattccagtggtcgtaaaaagttttctaatttctaagggggggaaacagatacaaaataatttaattccccaatgggttccctacagcgaactggaaacaatggtaccagcttcggcaaatccaccctgggagagttccacatagtgttcttgaacaagccagaagggggtggagatttccctagcattgaagggcacagcgactccatcttgctgctcgaacacaacattagtacccattctagaagccctgcgcatagaggagaataaaaacct

SEQ ID NO: 67607 - DNA, 384 bp, Zea mays
  Clone ID: MRT4577_161653C.1
ccggccgggctcccccttactctctgcgtgtgtttcaggctttcagctaggtgatcctcaacgctctctctctacatctccacacactttctctcttcctctctctagtgaacttccctttcatccactacaacttcatttgcacctttagggctgcaagcacacgcttctctctccatctcaccataggaagctactagcagctgcaacccctgccatctcactctctctataatagttcccatcccgtccacacctcttcctcttctttccagcaacacttcaggccaacccaacccaacccagaggtgccttcactccaccatgggagacccctacgacacccactttctcagaggctactacttccactttccttccttc

SEQ ID NO: 67608 - DNA, 583 bp, Zea mays
  unsure (1)..(583): unsure at all n locations
  Clone ID: MRT4577_161654C.1
ccggngtcgacccacgccgtctggtgataaaaaaaaaaaaaaaaaaaaacccaaaaaaaaaaaaaaaccacaataaaaaaaaaaaaggtcgaaacaaaaggaaaggacccaccctaagaaaacaagatcttgtcaccgagaaagacaaaaataaaaggatcaccaaaaagaaatccaaaagaccaatttatttaaaccgctgttactagcgaaagggcggggggcatttttttttttttccccacgccaaaacaccccccagaggacagcgggcggaacagcgggccccccccaacagagggccctcccgaacggcggcccaaacggaccggcaaccggaacgcccactggaccgccccctgaagcgccgcgcaaggggcggggacccgcagggagaccccaaccgtggccggtgccctagcccccgccttttggcctgttccccttgctttgttccccccgttcgccggctttcccgcggcttctctaaggggggcgctccattgagggctcccttttaggcctcaattgaccgtttaccccaacgcctcccttagggggctgtttcccgtattggcccatt

SEQ ID NO: 67609 - DNA, 175 bp, Zea mays
  Clone ID: MRT4577_161655C.1
ggggtcctggtggtggtccgtcgttccgtctgccgtccggccggccggcgtggctcttgggtcgtgctccggtcgcgtcgggcggctcacggtgcgggtcggccgcgcgcgcacggcgatggctcagggcgactccgcctctaccgtggccgccgggcgtcctgcttcgcccttg

SEQ ID NO: 67610 - DNA, 511 bp, Zea mays
  Clone ID: MRT4577_161656C.1
gccggccggttttcggatacgtcaaccaaacatatgatgctttgtgactccacggctgcagctgcatgagaacagcatggaaccaaacacgcggaaagagaatcccaaaccctaatatcattctaacaggtacgagtattgaaactaagagtttttagtctaatagggccagatctaagatagcaaagcccagcgggtcttcaccattgcccatctctacgaagaacggtgctgcccctagtttatgagtagtttggacgcaagcagtgctcaagattccagatgtgtgtgtacgatggtctctgttacagttttttttttttgtatgtctctttttctcgagtctcgagtctccagcagcttcgagatatgcttatctccagtctgaaattgaagttcttttgttctgtttatctgtcatatactcagatttgcatagtctccgcaaatgaccaaatattgacacattttttagttataagagcaaaaaaaaaaaaaaaaaaggccccta

SEQ ID NO: 67611 - DNA, 792 bp, Zea mays
  unsure (1)..(792): unsure at all n locations
  Clone ID: MRT4577_161657C.1
ggaccctcgaggccggccggngattaccctgtcccagatcaacgttacccaacggctgccaaatctccctccgcttcccggctccccaggtcgagggcgctgctcgccaactgccttggtcgctactgtacgacgcactttggtggtggtgcggtggtgccgctactctgctccccgagttccatccttcctcacgaggagggcgggcgttgccgttgccgttgccgttgcctgcccgtgtgctttggcgattcgggggcttgggctcggatctgcgtgtgcctgcctccggacccgcccgaggctcgggcgcctgatttggggccgggtcaggcagatctggagggcacatgagaataaggcggcggcggcggaggggtagcgggagctatgcggtgcttctgcgaaggacttgagccggcctgggaaggtgatcctggaggaggttgcggcggctgcaacggcggagggaaggctggaggatgtcgtagcggtcgtggcgccgctcgcggctccgcctgcgccgacgcttagcccagctgcggcggagctcacgctgatcgccgcagcggtcgtgggagccatggaaggggtctgcctaccccccggctcgacaccctgctgatccgacggacgacgactcgctcccgcaggggaagggggagacgcgcgtgtgcgctgtagccgctgctccgaggacagccgctgcagcagattcgccagcgctgacttcgagtggggtcggatgggtttcttcggagctgcagcaggcccggagggtggccttggccc

SEQ ID NO: 67612 - DNA, 744 bp, Zea mays
  unsure (1)..(744): unsure at all n locations
  Clone ID: MRT4577_161658C.1
ggccgcttttttttttttttttttccagatgatggatatattctagatacctaaacacacttttcgacactcagatcgtgtcttttggataaaacaccccgtaccacatgcgatatggataaatgcaaactgggaatgataaacaaatcacaaacgacgtcatatgcttacacacccgcgctctgaacatcagcctgctcgccatttactgcagcctccagcttatctacaacagaagtgccattttctttctttgaaccatgtgttgggctcgatcctggggtgggaatctccagagtattcgatcgcttagggcggaagggaataggtgttgttggtctcgatgataagaacgaagaagcagcgctcaacatggcgatcagagacgcttgaaccacatcctggtggattcctacaccccaaaccttgtggctgctctgggcagcagtacatccaatgtacgtcgctgccttggcatccttgctcgtaccaatcgtatgctcattgtagtctacaacatccaaatcgatacccagactcctcagcgcatcagccagcgacgacagagcaccgtttcccgaaccgcaaatgttgtgttcttgaccgtcaatctcgataacaccggtaaagatacggcgcaggttctgggtgctgacggtcctaccctctggcggcggttgaggagtcgccgagcgatcggncttgatctcgtagtcgacaagagagagcggggggttgcgcttg

SEQ ID NO: 67613 - DNA, 318 bp, Zea mays
  Clone ID: MRT4577_161659C.1
tctctgatggtgctggaccgcgaacacgaggaggaaggggagcaggcatacacaaccacaaggccatggcagggcgaggactaagcatccccactaacaacatccgcacctcatcgaaatcatcggcgacgaggacaccgacactgactatttgatggacgacgatgagaatgttgatctgcgcaagaaaaccaactacctcctcggcgacaacaagacgacagataaaacaaatcgaggccgcgttcaaagaatgcactgcgagggcggatattgctattgtgctcatcaaacagcatatcgctaacatgataggat

SEQ ID NO: 67614 - DNA, 206 bp, Zea mays
  Clone ID: MRT4577_16165C.1
ccccaaagcattttcatgaatttcaaaacataacaggtgaaacccgaattaagccggggccccttggggttcaaaaatccccccctaaaccgttaaattaaactgggggcgatccatgttaaactaaaccccccccttaaatccccccctttttttttaaatccaaaagaaccgcccccgggggggtctcccattacggggggggg

SEQ ID NO: 67615 - DNA, 382 bp, Zea mays
  Clone ID: MRT4577_161660C.1
gcctcgggcattcttggtggccccaagaacgaatcccccaccgtcatatctccaatgcagtacaagaagaggttcaggaaagccatgtccaagtacttcctcaccgtcccggaccagtggtcctcttgacggcctggctagctaacaagaattgtccgccttaaccagaagcgtttgccgtgccatgccatgccatagtacatgtccgtcattctttctgtgcctagaccctagagagagagagagagagagagagagagagagagagagagaggtagtcaaattcattttgtgtccacctgtaccatctgtagcaaccatagataggggatcatcctccgactggggatgctggatgccaagcatatggtcactgcagtgt

SEQ ID NO: 67616 - DNA, 2060 bp, Zea mays
  Clone ID: MRT4577_161661C.1
ccatacgtccgcccttcgtccgctcacttgcatccattttctctgcctctattgatttggcatggactgggtcttgtgatttgcagcatgatcttccacaagctttcaccaaaattgatgaaaacgtatcctttaatttggacagtccgaagtacagcaatttagtaacccctgttagaattcactcgtttagttctacgctggggttgcggcagagagaacgaactggattagttccagcttctttgcatctatcatcattcaaatctgctgagtacttcggagctatgagaagcatcctgaaggacccaatgccaaatatgcgaaggtcctgttctcaaaggtctcctgggacgatagagaaattaaatgttgttcttgcacgtaaacccacatatatctcatctacttcaaatattatcaatgatggggcacggctactgttaccccagactggatatgaacatgatgtcgttgttgcagtatacgaggatgagcccaccagtattatatcatatgccatgacatcagaagaatatgtagaacaagtaacacacagactgaattccagtttgagtttttctcatcaaccaaatactaatgggattagcagccatggacttgaggcgtcctctccatctcaaggagaccatttgcattccaagggaactcattttaagttatccttcgatgatgactcaccgatttctccagataaaacaaagttctctgtgatttgctattttgcaaagcattttgctgcgctgagaaagaaatgctgtcccaaagatattgattacatacgttctctaagtcgctgcaagagatggaacgcgcagggtggaaaaagcaatgtttactttgcaaagacactggatgaaaggttcataatcaaacaagtcacgagaacagagctggagtcttttgtagagtttgctcctcagtacttcaagtatttaatggaatccttggcttctggtagcccaacctgcctggccaaaatagtagggttatatcaggttggcgtcaagagcttgaaaactgggaaggaagtgaggatggatctgatggtgatggaaaatgttttctttgaaaggaagatatctcgggtgtatgacctaaagggttcattgcgctcacgctacacggctggggacagcaaagtcctcttggatgcaaacctcatagaggcattgcatacgaagcctatatttttggggagcaaggcaaaacgaagattggaaagagctgtctggaatgatacttcattccttgcgttggcggatgtgatggactactctctccttgttggcatcgacgaggagaagaaagagctcgtcatcggcatcatcgactacttgcgccaatacacctgggacaagcagctggagacgtgggtgaaggcctcgggcattcttggtggccccaagaacgaatcccccaccgtcatatctccaatgcagtacaagaagaggttcaggaaagccatgtccaagtacttcctcaccgtcccggaccagtggtcctcttgacggcctggctagctaacaagaattgtccgccttaaccagaagcgtttgccgtgccatgccatgccatgccatagtacatgtccgtcattctttctgtgcctagaccctagagagagagagagagagagagagaggtagtcaaattcattttgtgtccgcctgtaccatctgtagcagccatagataggggatcatcctccgactggggatgctggatgccaagcatatggtcactgcagtgtccagccacagatagagaggcttggtccatgactcccatctccatgtacattacggccagcatataatatgtctgaggagaaaaaaaaaggaaatctgtcgacgaaatgcagagaattcttttgatgcctttgtggcatgtatgcagactgtgaaggctattgcaatgtgtcacccccccgtaatttcgttggaagtagttgcggttcacctgccgtgagagtgaaagctattgcatgtatcaatgagctcttgacggttcttgtcaaatactcctagttaagtttc

SEQ ID NO: 67617 - DNA, 221 bp, Zea mays
  Clone ID: MRT4577_161662C.1
gcacgaggaactagtcttgagttttttttttttttttttgctgtgaacttttaaaacattttcatgttgtagtttttgctaatacaacagaccaacaaacagtcaaatcattgtaaggatagccagaagtcatgacaacttatattgagaacatagggaaacaatcagattatgatgataacagaagaaactttaccgaaacaggcaaggtcagcagccga

SEQ ID NO: 67618 - DNA, 218 bp, Zea mays
  Clone ID: MRT4577_161663C.1
aaatacatcatccttttttttttttttttttgggggggttttatggaggataaggggcgtaccaccccggagcacgaaaagcgccccggaaaaaggaacccggacgtgcccaaatggaggagacccataaccagaaggggcccattgcacaggaagccaatacacggacgaagacacggggaagaaatgagaccagaagaaacgagggcacacgcaca

SEQ ID NO: 67619 - DNA, 521 bp, Zea mays
  unsure (1)..(521): unsure at all n locations
  Clone ID: MRT4577_161664C.1
ngatcaaccacgccggccgggaggatagcttgtctaccctccgcttcgtttcactcttcccggcttcaggactccctcgcgaaataagggcccgcccttttgcgacattcacagcgcgggataggaaatcattgtccatgcactcgattgcggcgacgaccttcggcaccatcgtatcaggcctcctctgtgcagtggatggtgccgacggcgagatccatgtcccccactacgtgatccagggacgggcgtattgcgacagctgacgcgccactctcgtgaccaatgtcaccgaggacatagatggcgccaaggcgaagctgcagtgcaaggacttccgcagcggcaagctctagcgctccatccaccgctggaccgacgtcaacggcactgacattatccagctcaaggacagccacgaggaggacatctgctaggtgatcttggtggagagcccgctcaaggactgcgaccactcgcctgcggacagggaccgcggcggagacctgatcaccacgaac

SEQ ID NO: 67620 - DNA, 637 bp, Zea mays
  Clone ID: MRT4577_161665C.1
gggacgcgtgggtgggtgcgctgctcaacgtcaagggcttttttgttttcctcgccatcaactttgggaacaagagcaacggatggggctagaccatgcaggtggtgcttctcctatcatccatcatcaacacgttcatggccgggccggcgtccgccggcatcgtccgccagcagcgtcgtgcctaccactatcgctcacgctgcctcgaggaccttagcctggcccacgagcttcgtatgctcgtatgcacccacggtgccactagcgtctactcgatgctcacgctcagtcacctctccaggggcagggcaccagtcgtcgccgtgtacctgttgcaccttgtcgagctcgcgacatcgcgcaagtacgccatcacgcagcagctataccacgcccgggatggtggcgacgatgaggacgagtggggctacgcacgtgagatcgagcatgtggcctccgccgtggctaccttcacctatgacaatgccatcctcgtgcggcagatgacggccatatccagcttgggctctatggacacagacgtgcgcaactgtgtggaggatgcgcgtgcgtcgctggtgatcatgcccttccacaaggagcagcgctacgatgggcgcatggtgtgccggca

SEQ ID NO: 67621 - DNA, 1229 bp, Zea mays
  Clone ID: MRT4577_161666C.1
aattcggcacgaggccgctctgaatgccactgccactgcccgctccacgctcctttccctctcagcctctctctagatcacaggaccaacccgccgttccgccggcactctctgtccgtctctcctccgcccggatcgccaccgcgcaggagcagcagcaggcagccatgatcctccgcagcgcggcggcgtcgttcgcgctgctgctgctcgtcatcccggcggcggcgcaggacggcggggacgcctcccgcttcgcggcgccggcgtcgtgggcgttcccgaacccgcggctgcgcgcgtcctacgccgcgctgcaggcgtggaagcgcaccgccatcttctccgacccgtccaacttcaccgccaactgggcggggcccaacgtctgcgcctacaacggcgtatactgcgcgcccctccccggcaccggcccccacgacggcgccgtcctcgtggtcgccgggatcgacctcaaccacgccgacatcgcggggtacctcccggcgtcgctgccgctgggcgtccccgacctggcgctgttccacatcaactccaaccgcttctgcggcgtcgtcccgcccacgttcgcgcacctgcggctcctccacgagctcgacctcagcaacaaccgcttcgtgggcgggttccccgaggtggtgctgtcgctgccggcgctccggtacctggacctccgcttcaacgacttcgagggccccatcccgccggcgctcttcgaccgcccgctcgacgccatcctcctcaactccaaccgcctccgggacccgatcccggccaacctcggcaactcgccggcctccgtcgtcgtgctcgcgcacaacgcgctcggcggctgcatcccgcccagcatcgggcggatggccgacacgctcaacgagatcgtgctcatcgacgaccagctcacgggctgcgtcccgccgcaggtcggcctgctccggaagctcaccgtattcgacgtcagcgacaaccgcctgcaggggcagctcccgagcgccatcgccaacatggccgcggtccaggagctcgacgtcgcccgcaaccgcctcgagggcgccgtgccggccggcgtctgcgcgctcgccagcctcaggaacttcacctacgccgacaacttcatcacctcgcgcccgctctgcgccaaggccaccgccgacggcgcctggaactgcatccccggcgcgccggcgcagcgcccgcccgcgcagtgc

SEQ ID NO: 67622 - DNA, 483 bp, Zea mays
  Clone ID: MRT4577_161667C.1
cttgttaactaaaacgtgccagaatgctcaattgttatgggatctggactagatgaattcccgggtcgacccacgcgcagtaacaacttttaagtttacctttcatcagggccaactgttcatgattcatattattgtttaatctttacctccttcctataagatccacatcactaacatccataattctgagaatggaactatcgctatcgtgatctgtaagtgacatgggaagtatcatccaagagtctaatgaaattctgaatttttatcacctgagctagcagcactgtgatctgtcagaaacattaggggtaatacccagcaatggtgaccgagttatgaattttacgggtctgagtgagcagatgctgtaatctgatctagcaacatcattgcacgccaaaaaagtttttgtcgcattaacaaaatttctttgcacatcgtttaaggtggccaaggacccacctggcaaggatatca

SEQ ID NO: 67623 - DNA, 263 bp, Zea mays
  Clone ID: MRT4577_161668C.1
aggggcccaaagaaaccagttattttttgggagtatatttcagagagggactgtgaacattaccagcagggttaacgattcaactggggttttgttaaccatccacgcaagggggggggggcgacaattttctttttttttacaaaaatggcccccctgagggggagctggaccccccttatttgtactacgccccgatagcggggggcaggcaaggcctcaggtctttgaaaccagcgcgggccggaacatcctaatcaaaa

SEQ ID NO: 67624 - DNA, 354 bp, Zea mays
  Clone ID: MRT4577_16166C.1
tttcttttttttttttttttttttttttgggtttatgaactggtttcttttttttttttttttttttttttgggtttatgaactggcaaatgcatttgctccttgctcggctaggtaatgcatttaataaactcaacggctgtggcaaccgccccggccgtaatggcttccttaacaaccttgcctctgtccctgttgctggccccggaaatcagggcgccggacaaggcccccccctgtccctgttgctggccccggaaatcagggcgccggacaaggcccccccacaccatgcccacataaactccagcaacagtgccccaatatgcgccctccttgcacatcttcctcagg

SEQ ID NO: 67625 - DNA, 110 bp, Zea mays
  Clone ID: MRT4577_161670C.1
tccagggacgcgtggacgggagttggaggccgctggtatcagcagccaggctgagctcctcatactgaagcaggactactaggacgcccggacccgcgaggagagcgtga

SEQ ID NO: 67626 - DNA, 1036 bp, Zea mays
  Clone ID: MRT4577_161671C.1
gggcatgaacaataccattgcgtagtattgatgtcttcgtacttgtagccgccctatgcgaacggatatccacgacgccctttccccttatgtatgaaccggctctcgtccctgccacgtccaaaagccaaaaccaaagccgaccaagtcgaatatcgtaattaccatattaaggcattattataccgagtgaacacaaaaggtatctatacagaaacgtatcgagacatcaacacatcaaccaaactcccaacaacttcgttctccctttacagagcagccagagcgaaaccggcggcaaggaggagaggagcggcgaggccacgtccgtcgttggtgctggcgacagaggtggaagcagtggaagatgcggaggtcttggtggaagagcccgaggtggtagaagtggccatggtggagtgggaagcagtgccgctggtggtggtagtggtaccagtggtggcagtggtggaggtcgtgtcggtggtgctggtcgtgccagtagtgctagtagtggcagtggtggcagtggtcatggtggtgctggcagcggtggaagtagcactcgtggcagagctgacggcggcggaaccagcgaactcgaactggacgctgtagttgttggagtcgtcgctagtgtcaacaatctcgaaagcgtagacatccgtggtcagagaggtcggcaggacgacggtggtggagtcggcagtggtgctctcgaccagagtctcgacagtgtcgaggttgccggagggaccgttcttcaagaggatctggtaaggaccagtaccctcggtccaggtaaggacgaaaggctgtccagcctcaacactgaagtcggtgttggtgaacttgacagcgttggccagtccagagaggacggcgaaggcgacagaggcggagacggtgaaagacttcattttgacgggtttgaattaagagtgaatgagagtcgagaaaaaagcagttcagaactgtggaatattagaaagattgtaaaaacgacgcgttgacttgaatggaaaccacgcgtccg

SEQ ID NO: 67627 - DNA, 269 bp, Zea mays
  Clone ID: MRT4577_161672C.1
gtacacttaccattttttatgactgtgactgtctattcaaaagataaacaaggggcagaacaagaaaaaaagcaggacccataaaaaagcatgatagaacgcaagcacaccacaccaaaccagaccagaccaaaagcttcttccaaaacagacgaggcgcctcatgcaaaaaacggcaactacgacatgaggggctacaccacctaccaggtaaaatcggggtcgtccctcccaaagtgcccgtaggccgccagcaaaaggtacccccc

SEQ ID NO: 67628 - DNA, 812 bp, Zea mays
  unsure (1)..(812): unsure at all n locations
  Clone ID: MRT4577_161673C.1
aaaaaattcatcacaagctaaagtagaagagctgacaaggaaggttgctgaagcaaccaaaaaatttgaagttgaagcggtgaagcatgagatattcgagatcgagaggtcaagagcacaaaggaatgacgatgagcttcgtgcttccaaagaaagatgttatgaagtatccctagaatgctccaggaaattaaaggacaactttgttaaagttggggcatattcctctcagtagggattcaactgcggcgaccctaatggagttgtccagtggatcagcggggaagtctaagctttcgaagaaattcatagtgatcgaggagatttctatgcttttgctggtgcccagggggccacatccatcttggagaaggctggttgcgaacatacgaaggctgtggctcagtcaaactcgccttctcggttgatgatataaaaaatccttcaaccgaagcttctaccctcggtgggaaattttactccaagatatggctgaagggcagacgagaagtcattgatgaagccatgaaaaggaacaaaaaggaatcacatgatgcttcagaagcggcgaaaagggctgaagaagctgccaagcgggctaggcttatggctaaactatctccccctctggagccatatgatctagaggccaacccattcctgaaggaggcacttgagactatgaaaattgccaatgaagctgttgacgaagctgtcaataagctattaaacgaagctgccgagaaggtcctgaagaagactagaacttttattnttgctangttaatatcgntgagcatgatcactaatct

SEQ ID NO: 67629 - DNA, 355 bp, Zea mays
  Clone ID: MRT4577_161674C.1
agaatgcacaataatgaaccatctatggcgaccataatatcaatgcctacttatgctccgtcctctaccagactaggctgttaccacaaccatgcttgcacattgcttacactctcctatagattccctgctacccacatacctctgatcacagacatcaataccttgagaaaacccaacacttcaacactacaggatccaacaagcattcacagatggcatcttacgtacatcaccctagttcctccaacaatcatcatccgtattacatcagttacctcaggtgcatttattgtcacagaacatcatgacacagctactactacaacttgtgctagcaaacatcgctgcctac

SEQ ID NO: 67630 - DNA, 248 bp, Zea mays
  Clone ID: MRT4577_161675C.1
cttcggccgtctcgttactgctagccgatgcggacggggccgcgctcgacggcaggttctacttatggctggtggtctcgtagatccggatacccgactcgggcgacaccgggtgtcagcccgacggcgaggggtcgtgggcagtcggtatgttctacggcagcagtcccctcgcgctctcgcccatcaagctggaagggagaagcaatggcaacagctcatcgtgaactatattaaaaatcgatttt

SEQ ID NO: 67631 - DNA, 339 bp, Zea mays
  Clone ID: MRT4577_161676C.1
aaaatatcatagtcaaggtctcgcaaatagaggcaagaacacatgataggacctcaccacatttggcgcagagcagaataccccatctacacgacaaggtacacaagggactcaaaaaatgaaaggagaacgcaacgtgcaaaaagccctatatacacgggaaggctacaaaaacactataacaagctttagctgccatatccagttcaaagcgccgctggaagttcagttgctggacgcatactgccgacaacaacgcgaagaatactggaaagagtaccaaaaccaatgtaatgaccggcagaaaaaccgtgagggattcaaactgatgagggacat

SEQ ID NO: 67632 - DNA, 142 bp, Zea mays
  Clone ID: MRT4577_161677C.1
ccaaatcaaaagtccactgtaatagtgcatagaatacgcgtcaaaaaacttgccgtgtatttcttaatgacacatgcaaaactacttataaacactcatcattgtgctagtcgaacacagctatcacctagaacttgcaata

SEQ ID NO: 67633 - DNA, 260 bp, Zea mays
  Clone ID: MRT4577_161678C.1
attcggctcgagcgcatgcatagaacaactttatttcccgaataaatgcaggggctactgattgaggtggtcatgcactgttaaggttgtaccctaggaactgaccagctgatacttgtgacgccgtggttgtaagggttctacctgatgggccgcacgggaagctcgcatgaccacagccatggcgcacgtaccacaaatgcgaggactactggagctagaaactgcatcgggcggtaccatgccctggtgctcatagc

SEQ ID NO: 67634 - DNA, 146 bp, Zea mays
  unsure (1)..(146): unsure at all n locations
  Clone ID: MRT4577_161679C.1
gnntaccttgcaagggcggtaacccaagctttttcccctantaagttgaagtccgttatttaagaagctttgggccgtaaattcattggttcataaagctcgttttccctggtngttgaaaattcgttaatcccggctgcaccaat

SEQ ID NO: 67635 - DNA, 364 bp, Zea mays
  Clone ID: MRT4577_16167C.1
ggcaaccaaactaaacccatacaaatttttccatacccagtgggagtttggggattaagctacattgagccaacaaaaattcttgggtgtggaaaacactattaaggccttggacaactacaagggttctgcccaagggtttaggctcgagcccattttcaaagcgacacctgtttatttttggtgccaggaccgccggctggttcgccaactgacttgaactggcccgcctgggcatccccatggacaccgggaatggggtggttcccagcaccaaaaatgtggaggatacggactaaagggccaaccgcggtggtaattatgtacttgttggtagaaggcggttttttgggcaattgaaatt

SEQ ID NO: 67636 - DNA, 215 bp, Zea mays
  Clone ID: MRT4577_161680C.1
gaagaaaaatcgcaaagtgccaggcatagacaagataatgacatatggggcggcccacacaggtctgtgtggggttctacggacacttcgtcaacagtacctctatactacgcggactgaacaggtgcaacactgaccagagaatgatgattaaaacgaagatcctctgcctatgcttgtccgaagtctcgacataagatctgttgcgggcccaa

SEQ ID NO: 67637 - DNA, 2202 bp, Zea mays
  Clone ID: MRT4577_161681C.1
cccaaggtccggtggagttagtgttcctcgtctcgcgtcttcttctactcctccctccgttcccgttgatgcgagcgaaacagatcaaaaaggagattcgagagagagaaaaaaaacaggaaacaaaaaaaatccaccgctcccgaggcacggcggcgtcgagcgcgcgacacctccggcggctccacagtgccggcgatcgagctccgcccgcccgcggatgctccgggctcggcgcggtaaggcccaggaatccacgctcgtagccagatctcggggtggtgctcggaagtggagttcgttcggtccctgcctccctggtggggatggggtggtccgccgggctgtggtggcttttggcggcggtgtgggtggtggtggcggcggctgcgacggcggagggtgaggtcgcggtcggggcggcgccgaggcggcacgcgtacgcgtcgatgatgtacatgggcacgccacgggactacgagttctacgtggccacgcgcgtcatgatgctgtccctgcgccggctcagccccaacgccgaccgcgtcgtcatcgcgtccctcgacgtcccgccgctctgggttcaggcactgaaaaatgacggggtaaaggtggtctctgtgaagaatttgaaaaatccttacgagaaacaagaaaatttcaacagacgattcaaattgactttaaacaagctgtatgcatggagcttggtttcatatgagcgagttgttatgcttgactctgacaacattttcccccaaaatactgatgagttatttcagtgtggtcagttctgtgctgtcttcatcaatccctgtatcttccatacaggtctctttgtgcttcagccctcaatgaacgtttttaagaatatgctacatgagctatcggttggacgtgaaaacccagatggtgcagaccaaggctttcttgctagttatttcccggacttacttgatcagccaatgttccatccaccagctaatggtacaaaacttcggggtacttatcgcctccctctaggctaccagatggatgcatcttactattatctgaagcttcgctggagtattccatgtggaccgaacagtgtgattacattcccaagcgctccatggtttaagccatggtactggtggtcttggcctgttttacctttggggctctcttggcatgaacaacgtcgtgaaaacctagggtattcatcggagataccactagtattaattcaggctgtactgtacattggagtcatagcagtgacccgacttgcgcggcctagcttgtcgaagatgtgctacaacagaagaatggagaaaaacactatgttcttgctctcccttctcagaatagtggcagcttggtccatacttgctgcctacaccatacccttcttcatcatcccaaggaccgtgcatccgctgcttggctggcccctctacttgctcggttctttctcactttcctccattgtgatcaacattttcttcctccacccgatcaccgtcctcacaacatggtttggattcatcggcgcactcgtggtgatggccttcccttggtatctaaatggcgtcgtcagggccttggcagtgtttgcgtatgcgttctgctgcgcgcccttgatctgggcttctctggtcaagacaatgagctccttgcaggtcctgatcgagagggatgcattcaggctcggagaacctaaccagaatgccgagttcacaaagctatactgaggtgggcacggcagatacgtatggttggccacttctgttgctcggtttggacagctatctccattcacgttggcaaattctgatgggcaattcaattgtacaagtaaatctgcagcctgggagcaagaggagttgtatcttgtggaacccatcaggaaacctcaagaacccatggttgttgttgtcttgcacatgtaggtgacaatgacatacaggggaaattggtgcgggaactgaagaggaacggtctgggggccagttcttagctattttgatttattgttcctcggaaaggccaagccatttttggctttgttttgtactgtaaatgatatgatcggtttcgtcaccaatgaagaaaagggttggaagtccagacggcgtgatgttagaaacagtacttcgtttttaccgtggtataataatagtgtggcttcacctgaacgttttatatccctttcgtttt

SEQ ID NO: 67638 - DNA, 1506 bp, Zea mays
  Clone ID: MRT4577_161682C.1
gaattcccgggtcgacccacgcgtccgccttaacaagcaagacttcaaattcacagagcatcaaacaactcttcttctagctgcagattcaattgggaagaagattcaatacaattgaagctcgtgctgctttaggagagttcaaggaggccattgaagacttgactaaagcattggaatttgaaccaaattctcctgatattttacacgaaagaggacgaagaacatcgcaaagttagttaggaaaagggataaacttaacatgagccagaacaggggaggttattgtagcactagcactttggctggatctccaacttccagcccaaatgaagacagggtctcctccgggatctctctttcctggcaggatgtctataacattgctgttaagtggagacaaatttctgaaccttgtgatccagctttatcttgatttggcattagtccagagagaagttgttgaattgccttgagaaagctattcaaattgattcaaggttcgcaaaagcttaccatctgcgtggaattctctaccatggaatgggtcgacataggagtgctattaaagaattatcggttgctttgacatatgaaagttcaagtatagaagatattgacaagttgaaaaagatagaaattgcatcgtcatgctcagatttgtaccatgtagttggtgagacctactgggttgctacaagatgtgatagtatggcgtttcgggggaggcgccttgaagggacaagaattaccactcaaaacataggcaagacaggatttgactttgcaattcgaacaccttgcacgccatcgagatgggaggagtatgatgaagaaatgactgcagcctgggaggctatttgtgaggcatattgtaatgacacaaaccccacacgagaccctggtgtgcttgatgctgtgaaggacgcgatattgcggatgacatattactggtacaattttatgcctctttcgagaggctcggctgttgttggctacatagtgttgctcggtttattcctggcagcaaacatggatattactgccagcattccacccggtgtccaagttgattgggaggcgatcctgtctccagatcccggcacatttgttgacgccgtgaagccctggttgtacccatccacaaaaataagcaggtgcctgaaagattacacggacgtcagctgcgcgttcagcacgacaggttcggttgtagcggccctaacatctgttgacccataggttatttgtccaagtgttataggttgctccagttgttagtgtatttgtttcaaaatacctcagctttgcttagcttgtcagaatttctcagtttgcaaaaagtttgtatgtttctgtgttgtatacagatatgcagtaatgttgtaacttgaaaaaaaaaataagatttattttcattggaacaagttttttttttttgtaataaacagttaaacaccaataagttttgcagttacttctctcgtgcaggggggggggggggag

SEQ ID NO: 67639 - DNA, 511 bp, Zea mays
  Clone ID: MRT4577_161683C.1
tttttttttttttttttttttttttttttttttttttttttttttttttttttttttttttttttttttttttttttttttttttttttttgggaagcaagaagcccactaaaaggggcttggtctttagttcaattacagattgaccatacggggctttttgagaagctagctagctagggctaggagtaaaaacctaaattaggccccgatcgaaaagccgcaaaagaaaaacccaggaaaaacaaacaaacaaacaaacaaacaaacgagacaacccagatcctagctatgggtactaaaaaaaaaacgcgcgccggccggccggccgggctgtgcaccccaacctccgatactggccgttgcctggcactggccgggggccgcgccctcggctaaaaagtctcaatcggagagggttaacatgatggcgctgcggaggtactcgtcgagggcgtcccccctttcccggggggggccccggacgggggcccccaagcgggcggggtgc

SEQ ID NO: 67640 - DNA, 1336 bp, Zea mays
  Clone ID: MRT4577_161684C.1
ccagctttatcttgatttggcatatccagagaagttgttgaattgccttgagaaagctattcaaattgattcaaggttcgcaaaagcttaccatctgcgtggaattctctaccatggaatgggtcgacataggagtgctattaaagaattatcggttgctttgacatatgaaagttcaagtatagagtgcctatacttacgtgcctcaagccatcatgcaattggagaatataaagctgcgataaaaggttatgatgatgtacttgatttggaacttgattccatggataaatttgtgttgcaatgtttgtccttctaccagaaggaaatggctctgtatattgcttcaaaggccaatttagagttctctcagttcaacattgatgatgatgttgacccactatttaaggaatactggtgcaaacgactacatcccaaaaatgtggctgaaaaggtttatcgccagccaccgttgcggatctcattgagaagtgggcgccttaacaagcaagacttcaaattcacaaagcatcaaacaactcttcttctagctgcagattcaattgggaagaagattcaatacaattgtcatggcttcttaccaaatcaacgtcaggatgtctataacattgctgttaagtggagacaaatttctgaaccttgtgatccagttgtttgggtcaataagctaagtgaagagttcaattctggatttggttctcataccccaatgcttcttggtcaagcaaaagttattcgctactatccatattaccaaagagtcttggaaactgcgaaaactataatgcttgacttgaagtatgtcaataatgcagaggaccgtgcaatttttcttacagatattgacaagttgaaaaagatagaaattgcatcgtcatgctcagatttgtaccatgtagttggtgagacctactgggttgctacaagatgtgatagtatggcgtttcgggggaggcgccttgaagggacaagaattaccactcaaaacataggcaagacaggatttgactttgcaattcgaacaccttgcacgccatcgagatgggaggagtatgatgaagaaatgactgcagcctgggaggctatttgtgaggcatattgtaatgacacaaaccccacacgagaccctggtgtgcttgatgctgtgaaggacgcgatattgcggatgacatattactggtacaattttatgcctctttcgagaggctcggctgttgttggctacgtagtgttgctcggtttattcctggcagcaaacatggatattactgccagcattccacccggtgtccaagttgtttggtaggcgatcctg

SEQ ID NO: 67641 - DNA, 432 bp, Zea mays
  Clone ID: MRT4577_161685C.1
aagcagagagggttcattactaatatggagccgttattcatattgaacaaacccactctagttatcaatgtataatatacatattttatacaatttcaaactatagggccagaagccacattgcccttttcagaatgctaatagcactcccaaagaaacaaggaaggctccacctttttttgccgctatgtagcacaacctttaaatctctaaccctttggtttgggcctttttcaacttgaagaaggtctattaattcacatatacaggcacacacatgtacttgaaagtctatgagaaggcaccttaccattcatggcactccaaatgtgataacttgagggtcaaaaacccaattgcttttctttcaaacactgatggttttcccaataccgcatcccaagaacacaagaatggcttttttcttttccc

SEQ ID NO: 67642 - DNA, 672 bp, Zea mays
  Clone ID: MRT4577_161686C.1
gtcacctttttttttttttttttttgggttttcttgatccccaactttttttttttttttttttttttttttttttttttacttataacatcatatttcaatttaaacggcattgttggagatgttctaacatctcagctaaagcctaacatcatcagcttcagtgagtgagtgcgtaaaagtagcaaaagataccggccgtgcgcaagaccgaactaatcgccatggcgcctccgtccccacatgcgctcgtcatcccctacccggcgcagggccacgtgatacccctcctggagctcgcccacgcgctggtcgaccggggcttcaccgtcaccttcgccaactccgagttcaaccaccgccgcgtcgtggccgccgccatgccggagtcggagtcgccgacgctgctgggccggagggggatccggctggtggcggtgccggacggcatggggcccggggaggaccggaacgacatcgtctcagggctgtaccctgtctcacgggcgggagcacatgggcgccctcggggtgggaggacctccatcagggcgccagccgcgaacgggcgacaggcggcgcggaaggggcgggcccatcaccttgcgtcgtggcggactacaacgtcggggcgtgggcgctcgaagtggcgcggaagaccggcgtcaggtc

SEQ ID NO: 67643 - DNA, 311 bp, Zea mays
  Clone ID: MRT4577_161687C.1
tttttatcactcaggctgtggctctctatgccagggggtgttttgaaaatgttctggggcctaccgccgacccagagagcgttactgatgtccgttaagacagggatggctgtgctgacgacacagaggctggacgtgctgccggacccatacaaggtggcgatctccacgtactactggcgggtgcccgttctaggacaatatggggtgactccacaagaaccctccctaggggagactcctgaagaggcccctcgaggggcctcaggcccaagtcaatggaccttccttggtggtggagatgaagcttg

SEQ ID NO: 67644 - DNA, 398 bp, Zea mays
  Clone ID: MRT4577_161688C.1
gagcaatctccaggaacgaggcccaagctttttttttttctatgtttttttttttagccgctttagcctttttactgcaacaacagcttttgccattccatctgcaagctgtggcaaacattgttgctttcttgagacaacaacatttgatgccattataccgcgggggggggggggaaattaatgccttcttgcaacaggatcaattgctaccattctacccacagaatgtgagaaacattgctgccttgttgccgcaacaacaattgctggcatttagccaacatgctgtgacgaatgctaccaccttattggaaccggccaccattggtgggggggttttctagacttctgatgatttatactgtgctacctaggttcttatggggatatgtggg

SEQ ID NO: 67645 - DNA, 230 bp, Zea mays
  Clone ID: MRT4577_161689C.1
gcgcctggttggaccgttgacccgctagtccctgtgctgcatgcagctacgttgatgagaatgagatgagccagccgctttgctgctgctgctgctgctgctctttcacctagttggtctccgtatcttttagctctggtgtcgatggacgtgcagtttgtctgtactgtgataatggagttgcctggccaggagaacaaaatcatggtagttttggaaccccatttttt

SEQ ID NO: 67646 - DNA, 182 bp, Zea mays
  unsure (1)..(182): unsure at all n locations
  Clone ID: MRT4577_16168C.1
gatatgctttgtncaacgacagngcccagtgntaaggacagtgatgctgatgacagnnagactgnaaccagcttggaccacccccttgtnctcccatgagcaaacagagttcttcctattctgatagagacacnactgaagaggagtctgaatcntggatgatctggantccttacaaggca

SEQ ID NO: 67647 - DNA, 308 bp, Zea mays
  Clone ID: MRT4577_161690C.1
gccggggaataccccgggctcgacccactgcgtcacgatcaattgtagatatcttacacgtgcattacctaggagctacggccaacatttaccatcgctaatcatattgtagataaattagtaaattctctgacatcatatgtattatagctgtaaatttttaattaaataacgtcactgaaatgacatttgcgttaagaattgctggaaggtaatgaatatgtaacctaaaaaaactactcttggctatgatgagtgacaaaggcctaacaattggggcggtggttataagggaacaaagtttatat

SEQ ID NO: 67648 - DNA, 1716 bp, Zea mays
  Clone ID: MRT4577_161691C.1
ccgggcacacaccaggaccaggaccaggtccagcggcagccccagcgcagccatcggccccccgcttccttactggggcggcgccgctgttggcgcagaggagcagaggtggcgcatcggcatggactccgccgccgctgccctcctcgactccgcctccgcgtccgcctcttccgccaacgccgcaggcaaggagatgcccaccgcccgccacatcgcccaccgcaccgcccacaacatgtcctcctcctcgctccgcaagaagtccgacctcgcgctcctccgcaaggtcccctgcgccccgctccgacgcctcctcgacaacctccaggaggttttgctcgccaccaagctcgccctcctcctccccgccgttctactcgcgatcgccgcgcgaatcttccacttcggccaggaatgggtctttgtgcttagcttgatcggtctcgttcctcttgctgagcgacttagctttctgactgagcaggttgcgttttacatagggcctactgtgggtggactgttgaatgcaacatttggaaacgtaacagaggtcatcattgcgatctttgcactctatcaaggcaaggtagtggtggtgaaatgctccctgctaggctcagtcttgtccaacctgttgcttgtccttggaacctcccttttctttggtggcctggctaaccttggaactgagcagctatacgacaaaatgcaagtagatgtcagcacaggacttctgattcttggtgtgctatgccactctctgccactgatgctgagatatgctgtgagctccggggagcacgcagaatcctcttgggattcaggactggagctgtcccgagcatgcagcattgtcatgctccttgcctatgtagcctaccttttcttccaactgaaaacccaccgccaactatttgaaccccaaccccaagaggttgaagatggtgatgattcggtctctcaagacgaggcagtactgggattttccagtgcaatgatttggctgggagtcatgaccctgatgacagcactcctatcagagtttgttgtgagcacaattgaggcagcatcggaatcttgggagctatctgtcagtttcattagcgtcatcttgattccaatagttggtaatgcagcagagcatgctggtgcagtgatatttgcgtttaaaaacaatctggacatcaccctcggagtatctttggggtccgctacgcagatttccatgtttgtggtgccattgagtgtccttgtagcatggatcatgggagtcccgatggatcttgattattagtaacggccttcacgctccaggatggatcatcacattatctgaagggactgctgcttgtgttttgctacattgtcatctccttatgctttttcgttttgagacagcatggaaatggaagcaacgatgatcagctgggtgtagcaagcaagccatggaggatttagggcgcctgagctggcagtagtttctcaacaagtagcgtggactttggtttgcacgattttgcatggaacactggaggggagacccgtgaagtttgactaaagtatgtagactgcgggaagatgctgttcagctgatgtgtgaatgtaagtacatacaaagactatagatgaaaactgatgttgcgtgagagactatttgtgtgtgtttttcttgttctttccaccaagcaatggctagaattcggttgagctgcc

SEQ ID NO: 67649 - DNA, 1983 bp, Zea mays
  Clone ID: MRT4577_161692C.1
actctcggcaacggatatctcggctctcgcatcgatgaagaacgtagcaaaatgcgatacctggtgtgaattgcagaatcccgcgaaccatcgagtttttgaacgcaagttgcgcccgaagccttctggcggagggcacgtctgcctgggcgtcacgcagccccagcgcagccatcggccccccgcttccttactggggcggcgccgctgttggcgcagaggagcagaggtggcgcatcggcatggactccgccgccgctgccctcctcgactccgcctccgcgtccgcctcttccgccaacgccgcaggcaaggagatgcccaccgcccgccacatcgcccaccgcaccgcccacaacatgtcctcctcctcgctccgcaagaagtccgacctcgcgctcctccgcaaggtcccctgcgccccgctccgacgcctcctcgacaacctccaggaggttttgctcgccaccaagctcgccctcctcttccccgccgttctactcgcgatcgccgcgcgaatcttccacttcggccaggaatgggtctttgtgcttagcttgatcggtctcgttcctcttgctgagcgacttagctttctgactgagcaggttgcgttttacatagggcctactgtgggtggactgttgaatgcaacatttggaaacgtaacagaggtcatcattgcgatctttgcactctatcaaggcaaggtagtggtggtgaaatgctccctgctaggctcagtcttgtccaacctgttgcttgtccttggaacctcccttttctttggtggcctggctaaccttggaactgagcagctatacgacaaaatgcaagtagatgtcagcacaggacttctgattcttggtgtgctatgccactctctgccactgatgctgagatatgctgtgagctccggggagcacgcagaatcctcttgggattcaggactggagctgtcccgagcatgcagcattgtcatgctccttgcctatgtagcctaccttttcttccaactgaaaacccaccgccaactatttgaaccccaaccccaagaggttgaagatgggtgatgattcggtctctcaagacgaggcagtactgggattttccagtgcaatgatttggctgggagtcatgaccctgatgacagcactcctatcagagtttgttgtgagcacaattgaggcagcatcggaatcttgggagctatctgtcagtttcattagcgtcatcttgattccaatagttggtaatgcagcagagcatgctggtgcagtgatatttgcgtttaaaaacaatctggacatcaccctcggagtatctttggggtccgctacgcagatttccatgtttgtggtgccattgagtgtccttgtagcatggatcatgggagtcccgatggatcttgatttcaacttgcttgagactggttgtttgtttcttgcaatattagtaacggccttcacgctccaggatggatcatcacattatctgaagggactgctgcttgtgttttgctacattgtcatctccttatgctttttcgttttgagacagcatggaaatggaagcaacgatgatcagctgggtgtagcaagcaagccatggaggatttagggcgcctgagctggcagtagtttctcaacaagtagcgtggactttggtttgcacgattttgcatggaacactggaggggagacccgtgaagtttgactaaagtatgtagactgcgggaagatgctgttcagctgatgtgtgaatgtaagtacatacaaagactatagatgaaaactgatgttgcgtgagagactatttgtgtgtgtttttcttgttctttccaccaagcaatggctagaattcggttgagctgttgaaattgtctcctgtataaatcagtgacatgtcatactattttccaactggatttaacagagcctttatccttctaattggttacccgcatggtcataatctggatct

SEQ ID NO: 67650 - DNA, 476 bp, Zea mays
  Clone ID: MRT4577_161693C.1
gagcagtacatgtgcctttatagactgaatatacagagagctacgaactccactagtccactacccagccttcacgccatgagccacataactcatgttgctttgcatgcaagcaacctcctcacacacacgaacaagtcactaggcgctagcttctcggccactccttccagcatgcaagcacgcacgcaactaacgcacgcactacaccactcaactagctagtgaccagcaccatgcgcacacacccacggagctagcagttgcactgcatgcacacacatgcacaactgccatgactcgtacacacatgcgctgggattattctaacaaactccccctaatcctagtgtcgcgttccgcactcacaggagcgtcggttcttcatcggccctggctagcagcgccttctcctccttattcttacgaacaatcccgcgcgaagtggccccggttaccgtagatgaagcacttgc

SEQ ID NO: 67651 - DNA, 537 bp, Zea mays
  Clone ID: MRT4577_161694C.1
aaaagaagcttttcggcactttgagaaccaagtatctctccccagttgaaactttcagcaaaccttggatcaaggacgggttgtctgtcgagtaattagacatattatagattgaattcagaatataaatcattgaccaacaaaaaaaaaaaaaaaaaaaaaaaaaaaaaaaaaaaaaaaaaaaaaaaaaaaaaaaaaaaaaaaaaaaaaaaaaaaaaaaaaaaaaaaaaaaaaaaaaaaaaaaggggggggcccttttaaaaaaaaaaaatttaactcccgggggatggaaaaaaaaaatttttttaaaggggaaaaaaaaataaaataagggggcgggttttaaaaaagggggaaaggaaaaaaaccgggggtaaacaaaaaaaaatggtttgaaaaaaaacccctttttccaaagggggaaaaaaaaaaaaaagccccaaacaaatcccttttaaaaaaattggccaacctaaaagggaaaaggaaccccccctttaaggggaaaaaaaaccgggggggggggggggttacccc

SEQ ID NO: 67652 - DNA, 283 bp, Zea mays
  Clone ID: MRT4577_161695C.1
ctgggaactcagccgtagttgtttccctggttggaatcttcattgcagactttgctctctcgtgcctgttcttccagggtgctggtgattcgctcaagtatgcaatgggttgaggtgggtcagtgcagatgaagtttttcctttctaggaggatagcatagtcttgtacattaaaaagaatggtgcactggattctaacaggtgaacattgcaacttctgccgcagtcctggtgacatcatattttttgtttgttattgcaatatgaacttgagtcttgctgc

SEQ ID NO: 67653 - DNA, 243 bp, Zea mays
  Clone ID: MRT4577_161696C.1
atggctaagtataccactagaacttccagtaattgcaacctcgctgacagagagtatgtgctcattcccgagcaaggagttgtccaagaggaagcctatcccgagcctgccgccgaggatctctccgcagccccaggtacgctacaggttatggttgacgatgtgacttggccttccaccctgccaccgggttggacggttgagtgggatgctgcctcgacaggagaggaccaggaggagtag

SEQ ID NO: 67654 - DNA, 271 bp, Zea mays
  Clone ID: MRT4577_161697C.1
cgcttgagaggatgtatttcacggagggagaacccaggcaaagcaagtgactctgaggtgaggggatagcttgccgtgtggagcagccaagctggctagagtgctcaggacagggtactggagacgagcaaggtcgatatatagagaattctggggatctgcaaagggccccccgtgagtgttccacagagcatgattcatcatatacgtgtaaggaaaccacttgagacaaaggaaaggaccacccaaaacaatgggccggaacagtagc

SEQ ID NO: 67655 - DNA, 289 bp, Zea mays
  Clone ID: MRT4577_161698C.1
ttttatttaagtacaaaataggcatctaaatatttacaccaaagagaacttgaacctagattgtctaggcacgcattcacgcctcgaccaactgagctagttcggctttctaattttagctgtttgttccaatctgcctaaagatgtatgaagttaggtttttgctgatgcctgcaccctgcaggtttgtgcaaatactccatatacagaagagggggtctctttctttgaaatttgacgtttgctacctctggtatcttctgttcataacaaacttcttttcattcct

SEQ ID NO: 67656 - DNA, 245 bp, Zea mays
  Clone ID: MRT4577_161699C.1
gtcacgcgttcgtccacacgtccgcccacgcttgccgcgccgactacatgcccatgggcgagcacgatcataacgccagcccttacttcactgcttccgccgctgccgacttcggaccatgatccactgctgctatagctcccgtcgttgccagatacccgtttaccagcctgattcaagatgaggacaacctcatccttgaactcttcctgctccagcaagcaatcgcatacatcatgctgacc

SEQ ID NO: 67657 - DNA, 225 bp, Zea mays
  Clone ID: MRT4577_16169C.1
ctcatcccttactgcctacctgaggttcgatggtgctctgaacgtggatgttaacgagttggagacgaacctggtaccctacccgaggatccacttcatgctaccttagatcggtccatgcatctgtggtgcactagccttgatggaggagcattatgaatatgtgattacaaacatgcgcatgaacaggatgttgcaagatgttcactgagattccaatgccat

SEQ ID NO: 67658 - DNA, 101 bp, Zea mays
  Clone ID: MRT4577_1616C.1
tccacgcgtccggtgtcgctggtcgtggacgtggcggatgtggatgatgagccgttccagtactacggcgagctcaacctgctgctcagcgactggtacca

SEQ ID NO: 67659 - DNA, 384 bp, Zea mays
  Clone ID: MRT4577_161700C.1
ggccttaacggtgggactttaaaccaggctcacattcaggcttacccacatggaaaagataattcaacttccaaaaaaataaaagggttttttaactaaaacggtgtagccaaagacaaaaaaggccactgccaccaaaaagccctcatagaaattaaacactgaaaaccaaagggccaaggcttgaacaaaaaagagggggggccttaggaacaaaataagcctataaaaaatttaatcagggaaattcaccctaaaaaaaaacaccttccggtcctcaaatggtaaccctgaacttcttgacagggttaaagaaaaatttggcttccacgaagtagatgaaagggacacaaacaggctgaaaaaataaaattatgggttttg

SEQ ID NO: 67660 - DNA, 1153 bp, Zea mays
  Clone ID: MRT4577_161701C.1
cctcgaggccggccgggaaaccctagccgccgccagcaaggaatggccgccctcctacggctcaccgcagcccgatccgccctcccccggcgcaccctcgccccacaccggaggctccacacacgcaagttcatgaccaaccgtcttctctctcccaagcagttcgtgctcgaggtcatccaccccggccgccccaacgtctccaaggcggagctcaaagagaggctggcgaagatctacgaggtgaaggaccccgactgcatcttcgtcttcaagttccgaaccaacttcggaggcggcatactatgccacggccggaggaggaaccgctgtcggcctactccacctccacggctccacctgtctgctctctgtctgccccgcgtcctcctccgcagcacgacgaccgcatcgcgttctacgttctccgccctccccgctccccctactctgcttggtttcccagaagatttgattggtttccccaaatctggtgactccattcctgttgttcaccggcaggccccaaatctggcaaagatttgattggtttccccaaatcgggtcgtccccgaccttcctccgcttcttcatgaggtacaggcccgcgagcagcccgagcgccgccagcgcggcggcgcacggcgcgccgacgaccagcccgagcttccagccggacagcttcttcgccagctgtcgtcgtcgtcgtcgtcgtgcagcacctctacggtcatgttccacatcttcacgcagttgagctggtagtcgcccgcgctggtggacgccgagaagccgaagtaggcgtccctggcggcgacgaccgcggagaggtccagcgacgcgtcgagcgtggcggcggacagcttggtgccgttgggcgaaatgtacgcccgtaggcaccgcgtggcgccgtcgtagtcgacccagacgaagttgctgccgtcgctggcgccggtgtcgcccggcgcgagcttgatgcccaaggccgcgagcgggcaggtggcgctggaggagcggacgccgttgacgtcgaggccgatgtggttgccgtcggggttgtagggctgcttcaccatgtccagctccatggcggcgaacccgttggagaaggacgccacgcggcggccgtcggcggcggcgctggacgcgttgg

SEQ ID NO: 67661 - DNA, 462 bp, Zea mays
  Clone ID: MRT4577_161702C.1
ggccgggatcagtttcacccaccgactccgccgcctactactatcttaatcgtacctgtactctccggagagggttgcgctagagtattatccgatccgcaatgtcgaccgaggaggatgttgtgcctgacgtcccggtgatcgacgtgccagaggaggtcccggcagcccaacaggacgaggcgcccaaggcgaacaagggggcgaaagacaataaagcccctacggagaagaagctttccctgggaagcaagccagctgcgcactctccctaatctgaaaggattggatagggaatcgctggcctgaaggatacgatggtgtcgagctcggggacctgcttgaagttgatggaggccaagcatgctggcaagctccgcaccaacttccgctagcagatcactgtgcagctgatgaatctcgctgacgcctggtaagctgacaagggtgaagaactccttc

SEQ ID NO: 67662 - DNA, 255 bp, Zea mays
  Clone ID: MRT4577_161703C.1
ctcgagccgccatgttcggctgcaccgacaccaagcaggtgtacaaggagctgcaggagtacatcgccgcgtacccggacgccttccaccgagtcatcggcttcgacaacgtcaggcagacgcagtgcgtcagcttacatcgcctactagccccccggcagcgagtagagtccgtggctagatagacccatggccatgcatctgcatgttgatcggatcaccttcttgcattggttcctactaatcactcccccc

SEQ ID NO: 67663 - DNA, 864 bp, Zea mays
  unsure (1)..(864): unsure at all n locations
  Clone ID: MRT4577_161704C.1
ggggggggggngggcgatgggtacctcgaggcgggcgggatctctcatattttggagagagtttgcctctatcccgcccacctcgctgacggtgtctccgccaccggcgtcgctgccaccagagccatgcattaagctcgacccttccgcaaactatgcactatcactatggcatcggcggtccaccgatccctcgaatgcagggctcagatacccggcaccctcatgaggactagaccactccctgctagaatagaagcttctgcaaaagatgactagaaaaaacaaaaggaagcacagagccagaacaaaatcgaggataaaaagaagaagatagaaaggacaaactcactcacctgcaacacttcaaaacaaccagctgagcaaagaccagaagagccgaacgcacacactgacacaccaacaagctctcccccccaccattgccacccctaacgacaaccataacaaagaacaccacctgcaaaacccgccacccccagaccaccaacccaacaaaccacataaccaccccacaccacaccacagcaaaacaacccaaacaccaccccccccacaccacccaccaccacccagcacgcatcaccacccacgcaaccccccgcccatacccacccccccacccacacaccacccccacgacccccaccaacccccgcccccccacgccccacccccccccaccacacccccccctaaccacacccccccaccacccacccaccacaccaccccaccccacaccccccacccccaacccccaccccccccccaccccacccccaccaaacaccacacacccccccccccaccccaaccccacccccaccccccccccccccc

SEQ ID NO: 67664 - DNA, 514 bp, Zea mays
  Clone ID: MRT4577_161705C.1
atttcaccttcaggtcgtcgttcttggtactatagaaactatatagaagtagagtttgggtttcactttgatctcttgtgtactttctctcactgctgcccggctgttgttgtgctcttcttgcagagagcctgctctgattttaccacatgctttctttgtatcatgtggtagaatttgagctccattttttttttcttctgtcttctctctccctgtgactgttggttttttattaccgcggtgcaaaaacttcacaatccggctgcgaagaatctcgtctgggcataccctgcaccttttgcacataaggtatgtgctacgtgtgttgaacattagtggcgaatatgccgattcactctgcttgtcgggctggaattacatctgctttccaatgctctcaccgaagcccaccgacatcaactggtttttctttacccccctcgcctccccttttggtttcctgcgatggcttcttggtttcctgatcaaacagaaagacatccattcttgg

SEQ ID NO: 67665 - DNA, 336 bp, Zea mays
  Clone ID: MRT4577_161706C.1
gggggggggggcgggttttatttttaacaggcttctggtggtccaagtttttgaaaacaaaaaacgaaatctcctgcaaaatctaacatgggacagattaatttaaaaaaccagactgccgggctcaggcctgcacgttttttaaacctaactgccccgggtttgtcgggaatgtgcttttgtggttaaaggggggttgtcaagggcaagttcctttgggttgagcccattgtcaaggtaaatagttgaaccagtgattgttggtgccaggggagaccccaggaatgctgccgggttccccacttttttgggcgttaattttttttgggggggggg

SEQ ID NO: 67666 - DNA, 192 bp, Zea mays
  unsure (1)..(192): unsure at all n locations
  Clone ID: MRT4577_161707C.1
gatgaatcctacacagggaggcaatcctttggatttacaaaactgtacgatngatactatgcaacatgacataatgactgaccaaagctagtttgcctgaacaaataagatccaaatatgcagacacctatgtatcagtacaatgcagatgtactgcaatttctgggaaaaggatgttatgccgatgctttt

SEQ ID NO: 67667 - DNA, 454 bp, Zea mays
  Clone ID: MRT4577_161708C.1
agcaccccccccttgaacaaacaattttgtttaatttttaaaattgggagtcttttccggccctgcaacccaaaaagcaaaaaaacctcccccaaacaggggacaacccattttgggtgcaaaaaacagcccccctgaaaaaaaaaattttaattcctttcctcccagtcccccccccgggcaaaagggttttttttttaactaaaaaacggcaaatcccttggggggggggggggataaaaaaaaaacactggaatttgaacctccaggggcccaaacaaaaacccagggaccccaagggggggccaaaaaggaaaacacccatggccctccctgcagggggccctttttggggggggggggggggggaggaaatcccattttttcccaaaaaccccgccccgggttttgggaaatttttccttcccgggcagtttggaaacccttccggggg

SEQ ID NO: 67668 - DNA, 194 bp, Zea mays
  Clone ID: MRT4577_161709C.1
gcctgtttcgaaccaccaaaggacaacttttaggtaccaggggtttccggcatttaatctggttcaaccctgaatccggtggggctggactacctccattctcaacacctggtggtataaaacccgggcgcttttcatgtataattctggattgggggctcgggaaataaaatttggccacgggttatggactt

SEQ ID NO: 67669 - DNA, 194 bp, Zea mays
  Clone ID: MRT4577_16170C.1
gtaagttcacgttattgctgaccagttcttttcttggtagaaggagtactttgacggggtatttactccattcaagaagtctaatcctattcctgaggtctacaatgtgcctgttaaagtagttgtcgctgacatcattcactacttcttctttaaatctgtcataaatgtccttattgaattttatgccccct

SEQ ID NO: 67670 - DNA, 180 bp, Zea mays
  Clone ID: MRT4577_161710C.1
acgccgtacccgtaaaaatggtaatcgaccttgccgccggggggaggattaagaagaccaagcacactgcgcccaagtctgacgatgtctactctcaagctccttgttaaagctctaccgattcttgatcaggaggacctagagcaatttctaaaatgttattctctagaggcttttcat

SEQ ID NO: 67671 - DNA, 1703 bp, Zea mays
  Clone ID: MRT4577_161711C.1
ctcgctctcaggcgcatcattcttctcgcctcgtgtcgctgacttccccaagctttgctgggttgccttcgagcaggagacaggctgtgtagtgtagtctagtgctaccaggatcggatcagcggctgctgcgcttcagttgccgccggcggcatgagggtggtggtgacgggcgcgacggggtacctgggaggccgcctgtgcgcggcgctggccggcgcgggccacgccgtgcgcgcgctcgtccgccactccagcgacgtctccggcctgccccgcgacatcgagatgacctacggcgacgtcaccgacgccgagtccctcgccgtggccttcgacggctgcgacgtcgtgttccacgtcgccgcggccgttgagccgtggttgcccgacccctccgttttcttcaaagttaatgtaggtggacttgagaatgtgttgaaggctgtcaagagaacaccaactgtgaagaagataatctacacatcttctttctttgcaattggtccaactgatggttatgttgcagatgagacacagatgcatcgagggaaggaattttgtactgaatatgagaaatcgaagtttcttgcagatagaatcgcactgcaggcagcagcagataaggtgccaatcaccattgtctacccaggtgttctctacggccctggaaaacttacgactggaaatcttgtctcacgcattctaatagagaggtttaatgggcgcttgcctggttacataggagatgggtatgatagagaatcgttctgccatgttgatgatgttgttaacgggcacatagcagctatggagaagggcagagtgggccaacggtatctcctcactggtgaaaacatgtcgttcgtgctgatttttaacatggttgctaatatcacaaacacaagggctcccatgttccacgtacctctctggttgattgaagcgtatgggtggatttcagtttttgtttctcgcatcactggaaaactcccacttatcagttaccctactgtgcgtgttctgagacatcagtgggcatactcgtgtgacaaagcaaagatggagctgggctataccccaagaaacttgaccgaaggtaattcaaatatcaaagtcgtgcccaaggaaataaaactaatctgctgggcgttttcgatgctaaaaccagcgaccttggatcatcaatgcatttcgtaatggcaatatccatggttaagatttgaaagtatttttagacaagcagggaagtactatcaatcctgcaaagatcaatgcagttaataagagaagctgacgagaccataactttttcaaattaacggacggaagggtagccgttgattacaacgtcaatggaatcagtgagtgaacgcaaaatcctcagcttcttagatcaaaatccatacaccagtagaccaaaactatcagaaagctgtgtcgtctttaacagctctgggcccatttgtgccgttgtcatggcgttggatagtgcaaattaaaatataaaggtcgcatgaataatttgctaaccaagaacctgttagcaccacagaaggtagaagagaggagatcagagattggagctgggaagacggaagaaagacgagagcagacggggtttcagtgaattgatattttgtattctgttgtttgatgacttttacagatgactcagcctatatttatatctcctcaagctc

SEQ ID NO: 67672 - DNA, 489 bp, Zea mays
  Clone ID: MRT4577_161712C.1
gttcaaatcctccgacaccgtttcgagtttgagagattctactcacagttctgtcttggcaccgtgacactctgaaacatgcagatatctggagagacagcgtccgcgtctgtgaattcgagctcattatctgatctgtcgaacgtcactaatgcgacgctctacggttttgaagattaccatggagtggatattggtgtggtaaaggcagcacggctttggtacagctgcgtaggaggagaattgctgctggaaatcccacttgaagaaggtgacacaaggcttggctttgctatcagccgaactgaggaggtctttgtttttactagcactcgacggagtactcacagttagtatgtactacttgagcagttagaatcagccatggaatctgctgacgtgcttgtttttggtagggctttatctacatatcatctgtagtggaagatgacaaggaaagcgaggcaccatctacgcggtctgggctct

SEQ ID NO: 67673 - DNA, 353 bp, Zea mays
  Clone ID: MRT4577_161713C.1
atgattatcgattcatccatccagataaaccatgccatgtaccgtcggcaagatgcaccctcactttccgggggcaaccgagttaaagcccccggcacctgatcttattcgctaggggaaaaaaagatcaagggtatcaacggttgacctactgttagcaatgctgggagcgacaaatgggatcacatggggaaagggaaaacccaggggggccactgggattggtatgcttgtgatgagtgattggagatcccattgggacatgtcaagggacaagggatgggccggctatctttttgaaagagctaccggccaagaaacaggcgccaacagcatttggtaccgggggggtt

SEQ ID NO: 67674 - DNA, 200 bp, Zea mays
  Clone ID: MRT4577_161714C.1
ggacaacattggaccctatttttacgggcaaataaaaaaccaacaatcagttaaaaggggaaataacccaataacacatttaatcgtgaaaaccaatttgatttccgtcatttaaaacttgctttaaaacgggaggaacaaaaaaatttgttgaaacccgacgattttaccaaaactgaatagcgccgaaaatgatacaa

SEQ ID NO: 67675 - DNA, 866 bp, Zea mays
  Clone ID: MRT4577_161715C.1
cccacgcgtccgcccacgcgtccgttcagaattggagaaacttgtaaaggatgcctccactacggttgtggagggaaaagaaggtgctcctctacaaagcaccacactcctcttgaaatgtttgaaaattttggagaatgccacatttctaagtgacaacaacaagacccatttgctcagcatgagtcgaaaattgagccctaaatgccgctcactttcttttgttggtgtcattctcaacattgttgagttactatcagctctctctctccttcagaaaccttccactgtttcaagaaaagcagatccaaaaaatactaaagtttgcaacggggcctgctctgcagacagtagaggtttgagcttattgaatcatcattgcaagtgcaataactcaaagaaaaagagcattttactgaaccgaaggcgccagtattgttcatccaccaaatcagaagcttctcatgttaccctctcttctagtagtgatgtcagtcagtcagaaaggatactcaattgctcatctttttcaagcaatgggacatcaagtggttcatttggagtgaaacatattaatggtgctagtttgaagctcaatgtgagaatggatcgttctaaagcttatccagtcagaggctcaactggttggatttctatgaaagcacaaacttctgattggaactccagagaaatggcaaaaaagcggcgcctatctgaaaatgtactcactgatttgagtaatggtggtgatgatccatttgcatttgatgatattgatcaagaaccttcaaattgggatctatttggtccaaaaaggaaatcaccacagaagcgagcgaaaagaactaatggagaagtgttggatg

SEQ ID NO: 67676 - DNA, 1649 bp, Zea mays
  Clone ID: MRT4577_161716C.1
tttttttttttttttttttttttaggagattaataccagattaaacgagtaaatttccaaagaacaccaaataggatgaacaagtagctaatactcaaatgttattgtggtactgtgaatttgcttatttgaatgatgatgcaacgctgccattcaaaaccgatttcgccagttgccacgaacgctcacgccacggtggcccttgtcatcgcaagcttctcgtcggctccgtcttcaacatcatcatcctccttcccggaggagttcagcccggccgccacctcaagctccctccacggcccgtcgaacatctcggggaacttcttgcacaaaccgacaaccacccgccttgccgctcgccccttgccagcgtccttaagaccgcgcaccagcacacgcaccgttccaaggtcggccaccttccggcgcttcactcccgcgtagaacacgtcctccgcctccgaccaccgccctgcgccacaaagtgcgcccaccacgcaactatatgtcgcgcagtccggcaccacgtccgccttcttcccggcctccaggctgcggtacacctccaccgcctcatccaatcttttgtgccgcgccatcgcccgcatcagcgcgttgtaggacccgacatccggccgtaggctggcctcctcgcgcatgacgcggatcacctccttgacctcatccacggtgccgttggtggacttgtaggtgagcagggcgttgtaggcagcggtgtcgggggcgatgccgtggtcctggaccatggcgcgccacatctcctcggcgcggtgcgggaggcgttgcttgtagaaggagtcgatgatggttgtgaagagctggagcgacggcggcgctcccgacgaaggcttccggaggaggtggagcgcggagtcggcgccggaggtgaggcagagcgacttggcgaggatgctgtccgtgacggcgtcccgcgggacagaggcatgcgcggcgaggattgagggcacgagcccggccaggcggcggcggcggaggagtggaccgaggaccgcgttcaggtgcgcggtattgggcgacgtcatggtgccgagcagagcggaggcgcggtcggggaggcccagcgtggagagggccgagagcgcggcgacggggtgggaagggaacaggggcgcgagagtcgcgtcgatgtcgtcgaggcggccagcgcgggcgagctggcgaagacgggcgatagggacggggagctcggttttctctgccgctgccgcggcggtggagaggagccggcggccggcggcggagaaggttgcggcggccatagcggcggaagtgcggagcgaaaccagtgggcagtggccctgtattagggtttcgagaagccgactgcaatagtgatcagaccgcccgcgcgggttcagtcaggccccccttgagaatgtcccggatttttttttttttttttttttttttttttttttttttttttttttttttattgtggtactgtgaatttgcttatttgaatgatgatgcaacgctgccactcaaaaccgatttcgccagttgccacgaacgctcacgccacggtggcccttgtcatcgcaagcttctcgtcggctccgtcttcaacatcatcatcctccttcccggaggagttcagcccgccc

SEQ ID NO: 67677 - DNA, 324 bp, Zea mays
  Clone ID: MRT4577_161717C.1
atcataagttgccctctcatttgcatctgcatccttttcaccagtatcccattttttatgtgtatcatacattccaatgttcatacctgcagcaaacaattcctcccctaaaaggtcacttgtatcctcttcttcactgtctgtaatttgaactcttccttctttagtcaaattctcttcagttgaaatatcttggatgatatcttttcctttattcagattccacatgtttttctcagctggtggagcagggggagccttcatatatctatgctgcatgggctggtcattttttcctttttgctgattattggtatacccttc

SEQ ID NO: 67678 - DNA, 504 bp, Zea mays
  Clone ID: MRT4577_161718C.1
ttttttttttttttttcggagaacaaaaagaatagagggcattgattgagttttaagctctattttacatgtgacgatgctacaggagaatctccctcatctcattcccgtcgctccattctggcgcgacccctcgacatgttccctccgcctcaagagggaaaagcgacaacaaatattcggtatagacagcgacatccccaaaggcccccgatattctccgcgcaagttgctgctgaagatgtttaaccgaggaagctcttgacgaaggactgagtaacatcgcggagcttggcctcggtgtccttagagatagcaccctccttgtcaatggtggcaaggagctcagactcgttggtcttgaggtgagcaaggaagtcagactcccactggagaatcttgttgacggggatggtgtcgaggtgaccgttgactccagcgaagatgagaggaaccatctcgttaacagccattgggctatactgcttttgttttagaagctca

SEQ ID NO: 67679 - DNA, 521 bp, Zea mays
  Clone ID: MRT4577_161719C.1
acaagcttttttttttttttttttttttttttttttattttttttttttttttttttttttttttttttttttttttttttttttttttttttttttttttttttttttttttttttttttttttttttttttttcttttttcctccccccttctttctcctttccccctctttctcctcccccctctcatcttcttcctctccctccattcctccaaagggccccaccgcaccccgctcctgtttaagctaactccaaatcttcctgtctttacccgtgctttctgctacaccttattctttcttcttaccccatcttccccccctgaccccctacactcatttcgccccttaccccccaccccttttacaaatcaaccattgtggccctcggtccactttgttttcccacacccagcgggctcctaccaacaacacattattggtggcgccccctccctcatccattatcacaaaagattcaattttgcccttgtccgtatgaagaacccggccccccc

SEQ ID NO: 67680 - DNA, 1151 bp, Zea mays
  Clone ID: MRT4577_16171C.1
gcgaggagttcaggcggtcgtggcccagcaaagtcaccgctgatgattcagtggcgcctgcccggagctcggatgccgtggcgccggcatcgtggattgataggaagctgcttgttgatccaaagatgatgttcgttggggacaagattggggagggagctcatggcaaggtctacaaggggaagtaaagatgtatttgagacgtgcatacccgtgcttattttttcacatgtctttgctccaagccacagctactttatcaactgggctgattttgaagtatctgctttagttgtctcgaattaaatgtgtgttatgcaccagacccttgcaaaaaatggctattagtatgctttaaattaattagtttctcagggtgcccaaatcctccatgtgttatagtatcaagcagattcatgcctggtactcacttcaagcttccaaagttccaatattttgttgagattttagcaggcaggaggatgttttttgtcaaaacattagctatgagctgtgcgatccttgagaaccttggaggaaatgttagtcgtgatggcagtacagagtatacctccaataatctcctctctagagaaatattaatatgtcatagatgactgttggtaacatcacaagttcagatgtcattgtcttcacatgaggaagcttgtgccataatactttgtatttttttttctattcttattcaccagtttctatcatttgccctttagaacatttaagtcatatctgtaatcctgtttttcttgtatgcttcaaataggtacggtgatcaaattgtagcgataaaggttcttacccgtggcagtatccctgaagaaaaacaacacttgaaggccgtttcatccgaagtaaatatgatgtgtaaagtgaaacatgagaatcttgtcaagatacttccgggtcttaatgctagcttatgtgattcgtaatccaaaagggaacttgttcagtgtagagtagctgttgtattgatgttacaaaaggggaaagttgaagtgcagcttttgcaagctatgtatagctcgcagctcctttactgaaagttgcatctgtagcagtccaaacagccgactttaatccgaagcgaacagagatatatattaaatcaaacaaccgactttaatccg

SEQ ID NO: 67681 - DNA, 614 bp, Zea mays
  Clone ID: MRT4577_161722C.1
atcatgtaagattgtaaggcatgtcaccacattatagcgaaaataacaacatatgtttttcggccttctgctaagctgtaaaactctctatttctataaagtagtccacgccttattcctctgcctcccttccccttcctcatgtggctgcaccttctacttcctgatcccttcctctcaatcagtcgctcgcagcggacatccagaagaaccaaagtccaacgacgtcagtaacaatcgctcatgtcctctgtcggtgtttggagcccgaccgcacacccggggttacccctcgcggtgcttttgggtagaatggtgcttttgattgtaactcaatggttcgtacaagatgcatgagagacgacaggtgattttctacatgttcgggccacttggagaggcgtaataccctacttcctggtaaggatctttatgtggtgggttacaagaggaatctacggaatggggagaaactagtgaggtgggttggtgattgacttggaaatgatggggtaccccctaggccttatatattcgactgtggggcactacatgcatatgtgatgatgatatgttcctaaacaatagtaaaccgactgaactgatctttctat

SEQ ID NO: 67682 - DNA, 2415 bp, Zea mays
  Clone ID: MRT4577_161723C.1
gccggccggtttgggaaaagagactgaacaccacggaaatccaaggaccagcccggaaaaaaaaaaaaaaaaaaagtatgtatgtgctccctctctccctccctccctttgccatttgccgatttgggcagcagcaatgacacttccctgcgccggcggctgcgagatccaagccagcggcattaactaccgcatcgccgtctccacccgacctctcaaggtctggagcagatcagacgacgacgtccattcccaagaccaccacagcgtcgtccgccaggtgctccgggacgtctcctgccgcgcgcgccccggcgagctgctcgccatcgtcggccccagcggcgccggcaagtccaccctgctcgagatcctcgcggggcgcctctccccgtccccgccgccccacctgctacgcatcgacggcgccgccgcccacagcgccgacctccgccgcgtctccgcctacgtcacccagcaggacgtcctcttcccgctgctcaccgtgcgcgagacgctgctcttcagcgcgcgcctccgcctaggcgcgcgcctgccctccaaggacatgcacgcccgcgtcgaggcgctcctcgacgacctcaccctgcgccgcgtcgccgccaccaggatcaaggacctctccggcggagagcgcaggcgcgtctccatcggcgtcgaggccgtgcgtgacccgcccgtgctcatcctcgacgagcccacctccggcctcgacagcgcctccgcgctccacatcgtcggcgcgctccgcgccatggccgaggcgcgtggacgcaccgtgctgctcagcatccaccagccgggagcgcgcatcgtcaagatgttcgactccgtcctcctgctagccgccggctccgtcctccaccatggcaccgtcgaccagctccgcgccctgctcggggacgcgggccttcacctgcccccgcacgtcgatgacgtcgagttcgccatcgactccgtggacgcgcttcgccgccacgccagcagcagcctgcaggcgccgtcctccggagaccgagagggccggtgcacgctgcagcgtctgttccagctgcacggcaagcaggtggcggacgcccccgtggccgtgaccatgatggctagccgctacgccaactcgcgggcgcgggaggtggcggtgctgtcgcagcgcttcttcaagaacgtggcgcggacgcggcagctcttcgcgtgccgcaccgtgtgcatgctggtggcgggccttgcgctgggctccatcttctacgacctcgggcaggacaaggtggcggagcgcgtgggtctcttcgccttcctgctcaccttcctcctgtcatccacaacggaggcgctgcccatcttcctgcaggagcgcgacatcctggccagggagacggcgtcgggggcgtaccgcgtgtcgtcgtacgcggtggccaacgcggtggtgttcctgcccttccagctggcgctggccgtcgtgttcgcggcgccggtgtactggctggcgggtctccgtcgaacggcggcggcgttcggctacttcctgctggtgatatggctgatcctgtacacagcgaactcggtggtggtgtgcttcgcggcggcggcgccggacttcgtggtggggaacgcggcgatccagggggtgatgggctccttcttcctcttctcgggctacttcatcgcgcggtcggcgatgcccgggtgctgggtgttcatgcactacctgtcgttgttcaagtggccgttcgaggcgctgctggtgaacgagttcgccggcggcgggaggtgcgtggtgcgggcgctgggcgagtgcgtggcgactggggacgaggtgctgcggcgcgaggggctcggggaagagtgcaggtggcgcaacgtgggcgtcatggtggccttcatggcggcctacagggtgttgggctacgccgtgctgagggtgaggtgcagcctcgcgctcaacaagaagggggccgtggccgccggaccacctggcctcggcctcagccgccgcctgagaagacagctagccatcatcggcaccgctgcgtggccctcgccatcgtcttcttccaccccctcgctccctgttaattaaattaaattaaattaaattaaattaaatggcaaccaaatacactagtgtatgtgtgcttacttgttttgttcggtgattcgtacggagtgcttacttaatattgtattgtattatacttggagtaggaagtatggtatccaaagatagcatctgttccaatacatcttgtaatcagactctgctctaactcgtaccaacatgctgagatgtcccaaggcatggcattgtggaatctataaactctccgactataactatatatatgcttattttgtaaaaaaaaaaaaaaaaaactcgagactagttctctctcgtgc

SEQ ID NO: 67683 - DNA, 138 bp, Zea mays
  Clone ID: MRT4577_161724C.1
gaaggcccactttatttatttatttgtaaaaaacggcagtacaaggtgttacaggtaagtatacatggaggagcacacttgtttggaagagtgaaattgaaggtgttttaggaaagcccaattgcgttgaggaaagtg

SEQ ID NO: 67684 - DNA, 1108 bp, Zea mays
  Clone ID: MRT4577_161725C.1
taagcaacgaggctcccggcagtaccgcaactcctcttccaccaaactccagaggcatccaacagcaggcgaggaaagcaagacacgcccacccacccgctccggcagccagcggctatgcagcagcagatgcccatgccgccggcgcccgctgccgccgcggcggcggcgcccccggcggccggcatcactaccgagcagatccagaagtatttggacgaaaataagcaacttattttggccatcctggaaaatcagaacttagggaagttggctgaatgtgctcagtatcaagctcaacttcaaaagaacctcttgtacctggctgcgattgctgatgcccaaccccagcctccgcaaaaccctgcaggtcgccctcagatgatgcagcctggtatagtgcctggtgcggggcattacatgtcacaagtaccaatgttccctccaagaaccccattaaccccacagcagatgcaggagcagcagcaacaacaacagtttcagcagcagcagcagcaagtgcaggctcttacatttcctggacagatggtcatgagaccaggcaccatcaacggtatgcagcagcagcagccctatgcaggctgaccctgcccgggcagcagcggagctgcagcaggcagcacctatcccagctgacgggcgaggaagcaagcaggacaccgcgggtggggcgagctcagagccttctgccaatgagagccacaagagcgccaccggagcagataccgaggcaggtggcgacgtggccgagaaatcctaagtcgagcagcctgggcagggcgaaaaataatgccttgtatactagcaacgaaagaaaaaaagagtctttgaatgacagctactagcccctaccagtttactgtgtggtttagatgatgtagaacaaagtttagattggtgatgatgtaaaccgtccaatattgatactgcgttcttacattgctgtagtcaattatatgaataatttcatataagcatgttgccctagtggattttacctatgttttatgagctgatgtaaccaaaaacactgagcagcttttaattcagtatggcaattctgcagagttttcaccaaaaaaaaaaa

SEQ ID NO: 67685 - DNA, 594 bp, Zea mays
  unsure (1)..(594): unsure at all n locations
  Clone ID: MRT4577_161726C.1
cccacgcgtccgctcaacttcaaaagaacctcttgtacctggctgcnattggtgatgcccgagcccatcctgggtttaagggtgcangtcgccctcagatgatgcagcctggtatagtgcctggtggtaacaacgcagagtacgcgggaccaatgttccctccaagaaccccattaaccccacagcagatgcaggagcagcagcaacaacaacagtttcagcagcagcagcagcaagtgcaggctcttacatttcctggacagatggtcatgagaccaggcaccatcaacggtatgcagcagcagcagcctatgcaggctgaccctgcccgggcagcagcggagctgcagcaggcagcacctatcccagctgacgggcgaggaagcaagcaggacaccgcgggtggggcgagctcagagccttctgccaatgagagccacaagagcgccaccggagcagataccgaggcaggtggcgacgtggccgagaaatcctaagtcgagcagcctgggcagggcgaaaaataatgccttgtatactagcaaaaaaaaaaaaaaaaaaaaaaaaaaagtactctgcgttgttaccactgct

SEQ ID NO: 67686 - DNA, 195 bp, Zea mays
  Clone ID: MRT4577_161727C.1
aagaacagaaggacaatcctgttgcattaatcaacaatggttgggatcacaaaccagagggcgtcattataccgactatctgactggcaaaaacaaatggaatgttccattcatcacacaaggtgattccacgatgattaaaaaaggaactcgtcatgagaggaaccttttcttaagacaaggccctagccacgg

SEQ ID NO: 67687 - DNA, 1297 bp, Zea mays
  unsure (1)..(1297): unsure at all n locations
  Clone ID: MRT4577_161728C.1
cgatgttgtttttttttgagtggttttgttntgtttttttttgtttaccttttttttttgactnnatatcgtgggtttacttctttgctgggatattgttcggttatcttaattctctgtctatctctcttagtcatgtcaattctttattcgtttacttaattggtataacaactaaggtgttatgttttttttttgtagagtattaagttgtatttaccatatattcttttaggtagtattggttagttatttatttatttgatttatatgttgttttttttttgtttatgtttgtgttcatttnattttgttgtttttttttttgttgtttatattttgtttttcatatgttatttatgtgttattttttcttttttgctttttttgtttatatttatttttttttgtttgtttttcttttttttttgttttttgcttttatgcttatttttttgttttttttatttttttatattttttttttctgtgtttttttgttttttttatggtatttttttattttcttttttttttttttttatatggtttttttttttttatggttttatttgtttcttgttttttttttattttatttttttttttgtatgttatttttgttttttttgtttatttctttttttttttttttgtttttttttttcttttttttacttttttctttttttctgtttttcnttttattcttttgttttttttttttctttttttttttttttcnttttnttgtatctttttttttttcttttntttttttttnttttattttttttttttctctttctttttgttttttttttggtttttttttttttttttttttttttttttttattttttttttttttttntttttttttnttttttttttttttttttttttttttttttttattttttttatttttttttttttttttttttttttttttttttttttttttttttttttttttcttttntttttgttgtttttttttttttccttttttttttggttttttttttttttttttggttctttttgttttttttttttttttttgttttattatttttgtttttttctctgtttttttatttttttcactttattttttttttttctgttttttttttttagtttttttttttttttttgttttttttatttttttttttttttttttttttgttttgttttttttctgtttttttttttttttttttttnttttcatttttcttttttttattggtttttttttttgtgttttttttttttttcttttttt

SEQ ID NO: 67688 - DNA, 1179 bp, Zea mays
  Clone ID: MRT4577_161729C.1
cgacccacgcgtccgattcgctcacctctgctccgcctccccccatctccccacaaatctcgtcgcgatgggcctcgccgccgccgccgccgcccgcgcggccctcctcctcctcgccgtatccggggtcctcctcagtcctgcggcggcggagatcaagcaggagtccttcaaggacgactcccgcggctccatcctcttcgagaagttcggcttcggcctccacggcatggtgtctatctccgtcaccggcgccaagtactcctccaagctcgctgattgggaccgggtggtcgttcctgaagccattcctgcaggacaaggagaagaaagtgctcatggtggtgatcccactgcaggttgcagctaacattgctgctgctgtggttggcgagaccgggccattcttgcagggatgggtgacatggaaccagatcttcttgtttgttgatgtcgcttgctgctgtgccgtgctcttcccagttgtgtggtcgatgcgttcgctgcgggagtcatccaagacagacggcaaggcggccagaacccttgccaagctcatgctcttccgccagttctatgttgtcgtgattggatatctgtacttcaccaggatcattgtgtatgctctcaggacaattactaactacaagtacagatgggtgagcgttgcagccgaggaggtctccaccatggcattctacatgttcatgttctacatgttcaggccagctgagaggaaccagtactttgcacttgacgaggatgacgaggaagccgcagagatggtgctccgtgagcaggagtttgagctctagacggacacatggatgtccaatgacgtgggaatacaaccatctcccattcattttctcctcgatgtgctgttgatcatactatacagattcagggtttagctaatgtttgtttatgtgttttggtaaatcttctccatttcctttttagtttcggaagctgccaatgagatttgtgattaatagatttcttgtgttacaaaagcaagggggaattcaattccattatgaatagatgattttattggtgtaggaactggggatgtcattgataagcattgcgttgccatgtcttgtgaagccttgtcattgctggaagcaggttctgaatttcatatggttgttgacgcattcaacaaattcttac

SEQ ID NO: 67689 - DNA, 416 bp, Zea mays
  Clone ID: MRT4577_16172C.1
caactgaccgaccaccatggccggcggcggtggcggctcactgcctagcccctccgcctccttactttacagtcccaccccaacacccacccctcgtttgctccgatggtgccagacaaagtgcgccttaccagaaacccccatccacataccaaaatagccgcctccacagttctgcgcggaggtaggcacgccgacccccgctcccaggaccgcgtccaaaacggctggggcatggacggacctgagcagactgaacgcctggctgacgccagaccaccggcggcttgtccactccgacgaacccctcccgccggctctaggaaggctctctgaggaacagatgaaggcatatacgggcgggttccggaaccgcctaacgcgcggcaagacgctcgccgcctcccaagccgaaa

SEQ ID NO: 67690 - DNA, 279 bp, Zea mays
  Clone ID: MRT4577_161730C.1
tgggcccggtttacattccggcccaaattcccgggaacaaaggattccaacgatggtccctgcattttcaccatcaattttgggttctaggcatgcctctatgacatcgaaggggaaatataacattgattattacagccgtgtatctgttctgataggggaggggaactgacaacacacctggcttcaaatgatgatgggagtgcattcctgtgtacattctatacatctgatattacctctgatataaacgtttgacgttatgttaaacaatttgtt

SEQ ID NO: 67691 - DNA, 802 bp, Zea mays
  unsure (1)..(802): unsure at all n locations
  Clone ID: MRT4577_161731C.1
ctcgagggcctggccggaaaaaaaaaaaaaaaaaaaaaaaaccccgtcccgtccgtccggctattctcgactccgctccgcttccccccatctcccacatagatctcgccgcgatgggcctcgccgctgccgcccgcgcggtccttctcctcctcgccgtcgccggggtcctcctccgtccggcggcggcggagatcaagcaggagtccttcaaggacgactcccgcggttccattctcttcgagaagttcggcttcggcccccacggcatggtgtctatctccgtcaccggcgccaaggcctcctccgcgctcgctaagcccgatcccgcacagctcggcttcttcctcctctccgacgagtcgctcttcgaggccatctacgatcagccggcgcccacggatctgaaccccaacccggaatcctcccccacgtgcgtcctcgccagcccctacgtcaagcctctcttcaccttcgcagaggtcgacgacaacggtttccacaaccagactttccccatcacccaccccgacgagtacagcctctttttcgccaactgcgcgccggagaccagcgtcagcatggaggtccgcaccgacatgtacaacaccaacctggacggcaccagggactacctctccgtcggcatggcctccgtcccaacgatctacgccttcttcgccgtctgctatgtcgtattccctggccggttggctctacgtcaccctntaccgnaaccgnctntccgngcagngcatncaccacctcatgtcgggcctgctcgttgcgcgtatgctctact

SEQ ID NO: 67692 - DNA, 480 bp, Zea mays
  Clone ID: MRT4577_161732C.1
ggctcaaaataacaggtttgattcccaaacaacagacacaggggacacaaccaattgattttaacagatcgaagttttcgggcccaagttcaaaataaacgaggggccatgggggggcccattattttttttttattggagccttgggcaccttgggaccaggtggggcctttttttccacccttttgatatttggggtttgaattcaacccattcttgccggggcttgatggggtgtcctttgccgggcggtttgggggcggggtttccattttggcctcctttgcctcctgggattcgggggttgaatccaacccctcctcacccccgcttgatgtgcttcccttggccgggcgctttaagggcggggggttgaacttggcggcctcctttgccttctgggatttggggtttgaattcaatccccttttgccggcgcttgatgtgatgcccttcgctggtcgctttgggcgcgggttt

SEQ ID NO: 67693 - DNA, 1993 bp, Zea mays
  Clone ID: MRT4577_161733C.1
aacttaaaaaaaaaaaaaaaaaaaaaaaaaaaaaaaaataaaaaaaaaaaaaaaaaaaaaaaaaaaaaaaaaaaaaaaaccctcattgggtacctcgaggccggcgggtcggggccggcactcctcgaggccggccgaccccgatcccgtccgtccggctaattcgctcacctctgctccgcctccccccatctccccacagatctcgccgcgatgggcctcgccgccgccgcccgcgcggtcctcctcctcctcgccgtatccggggtcctcctcagtcctgcggcggcggagatcaagcaggagtccttcaaggacgactcccgcggctccatcctcttcgagaagttcggcttcggcctccacggcatggtgtctatctccgtcaccggcgccaagtactcctccaagctcgctaagcccgaccccgcgcagctcggcttcttcctcctctctgacgagtcgctcttcgaggccatctacgatcagccggcgcccacggatctgaaccccaacccggaatcctcccccacgtgcgtcctcgccagcccctacgtcaggcctctcttcaccttcgcagagctcgacgacaacggctaccacaaccagactttccccatcacccaccccgacgagtacagcctcttcttcgccaactgcgcgccggagaccagcgtcagcatggaggtccgcaccgacatgtacaacaccaacccggacggcaccagggactacctctccgtcggcatggcctctgtcccaacgatctacgccttcttcgccgtctgctatgtcgtgttcctggccgggtggctctacgtcaccctccaccgcaaccgcctctccgcgcaccgcatccaccacctcatgtcgggtctgctcgtcgcgcggatgctctattgcatctcggcggccgaggaccagcactacatccgcacggccgggacaccgcatgggtgggatgtcatgttctacctgttccagctcgtgaagggtgtcatcttgttcgctgtcattgcgctgattgggaccgggtggtcgttcctgaagccattcctgcaggacaaggagaagaaagtgctcatggtggtgatccctctgcaggttgcagctaacatcgctgctgctgtggtcggcgagactggtcctttcttgcagggatgggtgacatggaaccagatcttcttgtttgttgatgtcgcttgctgctgtgctgtgctcttcccagtggtgtggtcgatgcgcgctctgcgggagtcatccaagacagacggcaaggcagccagaacccttgccaagctcatgctcttccgccagttctatgttgccgttattggatacctctacttcaccaggatcattgtgtatgccctcaagacaattactaactacaagtacagatgggtcagcgttgcagcggaggaggtggccaccatggcattctacatgttcatgttctacatgttcaggccagctgagaggaaccagtacttcgcacttgacgaggatgatgaggaagccgcagagatggcgctccgtgaggaggagtttgagctctagacgaccacgtggatgtccaatgacatgggaatgcagccatctcccattcattttctcctcgatgtgatgttgatcatactatacagattcagggtttagctaatatatgtctacgtattgtggattgtggtaaatcttctcaactccttttagttttggaagctgccaacgagacttgtgatgactagatttcttgtgttgcaaaagtaaaggggaattaaatcaatgttgccattttgtcaaaaaaaaaaaaaaaatccattatgaatagatgattttattggtgtaggaactggggatgtcattgataagcattgcgttgccctgttgtcattggaaggtttatttggttcaaaaaaaaaaaaaaaaaaaaaaaaaaaaaaaaaaaaaaaaaaaaaaaaaaaaaaaaaaaaaaaaaaaaaaaacccccggc

SEQ ID NO: 67694 - DNA, 410 bp, Zea mays
  Clone ID: MRT4577_161734C.1
tcaagcttgttaataagcagctctagtcctgatattggcgagaccagtgaccaagtgcaggtggattcttgtcaatacttgataagcagccatacgggtgattgtagggtctcatgtcctgacaacagttcgttggatacttctggtaaagctcatgatgaagagagattggatcaggccttaataaccaagcatgacagtgggatgatgccttctactagtaaccagacatcattagatgctactgtaggcactgagagcagtgctgaatatatgaagcaggatgtaagccattgcgatgacttcaatatcagagtcaatgaccaaagcttgaaccaggcgttaagaaatcagcatggtgatgctgtcccattacctgacatggtatcactagatgctaaggtggacaa

SEQ ID NO: 67695 - DNA, 759 bp, Zea mays
  Clone ID: MRT4577_161735C.1
ttgggtacctcgaggccggccgggagtcgtggctcctcccccttgccctctcctccttcctccttgtcctcctcctcctcgcgccgggggccgccgcgcagccgtggcaatcctgcgggaacacggacaactactcagccaatagcacctaccagtccaacctcgcgagcctcgccaaggcgctccccgcgaacgcatcccggtcggcgacgctatttgcggagggcagcgccggcgccctccccgacgccgtctacgcgctcgcgctctgccgcggggacatcaacgccacagcctgcggcgcctgcatcaccacggcgttccaggacgcgcagcagctgtgcgcctacaacaaggacgctgccgtgttctacgacgcctgctacctccgcttctccaacaaggacttcatcgccagcgccaccaacaacggcgatgccacagtcctcatgaactcgcagaacgtgagctcgcccgtgcgggccttcgatgccgccgtcgccgtgctcctcaacgccaccgccgactacgccgcggccaactcgtcacggcggttcgccacgggggaggagggcttcgacgcgaccgatcccaccatctacgggctcacgcagtgcacgccggacatgtcgcccgccgagtgccggacctgcctccggagcataatttccgatatgccgcagtacctcagcggcaggcggggcgggaggattatcggcatgcgctgtaatttcagggatgatctctattctttcttct

SEQ ID NO: 67696 - DNA, 369 bp, Zea mays
  Clone ID: MRT4577_161736C.1
aaaaaaaaaaaaaaaaaaaaaatttaataaaaaaaaaaaaaaaaaaaaaggggggcgatctaaaagttatcggggtgtcaaacgcaatacattctacataatagctatcttatataaatcaactaaattcaattatattaaccgtggggtgctcaatttaaaagactcggaaatacccttaagttacctaacttaatatcctttttttacatgcccctttaataaattatcgtcctagagtataagcccttaccaatcggaatacccaccggttgcccaatctgaatggctcttgaaacacgcctttttttcgcccattaagtacttaacaagtggtgggtacgcttaactttccagaaaacatttgcc

SEQ ID NO: 67697 - DNA, 279 bp, Zea mays
  Clone ID: MRT4577_161737C.1
cgtcaaccatcgcgtccgcccatgcgtccgcccacgcgtccggcaagctgcagccctggtgaccctgctggtcctcatgatcatcaaactcgcgatcggcatcctcgcgcacgtcgactccttcgcgcatatcggacggttccacagcggcttcctcctcgggtacgtcctcatcatctccctgcattacgggtggatgcagcgctaggccctgcccgtcgacgtcaacttcaacatcgacacgtagttggtctaccaatcggctctgctggccgtggc

SEQ ID NO: 67698 - DNA, 878 bp, Zea mays
  unsure (1)..(878): unsure at all n locations
  Clone ID: MRT4577_161738C.1
catgttggnaagctataaatgatggcaaagatctgcacgtctccgttactatgccatctattgaggttggcacagttggtggaggcacgcagctggcctcacaatctgcctgcttggacctgcttggcgtcaaaggtgctaacagggaatccccagggtccaacgcgcggctcttggccacggtggttgccggtgcggtcctagccgcggagctgtccctcatctctgcgcaggccgctggccatctggtccagagccacatgaaatacaacaggtccagcaaggcccttgcagaggaaacagacaaacccaagaaatgttgaataatatcaagttgttgttttataaccctttgggagaacggagcgaaaagggtcccacaggatgattccttgcggcatgctcgggtggaaagggaaaaaaacccttctggcgaaaagagagaattcagtcgactcgtcatatttaccaagcggtgagacctgttgtggatcctggagtatgacctatttaattcgttgatgttgtcgttatagttcctctacactacactcgttgaccccgcctgcatctagttttgcccgtccatgggcggagaatctgaccatgggtttgtcccaagcttgcatcacagtggcgcatccagtgacccacgtgatctctgctttgccgcagaaaatttttgcggagcaactgccgggtgctttgtatttcagctttgtaaatttacttttatccagtcgttctgagtccaagccgtcagtgcagtcggtggtgtagttgattaaagtacgaaatgtaaatggaataataaaaataaagagctgtgttttgcatttatctaaaaaaaaaaaaaaaaaaaatggtacggttcgatg

SEQ ID NO: 67699 - DNA, 1948 bp, Zea mays
  Clone ID: MRT4577_161739C.1
agaggataaccttatctatcctcatgtctccaaaaaaaactcatagagaggaagtgccggtacaaccacgtgcatttgttcttgaaataggaacagaagagttgccaccccgtgacgtcgtagaagcaactgaacagcttgagaaatctctagttaatacattggagaaacgtagattgacccatgggtaaagtgcacacttacgggacaccaaggagattggcgattgttgttgaaaatcttagtatgaagcaaacagaggtagaggtggaactacgtggcccaccagttgcgaaggcatttgacgaagaaggaaaccccactaaggccgctgagggattttgtcgaaagaataatgtctctgtcgatcacctatatagaagaatagatggtaaaacagaatatatctacgctagagtcagagagtctgctcgttttgctgatgaggtcctaactgaagatttacctactattgtttctggtatttcatttcccaagtcgatgcgctggaactccaatattgtttttagtcgtccaatacgctggatcctggcacttcatggcgattttgttgtgccattttattttgctggcatctcaagtgggaatcagtcatgtggccttcgtaactcttctttggctaattttaaggtggaaactgcagaatcatatttaggtactgtggaaaaagctgggatcttgattaatatgcaggagcggaaggaaaaagtcttacatgcctctactgtattggctcaaggtgttggtggcgatttcattgcgcctgatagcttgctgcaggaggttgtcaatcttgtggaggcacctgtgcccatccttggtcgatatgatgattccttcttagaacttcctaaagatgtactgattacggttatgcagaaacatcagaagtattttgctgtaatctccaagtccactggcgatctgctaccttattttattgctgttgccaatggtgcaattagcaaggaagttgttcgcaaagggaatgaagctgttctcagggcaaggtatgaggatgccaaattcttttataagatggatacacaaaagaaattttctgaattccgaggccagcttagtggcattctttttcatgaaaaacttgggacaatgctcgataaaatgacacgtgtcgagaataccgttgctgaattggcccttattcttggaataaatgagagaacggtcccaattatcaaagatgcggctgcattggctatgtcagatcttgccacttctattgtcacagaatttacttcacttgctggaattatggcacgccattatgctttgagagacagcatccctgaagagattgcagaagcactatttgagataacactccctcggtcttcgggtgatgtgtttccaagaacagatgctggtatagttcttgcggttgctgatagattggatagcctagttggattgtttggagctggatgccagccaagttctaccaatgatccatttggactgcgaagggtctcttatggattggtccaaatattagttgagaacaaaaagagctttgacctcagacgagctctcaccttattggcaggggtgcaacccatagcaatagagagtgatgttatagatgaggcagtacagttcgtcacaaggagactggaacagcttctggtacatattatctatcttgatctttaatgacagttgagtatacacatattaggtttttcattgtgggtgttagctagggatagagatacagtggtacacacactggtatatttttcatggaaacaaaaaaaaattgttgggatggttatcattatttctccaactgttatggggcagacccagtgccggaacggatacatctgcatttcatttagaactcattttgctccatgtcatcaaactggtcgatggaatccattgcccttttgaaagtggcttt

SEQ ID NO: 67700 - DNA, 383 bp, Zea mays
  Clone ID: MRT4577_16173C.1
gtggcgcgtcgcgtgcggtcagacacgatgagttgcggcagcgatgtgtgcggggacaggtgcagttttaggggctgcgaggagttcaggcggtcgtggcccagcaaagtcaccgctgatgattcagtggcgcctgcccggagctcggatgtcgcagcgccggcatcgtggattgataggaagctgcttgttgatccaaagatgatgttcgtttgggacaagattggggagggagctcatggcaaggtctacaaggggaagtaaagatgtacggtgatcaaattgtagcgataaaggttcttaaccgtggcagtatccctgaagaaaaacaacacttgaaggctgtttcatccgaagtaaatatgatgtgtaaagtgaaacat

SEQ ID NO: 67701 - DNA, 352 bp, Zea mays
  Clone ID: MRT4577_161740C.1
ggggaagtcgggatttaatattatggttttatttgttacatctcaagcacgtaatttttatatggcattgtatctacacatttacaattgccggctaccatcacatattagcatctccaacacaggtccaaaaaaaaggtgagagaaaccaacaagggtacctgaatataatggaacgcaggagattagtcccaacccttttcggggggagaaaaacaaacctttctgtaaagggtgtgtgcatatgcaacttacatcttgcaagctttcagatagacagctgttatgagcttccagaaaccacaccaaaccatcatcacaaccatacatcccggctcacccctctgaacat

SEQ ID NO: 67702 - DNA, 371 bp, Zea mays
  Clone ID: MRT4577_161741C.1
tattatatccaagaagagggaagagcacctggggcttttggcgcccgttcaggatccacattttccctcgcgagtttttgcctggcctctctctcttttgaccacccccaaggctcttggtgtatcttgtcactctcacaaattaagttttcatgtctgatctcgacattcagatcccaactgccttcgatccctttgctgaggccaatgctggggactctggtgcggtagcatggtcaaaggactaccttcacctgcgccatccagaaagagtaatggttgcaagaacctgactaccgctcaaggattgaagaaggagtttaggttccccaaagattctcaacgactttaagaaagagttttgcttgcaa

SEQ ID NO: 67703 - DNA, 1107 bp, Zea mays
  unsure (1)..(1107): unsure at all n locations
  Clone ID: MRT4577_161742C.1
tccgggttctctgctcgtgctccatcgcggccggcgcgaggtgcacgacgctttcgcggcggccgcaggccgcgggcgactgaggacgctgccacctccgacgcggccgcctaccgcccggggctcaacatcacctccgcgaggctcgtgccgaggaccacctggctgcggaaggagaagacggagaacgtcggcgagtggaaggcgcgggtgttcgacgtccacaacgtcgtcttctccttccgcaccctcaaggccgcgagtgccggacgcaaggatttcaccttcgagctcgctggagacgaggacggcgacgaagacgacgacgagttcctgccactggagatccgggacgacgacgaggatggcgacttccttgtcgctgacatccctccgcccccagcgcggcgcagctgctacgttcccggcaggcgcagcgtggcggggccgccgtcgcacttgggaaccccgcagaggcggaggaacagcgtggacgtgccgcggcgattgccggcgtgcgcgtcggtggggcgcggcgaggacggcatcttcgcccggcacccaggtacgacgacgacgacgggtggagccaagtggaaggaagaggagacgattaagacactgcggccgtcggtgtggctgacggaggacttccccctgagcgtcgacgaattcctgccgctgctggacatcctggccagccgcgtgcgcgccgtgcgccggctccgcgagctgctcaccaccaagttcccaccagggactttccctgtaaaggttgcaatcccagtggtgccgacagtgagggtggtcatcactttcaccaagttcgtgcccctcacggagccagaggagttcttcaccccgatgtcgagccccagcctgctggcgagcccagggccagggagcatcacggcgaagcccgacgcccaaaagagcagctcgtacctgaggtgnggctcgaagaactcgagaccgaaggccgtgaaacctgtcgcaggtcgcggacaacgccgaccccttcacggtgcccagcgactacgcctgggtgaacagncttgngtccaagaaccacgacagaagtcgtccaagtccaagaagggcaagagc

SEQ ID NO: 67704 - DNA, 467 bp, Zea mays
  Clone ID: MRT4577_161743C.1
tagggaaagctggcacgcacgcgcgccggagatccggaattcaacccacgcacccacgcgtacgaccaccaattccccttttaccaacacccaaacgcacaactgccacgaccaagaggagcgaaatatcaaaacctacggggctcatatccgctgaacaccaaaacgacgccaggcaaaaggacctccgacccccaagccgaccccaccgacgtacaccccttcccccaaacctccgacacctaaaccgaccccgcctacgtacactaaaagtcctaagccaccggctaccaagccccccacgccgaagccaaccccgaccaagaacaccatttgagcaaatcatgcgaacccaagcccacccaagcgactaccacccctactaccaagcctccaacacgcaatcagacgacaccgacgacaactcgagggccgaaacgccacaacgactaagaccaacgaccgcc

SEQ ID NO: 67705 - DNA, 301 bp, Zea mays
  Clone ID: MRT4577_161744C.1
gcaagcacgcactctcagtcaacatgacagattctggaggttaaccagcaggagcagagataacttcaggaagtccatttttgcccctgcttttgctttggattatacctcaccagctgcacaaaatgcattttttcgtatcaaaaagtcaccactaaccctcccccagaagctcacaaaggaaaacggagagagcgagcgagagagatttccttggaaatttctcccaagggcgaaagtcattggaatttttaaatcataggggaaaagcagtcctgttctaaatcctcttattcttttg

SEQ ID NO: 67706 - DNA, 334 bp, Zea mays
  Clone ID: MRT4577_161745C.1
acacccttccgcggccccggggccgtttttgagctggagttgttcatgagccacaccaggccctactgggctgaaatggttaacaccgggtccactaaaaaccgcagggggatcggggggcgtgctgcccacttggccattggggtaacgaccaagctggttgggctccgcacccgggaggccgggtggtttggtttttggcttaaccgccgacctggatgtggccatccctttctgtgggaaactacttggctggggcttggttggacctgaaacccagagtcactccaacttttttgcaatcagttcctcctaaaagggggcaatttccact

SEQ ID NO: 67707 - DNA, 287 bp, Zea mays
  Clone ID: MRT4577_161746C.1
gcacgcgtcgtagcttggtccttagcggcgctcctctgggcgcctgcgcggaccgcgcgggcggacgacgaataagcgcggcggccggcggctggcgcttcttgctggggacgcagccgccgcccttgcccatctctggtttacgctctggtcaacgggcggcaccgatccgatccaatccaatccaacccaaccaccgatcccggcacgtcccgtcccgttcgccgccgtacgctggaaacctgctcaaagaaccgagctattcagagaccccttccagaaaagca

SEQ ID NO: 67708 - DNA, 546 bp, Zea mays
  Clone ID: MRT4577_161747C.1
aatcaacatattattgagaccaactagcaacatagaaagcgcaatacagtaccaacaatggccgacaaaggataccgccttcttatgcttcctgatgcttctggatgtgctgacacggggagcttacgccacacattgctcacaagcgcttataggctcctttatttccccttacctctcaacacctgttcgattttggatatgctgaaaacaccgagaattcccccctattggaccctacaggctatagcaggtggtatcattaccgtttaatacccttgattcgctccttgaagcgtcaaccctattacagcctatacctggggcgcatatagtggcacaccatatgggggcacaacatgtacaacatcttgcgctatgagaccatgctggctactctgagcaacctcagttccttctattcaaaccaccagctgcattgatctatgcttctgtattacgctgaaccctgacgaccattcgcacagacatctgttgcctaccagcaggatagcttttgattactccaaacgacagcatcgaact

SEQ ID NO: 67709 - DNA, 330 bp, Zea mays
  Clone ID: MRT4577_161748C.1
gtaaagcgcaatcaaattagactgggccttcaattggagtctgcaccaaagctggtcaatgattggatgttgcaccgcagctgtatatgcccataataagctgaaggtttatcctattgatctgatccctatgtcatatcatgattaaacataaataatggtaacctaattacgatcacttgatgtatgttagatacctatagatgcctttgtggcttagtagctgggcattgatgtgggtcaaaatgcgatggtgcattaatgcttatgtacctactatgagcttgtgggaccataaagacaaagtcttcatagaagatcttaacttta

SEQ ID NO: 67710 - DNA, 357 bp, Zea mays
  Clone ID: MRT4577_161749C.1
ggaaacaaacccagtttgttttcaagacaggggggacaacccaaggccaaaagctaaaagcccgggaaaaattttttgcccaaggcccggaaaggggaaaaaaccgggcgggaaaggggaaaagggccaaaataaaaaaaggggttttttgtaaaacaggggggcccaaaaaggggccctttggttaaaaaacaaaacctcggggggggaaaaaaaaaaaaaaccacgggcaggggccccgggaaacgggttgcaggcagcccaagggacaagggaggggtaaaactactataggggttccccccagggggcccaatggggggggctcccaacccaacccgggggcggacccgtggg

SEQ ID NO: 67711 - DNA, 1352 bp, Zea mays
  Clone ID: MRT4577_16174C.1
gttcggtggcgcccgcccggagctcggatgccgcggcgtcggcgtcgtggatcgacaggaagctgcttgatgatccaaagatgctgttcgttggggacaagattggggagggagctcatggcaaggtctacaaggggaagtacggtgatcaaattgtagcgataaaggttcttaaccgtggcagcacccctgaagaaaaagcaacacttgaagcccgtttcatccgagaagtaaatatgatgtgtaaagtgaaacatgagaatcttgtcaagtttattggagcttgcaaagaaccattgatggtgatcgttagtgagctactaccagggatgtcactgaaaagttacctgcatagcatacggcctagccaattagatacacacactgcaataagctatgcactggacatagctcatgcaatggactgtttacatgccaatggcataatacatagagacctgaaacctgataatttattgcttacagcaaatcgcaagaagctaaaacttactgattttggacttgcacgtgaagaaactgtgactgaaatgatgactgctgaaactgggacttaccgatggatggccccagagctatacagcacagtcacacttcgacgtggtgagaaaaagcattacacaaataaagtggatgtgtacagctttggcattgttttgtgggaattattgaccaatagaatgccatttgaaggcatgtcgaatctacaagctgcatatgctgctgcttttcagcaaaagcgcccagctctccctgaggagaccccccaggagcttgtgttcatagtacaatcatgctgggttgaggatcctgccatgcgacccagtttcagccagatcatccgaatgcttgaaactttcattatgacaatacatccacctccgctttcagagccaaacgaaggcgaggaatcggaagaaacgaggtcgtcacttgagcagtaggagctcctctggcttctcgctcgtttctcgcgcgacaagcaagctctcggtcgtccgccacctcttcgtctcaaagaagacaggcaatgggaaggcgtgatgcgccatgccctgagacgctttcctttcggtgatgtaaagatgctagcctaggtgatgcgcaatacaagagggaacttgttcagtgtagagtagctgttgtattgatgttacaaaaggggaaagttgaagtgcagcttttgcaagctatgtatagctcgcagctcctttactttactgaaagttgcatatgtagccgtccaaagaaccgagatatatattaaatcaaacaaccgactttaattcgaagaaaaaaaaaaaaaaaaaaactaaaaaaacgcccccccttgg

SEQ ID NO: 67712 - DNA, 232 bp, Zea mays
  Clone ID: MRT4577_161750C.1
ttgtttttttggaagtttttttgctcgtgccacaaaccatgacggtgacattattattcgctgtcttatcgtgggtatacacatgagactggaccaaaggacccggggcttctacagtattactaacagctaattggggtgagggcacatatatcaaaacctccataacaggaggttctgaaagcgcatgcgacacgtgcagaccaagaaccacagtgcgcacacactagta

SEQ ID NO: 67713 - DNA, 324 bp, Zea mays
  Clone ID: MRT4577_161751C.1
cgatgctctcgccgtcgacctcaggtttcccgccaagtcccctaccctccaaggccgccacgaacgccacagctacccgatgccgcgccgcgccctcgggagacgcctcgctgtgcgccttccgcgcgcaccacagcgccggccacgccctccacactaacccggctctgatgcccgctctcgccgcctgcgcgcggctgccctccgccgtggccgaggccgaagccgagcagatccacgcactcctcgtcaagtcaggcggctcgcgggctggctcccacgtccaagccttcacgtccctgatttcgcgcctactctaggctc

SEQ ID NO: 67714 - DNA, 629 bp, Zea mays
  Clone ID: MRT4577_161752C.1
atttcactgccaggcggcgcctcccctcgaatccttcttcttatcctgttcattaatgagaccggaaacgactcccattcgcatccaagacctatgactcatgccaactcacggtttctcgatcgccactgagcatgctgatctaagacgtcgaaatccttgtgaacagccagatgaacaagcactcgaacaaagacgatctcacgaccctgctcatccacaagccctcctggactatcgacgagttcaactgcgaccgtcggaacgccatcacccccgacagtcctcgcatagctagaagaacaacaccgcacactgactatctagcatccacgttgctgcccactgccaccacgtagacttcctctgtgaactgataacatgacactcccatacccgtactgccgcttgtccctcatcatggactccaccacctggcgggtctccaacgttcgtcatctctcagggatggccaccagccgggcagcaacgaccgtcgcttgctttcgactcttgccactgcgacaccatgatctgcgtgatgtgaacaacatcggatgccgccgctccataagtactctaaggtctcgatatgatgcaccatgtcaaggaagatctcttcctacctg

SEQ ID NO: 67715 - DNA, 124 bp, Zea mays
  Clone ID: MRT4577_161753C.1
gctcggactcctgatccaggctgggtccatagaccctcggagatttatctaatgttcaaaagcccctgtctagcagtgagtccgatgatcgcggacgattcaggttgcacagatgcacgcaatg

SEQ ID NO: 67716 - DNA, 824 bp, Zea mays
  Clone ID: MRT4577_161754C.1
cccacgcgtccgcccacgcgtccgcgtagatgcaaatgatcatcctcaacaccttctaaatcatctctcgcagaacattgtccaaacaggatttgataggagcgttgctttctgtaatcaagagaagcaaagaaatgaggagagcctgccgagcacatcccactggagaagcatcaaacagcatgtgctatctcatggttcttcaaggcctttctcccgaaagcattcctcggacacctccttgagtgattctacaagtgtgcctgcagagggcgggccaatgttggtgaacatccctagaacaacgaaacagggtgtcgaatatgggagaccgccgtctgtgtcgtcatccactctggttgaactaacaaccaggctagatttcttcaaagaacggcggtcacaattgatggaacagctccacagcctcgatttagggcatggatccacgtcccatggtttcccatacaaaccttcatctccctggaacagcccaaagtaaagtaggggatgatcatttgctgcagtacgacgtctctgtatattcttggtatagaatctcctttatgtttcactccatctttgtagagcctggtagtgagaatgtatatcccttgccttcacttgttttgctagtgcttgcagcggatcttttttttagcatgattttgttttattgtatatgtaatgagttgaggagattgtgacacggcttttatatgttttagcaattttgttctattgtgtatgtaatgagttaaggggattgtgacacggtttttatatgttttcgcaatatatagatgcgtctttttttttggggg

SEQ ID NO: 67717 - DNA, 3477 bp, Zea mays
  Clone ID: MRT4577_161755C.1
aattcggcacgaggcgtaatcccaaaccccggcgtcgctgtcgcctcgcgtaatcccaactgagttgagacagagagggcgggcaccatcacgcggccccagatcctagccacgctcccgcacccactcttccaccgcacgcacgggcgagtgcggcagatcgctggcggatccaatgctgctgccctggtagctgctagcctgctgcgccgcgcggctgctggtttggtgcccttcggctgcggcgccgggtcactttcgatgtgactatctgaggaggaaaggatggcggcttcggcggcggcggcgcctgggtcggctgagaggcaggcgcgcggcggcgcggcgtcggcgatcggcaacgcggtatttaagagtggccctctcttcatatcatcgaaaggaattggatggaaatcatggaaaaaacgttggttcatcctcacacgaacgtcactggttttcttcaagaatgatcctagtacattaccacagagaagtggtgaagtgaaccttacattggggggggattgaccttaataattctgggagtgtagtggtcagggaagacaaaaggctgctgaccgtcctttttccagatggccgtgatggtcgcgcctttacttgaagcagaaagttctaaagattgtttcggtggaaaacatcactggaagaagctcttgcacaagctccaaatgcagctcttctgatggggcataatggaatatttcgcaatgacacaactgatgtgtatgaagaggctattccaaattggagagagaagagacctaccaaatcactagttgttggcaggccaatactacttgcactggaagatatagatggcagtccttcttttctggaaaaagctttgtgtttccttgagaaacatggaataaaggtggaaggaattttgcgtcaagctgcagatgtggaggaggttgacaggagattgcaagaatatgagcaaggaaggacagagtttgcaccagaagaggatgctcatgttgttggtgactgtgtaaaacatgttctccgggagcttccatcttctcctgttccagcttcctgctgtacagcattattggaagctttccgtctggacatcaaggaatctcggatcaaatctatgcgtgcagcaatatctgaaacatttcctgagcctaataggcggctgctacagagaattttgaaaatgatgcataccgttgcttctcatactgccgagaatagaatgactccatcagcagttgctgcatgtatggccccactcttgttgcgtccccttcttgctggtgaatgcgagctggaagatgattttgacatgagtgatgacagtgctgctcagcttattgctgctgcaaatgctgctaacagcgctcaaggcattgtaactactctattagaggaatacgaaagtatattcaatgatgagcactttaggtgctccttatcacctgattctcaaacaggagatagtggaagtgaagaatcaactgatgatgaaactgtggatatcaaggataatgggtttcatgatgcagaaaatgatgtagatcaagaattagatgatgccgagcgagttaatggaaaaagttcagaaactgacagtgcatgtgtccatgctgacctccatgactacaaggaagttaatggcaatgattcagacgctgagctctctgttgaggataacacatttgaaccaaatgtaaatttaaatgatactcccctaagtcgtttaatagaaaatggaaagaaaccatcaaatctggcgtccagtcatgaaactccattatcagtgggagaaattcttttgtctttggatgctggagttccattacctggtcgtgcagctgaatattccaaggacagacactctagcaaacccaatggaattcagcagcatgtgaagcgtactaacttatggggacggagcaatgcaagaaagggccaacgttcagagttagttgatccttcaagtgaagaagagcttgctattcaacgacttgaggtaatgaagaatgacctacaggtcaggattgcaaaggaggctagaagtaatgcaatcctacaggcaagtttagaaagaagaaaacaagcactacatgagcgccgtgtggctctggaacaaaatgtgtcaaggttgcaagagcagctacaggctgaaagggatcttagagctgcactggagattggattaagcatgtattcttcacaattttctagctcgcactccatggactcaaagacaaaggcagagcttgaggaaattgctctcgcagaagctgatgttgcaagattaaaacagaaggttgcagagctgcatctccaactcaatcaacagcgccagcaccagtatggctcttcggtagatgcaaatgattgtcctccgcaccttccaaatcatctctcacagaacactgtccaaactggatttgataggaccgttgctttttgtaatcaagagaagcaaagaaatgaggagagcttgccgtgcacatcccactggagaagcatcaaacagcatgtgctctctcagggttcttcaaggcctttctcccgaaagcattcctcagacacctccttgagtgattcaagggaggcatcaacaagtgtgcttgcagagggcgggccactgttggtgaacatcgcccgaacaacagaaggtgttgaatacgggagacctccgactgtgccgtcatctactctagttgaactaacaaccaggctagatttcttcaaagaacggcggtcacaattgatggaacagctccacagcctcgatttagggcatggatccgcgtcccatgatttcccatacaaaccttcatctccctggaacagcccaaggtaggggggcttgttcagttgctgcattacccgcgcatctgtatattcttggtatagaatctcttttgtttcactttatctctgtagaagctggtctcgtttttgtttcacttgttatctctgtagaagctggtagtgagaatgtatataccccttgcctaccttcacttattttgctagtgcttgcagcagacatttttcgagcgtgatttttgttttgcttttgtatttattgtgtatgtaatgactcaaggggaaatatatagatgcgtctttttttcttggggatatattccactgcaggagaggcaaatgttgccatttcgaaaacctgatctgtgtccattatgtggctgatccttattcggttaattctctccccaaagggataggaggaaatgcgtggacttttgacaatccctatctaactcaacaagagcattggattctgcaaagagtctcgatgccaaccttcacaaatcagagcaaatgagcgaccacaccacaggcatgatgtcaaaaaaaatcagctttgttcattcacgaagcaagcattccaatccaaacatttacgagctaaccaaaacataaatacacagggcaacccggcagagacccggagggtac

SEQ ID NO: 67718 - DNA, 1737 bp, Zea mays
  Clone ID: MRT4577_161756C.1
atggccgaccaggtgaccatcatctcgccgcgtgatccatggcccttctccacagtcacagcggaggacctggaggatcttgttgccgagggtttactttgccgcctctctgatgagaggcaactggagtggattcctcccgcgagcggaactgccccgtccccgccgccggggtacgtcgtgagcttcgtctccttccacgagcgggggttcggtgtgccggcaagctgctttatgcgggcgatcctatacaactatgacatggagttgcacaacctcagtcccaactccatttcgcaggccgccatcttcgtagcgttgtgcgaaggatacttagggatcgccccccactgggacttgtggactcatctcttctccgtggagctttttgcttcgccgacgggagtgagaagggtccgcgcggcagtgcgggccggcggttgcattctccagctgaggcagtcacgggcgtcgctgtacatccccgccatcctcgcgtcctcgaacaaagggtggcagcgccggttgcctttggtccttacggtcgggatttccgtccgtctccaggaggtagggtggcacaagccttcccgcccacgggtcccggaggacgcagtggaccgagcagcgcggcgggttgccgcggaggagaagaagaagaaggacgcggagaaagcccgggcccacgagcggacgcgggcccgagacgccttggagaagctccgtcgtcggcaggagagggaggggctcccgagggagccgtcgccggagacgcctgacgacgacgacgatgaagatgatgacgaggacgacgacatggctgcccgccttggcctcagcccaggtttgaggctaggccaggagtcgtcaggccagcccccgagtgggctggcgtcgtcagttcccagagtcgggacgccgaggtcccggcccgacgagcgggggcagaccgagggggtacttgacccctcggccggggaagtcgaggtgaccccggggagtcaagccgaggcgtctgtttctcgggagccgtcggccacgccggcagcgcaggagggtgaccctcaggtcgccgtggcaacgcccaggaagtccgtctcccgggcgtccaaggtgcccaaggcgagggtgatgccgaagctggcggcgaggcggacgtcggcggtgtcttcgggggtcgagatccgagagacctcccctcaggcgcggttgatcatggcccggagcggcaagcgaagccatggcctgaccgatctggctccccggaaggcccttaagacggcgtcggcttccgcagccagcgtcacgccgggcctcgctgttcagctggccttctcgcaaggcgctccacagcggggggctctggcggcaccaaccgtcgtggagcgagttcccgaggccggctcttctgtcgaggcggccatcgtgctggaggaggcggctggcgcaaacgtggccccgggcccaccggacatgccgccggtgccggcgcctactgctgctggagccgctgccgtccaagtcggggagcaacccgttgctgccgacgctgaggtggccgaggcgtcggcgctcggtgcctcggaggaggggggcatgtgttggaacttgctatcagccgcaagaaagccaacaggggtgaacaatgtgggcagtagggttacgcgtgagatggccaacagctctatcatccaggcctctcacgggcactgtgtgggggtatttataggtacctga

SEQ ID NO: 67719 - DNA, 230 bp, Zea mays
  Clone ID: MRT4577_161757C.1
gagctattagtcggcggccgcccttgtttttttctttttcgcgccaggagagatgacggcacctgctctttatcaaattgagtgagatagctgtttctaaactattacagatacggagggtgtaaggcaactaagctgacgtggagctgaccttcaggagtacatgctatggcaaaaagtgaaaattgcatattacactaccatggtgcattagcatacatgcgctcatg

SEQ ID NO: 67720 - DNA, 489 bp, Zea mays
  Clone ID: MRT4577_161758C.1
gggaggggcactgaaacaaatttaaagaacgggcataaaggtgcttggataaaaaaaaatcacccccggggatacaacctaaacaaaaacccttaaaggtaaccttaaattcacatggttatgaatcgggagcaaagcttaccaagaggtgatgctttaatagggccagactcttccacctaaaggatgacaccgttatacgaccaaaacacccactttgtggagttgttatttaaaaccctttggggaatacaaacaggacacttgtaccttctagaaaacccctaatccatttctagaaccctcaaccacgaagtaaaagtttatcccccagaaatgaacctgtgcaattataaaccaaacgaatgcccatgttctactggatgccaaaacaaaaaaatcccagtcaattaaggggctgctcaacagaccacactccttgaccttttagccatttttaaaaagtgcatgttcttgacgccctttacc

SEQ ID NO: 67721 - DNA, 211 bp, Zea mays
  Clone ID: MRT4577_161759C.1
ctgacgcgtgggaggaggtaaatgtctgctactgcgcatcatactgatccatccatgacaggaatcgccctgatatacttgcaggatcacaccatggaatgcaacggactacctaaatggtgcaaaaactaacggctgcatgctggcactattccaccaaccggatgcctcgtgaataagaacacggctttcatagttgcaaaggttcata

SEQ ID NO: 67722 - DNA, 345 bp, Zea mays
  Clone ID: MRT4577_16175C.1
attgtcatgctttggggggctttttaaatttactggttcatacgggcaaccacggacctggcggcaaaacacaggaaaggagaacaattccgaacgctttcaggccacttaggggaaaaaaaagggagggggcaggaaattaccgccaatcacagcccggaatagaaaaaaaaagggggggtacaggaaattaaaccatgggttccaacgggctgcgctatcctacgactgctgaaccttactgaacataaggggcctaacacatgggggcgcttttcagaagctaatgagccctaatgtccgggaggatacaggtccttaggggcatattggccctcaggagcc

SEQ ID NO: 67723 - DNA, 485 bp, Zea mays
  Clone ID: MRT4577_161760C.1
cccacgcatgcagggacgcgtgggcggacacgttaccgagaggttgtaggagaccatggaccttttactgctcagagccgggctctgtgtgaaggttgccaggtggtgcctctagagagcaggagaaggcacagaactctgagcagcttactgtctttcttggagggcatggggcaggtgttttgacgacttactctggcgacataggggatggacctgatgcccttgggcaggaagggcggacctgtggtactggacggggagatgtctcagccctatgcacctgcatgtgctggcaccgacaaggacgcgcctgtatacggcatcaccaagtctgctgctcaggctgaggctaacaagtgtacgcgcacaaatgcatctgctgtgccaattatgtggaaggcttctttttggcgctttctttacaagagaattgaccgtgttaaggcatatgcaccataacaaacttttcttttagacgctgc

SEQ ID NO: 67724 - DNA, 314 bp, Zea mays
  Clone ID: MRT4577_161761C.1
aattaaggcccgggcggccaccctgactggcatgtactaggggatatatacagggaagacatgcacattggcttaaaattaaaaaaaaaaaagtttggaggggcaagaggattaaaagctttacatttaaccaatgggtggggggttcattcatcaggattaccattattgttgtgggtgaggcctttccaaaaaagcaagaagcacgggctaccacggtttgagggcattctgggtgccctttggccatttgagccccttttggccgggcttggggaaaacttccttggggtgggggaatttgggccccaacc

SEQ ID NO: 67725 - DNA, 474 bp, Zea mays
  Clone ID: MRT4577_161762C.1
tctcggcctagaccacctgcggactagcccgagtggtctcaagaagggtcgagggctctgggcaccagaacgccatgggaggggctcatttcttctgtggggacacgctggataccgccacatttgacatcccgaggcatcccaggagcgtggcaccactccacactggggcggagcgtgttctctctcaccggaggaggaacgacgcgctcaacaaaaggtctcaggagcctgacactgggaaccgagataaggaggtggagaggaggtactttatcatgacctggaatcagggtaatctacacagcatgcagccccacatagatgcataggctgtacaggtcacggctataaacatggaagaaaacgcacatagtgccgtgaacaaagcaaacgtgtttgtttacccggaggaactgccagggaagaaatttaccttcaaatggggaagagacaggacgccagagcgaggtt

SEQ ID NO: 67726 - DNA, 434 bp, Zea mays
  Clone ID: MRT4577_161763C.1
gtgctccacacgggcacacctttctctcgcacaaacggtgtcgtgctcgcgtgcggcattccccagacctagagagataccgtctggcccgatcgcacggctccctgcgcgcgccccagagatttcaagtcaggcgcgtgcacagaagatgcgggggggaagaggtttgttgcagaggttactcggctgggggcacccttctggtggctgcgggggctttgccaccccccggagcctgatggctggtttttttggcggcgcaaaccccgttgacgaccctttaataacaaaccccgttggtaggatgatgcatactatttcctcaccccttttcagcgggatgatgcaacctatcttgatgaaccccttcggcagcgtggtgcaacctagctgggtcggaccaagtatggtcgcccccccctggcagtttcaat

SEQ ID NO: 67727 - DNA, 1353 bp, Zea mays
  Clone ID: MRT4577_161764C.1
actgacgatcattctgtgcttgcttgattagatcaggtattcgcagtcgaccgtgtcctcgaagcacgatgaaggttgttcgctgcctacctgcttgctgacctcgaggccgggccgggttcccagctacgtagaggagacggaggggggataaaatcccagcggcttcccccaaacaaaacctcttctccgccagagtccgcgtcggccagatcaaacgaatcggcacgacgcatcggcatcgcctccgacgatcttgagacaaacaaaacccaccgctgcggcaactccgcctcccgccgacacggggatcgcctgacaacaggcagcgaaaagaggcgcagggtttgcccgcgaagatggaggacgtggacgtctcgcggcagctgaagcagatgacgaacttcatccgccaggaggccgtcgagaaggccgccgagatcgaggccgccgccgccgaggagttccaaatagaaaagttgcagctggtggaagctgaaaagaagaagatcaggcaggaatatgaccggaaagagaagcaagttggcatcaagaagaaaattgattactcgatgcagctcaatgcttccagaattaaagtccttcaagctcaggatgatttggtaacagatatgttggagtcagcaaggaaagagctactgtgcataagtagagatcaccccacttacaagaagctcctcaagacacttattgttcagagtttgctgcgcctgaaagaaccagctgtgcttctccgctgcaggaaggaggatcttcaacttgttgatttagttttggaatctgcaaggaatgagtatgcagataaagcaaaagtatatcctcctgagatagtggtagatcgtcaaatctatctgccatctgctcccagtcattatcaggcacctggtccctcatgctccggtggagttgtgctagcttcccgagatggaaagattgtctgtgaaaacacactggatgctagattgcaggtagttttcagaaagaagctgccagagattcgtcagagccttttcgggcaggtagctgcgtagccaattcttgaaagcagaacgtggcccagtactctttggggtaccctgacgatgtccaggagaaactttggcagctctcaatagtgatttatcacacttttggacctcgattattatttgtgtatacttttttcctggttatggatacctttgaatcctgcacagagcaaataaactgtgttcatttgtgggacgatcgtttgttgcaataaggcatcgagatgtgttgcgatgccacttctgttatagcatcatgttttttcgttgaaaaaaaaaaaaaaaaaaaactcgaactagttct

SEQ ID NO: 67728 - DNA, 826 bp, Zea mays
  unsure (1)..(826): unsure at all n locations
  Clone ID: MRT4577_161765C.1
gtaccctncggagtcctccgggtgaggtttctttcaggccgccttcagaccgtgcttgtctgacccgtattatttcgtgccggcatgtactttgggctcatgttttcgggtcgtgctcatactgacccaaaaagcccggtccatattacccgtactacttacaatgttcaaacgagagatctcgcttcaagtgcatgcaacgcgttcttacctgaatcgtgcttggtcagagtttactgcacttatgaccaggaggcctctgccctctgggccttgtttcgagtccgtaactgagccctctttggactttggtgaatatagcgcaggtggaggcccatgggctggaaaatttgtacttttgctcgtcttttgtaacatgtagatttagctagatgattgggtttgaatctataacaagtcaaaatctcttctaattctttctagatcagttcaattcatgtggaatgaaaataaccgaacaagttcaactggtaaatttattggtttgtacactgtagagctcggaggaaagctggaaaatgacaggaaaaaattggcctgtggacctgtggtcgagggagggagggacagcctcctgtcattaacaacagcacattttgatgaagatcgaaaaaaagtctcctctcgaatccactaactaactaagctagaagccttttttcgcggcttttaaataaaatctgcattctggggattctttttggaatcttcgtaaatccgcattcttattctttaaatgtccctgtactaataaacgttggtggtttaacgacactctggaaaaatgtccataacgcgaggaggg

SEQ ID NO: 67729 - DNA, 1322 bp, Zea mays
  Clone ID: MRT4577_161766C.1
ctcgaggccggccggggagggggaataaatccagcggcttccccaaacaaacctcttctccgccagagtccgcgtcggccagatcaaacgaatcggcacgacgcatcggcatcgcctccgacgatcttgagacaaaacaaaacccaccgctgcggcaactccgcctcccgccgacccggggatcgcctgacaacaggcagcgaaaagaggcgcagggtttgcccgccaagatggaggacgtggacgtctcgcggcagctgaagcagatgacgggcttcatccgccaggaggccgtcgagaaggccgccgagatcgaggccgccgccgccgaggagttccaaatagaaaagttgcagctggtggaagctgaaaagaagaagatcaggcaggaatatgacaggaaagagaagcaagttggcatcaagaagaaaattgattactcgatgcagctcaatgcttccagaattaaagtccttcaaggtcaggatgatttggtaacagatatgttggagtcagcaagcaaagagctactgtgcataagtagagatcaccccacttacaagaagctcctcaagacacttattgttcaggtaagcagaacatagtttgcattcttctctgcgaatatgaagcgtgaacttggtgcagctcctctattccattcttcagtaatttgagcatcagttaacacaaatttttatctgaacagagtttgctgcgcctgaaagaaccagctgtgcttctgcgctgcaggaaggaggatcttcaacttgttgatttagttttggagtttggatggcctcccacatggtgtatctgtagggtggatgaagatgaccatgatcccccgcacaaacctgtagtccacgagctcggtagtggagatcgcgtgtgtgtaccaggcgttgaaatctgcgaactgtggcaacacctacccctccatgtccccgtggcgggtctccgcggccaccggcactgtctcgcacgctccacggagtcgcgctggcaagaggatggcgagctcgagcggagtgacacagaggagaccacgacgaggaggaagcaatggagggaaagctctgagctggtgacggtggtggcaaaaacgtggtgacaacaggggtaccagatctaggcagcagaagcgagcgtaagggaagggttatcataccgacgccactttcagaggaggaatttcagcgagggaggaggtcggagagtcaaaggcgatggccatgactgggcgggggagagggagggaggtggggcaggtgcgctagcgtaagccactggcggcccggccggcctcgacggcctcgagg

SEQ ID NO: 67730 - DNA, 1148 bp, Zea mays
  Clone ID: MRT4577_161767C.1
agctcggaattcggctcgagcgcaatggctggcgttcgtctcgtcggcgtgcgtccgtcccctggccgtctggagaggtgggtggggagtctaccggacgcgggtagccggggcggtcgccccaccttgccgatacgaggtgtccgctcctatttcattcggtccattccgcctctcggaagagttgagagaggagtaaggaaggcgaggacctcgcgccccgcgatgggcggcgacctgtacgccctcgacttcgacggcgtcttgtgcgacagctgcggggagagctccctctcagccatcaaggctgcgaaggtgaggtggccgtcgctgtttgagcaggttgacgccgccatggaggagtggatagtggagcagatgtacacccttcgtccagtggtggaaacaggatatgaaaacttattgcttgtaaggttgcttgttgagatccagatacactctgttcgaaaatcatcagttgcagatgggcttagcatccaagaaatattggagaactggtcaaaactgaagcccactctcatggatgagtggcaagaagatagggaatctcttgtagatctctttggccgtgtaagagatgactggattgaaaatgatttttcgggctggataggtgctaacaggttttatcctggaacagctgatgcattgaagctttcaagctccgaagcatacatagtcacaacaaaacagagtagatttgctgaagcgctactcaaagaattggctggaatagactttccctctgaaaggatatatggccttggcactggtccgaaggttaaagttctccagcagctgcagcaaatgctgcagcaccaaggcctaaaacttcatttcatcgaggaccgactagcgactctgaagaatgtgatcaaagaaccagcactggacaattggaacctctacctggtgaaatggggatacaacacacagaaagagagggaagaaacagaggctataccaaggatccaactcattgatctaccagatttcagtaggcagctcaaataactaccaatggcgtcgacttgtgaatcttggaaactttgtttttgtttggtatacgtaactaatgaacagcagaaatacttgatttttcgattggatatcgttgttcacatagg

SEQ ID NO: 67731 - DNA, 364 bp, Zea mays
  Clone ID: MRT4577_161768C.1
cgcaggcctctgtgcaagctggtggacatgtacgagcacctacttggcgaggaggccttactggccggatgcatttttacgctcgacgacctgtgccacctggccaacgccgaccgtgtcggcggtgaccggcggtccgcaggcctcatggagtcaggcatgaacgtcactaagtggtgggacaccgggtcccgccaagactgttgagtcaggttcatagagttgcagcgcccgtcgtccgatgatgcgcccttctgttgtccatcgatcgcaaattaaggcggggacctttgcctcagcctacgtcttctgcttctagataattttctaatagaaaaacgccactgagccctctacgtcattg

SEQ ID NO: 67732 - DNA, 173 bp, Zea mays
  Clone ID: MRT4577_161769C.1
tggacgcgctgagcgtgacacgcgacgcacgggaggcggggagcagaacgcaccgcgcgctaccctcgagggccgccgccggcgcatcggccgccgccgctggcaaatcgctgcaaccaggggaaaggcacgataggtacaaagccgaagcagatcacgtcacaagcggtcac

SEQ ID NO: 67733 - DNA, 706 bp, Zea mays
  Clone ID: MRT4577_16176C.1
atagccaccacgtattcctctccttcacgatgtactccgcgcggtacattctgcgcctcgcatctccgcttgcgacttcgtcgagtccgacatggcgaatctcctcctctcacgaggccaatacgaagacatgggcatcgcgcgcgaccctgtggttagccagatggtccatctcaaggagatgaaaggacttgaggagagactcaacttctcaggatgatctgatgcactacaacatgatatgtactcagagaccgccgcctgcgtcgccgccatccatgtagatggtcctgctgtttaccatcaaaacttcaaccctgatggtgtaggatagtagctcccgcatgtacatagagcacagaccacatggtgtaagcatgtatctgctcatgaacacccaaggtatgcatatttgtggtggagactacgtgaggaactgtgtatgctaatcctatttatccgcatatcaccaaatgcttagatgaagactgctggccagatgatgagtactgtgtgaataatgacgattgagatctaccttacgctatgctggccgaacaaaaagctcatgattttgcactgcatacacttctgcacggtgattgtgacatgtccgagcatctatgagctacaccgcttgagcaatctactgaaaatctgaactgcgtgatgatccttattgatttcaaagatctcgatactgatg

SEQ ID NO: 67734 - DNA, 263 bp, Zea mays
  unsure (1)..(263): unsure at all n locations
  Clone ID: MRT4577_161770C.1
tcggtcggttcaaatccattcatcctcgtttgcttcgtcccggaggattttaaccccatggccaagatcaagaacgggatcaatgggttcggcaggatcggaaggctggtggccagggtggcccttgagagggaccatttctagctcgtcnccccggaccaaccctttattagcaccgactacattacctacatggttcaggactgcactttgtacggaccggggaagcaccatgaaatccaggtggaaggcttcaaaaccct

SEQ ID NO: 67735 - DNA, 338 bp, Zea mays
  Clone ID: MRT4577_161771C.1
attgtggatggacccacgcgtacgcactcagctattgagcatatgagatcgtgacgcacgagccatggacaccgtcagcgcctacgaggtgaccaccatatttgaccgcgccgataacgccaggcccaaatctctagggctgcctacatttgagggcgaggagcaagaaggagcggagcaactacccccgaggatcccaatgcctgggtgagcagtcaggaccaagggttcaagcgcgacggtgatacggcacagtaggggcggtgaccgcgatggtcgtgccggcgctggcgcacgaggacgagcgcatgttcacagagggcaccgggctgagccta

SEQ ID NO: 67736 - DNA, 415 bp, Zea mays
  Clone ID: MRT4577_161772C.1
aagaaggatacacacaatgcctaggctgcttaacaggagcgacaatgcccactctcaggctcatcttcaccgttattcttgcggtcgcctctactgcccagaggtgtgtcttaaagacaaactgcatatacacaagccagttatcgcatatctttctgaacggtgaggttgagagacacagtgggaaggctctgacgtacgtacaggactactactactggggatccaaccccaaatatgacccacgcaggaggccagggagcacacaccctccataggtggccaaggataaacgtccggtgacgctccagacactggactctgctggtacctaactaggcttgctgagttgtccctgtagagagtagaaagaatcaaaactgttctgtcccgttcacccccacgtcactttgtt

SEQ ID NO: 67737 - DNA, 322 bp, Zea mays
  Clone ID: MRT4577_161773C.1
cttgggtttttttcttttttttttttttttttggggagggccggcaaacattataatcttctttcaataatgggctgaaagaagcgcagaacacaatctttttccggttatttagcctcgcttaaattcctttgccaggttcaaaatgtgtttttaaaggagaattatctgatggggttgcggggcggaatgggtatagtctagcggcgcgcgccctgtggaactcttagaccgtgcttattccaaacgcagtagttgttggcattggcaacggcgtggaagtatgaggggatcatgttccccacgttttaccgtgacccga

SEQ ID NO: 67738 - DNA, 125 bp, Zea mays
  unsure (1)..(125): unsure at all n locations
  Clone ID: MRT4577_161774C.1
acgcccaccgcacccttacatcatcttgcctgtccacagatatattncccaacgtgctgcgctatgatcccctgtcctcccaaacggtcaatcttcgcatggcatcagcttttggcacctagggg

SEQ ID NO: 67739 - DNA, 287 bp, Zea mays
  unsure (1)..(287): unsure at all n locations
  Clone ID: MRT4577_161775C.1
gagcnattagtcggcggccgcccttggtcgtggtgatgtctttatgaccgtcttgcgtgccaagcccacagccaaggtcacccaaggcggcaccgttaggccggcctctatgctcctatacacgaggtcactcccaagcctcttcacgttgtccgggatgacgacgagaatcgccacctctgagcctgagctgctgaccacggcccggcctgacctgacgggcgtgctggtggacagagaggcctacgagcgaccgtcctctgtagaggaacgagcgcagggtgctc

SEQ ID NO: 67740 - DNA, 233 bp, Zea mays
  Clone ID: MRT4577_161776C.1
gtgggccgggaaacaacccgcccattaaccccctttaaggggtcaaagggccagaatcttaccccccgggggggagactaacaaacggggtcccgggttgccccccacccagggttttgggccgaacattttttggggggaaaaatggaaaccccaattttaaacataaactacaattttggggggaagggcccggttcccctgggtttttgggaacgccaaacgggaaaacc

SEQ ID NO: 67741 - DNA, 390 bp, Zea mays
  Clone ID: MRT4577_161777C.1
gctgccctctcgccatgggtgggcttgtttcgcggtaacctctccctctccgcgcggcggctgcttctcgatgtggaaggatcggaccgagcgaaatactggcgcccgtgctttctcctccaccccacctgtgggtctggacagaccaacagcgtcagcctccgtcgcttcgacgacctcgccttccacacgctaccaaactgaagtcacgggtggtagacctccatacgccggtgtctccgccgtcgcgctgagtctgtgccgggcttacctgggcgaccttgattttctctacccctggtgtttccgagtgccggctgctcgggccacacgcagagctacagatcgatatgggagcatgactaaggcgctagatggagagctagcgtt

SEQ ID NO: 67742 - DNA, 369 bp, Zea mays
  Clone ID: MRT4577_161778C.1
ctgcacatgcacgcatgcgttggctcggaattgggctcgagaaatttggcagaaactaggtttatctagacttcgccaccaacttgtgatggggatggagcagagttgtagcattgaaccagggagaccacaactgaatggctggacttagttgtgagaaacaagatcagtttgtgccctggagctggaggagctaacctgggactccttttaccctaaatggcaagttgcttgggctgtttctagatgcatagttttttcgatgtatccttcagatgcatagtgaaagttatatattttgaaagaacagatcaacttataatttggaatggagtattcattttattcataccgatgtgatggacaatg

SEQ ID NO: 67743 - DNA, 967 bp, Zea mays
  Clone ID: MRT4577_161779C.1
gggcgtcaccccgatggagacgaagagggagccgggtgcggggcgctggccgtgaggctgtgtaaggagctgggcagctggccctggccaggccgcgggagggcggggcggctggctgagggagctgcttgtcgggcacagcagccgccaggcgaggggtgagccacaaatgtgagcgttggcgcgtgcctgcgtccttgtgtcgggcagggcggaaacggggatgagctgcgagcgcggctagggtttggtaactggggcaccggactgcgataactagctggaccacgaagcagaccgaagcccgggctagccaggccgtgcctccgctactggttaggatcaacatctttgataagtgataaaatcttgtgtttcatttgtcatcattggtgcttatatatatatatatacacacacacacacacacacacatataattatgaactaaatttgcccccccccccccctttgtagtatttgggtatttttcctgttgccacaattgtctttgagttgtgctaatttttttttctgctggttcccagtgcctcatgattctgacagtttccgtcaacctgacatgcaccatggaatggaggttcgccttggtttgtccaagggacctatctgtcctagcttcaattgaggcagtaatgtaattctgctgcaagttcacctctcagtccagtacttcagtcaatagaccatattaagatggtgaaatatgaaaactggtagcttgcatctgttcaatgttatgttttaatcaacgctgaatttaatatttgtcaagtttgaacttttctggtttccttgccactgcgaggccatggaagcgaccaaatttatatatgtttgatgcgggttgtccatggttgccaaaacgtttgttctctggggcatgattttattttgggggacacaaaaaaaaaaatcatataaaaaaaaaaaaaaaattaaaagg

SEQ ID NO: 67744 - DNA, 446 bp, Zea mays
  unsure (1)..(446): unsure at all n locations
  Clone ID: MRT4577_16177C.1
agctgctggtgcaggaagtacccggcaggggtgcggtagtagggggagaactggtggtggtgcgccgccacggcggcgccgtaggctgtgatggcggccggggacagggcggcggcgggatcgggcggcgcgacgcccccgcctcccgctggcgagttgtcggactccttgcggtggaagttgcggtggcagccgcaggccgcgcagcgcagcgcgtcgatggagccctcctcgccagcggccatgaattcgccgcagccgtccaccgcgtgcccgccgatgccgaccgcgtggttcttgaggcactcccggtacctggtggccccgccaccgcctgcgcctgcgcctgcgcctgcgcctgcgcctgcgcctcctnccccgaagccgcctgctggcggcgtccctgagctcccggcttccgccgaatccccgtgcttnggggtctc

SEQ ID NO: 67745 - DNA, 140 bp, Zea mays
  Clone ID: MRT4577_161780C.1
gtcctgtatagcgggcgcgactcgggcgtccgcagagatgaagaaagtgttgtatcactatcttgaacagaagactggtttagagagagtccttattagacattaacagaggtcaggacgtgcatagttatgcctattga

SEQ ID NO: 67746 - DNA, 267 bp, Zea mays
  Clone ID: MRT4577_161781C.1
acccgacggagtcctctcgccggggtatttttggggaaaggggggggtccaaaatcataatctaataccaccaaggcggctcaatgaacgacaacacaaaccgaagcccctcaccaaaaccacctactacacgggggacgggtagccacctgggcacaccgctacaacggacaaaactctgggacacctaagccgacggccacctccgacacccactccacaagcaagcctccggacgccaaccccctgatgccaccaaccccctgc

SEQ ID NO: 67747 - DNA, 110 bp, Zea mays
  Clone ID: MRT4577_161782C.1
ctcggccgagcgaattgaataagctccccctctgaactgaagcaatggcagacggcaatgcctgtggcgtcgctcgagacctgtgctccatcctcggccttgcgctggcg

SEQ ID NO: 67748 - DNA, 287 bp, Zea mays
  Clone ID: MRT4577_161783C.1
cattgggtacctcgaggccggccgggttccggtcctcaccaacgacggcgagcccaggcccgccgcggccgtcgggcagaggatgaccaggatcatgctcgccatcctcgaggcctacgcctccgacgaccgccgccacctcgactacggccgcatcgccgccagcgaggagttcagaaggtatgccaacctggtccaggaactgcagcgggcggacatgacccagctccccgcggaggagcggctgcccttcttcctgaacctgcacaacgccatggccatccacg

SEQ ID NO: 67749 - DNA, 218 bp, Zea mays
  Clone ID: MRT4577_161784C.1
gtagaccttatackcggacaagaacaacacaacagaagcagaacaaagcbacatggccaagatccagaagtagacaattctcgtcaggcttccaccagaaagctgatcacgtagaccaaacttttaattctctatatcakcgttctcctctgccacttgatcgacaasgcgagcatccaacttaacgctcgcggccctgrccagcagcyttgcgcccg

SEQ ID NO: 67750 - DNA, 579 bp, Zea mays
  Clone ID: MRT4577_161785C.1
gccggccgggctgggactgagaacgcagagacaggcgtcttcgtactcgcctatctccgcgacccaaagcgttcccccttctcccattcttctctcatttctcaccaccgccgccgctaccccctttctgcaacaccatgagggagtgaatctcgatccacatcggacaggacggtatccagtccgaaaacgcgtgctagtgagctgtactgcctctagcatggcattcacggtgatggtcatatgcacggcgacaagaccattgggcgaggcgatgaggatttcaacatcttcttcagtgacaatggcgctgggaagcacatacacccgtggtgtccctggtgagcttgagaccactgtcatcgatgacgagaggactggaacctatcggcagctcttgcatcctgagcagcccatcaggggcaaggaggatggagcccacaacttcgctcgtggtcactacaccattgggaaagacattgttgaactgtgccttgaccgcatcaagaagattgcccataattgcactggtgtccaagggttcctcgccttcaacactgttggtggaagacgggctct

SEQ ID NO: 67751 - DNA, 429 bp, Zea mays
  Clone ID: MRT4577_161786C.1
cccacgcgtccgggtcgacctcggcgggcggagcagcaaggagcgggaccgcaaggtgctgctcgagcagacgcgcgaggagcggcgccggcgccagggcctccgcctccagaacacctccgccacgaagatccaggtctgttgacgactcgctgcccgtggcgtggctcagggtaggcgttggagcagtacgatcgtgcaggggtttatctacctccgctctcggtagtctcatgggctctgaaatccaactatgagccttttggcggttgtgaatgctcatggctcagctggttttctttggctgaaccgctgaagacggattccgtgttaggatatagctttaggcttctcggcattaaaatggaccgctaacttggcttcttttccttttcctcttgtgtggtgagaggatgagttagcgtgttc

SEQ ID NO: 67752 - DNA, 226 bp, Zea mays
  Clone ID: MRT4577_161787C.1
gtcacgcactcgtcgctctagtatgttttgcttcgctgttctcgcgccgtgtcgggggactttactggtatctgttgactgcagtctacgaaccgaacgtgggtttaaatcttttttgaactcatcccaactaacacagtaactctaaagcaatcggaatggataccactcctagtcatcagtgctactttactacattcggatgggactgacagcattcccacac

SEQ ID NO: 67753 - DNA, 1987 bp, Zea mays
  Clone ID: MRT4577_161788C.1
ccgccgccgccgggcaccgctcctcctggccgccgccggcgccggcgccgcgctggctgccacctctccctccggcgaaaatggtcgaagagtcgcctccgcgctccaccaaggcatcgctcgctcctcccgttccgtctacacggttcgccctcccgtatctgttgctattactcctgagtttcggatgctgcttttgctcgattttctagccgttggctgtcgcagattggttttgtgatggcagattacaagtattcgctgaggggtctggatgctggatcggcggattaccctgttaagctctccaaggttcatctgcggtcagcaaaaaaactacttaaactatgtgaagtgaatggagggttttatgtcaaagctggtcaatatgtatcttcactaagacaagtgccaaaggagtactcatcaactctctcctgcctgcaagaccaggcaactccatccaagtttcaagatattaaagcagtaatagagcagaactttggcaaggaattgtatgacatgttcatcgaggtcgattgcataacaatcaagatgtagctgtcaaggttcaatatcctggattggagcagcgaatgaagatagacattatgacaatgtcattcttgtcaaaaatggtctcttgggtttttcctgattataaatttgacagaatactaattgaatttgagaaatccatgacaatggagcttgattttacgcgggaggctaagaattctgagagaacagccagctgcttcaggaaaaatagtgttgttaaagtgccttatgtgttctggcaacttacaaccagggaggttttgacgatggagttttgttatggacacaaggttaacgacttggacttcctgcggaaaacagatattagccctacaaaggtagctaaggctttgattgaactctttggtgaaatgatatttgtacatggttttgttcacggtgatccacatcctggaaatatattagtttctcctgaaggccatgggaaattttcactagttctgttggatcatggaatttatagagaattagaccaaaagttcagattggactattgtcggctatggaaagcactgatattgttggattcaaacaaaattctggaattaggcgaacagtttggcgttggcaaatatgcgaagtactttcctgtaatattcacagggagaactatagaaagcaagtcagctcttggcacacaaatgtctggtgaagagcagaggcgtctgaaggaggacttaaactctcttgggatggatgatatatcttcatttatggaatccttgccaccggacttctatgtcatactacgaacagacggactattgaggtccattttagggaatcttggggcaccacgccatgttcggcttctcacttatgcaagatgtgctatacacggtcttgagaagcagcacaaaatggagtctgatgttcaattgtgttcaggtgcaatcagacgtatgttcttgaatgtcaaaacaaatgtcatctatctccgtctgagagtgattattgaaatagcggtattattagctaaagcaaatggtgccaagcagaaagtcctgaacacactcagacagatgttactggagatcagtcaaggttttcaccgccttatttgatgcccagaagtcagcgacgtggtgaaattaaggctacgagaaaggtgggggaagttggaagtacgtcaggactccggagtagaatcataactgtgattgttctgtttcaacttgtaaattggaggttgtattgtgtcaaggagtccaatcataactgtgattgctctgttgtaacttgtaaattgtacttctacgtcgagtctgcgctcgagagtccaggtgttttttttgttggaccaagtacgcatcccaaaataagctaaaaaacaaaaagcgattcgaggagtcaaacaaatcttaatttgaagtttggctaaatttataaaattggtattaacatt

SEQ ID NO: 67754 - DNA, 374 bp, Zea mays
  Clone ID: MRT4577_161789C.1
ggaatgtgggacttcatcagcaacaccatgagggggaacatgtatgggtcagggcgctctaccagttcctcgacatctggtacctgcactctaggcggaaacggctattctgtatcgacaagggcgccaacaactccgaccatgacctgaacacggacatcttcaactgcttcgtgttctgccaggttttcaacgaggtgaactcgatggagatggatagggtgaacgtgttcccaggcatactggacaacaacgtgttcgtcatggtcctaggcagcaccgtacagttccagttcgtgatcgtgccgcgcctcagcagcttggacaacacgacccctctcaacctctcgcagtgagtagtctgcgtcttcatc

SEQ ID NO: 67755 - DNA, 839 bp, Zea mays
  unsure (1)..(839): unsure at all n locations
  Clone ID: MRT4577_161790C.1
ntcgggccggccgggactaattttagcggttaactactagttagctaccaaagattccaaaaccaacccccccaatccacgccgcgatgctccgccgccgccgggcaccgctcctcctggccgccgccggcgccggcgccgcgctggctgccacctctccctccggcgaaaatggtcgaagcgtcgcctccgcgctccaccaaggcatcgctcgctcctcccgttccgtctacacgattggttttgtgatggcagattacaagtattcgctgaggggtctggatgctggatcggcggattaccctgttaagctctccaaggttcatctgcggtcagcaaaaaaactacttaaactatgtgaagtgaatggagggttttatgtcaaagctggtcaatatgtatcttcactaagacaagtgccaaaggagtactcatcaactctctcctgcctgcaagaccaggcaactccatccaagtttcaagatattaaagcagtaatagagcagaactttggcaaggaattgtatgacatattcctggaatttgacgaacatccgattgctgctgcatcaattgctcaggttcatcgaggtcgattgcataacaatcaagatgtagctgtcaaggttcaatatcctggattggagcagcgaatgaagatagacattatgacaatgtcattcttgtcaaaaatggtctcttgggtttttcctgattataaatttgacagaatactaattgaatttgagaaatccatgacaatggagcttggatttacgcgggaggctaagaattctgagagaacagccagctgcttcaggaaaaatagggttggtaaa

SEQ ID NO: 67756 - DNA, 540 bp, Zea mays
  Clone ID: MRT4577_161791C.1
aggggtaccccccccacacggctcgctgccccggtggtatatgacacggtgcttttaggggtctgctgctgctgccgctgcagcacggtacgccgctgagtatggaggttgcacgcccctctgagagggtaggactccaatgatactgtcctagtaatctgcgacgtcttgggcgagcgaagagactaacgtgtggaagtgcttcatctggtgacataatatcctacgacgttttgggtacagaacgactcgctagtgtattactaggtcttttaagaggtcgctccgaaagaccgtaacgacactaagtcgttgagtcgtatggaattggaactcatagaccccgttaggacggtcccattcacagcctacaccacaacactcacgacgatagcgcagacctagttaataagcagcaacagctacaacccgaagaaaccccgatcaagtcccagtaagggggtccgagccggcgaacaggtaacaacggagttgggtacttcgaagaaactcttttcattcgtaacgaaggtcctctcg

SEQ ID NO: 67757 - DNA, 225 bp, Zea mays
  Clone ID: MRT4577_161792C.1
cccaacttagcatatatgaatttccgcacgctcctactcatcatatagaattcgtgctgcccgtacatatcccacattacatcatagttgataaaacaaaaaagggggcctgctcgattcttcatcgtcaggaccaacttacgctatatttaaccgcaaagagacttattaacatacacatatagagataaccctgatcccacataggaagcatgtcttttggat

SEQ ID NO: 67758 - DNA, 772 bp, Zea mays
  unsure (1)..(772): unsure at all n locations
  Clone ID: MRT4577_161793C.1
ggccgcttttttttttttttttttggctcatttaatttcaagaaataagtaaacctagaatttatcacaccatgaaacaaaagatatgtgaacactcacatctaagctcggtgattgttgatagctaggcagggacaacaatatcgatctcaagtattcttggattgaacaacaacagacttgatttctacatcatgtttaggcgagcctgtcacattagaagttccttctatctgcgatttttccttgtgctctgaatacccacctcccttccacagattgggtcgaatccaacctagaatctcggaaccctgcatcttctcgtgcacaggcttcacttcagatctgccggtaacaacatcaacgatctccaaacgatgcaccatgtcgtacggatccccatacaagggttcagagaagtagattgtgttctccttgtactccgatacacttgttccgctgaagcttccgttgaaacgcttagacacgaacagtgtctgatcaccgatgtccttcaccctggaccactccggcgtacggtcgtggaggttgcaagcgtagatcgcgctgctgtaagtgaacgtctgcgtctcgtgggacgtgctcaccatggcacccacaatgtgcagctcgccgtttgactccaggtaactccggtgacagagccccgcaggtggcgacagcgatggcaacagcgtccatgcgcccggcgttgctgctgaagacggagatctctncagtgtagtcgatagccaagaacttgtcctggcag

SEQ ID NO: 67759 - DNA, 138 bp, Zea mays
  unsure (1)..(138): unsure at all n locations
  Clone ID: MRT4577_161794C.1
ggagtaattttattatttaattcaaacacactgagcacatcataaatagcctttgatccgtcccacttgagctatctatncctacacctagacataatgattagcagccagcatgttgcttatcaacctgcgttgttc

SEQ ID NO: 67760 - DNA, 2705 bp, Zea mays
  Clone ID: MRT4577_161795C.1
cggacgcttgggtgcgcgagctggaagatactcaagggatgcgcgtgtctcggagaaagaggtagaagatggcgaccagggctacgttctgctggctcaagatgatcacgaggaggagccggatgaggtcgaaaaccgacaacaagaaccgcagagcgaggtggatggccgacaacatctggaagacgaggtgatggctgccgttcaggacgaatccttggaattcatggatcaggtcgaagacatcacgatcgaggacgaccggttggtgtcggtggtggcgcttgacgagatgaccatcgccgatgattcgggtctccatcgggatgtagaagaggtggacggaacgaatcatgtagtagaagatgagcaggatccgagggatgtggatgtcggagcggttctggaggagaagaggatgttggattcctcggttgcaacgccggtcgatttgaccgaggactctgtcgtgcccaccagccccgtaccttgtcctgagacttcaacagacccatctcatcctgatcatagctccgtttcccaagacgatggagatgttcttgaagatactgctggaattggcgattccacggccgaggaagaacacatctttgtgcctcaagcttcagtatcggaagccgtttccgaggatgacaacagaacagctgctgaggtggacacgaactgcgaagtgtcaatcgggagcgatatatgcgaacgggaacaagatgagcatgtcgttccatttcaagatttggcagcatttgaggagctggttgctccattggcaactggagacgatctaccattgccatcggaggtcctagagccacctgaccaagaagcaggcccacgcgaacgggaggacgtgaccacaagcacgggattagacctccaaccaaatgaacagaacgagatcgaagaagacagagcacctgagacgccgacgaacagcgtcgccacacaacgctccgacagaatgttcttgctcgagaggaaacggtcgctgtcgctgtctctggatgggagcgtagcgagcgagatggaaggcagcgagccgtccaccgtggaccagctgaaatcagcgctgcaggccgagcggaaggcgctcggcgcgctgtacgccgagctggaggaggagcggaacgccgcggccatcgcgaccaaccagacgatggccatgatcaaccggctgcaggaagagaaggcggcgatgcagatggaggcgctgcagtaccagcggatgatggaggagcagtcggagtacgaccaggaggcgctgcagctgctgaacgagctggtcagcaagcgggcgagggagaagcaggagctggagagggagctcgagctgtacaggcagaaggtgcagcactacgaggacaaggagaggaggaggacggcgagcttcaaggccaatggggtaagccccagtggcagtggcacttccgtgtcgtccagcggcgaggacagcgacgggcactccgacgactactgcgagctcggcgactctcctgacggcggcaacgtccagagctcatcggatgctgcccttagctccatgagggaccaggacgacggcacgaagcacctagcggctctggacgattccttgacgtacttcgaggtggagagactctccatcctggaggaactcaagacgttggaggagaggctcttcacactggaagacgacgatatcaacaccagcaaagaagttactggccattcctcgagtgacatggatttaccacacgatggccttcagtcgccggagtacattctcaccggtgacaggccaagattcggaggaagggcctctatcagcagagggaagagccttctgcctctgttcgatgcagtcggcgacgaggcctgtgaccgaatgccgccatctgcaggagcaggagaggcagaccaggccgacgatgcagcaacgaagccggcatccgtgcttgtcaaagagcaggagaggctggcgatcatagaggaggtcgaccatgtctacgaaaggttgcaggcgctggaggcggacaaggaattcctgaggcactgcatcaagtccctgaagaaaggagacaagggcatggaccttctccaggagatcttgcagcaccttcgcgatctccgcagtgtggagcttcacgtcaagaatgccggtggtgccatggctgcaaattcagcctagcaagttcatctatacgcggtaacgatgacactactagcttggtatggattcagtcgattggattgtaggactccaaagcactgcattggtgatggtccctgcaaggtactgccggagttatagggaggctctgctcattttgcctgtgggccggaagcaagccctcccttttgtgctggtccagcactgccaactttttctgtcgtggtggtcgcctggtctggtcggtcggtcgtaggaatcattagcccttccaaagctgcacaaagctgaatcacggtgacagcttctgcagcatgcacggggcaaaagaaaaaagatagccccagtggagatgtggatgtttttttttcttgtctgatttaatcttttgattaactttggatttgtttgtgcgctgaggtagggagtcctcgtgtattttttttttggtgaggatgtagcttgaacggttggtatgtgcagtttgtgctttctcaatatccaggtttataatgaaaggaaaggcggtctcacgaag

SEQ ID NO: 67761 - DNA, 349 bp, Zea mays
  Clone ID: MRT4577_161796C.1
aaaaaaactgcaaggtactacttaagaaaccggggaacccgccgttttgttttttgaaaccacgggcaggaaaaaaaaaatcgggacattgcgtaccctacctcgggggcggaaatatatccaccacaacctcgggggaaaccaaaaaagcagagacttggaaaatgtaagcccccacacactttttgaaggtcaagaccaacaggatgagggccccccccactgtttgcaggaacagactaatctgtgggtcaagggccgcagtaaggcggtaaaccgatcctgggatgccttaagagggggcgctccattatagtaggcgggaggctgcccatagcttgaactacca

SEQ ID NO: 67762 - DNA, 593 bp, Zea mays
  Clone ID: MRT4577_161797C.1
gctgtgttcttgcctgcacgcctacggaggctcggaattcggctcgagcgggcaccaactgccccatccctcccggatggaactggacctacgagttccagctcaaggaccagatcggcagcttcttctacttcccgtcgctcggccttcagcgagctgccggcgggttcggccccatcaccgtcaacaaccgcgccaccgtgcccgtccccttcgaccagcctcatggcgacatcaccctgttcatcggggactggtacaccaagggccacgttatatgacagtgcgctggttccggatggccttccctacgaaatcgttggagttgagccaggcgaaacatatcgcttccgcgtccacaacgttggcgtctcaacaagcctcaacttcaggatccagaaccacaacatgcgtctggtggagaccgaagggacctacaccaaccagcctaactacaccgacctggacatccacgtgggacagtcctactctttcttggggaccatggatcagaacgcgagcaccgactactacattgtggcgagcccgaggttcgtaggcaatcctcgatggcacgaaatggctggtgtggc

SEQ ID NO: 67763 - DNA, 322 bp, Zea mays
  Clone ID: MRT4577_161798C.1
gtcctataagacgcatacaaagggtgcggtcgagaagggttccaaggtccccatgttgggcggcggtggtgggaagcgctgtaagaacggaatgactgtaaggaggctgtcgtggcagcgggataccccgcctaacatgcagcggtcaattaggccgtcacaactgcaacacagtgtcttaagagacggggttgggtttgggagcgccttccatacacgcactcaacgtcaagggtcgacattgaaggcgttccttaaccaaagccagtttcatagaacctgggctgaatttgggggacttattttagcgctgctttttcgt

SEQ ID NO: 67764 - DNA, 2265 bp, Zea mays
  Clone ID: MRT4577_161799C.1
aattgacgccaatttttattctcatcctttgggaaccgaactggtttggtgtgcccacctctctctcttccatgggatatggcagggacggaatccagatgaggatgaactcgtggcaggacggcgtcacgggcaccaactgccccatccctcccggatggaactggacctacgagttccagctcaaggaccagatcggcagcttcttctacttcccgtcgctcggcctccagcgagctgccggcgggttcggccccatcaccgtcaacaaccgcgccaccgtgcccgtccccttcgaccagcctcatggcgacatcaccctgttcatcggggactggtacaccaagggccacgttgaactgaggaacatgctagatgatggtcaggatctaggggcaccagatgctattctaatcaatggaagggcaccttacagatatgacagtgcgctggttccggatggccttccctacgaaatcgttggagttgagccaggcgaaacatatcgcttccgcgtccacaacgttggcgtctcaacaagcctcaacttcaggatccagaaccacaacatgcgtctggtggagaccgaagggacctacaccaaccagcagaactacaccgacctggacatccacgtgggacagtcctactctttcttggtcaccatggatcagaacgcgagcaccgactactacattgaggcgaacgcgaggttcgtaggcaatcctggatggcacgaagtggtcggtggagttgcgcgaccttcagtcctccaactgccaaagataggaaggatctggtcagcgccctgatgcttgagatgaccaatacgacaagaacctcttcatcaacgtctttgacagaaaacaaagatcatgtacagttttctttaatgcttgagacctcgagggttgttgaatgtagaggtcattaatcttcacattgaactgttaaaggagagggaaaaaagggaacccaacaggtttttgaaatgccatttcttcaatacattcttctacaagaagcttacttgcggaatagctggttatgattaccagtctgttaggagatggacaacattcaagaggctgggttatggacttgtcgagtgtgagaaaatctttgttccagtgcatagaaatgcacattggtgtttggcactaataaacatgaaggataaaacattgcagtatcttgaatctcttgttggttggggccgtgatgtactggacatactggctagatacatcgtggatgaattgaaggacaagagtaacatagaggtagaacctagttcgtggactgtagtgtcagagtctttgcccttgcagcagaacgggtgggactgtggcatgtttatgcttaaatacattgatttccatagcagaggtatcaaaccatctttcagtcaggaacacatgatgtattttaggaaacgaatagcaaaagagatcatggcattgagccgactgaagagcaccattctgacattgtctcaagtcaggtatttgcttcaaatagcagtgtgattcttctaaggctcaatgcgctttgtaggcattttttagatgatttagggaaaagcaatgaacggacgcgagggcggatttgtgggtttcaattgaatcgagatggtttatcttttttgtttcagagatagttagtgaaaatattgcactttttcttgatctctggcacaattctctcgtgattttccaggcatatatctgtacaaggagtagaagcttacaccaaaaattagtattcatctaaggatctaatttcatttttaagtttacagaacaaaaaaatgtggtacatatggattcactaaaaatggacttgttgcacaatatttagcttagtactttaataagcttttgcatattgctcttgtaacttgagcattctatcccatgtaggaactaaggaacatgctgaatgatgttcaggatctaggggcaccagaggccattctaatcaatggaagggcaccttacagatatgacaatgcactggttccggatggccttccctatgaaattgttggagttgagccaggtatggcctctataatgcatgagatgtgaaggacaatatcagagagcttatgaatgtgaacccgtaggactccacaatatccttctcattgtctttgacagaaaacaacgatcatgtgcagtttttttttaaaaagtaaaacaatattttgaatgcatatatccttgttgtcttctgaaataaaggaccaataattgtatttcg

SEQ ID NO: 67765 - DNA, 4071 bp, Zea mays
  Clone ID: MRT4577_16179C.1
atggtgtcgcaggctcccgtggcgggcgccagcctcgccgcgtcgctgtgcaagaagagcaaccgcgtcgcgcgggtgctcgcgtacgcgctgctcgagtggatcctcatcgcgctgctcctcgccaacggcgtcttctcctacctcatatcccggttcgccgccttcttcggcctcgcgccgccgtgcgcgctctgctcccgcctcggcgtcgacagcctcttcgagacccgcccgccgcaccaccgaggcgccgagcccctgcgccgcttgctgtgcgacgcgcacgccgccgagctgtcgcgcctcggctactgcagcgcgcaccgccggctcgcggacgccggggacatgtgcgaggactgcgccgcggcggcagcgcccgggaaggcgctgttgtcgtggatgggccggagcgagctgggtgagcgggacctcgcctgtgcctgctgcggtgtcgcgctcgagagcggcttctactcgccgcccttcttgctcaccacgtcggcgccgcgtggttcagattgtggcctcaagcaagaggaagaggcagcgatgccaaatggagacgtggtcgttgtctccaaggaaggtcctgtgatcgagctcttcgacgataagccgtttgtggaggatgactcaatcggcgtcttggctgccgaggttgttgccaatgttgagcggccggttgctcttgaatcaattgactcgttggtggtcaccatgggcaccgtgtcatctcaatccggtggcgaaggaaaggaagcagttgaccatggtgttgtaaggcagaacaacgtggacatggagaacacagttagtagcaatgaggagaaaattatgccatctgatgataaggtggatgtggttgatcggctgattgatgaacagattgttgccgtagtccttgtgccagcttgtatagaagctacacttgatggtggcataaatgcagacaaaaccgtggatgcctttgctgatcatcagtctcttgaggatgacagtggattggaagttaaggaccagaaaatatcatttgaagatgaggtatttgaaggtgagcaagctgaatacatcatctaccgaacctaacagggattgagcaacgcgcatgtgcaaggaactctggtgagctagcgcctcattacctacatcatcatagggaatgaagattccagatcagctgcctatgtcaagcgaacattgccagtggaagcttctaagcacgttgcgataagggagaataaaggaaagccgactaagtagtattgtcattggagggagttggattcaataccaaaatgttccagggagcatgctgatgaagaacttcaaggagagagaactgcacaggctgggttggaacaagagtgtgactctgtgccaattgattatggggaacacggttcccttacttcatatgctcatactgatgatgagcaagatgaggcgatgcagaaagtcacttctgtaactcggattgaagagaagcaggttcaacaagctgaggtaaatcaggagttggattcaataccaaaatgttccagggagcatgctgatgaagaacttcaaggagagagaactgcgcaggctgggttggaacaagagtgtgactctgtgccaattgattctggggaacacggttgtcttacttcatatgctcatactgatgatgagcaagatgaggcgaagcagaaagtcccttcggtcactcggattgaagagaagctggttcaacaagctgaggtaaatcaggagttggattcaataccaaaacgttccagggagcatgctgatcaagaacttgaagtagagagaactgcacaggctgggttggaacaagagtgtgactctgtgccaattgattctgaggaacacggttgcctgacttcatatgctcatactgatgatgagcaagatgaggtgaagcagaaagtcacttctgaaacagcagatgttctacattatgcagcagacacttttaatgttaacacaaactcatggaaagaagatattgaagaggatccaactgaagctgctctaacagccatacatcaaatttgttacgaacctttgacgagcatagtcaagttctctctagatcacagtgtctccgaagaagacagagagcctgatacgccgactcatattgaaggtatatgtgattcacaggaactgctggattctaaagcagttgtttctgatgctaaatctgtagattcaagtgttgctactttgtctactgatctggaaagcactgaattggtgagtgtcgatcaactaaaatctgctttggcttccacacgcaaatcattgaacaccctatattctgaacttgaaaatgagaggaacgctgctgctatagctgccgatgaaaccatggcaatgataaaccgtttgcaagaacagaaagctgcaatgcagatggaggcgattcaataccagcggcttatggaggaacagtcagagtatgaccaagaagcactgcagaggttgaatgaactagttgttaagagagagaaggagaagcaagatctggagagagagctcgagctgtatcgccacaaggttcatctctatgaggtaaaggtgaggaaaatgtccaggcacaaggctgatgaccagaatggatcatcgtcagcttcatcgagtgctgaggatagtgatgacctttcacaaagtttctatgaaggtgatgaatcttcccatggtattaatggaagcaacgggagtattcctacagatgttgtgctacaagaaactgccaggcatcttgttacccttgatggctcactagctgattttgaggaagagagactatccatactggaacagcttaaagtgctagaagataaactttttgatcttgaggatgaagagtccgataacatgaagcatttctcagaagaaaaccatttaagtggtgcctcgaatggtttctctgatgatgatagctgctttaagctccatgacaagagaaagaatgtaacctatagaggaaagaaactccttccattgttcgacgatgctaccgtggaagctggaaacgtcccccaaggtaatgatgcacagcattcaacagaggtcacactggaccttgctagagagcaacataagcttgcaattgccaatgaaatcgatcaggtacacgagaggctgcatgctcttgaggcagatagggaatacataaaacagtgcgtgaggactttgaagaagggagggaaagggtttgatcttcttcaggagatattacagcatcttcgggacctaagaaggattgagcaacgtgcaagtgcaaggaactctggggagctttcgcctcattacctacatcatcacacggattgaagattccagatcagctgcctatgtccagcgaatattgcttgaagatggaaatcatacaacaatgataaggggaaaaaaagattgccgactaagtagtattgtcattggagaagttttgttggttcccggagaggaaggagctcctcctggaacacccgtcacagtcggttcgaagataccattgggaaggcagatcacggagcaattctgccttccaaggtccaggattttttttgtggaccacatcccacgttctctttttgtgttggtttagttttcccggtgggttccaaacttttgcccaagggcaagagggtggttggtgagccgcccgggcccctgtggggctgtgtgtttgttggggggtgtggcggcaatcatggccttgtgcagaagctttagaattcattaacctgaaaacatgccgatgccagctttgctgccagatatgttgggcttcactagtttttgttttcttctttttttctaaatcctttccctgtaaatcttctagctgtatgtaatgtgctttcggcctttggaatgatgaggtgttgggtgtgtgcatagcatgactgttgttttatgggtcttttttttcttaaaaaaatgttctttttcgctgttattgttctggacattgcaatattttgatgcaagtgctgctgcttattagttaaaaaaaaaaaaacccaaaaaaaaaaaaaaaaaaaaaaaaaaaaa

SEQ ID NO: 67766 - DNA, 368 bp, Zea mays
  Clone ID: MRT4577_1617C.1
gagtattccactatcccaacttctgttcagttaagactatctccaaccatattttttatatcccttcgttacagacttgaaaagattttttacctctatatctcatttctcaacaacctcctgtatatctcatcctctatactttaagtacccctgtattagagacatttttctttagatttttatgcgtacttatttgtcattacccttaagggcttgtttggttaggagtggatcctaaagggattgaagaggattaaatccctttagtcaaaattgaatggaaagggatgcaatcccccctcaaccccctccggtttgggtgaaaccgaacaaggcctaaatgtttttgtacatattttagtttt

SEQ ID NO: 67767 - DNA, 633 bp, Zea mays
  Clone ID: MRT4577_161800C.1
gaaaagaaaagccgttctccctccgtttccccaaaccccaaggtccccaaccatggcagccgccgccgattctgcctccgaccaaaaccctaaggacgccgagcggcacgtgctcaccgccgaatccgacgccgatttctccgaggaggactacgacgaggatggggaggaggaatacgaggaggaggaggagctggacgggccgcccccaccgtgcaggacctgctccgcgccgccagtgtcgccactgcgcggctgcacgatctcgacatcttcgacgccgtcaagatcacgctcgacgccgggccgcccgagctgcctggcaccaccaacgtcgtcatcgaggtcgtcgaggtggccaaccccctcactggcaccgccggcgtctattcgaagcccgaagcaagatcttggtcgctggaagggtcacttaagttgaagaacttgtttggctatggtgacatctgggatgcatcaggatcctttggttgggaccaaacaacagaggttggtgttggagtctgcctaccgaggtttaaatcaataccaacaccattgatggctcgggcatctttgtcatcacaagattggcctgaaggtttcatcatacaaagagcgcctacttgggctttc

SEQ ID NO: 67768 - DNA, 2004 bp, Zea mays
  Clone ID: MRT4577_161801C.1
gggtacccctcgaggggccggccgggagcacggcttgctaaacacgcagaaaagaaaagccgttctccctccgtttccccaaaccccaaggtccccaaccatggcagccgccgccgattctgcctccgaccaaaaccctaaggacgccgagcggcacgtgctcaccgccgaatccgacgccgatttctccgaggaggactacgacgaggatggggaggaggaatacgaggaggaggaggagctggacgggccggcggcggcggcggcggagcgggagcggatgcagtccgtgttacggaggctgtcatccgaccccgtgggcatccgcgtccacgacgtgatcatcaagggcaacaccaagacgcaggacgagctcatcgaggcggaggtcgccgagctgctccgcgccgcccccaccgtgcaggacctgctccgcgccgccagtgtcgccactgcgcggctgcacgatctcgacatcttcgacgccgtcaagatcacgctcgacgccgggccgcccgagctgcctggcaccaccaacgtcgtcatcgaggtcgtcgaggtggccaaccccctcactggcaccgccggcgtctattcgaagcccgaagcaagatcttggtcgctggaagggtcacttaagttgaagaacttgtttggctatggtgacatctgggatgcatcaggatcctttggttgggaccaaacaacagaggttggtgttggagtctgcctaccgaggtttaaatcaataccaacaccattgatggctcgggcatctttgtcatcacaagattggctgaagttttcatcatacaaggagcgcctacttggcctttcatttggtttgctgtcaacaaggaaccatgacttgtcatacaaccttgcgtggcgtaccttaactgatccatcacgtgtctcatcaaaggccataaggaggcagttagggcataaccttctttctgcattgaagtacacatacaagattgataagagggattcacatcttaggccaacgaaaggatatgcgtttcagtcaacttctcaagttggtggtctatggaatagcaaaggattgagatatttccggcaggagttcgatgtacgtggtgctgtgcctttgggattttatagtgctgctctcaacgttggtgtaggagcgggtgtcattttaccgcttgcagggggattcatgaattcgacttcatcagtgccagagaggttttatcttggaggtaattcttctccagtgtgcagcttgggcggaccgtcatctctgctgggtttcagattaaggggagttggcccaacagaggcgcggaggcatgtccttaataactcggagagtggctcggctgaccctggaagggattacttgggaggtgatctggccgtgtctgccttcgctgacctttcttttgatctgcccctcaagatattcagagacgctggaatccatggccacgcattccttactgctggaaaccttgcgaaactgtcggagggtgagtacaagaacttttcggcttctgaatttcggcaaacgttccggagctctgctggcgttgggattattttgcctaccaaacttttccgggtagaggtgaactattgccgcatcctaaagcaagctgagcatgacagcgcgaagactggaatccagttcagcttttcctcgcccatgtaggaacttgccatggcagccgaaacagctgcactttcctctgtagacttgcatttcttcccgttcttttcatgctgaagcaattgaagaggttatttacgtgctcccttttcttgtgacgcttgttcattgacacgaggagctgctccttttttttggtgtcttcaggagatgggtttattatttgctgtttttgacctcacgagggatttgtcctcgcacaactcaaataccgatgctgtggctacacaatggtggatagaataatattttggcccataatgttgtataattcataccacatcaaaaaaaaaaaagataaa

SEQ ID NO: 67769 - DNA, 381 bp, Zea mays
  Clone ID: MRT4577_161802C.1
gctaaatgcgacctgggaaacaacatcaggccacaccacttgtaatattctacccccacccaggccaagaagagcgaggacaatggccataactggctctcacaacttcattcccaaggcctcaatgacaacagctatcgacatcctggatgtaaaaagacaagtgagaatactataaaactgtcacatgtcacagtaacctagtgcagcattacgatccttctgaggattaatataacgtgtttctacttatagaacaatgtaaaggaacttacctactgaacacgcatttcactagcagttgctcataccctgaagacgattcaacagttgctctttgacatagtttggcctgcaactcatttcatcatcatcaaggtg

SEQ ID NO: 67770 - DNA, 448 bp, Zea mays
  Clone ID: MRT4577_161803C.1
actaggggtacatttattatagagtacttcaacaggggccgcacaggcaatggtacacatagctagactgcattactatagcagcactaccaagcatgcattattgaactgataaaacagataatgctttttttaacaacctagctcgccagatatatacacataagacaccagctagctagttgaatgaagtacggccctggccccacagtcatgactcatgagccatagatgagatcacagcttgagcgcccactgctaggtgggactcccagtggcaggcgatacgatgacttgtctagcagtaccattaccccacgcatatggcctggagttcaacaccatcccggtgccggtgttgaagatggcgacccccgtgaggaacacccatcgctcacaagacgatccagccccgttgaaaattttaaccgtcacacccccgctggca

SEQ ID NO: 67771 - DNA, 367 bp, Zea mays
  Clone ID: MRT4577_161804C.1
aaaaaaaaaaaaaaaaaaaaaaaaaaaaagctagaacataaaaacgaaaaaaacactaagggcgaaataaatgctgatataaaaaaaaaatgaaaggaagatagggttgtgctttggcggggacccccttaggggggatttttgcgaatttcaatcaactggggggcggtttacgcttgctttaagggggcccacttggccttatcgggggtggttttacagttcccgggccgcctttttacaactggggtattgggaaaaccgtggggtcccccagctttttccctttggggcacatccccttttgccaagggggggtcattgtaaaggggccttaaccgcggggcttttcaaaggtttcgcccac

SEQ ID NO: 67772 - DNA, 197 bp, Zea mays
  Clone ID: MRT4577_161805C.1
acacccttccgaaccattcgcggaaataattgtcccctttatcatattccatccaacctttcctaaccagcgagtctttttaaacacctgtaggcttccattaaaccaaactgttaagagataattttaatgccccccaagctttccttttaaagttttttccttttccttaaaaaatgttttatgtaacccctttt

SEQ ID NO: 67773 - DNA, 455 bp, Zea mays
  unsure (1)..(455): unsure at all n locations
  Clone ID: MRT4577_161806C.1
taaagaactgggcaccattcaatccatctacactaatcttgcatctgagagccaatctagtagtacctacgcaataggtttcacctctgcagattttatcatttgggaccttgngaatgaancaaagatggctcaagtntcctgtggtggctggcggcgcccttattcttattatcttgggacagtccctgnatatcaganctgctttgcctttgtnnaggatcatgatattcacattcacaggcnctgggcaccaactcatgataagaaattactcgctcaagttctccatttgcngtttcttggtngagaagtgcactcgttgtgtttcattgatccngctggcctttccgatcctgagaatngctcagatctgttgatggcgtccgggtgtgtngatggctctgtgcgccttacggttttttgtctggtcgttctggggggtggcttttctc

SEQ ID NO: 67774 - DNA, 752 bp, Zea mays
  Clone ID: MRT4577_161807C.1
gtggacttttttttttttttttttatacggggactgtctttcttttttgttggtcaactgtgtttggcagtaaatatgaacaaattaagatggtgtgatcatcgtcacagtcaacccatgcatctactgatgtagtatagaacaaatctcagtggtggttctcttctagcataaatggacgtgtttacgtatacaaatatacaatccatcatttactatacatcatacaaaactgatccacacaaaatacaccgaccgtggacgaatgtacagaggcgggaaggaacaggaacgcgttagcttccgttttcaccagagccaagtctatatatagtttcctgcgcgaatggtgagcttgtatactcgagtgaaagggagaatgagaatcaatcgatggatttcagagcaagccggggcgcgagtggaaggggaactggtgcatcacaactacggaagccttctcaccgtccttcttcttcctctccttacggcctcctgctactgatgccgccgcctgctgctcctcctctcgtggtgccacccgctgctgctgctgctgcttggcttctgctccgccttctgacgccgattgcttccggcctgctgcaacaggcgacaccgcggcgacggcgacaccgccgaagcatcctcccagtccccacaccatgatggatcgaccgcacgtacgagcttctcctcagccgatcacctcctgatgactgacctggcctgctagctatttgccccgatga

SEQ ID NO: 67775 - DNA, 325 bp, Zea mays
  Clone ID: MRT4577_161808C.1
tcgggaacctgtttagcacactaatactcacaagaaagatgtccaggggcagtgcagtgacggtcccttagagacccaatagcaaagggcttaaagggtacttggagaggatgaggagtggtcagaaccacatggactgcactgccattgctgctgagatcctccctcagatcgggaaatgggggccatcatggcggtgctctgactactatgagctttgtgctgcaactgacagttttggttgagagaaaatgactgggaagggagggcctgcagaggtgtacaacggacagacagctgatggacaattagtggcagcgaagag

SEQ ID NO: 67776 - DNA, 595 bp, Zea mays
  Clone ID: MRT4577_161809C.1
aacgagcaagtagggggctgctgtggtatatcgcacaaattccgctccatccgtggagctgcttcggggaggcaatacgcctgaactgccacgcgggtcgactcttgggcggggcgggcatggttccacccggactaggatctcatgtggacggcgcagcctgggcgcccggacggtcggactctcatcccaaggacgcggcgctcaagggtaacagcactctaaactttaggaccaaaccatgcatagggtatggcattaggggggaaaagaaggacccaacaaccacggggagtgaacaaggtactatgtatgtctgtacaacaagcgagcacaaaccaaggttgctgtcgcgcccattgagtcggagaacgcaaaggagccaccgctccactcgtgtaaaaccaaaggagccttacacgggcacgatcggctatgtagagaggctgggaggacccatagctcctggcgaaacatgccacggtgtcattgatcatggcggcaatgttgcgcactgggaaggacagtactacggcatcattcctcctggagagaatacaaaaaaacctggatctaccaatactgagaggctcta

SEQ ID NO: 67777 - DNA, 150 bp, Zea mays
  unsure (1)..(150): unsure at all n locations
  Clone ID: MRT4577_16180C.1
ggcggcgacgcgtacggtccattttcattggtatgaatactgaaactactaacgccagtgccactgtggcggtgtggtcttttctacattactgcaaagctcngtttaatcaaagcttaattaggctccctctacatactgatccagcta

SEQ ID NO: 67778 - DNA, 408 bp, Zea mays
  unsure (1)..(408): unsure at all n locations
  Clone ID: MRT4577_161810C.1
ccgtccgnnggcgattggccnnnagaagctaggcnntgagctntacanacnncacgannagggtngnntcactaccccatcatnnncggcggcgnnngcgatatctggtgcgctgctnnngtcgaagaagggctgngnngctggccccgaccaagggatgaagcnccacatnnttcgacccggcngnngcggtgccgagcctttggaaccctcttggaaaggcgaagaaactctacctggtggtcccttgggccctcgatgaccccgcctagatcccccgctgctgctngnnctgctgctnnnactcaggtnntctgcccanngcttttgcgtgtcaaatcttgtnnttcggacccttgnnngtgtagcnaactgcaaaggggctaagggtttacctccccctccaca

SEQ ID NO: 67779 - DNA, 244 bp, Zea mays
  Clone ID: MRT4577_161811C.1
tcgagcttgtgaggacccagatgcaatagagctatatgagacccatatgccgcggcgaggtcaatggatataccttggttgaacactgctcagaagcagcagaatcgcaagaagaggatgctgtatggaagatggctgttcttacattggcacatacagagagctatgcaagcatatgcaagagaaacatattactgtaaacacactagctgcggtacagtggcatgcttacataaggaaacgg

SEQ ID NO: 67780 - DNA, 503 bp, Zea mays
  Clone ID: MRT4577_161812C.1
tggcttggaacctttgggctgatttatgtgcttgaataatcccgtgctcctttgaactggggttcttattactcttaatcgtaattttattttacattgttgttgttcttgtcagggccccggagcgaggactgttgacgctgatggtctttaggtgttttccttgaggttgtggtgttttgtttttcggtattggtcatgcctgttgtggttttgttttcgttttaggttttgttgatcgtgttaagatttcgtgtaagtttgctcctattattgctgattagtcgtgtttttagatgtatggctatatttctattgcttgtgctactcttgtttgtattgcttctgataagtttcctatgtatactggttgtatttgtgctgtagagcgttctgctggagatagtattggtattgcttctgctattgcttgtaatgaataggccgattcctcgaagttagacataatagcgactccttgtaatgtcaagaccgatacgcct

SEQ ID NO: 67781 - DNA, 403 bp, Zea mays
  Clone ID: MRT4577_161813C.1
gaacgccaaggatgcggattccaaacggatcgcctagcaagcaagcaagctatccagtttttttttacaaagggacgaagcctcctatttcattaagaaataggaaggtttgaaacagtaacatgcacgcgtgcaacaaaccaaagggatcgaacaaggtcatatctttatgtgagaggctaacactttttgtgtttatcgggggagagcctatgataacagatgaaggttgacctacgattaaccacccccctctttcttattttacagaccatagcatgacggactggagcagcggaagatactgaaccaaggtaagcaccagaggaaaggagtgggccagccccatgattcaggttccagcttaagagcggcccgaagtacgcctgtctatggggcacca

SEQ ID NO: 67782 - DNA, 312 bp, Zea mays
  Clone ID: MRT4577_161814C.1
ggtgtgaggacacttaaatcttaaaaaaaaaccagaccacaaaaaaaaaaaaaaagtttctcacaaaaatcaaaaaaacaaaaaaacactatataaccaacggtttttataaaaacactatgttgaccattactacacaccacacattttgctgtcaccaactcaaatcgcccaccaattatagaggttgtaaatatccgtgcgctcttcaaacatggagcgcgaataaaaaatttaaaacaatcgcttagctgaaaaaattcttatcccaaactcaggatttattgccccccataccacacattaactctc

SEQ ID NO: 67783 - DNA, 430 bp, Zea mays
  Clone ID: MRT4577_161815C.1
ggagggccaggggttaattcaaagaatagtcacaacacagggcccagtacaacccccggcaaaacgtttcactgaaagaactttacacgggcgccaacatccatccacagaaatttggcctcgggggccaatttcctgctcctgtacaaaaccaggttcgtgagccggggcttgggcccaggctcaaaggacccccccttgtcgggcttccccaggagccccagttcccgggcgggcaccacgttgccccaccaaaagtcgcccaaccccttgggcaggaactcccaatacccccggccccccggaacccggaacaggctgctccccctgggcgtccaacagtaaagctccccccaatccctgcccatgatctccattaggccctgcacctgcggaatgtaataatagggcattgcgccccagggcaacc

SEQ ID NO: 67784 - DNA, 765 bp, Zea mays
  Clone ID: MRT4577_161816C.1
gcccttcctcgagttttttttttttttttttttttttttttttttttttttttttttttttttttttttttttttttttttttaaaaaaccaaaacttcttttttttttggacccaccttttttttccaaaaccctgggggtttaaaacagcccaatttttccgtaacccccttggtaaatccccccccgcgggatagaaataatacttaacaaccggggcccaaaattgggccgggggaatttttttgtttgaaaggggggtttgcaaaattcaaacaaaaacgggacgaattgggggccccccttcccccccccaatttgggggtcggggggggtgtaattaattcttgggggaaggaaaattttttggttttaaaaaaaaattttttttgccccttggggcaggggatcccccccccctccccaaaaaaaaaaaagggttttttgcctttccggagcaaaaattaaaacccggacccggccccttgggtaactttggccacaattttggcccctttggggttcaaaaattggtatcccgggggggggcccataaggaaccccttgggcccggcccccgttgttttgggggggtctaaaataaacaaaggggtgtctttttgaaaaaaggcccctttcttgaaaccccagcccgggttgttgtccccccattcccccgggccgggtggccaaaaaaaaacctttccggggggaaaggtttgggggaaaaccccaacaaaaacccaaagggggggggggggggg

SEQ ID NO: 67785 - DNA, 2096 bp, Zea mays
  Clone ID: MRT4577_161817C.1
ccggccgggaccagtcccacacaccaccacaccagacgaaccgtctatctggccggccctcgccacgcctatccgcaccctcccctccctcccctactctctcggaagcggcgccgctgccgccgcagcggcgaggagccagccatggcggcgcacgcgacgctccccttctcctgctcctccacgctgcagaccctgacccgcaccctctcctcgcgcggggcccaccagctccgcgggggcttcctccgcctcccctccctcgcggcgctcccgaggctggcccacccctaccgccgccacgtctcggcgtccgctgcggcggcgcccaatggcgcctccgttgagggggagtacgactacgacctcttcaccatcggcgccgggagcggcggcgtccgcgcgtcgcgcttcgcctccgcgctctacggctcgcgcgtcgccatctgcgagatgcccttcgccacgatcgcttcggacgagctcggtggcctcggcggcacatgcgtgcttcgtggatgtgttccaaagaaattgctagtgtacgcatccaagtactctcacgagtttgaagagtctcgtggatttggatggacatatgagactgatccgaagcatgactggagcactctcatagccaataaaaatacagagctgcagcgcctggttggcatttacaggaatattttaaacaatgcaggagtcactctgatcgaaggtcgtggaaagatagtcgatcctcatactgtcagtgtgaatggtaagctctacactgctaagcacatactagttagtgttggtggccgaccatcgatgccagatatccctggtatagagcatgttatagattcggatgctgcgctggatttgccttcaaaacctgagaaaattgcaatagtgggaggtgggtatattgctttggagtttgctggcattttcaatggcttaaagagtgaagtccatgtgtttattcgtcagaagaaagttttaagaggatttgatgaagaggttagagattttgtcgctgaacaaatgtctttaaggggcatcacgtttcatacagaacagagccctcaagctataactaaatcaaatgatggtctgttatctttgaagaccaataaagaaaattttggtgggttctcacatgtaatgtttgcaacaggtcgcagaccaaattcaaagaaccttggactggaagcggtgggggttgaaatggataagaacggtgcaatagtggttgatgagtattcacgtacctcagttgattccatttgggctgttggagatgttaccaatagggtcaacctgacaccagttgcactgatggagggtggggcatttgcgaaaactgtctttggcaatgaacctaccaaaccagattacagagctataccttctgctgtgttctcccaaccaccaataggacaagttggtcttactgaggagcaggcaattgaagagtatggagatgttgatgtcttcgttgccaacttcaggcccctcaaggccactctgtctggactacctgatcgtgtattgatgaagattcttgtgtgcgctacgtcaaacaaagttgtaggagtgcacatgtgtggtgatgatgcacctgagataattcagggaattgcaattgctgttaaagctggattgacgaagcaagattttgatgccaccattggcattcaccccacatccgctgaggaattcgtcacaatgaggagcccgactagaaaaattcgaaaaagttctacagatcaggtagaatctaaagatgaggttgtaagtaagcagtagataccattttttcctaggaggtgttctcgggggagggagtattcctgctgcaggacgacagctggacggaattttggaatacaccggcagagtagctgaaataactgctaggaatttctgagaaatttcatgttagggaaccaacgatgctgtttaatagaattggctgtacatacctgtccgccgagctattttcctgtgtcttgtacgttgaaataaaatactgcaaatgtttgccttacggtcatgaaattttgcaataaccaataaaagcgccttcctaggcaagcaattaagct

SEQ ID NO: 67786 - DNA, 544 bp, Zea mays
  Clone ID: MRT4577_161818C.1
gcggggatcaaccttattattgagaccatcaagctcatataaagtggaatccactagcattcactacagcaacaatggcgaccaagatattttcccttcttatagctccttgctctttctacatgtgttgctaacgcgacaatttcccctcaatgctgacaagctactatagctagccttcttcccccatacattccatcatttatacctactacatgacctaacccatctacttacaacattcaggcctgaccaagcaatcaccatgagcaacatgcctttgtcgcccttgcccgtttctcagtcgacaagcatatcgttggtgcaggctgaggaacctctgagagatccacgctaaggtcggttggcgctgaatctgtctgctcggtactactggtgttctcactgaccaccaaaatggtggaactcacttgaatagcggtgcccagaatgatgacatctttggttctaacatggatgcccccatctatcgcgatgcagacaacgaaaaggattgcaagcctgacgtaacatctgactcaat

SEQ ID NO: 67787 - DNA, 335 bp, Zea mays
  Clone ID: MRT4577_161819C.1
gggggggaaaaaaaggctccaacaaaaacgggctaaacccacacacgggctgtctgcttagtttccccaaccctacccaaaagggcccccccggcaatgcccccctggacaacaggtttcccagaaacatccccccccaccaccagaggcgagcccctttcgcccgccaacttggggacaattttccatgcccagggccccggggccaaaaagacctcccccatcacccccggggaccaaaaaaagttaggcaggccacacttgccacctgtgggataaaaaaaacccccggaataacctaggttagaaaacccccccccttccccttttccccc

SEQ ID NO: 67788 - DNA, 340 bp, Zea mays
  Clone ID: MRT4577_16181C.1
catgggccaaaggacaggccaataaaccaaggaaaagggcacaacaaataaaagcccaaggccaagggccacaataacacatccaggggacggaacactgaaaaacgccgggggcaaatcttcggaaacaaaaaaaaaagggaccactagggcacaaacaaaggcgcacaaaagcaaaggcagggcccaaacatgtgcagagaaggcacaaaaccgctgtaaaagggcaaaaaaaacggaccaggaacgacgggacccagttaatcgccggcccatgcccccgccaccaggacctgggattggacctgacacccaaggggcgggttgtaacggcacccga

SEQ ID NO: 67789 - DNA, 620 bp, Zea mays
  Clone ID: MRT4577_161820C.1
gtctcaagggaagcatgcagatcttcatcaagaccctcactggaaagactatcaccctctaggaggagtcttctgacaccatcgacaacgtcgaggccaagatccaggacaaggagggcatccctccggacacaggagcggctcattattgctgtcaagcagctcgaggacgggcgcacgctggccgactacaacattcacaaagagagcaccctccactaggtggtgcgtctcaagggcggcatgcagatatttgtgaagactctgactggcaaaactatcacccttgaagtggagtcttctgataccatccacaatgtcaaggccaagatccaagacaaggatggcatccctccggaccagcagcgggtgatttttgccggcaagcaaatcgaggaccggcgcacgctggccgactgcaacattaagaaagagagcaccctccacttggagctgcgcctgagggggggcatgcagatcttcggagagacacttagtggccatacgatcacccttgaggtgtaggcctaggacaccatcgcacattgggaaggcgtaagatccaggacaaggaagggatttgcaccagaccagcaccagctcatgttttgctggccagc

SEQ ID NO: 67790 - DNA, 286 bp, Zea mays
  Clone ID: MRT4577_161821C.1
gacacacgcgtgcaaagactcatgagctgtttcgttgtacatgccacacgcactacacgcagggcagcgctattcatatatagagaggttagctatagctcgcacatatatgtaactaactaactaactggctcgctagcgtcgatccgtacagcacagccaaagcatctagaatcaatgcaaaggagaaccctgccagtgtgctagtactaccagcgcattttaccaaactgaccttcagaaacctgtacatccgccaggccgggccgtgcctcatggagctaac

SEQ ID NO: 67791 - DNA, 475 bp, Zea mays
  unsure (1)..(475): unsure at all n locations
  Clone ID: MRT4577_161822C.1
ggggggggggggtgtatgatnnatgnaaagactaagactgtgtgtccggggatacccatcgggatgatgtgggaccgtgccatcccagcagcacgcccggtcgtgacgtctacccattgcatgcctcataggaagtctgcgtgcgtcttcttcttcgatccaacacgttttcttcggtgggggcagcgctggccgcgttagcattcttattggacttcctatttgtcctgttcgcgtcattaggcagtagagcgagtggggctctgttcgctcgtcggcacgcctcttcctcacactcggctctctggacctcctccacgaacggcttggccttcttgtcgacctgggagtccttcccagctgcgacagcatcattgggccagtccacattggcttcctcgtccagcttctctccctccttgagggctttgnggcccacgggaacctccttcagcgcctcagggttgcccttacc

SEQ ID NO: 67792 - DNA, 313 bp, Zea mays
  Clone ID: MRT4577_161823C.1
aacgcaaaagggggggttttcaacaagttgtgtggaccatattctcatgtggcgctagagcgtgtttcggactatattggagccacaagtccataaagtatcaaggcatgccgacaccgcatacaaatcatggattggctacagaaggtgatactgactgctgggagcggaccaataccaaatcactcggtttcctcaacataagtgaagcaagcggcaaatcgtcgacgggccatactaagatccatgttccgccgcacggcgagaatgtgcccgcccctgcctgtccatattctgatgcgctcctattctc

SEQ ID NO: 67793 - DNA, 454 bp, Zea mays
  unsure (1)..(454): unsure at all n locations
  Clone ID: MRT4577_161824C.1
tcttttttgtgcgagggcatgggtatagggggatgtatatgataagccaagttgaagctgtggatgatcactaccatgaagatcatcttcatcctgacgaccccggatggcatcgagtggggagtcttgatctcgatgacgtacgactgggacagaaccgctgggctcgccatgggggactggctcaactggattgtgaggtggtatgctaccgtacattgtgtttgtgagaccagctcgtcgatgactacaatgaaccctatagtgcatattcctacttaagctgcattttgtgattaacgcctaatttngggnggggtgcccgcctcatgtccatgctggccaagtgggcctagtttactagccagacactatttgctctctgccctctagattgcagttctttttttgagttaaattgatgcaaaatactactgttatggagaaacgaacg

SEQ ID NO: 67794 - DNA, 639 bp, Zea mays
  Clone ID: MRT4577_161825C.1
ctttcaccaatcctatctcctgtgtggtatgacagccttccgctcctcgccgatcgagatcagtcgatatgccattgtatgatgtcggccatgtcgatacacgattgtctgttggaaccatggaccctggcaccccgctccaccgtctacgatatcttgtcggcaaatatgctcacaagactggttaccgcagtttcaacgtgactatgcactcattggattcaacggccaccgcgatgctggtgatgaggaatccaaccgaaaaggctgagaagtcgatggaacgcacgctattagtggtgaacttgcataaaggaggtcctcatcgctactggtgaatcacagtgagtgcctagcagcagaggacctccaccaggaacagattgtctgtggtcaccgaggaatgaatcgtcactggtgtcagagagtgcgatcatcgtcgactgatagacaactaatgctaccactgggataaatgtccgccattgatagtagaaactgccagaagagtctaaggaatctcaggcgtggtacaaggtattcacgtacttcatgcccacgaagaggcacgtggacgccagaccagctactgtacacaggcgaggtatggccgatacagatccccatctggctcgccca

SEQ ID NO: 67795 - DNA, 144 bp, Zea mays
  Clone ID: MRT4577_161826C.1
tgattttttttacactttactggattttctttccctgaatcggaattggtctttgggggagctatttttacacctggtgagggcccattctaatatcctttcctataaatgcacataacattttaccaaatatccttaatagtc

SEQ ID NO: 67796 - DNA, 1246 bp, Zea mays
  Clone ID: MRT4577_161827C.1
ggccgccctttttttttttttttgatgcgaatatggtgggccgaggctggctctctccttttcgagctgaacgagtttttttttttttttttttttttttttttttttttttttttttaataaacaaaggcgagattctttcatgagccacacaccctctatactgcttttaaaaaacgtaacagtatctcgtataataataacatgcaaccgtttcagtatcactgaaggaatccgcgccagccttttcttccgggttttgtggaatctaccagctctttgcagcgcccgcatgttcgatacagggagggctgaatgaactatagtatatagcctaggatctcctcttgtcaaacggtcttggcattaaaactatgattacagctgtccacatagaaaacaactactgctagccatgacttctgggatcagcgacttgatgaactttcctagattcagcgctcgagaactgaccgaccactcgtgcgtgcggtatctcgggatcaccagaagcaagcgcaaccacgttgtcaaggaaatactgctttggaagtctcccgacaacattgccttcctcgtttccttccttatccagaaaggcgaagtgaggaatgccttccaccccgaactcgtcaagctcttgctcccacttcgtgttgtcaacattcagcatcacaaaattgacacggtccttgtattgctgttccactttgtagatatccggagctaattctctgcagacctcgcaccagtctgcataaaactcaaccacagtgggcctgccatttgaaagagcctcttcatatggaaccgaattggctgcaagatctttaagagatgcctcgctaagattgagcctctgggatgcaaacagagccaccgctccaagagtggacagtagtgctacccttctgttgagatccttattcgggagagctggaagcccagcatcctcgggtgtactagtcggagcatcttcttggatagattcagctttcacagcctgctcatccgtctgtggctccgcggagtcgggcggcgcgacgcaggcgaggggggtcctcggccggcgcaggccccaccgcggccgcagacggagcgaagaggacggacgggagcagcaccgtgctccggcgaagcttggcgggaggagaaggccgtaacacctcgcggaggccacgctcgccatttctttcgctctagactagattttgccctcgtgccgatcgggttccgtctttgaaaa

SEQ ID NO: 67797 - DNA, 344 bp, Zea mays
  Clone ID: MRT4577_161828C.1
aagaccaatgtcaacgagtacatcgcaggcgccaaggtgaagctggagtgcaagcacttcggcaccggcaagctcgatcgctccatccacggggtgacccaccggaacggcacatacacgatccaactcatggacagccacgaggaggacatcggctaagtggtcttggtggagagcccgcacaaggactgcagaccaggtacatgccgacagggaccgcgccggcatcatgctcaccatgaacgtcggcattaacgagcttctgcgctcctggaaaagtctcgggtaactcaaggacttgccactgatcatctacgcatccctgctcaaacagttggactcag

SEQ ID NO: 67798 - DNA, 302 bp, Zea mays
  Clone ID: MRT4577_161829C.1
ggccgggaacttagctggtggttaaaaaaccaaaagggaaccctgtttggtacttactaacacaagggcgggactgggtccacacaattttttaccccggaggggggggggggcaaattagcattaacaattgcggtggtaaaaccttggccttaacttgcccccaagagcaaaccacctttcttcttgtttgtggggggggggcaacctttttccccgcccgttggcggaaattcctcttttcttggcgcaattgtttttgagttcattttttggaccttccccttggtggaaatttaaat

SEQ ID NO: 67799 - DNA, 786 bp, Zea mays
  Clone ID: MRT4577_16182C.1
cattgggaccctcgaggccggccgggacccacccttcctcctcctccctcctctctttctctcaccaagtcgttcgtcacgcagaggaccggacgctcgtgagaggcgagacgagcaatcgaaagccggaaggaagcctaacctctcttccaaagccaaaccgaaaagggaaaaaaagtattgtcgaagagaaaaggaaaaaaataataaaggaacacaagcagcccaccggcgcatcacaggggaagcaaacaggggagaaccctagtcaacagacgccgccgccctccctggctggatctggccgccgtctcctccgccgcccgacgatcgcctggtacggagatcctaccccccaatcaggaccattaggactgctgtgtcacagtctcacggaacggacggattggaacggagcgggatccttagcgcgtcgcgtgcccgccggggtgggtgagacgcggcgcggttagttaagaggacggactgatttccaatttcatttctccggactgcttgggatgccgaattcgcgcttttagcgcagcgaggacacctttgttttttaattcttccgcggggtgattatgccaaatctgaaagcggaatgggatcaaggctatggccgggttgccgaatctaccaactgttacggtgcgatccttactttataggaagaatttagcgatatttattgattcaaggcaggctataaatacagtccgtagatcgaggaaggcaggaggtagtggtatctagaagggagtagaagttaaggcccctttc

SEQ ID NO: 67800 - DNA, 558 bp, Zea mays
  unsure (1)..(558): unsure at all n locations
  Clone ID: MRT4577_161830C.1
caggncgactctagattttttttctatcttttacccacttggctcataccatcacaccacttaacccatcagcatcgcgtctttattaagcaatctatcatctacaaagatactactttcacttctttattgtgtgattttgatactgcatagtgcatttaatggagcaaactatcctaaataatactccctccagtctaaaaaacaagtcgttttggacaaagtttgaatcaaatatataaaattttgcctactaataacatttttgttatataggttagaaatctaacaatcatatatatagatttatcttaaaagtactcttgtaaaagcctaaatacattaagagttaatttttattttaaaaaaaaatattagtcaaagctctattttggagaccgtgtcgctgtcctaaacgacttgtatttcgatactggaaggagttatgttgtttcttccttttaagtcatcctgtattacaaccacaaagtctagtccatccagacaagctagaggcaaggtaactcatgtgtgcttttttttcccacggagaggttt

SEQ ID NO: 67801 - DNA, 373 bp, Zea mays
  Clone ID: MRT4577_161831C.1
tcttcctcacactcattctaacactcttaatctttaaacaaatcacacttaaacctaatcaaatgcaatcttacacaattggctcacttttacaataaactataaatccatccaaccattatatacttaaatctacatatatcataattcacaaataaattctataatcctaccaaataaattttatactattcctcaacataaactctcatattgcatcttccatatacgtataatctataaaaactcttctatcaccatttatatattcaatcaacttattcaattctatttctttaatttcatttcctaaaatataacatcatatacatatcatcattacaaaaagtttcatttcatacaaaatttcttt

SEQ ID NO: 67802 - DNA, 282 bp, Zea mays
  Clone ID: MRT4577_161832C.1
attcggctcgagcctgccgccgcggcggccttttccttttacttccaactacagggccggcacggcaggcaccgcgtccgtgaatcccgtgtctggcgcgacccggccgcggcgtggggcgacacaatgggcgagtggaacggcaccgatatactggcatgcgactgcctgccatcctacagctacatagacaactcggccatggacgccacaaattctatgagtaacaccgcgtatgtcaaggccaaagagagcacagaagaggtgatcatgggggaattc

SEQ ID NO: 67803 - DNA, 271 bp, Zea mays
  Clone ID: MRT4577_161833C.1
ctgtggatactaatgaaagggattgggacataggtgctgtggaacaacctgtagaagaatctggcgatggcttttgatcgtatgaaatatatagttgttatttatagctggcctggatttgaaaattaattatgttggtgtctctaactaattaatgcatcaaagaagatcttgcatcatcttgatcctggtattttgctggtacatcactgctgattagttctcaagaaattgtttgtttatcaaaatgctttatttgtattagagcaat

SEQ ID NO: 67804 - DNA, 169 bp, Zea mays
  Clone ID: MRT4577_161834C.1
tcaccctgtacttcctctcattcattcgttatacaatacacaaccaatatcatgtaaaactctcccattcttgacgccattcagtccttgaatagcctcaatactgactcttttgtataactttcatgatactacataactctaatattttaactctttcatactcatc

SEQ ID NO: 67805 - DNA, 771 bp, Zea mays
  Clone ID: MRT4577_161835C.1
tcataaaggccggccgggaaggaaactgaagttgcactttgaggagagacgagatcatgaggaagcaatactcccctgtgctctccttgtgcctgatggcccttgtagtagctgctatggtctgtgtcatgtacaccacctcggcacaagcaggtaaggccgtgtttggaagtgtagttacagttttgaaacaatattatggtatttagtgatactatagtattgtaactcaaaagatgtttgttttgtacaggtaaaacgtagttttaaatactatggtttacctaaaaccattatatttttggaattttcgaaactccactcatcattttaatgttcttttcttctctttataaatactttgtttttctaatagaaccaaacagatctcggttttgagtaatactgtagttttatatatgcatgcgtgtttcatacgtacgtggtagctacagtttacgtctaattacccaatcgtctttaccttcttcaccacaggaaggagtggctacaactcgtacgaacctgatggtaagtaagaagacccttgtcatgtaattaacctcgctcgtgatgaggatcagtttaaccgcgtacatatttatacgctgattaatatttgtgcgttacgtattcaggaaggagtggatacaactctgttccaataaaacggcggtggcagcccctagccaggcggtggagcctgtatcagaatcaaaaaaatataaaggctcatcggatgaaaactgtgtgtgtattctgtcatgtcat

SEQ ID NO: 67806 - DNA, 516 bp, Zea mays
  Clone ID: MRT4577_161836C.1
gccggccgggtctcggaacgaaactgaagttgcactttgaggagagacgagatcatgaggaagcaatactcccctgtgctctccttgtgcctgatggcccttgtagtacctgctatggtctgtgtcatgtacaccacctcggcacaagcatgaaggagtggctacaactcgtacgaacctgatggtaagtaagaagacccttgtcatgaaggagtggatacaactctgttccaataaacggcggtggcagcccctagccaggcggtggagcctgtatcataaatcaaaaaaatataaaggctcatcgtatgaaaactgtgtgtgtattctgtcatgtcatgtgtgttgatatatgatggcttggtcgtcgtaattaatgtaatgtgtggacaataaatatgcggggttgcacctcaacgtaactctagtacttgctattgcgatatatatgtactttattattattattattatatgtgttagaagtctaaaaaaaaaaaaaaaaaaggcccctac

SEQ ID NO: 67807 - DNA, 532 bp, Zea mays
  Clone ID: MRT4577_161837C.1
actcctatagggggttgggggaccagaagaagaaaccggccgggaaggaaactgaagttgcactttgaggagagacgagatcatgaggaagcaatactcccctgtgctctccttgtgcctgatggcccttgtcgtagctgctatggtctgtgtcatgtacaccacctcggcacaagcaggaaggagtggctacaactcgtacgaacctgatggaaggagtggatacaactctgttccaataaacggcggtggcagcccctagccaggcggtggagcctgtatcagaaatcaaaaaaatataaaggctcatcggatgaaaactgtgtgtgtattctgtcatgtcatgtgtgttggtatatgatggcttggtcgtcgtaattaatgtaatgtgtggacaataaatatgcggggttgcacctcaacgtaactctagtacttgctattgcgatatatatgtactttattattattattattatatgtgttagaagtcaaaaaaaaaaaaaaaaaacccgcggcccaatttgcggcc

SEQ ID NO: 67808 - DNA, 849 bp, Zea mays
  Clone ID: MRT4577_161838C.1
cctcgagggggcggctcgagaccggaagggaagaaactgaagttgcactttgaggagagagacgagatcatgaggaagcaatactcccctgtgctctacttctgcctgatggcccttgtcgtagctgctatggtctgtgtcatgtacaccacctcggcacaagcaggaaggagtggctacaactcgtacgaacctgatggaaggggtggatacaactctgttcccatcaacggcggtggcagcccctagctaggcggtggatcggagcctgtatcagaaatcgaaataatataagactgtcttcaacggatcacactgccgctcccccacgctaaatttgggggctacagtgcacacgctagccgatcaacggctcacgctaccaggcgctctacgcggatgtgccccctagccagcttctctctccccctcgttctgtggtgcctctctcaccctctctaatattgttcacgtgggcccacttccaattattagtagatgaaaaattgataggaggtgaaaagtaggtatagaaaatgatattttatggttgtagtggggtataggggaaggatttagggggaaacgctgtacagagtggagatataggggggaagagaacgctgacgtggcacgtgagtgggatatagggagagaaatttaggggtaaccgctgaagacagtctaaaggctcatctgtgtgtattctgtcatgtcatgtcatgtcatgtatgtgtgttggtatatgatggcttggtcgtcgtaatgtaatgtgtggacaataaatatgcggggttgcacctcaacgtaacttactagtaaaaaaaaaaaaaaaagctctggacttta

SEQ ID NO: 67809 - DNA, 1946 bp, Zea mays
  Clone ID: MRT4577_161839C.1
actgttgtgcggatgaaaattccaccgccccagcatttctcgatgtcctgcgcgagccgtgctcgtgcccatcttctacagccaccgcgcccctatccttatctcctgcgcgcgatcttctcaagcttcttcctcctcgcgtcttcctggcagccggcgctcgactgctcgtgtcctgtactcgcgcccctccgctctgcttggagttttccctgccgcgcgctttccccaagctgcgaatccaccgtggagctgctccagacgtgcccttggtccgtgccatggccgtcgtcaagcccctagaacttcctcacctgcgcgctcctctgcgtcgtgctctgctcgcgtagctccctccggccctctgtttccatggccggcgcttctcccagcggaccgtgccctcctctactcgaattttgtgcgcgagctcgtcgtggagttcacctctacgcctggctcctgctcgctcttcccccagctcgccgtccttgctccaatcctcgtcctggccgcgcgtgctcgcccctagctcgccggatttcctcgccccgtgctcgcccccatggtgcccggcccttcgctgtcaaccaagaccgccgtatctgctctgccgttcaagttcttcagctcgcccaggatggcgtgttgctcgctccctagctcagatcacgcggctccctgcggcgctcaccctgctccctgcgccggatccccgttcccctatgtttccatggccgaagctcccttcctctcccagttcgccggcgctcatccatggccgcgccactggctcgtcccctgcgcagcactccagttgcgtcgctgcgagctcgccgtcaaccccatccgggttcctggcgctcctcttctctggctgtcggtcttgtctccctctctcaagcacgacggcacctgggcactgcacgaccacatgtcttctcttgttgtcgtcctcggctcgcgtcggcatgcgctcgccagcttccttgcccgcgtctgctgagcttgccaatgctccatctcgtcggactccagccacctctccatgccacgcctatttccctgtggtcggagctcgccaacgcccattgttcctccacttcgttggccatgtattccctccacacacacctcctgctcccctcgccatggcatggatgaccgatgtatctgctcttgtgtcatgttcaagcaatcactggttggtgggttgtgcactatgtcgggctcaccgagtttttggtgcgctgtcgcggatgccgtcgctcagctcgcccaaatcctagccataattcctgtcacgccctgtgtcggcatgctgactcgacgttgtcgtccttctttatcctcatcttcgcctcgacctcgcgtggtgctcggtcgtgcacagctgctggtcgtcgacgtccctctgagttgtcggtcgtcgctcatgttcacctccgtgtgctgggtggcgtgggtggtaatgtctcggcgcgctgttcgttggtggttcgaggatgtgcttgagccagagatgttccaagtggatactggacgaccttacaccgtggacacgtcgaagatccatagcatactgtggtgccaaggagagaaattcctaggaaccgggtaatgaagcgagatctgtgcaacaactgccaggagctcgaccgaatgtctaaactgagagccgttgtcgccctcgcggttatcaaatcgattcgatcgtggtgagccaatttattatttcggttaattgaattggatagttataaagccacaatgatttttcttgtcgttagcataggcccattatgtgacgatttccagatcggtagttgtaacaccccaggtgtttatattccgctcgacaacgagtacggatttaagcgcgtaatatcagtggctgaaacggatgttgaattttaatcgcattcgtctatctcgattttaatatc

SEQ ID NO: 67810 - DNA, 321 bp, Zea mays
  Clone ID: MRT4577_16183C.1
cgctcttcattgttgattgttagttgtattgatcgatccgtatgtgtgcgtgcgtgtgtggcgttgctctttcttcttgtgacgagctgtgccctgccaccggccgacgtgcgtgcatgccatagttgctgtcagcgttttctaatgtcatatactcgtgctgtgtgtaagtacatcgtacgtactcgattcctgctaaataagtatcctagtactagagtactcctctgaagcaaaaaagccgtcgaccacctctccggcttaacgtcgctaacgctattgatcgtgctctactagcagtcgtctagtgtccagaagtcg

SEQ ID NO: 67811 - DNA, 1141 bp, Zea mays
  Clone ID: MRT4577_161840C.1
gccggccgggccgggaacaaaccaaggaaactgaagttgcactttgaggagagacgagatcatgaggaagcaatactcccctgtgctctccttctgcctgatggcccttgtcgtagctgctatggtctgtgtcatgtacaccacctcggcacaagcaggaaggagtggctacaactcgtacgaacctgatggaagaggtggatacaactctgttcccatcaacggcggtggcagcccctagctaggcggcggagcctgtatcagaaatcgaaataatataaaggctcatctgtcatgtgtgttggtatatgatggcttggtcgtcgtaattaatgtaatgtgtggacaataaatatgcggggttgcacctcaaagtaaatctaaaatttgaaaataatatataatgtcatgtgtgtaggtattgatgcataatcgtcaggctgtgtttggaagtgtagttgcagttttgaaacaatactgtagtgtttagtgatactatagtattgtaactcaaaaggtgtttgttttgtacaggtaaaacatagttttaaatattatagtttacctaaaactatggtatttttggaattttcgaaacttcactcatcatcttagtgttcttttcttctctttacaaatattttgtttttctaatagaaccaaacagatctcggttttgagtaatactatagttttattataataatataataacgtagtatttatgtcatgtataattcttaactatgttatcttaaaactacagtattttaaaactgtattttcatataccatatatgtgcgattaagttacttcatatatgcatgcgtgtttcatacgtacgtggtagctacagtttacgtctaattacccaatcgtctttacctttttcgccacaggaaggagtggctacaactcgtacgaacctgatggtaagtaagaagacccttgtcatgtaattaacctcgctcgtgatgaggatcagtttaaccacgtacatatttatatacgctgactaatatttgtgcgttacgtattcaggaagaggtggatacaactctgttccccatcacggcggtggcagcccctagctaggcggcggagcccgtatcagaaatcgaaaataatataaagctcatc

SEQ ID NO: 67812 - DNA, 478 bp, Zea mays
  unsure (1)..(478): unsure at all n locations
  Clone ID: MRT4577_161841C.1
ccggnntnctcccccttttttttaaggcggggganttacctaacggggaaaaccgggtaacagggggaagccgggccccgctactcctccggggcctctcccgcggaagcggggggggggtggaccattttttcctgggggcggagttgaaggccnggtccccccctcacccgggtcaaggagtaccttcactccaacccttagacagggtttgggggggggcactcgcttggcgggcttccactggttaaggccaccatccttcagtttggccaccacctgcatcttgggggtggccccactttacttgcgcggggggcacctctgggccctttgccaaccccaaacggggtttgccggaccgccggggatcccggttggggcttcgcttcgaacttgggcgagcctcgggcggctggccttctccccgcaaaacccggggttccctctccggggggacccccgccgaccacggggc

SEQ ID NO: 67813 - DNA, 424 bp, Zea mays
  Clone ID: MRT4577_161842C.1
attatttccttgattgtattctgcttttattgcttattggttcttgtagaattgttcatgttttacttgactgcatcttacccagtgcggattcagcttagcaccaaaaccattcttttcgaacttggatgctatcataacatttgcaatcctgggaaccttcattgcctccattgttacaggtcttttagtctaccttggtggattactatacattgtctacaggctcccactggtggagtgtatgatgtctggtgctcttgtatcagcaactgatcctgtgacagttttgtctatatttcaggagcttggcactgatacaaatctatatgcactggtttttggagaatccgttttaaatgacgctgtagcgatatccttgtacaggtctatggcatctatgaggacgcaccattctggaaaa

SEQ ID NO: 67814 - DNA, 1805 bp, Zea mays
  Clone ID: MRT4577_161843C.1
ccggccgggaaattgacgtgtgtaacctcctaaacctagagcagccctgtttgaaaaaaatggcatcgactcttcttctggctgatgctataaataaagagcagcagggtggaaccccgggaaggaaactgaagttgcactttgaggagagacgagatcatgaggaagcaatactcccctgtgctctccttgtgcctgatggcccttgtcgtagctgctatggtctgtgtcatgtacaccacctcggcacaagcaggaaggagtggctacaactcgtacgaacctgatggaaggagtggatacaactctgttccaataaacggcggtggcagcccctagccaggcggtggagcctgtatcagaaatcaaaaaaatataaaggctcatcggatgaaaactgtgtgtgtattctgtcatgtcatgtgtgttggtatatgatggcttggtcgtcgtaattaatgtaatgtgtggacaataaatatgcggggttgcacctcaacgtaactctagtacttgctattgcgatatatatgtactttattattattactaaaaaaaaaaaaaaaaaaaatttgcggccgcgggcgctttacgcggatgtgccccctagccagcttttttttccccctcgttttgtggggcctctctccccctctctaatattgttcccgtgggcccccttcccatttttagtagatgaaaaatttataggaggttaaaagtaggtatagaaaattatattttatggttgtaatggggtaaaggggaaggatttaaggggaaaccctgtacaaagtggaaatataggggggaaaaaaaccctcacgtggcccgtgagtgggaaataaggaaaaaaatttaggggtaacccctaaaaactgtataaaggctcctctgtgtgaattctgtcatgtcatgtcacgtcatgtcatgtgtgttggtatatgatggcttggtattcgtaatcaatgtaatgtgtggccaataaatattcggggtcgcccccccatttggaggcgattggcttcctcgaggccggccgggaaggaaactgaagttgcactttgaggagagacgagatcatgaggaagcaatactcccctgtgctctccttgtgcctgatggcccttgtcgtagctgctatggtctgtgtcatgtacaccacctcggcacaagcaggaaggagtggctacaactcgtacgaacctgatggaaggagtggatacaactctgttccaataaacggcggtggcagcccctagccaggcggtggagcctgtatcagaaatcaaaaaaatataaaggctcatcggatgaaaactgtgtgtgtattctgtcatgtcatgtgtgttggtatatgatggcttggtcgtcgtaattaatgtaatgtgtggacaataaatatgcggggttgcacctcaaaaaaaaaaaaaaaaaaggcccctaaaaaaaaaaaaaaaaaaaaaaaaaaaaaaaaaaaaaaaaaaaaaaaaaaaaaaaaaaaaaaaaaaaaaaaaaaaaaaaaaaaaaaaaaaaaaaaaaaaaaaaaattttaaaaaaaaaaaaaaggggcccccaggggccgggcccctttaaaaaaaaggggcccccccgggggggggaatttcaaataaagttttttcaacccccccccccccggggggggcccgggacccaatttcccccaaaagggggggaattaacgccgccccctgggccgctttttaaaaacggggggtggggaaaacccggggggtacccaaatttaaccgcttggaaaaaatcccccttttcccagggggggg

SEQ ID NO: 67815 - DNA, 120 bp, Zea mays
  Clone ID: MRT4577_161844C.1
gcctactaactttgcagatgtatgcattaagtgagtgagaaactaagatgatgaaggctatggtggacttttgacctgcacaagagggccacagacacaggttctactgcagagaggatt

SEQ ID NO: 67816 - DNA, 486 bp, Zea mays
  Clone ID: MRT4577_161845C.1
ctgccactgtagtatcgcatatgatcaaatcggcgtatcctaccgtgtacccatcatgatggccactctcgtactgcgggcatcaccgccccttcattctcctccgtacccgcttccctgactgctccatccacgtaggttcatctcagccgtcgcgtgcgcttctcttcctgtagaggccactcgccaccgtgcgcgcgcggcgcgcctgtcgtcgagctgctctctgattgccggcgagaggagccatgaacgaggaggagatgatggaggaagagcgatggagaagctcttctacaagaccagcgcaggatcaccgacgaggacgtggagaccatcagctacaagaacaaaggcgagtaccccgacaacggagtcgttcgaggaggaaaaggtgtacagtggcaaccacgcctacaacatctaaaacgaggaacacctcaacgtctcagaccagatctactccgtcaacctcaccgaggctat

SEQ ID NO: 67817 - DNA, 273 bp, Zea mays
  Clone ID: MRT4577_161846C.1
gtcgtttacggcttacatcgcatgctctgtgtgtctagctcagcgactatggttgctaccgctgccgacctacactcaggttgccagctcttgaccgggcccttctgccgagacgagcacccaccaggccgccagttgacatcttatactacctgaatctaatgcttatcaatatactctaatatttacatggcgaagctctactttttgcaacacatattctccatgtaactaacgacactgaggttgtgctcaaacaatggatctatggat

SEQ ID NO: 67818 - DNA, 275 bp, Zea mays
  unsure (1)..(275): unsure at all n locations
  Clone ID: MRT4577_161847C.1
aanaaaatgggtacagttaaaagtttgtcttctgtatgagaaaaggcacctgaagagattggaaacaatcccatgttgccttccatgaacctgcacgtggtgttcggtgtgttccagagctcctgtgtgtcacttggcatccaaccggttcatctcagtgggtccaggttgtggtccacgaacagtaacataccacccagagactgcgtgcactcgagcttcgcaagtgagatttgtgaanaagtcatgagttgccagagacttaaaagtcttta

SEQ ID NO: 67819 - DNA, 828 bp, Zea mays
  unsure (1)..(828): unsure at all n locations
  Clone ID: MRT4577_161848C.1
ttcgggagcaaggattgacagactgagagctctttcttgattctatgggtggtggtgaaaaaagaaaaaagaaaaaaaaaaaaaaaaaaaaaaaaaaaaaagtcttagcattcttttctctgctcctctcggcactcgtctcagcacttcttcctcaggccgcaacccttctctgccatttgtgcttggctcccagaagctgccgagctagactcctcgtcgtgcgctgttgtgctgctccatgtccgaccgttcgtctctagctcgccatggctgctccagatcctgctcgcgagtttcccagcgccgtcagcttgccggcatccagctcgcctgtatcatggccgttgcgccgtctttactcgttggccgtgcgttgccgcgcacacgcgcccgacaccccggttcctctgtacgccttggttgcgcgcgccgaactgcgtccttcgcagctcgctggctttagctgcaggacaccaccagccgtgtcttcgtatcctgtgtcctcgactcgttcacagtgtcgctcgcgaggtgctcgacgtaatggcagaattgaaaatcgtagctgtgctcatggccgtcaagacatattaagttattggggagttgtcgtcgctctcgcttttcgttttaatatttctcgtcagtttggtatacttgcgctattaacgtgngccggtgacgtgcgcgtaaatcgcagtagtgaattagtcccagaataaaatttgatcggatagaataatgaagtctagtacgttgctcgtcacatatttggtgttatgcgcggaccaggaagcgtcgtccgatttcgtggtttcaagtcgg

SEQ ID NO: 67820 - DNA, 1974 bp, Zea mays
  unsure (1)..(1974): unsure at all n locations
  Clone ID: MRT4577_161849C.1
tttcacgcgtccgcttttactcatcttttctcttgccttctactcctcgcccacgcctcctcctccctccctccctcttccgtcgtcgcttcgcttcgcttcccttcccttcttcccttgcgaatcctctgaccaccgcagagccacccccggaggaaacgaaccgtaccgcagccgccgagcaccgccgccccgcatggcgtccccggcacggccagccgccgcatccgtctccggcgccttcggcctctcgcccgaccccaaacgctgctccttcgaccaggcgctccggcacaagactgttgatgtcatttgttaattaccacgagcatgaaaaggtctctaaagaaatcgtaacagatgctatagaaagctgcatgaagaaacaggcagataacttgttgaattcgctggaagttatcagtggtaggctgtcgcaattggagttgtattgctataagctggaaaggtctattggagaattacgaagtgacgtgatggattatcataacgaagcaaatctcaacttccagtgccttgacaagcaagtgaaagaggttcagaaatctgtgcaggtcgttcaggaaaggcaggagcttgctgaaactcagaaagaaatgaccaaacttcagatagtacatgaggattctgcacaaaagagtgaacgtagttctccatcagttttcataaatagggaaaatgaggttgcccttgtgccattgcaccaagtaaatgctgttcagtcacctcctgtgcaattccaaagttgcagtggccttattctacagcaactgatgccagtccaagaccagcagcgctcgaaccaaaccgctgtgtactgtatgcgaggccaaagccatctggagcacagacaggcccaaatgttcgaagctgctggtcaatctctgcagacacacactcggaaaactcagccaccgacagtagttgaggtatctcaggtaaccagtcaggcaccagagttctaccctcatccgcagcaccaatggcaacatcagaccggccagcaggttttctcacaggcaaggcaaccacaaccacatgtactacagcagcagtacagcaacatccagcaaggtccagcacagatggttcagctgcaaacgtcctctccacatgctcatagtacaccacaggtcacagtagtatatcctccatacgggcctcatcagtctgcctgtggtaatgctgaggcacgcagtgggggcatagttgtgccaccttcatactctacaatttcttcatcccaccggaagcatcagcagcttcattcactcggcaatggctcatttgtacctcagccaagcaaagttagtccatgcggtctagcgtcatatacggtacaagggaatgcacagacctatagccctgcttatgggaggcccttccagcaatcctgctactattgtgnctgtccttaatcaacaagcacattgcagtgctcccatggtgcttcatcacctgggaccatctcagtcagtgcagaaccatccgataggcattgctgataaggttgctcgaatgggttacccaaaggatcaagtagttgatggccttgcgctccgtatggtggatgcaggccagcctgcagaatgtaacaccctgcccgataggttgagctctgtcacccatgcggtggctcctcaggcatggtctggatagttaagaatgaattagtcatgagatgctcgtgtgataatgtacctcattatcgttggaaatcttcaggtatttcctctgccgtcttcttatctgccaggactacatatcccccagcttattttttgcagctggatggtcaagatgaaataagactgattagattagttgaaatgatgctggcatatgtcctgccttttaatggacatatgtgattgtaacctgtttgtgacttgcacacgcatgcttgcaatataaaaagatacgatgatttgttggttgctgctcttgcgctcc

SEQ ID NO: 67821 - DNA, 241 bp, Zea mays
  Clone ID: MRT4577_16184C.1
gggagaattcaaggctgaaggaaatagcaaattcacttacacagttctagaggatggctgcactaaacacactggtgaatggagcaagacagtctttgaatatcaaacacgcaaggccatgagactccccatcatagatatcgcaccctatgacattggtggtcctgatcaagaatttggtgtggacattggccccgttggtttttaaaagccaaatctccgaaaacccgggaaaccaaaa

SEQ ID NO: 67822 - DNA, 368 bp, Zea mays
  Clone ID: MRT4577_161850C.1
tcttttctttctctcacagcatccatttctggggcagaggagtccctctctggggagggcacgattcccgtccacaactgccaggttactgcattcgcgaccccgatcgacaactcgccgatcatcgtctcctcctcccgcgacatgttcctgctggtgtgggacctgaccaacccgttccactccacctcggtatcctacgccaccagtcgactacttgatacccttccgccgtctaaccgttcactccctacttattcaatacttctttctatagtccgtcagtctttttacccttttcagcttctaatatttatagctatttctttattacttatttattttattaactattttacttttttttt

SEQ ID NO: 67823 - DNA, 301 bp, Zea mays
  Clone ID: MRT4577_161851C.1
gtccaccactggtggttttgatgctggggtctcccatgatggccagacccgtgaacatactctccttgcgttcacccttggagtgaatcagatgatttgctgctgcatcatgatggatgcaaccactccaaaatactccaaggcacgtcatgatgagattgataaggaagtctcatcctaactcaaaaaagctgggtaccaccctgataagattgtctcaggtcccatggctggttttgagggccacaacatgatcgaaaagtccacccaccttgactgggacaaatgcccaaaccttttt

SEQ ID NO: 67824 - DNA, 845 bp, Zea mays
  unsure (1)..(845): unsure at all n locations
  Clone ID: MRT4577_161852C.1
caaccgcagcatcaatggcaacatcaaactggtcagcaggttttctcacaggcaaggcaaccacaaccacatgtactacagcagcagtacagcaacatccagcaaggtccatcacagatggtccagctgcaaacgtcctctccacatgctcatagtacaccacaggtcacagtagtatatcctccatacgggcctcatcagtctgcatgtggtaacgctgaggcacgcactgggggcattgtcttgccaccttcatactctacaatttcctcatcccagcggaagcatcatgaagctgctcctatttacgtacaaagcaacacagtttctgttccattgacggagcagcaccagcagcttcattcacttggcaatggctcatttgtacctcagccaagcaaagttagtccatgcggtgtagcatcatatacggtacaagggaatgcacaggcctatagccctgcttatggaagcccttccagcaatcctgctactattgttgctgtccttaatcaacaagcacattgcagttctcccatggtgcttcatcacctgggaccacagtcagtgctgaaccatccgataggcattgctgaaaaggttgctcggatgggttactcgaaggatcaggttgagggtcttgcactccgtatggtggctgcaggccagcctgcagaccataaccccctgcatgataggttgagctctgttagccatggtgtagctcctcatgcatggtctggataggtaagaacgacaaatgcagccgtcacgcttacttatactcatnganngtgttgtgtgatatatctcggtatgtgctttattatcgtcggaaatcttca

SEQ ID NO: 67825 - DNA, 1964 bp, Zea mays
  Clone ID: MRT4577_161853C.1
ggggggggtggtggctctttgcaccgctttttttcgaccgggggttagcttgcatccgccttttctcttggcttccgctcctcgcccacgcctcctcctccagtcctccctttcgtcgtcgcttccctccccttcccgttcgaatcctctgaccaccgcagagcctcccccctgaggaaaccctagcgcagccgccgaccgccgccgacccgtagcatggcgtccccggcccggcccgtcgccgcgtccgtctccggcgccttcggcctctcgcccgaccccaagcgctgctccttcgaccaggcgctccggcacaaggatttccaggagaacaggctgttgatgtcatttgttaatttccatgagcaagagaagatctctaaagaaatcgtaacacacgctatagaaagctgcatgaagaaacaagcagataacctgttgaattcactggacgttatcagcggtaggttgtcacagttggagttatactgctatagactggaaaggtccattggagaattacgaagtgacgtgatggattatcataacgaagcaaatctgaacttccggtgcgttgaaaagcaagtgaaagaggttcagaaatctgtgcaggctgttcaggaaaagcaggagcttgctgaaactcagaaagaaatgaccaaacttcagatagtacatgaggattctgcacaaaagagtgaaggtactgctccatcagttttcatgaatagggaaaatgaggttgcccttgtgccattgcaccaagtaaatgctgttcagtcacctcctgtgcaattccaaagttgcagtggccttattctacagcaactgatgccagtccaagaccagcagcgctcgaaccaaaccgctgtgtactgtatgcgaggccaaagccatctggagcacagacaggcccaaatgttccaagctgctggtcaatctctgcagacacacactcggaaaactcagccacctacagtagttgaggtatctcaggtaaccagacaggcaccagagttctaccctcaaccgcagcaccaatggcaacatcagaccggccagcagcttttctcacaggcaaggcaaccacaaccacatgtactacagcagcagtacagcaacatgccgctgcgtgcctcagcgttaccacagtgcagatcccacggtgctccgtgtggacctcgtgccgaattctactacaacaggggcttcatcccagcggaagcatcagcagcttcattcactcggcaatggctcatttgtacctcagccaagcaaagttagtccatgcggtctagcgtcatatacggtacaagggaatgcacagacctatagccctgcttatggaagcccttccagcaatcctgctactattgttgctgtccttaatcaacaagcacatggcagttctcccatggtgcttcatcacttgggaccccagtcagtgctgaaccatccgatagacattgctgaaaaggttactcggatgggttactcgaaggatcaggttgagggtcttgcactccgtatggtggctgcaggccagcctgcagaccataaccccctgcatgataggttgagctctgttagccatggtgtagctcctcatgcatggtctggataggtaagaacgacaaatgcagccgtcacgcttacttattactcatgaggtgtttgtgtgatatatctcggtatgtgctttattatcgtcggaaatcttcaggtatttcctctggcgtctttttttatcagccaggattgcatatccaccagcttatttttaccagttggaggatcgagatgaaataagtctgtttagattagttaaaatgatcctggcatatgtcctgccttttaatggacacatgcttgtaattttctcgtggacttgcacacgcatgattggaatataaaacgatacgatgatttgttggttgctgaaaaaaaaaaaaaaaaaagcggcc

SEQ ID NO: 67826 - DNA, 536 bp, Zea mays
  Clone ID: MRT4577_161854C.1
ctggctacaaagacctagctttctggttcatgtaatgcactgtttaactgtgtaggaatgtatatgtgtgtgtatatacggccccagttttaatttacttattaaaaggtcagtattatacgttaaaagttaccggcttctactgtatttttaaaaaaaaaataagcaaaaggaaaaaaaaaaagaacagagcaaagagagacttattctggttgtcgctaataatgttaacctgctatttatattccagtgcccttcgcatggcgaagcaggggggaaaagttattttttcttaaagtacaaaaagagaggggagaacttttgtagaaggacttttaaaaagctattttccattcttcggaaagtgttttggttttccttggacccgaagaagctatagagttcaatgttattttacagttattgtaaatatagagaacaaatggaatgactaatcattgtaaattaagagtatctgctatttattctttataatatcccgtgtagtaaatgagaaagaagtgcagagcaggatt

SEQ ID NO: 67827 - DNA, 443 bp, Zea mays
  Clone ID: MRT4577_161855C.1
cccacgcgtccgagctattcttcatatatctacattgagtgggcgattggagtctgataggagctagaaccttcatatgtgacaccagaatgaatgggtgattggagtcgaatgtacagacttgtaggatattccggaaatgttttagcatgccttttgatttaagcatgtacctgttaaaagtcttctgtgttttccaggttaatggagttggaaagaccgcagttacagtggagtacccagagcgtcctggacagcctctctgtgagtactatgcaaagaatggcacctgtaaatttggttccaattgcaagtttgatcatcccagggagggtggttttgtacctgtcacattgaacagcggtggattccccctgcgtctgggtgaaaaggaatgttcctattacatgaaaactggacattgcaagtttggagctacatgt

SEQ ID NO: 67828 - DNA, 234 bp, Zea mays
  unsure (1)..(234): unsure at all n locations
  Clone ID: MRT4577_161856C.1
tgccggaccgctactgtacggctctgctgcctgagatatattccatcacgcatacatgcgctagcctttgggcatggcgagcaagctctgctcggctcctccggccaggctgccgcactcacctacgtgagatattccatgcgccgaacgtgcttggagaagaagatcctgccgacagaccgatattcctcagatgatcgtcgccgtcggtnccatacctgttctttttatatg

SEQ ID NO: 67829 - DNA, 428 bp, Zea mays
  unsure (1)..(428): unsure at all n locations
  Clone ID: MRT4577_161857C.1
atcaaaaccatgcaaaatatttttcttccacaacaagggaccagcgtgctaatggaagattactgatgaagcacgacctcctcaaaattttaataactgaactataaacagtgtcatactctagtggaatgaaaactaaacatgctacagcatactggctgagagttgtaaaaacactaaaaactgcttactaactaactactaaggaagtaactaggccgcttcctatattatctgagcagtgagttcctggccttttcttgcagtagcttccagaataagaagaacattccggttcctcctaaaagggctcgatgctagctacaatntctcttggggggaggaagcttatctgagcacgtgcttggcctcgattttctcgaggggactgnntgctactcaggattcttgcgaactgatattggtgg

SEQ ID NO: 67830 - DNA, 475 bp, Zea mays
  Clone ID: MRT4577_161858C.1
ttttattatatattatataaaaaaaacaaacttaaaaaaaaaaattttattttataagaaaaaagaaaaaataaaaagggggagtaatgataaaagaaacaaataataaaacaaataactctgcctcctatcggacgaactcccacaccatgtacccttccgtgccccccgtaattcatcaaaacagttattttggggggggggccctgggcggggcccccctccgccgccgggcccggggggcgccggccctccccatgctgggtgggcaatggtaggtaggcgatcgtgcggcgcccggcctgacagggccccggccgggagggcggcccgccggccgggttggcccttttggctccggccgggcccaccggccccccccgcaggcgcccgggagggcgcctcggaggcgaccgcggccccctcggggctaccccgggccggccccgcgagggtgggggccccgccccccccg

SEQ ID NO: 67831 - DNA, 152 bp, Zea mays
  Clone ID: MRT4577_161859C.1
agcgatccgatccgatccgcaactgtgccggccagcattggcgactagggatgggctaccaccctcctcctcagcttcctgctcggcatcgcccccttcacggcccgagttgatacaactgattcggaggaagatgctgctgcatctgaggt

SEQ ID NO: 67832 - DNA, 322 bp, Zea mays
  Clone ID: MRT4577_16185C.1
tagaatgaactgaaaacatcctatcgatctactttagctatacctctgcgatccattggggagcgcaacgaatgttacatgggcgaccgggcagagatgtcgcgacaggcttacgattgctatcacctgttttgcaagatctatatgccaccacctctcggcatcatgcatattcgttcacgacagctacggctgttcgcatatctcggcgttacactagttgaagaccatggacatggtcaacatcacaaatgtcttagacgagccatagcacctaacgccgactggtctgttaatcggacctactaagtacatggtgata

SEQ ID NO: 67833 - DNA, 297 bp, Zea mays
  Clone ID: MRT4577_161860C.1
atgtggagattggaaggagctcagaaggctgggacactgacctgctttacgacgaggagcgtgggatggttcaaggtggccctgttcgcagacctgctttacgacgaggatgcgtggacggactggtgccccgcgcaggatgccacatctgaccgcgttatagccgtcatccacgacgccgagaacctaggtgaggtcaggaatgacgattcacgaacactgcaattcaattatggttcattcaaacataaggcattggataaatccttaactaaaaagggatttttgaagcactaa

SEQ ID NO: 67834 - DNA, 1579 bp, Zea mays
  Clone ID: MRT4577_161861C.1
gcctggtctctccaactcacgctttttcaccttcggcagtctggctccatccgtctcctgcactgaccttttcctccacgtttccggcaactgcaagcaaccactgatccagcccgttctgtgtcccggcgaatggtgacgaaccaggacgcggaggcggcagcgccaggggcaggggcgacggtagatccgatgcggctagcatcgcggtggcgatcccggccagagtggaactgcgcgtcggcggagctggaggctgagccgtctgagctcaacaccatcaacagctcgggactcttctccgtcgtctctaccgacaagttatcggtaaaatacctcggtagccatcaccacggccacgacgtcggtgtcgtgcaggccgaccgtcccgcgccgacgcgccgagccgtgtactacttcgagatgggcgtcaggaatgctggatacaaggggcagacatccattgggttcacgagcgagagtttcaagatgaggcgacaaccgggggttatattcttgaggacaaaatgaggcagcaatcagtgtctgataaattgaacttggagccagacatcagccattggattgtccgttcatatctcctacattatggataccaagatacattaaatgcttttgacacggcaaatgcaactgatcgccccaccagtcgccaaaatggtcatgcagaacctcacgaaatgtatggtcttagccatagaaaacttttgcgtcagcttatcatgagtggagatattgactctacattcaaaagacttcgggagtggtatccgcaagtgataaaggatgagcaatcggttatttgcttcctactccgttctcaaagattcatagaatatatcagggctgaacaactggaggttgctgtgaaatatggtcgtgctaacctggcaagcttcttcactcacaaagcttttgaggggctgctgaaggatagtgtggccctacttgcgtatgagaagcctacagaatcatgcttgggatacctgatggactcttcccagcgtgaatttgtggcggacgcggtgaacgcggctgtcctgtcgacgaaccccactgtgaaggaccctgagagctgcctttactcgtgtctcgagaggctactaaagcagctcacagtatgtagctttgagcgacgtgcattcaacaactaccaaggagatgcattcttactccacaaagaagtgcagaattatgaaaggtctaggcgctcataggcatcgggtttgatgcgcatctcagaagtaaactcagatgctagagctagactcccaagtctcaactgctctttgaagggacgaaggttcagaacgaagtggtcaaccatgctaagcacaaatccttccccttgatgcagcacccctactttcggaagggtggatacaagatttcgcagacagaggtcaggctttcggaaggtgtcttatcctccctgtaatcagaaaactcagtcagatacgccaacgtttcagtctccctagttttttttgttggttggctaatatgctgattgacattgacattgtggatgctaaaaagtaaagatgcttcatgcttc

SEQ ID NO: 67835 - DNA, 2604 bp, Zea mays
  Clone ID: MRT4577_161862C.1
gtatgtatgacctgttgagctattctgtgcgttcgccatgtctaaggcagcgcaacgcaactgcaagcaaccactgatccagcccgttcggcctttcggcgaatggtgacgaaccaggacgcggaggcggctcggcggcagcgccggggccaggggcggcggtagatccgatgcgcctagcatcgcggtggcggtcccggccagagtggaactgcgcggtgccggagctggaggctgagccgtccgagctcaacaccgtcaacagttcgggactcttctccgtcgtctctaccgacaagttatccgtaaaatacctcggcagccatcaccacggccacgacgtcggtgtcgtgcaggccgaccgtcccgcgccgacgcgccgagccgtgtactacttcgagatgggcgtcaggaatgctggatacaaggggcagacatccattgggttcacgagcgagagcttcaagatgaggcgacaaccgggctgggagacaaacagttgtggataccatggtgacgacggccatctttatcggggtcaagggaaaggtgaatcatttgggccaaaattcacatctggtgacataattggtgctggcatcaactacttgtcacaagaatttttcttcacgaaaaatggtactctggttggagccattccaaaagaaattaaaggcccactatatcctaccattgcagttcatagttacggtgaagagttgactgtaaactttggaaaagaaccattctgttttgacgttgagggttatattcttgaggacaaaatgaggcagcaatcagtgtctgataaattgaacttggagccagacatcagccattggattgtccgttcatatctcctacattatggataccaagatacattaaatgcttttgatatggcaaatgcaaccgatcgccccaccagtcgccaaaatggtaatgcagaacctcccgaaatgtatggtcttagccatagaaaacttttgcgtcaggtgagcttggaaactcaattcaactgattgttgaattcatttctctggtatcttagttagcatctatgtgaactcagttggtacttcgtaaaagttacacagaatttttttcttcgaacagaaaatattgcatagaattacacttcatttttagtacagtttgacaattaggcaccagttcctaatgattattgcatgggaaacttcgtgtgaagtatctttattgttgttactgtttgttatgagggtaacctgacttttgttttttttactaccaaccaattaggtttgaagttctatatctttttaacttgattagaattttaaatttgcatgtgtttgagctcattagctgccgtttccattctcacaggaaagtgatagttgatctttgcgctgagctgccttgaagtttgagctcttttacctttggttgtgctgcgcgaatatgttgtagtattacatttgtccacatcattccactttattttgcagacaactggatattgatttgctattgccctgtttttttttggcctctggtatggcttctgctttctgaaaacagtttattttatttgataaagcttatcatgagtggagatattgactctacattcaaaagacttcgggagtggtatccgcaagtgataaaggatgagcaatcggttatttgcttcctactccgttctcaaagattcatagaatacatcagggctgaacaactggaggttgctgtgaaatatggtcgtgctaacctggcaagcttcttcacccacaaagcttttgaggggctgctgaaggatagtgtggccctacttgcgtatgagaagcctacagaatcatgcttgggatacctgatggactcttcccagcgtgaatttgtggcggacgcggtgaacgcggctgtcctgtcgacgaaccccactgtgaaggaccctgagagctgcctttactcgtgtctcgagaggctactaaagcagctcacagtatgtagctttgagcgacgtgcattcaacaactaccaaggagatgcattcttactccacaaagaagtgcagaattatgaaaggtctaggcgctcataggcatcgggtttgatgcgcatctcagaagtaaactcagatgctagactcccaagtctcaactgctctttgaagggacgaaggttcagaaccaagtggtcgaccatgctaagcacaaatccttccccttgatgcagcacccctactttcggaagtgtggatacaagatttcacagacagaggtcaggctttcggaaggtgtcttatcctccctgtaatcagaaaactcagtcagatacgccaacgtttcagtctccctagttttttttgttggttggctaatatgatgtttgacattgacattgtggatgctaaaaggtaaagatgcttcaatgtatgtccaccttttagaacatctgcatcatagttgtctgcatcatagttgaaaaacatctaagtcctaggctcctagttgaaaaccatctaggtctaggtctctagttgacttttagtggttaatgacaatataaaattatgatgatgattgagtttacgtgctattcgtgtccctactaatggtaatc

SEQ ID NO: 67836 - DNA, 740 bp, Zea mays
  Clone ID: MRT4577_161863C.1
cactgacatccaagaaacaaaacgcaacattggaattcggctcgagctgccattgtcgattctcattgtaggcgttggaaacgctgatttcaaacaaatggagatcttagacgcggacaatggtaagcgactggaaagctctacgggtaggatcgcgacacgcgacatcgtccagtttgttcccatgagggaagtccaaggtggcgagatctccgtcgtgcaatcccttctggaggaactgcccggtcagttcctgcagtacatgcgcactcggggaatcaagccacagcgggctccggggcttgcttcagcgcccgtttacccacctcagcagtgaccagaagaaaacgtgcacgagctgatccatttgcctcaactgtggattccgctagcgtcccgtcccgtggtagcctagtactcttgttcatacggtctctggttagctttctctttgccgcagttggtaaatatccatgctgtagaatctagatccagcacaaatagatagtaaaacactgctttcctctaggttaagctagacgatgtaaattcgtgctgcagattgccaagtattcaggttgtcgtgaaacgtcattattatcacctgctttcatattaagtactatcttgataatagttgatttcgagcttgttctcagaagaagaagaaaaaaaagctatgataatgtgcgaggtttgatggtaataataaagaaaaggcaaatccggatgcctttggt

SEQ ID NO: 67837 - DNA, 383 bp, Zea mays
  Clone ID: MRT4577_161864C.1
gtgtgtgttataaaaatgaatctaatcaagttacgattcttcgttacgcaactgatttgcaatcgttcgggttctttcaaagacgaagtgtggaagaatttatgaagtttactagtaaaatggtgattgaacgatctgaactagcttctcgatgctctgttaaagagcaagaatatttatgtcatgtttacaatcgtagcgaccgattatgttccgttttgatttctgatcatgaatatcctcatcgagttgcacacaccttaatatctcgcatattggatgaattcgtttcaactgtgcctagtgctaaatggaaaactacagaggaaaattctgtggcttttccacaattgaacgtttatttaggaaagtatcaaaaccct

SEQ ID NO: 67838 - DNA, 459 bp, Zea mays
  unsure (1)..(459): unsure at all n locations
  Clone ID: MRT4577_161865C.1
agcagtggtaacaacgcagagtacgcgggagatgatttatttataaaaaaaaaaaaaaaaaaaaaaaaaaaaaaaaaaaaaaaaaaaaaaaaaaaaaaaaaaaaaaaaaaaaaaaaaaaaaattaaaaaaaaaaaaaaaaaaaaaaaaaaaaaaaagccctctgggttgttccccctgtttaggggcgatttccacccccctggcggccgttcctgggggttccggcctcggtcccaagcttggggtattcttggccttggttgtttcctgggggaatttgttttccgttcccctttcccccccccttccggcccggaccctttaggggtaaagctgggggggcccgtgggggggcctccccccctttatttgggtgggcctctctgcccttttttctgtggggnaccctggcgcccccctattttttttgtctcgctcaccccccccggggggggggc

SEQ ID NO: 67839 - DNA, 858 bp, Zea mays
  Clone ID: MRT4577_161866C.1
gcgcgcgcccagaagacgcgctactacgcgtgcgggcacgcgacagccagcctgccggatcggggaaatgcgcagaaaaatggacgcggccgtcggtggctaccaataaatggactcccacgccacgccgcgctcctactagcacaaggttgaaaccagcgttgccgagcgagagaaacagagcgccccctgtccaagtggtcaggtccaggacaccctccacgcacgcactgatggaacccctggtgttcgtgctgctcttggtggccatgccactcagaggatcagatggcgcgtggtgcgtgtgccgcccggacgtgtccgatgcggcgctgcagaagacgctggactacgcgtgcgggcacggcgcggactgcgccgccgtgctcccgaccgggccgtgctacagccccaccactgtgcgcgcgcactgctcctacgccgccaacagctacttccagcagaacagccaggccaacggcggcgccacctgcgatttcggcggcacggccaacctcaccgacacagacccgagctctggaacttgcaaataccctgcaacaccaagcgaagcagggacaagcggcaacgccaccggcacgggcacggcgccgccaggctcggcgagtaacccagctacgacgcccagcacgggagggagcgtcacgacgacacctgtcggcgcgtttggtcccgcgcctagcaccttcagcgcggccaccgccactgccgccgcgtttggtggtcgccgtgccctcctcctcgccgtcgtctccgtcctgtctttcttggcgcgctaacttgctcgatcagaagaaatccgtagcatcgtcaccctatgtgtaattggcggccctc

SEQ ID NO: 67840 - DNA, 384 bp, Zea mays
  Clone ID: MRT4577_161867C.1
gtttacacttcaatttcgctatgaagagaccagggtcccccgtggaagaaatgtcaccaagtaaactcgccaaagtcgaacacgaataccttttctatgcagtttgtaacaagaagcacagatttttcgtaccacaccaacagtgtacgtttggaggactggtgatatcgaaggtaatgatagattctggctgcaacactctcctccttccactcgagcgtgaaggaatggtaccggacctgaagcttctatttccttttgagacgcattcctggaaactccgttcgtcaaacggtgttggtggtacatctgctgttctgcacattgaaagcgtgcaacacatagaagtcgccttgcgccctggaggacgttcgattaaggtca

SEQ ID NO: 67841 - DNA, 472 bp, Zea mays
  Clone ID: MRT4577_161868C.1
ggggggtgttttgcaactgatttcttaataaggaacagcaggcagaccacgtttgcatttcttcgctaaagtttatggaggttataggacaccctgaccctgtgaaccatggcgatgccgtgactcagtaaatactaattcatgatgcgcatcagggcctcgcctgaattatcgtcgcacacgagctatcctacgagctaatatctttttgactgaaggggcacctcctgggcttgctatacaccgtgcagacacttgctcgaggctggacatctgcttcaggggctgagatctatggggaatccatatccccgctaattggtcggtttatcaatgaagattgactatggtccacccgaccaatcctttgatcggctgccacaccatcttcagataaacttatgtcattactatggccacctttcttgcgccaacccaggtggtcactggctgctattgcccactcgtgagc

SEQ ID NO: 67842 - DNA, 218 bp, Zea mays
  Clone ID: MRT4577_161869C.1
ccacgcgtccgctcgacactcgcttgcttgatccgctgcaatttatgcgtacgattattattattatttattaataaaataactacatatgcgtgtgcgtatgcagagagaaatatgagccatgaatgcagcatgattatgccatgacaaatttatccttttattgtctactatatatcgactgtacgtaattctacgtgcaactctatcatcatgtt

SEQ ID NO: 67843 - DNA, 1235 bp, Zea mays
  unsure (1)..(1235): unsure at all n locations
  Clone ID: MRT4577_16186C.1
cccacgcgtccgccccggccgggactgcatgaaaaaaaaaactctgcggagattgaccgaccaaccgaaacaaaaaactctgcggagattgaccgaccaccatgaccgcctgcgtcccccctccgccaccctcatggctgccgctgccccccatgcatactcctccctcgtgcctgtttcggctgcgcggcctctctccggaagcacagtttctttcggtgcttcgtgccacaagtggaggaaggttccggcatggcgactccactgatgttgctgaagacgaagctgcaggaagtcaaagattgttggagtcaatatggcactatccatgctaaaattttttacaaacgagaaatatcacctttactaccttcaagctgccgatatgtacccaactgtgctgagagcactctatgcaggcgcacaaacgaatatgttgtttgggaaggcatcctaactttgagctggcttggccgttgtaatccccttggtatcctcttggaggatattggtataatgctccgcgaagaagatgtcgctcagcaagaacctttcctatagattgaaagtacaggcattgtaattcttcagatccagacttgcagcagagtttatgaacatttcttaactaaattactgaaacacaagactgaaattctgggatttctatgctgaagatatatgcaccgctgatgggttgtcttcagtttaaacatggcccaaaacaaagcatcttctataaactactaagctacttggtgaccagtctatcagtatagttgaggatttgtattctaggaatcctattggtaaaacatgaggactgtgtagttctgctttgctaacatggccctactctctgcgtcctcgatgaactccgatccgacttggcgtccggtccaccagtttagctggggcttcgtgttcttggattcaagggaaagcctccccatcgactatactgccaaggaacttgattggatttctgagatttctatgctgaagatacataaatggtaatggattttcttctatacaaacatggcccaaaacaaagcatcttctataaactactaagctacttggtgaccagtctatcagtataagttgaggatttgtattctaggaatcctattggtatacatgaggactgtgtagtttagtttagntaaaaaagatactatctatgatcttggagaaaactgatcagaaaatcttttgatgcacgatttagc

SEQ ID NO: 67844 - DNA, 283 bp, Zea mays
  Clone ID: MRT4577_161870C.1
cggaccctcatttatacaaatatccagcgtgaggggcccaaaaacttgagaaagggtcccccactgcttttatccttcaaacatacaaccaccttccttgtcaaggacacgaaacagaattccttgaatgtcccaacacacctctttaaattaaatgtggggaacctcttgtttagttcactccccttccgactattacaggaggggaacaggggcaataacacaaatgtgggatcactggcaaagctaaaccgggggatctgtgggtccctacggtttgttt

SEQ ID NO: 67845 - DNA, 263 bp, Zea mays
  unsure (1)..(263): unsure at all n locations
  Clone ID: MRT4577_161871C.1
ngctgaagcttcctagtgaaatactctatcaccaggagtgcattccaccaaccaggacacttgcgtacggcgagtactccgccgccgtgggtcaaggaggcgctcggctacaaccagcaggcgctcaccatgctcggcgtcggcaacgacatcggcgagaacgtcgccatgccttattgggtgacagacaattgaaaaagagaaggggncnttntttcggtcggtttgnngaaganggccnnggggaaggaaanggggggggg

SEQ ID NO: 67846 - DNA, 1314 bp, Zea mays
  Clone ID: MRT4577_161872C.1
ccggggcctcgcacctgcgctcccatccacttccctccgcatgctccatcgcctcgccttctccccctctccctcgggagccgctgctgctccgacgatgtcaccctcatgcatcgctcggatctctccgataagcttctccacctttctcatgccttgctctgttcctccctcgcgcgctcataacggaggttgcggcaatggtgaagacgacgtgggagaccggggaggacactgtcgtggcaggggtgggggctgaggcggcgggaagcacctccaatctctttgccccgcacggacctgagctgccatcgtcgccttgccgtcgggatcgctcaggagaacaaccatggtgcttatgtgcgtgcctcgacccttgtttggatgtctctcatctcgtggatctagggttctttggtgattttgtcttgggggtagggcttaggagttgtgttccttggtggctcacgcttgagatcagtttcctgtgcccaacatcctcattcccagagtcgccctctcgattccccctcgatccagccggagcagtcccctttccctcctccacacaagggcaccgtcatctcctccttgtgttgctcaatcgcccagtataacatggattacgcgcaggagttcagttaggactttggagaaatagtgtggtatgttttcttcagtgatctgagagactggagttgtttttcttctagcctgacagactggcatgtatatatatatttttctgcgagacaatcttcttagataagttcagggatctgagaggtcctgttatatgaagtaatcactccgttcaaattttaatctattcttctgtgagtcggtcttcttagagaactatagcgatctgagagacagctcctgttatatgcagtaatcactccgttcagattttaattattctgtcttttttcctgttcttctgtgggtcagtcttcttagagaacttcgtgatctgagagacagctcctgttgtatgcagtactccgttcaaatttcaatttattctgtcttttttccctagatacataatttttactacgggcagttctttcgcaacatggtgtatggccagtttttctttttctggatacacaatttattctgacatatagttttgcgtcgattcgttgaagaactttatacgggtagtctggtctctagtcacgttcacgtatgacgtattcagccaagtgccgcgatgcttacgatctgaaacatatgcactgtatgtaacaggaatcggtgtattttcaatcacatgatgaacatgcatgaatccttttgtttggt

SEQ ID NO: 67847 - DNA, 444 bp, Zea mays
  Clone ID: MRT4577_161873C.1
cgggcccggaattccggggtggcccacagccgtccggccccaccaaaccggagggggggctaaggacaggccctgaacttttgttgaatccggtcctgttttgccgaaccgaagcagaaaaatgtttgttggagacttaaatcaattccatccgattaagcttgaaggttaagcaggcagatgaatgggagaccatttttgccaagaagttctttaggttttggtcaatgggggcagaggctttccaggggttggggagaaaaccggttcagggttatgatatcagtttcctgttaccaaactaccatgggggggccatgcttaagcccaagctcatagatttaatcgggcaattaatggaggtttttgccagggagatcagcgggctgaagctgtcagtaaccacttctggccggttgggggccactgaatttttgaagcagt

SEQ ID NO: 67848 - DNA, 378 bp, Zea mays
  Clone ID: MRT4577_161874C.1
ttcaagcgacaatggattttttggttacaaccaactcaggctctctgatgaattgggtgggcaagctaaacctgtgccaaaaagacaaggattgcttactggggatacaaagccaaccaaaaccctctataatgtcaattttaacaacatacgcactaaagttcatatattgagaaccatatttaactgtatgacaagatcaccaacatttgcattaaaaggaacattcaaatggtacaatatgagacactagaggaagctactgtcgctgcatacaacactaacaaaattccgatctattctaactaacccagaacactagtaattatcaaggaagaagtcgtgagaaacatcatgatttacaccacgccatgtata

SEQ ID NO: 67849 - DNA, 452 bp, Zea mays
  Clone ID: MRT4577_161875C.1
ggccgcttttttttttttttttttgggacagaagagggagtcattattataagttaaaaacctgtgccagattaaaagcaacacacgtacgaaaacagagagccagcgaagcatacccaaggcacatggaggcgcgtgctctggtagcgtacgtgctacagcgtgtcacggaaggtactcgaggacggcggggagcgggaacggtgggactctaggcgcggtgctcactagggggtgcgtgatctacttggttattatgtgccagtcctgagcgtgggcgcacgggggttggacctccctgctgctgggccggcctggatgactgggtgggggcgcggccgctggcttcccaggggggggctgcctccccctctgggcgccttgggtcgggggttgtggggcgcaggccggcggggggggctgccggcgcccgccgggggcgccccctcccc

SEQ ID NO: 67850 - DNA, 410 bp, Zea mays
  Clone ID: MRT4577_161876C.1
ggggtagttggagtatagcgaaggagagtgttgttgatcgaggcgaccttgagcgtcttagtagttactctcttgtgagatgtccaatagaacggtttatgtcagtgaccagaccaccagtgggaatgactcgcatgtacgagggcattgatttttactcggacatcacccggtccagggatggaggagcttaacatggacctggtcaggaagtgcatggagcctgttgagaaatgcctgagggatgccaaaatggacaagagcagcgtgcatgatgttgtgcttgttggtggatccactaagatcctcatggtgcagcaactgctgcaggacttgttcaacggtacggagctgagcgagaacatcaatcctgatgaggccgtgggctatggagatgctgtccaggctgc

SEQ ID NO: 67851 - DNA, 322 bp, Zea mays
  Clone ID: MRT4577_161877C.1
ccggatccacccacgcctctggagtaacgcgcgcgcgtgcatgaccctagggctgggcagcggcgcccgggaggccatggagaggctggatcagaaactccgtgcgcagagacaacctgtggtgctcaagaggcatgaggtgagcacgagccccactcccgcgaaagcgcacgaagacgcaacgttcagctgcagtctccatcgccagtagtcggcagcgtgcatcagcgacacgggcgtgcatctgcggcgggaagtggtgtcttctccgagacctaacaataaaggaggacgaggacggggccggttccgctggtgcctg

SEQ ID NO: 67852 - DNA, 1836 bp, Zea mays
  Clone ID: MRT4577_161878C.1
cattgggtacctcgaggccggccggaagagccaatcgccaagccaagccaagccagaagcggcagcctcgcgcagcggtctggtctctctggtgggtggtgcccctcttcgccggtggccggaaaggggagtggagtgggaccgctcaaggagaggccggcgtccccaagtctcacttccgccgtccgctttccccctgtagggatcgagggaggaaggaaaggaggtgcttcacaatgaaggccctcattcttgtcgggggtttcggaacccgccttcggcctttgactctgagcttcccgaaacccctcgtggattttgcaaacaagcccatgattctgcaccagatcgaagctttgaaagaagttggggtcacagaggtggttttggctatcaactaccgcccagaggtaatgattaatttcttgaaggactttgaggataagcttggcatcacaattacatgctcccaagagactgagcccttaggaaccgctggccctcttgctctagcaagggacaagcttgcggatggatctggccagccattctttgtcctcaacagtgatgtcataagcgaatacccatttgctgaactcatcaaatttcacaagtgtcatggtggtgaggcaacaattatggtcactaaggtggatgaaccatcaaaatacggtgttgtggttatggaggaggcaactggcagggtggaaaggtttgttgagaagccaaaaatatttgtgggtaacaagatcaatgctgggatttacttactgaacccatctgtccttgaccgcattgagctgaggccaacatcaattgagaaagaggtcttccctcaaattgcagctgatcaacagctctatgcaatggtccttccaggtttttggatggatgttggtcagcctagggactacattactggcttgcgtctttatctagactcgattaggaagaaatcagctgccaagctagctactggagcacatgttgttggcaatgtgctggtgcatgagagcgccaagattggagaaggttgtctgattggtcctgatgtcgccattggacctgggtgtgttgtggaggacggcgtgaggctttcccgctgcactgtcatgcgcggcgtgcgtatcaagaagcatgcttgcatctcaaacagcattatcggctggcactcaactgttggtcaatgggcacggatagagaatatgactatcctgggggaggatgttcatgtgtgtgatgaggtgtacagcaatggcggtgttgttctcccacataaagagatcaagtcaagcattctgaagcctgagatcgtcatgtgagctctccagttttagctacagtacattcttaacttctttgacgaagggaggattgcagatccccttttataaacgatattgcttggtatcttcgatctaatgcaaacagcttcatacttggtctcttgttaaactattgacaatgtatcttgttttttgttgaaaagtttagtacttgagtgtcaatcatacgtattcgcttgctaaactattgacaatgtatcttgttctttgttgaaaagtttagtacttgagtgtcaatcataactaaattttttaaatgttttcagagtcattgtgctaaatgctctcccggagaaatgtacacgctgcccacgtgtgatgtaacttactatgttcacgtatttaatcttgtaccaatggccagtcgcttgggcagtgggtgttgacagcaccataatcaggtgtaggcgcaggaccgcatccaagcgatcttcggcttggtcctccaggccatcctgcagcagcagccgcaaagcggcccagtcgcggg

SEQ ID NO: 67853 - DNA, 1830 bp, Zea mays
  Clone ID: MRT4577_161879C.1
ccgtttgaggagaagccaatcgccagaagcgtccggccttgcctcgcgcagcggtctggttctggtgggtgccctcttcgccggtggccggaaggcgagggggaagccggaggacgctgagggcgggcgaggccgccgtccccagatctcacttccgccgcccgcccgccccgcttttggtactactcttcttctgttccagggattgagagaggaaggaaggaaaggaggtgcttcaatatgaaggcgctcattcttgtcgggggtttcggaacccgccttcggcctttgactcttagcttcccgaagccccttgtggattttgcaaacaagcccatgattctgcatcagatcgaagctttgaaagaagttggggtcacagaggtggttttggccatcaactaccgcccagaggtaatgattaatttcttgaaggactttgaggataaacttggcatcacaattacatgctcccaagagactgagcccttaggaactgctggccctcttgctctagcaagggacaagcttgcggatggatctggcgagccattctttgtcctcaacagcgatgtcataagcgaatacccatttgctgaactcatcaaatttcacaagtctcatggtggtgaggcaacaattatggtcactaaggtggatgaaccatctaaatatggtgttgtggttatggaggaggcaactggcagggtggaaaggtttgttgagaagccaaaaatatttgtgggcaacaagatcaatgctgggatttacttgctgaacccatctgtccttgaccgcattgaactgaggccaacatcaattgagaaagaggtcttccctcaaattgcagctgatcaacagctctatgcaatggtccttcctggtttttggatggatgttggtcagccaagggactacattactggattgcgtctttatctagactcgcttaggaagaaatcggctgccaggctagctgctggagcgcatgttgttggcaacgtgctggtgcatgagagcgccaagatcggagaaggttgcctgatcggtcctgatgtcgcaattggacctggatgtgtcgtggaggatggcgtgaggctttcccgctgcactgtcatgcgtggtgtgcgtatcaagaagcatgcctgcatctcgaacagcattatcgggtggcactcaactgttggacaatgggcacggatagagaatatgaccatcctgggcgaggatgttcatgtgtgtgacgaggtatacagtaatggcggtgttgttctcccacacaaagagatcaagtcaagcattctgaagcctgagatcgtcatgtaagagttctccagttttaactacagtacattcttaagttcttcgagtaagtgaggattgcagatcccctttttataagtgatatctattggtatctttggcctaattcaaacagcttcagacatgttcgcttgctaaactgttgacaatgtatccttgttctttgttgaaaagttttgtacttgtagtgtcaatcatatttcacaaagtggttgtcatataatactgagggaggttttggacccttgatctgcagaagttcaataccatagtagcaagaataagttatttttttttaaaaaaaatgttgtccaatgtaactttcagcagtaatgtttgtgtgctaaatgctctcccggagaaatgtacacgctgcccacgtgtgatgtaacttaatatgttcacgtatttaatcttgtaccaatgaatatattgtcggtgtctttaaaatcattctaatacagtctgtctggcattacgagtaaaaaaaaaaaaaaaaaagcggcc

SEQ ID NO: 67854 - DNA, 493 bp, Zea mays
  Clone ID: MRT4577_16187C.1
ctaccacgtgccccgactacctcccccgagctgggcgagtccgcaccaagtccggcgttcaccagcgtggatctcccgagctgggcgagtccgcaccaagtccggccttcaccagcgtggatctgtgccagcgaaaagaaagatgcgcgcggcatgggagcgaacctgacgcctggggcccacgcgccagtgaagaggtggggatgagcgattgcgcggcctgtttctggctgttgggccgaattgaggttccgaagcccatttagactaggttgattttattcttttttttattattctttattctcttttctatacttccaagttccatttgaattccaatttgaattcaaacataaattcaagctcgtgctacattaatcccctttacatttgtgaagttaaaaataccagttttacaaaatataattatatagtttatgtttttatatcctttctcttcttctcattttcaagaccctatttttcaact

SEQ ID NO: 67855 - DNA, 430 bp, Zea mays
  Clone ID: MRT4577_161880C.1
cactggcccggacctttgggctgatttatgtgcttgtcgtctcttgattctactaattctgcatctctgggttgtattgggaagactactgttgagcatactcgggccggtggccttgggacggatgctaggagtaaagttaggatgtcgcatggattcgccgacgattttagtaagtccttgaagcggaatcctaatggtcatagtattggttaagtcttgggtgatgatagtgaagctacttcccgtttctgggttactcctaaggatttgcctacgaaggggtagaatacatcggctacgcgtgatcgtcatgagttgaatggggagttgactttgagtaataagtggtatggggttgtgaagactcccagttatttcgatgctaaggtcgatgaattacggcctgggaccgagtaagagcatattt

SEQ ID NO: 67856 - DNA, 629 bp, Zea mays
  Clone ID: MRT4577_161881C.1
aatacatccagtctcctatcatgtataggagggagttgagcttctaacaacgtctgagtatctctcatgactactttcgtgggtgatgatcacgccagacaccctcaagcacatgatctagtaccaaggacgcgagatcactcgacgggactgcgcacgcaagaagatgaggatgcatccactccgaagataagaacctcctcgtctacgatctcaacgtgcggagctgaagacgaggatctgcaacggcgagagcaccatggcgcctcgtctacaaggccatcgggaccaggctgagcctggtggacatatcgtggaaagaatggatgttgttcgtctacagatcatcgagacctctcccgttgatcatacgggcagagaataggcttcctccatcagtccaagaccggctcactggaacattgcttgcaaagcgccagaatgttcctgggctgatacgaccatgtgccgactcgagacttcgtcatgggctggaacatcccgggtgactacctgccgagacgaacctagacttaaattgtttacggaaacgagttgctgaatctgtggtctacagacaaagccaagcgaggtcaatcacggaaagtgacccatgccttagacgagaa

SEQ ID NO: 67857 - DNA, 400 bp, Zea mays
  unsure (1)..(400): unsure at all n locations
  Clone ID: MRT4577_161882C.1
cctccctctgttctttttttcttttgcggagaccaagaaatgttccgctctttgagaaaacagaacggcatcaaaaatatattttacaacacatagcctgcgactcaactgagtatgctaagcagaaggtcgcaccatctacacattctgacatatttgaaccaaacatgcgaaccattgcacggaaaaattggcacctagagcatttggcgagaaatacttattcctagctaccatgcaaagagacaggcccccatatagctgacgggacccactatgtatttccgtggtatgtccaaccccaaatagggttgcacacaatctacagggcgatatagcncaaaaacagcactaacaaagcaaactactctattagtgactgccatcctgcacactgatt

SEQ ID NO: 67858 - DNA, 101 bp, Zea mays
  Clone ID: MRT4577_161883C.1
agggaaagctggcgcgctctgcaggtactcgatcctgtatagcgggcgcgatccacgcgtccgctcacattttggatgtagctatcctgggtgatgacttc

SEQ ID NO: 67859 - DNA, 331 bp, Zea mays
  unsure (1)..(331): unsure at all n locations
  Clone ID: MRT4577_161884C.1
cgcgttcgatccggctactgaaaccacacactttccttttcacgatcgcatatcgatcaccgggccgtggatagttaactcccgtgcccttcacccgcaccttgagctcgcaacacaatgctcgctagaggcacacctctcacgggtcaaggcatcaactgtcgcaaccgtcgtctctgcagttaccaccctggttagcgaccagatgcttccatgggccaatgccaacatcaaccccgttggccaggccctcatacaatacacagntgctgacatggcagcactctatcttggcgcacataacgatactctccatggcgacgcaacactc

SEQ ID NO: 67860 - DNA, 208 bp, Zea mays
  Clone ID: MRT4577_161885C.1
ccgctcgaggtgtgtgtgtgttttccgactgacatgtttacccctaaattttgtagtgcaccactaccatcataccattctttggcgatcaattcttttggggcagcatggttcatgccagaggattgggtgcaccacctatacccgtggagcaattacaattgcattcgctgattgatgcaatcaaatttatgattgatcctaaggt

SEQ ID NO: 67861 - DNA, 415 bp, Zea mays
  unsure (1)..(415): unsure at all n locations
  Clone ID: MRT4577_161886C.1
agaaaacacagaagatagaacaatattatgcttcagntgcaaataaatttccgtcgttcagcacaacatagggttccccatgaggttgttcagcacaaccgacttgccagcttcgatgttatcgagcgcggcggcatttttttttagaaaggtggaggggcggcgtgaggtgttttcgatggaggggtcatcgtccgcanggagcgaggcggcctaccacatggactcggagagctggacgagctcgtcgattgcctccatggctgccgaagatgacatgtccgcagggatctcgaggctggtcggaagatctcggggtggcgctggagattggtgaggtgcgcggttcgagtgcggagcaccgagaaattggggacagactcatggaattcacggggacgccctgctgcacctc

SEQ ID NO: 67862 - DNA, 295 bp, Zea mays
  Clone ID: MRT4577_161887C.1
cgcgtccgcccacacgtccgctctcttcctgatggcggcggctaccacatattcggcggcgcggtgggtgcggacccagcggttgtgggtgctgccccggcggcctgcagccccggcggctcgcggccccgagccccggcctcggtggcggcacggacgcagaggctccggcctagcgcaagcgcatggcgcacagccgcacccccgacagcgcgggggccagtttactcggcagcccgtccgtgagtgcgcggactcctgggcgcacaggcgcaggtacaacctcaagcgcaca

SEQ ID NO: 67863 - DNA, 495 bp, Zea mays
  Clone ID: MRT4577_161888C.1
cccacgcgtccgcagcttcctggtcggcgagtgggaacttgatctcactgttgtgtaactgcttgctgttgtccctcttgcacaacatggtacatggagacatggcatatctttatctactttatatagaaggagcatgctttgccctggtttctcactcttgaacttgcatataagcccattgatgtaaggagagtgcaacttatcatataaactctttgatgaggttcttgatgatgttctaatctacaaatgtgttagaagatggccggatcctgtgtgactggcaagatttaccatttaaaaactatgcccccggagaatgaggagaattctatccgacttattacacgttctgatgccacatttgagaagagccagaactgagcacctacaacccttttaagttaaggaacacaagttgaattcatgctcccatgtggtttgttaccaagatctgttgtatatacatatgacttatcaatgattttcatg

SEQ ID NO: 67864 - DNA, 1037 bp, Zea mays
  Clone ID: MRT4577_161889C.1
ctataattttaatcgagtgagatgaagtatcttgcttttattgttctcctgctcttacctgacattgtgttacactatttatacaaataactttcttttgaggcagtgtaaccacatatgcctttatccccttccgcgtccgattttttttgttgaattcaggttcttgatgatgttctaatctacaaatgtgttagaagatggccggatcctgtgtgactggcaagatttaccatttaaaaactatgcccccggagaatgaggagaattctatccgacttattacacgttctgatgccacatttgagaaggttctgttaatgtccacccagtaacttttttgttttgtttcctgatcatctgaagatcaaagatcctaagaaacagtttctggtttatgggtctagcagagccagaactgagcacctacaacccttttaagttaagtaacacaagttgaattcatgctcccatgtggtttgttaccaagatctgttgtatatacatatgacttatcaatgattttcatgttgttgtaactatccagtatcgtacaactaacctgttacctagggggaaacactgcatgagtgttgttggtatccttgtctgatatgaggcggagcgggcgattcttgcaggaggagagagtgattctcctagaggtggaggatgaagtggtgatagacttcaagccaactccaagtgtcgtgtcgacctctgcctccgctccctgcacacatccctcccagtcgtcttcaaggtccagacctcctccccgctcaagttcctcatcagcacgttgtgcggtgtcatgtcgccgctttccttagtgtccatacacgtcgtgcgaggcgtcccgcttcatctctaatcacctttatgtgcacatcgtccatatgtgacccccttctccatataatttcaacaaattttactcttttgggctccgtgtaatttcattagtaaaatctctactaattattaatgctgcaaagttaacctgtcaaaaactcgagcccggaactcgagcccgg

SEQ ID NO: 67865 - DNA, 110 bp, Zea mays
  Clone ID: MRT4577_16188C.1
ctgacacactcgtccacatctgcttctccgtgaacacgcggcccgcgttgcacagctcgctcccgcgcggagacgccgggttctacagcaacatctactacatcattcgc

SEQ ID NO: 67866 - DNA, 235 bp, Zea mays
  Clone ID: MRT4577_161890C.1
cccacgcgtccggtttaaccgtccaaacctaagtacccggaatccctttttgtcttcattgcatgtttatgtcacactctagaattacccttcctctttaggatgctctgttactgtgaagtataggaatctgggttatgagttgctctctttaggtttgttccattttttattaagtttatgtatgtattcatggagaagtagggggcggtggggtttcaggagcagaagaagc

SEQ ID NO: 67867 - DNA, 539 bp, Zea mays
  Clone ID: MRT4577_161891C.1
ggtgacagacaacctcgaaggcttgttagatgtccgtgtcccggaatcttgaaagagttgtaaacagacaactgagcaaccagtgatgtaaattggaggtattaaacagatcactgagcaacgagtaatgtaaattggaggtactccctccgtttctttttagttgtcgctttgcataatgcatgatagcctcgagactccagattgcaagccaccccattcatcacatctccatcaaaagtgatttcaagccttccttgtagattttcatcaggaagaatatatttggacacaggaccacgagtatcaagtactgtttcaaatctctcattgatgtcctctacatattccttcaacttctccatgacatgcgaagtgctatagaaaggagtcaaccttacatcccctgaaattgtgcattctcccggaatttgattaagccccccgccaggatagctccatttagttggcttcattgtagatggagtagcaaatttatagaccttctctttctcatgtggagggaagtcagtgtaaaa

SEQ ID NO: 67868 - DNA, 400 bp, Zea mays
  unsure (1)..(400): unsure at all n locations
  Clone ID: MRT4577_161892C.1
ggtcagggtcagggatggatggatggatgcggatgcgagtccgcgcgtgaaagtccgcgccgccactgacgccactcggcagctttctgaatttaccaccaccctcccctactcctccggtcctcaccgctttcagcgcctggcctgcctctgccatgccatcggtaaacagaacaacatccacacctgcaagccccatgccgcctgtagacagacggtgggtgggtgggtaggtgggtggagttggacggtggtaccattttgcagcgcggcggcaggcagagatgtgcctacggcgacagtggcaagaacaggaagtggccgatgcatgcagatgctcatgcagcccatgcacagcaagctgctactgcatgcangctccactttgtgttgcgctctc

SEQ ID NO: 67869 - DNA, 315 bp, Zea mays
  unsure (1)..(315): unsure at all n locations
  Clone ID: MRT4577_161893C.1
aattccctaatcgacccaggcgtcctctaaacaatcgtnaaactctgataatccatttccttttcatcattctggatactaaaaaagggtagcgtaagaccaacactaggctggacagtaaagctgaccttcattttacatccatcatgactcaagctttcaactacatttttctcacatcaactgaactttcttaactcctctctcttcttaaaaactcattattttgattcctgtcgcaaggactagcttcatacattatatgcttcttgtcgccactatccgatgactacaatataattctgttcactttct

SEQ ID NO: 67870 - DNA, 1826 bp, Zea mays
  Clone ID: MRT4577_161894C.1
ctcgaggccgccctccgcaaaactcccccactccacgcccggccgcagctctcctatcttgctccaagtagcaagttccaactcgagtagattcacttcgccactccgttgccctctcctccgccgcccgatcctttccccgtctgagatggcatctccggcatcggcgtcgcttaaggaagccgtgggcagcctcgaccgcgacggctttgttggtctcctctccaacctcatcggcgagaccgcacacctgcagaacgacccgccgacctacaggcctcaggaggagcgcgtggcgcagcacgtagtcgacgtgctccgcccggtgtccgcggacaccgggggcggccccctccttgtgcggaagataagctacgccgagggcaggagcaacgtcatcgttgaataccccggcaccgtcccaggccgcgttgtctccttcgtcggcatgcacatggacgtcgtccctgccaacggcagcgagtgggactttgatcctttctcactaacctttgatagcgaggataaggacaaacttcggggacgtgggacaaccgactgtcttggacatgtcgcactggtggctcagctaatgcggcggcttggtgaggtcaagccacccctgaaacattctgtcattgctgtgttcattgccaatgaggagaactcatctgtcactggcattggtgttgatggcctcgtgaaggatggattacttgacaagctcaaaacaggacccttgttttggatagatacagctgataagcagccatgcattggcactggtggaatgattccatggcatctcaaggcaacagggaagctgttccacagtggccttgcacataaggccataaatgcaatggagatgaacatggaagcactaaaggtaatccaaaaacggttttacactgacttccctccacatgagaaagagaaggtctataaatttgctactccatctacaatgaagccaactaaatggagctatcctggcggggggcttaatcaaattccgggagaatgcacaatttcaggggatgtaaggttgactcctttctatagcacttcgcatgtcatggagaagttgaaggaatatgtagaggacatcaatgagagatttgaaacagtacttgatactcgtggtcctgtgtccaaatatattcttcctgatgaaaatctacaaggaaggcttgaaatcacttttgatggagatgtgatgaatggggtggcttgcaatctggagtctcgaggctatcatgcattatgcaaagcaaccaaggaaatagttggccacgtggagccatattccatcaccgggagtctacctctaatccgggaattacaggacgagggatttgatgttcaaacagctggatatggcttactgaagacgtaccatgcgaagaacgagtactgtctgttttcagacatggcccagggctttcaggtgtttctgagcatcatttcacagctggaagaagaggtctgagccttcttgatgggatagaccaatactccctccgtttcgttttagttgtcgctggatagtgcaaaattgaactatccagcgacaactaaaaagaaacggagggagtacctccaatttacattactcgttgctcagtgatctgtttaatacctccaatttacatcactggttgctcagttgtctgtttacaactcttttcaagattccgggacacggacatctaacaagccttcgaggttgtctgtcacccgttgaaaacggagccatttcaccgcagtgttctcgtgggcataaaacctttgtgctacaacttggcataaaatctttgtgctac

SEQ ID NO: 67871 - DNA, 812 bp, Zea mays
  Clone ID: MRT4577_161895C.1
tacacaagatccctgaacggcatcgtcgccgccgccgctgcatcagtgggcgctggcgctggtactcaccgaaacatcggcgttgtgccatctggcatgtcaaggatgtattagctgctgctgaaatgctggcaaatcctacctagccttgtggccacagcttctccgggactagccggcaaggctacaaggagtgggcatgtggtgcaaggagtgattcaaaagaggtggtcacgtggtcttggactccaaaaaaatttgcgggtccgaccaccaagcccagtggagtccacctcggtcctccagataactctatccatctgtgcgtgagccacaaagaaatccgttttgccatctccatgacgaactgcaggcagtggcatcccgatcctgatgccaggcttcacatctgtggcacccgcaacttgtgatctcctttctcgaaagtgataccccagatcatgacattcaggcaggcaatctacttgatcatgacatttaggcaggcaatctactactacacggtgttctggaacttggaaatacgatctatttgttctaatcctcatcttacctgtgaagcaaatgattcaatttataaatcaagttagatttagcaagtgcaaaatgttcacctgatgcttcgcttggtacacatattagataatctattttgtttgcctcgtgataatatacttatgcatagcctaaaatgaggaacctactgtatgtattcactaagccctttctcacttaaagcactctttcctttatgcttgaatagggagacaagctcggaggcgtggacatgg

SEQ ID NO: 67872 - DNA, 114 bp, Zea mays
  unsure (1)..(114): unsure at all n locations
  Clone ID: MRT4577_161896C.1
gcncgcgctgnctgtgttgcgcctgcgttcgactttttgctcccggggctcgtgtgtcgggacccttcccactctcgacatctcctgttctgtccgttagtgcctgactctttt

SEQ ID NO: 67873 - DNA, 224 bp, Zea mays
  Clone ID: MRT4577_161897C.1
acgcaggaaaccgcggcctttttcttttgtcgctcattcgtctgggtcaaacgcacacgtccctttcggttccctcctccataacagatttttttaatcgcattcgcaaccgcccccggcgacgacggcgtctagcgttgtacagtcctgccgacgtatatctatctgacaataaatctacctgcaccgctgcacacaagtccaacgccggctctctctttctc

SEQ ID NO: 67874 - DNA, 605 bp, Zea mays
  Clone ID: MRT4577_161898C.1
ctcgaggccggccgggccgggagagcacagccttaacctgagaaatttcagaatttgggtcacccaagcggccgagccgagaacagggcagagcacgaagcggaagcgcatccgcaggcacgacatgtctcgccggcggcgaggaggctccgactccgacggcgaggacaacagcttcctctaccgctacccgctcccctccgccgccgcctcagcaggcgtctcagcgggaggcagcggcaagccccggggcgggggctcgggcggcctcgcgccgtccaaatccacagtctacgtgtccaacctggacttctcgctcaccaactccgacatccacctcctcttctcccgattcggacgcgtcgcgcgcgtcaccgtcctcaaggaccgtgaatcccgccgcagccgcggcgtcgccttcgtcctcttcgtcctccgggaggacgccgcggccgcggccgccgagatgcacggcaaggtgctcaacgggcgcacgctctccgcctccatcgccgacgacaacggccgcgccgcggagttcatccgacgccgcgtgtatcgggacaagtcacggtgctacgagtgcggcgaggagggccccctct

SEQ ID NO: 67875 - DNA, 397 bp, Zea mays
  Clone ID: MRT4577_161899C.1
aataggagcaaaaaaatcccaaaaaaccctttggggtcccaaaaaaccaaatcagggacccggggggcccaacattccccccaggggaaaaaccatcaaggaaaaaggggggggcctctcaagtaaaccaggccccccccatttatggaacccccaggtggggcaacaagggccccaatccccacctcttaaaatcccccctttttttcccccaacacaccccattttaaaccctacaaagtccccgttaaaaaccccaaggccggcatgaccccaaaaaagggccccaaagaaaagggcccaaaaagccgaaaactatgttccccaccacatggggcccccgggcagggatcccaaaaaaccggaataatcctggcggccccaaggcaggcagtat

SEQ ID NO: 67876 - DNA, 294 bp, Zea mays
  unsure (1)..(294): unsure at all n locations
  Clone ID: MRT4577_16189C.1
ggcggcacaagagccgngagcgaggcgcgcaagcgcaactncgggacgcccgggggcaggggcaggaggagcggcgagccggcaacacccttgagcgggcggcggcgcggtcaccccgccattggagaacagagaccaaagagcaggcggcggcaagggcacggagaaaaggacggggaaacagagagccgacggaacgccggaggcagaggaaaaccgcccggttgtgcgggtgccgccgtgccaagagcactcgtaccagaaggagcagcggaaccaacagctggcgtcaag

SEQ ID NO: 67877 - DNA, 290 bp, Zea mays
  Clone ID: MRT4577_1618C.1
aatgaataacataagggtgtttttgtcttccggcagaagtcaattctctatcaatctgcatttaattacattcggatgtatcaggattccattgaacataatttattatcctttgttgttatcctttatttaaactttgttgaccttttatggtattataaagttcaaattctttgttttcttgttaaattgggttgttattcttgataatcaaaaatttttatgtttggtaaagttttatattattttatatcacttacttttattttttttaaatcgagttttttttt

SEQ ID NO: 67878 - DNA, 1075 bp, Zea mays
  Clone ID: MRT4577_161900C.1
aacataataaatcttggattgagttacctcacttagttatcaacaccactgaagataatcacacactcactcatagacattcagtcattcatatgcacaagcacatacaacaacagaaacaccgcacaaaacgaattctctgaatattcattcattgacggcgacgcgctgccagacacagtatatatcgatcactgcgtggagttggagtcggaggcggggaagaagtcgaagcgcatgagcagcttgacggagggcagcggctggcccttgtggtcggacagcctgacggagcggatccccgggcggagctcccacacgggcaggcaggtctggccgccgaactcgtccttctggtggttgtccgactcgtgcacctccacccgcagcagcgccagctccggcaccgccagcgggaacagcccgaactcgtggtcccacgccgggacccagctgtccatcgccacccgcgtctgctccatcctcgtgtccgccgccaccccggcgacccccacccgggcgtagaagtccggcggcgagcaccggtcgaagtgcgtcttccggaagtcgaaccgccagccgtcccccatgtacaccgtcaccctcagcctcgtcttcaccggcagctcggctctcgggtcgaagtccaacggcttgctgcgcatcagcgcgtcgggtttcttcacgtagccgcagccgccgttcgcccggaacatgccttgcgtcagccacagcttcctcccgtggccctgcatgtttgccgccaccatctggactccgtacctccaccccatcagcgggttgtagttggacgaagtgatgcgcgtcgaccgcgggaaaatgcgcagtaggttccgctgcgtgaacctggatttatttatgacgacatgtcatcgccggatccggacgtactggacagggttggttgtaactggaaaacaatgtgcaggtgcatggcccccccgcgcgcccctagctgcctcacctgacgacgtgatcgccatgggagacgatggccttctcgaacgccttctccccgaggctgacgcgcgtcaccttgtcccggacgcgtggg

SEQ ID NO: 67879 - DNA, 392 bp, Zea mays
  unsure (1)..(392): unsure at all n locations
  Clone ID: MRT4577_161901C.1
gagctcacttgncggcggccgccctttctttctttttctgcgcgaagaatacataagataaaagtattgcaccactgaccaccagccactgcggcacaacatccgactcgtagatcaactccacacctatgcggggacttgtctcctcgcccttcctcttatcgcgctgccgcggcaggacagtggaccaatcgcccgatccatggcgggcttagggggatttgaggcatggagacctgcatctgcgataaaacggctcggaacataggcacctacactctgacgcgcaaattagggatgggtgcgaccaaagaggactactcggtcttgatgttcggcacgacgaactaaacacggacctgaaatgagtgcgccacctggatgtaccaaca

SEQ ID NO: 67880 - DNA, 397 bp, Zea mays
  Clone ID: MRT4577_161902C.1
aagaaacgcccctttgaataagggggtttcgggtagggccaattctggaacctttaaccaaacacgccaaaaattttttaactgggcccaaatttacccaagaaaaccggttttaagccctggtttttaccccccgatttttcggggttacaggtacaaacctttttttttttttcccccttaccaaggggggtgatcgccaaattttccccccccctggggccggggggtccacggggaacggggcacggggaatatgctcccccagggaaagggactgggcttaatttggcgccccggaggaaggtggcttaccatttggccggggggctttgggccctttgtccgggcccttgggtttaactgaccccggaaaccccgaaccgggggggggggc

SEQ ID NO: 67881 - DNA, 600 bp, Zea mays
  Clone ID: MRT4577_161903C.1
cctcgaggcggcgggaaaactctgcttgacgacacctcgacggggctcctcatctatcgtgccgcccatggccatgcaagagccgacgagtgcccccacccaccttcacgacgcgacggaagcgtcattggcgctctcggcactgcagctagacttcacgggggtctcggctatcgcgacgctgcgcgtcgcggtgaccggctccacgcacaaccggagatacctggaactgaggctgactccgggcccgcccgagtggcccggcgccggtaacctcttccaggaggcgttctccggtgagatcttcatccactacatccgcgagctccgcaaggatgaccaccccatcctgacggtgctcatggtaggatcgcacgctctccgatcatcatgagagccgagctctgtgtcactatgcgctggtgtagaattgccggtagatcacgaggcgaccccgatagaacaccacacgcaacatcttctcgtacaatcaagatcaccgtgaactccgcattgcacggcaccgaggggataccgctgtagccagaacatggtgtacgggatagctgattacgtcgaggctcagggagttccggtacg

SEQ ID NO: 67882 - DNA, 1457 bp, Zea mays
  Clone ID: MRT4577_161904C.1
gttgttgtggggaacatggcagccctcaagagagcaccaactcatacataaaagaaatgttgcaagtatccaagtttcttcgtgtcatcaatctacaaggcatcgatatcggtgagagcttaccaacagctattgggaatgtagcacaccttcagtacctcggtgtcactgcttgttcgaggtatatggcgagcatgagtttgtgaagaaaattgaacaagtggatgaatacctctatggccgtatcactcaagttccggttgctccaaagaaaattggtcagcttcctagcatgaagcaacgcgtggcttcttttcttgcctaagcaggtcggtgccaccaatatagtaccacttgctgttatttcgatcctgataaggataatggttgggacagcagcacttttgagaaaatggctcaccttcagtcccttcatgtttgggattctaagtacaatggagttaatgctgaggctctatctgctgttattgataaagccaatttcctcgaacacctagataccctcactcttgatgttcatgacatcccattgagtgtgttcaccagttcttccctgaggcgtctccgtaccctaatcttagacggcaagttggacatgttggtgctgcaatctaaagaaaaggagtcaaaatttcatttccccaacattagcttcctatcattggcaaaaacagaggtgtcgcagaacttcatcaacaagcttgggaagctgccttcgctcaccactctaatattggatataaaatcctacaaggatgatcaagatcaacttgccttccaagctggtggatttacaagccttacaaagctgatactttctgatctggaaattgtgaaactcgagataaagaaatatgcacttccagaactcacagatttggaggttgagttgtactacgacgacatcgaaatcgaggtatatggtgagcatgagtttgtgaagaaaattgaacaagtggatgaatacctttatggccgtatcactcaagttccggttgctccaaagaaaattggtcagcttcctagcatgaagcaacgcgtggctagctgaagatcacaggtaaactaagacaccaatatagtactacttgctgttatttcgatttgcctgttcagtatgtacaactctgtcatgagtcgtgagtttattagtgtggatgtggtggcagatcggcatgtctacataataattgctggccgcacctgtctacagtatgcgtgtatgtattatatattatggaacctgcgaaaaaaacgtatgtgtgcgcgtgtatcatggtgtgtactcctaaattgtaaaataagtgaaagaaaaaacaagtggatcattgaatgttgaaggatgtttttgtaaccagatgttctttggactctgttttttgtttagagaaatataatcccttatgtaggaaaaaaaaaaaaaaaaaaggccccta

SEQ ID NO: 67883 - DNA, 170 bp, Zea mays
  Clone ID: MRT4577_161905C.1
ccgatgaaattggggtaaatccttagaacgaaaaaaaaaacgaaaaacgtccgcgaaaacacacatggcttcacctttgggattgggacacaccacctttcatggaaaagaacttaccacaaaacccttgactgttttacttcaggggcaattaattactctttcgagga

SEQ ID NO: 67884 - DNA, 287 bp, Zea mays
  Clone ID: MRT4577_161906C.1
gggggttggatttttttatcttctgaatattaattctgactattttcacacaccttaatcagtatcttgctatttattcctgtgtgttggcagtgcatacgaaggccgataaaaacccccccatctgaccaacttggggggggatgaaaaaatccccccccccaaaagagaaaaaaaccaggttcttaatatgggggacacttaaaaaattttgaaaggggacgccaaaaaaaaagggggtctcgggaaagcacctcaatggggtataaaaactttccccccctccc

SEQ ID NO: 67885 - DNA, 266 bp, Zea mays
  Clone ID: MRT4577_161907C.1
ccaggacgctccctgctccacgtctgcgccgccgccggaatccactcccagtgcttgcaagattccaagatctcacctcttaaagaaaacgcaccccgtagattcccatcatacacttccttctttggtaaaaaagttgggttttctccattcagggttctgttccttagggtgttttccttctgaagtgtttcacgagagcccgggagctgctggccctgcggccccgtctgtggctttcaggctctgggtctgagtcatagcgg

SEQ ID NO: 67886 - DNA, 294 bp, Zea mays
  unsure (1)..(294): unsure at all n locations
  Clone ID: MRT4577_161908C.1
ctgccgncctttttttttttttttttttttttgggtttttgggaaattagtgttgatttcctgttttttaaattttttatttttttaaacctaaaacccctttttttttacgaagggggcctgtttgacaattaacaagacttagggcacaagcacaaagggcccagaacaccacacaacatcttggatattacaggtacgggactggggtggcaaaactggatgggaatttttcaaaagggcgcggcgttctttccttttcctttttattgggtagggcagaaacaaaacacg

SEQ ID NO: 67887 - DNA, 279 bp, Zea mays
  Clone ID: MRT4577_161909C.1
atcggccagctcgagggcagggtcgacctcgagagcgaggatgtcgagctcgtggccgtcaacgaccccttcatcaccacggactacatgacctacatgttcaagtacgacaccggccacggacactggaagcacaacgacatcacactcaacgactccaagacacttctgttcggtgacaagccggtcaccgactttggcatcatgaaccctgaggaaatcccatggggcgaggctggcgctgactatgtcgtggaggccaccagcgtcttcactgac

SEQ ID NO: 67888 - DNA, 537 bp, Zea mays
  Clone ID: MRT4577_16190C.1
tgcggcgctcgagccggccgggtcgggagacaccgtatactgagagatgatcctccctcgcctccccaccccgccccacccatggcctccgccgccagcactgccgccgccgccggggccccgctgcgcctcctctcatcctcttccaaccgtatctccaagcccttccttccccgcccccaccgtctcaccctctcctaggccatctcgttccagcgggtcacgccgcgagacgcgggctacccaatactgtccacagaagagctcagctgctgctcggctatgaccatgcgcacaagatggtgcccgtgctcctccatgtcgacaggctcgtctgcgaggccctgctcatgggcaagcacgacgacgaggtcttcgacgatgcggcgatcctgccggccgtgcccccacgagcgtgccgtcgaccgcttctgggggaagttcgtggaaaccaagttctgccagccgttctggctggcgaactgggcggagggcgaggcgccgaagggcgcgcagaaggaggccaaggagaacctg

SEQ ID NO: 67889 - DNA, 326 bp, Zea mays
  Clone ID: MRT4577_161910C.1
cgtcttttttttttttttttttttttttttttttttttgtttgtttttttttttttttaatcaagatcccttttttacaaaaaacccggctcacaggcttgttttattcggccattattggggcccgggcaaaaaaaagtatccccggcgtgctcaaatttttaggaacccttgccccactagggggaatgccacccgagcccctttcaaaaatttttctgaggggaaaacaaacttgcaattaaggccgcccaatgcggatttttacagtttttttccccccgccccaaattttgggcccaccctttttggtaacccctggaaaa

SEQ ID NO: 67890 - DNA, 1527 bp, Zea mays
  unsure (1)..(1527): unsure at all n locations
  Clone ID: MRT4577_161911C.1
ggaaagtgggtgacaccgcacaagtctcaccattccctcatagctacagtgcatctgcaccttccgaacaaaacggtgatcagtcaaacagctccaggtattgcttagttgccagcaaacaaatggatccccgggctgttttaattcggcacatttctcacagtctgggtgcgcaatgaaataagagacgacgtcaggaacttgaaagtctcttgtgtgggtcgaggattgatgggttatctcggaaacaagggttcgatttcagtgagcatgtgcctgcaccagacgagcttctgcttcgtatgttgccacctgacctcgggggagaaggaaggcgacgagctgcgcaggaactccgacgtcctggagatcctaaggaagaccaggttcccgcgggtccgcggcgccggtgacgtcaggtcacctgagacgatcctcgagcacgatcgggttatatggcttggggatttgaactaccggatcgccctgtcttactgctcggcgaaggctctcgtggaaatgcatagctggaagcagttattggagaaagaccagctgcggatgcaacagagatacggacgagttttccagggctggaaagaagggaggatctacttccctcccacgtacaaatactctttcaactcagaccggtacgccggcgagggcaggcaccctaaggagaagcggaggacgccagcatggtgcgaccgcatcctctggcacggcaacggcctgagccagctgtgctacgtccgcggcgagtcccgcttctccgaccaccggccggtgtacggcatcttcctggcggaggtcggcgtcgtgcgccagcggaggaggaacaacgccgggtacttcggctctagggtcgaggtggaggagctgttgccgcgctctcggagctatagactgagagatgaagttttgctgagctgacttatagcatggtataatagaaggtaccccccaacaccacccaagagagaatgtgcagacactaacttgatgaaaaaaaaaaaaagttcggcttacgatccttcgtttcctcagacactaactggatgaaaagaaaaaaggtttgctgcagtgcaggacgctgggcggtatttgctgctcaccaacagcaggggcaggcaacagcgggacacgagtacacgacgggtatgtcgccgctcgtcgtcggagacgtagcagcagcaggcagcaggccatgccgctgagtgactggctatagagtttacccagctttagccccacttagttattcctcctcctagcaactgcatttgcttcaattttgtttttttttggtcctcgtttttggtagtgtcagcaaacacaacatggtttccttcctccctcttctgntttttgatgnatcttttgtttgtaagaaactttgtanaaacctgctggtgtctgctgtgcatgccatgcaagtcgtggaacctttttagatatgctcagatggctagagagcagttnntggttggtgatgctgagggcaaggcannnnnnngccgctgt

SEQ ID NO: 67891 - DNA, 428 bp, Zea mays
  Clone ID: MRT4577_161912C.1
ggaaaaacaaatatggattgggggggaagcaagaggattaaaaaccaaccaaagtatttaggcctgatgttttgcccccaacggaatcaaacaatcttggtggaaaaaaaaagattacctacccccccaaaaaaggaccaccaagggggaagggggggggggccccccaaaggaccaaaccctaacaaatttttttttctcttccccttttttctgctggaggccacccccggaaattccttccttttgctggggggggcatcccaaagggttttttctctctacccccaatgccacaagggagcgggggccggggcccggaaaacccaaggggggcttaaaagggacagggcaaccacctgcccccactgtttaaaccgaatttttaccgtctccggggggtcccctggaaaaagtatggacatggg

SEQ ID NO: 67892 - DNA, 488 bp, Zea mays
  unsure (1)..(488): unsure at all n locations
  Clone ID: MRT4577_161913C.1
ccccgcctcccgcgccgccgccggctggccggttggggcctggacgcctccggcggggccgggctgcccaccgggtctgccgccgggacggactactgtcaacggcctcttcgcggcctaccccgccgtccgccgcgtcgccctgcacctattgccgctgggcgcctccgttttcacgagagaggacccgttcttcctccggggggaggccctgcgccgctccgtccacctcctccgccccgtcntctctctcgccgcgccgcgcgtcgcggccgtcntgcccgacctcacccccgcctcctgcgtcctccccatcgccggggggctggacgtcccgtgccacgtcctattccccacagccgccaccgtgctctcggtcagcgcctgctaccccgtctctctcgtgtggctcaaggggggtccggccccgggcttgatcgggggcgtcggcggcgtccgcggggtgggccagcggccgcgctccgggc

SEQ ID NO: 67893 - DNA, 266 bp, Zea mays
  Clone ID: MRT4577_161914C.1
gcaataatgcatgaacagagtaatcaatgttattactggaacactgttactggagaaacgtcttgggacataccaaatggattagcttcaggagctgcgactgcatctgttccttctgatgtgggctattcaatagaagctcaagcccatgttcttcctcacagcacacttgaagcgtacccaagtgacatgtctgtcgggaatggcacatcaacttttgctaattttggaatggcatgtggaagtgcacaggttactcaagatgc

SEQ ID NO: 67894 - DNA, 993 bp, Zea mays
  Clone ID: MRT4577_161915C.1
ctcgaggccggccgggtctccaatcccggaccgaacaagcaggcccagagaatcagaatcaggggcaagttacaaaaactgtctcctctcgcacacgccacgcgcgtacacacgagcgccccgcggaaagggtagcaaacggcccggacagtgagccgcgcacctttcacacttgacttgatgggttgctggcgctcgtcgctgcgctcagggccccacgcggcggagaagccgccccgccaccgccaccgcccgccaccgccaccgccaccgacgaacggccccacctcctccctgaacgcgcagcaggccgcgcccccggcccgcgcctccggggaagtaccggcgctcgccgagttctcgctggcggagctccgcgcggccacggccgggttcgcgccggggaacatcgtctccgagagcggtgagaaggcgcccaacctcgtctacagaggccagctcaggggccccggcggtgccccgccgcgcgcagttgccgtgaagaagttcgccaagctcgcgtggcccgaccccaagcagttcgcggaggaggcgaagggggtcggaggcctgcggcaccggagcatggcgaaccttatcggttattgctgcgacggcgacgatcgcctgctcgtcgccgagttcatgcccaacgacaccctcgccaagcaccttttccactgggaaaaccagactattgagtgggctatgcgtctgagagttgcatactacatttcccaagcattggaatactgtagtaccaaggggtggcctttatatcatgacctaaatgcatacagggtcctctttgatgagaatggtgaccctcggctgtcatgctttggtctgatgaaaacagcagggatggaaaaagctatagcacgaacctagcatatacacctccagaatatctgagaaatggcagggttactccagaagtgtcattttcagttttggcactggacttcttgaacttctcaggggaaaagcata

SEQ ID NO: 67895 - DNA, 507 bp, Zea mays
  Clone ID: MRT4577_161916C.1
acttctttgcttctcaggtgttgttaatgtcaatattactgacagccaggttactcactttctctaactagcactttaactacgttgtcctcttcctttgcatcttggtagttaacttgtccacttgagggcaccttcgattccctctcaatccatatgggcttgttcggttcgctctcaatccatgcggattgagtgggattgggtgagtttaaattccaagcaagtcaaatttcttcttattttttttccaatctcatccaatccatgtgcaatgggaataaccgaacaaggtaaattggaggggtttaagtgagattaattccatatcaagtcaaaatcattcataattttttacaatcatttccgatccatgataaccgaacaatgcctgacatggaacacatatttgaactgcagatacctcttgctggaccccactcgatcattggccgagctgttgttgtccatgctgatccggatgaccttggcaaaggtggacatgag

SEQ ID NO: 67896 - DNA, 160 bp, Zea mays
  Clone ID: MRT4577_161917C.1
gccactcgttcggatacgcttcagtctgcatgccgggggcaataatatctgagtagggggcataaaggacctaattaccttcacacgtgaccccgtacgaactacaggctccatcaccacggcttccagctgacatagtgcagatatttctacgcaggag

SEQ ID NO: 67897 - DNA, 164 bp, Zea mays
  Clone ID: MRT4577_161918C.1
acgcgtgttttttctgcaagggaacgctctggagggcgacctgccctccctggccgagatgggctcgctcgcgaccctggatctggagggacacgcattataccaccctgccgccggacttactcgatggtctacccttgctggtcaagctcagtatggaccac

SEQ ID NO: 67898 - DNA, 1009 bp, Zea mays
  Clone ID: MRT4577_161919C.1
cggaaactttgcggatccgtcgccgctgcccttgccgccgatggtcgatgtggccgcgctcacggacgacgtcctggcggagatactcctccgggtgccgtcgccgcgggacctcgctcgcgcctctgtgtcgtgctcctccttccgtcgcgtcatctcaaacccccacttcttccgccggttcgtcgccctccacgcggctcctccgctcggcgtcttctgctgctaccccgccttgggcggcggggttggtggatcccagttccagccagcgctgccgtcgcacccctcggcgcccctcgctcgcgcgctcgccagttcagcagacttctgcttcaacttcctcccgccgcccgccagcgactggctcgtccgcgacagccgtgacggccgctttctactcgaccgcgtgcgggacggctccaccgctttcacggaggttgcaatctgcgaccccctattccggaggtaccggctgctcccgcccatccccaacgatctcgccgcctcggtggaaaacccctacttccagcgcggtggcgatggtcaattgcagtcacgcagcagtgaaatcttcctggtttctcgtagtaatgacagtgtcagtgagaacgatacgacgttcaccgtgatctggatggcatgctgtcgagggaagctggtagcattcttctactcttcagagtcacagcaatggtgtgcactttcaccgcctgaacactatgctttgagcaccagaagagtcatgggcgttcgactaggacagcgcaaccatgctcatgggtgcttctactggatgttagccctcacacataggtggcttgtgttggacacacacaaaatggactttctccatcgtggacatctcacctatcctgacaggccgtgcgatgatgttcagtaatcagattaccactctggagtcaagcaatggctggactaccatcgtggtctctgatgttttccgtcagatagaagatgcattctgtatttttatgcattcttgaat

SEQ ID NO: 67899 - DNA, 258 bp, Zea mays
  Clone ID: MRT4577_16191C.1
gcacaggccccccaggcctaggttccccctgaggctgtggcaagtcgtcaatcctgtgtcccagaggtccctctgggccacaacccaacccttctcactctcctcagtgctagcactttgtattttttaatacttttatacttgtttctgcttttgctgctcttgatcccacctttgctcctgacaaccctcattcaataaagaccagtgaagaccaataaagtggtaataaagaaatgtatgaaaaatggggggggc

SEQ ID NO: 67900 - DNA, 1975 bp, Zea mays
  Clone ID: MRT4577_161920C.1
ccagtatcccacggccggccggccacccacacccacctctcaactacgccaagccaagcttagcgaaactcaggcgatcggaccacgccccaccgaacaagtgcagcgcccgaccctccccacggaacgaagcttcggcgttctcgtcgccccgtcgcaagatcacaagtccataacaagaaagacaacaaaactatgctgaaagatgtgcttgcatagaagatacttctgctgcaacaccaccaagggcctagtggctcttgcgcaagatctgcaggcctgctcgtctcttgacttgagcggcggtcaccttgtccgcatttactccacgcccttcagactccgacgccagcaacctataaggcgcagtccacctgattgacaacagaaagctagccttgtgcgtgatcacacagttttcatggatataaaagatatgaagaccagagggaagactttgacggagcggtacgagatggggaagctgctggggaaaggcgcgttcgggaaggtgcactatgcaagggacctcgagtccaaccagggtgttgctatcaagatcatggacaaggacagggtgctcaaggccgggctctcggagcaggtaaagcgtgagatcacgactatgcggctggtggaacacaaaaacatcgttcgtctccatgaggtcatggcgacacggaacaagatctacatcatcatggagtatgccaaagggggtgagctcttggacaaggttaagaggagcggcaggctgacggaggctgacacacacagatacttccaacagctcattggcgcactggatcactgccacagccgaggcgtgtaccaccgggacttgaagcctgagaacctgctgttggatgagaatggggacctcaaggtgtctgactttggactgagcgcgttttcagagtcgaggaggacagatgggctgctccatactgtctgtgggacaccggtgtatatagctccagaggtgatcaagaagacaggctacgatggtgcaaaatcagacatctggtcttgtggtgttgtcctgtttgttctcgctgctggctacctccctttccagggcccaaactatgatggagatttatcggaagatacatgatagagatttcaggtgccccagtatggttttcacacaaactcaagaggctgctatacaagatcttgaaccccaaccccagcatgagaccttcaattcaggagataaaagagtctacctggttccgaaaaggtcctagggagatcagtgcagtgaacgagaaagttcttagcgagaatgccaccaccacaaatgctgccccagtgcttgcttctaggcgcaaggagattgctcacgaagatatgaagtccttggttgccacaaacctcaatgcctttgaaatcatcgcgttatcagcagggttggacctgtctggtctgtttatcaaggagtgcaggaaggagacaaggttcacttcagataagcctgcattggccatcatcgcaaagcttgaagacgtcgcaaaagcactgaatctcaggataaggaagaaggacaacaacactgtcagcattcaagggaggaaggaggggggcaatggtgtccttaagtttgacacgcaaatctttgagatcacaccatcctgccatctcgttcagattaaacaaaccagtggcgatctacttgagtacgagaaactgttggaagagggcatccgaccagggttaaaggacgttgtctcggcatggcatggagatgatctgcagcagaagcagaagtagcttcggatgtctcccgtagattctgttctagtacatttcattccttatttttttagcagctacattccttttttgtattggtggtgatatgaaccattaggttgtgttttgttcagcaataattgttaaggagctgagttattgtgttacaacctaatgattgttacaattttataatgaaaaaatgttgtcgatcctt

SEQ ID NO: 67901 - DNA, 535 bp, Zea mays
  Clone ID: MRT4577_161921C.1
tgttgtatcttccttttgcaaaagcatgtgtcactactctgctgtggagggcggctgaccaacaaggccgttattaccatcgcataacaaccggcccagctttacttgctgccgactatgcattattccacctaacacaccaataggacattctcacacctagcctgtttatgcacgttttagtgccattgtggaatgatgcacgggcctcatgcagatttctgttcgaggccttctgacggacagtgtgttaaaatccattgaggcacatgctgaccggattgagatgctctccattgtcttcgtcgggaacagactatttgggcctgcattacatcctatatggctgtaagatttgaagagctaggggattatggactgtccatttcatgacaagccacttgctggcaaacgctgtcaatctggagacaatgccatcactttggatgttacgtactcaatgaccttgggctcatgcctgtagctggcgctcaagatgccccatcttagtgctggagtcatgaatgatcctcga

SEQ ID NO: 67902 - DNA, 786 bp, Zea mays
  unsure (1)..(786): unsure at all n locations
  Clone ID: MRT4577_161922C.1
ccggccggggtctcaatcccacgccacatcctcccctccttcctccttgggttcccagcccgtgcgcccgcctgtcgcagtcgcaccgcagccgccggccatggcctgcctcaccgacctcgtcaacctcaacctctcggacaccacagagaagatcatcgccgagtacatatggatcggtggatctggcatggatctcaggagcaaagccaggaccctcccgggcccggtgaccgatcccagcaagctgcccaagtggaactacgacggctccagcaccggccaggcccccggcgaggacagcgaggtcatcctgtacccgcaggccatcttcaaggacccattcaggaggggcaacaacatccttgtcatgtgcgattgctacattcctgagaggatcaccgagatcgccggcgtggtggtgacgttcgacccgaagccgatcccgggcgactggaacggcgcgggcgcccacaccaactacagcaccgagtccatgaggaaggagggcgggtacgaggtgatcaaggcggccatcgagaagctgaagctgcggcacaaggagcacatcgcggcctacggcgagggcaacgagcgccggctcaccggcaggcacgagaccgccgacatcaacaccttcagctggggagtcgccaaccgtggcgcgtcggtgcgcgtgggccgcgagacggagcagaacggcaagggctacttcgaggaccgccggncggcgtccaaatggaacccctacgtggtcacctccatgatcgccgagaccaccatcgt

SEQ ID NO: 67903 - DNA, 582 bp, Zea mays
  Clone ID: MRT4577_161923C.1
ttcccccccccccccccccccccccccccccccccccccccccccccccccccccccccccccccccccccccccccccccccccaaaggggctttgggaaaaccccttttccctaagagtttaataaaaaagggggggttttttttatgacccttacttaaaaaccccttgggggcttaaaaacccttatttttttttttaatattttagggaaaaaaaactttacttttggcccggcatagttaaaaaacggccaaaatatgctttttgcccttaaaagttaaacccttttcgggggggaaaaaaattataaaaagatttgggttttaaaaaaaaaaaaaaagggggggggaccaaaaaccctttgggccccccattgtttgaaagtttcttcctggggccctttaaaaatggggggaaggggaaaattttgaacaaaaaagggcaaaaaaaaaaggggggccggaaaaggaaacccacccagggccccaaggggtttgaaaaaacccccggaggggccccggcccccgggggaaaagctaaaaatttccaaaagggcctttttaaaaaaggggacccct

SEQ ID NO: 67904 - DNA, 1348 bp, Zea mays
  Clone ID: MRT4577_161924C.1
cagacagctcttcttgcgttgcctactaagatctctctctctctctctcttgtgttcttgccttctgcctactacgagtgatggccagcctcactgacctcgtcaacctcgacctgagtgactgcaccgacaggatcatcgccgagtacatctgggttggaggatccggcatagacctcaggagcaaagcaaggccctcaagccattttcaaggacccgttcaggaagggtaacaacatccttgtgatgtgtgactgctacacgccacaaggcgagccaatccccagtaacaagaggtacaaagctgccacggttttcagccaccccgatgttgcagctgaggtgccatggtacggtattgagcaggagtacactctccttcagaaggatgtgagctggccccttggctggcctgttggtggataccctggtccccaggcaagagatcgatcctttccttcttcaacttttatcgattgcatgcgagttatatgttggcggaagaggcagggctttgcaaagttatcaactgttcggtgtattttttatttaatttttttggcagggaccatactactgtgctgccggtgccgataaggcctttgggcgcgacgtggttgacgcccactacaaagcctgcctctacgccggcatcaacatcagcggcatcaacggcgaagtcatgcctggacagtgggagttccaagtcgggccgtccgttgggatctctgccggcgacgagatatgggtcgcccgctacattctcgagaggatcactgagatggccggaatcgttctctccctcgacccgaagccgatcaagggtgactggaacggcgccggcgctcacaccaactacagcaccaagtcgatgagggaggccggtggctacgaggtgatcaaggaggcgatcgagaagctggggaagaggcacagggagcacatcgccgcgtacggcgagggcaacgagcgccgcctcacgggccgccacgagaccgccgacatcaacaccttcaaatggggcgtggcgaaccgcggcgcgtccatccgcgtcggccgcgacaccgagaaggagggcaagggatatttcgaggaccgcaggccggcttccaacatggacccctacgtcgtcaccggcatgatcgccgacaccaccatcctgtggaagggaaactgataaaaccactgttcttctcctgcacgcatgcatccgccccgtgctgtcactttttgtttttcaaatttcgattcccgtcctaaagtttgttagcacttattatttcgctctccagtgtactgctcggaaagtccgaataaaaacggctctaatgattttgttttttttttt

SEQ ID NO: 67905 - DNA, 193 bp, Zea mays
  Clone ID: MRT4577_161925C.1
aaactttttgatttttgacacaagcccaatgaaaacacaggcacggggatgagtcgtaaaacaatcttgcgcccggaccaggacctacctgaggctgcaaataacaccaagggaaaactctaattctcaaactggatcagaatcattcatgaagtggatccagattaatatgctttcatagtttcaggataca

SEQ ID NO: 67906 - DNA, 628 bp, Zea mays
  Clone ID: MRT4577_161926C.1
gccggccgggtcggaaaccctccttcagaaggacaccatctggcccctcgggtggcctattggcggcttccctggccctcagggtccttactactgtggaatcggcgcggagaaatcgttcgggcgtgacatagtcgacgcccactacaaggcctgcctgtacgcaggcatcaacatcagtggcgcgtcggtgcgcgtgggccgcgagacggagcagaacggcaagggctacttcgaggaccgccggccggcgtccaacatggacccctacgtggtcacctccatgatcgccgagaccaccatcgtctggaagccctgaggcaccccgtggccgtgtcgtgtcggtttgctccgcgtacggcgctggccgttgcatcgcagggcccagcggttgcgcaactattttcccttccccgttctgtttgcttgtactactactctaccgctagtcctgcatagcattttagctagaacacaacaacagccaaaaaaaagtattgttgcttgcttcgacgcttgccaccacttccattccatgccgtccgtccgcttccttcctgtgtaatcctcctccaataatagacgtgccatgttgcatccccaaaaaaaaaaaaaaaaaaggccccta

SEQ ID NO: 67907 - DNA, 358 bp, Zea mays
  Clone ID: MRT4577_161927C.1
ctgatttattctgtcaaatctattgttttcgaaggtgtcaactggtcatagggccttgtgtttcggtaagatggtatttttcatgccaacaaatttggtgcttatattgttgtgctatatagatatcatatcataacatgacaaatgctggtgtagaatgcatcttttgacattgtatgttgtgaaccaatagcccattgctatctgttacttgagaggaatttatggctgtcatctctacatcttctgttaaaaatttgtaaaactgtaagggtgcctcttaatttagtgaccagggcagaatttattaagagaaattgagacattgaataatttgaagggcaggcccggtgctgtg

SEQ ID NO: 67908 - DNA, 332 bp, Zea mays
  Clone ID: MRT4577_161928C.1
ggagagggacccaaaccatttgggtccaacccaatagtgaaatttttcagggaaaactcagtttaggtccccaggggaagttcaatgggggttttgggaagattaagtcagatggcaaaatttgtgccaaggaattggaaatttaaaaaacagggggttgttttccgtaggtaaaccaaaggccctacatttgatttgggaaaaatatcccttttggttaaagggcccccattaaaaacccacccctcccgggacccgggggtgaacaccacccgtccgttatttttaaaagggagggggccgcccttttttttttattttttttttttgaa

SEQ ID NO: 67909 - DNA, 1267 bp, Zea mays
  Clone ID: MRT4577_161929C.1
ctgcctcaccgacctcgtcaacctcaacctctcggacaacaccgagaagatcatcgcggaatacatatggatcggtggatctggcatggatctcaggagcaaagcaaggaccctctccggcccggtgaccgatcccagcaagctgccaaaatggaactacgacggctccagcaccgggcaggctcccggagaggacagcgaagtcatcctctaccctcaagccattttcaaggacccgttcaggaagggtaacaacatccttgtgatgtgtgactgctacacgccacaaggcgagccaatccccagtaacaagaggtacaaagctgccacggttttcagccaccccgatgttgcagctgaggtgccatggtacggtattgagcaggagtacactctccttcagaaggatgtgagctggccccttggctggcctgttggtggataccctggtccccagggaccatactactgtgctgccggtgccgataaggcctttgggcgcgacgtggttgacgcccactacaaagcctgcctctacgccggcatcaacatcagcggcatcaacggcgaagtcatgcctggacagtgggagttccaagtcgggccgtccgttgggatctctgccggcgacgagatatgggtcgcccgctacattctcgagaggatcactgagatggccggaatcgttctctccctcgacccgaagccgatcaagggtgactggaacggcgccggcgctcacaccaactacagcaccaagtcgatgagggaggccggtggctacgaggtgatcaaggaggcgatcgagaagctggggaagaggcacagggagcacatcgccgcgtacgacgggggcaacgagcgccgcctcacgggccgccacgagaccgccgacatcaacaccttcaaatggggcgtggcgaaccgcggcggctccatccgcgtcggccgcgacaccgagaaggagggcaagggatatttcgaggaccgcaggccggcttccaacatggacccctacgtcgtcaccggcatgatcgccgacaccaccatcctgtggaagggaaactgataaaaccactgttcttctcctgcacgcatgcatccgccccgtgctgtcactttttgtttttcaaatttcgattcccgtcctaaagtttgttagcacttattatttcgctctccagtgtactgctcggaaagtccgaataaaaacggctctaatgattttgtttttttttaaaaaaaaaaaaaaaaaaaaaaaaaaaaa

SEQ ID NO: 67910 - DNA, 336 bp, Zea mays
  Clone ID: MRT4577_16192C.1
gtcgaaccgaggcaggggaggttcggcggagaacaagttccgcatgtcgctgggattgccggttgcctcgacggtgaactgcgcggacgacattgtcgccaagaacctgtacatcatctccgtcaagggcatcaagggccgcctcaaccgcctagcgtacgcctgcgttggcgacatggtcattgacaccgtcaagaagggtaagcccgacctcacgaagaacgtgatgcccaccgtcataatccgtcagcgcaagcccttgcgccacacggacagcgtctacatgtacttcgaagataatgctggagcgattgtgaatcccaatggtgagatgaa

SEQ ID NO: 67911 - DNA, 1561 bp, Zea mays
  Clone ID: MRT4577_161930C.1
ttgggtacctcgaggccggccggggtcgtctcaatcccacaccacatcctcccctcattcctccttgggttcccagcccgtgcgccccgcctgtcgcagtcgcaccgcagccgccggccatggcctgcctcaccgacctcgtcaacctcaacctctcggacaccacagagaagatcatcgccgagtacatatggatcggtggatctggcatggatctcaggagcaaagccaggaccctcccgggcccggtaaccgatcccagcaagctgcccaagtggaactacgacggctccagcaccggccaggcccccggcgaggacagcgaggtcatcctgtacccgcaggccatcttcaaggacccattcaggaggggcaacaacatccttgtcatgtgcgattgctacaccccagctggcgagccaattcccaccaacaagaggtacagcgccgccaagatcttcagcagccctgaggtcgctgccgaggagccctggtatggtatcgagcaggagtacaccctccttcagaaggacaccaactggcccctcgggtggcctattggcggcttccctggccctcagggtccttactactgtggaatcggcgcggagaaatcgttcgggcgtgacatagtcgacgcccactacaaggcatgcctgtacgcaggcatcaacatcagtggcatcaacggggaggtcatgccggggcagtgggagttccaggtcggaccgtccgtcggcatctcttcgggcgatcaggtgtgggttgctcgctacattcttgagaggatcaccgagatcgccggcgtggggtgacgttcgacccgaagccgatcccgggcgactgggaacgggcgcgggcgcccacaccaactacagcaccgagtccatgaggaaggagggcgggtacgaggtgatcaaggcggccatcgagaagctgaagctgcggcacaaggagcacatcgcggcctacggcgagggcaacgagcgccggctcaccggcaggcacgagaccgccgacatcaacaccttcagctgggtacgcttctcccccgttcctaattgtgcaactgctgtaccgtggaggatcgccgaaacccgtgtgcctgccaactgttgttgcttgtgccgttgcagggagtcgccaaccgtggcgcgtcggtgcgcgtgggtcgcgagacggagcagaacggcaagggctacttcgaggaccgccggccggcgtccaacatggatccctacgtggtcacctccatgatcgccgagaccaccatcgtctggaagccctgaggcatcccgtgggcgtgtcgtgtcggtttgtaccgcgtacggcactggccgttgcatcgcagggcccaacggttgcgaaacaagtttcccttcccgttccgtttgcatgaactactactctacctctagtcctgcatagcattttagctagaacacaacaacaaaaaaaaacattgttgcttgcttcgacgcttcccgccacttccattccatgccgtccgtccacttccttcatgtgtaatcctcctccaataatagacgtgtcatgctgc

SEQ ID NO: 67912 - DNA, 1623 bp, Zea mays
  Clone ID: MRT4577_161931C.1
cattgggtacctcgaggccggccggggtctcaatcccacgccacatcctcccctccttcctccttgggttcccagcccgtgcgcccgcctgtcgcagtcgcaccgcagccgccggccatggcctgcctcaccgacctcgtcaacctcaacctctcggacaccacagagaagatcatcgccgagtacatatggatcggtggatctggcatggatctcaggagcaaagccaggaccctcccgggcccggtgaccgatcccagcaagctgcccaagtggaactacgacggctccagcaccggccaggcccccggcgaggacagcgaggtcatcctgtacccgccaggccatcttcaaggacccattcaggaggggcaacaacatccttgtcatgtgcgattgctacaccccagctggcgagccaattcccaccaacaagaggtacagcgccgccaagatcttcagcagccttgaggtcgctgccgaggagccctggtatggtatcgagcaggagtacaccctccttcagaaggacaccaactggcccctcgggtggcctattggcggcttccctggccctcagggtccttactactgtggaatcggcgcggagaaatcgttcgggcgtgacatagtcgacgcccactacaaggcctgcctgtacgcaggcatcaacatcagtggcatcaacggggaggtcatgccggggcagtgggagttccaggtcggaccgttcgtcggcatctcttcgggcgatcaggtgtgggttgctcgctacattcctgagaggatcaccgagatcgccggcgtggtggtgacgttcgacccgaagccgatcccgggcgactggaacggcgcgggcgcccacaccaactacagcaccgagtccatgaggaaggagggcgggtacgaggtgatcaaggcggccatcgagaagctgaagctgcggcacaaggagcacatcgcggcctacggcgagggcaacgagcgccggctcaccggcaggcacgagaccgccgacatcaacaccttcagctgggtacgcttctaattgtgcaactgctgtaccgtggaggatcggcgaaacccgtgtgcctgccaactgttgttgctttgtgccgttgcagggagtcgccaaccgtggcgtcggtgcgcgtgggccgcgagacggagcagaacggcaagggctacttcgaggaccgccggccggcgtccaacatggacccctacgtggtcacctccatgatcgccgagaccaccatcgtctggaagccctgaggcaccccgtggccgtgtcgtgtcggtttgctccgcgtacggcgctggccgttgcatcgcagggcccagcggttgcgcaactattttcccttccccgttctgtttgcttgtactactactctaccgctagtcctgcatagcattttagctagaacacaacaacagccaaaaaaaagtattgttgcttgcttcgacgcttgccaccacttccattccatgccgtccgtccgcttccttcctgtgtaatcctcctccaataatagacgtgccatgttgcatcctctattcctctgcattgtataaaagtggtgtaattcttttgctacgcctccaatgtctgtggctttt

SEQ ID NO: 67913 - DNA, 1458 bp, Zea mays
  Clone ID: MRT4577_161932C.1
tgggtccctcgggccggccgggatccctgcgatacttcagacagctcttcttgcgttgcctactaagctctctctctctctctttctctcttgtgttcttgccttctgcctactacgagtgatggccagcctcactgacctcgtcaacctcgacctgagtgactgcacagacaggatcatcgccgagtacatctgggttggaggatccggcatagacctcaggagcaaagcaaggacggtgaaaggccccatcaccgatccgagccagctgccaaaatggaactacgacggctccagcaccgggcaggctcccggagaggacagcgaagtcatcctctaccctcaagccattttcaaggacccgttcaggaagggtaacaacatccttgtgatgtgtgactgctacacgccacaaggcgagccaatccccagtaacaagaggtacaaagctgccacggttttcagccaccccgatgttgcagctgaggtgccatggtacggtattgagcaggagtacactctccttcagaaggatgtgagctggccccttggctggcctgttggtggataccctggtcctcagggaccatactactgtgctgccggtgccgataaggcctttgggcgcgacgtggttgacgcccactacaaagcctgcctctacgccggcatcaacatcagcggcatcaacggcgaagtcatgcctggacagtgggagttccaagtcgggccgtccgttgggatctctgccggcgacgagatatgggtcgcccgctacattctcgagaggatcactgagatggccgggatcgttctctccctcgacccgaagccgatcaagggtgactggaacggcgccggcgctcacaccaactacagcaccaagtcgatgagggaggccggtggctacgaggtgatcaaggaggcgatcgagaagctggggaggaggcacagggagcacatcgccgcgtacggcgagggcaacgagcgccgcctcacgggccgccacgagaccgccgacatcaacaccttcaaatggggcgtggcgaaccgcggcgcgtccatccgcgtcggccgcgacaccgagaaggagggcaagggatacttcgaggaccgcaggccggcttccaacatggacccctacgtcgtcaccggcatgatcgccgacaccaccatcctgtggaagggaaactgataaaaccactgttcttctcctgcacgcatgcatccgccccgtgctgtcactttttgtttttcaaatttcgattcccgtcctaaagtttgttaccacttattattacggtctccagtgtactgctcggaaagtccgaataaaaacggctctaatgattttgttttttttaaaaaaaaatttgccttcgccataggtgtacgattggctgcgcttcccgtttattgggtactagtacaattgatatgaatcaattgccattaacg

SEQ ID NO: 67914 - DNA, 104 bp, Zea mays
  Clone ID: MRT4577_161933C.1
ctcgagccggcgaaatgacccgcgaccgcgaccaggtcattactgcgctgaagaatacctggacatgaacaagctggcgctgggcgtggtcaagccgggcggcc

SEQ ID NO: 67915 - DNA, 2438 bp, Zea mays
  Clone ID: MRT4577_161934C.1
tcgaggggccggccgggagaaaaaaaaaaaaaaaaaaaaaagtcctcaatctcaatcccacaccaccaccacctcctccggtccccaacccctgtcgcaccgcagccgccggccatggcctgcctcaccgacctcgtcaacctcaacctctcggacaccaccgagaagatcatcgcggaatacatatggatcggtggatctggcatggatctcaggagcaaagcaaggaccctctccggcccggtgaccgatcccagcaagctgcccaagtggaactacgacggctccagcacgggccaggcccccggcgaggacagcgaggtcatcctgtacccgcaggccatcttcaaggacccattcaggaggggcaacaacatccttgtgatgtgcgattgctacaccccagccggcgagccaatccccaccaacaagaggtacaacgccgccaagatcttcagcagccctgaggtcgccgccgaggagccgtggtatggtattgagcaggagtacaccctcctccagaaggacaccaactggccccttgggtggcccatcggtggcttccccggccctcagggtccttactactgtggaatcggcgccgaaaagtcgttcggccgcgacatcgtggacgcccactacaaggcctgcttgtatgcgggcatcaacatcagtggcatcaacggggaggtgatgccagggcagtgggagttccaagtcgggccttccgtgggtatttcttcaggcgaccaggtctgggtcgctcgctacattcttgagaggatcacggagatcgccggtgtggtggtgacgttcgacccgaagccgatcccgggcgactggaacggcgccggcgcgcacaccaactacagcacggagtcgatgaggaaggagggcgggtacgaggtgatcaaggcggccatcgagaagctgaagctgcggcacagggagcacatcgcggaatacatatggatcggtggatctggcatggatctcaggagcaaagcaaggaccctctccggcccggtgaccgatcccagcaagctgcccaagtggaactacgacggctccagcacgggccaggcccccggcgaggacagcgaggtcatcttgtacccgcaggccatcttcaaggacccattcaggaggggcaacaacatccttgtgatgtgcgattgctacaccccagccggcgagccaatccccaccaacaagaggtacaacgccgccaagatcttcagcagccctgaggtcgccgccgaggagccgtggtatggtattgagcaggagtacaccctcctccagaaggacaccaactggccccttgggtggcccatcggtggcttccccggccctcagggtccttactactgtggaatcggcgccgaaaagtcgttcggccgcgacatcgtggacgcccactacaaggcctgcttgtatgcgggcatcaacatcagtggcatcaacggggaggtgatgccagggcagtgggagttccaagtcgggccttccgtgggtatatcttcaggcgaccaggtctgggtcgctcgctacattcttgagaggatcacggagatcgccggtgtggtggtgacgttcgacccgaagccgatcccgggcgactggaacggcgccggcgcgcacaccaactacagcacggagtcgatgaggaaggagggcgggtacgaggtgatcaaggcggccatcgagaagctgaagctgcggcacagggagcacatcgcggcatacggcgagggcaacgagcgccggctcaccggcaggcacgagaccgccgacatcaacacgttcagctggggcgtggccaaccgcggcgcgtcggtgcgcgtgggccgggagacggagcagaacggcaagggctacttcgaggaccgccgcccggcgtccaacatggacccctacgtggtcacctccatgatcgccgagaccaccatcatctggaagccctgagggctaaggcggccgttccgtcgcgttgcgttgcgttgcagggtccccgaagcgattgcaaagccattgttccttctgttccgtttgcttattattatcattattatcatctagctagatcatccgggggtcaggtcgtcgtggtgtgccaaaacagaacacagaaagaggaagaagaaaaaaaacaagacgtgtggcgttaatgttatatcatccaaaaaaaaaaaaaaaaaagcggccgcttttttttttttttttttgttgaaacagggaaacccatcactttatttattgcatgcatgacaaggccagactgaattggaacaatgcgttattagccacggtgctggagagtatgcctccagaacctctcgtggcggaaaaaacagaacattttcggttccaaaccacacaccagttttttatgggctgcacccacatcatgaggcccccgatttctaagctggcgt

SEQ ID NO: 67916 - DNA, 463 bp, Zea mays
  Clone ID: MRT4577_161935C.1
cccacgcgtgccgctacagcttcggggtcatcctactggagctgatcaccggaaaagccagcagagcagccggcgtccgacgacggctccgtcgacatcgtcaagtgggtgcggcggcgggccaacgtggctgacggagcgtcgcggatactagaccccagcatcgccagcgcggcggcgcagaaggggatgcaggccactctcgagctcgctctgcgctgcacgtcagtgatgcccgatcagagaccggccatggatgaggtcgcccggtcgctgcaggcactatgtttcagcgttcatccacaggcgccgctgctcacttaaatcgctcaggactctgatggcacttcacagtatctattactgcataggccttgctttttgtacatacatggcgataggatgtagggggatgcaaacataataataaagagaaataaaggatcagcatgatctcagctta

SEQ ID NO: 67917 - DNA, 810 bp, Zea mays
  unsure (1)..(810): unsure at all n locations
  Clone ID: MRT4577_161936C.1
gggtacctcgaggccggccggggtcgtcttaccccaaccacatcctcccctcattcctccttgggttcccagcccgtgcgccccgcctgtcgcagtcgcagtcgcgccgcagccgccggccatggcctgcctcaccgacctcgtcaacctcaacctctcggacaccacagagaagatcatcgccgagtacatatggatcggtggatctggcatggacctcaggagcaaagccagggtaagataacagattcccagcactgggaggaccccccgggatactggtggttgtgactcgtcgtcacctatcacttatccctgagctcatccgctgatctgttatttggcttatacatacatcagagctctgctcaccactatcactgcaattatttttgtttttctgttctacttcgtagtaaaatcatactgatctggttggttctggtgcagaccctcccgggcccggtaaccgatcccagcaagctgcccaagtggaactacgacggctccagcaccggccaggcccccggcgaggacagcgaggtcatcctgtacccgcaggccatcttcaaggacccattcaggaggggcaacaacatccttgtcatgtgcgattgctacaccccagctggcgagccaattcccaccaacaagaggtacagcgccgccaagatcttcagcagccttgaggtcgctgccgaggagccctggtatggtatcgagcaggagtacaccctccttcagaaggacaccaactggcccctcgggtggcctattggcggcttccctggncctcaggtccttactact

SEQ ID NO: 67918 - DNA, 480 bp, Zea mays
  Clone ID: MRT4577_161937C.1
cgcctgcgggtccggtccggaattcccgggtcgacccacgcgtccggcgagctttcagcgcgggcgcgagcgcgcggggcgcggggtgggcgcggccgagcgggtccccgagccggtccccagcccggcccgcgaccccaggcctgccgcgccgcccgctccggactcggaggcccttgtcgcccgctgcgccccgcactcgcccgctcgccttccttctcccctcgctctccggccggtcgggcgggcccccgagaccccgtcgggtccaggctggtggcaggcgggcggtcaggcccgggtggcggcctcctcgccatgtcctcggcccgcgacaccagcagccgcttcccgctgcacctcctggtctggaacaacgactacgagcagctggagaaggagctgcgggaccagaatgcagaggccttggacccccggggtcggacattactgcaccttgcagtttctgtggggcatgtg

SEQ ID NO: 67919 - DNA, 294 bp, Zea mays
  Clone ID: MRT4577_161938C.1
aaaaaaactctaaaggaaaagacagtgagaaggaaaggatcctatgaaggtacatgagacatacacgtgattaattaatggtctcatacattttgttttcttaaccgttttttttccttttctatgtcctttccttcctccatttcaatactacctttccacccttacctatttccttttgaaacaaaacctctttaaggaaataaatctctatcaagtgatatagaacagtcaaaggaaaagtagatttgcgcagggttttaggatgtggaaataaaagaaaagaggggcaag

SEQ ID NO: 67920 - DNA, 280 bp, Zea mays
  Clone ID: MRT4577_161939C.1
ctggcccctgagggctcccacacggaccttccagagatgactctatcaacaccctacaaggggctagaatgttctgtcaatgccggaatgatttgctcgaaagaacgcgcttatcgccgctttttcttacaccattgctgactctatggcctcctcacccgccatcatgaacgacaggagcgctagacatgctccaaggactcattacactctgatcgcaagttgcacgaataccatctttggagaatgatgcgcatgagcactgattaccgatatttgt

SEQ ID NO: 67921 - DNA, 830 bp, Zea mays
  unsure (1)..(830): unsure at all n locations
  Clone ID: MRT4577_16193C.1
gtatgatacattgatgctacacatgctccctggccactcctcattttcaggattatgacgtcctctgtagcaggaacaatggatattgagatgcctttaggcaacaacctgtggagcgagaacatgggtgtcgatgaagataatgaagctatcacccgagccaacaaagaaatcagtgcagagcctactccacttgatcaggacagcgagtcgacagagcaagcggaggatgtcgtggacttgacggagctgaaagagaaggtgattggggctgttccttttcctccacagcgcctcgacggctggatgcagcaatggccaaccatctacgtggtccccggcgacctagccgccggaaaaacggacccctacgcccccgccaccgtctgcttcgagccgctcttcggtccggcgaggcgtgtgacggacggcatggcgaagctggagcgctacaaattgtgctgtcttcgcaagctcatcgtggggcgcagccctagccctgcaggaactggaacccgacctgcagagccagccgtgtggaagccggaggtgcacgaaccgatgcttcgcagttgcgtggacgcgatgacaagactgctcccgagaattcgtgcttcctacagcatcgcctcatctatggacaccatcgctggcgacgaaaacaccgtgcgagaagtcaagatgctgctctaccncaaccccgaggtcgccgccgtcatgggatcaactctggctgagaaatgctgctggacggctgcttcatcctccaccgnctgctncagatggcaagcagagcagcagggaaacgctacgacgacgacgacgatgac

SEQ ID NO: 67922 - DNA, 459 bp, Zea mays
  Clone ID: MRT4577_161940C.1
atggccaataagggcaaggcgacgttcgacgtcaactacaacccggaggatgggcccgaggcgtatagcaacctcgccgtctacagccgcctaagtgagtacattgccatgtcacgggaggtctatgtgccagattacgatccgaggaccatggacatcgacggagatgttctaatgagggtcggaggacacagaggcatgggtggtgcgagcaaggaccacgagctcaagcccagccatacgacctcggcaggacagctcacatcattggatacaacaactccaggcccagctagaagaagagaggaggaaacggcaggagatggaggcgaggatgatggcggagcggatgacccgtttggcagatcagcagaggatggcggagatgttccagtacatgcagagccttgccaccgcacagggttttgctccaccacctccattgttccctccagctga

SEQ ID NO: 67923 - DNA, 359 bp, Zea mays
  Clone ID: MRT4577_161941C.1
ggggccgaacccatcccttattccccggttttttttttattaaatagcccggtcccgacaacacgacccgacttttttggggcgggccacgagacccgcgcccatgtgggggggcccaaccgaaaagggccccccccccctgttagcgcccgggaagggcccaaaaaaggcgggagatcaacccacgtgcgccccttcatgcatgcccattggacacacccacacctactaaaagggggggacggaaacccccccggaggggacaacccttccccccttgggggtgtttatttaacccccccaagggggggttttaaaaaaaagggaaaagaaccccctgtgggccttgggggtggagc

SEQ ID NO: 67924 - DNA, 443 bp, Zea mays
  Clone ID: MRT4577_161942C.1
cagaccttcaccatgggcgtgcatggctcaagcgagacagatctatgatctatctggcatttgacccctctatttaagtagagagtggacaactgagagggtcacaaggtagatgatgaaccaacggcaaactggcggtctgctgcttcttggctgcagcaagtgctagtgctaaaaggaccggaggtgctctctgatcggtagccaacaaccgcgcgccgtcgcaggcagcatgaccaggccgtgggcggggatgggaatggcgggctctggcacggcgtccgagccggccgccgacgtcgtcgccagggacgacgcggcagcggccacgaggggcgccgacgccgtcgccaccgtcaccaacgccagcgccatctccttcgggttcgcggccacggcggtcctcgtctccatgttcctcctcatggccatcttcgagcacc

SEQ ID NO: 67925 - DNA, 399 bp, Zea mays
  Clone ID: MRT4577_161943C.1
acttgaggtgaatatattgacaagaacacaattcgatcatagccacgacatcaaacaaggacggaaaatttattcgtgaacaatattggttcacttcaccaggtgacagtttcctacttgtagctactgcttgtgctgctgctacttgctaaccaaccatttgtaccataaactcgacagcatcccgaaagacgcctttccggagctctcatttggcggatctgatgagctcctcgctgaactcccagagttgctttgccaaggcgtcactcttcgcgtgcgcgctcgtcttctcctcgttgcagtcggcaaagtatttgcctgtcatccccttcagctgagggttgaggcctacgtagcaagtagttgccgctccctggggtacattcttccagaaca

SEQ ID NO: 67926 - DNA, 461 bp, Zea mays
  unsure (1)..(461): unsure at all n locations
  Clone ID: MRT4577_161944C.1
accgccccgaaanncccgggccgaccaacccgtccggttgaacttaagtttgttggactgagggtttttaactcttactgggtgaatgaggatagaccctacaggtcctttaagataatccttggggactttgccaacaaagccataaaaaccgacccggggatcaactggttttgcaaccttgtgcacaagaaccggaggctccggggcttaacttaagaaggcaagaagaaccgtggcctgcttggcaagggccaaacccacaacaggaccaggccctaagggagagccacctggaagcgcaaccagaccttttccttccgccgttaccgttaagaaattcgtcggttgcttggttactgccattgtccgatcattccaaataaaaaaaccaagcgggcctgtttttggttgcattttaaaagttttgttatttgggttcttggcacttttaatgttag

SEQ ID NO: 67927 - DNA, 657 bp, Zea mays
  unsure (1)..(657): unsure at all n locations
  Clone ID: MRT4577_161945C.1
ccggccggggccacaatcaaggcagagaataaacagaagagggaggcagaggttctggcagcacgcaagaagtgtcgtctggcaatgaagagggagaagaaggccgagcgtatggctcacgcagggccagggaggagtatctccccctacaccaacaaggaggataagacctccatggcctctagtggatctgtggtcctggtgttggtgggggcctcagctcaccgcgctggtgccactgctgaggctagctccaacgctccgatctaggaggaggaaccaacggtggagcccctgcgcttgtggcgccggttgagcgtcgcaatgggggagggtaacctgcggcagcgtcctctgtgcctgatgcgttgactgggcgccatgaaggaggaccaccacaagcttctttagggacgattactttgtcatagaagatcctcttcaggcgggcgcactcctccaagtaagccatgtccctttacgaggtttttcatccttgcctccagtttttcattcggttgtcttgcaagtgtgtacgtgtcgcataagtccatgaaggacataactcgcatagcaaaggagggcacctcgccttcctaggcgcttatngcacaacaagagctatagtgattttcaaaaaaaaaaaaaaaagcggcc

SEQ ID NO: 67928 - DNA, 195 bp, Zea mays
  Clone ID: MRT4577_161946C.1
accttcactgaggcgaacaccaatcaaagaagttaaattactcttatttggcaaacaaatactaatatcttgtcactggcttctactaatatagatggtgcgactcattccaatttgctggctgataattctgtgaaactttccgtgaagccattaatcggcaccatcattttattgcactacaaatgttgctca

SEQ ID NO: 67929 - DNA, 377 bp, Zea mays
  Clone ID: MRT4577_161947C.1
cccacgcgttcgtcaactcgtctgcaaactcttactacaacgcttactctaacatgttcgttgttgatgataacaattatggaatgataacaccagattagcgagaccactacttgtaccatggcatgggtatgagattactatgatatgataccatttatcatagactatgatatcactacaacgctattgatgcttaaatggaaggtcttgatggatgctatgcatgagctcatgaaatagctttgacgctttatcgatacaaacgctagctgaacatggtattctttgaggacgatagtgcttgctacaatattcaatcgactgctgtatgctacgaactggttgagctaaacgcacatcgaagcttactctat

SEQ ID NO: 67930 - DNA, 322 bp, Zea mays
  Clone ID: MRT4577_161948C.1
gtccgtccgtattccaggtcgaccacgcgtccgctgaatgaaagtgggttaaattggagctttaataactaaaaataaagaaccataatacatggagaggaaaatatagaagataaagaggaaaaaaattaccacagcgactaaaacaaatgtatgggggggccccttctgcggaatccataccttctgcccccgggcagtcgcaaacttgctctctcttttggggcgccttagcacaattcatgggcgcttgtgtacaaactctgggctgggaaacgccctgtctataccaaccgtattctatttgcgctcctgccccttt

SEQ ID NO: 67931 - DNA, 246 bp, Zea mays
  Clone ID: MRT4577_161949C.1
aatgtaaagagatagcgtctgacttgcaaaagtaataagaggaaaaaagggcgaagtcccgcgcacacacattgatcgacaaaacaaggcccaaaacccaaacgcggtctaataaatgatgggcaaattgctaaggacctctttttttcttgcttggacaacacggatcaaaaccttatgtttggtgttggacagaaaaaacaccttggggggggggtcccaagaatgccccttttttgggggggg

SEQ ID NO: 67932 - DNA, 128 bp, Zea mays
  Clone ID: MRT4577_16194C.1
gtagctacatacctacggccgataccatacatgtattgaatcaaattgttaaaaatggactaaacctagtgctgctcgtgatcccgccccgtgcccaaatctgaaacatgtaaaaacgtgtaataaaa

SEQ ID NO: 67933 - DNA, 222 bp, Zea mays
  unsure (1)..(222): unsure at all n locations
  Clone ID: MRT4577_161950C.1
gtccgagttggagcatacttaatcacaccaagtgaagccaccgagcaacgactgaacaacaaganctttcaagagattagggctccttgctcttcgtgggctttttgtgagcgcaacaaatgcgtgcattattccacaatgctcacttgctcctagagccagttataccacagttgttgcgaccagatactaggatgggcttaagagctcctagctgtgcaa

SEQ ID NO: 67934 - DNA, 250 bp, Zea mays
  Clone ID: MRT4577_161951C.1
gtatgcttgattcacactgctgatttggcattgtttgaacacattataacgaatggtctttccatactcttagcaagactatatgttgctttatgtactatctatttacactaacactgttcttttttacgcttaaaaataaattgcatcttcctactttctttgtgtatgactcctcttctctatcctatttcttttctacaaaaaaaaatagttatacactatacctattagttacctgcaagtttta

SEQ ID NO: 67935 - DNA, 195 bp, Zea mays
  unsure (1)..(195): unsure at all n locations
  Clone ID: MRT4577_161952C.1
cactcctaagggcgaattgggatcatcgaggccggncggggatcaatccatccgacttgtttatttcagccctgtggcgttcatctcgaagtttactttgactcaccaccctaacatcgcctactccgnagagntacacagnatctatgtaaataccacatcccgncnaaagntactatcgagatgnntaccatc

SEQ ID NO: 67936 - DNA, 998 bp, Zea mays
  Clone ID: MRT4577_161953C.1
atgtccttaaatggaatcgtggttgtcgaactgaaagaacattgtccttttattgtttttaaaatttaatgaaatttgtttaatttgttcattattattatttgtaactagatatatattatttttaatgtttttttctcattttgcttaccgtatttgaattagaacacgtgtttcgttgtatatggagtctacaaaaataaaagttgatgtggcactgatattgtgtaggctgacgaaataggtcgtgcactgaaaagttctagtagataaaggtcgatggtggtagataatgtctgatcgatagtgacgtggcagtagatatagaccttagacattagaaccaaccctacaacataacttcctcttgatctctaccctccaaatcagatccaaaggctaccctttgaaagggaaattgacttaaacatttcctataatcgattttggtatttgacaaacatcacaaataatatgaactaactagtttgctctagttgatcatttcacaggtgcataagttcatctacaagtattctaaatcgactgtccggaataccgtagattatttcggacaggagaagttttttgggaaaatcacccaagcgcggactgtccgggcccttgcggtggaccgtccgcgacacccaagtggcctcggacaggaacactgcataaacggaagtcaaacactgtggatcgtccgatggaaaagcaagcaccgtccgggaccaggcgcggaccgttcggtcggcacaaccaaaaaccccgaaggtgacaggttcggtaaaatgaattatagcgtcctcacggaccatccggggtacacgatcggaccgtccgcgactgcctttatctgacatctgacgacacatttaatgcattatagccgttgatagagtcgttactgctgaccgttgggatttcagtcgtcgatgtacaggggcggaccgtccggaccaggagcgcggaccgtccgcggttggcagaaagaggca

SEQ ID NO: 67937 - DNA, 541 bp, Zea mays
  Clone ID: MRT4577_161954C.1
tcgagcggccgcccgggcaggtacaagctttttttttttttttttttttttttttttttattttttttttttttttttttttttttttctttttttttctttttttttttttttttttttttttttttttttttttttttttttttttttttttttttttttttgaaaaaccggagggtccccttttccgacggaaggccccccccccaaaaaaggggggaaaaaaagggcttttttatttaaagggattacaaaatttttaactgcccccaaaaagcccctttttttttttaaaccctttaaccccccccaaaaaaaaatctgaaaaaaaagggccccccccctcccttttttaggattaacccccccttaaaaggtttgcctataatagggtcccaaaaacctttccttgcaacccccggggcgaaaccggcttttatttcaaccccttcctgaaacccccccccccctggacaaaaaaaggcacgaagcgacttatttgtatgacccgggcccgacccaccctaggggggaattcccg

SEQ ID NO: 67938 - DNA, 612 bp, Zea mays
  Clone ID: MRT4577_161955C.1
gctttgccataagagaagacctttatgccgaagccaaagccccctgtaataatccatatactagaaacacatgattaatcacatttttgaggacctttggaataggaaggcccccaacataggctatgccacaaagaaggccacaaggcttaccaatgcaaggcgaagactggggataagcaaaagccatcaagcaaaatctccaacacctacatcaacaaggtggataaaaaggttgctaccccatacttaatcaagaagaaaaagaataaaaaggtgatagcaatcatggccaacaagcaagccaacaaagggaaagggggccaaacgcatatgggtgccaaaggaaattatttcaaccatgaaaagcaccaagaaggtttggatcccgagagggaagtaagaagtccgatggacttttgggaatttggagacttggcaaatttgggatgtatatcacgggatgcatcatattggatcaagtctattgtcaagtgcgttagtgtatactttggacccaaatttccccacccatgtctaaagtaactagatttattgaattttctttttagatatgtgtatctattttcttggatctagtttttaccttaa

SEQ ID NO: 67939 - DNA, 706 bp, Zea mays
  unsure (1)..(706): unsure at all n locations
  Clone ID: MRT4577_161956C.1
caccaccaccactcgcccgcgcaattcccaaatctcccaggggcctcttcgcttacctcccgcccgactcctcgcgaccccatcgcctcgcctaaacccgtcccgagccttgctcgtcgcggagcgccacaaccacgcctcgccgccgccggcgagcggtcaagcctaggggctatctccgtgtgatggctaccgcgccggcctccgaaagctcgaccgcctcctagggcggcagttacccgaggctgagctcgtgcgcgcgcgtggggacccccgtgctcagctcgcgaaaccctaggagcagcaggaggcgaggcttggctggcggcgatggacgtggactcacgcatggcgacggagtccgactccgactccgacgcgcgcggcggcagcgggtccgggagcgagacccccacggcgtccccgtccccgtctgcatccccgtccccatccgcgcccgggacgcccacggccgcggtcgcgtctccggcgccggttgcggggcccaggccggcgccggggtatacgggtggtggacgccgcgatggacaagaaggaggacggaccggggtcccggtgcggccacacgctcacggcagtgccggcagccggggaggagggctcgcccgggtacgtgggcccgcggctgatactcttggtggttgcaccgcgctcgagggcaactccgnccaccgncctcgtcggc

SEQ ID NO: 67940 - DNA, 225 bp, Zea mays
  Clone ID: MRT4577_161957C.1
tgttcggcaccaccagatctggatccaaacggcggctctgtttcgtgcgctggcccgtctccctccgtctcgtcagcttcgtgccgtgcgcccgtgcccgtgcgtgccgttgccaacccgttccagctttgcccgtggccgcggccgctaccattgaaccaacttagcaaaggtcgcgttccacgttgccttggttccccaaccctgatgtttccatcccttctt

SEQ ID NO: 67941 - DNA, 496 bp, Zea mays
  Clone ID: MRT4577_161958C.1
tttgggctgatttatgtgcttgtcgtagcgtcatcctctgcccatcgtcgtcccgagcaaaaccgttaaagaaacctccggacagaccggccgtacgggtaaagaacccaaaagctctagacttatcggaggaaggtcgtaaatcgggcctagccactagcgaaggatagcatgagaagacaaagaaacctactctgatcgtaagaagcgaaggcgttataacctcgcacggaggcggttgattatagtactctagaagagggcctccctccgaattcataaccacaatagacgccagcatgctaacgtaaacccggtaagaggaagctcccggattagccactcgcgccaaggagcccaggatagagagcgaagtcgcggaatccgtaaacgacatctatcacggcccagtcggcgttgcgactcttaacgactaagagaggcgcgagtgtaccctaaaggtctcctatctcggcaccacccggacaaaccgtct

SEQ ID NO: 67942 - DNA, 332 bp, Zea mays
  Clone ID: MRT4577_16195C.1
attcagggcccaagaggaagttgcaatccttcgttttatcatcaacccaagaagggaggttatcttcagacgttaaagtaaccaattaatttgtcaactggaagaacaactgaagggacaactacagtctcctaattgcgtcatatccggctcaactaataatgatgagagaactctacaacccaaaggcatgcatctcataaacaaagtaggaccagcaagcctgcagagagagcacacaggcgaattaagactcgctactgagaacacactctgtgcacatctacacagctgatagagatagacacgccgctagagatttagaggaagaa

SEQ ID NO: 67943 - DNA, 294 bp, Zea mays
  Clone ID: MRT4577_161961C.1
tagtcagggcggccttccttttttttttttttttttttttttttttttttgggtgggaacccgaaacgaaaggggtttattcttttaactctcaaaaggaccctcccagattaggccaataggacactttttaacaaccgatgcctcatccattctacaattctccatttttcggtttcatatgtaaactaggtattggaaaactttggtccggggctgatgacattactgggcgcaaatgttctcataaggagggttttgccagtggttggttctcattggaactgtatgttg

SEQ ID NO: 67944 - DNA, 694 bp, Zea mays
  Clone ID: MRT4577_161962C.1
agttatacggttctgcccttcggcatctgaaggaccatatagtacatgactacatggtgccggtcaaccgccgcacgcctggacgttgctctggcactgcacactagcgacttcaccagcgacgaggagcaccgctgactgctaagagcctaggatgatggtgacgaccatggattctcaggcgccaacgaacttagatggtgacccaggaaggtgaaaaagatgctcagcataagagaaagctaactagcaaatggaagcccacgaccaaaggcacactgaagagaacctaccgagtacgttcaacggatgaaggaaggcggatcctgaaggagattgcttcagttctgtcccaagatgatcattttgtggatgcttcgtctcacaagggttgccaaattaggagggaaagtgctcatggcgaaagtgtttgctgctacaacgtgagagcgttgtttcgatgagccttccaactcctcacttgcttctggagataacaccgtttcctgctggacaacttacggacaacgactaccgtaaggcagagaggcttgagatggtcctgaggctcagcacttctatttaaaaaacctggggactgatttttcaatttcccctaatacttaatttgcccaagttgtaaattgtcttcctatgggcctgtaaattgacgcagttggcaaagaatcacttg

SEQ ID NO: 67945 - DNA, 760 bp, Zea mays
  unsure (1)..(760): unsure at all n locations
  Clone ID: MRT4577_161963C.1
ggtaccctncgaggtcccggcccgggaaaaaaaaaaaaaaaaaaaaaaaaagcagcggtgctcctctgctccttccgcttcttctccctggcgctcggccgcctctggtccccagcagcggagctgcttcttccccagtcaggcgccaggccttcttctctccagctcgtgggtctccctcgccatagtcgcgcgcagttccctgctcggcagcctccctgctcgccggcagaagctcccagccgagcagctcctggtctccagccttcttctatgcgcgtcctgagctcctctggtgccgcatccggctccctgggcgcttggcctcctgctcgccgcgccctaggccctattccagctcgcccagccgagctcccttgccatggtcacgccccagctcgtcttccccagcacgccgcgctgtagctccctgctcggcgtccttctctacgcgtctgctccctcgccgtggagttctctgcgctctgcccaaccccgatgcccagtcctcgagctcggcttttctcaatgaactcgccccaaccacagccgcgctccctgccgagctccctctgctcgcgcgcgccctgcttccatggccgcgcgtccctggctcggctctgcccagcgccgctgtagccgagcttgtccctggcgcccgtgtttcctgctcctaacgccgcgtcctcccggccatggagttcggcgggagcccccccgtcgggctcgtttctgatgctcgctccggccatggacgcta

SEQ ID NO: 67946 - DNA, 605 bp, Zea mays
  Clone ID: MRT4577_161964C.1
cggtctagtttacaatttagagctcataatcacctcatattttacaactcactactttgttcataaccttcaacatactaacacaacatcattcggataataatcaacataagaaaaaatatagacttttgcttcatcgtcttctaatgtcatgattatctcacgattttcccaatcttcagtaatttgagaccaaaatgaagtacattacctcataaacgacacctcataagtttttagtacacttctccatattcattggaccattgaaaataccatgtactatttgtttgtcttctcgtagcagcctagaaaattgttgaccaatgcttgaattcatctagcaactagtacatgcgtgcaatttcttcaacctctatatgttggatggagcactaggagcagtcaggatgagttcagttcgagacaatggggcaaagtcaggcttgacatattccaatacagatagtcatgtattcacatcctccctaagtagtttggttacttccaacattacagaacgttaattgtaaaaggtccaaaggtgaaaataagttcaagattataatatggactcctctactaccttatgatctttgaccatg

SEQ ID NO: 67947 - DNA, 218 bp, Zea mays
  Clone ID: MRT4577_161965C.1
gacttcctgcaaggagcttgtacagagactatgagcgccgtgaaagtccatgcgcttactctcctgggcatcctgaggttctaacatgcgctccaggtcataactgacacaatagtgacttctttcaagcgggaccaatacggagatgatatgtgctggcagtagatgcgctccatgcaggacccacctaagtgtctgccacagccactcactagctg

SEQ ID NO: 67948 - DNA, 353 bp, Zea mays
  Clone ID: MRT4577_161966C.1
cgttcttcttccaaaacagtccaggtcccacaccggagccaggcgtgcaagggtcgttgctcgcaaagccgccttcgttgctagtgcgacggctttggagatgattgttcaagctgagaaggcgaacaccgaggctgccaagaaagctcctagacctctgcgtcgtgatgtatgatatgcatttttcttcgatcctaaaattactttgtcatttgaaataggatcttgatgccagttctttattgttttaagtggtgaacaaactatgtttgttagcaattttatttggttgaattgtattaaaaaataaaaaataatattatacaaatcctaaattaactaaaaaactaaaa

SEQ ID NO: 67949 - DNA, 1399 bp, Zea mays
  Clone ID: MRT4577_161967C.1
agctactccgatccgtccggttcccagcacctgagcagctacgtatacctactagctacaacgggcctgccgcagatgcatgccagctaggcactagctcggcctccgggcggtcggccggcccacaatattgtccttgtccatctccgattctccataaatcctcgctcgcctgccaccagaaacgaccttctgcacgtacgcacggtggctgcaggccggccatgagacgacctcacgccgccgctaccgctctcgctgccctcctcctcgtcctgtgcctcgccgccgcgttgacccgccacggcagcggaatctgccagcaggcggggaggacgccgacgaggaagatgctgctggccatgacaagcttcgacgacgacgacgctgccgcctcgccctcgccatccggtcaccaccgccatcctcaccaccaccaccaacaccaccaccaccaccaccaccacgcgggcaggcggcgatggaaccggcggcaggggaccattccaccaccgtcagatgctggcgaggccgaggcggtcgacccgcgctacggcgtgcagaagcggctggttccttcgggccccaaccccttgcatcactgaggtgtgaggcggagctagcaagcaacaagtcgtctcggcgccggtggcacccgcaacgcaacacaattattagcagcaacgccggccggccatgcgcgtgcgtggatccagcatgcagctttataattttcatggaggccgctcaactagcatgcatgcacaggctggttcggccttccacggtgagtatatatacctctgtctacgcgtggcgcacatcatgcatcttgctgtgtggatccgatcgatcgggttcgagccaatcttttgttgtggagttggagctactagctgaactgctgacgaagcatgctgcgtgtatttcgctcccgcgtgtcagcaggcatcgcacaaccttattaactagtagctagctatagtattattcgtttccattcgtgtgttcatgtatgtaaatgtaatctttgtcatctccagctgcaaaagcaagtgaaacaaaaggagagagagagggtaattgatcacactagctagctacatatacacacacacatacaacgatcgaggagagagcatatatgcctatgcttggcttcctctttatttaattaattagtttccattccgtttccaattcgttcattttttttttctgtttcttgatcatgatcttcaaacaacgaatcgatactggtgctgctgtaattctgatgatcatccgcagcatatctccaactccaatgcaaattaaatttcgggtccgctataaataaatctctactactaattatgtagctattgtaggcgtgcacactccatggttctgccgctgc

SEQ ID NO: 67950 - DNA, 211 bp, Zea mays
  Clone ID: MRT4577_161968C.1
cctgaatccggtcgaccacgcgtcgaaaaccgatcgctgcgtcagtcctttctttcgacccgtgcaccagggcacgtcaatgcacaatccggttggtcggcgatgcgagacatcaaccccacacacagcgagaaggagtatggacacacagcgagaggcccaactgagtcctgacttgcagtggcgtgccagcggttgcctgtgcttacgc

SEQ ID NO: 67951 - DNA, 388 bp, Zea mays
  unsure (1)..(388): unsure at all n locations
  Clone ID: MRT4577_161969C.1
gggtacctcgnagccggncggggaggcattcactaaataacgagacgcagcaggctttgagcgtctctcatctcccacgcatcgcgccacggaagagagagagatcgccgctccccttctcggcgtcggaggtgcgggtgccctccctcctcgagcgagatctgtgtggccacagatctatcggacagaatggggaagatctgctgcataggggatggctatgccggtggcccaaccatggacgtcattgccctcaagagcccggacattgaggtcggcgccgttgacatctccgagcgccgcattgagggctggaacagcgacaccctcgcccttctacgagcctggccactatttttttgtttccccccgccagcgcacggaaccg

SEQ ID NO: 67952 - DNA, 636 bp, Zea mays
  Clone ID: MRT4577_16196C.1
ctcgagttttttttttttttttttttttttttttttttttttttttttttttttccccgggcgggggggggggaccaataaaacaggatataccggcaaattcggcccatatttaaccatttttctccttttttcccctggacgattaaaggcaaatggattcatatccaacatcagaggttcaaaacttccttggggggcggaaaaattatgaccccatcaggaacaaaactgttggttcaggggaacagaggcaggattccccatggaggcaggaacccttcgcggggggtcacttccagcaccaggaaagccagcacggccagcatcgccgaacggccattccaggtttccgggctttttgtccagccccactcccacacgattaccgggggggggagctcatcgcgcttcgagtcgaatgctgctagcagctcctccacgctcccgaggggaacaaaagactgccgaccctaaaaatgggaaactgccatggccccaacaaaagggaggctttcaataccggcatcagcaagacccgaaatgaaggggggttcccaacctagggcgggaacccgcccccagggcttgaggccaaattccaaagccaactctttgaactccacatggatttct

SEQ ID NO: 67953 - DNA, 407 bp, Zea mays
  unsure (1)..(407): unsure at all n locations
  Clone ID: MRT4577_161970C.1
ggacctttgggctggtttatgtgcttgcacaatctcgtattttactggagatctggagctgggggtgttagtgctctgttctgttgctagtagtagtagtagtcgtattcttaccttatggtccttgctgcgtgtcctgctcgtatttataaaggtgatggtgatggtagggggaggagacgaagtcgaagtagtcggagggttctccgggcggttcgatttagcctcttgattttaaggcatcgtcgatcgtgttattgnntattgttttattctccgggcggttccctccctccttccctctgcatttcgtctgaccctgttctgtttaattttgataaaagggaaggggaaaagtggaagagcactcgatccccgttattaacggtgcgcccccccataatgag

SEQ ID NO: 67954 - DNA, 626 bp, Zea mays
  Clone ID: MRT4577_161971C.1
accttcggcacgaggggccgccctgtagctcgcggccgcagaccggcgccggcgccggcgggtggaagcgacccaagggccatgaaaagcacccgcttgtaccgcgaacggggagtcgtacccgtcaccttccgccgcagcggcggccgcgcgggttcgcccccgctcccgctcccgcggcgggggcttcgccgcggaggcgaggtgtgcaggagcgggagcgggagcgggagcgggagaaggagcggacgaagctgcgggagcggcaccggcgcgccatcactggccgcatgctggccgggctccggcagcacggcaacttcccgctccccgcgcgcgccgacatgaaacgacgtcctcgccgccctcgcccgcgccgccggctggaccgtgcaacccgatggcaccaccttccgctcctccaaccaaccactcctgcctcctcctccccagctgcacggagcattccaggttgcttctgtggaaaccccagctttgatcaacactctgagcagttatgccatcgggacatcattagattctcaggtatcagccctacaaacagatgacagtctgtcaccatcatcactggactcaggtgtggcagaccgaacataaagactgag

SEQ ID NO: 67955 - DNA, 265 bp, Zea mays
  unsure (1)..(265): unsure at all n locations
  Clone ID: MRT4577_161972C.1
tnnnnnnnnnnnnnnnnnnnnnggggggaaaaaacctccaaattaatttttttgcccccccaaatgtttctttttccacccccagtacacaacagcctgccccttcttttcgcttgttttaaaaattacccaactgttactccagtcccatgaacaggtttccctcctaaaacaaaatctctttcggcgcatggaaccttcccccccggcaaatggtttcccggttttctcccggcgtgggggggagcgggaaaacttccccccc

SEQ ID NO: 67956 - DNA, 398 bp, Zea mays
  Clone ID: MRT4577_161973C.1
atcggtatctcgctaaccatacgaacgttgtctcaacccaagagcactcgcgtataggaaacgtagtcctggtcgggtctccgtggctcggcggcgtccactacttcaaggcattcgtgtatgcaattctcctgcgacactcaccttccgtccgcgcatcggaatgtgccagcggctgtcagcgacactatgcgaggtcaacggcctacaaggcaggcaggaggtgcgagatcgactatcgcacgtgcgacctcaagaatgacttaaatgatcaccactgatgatccttgggtttgtgagttcctctcaatgaagcatcgagcacactactagtaatcagagcacacacatgtaatgtgactctcgatttcagctgcgcgcatgcttcattctgtctt

SEQ ID NO: 67957 - DNA, 385 bp, Zea mays
  Clone ID: MRT4577_161974C.1
agcagtggtaacaacgcagagtactttttttttttttttttttttttttttttttctttttttttttttttttttttttttttttttttttaaaagaaaaaaaaattattagaggggggtataaaccaaacaaaaaatgggctactactacccaacaaaaaacattaccaacggcggaaaaaaaaatgtgctccaagaccccgaaaggtcaaaaaaaaacctgaagggctacagcaaaatcaatttggcgaaacgaacagcacatgaagcattaaccccatgctttacaccccgcgtactctgggttgttaccactgctaaagggggaattctggaaaaatccataacacttgggcggccggctcaaacgatgcatttaaaaggg

SEQ ID NO: 67958 - DNA, 114 bp, Zea mays
  Clone ID: MRT4577_161975C.1
attgtgggctacgtggaaacccctcgaggcctccggaccttcaagactgtctttgctgagcacatcagtgatgaatgcaagatgcgtttctataagaattggcataaatctaag

SEQ ID NO: 67959 - DNA, 126 bp, Zea mays
  Clone ID: MRT4577_161976C.1
acatgttaagggggtttatatgccaggggagaaaatcatttctgttttttgcacattgggtctcaaaactctaaagagctataacaaaagaaatgtatagggttcatgaaaaaggacacgttgcaa

SEQ ID NO: 67960 - DNA, 454 bp, Zea mays
  Clone ID: MRT4577_161977C.1
cttcttccaatacttagacaagtatattagtgcacaaggccaatttactaatacttagaaacatacctttgctcttgatttgcactttattcatccatggcataaattcacatttaagcacttgagttggcactcaatcaccaaaatacttagaaatggcccaaggacacatttagctttcacctcttgcatcaacacgcattccaaaccagtgtaacaagcatcacaatacaccgagaagggcttgtgcacatcaggcaagactaaaacaggcgctgtagtcaacttctctttcatcgcttcgaaggcctcttgacatttctgggtccacttgaactcaactttattgcctaacaacgctgtcattggtttctcaatctttgaaaacccttcaatgaatcgtcgataatatccggccattccaatgaagctcttgattcctcgaacatctgtt

SEQ ID NO: 67961 - DNA, 262 bp, Zea mays
  Clone ID: MRT4577_161978C.1
gttttacattgctacaccctatagtgagtcgtattcaaaaacgcggtcagggagcgggcgcaggaggggatgaggggaggacagccgaaggcgcgggtccacgggttggccggggatgggaaagtgaaaacgttccctgtgatcgcagtgcccaaggagaaacttgttgacaccaacggggcaagtgatgctttcgttgggggcttcctctcacagttgggtctatgcaagggcaatgaagactgcgtgagggcaggttgct

SEQ ID NO: 67962 - DNA, 777 bp, Zea mays
  unsure (1)..(777): unsure at all n locations
  Clone ID: MRT4577_161979C.1
gcatttagaaggagacccgaggaagaagcttcccctgctcagtggccaaaatgaacagagtgctcactgccgacgacggcaagcgatggaactggggggctagcgctttgctcactgccttcgtgatgaccgtgcccacgctcgtcgtcatcctcctcggcgggagcactgctggcgcaccggtggtctgggttaggacagccatggccggctttcggcaaggtccggacgatttctccttgccgtacacgagcacgaggacagcgcacgacaggctccacggcggcctcttggcggcaggatttgaccaggaggcgtgccacagccggtaccaatcggccatgtatcgccggaacccgggcaggcgacctagcgagcacctcgtctccaagctgcgacggcacgaagccgtgcagaggcggtgcggccccggcaccgcagcctactccagcgcactggagcaactcaagtccggcaagaacgccggcgcgtcccccgcggatccggagtgcaggtacctggtgtcctcttcgtaccgcgggcttgggaaccggatcctcgccgcggcgtccgcgttcctgtacgcgctcctcaccgaccgcgtgctcctcgtcgactaagcaacgagatgggcgagctgttctgcgagccgtttcccgacacgacgtggctgctgccctggnagagcttcccgctgtggaacttcagcttcgacacgcaggancggtacggcaggatgcgncgagaacggcgtgctcagaacaaacgacgacgtcg

SEQ ID NO: 67963 - DNA, 347 bp, Zea mays
  Clone ID: MRT4577_16197C.1
actttttcttttttccattagactctgtaggggcataaatcacaccactcttatactcgaaagtgctgtatacatatatgcaaatctacaacctaactatacatctatttctgctatatatattcccaattttacccttctccctatcaattgaatgctcgaggattatgccattgttccattcccctgtgctcatataaatctacacactgcgtgttacataagcctaaaatgctacagttcaaacccacaaaaaaaatgagagctgacttacatatttatctatcccaagcaaacatgctttccagttctgcatgtcatgtataacctgcatcatgccttcagca

SEQ ID NO: 67964 - DNA, 194 bp, Zea mays
  Clone ID: MRT4577_161980C.1
aaaaacagacggggccctctaagctgaattcctcgggcaccgtcctcagggctacgtacgctaccaaatatgtgtcagccagcaagccctacgacagaagcttcatgtttcgatgctcacttatgtctcctgctgctggcaatgactgtacaacccatggttgtgacagatcactaaaagcaacacaaaaccta

SEQ ID NO: 67965 - DNA, 1718 bp, Zea mays
  Clone ID: MRT4577_161981C.1
aactagcctccacctgccactcgacggccacagcagcaggcgcaatcagcagtgctgccatcgtcgtcggcttccaccaaccatgaagatgacctgtgcccgaccgcgcattcaggctcgtccggcaaccagtcccctgaacctgcaggaagaaatgctccattgtcagaggctagctccccgggaccttccgaatacagggtctgcagacccatcggagctcaggatgccgcgacacaaacagatgacagtgagagggatgttgctaaaacccatacttgcgtggtcggagtgtccatggatacgacgttagatgctgagattcaggaatgtcatcaaaggagctcactgctgtcaccaaaggtacccaagattgttcaggaatcaccggccctgtgttcctctgatgcttcaccgggtgtcagagttgagaccttggagtccctaataagagcagaagcctgtaggagaagtagctttagaacactagaggaggaacacatgcttggcccaattggtgtgaaactgaagccagccaatttgctaatgcagcttatcacttgtggatctatatctgttaaagaacaccgaggctttgggttcatcccaacgtacaggcctcggtttacacaagttgagttcccttcgtcagtgttctccactcctgtggcattgcgacaccttgacaaaatcccctgcaatacaagaacaatcgggacgagagctccagagtctgaacgtttcagtgggagcttggttgagaccaagatgcaggacgagtcaaggagaggaatcagctcactcaaacgctcatcatcttatgacgaggatagagtttatagagcagcacattccaaaagtgatacagaaaactcttgtgagtcaggtagtttcaggtgtcttccgcagactatcagaatcatatcatgtaagcaatcgagaaatggaacaatactctcccctttctctgatgtgagaaacagctctagtcaacaagaatatagtactagatcctcaccactgggttcatcaaagagtgcaagcaataggatgactgatccatcactgggtaaagtagattcattccacaaggaaaaggacatgatcaagatcgaagaaaggcttccttctggagctcgggttataatccaatctgcacctttgtgtgaagatagtgatggcagcaatgaatcactgtaaggggctgtgttacatatgttttttttctttttatttcattttactgagaatgacatttgttggaatttggtgcttgtgtgtggcatagcttttggagtaggttcaaaggtattgattttgtaaactgtgaatgtgatagtcaacattttctcacaccttgaagaagagaatactttatcttgctttaaaaagtctactaattaataattcctcgtgcgcatgtttctgaagtctgaacgtgaaacgatagtatctggctctgaattttcttgtctttcaattcggagtatatatgcatgtatctatgttgtgtgttgccgtctgaagcataaagcaccaaggaacaggcggcaagtattcttgtgcctgtgttgacgtgttgctctgctaggggtggcagagagtggcagggcatcctttgtctgtgttgagcaggtatgtgctttcttctagttgtagatggcaaagggttgcaccccccccccccccgggggggcctggtgtgagaactgaaaaat

SEQ ID NO: 67966 - DNA, 522 bp, Zea mays
  Clone ID: MRT4577_161982C.1
ctcactcattcggtagaaaagagtgtgaaagacactttgctggccctctgttggacccttgctattgcaacctcaaagcggacattataaaggaagatctggtggccaagctggcggaccctatcgctgaacctgactctggaggctattctgggcgctgttcaaatcatggatcacgacactaaaagacgcgaaagagcaggtgaaactcctggtgacacacctaatgggacaccgaataagtctaggaataactgtgcttataacagaactcctaataaaacgctccataatagaccctcaggatgatacttacgaggatgaatacatgaaggaaaacatagatgaaaacatagatgaagatgcagacaaacctgatgacaaccatgaatctgactatggatctgcaaaagaaaaggcatggaaggaaaaatcatctgtaagaagaatctaaatgtaacacagaagagaggccccaggaagaggccccacatcaagaactatcaaataaaatggtaaaaa

SEQ ID NO: 67967 - DNA, 404 bp, Zea mays
  Clone ID: MRT4577_161983C.1
attttgtatggaaaatagataattttgctgcaaacattgaaactgtgacaaatttaattaatgatagtttagagaagcccgcccatattaaataattttgaacgcaatgttattagtaccagattgtcaagccaatgtcagttactttactttgcagtttcaggcacagtgttccagaaactataataatttgtctgtgactctggtcattgatgattcataaactagttatttgctatttcattgaatgatgtcacatgcatgagcctggcaaagaattctaaccagcatgaagtttgtcaaactctacttctgttcaatatgaactcccaaattgtaccagacattgtttgttctgtgcagttggaggcttttaagaaacaattgatgaaatcattgagtga

SEQ ID NO: 67968 - DNA, 283 bp, Zea mays
  Clone ID: MRT4577_161984C.1
tttttgttttttaaacaggagaagccaatatttaccgagatgagtcaacattaattatggatgaacgccctgtgtcgaagcattaccattacatgcccaaacagaacacgtgctgatgctgctaaacacatgggacgaacacacagtatggactgtaaataaaacggacgggaccgtagaagacagatgtcgtaagcacacatctatgagtagttcatactggatacgtgtagtacagacagaaggactgctaaacacaaggagggtatgtcgtggaccaggg

SEQ ID NO: 67969 - DNA, 412 bp, Zea mays
  Clone ID: MRT4577_161985C.1
ccccaaccatacgaagggggggggaataaaaaggccctcaggaaaaatcctgggggaaccatagctagaaggcctggggttcttttaccccaaaaatccaaatccaaggggcaaaaaaggggcccccctcccaacagtcaaccatgacatgcgtagaacccaaaaatgggggggggggggcttaaacattttcctttccagccaccgggcccaaataaccccttccgggggaggggatcccccccccccccccgggagcgacataaagggggcccacccccggcggcgggggaaggatgttccaaaaaagggccccacggctcttggaaaagggaggggggcggaagccattcctttggggcgcccaataaattttggggaagccccacccccaaggcctgggccaaagaaa

SEQ ID NO: 67970 - DNA, 291 bp, Zea mays
  unsure (1)..(291): unsure at all n locations
  Clone ID: MRT4577_161986C.1
tgtcncgtccgactgctcacccagcctccggcgcgccagtcccgtcccgtcccggcctgcactcattccattccacacagccctgaccccggccttgatcggtaaggtcgtcttgatcacagcatactggctccccctctctgaggactcgtcagagctgatcgcttggcaccgcgtgtgtaggcagcggcggcggcggcggaggaggagatcgacagaagcggcgcgcgcaggatgccgtagcagcggtgccagtgaccatcgtgcggtgcggctgcccgtgctagctca

SEQ ID NO: 67971 - DNA, 270 bp, Zea mays
  Clone ID: MRT4577_161987C.1
ttttttttttttttttttttttcgagaactgataacagagttcattttttttttttttttttttttttcgagaactgataacagagttcattactcgatgattcgacagtaacccaaactacagaacccagcatatctctacatcttctgatcgggcactgatgacagaaaatatgacgcttaggccctctccccgcggatgccgggtcaagctggatgtccttgggcatgatggtgacgcgcttggctgcgatggcgcagaggttggtg

SEQ ID NO: 67972 - DNA, 233 bp, Zea mays
  Clone ID: MRT4577_161988C.1
gcacgaggtgcaaggcctgagctcgttatgaaaatgaccttattctgtgaggggctattgttggggtggccttcatgcctaaaggtcctcaaaagatcaacattgtcaattgagcaagcttcgggtagccagactcatctttgtccaagccagcgctaggtgaagggacgaagccaagaagctttggatctatgaaaacattaagtcaaacaaagccgaaggaaggagcttcg

SEQ ID NO: 67973 - DNA, 486 bp, Zea mays
  Clone ID: MRT4577_161989C.1
acaagcttttttttttttttttttttttttttttttttttttttttttttttttttttttttttttttgttttttcttcaaaaccaaaacttgtttaggatgcctagtattatgggccataccacacaagaggggggggggggggttactgcctaattaccattattcatagggggggcgggatggaggagattacccaacattcatgaatccggaggcgggggaaatggcaccggagaccccacaggggttggggcggaagctggccaactggtacccgggcctagaccaccctaagggggaaccccaccacacgggcggccggtactaggggatcccagctcgaaaccaagctgggctaaaaaatggacacagcatgctacctgggagaaattggtgtccggccacaattcgccaaaagatacagcccgcgaacataaagtgcaaagcccggggtgcccaatgagggagctaactaacattaat

SEQ ID NO: 67974 - DNA, 550 bp, Zea mays
  Clone ID: MRT4577_16198C.1
ctcctcaaaggcggccggaagcctgctgctttcctccaactccacccgttcgtcccattcgtgctttccaccatggagcttcgcataatctccgccatgtgctgtgcccgtcttgagctgctcttcgccccctccagccccaagatgccaactgctcatgacgagagctgctgcaaggacgactaccaccaccctatctgtctctcccgaagactgcgcgctcaccggccactatcacggccacaaaccacggccggtgcaactgattatggactcggacgccgtattgccagagcctgtttgcgtactgccaatacgtccgatcactcgctcactgtgtcgctctgcttgcctcgtcggccgatgaaagatgaaccatcgcactcgatgatcgatgtacccgtagccactgactatcactcattgcaaccccctctaatcctgagcagaaattattttcatggcacctgagcgcattaaagacccatggactcggacagtaccaatacatgagctcttcatggctcgcctatcaaaatcgacgctcaag

SEQ ID NO: 67975 - DNA, 217 bp, Zea mays
  Clone ID: MRT4577_161990C.1
cttcttttttttttttttttttggcggcagaagtggggaagggtcgcggttctctgttgattggtctaaaacgataagtttgtggtacatgtatatttcgagactaccaattcgaccacagggctgttctgaaaccattttctttggatagatgttaactgtacaattcattgaccttttcacatctctaaactctatacctattaaataataagcc

SEQ ID NO: 67976 - DNA, 1414 bp, Zea mays
  unsure (1)..(1414): unsure at all n locations
  Clone ID: MRT4577_161991C.1
agcgtccgcggccgcgtggggngacccancactctggcccctacctttctgntatacaccttagtgtagtgagaggcatgagagtagcagtctgtggtgtcattggttctggtaaatcaagtctactatcgtctatactcggggagatacccaaattatgtggccatgtcaggataagtggcacagcagcgtatgttcctcaggctgcatggatacagtctggaaatattgaggagaatattctgtttggcagtcaaatggatagacaacgttacaagagagtcattgcagcttgctgtcttaagaaagatcttgagctgctccagtacggagatcagactgttattggtgatagaggcattaatttgagtggaggtcagaaacaaagagttcagcttgctagagcactctaccaagatgctgatatttatttgcttgatgatcccttcagtgctgttgatgctcatactgggagcgaactgtttaaggagtatatattgactgcactagcaaccaaaacagtaatctatgtaacacatcaagttgaatttctaccagctgctgatctgatattggttcttaaggatggccatatcacacaagctggaaagtatgatgatcttctgcaagctggaactgatttcaatgctctggtttctgctcataaggaagctattgaaaccatggatatatttgaagattccgatagtgatacagtttcttctattcccaacaaaagattgacaccaagtatcagcaatattgataacctgaaaaataagatgtgtgaaaatggacaaccatctaatacacggggaattaaggaaaaaaagaagaaagaagagcgtaagaagaagcgtactgttcaagaggaggaaagggaacgtggaaaagtgagctccaaagtttatttgtcatacatgggggaagcttacaaaggtacactgataccactaattatcttggctcaaaccatgttccaagttcttcagattgcgagcaactggtggatggcatgggcaaacccacaaacagaaggagatgctcccaagacagatagtgtggtccttctggttgtttatatgtcccttgcctttggaagttcactatttgtgttcatgagaagccttcttgtggctacgtttggtttagcagctgcccagaagctttttataaaaatgcttaggtgtgtctttcgagctccaatgtcattctttgacaccacaccatctggtcggattttgaacagagtttctgtagatcaaagtgttgtggaccttgatatagcgttcagacttggtggatttgcatcaacgacaattcaactccttggaattgttgctgtcatgagcaaagtcacatgggcaagttctgattcttatagtccccatggctggtgcatgcatgtggatgc

SEQ ID NO: 67977 - DNA, 542 bp, Zea mays
  Clone ID: MRT4577_161992C.1
gccggccgggccgggattttttttctttctttccttctctgtttaaaacctcccttcttgtacatataatgcatattgaaatagtccaagcagttgaatttcttggtagacttttaaatcaaaaagtagaacaagaatcaataaatacatttaaagaaaaattggttgaacttttaaaacatcgctttcaagatcattgggatcctcaacagccttataaaggaaatggatatagagccatttccaactttaacggacaattagaccctatactcaccttggcttctattgaagtctctattcaaccttcttctattcatactcatttacctcgtgaatttgtattatggatcgatcctttctcggtctcttatcgagtaggagatcacggcaatatcatgacattattcgaagatcgctctcatggcagaatatcgtttgaaactccatctcctgttctctttcaaccaagaatatctacacccattcgcatctcaccacccaatagtccctcagataaggaccaatcccgcactaataaa

SEQ ID NO: 67978 - DNA, 127 bp, Zea mays
  Clone ID: MRT4577_161993C.1
ctttttttttttgatgaactggaacaataactgcacggcctcatatttatataggggaacacctctccttattttattatacatgctttggaaaattaacgcaacaaataactgaattactacacag

SEQ ID NO: 67979 - DNA, 812 bp, Zea mays
  Clone ID: MRT4577_161994C.1
cccgcttcgtcttcctcacttccgtgcgagccacgccttagatgtccatggcgacgaagcaagcgaccctgcccaggtcgggagctttctcaaagggctacaacttcgcgtacgcgtgggagaagaacgcgccggtcacagaggagcagaatgccgcgatctccgcgctctcgcacgctgtggcagagcggccgttcccggtcaatctggaagatggaggtacggccgtgccagaaaaagagtctgctttggaggaggcgggtgcaatggatgctgtcttggtgaatacacatcagttttacaaatggtttgctgaactggaatcagctatgaaatctgagactgaggaaaagtatcgcctctacgagagtacattagaggaacgtgttaacacatgtgatggcatccttcaacaagtggatggcacacagaacttatttgaagaactacaatccttgcactcgagtgttgccataaagacacaaactttgcatgatgcttgcgaccaacttttggtggagaaacaaaggctcattgggttcgctgaagcactccgaagtaggttaaactactttgatgaattggaaaatgcctctactagcttctattctcagactatgaacattgggaatgaacagtttctcccactgttgaaaagacttgatgattgtatcttatatgttgaaaataatccactgtatgctgaatctgctgtttacttggtcaagtttcgccaacttcagtctcgggcattaggtatgatccggtcacatgtcttgtcgacactgaaagccgcttcatcccaggttcaa

SEQ ID NO: 67980 - DNA, 1431 bp, Zea mays
  Clone ID: MRT4577_161995C.1
ttcacggcctcccctcccctggtactatacgcgtgttccgccgcgagctccattagcgcggctagctcccatgctcatcgctttcgctgacctttgagagccatattctgttcctcctcctcctcctcctccttcagttggtagcgctcgtcatcattccaggcagcaagatcgcatgacacacagctgaagctcggctttggcgcttcttggtgaccgaagcacgcgcagcatccatccgccatggagagtgccggcggacgaccagaggcggcggcggcggcggtgctcaaggtcaagggaagagacgccggaagaagaccgaacggggctcactcgtcttcttcctgcctgcaacaccgacactccagaagaacaacgagcgcgtcgtacgtaaatgctcccgacgtgtcgccgcgactctccgccggtcacatacctgcggccatcagtcgcagtgaggtgctcgacgacacaaggcgttcgctcgacctccctgaccagtttcccgagcatcgcgtcgccgcagccacagagagagctgaaagaagcggttcgaagtctgccgcggacctggcctgggagatagccgtcctggaggagcaagtcgtccgcaaggagctgcacctgctgtccctgtacagagccgcgttcgaccagtacctcggcgtctcccctcgcgcgtctgctcaggaaccgcgccatgagcgcagcagcagaagggctactgctgctgacgacgaaggcgcccttcgcctgaggagcatcaaggagtctgcgtcctacagcctaccaacgctctccgattctaaacgcgtagtatgagcagcgtctcttctctccgaccaatccttccacctttggctctgtttctactaccagctggttcttgagtgttgactgttgacgacagaaaccatctgatctaacacacggctcttggtggtgttctgctgaagcacgcgcaggagctctccaggtgctcctcagggcggtccagcctggccaacttcctgagcgcctcgatcgctgagtacgtgcctaagatctcgtgcaagctctcggaggacatactgcggtgcgtctccgccgtctactgcaagctcgcgagcaggccgctgtcgcaggaggaggaggaggcgaggtccgagacgccgccgttcacgccttctctctcggtctcgtccgcgtcgagctccttctccctcaagaagcagcaccccgtccgtggctgaagccctcggtgctactacaacgccgacgcgactgcgaccccggacgcgtacgcttcgtccggcgggagcagtgggcggtacagtggggtgatggttttcccagggatacatgtagacgaggagaagtttgagtatgcctgcaaaatgctggacactatcaggtaagcacccatgcaggaaaaaaaaaaaaaaaaaa

SEQ ID NO: 67981 - DNA, 234 bp, Zea mays
  Clone ID: MRT4577_161996C.1
caaacacactctagcgagagcgcactcagcaacgacgctaacaacaatgcgctaccgaagatattatccccgtctttgcgctctcttgccctttcttgtgagcgcaacaaatgcgttcattattccacaatgctcacttgctcctagtgccattattccacagttcctacctccagttacttcaatgggtcttagaacacccacgtgtgcaagcgtacaggttacaacaagcgc

SEQ ID NO: 67982 - DNA, 198 bp, Zea mays
  Clone ID: MRT4577_161997C.1
agaccaccaatctagtcatcccttacgcagcacagcgagcggcgagccggcgacgcgattaacctcgactcagcggcgagaacaggaagaacaaggggaaggatccgtacgtgctgcgcggccaatccatgggcaactgcgccgtcacgcagcacgcggtgacgtcgtgggcggactacggcgagtaggacgtgccct

SEQ ID NO: 67983 - DNA, 337 bp, Zea mays
  Clone ID: MRT4577_161998C.1
ggccccaaaagatttatgtacccttattccataagcccctttcaaaaaaaataaaagtaaccgaaaacaaaaacttgtttttttttttttaaaaggttgcagcctttccctgggaaattttaactgtccgttcaaaataaccccagcagaggggggaaccaacagttggaatgttggggccaattttgttttataatcccgggctttcaaatagccttgaggatgttaaccggcccctggttcttgggggggggggggatttttggggagtccatggataccaattcctttttcaaaaacccgttttgtgttgggggcattttttcgttttcggggt

SEQ ID NO: 67984 - DNA, 348 bp, Zea mays
  Clone ID: MRT4577_161999C.1
gtccctccttcccgtctatgtgtttactgcaccaccgtggagcgaacattcatggcatctggctccattccttcctttgcttataagtgaccattatttatcctctactagtctctttcatgctacatcgaatctaaattccacttcacatttgcacattcatgctctacttctattacaacccgtatgatccatccattacactactatgttctttactgcatctactaatcttcatccgacttgacgcctaaacaaaatcggaccacctgagtgaacttttaaaattatttaccagacaacttgcaaagctaaacaagcactattctacacgaactaccaaacatt

SEQ ID NO: 67985 - DNA, 198 bp, Zea mays
  Clone ID: MRT4577_16199C.1
tcgtgcactatcaatgttcacattgtccttccgtgcctccacatccagctttgtcgtcagggtggtcaccctcgcgccgtgcttctcctccggctccggctcctgccgtcctaggcccaggctcattctggatcgccccctgctttgccgtccccgtcaccgtcgtgggcatggaccgcaccgtctatcgcttgaata

SEQ ID NO: 67986 - DNA, 739 bp, Zea mays
  unsure (1)..(739): unsure at all n locations
  Clone ID: MRT4577_1619C.1
ggggtcttggtatgccctacaatagatagtgcaacctttgtctgcttaatcaactcaattatataaatgttctatctattcctaatttgagtagtgttttttaaaatctgctgtagtttactttgttccttctctaatggtgttattttgattctgaaactccaaggcttattttatgtggccttgtcttttagtccctccgtcctagtataaacggcgatactacctctggttcaaagacctagaaatgtagttaattctatctatactactgaatcgatatacacatctctagagagagcacactttatattatgggactagaataaaaagtggttacggcttatatactaggacggacaaagtattccactatcccaacttccgatcagttaagactatctccaaccatattttttatatcccttctttacagacttgaaaagattttttacctctatatctcatttctcaacaacctcctgtatatctcatcctctatactttaagtacccctgtattagagacatttttctttagatttttatgcgtacttatttgtcataccgttaagggcttgtttggttaggagtggatcctaaagggattgaagaggattggaaagggatgcaatcccccctcaaccccctccggtttgngtgaaaccgaacaaggcctaaatgtttttgtacatattttagtttttcttcattggtgtctaaagtataaaaaatgggta

SEQ ID NO: 67987 - DNA, 311 bp, Zea mays
  Clone ID: MRT4577_161C.1
gggggggccccccatttgatttccataggggaagggccccttccaaaagaaggttccttgcccataaaactacggggggttaaatgaccctcaagggggggtggggtaaatttcctgaaccaaatctgttgaataaaatttggaaattaaattaaacgggtccaacataaaaaaagattcctgaaaattttttccccacagggaaacaggctcctctccagttataacgccttttaacctttccatttttttagctccggggcttttccctaaaaatgggtttttttttattccgggtttagaaatttttt

SEQ ID NO: 67988 - DNA, 1067 bp, Zea mays
  unsure (1)..(1067): unsure at all n locations
  Clone ID: MRT4577_162000C.1
aaagaagagatattttttttgtcacgccctcggccctccccgcggaataaaagctttttctctggcctcccttcctccgaatccatccatccatccatctattgtctcccttccaattcgatgcctttgtagcgctgctgcctcgccgcgtcgtcgcgggtccccgatttccgcttgctgctgcgcttccaacaccatggacggcgggggatccggcaatgcctccggcggcagcggcggcgcatcgacgtgctgctactacgcgctcctcggcatccgcaagaacgcctccgccaccgacatacgcgccgcttaccggaggctcgcgatgaagtggcacccggaccggtgggccagcgaccccggcgcggccggcgaggccaatcagcggttccagcggatccaggaggcatactccgttctgtcggacaaggggaagaaggccatgtacgacgccgggctcttcgaccccctcgacgacgacgaccaggatttctccgacttcatgcaggagatgctggtgatgatggatagcgtgaaaaacgagaagccggacacgctggaggacctgcagaagatgctggaggacatcgtgaagggcgacggcgggggcgggagcggcgcaggcgggcgggcgccgacggacggtgctcgacggacgcgcgttgcgccctacccgcagccgcagcgtgcgcgcaggtgaccggcgagcccgtgtacgagcgacgtacgcttcccttttggcgaaagggaccggaccccagcaacggacgggaggctctggaaaagaagaataaaaagtttcacctttctttttagttttaggccatcttcggatggtaatctacgcatcctttcatgtagcagtggtcgattgtgtaagctggggtttggggttgggtggtggtggtggtggataccggctgcgccgctgcaataacttgcggacgcgcggccggggactctgatttttttttatctcggcgacatttcgatttcgtgcccaattgtcactgaagatgatcctgactgttccattgccaaanaanaaaaaaaaaatttaacta

SEQ ID NO: 67989 - DNA, 409 bp, Zea mays
  Clone ID: MRT4577_162001C.1
gtttcgccggttgtcgattttcctattcgctatggtcatcacgtcagtcgtgcggatccgaacttgcgagctcgccgactgaccgtcgtgttccttgaaatccctcgtcggtcgacctcgcgacttaattcgtccgtcgtgctggtcactggcccatactggacctattagcttggattctggccaacttgtcgtcgtatcgtttaccgtcgagtcgtcaaacacgtcatctgcggctggaccccccaccttaccaactcgctccaaacacgatctcgtcgtcgtttcgtgtgtcatcaagaaatcccaagaatcgggtgaagacgaagctagcaacgcaatatttcccaagcgctcgacatattgcctgtatccgaaaattgctaccgatctcgttgattcatgtcag

SEQ ID NO: 67990 - DNA, 421 bp, Zea mays
  Clone ID: MRT4577_162002C.1
ttgcgtccgcccacgctgtccgaaaaaaaaaaaaaaaaaaaaaaaaaaaaaaaaaaaaaaggaaagggcgagactagagtgaacgaatcttacgtaaccttcgcgtgcaatgaaatagcatattctattgtgtaacgtaaattaaattcaatggacctggcctttacaacacaactgactggaatgacaatgccgtggcgttacttaatttaattgccttgcatcccattttcgttagctgaggtggtgtcatagaggacaggaccgatcggattgcccttcacatcagcagcctgaatggaatgtggaacgggacctgcactgtagcattaaattcagcgcgtgtggtgtgttcgttaagcgcaacctgtccactagacttgccactaccctacggtccgttccttttgtttccttcctt

SEQ ID NO: 67991 - DNA, 440 bp, Zea mays
  Clone ID: MRT4577_162003C.1
ggaccaaagggggggggctcccattttatcgggatctaaacagacccaaactttaggccttttggaacgggggatttttttcccctgttccccatgttttttctgaaaaaaaaaactgatttttataaaattcatgcgttccaagaggccttacccatattttttgcaaaaatgctgaaacttttaaaaatgaaacggcatgggtaaacccagtctaaaccaaatggagcttttttttttggcccaactttgcaaaaaacaaaattatccggcctttgaaatctgacctaaaaaagcacccgttgaaacaggggggttcaaactttcaaaaacaaatccaactacagagacggttgggcacttagtttttcaggaaaaaatcagcattacttgccctagggcataaaaaaagttatcatgctggcccgggcaattaaaac

SEQ ID NO: 67992 - DNA, 352 bp, Zea mays
  Clone ID: MRT4577_162004C.1
gcgcgggtattctatagagggggcgctcttttttttttttttagtaaagacaaagatgtgctcgttagatgataaactgctaaaaacacaacggtacaggttattggtgattgttatctgcagggccatgcacatcaggggttgtgccacaggccacactgacagtctaatgagctacattacatatgcccacaagagaggagcgtacaccacaaggtacagtatatgtaatggaccaccgaccatcagtatgaggatatgcaggacgacacgcacaatccctggatgtataatcatactggtgctaacatcatacgctgcatggcgcggtcggtcctagggcaccggggcc

SEQ ID NO: 67993 - DNA, 966 bp, Zea mays
  Clone ID: MRT4577_162005C.1
accgtttcctgcgttcgcctccggcatatatgcttgccttgaatgccctctcctagcgagatcggcgagacgcgactggagcggcatcatcgggcggtacctctagcttgctacagccataccgaatggcgacgattgtcaacccatcgatcaccttgatgagccacttcttcgacacgaccgccgcatccggcgtcacacccaccgactacttccaccgcacctacacgaccacctactacatctgccgcttacagaagtctgacagactgaaactaaggagtccgcgccagacagcgccgccatacctgatgatgagcattgtgggcaaccgcgtcacctattcggcgtacgccgacgaggagccataggatcttaaagagatagttacgaatgcgattgatggccagcgtcaaagtagcgagacagaggatgctgatctggtgccttcttctggtaacgaccatgaccattcatgacacgaagagaacaaaaactgcacggccgcgtggggcaatattgatgatacaaacattgcagatgaaggttataatttagagccagcaacaaatggttatcccatgacccatgtccatgatcttgactcttcatccgcagacgaaaatggtcctccagcatcgacagggcaggatatagtagttttgagtgactcggatgatgatgctatcatggtgttgtctcccggtgctgtgaactgtggctcgatgcataacactggaaatctgtttccacccaacacaccttgaaaatttaggagtgtgtagtggagaaactggtggatgccccaaggagacatcattccttgcattaaaagaagattttggtgatccggggttgtcattttgggaaagtcatggtagtccccgaaatgcttctacttcccagatccccgatgccagtacaaaggcagtatataatccaggtgaaatggacaaccaccctgcc

SEQ ID NO: 67994 - DNA, 799 bp, Zea mays
  Clone ID: MRT4577_162006C.1
cggggcggtcgacgcccagccccttcctatcttcaatccccagtcgtcctccccatcttcctcctccagccgagatccttccctgcttgctcgagatcgcctcagcctccggccatggagctcgcccctgctcgacgcccttgcttttcccccagctccggcgttcgtcgcgccccctgtgccgcaacctcgccgaatcgtgcccctgctcctctccgtccatggctgcgctcgacctccacttcaagccgcgccctgggatttgcccagaacctccatcccctcgacaccagttctcagctcctccacctctgtatgtttggtcgcctctctgttttccccatctggccgtcgttcttcagcccaggccatcacggcgccctctgtccaacacgtcgttgtccactgcaagcttgccgactcgcccttctttacggtcatcgccagcagccgctgctcctcctctcttcgccctgctgcgctctggtggccgccagttcccagctcctactcaaccggtgtcaggctcggaccaccttgtcgcgttgctttttgttgtggccatctagtcgttgatgctcggtctcccccgttagcatcatcaaccgttcctggaccatatcgttgccctctgatctctttgtcaattgttttaactccatacttcaaaaaggaggtgctcttttcaccagaagatcttcataggaaaaatgagggatggtatatcaatacctggtctacctacggaaaatatatccagatgaatttaggaacttccttcacagatagattttaactg

SEQ ID NO: 67995 - DNA, 1826 bp, Zea mays
  unsure (1)..(1826): unsure at all n locations
  Clone ID: MRT4577_162007C.1
aattcggcacgaggctcgagatcgcctcagcctccggccatggagctcgcccctgctcgacgcccttgcttttcccccagctccggcgttcgtcgcgccccctgtgccgcaacctcgccgaatcgtgcccctgctcctctccgtccatggctgcgctcgacctccacttcaagccgcgccctgggatttgcccagaacctccattcccctcgacaccagttctcagctcctccacctctgtatgtttggtcgcctctctgttttccccactctggccgtcgttcttcagcccaggccatcacggcgccctctgtccaacacgtcgttgtccactgcaagcttgccgactcgcccttctttacggtcatcgccagcagccgctgctcctcctctcttcgccctgctgcgctctggtggccgccagttcccagctcctactaacncggtgtcaggctcggaccaccttgttcgcgttgcttttttgttgtggccattctagtcgttgatgcctcggtcntcccccgttagcatcaatcaaccgttcctggaccatatcgttgcccacgcgtccgcaagaaaaaagatgatgaacttatgaagaggataaagcaggatccttatactgagtatgctgtaatagaatgctacgatacattattagatatcctttacagcattattgttgtacaaagtgataagaaagttgttgatagaatacgtgaaagcatcaaagatagcatccaccggaaatcactcgtgaaagaattccgattggatgaacttcctcaactaagtgctaagtttgataagttgctaaatctactgaaggaatatgatgagaacgatcctgtaaatagaaacacacatattgccaatctgttgcaggatataatggaaatcatcacacaggatattatgaaaaatggaaaaggtatcttgaaggacgagggccaaaaacaacaactgtttgcaaaattaaatctggattcattgaagcatgttgcttggagggagaagtgcattaggcttcaattgttgttgacaacaaaggaatctgccatatatgtaccaacgaacttggaagctcggcgtaggatcaccttttttgcaaactcactttttatgagaatgccaagggcaccacctgtccgtagcatgatgtccttcagtgttttaactccatacttcaaagaggaggtgctcttttcaccagaagatcttcataggaaaaatgaggatggtatatcaatactgttctacctacggaaaatatatccagatgaatttaggaacttccttcagcggatagattttgaagtgaaggatgaagaagaacttaaagataagatggatgagatctgtaattgggcgtcttataggggtcaaactctcaccagaacagtaagaggaatgatgtactacagaaaggcacttgaaatccaatgccttcaagatatgacagatcctgctaaagttgaccgagacagatcaataggatcctaccaagagttgcaatatgatattgaaatggcacaagctattgctgatatcaaattcacttatgttgtctcatgtcaagtttatggcatgcaaaaaacatcaaaggatttaaatgaaaaaggcgctatcagaatatcctcagtctcatgataatgaacccatcactacgagttgctttcattaatgaggtcgaagctccaaccagaaatggagcaactgagaagacattattccgttcttgtcaaaggtggtggaaagtatgatgaggaaatttacagcataaagcttcctggcaatccaacagatattgtagagggaaaacctga

SEQ ID NO: 67996 - DNA, 315 bp, Zea mays
  unsure (1)..(315): unsure at all n locations
  Clone ID: MRT4577_162008C.1
tttgggctgatttatgtgcttgtttatgtgcttgaacgttcggttacatccacgcttttcgacatagccctagtcaacgatcggctagctacaatataggagggtaagtgaagtacgtcgaagtcggtatggtggacgatggagaatcctcgtgttggggctagtgtgctactcgtatgcgaacggagcaagtcggatggtgtcgtaagtagtactggggaagacgcgtgggctacggtatggaaaagtgcggatgagttcggggagttgntgggtgcggcttcaagtgtagttatactggcgcgggcgtttgcg

SEQ ID NO: 67997 - DNA, 370 bp, Zea mays
  Clone ID: MRT4577_162009C.1
gtaaaacccattgtttgtggccaagcaccccacgagctggtcgtggatgaccccgtcggccgggagcaccgttccgtcccccacctcccgccgcagcgacctcacccacttgccagagatgccgcatggaacaaagcgactcatgtactccaggccggcgtcaacgtgaaatgccagacctggccacgtgtacccaaaggaccaccctgacctatccgcagctatatggctgctctgtgcccacacccagatctccgcgaggaccccgggaccctatgagactccaatgaaccactaccacagtaacattgctgtaattagcaccaccgctgcacgtggaacgctgtgccccaaagtgcggagcgagagg

SEQ ID NO: 67998 - DNA, 281 bp, Zea mays
  Clone ID: MRT4577_16200C.1
taaaaaaagttataacgtcatatgacgctctacacgaagagtttttattctttataagggcggcccttttttttttttttttgaagtaaagtaggtggtattatttattttgaaaaattatttcaagttcaatggcatttgatatactatctctatgtcaggttttactttgacttcgacgacgtttacttaagacgacgataaaacgttaacttaagacgaaaatactaatttaattattaataaccatgaccttgaaaaacaatttagaattattggta

SEQ ID NO: 67999 - DNA, 440 bp, Zea mays
  Clone ID: MRT4577_162010C.1
ggaaagctgcgcgcgcctgcaggctcggatcctgaatagcgggcgcgacccacgcgttcgggcattagcagctcagggggcatagcgcagtattcattggaaacaaagacaccattgtatgaattaggttgttgctaacctattaaatgcttactttgacatcactattatctttcaatattgcctatgactaagtggctgctggactgaccatcgcgaactttgtaggattaactattttaatgcgcctttgacaacctgaatgagccaagcctatcgattccaatggaaaactaagggaagtgggctacatcaacctatctaaaatgttgtcgcggcaatacttggcacgactatcagcacaaagattgaaaccgaaacaagccaaccccacctaccaggagctaaggccccatccatggtggaacttagtgaccact

SEQ ID NO: 68000 - DNA, 260 bp, Zea mays
  Clone ID: MRT4577_162011C.1
tctgctacgcgcgggccccctcagctgtccaagggcctgttagcaatggatatacaatggcaacacacatatcgtgcctccttaaggttgtaggagtactaggtgtgtcgcaaactggaccactacagcgacaatgctcacaaactgctatggcttcgctagctcgccgatctttatggtctacgatagctactgcaggttaagaccgacctatcgcgtcctataggcttgaaacagcaatttcgacaggctggataact

SEQ ID NO: 68001 - DNA, 635 bp, Zea mays
  Clone ID: MRT4577_162012C.1
cctcgaggccggccgggatcttatctcaaacattcctcacacgcctaccatccgattcgaacctcgcggagacaccgaataacgtgacatagcatgtttcacaccagaacaactgctcacgctgcactcggtacgaaatgctcagcacgagacagattgccaataaggataccggaaccactgcgctcagcacctgttaggagagaacaacacttcctccgttaccgccctagaacagacgtgctcggtgagagctggcagcaaccaaagagcacagaaccggtgatcaggaagctgccctccgctaggactctctcctaaacctgcaccggacttcggaacggaatctgcgctgatcagagtacatgagtggttctgacctccaacagggtgctgcaacatacctgaagcggcctgggtgaagatagacactctgcgacgccaacatgataagcgcgtgagcatcatggcagatgctactcagcaggctaggaggaaccgtggcctcaggcactacgaaccacctcgaacatcgtggactacaaatgaatggacgtggacactgttaatcaggagccattgtaaggagatatcacgaggctttgcttcgtggatcacgagcacctcgactggta

SEQ ID NO: 68002 - DNA, 227 bp, Zea mays
  Clone ID: MRT4577_162013C.1
gatacctacaccccatgcatgggggtggatcagggatagtgctgggctcgaacgcacacttattccaaacggagtagcagacccttctgatgttaaaccagttgagcattgtagctatccactcgtgcacggacaggagagactgccggatgatccacgctgcttgtggtcggagaccccatctacgaccgggagcgcgagcttgcggatgaggtgcagaattagac

SEQ ID NO: 68003 - DNA, 728 bp, Zea mays
  Clone ID: MRT4577_162014C.1
gttcactgttccggctgctgcgaccacctcccaaacccctactcccccacgaagaaatggcttcccccacccaacgtcactacttcacctgcacttggtggcaggagtaccacgccgaacaagacgctcgtgatcaaggacgtgcatgtggctccgccccatgccgacaaggtccgcgactagattgtcttccccgtactctgtccaccgaccactactcctggcattggaaggatcctgatgctatttttccttgcattcttggccacgaagctgccttgattgtggaacgtcgatctagtcagcgagtatctgatagtgcattcgtgatgattgtgtccttccttgctaccaaacacaattgaataatgcaagttttgcactgccgctgacaatctgcctctgtggtgaggctcgaatcggcacacgagtaatagtgatgatgaatgatatgtatgtcaagtgctctgtgaatggatgacccatttagcattttatggtcacttccacattcagccattactctgctgaagcgagatgtcagtgttgccaagatcaacccacaggcacccttatataaactctgcctgctcggatgtgctgttcctactgaacttggagcgtagcggaatactgcgaaggatgaatctgcgtcagctgttgctgcttttgaccttgcaacagctggacttgcagatgctgagggagcaaaagctgctggtgcttct

SEQ ID NO: 68004 - DNA, 408 bp, Zea mays
  unsure (1)..(408): unsure at all n locations
  Clone ID: MRT4577_162015C.1
ggaaacagcatccaaatgttgttgcctatagcaactgggggaccccgcagatttcccgttttacaaacaaaactcncccccgggataactaacttgtgtccaaatcaatcgcagaaaaagagcatgatacatataattcttccggacatatatgccagtgatcacagtcaccttggaatcatgctgaagctgtaggctgaatcacacacgctatgccaaacattcattctgaagcctgtgaaaccagtgccatatttctcagacagcgatgcttattcctgatggttactggatccagcatatccctggcatgaagactatcattgaaacaaggctctgtaacgcactgaacagaattcactattaatggacaacttacagctaacaaaactgcacctttgtagtgaa

SEQ ID NO: 68005 - DNA, 154 bp, Zea mays
  Clone ID: MRT4577_162016C.1
ccatccacacacaaaccataccggggggggtatttgaaagccatcggcgagacaaacgcacacgcacgcaggaattatattatcccatatcctctaacgtactgacacgacgacacgggtgaataatatagatctcgaggcactaactaacgac

SEQ ID NO: 68006 - DNA, 359 bp, Zea mays
  Clone ID: MRT4577_162017C.1
gggacaaaaaaaaaagaaggtttgggggagaggtttaaacccgcccaaaaccggggcaaaggcaaacaaggccatgggaagggagggaaaaaaaagccggggggaccaaagaaaacaaaagggggccacgtttcaaaaaagtttgggagagagcccattttgcaaaaaaattttttccccgtttgccccggggtgccttgaggggccccgtttttgccgttttcttgtcggggccgtcccttgggggccttatagcataaaaggcccggccctcacccaaacaggggcggcaaaccttcccccgcctggttggttggggggaccccccgctttgggacccatccgggcatatgaaccct

SEQ ID NO: 68007 - DNA, 612 bp, Zea mays
  Clone ID: MRT4577_162018C.1
ccccgcgtccgcacatccccaatcttcattcccctgaaaccctagccgctccgtccggtcgcgccactcccttcgcctctctaaggttccggcggaagccgtcctctgcgtgactgcgtcggctgcggtggagatggcttcctcgtcggcgtcttcgaggcaccaggtcaccatcaccctcggccgcagcggtcaggcgacaattagaaagtaatagctcacatggagatgatggttcaggtgatgataaaccttaacttgtcaattctctagggcttgaactgaagatatctggcactacttactctgttgaattggcgtgcaaaatatttgaagaccgcctggttgggaagggtgatctgagactgaaactcatgaggaaaggcttgttgccgaggagcaatggtagtgcagaacagaatgacatagatctccgtgaaaagctttcccgaaaccataagttaccaaattatgattctagaggtcatgctgcagaatcaagggctagttatgatatgagagatgagcctccagagttaagttccagatattcttcgagggaggatgtcctagggtcgaggcactcttctgttgtaagtcgagttctttatg

SEQ ID NO: 68008 - DNA, 569 bp, Zea mays
  Clone ID: MRT4577_162019C.1
gggcagcgtcaccaaagcgggctcctctcgtcccagcgccggttaactccgtctcagcgcacgcggcacgcccctaatcttcattcccccgaaaccctagccggtccttggccttgtcccggtcgcgccgctcccgtcgcctcttccgcggaagccgtcctctgcgcgtcggcggcggtggagatggcctcctcgtcggcatcttcgaggcaccaggtcaccatcaccctcggccgcagcggtcaggttgttaaaaggaggactatatctgatgatattaacggcgatgaaatgccattgtcggggaaaaaacgatctgtgagggataggttaggaagtaatgtgtctgattctgatttttatggaagccagcagaggaacaaaaggcaacagacagaaattaatagctcacatggagatgatggttcaggctgaagccccgcttacagttactggattgttgaattcgttgggtcttgagaagtatattgttctctttcaggctgaggaggtggatatggctgcattgaggcaaatgggggagagtgacctcaaagactgggggtacc

SEQ ID NO: 68009 - DNA, 128 bp, Zea mays
  Clone ID: MRT4577_16201C.1
caacacacaactcgacgacggtgcgttgcgttggtagccgccggcgacgatatcgtcgtccgcaggcgacaagaggaagaagacggactgcgtaaccggagggaacaggtacatcggctccgcgctca

SEQ ID NO: 68010 - DNA, 1734 bp, Zea mays
  Clone ID: MRT4577_162020C.1
cctcgaggccggccgggagcgactagcgacgcaacaacgatatccgggtcgttctcagcgcacatccccaatcttcattcccctgaaaccctagccgctccgtccggtcgcgccactcccttcgcctctctaaggttccggcggaagccgtcctctgcgtcggctgcggttgagatggcttcctcgtcggcgtcttcgaggcaccaggtcaccatcaccctcggccgcagcggtcaggttgtcaaaaggagagctatgtctgatgatattaatgacggtgaattgcctttgttggggaaaaagcgatctctgagggataggttaggaagtaatgtgtctgattctgatttttatgaaagccagcagagaaacaaacggcgacagttagaaagtaatagctcacatggagatgatggttcaggtgatgataaaccttaacttgtcaattctctagggcttgaactgaagatatctggcactacttactctgttgaattggcgtgcaaaatatttgaagaccgcctggttgggaatgggaaggatgatctgagactgaaactcatgaggaaaggcttgttgccgaggagcaatggtggtgcagaacagaatgacatagatctccgtgaaaagctttcccgaaaccataagttaccaaattatgattctagaggtcatgctgcagaatcaagggctagttatgatatgagagatgagcctccagagttaagttccagatattcttcgatggaggatgtcctagggtcgaggcactcttctgttgtaagtcgagttccttatgcaagaagtgtggatgatttgttaaagttggattattcaagaaaatcctacccgtcatggacagatgatggtttgaggcacaaatcacctgaaaggatggccggggttcgtagtgatgtgtctccaccagtaggttatgatcagattaggtccatgccaccacttagatctgccggtcaagacctcaaagttttattacaagaggtgctcctgatacgccaaggagtcaaccatatgctggcaaagccaccatttctgttgatacagtacagagaactaatgggatcactccatctagtgcacctttgcctaaggtccctgttatggctgaagccccgcttacagttactggattgttgaattcgttgggtcttgagaagtatattgttctctttcaggctgaggaggtggatatggctgcattgaggcaaatgggggagagtgacctcaaagacatgggggtacctatgggcccgaggaagaagattctccttgcagttggccctcagtcgaaacaacggcaaatatgagcaacatggtgtgggacttacgagcatttgttggcaactgaaaatactggtgcaagaacgccagatagcagatattgtatatcaatccatattgtctgtctcaatccactcttttgttgctgatggcgttgtttcgtgccgtagttgacaccatttaaagtctattcagccagctgttaatctaggttctatcattcagtctgcctgcccaggccttgttcgattacatgggatataatcccaccatggatttaatccaggtatggattgggtgaatccatatctcacacccaatcccatggtgagattaaatccatcaacaaatccatgtgtctttcaaagctagaaaaaaaaaaaaaccggggattctaatgtaaatttatgcaatatttcatagatttgttcc

SEQ ID NO: 68011 - DNA, 1812 bp, Zea mays
  Clone ID: MRT4577_162021C.1
tttctattttatttgtactagagataataattaattaggtagtgagattatgtatctaacaaatagccagctagctagtaactaatttgctaaaaaagctaatagttgatttattagttagattgtttattcaacttaattttagtgcatttggacagacacttttatcatagcgcgctggttaaagttctagtaaaaagtaaagcgccgtcgaaaccggcaaagcgaaaaatgcccgcccgcacctgcgtgcgtgtgctgtgtgggcatgggcagcgtcaccaaagcgaggctcctctcgtcccaagcgccggttaactccgtctcagcgcacgcggcacgcccctaatcttcattcccccgaaaccctagccggtccttggccttgtcccggtcgcgccgctcccgtcgcctcttccgcggaagccgtcctctgcgcgtcggcggcggtggagatggcctcctcgtcggcatcttcgaggcaccaggtcaccatcaccctcggccgcagcggtcaggttgttaaaaggaggactatatctgatgatattaacggcgatgaaatgccattgtcggggaaaaaacgatctgtgagggataggttaggaagtaatgtgtctgattctgatttttatggaagccagcagaggaacaaaaggcaacagacagaaattaatagctcacatggagatgatggttcagatcgcttggttggcaaggatgatctgagactgaaactcatgaggaaaggctcgtttcagaggagcaatggtggtgcagaacagaatacaatggatctccgtgaaaagctttcccgaaatcataagaagttgccaagatatgattctagaggtcatgctgcagaatcaagggctagttatgatatgagagatgagccaccagagttaaggtccagatattcttcgagggaggatgtcctagggtcgaggcactcttctgttgtaagtcgagttccttatgcaagaagtgtggatgatttgttaaagttggacccttcaagaaaatcctacccgtcatggacagatgatggtttgaggcacagatcacctgaaaggattttaaatgttcggagcgatatgtatccacggatagcttatgatcagattaggcccatgccaccccttaggtctgctggttcctcgagacctcaaagttttattacaagaggtgctcctgatacgccaaggagtcaaccatatgctggcaaagccaccatttctgttgatacagtacagagaactaatgggatcactccatctagtgcacctttgcctaaggtccctgttatggctgaagccccgcttacagttactggattgttgaattcgttgggtcttgagaagtatattgttctctttcaggctgaggaggtggatatggctgcattgaggcaaatgggggagagtgacctcaaagacatgggggtacctatgggcccgaggaagaagattctccttgcagttggccctcagtcgaaacaacggcaaatatgagcaacatggtgtgggacttgcgagcatttgttggcaactgaaaatattggtgcaagaacgccagatagcagatattgtatatcaatccatattgtctgtctcaatccactcttttgttgctgatggcgttgtttcgtgccgtagttgacaccatgtaaagtctattcagccagctgttaatctaggttctatcattcagtctgcctgcccactgttattgtttcgaaacgggtggatacgtgtggtttactcgtgacgattagtttggaatggatgctacgttcgattcttttgtgcc

SEQ ID NO: 68012 - DNA, 419 bp, Zea mays
  Clone ID: MRT4577_162022C.1
aaaactgtcaaaggaaaacgaacaaaacaaacagggggggggggagggggggagggaaaagaaaaggagcaacgcggacgcgggggggggggggaacacaaacaacaccagagggtgaaggagacgaaaacgcacacctacataaaagacaacagattatggggcgggggggagaaaaaaaaagcgcgaccccgggggggcagggccacgcccgcagcccgtggaggggccgctgcaccccgacccaaggacaggtgcgggggcaaggggtggggggaaagggaagcgcccccgggaaaaagaacacaacagaaccccaccaccaaaaggtaaagggagatgtaaaatgaaccccacaagtactggaatcgaaaaaaaaaagacgaggagatcttgagggcaaaagaaacatgggaacc

SEQ ID NO: 68013 - DNA, 635 bp, Zea mays
  Clone ID: MRT4577_162023C.1
cccgggcgaaagtgtgagtttgaggtgaaagatgacggcgacgatagatcggaggttatcaacgctgaatccaaacgcgccggtgtttgatccggtggattttcgtgaggtggaggatttttcaccgaaatggtgggatctagtaacgacttcgaaatggttccgtgacttttggctcagtgctaactctgagaatgagttcctcggcggcgacgatttctcagttatggaagaagagttcgaggagatgatcgcatcgtctgatggtggatccatggctgatacagttacagaagcagatgtggctagttatttgaagatgcttttgaacatagcggagtctacgaaagagaagatttatagatcgaaggtttcgtcttgttcaccaaagtataatcagaagaagtacatgaatccgaactttaattgtcgccggaatcatcatatctatcagccacggtgaagcttctagaaggaacaaagctcttcttcttcttctttcgagatgataatcagagtcgtgtctgtgtttatggctgaatctgatcttttctgctttcttgttttttgtaattctgtgaatattcctactttctataataacatcactttatgttatgagcataaccaaattg

SEQ ID NO: 68014 - DNA, 677 bp, Zea mays
  unsure (1)..(677): unsure at all n locations
  Clone ID: MRT4577_162024C.1
ccggaaaaacgacgtctcactttcaacgcacatccccaatcttcattcccctgaaaccctagccgctccgtccggtcgcgccactcccttcgcctctctaaggttccggcggaagccgtcctctgcgtgactgcgtcggctgcggtggagatggcttcctcgtcggcgtcttcgaggcaccaggtcaccatcaccctcggccgcagcggtcaggttgtcaaaaggagggctatgtctgatgatattaatgacggtgaattgcctttgttggggaaaaagcgatctgtgagggataggttaggaagtaatgtgtctgattctgatttttatgaaagccagcagagaaacaaacggcgacaattagaaagtaatagctcacatggagatgatggttcagaccgcctggttgggaagggtgatctgagactgaaactcatgaggaaaggctcgttgccgaggagcaatggtagtgcagaacagaatgacatagatctccgtgaaaagctttctcgaaaccataagttaccaaattatgattctagaggtcatgctgcagaatcaagggctagttatgatatgagagatgagcctncagagttaagtttcagatattcttcgagggaggatgtcctagggtcgaggcactcttctgttggtagtcgagttccttatgcaag

SEQ ID NO: 68015 - DNA, 408 bp, Zea mays
  Clone ID: MRT4577_162025C.1
tcacagagaacgcggggagggtgtagccctggctgtagtatgcgatctgcgatggggggcagatgacagggggtccagatagtgagccccgcgggatccctctaagggactgcttacttctaagttcacttgcgaggacgccacttcaggggactcaaagttgaggtgattgcaatgaaatcggagaagggggagaaggactggtgatcacttgctgctcacaatcgatcgcggaaaggattacgtgggacgtggagcgaatgtcagcacacttgagagcagaattcggtaccatatgtaccaagcgaacgtgagagtgctccagggaatgggcatggaccaggtatagggtctctatctcttgggccaagaagtgtcgaaggaaccaaataaggaggatggaagccg

SEQ ID NO: 68016 - DNA, 462 bp, Zea mays
  Clone ID: MRT4577_162026C.1
cggacgcgtgggcggacgcgtgggcggacgcgtgggagggtgggctcacaaaagatcatagctcaacaagttgtggggaataatgtgcatgaactcaccaaaggtgggagttgatgtgtagtgtaaggctgaacaacaaataatggttaaagctgagcatctcttttaataagttggtcaaaaattattagcacttactaaatgtaagtgtatgccaacccaaagtaatagtaaatcaaaattaataataaaccataatgtgatgcaaatgacaaattaagtttacttccacaaattaattatgtgagtgtacgagctatctaggtggcgtctcctagtcagcttgatggcgccaaggaataattattagttctttttattgttatcgtttattttttttaagactcttccgctatgtaataatgatgtgacatttatctctatacacttggtcattatatg

SEQ ID NO: 68017 - DNA, 265 bp, Zea mays
  unsure (1)..(265): unsure at all n locations
  Clone ID: MRT4577_162027C.1
agccgctagaactagtcgactagttctagatcgcgagcggccggccttttttttttaaaaatntnaagaaaaagaaaaatttgggcggaggtgggctancccttctaaccacacctttctccctataacagccctgtgaccggaccaaccccattcactagagggcataaaaggcctaccctttcctacccaaaaaaacaaaaaaacattttttaaagccggcccccctaaaattaaaccacctcgtatacatctttagaaacca

SEQ ID NO: 68018 - DNA, 205 bp, Zea mays
  Clone ID: MRT4577_162028C.1
tagcggcgatgattgagtaataatgtgtcacgcatcaccatgggtggcagtgtcagtgtgagcaatgacctgaatgaacaatttgacatgaaaggagaaaaagtactccatctgttccaaattagaattggttttaaccttttaataggtttatacaataagaactagaaagacgtcgttgatccgttccacataccgtcgttct

SEQ ID NO: 68019 - DNA, 311 bp, Zea mays
  Clone ID: MRT4577_162029C.1
tttttctttttttttttttggtttttggcttttttttttttttgtttttgatttttttatccctaattcgatatgctcccggtatctttttgaagtttttaaataacttgaaaaccttgggccccacatgctacgataggttgttcccattcactgatcaggggacctgccttacaaagatttgcctgtttctggttaacaaagccatccccaaagcttatcagggattacaaacttgccctttgtagtcgcaccatatcgctcaatgctcaacttttactttgacatttccatttggcaaaattccctgg

SEQ ID NO: 68020 - DNA, 328 bp, Zea mays
  Clone ID: MRT4577_16202C.1
gccggccggtttcgggacatccttcaaaatgaacgcattctgtatcaaatcattaattttaatactttgcctctttactacctgtacattggctgaatggaaaagatgtggtttagaatacgaaattacggaaagatgctgtcaagaggctactggaacaactaaaactcactactgctggggcgatatgcgttatcattgtgatgttggcccatttgctggagacccatgggagacttttacagattgttgtaaagatcatgatgttcccgtcgaaacatgcccataaatggcagtattagaaaaaaaaaaaaaaaaaaggccccta

SEQ ID NO: 68021 - DNA, 418 bp, Zea mays
  Clone ID: MRT4577_162030C.1
gggtgcgcgcccgcgtccgcagggggattgggattttatgttttagctgagtagtgtgcccacctcccatgcagttttgtttacaatttgttgactttgacactgagggtcaccgtagtcataactatttgaatccaatcacaacatttcttgttaaggcattcaaacaaaaaaaaatctcaattatcttgtcataggccttcttgaagtttacctttaggactagaccatctctcttcttaattctagtatcatggagtatttcgtgcaaagccattaccctatgatttgtttcaattattttaaaagcttctaagtacgtttttaggtgcttttcacatttctctcgaggtggtttgcattgaatattttcctgggacaagggaacttcacttaacaatgttggaatttgtaattt

SEQ ID NO: 68022 - DNA, 628 bp, Zea mays
  unsure (1)..(628): unsure at all n locations
  Clone ID: MRT4577_162031C.1
atattagcttgcatcgtcacctacaccgagcagctcaagagaggaagcgaagacccatttccccgagcgcaagagtaccatggcggcggaggcagtttatgagccccctcaaggagaagcttggcgtcgaggatgcccccgagctacaactgaatcgcatccgcatcaccctctgatccaagaacgtctacaacctgngagaaagcttgtgcgagatttggcaaagggagccaaggataaacatcttagggtttaagggcctgttcagatccctaataaggttctccacgtcatcaaccgcaaatccccttgcggtggaagaaccaacacatgggagcggcttgaggaccgcatccataaaaaggtgttcgaactgatcacttccccagacggggtgaagcagatctcctctattaacatttaccccggctggtgaggtcaaggagaccattgcggacctggaacgtcccgctatatattcccggtgcttttgattttgagctccccgtgcgtgcctcgaatacacacatcccaatattgggagcttataatccgtttggagctgtatggcttaactgtgggctgcgcaacttaaaattttgtggccgcaatctaatatgtcagggaa

SEQ ID NO: 68023 - DNA, 197 bp, Zea mays
  Clone ID: MRT4577_162032C.1
cagaaaatgtgaaggagaaaaaaaacccgtatgaaagctagaactttctcctttctctgtctctctcttttttttttttgtcgtcaagtttttgttcatattgatttcgacccctcttccctcagtgtccttctatactaggggttttaggagaattcaattgataagttcactgttaatagtaagcagcagatggc

SEQ ID NO: 68024 - DNA, 310 bp, Zea mays
  Clone ID: MRT4577_162033C.1
ttttttttttttttaatgaatggttgtgcatgcatgctaaggggagaaagggaggagtaaaaacacgtgtatgacgaagagcatgcttagactcgaacgacgaaacgtgaattacagtctatgtcggggggtacgcgtagggatgcgattatttggtcgcctcctcgaggtacgtgaccaggtcgttcctgtccttggccttcttgagacccgcgaaagccatcttggtacccgggatgtacttcttcgggttctcaaggaactctaagaggggttggctgtcccaggtgatacccttgttgacgttggc

SEQ ID NO: 68025 - DNA, 1217 bp, Zea mays
  Clone ID: MRT4577_162034C.1
ctgcttcctgctgcgatggggggcgagacgcacctgagcgtgcaggagctggcggcgtcgctgggcgcgctaccgccggagttcgtgcggtctgagcaggaccagccgggcgcgaccacgtaccgcggggccgccgtgccggacgcgccggtgatcgacatgtcggagcccgggttcggcgcgcgcatggccgcagccgccagggagtgggggctgttccaggtggtgaaccacggcgtgccctcagcggcggtggcggagctccagcgcgtcgggcgggccttcttcgcgcttccgacggaggagaaggagcgctacgccatggacccggcgtccggcaagatcgagggctacggcaccaagctgcagagggacctcgagggcaagaagacgtggaacgacttcttcttccacgtcgtcgcgccgccggagaaggtggaccacgccgtctggccccggagcctcgccgggtacagggaggccaacgaggagtactgccgccacatgcagcgcctgacgcgcgagctgttcgagcacctctcgctggggctggggctccacgggagcgccatggcggaggcgttcggcggagacggcctggtgttcctgcagaagatcaacttctacccgccgtgcccgcagccggagctcacgctcggcgtcgcgccgcacaccgacatgagcacgctcaccgtcctcgtgcccaacgaggtgcaggggctccaggtcttcaaagatggtcaatggtacgaggccaagtacgtgcccgacgcactcatcgtccatatcggcgatcagatcgagattttcagcaacggggcatacaaggcggtgctgcaccgtacgacggtgaacaaggagaagacgcggatgtcatggccgatgttcgtggagccgccgggggagctcgtcgtcgggccgcaccccaagctggtcacggaggagagcccggccaagtacaaggccaagaagtacaaggactaccagcactgcaagatcaacaagctccccatgtaattatgtagctcgggttctactgtcgtgcagtgtgcacccgcttctgttatttcagtctaccatttaagtcacataaccgaccgtgttatttgttgttgttgttgtaagggcactaatacatgctaaagaataactagtattttgtccgtgtattactgtaatttctataattaaaatatttacgatatctattatttagt

SEQ ID NO: 68026 - DNA, 1428 bp, Zea mays
  Clone ID: MRT4577_162035C.1
cccacgcgtccctcactccttccccgtgccgtcctgcttcctgcaccgctgacgcgcggcactcacctgagcgcggacgcgtgggagcgtgctcgcgaggccctgcttcctgctgcgatggggggcgagacgcacctgagcgtgcaggagctggcggcgtcgctgggcgcgctaccgccggagttcgtgcggtctgagcaggaccagccgggcgcgaccacgtaccgcggggccgccgtgccggacgcgccggtgatcgacatgtcggagcccgggttcggcgcgcgcatggccgcagccgccagggagtgggggctgttccaggtggtgaaccacggcgtgccctcagcggcggtggcggagctccagcgcgtcgggcgggccttcttcgcgcttccgacggaggagaaggagcgctacgccatggacccggcgtccggcaagatcgagggctacggcaccaagctgcagagggacctcgagggcaagaagacgtggaacgacttcttcttccacgtcgtcgcgccgccggagaaggtggaccacgccgtctggccccggagcctcgccgggtacagggaggccaacgaggagtactgccgccacatgcagcgcctgacgcgcgagctgttcgagcacctctcgctggggctggggctccacgggggcgccatggcggaggcgttcggcggagacggcctggtgttcctgcagaagatcaacttctacccgccgtgcccgcagccggagctcacgctcggcgtcgcgccgcacaccgacatgagcacgctcaccgtcctcgtgcccaacgaggtgcaggggctccaggtcttcaaagatggtcaatggtacgaggccaagtacgtgcccgacgcactcatcgtccatatcggcgatcagatcgagattttcagcaacggggcatacaaggcggtgctgcaccgtacgacggtgaacaaggagaagacgcggatgtcatggccgatgttcgtggagccgccgggggagctcgtcgtcgggccgcaccccaagctggtcacggaggagagcccggccaagtacaaggccaagaagtacaaggactaccagcactgcaagatcaacaagctccccatgtaattatgtagctcgggttctactgtcgtgtgcacccgcttctgtaatttcagtctaccatatttaagtcacataaccgttattccagtcgcatgcatggccacagaattggcttgtgggctctttcgtctggtttgggccattgcgggctgcttatctactctctttcccgaccgtgtttatttgttgttgttgtaagggcactaatacatgttaaagaataacgggtcttttgtccgtatattactacaatttctatagatgggattgtccacgccattttaaaaatatttacgatacctattatttagt

SEQ ID NO: 68027 - DNA, 275 bp, Zea mays
  Clone ID: MRT4577_162036C.1
gggggggactgttcttttttcaacaggtactttttttttttttttttcttttttttttttccctcgaaagcaaaaatattttgggggccccggttttactttttttttttaaccccaaaccaaaccccctacaaaaatctgggtaaaggggaaaatattcactgggggcccccccccccaaacacccaaaggttgaagggaaaccccgcgcgaggggcttttttctgggccccaaaccggccctttggaaggcccgtacgggtccccaaaggggg

SEQ ID NO: 68028 - DNA, 490 bp, Zea mays
  Clone ID: MRT4577_162037C.1
gtgaagggcaccttgccagagacggacctacagattattagctggctgggcatgccaatgtacgacgtggatttcggatgggggaagccagcggtgatgtcgcgggcggactccgtccgtggaggcttagtgtacctaacgagcgacgggccaacaggcggcggcggcgtccgcgggcgggtgtgcatggaagctgcaaatatgaaggagctggagcggctgctttacgcaaaactctagcccctagagcctagacctgctaggtgcttgatgtgtggaacacaaaacacaataataataggccggagaggatacgactggctgtttttttaatttgtctaaaaaacttagtgtttatgaaactccactaccaaccgatctacatcatacatgtatgacggagaagatcgatcaatatcccactgttggtgaaacttaaagagtgagttgagatcaatgatgggcccaataatatatgcgtgctgacttt

SEQ ID NO: 68029 - DNA, 436 bp, Zea mays
  Clone ID: MRT4577_162038C.1
tcgtccgaatgtcgtccgcttgcacgaggctgctgccagtaaaacgaattctacatggtgctcgagtttgttaacgggggccagctcttccgactggatcgctatcactgtggaaactgatcctaacacgagggctaggaggctctggcagcggctaatccaccgcctcagctcttgccatgacagaggtgtctaccacccagacctcagccagagaagcgcttgttcatcggaagggcaccatcaagatctctgactttggcctctgcgctctacctcaacatttcgggagcgacggtcttctgcacacaccatgtggcagtccctactacatagctactgaggttgtgcttaacagaggctctcaccgcttcttgtcagatctctggtcgagcggggtgatcctctaccgatgcttgggggctgccttcccttc

SEQ ID NO: 68030 - DNA, 496 bp, Zea mays
  Clone ID: MRT4577_162039C.1
ccggccgggaacaaccacacctactatggcgtcgaacaacacgtccctcatcgtggcggcgatgctgctcatcacgctacgtgctgccacgccgacacctcccgtcgaccgccatagcgactgtaaggccgactgagacgaggccacgaccccactccacatgaccatggaagactgcatgaagacgtgcccaggagatcgctgctaactacgggacgatgtaccctgtacaaggataacaaactcgacatcccatgaactagattaatagctcctatatcatctgcctatccatgcatgcatctgcattgcgtatgcacactgtgcatgccagcccacaaagttcgacagcatcaccgatctcgacgaatatgaaatcgagtacactcgatcgagagatcgcatcgatgcttgtgagtatatgagaattccacatctatatataacaaatacgaatcaaattatgtttactaaaaaaaaaaaaaaaaaagcggcc

SEQ ID NO: 68031 - DNA, 998 bp, Zea mays
  Clone ID: MRT4577_16203C.1
gtcaagagttaagcatgcttcaagacaaggtcgatggtgatggcacaacagctgatactgcagctagaacccttctttccattttccagcatagttctgaacgcattgctcattgctttggaagcagcaaccagacagcagctcagaacgtgaacgatgagcctcagccttcattggactcgttcgagcaaaccgtgttgaacttagaggagatccaagatgacggtcaatcgatcaatgtggcaccaccctatatcgaaggaccagcatgtcggatcaagctaaagagagggaggggtatgagaaattttcagagggagatcattcctggcctccttctagggaggcaagagatatgcgaggacttggaagttataggctatgcgccaaagaaagctcggtccaggaaaccccgcaagggtccaggcgcatcctcagctcaaccgaggccgtgcaaacgtggagctgtcaagcgctgaccaggagcatctgcattccgtggcagggtgccataaggcaggcgattcagaacaggagagtccattctaaaccatgtgaatattcgtgtgtatcaagcctagcttcaaactctggtttgctggtgaccatttagttggggatattctttcctttcccctcttgaatctaacaacctgatcactccaggttgttagattcaagattttttttttttttttgcctttatatttgaaagtctagcggcgaagacagtcatagtgccacaatgatcagtctcgaaattccaggcttagatcagagtcgacgaagaaggcaagatggttgttcctgatgataacctagcactttctatcttgggttataccttggattaatgcgaaaacagtatacttgcttagattaaatttttctgggcatgttgactgctgcatctcagcaacaggccctcacttcaatccaggcgatttggactggtttctctgacctgtgaatcaaagaacaccatgtctgtcagtaca

SEQ ID NO: 68032 - DNA, 1713 bp, Zea mays
  Clone ID: MRT4577_162040C.1
attgggtacctcgaggccggccgagccccagactccgagaggccacctcgagccccccctgccccgcaagccgcacccgccgctccctccgccatctgcgctgcgctgctctgctctgcggtgccaggctgccagccagtgccggcgcgcgcccgctgccgccccgacgggcccaccgttctcttctctccgcgctgcgcgccggctgggctgcaggtctgaggtcagttaatgcgcccgtgacaggcggcgtcggggaggccaagggcggtgccgggttaatcccgccgtctctcgaggcggcgcccgcggaggaccaggcgggagggggagacggtgaggcgcggccatggggggcgccaaggcggaggacaaacccgccgccgccgctgcagaagattggtgctaccaatttggaaacaaggatgcatttgacttgaagcccccgaaaaaatcaccgatcgcgttgagaacggttgtctttgctatgactatgttatgcgggatatctatttgctcaatgtgcatgaagcaactagggagtgatggctggtcaagagttgtcaagattgaagttgtggaacaaccatgtaataagtccattgctcctctttcagaggctcaatttgtgcgctatcctcaaccgataacttacagcagggaggaatgcaagtgcaatgctgtccggtcctttgcaattatatcctcgcaccgatctggaagtggctggtttgaaacacttcttaacagccacatgaatgttagctccaatggtgaaattttctctagaaaagaaaggaggagtaacatttcctctatagtagataccctggataaagtgtacaatttggactggaatagtagtgcttccaagaatgagtgcactgcagctattggcttcaagtggatgctgaatcagggcctcgtggcaaaccatgcggacgtagtcgactacttcaaccgaagaggagtctctgcaatatttcttttcagaaggaacctgctccgtcagttggtatcacaagtagcgaacaatcacgacaggttacttaagcaactaaacggaacgcacaaggcccatgtccacacgaagcgtgaggcccatatactggcaagatacaggcccaggctcaacacgacgtcactgatatggcagctgaaacgagctgacgagtacactcgcgacgctcttgagaacctaaacaacacccggcacatgagcgtctactacgaggatgtcgtccgcaacagaacaaagctcttggatgtcctggatttcctcggagtgccgaggaggaagctggtgagccggcacgtgaagatacacacgaagccgctgtcggagcagatcgagaactgggacgaggtctacagcgccctcaacggtacccagtacgagggcttcctgaatgccgctgactatctagtataacatcacgtttctggatgtagatagtgtgcgtgtgattctttcgtttcttgtttgtttctggcagaaattttgatgcggggtaggcgccttttgccgtgcatggttgcattctcggtaacctgatgctcctgtaactaaccctccagcttctctggtctttgtatttgccttgggtgtttgctgatgttcttttaaactatttgaaatcgggatgtcggagttccaagatcccgggcggacaaaatataaaatatcaaaaatatataaaatatttctgtagc

SEQ ID NO: 68033 - DNA, 626 bp, Zea mays
  unsure (1)..(626): unsure at all n locations
  Clone ID: MRT4577_162041C.1
ccggccgggatcaaacctcaatctgacatcctgtcattactgagtttctgtcaagcaaagtcacaaaccctcaccgacctctatcagtctattattcgtcttcatcttatacccgcaaaggccggaccctgcgggcgcaacatcaatcatgtctgctgatcgccagaccattatcgaagtgaaccgttcgcttcgcaacatcaaaaatgaactcgaaaacctcctcgagcgaggcgtgattgacgactccgtctacgataccattaatgtcgctctgcctcctgagtcttccctttcaggccctcttcgaactgctacaggcgctgccaacaaaaccgcggccaaggccgtttctcccgcgccaactccctctcccgcgccatccgccaaggcggcccctacaaaggccttcaacgacctcaagatcaagtccagctctcctgcgccgcccgcatacgatcagacacctcctcctggtctccctactcgcaacgtcaagnccaccgtcgcccacgctcgcgctctataccgctacgccgcttctgacggtcgcgacctgaccttcgagaaagatgaccgtatcgccgtctacgagtatatgaaccaggactggtggatgggtcgca

SEQ ID NO: 68034 - DNA, 131 bp, Zea mays
  Clone ID: MRT4577_162042C.1
ttgggggtttgctcatcagccatcatcaatacatcatcagtggaacacctacaaattgtgcccgttgttatccaatacataggattttaagatgcatgagtccaatatagctgacgctttgcccccagttt

SEQ ID NO: 68035 - DNA, 1198 bp, Zea mays
  unsure (1)..(1198): unsure at all n locations
  Clone ID: MRT4577_162043C.1
cgacggaccgggacccggggccccaccgttctcttccctgcgctgcgcggcggctgtgctgctgatcagttaatgtgcctgtgaggctgtgacaggcggcgtcaagcgagttcgaggcgggcggtggcgggctaactgaacccgccgtctctcgaggcggcgcccgcggagggccaggtggaggcggtgaggcgatggggggcgccaaggcggaggacaagcccgccgccgccaccgctgaagacgattggtgttaccagtttggaaacaagaatgcgtttgacttgaaggccccgaaaaaatcaccacttgcattgagagtggttgtctttgccatgactgtgttatgtgggatatctatttggtcaatatgtatgaagcagctagggagtaatggctggtcaagaatagtgaagatcgaagttgtggaacaaccaggtaatacgagtctacaggtcgggtttcggaggctcaatttgtgcgctatcctcaaccgataacttacagcagggaggaatgcaagtgcaatgctgtccggtcctttgcaattatatcatcgcagcgatctggaagtggctggtttgaaacacttcttaacagccacatgaatgttagctccaatggtgaaattttctctagaaaagaaaggaggagtaacatttcctctataatagataccctggataaagtgtacaatttggactggaacagtagcgcttccaagaatgagtgcactgcagctattggcttcaagtggatgctaaatcagggcctcgtggcaaaccatgcggacgtagtcgactacttcaaccgaagaggagtctctgcgatatttcttttcagaaggaacctgctccgccagttggtatcacaggtagcgaacaaccacgacaggttacttaagcaactaaacggaacgcacaaggcccatgtccacacgaagcgtgaggttagtaatgctagctaagaaacggatatggcagcaagtctctgagctgatctgatctctctctgtgtttgacgtgtcgttcgttctcgctccacaggcccatatactggcaagatacaggcccaggnctcaacgacgtcactgatatggcagctgaaacgagctgacgagtacactcgcgacgctcttgagaacctaaacaacacccggcacatgagcgtctactaacgaggacgtcgtccgcaacag

SEQ ID NO: 68036 - DNA, 382 bp, Zea mays
  Clone ID: MRT4577_162044C.1
cgcttatccgggtgcggacggggctggaggggcggttccaggagcccgggctcaagggcccgctgtgggaggaggtgagcgcgcgcatggcggtggcggtctacggtcgcagcgccgagcgctgcaaggagaagtgggagaacatcaacaagtacttgcgcaaggccaaggagagcggcaagaagcgaccggcgcacgccaggacgtgcccctacttcaacgagctggaccgactctactcccgcttgggccaggcaaagcaggcgagctgagtgctgttggacgcggtggtcaagtaccctcgacgtgcgctacggcccgtcgggggtaggtatggacagggcgcaggccttcggtggcgggggcacatataatgacacta

SEQ ID NO: 68037 - DNA, 179 bp, Zea mays
  Clone ID: MRT4577_162045C.1
tgcgacggaggggtagaccccacgatggcggggtccgcttcaacttaatctacagcggctcccagctcctacaacgcgaattggatctctcgacaaggggagagggaagagatggggctcacgttcaccaagctgatcagccggctgatcggcaagaatgagatgcggattctgatggt

SEQ ID NO: 68038 - DNA, 1730 bp, Zea mays
  Clone ID: MRT4577_162046C.1
tggcatcgcccgccggtgccggcccggacttcatggctggacccacgcacgaggtctcatcaatttttccgtagcatcctctccctcgaccaatgcatgcccctgctactgggcgatcaatttgttcatctatgttcatacttcgttcattccccgtcttccccagccggcgaggccgttccaatccgttcccccggttctcattcccaccccgcctcctattctcctcgctcgcgctgacgggctcccacacgcaccccccgcctctgtgccgccacaccaaaaccgcactccaccgccacagtccccgcccccgcgtcgctgtcgtccgtcatcggtgccgtcgcttccccagcacggtacccctagcgccagcgcacgctataaggcaccgcggtctagccatggcgcccgcaccggcatcgctctccgcgcccaacgccctctccctgcccgcgcctgctagagtcacctccgggaggtggaacaggagcctgtctgtctccgccgctgcgcggtccgtgacccgggtggtgtctgtcgcgtccgcggcagcggtcacggcgcagaggaggctggtcgccgcggcagcggccacggagatggcgcccacggcgagcggggaggatgggagcaagcccttcgtggaggagatgcgggcggtcgcgatgaagctgcacaccaaggaccaggcccgcgagggggagaaggagcctcaggcgccccccgtcgccaagtgggagccctccgtcgagggctacctccgattcctcgtcgacagcaagctcgtcttccagacgctcgaggccatcgtcgaggccgtcccttggtatgcagagtctccggaacactggtgctggagagatcagaggcactcaaaaaggatctggaatggttcaggcaacagggccacacaattccagaaccatcgccccctggcaccacatatgctacacacggggaagtactggctgagatctactggaagaactgtctgagaaggacccccaggcatttatctgccatttctataacgtctactttgctcatactgctggaggccgaatgattggcaaaaaggtttctgagaagattctggacaagaaagagctggagttctacaagtgggagggcaatctctcccagctgctgcagaacgtccgcaacaagcttaaccaagtcgcttcaagctggtctcgggaggagaaggatcactgcctggaggagacggagaagtcgttcgcctactcaggaggcctcctccgccacatattcacctgatttaacactgttggccgatccagtttcaaacgctgtacatacataacctttgactgttaaaactttattactggtgagggggatctccctcccccagatacgttttacctgcaaacaaagttgccaagtgttgaataaacctccctgcattgctggtgttgggtaaacgctgagcgatgccgctgactgtgaaggtatatgttttctgtaatggaatcggatggcacagcaccatgcccctagacctggacaccggtggatggcgctgccacaacacacggctgccgttgagatgcgatgcagtggatacccgtaggtcgtttcatgaccactagaatcggccgttccagtactgcactattgctaatggcaaagaggagcccttttattataaaattgttctcttattgggagaatttatcttatgagaaaaagagaaagtttttggt

SEQ ID NO: 68039 - DNA, 1443 bp, Zea mays
  Clone ID: MRT4577_162047C.1
gtcgcccgcaccggcagcgctctccgcggccaacgccctctcactgctcgcgcccgctagagtctcctccgggaggtggaacagcctgtccgtctccatttcggcccggcgggtggtgtctgtcgcgccgccagcggcggccacggcgcagaggaggctggtcgcgccggcggcggcgacggagatggcgcccgcggcgagcggggaagaagggagcaagccgttcgtggaggagatgcgggcggtcgcgatgaagctccacaccaaggaccaggcccgggagggggagaaggagccccaggcgccccccgtcgccaagtgggagccctccgtcgaggggtacctccgattcctcgtcgacagcaagctcgtcttccagacgctcgaagccatcgtcgagcgcgccgccgtcccgtggtatgcagagtttcggaatactgggctggagagatcagaggcgctgaaaaatgatctggaatggttcaggcaacagggccacacagttccagaaccatcggcccctggcaccacatacgcttctctactggaagagctgtctgaggaggacccccaggcatttatctgccatttctataacgtgtactttgctcatactgctggaggccgaatgattggcaaaaaggtgaaccgccccacccccacgcttctgagaaaatgacaaagtatatggcatcatgtcagagcattattttggggcatacatgatttagacagcatcgacatatttagcatgttccccgttcctgatgtcatcaaatccccaagcatgcttatgcgttttctgttggatatgattccttgtgccttttttctttgtcgatactgcagtgcgattcttgttaggaatatgatcccctgtgtgtatgtgttttttattgctgatctgggcagtttagaagtctgaaactacatgttcctccattatcttgtctcatttaacagagtatcatgtgctcctggcatcttagtttctgagaagattctgaacaagaaagagctggagttctacaagtgggagggcaatctctcccagctgctgcagaacgtccgcaacaagcttaaccaagtcgcttcgagctggtcttgggaggagaaggaccactgcctggaggagacggagaagtcgttctcttactcaggaggcctcctccgccatatattcacctgatctatcgttgctggttgatccagtctcaaacgctgtaaatacatagtcctttgactgttaaaactttattactggtgagggggatctcctcccccaggtacggtttacctgcattcaagttgcccagtgtcttactggattgctggtgtttggtgtttctgtgatgcaatctgtattctgtaggtcgtttcatgactaatagagtcgaccccttccaatgccgtcaatggcaagagctcttccaatcaacatgc

SEQ ID NO: 68040 - DNA, 463 bp, Zea mays
  Clone ID: MRT4577_162048C.1
acagaacatgtaggggaagaaggcgagggaaaaaaaaaagggcaaaacgaggccaccaggtcaccggagaacggaagcgacgccgagcaaccaatccctatcgctcgtctcgcacgacgtctctcctcagatcatgtgacatgtgcgactgctaccggctgctctgggcgaaccgcgccgactcctactctcaagatatccaccttagcacagtgactatctgcacagggctgaaggatctgaagtatgctgacactcatgaatgagcgaaagctgagggtgattatcagacgtgaagattactgaccatgcccagcatcattagggtgatggacgtgattaaggacaagactccggaggagatccgcaagacattcagaatcaagaacgacttcacccaaaaggaggaggatgagatccgcatggagaaccagtgggccttcgagtgattgttgtcttcctt

SEQ ID NO: 68041 - DNA, 365 bp, Zea mays
  Clone ID: MRT4577_162049C.1
gcacttgtaagaaagagaccggctgcatgaaataggatcgatactgtgactagctcagagccgtgcgcgcgctccatgggcatacacatccatacacacgcgcttgattaccatgcatgttctatgccacggaggatgaaggacacctggcaaagaggtataggtgccctacatgggcgatcgaacgcctacaaggtgtccgagccccgggcgccctatcgtgaacagggcacgcaccagcgtgtgagctaggacccgatgtagttgtcaccgtggttgacgccgccgccggtgaagacacaggggagagcgctggggtacatggcagccggatcatggcaaatgtgggggcccggctagaaact

SEQ ID NO: 68042 - DNA, 318 bp, Zea mays
  Clone ID: MRT4577_16204C.1
gactgcatgcaagtgcccaagattttattatcagcagttggaccatccttacagtgtcactacatttgcaccccagaacatggactcccatctaggaactgaaaaaggcattatggtacattctgttgtgaatctccttcggtggacagaaataccacatggacaggacaaagttacaagtggagcgttcaatttcttctgcagctaaagagaaataattcggtcggaccgaccggaaggatcagaggctcagacccctggtggtatcaccaaaatcctccacttgacaattgatcttcaattagtggtgacacaact

SEQ ID NO: 68043 - DNA, 256 bp, Zea mays
  Clone ID: MRT4577_162050C.1
cgaatgcctggaacgcggagatcggataccggaagtcatggtgaacaggtccggggggaactggagtatgacgtcgtccccctggagagcactgtgggggcgctacagtgcttcccttatctgggggacgtgcgcatcttcacctacggctgtagcatggctcaagagtgcgagtgtggcggatgccgctgcagctagccttactctcgcccgaagccaccaccagctggaagttctttcacagacgcgaccgtga

SEQ ID NO: 68044 - DNA, 236 bp, Zea mays
  unsure (1)..(236): unsure at all n locations
  Clone ID: MRT4577_162051C.1
aaccaaccggnggggcagcagggaaccaccggcaagagaggggaaggaccaaagcccgaagggccggaaccnccacagggccggaacgacggccggaaggccgcgaacgagcgcgaagacgaggagggcacccgagaccgncccaacgggcacagcgcggaagcgggccgcgccaagaaccccaagaagggganccgaaaggaccccgccaagaagacgcccaacaacccccccgc

SEQ ID NO: 68045 - DNA, 1924 bp, Zea mays
  Clone ID: MRT4577_162052C.1
aagaaaaactcataccaaatatccttttggggaaaaaaaacgggaatacatgagtacctgaactcaactgaaaatacattattactttaatacaaagagctttactggccaaagctcagttcatagtttctagaaccttgcagaaattatgcgaaacaataggacccaatgtcccacaggcgaggtcagttcacagtttctaaaacctcgcaggaattatgcaagacaataggtactcgcctcaatcagttttgcagcattagaacatgaattattcatctgcacattgcacgacgaaaaacaattgttactacaggagctgagcggtatgcgaacctcaatatacagttacacaatacacgccactatgtccatgataacgctcaaatattacacccaaaaaaaatggactggaaacaagagtacagatgctgattcctcatagacgagctacgtaggagttggcttgtgtaacgtatcgcacccatctataagggttgtatgccttcgatttctttgcgatctgaagatacctgacctgcaactttgatgcattgtacatcggtatagtgaaattcatgttcactgggccagcttcctttgtgatattcccatgtgactcctgagaaaatgtcagctttgcacggagggtgtgctcagaaccaccaacaatcttctttagattccactcaagtctcctggatccttccttaaaatcggttgtctgtccaactgctccagcttccaactcaaaactcgctctcattgtgtatgcaggcactggcatttgtactacgattgtgttagcagtggcactcgcggagaagtcagctcttattttcagtagaacttcagccctcgctggtccagcttcttcaattagtgcggttacacggaatggtggcttaaattcttgggtcatacggtagttcattacaggaaattctccatcgggcggtattaaagtcaaagttctgtcaatatcaaaactgtccagatgtactgactcatggaaattgcaatcatcaagaatgactgttcctcctccagaagaacttctgtaatcgtatgaagaagatccagttcttccgatgctcaaatcctcattgagagcaagacggatttccggattgccagtgaggtaacttttcatttgaattgttccatcaatctcagatgtaagtatatagccactcgagctgaatgttacactaattctctcaatgatatcaacaaaaatttcctccctcttcttccccccaggctcagtagcaacaacagattttgtaacagctgtaccaggcatacgcttcgtgccttgcatgaacatagcagcaggaccaagcggtggcagccttccagcatcaaccataatgggttcattgaatatgtacgacttgagaacttcagtagaggttgtctgtgggtatccaaagtcaatgacttcatcaagcaattcatacaccaaaataaagttcttccgcaatgaatcttcattaagaacgccgagataatcttttgtaacacgtgcaatcctttgaagaagctccaagagaagggatggggagacattaaccattgtggttaccacaaaaaatagtccagcgactttgacatgaatatagttaaccccatcgacattgaagaccgggggcgcctcctctgcctcgtcgtcgttccagaacttgaccttccggaagaagatctccgcgcttcccttgggcacctcgccgcgatagtcgcggaagacgatgtggtcgccgcgctgcgacagaacgaagaactgcgatatcatcccacctcgccgacgcctcctcgggatcgcacgcgcagatatcctgggccgctggccgcgccgccttgcctctccttcccctcgcttccctgctgtccgtcccggggcccggccggcctcgaggtaccc

SEQ ID NO: 68046 - DNA, 561 bp, Zea mays
  unsure (1)..(561): unsure at all n locations
  Clone ID: MRT4577_162053C.1
gttggttgcattgcattgcctgggtgggatgacgacccttcacanattcttgcatgcatcctccactccactccagcgagtggngaaaatggaaaataaaaggnnggaaccttgcccttggnaacaaataacgctcgattttattattgctattttgctttagtgacaagcgattcttgtcgtctggtgactgtggatggagcaggatggtcctcgtcgtcgcgctctcgctgctggtgctcggcgcgctgcccaacgcgaagcgcaagctggcggagtgcggggtggcgcggcaccggttcctctctatcggcggcgtcctctgcttcgtgcacgcgcccttctgcgccgtctactacgcctccgctagcgccgcggcgcgggaggctcgccgcgacgcgccgcacgtgtagtttgttcggttctattagccacccctccatgagtgtatcgtgctcttgacgaaggtgctggcacagaagatggcgtcagacgggctgggcatgggatgtaattttgctcgtttctcgaacgatcatgcatggctgtgcatgggatgga

SEQ ID NO: 68047 - DNA, 280 bp, Zea mays
  Clone ID: MRT4577_162054C.1
tccaattttacatacagctgcgcgtgcaactggtcgtctcttgtttctggacggtgacgccggtgctacaaagtcagacgacgtcttcggcatcgggtacaccttgtagtggcatatctttaactgagcataccagatgccgagacagagtgttgatatcgagggcgactatactgacatctttagcgatcaacaaatgctggccactattcttggcttgtgacctcctgaatgtagccgaacaccaagcgtggtacgctcggtacttcccctcatttgc

SEQ ID NO: 68048 - DNA, 358 bp, Zea mays
  Clone ID: MRT4577_162055C.1
tcgagccggccgggagcagctgcacaggcgtccgccgagatcgtcggagccggtgttatctacctcactaattaatacctaatagcagctagatcgttctgtgctgcaataatggacaatcgctcctcctccctgcacctggtagctgcgcccggcctggcagctgccctgctgcttctggctgctgggggcgggacgccgtccgcggccgcgagctgcgaccaggtgacatcggccgtggtcccgggcctcgtgcatccgataggcaatgcgcagtcaccctccgcgctccgctgcagggtggagcgctctgtcaacagtcaagagtcgtcggtggtcgaccgccaagccacctgcc

SEQ ID NO: 68049 - DNA, 454 bp, Zea mays
  Clone ID: MRT4577_162056C.1
aagcagtggtaacaacgcagagtactttttttttttttttttttttttttttttgatttttttttttttttttttttttttttttttttttttttttttttttttttttttttttgggccccaagaccactcgggggataaaaaaaaaaaccaaaaaaggttatgcttaaaggggcgcaagaaccgaagggttttttgcacaagggccccctcccccgggtccaccctaaaaacaacccttcaatggattctttcccgcacttaattgcatgggaagccccttgctctgggggggggcccccacaatcgagggggccaggattacaaaggaaaacattccgggggggggggggccaaacgggaagcaaaggcgccggttaaaggcaggatttatgcccccccaacagacagaaaccgcagcaaactacaaccttttacagaccggggccaaggg

SEQ ID NO: 68050 - DNA, 143 bp, Zea mays
  Clone ID: MRT4577_162057C.1
gtggattatatggaaaaagaagaagcttaagtatgctgtctttatgaacctaaaagggaaaattgccttgataaatttaaaaatcctggagaaaagttaatttaatcacatattttgagcagaaactatcatttactttaaat

SEQ ID NO: 68051 - DNA, 814 bp, Zea mays
  Clone ID: MRT4577_162058C.1
cgggaaaggatatatcaaatactagtaatcgccagcacacattcctgaatcagtgaatcaggatgctgaagaagtgttgtacactggtaggcctaacagcagcatgggtcaatccctacgagaccttgagaatgaccgtgcagatttccaatcgacaccacatgaccctcattctgtggctggagaagctaatttgctgcaacataatgtcccaagggacagtgatctgagtcctcttggcttactttggtctgagctggaaggacgtccaaaacaacctctctcatctaatgtacttagtgtaaatgaacgtagaaatcccaagcctacaacacccaaggacattccacctgtaaacatgagacaagggccacttagcagaatgaatgaagtttctagtgtgcgcgatgagtggcctgcaaactttggtcggctggacaacatgaatgatgcaaacatttctggcagaatccatcaggttgaagcggagcatcatttgaattttgatgggcacctgctgcttcaacagatccgacgggagcaacagcaacagcggcaggagcaattgatggcccataataatttagagttttctggtgcatttcccgggcaggtgtttgatcctttgaaccaacaccgacagcctatgaatcaacagattcctgatgtggagcatcttttgagaatccagtttgaacttgagcaacagcagcaacgccaactccaacaagagcagcaccaacggcagctacagcagcaacggcaagcccagcttttgcaacggcagcagcagcagcagcagcaacagcaacac

SEQ ID NO: 68052 - DNA, 3305 bp, Zea mays
  Clone ID: MRT4577_162059C.1
ccggaatcgaccgcatgcactccaggatgccgaagaagtgttgtacactgggaggcctaacagtagcatgggtcaatctttacgagaccttgagaacgaccatgcagatttccagttgacaccacatgatcctcattctgtggttggagaagctaatttgccgcagcataatgtcccaagggacagcgatctgagtcctcttggcttactttggtctgagctggaagggcatccaaaacaacctctctcatcaaatgtgcatgggcttcagtagcctagggtctgcaaggttgcgttcctagcaacaatctgactgtggcgtttggcatagccatccgccaccaacaatatagaggcctctggtcagtccttcagcgaaccgcaagaagagctcgaggaagccaccgttgcagtacgatgcctccgaatctgcagactgtggcccaggtggtaagggcgcgaagaagaaaacgaagaaaggaaagcagattgacactcctcagcttgagcaacatcaacagcgaaaggagcaattgatggcccggagtaatttagagttttctggtgcatttcccgggcaggtgtttgattctttgcaccaacaccgacagcctatgaatcaacagcttcctgatgtagagcatcttttgagagtccagtttgaacttgagcaacagcagcaacaccaactccaacaagagcagcaccaacggcagctacagcagcaacgacaagcccagcttttgcaacgacagcaacagcagcagcagcaacagatgattcttgagcaattgttgcagcagcagctgcagggttcaaattttggaccaacaaatatggttgatcaagtcttacttcgtgaacatgtattaaatgaactgcaccagcagcctcaccatttgcaaaggcagcatgatgcagctattgaacaacttattcaagcaaaatttggtcacgggcttcatagggagcaccataatgatatgttggatgttctctcacgttcaaatcagagacagatgcttcctttagagcagcaaattcttttaggccttcaacatgagcaggaacaacaacttaagtcccaacaattggcaaatgctctgcggcaacattcaggccgggaagaagaaatgcacttaagtggggtctggccaatggatgctgctgcccagtttatccgctcaggaaccagtccaaatcagatacacagtcgtttcgatctcctggagaaccttcagagatcgtcatcgtttgatcatcatgaacatctagaccgcagcttatccttacacgaacagttgcatatgggaggtcaaggtattcgctccctagaacggactggttctttgcctggtggtggtcctggaccaaacccagatgtcataaatgccctaacacgtcatcatggacttaggcagttggaaacacatggtgatgtataccctttgggtcaaatgcctatgcttccttcaggtgttcatccccagcaacataggcatcaggaacagcttcctggttctcacataggaaggcttgaaaggcactggtcggatgccaatggtcagttgcaaaatagtctaatgcaatcttcacacatcaaccagttgcagatggaagtggagaagcagaggaggaatgtggaaatgaacctttctgttgacaatccacatgcatgggcagccctaatgaataaagagaggaatgcagaacaagatttgagtgatatgattcacaagaaacttgcccttcaatcgcagcagtcccttggttttcctgatgtttctgttccggcatcatttggacgtaaagatcactttgtgcaacctgttgtggagagccctctgagatcagtggacatgttcgtttgaggagtctctttcagaaaggtcactttatgcaaagtcagggcagttggcacaagagggatcagctaatctgggtactttacccaacagtattgagaacactggaaattttaaccttagaccaggatctggatcaatgcttgagcagaagcattttcttggaattgacgatgttcaaagtgactttccagagaccacaggtggtagaacatcagctaatcaactggttgggagtgtcaatgaattaacaaggggtaaaaggcagggttctagtgcaagtttggctggggatgatcctaatttgtctgatgaagctgttagtaaatggtctgattctggcatgtcaaaaggaagctctcactccttactaaagcgctctacaagccaacatactactacatctcagtctgtttctgcagatctgtcagtgatcaggctgaagaaagcaggacttgcatcctctgatgagaataagatggaatcaggattggcctcagtagcccagggtatggaaggctgcgttattagcaacaaagagacgggggcgtatggcatgccatcagccaccaacaatccagatgcctctggtcagtccttcagcgaagcgttgaagagttcgaggaagcctccgttgcagtacgatgcctccgaatctgcagacggtggcccaggtggtaagggcgcaaagaagaaaacgaagaaaggaaagcagattgacccttctcttcttggcttcaaggtccacagtaaccggatcatgatgggcgagattgttcgagatgattagcacgcatgagtgtacatacccggtaggagttggccttagaatcatgattggcttcaagctctacagtaaaccctaaactctgtacatgccagaaattttgtgccatggcttcacttctgcttagatcttctcttagcctctgttagttatagacttgcccgatttctcaggtttacagaagtgtcatttgtacagaacagccaagatcatcatgtatttagtggcaaagttttgttgatctgtgttcctttcttaagagggcccacagactgaaaaaagagtcatagttttgttgatctgtgaagatatcgtagcactggagcatggaacgtttggtgtgctgttgtttcaaaaaaaaaaaaaaaaaactcgagtatgtttttgcaaactgtggttaatgttactttgaagttctatgtaaaagtcagcttaattcgcttcacttaaaacaaagctgtcaattgctaaagtaatactgtctagatcacaaacctgaagtgtgagtggcttatacgtatgtcctgtggtagtttgaacgagcacaatgttagtgcgcaacttgttgcacaataacaggcaacctgaagtatttcttttgttactccctctgcctctggataaatcaatttctagagttgtgtgcagtcaga

SEQ ID NO: 68053 - DNA, 333 bp, Zea mays
  Clone ID: MRT4577_16205C.1
catggttccaaagggggagtgtgcggttaaactcattttcagaaaaaaaaatctatgttcaacttttcatgtcgtttattatttcaatggcgctttccttcattatgcttaaacactaaaaatcattaaattagcagattgaactaacagggtttgcaataggtgtgcttctgaaaaatatttgatggctttcatgtgagtagggtcttaaattgaaattacctaggcaagtcctatccctattttttatttttgtgagaggctactcatacaaatattattttgagggcgttgcatttgattttttataggttgacacgctgtcaccatttt

SEQ ID NO: 68054 - DNA, 1762 bp, Zea mays
  Clone ID: MRT4577_162060C.1
ccgggggcagcatgcatcctctgatcctctttcccgcacatcccaaagaggcgccgccgtcctctgaaaaatcctagccgctttctacatggccgagcccgccaaccggcggatggaggccgtccgccgtcacctccttctgccttcacccgcgccgcttcgccctaatccgttaagcagcctcgcggaggtggagcccagcccggtgatcattggcgggatggtgctggatatccatgccaagccttccgtgccgccccatcatggtaccactgtccctggaatggttaaatacatcagtggaggcgtagcaagaaatattgctgagtgcatgtcaaagcttgggacacaacccttcatgataagtgttgttggaaatgatttggcaggggacttccttttgaagtactggaggtcagctggattatgtacagaaggaattctgcaggttgataatgttgcaaccccagtagtatcaaatgtgtttgacggtactggagaattaatcgctggagttgcaagtgttcaagcagttgaaaattttattacttcgagctggatttatcacttccgtaatcatattgctaatgcaccacttgtaatgcttgatgcgaatttatctcctgagtcacttaaagcagcttgcataatggcatatgaatttggggtgcctgtgttatttgagccagtctcagtggtgaagtgtcgaagaattgcaccagttgcagaatatataacttgcacttcccccaatgaaattgagcttgttgccatggcaaattcattatctccatcagtgaaatataattttcacaaaatagagcagttcaaggagaaagcagatactgttgaatatatttttgaaatgcttagcccagcaatgttcttcctacttgagaagggcatcaagttgcttatcgtgacacttggctcaaatggtgtttttgtttgttgcaaagagcacactaacttcatgaaagaccagcacaagtgcaaacagacgcctttctccagacagctaccggaaaaaatccacgggtgttttccatcaaacaatcttgctaatctgtgcagagaaagctcttcaagaacatgtgtttttcatttacctgcaatatcggcctctgtgataagcctcacaggtgctggcgattgtttggttggtggtgttctttcagctctatgtgcaggcttcgatatcatccggagcgttgcagttggggttgctatagcaaaggcatctgtggaatctgaagcaaacatacctgatgacatttctgctgcgagtattgcagatgatgcacaaagtgttttgcattctgctaaggtgctttggtgcaaatgaagaatagaaaaactaccatcccggtgtaaattgaagacagtcaggtggtattgaagctattgaactctgttactcttccaacggcacaacggataagaatgaaatcgctatatatgatggattttttgttggaagaacagagggatcaccaatcagaattctttctactatagcatatatttttcatgtacactgtgggtgcaacttcgatcaagggagcaaattctgttgtattttcgagttagagagattatgtgatgaaaaattggttagcgtcaaatttgcaattgcaaagtgactaatataatgacataatataatacactgataagatatatcaagggagcaaattttgttgtatttttttagtagtcgagaatatttttataaaaaattggatatcacctaattttcaat

SEQ ID NO: 68055 - DNA, 507 bp, Zea mays
  Clone ID: MRT4577_162061C.1
taggggctgggcaagacacgccaacgagtaagatgacatgaatgcattctgagagatcggcgaggaggaggggctgcgattgcggaagggcagaatgtcggccgctgaggctcgctcgtctggcaccagaaggtcccgtgtccagctccgcggacacgctgatgagcggattccgcatgagaagaggatcgcgccaggcaatgctaaacctagcgcgaccgtgatcgcgctgtctcgctacgctgctggcagaataactcggctcgggtgcgatgcgtgcagaagcgggctctcagcgtgaccagaacctgcagctgcacctgcggagccacaacaatgccggagcaaagcgtgaagcaggaagggccccaaggacgcgcgccgccggtgtacctgtgccccgaggcgcacagcgtgcaccacagccagtgccgagcgctgagcgacctcacggagatcaagaatcactactgacgcaggcacggtgagaagaagttcaggtgcgac

SEQ ID NO: 68056 - DNA, 164 bp, Zea mays
  Clone ID: MRT4577_162062C.1
gacctaatcgcatgtccatcctaatctcaccctattttagtaacaggtctaactaaggctctctattggtctcatggtgaacttgaaactgaactcgattccccttctgaatcaggacccggacatgctctaccatatcctgctggtgcatatcaactatatta

SEQ ID NO: 68057 - DNA, 505 bp, Zea mays
  Clone ID: MRT4577_162063C.1
atattaaatagcttaatataatcagatgataatggaagagatccgatcggtgagctaaacataagtctacacataacagcacacaccaaaacgagtgcatacatgctagtaggcagcctaacaagcggtgcatgagctcactgcaggaccagatgaagaacgaagggctgtctaagtgtttgcctatcagtgcaacctactcacagcaaactgaggccaattggctgataacctaatctttgattttaaggagctcgcggaacaacatggtaacacaagactctatgagacaaacccacttggggtatagatcatgaactttcagcagaagctatgatggtggatttagaaaccgatcttggtcaacctttgaactctagagctaatggatccttcttcacgtttattgtaaaaactggcgatggaaccagcctgggcactatgccgatgccggtccttgaaagactcaagcagcatcctttcaagctacagttccatgatggcc

SEQ ID NO: 68058 - DNA, 388 bp, Zea mays
  Clone ID: MRT4577_162064C.1
agagcaacactggggcatgaaatagttaaaaaccgtgccatgatgatttggacaccaaaccaaaggtacaaacggggctgcactgccaaacaaacgaaaaaaaagagacaccagtgggctgaggaagaactgctctttcaaagaagccagtgtcacgaactgttttaagagaactccggagctcttggcgacaggggccttaatttcacagagggggcagaaacaaatgccaccagaagaacataaggtaccacttcacaccttgtatcatacatgaagaaacaggggcagactaggcgatccaatgacctcacacagatgtaagactccactgcgttggcaagctggaagaactcactgcacaccatgagggcagctgttggaggct

SEQ ID NO: 68059 - DNA, 474 bp, Zea mays
  unsure (1)..(474): unsure at all n locations
  Clone ID: MRT4577_162065C.1
cttgaacttctatctttgataaggcaccttttggagtgttagctaatccttccttccttcttgttttgatatcagcaatgcatcactttccttctaaaaaatgtttactccatcaatcccttagggacatgcaatgaaccatgaattttccctacagacttcggcttcagcacgatgttcttcgccattgcttcttccctttcttttgatgcaacttgaatggactccaactcttcctgcgtttggaggtctcacagaagagaccagatgccagagcctgctcaagccacaggtcaaacgcctcttcgtcttcatccatcatttctgcatcaaaatcccacgggaatctactcgagttgcaacgttggcttttctccaagccaaccatgtttacatggaaactnggtcgatgggtatttggcctgcaagccattccctgacatatcgcccattctgacacatcaaaaattttgc

SEQ ID NO: 68060 - DNA, 695 bp, Zea mays
  Clone ID: MRT4577_162066C.1
gtggcaggtgggtgttgtcctgttgaggttctcggcagcggtatgtttggagagctattctatttctgcacaaactgctgtacctgttggattttggtgtggcgcgtaagggttagtggttaataaatgctgggatggcggtcttatgtgaactgaccattggaattaagcgtcttgtattcttgtgatctcaatatacatggatcatgggcggtatcaggcattgccaactattgatacgttacatggccctttactttccgtgtccatatttgaatttagcagccagatgaaatctcctggttaaaacttgcctgatttggtactgtagttcaatcatgagttctaacattgcgtaaaccacagacagatgtatccatagcatgaacttgaacattatccatagctagatataaagtgttataaagtttgtatcctataatggcagacctagcataggtgttggaggacagcccacatcccactgtctctttcgtttccgacaagatgttttggccgttacataatgcctgtaaggtagaatgccattgcagttgttgcatcagaaagcagccatttaacggcattgtaaagtgagtgatgattaaatacagccacacttctgtctctcaggtttctgtacatagaatttttattgcacctcttcttccccagcaagtagtacttggtagact

SEQ ID NO: 68061 - DNA, 371 bp, Zea mays
  Clone ID: MRT4577_162067C.1
aattaataaattattttttttattaaataaaataaaaaattatgtaaaaacattaaaaaaataaaataaaacaaaataatgaaaaacaacagtttcaaaaattgtggaaaaaaataaaattaaaggcacataataactattacgtaggctcataaaccaaaccaatagcgagcaaaacaaaaagagcaaggcccattcaaagttaaaaaatgcaagttaaaactattattatacttgtaatatcttataataagagaaaataaaatttataggggcaaaaaggggttaaaaggattctaaaatgtaaaatgaatggtattttaaattaatttaaatgtcaattaaaatttaaaatttgtaataaaacatta

SEQ ID NO: 68062 - DNA, 368 bp, Zea mays
  Clone ID: MRT4577_162068C.1
gatgtgaacaaggaactccaattggcacgacatggcaacactttcagtaacatgaagctgagccactgcactgctatactgctgctagcagtcacaatgagctgaaacaaagaaagcgagcggacaaacaacggaactactccactccacccttgctcgatcggtgttgcttctcaccgatcagaacttcacggtgtgtgtgttaccgtagcccagctgcccaggccacccaggatgagcggggcgctggcgccgctgtacaggttgggggcggcgctgccgaggttgaggtcggacgcggtgggcatcacggcttcggcgccgtggtcgtagaggaggcccctgaacaggtgcccgttgatggtcac

SEQ ID NO: 68063 - DNA, 899 bp, Zea mays
  Clone ID: MRT4577_162069C.1
cacccaccccatcaagtccttcccaaagtcccaaaggccgccgccgcccgccagcccaccatggccgcgcagttcttcctcctcgccgccactgccgccgtgggccgcctcgagccggccgggaaaaaaaaaaaaaaaaaaaaaaaaaaaaaaaaaaaaaaaaatattatccacaacactcatcgatctacacacatacatagtttcttctactacacgacgacaaacatggggaagcctgcgaagatcggagagtggggtggatacgccggcgatcgtcgggatctgagggctactccggaccggctgatcgaggtgaaggtcacggcggacaacagcagctgcatccgctccatctccttcatctacatcggagccgatggcaaaccgtacgaggaggggccatggggtttcggccatgctggcacggagtacaagattgatctcaggttcgacgagagcttgacggagatctccgggaccacgggcccagcctacaacattgacaatctggtcaagtctctcaaatttgtcagcaacaaacgtacttacggaccgtacggcagggacgagggcaccccgttccgtgtcaaggtgatgaacaacggccacgtcgctggcttctttggccgctctggagattgcctggacgcgatcgggctctacgtgaaccccaactaataactaaaacgatggatcggatcatctgcatgcatgcatatgcagtatgctgcttgcctgcctgtaacgaatatgaatgcataaaataacgcccctgctgctcccatgcatcagcagtgtgtaccactatgttatatatatatactgtatttcctaccgaataaaaacataaataaaagatccagtgtcgtctgtaaaaaaaaaaaaaaaaagcggcc

SEQ ID NO: 68064 - DNA, 462 bp, Zea mays
  Clone ID: MRT4577_16206C.1
aattcggcacgaggaggtcgcgttcgttccttcgttccccaaggccttgccttgttctggttcagcatcagtgacgcttagcttcacaggaaccaggaccagcgaggtctctggctctctgcaacttgccatggggaccgcaacggcagcaatggacaggaatgtagatggagagcagggcaagaggaagaagaagggaggcttcaggaccatgccgctgatactagcaagcgaagtctgcgaccggtttgccacggccggcttcggcgccaacctgatcacgtacctgacgcagcagctgcacctcccgctggtggaggcctcgaacacgctaaccaacttcagcggcacgtcctccttgacgcccatcctaggcgcgttcgccgccgacgccttcgccggccgcttctggaccatcatcgcagggtccgtgggtgtaccagctcggcatggtcggcgtgg

SEQ ID NO: 68065 - DNA, 1790 bp, Zea mays
  Clone ID: MRT4577_162070C.1
ggggtaccctccgagtccttccgggaaagagacagaacaggatgtggatacaatagcttcgaacttcatcaagcttaagcacagggcttgggcactccagaagagcacaaccatgtaccaaccttccacttaaaggtgttgctagttcaataagtcaatactatatacttatgcttgtctctatatagtctataggtcctagttcaaataacagatgctgcttgcagccttggatatttgtggagtgaacgcattgttgatagcatatggataagaaagtaatgtaatcatctggagatgtgtaattatgtggcaatattatttgcaacaatgctgcatggagtactttcatgtatgatactgaggctttgcaaaaaaaaaaaaaaaaaaaaactcgtcgatctacactcgtcgatctacacacatacatagtttcttctactacacgacgacaaacatggggaagcctgcgaagatcggagagtggggtggatacgccggcgatcgtcgggatctgagggctactccggaccggctgaccgaggtgaaggtcacggcggacaacagcagctgcatccgctccatctccttcatctacatcggagccgatggcaagccgtacgaggaggggccatggggtttcggccatgctggcacggagtacaagattgatctgtgcaggttcgacgagagcttgacggagatctccgggaccacgggcccagcctacaacattgacaatctggccggcccggccggccggtaaaatttggcaccggattattatccacaacactcatcgatctacacacatacatagtttcttctactacacgacgacaaacatggggaagcctgcgaagatcggagagtggggtggatacgccggcgatcgtcgggatctgagggctactccggaccggctgatcgaggtgaaggtcacggcggacaacagcagctgcatccgctccatctccttcatctacatcggagccgatggcaaaccgtacgaggaggggccatggggtttcggccatgctggcacggagtacaagattgatctgtgcaggttcgacgagagcttgacggagatctccgggaccacgggcccagcctacaacattgacaatctggtcaagtctctcaaattcgtcaccaacaaacgcgcttacggaccgtacggcagggacgagggcaccccgttccgtgtcaaggtgatgaacaacggccacgtcgctggcttctttggccgctctggagattgcctggacgcgatcgggctctacgtgaaccccaactaataactaaaacgatggatcggatcatctgcatgcatgcatatgcagtatgcatgctgcttgcctgcctgtaacgaatatgaatgcataaaataacgcccctgctgctcccatgcatcagcagtgtgtaccactatgttatatatatatatactgtatttcgctaccgaataaaaacataaataaaaaaaaaaaaaaaaaaaaaaaaggccaaaaaaaaaaaaaaaaaaaaaaaaaaaaaaaaaaaaaaaaaaaaaaaaaaaaaaaaaaaaaaaaaaaaaaaaaaaaaaaaaaaaagggggggcgcccttcttttttttttttttttgggggtttttttttccaaaaaccccccaattaaccttttaaattaaaaaaaaacttgggtaaaaaaatcccccagggttttttggcccattttaaaattttgcccccccctccccgggggcaaaataaaaatttctgggaataaaaaaaaaaaaaattttttta

SEQ ID NO: 68066 - DNA, 518 bp, Zea mays
  Clone ID: MRT4577_162071C.1
ggaggaacttttaggaaaaaaaatggaaaaaccacccggtataggggggcccggggacaacggaaaattcccccagcccaaaacaaggggcccggggaaatggaaatttaaaaaaggcccccgaaacgaaaaaccccaaaagggggggaaaatagccgccccccccacccttttttatggctggcacaaaaaaaaaacgggaggggagcccggaaaaaaaaactggaaaaaaaaaaggggaaacaggttttctcccctttcttcccggaaaccaaaccatggggggggggggggggattaagggaccccgggaatggcctttaacccagcgtccaaggggttggccaaggggaaaaacaagaaacccatctccccccacttttcggaggtaaaaaaggtggggccggccaaaaaaaaaggggggttctggatggtggccaaaaatttttgggaagccaggggctttaaatccctcccccccggcaagaaggacaacccccgggggcccttggggggcc

SEQ ID NO: 68067 - DNA, 459 bp, Zea mays
  Clone ID: MRT4577_162072C.1
attagtctgattagagtgtttctagaactaactcccaatccaattcagtcactgatcaattttctgacgttctgtaggtcagagagagtcgtgtatactacagctacggtacatgtccaaagtcaagcttgcaagctaacgataagacaggaggaaacgggaaagaagcgcgcggcatagcagtagaaaccatcgatgatccagcgccaactcgcttgttccctacgaggacgaggacggagaggaagtgccgctggcggagggctcctgctcctgctcctgctcctgatcccggtcctggtcctggtggaggcgcgcgtggatctcgtggatccggccgcgggtctcctcgaggaggcgcgcccgcgcagccgcctctctccgccgcagctccgccgccgccgcccaccccgctcggctcgcgtccgccggccgcccacgcgtccgcggacgcgtggg

SEQ ID NO: 68068 - DNA, 310 bp, Zea mays
  unsure (1)..(310): unsure at all n locations
  Clone ID: MRT4577_162073C.1
ctgcagncattgctagtcatcactactcacgttcctccaccagagcagacaacaatggccatgcagacgtcgcttcatagcgtggacgctgcacgcccccgctggcagtaaggaccggctcctcgtcggctacctggtgctgtcgtcaaagcgggcgcctcgaacgactcccgctcctcctcctcctcctcctctccttcgcagactcgcccggacgtagacgcgaccagaagaccctgtgtcgtcctccgacaacacgaggcagcggtcgccctgctgtcgaccgcctttctctcccgcttccccctcc

SEQ ID NO: 68069 - DNA, 739 bp, Zea mays
  Clone ID: MRT4577_162074C.1
aaacccggccgggaacaactccaaacccgaagcccccacggcgcaggcctaggtgtaggcggcgcggaccagggccgggccgccggaggcgcgctacttggcggcggcgcaggggagatgtgcgaggggaggcggccggtggacgcgagccgggcggggtgggcggcggcggcggagctgcggcggagagaggcggcggcgcgggcgcgcctggcggaggcgctggcggagctggagcgcgcgcgggcgcgcgccgccgagctgcagcggcgcatcgagcagacatacggcaagcgccggcgcctcctcgaggagacccgcggccggatccacgagatccacgcgcgcctccaccaggaccaggaccgggatcaggagcaggagcaggagccctccgccagcggcacttcctctccgtcctcgtcgtcgtagggaacaagcgagttggcgctggatcatcgatggtttctactgctacgccgcgcgcttctttcccgtttcctcttgtcttatcgttagcttgcaagcttgactttggccatgtaccgtagctgtagtatacacgactctctctgacctacagaacgtcagaaaattgctcagtgactgaattggattgggagttagttctagaaacactctaatcagactaataaaattcgttcactgctgtgttggctcgtgactgaattcgtcacgagataattctcagaaaaaaaaaaaaaaaaaacccgcgggc

SEQ ID NO: 68070 - DNA, 602 bp, Zea mays
  unsure (1)..(602): unsure at all n locations
  Clone ID: MRT4577_162075C.1
cggacgcgtgggcggacgcgtgggcagcaaccaactctctgcgttcgtgtgtgtgtgttcatcctcatcggatttgtgtcattcgtgtgataggattcaacagaaaactactactcctgtggcagcaggaagaaagcgacaggaggagcaaggaggtctcatcctgcagaaacacacaacctgacagagaagcgacgaaggcgcaagatagacgacaagttgaagacccttcgacagctcgttccagggtgcgatgacaagagcaaccaagcctcaattctggaccagaccatccagcacatcaactcactgcagcaacaaatccaggtccaacctaaggcaatctcgttggggtgcgatgccatcaagccaccagcagtttacccagtcgtgctgccacagggcacggctgtcgctgccgccggcgagctgctgccgcctgcagccgcgcttcctccagcggtgctggccatggcggcgagagggcatgtccggccagggttggcgcccttgcaccacctccgtcgttggtgcctttcggtccctttcttccagtggtgactcaattntgaagacacaggcagcagctgctgcgatcatat

SEQ ID NO: 68071 - DNA, 340 bp, Zea mays
  Clone ID: MRT4577_162076C.1
ttctttttttttttttttttttttttttttttttttttttttttttttttttttttttttttttttttttttttttttttttttctggggggaaccaaccaaggcggggggttgttcgggcaaaaattctgggcccgtttaaaggggggttttgttgctgaaaaacccttttttttaaaattttgggaacaccccaaaaaatttttgttacttatagaaggcaagatttccccttttatttctggccgcgttttgggtcccttcgggggccccgggcggtcgggaatttttgggggtccggggagcccaatgttggcgggggcctctgtgggctgagggg

SEQ ID NO: 68072 - DNA, 1914 bp, Zea mays
  Clone ID: MRT4577_162077C.1
cgccggcacgctcgctctcaagcttccagagcccacgcgccacgtctcgctctcaagcttcaaaatcccactagcgaaaggaaaacgggagaagctaggaagcagcagccgcggcatttcttccttgagcgttcgccttcggctgctcaacgcgtgcttggtttcaggagagccttggtggcatctctgtttcatggccgagatctgctgtgaggcggcggcggcggcggcggggtcggaccagaagggggagtgcgccggcagccgcgcggcgcggcggcggaggatggagattcggcggctcagggtggtggccgaggaggcgtccgccaagaggcggaggctggaggcggatgaggaagacgcggttggggggcgagcgccgaggtacggcgtgacgtcggtctgcgggcggcggagagacatggaggacgcggtgaccgcccgtccggagttcatcaacggccaccacttcttcggggtgttcgacggccacggctgctcacatgtggcgacgtcgtgcggggagcggatgcaccagattgtggccgaggaggcgacagctgccgcaggctcgtcggtttcggacgagaccgcgcggtggaggggtgtcatggagaagagctacgcgaggatggacgccgaggccgtcgtctccagggagaccgccggcccggcgcccacctgccgttgcgagatgcagcttcccaagtgcgaccacgtgggctccactgccgtcgtggccgtggtggggcctcgccacctcgtcgtcgccaactgcggcgactcccgcgcggtcctctccagcggaggcgccacgatccctctctcagctgaccacaagcctgaccgccccgacgagctcgaacggatccacgcagcgggagggcgcgtcgggttctgggacggcgcccgcgtcttcggcatgctcgccatgtcccgagccatcggtgacagctacctgaagccgttcgtgatctccgacccggaggtgctggtggtggagaggaaggacggcgaggacgagttcctgatcctggccagcgacgggctgtgggacgtggtgagcaacgaggtggcgtgcaaggtcgtgcgcacctgcctccggaacagggcgccgcgcggtggccgggagcagtcgagcccgacctccaacctgagccctaggcagagcagcgccagcggcggcagcagcagcagcagcggggacgaggaggctggtgcgcccagcggcgacggcgcggggtccgagagcgacggcgagagcgccgaggacagggcgtgcgccgaggcggccatcctgctgaccaagctagcgctggcgcggcagagcgccgacaacgtcagcgtcgtcgtcgtcaacctcaggcggcgcccgcgatcgtgatcggtggtggctctgtgatggactagccgttcttggttggtttggtttcctggccccgtccgtaagttcaaatgggagcccagttcaccttcgcttcggccgagcaaatcattggacaagatgtcaaagcgaagatcgaacaaaatagtgagatctgagatccttagcaaaattgcatgctacttccttttacagtagtacagcaggactattgtttcgttagcgttcttttttcatgggtgttggtggagggtgcgtttgtgatctggtcggacagatcatcccgcctttcttcccccggtaaattctccaaatagaaaagcgcatgcgtctccgatgtttgaagaaactttaccgtgcgtccgagagatttaattgtaatatatagtccagtgcccctttcactagccaaatgcccaaaatccttccaaccttctctgactaagatcgtgatgtgctcctccggttccgtgtttcatgttaaaatatataaataaattttgacccccaaaattgtcctgataatt

SEQ ID NO: 68073 - DNA, 400 bp, Zea mays
  Clone ID: MRT4577_162078C.1
aattcaaacaagtctatacacgtgatatatatgaatcatataacgtacgatcacctaactagtatatatattgggcccaaatgttgctcatcatagatgtatttacatgcatgacatgatatataccttacttccctatgtacacaaacctgtcggtaaaggcgtatagctgtgtttagaacctttaagaagtaagaaccatgccgtaggactcaaaatttgtcacctatcccgccacgtatcctgagctgctaaaaggacccaccaaagttaaggagcataaaatctatgcaaaaaaaaaaaaacgtgttggaaaaaattaatggaacagagcagccggccgtttgatccccaagaaaccgacgctgctgcaaacgcgtgcgttaaaagtggacgctgc

SEQ ID NO: 68074 - DNA, 587 bp, Zea mays
  Clone ID: MRT4577_162079C.1
gccacaacttgcggagaggaattcgaaaagcggactatacgcgcgactatgccttcatcgaatgcaatgaccctggtgctgctgacaatccacatggcaacctcgatggcaggggccgcattggaagccaaattattgaaggatttgctaaaggggctcctggtggatctggtggcaaacgtgaatgccccggaacaggaccatgaccaggaacaaaccgtggatttaactgtgaatgtgaaggacactgggcaagagactgctgggctaacaactgcaagaacaaatgctaacggtgccgtaaaaggagacatatacaaagaaattgacagaacattacaaggaacataaggcgtgaaagaagctcttcacggcctccatgaccacgccgaagacggagccacagccgaagctacagctatagccggagctaaagccgatccagatcccctactggatctcctagggaccgacgccaaaaccgatcagagaggataacatagagtatgagctacagcactagcgcaagccctacacctgctgaggaaactgagaacgaaaagcacgcaatcgcacacctaatggca

SEQ ID NO: 68075 - DNA, 319 bp, Zea mays
  unsure (1)..(319): unsure at all n locations
  Clone ID: MRT4577_16207C.1
cctataatttcctaaggagccgcggagtacgggggggttattaaaaataatgtcaatccacccggaggagctaactcgcgcaaactggggaaccttgcgacagatgacagaatcagctacacctttgatcgaaccccatgttcaccccatattcaccgagatctcttctgcagtcccaagcctagctgcgatcaccacttcgaagacctagacgcacacgacacatgacatcttgtactttggacaagctactcatcacggattcaaatcactgctcctgctnttgcgaggcgctgtacattgcatgctctgcctgtgc

SEQ ID NO: 68076 - DNA, 236 bp, Zea mays
  Clone ID: MRT4577_162080C.1
gaaacaaacaccagaaggcgggtttttttttacccaaccggggtttattcacacatgtataaactagttaaacggtcttaatgaggacctttatgcagatacatataggcattgcataaataagtcggtttccatcagtgcccgacagtgaagctaccgtttcatcaaatagcgagcttgagcattgcaccagtcctttactaccagagccaccctgggcccagaaagaattgcct

SEQ ID NO: 68077 - DNA, 546 bp, Zea mays
  unsure (1)..(546): unsure at all n locations
  Clone ID: MRT4577_162081C.1
cccgggcctccgccatctgcccctcagnaaaatggaagctccaaccctgctatggttgctcntcgtctcactcgcctcctgcctcctctacaagctcctcgagccgaactcgagccgctccgagaaggcgcggcggcgcgcacctggcccagcacctctgccgctcgtcggcaacatcctggagctccgaggtgagccgcaccacgcccctcgccaggcttgcagagacgcacgggccggtcatgtccctgaggttgggcactaccgacgccatcgtggtctcctccgccgcggcggcgcgcgacgtgctgcagaggtacgacaacgtgctggcggcgcggtcggtgaccgacgccggacgcgcgctggggaaccacgagcgctccgtcatctggctcccagccaccagccagctgtggaagcggctccgcgcccgtgtgcaccaaccacctcttctcagcgcgcgggcctggaagcgacgcgcgccacgcgggaggagggcgggtgaggcagcttgttgtcatgcctgggccgncgcaccggcga

SEQ ID NO: 68078 - DNA, 722 bp, Zea mays
  Clone ID: MRT4577_162082C.1
atttcgtgttgagcgtctcatctcaactgagctggtgggaggtctcccctctgccgtcacatcccagattcaccccttctcctcgttgctttcagccggcttgccctccttcctccccagcagtctccccagtctcccctcgtcgccagccccgccgccgcagccgccggtaccccacaccccgggagaaggaggtcgtctcctccgtcctctcctccgctgggctcgcggggagcgaagatccgcccggacgcgggtcctcttgctgatttcgggggttgttctcttgccgcggcgagtttcgaggatgatgagctaagaaggtatagctcgtgcaagccgccgcgcctttgttgtttctgataaaccactgagcaggcgagagtcttgcttgaggtggtagtgagagatggatgcagtgtccgaggttgccgatgccatgggtgcattgggcgttgacagtggggcgagccagaaatttctgcccaaagatagtccagacagcgaagagttggccgatgtggcgctttcgggcgagagtgaggtgatcaatccacctgaagaggtgggtggggaagccacctcgccatcggaggacataaagtcgcaaccggaggacataaaagcccgtgttcccaagggaagccaaagccgttcccctaaggttaccaatcacagcgccagagcccacggagcggcgataagagttaagctaagaaaaa

SEQ ID NO: 68079 - DNA, 527 bp, Zea mays
  Clone ID: MRT4577_162083C.1
tcacatcccagattcaccccttctcctcgttgctttcagccggcttgccctcctccctccccagtctcccctcgtcgccaaccccgccaccgccgccgcagttgccgaaacccgccgcccagtccgccaccccgagagaaggaggttctctccttcatcgcccctccgtcctctcctccgccgggctcgcggggagcgaagatccgcccggacacggctcctcttgctgatttcgggggttgttctcttgccgcggcgagttttgaggatgatgagctaagaaggtatagctcgtgcaagccgccgcccctttgttgtttctgataaaccgctgagcaggcgagagtcttgcttgaggtggtagtgagagatggatgcagtgtccgaggttgcggatgccatgggtgcattgggcgttgacaatggggcgagccagaaatttctgcccaaagacagtccagacagcgaagagttggccgatgtggcgctttctggcgagagtgaggtgatcaatccacctgaagagg

SEQ ID NO: 68080 - DNA, 412 bp, Zea mays
  Clone ID: MRT4577_162084C.1
gttttgttttttttttttttttttttttttttttgtgtttttttttattaaacacccttgtgggccaatttcacataaaaattgggaaaggtaacttttaatttgaggggggccacatacataacccaaaaaactttattataaaagggcggcggggaacaaacctaaaaaatggccccccaaaaaatttctttttgaaaaaaggctcctgggtttgtaaaagaaagtgggacaaagggcagaaactgttgaaatggtaagagggtgggggggtaagccacaaacggtggggaaaacggaagcaatggtggggggtaaaaaaaggaaggggggcttggtatacctagcaaacaaaaaaggaagatttttcgcggcggaaaaaaaacaaaggggtcaagggcgcccaattggt

SEQ ID NO: 68081 - DNA, 377 bp, Zea mays
  Clone ID: MRT4577_162085C.1
gcgattgcataccatgaaactgtcgattaggatagcacttcagtgaaataggttacttgcttgactagcctatactcacaagatgtgataaggcacacgacttatcaggggcctacaatgtgacaggagccattgtgtctgatacatgtgaagactttttctatctacaatatacatatggaccttggatacaacataagaacatctagccggataaaccagacaggatgcacaccttgtactaatgcatactcatacggcaataaccacatttgcagattcactaatgagacatattgatagttgtgagctagatatagcgtgaaaggattccatcgcaccagcgggcaaatcttagcttgaataaatggaaacag

SEQ ID NO: 68082 - DNA, 2007 bp, Zea mays
  unsure (1)..(2007): unsure at all n locations
  Clone ID: MRT4577_162086C.1
aagggttggaatttgggaacagtgtttactggattagctttggcaatgagtgcggcattgggtgcctcgaggccggccgggcgctcccaccgaattcattccacccccgtctcctccgatcggacggaccaccgggccagcagcggggcggatcgcgtcagcagccatggtgaaggcctaccccacggtgaacgaggactacctcaaggcggtcgacaaggccaagcgtaagctccgcggcctcatcgccgagaagaattgcgccccgctcatgctccgcctcgcatggcactccgcgggcaccttcgatgtggccaccaaaaccgggggccccttcggcaccatgaagaaccccgccgagcaggcgcacggagccaacgccggactggaaattgccatcaggctgctagagcccatcaaggagcagttccccatcctatcctacgctgacttctaccagcttgctggagtcgtggcagtcgaggtaaccggcggacctgatgtccccttccaccctgggaggcaggacaagcctgagcctccaccggaaggccgccttcctgatgccacccaaggttctgatcacctcaggcaggttttctccacacagatgggtttgagcgaccaggacattgttgcgctttctggtggtcacaccctgggaagatgccacaaggacaggtctggatttgagggagcctggacgtccaaccctttgatctttgacaactcttacttcaaggagcttctgagcggagagaaggaaggccttctgcagctaccaagtgacaaagccctcctctctgatccatccctttccgcccacttgttgacaaatacgcagcggacgaggacgctttctttgctgactacgccgaggcccacctgaagctttcagaattgggatttgctgaggcgtaacgaaccagaagagtgtggtggctgtcgtcggccggcggccttgtgtttttgttgtctgcttttctcttgaatgaagatgtgatgaactcagctggaagatgtagtgtgtatgttgtcatggtttatttttctattttatttatctatctataatatctatcggagaaggtttgatatgaagcggaacactgattaacgatgccaatgcctccacatccaaacccgttatgtttttgcaaacataaaaatttaaaaaccctgcatccagaccgtttggtatcaagtacaagtttcacttagaggatgctgttgattgcccagaatgggttgttccattccatctcttcaaattattggcagaggagtatgatctcgagctggttctgatgaagaacttccatgaatttgtacacgagtacttgcaaaaaccagagttcgccgagctgatgcggaggctgggtgccctcggtgatggaaggcaggaccaaagtacactgtcacaagatgagtgggaggtttcctatctctatctcgcgtttgtcctgcggaagcgaggccaaccgcctacccaacgaagagccagcaacgcaaacagagggaaaatgtttctcaccgagggtgacatcgaggttctcggtgtataagcatgagtatatcctggaagggcttgctaacagcttaccgattatatgctccacagaccacatagcataaaagaaagttgtaacattagtggctcacctgctactccatccgtttataaataaatgacaacgttgacttttttttaaaaaaaattgaccactagtcttatttaaaaaagttatcatttattttttgtaatttgttttatcacttaagttagtttgtgcttgacttaaaattttacattttgaataaatattttaaaatgaatattttgaataagatgagtggtcaaagttttcgaaaaaaaaatcaacggtgtcatatatttgtaaatggaggtagtatttgtttctccaatttatatcttttgtataatttcacatatagcacttcccaaacttttttctattgacaatgtcaacattttaaggatcaant

SEQ ID NO: 68083 - DNA, 1966 bp, Zea mays
  unsure (1)..(1966): unsure at all n locations
  Clone ID: MRT4577_162087C.1
ctcgtttggntgnatatttatatgagggtcattgggtacctcgccggccgggacgaaccagaagagtggtggttgtcgtcggccggcaggccttgtgtttttgttgtctgcttttctcttgaatgaagatgtgatgaactcctgctgaagatgtagtgtgtatgttgtcatggttcatttttctattttatttatctataatatctgtcggagaagctttgatatgaagcgggatctggttcggaacactgattaacgatgccaatgcctccacatccaaacccgttatgtttttgcatacaggtgggtttcaagcaactcttataacaagtgtttgaaacaaaaaaaaaaaatagcgacgtgtgcataattgacccggtggaatctctctgttcttagttctgttctacttctccaccaagtccctaacacgcgggtggcgggtccgccgccgccgccgttcgaagactcgaggctcgagcacctcgtctgctcgcccggcccctcctatccctcgcgcgactgtctccgccgacgaccataagccgcctgcctcatcgctggccacacaacgatccgtggcaaggaaagcacgaggacgtacagtagaattgtgaatcgccggaaaaacatctgttggcggcgtcatgaataagcggccccgcgacgaccactccttcgcctccgcgcccaagcgccagtatggcgcaggcggagggtatggcccgcagcagggttactcggaagagcggagcagcgcgcggcgggtggccgaccactacagcgcgcggtccaaccagacactcgaggaacgcgagaacagccccatcatccacctcaagaagctcaacaactggatcaagagtgttttggtccagttgtatgcacgcccgggtgactgcgttcttgatcttgcttgcgggaagggaggtgatttgataaagtgggataaagccaaggttggctactatgtaggggttgatattgctgaaggctcgataaaagattgcatgactcgctacaatggtgacacagatcaacaaagaaggaaaaggttcagtttccctgcacggcttatttgtactgattgctatgaggctcgtttggatgaatatttatatgaggatgctccgtttgatatatgtagctgtcagtttgctttacactattcatggtcaactgaagcacgcgctagacaagccttggcaaatgtgtctgcattacttcgtcctggaggcatttttattgggacaatgcctgatgccaatgtcattatcaaaaggcttcgagaatctgaagggttggaatttgggaacagtgtttactggattagctttggcaatgagtacgctgaaaagaaattccctgcatccagaccgtttggtatcaagtacaagtttcacttagaggatgctgttgattgcccagaatgggttgttccattccatctcttcaaattattggcagaggagtatgatctcgagctggttctgatgaagaacttccatgaatttgtacacgagtacttgcaaaaaccagagttcgccgagctgatgcggaggctgggtgccctcggtgatggaaggcaggaccaaagtacactgtcacaagatgagtgggaggtttcctatctctatctcgcgtttgtcctgcggaagcgaggccaaccgcctacccaacgaagagccagcaacgcaaacagagggaaaatgtttctcaccgagggtgacatcgaggttctcggtgtataagcatgagtatatcctagaagggcttgctaacagcttaccgattatatgctccacagaccacatagcataaaagaaagttgtaacattagtggctcacctgctactccatccgttcataaatatatgtcatcgttaactctttttttaaaaaaaaattgaccattcgtctaaaaaaaaaaaaaaaaaaaaacaaaaaaaaaaaaaaaaaagcggcc

SEQ ID NO: 68084 - DNA, 743 bp, Zea mays
  Clone ID: MRT4577_162089C.1
cctcgaggccggccgggaaacacgtcctacggtctactcgcattcactctcgtgtgagccggcggcggagcatgaggaaagcacgcaggccatgctgtacccggcgtcaaccccgcgggatggccccgagatacaaaaagatctcgaggtccaggataacgccctccataagatacacaaagacgtcgcctcgaagcaccaggccccctagcaatacaccatccatgctggcgagaactacctcggcctctctgacctgaagatgctcaacgatggggccaacacgtacaagatcatcggaccgaggctggcttagcaggacctcgcaggaggacaaagacaacactccatgaagcgcatctagaacatctccgctacattgaagagaatggatcgggagctaaagactggaaagaaacagaaaaacaccactaaggaatccatagtctagttgcagcagacgatgcagggtgcacaagctaatgctactacaactgtctgtaggttgcaactatgccaaagtcatgcttcatttgcatcccaattccctccagggatatttttatgtgaggaagaatcacgtgcctgatgtactcgtctccactacgaataacaaatataaacgggtcctaatgaaattctacggtattctgtatgccctagtatgaaagcgcgcctttagtataactgtacaagatgtaagggtcagtatctctcttggatattggcccatgtatacttct

SEQ ID NO: 68085 - DNA, 559 bp, Zea mays
  Clone ID: MRT4577_16208C.1
accatcagtctctctccccgctcccggttgggtcagtcaaatacgcaaggaggtggtggtcaataccaagatcagattcagagcgagctgagggagaaaggcatcgtcatcgatcgatcgaaggtggatcatcggaggcatgacattggcagcaagcgaaccctgcctgagcctgacggggaggaggcggcggcggcggcggctcaatcgtcggcgtcgcggtcgctgggctcgagccaagagcgctacttcccgcgacggcggcagcagcagatagagctcggagggagtggtggtggtggtcacgatcacgatgaccgctactactcgcctgcggctgtgccggcaccgggacggtaccatgagcaggccgaacagcaaggtgctgtgtacagctccaccaccatggcgtactacgacgacgtgggcacgcactccgcctcctcatcgcttcatccgggcgacagcgccgccgccgccgtgccggtggccactgagtctcctcatcagcggcttccgctggaagccgggtctgctggttgttccttcgcggttgggc

SEQ ID NO: 68086 - DNA, 1086 bp, Zea mays
  Clone ID: MRT4577_162090C.1
cggacgcgtgggcggacgcgtgggcggacgcgtgggcggacgcgtgggttgcgccccgctcatgctccgcctcgcatggcactccgcgggcaccttcgatgtggccaccaaaaccgggggccccttcggcaccatgaagaaccccgccgagcaggcgcacggagccaacgccggactggaaattgccatcaggctgctagagcccatcaaggagcagttccccatcctatcctacgctgacttctaccagcttgctggagtcgtggcagtcgaggtaaccggcggacctgatgtccccttccaccccgggaggcaggacaagcctgagcctccaccggaaggccgccttcctgatgccacccaaggttctgatcacctcaggcaggttttctcgacacagatgggtttgagcgaccaggacattgttgcgctttctggtggtcacaccctgggaagatgccacaaggacaggtctgggtttgagaggagcctggacgtctaaccctttgatctttgacaactcttacttcaaggacatgatcttccttgatattgtgctgtactttgttggttaaactgaagacaacactgattgacagggagcttctgatcggagagaaggaaggccttctgcagctaccaagtgacaaagccctcctctctgatccatccttccgcccacttgttgacaaatacgcagcggacgaggacgctttctttgctgactacgccgaggcccacctaaagctttcaagattgggatttgctaaggcgtaacgaaccaaaagagtgtggtggctgtcgtcggccggccgaccttgtgtttttgttgtctgcttctcttgaatgaagatgtgatgaactcagctgaagatgtagtagaagagtgtggtggctgtcgtcggccggacgaccttgtgtttttgttgtctgcttttctcttgaatgaagatgtgatgaactcagctgaagatgtagtgtgtatgttgtcatggttcatttttctattttatttatctatcaataatagctatcgaagaagctaagcaaaaaaaaaaaaaggaaattaaaaaactccaggggtgg

SEQ ID NO: 68087 - DNA, 179 bp, Zea mays
  Clone ID: MRT4577_162091C.1
ttttggactgaaatttactagtatagaggggcaactgaatcacaacatattacttcagtgaaatcatcaacatgagctaaatcctaccatatacaaaggttgccgagagaatggattccatgcatttgcaagtggcaacaggcatcacggcagtgctaagaataaaagcaaatcccatg

SEQ ID NO: 68088 - DNA, 554 bp, Zea mays
  unsure (1)..(554): unsure at all n locations
  Clone ID: MRT4577_162092C.1
ttttgccggaccaaaaaccccggggcgacccagcgnncgcggncgcgngggcggacgcgngggnccggaggagagggaggaggngcgcncggcgnacnnggagacgccgacgacgaacaagagcacggnggcggggancanggggnngccgcgcagggagcagaagaaggagacgcaggcggagaagagcncgaagaggaggccgangagggggcgggggggagggcgnngnccnccagcgaggaggcggnganggggnccgggccgcccaggnggagcagcaggaacggcgnccagaaggcgaagaaganggggcngcngcngcngcnggcgncgnngnngccggcaggggcgcccgngccgccgcgcnggaggccgaagcnggagcnggacgaggagcngccnccnncgccgnnggggcccangcgggggcggaggnggccgngggcgaggncggcgacccagncggcgnggggggggcngggccggacgncgaagcgggggaacgggggggcggaacggcggcgccnggggcccgcgcggggccggaacac

SEQ ID NO: 68089 - DNA, 322 bp, Zea mays
  unsure (1)..(322): unsure at all n locations
  Clone ID: MRT4577_162093C.1
cgaggacgctttctttgctgactacgccgaggcccacctgaagctttcagaattgggatttgctgaggcataacgaaccagaagagtgtggtggctgtcgtcggccggccggccttgtgtttttgttgtctgcttttctcttgaatgaagatgtgacgaactcagctgaagatgtagtgtgtatgttgtcatggtttatttttctattttatttatctatctataatatctatcggagaaggtttgatatgaagcggaacactgattaaccaaaaaaaaaaaaaaaaaaaaaagcttgtacctgcccgggcggccgctcgan

SEQ ID NO: 68090 - DNA, 1539 bp, Zea mays
  Clone ID: MRT4577_162094C.1
atcgtcctcagcccgctcctcctccccgtccgtccccacacacacacgcacgcgtttgacattttccgcccaccaccgccggagggagctccagccatggccgccaagtgctacccgacggtcagcgacgagtacctggccgccgtcgccaaggccaagcgcaagctccgcggcttcatcgccgagaagaactgcgcgccccttatgctccgcctcgcgtggcactcggccgggaccttcgacgtggccaccaagaccggcgggcccttcggcaccatgaagtgccccgcggagctcgcgcacggcgccaacgccggcctcgacatcgccgtcaggctgctcgagcccatcaaggagcagttccccatcctctcctacgccgacttctaccagctcgctggagtcgtcgccgtcgaggtcaccggcgggcccgaggttcccttccacccggggagacaggacaagcccgagcctcctccagaaggccgtcttcctgatgctacccaaggctctgaccacctcaggcaggtgttttccactcagatgggtttgagtgaccaggacattgttgctctttctggtggtcacaccctgggaagatgccacaaggagagatccggctttgagggagcctggaccgccaaccctttgatcttcgacaactcttacttcactgagctcctgagtggagaggaaagaaggccttcttcagttgccgaccgacaagaccctcctgactgacccggcctttcgcccacttgtggacaaatatgcagcggacgaggatgctttctttgctgactacgccgaggcccacctgaagctttcagaattgggatttgctgaggcgtaaggaaccagaagagtgtggtggctgtcgtcggccggccggccttgtgtttttattgtctacttctcttgaatgaagatgtgatgaactcagctgaagatgtagtagaagagtgtggtggctgtcgtcggccggccggccttgtgtttttgttgtctgcttttctcttgaatgaagatgtgatgaactcagctgaagatgtagtgtgtatgttgtcatggtttatttttctattttatttatctatctataatatctatcggagaaggtttgatatgaagcggaacactgattaacgatgccaacaaaaaaaaaaaaaaaaaaaaaaaaaaaaaaaaaaaaaaaaaaaaaaaaaaaaaaaaaaaaaaaaaaaaaaaaaaaaaaaaaaaaaaaaaaaaaaataaaaaaggggaaaaagggccgcgatggtgaaacattggttaaggggttaaaatgggggaaattggtataagggtaaaaaattcccccccccttagaaacaggaaaaaaaaagtggaaaacccccaggtgcctaaagggggggaataaagggcagtttttgggggggcctaattggagggcttttcaccccgagaaacctgtgggaacccaaagcgtaaaacaaacgggaaaaacgccgggacagccgcttttatgatttgggccttcttcggcagcgaagttaattt

SEQ ID NO: 68091 - DNA, 225 bp, Zea mays
  Clone ID: MRT4577_162095C.1
ctcacacgtacaatactgcgaatctttttctgctagggtcaacttttctatcaggggcggcttactatagtgctgaggtgttcttgatctcaacacctacccatgtatttatatcgttatatagaggcattgtgaatttgtatctacctcgcacacgcgtgatcaacctaccagacctactgattgacgcacttcaatcaacgataaagtgaatgaccgtgatcg

SEQ ID NO: 68092 - DNA, 1573 bp, Zea mays
  Clone ID: MRT4577_162096C.1
tcgcggacgcgtgggcggacgcgtgggcggacgcgtgggcggacgcgtgggggacattggtgcgctttctggtggtcacaccctgggaagatgccacaaggacaggtctggatttgagggagcctggacgtccaaccctttgatctttgacaactcttacttcaaggagcttctgagcggatagaaggaaggccttctgcagctaccaagtgacaaagccctcctctctgatccatccttccgtccacttgttgacaaatacgcatcggacgaggactctttctttgctgactacgccgaggcccacctgaagctttcagaattgggatttgctgaggcgtaacgaaccagaagagtgtggtggctgtcgccggtcgaccttgtgttttttttgtctgcttttctcttgaacgaagatgtgatgaactcagctgaagatgtagtgtgtatgttgtcatggtttatttttctattttatttatctatctataatatctatcggagaaggtttgatatgaagcggaaaaaaaaaaaaaaaaaaaaaaaaaaaaaaaaaaaaaaaaaaaaaaaaaaaaaaaaaaaaaaaaaaaaaaaaaaaaaaacccccgaaatcttaaatccccccagaaatcccaagaaaaagccttccatcctcactcgctcaagggcccgaacaaagaaaacggggagaaagcccaccgggggaaaggccccaagaaaaaagttggcaacaaagggggcccgaaagtttgcccctgcaaccgggggagtaaaaaagccccaccgtttccgccccggaaccgtcgcgctccggaaaatccgcaagaaccaaaaaagcacggagttgctgatccgaaagttgccgtcccagcccctggggcggaaaatcgcgcaggacttcaaaaccgacctacgtttccaaagctccgttgtctccccgctgaagaagggggttgaggccaacctgcccgggctcttctgcgtcagaaggttacaaatttgggcgccatccacgcaaaggggggggggggttagctttggcaatgagtacgcttgaaaagaaattccctgcatccagaccgtttggtatcaagtacaagtttcacttagaggtaagtgggacttgtttttcgttaatatatgccttgtgtttcgtttaaaggatcgtgggggggtggactaatttttaatagtcttttggatttaaatatctagtctagtttgggtaagtagtttctgtcgtctcaaattagtagtttcccagattggctttcttttggactttcttttgtctgtatttataaattctgaaagaaaaacaagtggtgaattaaattcttctgcaacatgcaggatgctgttgattgcccagaatgggttgttccattccatctcttcaaattattggcagaggaggtactggaggggttctattgcttcaacagtcctctgtgcagcctatatgcctcaccaatgcttgttacatattgtttgccaatgtttcacagtatgatctcgagctggttctgatgaagaactttcatgaatttgtacacgagtacttgcaaaaacc

SEQ ID NO: 68093 - DNA, 296 bp, Zea mays
  Clone ID: MRT4577_162097C.1
actcatggcgccgtcgcagccaaagacgcgcctcttcgttggcatcaacaagggtcatgtcgtcaccaagcgcaagctgccttcccgcccgagccaccgcattttttataacaacgataggggtagctataggacaggggcctgatcatgtatgttgctgggtttgcatcttatgagaagcgtatcactgaactacttaaggttggcaaggacaaaccggcccatgaactagctaagaaaaagcttggaactcacacgagggcacacaaaatagagaggagatggctggcgtactc

SEQ ID NO: 68094 - DNA, 1454 bp, Zea mays
  unsure (1)..(1454): unsure at all n locations
  Clone ID: MRT4577_162098C.1
cgaccaggacattgttgcgctttttggtggtccccccctgggaagatgccccaaggacagggagcttttgatcggaaaaaaggaaggccttttgcagctaccaagtgacaaagccctcctctttgatccatccttccgcccacttgttgacaaatacgcagcggacgaggacgctttttttgctgactacgccgaggcccccctaaagctttcaagattgggatttgctaaggcgtaacgaaccaaaaaagtgtggtggctgttgtcggccggccgaccttgtgtttttgttgtctgcttctcttgaatgaaaatgtgatgaactcagctgaaaatgtagtaaaaaagtgtggtggctgtcgtcggccggaggccttgtgtttttgttgtctgcttttctcttgaatgaagatgtgatgaactcagctgaagatgtagtgtgtatgttgtcatggtttatttttctattttatttatctatctataatatctatcggagaaggtttgatatgaagcggaacactgattaacgaaaaaaaaaaaaaaaaaaaaaaaaaaaaaaaaaaaaggaaaccacaccgtaccacaagccctcgatcgagctagctaagtaacctaggcggtggagtggagtggatctagtgtgcagaaacatggcgcgaagcagcagcccagctaggatggccatgttgctgctcttgctctcggccctcgcagtgctcttcccacccgccgtggccgacgacctgctctccgtggacttccacgccgcgtcgtgcccgcagctggaccgcatcgtgcgcaccgccgtgcaggccgccctccggagggagatcgcgctcgccgcgggcctcctccgcatcttcttccacgactgcttcccgcagggctgcgacgcgtccgtgctcctcaagggcaacgccacggagcagaccatggggcccaacaccacgctgcagccgcgggcgctgcagctcatcgacgacatccgcgccaaggtgcacgccgcctgcgggcccaccgtgtcctgcgccgacgtcacggcgctcgccacccgcgccgccgtcgtcgcgtcggggggaccctcctaccccgtgcccctgggccagcgcgacagcctcgccccggcgcccgaggacgacgtcaacgcgctcccgtcgcccaccaccgccagcgtcccggagctcctggcggcgttccggggcaggggcatccgcgacgtggccgacctggtcgcgctctccggtgctcacaccgtcgggagggccatctgccccttctttcaggaccgngccgacagccagggagatgacttngccaggcagctaaaggccgactgcgccagggaccccaaccggctgcagcagctggacgtcgtcacgcccgatgcctttgacaacgtttactacaagaaccttaacgtcaagccggggcgttttcacgttcgacatggc

SEQ ID NO: 68095 - DNA, 311 bp, Zea mays
  Clone ID: MRT4577_162099C.1
gcaaaacaaaccgaaacaggttaaactctgttaattctccgttatatgatttacgttttctgcaagtgcgtggagatctcataattttatcagcattttctgcatctgacgcaaagcctcactacggaagcaaacttacccaatcttgagacggttgtccggaacgccggtggcgtatcctttgaagtaaaagaacctcgcgacgatgtaaatgccgcccaaaccggcggcaatggtcgggtgctgcaaaccgcccagcagcagtttgacgaagaaaacgggcatccactctagagagttctggtgccccc

SEQ ID NO: 68096 - DNA, 299 bp, Zea mays
  Clone ID: MRT4577_16209C.1
tttcatgtgactggtaaaaaaaagtgaaccataatggtttatcaaggaaaactttttgacccattcgtgtttccaaaaacaaaaacgggacttttaactcccaaagcgcgtgagaagggggacaagaatttttggccattttttctggccaaagcattccacttaaaatcccagaacctagagaatgaggtggttctagttgtggttatggactttacttgggtggggccttccttgtatctttacccgacatcccaaaaaagggctccccggcccgggggtgcccccgggaatttccg

SEQ ID NO: 68097 - DNA, 367 bp, Zea mays
  unsure (1)..(367): unsure at all n locations
  Clone ID: MRT4577_1620C.1
gggggggttttttttttttagcatatgacaagacttttgtttgagtcaatgatacatagccgggttcacaatccactgctgctcgggctcgcggaggttgcaccacctagagctgtttttttttttttgaacacgtgacccgttgcagggggggggggtatgctgcatgaacactaagccttggctgcggcacaagatcagcaggggctgctcacggcgaaggcgaacgacaggggcccacatgagcaaagtagctggttttcttttatggaatggctttaattgacagtggcgcntatccagggagcataattttgtgagcgatggtggacatgacagctggggaaccctgcaggagtgtcctagg

SEQ ID NO: 68098 - DNA, 675 bp, Zea mays
  Clone ID: MRT4577_162100C.1
tcgaggcggcgggccgggatttcgaacttccttcaccatcgtcttcttccgtccctctccctcccggcgactctgccctccccctccctctctagggttttacccggcgatctcccccaccccctctgctctcgcccttgccgtggcgaggcgcccgctccaaaatggcggaggtggaagacgtcagcaacaggatggaagcgcagctgcgcgtccacgcggcggaggacgacgccgatctcccgctccccgccctctttgacagagcgtcccacctccactcgctcgcctccagctcctccctcgaccaggaagggatccggaagggggtcgacctgctgcggcgctgcgacgacatggtcagcaagctcggcctcttctcctccaacgagaccaaggaagacgtctccaccgccaatctcaagtacctgctcgtgccgtactaccttggggaaatgactgagcaagtggagcaggaggaccggattccggtcctcaaggcatcgcaggaccatttgaaggagttcatttctgtatgtgaagcattggagcttattccagaggacgagcttcaattatataggcaggggcagtctgaaacaggggcaaaccgaagagcacaaaaggttgccaggttcaagcggcaaaaggctgcagaaacgaaggctccaagag

SEQ ID NO: 68099 - DNA, 440 bp, Zea mays
  Clone ID: MRT4577_162101C.1
gtgaacactccccgcattccatagtagggatgggcacaagtgctgaggcactcaccaggtacagctgcaaaggtaagcgctaggatgctgctattatatcaggaaaagggctcctaggccagtacgattattatttatagagcagcgtcccatccactaaacaaacggagcaccacgactgactggacactgacgagcgtcacggacggtctctgtcatccgactcagcgcaaactactcacagtccatcagactagtagcgaagcgactccttggctcaatgatcgaacaagacctcgcccaggtatgcaaattgaactcttgcagcaaatagcacactcgaacgcccgctgtatagctgaagcagactctctttctcgcctcctggaagggcaccaatgaatgaaatggccggggagaagacacgacactccgagggc

SEQ ID NO: 68100 - DNA, 310 bp, Zea mays
  Clone ID: MRT4577_162102C.1
ggtgacggggggaaccaagccggagtacacggtggacgtgtggtccggtaaccacccctactacgtcggcgacacctcggcgctggtggtgatggacagccagatcgagaagttccgcaagaagtgggggcacgtcaaggagtactggcccgaggaccagtggagggagatgcaccccgacggcgacccggagttcgagcccgagggggacaactgaaatggctcccgtcttcttcctcatcaatcaccgtaccggtgctgtttctctctgtgtcctcttgagtctgaatggaattgagacttttggtct

SEQ ID NO: 68101 - DNA, 197 bp, Zea mays
  Clone ID: MRT4577_162103C.1
gctactcgtagtagctcggtagtcggctcgacgaagagatccttgtggcagaagttatgagttatgattcaagaaaacaccactatctcttgctcctcattgcattggctcagttcgcattgttcacatggcttggaaacattactgtcaattggctaatatagagtgatagcatgtacactgtacttggaagcact

SEQ ID NO: 68102 - DNA, 311 bp, Zea mays
  Clone ID: MRT4577_162104C.1
aacctcacctcggtctctccctctcccctcccctcccccattctccgagcccccaaagaaggcggcagcagcacgagctagccagcctgccagtgcagtgacggaccggcggtttgggaagctcccgcgcgtgtacgtggacatgaagtatgtgctggtgaccggcggcgtggtgagcggcctgggcaagggcgtgacggccagcagcatcggcgtcctcctcaaggcctgcggcctccgcgtcacctccatcaagatcgatccctacctcaacaccgatgccggaaccatgtcccccttcgagcacggcg

SEQ ID NO: 68103 - DNA, 174 bp, Zea mays
  unsure (1)..(174): unsure at all n locations
  Clone ID: MRT4577_162105C.1
ccgggacgacccacgcgaccgagactcttgggaacgggaaaaaccgggagcggancgagaaggcagcgacggaggaagagnaccgaagcaacgacggcggccacgccagggccacgaacgaccacacccnccacaacgccancagcaccaacggcgagggccacgagaccaaga

SEQ ID NO: 68104 - DNA, 309 bp, Zea mays
  Clone ID: MRT4577_162106C.1
ttcagcgtggactgggacgcctaccggagggccagggctctgcatgaacgagttcaggcgccctcgggacctgggacggcccctattccaccgtcagacatcggacgagggccaagctcacggacgttcggtccggcggcgccatgactcgaacggatcggcctggagggacacattcagcgagcccaacgttcggctatgggggccatactggacaaggtcggcaccctggggctgaccatatggctcaccgagatcaacataagcctcaaggtccacgcgctgacacatgccggctaccgggaccag

SEQ ID NO: 68105 - DNA, 334 bp, Zea mays
  Clone ID: MRT4577_162107C.1
tttcttatcgttagtcttgaaccacctagagtgtccagcgaggcgggtcaacccctccgtatcccggaaccgtagccgcccgcgggtgtcggcgttcccccttccgctactagaggcctggagtaggactgacgagatggctcccggcgccgccgataagagcatgtggcggccactcagacgtgaccacttctcgcatcgacaagggccggcctgacggaggtgggtgaggagagtgacgcccacaaggcacgtctcatgaataagccggtcgaggagtgtgcgggctgagacactccagagaacggggaaggaggggaagtgccttatacgt

SEQ ID NO: 68106 - DNA, 652 bp, Zea mays
  Clone ID: MRT4577_162108C.1
ccggcctggccggggtacgactctcggcaacggatatctcggctctcgcatcgatgaagaacgtagcaaaatgcgatacctggtgtgaattgcagaatcccgcgaaccatcgagtttttgaacgcaagttgcgcccgaagccttctggcggagggcacgtctgcctgggcgtcacgcctcctgtcgctcgctctccctgtctcccgcacgccgacccgcagccgccgccgttcgccatgggtttcctcgacgcgctctaccgtgtggtgatgcgccgcaacgccgtctacgttaccttcgtcgtcgccggcgctttcgcgggcgagcgggcggtggactacggcgttcacaagatctgggagatgaacaacctcgggaaaaggtacgaagacatatcggtttggggcagaggccagctgaggaatgataaatttggtcaccagtttgcttcggtttgaccgtttcattttggcacagtaataaacgatgtaaacttacgctgctcctgtgacctccttctcattcgtttactttgaaaatgcttttgtggggatttcgtggtgcatgattgaaacccgttatatagaacatgcaaatactgaaatacctctggaaaattcctttggaaaaaaaaaaaaaaaaaaggccccta

SEQ ID NO: 68107 - DNA, 658 bp, Zea mays
  Clone ID: MRT4577_162109C.1
cattgggtacctcgagggccggccgggaaaaaaaattttcaaaaaaaaaaaaaaaaaaaaaaaaaaaaaaaaaaaaaaaaaaaaaaaaaaaaaaaaaaaaaaaaaccaaaaaacctgtcgctcgctctccctgtctcccgcacgccgacccgcagccgccgccgttcgccatgggtttcctcgacgcgctctaccgtgtggtgatgcgccgcaacgccgtctacgttaccttcgtcgtcgccggcgctttcgcgggcgagcgggcggtggactacggcgttcacaagatctgggagatgaacaacctcgggaaaaggtacgaagacatatcggttttggggcagaggccagctgaggaatgataaattttggtcaccagtttgcttcggtttgaccgtttcattttggcacagtaataaacgatgtaaacttacgctgctcctgtgacctccttctcattcgtttactctgaaaatgcttttgtggggatttcgtggtgcatgattgaaacctgttatatagaacatgcaaatactgaaatacctctggaggattcctttgttaaaaaaaaaaaaaaaaaagcggccaaaaaaaaaaaaaaaaaaaaaaaaaaaagaaaaaaaaaaaaaatttattaaaaaaaaaaaaaaaggcggcc

SEQ ID NO: 68108 - DNA, 475 bp, Zea mays
  unsure (1)..(475): unsure at all n locations
  Clone ID: MRT4577_16210C.1
cggcccggatttcttgtgttgatcccacgcgtccctcgacgngatccacgcgancaagcccattttttggtcgctcgtgcaggagtactggcgggtgttcgacttcctgtcgcacctccccgagagcctgcacaccttcttcttcctcttcgacgacgtgggcgtgccgtccgactaccgctggacgacaccaagacgtggccggaggacctgctgccgctcaggcccgtggggaggctggtgctggacaggaacgtggacaacttcttcaacgagaacgagcagctggcgttcggcccggggctggtggtgccagggatctactactcggacgacaagatgctgcagtgccgggtgttcgcctacgccgacacgcagcgctacaggctggggcccaactacctgatgctgcccgtcaacgcgccgcgctgtgcgcaccacaacaaccactacgacggtgccatgaacttcatgc

SEQ ID NO: 68109 - DNA, 800 bp, Zea mays
  unsure (1)..(800): unsure at all n locations
  Clone ID: MRT4577_162110C.1
tttgaacgcaagttgcgcccgaagccttctggcggagggcacgtctgcctgggcgtcacgccagacgcccccgaattcgtctccgcctcctgtcgctcgctctccctgtctcccgcacgccgacccgcagccgccgccgttcgccatgggtttcctcgacgcgctctaccgtgtggtgatgcgccgcaacgccgtctacgttaccttcgtcgtcgccggcgctttcgcgggcgagcgggcggtggactacggcgttcacaagatctgggagatgaacaacctcgggaaaaggtacgaagacatatcggttttggggcagaggccagctgaggaatgataaattttggtcaccagtttgcttcggtttgaccgtttcattttggcacagtaataaacgatgtaaacttacgctgctcctgtgacctccttctcattcgtttactctgaaaatgcttttgtggggatttcgtggtgcatgattgaaacctgttatatagaacatgcaaatactgaaatacctctggaggattcctttgttaccttttcccagttctagtttttgtcatgacccggagcatgtactctgcccttccaaagttcggtggtcgtcgacgttcctccgcatccaaagaggaagtagtgttatagaatgatgtaagcaaactaattggtttgccacattagtgttataggatgatgtaagtaggctaatttgtttgccacattagattttcattaagttggatgagagaaagaagagaagtagacttctaagagaaaaaaaaanaaaaaaagcggcc

SEQ ID NO: 68110 - DNA, 173 bp, Zea mays
  unsure (1)..(173): unsure at all n locations
  Clone ID: MRT4577_162111C.1
aaaaaaaaaaaaaaaaaaaagtgccccctcgcgngccaatccgcgccccgnccggccgatcgccagccctgttgccttactaataccgacgnggtgccggcgcgcccacttccactctcaaactcnngtctgctgtctgctcatggcaccgtccccgcgccccccactgccca

SEQ ID NO: 68111 - DNA, 325 bp, Zea mays
  unsure (1)..(325): unsure at all n locations
  Clone ID: MRT4577_162112C.1
gtccgcccagcgtncgntgaggcttgggtgtgggggggcggtggcgtcgtgctgttggtctgagtgccggtcgttgttgtggctgtgttgctgggagttcatgctggtggagctcgtgcaccggttccaggtgatctttggtttggtcctcttttccgtcctggtggcgctgncgctttggggggtggtgtcggtggtgttggttgngctggttgcgcggggggtgacggtggtgtgcggcctgcaggaggtgtgtcttgtgcttgcgctgctgccggctttgtcccctgctgtggaatctgtgtgttgttttgttggcgttggc

SEQ ID NO: 68112 - DNA, 150 bp, Zea mays
  Clone ID: MRT4577_162113C.1
acacgcagtacttggggggcggtttcattttgagtgggggtgatcgcctgcagagtaagctgcagttgaccatcagtttatgttgcgcgcgcatgccttggcacaatgtgtgtatgatggtcgtatataaagttaactggcctcccgctt

SEQ ID NO: 68113 - DNA, 111 bp, Zea mays
  Clone ID: MRT4577_162114C.1
gggtcagtgatggaaaggggttaacttcagccaggattgatggcagctgagggaaattcttgcccaactaaacccagaactgcaaacttaacattagaaaataaggtccag

SEQ ID NO: 68114 - DNA, 263 bp, Zea mays
  Clone ID: MRT4577_162115C.1
gagtcgtattaaacacgtgcggcgtctgtgcccgcgtctcgagcctcacggtccggatcgctctcccttccacaacattagggatcatgtcgggggccgacccctgcgagatccgatcggaggcagtcagctaaggtcaccctgatcatctatgaggctgggggtcacggggaggtccggattctcggctcgcgcatgacgcggaagcgtcggttgcttatggtcacggggccctctcgccggtggagctaggggcgccggga

SEQ ID NO: 68115 - DNA, 386 bp, Zea mays
  Clone ID: MRT4577_162116C.1
gccggccgggccgggatcatcacagagctctctcctcttgcgattcattcgctcgatgctagcttcccttgccaagaagagcggcggccatgaccatggccactcaagcctccgccgtcacgcgccacctgctggacgccgcctgggcgccggccttcaagccgcgccaggtgagctcgcagatcacgctggcgtaggcgtactcccgcgagtcggacccgatccgcgggtacacccaggatacgctgaaggagcccaagggcactcgtggtcccgcagctggagcccatgacgccgtcacctgatcttcagacgacagcacgtgtacagcatgctccgtaaagagcaaccggaagacgtctaccacaacacgtgaacgtccccca

SEQ ID NO: 68116 - DNA, 241 bp, Zea mays
  Clone ID: MRT4577_162117C.1
ggattgtacccctgaggaggcatggatgtggagccggggctctggtgatgggcccctctcctttcagcaggagaagcttggggacatctgcttctccctccgctatgtccccacggccgggaagctcaccgtcatcgtcctggaggctaaaaacctgaagaagatggacgtaggaggactgtcagatccatacgtcaaggtccacctgctgcagggcggcaaaaaggtgcggaagaagaaa

SEQ ID NO: 68117 - DNA, 318 bp, Zea mays
  unsure (1)..(318): unsure at all n locations
  Clone ID: MRT4577_162118C.1
gccgctcacggtgtgcaccgcgcgggaanaaccaaaatgagatctgcgaggacctcttcaagggtatggtccactagactcgcagtagggtaacctgggctgattgggtgggccgccttctaggaggtgacagatcttcaaattattctcgtattactacaantcagtgggtagaagggggttatcacatcacccanaanncccaanaccaccacaaggaagaaaaggaggnncacnagcggacctacgacaccggaagcaaggaggagagganggaccaggagcgcgggaacaaccaggggaggatagatgggaaca

SEQ ID NO: 68118 - DNA, 853 bp, Zea mays
  unsure (1)..(853): unsure at all n locations
  Clone ID: MRT4577_162119C.1
tttttttttttttttctggggttgtgttttttttttttttttttttttttgtggggttttttttttttttttttttttttttttttttttttttttttttttttttttttttttttgtttttttgggggaaggccgttttgggctgggtgtgggggggttaaaaaaatttccgggggagggggggggttccgagggggggctcaattccaaaaaatgcacgggggggggggtgggggttccacctgcccgggggggatgtgtggggctagttaacacaaaggagaaaaaaaaagggaaaaccccccggtgggaaaaaaagggggggggcccgaagaaaacccttctatataaaagggggccgaggggggggagaaaggtttgttgttaaaaaaaaattcttaaaaccgggggggggggggagggccccttggggggggtgggggggggataagcgggggggcaatccgcctggtgttttaagcgggggcccatggatagcactttttggagggggtattcccgggtgggaggaagctatattttctttgggggagaggggaaaaaaaaaaaaaggggagggcgcagaggtttccccccccccgcaagggggggggggagaagaaacacccttgaaaaaaaaacgcccgggagaaaataccaccgccgcggggggggggggtattgggggggtctaaaaaaaaaggtgtgggggagcgtggaaaaaaaaaggatctgttgaattcctctcacaaaaaaaagaaaagccctcgggggggagggggggggngctcccataggttangggaaaaaaaaaatttggctgaaaaaaatttctggtggtgcgaggcgaac

SEQ ID NO: 68119 - DNA, 521 bp, Zea mays
  Clone ID: MRT4577_16211C.1
acctacagcctgatctaagcagtattccgaggggatagaaacggaaagcaagacgaaatcctgtgttgaaaaagaaccttgcaaggaaggaatgaagctatggatatatttgagtaaaaagaggaaattgaagcccaatcacagtggtgagcagagccctcgtccccgatatcgatatttattttccttcgcaatccattccttagaaccacttaatcggattttgaaacaggcagctaaagagagtcccatgggcatgcatggggggagagtcattcctagcggtaggtgggtcgtttcctgcgtcttatcatggcaaggacactttttacaggtccatcaaatagaaatccttctcttctgggaaacctaaattctaaaccaaagtggtgaactggttggcactctgcactcttctacttcagtttctacccctgtcctgtggtataggcaaatgcactttactagttatgcggcccgccctagattaccaagttcctcttggaggaggaggtacctcg

SEQ ID NO: 68120 - DNA, 335 bp, Zea mays
  Clone ID: MRT4577_162120C.1
gattccaaacatgtaaaagtgtaattcatcatgcaatacatggatacgctcatcagaactgtcccagatcacgtgcagatacatattcgtttcgaattttacgactcctatacgcatatgatacagatccgacctgagatctatttacatgaccagtaggcagtagctcaataaagaacattatgtggctcgagaagggatgactagtgcctagtacgcactcagaggtatccacatatatatgatttctgcattcgataattcacatggcatccatggacacgagaagaacggcgaccgtagcggcggacagagtccgtgaacatgcccgtgcg

SEQ ID NO: 68121 - DNA, 666 bp, Zea mays
  Clone ID: MRT4577_162121C.1
ctaatcagagcggggaaaggcgtcttcgtactcgcctctctccgcgcaaccgagccttccgcccacctcctccccatttcgccagcggcgcacccaccaaccacccccacccgccgccatgagggagcgcaactcgatccacatcggacaggccggcatccagggcgggaacgcgggctgagagctgtactgcctcaagcatggcattcagcctgatggccagatgcccggcgacaagaccggtgggggaggagatgatgctttcaacaccttcttcagcgagactgggcgctgtggaagcacgacccccgcgctgacttcggagatctcgaggccactgcgattgatgaggtgaggactggcgcttaccgccaggtcttccaccctgatgagcgtatcagtgtcaacgaggatgcagccaacgacttcgcccgaggtcattacaccattggaaaggcagattgctgatctgtgccctgaccgcatcaggaagctttcagacaactgcgctgtgctgcagggattccttgtctgcaccgctgctgaaggaggaactggttctgatcatgaatctcttctgctggagcgcctctctgttgactatggaaagaactccccggttgaggtcacagtgtacccctcatctcaggtctccacctctgatgt

SEQ ID NO: 68122 - DNA, 707 bp, Zea mays
  unsure (1)..(707): unsure at all n locations
  Clone ID: MRT4577_162122C.1
acctcgaggccggccgggaaacgacgtcagttctcagctcgtctatcgcttagccgccgaagccactggagaggcgatatgggaagcccccagagacgatgcggctaccgtagcacacggagcgtgcgggttcgccgaaaacctgcagcatcttccaagcgtggccgccccatcaccttcgctgtcccggtcctgtctcacagctgctggtcctgtgcgctgtccctggacgcccacgccgtcgatgccacggacacctcataggtaatcatgatccctaatcctacttgccttttgtgcgggccactggttcataagtatttagctgattcgtacactatggaggttctgagtcctgtgcagctcttgattactagatggatgcagatcacttgctgcttgtgaggataccagtgtccagcaacacatccccgatagattcagacccgttggacattgtggaaacctacatatcgtggcctccaattttgttatattttgatgaacgcgatagccctcagttttgatgatgcacatggtcttaagttcacgaaatgtgccatgatctgaactttaaatctgatttgattttctgaaggcacctttggtagtatttgctgcaaccagtgtcttgtttgacctttaaaaaannnnnnnnnnnnnnnnnnnnnnnnnnnnnnnggtaattaaaaaaaaaaaaagcggcc

SEQ ID NO: 68123 - DNA, 2357 bp, Zea mays
  Clone ID: MRT4577_162123C.1
ccccggccggtcgggttgtcaaataggcgatcctattttcttgcagcgcgtgctgggtgctgctctggtactctcttctctctccctgctgacccaagtcccacgcctgcgtctcgtgatgccgccgaaatcgaaggcgtccgccgccgcggagccggtggccgtcgaggacctcttcgcctcgctccaccgccacatcgaggcaggtgctttcaaacaggccgccaaggtcgccgaccaagttctcaaggcagcgccgggagatgaggacgcggtgcgatgcaaggtggtggcatacatcaaggccgacgagatcgacaaggcgctcgccgcgatccgcgccgccgagcgcctcccgatcgatctcagctactacagggcctactgctgctacaggcaaaacaaactgcatgaggctcttgagcttttaagaggccaagaagaaacttcagctgttctccagctggaatcccagatcttttaccgactaggaagaatgaatgattgcatgagtagctatgagaagcttaaaaaatttaaaattgactcaatggatctgaagataaatatcattgctgctctagttgctgctggaagggcttctgaggtacaggcagctatgaaggcgcttaaggttgatcttaccacgagagcactcagggatactcgtagttttgagctcgcatacaattctgcttgctccttgatagaaaacaagaagtactctgaagccaaggagcaattggacttggctaaaagaattgggaaagaagagcttatggtggaagactacggcgaggcggatattgaatatgaattagctcctgtttctgctcagcttgcttatgtgcagcagctacaaggacaatctcaagaagctatgcaaacatatgttaatatgataaatgggcagtcagctgatttatcatcacttgctgtggcaacaacaaatcttatttcaataaaaggtacaaaagataccgcagatagcttgaagaagctcgatcggcttattggaacaactacagctccaaaccagttgcatcttgttgaaaaccttgactacaagttatccccatggcagaaagaagctctgtattctgcacgtgttcttttactgctccatgcaaataaaactgaacaggcacatgagttggtcagggggctgcttggtatgtttccagatagtgtattccctgttttacttcaagccgctgttcatgttaaagaaaagaagattcacaaagctgaagatgttcttagccagtacgctgagaagcgtcctgagaattctaaagggctcctccttgcacttgcccagattgctgctaatgccaaccattttcagcttgctgctgactcactatccagaatacctgacattcagcacatgcctgcaacagttgctacattagtggcccttaaagagcgcctaggtgactccaatgctgcagcttctgtacttgattctgctatcaactggtggaagaattccatgaccgaggataacaaattagatatattaacacgggaggctgctgcatttaagctcagccatggacgtgatgaagaggcttgtttgttgtatgaggaacttgtgaagagccatggaagcatagaagctttggctgggctagtaatgacttcagcgcgcactaacttggagaaggcagaacaatacgagaagaaactgaagccattgccaggcctcaaaggagttaatgttgagagcttggagaagacatctggtgcaaggcatgtggaagggccccaagacatgaaggtagatgttcccgaggaagtgaagaagcaaaaggcaaagaagaggaagcggaagcctagatacccgaaaggcttcgatccagcaaacccggggccgccaccagatcccgagagatggctgccaaggagagagcggtccagttaccgtccaaagaggaaggataagagggctcaggtcagaggtgctcaaggagctgtgtctagggaaacatcggccaccaatgtcggtgcttcctcaaaaggaagccaaaccaccaattcatcaaagacaccggcggtaaatgctgaacagccaaaaactagcaacaaatctaggaagaagaagtccaggcattagatgagaattttatgttacattaccgtacaaaagaatatgttcgtttatcttctggatgacttgcaattttggactggattgcattcaattgcagatttgctttgcttttacactaacgtttgaagcgactgagactattgatttttttttttgccaagatgtgattgatgggttgctccagtaacattctattttttatgagttaatagttcttttgattccattcaaaaaaaaaaaa

SEQ ID NO: 68124 - DNA, 839 bp, Zea mays
  Clone ID: MRT4577_162124C.1
ctgtgtctcgtgatgccgccgaaatcgaaggcgtccgccgccgcggagccggtggccgtcgaggacctcttcgcctcgctccaccgccacatcgaggcaggtgctttcaaacaggccgccaaggtcgccgaccaaggtcaagcactccatctcctcccccccagcgcggtccgagtctcgtgccctaacccccgttccaatctgattcccactggttccgcagttctcaaggcagcgccgggagatgaggacgcggtgcgatgcaaggtggtggcatacatcaaggccgacgagatcgacaaggcgctcgccgcgatccgcgccgccgagcgcctcccgatcgatctcagctactacagggcctactgctgctacaggcaaaacaaactgcatgaggctcttgagcttttaagaggccaagaagaaacttcagctgttctccagctggaatcccagatcttttaccgactaggaagaatgaatgattgcatgagtagctatgagaagcttaaaaaatttaaaattgactcaatggatctgaagataaatatcattgctgctctagttgccgctggaagggcttctgaggtacaggcagctatgaaggcgcttaaggttgatcttaccacgagagcactcagggatactcgtagttttgagctcgcatacaattctgcttgctccttgatagaaaacagaagtactctgaagccaaggagcaattggacttgggctaaagaatttgggaagaagagcttatggtggaagactacggcgaggcggatattgaatatgaattagctcccggttctgctcagcttgcttatgtgcagcagcta

SEQ ID NO: 68125 - DNA, 693 bp, Zea mays
  Clone ID: MRT4577_162125C.1
aaaccaaaccaaccctactcgcccccacccgcgccaccgccatggactcgatcgacgcggatttagcgcgcacgcaggaggagcggcgcaagatggaggaggcgctggcggccggcgcgcccatggccgtgtcctccgtcaccttcgacactgacctctacggtggcgggggcgccgaccccaaccgcttcgcgggctacgacacctccatcccggcctccgaggatgacgccgcggaggacgacacggagttggccaaccccgcaccgcgccgcctcgcggcctacacgggccacgccatcgccgccgccgacctcccgcggtcagccgacgacgacgacgggctgcccaagaggtcccagcgcatcatcgaccgcgaggacgactaccgccgccgccgcctcaaccagatcatctcgccggagcgccatgacccgttcgccgccggggaggccaccccagatccctctgtgcggacctacgccgacgtcatgcgcgacgcggcgctgcagaagaagaaggaggacctgctcagggagattgccaagaagaagaaggaagaggaggagaaggagaaggagaggaaggctgccgcgcctgagcagccggctgctgcgacgaagcggcgcaacaggtgggatcagtcgcaggatggggatgctgcttccggtgcgaaaaaggaaaagacatcct

SEQ ID NO: 68126 - DNA, 839 bp, Zea mays
  Clone ID: MRT4577_162126C.1
ttgggtacctcgaggccggccgggcctggccatcagccggctgcgagggcaaattgaatatgaattagctcctgtttctgctcagcttgcttatgtgcagcagctacaaggacaatctcaagaagctatgcaaacatatgttaatatgataaatgggcagtcagctgatttatcatcacttgctgtggcaacaacaaatcttatttcaataaaaggtacaaaagataccgcagatagcttgaagaagctcgatcggcttattggaacaactacagctccaaaccagttgcatcttgttgaaaaccttgactacaagttatccccatggcagaaagaagctctgtattctgcacgtgttcttttactgctccatgcaaataaaactgaacaggcacatgagttggtcagggggctgcttggtatgtttccagatagtgtattccctgttttacttcaagccgctgttcatgttaaagaaaagaagattcacaaagctgaagatgttcttagccagtacgctgagaagcgtcctgagaattctaaagggctcctccttgcacttgcccagattgctgctaatgccaaccattttcagcttgctgctgactcactatccagaatacctgacattcagcacatgcctgcaacagttgctacattagtggcccttaaagagcgcctaggtgactccaatgctgcagcttctgtacttgattctgctatcaactggtgggagaattccatgaccgaggataacaaattagatatattaacacgggaggctgctgcatttaagctcagccatggacgtgatgaagaagcttgtttgttgtatgagg

SEQ ID NO: 68127 - DNA, 515 bp, Zea mays
  unsure (1)..(515): unsure at all n locations
  Clone ID: MRT4577_162127C.1
aaaacagcactactcatccgtcgccccacggaagtttcggcggcgccggcgtgctcgtgatctcaaccaaggcgtgtctccgctccggtcacccgtcactccacgcaaacatgtcgaggaggaagaccagggagcccaaggaggagaacgtcacccttggacccactgtccgtgaaggagagtatgtctttggtgtcgctcacatatcactgatttgtctgggagggaaactctggttcggatcaccggtggcatgaaggtgaaggctgaccgtgacgagtcgtcaccttacgctgctatgcttgctgctcaagacgncgcacagcgctgcaaggagcttggcattactgcactgcacattaagcttcgtgccaccgggaggcaacagaccaagacccccggacctggtgcccagtctggcctcagggcggttgctcgttctgggatgaaaatcggacgcattgagggcgttaccccgggccccacggacagcactctgaaaaaggcggtaggag

SEQ ID NO: 68128 - DNA, 411 bp, Zea mays
  Clone ID: MRT4577_162128C.1
aaaaggaaattgtttttttcccgggacaaactccgggtatgggcggaacctgaaacgggccaaaacatttttggcccccccctcctgttttcccttccgggtggggcacaataaaatcttttttaccccggggctgcactggcctggcctgacctgcccaaaaaactgctcgctggctttaaactgggcttcctcgtttttcaccccaggggaacccccacctgaacccgagctcccttccaagtcccaacccccgtttgtccaggcggtctttggctttggtaggggcccgtcccggtccggggggtcatgttcccaagccgaagggggccctgtgccccaaatacccggggggcttctcaaacccgtggaccttccatttcgggggccccctgcaagaaccgggggctt

SEQ ID NO: 68129 - DNA, 857 bp, Zea mays
  Clone ID: MRT4577_162129C.1
ccggccgggacggaagtctcggcggcgccggcgtgcttgtgatctcaacccaagtcgtgactccgatccggtcacccgtcgctccacgcaaccatgtcgaggaggaagacccgggagcccaaggaggagaacgtcacccttggacccactgtccgtgaaggagagtatgtctttggtgtcgctcacatctttgcatccttcaatgacaccttcattcatatcaccgatttgtctgggagggaaactctggttcggatcaccggtggcatgaaggtgaaggctgaccgtgacgagtcgtcaccttacgctgctatgcttgctgctcaagacgtcgcacagcgctgcaaggtactcactcatttgtccgtctgtgtattcaaagacgacattgtcttaataattacattgaagcctaggattacgtagctctgctttagtgttgctgtatatccggataagtgatctgtgtccggtattttgtcttcaggagcttggcattactgcactgcacattaagcttcgtgccaccggaggcaacaagaccaagacccccggacctggtgcccagtctgccctcagggcgcttgctcgttttgggatgaaaatcggacgcattgaggatgttaccccggtccccacggacagcactcccaaaaagggcggtaggaggggaaggaggctgtaggcatctctggcggctcttgcctgctcttggcggtatgaagctagtcctctctgggtggtgttgctgttttctgtgtttgtcaagacgagctttaattttgctctatgtggatgaccgtttacagttactcgaacctatatgatgttgcatggataatgttttttggctgagg

SEQ ID NO: 68130 - DNA, 1403 bp, Zea mays
  Clone ID: MRT4577_16212C.1
ccggccgggaaaaaagtgttcagcagcaccacacaaccaatgccggctgtccccggcacgcgcaccagcaccaccacgacccatggccgacaccgccaacccgccgaccaagcccaccaaagcctccgcccccttcgtcgtaattgacgccgccagcgccaacaaggcccgcgacggtggcgccgatgccccgacaccgtcggcggggcacggccgccgctggctgcggcgggcgtgctgcggcgtggccgtcggcggcgcgctggccgcggcggcggtgctgtcgctgtcgctcaccgtgctcagggtgcgggacccgacgctgtccatggagtccgtggccgtcaggcgcttcagcgtgcgcctggacgccgcgtccccggcgcgcccgctgcggatcaacgtcacgctgtccggcgccatcgtggtccgcaaccccaactacgagtccatgcggttcggcgccagcgccacggagatcttcgtggacggcgcggcggacccgggccccgtcggcgtgggccgcgcgccgcccggggaggtccccgcgcgcggcgccagccgggtggccgccgacgtcgacgtgctcgtcgacagggtcgcgcccgccgtggtcgcccaggtgctgttcggcggcggcgaggtgcgcctcgccacgcgcaccgccgtcgacggcaggctcagcctgctcggcgggctctacggccgccgcaccgtgcgcgtcgccatgcggtgccgcgtcgcgctccgcgtctcagccgcggccgtcgccgtcgccggcaaccccgcgtgcgtcgcggacctcgggcgctgacgtggtctattattcgtcagctgtagtctgtgggtgagcgggccggtgtagtttttgccctttctctttaccgccggcgatgaccggtggagatagttacggtggcagctataactgaactcctgtcggctagcctcgtttatagagcacaacttactttgggcacaattcgatgaccaattgatgatggtgagtcagttcttttgacacaaaacaacataaaaaaaaaaaaaaaaaaaattgtaaatcacactccactccagcgctgagcacttgattgattcactaggtagctagctagctgaatcacaatggatcctaccaagttccgcccgtccagtggccacgacacgacggtgacgacgacgaacgctggcgctcctgtgtggaacgacaacgaggcgctgactgtggggcctcgcggtcccatcctgctggaggactaccacctgctcgagaaggtggcgcacttcgcgcgggagcgcatcccggagcgcgtggtgcacgcccgcggggccttcgccaagggcttttttgagtgcacccacgatgcgacgtcgctgacgcgcgccgactttctgcgctcgcc

SEQ ID NO: 68131 - DNA, 786 bp, Zea mays
  Clone ID: MRT4577_162130C.1
cattgggtacctcgaggccggccgggaccactcatccgtcgccccacggaagtctcggcggcgccggcgtgcttgtgatctcaacccaagtcgtgactccgatccggtcacccgtcgctccacgcaaccatgtcgaggaggaagacccgggagcccaaggaggagaacgtcacccttggacccactgtccgtgaaggagagtatgtctttggtgtcgctcacatctttgcatccttcaatgacaccttcattcatatcaccgatttgtctgggagggaaactctggttcggatcaccggtggcatgaaggtgaaggctgaccgtgacgagtcgtcaccttacgctgctatgcttgctgctcaagacgtcgcacagcgctgcaaggagcttggcattactgcactgcacattaagcttcgtgccaccggaggcaacaagaccaagacccccggacctggtgcccagtctgccctcagggcgcttgctcgttctgggatgaaaatcggacgcattgaggacgttaccccggtccccactgacagcactcgcagaaagggcggtaggaggggaaggaggctgtaggcgtctcttctgcgtgccatttgccggctcttggcgggtggccatcatgaagctagtcctctctgggtgttgttgctgtcttctgtgtttgtcaagacgagctttaattttgctctatgtggatgaccgtttaccgttagtcgaacctgtatgatgttgcatggataatgttttttggcttagcaactggctcgtcatatttct

SEQ ID NO: 68132 - DNA, 824 bp, Zea mays
  Clone ID: MRT4577_162131C.1
aaaaaaccgcaccactcatccgtcgccccacggaagtctcggcggcgccggcgtgcttgtgatctcaacccaagtcgtgcctccgctccggtcacccgtcgctccacgcaaccatgtcgaggaggaagaccagggagcccaaggaggagaacgtcacccttggacccactgtccgtgaaggagagtatgtctttggtgttgctcacatctttgcatccttcaatgacaccttcattcatatcactgatttgtctgggagggaaactctggttcggatcaccggtggcatgaaggtgaaggctgaccgtgacgagtcgtcaccttacgctgctatgcttgctgctcaagatgtcgcacagcgctgcaaggagctcggtatcaccgcgctgcacattaagcttcgtgccacaggaggcaacaagaccaagacccctggacctggtgctcagtctgctctcagggctcttgctcgttctgggatgaaaattggacgcattgaggatgttaccccggttcccactgacagcactcgcagaaagggtggtaggaggggaaggaggctgtaggcgtgtatccttgctatttgccatcactttgcactggcctctgggtagcgttgctgtttattagcttgccaaaaggagttttaattttgctcattttgctctatgtcgaggatcatttactgttagccgaatctatgatgtgcattgataatgttttggttgaggaattgacaattatgctaaaaaaaaaaaaaaagggcggccgccgactagtgagctcgtcgacccgggaattaattccggaccggtaccgcaggt

SEQ ID NO: 68133 - DNA, 236 bp, Zea mays
  unsure (1)..(236): unsure at all n locations
  Clone ID: MRT4577_162132C.1
tcgacctcacctattccgacgccgctccttttcctttcattggattccgaccaactgaccgaagtgcgtttcatatggtttctgcggccatctntcnttcggcgccccggctctcctcgcaggtccggctcctcctgtcgtccatcgcgcccccggatcacgctaccactaccgttcctagcccctgcatctaacccaaactcttaacctacacactccaccatccgatcaacaac

SEQ ID NO: 68134 - DNA, 948 bp, Zea mays
  Clone ID: MRT4577_162133C.1
gtcctgatgagcctttcccagatgatgatgctgaacatactgagcgctacattttctcgttcgagaaagccaagccagaactctgattctcggaagtttcggcggcgccggcgtgctcgtgatctcaacccaagtcgtgcctccgctccggtcacccgtcgctccacgcaaccatgtcgaggaggaagaccagggagcccaaggaggagaacgtcacccttggacccactgtccgtgaaggagagtatgtctttggtgtcgctcacatctttgcatccttcaatgacaccttcattcatatcactgatttgtctgggagggaaactctggttcggatcaccggtggcatgaaggtgaaggctgaccgtgatgagtcgtcaccttacgctgctatgcttgctgctcaagacgtcgcacagcgctgcaaggagcttggcattactgcactgcacattaagcttcgtgccaccggaggcaacaagaccaagacccctggacctggtgcccagtctgccctcagggcgcttgctcgttccgggatgaaaatcggacgcattgaggacgttaccccggtccccactgacagcactcgcagaaagggcggtaggaggggaaggaggctgtaggcgtctcgtctgcgtggcatttgctggctcttggccggtggccattatgaagctagccctctctgggtggtgttgctgttttctgtgtttgtcaagacgagctttaattttgctctatgtggatgactgtttaccgttactcgaacctgtatgatgttccatggaaaaatggataatgttttttggctgaggaattggctcgtcatatttatgtatgcattttcactctctctataaagtgtactagagtaatcttccgtagtgaaatggcctataatacccttccaaaaaaaaaaaaaaaaaaaaaaaaaaaaaaaaaaaa

SEQ ID NO: 68135 - DNA, 470 bp, Zea mays
  unsure (1)..(470): unsure at all n locations
  Clone ID: MRT4577_162134C.1
gggggggggggagcattttcnttaatagacccgataccccgtgctgcgtccagtgtacaggtcttgaagtgcgctctttcggtgacctgtgggctgcagtgcgggcacctactggctgtgggcccgccactatccggccttaaggcttgcattatttcgggcgggggcggactgttatctatgtgtaagcggcgtctaacctttgctgcgcacgatggtggctggagtagctgcaccgacagcccccttttgcagggctctgtccggcccacttccgtgaattgtggaagctttcttaggtggtgacacctggctactcctatttctggttggggaatgaccgtttgccccactgcttgctccgacattattcaactggccgggtcctgccgatcccttgggcggcgtgagtacggccctacgccactctgtgatctggaggtcgcatgcgcctgtggcctccatgatcc

SEQ ID NO: 68136 - DNA, 827 bp, Zea mays
  unsure (1)..(827): unsure at all n locations
  Clone ID: MRT4577_162135C.1
ccggccggggcatggaactcgtatacttctcatccccactcccccgcgtcctctgctctgccgccgcacccaactaaagcgcagtgtggacgtgcggtggcttcacgctcgcaccgctcgccagcccggaccctaatccagcttgctgggcgcgagcacggaaggaattcccgtagcaaggaaggaatcaccggaagcgggtggaaagcttcacggggctcaagcaggggctgcaggagggcgcgaccgggctgtttcggctcatgcctggatctgggggagagggacgcgcggagccgcgccgcgccgtatcccgttcgtcggcggccggatggtgatcagcggttccagctcagcaaactttggagtcaggattgtatctcttcgttgagtgtcgtttaaccaagcggatttgggaagaggtggttgtatggacaacagtggagggtcttagtccaagtaactgggaccgcagtgagtctgtcctggtggacgcctctagctacaactcaagattgcaccagcttcttaattctagtgaattggattgtctggcgtcagagaaatgctaggattttcgaccacaagtcctccacatgtcctcagattctcgcagctattatatctgaggcataggcttggacgatacgtgcaggagccaaacaggctatgatattcaatgtgatcttcatcaacaaagcaatcgtatggagaataggaatgttttcagtcctattanatgccacttgatttgcagaagctgttcaaagtggttactggtggcctctctggatcgtcaaagaatgtcacgtgccatgaaacgctgc

SEQ ID NO: 68137 - DNA, 933 bp, Zea mays
  Clone ID: MRT4577_162136C.1
cattgggtacctcgaggccggccgggaaaaccagcactactcatccgtcgccccacggaagtttcggcggcgccgtcgtgctcgtgatctcaaccaaggcgtgcctccgctccggtcacccgtcgctccacgcaaccatgtcgaggaggaagaccagggagccaaaggaggagaacgtcacccttggacccactgtccgtgaaggagagtatgtctttggtgttgctcacatctttgcatccttcaatgacaccttcattcatatcaccgatttgtctgggagggaaactctggttcggatcaccggtggcatgaaggtgaaggctgaccgtgacgagtcgtcaccttacgctgctatgcttgctgctcaagacgtcgcacagcgctgcaaggtactcactcatttgtccggctgtgtatccaaagacgacgttgtcttaataattacattgaagcctaggattacgtaactctgctttagtgttgctgtatatccggataagtgatctgtggccggtattttgtcttcaggagcttggcattactgcactgcacattaagcttcgtgccaccggaggcaacaagaccaagacccccggacctggtgcccagtctgccctcagggcgcttgcccgttccgggatgaaaatcggacgcattgaggacgttaccccggtccccacggacagcactcgcagaaagggcggtaggaggggaaggaggctgtaggcgtctcttctgcgtgccgtttgctggctcttggcgggtggccatcatgaagctagtcctctcttggtggtgttgctgttttctgtgtttgtcaagacgagctttaattttgctctatgtggatgaccgtttgccgttagtcgaacctgtatgatgttgcatggataatgttttttggctcaggaattggctcgtcatatttct

SEQ ID NO: 68138 - DNA, 1006 bp, Zea mays
  Clone ID: MRT4577_162137C.1
actcaccctaatgggctgcggcctcgtatataaaccagcaccactcatccgtcgccgcacggaagtttcggcggcgccggcgtgctcgtgatctcaacccaaggcgtgcctccgctccggtcacccgtcgctccacgcaaccatgtcgaggaggaagaccagggagcccaaggaggagaacgtcacccttggacccactgtccgtgaaggagagtatgtctttggtgtcgctcacatctttgcatccttcaatgacaccttcattcatatcactgatttgtctgggagggaaactctggttcggatcaccggtggcatgaaggtgaaggctgaccgtgacgagtcgtcaccttacgctgctatgcttgctgctcaagacgtcgcacagcgctgcaaggagcttggcattactgcactgcacattaagcttcgcgccaccggaggcaacaagaccaagacccctggacctggtgcccagtctgccctcagggcgcttgctcgttccgggatgaaaatcggacgcattgaggacgttaccccggtccccactgacagcactcgcagaaagggcggtaggaggggaaggaggctgtaggcgtctcgtctgcgtggcatttgccggctcttggccggtggccattatgaagctagccctctctgggtggtgttgctgttctgtgtttgtcaagacgagctttaattttgctctatgtggatgaccgtttaccgttactcgaacctatatgatgttccatggataatgttttttggctgaggaattggctcgtcatatttatgtatgcattttcactctctctataaagtgtactagagtaatcttccctagcgaaagggcctatagcctagtggttaaggactttcgaatagcatctccaaatcttgggttagatttctctcgggaacaaatttttaggcttgttaaaaaaatcctctcgctatgtctcatccgcttttgggttataaaaaaaaaaaaaaaaaagcggcc

SEQ ID NO: 68139 - DNA, 785 bp, Zea mays
  Clone ID: MRT4577_162138C.1
cccccggttcgacccagcgtccgtccgtcgccccacggaagtttcggcggcgccggcgtgctcgtgatctcaaccaaggcgtgtctccgctccggtcacccgtcactccacgcaaacatgtcgaggaggaagaccagggagccaaaggaggagaacgtcacccttggacccactgtccgtgaaggagagtatgtctttggtgttgctcacatctttgcatccttcaatgacactttcattcatatcaccgatttgtctgggagggaaactctggttcggatcaccggtggcatgaaggtgaaggctgaccgtgacgagtcgtcaccttacgctgctatgcttgctgctcaagacgtcgcacagcgctgcaaggagcttggcattactgcactgcacattaagcttcgtgccaccggaggcaacaagaccaagacccccggacctggtgcccagtctgccctcagggcgcttgctcgttctgggatgaaaatcggacgcattgaggatgttaccccggtccccacggacagcactcgcagaaagggcggtaggaggggaaggaggctgtaggcatctctggcggctcttgccggctcttggcggcatgaagctagtcctctctgggtggtgttgctgttttctgtgtttgtcaagacgagctttaattttgctctatgtggatgaccgtttacagttactccaacctatatgattttgcatggataatgttttttggctgaggaattggctcgtcatatttatatatgcattttcactctcaaaaa

SEQ ID NO: 68140 - DNA, 491 bp, Zea mays
  Clone ID: MRT4577_162139C.1
gggggaaaaaaaagggccccggaccgggggagaaaggggggaaaaggagggaagggggggggagggggggtcccaaaaaaaaggggacacgggcaggggccccccgggggaaaaaaggggggaagcccggggcttgccccggatcaatagcaagggggggccccccaaattcccacaaaaaaaacaaaaaacggggggcaaaaagggggaccccaaaaaaaccggggcaaaaaaacattgctggggggcaaaaaaaaagggcaaagcccctggaccaggtcttagggccgaaaaggcggctttaccgccccccccacgaggggcgaggggggccccccccggaattatcccaggggggccccaaaagggcaaaagccccaaggggaaaatttccccgaaggacccacgggaaaaaaggggagcccggagggaaaccccaacaaaggggggaccaaccccaaaggggcccccaaaaaacccgatttgcaaaa

SEQ ID NO: 68141 - DNA, 334 bp, Zea mays
  unsure (1)..(334): unsure at all n locations
  Clone ID: MRT4577_16213C.1
tatttttcaatgtcacnaaccanagcacgaagattttctatatgcatcacaaaaagctaactgagctgcaatatatgtggagctttatcaaatcttcttancaggatcccatcatcttcacttaccaaatattatacccatgatcaaaaccatggccgaatctaacactaatgctgaccaaatagagactcttatcggtaataatcataacctgcctgagttacctgatcatgaatctatctgatacttctcttgcttgtctccaaccaaacatccttcagcaaaccaaggtggtgcttatacccactgcgttgatttccaacctctgcattaa

SEQ ID NO: 68142 - DNA, 147 bp, Zea mays
  Clone ID: MRT4577_162140C.1
atggggagtcatgatccccgggcaaaacgggaatcacggctcatgggtggtgacaaggatgatggttatgactatggtaatggtaaagaagaaggcgtcgaggcggatctccaggagttccaggacttcgacgagttcgaggattag

SEQ ID NO: 68143 - DNA, 1198 bp, Zea mays
  Clone ID: MRT4577_162141C.1
ctggccgggaaaaaaaaaaaaaaaaaaaaaaaaaaaaggaagtctcggcgggcgccggcgtgcttgtgatctcaacccaagtcgtgcctccgctccggtcacccgtcgctccacgcaactatgtcgaggaggaagaccagggagcccaaggaggagaacgtcacccttggacccactgtccgtgaaggagagtatgtctttggtgttgctcacatctttgcatccttcaatgacaccttcattcatatcactgatttgtctgggagggaaactctggttcggatcaccggtaccatcctaaaaccttggctgtgcacgacctaggtggcagctgtatatggttttaactgagatgtgctaaacctgaaccctgtatgtggcatgaaggtgaatgctgaccgtgacgagtcgtcaccttacgctgctatgcttgctgctcaagatgtcgcacagcgctgcaaggagcttggcattactgcactgcacattaagcttcgtgccaccggaggcaacaagaccaagacccctggacctggtgcccagtctgccctcagggcgcttgctcgttccgggatgaaaatcggacgcattggtaaggaggtcctggatctttcaagggctggctggcctgtgctggttagccctgctttgtttcataatgctttggttctgtatactgatgcagcgtttgtgctatgtgcagaggacgttaccccggtccccactgacagcactcgcagaaagggcggtaggaggggaaggaggctgtaggcgtctcgtctgcgtggcatttgccggctcttggccggtggccattatgaagctagccctctctgggtggtgttgctgttctgtgtttgtcaagacgagctttaattttgctctatgtggatgaccgtttaccgttactcgaacctatatgatgttccatggataatgttttttggctgaggaattggctcgtcatatttatgtatgcattttcactctctctataaagtgtactagagtaatcttccctagcgaaagggcctatagcctagtggttaaggactttcgaatagcatctccaaatcttgggttagatttctctcgggaacaaatttttaggcttgttaaaaaaatcctctcgctatgtctcatccgcttttgggttatgatgttctgtgcgtcgaaaaaaaaaaaaaaaaaagcggcc

SEQ ID NO: 68144 - DNA, 508 bp, Zea mays
  Clone ID: MRT4577_162142C.1
cctaggtatttttgaatacttacggagctcatccttgtcagctgtcgtgccattctttctattttcagaagatggtttacttgaaacatctacatctgtattttgctgttttctgtttgctgatgttgctgccctggtcgactgttttgccgaagttttcctggtcttcttttgatcttgattttcagttttgtttgcagctgatgctacattggtagattgtgatgcacaacttttatcagtcttctgatctcgattttcaaatttagttggtaattgcatggttccattattgatgggagaagctgcactagaagctactgtctttcttttagctttggttctctttccagtcaaaccagtccgctttactacgctccttggagtgtcaaccaccaaggaagaaagggacctttgttttctctttgctggcaatgttgttagagactttggagaatcagcgtttatctttttaattggaaataccttatttctgatatcttgaagg

SEQ ID NO: 68145 - DNA, 377 bp, Zea mays
  Clone ID: MRT4577_162143C.1
aaataaaatttttttttttttttttttttttttttttttttttttttttttttttttttttttttttttttttttttatggaaaaaaaatttttttccccgttcccatcccgggggtgcccaacaaggggaaaatcaaaaaaagggggcgcctttaaaaaaaaaccaaaaataaacaccaaaataggggaaaaaaagaaaaaaaatttaccctgtgaaaaatttatacccgttaaaattcccaaacaaaaaatgtcccgaaagaaaaagtataaaacccggggccccaaataagggaggcaacccacattaattgggggcccctaaaggccccttttttccccggaaaacctttgggcccctcttttttatgggatg

SEQ ID NO: 68146 - DNA, 224 bp, Zea mays
  Clone ID: MRT4577_162144C.1
tttttttttttttttataaacttattaacaatcggtagagattaatttaacctatgtaaacaaacttcacatccatccctcataatacacacatatttacctaccaaattttatcacaacacacaagttatttcattcactacaataaccttcagcacttccaaaataacaccattgaaaaacaccttacatccctttcccacaaaatgcttccccacacctat

SEQ ID NO: 68147 - DNA, 699 bp, Zea mays
  Clone ID: MRT4577_162145C.1
cctttttcctgatcttttctctcgccttwgbbsctkkbgtcgctgtgaattagacksscctcscccccaacatccaggatgctcctcgtggcggtttccctgattgattgatccgtgkggatccagaaggcctgaattgatatgatctgggatcgattggcgtatttggcaagcgtgctccgatcgtctcgatttcgcacggggcagatctagttgattttttcgtaccgaatttattggggaattgctggttcgcgagawgctaagcaattkagagatctgcttggctccggggtgggacttggagcatgtdgaatggggttagctatgcgattkcgtttttttcccgatcaatattggacaagggcacgggaacgccttgttatccttacacgagtctcaaggtaacctgtttcgcgtggtttgtcatgtttagcttcggggttctagctcctgatttgtcagggtggcatgctgactttgggggagaatgctcatacaagacatctcttgctgcaaaattgacgaggatcaacagattagggataaggcgccaaaragaaggattagaagggagtaagaatacattggctttaagcatcacaatgatacagcaaatgtatcagcataatctgtatcaactcctgtgtaggmttygttcattttgsactgtctgcaaaaagaccayccatgcaggac

SEQ ID NO: 68148 - DNA, 460 bp, Zea mays
  Clone ID: MRT4577_162146C.1
cccacgcgtccgcccacgcgtccgcccacgcgtccgcccacgcgtccgcggacgcgtgggggtaggtcacctatgtgaccaatcctcaccattggtttcacagcacttagtaagcatacgtttgaagaccgagttggttgatttggtctgtccattcgctctaggaggggctcgacttcctttgagctatgagaaatgggagcgccttcttcttttttttcagggatctccttggctacaaagagagctatggagcctagctgaaagcttgacaaggcctatttaagtgaattcggccacccaacaatcgcagaaagaaaggggcattcaaaaccttgcagggattccttctcctaaggttgctctgaagtaaccgctcgtcttgatgctggcagtcaagaaggcaaagagttgacttctacttttgaaagtgtaggagttgaccttccttcgcctatct

SEQ ID NO: 68149 - DNA, 357 bp, Zea mays
  Clone ID: MRT4577_162147C.1
gagctcacctgacggcggccgccgctcttttttttttttggtattttttaaaaaaaacggttttttattaattcacgggtcattcggttgaccgggaccaaaagaagacatgctggctgcttgcttaataaggggccccagggggtccttaacccttggatggggtctttgaaaacagtaaagccgcttcggggggaatttttgaaaggggaacttttaaaattttcaccaattattaggggaaatggggaaaacgagaacagtgtgttccctcaggggaaattttttttaaaggtgggaaagttttacaaggggggggaccccaccggcccccccattttgcccggtacaaagggg

SEQ ID NO: 68150 - DNA, 533 bp, Zea mays
  Clone ID: MRT4577_162148C.1
ccaaacatggcttttttacccaagagttccaaaattcataaatccccatttaactttttgattcccaaccccgcatcccgggtggggggggccccctgcctcttaagacagatttattcgcccgcgcctgggagggccgaccaacatgaccccggaacccatctaaacccaacgggttcacaaaaaatttggggtccccaatttcaggagctttcaacatgcttcacactacctacaccgccttgaatggggccctggggctcaaaggaatgctcccaaacccgttaaccaagacctttaaacaagggaaccaaacaatccacaccaccgtaagcacaaatggcgcaccaataacccaccccagcctcggattggcgatgcctaacagcacatcctttgatgcatgaccagaaaaaacctttctaaatgcgttggctgccaaggggaagcgcccaccgccactgatggtttcccccaaaccccaaaaagggaccaacaaccttagctcaattggaggggcggccaattttaaa

SEQ ID NO: 68151 - DNA, 460 bp, Zea mays
  Clone ID: MRT4577_162149C.1
gcaaaagtaacttcttatttttgggtggccacatacattatccaaaaacctttatttttgaattacaactaataagcaatctaaaaaagggcccccccaatgatgtgttgttggtaggaggctgctgggtttgtcaaaacaagttggacaaagggcaacaattgttgtagttgtaaaagggttgcggggttagccccaaactgctggtaaaaaggcaacaactgttgctgtgtcaaaaaagaaacacggcttgctgtagctagctggctaaatgggagtagtatttgctgctgcaaataaacagcggggttcaatgcggccaattggttaaaaggaaaaaattgtttttgctgaaagaaggcaaaacctacctggctgaaagggaatagttgttgctgcaaataagcaacaaggttcaatgtaaacagttggttgaatgaaaaaaatattttttttttaa

SEQ ID NO: 68152 - DNA, 1199 bp, Zea mays
  Clone ID: MRT4577_16214C.1
ctccactccagcactgaacacttgattgattcagtgggtagctagctagctgaatcacaatggatcctaccaagttccgtccgtccagcagccacgacacgacggtgacgacgacgaacgcgggcgctcctgtgtggaacgacaacgaggcgctggacgacaccaagacgtggccggaggacctgctgccgctccgccccgtggggaggctggtgctggacaggaacgtggacaacttcttcaacgagaacgagcagctggcgttcggcccggggctggtggtgccagggatctactactcggacgacaagatgctgcagtgccgggtgttcgcctacgccgacacgcagcgctacaggctgggtcccaactacctgatgctgcccgtcaacgcgccgcgctgcgcgcaccacaacaaccactacgacggcgccatgaacttcatgcaccgggacgaggaggtggactactacccgtccaggcacgcgccgctgcggcaggcggcgccgcccacgccactgccgcccaggccggtcgcggggaggagggagaaggcaaccatacgcaagcccaacgacttcaagcagccaggggagaggtaccgctcctgggacgccgaccgacaggaccgattcgtgaggcgattcgccgactcgctcggacacccaaaggtcagccaggagctcaggtccatctggatagacctcctcgccaagtgcgacgcgtcgctggggatgaagattgccacccggctcaacatgaaggcaaacatgtgatgcttctgctgaatagaataataatgaagacgcatgcatgtcgtcgccaggaacaagagaaataatacaagaccaccacgcatgggcatactccatatatatatgtatagcccgtgcccgtgtccgcctttgtaccaatacaagccaagactagtggatgtattattattattattattgcgctatcacatacatgtacccctgctacctgaagatggatgtgtatcgagttatcaaattaagacacctgcagcaaaaaactatatatgttgcataagaatactcgtctcgatatggacatgattccctcagctgctaatttaaccctccaacaaattctgtaagatcctctcgcttctcagtctatatatgtttaaataaaatcctcagtctatggttaaaaaaaaaaaaaaaaaagcggcc

SEQ ID NO: 68153 - DNA, 229 bp, Zea mays
  unsure (1)..(229): unsure at all n locations
  Clone ID: MRT4577_162150C.1
aacccgcgcgccgtcgataaccacggccggtttcacgtcatcaccctcaccgacacnnaggaggaccaccttaacccggccctgctcttcagcctccgcttctgcgtagaagacagcccccgagcatgccccggagcgctcgttctgtcctgcgaggacaacttcttcagcaacagctactacctatcctgaacacgcgcggagccggccccagaaccggaacaccaac

SEQ ID NO: 68154 - DNA, 401 bp, Zea mays
  Clone ID: MRT4577_162151C.1
gtttgcgaagtaattcgtcgagaagcacaacactgcgattgtctacaaggtttccaacttactcactcacttggaggcggcactggttctggcatgggaactttacttgtatcaaaaatgcgtgaagaattccctgatcgtatcatggtaacttactcaattattccatcaccaaaagtgtcggatactgttgtagaaccatacaatgctacactttctgttcatcagttagttgaaaatactgatcaaactttttgtattgacaatgaagccctctatgatatttgcttccgtactttaaaaattgcttctccatcttatgctgaacttaatcacttagtttctgctacaatgtctggagtgactacttgtcttcgtttccccggtcaattgaacgctga

SEQ ID NO: 68155 - DNA, 491 bp, Zea mays
  Clone ID: MRT4577_162152C.1
ggaaatgtaactttttatttttggttggccacatacattatccaaaaaatttatttttgaattacaactaataagcaatttaaaaaagggcaccaccaatgatttgttgttggtaggaggcccctgggtttttcaaaacaagttggacaaagggcaacaattgttgtagttttaaaaaggttgcggggttagccccaaactgctggtaaaaaggcaacaactgttgctttgtcaaaaaagaaacacggtttgctgcaactagctggctaaatggtagtagtatttgctgctgcaaataaacagcggggttcaatgcggccaattggttaaatggaaaaaattgttgttgcttaaagtaggcaataactagctggctaaatgggaatagttgttgctgcaaataaacaacagggttcaatgtaaacagttggtttaatggaaaaaatttttgttgcttaaaatagggaaaaagttttccaaaatacttggtt

SEQ ID NO: 68156 - DNA, 801 bp, Zea mays
  unsure (1)..(801): unsure at all n locations
  Clone ID: MRT4577_162153C.1
ggtaccctncgggctcttccgggtcgagagaacctgtcgaaggaacctccattgtttgttgtttaaacaaaaaatgggtcttttcctgcgaattctatgtataagttccttgtcggcagtggtatgaaagtcacgcagagacgtggcaaatgaaagtacctttaaaaataaaatattcgtgtggttcctgaaaaagggatttattttaacaaaagataatctagtaagatggaattagaatggcagcaaagtttattttttttgcgataagcttgaaactgtccgacatcctttctttggttgtcattatggctcgctttctctggcgtgcggttcattgggtgtttggtggcacccctccaacacacgtgtctcacttgttttgaggttggtccaaaatgaggcaaggcaaacgcaatttgcttgttttgacgggacattgcggtctttggttgagaaatttggctcataaaaaatgatctcgtgtcaaaaacaaacttttttttgcaagaacttcttttgggggatatattgactctaatctggactcgtttgtaacgcttggatgagcacaagattttcattgcggaagcatacagacttttatagagtgcagtgccacatttctgtttgcttctcctcgtcttagacattaggagtggatccctgtattttgtgtgtgtgtgtgattttataatatttggtctgattcttgctccctgaggaatgatgaagccagaacctgtgtttccattatctaaaaaaaaaggtctttagactggtcattccatcagcagcagg

SEQ ID NO: 68157 - DNA, 433 bp, Zea mays
  Clone ID: MRT4577_162154C.1
ctccttttttttttttttttttttttttttgggggtttttttttttttttttggttttttttttttttttagaaaccggaaatgtaacttcttatttctgggtggccccataccttatccaaaaaactttttttttgaattcccactaataatcaatctaaaagggggccccccccatgatttgtttttggtaggaggctcctgggtttgtcaaaacaagttggacaaagggcaacaattgttgtatttgtaaaaggggtgcggggttagccccaaactgtttgtaaaaaggcagcaactgttgctgtgtcaagaaggaagccccacttgctgcaacttgctcgctaaaagggcgtagtatttgctgctgcaaataaacagcggggttcattgcggccaaatggttaaaaggaaaaaatttttttttgcttaa

SEQ ID NO: 68158 - DNA, 212 bp, Zea mays
  unsure (1)..(212): unsure at all n locations
  Clone ID: MRT4577_162155C.1
gcgttcgccggntnnggactagacccctcctactactctgctcccaaaacgtaccacccaggtgctacctttctttgaccccttcacttcaccatcctcccataaatccatctcccacttctggaatccctaccagcggaccaacgccgaaccaactgaaaaagcgacccaaggtctaccaatagaaattgaacccctgcaacccagcacaa

SEQ ID NO: 68159 - DNA, 445 bp, Zea mays
  unsure (1)..(445): unsure at all n locations
  Clone ID: MRT4577_162156C.1
aaaatctggaaatgtaacttcttatttctgggtggccccatacctcatccaaaaaactttatttttgaattacaactaataatcaatctaaaaggagggcccccccaatgatgtgttgttggtaggaggctgctgggtttgtcaaaacaagttggacaaagggcaacaattgttgtaattgtaaaaaggttgcggggttagccccaaactgcttgtaaaaaggcaacaactgttgctgtgtcaaaaaagaaacaccacttgctgcaactagctcgctaaatggcagtagtatttgctgctgcaaataaacagcggggttcaatgcggccaattggttaaatggaaaaagttgttgttgctgaaagtaggcancaacaactattaccatttagccagctagctactgcccggacccctgggcggacccgtgggccgacccctgggt

SEQ ID NO: 68160 - DNA, 536 bp, Zea mays
  Clone ID: MRT4577_162157C.1
acacagaggccggccggggcagtcactttcaaccagcgactcatcgagccgagagcagcacacactgcacgcagctagataggatcagcagcagcggcggcgatggcggcctccatgatctcctcgtcagctctggcggtggcgcctcagggcctgccgcccctcggccgccgcgcctcctccttcgccgacaactgctccaagaacaagatcaagaccgacaagccctacaggattgggggtggcctgaccgacaacgccgacgccaacgggagaaagggcaagggcaagggcgaggaccagttcaacgacaagtacggcgacgaacgtcgacggatacagaccaatctacaacgaggatgactgagctcccaccggcgacgtctacggcagtggaaccactgggcttctgatctgggccggcaccctcgctgtaattctcggcggcggcgccctcctcgtctagcaaaccagcgccctctccggctaacgatatcccatgcatgctcctcttgcgaattcgcatgcaaaaacca

SEQ ID NO: 68161 - DNA, 227 bp, Zea mays
  Clone ID: MRT4577_162158C.1
tttttcttatttttcattttttttttttttgtaggttgtggtttactactactacggatcttccagcatcctgtcgggcgtttggttcggtcagctctctgtcggagctgcatgggacctggcacgcggtggccgaggtcgccacccacgggctcggcgaggacgacgacccgcggatggcgtgcccgcagaggactacgccgtcgctaggagacaacgggaggagc

SEQ ID NO: 68162 - DNA, 213 bp, Zea mays
  Clone ID: MRT4577_162159C.1
agccttccggccgagaccagaaatgcaaaattcggggctttttttttaggcaggattttgatgcgcctcgcgaaacgtgctgcggcagacatctccgtaacagacccgacgaagcgactggccatcgctgattctgaacaaaacagtgtgatcgcaagcgatgctataccgctcgtatgcatataaaacgaggcagcaacttctaggtctatc

SEQ ID NO: 68163 - DNA, 994 bp, Zea mays
  Clone ID: MRT4577_16215C.1
aatccctgctcgtcgcccctagggagacgtctccctcacggctgctcccatggccgccccttttccctggtggccgagccttcttccttggacgccagtccctctctgtcggtggccgacgccccatctcctccccacctcctggatggccggcgccctctccagctttagcacggcgccctccccttcctgcaatttggcgccatccctccctcacctccatctcggctccctgctccagccagttcccatggccgcccctctccatggtgagctcgccctctctagttttgtggcgcccagctgctccatggcgcctgcagtggtgatccctaaatccccttgttgtttcattagttcttgctcatataggtccttgttaatatcttgctgatgtgatactctatatgtgtgtgtgtgtgagtttgcggcggagaggagatctcaggttttgggtggagtgccatgtctggagagttaattttaagacgaagacgaagtccaagcacaacgtttgctaggtgttcgatgatttgtttgagccaggaatcttcgtcgatctcgtggtttcgagtttggtttagttatggtatgttaattaatcgcgtgatgtgaaggacaagagctggattgatctcaaggtgatgctgatgaatgaacctgaagatggatgatctgattagatgccaggatgggagatgctcgccaagcgagtatcatgtaccaacactgacttagtgttatcccaggtactaggtttgcgctgttgtggatggtgctaagtgccggtgggcccgaccttcctatatataagtagctcttctatcttcttttttgaggattgtcacttaagctagcatgtatttcgaacttacaaacattttataacatttcaaagtgtatttcttttgaatcacttttgtaatcactccgataaatataatgtaaacctgttgtaactagtaacattttgtaataaagaatttccgctacg

SEQ ID NO: 68164 - DNA, 300 bp, Zea mays
  Clone ID: MRT4577_162160C.1
ttttctttggaccatttaatagtctgtttacttaatgcaacatttacaccagcgaagatcatgcctctatgagcttatctgatccaagaccgctagggatagcataagaatgtctgacttcgctgaccgggccttgaccgccggaattggcggctttgtcggcaccgggcaaactagcccaatgctagcattgcgcagagcggtaccctacaagtgtaggcttgcatgggtcacaaacgatatatatacaaaagaagatggagaaggccaaatgaaacatggagcgctacctgcagaacg

SEQ ID NO: 68165 - DNA, 562 bp, Zea mays
  Clone ID: MRT4577_162161C.1
ttttttttttttttttttttttttttttttttttttttttttttttttttttttttttttttttttttttttttttttttttttttttttttgagggaaaaaaactacggactaaaaaccaagggggagccccaccggggtcctgggctttggggaaaaagggggggccccaaaattggaaaagggggggggcaaaagaaaaaaagggtaaaacgaaaaagacccaaatcaacaaaccccaaaaggaggggggggttgggttcaaaaaaaaaaagccccatggggggaaatggaagcatcggagctgcccaccacttgagcttttgataaagaggaccaaaaaagcttggaaaaaggagcccaaaattttgggggggctttaaaaaggaaataaaactttttaccaaaaaaacagggggaagggaaggaaaaaccaaaccaggggggaaaaaaaaaattggataaacagggcccccccaaaaccacaaaatatgcatgaaagggctaaagggggggaccccaatatatccaaaaaaaaaaagaaggggaaccgggtttctgg

SEQ ID NO: 68166 - DNA, 503 bp, Zea mays
  Clone ID: MRT4577_162162C.1
ataaacatccacaccttattctcaaatgagactttcaatggccagacagtgaagaaccttaagtcaaggcgcggctaggttttgccacacccctcacctaagttattttacaggggacatatgggatgcctctcaaatggggggctaaccttttggtgacacccatcccataatgctcactacatgtccaccatatctgggctcactccgatctgcgaaaaaccctatctaatgttaaccagaatgtttcccaacgcaatctctaggagaggttgtgtcaaacatgaccccaggttagcaaaggcaaccaatacccaacagaatgaacccaaaatatgtccctttcgagagaacgatggtgttcttaaacctgtttcggctaaaagctccaagaacaccccagaaccccggaaaacctttaaacaacaaatgcgattaccagcaccttggtgcctaaatgaatcctgtaacccataacatgtcaattctttcttgaatcacgc

SEQ ID NO: 68167 - DNA, 180 bp, Zea mays
  Clone ID: MRT4577_162163C.1
ttcgacgcgtgcatacacgtgttggagcggtgctcttacagaaagagaggtcgctgaggacctgcatgcctttggcgctggagccaattcgtttacacttcggcacaagaaccaacaaaataccctgtgtccgattacgctcgcctaagaagcggtccttgggcctctcacttggtccac

SEQ ID NO: 68168 - DNA, 191 bp, Zea mays
  Clone ID: MRT4577_162164C.1
ccactggcgccctccgtcctttttttttttttaatgcctttttggcttttgggctttttttttttgagaaaaaaaaaaaacaaccgccactcttcttacgggggtactggaaccgaattcacccgctcccacaaaagcccaaatcttttccgggggtgggcgataattcaaatctttccccaaacacaatc

SEQ ID NO: 68169 - DNA, 249 bp, Zea mays
  Clone ID: MRT4577_162165C.1
aacacgccgaatggagcaggactgagggagcgtgatcgcacataaggagcagggtccatgtgggtcctgtattgactaagaaagaacccccgagttcaccatcaacctgcacaagcacgttcatgtatgcactctttataaaaacgcccacaatgctattaaagaaatgacgcagtttgcacagacggcaatgggcaccaactccatcaggtttgatgtgagactcaaccaacacatctggtgcagtgg

SEQ ID NO: 68170 - DNA, 3073 bp, Zea mays
  Clone ID: MRT4577_162167C.1
tatatatgattggatcaagtctactggtaccattagagttgatcctgaagatgagaagcgccgtgcacaacggaatcccatgtaccaggtcaagacatacaagaatctcaataacaagtgcatggagctgaggaaagtttgtaatcatcctctgctgtcatatccattcttaaatcatgggaaagattttatgatcagatcttgtgggaagttgtggaatcttgatagaattttaattaagcttcacaagtcaggccatcgtgtacttctttttagcaccatgacaaagcttcttgacatcatggaggactatttgcagtggagacgacttgtttataggcgaattgatggaacaacaagcctggaagatcgagagtcagcaattgttgacttcaacaggcctggttctgattgttttatattcttgcttagtattcgtgctgctgggaggggtctgaatcttcagagtgcagacactgtcgtaatatatgaccctgatccaaatccacaaaatgaggagcaagcagttgctagggcccatcgtatagggcagacaagggaggtaaaggttatttacatggaggctgttgttgataacatatcaagttatcagaaagaggatgaattgagaaatggagggagtggagatttggaggatgatcttgctggaaaagatagatacatgggatcaattgaaagtctcatccgcaacaatatccaacaatacaaaattgatatggcagatgaggtcattaatgctggtcgttttgatcaaagaacaacccatgaggaaagacgaatgactctggagacactcctgcatgatgaagagagatatcaagactctgttcatgatgttccttcattgcaggaagtgaaccgtatgattgctaggactgaaagtgaagtcgagctttttgatcagatggatgaagactttgattggacaggtgatatgacgaagcatcatcaggttccaaagtggcttcgtgttaactccaatgaagtagatgctgtggtggctagtctgtccaaaaagccgtcaagaaatatgtcatctgggggcattgctttagacactaacgaaacacttgagaaaagagggggcggccaaggggtacgggcaagtactccatctacagggagatcgatgatgaagatcttgaagaatctgatgaagattctgaggagaggaatactgcatccctacctggggaaggggaagtaggggaattcgaagatgaagaagacaatgatgactcagtacctgataacaaggatgaatcagaggaagaagagcctatgaatgatgatgtatatgaatttactgaaggattaagaggcagaaaagctaataggatggaagaagctggttcaacaggctcttcttctggaagcaggagattaccaccacctgtaccttcctcatcttcaaaaaaaattgcggtctctatctgcattagatgcccgcccaggcactttgtcaaagagaactccggatgacctagaggaaggtgagattgcaatgtctggggactcacatatggacctccagcagtcagggagctggaaccatgaacgtgatgacggtgaggatgaacaagtactacaaccgaaaataaaacgcaaacgaagtattcgtcttcgtccaaaacctaatgcagaaaagcaggaagatagatctggagaaggggccttccctcagcgtgctgccaggcagcaagacgcggttcatcctatagtgaaacagaagcgcaacatgtcatctaggaaggtttcaccggcttctaggtctgggaaattgagtcacttgtctgggtctggtgaggggtctgctgaactctccaaggaaaattggagcagtaaggccattgattccactgcccctgagttcggtggcacaaagatgtctgacagtatgcaaagaaagtgcaaaaatgtgataagcaagctttggaggaggattgacaaagaaggtcatcaaatgatacctaacatatcttcttggtggcggaggaatgagaattcgtcgttcagaggtccggctggtagcacacttgacctacaaaaaatcgagcagcgagtcgatgggttggagtacggcgctgtaaccgagttcatagcggacatgcagcagatgttgaaaagcgtggtccagcacttcagctataggcatgaggtccggatagaggccgagaccctccacaacttgtttttcaacataatgaagatcgccttcccagactcggacttcatggaagctaagaacgccatgtcgttttcgaatcctggaagcggtgccgccgctgccccatcatcgtcaaagcacgccgcaccatcccttaagcgcagcagagccagtgccagtgccagtgccagtgaagcagagcagcagcatggctcgggacacagcagcaggcacaatcagcctagcgaggcggtcccgcccagccggtcccacagctccaggtcagagagagaccccagacatggcggcagcagggatcagcacctccaggacggcgccgctgggttgctgcaccctagcgacatgttcatcgtgaagaagaagaggcaagagcgcgcgaggagcggcatcgggtccccttccagctcgggccgaggcgccggacctctgtcgccggccaaccctgggcgtccgggccctgccccctcgcccagaggtgccaggacgccgttccagagggatccaccgccacacccgtctcagcagtcgatgcattccgctgggtctggatggggcagcggcggtgcgcattcggatcatcaagcgggggcaagctcgtcagcacccggcatcggagacatccagtgggcgaagcctgccaagaggctgaggaccgacagagcaggcagaggcggccgagcctaacggttggttcttctttagcgtcatatggatgtgtaaatgcatccacgtagcggatggaggcgtttgataataatcgtcagtgtatttagttcatcgtcctagcaagtcaaactttgctggcagtttttaaaacagttttttaaggaaaatcaggttatatttcagacctctttaattaac

SEQ ID NO: 68171 - DNA, 198 bp, Zea mays
  Clone ID: MRT4577_162168C.1
cttactttttgtgccctaatcacctcctctcgcggcgggaccttttaaacgaggcctgggggctaagactcccctgcctccttacagcgccccgagctctacctcttagacaggaattttgacctcactgtggaaatacaccacgattgcagctaccaccccttggtccatgacggtctatgactcaatctcaacaag

SEQ ID NO: 68172 - DNA, 1297 bp, Zea mays
  Clone ID: MRT4577_162169C.1
gaggaattgcttcacaggctcttcttctggaagcaggagattaccaccacctgtaccttcctcatcttcaaaaaaattgcggcgtctatctgcagtagatgcccgcccaggcactttgtcaaagagaactccggatgacctagaggaaggtgagattgcaatgtctggggactcacatatggacctccagcagtcagggagctggaaccatgaacgtgatgacggtgaggatgaacaagtactacaaccgaaaataaaacgcaaacgaagtattcgtcttcgtccaaaacctaatgcagaaaagcaggaagatagatctggagaaggggccttccctcagcgtggtactcatcttgcatttcaaggagatggtcattatgattcacagtttaagtctgacctagatgcccgtgcttttccagctgccaggcagcaagacgcggttcatcctatagtgaaacagaagcgcaacatgtcatctaggaaggtttcaccggcttctaggtctgggaaattgagtcacttgtctgggtctggtgaggggtctgctgaactctccaaggaaaattggagcagtaaggccattgattccactgcccctgagttcggtggcacaaagatgtctgacagtatgcaaagaaagtgcaaaaatgtgataagcaagctttggaggaggattgacaaagaaggtcatcaaatgatacctaacatatcttcttggtggcggaggaatgagaattcgtcgttcagaggtccggctggtagcacacttgacctacaaaaaatcgagcagcgagtcgatgggttggagtacggcgctgtaaccgagttcatagcggacatgcagcagatgttgaaaagcgtggtccagcacttcagctataggcatgaggtccggatagaggccgagaccctccacaacttgtttttcaacataatgaagatcgccttcccagactcggacttcatggaagctaagaacgccatgtgttttcgaatcctggaagcggcggtgcgcattcggatcatcaagcgggggcaagctcgtcagcacccggcatcggagacatccagtgggcgaagcctgccaagaggctgaggaccgacagagcaggcagaggcggccgagcctaacggttggttcttctttagcgtcatatggatgtgtaaatgcatccacgtagcggatggaggcgtttgataataatcgtcagtgtatttagttcatcgtcctagcaagtcaaactttgctggcagtttttaaaacagttttttaaggaaaatcaggttatatttc

SEQ ID NO: 68173 - DNA, 235 bp, Zea mays
  Clone ID: MRT4577_16216C.1
aagggggtggggtttgtttttaaaacaaagaggagattgatcctttttttaaaccccccgtgtcaacttgggcggtggggggagcgaaccatttccccccaaattttttcgccggccgaaaattctttatcatcgcgtccaaagtggtgcccacgggggggggcactggaccctttgggcgccgcccggagtgttcttatctttgtctgaagcctctaggtggtggtgttgccgc

SEQ ID NO: 68174 - DNA, 417 bp, Zea mays
  Clone ID: MRT4577_162170C.1
ataacaacaacacaaacaaatcaaatatatcatactccaagatccacaacacatctcaccgaagaaaaatatgacaaggcaactgaattattaatttacacatgaaggtataacacacacatttacaactgaacatgcagcaagaaagtcatgatgaacgaacattgctactacattggtctcaaacggatataaaacaaatacttgatattattcaacaccttttgggtcagactgaacccatatgcaacgaaacacggaaatatctcttaatggatctgtagcatatcatgggcctcttgaccataagacaaacgacctgctcagatataatggacaattaccaagctaggaccgtaccctaaaccaacatggccaagaacctcgcgattaaccccgaaaacaccctgatagcac

SEQ ID NO: 68175 - DNA, 175 bp, Zea mays
  Clone ID: MRT4577_162171C.1
ccctcccaaccttgggcaccagtccatcgatccttgaatcgctcgcctgcactgcactgcgggggacatacgccatgaggctgatcatgcctttcttcggctcgtcttcatcctcctgcggtatgaagaggatggggtcaaagaccggcaggtaatcttccttcgtctacaccgg

SEQ ID NO: 68176 - DNA, 467 bp, Zea mays
  unsure (1)..(467): unsure at all n locations
  Clone ID: MRT4577_162172C.1
cgggctcgcctataaccccctgcggggggggggtggggcgccgccatggccatgggcttggcctccgcgaccgccgccgcactcttccgctccgccctgtccgcgccacacggcgccggcgcgcgcgtccggccgcagctcctttttccgttcttggctccgctccacggggggggtgaggggggttttttttcnnnggngctnganggcnnggccaagggaaagaagaagaaggggcccanctccgggaaccttcccgcagccctcggcgtcgngatcaggggggcgcgggagtccctcggcggcggccagcaggaacctgttccagaaaactttccatttgaattactcggcgaagagggtgtgagcggggttcttttgggggggggctacttgggcgaganggtcgggggtgctggccgcctgcctcttttacgaggcggccccgtgtttggtgttgagggtgg

SEQ ID NO: 68177 - DNA, 277 bp, Zea mays
  Clone ID: MRT4577_162173C.1
agcgagcagctatgatccaaaatttggcggatttggctctgctcccaagtttccaagacctgttgaagattatataatgctatacaaattccataagtacatggaggctgggaaggagattgaagccttgaacataaagaagatggtgactcacacattggactgtatggcaagaggtggagttcatgaccacataggtggtggttttacagatatagtgtggatgagtgctggcatgttccacattttgagaagatgttgtacgatcagggacaga

SEQ ID NO: 68178 - DNA, 322 bp, Zea mays
  Clone ID: MRT4577_162174C.1
acagatcccaatagactacgagctcgcggtgaagacggtgacttccggatagagagagagagagagagagagagagcaggaagcaggggctatgacgcggatcgtctagcatgaagggcgccgtctgccatattatgatggacgatgaagagagggtgggccatgcgacgatccagaccagtttttgtaccgagctgcgcgcatgccttcgatgccgtctaagcatgacctaccaccagttcatggagaacgtctgataaaactgcccgcttctagagatatgacagagagctcgacatacatattcgactgcaccacccat

SEQ ID NO: 68179 - DNA, 236 bp, Zea mays
  Clone ID: MRT4577_162175C.1
agttagtcgtgggtcagccagcgcgtccgcccacgcgtcgcgaggaaggtatgttcggggatagtggcaggacaccccctctgtgcagttcgccgagaagtaataatgggatttctatgcatggcccttgttgtacactaggaaattgtgcacgcagacttgtgtcattttgtccgctgttgctaaattcagtgatggtgttgtggtactataccagccggtgtcagttgtgctgt

SEQ ID NO: 68180 - DNA, 441 bp, Zea mays
  Clone ID: MRT4577_162176C.1
atgtctagtacgccagccacgtcacccaaccgttatggttcgggagcttctgaccgttggaggctttgtcctttagtggcaccggacagtctggtgcagcaccgaacatgcactgttcactatccgccacccccaccatctaaggctacagggacaactgctaaaacttccaatcgacgtagtcggatgcggtccaggctccttaaggtggcgatcgcctctcatcggtctatgcttattgtaaagctgaaggcttatgctataagtgtgggttgccatttcataaaggctgataagtggttgacactttccaaggacgaagtctttgtcaagttgtatggtgtcaagacttctaatcgtggggcttttgttcaactttgcaacattgttgacttaactgatgaagataggttggttgccaggatcttcccctggagttga

SEQ ID NO: 68181 - DNA, 318 bp, Zea mays
  Clone ID: MRT4577_162177C.1
caaaaaaataatactggaacatgctcagccataaaggattttacgacataatctaaggggggtactggaacatagaaaaactggcatgtaatgccatggggctaatgaaacagggaaaaatgggcggggggggaaaattataagaccaaaaatttttcatgggcatatgggaggtggtacgaaaccaaccgccacccaaagggaaacattaaaaaaatcactctgacattagcagtttgggacgacagtaccactttaaagctgggcattagcagacgcgtaaagatcctacggaaagaaaagcctgcatgtgttggg

SEQ ID NO: 68182 - DNA, 257 bp, Zea mays
  Clone ID: MRT4577_162178C.1
ctttcttttttttttttttttttttttttttttttggctgtgggttttttttggccacatgaaacgtccttattacagacacagacgggagtatttccatacttaaaatgcccaggtgtttgatggtctaattgttattgccatggtagctacaaaggggaaaggaaaattgaaaacggcttattctgatctacagacttcctcatttgatagataatttccatggttttgattttgaggcttaacatcatgccctt

SEQ ID NO: 68183 - DNA, 323 bp, Zea mays
  Clone ID: MRT4577_162179C.1
tttttttttttttttttttttttttttttttttttttttttttttttttttttttttttgggcaaaaaattttagtcgcattattttttcaccttgcttcccgggagaacacccgcttgtttgaggaaaacccaggtaaaaaccattaccacacccccccccctcacttttggaaaaccttgcctttggaaaagggggggggaaaaggaacttcctaaaaagacgggtaccccacccatcccataatagggaatttttggggggataaagagctttacagctcagaaaatttttatttgtaaacaaaggggtcccctcgggcc

SEQ ID NO: 68184 - DNA, 764 bp, Zea mays
  Clone ID: MRT4577_16217C.1
gccagggatctatctactcggacgacaagatgctgcagtgccgggtgttcgcctacgccgacacgcagcgctacaggctggggcccaactacctgatgctgcccgtcaacgcgccgcgctgcgcgcaccacaacaaccactacgacggcgccatgaacttcatgcaccgggacgaggaggtggactactacccgtccaggcacgcgccgctgcggcaggcggcgccgtccacgccactgccgcccagccggtcgcgttgaggagggaagaaggcaaccatacgcaagcccaacgacttcaagcagccaggggagaggtaccgctcctgggacgccgaccgacaggaccgattcgtgaagcgattcgccgactcgctcggacacccaaaggtcagccaggagctcaggtccatctggatagacctcctcgccaagtgcgacgcgtcgctggggatgaagattgccacccggctcaacatgaagccaaacatgtgatgcatgcatcatgcttctgcagttctgctgaataatgaagacgaaatgaatacgcatgcatgtcgtcgtcgggaacaaagatcgagaaataatacaagaccaacacgtatgggcgtactctatatatatgtatagccaagtcaagtcgtggatgtgtattattgttagtattgcgctatcacatacatgtacccctgctatctgaagatggatgtgtatcgagttatcaaattaaggcatctgcagcaaaaactatacatgttgcataag

SEQ ID NO: 68185 - DNA, 326 bp, Zea mays
  Clone ID: MRT4577_162180C.1
gatcacaactggttaagatgtaatttgaatttttatattgatttaggggttttaactctggcaccatatcggagtgcatgagcgaaagaatgaatatgcatgcatgatgcatgttataatctgcatggctgcttgcgggcatgcaggttgaagaagaggagggaaagtggctacttaaaagctcttggacgcctggtacgtgacgccaaacttccaatcagtggggagaacgtgccatgaggggggcttgcggtgggcgctagaaattacccgggacggtaatgacctcgaggggagggcctccccggtttggcacacttgccccc

SEQ ID NO: 68186 - DNA, 169 bp, Zea mays
  Clone ID: MRT4577_162181C.1
actggcaactgttgttttttttcactattctacatatccgtttataccggggggtgtagtacaagactggcggagtcacattaacagcaactagggcgggcaaccaaaaccactatactctgagttaatacactcgaaattggagatcatatcaacatgtactgaatcc

SEQ ID NO: 68187 - DNA, 392 bp, Zea mays
  Clone ID: MRT4577_162182C.1
cccggggctggtagatcgttgatctgcaatcgtctgcggaccagagcctaggtctcagtatcatgcagcacgcgtaactatgtgtagagacgactgaggtaggagcacgtcactaatcggatgtttaggtgatgggggtggacctctaccgcgtctacatgtaatatggtggaaagcaggccgaactttgtagcaggatctacctatacgcttaaccgcatgcaagggattttgtaccctatattgtccaatactttgagtgctctgacaatatgcacataacttcagaaatacacaaaaatgtcggcaatacccaacttaacagtggttgtaacagcatatgggctttggtccgcataccgatccggggagcattccgaccgatgcgtttt

SEQ ID NO: 68188 - DNA, 349 bp, Zea mays
  Clone ID: MRT4577_162183C.1
aaaagggtatatgggtcgacttaccaaaacaaatcacatttcttccagataggaagaggaataagggcctaagaaataacgttatgatttttggagaccacaggggcgataaatatggggggggaattctcccccgggctataaagggggggttatactcaggggaaagaacaacgaaacataaccaatgaaccccacagggccgggggcagggccatagcaaaaaccaggtggggcgcttttggggattttaggttatatacaggacattggtttaaccttaggggccacttggacaaaacctgggaagggaacatgatgcaacagggggggatctaggggggggggg

SEQ ID NO: 68189 - DNA, 367 bp, Zea mays
  unsure (1)..(367): unsure at all n locations
  Clone ID: MRT4577_162184C.1
caagtttttatagccaacaaaaaaaanccagctgtgcaattttaagtttttttgctccaaaaaaaaaaattcaatgttcagcaaatcacctgaagaaattttcagtgagagacataatttaaataattatcaactttctatggagcattgtacacacaaatttatttaataataacaagtacttgattaccatgttgctgatttcttttattaaaatgtaatttcatttaatgttgttaactaaagaagctttgaaataatgttatagtttatatgacaatatgggtcctgggtatatttaacctttttaccattagtaatggaatttattactttacatgtcaatatacaagacaaattatgtttt

SEQ ID NO: 68190 - DNA, 223 bp, Zea mays
  Clone ID: MRT4577_162185C.1
atgattgatgattctgacaaagaaaatgcagcaatcaaagaatttcgtcttaaacatctctttgcaaaccatgaaacagcagcaaatcggataaaagtattagaattacttaaaaataaacctctaaaattaaaacattataatttgcgcagaattctcaaaaactatccaaatatgaatttgaccaaaaaacgataatttaaaaatcgtaagcgtttttagt

SEQ ID NO: 68191 - DNA, 650 bp, Zea mays
  Clone ID: MRT4577_162186C.1
cgctcagggaggagctccccgacgtgctctgcaaggaccacagcttcgacatctacagagaagacattgtcttcagagaccctctgaacacattcaagggcctgggaaactacaagaggctcttctgggcgctgcgcctcaccggccgggtcttcttcagggcgtcgtgggttgaagtggtcagcatatggcagcccgccgagaacagcatcctgcttcgctggaccgcccacggcgtccctcgggtgccctgggggggctgggacgcccacgcccgcttcgacggcgcgtccgtgtacaagctcgacaggaacggcaagatctacgagcacaaggtgcacaacgtcgctacgaacccgccggccaagtccaaggtcctgccggtccacgagctggtcaggtcactcggttgcccctccactgccgaacccacctgttttgacttctgaagctttcgtcgtcgcagtgctagctgtgccatcttatatcttattattcgagattaattagcatggattggatgctacgtcgagattaatttttgttttttcagtgtgatttgatagcgcataaagttacagagtactcctgcaggctgcagttgtatatatgtacagttatagaataagaacatcagttattgattgttt

SEQ ID NO: 68192 - DNA, 388 bp, Zea mays
  Clone ID: MRT4577_162187C.1
ttttttttttttttttttttttttttttttttttttttcattaatttgggggcgggtttttttttcttttggaaccatacccctgcaacccaaaattaagccccaaaaacaaaaccccatgcatgggatttaacaaaagattctgttcaaaccaacttttcccttaattcccccttcttgtaatggacaaaccaataacccctaagcccccctccccttataaaccatacctgcatttaaacaccggccccaattttgcccctcccgattggttaacaacccccccaaaccgtcccaaaaaagaacttaatggttaaatgcggcccttcccccccaaattaatttcccagcgaaggatcggttccctcctcgccctttccttaaccgg

SEQ ID NO: 68193 - DNA, 1057 bp, Zea mays
  Clone ID: MRT4577_162188C.1
cccgggcagatacagtacagttcacacactctcctgtctcctatccatccagccaccgaagctagccaagaccaagatgtctcagttgctgcacctgccggacctcgcggcgccgcggaccaggatgggctcggcgctggcggcgggggcccgcgtcaagcagggggaggcggggacggcgagggggcgggtgctcagggtcgccgaccccgtgcggcgggagtgcctggtgccggtcccgccgccgccggtcctcgccgcggggaggcgcggagacgacgacgacgacgacggcgtcgacgaggagaggcagcggtactacctcaacctgggctacgcgatccggacgctcagggaggagctccccgacgtgctctgcaaggaccacagcttcgacatctacagagaagacattgtcttcagagaccctctcaacacattcaagggcctgggaaactacaagaggctcttctgggcgctgcgcctcaccggccgggtcttcttcagggcgtcgtgggttgaagtggtcagcatatggcagcccgccgagaacagcatcctgcttcgctggaccgcccacggcgtccctcgggtgccctggggctggtgggacgccgcccacgcccgcttcgacggcgcgtccgtgtacaagctcgacaggaacggcaagatctacgagcacaaggtgcacaacgtcgctacgaacccgccggccaagtccaaggtcctgccggtccacgagctggtcaggtcactcggttgcccctccactgcccaacccacatgttctgacttctgaagctttcgtcgtcgcagtgatgtgccatcttatatcttattattcgagattaattagcatggataggatgctacgtcgagattaattatctggaagaaggattggcgtgggtttaacatgataccctccattttttttgtttttcagtgtgatttgatagcgcacaaagttacagagcactcctgcaggctgcagttgtatatatgtacagttatagaataagaacatcagttattgattgttaaagcatcagtcagc

SEQ ID NO: 68194 - DNA, 267 bp, Zea mays
  Clone ID: MRT4577_162189C.1
ttcagctttgtcaaccccttgttatcagacttcttgttcactgtggtgaaaggatctcataagcatgcagacttttatctcttttatttttgtacatgaggtcttgtagctgttctgatgtatgtttaaagatgtccggcattgtatatttgtggctttgttgcattttgtatttgaatcatgcatgtgtgttactgacatgtccatatttcgtttctagttgcccagctgactctgaaaatcaagcatctgtcaactgttctacac

SEQ ID NO: 68195 - DNA, 157 bp, Zea mays
  Clone ID: MRT4577_162190C.1
tatcttcgggctgcctggggtgtccttgctcggactcacactcagctgtacggctaggggagtgggctccaccctgctatgagctacgaccctagagacggtgacatcgctctgcagggtgaggaggacagattgatgagcaatgaccttacgatct

SEQ ID NO: 68196 - DNA, 523 bp, Zea mays
  Clone ID: MRT4577_162191C.1
gcccgacgggcacgcggcattaacaagcactctctgcgtaccgcactatcaacgaactaacagcaatggctgccaagagatacgcccttcttgtgctgattgccctttacgagagcgcaacacatgcgctcattagttcaacaatgctcacttgctcctagggccattattacgcaggggctgccactgagctactttaatgggctttgaacacctacctgtacacgccaacaggcaacaacaggcgcttgcgcacagcgacttacccttctcaaagcccaattgcaaccacttatccttgccgcatctaacaattcaagccattgcagctcaacaagcactacaggtactaccagcactgatccacctagccatggtgaaccctgacggctacttgcatgagcagatgcttgcatccgacccacttgctctggcgaacgtagatgcacaccatcaacatcaacagctacaacagtttctgccaacgctcagtcaactagccatggtgaacgctgacgcctac

SEQ ID NO: 68197 - DNA, 129 bp, Zea mays
  Clone ID: MRT4577_162192C.1
tcccagctcgacccactcatcctaacacacatacaaatactcaaccacttttttttttacaccatcattcacatcccaatagacgtctctaataactcattctacctcctattaaattccttactaaaa

SEQ ID NO: 68198 - DNA, 381 bp, Zea mays
  Clone ID: MRT4577_162193C.1
ccccattcgttcgagaactgtgaaatgacacttgtttgattgagatctaaaaaaaaagagagccagatgcaagaataaaaaaaaaagaaaggataaggaggcattaaacgtgaagaagtcagggcaggcactcgtcgttggcatatacgacaagccgatgacacctggacaagagcagcgggggggcggtttagggggttcgagtttttgttccggcggcggggggggactactactttctttgggggcaccaaaatcaacttagggggcggcgtgtttccaccgccggtattgggaacacctgggtttaccccattttattggcttttgagcaaatcctcttttccccggtggcgtaaataataaaggggccggcccctt

SEQ ID NO: 68199 - DNA, 262 bp, Zea mays
  Clone ID: MRT4577_162194C.1
cgtactggacgaacttacacagggcaaaggcgaccggagactcatgacgcctcgcattcggcgccgtagcagcctccagctgccccggccccgggccacgggctgacacatcgccatgtcccggaaggcttccttgcctcggctgactgggcaggcgccggaccgatcgggaggggacgacctgaggggactggctgggatgaccgggaagaagcgcaaggcggaggctgcgcgtctggaggaaaccgaccaagcgctctac

SEQ ID NO: 68200 - DNA, 385 bp, Zea mays
  Clone ID: MRT4577_162195C.1
tctcgccctcaatacgagccgagagacgtggcgtgatttatatttgaggcacccctctaaccgatgaatatgaccagacttcatactattctgcaagccaatcctacaattggactgcagagacatccatacctaggcccagtacggaccgccaatatggatctccttcgggattgattgcgggaattcggaacgcctcccggagccaggttcgtaggaccataatgaacagccgatcaacacacggcagtatacagttctctatcttatggtcacatatgtgactgctcttgctatactatcgagaaatttccctccaacacaaaagagattaataaaatgccatccaaaacccaaacagacttctagatctgcggcatgttgt

SEQ ID NO: 68201 - DNA, 489 bp, Zea mays
  Clone ID: MRT4577_162196C.1
ctgatgcgatgctttaccgcagtctagagagcgaggccagtcgcctggtgtctagagcatttgtgactgaggacatgatatacattgttgatcctataactaccaacagtacatttatctactgtaccttgcggtccactgtagttagcggcagagtcgccgaaaccatgatgaccgatttcatccctattgtgggttaccacagataactaccagggtgacctgtcggcgcggtacgatcgcacataagatggcatgtgccgaagaatcaacttgtactctgacacctataggaccgccgctttacaagtatcccttgaataaactgaaacgcggaatcaactcccaggaagctggccagtcgcgcgccagatactgcgtgggatccgacgccgacaacgctgcagcctgcacttagtaccgtaggcgctagagaggcctccgttagagggacattgtgccggggcgttgctttcgaaagaatagatt

SEQ ID NO: 68202 - DNA, 182 bp, Zea mays
  unsure (1)..(182): unsure at all n locations
  Clone ID: MRT4577_162197C.1
ggagttaataaatatattaattattttgccaaaatctacaaccccttttgaaaattaatgctgaatccncacaagatggttatctacagataaattacattacaccggcagtttaaaaaccggagcggtcttattaacaaaaaaaaaaagaaaattcttgaaaattttcgccattttttttt

SEQ ID NO: 68203 - DNA, 390 bp, Zea mays
  Clone ID: MRT4577_162198C.1
ccttaagttgggttccttataacgggcggccttttttttttttttttttcgagggatggggaggcatcaattggttatttacacaacttctattacctaatggcacatataaggggtaaaagttttattacaacaagggggtggcaaatgcaccggggcttgcccgggatacactaagttagtgtgggtagatgacctccgctttgtgaggataaacaatacttacacttgatcaaatggtccatatttagatgtccacattgagataggtgtattaaaaacaccttgtgatacaccctgatgcttgtgctccaattcacataataatatatacggcctattggagatgcatattgcctattagcatgagcaccaacacaaaatagataa

SEQ ID NO: 68204 - DNA, 349 bp, Zea mays
  unsure (1)..(349): unsure at all n locations
  Clone ID: MRT4577_162199C.1
cggattcccgggtcgacccacgcgtacgcaanaagcagcacaagagtgaggtacaagaacaccatgagaacaacgatggcagccgggatgggttccatgctaatgctgcttgctctgtgtaggtgaggagcgaacgcgaccatatgggcgaagtgactccgtgctcatataactagatctgctctatggatacttatccatcattgaccagattgagtgtagtgaaaactcgatagctatgaacactacaggctttgaacacggtatactgcctacgcaactgacctttataagccctgtactttcgacactcgtgagaccgatgtctgtagcactcattggttcatac

SEQ ID NO: 68205 - DNA, 521 bp, Zea mays
  Clone ID: MRT4577_16219C.1
ggctattcgtcgactcgctcggacacccaaaggtcagccaggagctcaggtccatctggatagacctcctcgccaagtgcgacgcgtcgctggggatgaagattgccacccggctcaacatgaagccaaacatgtgatgcatcatgcttgtgctgaataataatgaagacgcatgcatgtcgtcgccaggaacaaagatcgacaaataatacaagaccagcacgcatgggcatactctatatatacgtatagcccgtgcccgtgcccgcctttgtaccaatacaagccaaaccaagtggatgtgtattattattattattattgcgctatcacatacatgtacccctgcctgctacctgaagatggatgtgtatcgagttatcaaattaaggcacagcagcaaaaactatatgtattgcataagaatactcgtctcgatatggacatgattccctcagctgctaatttaaccctccaacaaattctgtaagatcctctcgcttctcagtctatatatgttt

SEQ ID NO: 68206 - DNA, 382 bp, Zea mays
  unsure (1)..(382): unsure at all n locations
  Clone ID: MRT4577_1621C.1
gaatcgactgcatctgagaggcgcacccgngtgtcgagatgggagattgttcctgttgctacaccattttatatatgcccaccaccatttttcaggccaaagcttcctaagcaagcaggaatgccagatgatgaaaacgaggttgagagtgctttcaaaagagcgatgccatggcttgctgatgacttcgctctgaaagatgtccaaaatgcattatttccaggcctgagcctagttcaatggatggctatgcagcaaaatcctcagatgctagcaactgcttcccctgctgtacagtcgcagtacttgacctctaatgcactgggtatgcangatgggataagcagtgtcagtgaagatccaacaaaaagattgactatgc

SEQ ID NO: 68207 - DNA, 2188 bp, Zea mays
  Clone ID: MRT4577_162200C.1
cgattgtgtacctccgagccggccgggtccggccggcgggaatttggtccccgcttccctcccccctgttcctcgcgttcctgtcaaggctcctgagcctcgccatcgctcgcggcatcgccgcttgccctccccttccccaagcgaataaagtgccggaagcgcgcgcgtcaagcgaagccctcgcccccgcgctccgctcaggatcgggagccaccccctagggttagggctcggttttgcatcgttccggcgtcgaccgatgcgcggcgcatggcggcggtgaactgcctctacgtcgcggctgcctctacggcggccagcgccgccgcgctgcagtggtgggcatcctcgctcctcgacggcgacgctggcgcgggcgaggatggagcctggctcggagccgtgctgcggtcaaaggtcaccgtcgcgctcctggcgaatctggcggtccacgtgttcctcgtcatcatcctcgcgctcaagactctattttttgttcagctaacttctatagagaccagaaaagtgttggagcacatcattaactatgtaatttacaagggaacttttctcccactggttgtgcctcctacttctcagcaaattatcctttggtcaacttggttggtcattctttgttcgctgaagatgtttcaatcattggccagagaacgtctagagaagctcaatgcttctccctcagtgactccttcaaaatattttcgtgtgtactctgcattgcttctggttttatcagctgatctactttggatgtggctctgtgcagggttttgcagcttctgtaattccaagttgttttggctcctgttctttgagccacttagtattgcctttgatacactgcagtctactatggtgcatgggtttcagttatttgacatctggcagcatcatctaatggaaagtggtgcagacttccttgatttacagaaatcttataagcaagcagcaggatctttttctgaatggaggggcaagcttactaggaactttggttttgctattgatttgataagcttgttgatgtcacttggtcattactcgatgatattttggcttcgtgggatggcgtttcatctggttgatgcagttctcttattgaactcgcgcgctcttatagattccttttttgagaggattaaagctcacatcaagttacggaaggcacttagttcactcgatggagcacttccagatgctacgtatgatgaaatttgtgcatatgatgatgagtgtgccatctgcaggggaccaatgggtcgagctaaaaagttgtcatgcaaccatctatttcatctagcttgtttgcggtcatggttggatcaaggactaatggaaggttactcctgtccaacttgtcggagaccgctcttattgtcatctgaagggcaaagaaggtctacaactgcggaggtagcaaatgttcagcgaattgcggaacaacttactatggggatgaatcagcagagagttcctggtaatgaacatcctgttgaacagcagaacccttcagatgctgtttggagaggtgctggtctggatgctagctggattccaccgtggtcaagccctgtgatggaccatccgagttcctccagtgcagtgaggtcagtaggtcttactggagttcagatgatgatgacgcagttggcttctgtcaccgacaattatgggcatgctgatggtacctggaacctatggcctgaaccgatggcagggtcctctcttgttccttccacttcctcgatttccggcactgcatctgcttctggattgcggctccgtggtagtgcaggcataagcaacgggagtctttcggaggtactcactatggtagatagagtgcgggaagttctacctcatatccctgatgagctaatcttagaggatttgatgaggacaaacaacataaacgcgactgtgaataatcttctgctgatgcaatagtagatacgtcaatacaacatataagtgtgacgtttactggctataaaagcttataagaaaagtatgtgtatagctaagggcgagcctgggtgtaacacgtctttggttctgtaataaaagcccttttttctttatttttgtctgcagaggtctgtatagcaaccaatattatcggaataaaatttgttttgctaataaaaaaaaaaaaaaagcggcc

SEQ ID NO: 68208 - DNA, 808 bp, Zea mays
  Clone ID: MRT4577_162201C.1
atggtggtcaacggccggccgctgaagagggcgagggcgcgggtcgaggccagggacttcgcgaggttcccggcggccggagactgcggggcggccgggacgttcagggaggcggtgagagggttcctcgcaaagcatgcgaggctgctcccgttgccgtccatcttctctccggcggccgcggccgccccgccgcacctgctgatctggagggtgtccctaagggtcggggaggccggggaggaagagagcggcggcggggtagagctcaacgtcgttgaggaggatgtgctccgatcccgatctgtgtattgtgaccagtgcagagtcgtgggctggagtggacacccggtctgcgtgaagcggtaccatttcatcatcgagaacgacagtagccacctttctggccgccggcgcacctgctgcctccgctgcggaacacccatggccgctggagaatcaagggtaaatgggcgtgaaggtggctcaagattcctcactggccgtgacataatgagcctgtgggatcgcctgtgcaaggtgttacatgtgaggaagccaaattagtcatggatatatccaagaaacatggaatggactacagacttcttcatgcagtcataagtgggcacccttggtacggccaatggggatacaagtttggtgccggcagctttgctctcacctcagacacctaccgaaatgcagtagacatgctttccagcataaacctggcgctgtacttctcgcaccgcagccaaattaggactccattgcagaacacaatcgctctttattgggcgctcca

SEQ ID NO: 68209 - DNA, 575 bp, Zea mays
  unsure (1)..(575): unsure at all n locations
  Clone ID: MRT4577_162202C.1
gncatcaataaattaccaggcgacaaacttggtcgagtggttcatatcatacagaatcgtgagccgtcacttcgtgattccaatccggatgaaatcgaaatcgatttcgaaacacttaagccgtctacacttcgtgaactggagagctatgttgctacatgtcttcgtaaaaaaactcacaaaaaagtgtccggaaaatctaaggatgagcaaatggctgaaaagaagcaagagcttgaaaaacgcttgcaggatgtaacaggtcaattaggctccgctaaaaaggcagcgaagaaagttgaagatgcagctgctggaaaattagatgctgcagttgtaccacctgccggtcatctgtcgtcaagttccagttcaagtgattcatcgtcatctagttccagcgatagcagctcaagcgattcgagtgacagtgaagcaggttaggaattaaactaaatacacggaaaaatgaaatatgcaaaatatttgtaaaagaagtagctgattcatttgattgacgaagtgttaaaaattttatctttaaaaaaaaccaaacacagaaacaatgtgttaga

SEQ ID NO: 68210 - DNA, 1967 bp, Zea mays
  Clone ID: MRT4577_162203C.1
ccggccggggaacaaaaggagaaagaacactgaccaatcaacaaaacctacagatttgccaaacaggttgtgtggagcagaaagtgagcaagctgacaatgtaggtgcaaaaagcacattgccccagattgctgtagagcctcactgtgcagcaaagcactcgaagggtgatccacaaattgccaaacagggtgttgttgctcgtcaaaatggtgcagaaactatgaaagggcatgaaaatcaatttggcatttcattttgtgttgcaagtactgaaacagagaagagggtaacatgtttggcacaaagggggacatgtttagggacacaatatgacgggccatcaaccaagggcatgtatgattgttctgttcaggacaccccaatggacgacgatgttgagttggataatgtggcctgcataatcgcggtggataaatatgtcaatggaaggggaaaaacacaagaaaactacactagaaaagaagctgctcagcgcaaagactcgagtgaaaatcaagggcagaatgatgctctagagctagacaacctccggatggagatgcaagctgacgaacgtccgttagaaccaggaaacaagagggacaggaagtggcagaaaaatgtatatggactcggatcagcttcgggacagaaggaaaccttgtccaggagagaaaatccacggtcagatagagggatggtccacagtaacgacagcaaaacaatttattacaggaagggtgggacggaagtcgataatgttgatgaccaccctttagaaaagcaagaccaccaggatacatcaagtgacggatctaaaaagagaagccgacctgtggacaacgcatctggtggcaacagaccatacttggatgagaacaagaagcgtaatctcagagaagatggaagatatgctcattatgaagactggagaagtgaaaggaatacagcagcagacacgtctggatataaggcccaatcagaagagaagcctgtatggacaaacactcgaacaggatcaagggagcattcactggacaggcaaaggatagagtgcggtgacagctatcgtggaacctataacaatagacaaagacatgaatggctgcacccgcacgctagtggtaattcctcgagaattggttgggatgacaggaggcagtggagttcatctcggtcaccatttccttgggctgaatttggtggtgaccgttcctgttctcgtgcccatccgagaggttctaaatacagaaccggcgggaggcatgatcacccccggtacctgggactgggaacacctcaacatggtacaagtagaccgcaccaaagaatgggctgggacagggacaccaccttccatgatcaccagcatggcagaagaccgccgcaccacacaatgggctgggacagggcccccttccgtgatcaccagcatggcgaatacgacgactccaggtatggtgaatatgatgcaactgacaatggtcctgacagcgcgcatcgaccctacacggctgctggcgtggctggacgttcagcaccgagttatcagcttgctggtggttatggagagggatcaagggcttggcggccagttacggacaagtacgccccatggcccttgccttgaccgcacaaactaatattagccaaggagccagagtgagctacaagaacaccgtttgctattgtcggaaatgctttcttcgaggactgtctcagtacggggaattgatgggtcggtgttgaaacccaaatgatatctgccttccagttgcttgctttgcctatcgtaatccctgcatgttatttcacataagcagctggattctcaagttatgtgggcggtgcatttgagttatactagatgacagcctgtgcatattgttactgaagtaaaatatcttttttttaggttccccttaaaaaaactcgagggggggcccggtaaaaaaaaaaaaaaa

SEQ ID NO: 68211 - DNA, 768 bp, Zea mays
  Clone ID: MRT4577_162204C.1
cccgccgcacctgctgatctggagggtgtccctaagggtcggggaggccggggaggaagagagcggcggcggggtagagctcaacgtcgttgaggaggatgtgctccgatcccgatctgtgtattgtgaccagtgcagagtcgtgggctggagtggacacccggtctgcgtgaagcggtaccatttcatcatcgagaacgacagtagccacctttctggccgccggcgcacctgctgcctccgctgcggaacacccatggccgctggagaatcaaggtgtgctctatgcaatttcgatatggatggggaggagattgaagagtgtgcatatctgcatctggatgaccccacccacttgctgcacgctgtggtgcatgcaaatggttatgggcaccttctcagggtaaatgggcgtgaaggtggttcaagattcctgactggccgtgacataatgagcctgtgggatcgcctgtgcaaggtgttacatgtgaggaaggtaactgtcatggatatatccaagaaacatggaatggactacagacttcttcatgcagtcataagtgggcacccttggtacggccaatggggatacaagtttggtgccggcagctttgctctcacctcagacacctaccgaaatgcagtagacatgctttccagcataaacctggcgctgtacttctcgcaccgcagccaaattaggactccattgcagaacacaatcgctctttattgggcgctctctaatcgccaactagtaaccatccg

SEQ ID NO: 68212 - DNA, 326 bp, Zea mays
  Clone ID: MRT4577_162205C.1
ggctagctgtccgatttgttgctttccctcctgaggggggaaagcggatggttcaatccttttttttaaaacggaaccaaaagccgcaccaggtcttttccgcccggggtttaagttttgtgcttaaggttgtgtccgggttcgtgtcccaaaaaggctggaaaaaaaaaagctgaaaacacagtcttatatgtaaagttggaaaaattatactcttgtgcaaagatcaagattctcagggagatcgggccctttacggatttgggtctaaaagaggcaaaagatctagtggagaaggccccacattttctaaagaaatctctcac

SEQ ID NO: 68213 - DNA, 1019 bp, Zea mays
  Clone ID: MRT4577_162206C.1
aatccgctagctcatcagttcagttgtttgctagaagagaataggatatctatcgatcggagctgctgagctagctgcatactacacttgtgccactgcagtgactatcgatcgatcatggctcttgcttctgtggccaaggtggtgctgggctccatcgccttctgtgtgttctgggtgctggccgtgttcccgtccgtgcccttcatgcccatcggccgcacggcgggcgccctgctcagcgccgtcctgatgatcgtgttccacgtgatcagccccgacgacgcgtacgcgtccgtggacctccccatcctgggcctcctctttgccaccatggtggtgggcagttacctcaagaacgccggcatgttcaagcacctgggcacgctgctggcgtggcggagccagggcggccgcgacctgctgtgccgcgtctgcgtcgtcacggcgctggccagcgcgctcttcaccaacgacacctgctgcgtcgtgctcaccgagttcgtgctggagctcgccgccgagcgcaacctccccgccaagcccttcctgctggcgctggcctccagcgccaacatcggctccagcgccacgcccatcggcaacccgcagaacctggtgatcgccttcaacagcaagatctccttccccaagttcctgctcggcatcctgcccgccatgctcgccggcatggccgtcaacatggtcatgctcctctgcatgtactggaaggacctagacggcagcggcagcggcatggacctggacggcaagcggatggaggccgtcgaggagggggccgtcgtcgtcgtcgagccgagccccaagcagcagcagcagcagctgggcggcagcaacgggtacatgtcgccgctgatgacggagaacatctccaccaagcacccctggttcatgcagtgcacggagcagcggcggaagctgttcatcaagagtttcgcctacgtggtgacggtgggcatggtgatcgcctacatggtggggctcaacatgtcggggac

SEQ ID NO: 68214 - DNA, 529 bp, Zea mays
  unsure (1)..(529): unsure at all n locations
  Clone ID: MRT4577_162207C.1
caggnacacatctattaacatcgacactgcatgactgacacgcagatcgccgcctgcggctcggtaggcggcccataccttggggctcaccgacagtgtgactacataactgtggctggtctgtccgtgcggcatgatcttaccggcaacgtgccttcacacatgtcatcagcacgtttaccttgcacactttgcctcttacggaagagattgagactggccactagagattagacaagccgacacgcactttactgggctctgcactttctgtatataacacacctgagggtgctcatgcctctctgcgggactccgtgatatgcaattgatatccaccagcttgtatgccttcttgccatacatgggaagaaggcgaagcaggggcaatcacagtcattctggacctgccaaccagcagcaagaccactaacaccagatgctgtcggctggtccgcaggatattagggaggcctggggcttggttcacaaatgggagcacagtatggtagccctggaagtgatatgc

SEQ ID NO: 68215 - DNA, 819 bp, Zea mays
  unsure (1)..(819): unsure at all n locations
  Clone ID: MRT4577_162208C.1
aaaccagctaacgtattgggttagccaagagcaagaaattggaaaattggatagatcgagcggtggctaccacgtactctgaggcctcaagctccaagagcatggcccggattgccccgctcctgctggtggcgctgctctccctagccgtgcagctcccgccgtccgcggcttgcccatcctgccccaaaccaaagcctccgccgccaccgccgcgtaagctgacgcctccgccgtccgtgccctgccctccgccgccacactctcccaagcctacaccaccgcacacgcctaccccaaagccaacaccacctcacaccccaacccccatgcctaccccgccacacacgcctacccccacgccaacaccgcctcacacgcccatgccaccacacactccaaccccggcgccaacaccgcctcacacgcccacgccgccgcacaccccaacccccgcgccaacaccgccgcacacgccaacccctatgcccacaccgccgcacacgccaacccctgtgcccacaccgccatacacgccaacgccaccctccccaatccctcctacaccaaccccggtaaccccgccatcacctgttccatccccgacaccgtcaccgccatcaggcaagtgcccagtggacacgctgaagctactgggatgtgtggatgcgctcaacgggttggtgcatgctgtgataggtagcagtgcaagcgacacttgttgccctctactggncggcgtgtccggtgttgacgccgcactctgcctctgcacaccatcgagctcaggggctcacatcaacctcgtgctgccgatcg

SEQ ID NO: 68216 - DNA, 232 bp, Zea mays
  Clone ID: MRT4577_162209C.1
gagctcactttttggcggccgccccatattatgcctgcgcgggcaccaacgagaccctgtggttctaacaaccgcaacggaagaccgataccttttgtgctccgatgacacgatccatctggtgttcctaatccgcccccaacgccggcagtttaaacctcactatccctcatctgaagtgcgctttatgagcccgcgaggaacaccttatcatcgaagctggaagtcactt

SEQ ID NO: 68217 - DNA, 774 bp, Zea mays
  Clone ID: MRT4577_16220C.1
gtcagggatctactactcggacgacaagatgctgcagtgccgggtgttcgcctacgccgacacgcagcgctacaggctgggaccaaactacctgatgctgcccgtcaacgcgccgcgctgcgcgcaccacaacaaccactacgacggcgccatgaacttcatgcaccgggacgaggaggtggactactacccgtccaggcacgcgccgctgcggcaggcggcgccgcccacgccactgccgcccaggccggtcgcggggaggagggagaaggccaccatacgcaagcccaacgacttcaagcagccaggggagaggtaccgatcctgggacgccgaccgacaggaccgattcgtgaggcgattcgccgactcgctcggacacccaaaggtcagccaggagctcaggtccatctggatagacctcctcgccaagtgcgacgcgtcgctggggatgaagattgccacccggctcaacatgaagccaaacatgtgatgcatcatgcttgtgctgaataataatgaagacgcatacatgtcgtcgccaggaacaaagatcgagaaataatacaagaccagcacgcatgggcatactccatatatatgtatagcccgtgcccgtgtccgcctttgtaccaatacaagccaagcctagtggatgtgtattattattattattattgcgctatcacatacatgtacccctgctacctgaagatggatgtgtatcgagttatcaaattaaggcaccagcagcaaaaactatatatgttgcat

SEQ ID NO: 68218 - DNA, 608 bp, Zea mays
  Clone ID: MRT4577_162210C.1
ccgggtttcgacccacgcgttcgtaaaaaaaaaaaaaaaaaaaaaaaaaaaaaaaaaaaaaaaaaaaaaaaaaaaaaaaaaaaaaaaaaaaaaaaaaaaaaaaaaaaaaaaataaaggggggccgcgtttaaaggaccacgtgttttcgtccggccgtgccttctgatgtcagtgggccccttattttgtggtcccctgtggccttggttattacgcgcccggcggtgtctgcacccttccccgtgctggtgaccccctctggctgttcccccgagttatttccccttgtggcaccggcccgctgttttcccgcctggggccccagcggagcggcctgcccggctggtgctttcccccattggggcatgcttcttgccctgggggggtccctttttcgcggcgcttgacgggcgcccgggcagggggtccgctccctgggtgtcgcctcttgccggggcctttgcgcccgttcctttgcttttttgcctttgtttttggctcgcggtgtccggtttttcccccgggggttctgtttggggggcccctttttggcttcccgtttcttggttcccgggcccttgtctcggggatttggtttggggggggg

SEQ ID NO: 68219 - DNA, 492 bp, Zea mays
  Clone ID: MRT4577_162211C.1
tgttcattaaaacagatgacgagtctgatgtaatccattctattacgccatgtggacaatcgaggcatttgtctgagagaacactgattgcttagccatttgctttgctcgttttccccactgttttgtgtataattgcgtcgttggcatgatgaggaagacaattgctgtctgatctatttgaagataaaatcctcctactcattctgaatgtcaaacggactgcagatctctactttgcttaactagttatttagatatcttagcataattgtttcctatttgcctttgaaatccactttagtttgggaaatgatgaagaacaattggtccgtgtttctgaaaatcatgtgaagatatccaatgaaacactcaaatcgtctgattctaaatcacatgaactatcttttcattttcattttggaattgttgttatgttcctatgcatctcctagagtgctcattctccccaccttttttttgtataaataa

SEQ ID NO: 68220 - DNA, 388 bp, Zea mays
  unsure (1)..(388): unsure at all n locations
  Clone ID: MRT4577_162212C.1
acagagacctctggctcttttaaaaacaagataaagatttttacctcgctgcagcttgcggagaaacaaatgaagctgcgcgcgcggataaaaaaactaatcaaacgccccccgggaaacttgggattaccccttcttttttttcttttttggtactggtagggtggtaatcctcactccatttcccccatggtctttagcttccatgcctggggcattctggcatggatgacgccgccgnaataccttgggcagcttctttctttttcaagcaaagaaaccatgaaagctgggggtagcgcccgaccccggggggatgtgcgggttttgggcggccaaaaagctctggaagagcatcctgtcctccgccgacgcgggggacgcgagg

SEQ ID NO: 68221 - DNA, 301 bp, Zea mays
  unsure (1)..(301): unsure at all n locations
  Clone ID: MRT4577_162213C.1
aaggaaacaaaagcgtggtaaagataaattggtaaagacaaatttcgtgtccggccgtgctttgagctacttttttcgggtcgggatcataatggccggaaaagcccaacctttttttacaggagttcagacgggcccctttgtcgaccgggggttttaacccactcgcaatggagtcccttttatcggagagcgcttgagcgggtttattggggacccaactgtccatgagattgtgatgtgactgccttttcccctcgccgctagttcatcctctgactggtaaagnagctgaggcccc

SEQ ID NO: 68222 - DNA, 700 bp, Zea mays
  Clone ID: MRT4577_162214C.1
gctcactatcccatccatgcgggctacgctagcgtatagacgaataatactcttctatccctcgctaactagcatcagataacaagtctattgttctcccctgcagatagtggacgctcgctcctcatcccagcacgatgcgcgagagggcagcgctgggacagacatggctgatgctgacaaggaggagtcgggactgacactgctggacaaaatttccgacaagctccaccgtcgcgggggccgctcctcctctacgccatgctcagaccaccatcgctctccgcggactgccgccgtgaagggcaatatctacagcatcttccgtcgccagaagcccatcgactccgcacccggaagtggctaagagcatgatctgtctctatcggacggaacaagacgatctctgcaaggcctgctccctcgcccaactgccttctggctgctgcttgaggtcctgcattaccacctcctcatgctgctatatcactggctcatcctcaccctggccatcctgtttctctggtccaatgccacgactctcatcacactagtctcctgctaacatccccgagatgaagatcccacatgacacggctgtgaatgctgcacactgcctgatatatgagatctacatgatgtttgctacattgatgcatattgctcaaggccatgacctcaataaatttctgattgtgat

SEQ ID NO: 68223 - DNA, 184 bp, Zea mays
  Clone ID: MRT4577_162215C.1
atcagttctatcagagagtgcgacggagactgatggctgagatagctaggccctgtttccctggtggcaagatcaacgctgtccctcgcctgacagcgtgcatgtagaagggctctgtggttgatcgcccggaccgccttggcgacgggcgcaaccacttgagggtatttctattctcgatacg

SEQ ID NO: 68224 - DNA, 497 bp, Zea mays
  Clone ID: MRT4577_162216C.1
aaatcccagtccggcgtcaagtgagcactgactgagctacccatggatcatggtggcggaggtggcggtggcggcaggagtagcagccgcctcagggaccggctcgcccggatgttccgtccgggctcgctgctccgctcgacctgcaacaacaacaccgcatcgacctcctcttcctcctcgtgctccgccgcggtgggcgcggcagccgacggggtgactgcgtccaagccgcccccgagctccgcctgctcctccagccgcgcgctcttggccgccgactccgccatctcccgcgacagggactcgttcctcacctcttctcgccgcgactacgccactgtcgtcggccgcaccgagtccttctccaacgcactcgaccgcgtgcaccgccgtgccggcgccgcggagcaatctctgtcacctccggctcgcttatctatgaacgcgtcgcctctgatggagagtaagaaaaagagccctctccacggccatgg

SEQ ID NO: 68225 - DNA, 907 bp, Zea mays
  Clone ID: MRT4577_162217C.1
gggcgggccaagtcaacaagccatcgatcgatcggcctacttcctcctcactccgtccataaatatactactcttgcaacaaacaaagccagtagcttgctcgtccagtcgtccgtcgatcggcgcgtcgtacgcgtacgtatatgtccaccatgcacgacgacgaggagaagaaggaatccaagaccgcgacggcgatcagcatcgccggccgcatcgcgggcatgggcctggcggtggcggcggcggtgctgatggccacggcgagccagtgcaccgtgtacgcggcgtacggcgcgcggccgcgcaccgtgacctacaccgacttcccgcccctggtcttcctcgtgggcgccgcctccatcgcggcgttcctcgaggccatcgccatcttcctctgcgtgtggaagaagggcaaggacaagaaggccaaggtgctcatgccgctgctgggcgccgccgtgccggcgctgctgtacgcggccaccggcgcggcgttcgcggccagctccaacatgtcctactgctcagcctacggcaggcgcctcaacgtctgcaccgccgacgggggcggcagcggcagcaacttctgcagacaggtgcatatctccgtctacctcgcgctcgccgcggccatcgccgtgtccgtcgccgaggtggtcaggggcattggaggaacggcgtccggcggtggactcggactcggactccagctccgacggctgtgaccatagctgccgccacaagcattagctaggttgtgcgttttggagtttgtaccagcaacattgtgtggcttcatttcaacttctggaatccattttcattggtgggcctgtattgtatacgtaccagcagtaccatggatccaaattatatcggaatgtatttacatatatattgtgac

SEQ ID NO: 68226 - DNA, 766 bp, Zea mays
  Clone ID: MRT4577_162218C.1
cttaatacaagatactgtcggagaggtttggttgacccccttcactaccagctgatgaaccataccttccctatcttccaccatctgatcgatagagctatcatgactgaaaggaagcgccggaagatggaagacaggaaacgcaagattggtggaccataggctaggagaagctgtcgtccccgtttctcaggcaacccgccctagcaattcaagcagagtcaccctcaaggacaccagcatcagcatcaacgtcagcatcaatagtagttctagaggcagttcccttagaagcagtagcagtacagctagagcaaccaacagggaggaaaccagtatcagcgacaaaacatccaagcacctcgccttcctgccccagcaaccaatccgagcagccaagcagcctagtgcaaggaggaggtcatggatgtttccactatgggcaacaaggtcactaggcgactcatttcccaaagaaagcagctcagcagcagtcagctcctaatgccactgcaagacagaatgcacctcagcaaggagtcagcaatcgtagacagcctcgtgcctaatacggaaaggtgaagcacctggaggccgacacagttcaggagaccccaggagtggcactaggtacggtctcagtcgaatcccattctacgaatgtgttatttgatactggagcaacacaccctccgtgactgcatcatgggtagaaacacacacaaactagtagcacccatgtatccacctatgagggttcggacgc

SEQ ID NO: 68227 - DNA, 113 bp, Zea mays
  Clone ID: MRT4577_162219C.1
gaagaaatgtcctctagcgatcaaaacctagctgccacacccgcgtcgtctgacggcgccgagccctcgccgggggggaggccaacagctgtgtcctcacgtctcctccacat

SEQ ID NO: 68228 - DNA, 618 bp, Zea mays
  Clone ID: MRT4577_16221C.1
ccacccgccgccgccgccgccagagatccatccatccggccaagccgagagcagagcggagcaggggaaggagacgggagagaggagcagcagccatgatgttctccagccaggtcgacgccttctcgccgtcgcagttcaccgcgtcgcagaacgccgccgccgactccacccccaacaagttccggggcgcgttgggcacgatgccgctgaccgtgaagcagatcgcggacgcgcggctggccggcaccggcgagaagggcgcgcccttcgtcgtcgacggcgtcgagacggccaacgtcaggctcgtggggatggtgagcggcaaggcggagcggaacacggacgtctccttcaccctcgacgacggcaccggccgcatcgacttcatcagatggttgaatgatgctgcagattctgctgaaactgctgctattcagaatggtatgtatgttgctgtcatcggtagcctcaagggagttcaggacaagaagcgtgctaccgctttcgcagtcagacctataactgattacaacgaggtcacactgcatttcattcagtgcgtacggatgcatatagagaacacaaatcaaaggttggcagtcccgcgcacaccaa

SEQ ID NO: 68229 - DNA, 420 bp, Zea mays
  Clone ID: MRT4577_162220C.1
cggcgatcaaggtggagcaactgatatacagcgacgtttgggcctatgacgaggccgaggtagatcgcatcaatgtagaagagcgcgagcacatcttagactaggggggcaggcgccctatgcattacgaccaggatgctacaggcagagtgcgaacctgaccaatacgtaccaggaatagctcgccatcttgatgcagctagtccagcagcaccgcaacacggtttgctgatagattgcgagctggaggtgaaacaggcgaatgcgcttattagcactgtgctctacattcgacgagtcatcaagtagccgctactaggtcacctggagttccacgaactgaacctgcgtcatgagctcaaactacacgatcactgacacactcattatcctgaactatacttaaactggattcaccac

SEQ ID NO: 68230 - DNA, 584 bp, Zea mays
  unsure (1)..(584): unsure at all n locations
  Clone ID: MRT4577_162221C.1
gtcatttgttgtggtgaaaatgntagattttcaaanactggtcaaacgaacactgccttgcacaatcctgcatatgtacctcgagcaaaaagtaagcacatgccaatagttttgggccaatcagaaagcacaaaagcaggaaaaaaggagggattagcctaaggcaaaagactcttttgcaccatctttaggcctaggaccatctccaagatggtctaattgccaatctattgagctctaatgtaacttctggcatataattaacctgccactgctaagatatgtccagatttgcatgatggatcattgcattggcaatctcattttcttctgcagagtatgtggagtgcaccccatagcagacatagaaaactatggtcacaaggctccagatgccgaacctctggtatgatctcaccttgagagtggttatcaggaacacattcaggaagacagaagcagcggcaggccatggcatcagaggaaccgaccactccaacgagggtccggcgatgttctgctgtgctgtgcagtggaagatggtggtgattgctatggagacagcgccgaacagtgtcatcccc

SEQ ID NO: 68231 - DNA, 422 bp, Zea mays
  Clone ID: MRT4577_162222C.1
cccgggtcgaccagcgtccggttctagcgcgtagcgcccttttttttaattttttttctctttttataattttttttttccaattttattaattaataattttttttttttttaaaaaaaaaaaaaattgtttgtgggttttaattacaatttttattagaagcctttttttttgaaccccaaataaaaagacgtacatttcgagaggaatataaagatagctaaatgggaaaagatctgaaaataccaaaaatttttgtgtcctttgcgtctgcaggcccaaatgaaagaatatgaaaaaattaacccctggcagccgatgcatgtagcttgaaatgatcgaaacttctaaaaagataggaaaggccaaagtctggccataaccagagcgcaaccaataggaagcgtggtgggtaaacggc

SEQ ID NO: 68232 - DNA, 368 bp, Zea mays
  Clone ID: MRT4577_162223C.1
caaccacatctatatgccactaccctaacacttttcctccacagctctacctttcctcgggggtccacttactacctcagctcacccctccaccttccgtcttcttccgcctttaatcacgccctcctcaccattcacatgactcactctaaatcctacccatccaacacgtcctctaccactacataccacccctaccgcactcccttcctcggcccactcttccactaaccacccatctacctcactaactatttaaccatctactacatactattcacctaccttctttcatccaacccacaaactctcacacacaacctacatctccatgtaatccactcccactcagacattcttgtcactct

SEQ ID NO: 68233 - DNA, 565 bp, Zea mays
  Clone ID: MRT4577_162224C.1
atcgcccttatggctaacaaccatgaccacaagaagcagttaaaaagagtacttgatttatagacacagcgacacatatatggccatggagctaagagataatcggaatgaccttgtctttatgttcaataattcttttcaatcttctaatatgttgttctcctttacctttatattccactcatagctgctcactaatgtccattacatttactcctgcatcttttactgtccataccaatgatccacatcctcacattcttcccttattaaaattctaccttgccccctatgtcgatacggatatctgttacatatccaatgatcctgaagccggcgaacggtttgctgctgcattatcaacttccctgatgactgaaggcgtatcattcttatgaagatgcctaaaacaaagaatcttatcccgaaaatacctcatgtgttcagtaaagacaacaacaagcatgtgtctcactgtacataaagtcattgcagccttcactagctttcttcctaacaagtaccaggaaggcccttctcctgcagtcagtctcatagtcaacat

SEQ ID NO: 68234 - DNA, 438 bp, Zea mays
  unsure (1)..(438): unsure at all n locations
  Clone ID: MRT4577_162225C.1
tccggacaggtccgacactccgcaagcccacaaaagttgctagccttcgttgctacctaggaatgctgagaagatgtgctgactcttgctcggaaatgcgctaacttgcgctagttggccgcaacttgcctaccgcaatgcacctgtcgaggaccggggtaggttcattcggtcttcgtcgccccgggttttcaaggtannaagtcaggtcagggccaactttctgtcgaagaagcgaacaaatcgaagaaagtgaagtggagggtgggcgnnngcaatggagtgaatgcngaatntngcggcggaccgggaaagaagcgttgctgcannngggcggtaccgaagcttggggcgggtgcttggggcaaacggcaacttcggggcggggtgcaacgccggcgcgggaacctgcgcaacgggctcgcaagcgtcgcggtc

SEQ ID NO: 68235 - DNA, 329 bp, Zea mays
  Clone ID: MRT4577_162226C.1
cacacccaataaatatccaccaccccccacccccaccgggggggaagtaaaaacaaaagcccaccgcagcccccccacacaggcaagaaacaaaacagagaccaacaacaggagccaaaccgaaaaaaggccccagaaaacaacaaggcaccaacccggcaagcacccgcgactcccaatgaacaaagggaccaaccaacgggccaagcacccaagcggcagcaaccaaggcaacaaagcgaagtccacccaaagaagcgaaccgccgccgacgcaaccggaggacagcgccgacggcgagaacaggccgccgagccactgcaaggaag

SEQ ID NO: 68236 - DNA, 419 bp, Zea mays
  Clone ID: MRT4577_162227C.1
gtttagtcctatacgctccaacatgctatcacaggaagcaacatacctcaattaccgtggttgattcaacactcgacaaccctatctacgttgcagctcattgttacaaaccatctagtcacaacgcctgcaccaactcgtgctacctgtgaacaaccaagtagatcttgctaacctttctgcttactctgagcagcaacaatctcttctattcaaccaactgtctacactgaaccctgctgcttatttgcatcatcaactattaccattgaatcatctagctactgtatactctcagcaactacaacttcttccatgtaaccaattggtcacactgaaccccactgcttatttgcagcatcaaatactactaccatgtagccagctagctgcagcaaaccgtgcttccttctttacac

SEQ ID NO: 68237 - DNA, 712 bp, Zea mays
  Clone ID: MRT4577_162228C.1
gtacgcctgcaggtaccggtccggaattcccgggtcgacccacgcgtccgctttatttgtcttttttgtttatcttttaataactattttatacatatttttgccaggttctacagttggtagcaatgcttattagtatattgatctttgaggaagaattttctgtatttttagtttttaactataagaagtcaggactatttatttaaatcagtggcagaaattaataatttaaagtgtttctttgcatagaaaaatatatttatatgggatgcgtttatttttgaagtttgtgtaatctcttgttgcccagtgactggtttgacctgcccacttaaggtgcttctaactgtatggaagtgggctgtagagtagtagagaggctctgcctgccgtagttagcactagaacttgctttccacacatgcgctgtaatctctaatatgtttttttctaggtgatgcggtcagataatggctgatgtggctcgatgctccatctcagtcttagttttatgatgtgttttggagagggctgttttctgaattttacaggttcttcaggccctatgatggtcgggtcacaaatcttcgaagagtgacatatgttgttttagatgaagcagacagaatgtttgacatggggttttgaaccacaggtcatgcgcattgtggataacgttcggcctgaccgacagacagttatgttttca

SEQ ID NO: 68238 - DNA, 267 bp, Zea mays
  unsure (1)..(267): unsure at all n locations
  Clone ID: MRT4577_162229C.1
cctgcccacctccctcgccatcgctaggctcaaacccaaccctagagaagaagaagagagagagagaagggagaggnggggcngcaggacgancncgncgggaacccanggggcgcggngcgcgccaccnncgagaggacggccgccgccgcngcagcgcagncgggaggagcngacccngnggcggcgcnccgnggcaaagacgggggggggggggaccncnnccgcnccnnccnnnncgagcaagacggacacggcaaggaaccg

SEQ ID NO: 68239 - DNA, 611 bp, Zea mays
  Clone ID: MRT4577_16222C.1
gagaaggcaaccatacgcaagcccagcgacttcaagcagccagggtagaggtaccgctcttggtacgccgaccgacaggaccgattcgtgaggcgattcgccgactcgctcgggcacccaaaggtcagccaggagctcaggtccatctggatagacctcctcgccaagtgcgacgcgtcgctggggatgaagattgccacccggctcaacatgaagccaaacatgtgatgcttcatgcgatgcttgtgctgaataataatcaagacgcatgcatgtcgtcgtcaggaacaagagaaataatacaagaccaccacgcatgggcatactctacatatatatatgtatagcccgtgcccgtgtccgcctttgtaccaatacaagccaagctagtcaagtggatgtgtattattattattattattattattgctgcgctatcacatacatgtacccctgctacctgaagatggatgtgtatgagttatcaaattaaggcaccagcagcaaaaactatatgtattgcataagaatactcgtctcgatatggacatgattcactcagctaatataaccctccaccaaattctataaaaaaaaaaaaaaaaaatata

SEQ ID NO: 68240 - DNA, 490 bp, Zea mays
  Clone ID: MRT4577_162230C.1
gatctgttggggggtcaagaaaacctttggataaacagtaaaaaactacgcgggcattctacaagcctactccggaaaaaaaagcaggcaaaggttgaaggggggttagctaagctagccaaaaaagcccctttgctttttcccctttccgtaagggtttttgggcggcaccttttctttttttccccccactttcaagctaggaggagcttcaccttgcaccgcacgcccgcttcaaaggctgacccccggggtccactcgaaccggccggggtcaaggggcaccccccggacaaagccgaaattgcccctggcatagcatcgaggggaaatcgcaaaacacgcccaggttaacaattaagcacacaccccggccggccggggaaagccccggcacgcaccccccacaaaattaagcacggggaaagaagcttgcgggcctaattcctgcaagctacggagaacacccgggacaaaaaaaaagttttct

SEQ ID NO: 68241 - DNA, 562 bp, Zea mays
  Clone ID: MRT4577_162231C.1
gtgctgtagcactctgtctagtttccaggaatttctggaaggcaagtgtaatctcgctgtaaactgtatcttatctgtcaccaatatagaagtcatcatggcctatcagcaatgccttgtatgctcttaccattcagcacattttgtactgtactgatgagccacggcccacgggtgttgttgggttcaatctcatgagatgatttattcatcctgaagcttttgcaggtctatggggttaggtttgctgttatgtttctcaagacttccaattgatcccgttgagacgacaaagtgaacgctgacacaacggtttctaacgcttccctggaagtgacaagatgtttggatacttcacttcactccggagaggcagggccgctctgccgctaaaggctcatctacctttaatatagaagatcaaacgattttgtactctttccaacagcatcctctaaacggtactctaaatttagagaacgttattggattttcatatatatagagtttctctaaacgatcatctatatatttgaataagagtttctttattcgatcctct

SEQ ID NO: 68242 - DNA, 755 bp, Zea mays
  Clone ID: MRT4577_162232C.1
ccggggttgtcgaaggggcagccatgattgtacttgtgttcgcgctgctagttgtttgcggtctggctcgctggtgcagcactgcgagcgacgagcagctgagactggacgactgcagactcaccaccaaacagggaacacattacgacctgaacaagttgctacagtccggcgaatcctggcccgtgaatctcaccaccagcagacccaccccgccatccaccaccatcgagaccatcctcctctccccatgcgccaaactgcccgtggacccatcggctcagtcttgtccagatggaactctcgtctgtctcctggtctacaaccagctctccttcgccgaccggagactccagcaactcatccccctcgccttggaccaccctgatcccaccgtccaagtctcgacatctgatcacaacaaacaatcactcctggttaacatgatcggagccacctacaaccacatccaacaaactaccgtcatgagattgatctgctcagcccaagccgacccacctacgaccatatacgacccggtcaagggcgcactcaatatcacctggaccactcctgccgcctgcccttcgtctcaggaaccccccagtattggtggctcttctcatgccttcaaaaacttactcgtctttttcgtgctgctcttccttgcctacctggtcccttggaatatggtataattacaatacttatggactgacgggagtggacgcgcttccacacaagaacttctggga

SEQ ID NO: 68243 - DNA, 115 bp, Zea mays
  Clone ID: MRT4577_162233C.1
atgcaatacagatactactatcggctctccacgcaagtggatgcgctgagaactaaaggtcacggcgatgtccctgtccatcagcgtctgagagagggagatatgctctgctcct

SEQ ID NO: 68244 - DNA, 318 bp, Zea mays
  Clone ID: MRT4577_162234C.1
agcgcagccacgctttcctgcacgccgccagccgtcgtttatccgtggccgggtacggcgtcagccagccgtaaggtcgcgctgtcagccagcccttctgacgtggtgaggtacttgacgaatttttctggcaatcagcctttttcttgtcatgagtagtgatgacaatcaatgtgaaagattctacctccatggtttgaggctataccaatgctacagagttatctggtggactatacatgatatttaagcgctgtgatcacaaaaggactgctggaccaacataaaacggtggcaatttcaacccacagtatttgg

SEQ ID NO: 68245 - DNA, 417 bp, Zea mays
  Clone ID: MRT4577_162235C.1
tccagaacatgctgagccaccactgcgacttcgtttaccagagcgccttctacacctaccgctcgtgtatcaaggccggcaggaagttccccggcttccgcaccaccgtcgactagcagacacgcacgcgaaagctcgccgacttcttcggccagacgtaccacgaaaccaccactagatgggccactgctccgcatggaccgtttgcctgcggatactgccggatgaacgaacagaaacacacggacccaccctactatggactaggacccatacagctaactcataagtacaactacaggctcgccgagcaagcgctgaacctgaacctggtgggccacccagacctgatgacgatagaccccatggtagccttcaaaaccgccatctggttctggatgacgccgcaaacaccca

SEQ ID NO: 68246 - DNA, 169 bp, Zea mays
  Clone ID: MRT4577_162236C.1
gggcaagaatggaaaaacccattgaatcactgggttcggaatccagttcaaggggtcatacaggacgacacccaaaagtttgaaagggctctatttccatccccgcaaaaattcctacaacatgggggtgaggcttaatcatccacttttgactgcatattacaaaaca

SEQ ID NO: 68247 - DNA, 342 bp, Zea mays
  unsure (1)..(342): unsure at all n locations
  Clone ID: MRT4577_162237C.1
ccgggccgaccgcacgcgtccggcagtgtatgggcacctctccgctatgacaaatctccgcctgggggtgtttcacatgcctgggcgncagattattggcaaatgcagncacaatctggagataatgtttcacatctaacagacggncatggagacagaaagacaaacccaaggggtcagggaggaacccggggggtcccggtggaaaaggaccataggcatgccacccgccggggaccccaatgtgacccaaaggaaccacaaaaatcggctagcgcgccggagggaaaaaataaagagaggggctctgctagctatggtgctcatgagagacaagaatgg

SEQ ID NO: 68248 - DNA, 433 bp, Zea mays
  Clone ID: MRT4577_162238C.1
ccggcccgaatttcccggtcggccccacccgtccggggttttcttatctgaattgggacctcactcgggccttcttggtcttttcggttggggcgtgagtattactcgctatggggcgattgacacatttctgggtgtaaatattttctgaaatataacgttattgggcggcgaaagtgacttttgtatgaacccgaggggttttcattttactaggaatggagtcaataatttcaaaattgccccttcctccgggctcttcttttgggggttgtaccatttgcaagaaaaaaaaatgctcctgatcacctcatagttgtctctcctgtctatatctggggggcttttatgtttttgcacgcacacacacaaagaaaaaaggtttctctacccaatttattcattgatatgtgccgcacctgcagtattgaca

SEQ ID NO: 68249 - DNA, 477 bp, Zea mays
  Clone ID: MRT4577_162239C.1
gacgccaaagcgaagctgggggcgatcagacgacgaccaaacaagcaatctttgactctttgtagcctcgcgctcgcgtacacaaactcggaatggagggaggccggagcaacacagttcagattatcgcgcgtcatctgcagcagcgtcgacacgagccgccggtgacggtggcgacgccggcggcgagccgtccctcggcttcttcgtcccgggattcctcggcggccttgtaatatcggggcacgtggcgcagtggtctcgcctgccggtgttctccgcggatcatcgctatttgctcactgtaccttgagaaacccaggaggtaccagtgagcgctgcgaagttgcccagggacgacaagtctgacgacgccatgatgtcgttcatctgcaaagatatacaagacgcagaaccagatcaaaaactgtaccgatcagaatccaaacatttgagggaagtcgcagcggcagtgcc

SEQ ID NO: 68250 - DNA, 795 bp, Zea mays
  Clone ID: MRT4577_16223C.1
gccagggatctactactcggacgacaagatgctgcagtgccgggtgttcgcctacgccgacacgcagcgctacaggctgggaccaaactacctgatgctgcccgtcaacgcgccgcgctgcgcgcaccacaacaaccactacgacggcgccatgaacttcatgcaccgcgacgaggaggtggactactacccgtccaggcacgcgccgctgcggcaggcggcgccgcccacgccactgccgcccaggccggtcgcggggaggagggagaaggcaaccatacgcaagcccaacgacttcaagcagccaggggagaggtaccgctcctgggacgccgaccgacaggaccgattcgtgaggcgattcgccgactcgctcggacacccaaaggtcagccaggagctcaggtccatctggatagacctcctcgccaagtgcgacgcgtcgctggggatgaagattgccacccggctcaacatgaagccaaacatgtgatgcatcatgcttgtgctcaataataatgaagacgcatgcatgtcgtcgccaggaacaagagaaataatacaagaccagcacgcatgcatgggcatactctatatatatgtatagcccgtgcccgtgtccgcctttgtaccaatacaagccaaaccaagtggatgtgtattattattattattattgcgttatcacatacatgtacccctgctacctgaagatggatgtgtatcgagttatcaaattaaggcaccagcagcaaaaactatatatgttgcaaaaaaaaaaaaaaaaaagcggcc

SEQ ID NO: 68251 - DNA, 232 bp, Zea mays
  unsure (1)..(232): unsure at all n locations
  Clone ID: MRT4577_162240C.1
agaccaaagaagaacagnnngcatttnaactccgggcccgaagggcccatagctgcagcccaagggggacaaataacagggtggtcaagatgccggctacccaacacatggagggaaattacccggtggggtaaacccggaatacaacatctcacacattagggaaacattggtcggggggccaatacttttttgcaaatgggaagacccactgggtttcttttgggaattt

SEQ ID NO: 68252 - DNA, 1698 bp, Zea mays
  Clone ID: MRT4577_162241C.1
atgtctagagatcacgccaagagggagatcatgaccagcgaaaagcccacaggctcggagaggactctctcaacggagtccggcaacaagtataaggaggaatcctcttcctccatcaagtcacatcggagaggtgacaagaagaagatgataagaaagtggtctactacgagactgactcttcgtcaccctctacgtccgacaccgagtcgtagactacttctaagtgccatgagcgcaagaagtatacgcgctccattacttttcgtacccctaggaaaaacaccatattttgatggtgaagattattgtatgtggagtgataaaatgaggcatcatctaacctcactccacgaaagtatttgggattttgttgagtttggagcgcaggcaccaaaggtgggggacgaggactacgactcggacgaggccgcccaaattaggcacttcaactcacaagcaacttctatactcctcgtctctttatgtcgagaggagtacaataaggtgcaagggttgaagaacgccaaagaaatttgggacatcctcaaaacggcgcacgaaggggacgaggtgaccaagatcaccaaacgcgagacgatcgaaggagaactcggtcgatttgtcctcaataaaggagaagagccgcaagccatgtacaaccagctcaagaccatagtgaatcaagtgcgcaacctcaggagcacaaaatgggatgaccatgaaatggtcaaggttattcttagatccctcgtatttcgtaatcctactcaagttcaattaatatgtgtggatcctagatacaagcagatgtctcccgaggaagtaattgacaagtttgtgagctttgaacttatgatcaaagactccaaacacattgtcaacttggagcaaggcaccacctctacacccgaggtgcaacccgttgcatttaaggcaacagaagaaaagaaggaggagtctacaccaagtaggcttccaatcgacgcctccaagctcgacaacgaggagatggcgctcatcatcaagagttttcgccaaattctcaaacaaaggagggggaaggactacaagccccgctccaaaagggtgcgctacggtgtgaaggggaagaagaaggagaagaagagatactacaagaagaaaggcggcgaggcgcacatggggcgcgagtgggactccgacgaaagctccatcgaatcctcctccgacgaggacgtcgccaacatcgccgtcaacaagggcatcctcttccccaacgtcggccacaagtgtctaatggccaaggacggcaaaaagaagaaggtagaaaaatatgaaaatttgtctaaggaccttagcatctgcaataattcaatttcatgtcttagagatgaaaatgctagtttaatttttaagattgaaaaattgaatgtttgcaatgattcaatttctagttttagaattgagaatggtaatttaaatgctaagaataaggaattgaatgtttgcaaagcatctacatctattgttgaaaatgttgctatttgtactagatgtagagatgttaatatagaagctattggtgatcaccttgccatgattaaacaacaaaatgatcacatagctactttaaatgccaaaattgctgagcatgaacttgaaaatgaaaagtttaaatttgctaaaagcatgctaatgggagacgccctgcattaa

SEQ ID NO: 68253 - DNA, 555 bp, Zea mays
  Clone ID: MRT4577_162242C.1
acaagctttttttttttttttttttttttttttatttttttttttttttttttttttttttttttttttttttttttttttgggggggaccaagggttggtttttgcccaccaaataccccccaggatgggcttcccccccccacccgaccgtttgaccaatatacccccttttattaacccccgctttttttttttagccctggttgggggttgggcttaccagccacccgaaaccgagataccaaaaaagattcctcgggttgcaagaaccagacttggtgggcgcccctttttttccccccccttccccaacccatggtccctgggccggaacccccttagggggaaatcccacacactggggggccgtactaaggggacccaacccgggacccaacttgggggaaacaagggcaaaagcggttcccgggggaaaatggtattccctcacaaattccaacaaaaaaacaacccgaaacaaaaaagggaaaacccggggggcccaaagggggggccaacccacaataatatggggtgggcccactggcccctt

SEQ ID NO: 68254 - DNA, 352 bp, Zea mays
  Clone ID: MRT4577_162243C.1
gataccattgcgataaaacctaggcctgagctcatagcataatccacacacgcaggggctatgttgttcgttgggacgcacgagtacctgacccgcaagatcattataggcgaagtccatggaacctcattccactggtggaccttaccggcatacttgtaccagctgctgttcgggaagacgcctttcaagggatccagcaaccgagccacgctgatcaatgtcattggccatcagctgctcttacctgattaaccgggcgtcagattctatgcgacggatctgatcactggtatgcttgtgaaggatccccaacaacggttggcctacaagccatgatccacatggatca

SEQ ID NO: 68255 - DNA, 563 bp, Zea mays
  Clone ID: MRT4577_162244C.1
cctcaaatatactacatctagcgatgagggtagttctagtgataatgaagacgatttaatttctcttttgccaaccttaatatggaccaaaagaaaaaattaaatgaactaatagagaccattaacgagaaggatgatctcttggaatgccaagaagacttgctcgttaaggagaacaaaaaatttgttaagttgaaaaatgcttatgctctagaagtagaaaaaggtgaaaacttaactagagagcttagcatttgcaataattcaatttcctgtcttagagatgaaaacgacagtctagtttctaagattgaaaaattaaatgtttgcaatgattcaatttcatgtcttagagatgagaatgctagtctaaatgctaagattaatgaattgaacatttgcattccatctacatgtactgttgagaatgtcaccatttgtgctagatgtagagatattaatattgaagctattgatgatcaccttgccatgattaaacaacaaaatgatcacatagctaaattaaatgcaaaaattgccgagcatgaacttgagaacgaaaa

SEQ ID NO: 68256 - DNA, 1944 bp, Zea mays
  Clone ID: MRT4577_162245C.1
atgtctggagatcataccaagagggagatcatgaccggcgaaaagcccgcaggctcggggaggactctctcaagggagtctggcaacaagtataaggaggaatcctcttcctccatcaagtcacatcggagaggtgacaagaagaagaagatgaagaaagtggtctactacgagaccgactctttgtcaccctccacgtccggcaccaagtcgtcgactacttctaagcgccatgagcgcaagaagtatacgcaggcaccaaaggtgggggacaaggactatgactcagatgaggctgcccaaattagacacttcaactcccaagcaacttctatactcctcgcctccttgtgtcgagaggagtataataagcacgaaggggacgaggtgaccaagatcaccaagcgtgaaacgatcgagggagaactcggtcaattcgtcctcaacaaaggggaagagccgcaagccatgtacaaccgactcaagacaatggtgaaccaagtgcgcaacctcgggagcaccaaatgggatgaccatgaaatggtcaagatgtctcccgaggaggtaattggcaggtttgtgagctttgaacttatgatcaaagactccaaatacattgtcaacttggagcaaggcaccacctccacacccgaggtgcaacccattgcattcaaggcaatggaagaaaagaaggaggagtctacaccaagtaggcttccaatcgacgcctccaagctcgacaacaaggaaatgacactcatcatcaaaagctttcgccaaatcctgaagcaaaggagggggaaggactacaaaccccgctccaaacgggtgtgctaccgatgtggtaagtccgatcatttcattgcaaaatgtccatatacatgtgaaagtgacagggatggcgataagaaggggaagaagaaaatggaaaagaagtactacaagaagaagggcggcgaggcgcacatggggcgggaatgggactccgatgagagctccaccgactcctcctccgacgaggacaccaccatcatcgtcatcaacaagggacttctcttccccaacgtcggctacaagtgtctaatggctaaggacggcaagaagaaggtacactctagagtgacacccaaatatactacatctagtgatgagggtagctctagtgaaaatgaagatgatttagtttctctctttgccaacctcaccatggaccaaaagaaaaaattgaatgaactaattgagacaattaacgagaaggatgatctcttggaatgccaagaggacttgctcgttaaggagaacaaaaaatttgttaagttgaaaaatgcttatgctctagaagtagagaaatgtgaaaacttatctaaggagcttagcatttgcaataattcaatttcctgtcttagagatgaaaatgctagtttagtttctaagattgagaaattaaatgtttgcaatgattcaatttcatgtcttagagatgagaatgctagtctaaatgctaaggttaatgaattgaacatttgcatgccatctacatcttctgttgaaaatgtaaccatttgtactagatgtagagatgataatatagaagctattgatgatcaccttaccatgattaaacaacaaaatgatcacatagctacattaaatgccaaaattgccgatcatgaaattgaaaataaaaaatttaaatttgctagaagcatgctctataatgggagacgccctggcattaaggatggcattgggttccaacaagggagccaaagcaatgtcaagcttaatgcccccaagaaattgtctaattttgttaagggtaaggctcccatggttaaggatagtgagggttacattttatatcctgcaaactattctgagcacaagattaggataatccatgctagaaaacctcaatgtctctcatcatgcatttatgtataa

SEQ ID NO: 68257 - DNA, 323 bp, Zea mays
  Clone ID: MRT4577_162246C.1
attcctaaacattgattctcatgcgatggcatgccgacttcattattgggtacaacacaaatgcttatatctaaaatgcagcaccaacaaaggggggggggaaaaacaagggggagatcgccacggctggggggctgaacaaaaaggggaagggctggggttgtataatgggcgaaagggaatcagaataacattggggcactgccaacatgggggggattaacattgaggacaccacgctcggcatgagcatcggggggaacaaacttggcatcattcccgggggcataagacccggcggcatggtcaaacgcattataccc

SEQ ID NO: 68258 - DNA, 167 bp, Zea mays
  unsure (1)..(167): unsure at all n locations
  Clone ID: MRT4577_162247C.1
ctccagaaggatgcttcagccaccccaaaatctcctccangaaaagacccnagaaaaacattcgaacaacccaaccaaccagactcaaaagacacaacttccaaagcccctaaaaaaagaccacccgccgcttccaaaaagaattccaacccacctaaaccagaccc

SEQ ID NO: 68259 - DNA, 291 bp, Zea mays
  Clone ID: MRT4577_162248C.1
ctggttgccttaaccctactgaagcatgatgatctgcaaggtcctggtgatcactgtcttctgtgtgctgactgtggctttccccagtttggacatagattcaatcaatgaagaactacaggattcaatctttgatatactaaactcaacctctgacttccaactggcatcatatgaaccatcaacatctcctccagaggatagcacataccaggaatcaaacactgacttcatgcaaaccacatattccagaagcatacagatttctgagctctctaatggagctgagac

SEQ ID NO: 68260 - DNA, 1341 bp, Zea mays
  Clone ID: MRT4577_162249C.1
atccaattgagttaaagagattgcattttcaacaatgtgaacctgtagagccaccggcaaagcatccacgtgtggaacagttgccccccaataatatgcttttgcagagaagcatgagtagcactgcagaacgttctgcagaaatattaagaagtcctgtacgagctccactaggaattccattttgttcagcaagtgtgggtggtgcaaggaaatttccacctccaccaattgttacaggtgaggatcacttcaacagctgttttgaggatggtgggctgttcagcaccgagctgctgcatagacgtatggagaaaacagcagaaacactgggtttagctggtgtcactatgcatagtgctgagcttctaaatattgctctggatgagtacatgaaaaacttgattaggtcatctgttgagttagtaggaggtagtgttcagagggatgcaaggaaagggacactaccacacaagaaccaagtttatggaaatcggattaatggtgtctggctgccaaaccatgttcatatgcaatcaggcagtggttcatcaggaactacgaatgagattggaagtaaccaattgatctccgtaagtgattttaaggtagccatgcagctaaaccctcaacatcttggggagaactggccagtccttctggagaagatatgtctatgttcttcagaggaaaatgactgacagatggcgcctttttacttcacatcgaagttttgtaccaatgtgcttattggtgcccatccgatgtacatttgagctggaagtggcaagattgcaggcacaacacaaaatatgcacatgtggggtcaaggcagaaatctgattcaacgttcagctgtcagagttgtactgaaagaaagacattctttttttcctgatacatcatgcccaaataaaggaaaacatcttctgttctggccatgcagcttaggcctcattagcacttacaaggtggatagtgttacatccaaaagtcccaacttctatgtaacatctggcataagggactgggggcagcaaaatgcaagtgctgtcttgtaacttataggaaaatgttctgtaagtttctaggtcaggatgtacattattgattgcaaaaattttctaggtatcttcagtactaatttcagggatctcgaatgttcatttaattcttttgtaactctgctatgagaattatatgttagatctctacctttctaaaaaaaagtgcgagagtgtctttgggattaggttggtgcccccatacacttttttggtgtttattatactaaaaaaagggagatgatgcatcgtcaaaaaaaaaaaaaaaaaagcggcc

SEQ ID NO: 68261 - DNA, 3963 bp, Zea mays
  Clone ID: MRT4577_16224C.1
ttggaaaacggcgggcggacgcgtccgcccacgcgtccgctccgctcggccaccagctttgaccgcctcccctcccctccgctccgtgtgctccataccccacccccccgcaggagcggcgcggcggcggcggcggcaaagccaaaggcaagatgttcgggcgcgcgccgaagaagagcgacaacaccaaggactacgagatcctcggggcgcggccgcctgcggctcgacctgcctctgttagctctcggccgtctgcgggctctcagattgccctgtccccctcctggaacccacggcgcagccctgtccagctcagtggcgcagttggtcgcagcagttagcagtggtcgtggtgaaattgagattgagaagttacctcttcacgaggttgagatcaggagaagggaattgctccctgtattcaagcagttccaatattctgatcgacattccagtgataggaatattgcaaatggaggctttcagaatgccttgtcccacatcagtaatgcacagaatagctctgtaaaggataatggtgaatatgaaaccaaaccggtggctttgtctgggttttacgcagacacgaggaaaacagctaacacaaatcgtctagctaggcaaacattctcagctgttactcttcagcaagtggggaagtgcaattctattgaatctcttaacactgcaattgtgtctggcaaaacagagaatgggaacgatggctctcattctcccagacctgtggcgtttgcgccgtacttcccagagagctgttgtaatctatcagaactccatgactgccgtgagttaactgaagctgttactgatgctgacagcagcagcagccactgcgagtgcgtgtaccccctggttgttggggggagcgaggatttgctcgaattcggcacgaggcctatgtacacgttcttcgattccggtctgctgtatatttagttcgctgcagtccaaggattgttgctgtagcacttgcagcacaaatctactgctttgatgctgttactcttgagaacaagctcagcgtcttgtcatatcctctgcaaggtgcacctggggtaaatattgggtatggcccgatggctgttggccccagatggttagcctatgccacaaatactcctttattgtcaaacacaggccgtctaagtccacagaacctcacaccttcaccaggtgtgagcccatctacttctcctagcagtggcagtttagttgctagatatgcaatggagtccagcaagcaattagcttctggtattattgacatgggatataaaacattttcaaagtaccgccaggaacttctaccagatggttctaactcccctttgtcatcaagcccaggcaggagatctggtaaaattccttccagtgtgcatccactggaagctgacaatgcaggaatggtagtcatcaaggatttcacttccaaagctgtggtctcacagtttagggctcacacaagtcctatatctgctctttgttttgatcctagtggaacacttttggtgacaacctctgttcatggccataacataaatgttttcaggatcatgccaacttgcgttgctaatggcacaggcgcaacgcgctatgattggacagcatctcatgttcatctttataaactgtatcgtggcatgacatcagctgtcatacaagacatctcgtttagtcattttagccaatggatatctattgtttcatctcgtggtacctgccatatttttacattgtccccatttggtggtgatgccagcctgcagccacagaattctcacagtgatgggccccctcttgcgccatgtcagtcaaggccatggtggtcaaagccgtcctttctgatggaccaacagcttcatcaagttccctcaactgtgacaaattcggtagtcagtaggataaagaataacaattctggttggctaaatactgtcagcaatgtggctgcttctgcaagtggaaaactatctgtaccatctggcgctgtaactgctgtttttcataattccatctaccagggttctttgccagttccatctaaggctaatgctttagaacatctactggtgtattcgccatctggtcatgttattcaacatgaacttttaccttcttcaggttctgagtcctctggtagcagcccaagagttggttcaggtcataactcgcaactccaagatgatgagatgcatgttactgctgaaccaattcaatggtgggatgtgtgccgtaggacaaactggcccgaaagagatgaaaacattgcaaacattgtactgtataaccaaagaagcagtatgatggctatggatgtttctgactgtgaagatagcgagcattcggattccactgcatcaaatgatggtatctctgggaaagagattatgagagtccgagaaaggtcaagctggtatctatctaatgcagaagtacagataaactcatggcggattcccatctggcagaaatctaagatttgcttctatgtgatggaccatcctgctgcagagtcggtcgaatcagttagcagtggtggagaaattgagatcgagaagttacctcttcatgaggttgagatcaggagaagggaattgctccctgtattcaagcagttcctatattctgagcgacattctagtgataggaacgttgcaaatggaaggagtaatgcaaatggaggttttcagaatgtcttgtccgtcatcaatgatgtacaatatggctctgtaaaggataatggtgaatatgaaaccaaatcggtggctcctttgtctgggttttacactgatacgagggaaacggttaacacaaatggtctagctacgcaaacattctctggacctggctcagctgttaatcttcagcaagtggggaagcgcaattctattgaatctcctaatgctgcaattttggctggcaaggcagagaatgatagcaatggctatatatccacgccacctgaaacaaatgcatctatcagatccttgagcagctattctctcttggatggatctgttaacggaatgccgtctcctgcaaatagcgcatcatgcaagcctgaaacaaccaataattctgtgctcagcaatgttgcaagcactgacgtaacaaatgggtgtctcaccactgtcgattctggacagcaggaggcgtctgattctcacagctcagtggagtttacccagtatttccaagagggctattgtaaaatatcagaactcgatgactgccgtgagttaactgaagctgttactgatgctgacagcagcagcagccactgcgagagagagaagcctgaggaagatggggataacgatgacttgcttggaggagtttttgccttcagtgaagaaggttgaacttactatagtgccttgagattgagatacaacagaaaaaaagtgctcaaaacatccagtgtgccatagtatgtagacgatggtgaaattctactaggttttcatggaataaagctgtgcggaatcgatcatctgccatggtacatagtacttttcaaggtaaaccttgcacctagttctcaaaatatgaggccaagattcctccaggcaatttactaatctgcggatccacgttgaaacttggaaggagttggtgttgtcgagaagttgctattgcctgccgcaacaccacttccttatagtgttggtttgtacatataccgtgagacccatttgtttcgtgccatacttccgttccggggcatttgggtggttctgaatcctgtaccttggcagccatatttgttgaccgtctctgccagggcctgtgaatgttccatgtttatttgtacatatacattgtgttttgtcggaaaaaaaggaaaaaaaatctagcgacaattgatgtgatataactttataaacattcagtaaagaaaattgcattcacgatgttatgtttaaaaaaaaaaaaaaa

SEQ ID NO: 68262 - DNA, 1714 bp, Zea mays
  Clone ID: MRT4577_162250C.1
actcggctgcaggaattcggttcgaggctcgcccctcgcagagtcgcagtacatagcagccgcccaacctttgccgcgccctgcacaccggagtccaggcggcgcccggcccagccctcatgaatctggccgccttttcctccacccttgccacgctcccctggtatgagatgccatcaataaattcctccgcaactttctcgtcctcactgctccgccgctcgctctgcgcgtcgctccggacgatctcccacatggcctccgccgccgcccccacctccgcgcccgtcgccaccaccgagaacggcgccgcgaaggcgatagagcagcggcccgtgcaggtcgcagagcggctggaaaagttcaagacaacaattttcactcagatgagcatgcttgccatcaagcatggagcaataaaccttggccagggctttccgaattttgatggcccagactttgtgaaagaggccgcaattcaagctatcaatgctgggaagaatcagtacgcaagagggtttggtgtgcctgaactgaactcggctatcgctgaaaggttcctgaaggacagtggattgcaagttgaccctgacaaggaagtcactgttacatctggatgcactgaggcaatagctgcaaccatactaggtctgatcaatcctggcgacgaggtgatactgttcgccccattctacgattcatacgaggctacactgtcgatggccggtgccaacgtgaaggccattaccctccgcgctccagatttcgcggtcccgcttgaggagctggaggctgcagtctccaaggacacgaaagcgataatgataaacacgccgcacaacccaaccgggaaaatgttcaccagggaggagctcgaatccatcgccgccctctgcaaggaaaacgacgttttgctgttctcagatgaggtctatgacaagctggtgtttgaggctgaccacatatccatggcttctatcccgggcatgtacgagaggacggtgaccatgaactctctggggaagacgttctctcttacaggatggaagatcgggtgggcaatcgcgccgccgcacctgacatggggcctcaggcaggcgcactcgttcctgacgttcgccacctgcacaccgatgcaggcggcagcggcagcagctctgagagcaccagatagctactatgaggaactgaagagggactacagtgcaaagaaggctatactgttagaaggactagaagctgcagggtttattgtttacccatcgagtggaacatacttcatcatggtggaccacaccccattcggtttcgacaatgacatagagttctgcgagtacttgattcgtgaagtcggcgtggccgctataccaccgagcgtattttatctcaaccctgaggaggggaagaacctggtgaggtttaccttctgcaaggatgaagatacgctgcgtggcgcggtcgagaggatgaagacgaggctcaggaagaaatgaagggcggggaaaattccatgtggcttggtgattgctgaataatctgctactaggtttcaactgctcccggatgcgtgtactacctttttctagcaatagttatccctgtcagtgacttcatgcctagtgtctttactatttgtctgtgtgtaagcagattgtgatggatcaggatagctgccggtacacttttgtaacctactgagcaatctgtggctgct

SEQ ID NO: 68263 - DNA, 400 bp, Zea mays
  Clone ID: MRT4577_162251C.1
tttgactctaagctcgccggctctcccagggggcaccggacaccgggcgcggtggacaccaccaagccaatacgataccaggtcccatggctcaagaaccgcacgacaaacggcgagagcggggacatagacactaaccccaggccccgtttccccaaccccgtgcgacctaaacaagcccaggtcacctccttgcagtactccttacaccgggcgcaaccgacggcgccggcctgggcgcgcatcaacagggcagccgacaccgacggggcccgacctacctcggagatcgaggagcggctcgccggggtgcccgaggacgcgctcgccaacgccggccaagagtacgtgcaagggaaggcacacacgggggagagcaagggggcgaagagcggaggac

SEQ ID NO: 68264 - DNA, 233 bp, Zea mays
  unsure (1)..(233): unsure at all n locations
  Clone ID: MRT4577_162252C.1
ccaacancagcacagacagcaacacagaagacagggaacccacagaagaagggggaggcccacaagagaagacacggcaagcaaccaagaaaacaaaaaccacgacccccaaagagcaggacaagcacactcccgggaaccaagcaccaacataaggagaacaacccaagcaacaacaggagccaccactgcaacgccaaccccacagaccaacaggacaacaagaccaacca

SEQ ID NO: 68265 - DNA, 118 bp, Zea mays
  Clone ID: MRT4577_162253C.1
tgtggttctcgcagggtcctgcccaagcccagaacctgatatattcactgtgtgaagccaaatcatatattgttgtgaagattggactccggaatggatccaaatttttttgaggaat

SEQ ID NO: 68266 - DNA, 314 bp, Zea mays
  Clone ID: MRT4577_162254C.1
accatacgtcctctacccctcgcctgggttcaaactctccccagcccgggctgcctacgagaggctattcatgaccctcaacgcccgcctttcctcctagctcccacatttattgcagatccaacccattgagcctcaccttaattcacctctccaacatgacagtcaacaccaatatcaaactaccactccgcatggcgcccacttaatcccttccacggaacgccagctaactaccctacccaccttcaccgctcaacttcaacaccgcgcaccaccccatctacgagcccaccacacccatgatgtcctta

SEQ ID NO: 68267 - DNA, 233 bp, Zea mays
  Clone ID: MRT4577_162255C.1
cagcgacgctaaagccctgctatagggcaactgaagttcatttctttgcccgtcgtttcgcaacggacgcgtctggagaaaaccctagtcgatgcccatcttaatcaccttgcggaacagccccctatcgccagcaggcgaaatagcgaataggcccgcacctatagcccttccgacagaagctcagtctgaaggcccaatgggatgccccctgtagggccacatacagcccg

SEQ ID NO: 68268 - DNA, 726 bp, Zea mays
  Clone ID: MRT4577_162256C.1
cattgactacctggagtccccctgggtgctatccttctgcgaaaacctcggccacgcggtgcgggtcgtcgtctagctggatctggcagatcccacaaatagtgcctgagcccaagctgcccacgcgtccgcccacgcgtccgcttcttcctcctcctcctccaagcagcacggagcgattagctgctgctgctgccgctgcagcgggcagagatggcaggagcagaggttgccaacggcgtgcacgacggcgccctggatttggaggaaggcagaggaggcggagtcgatggagcggggtgtgagagctcggagcaggacggagccggtcgccgccccatgttctccgtgccgttcgtgcagaagatcctggcggaggcgttggggacctacttcctgatcttcgccgggtgcgcggcggtggcggtgaacctgcggacgggcggcacggtgacgttcccgggcatctgcgccgtgtggggcctggccgtgatggtgatggtgtactccgtgggccacatctccggcgcgcacctcaacccggccgtctccctcgccttcgccacctgctgccgcttcccctgttgacaggtgccggcgaactcagcggcgcaaaaaacaagggcaacggcggccagcctgacgctgcgcctcctgttcgggagcgcgcgggagcacttcttcggcacggtgcccgccggctcggacgcgcaggcgctcgtcggg

SEQ ID NO: 68269 - DNA, 612 bp, Zea mays
  Clone ID: MRT4577_162257C.1
agctttaagcacatgcaggtagatcctcaaattgatgggtggcgaggtccaatacatcagagagtcagagcggagtggcttcctcatcgtcctcgagcagccccaacctcgtccagcagctggtagagaaatcgtctgatatgttaagatccgtgctgaccccacctaactttctcggccgattacataacttagccccctgataagagggtgcctaatttacgagaagcctggaaacaaatcaaagctgccatggcaattcaatgactgaagtgttgttgatgaggctgttttcagtgcaccgctatccatggccatgctgtggtttcaagaccagagttggcggatagttacgtacacaggcggcaaatgtgtctcttagccgctgtttaagtgcaccgctgtaagtttgggtgtccatgtccatgctgtggtttcaagatcagagtccatggcggatagttatgtacacaagcgacaaacgtggttcttagcttaggttcatgaccagttccacgtagtacatatagcttatatgtatatatacaatctattttttactatgcataaggagttgtttcagcttaaaaaaaaaaaaaaaaatttgcggcc

SEQ ID NO: 68270 - DNA, 356 bp, Zea mays
  Clone ID: MRT4577_162258C.1
ccgacgcgtccgcgtactcgtaccgacgcccttttcaatgtccacgaaatctatactctcgacgtgcttatctcacgacatgtccgatctgttgtaacagatgtcccggcccagccgaactcagcacctgacactgtcttccacgccgatatgacctgctagcgactgccttggagcctaaacgagtggctgtgcaccgcttgcgacccacgtactgcgtatataacgctgatgtactggtatttcaatcgtgcacagaggctccaacttatcctacaactgtcacgtcatctgccaatgtctgactaacgtcaacctgaacatgatctgccttaacggctgattccgccaaagca

SEQ ID NO: 68271 - DNA, 326 bp, Zea mays
  Clone ID: MRT4577_162259C.1
aaaaaaaccccctttttttgggaactgacaaaccccttacaaaaattgcagttttgcaatttatttttttttccctcccaattttttttttttgtacattgccttaacctttccatttttggaggggaagtttaaccccccgtttttcctttttttttttaaagggctgccctttttttggggtaacacaaaaggaacttttaaagcaaaggcttcaggtgagcttttcaaaagaggtccccagggtacccggctgctttttttttttttttataaatccttgccgagaagccaaacattgactgtgaaattcacattggcaacct

SEQ ID NO: 68272 - DNA, 745 bp, Zea mays
  Clone ID: MRT4577_16225C.1
aaaaggaagtccagggttaatgggtcagtagagcgtcacaggaaccgacagcacgcgtcgcaaaatcctgggcgtagagtttttactccagacgccagtaataagccgcaagcaaatctaaaggtaccaaggttggtgacaagcacaagcacaaccaaacttgagagatttccgccgcctcatctggacgcgtcgattggttatagtctagattcatcagtggatggagccacagaagagttcttctcgtcgtcggtcgttgagataaagaaaatgccaagcctcatatttggtcacgtgaaatcttacctgaatagctcaaagaagggcatgcacagcaaggcaaggccaagcctcaacatggcgcctcccaccgttctcattggcgcattccggccttactcctttgggcagccaatggaggtgaagaagaaagaatagagagcaattcagaagcaaaggaagaaatgcagtaggtgcagtcaagtgacaacctaatcatgttaccccccctttttttgcccttcacttttttattatagatgccagatagataatagccggtgaatttcaaccacagttgataggttttaccttgtatagttagagagtactatacattagagttgcgtatactgcatttattctgtataatggatcacagagtttcatctttaacacaaaggaaggtctgagaactccctgacaaaagatagttaggattcctctgcatcagaggaagatc

SEQ ID NO: 68273 - DNA, 394 bp, Zea mays
  Clone ID: MRT4577_162260C.1
accacgcgtccggttctacctgaagtccacagcgtggatgtggtgatccttatgttcctgctggtgctaaactcctccccagtctccagagtaatatgttccagagctatacacactgtcttccttggtctggtgaccgcacccatagattctcttacctcaccatggccaagtcatctggagcagttgtgcatctggggccatgccaccgtggtctggcgctacggacagcctccacgccggccgagcgactcacgctttctccggccgtcttcacgcgagcaccaaagtcttgccatggcctttaactactaccgaagcacttggtgtgggtctgctgcagctaataagaacaatgaagaaattgaagcatgtgctgttttggttgcaacat

SEQ ID NO: 68274 - DNA, 408 bp, Zea mays
  Clone ID: MRT4577_162261C.1
ggccgccccttttttttttttttttttctaggtacacacactagccactcataaggcgtgtccatactatgtataggtacaagactcttttgtagttgctgtaagtactagatacaagtgccgtactgggatatcatgccagccactcacgttattccaagccatgcgctggcctgactatgggcctatggcatctcgagaatgcgggggacattacattacgatctgtgggtaacagtgttcatggcatggggcacgctcacgcatcatcgtcgccttcaacagtgttgacacgctcacactgccgacgccattctctctgtccctccagcggctgggggcgcgccctcgccggtgggctccagctgtcctggccgtttctactcgatcgtgggccaagacggtgct

SEQ ID NO: 68275 - DNA, 1622 bp, Zea mays
  Clone ID: MRT4577_162262C.1
cccacgcggccggagtttcttccctgccttaagttctacctgaagtcctagcgtggatgtggtgatccttatgttcctgctggtgctaaactcctccccagtctccagagtaatatgttccagagctatacacactgtcttccttggtctggtgaccgcacccatagattctcttacctcaccatggccaagtcatctggagcagttgtgcatctgggggccatgccaccgtggtctggcgctacggacagcctccacgccggccgagcgactcacgctttctccggccgtcttcacgcgagcaccaaagtcttggtgagtccctggtgctccctgtgtctcaaatttaaactctactatatggtggccacgagttcgggctcgctagcctaaggctgtctccaatagtggagtctcaaacaggagacccatacgccgtatgcgtcttaatgggtctgctgaaatggggaaccaaattgttggttctccaacagaccatctaaaatgggcctccatcaaccgttttagcaagaaaaggcgggaagcaatcatcccaatcttcagttcccgcttcttgctgcccagaaccaagacctcccgcttcctgttgcccacgtcgccggtcagcctgctcggccactcgtccagcagagctggaaggcatcttcattttctcccattcgcttcaaggcaagtttcattttcttctctccctgacaggaatcctattccttttttcgtttttacagtccgtaggtaaatattgcccccaagctgcttcttttcttcgtttttacaccatggtgaaactatttctatttactaccaatttgagttcgattcttggtgtgaatctgctgcaactattgcctgattgaccaaactactcaaattaatctgattttttcatgcagccatggcctttaactactaccgaagcacttggtgtgggtctgctgcagctaataagaacaatgaagaaattgaagcatgtgctgttttggttgcaacattgaggaagaagcggcgttggggagggtctgttgttggccataagatgaaaaatcgcgaccgtattggtggcgacattcaactgaataatgactactttattgagaggtcgttgttcaaccctgagcaattccgcagaaggttccgtatgcaacaatcccttttcttggagattgaagataaattggcagctgcaaataagttctttagacaaaaaagaaatgcagctggtgtgttgggattctccagtagacaaaagtgtactgtggctttgcggatgttggcttatggaggtccagcagattttctagatgaaggtctgcgtatgggagaaagcacagtccttcaaactatcaaggagtttgctaaaacagtccttcaaacatttttctgcttagcttgtttcttccctcctctggatggcagtagtgattcctcagacgtcaaatgaaattgggaagacctagctgatgtatccccttcatccatgttgtactgcacacacacaacagcagtagtaatttgtaacatatgcaacatcagggtagcaaggttaatttgctaatattcttccaatcctccctcggaaaaaaaaaaaaaaaaaagcggcc

SEQ ID NO: 68276 - DNA, 375 bp, Zea mays
  Clone ID: MRT4577_162263C.1
cagaagtggcgaagcctgaaagtgagctgtacgatagagggaggggccaaccaaaagcaaagctagcgcctataggtagctggtagcaggagggctccgaccaatatctgctccaggaccttgttcttgttccctctcgctcatcactggatgggccgttgtggtggctgcctggctgtggctggtgcgagaaaaaaagtatccagtatcaggcgcaagttgcgattatcgggagttctttgaggagtcacaaagaaagtttggtggtactggtgaggcaaaagcttccttacagggttcgtcaggaacgaggcgtgtcgcaatctgaagcctctcgtctgttccgtgtagctgccccactacgattcggtcatg

SEQ ID NO: 68277 - DNA, 268 bp, Zea mays
  Clone ID: MRT4577_162264C.1
aagatgtagccacctgatggcataggctgacagtgaaaatattgaactattgtataatctggaccagctcatagtacgtataatgccaccagagacttgagtggcgattgaccattttgagggtgccattcttagaagccacgaaattggaacttaaaatctatcttgaggataacatgtcatctactttgccatataggtatagtaaccttaagagcattatagtgatgacattggcgggtggggtgcatttgaaaactgaatgaca

SEQ ID NO: 68278 - DNA, 723 bp, Zea mays
  Clone ID: MRT4577_162265C.1
ctcttccgcacgaatcactgctctcctctaggtaacaccgacagcaccaccgaaattttccgctgcttgttggagattactgctgcttcacgtcggatttccctgccaggttcgatgcgttgctgctgcgggagcagcggctgagcttggggcttgctagggtttgctccgactcgatcttcagcgggggtcgggggagcacttcgtctgcttgggcagctggagcaataagggtcacccggatgaccggggcagacctggcaccagtaatggagttgaaggctgtggcaaatggaggaacacccactgaagttgttgcttctgataagaaggataataccaagatggaagaggctggcgagagcaaggatgttgcagtagcgaataccaatgctgaccaacagaataaagcctcagaaaacggcgctaagggctcatctgatgatgatgccaagatggaggaggctgaagatgcaaaggaagatgatgtgggtgctgtgaagcaggcaggtacagaggatgtcaaatcaggtgacagtgcggatgccgaggaaggtaatggcgccaatgcagcagaacatgaggattccaaaacggctgctattgaggatgtagttgcaaaggaagatgacaacaccaagtcagcagaacacaaggactccaaaatggttattgtagaggatgcagatgcaaaggaagatgacaaagccgccaaggcagcag

SEQ ID NO: 68279 - DNA, 300 bp, Zea mays
  Clone ID: MRT4577_162266C.1
atgggcgcgcgagaggtgggcatcacgagaggacatgtgtgggagtatggcctcatccctatagacacacacccttccacgcttaatagtagtagggactaccagtttcactcgaacaacaaccctaatacacagattttcatgaagactgaaatattagtgtccaacacgcatctaccaccgtccatccgaacctggggcgggaataacaacttcaacacgcgcacgaccttcctccaagaaccgtcgtccatccgaacctggggagaagattggaggtatcaggcatcaaatgactaa

SEQ ID NO: 68280 - DNA, 6058 bp, Zea mays
  Clone ID: MRT4577_162267C.1
atgcacggaggaggaaggcgctggagcctggtgggaggtagtggagcgatagtaggcgtggagcgtctgcatgtggtgcaccagtgttgtgttgaatggtcaatagcagcatcagaggaagtggattcaatccacttcagcttctatagtgatgatgaaattaagaggatcagcattaaaaagatcaccaagtcggagcgccttgatgccaaaaaccttcctgtgccaggtggattactggaccctgcaatgggacctatcaatgatattgatatctgcaagagttgtggtcagcattctgttcgttgccctggtcacttcggtcatattgagttggcaaaaccattgttcaatcctttgctgtttatgagtctgaaaaaccttctccatgtcacgtgtttccattgtcacaagttccgcctgaacaaggaacaggttgacagatatgtgaatgaacttgaacttttagtaaagggtgatattgtctgtgctaaaaatttggaagactcagtagaagaagcatatctttccaaggaagatgaaaacatgaacaagaccacttcaggtgataactcatcttctgtgaaagacaagaaaacctggacatctatccaattgaaagaggttttgtctattttttccaagataatgaaaaagagacagaagaagtgtgcaaaatgtgacatgaagagcccaacaatctcaagtcctatatttggttggctggtcaaggacacaaaggcttctgctgtaagaacaaatgcaattgctgattttaaactcaagggagatggtgatattcacaactcaggggaaacaggggtttctggtcttgaggaagagtcatcttcacctggaatggtgtctaaagactcaatcaatgaagttagaggtctttctgatgatacaattaaagaattggtagcatcatcaggaaaaaaacatctattgcctacagaggttgaatctattctcaaggacttgtggaaaaatgaagctaggttctgcatgttactttgtgatttccagaagaatatgtcaagtgaaccagaaaagagaaggggctatgaaatgttcttcttgagtagtctccttgtggcaccaaatagattccgcccatcaactagctctagtcttggaattatggaacatcctcaaagtgttctgctaagtaaagtgcaagaatccaatcttgcgctacaacataacaatgcatcttctaaccatatggatgttcttcaaagatggatggatctacaacggagtgtaaatgtgctatatgatagtagcaaaggccttgcaagaagcgagaagaatgctcatggtatacgccagctattggaaaagaaagaaggaattcttcgacaaaagatgatggggaagagggttaattatgcatgccgatctgttatatctccagatccgtacttggctgttaatgaaattggcattcctcctgtttttgcgacacgattgacatatcctgaggtagtgctttatgcattgttcaacatcctgtatgattcaatttggcacaactttgtttacgtttgtgttctgacttgctttgccctctgcgatagggatgacaatgggatgggtaaggcgggggggtggggtagtaaaaatctgccctacacccaccctcaatgtgactcgcgggcaacgactgctatgcaagcagtccttctgtgcaagcgtgcaagcaaaccatctgatccatcagattacgatccaaccacagatacaaccatgaaagtaacaccctggaataccaaaaggggccgcgtgggcggacgcgtgggtgccgatatacatccaggtgcaacacattacagggacaacaatagcatgtataagttacaggcagtccctgccaaacgccgttccattgctaagatgctacctgcatctagaggatcaatttgtcagccagggagagatcctaattgtgagtttgaaagcaaggttgtatatcggcatcttcaagatggtgacattgtacttgtcaataggcagcctactcttcacaagcccagcatgatggctcattttgttcgggtgttacctggagaaaagacgttacgaatgcactacgccaattgcagcacctacaatgctgattttgacggagatgagatgaatgttcatgttccgcaagatgaaatatctcgtgctgaggccatgaatattgttgacgcaaacaagcaatacattggtcctaggagtggggatgctgtcagaggtctcatacaggaccacattgttggtgctgtactattgacaaaaccagacacattgctaagccgtgaagaatatagtcagcttgtctttgggtcttgtgtgccgtcctcaaattgtggctctcatcaccctgctaaggtgtctgctattgaggattacgatacacttgaacttgtccatcctgctatttggaagccaaggcccttatggacaggaaaacaggttataacaaccatcttgaatcatttaacaaaaggttgtcctccatttactgtggagcagaagggaaaaataccaaaagaatatctgaaagaagatccttccgctcaaaaggaaaaagaagatccttccgctcgaaaagaagctcattctgctaaaaaaggaaaacgagaagatccttccgctcaaaaagaaaaagattcttcagttaataaagaaaaacaagagaagatacaaaaacaaaaacaaaaagatcgttctgaactggtcttatatattcacaataatgagctcataaagggcataatagacaaggcccagtttgggaagtatgggatagttcatacagttcatgaactctatggtgcatatacagctgggatactgctctcgacattcagccgcttatttacactgttcttgcagttgcatgggtttacttgtggggtagatgacctgctactattgccagagaaggataaactgagaagtaaaattcttagtggaagcgaagtgcgtagtaatgaagtccactggaaatttactggagctgacgaagatcataaaggtgatctggtaaaattgcatatggaggttgagaaggctgtaagaagtaacggtgaatcggacacggctaccttggacaatgatatgaaaaatgctctaaatgggataacaaccgacgtcaataaaatattatttcctgatggtctacaaaagccctttcctggaaattgtctctctcttatgactacaactggagctaaaggtggtccggttaacatgaatcaaatatcatcattactaggccagcaagagctagaaggaaagcgtgttccacggatggtttctgggaagactttaccgtgctttccgccatgggatatttcttcaagagctggtggctttatcagtgatcgatttttaactggtctgcgccctcaagagtattactttcactgtatggcaggcagagaggggttggttgacacagcagtcaaaacatcccgtagtggataccttcagcgttgtcttatcaaatgtctggaatcgttgaaagtctcctatgatcacacggttcgggatgctgatggatcaattgtacagttctgctatggagaagatggagttgatgtgctgaaaactagctttctgaacgagttcaaagaacttgctgataacagaaaagctgtccttgccaagctcggtggctgcagtaaggatcccacattatcaaaatgtaatggatacattactgaactgcctcctaaattgattgataaagcggaagagtttcttaagcattcaaaggaatgctgtcgttacaacattgaggcaaaggaattaaaggagttacttaaagtcaagttcctatccagtcttgtagatcctggtgaggctgttggtgtggttgctgctcagtcaataggagaaccttctacgcagatgacgctcaacacttttcatcttgctggaaggggtgacatgaatgtaactcttggtataccccggctgaaagaaatactgatgactgcatcagataatattaggacgcctgttatgaagtgtcctttgctcgaacatatttctgaggatgatgctaaaatggtggttgcaaagcttaggagggttcgtgtggctgatgtagtggagaaaattgaagtctgcacagttcctttttacaactctaatgggcgtgtttcaaccctgtacaagttacagatgaaactctatccacaagaccagcttgagtcaggtcttactatagatgagtgtcaggcaaccttgagaacagtttttgttgaggcaatggaacatgcaattgaaaagcatctagatctgctatacaaaataaatgaaatccgtgctgttaagatagaagatacagagggctcattattaaatggtgatgaagaatctcaaagtagacatgctgatggaggagacactggtactagtgatgatgacgatcaaaatgataatgatgttgacttgggaactgatgcagaaaagatgaaacggcaagagaaagatgagatggagtatgatgatgatactgaaaccgaggagggaatgggtagcgaatctgaggagagcgatgaggatccagctgagtcaggtgatgattcacaagaggctgacaaagaacacacgatctcgaagtctgagacgacttcagtggatgacctgccatattctgtaaaaaaggggaaaaaatcaaaagatgatcgtggaacagctaaactagaagagaaaaatcaaaatgagggaagattagatgaccagaaacagggtcaaataaagaagcgcaggaaaaagttaaaacatactatccatgttgaatccagtgatttggattttgagattcactatgcctttcatgatgaacctcatattttactagctcagattgccaaaaagatagctaggactattcttgtgaaggcctgcaataacattgatcattgtaagatcgtcaagccaatgcacaaccatacgcgtctagagaccgccggagtgaactttgaagtggtatggaatctcagtgaatacatcagcgtcaatgacatcacatcaaatgatatccatgccatgctgaagacatacggggtggaggccgcacggggcaccatcatcaaggaagtgagcggcgtgtttgaaccctatggcatcaatgttgacatgaggcacctgagcctgatcgcagactttatgaccttggatggcggataccggcctatgaacaggctggggattggccagttcagcacctcgccatttggcaagatgacgttcgagacagcaacaaagttcattgtggatgcagccacacatggggaggcagattttctggagtgcccctcagcgagtgtctgccttgggaagcccccgaaggttgggactgggatctttgggctactgcagaatcttgaattggagcagcccaagaatatctaaaatctgcatttggtgcacgtctggccaagctgccttctgaaggtttacaagttttggtcctgtcagcctttgcacggcagaatgtgctttagtttgttacggtgtggcacgctgcatctgtggtggcttagtggcagcatgccatttcatacgggcatgctgctggaaaaactagcagaacatgtcaaataccagttagtgatctggaattctggattaatttacagcatgatagctagttgtacacatgctttagaatgccgttgttgtccagtgcttgttaagaaagaactgggtcatctttgttgccagggtctcaaaaaacaaccctgcatgacgccaaggacccaggcaccagtgttcgaattatcgacgagcagacatcatatatggatgcgatattctattgacacaatctcaggttgactgctcacctatgtactaaatctgcctaccctgtgatgtggaaattgaaatactagaagcatttgtaggacttttaattagaggactcaacagtcacttatcctagtggcttgggaggtttgaaagcactggaatgcttgcgtgtttgaaagagtcggtctttgtggttctttaaaatattggtaacgaaagcttgatgtgcggctggagc

SEQ ID NO: 68281 - DNA, 330 bp, Zea mays
  unsure (1)..(330): unsure at all n locations
  Clone ID: MRT4577_162268C.1
ctcgagccgccgggagctgttacaccgatcancccagcaangccaccccggccggcgacgacttccccttccacaccctcctcccccgtccctccctccctgtaccctgatcccccggcatccatccatgggcgacgaacagcgcggtgattgtgctcctcctcgtcgctgctgccgtactctcctgcgcgggcggtgcgcgcggcttctacctcccgggggtgacccccggcgggttcctccagaaggacccgatcgccgtgaaggcgaaccagctcagctctatcaagacgcagctgaccgactcctactactccgtccccttctgta

SEQ ID NO: 68282 - DNA, 337 bp, Zea mays
  unsure (1)..(337): unsure at all n locations
  Clone ID: MRT4577_162269C.1
caggaccgggccggaattaatnccttggttgacgagctttctttccgagcggccgccctnaannnaanatgtntgtttttttttaattttcgttcagttcattcccagaagacgttttttttggcgagaaagaccaaaagaacaggggcaaagataattcatagatactgctcggacccaacagggggggacgggggtcaataccaacgttttgaaccttatataataaactgtacagttaagggacggctgtaacaaagcaaaggcaatggtaacaccggggtgccgaggccaaaccatacacctgattgggttcgagctttaagggaatttcgag

SEQ ID NO: 68283 - DNA, 577 bp, Zea mays
  Clone ID: MRT4577_16226C.1
gaacgcaaatcctttactgaatgtttataaagttaatttgtcactacattttttttcctttctcccaaaaaaaacagagagtatatgtacaaataaacatggaacattcacaggccctggcagaggcggtcaacaaatacggctgccaaggtacgagatccagaaccacccaaatgtcccggaagtatggcacaaaacaaatgggtcttacagtatatgtacaaaccaacgctaaggaactggtgttacggcaggcaatagcaacttctcgacaacaccaactccttgaaaaatatgtaccagatgatcgattccacacagctttattccatgaaagccatcccctacatactattgcacactgaatgttttgttttgagcacatttttcgttatatctcgatctcaagtaaggcagtatatagtaagttcaaccttcttcgctgaaggcaaaaactcctccgagcaaatcatcgttatccccatcttcctcgggcttctctctctcgcagtggctgctgctgctgtcagcatcagtaacagcttcagttaactcacggcagtcatcgagttctgat

SEQ ID NO: 68284 - DNA, 620 bp, Zea mays
  unsure (1)..(620): unsure at all n locations
  Clone ID: MRT4577_162270C.1
ggtaccctcgtatttggccgagtttgtgtcctcattttgctctgattttattgtatgtttgcaaccaaactaatgctgtgtgtaaatgaactattttccaagttgtgtacgcatgatagtttcaatgctgttcagtcacgagcactaatacctcaacaatcatgctgtatgttgttggttctttgtgatggtgtacttgtttcatgcaatcaatcatgtatgcaattacttgtcatatggaaagtcccattcctagaaaatttaggtttcatgagcagtatatttgttgccatagttatttttgttcgatgaatatgctttaatggtcttaatgatacagcagtaggagttttataaggttctcccctgcagcaatttactttttgcttcatccttatgtacattgtactcctccgttcttttttatttgtcgtgttttagttcaaaaatgaactagctgataacaaatattcgagaacggaggtaatacttctgacatgagaaccttctctttcatttcatctgctctgntgaggttcaaattttaactgttatcgacaagatggccaatagtgtatgtttctcacctggttattttatcgtgaaatgattattattta

SEQ ID NO: 68285 - DNA, 243 bp, Zea mays
  Clone ID: MRT4577_162271C.1
gacgacttgtttcattgattcttcaagcgatcgacttccctctcccccacacggtcgcggatgtcttgcagctgcggatcaagctgcggctgcggctcaagctgcaagtgcgacccgtgcaactgctgattacatcaatcgacgaccatggctatgattattgatctactagcttgtggtggtggctgaacaataatacccgatgccgcgctggctgccatccataggtcattgtgtggtgtg

SEQ ID NO: 68286 - DNA, 451 bp, Zea mays
  Clone ID: MRT4577_162272C.1
gcgcctgctgcggcggtgacacgagggaggcggacggaaccttacgatggtgcggcgacctgcaggatgaaccggcggctaccgggcgttgagtcttccataaaccttgatatatgactgggcgacgacgcctaaggtcctatgcgaggagttctaattgacacagatgtacttgtgggggtggggggggggaatgactcacataggcctcctggctgatacacatggcacaagatgaataacatctgcctgacattacttaagctaaataatgagaggaaggggtcgctgggggatcttgtatatgggatgcctgggaaccgcgacatacaacatgtctaatgttaaggatggtgaaataatagggattgttgataatcagttaatattatgaggatgagaatgagaagactgccacagatctgataccttatgattcattctatctgaa

SEQ ID NO: 68287 - DNA, 498 bp, Zea mays
  Clone ID: MRT4577_162273C.1
gccggcccaacgccgttccggtttccgcttcctgttcgtcgcccatcctccgcatcatcgccagcggcgagcgggcaagtcaatgtggattcagactccatatttcaggccctatggataagcaggagccagtagccaatgttgaacaaaagataggtctctctaggaagccaaaggagctggtcattactcattaccgaattattgttttttgtccttttttaccttgtttactctgtttgtctattttatcaaccatctaccttagcctattgccaataaggatgagaatgcaactgtgcccttgatttcagttggttcaaatgctatcgatctaccaagtgaaggccaaatccaagttggcacactcaacatggatgggggccataatagtgcacacaacttgtattcttcttaggcacaaccattctgattccataataagcttacaagcctgattatctttacacactttgcattccttctttcgattttatt

SEQ ID NO: 68288 - DNA, 393 bp, Zea mays
  Clone ID: MRT4577_162274C.1
gtgtctctttttttttttttttttttttatctaaacctcacgtcgttcgttgttacctttttttgttggtttgatcacagccaaggggaccccagaagaggggcgtgccaaaaggagtttatgcgctcgggatagtggagctgataaataagagcggggctctcaattgtgcaaaaaaactctacagcgacgaggggggcctttgtgtcattccctccaaccgccttttggggaacaaagacaacgtgtaccgaaaatgatcttatctgaagaggccggggaacaacaggttattttttttgatgtgcgccccccacccaacctggaaaaaagcacctaagggggccgggacctaaagacccccttatttgggggggccgcccttgggggaaa

SEQ ID NO: 68289 - DNA, 360 bp, Zea mays
  Clone ID: MRT4577_162275C.1
acggcctcgctttttttttttatatcaaaatcgaaatggtttgagttagcgaatctgagatgaagaagacttatttggtgtgggaaagagaagagtacatgcatatcccttccctatacttagatgcgttggggagtccatctgatgagagagctcgagccattcaatccaggaatttctccactttgcccacttccttcactctaccaatgtacagaggcactcttcggtggatctgtgctattgtgatgtcatgaattctttgttgggcggacagcccttgccacgggcctgcttgctgatgaaggtaattggtgcgcgctcattgagaaaccggcccttgcctgtcttgcttgtttt

SEQ ID NO: 68290 - DNA, 2600 bp, Zea mays
  Clone ID: MRT4577_162276C.1
cccgggtcgaacccaggccgtccgggcgccagacagatactcaaccctcgccgacgtttcctcctcctgcttcattcactcgtcttccagttcctcgccgcttcagggggcagacgcataatttgattgagctagcgagcgagagagccgatggcgctggacacaggaacggtggcggcgggggcgatcgacgaggcgtacgagttctctgcgcccaggttcttcgatttcatcaccgaggaaacggaggaggccgtacgcgccgccgagagctggttcgaggccgcccgcagccacgccccgtcgccgttcaaccccaggataaaggaatcgagggcggaagccaaggtcgctgtcctctgcgatttcgcggaagccgaggagccggctccagaggcggtacccgtggaggtggcagcaggaagcgtctcggtacacggagcagatgctattgatggtgctccatgtcctgaggcaatatcggaatcgccgccggcttcacatccggctcaagaagagaaggataaatcgccccaatcgttcgagttcctctcggcgacagacctatccgtaaaatcagacggtggtgctgccagcacgcctaagatgcagacgcgtcctccttctccttctaccaaaattgcccctccaatttcgacatgtgacagctcttcagtgaatactggtgcgcgcacgccaaagacgcaggcgaacatgtgcagagcaggtactatggctgcttcgacgaatgccaaggggagcgtgatcaagggtggttgtgatttggttgggactggaaaggcagccactgctggcgctgaaattgcacaagcgaaccaagcggtgaagaggcagaagcttgatgatggaagagccagacagatactcaatgttaagactaaggtcctgcctcataaacggagaactgatttagatgtaagcaatgaagtgaggaggtcccgtgaggatatgtgttctctgaaggaagcaacaacatatgtatcaactgcagaattggttaagaagtttgaatcagggaccagaaagctgagcatcactcacagcagatctcgttctcgtgacgatgctgcattacagggaaggcctaagcttgtgttaactagacctaaggaacctgagttccagacttcccaaagaatccgagcagtaaaagtaaagagctctgcagagatagaggaggaaatgttggcaaagatacccaagttcagggcacggccattcaacaaaaaaattgctgaagccccttcgttccctccacttccaaggaaacccccacagatttctgaattcagtgaattccatcttaaaacaatggagagagcaagtcgatatgcggacacctgttcggaagtatcttgtgcagatactatccggagtcgaataagccactgaaatcgacacaacgaaagccaccgcaacttcatacagcaaccgctcccgaagtttgacaggccattccgaccacagaaatcgacgaagcaggtgacaaggccgaaatcgccagggctacacgtgcatccgaaaagattcttgagagtaagggagacattggagtgtttgtccatcctaagtctcaggtcacagctcccaaagaattccgtttttgtaccgatgttcgcttgggtcctccatcagttgctgacttatttgacaagctctctcttcactctgaatgttcttcaaacagtaacaggcaaggtgtgcctagatgcaccataccaaaccctttcagtctacaaacagaggaaagaggtcaattaaaagagaggcagctagaagcacaactcttacaaaagaaggtggaggaggaaaaggccagggttcacaaagctaacccttacccatacaccacagactatccgatggtgccgccgaagcctgaacctaagccctgtacgagaccagaaggctttcaactagagagtttggtgagacacgaattagagcagcaaaggctgatggaagaaaggcagagaatggagagagaagaagctcagaggagaatcgtcaaagctcaacctgtactgaaagaggaccctatcccacttccggagaaagagcggaaacctctcactgaagttcaacaatttgtgttgcatgttgatgagagggctgtgcatagatcagaatttgatagcatgataaaagagaaagaaaagacttacaaaaggttgagagaggagaacgaattcgcgcaaaagattgaggaggagaaggcgctgaagcagctgaggagaaccatggtgccacatgcccggcaggtccccaagtttgacaaaccattccgaccacagaaatcgacgaagcaggtgacaagaccgaagtcgccacagcttcaggtggatgagcgaggggcgaggaggcatgctttaatcagatgaccaccatcctcgcctcaagatctctgcgacgttgtttatgtatctgttcgtcgggctactaagattcttttttcgctgaccaatttgtagagcaggccagcaacccattgccgctgctgtgtgtgtaggttggtgatgttttatgattatctcaatgatgacactttttaatcggaaaaaaaaaaaaaaaaaaaaaaa

SEQ ID NO: 68291 - DNA, 698 bp, Zea mays
  Clone ID: MRT4577_162277C.1
cccacgcgtccggcgaaggcctaagcttatgttaactagacctaaggaacctgacttccagacttcccagagagttcgaacagtaaaagtgaagagctctgcagagatagaggaggaaatgttggcaaagatacccaagttcagggcacggccattcaacaaaacgattgctgaagccccttcgttccctccacttacaaggagaaccccacagatacctgaattcaatgaattccatcttaaaacaatggagagagcaagtcgatatgcggacacctgttcagaagtttcttgtgcagatactatccagagtcaaaataagacactgaaatcgagacaagcaaagccaccacaacttcatacagcaatgagagctcggccaccaagtgtgaaaagttttcaggaacttgaactggaggagctggacaaggcccccaagttcaaggccaagccattaaacaaaaggattcttgagagcaagggagacattggtgtatttttccatccaaagtctcaggtcacatctcccaaaaaattccatttttctaccgatgttcgcttgggccctccatcagttgctgacttatttgacaagctctctcttcactctgaatgttcttcaaacagcaactgacaagatgtgcccagacgcaccataccaaaccctttcaatctacaaacagaggaaagaggtcatt

SEQ ID NO: 68292 - DNA, 386 bp, Zea mays
  unsure (1)..(386): unsure at all n locations
  Clone ID: MRT4577_162278C.1
cggtcaactccccaaaatccaagcgcgncgttgtttgcattttttcgccattgcctccaaatccgtgtgcgactcgcgtgatcccagatcccgctcgccgtattccccgcagtgacctctgaccagagcgcgtcacagctagtggaggagaggtcagccggcttaatctctgtggtggacaggaggtgggtcctctccgatgctggccaggcggattgtgcctttcaaggtcaattggggatactgatgtcggcgagttcatcgtaccgattccacatgtcaagcaagtgaagctcccaaatactggtggaagactaataattgcatcagacggaatatgggacgctctggcctcagagagtgctgctcaagcgtgccggggatta

SEQ ID NO: 68293 - DNA, 269 bp, Zea mays
  Clone ID: MRT4577_162279C.1
tcgtggtgtgttcttgactccgctgctcgccatgtcttcgcacaagactttcaggattaagcgattcctggccaagaaacaaaagcacaatcgtcccattccccagtggattcggatgaaaactggaaataaaatcaggtacaactccaaaaggagacattggagaagaaccaagctgggtctataaggaattgcacatgagatggcacacatatttatgcggtctgaaggtcacgatcatgttaccatatcaagctgaaaatgtcacc

SEQ ID NO: 68294 - DNA, 1462 bp, Zea mays
  unsure (1)..(1462): unsure at all n locations
  Clone ID: MRT4577_16227C.1
ccggtaccgaccttcccgggctaatgcagnaatacagtataaactcgtggcggattcccatcctggcagnaaatctaagatttgcttctatgtgatgggctatcctgctgcagagttggtcgaatcagttagcagtggtggtggagaaattgagattgagaagttacctcttcacgaggttgagatcaggagaagggaattgctccctgtattcaagcagttccaatattctgatcgacattccagtgataggaatattgcaaatggaggctttcagaatgccttgtcccacatcagtaatgcacagaatagctctgtaaaggataatggtgaatatgaaaccaaaccggtggctttgtctgggttttacgcagacacgaggaaaacagctaacacaaatggtctagctaggcaaacattctcagctgttaatcttcagcaagtggggaagtgcaattctattgaatctcttaacactgcaattgtgtctggcaaggcagagaatgggaacaatggctatatatccacgccacctgaaacaaaagcgtctatcagatcattgagcagctattctctcttggatggacatgtggacggaatgctgtctccaaatagcgcatcacacaagccagaaacaacaaataattctgtgctcagcaatgctgcaagcactgatgtacaaaatgggtgtctcaccactgtcgattctggacagcaggaggcgtctcattctcacagctcagtggagtttacccagtatttccaagagggctattgtaaaatatcagaactcgatgactgccgtgagttaactgaagctgttactgatgctgacagcagcagcagccactgcgagagagagaagcctgaggaagatggggataacgatgatttgctcggaggagtttttgccctcagcgaagaaggttgaacttactatatactgccttacttgagatcgagatataacgaaaaatgtgctcaaaacaaaacattcagtgtgcaatagtatgtaggggatggctttcatggaataaagctgtgtggaatcgatcatctggtacatatttttcaaggtaaaccttgcgcctagttctcaaaatgtgaggccaagattcctccaggcaatttactaatctgtggatccacgttgaaactttggaaggagttggtgttgtcgagaagttgctattgcctgccgtaacaccagttccttagcgttggtttgtacatatactgtaagacccatttgttttgtgccatacttccgggacatttgggtggttctggatctcgtaccttggcagccctatttgttgaccgcctctgccagggcctgtgaatgttccatgtttatttgtacatatactctctgttttttttgggagaaaggaaaaaaaatgtagtgacaaatgtcataactttataaacattcagtaaaggatttgcgttcatgatgaaa

SEQ ID NO: 68295 - DNA, 909 bp, Zea mays
  unsure (1)..(909): unsure at all n locations
  Clone ID: MRT4577_162280C.1
gaaatctcgatacgatcctgcaccttctcactctctgatcagctgattaaaatcctcgtccccttttgccgtccctctgttcacggccctcgccaaatccccaaaatccaagcgcgtcgccgacggcattgcgtcgccattgcctccaaatccgtaaaatgccgccgtttcggccggctcttggaagggcgcttcttctgtaggaccgcggcgcgaggctgcgatggcgttcgccgccagcgagggaaatctttccccggcgctgcccctggccactctgatcggccgcgagctccgcggcgacggtagcgagcgcccgcacgtgcgctacggccactctggcttcgccaagcgcggcgaggactacttcctcgtcaagcccgactgcctccgcgtccccggagacccttcttcctctttctccgtcttcgctgtattcgacggccacaatggcgtgtcggcggcggtgttcagcaaggagaaattgctggagcacgtgatgagcgcggtgcccgagggcatcagccgcgaggactggctacaggcgctgccgcgcgcgctcgtcgcaggattcgtcaagacagacattgacttccagcgcaagggtgagacgtcaggaacgacggcgacacttgttgtggttgatgggttcacggtcactgtcgcgtcggtgggagattctaggtgcattctggatacacagggaggcgaggtctcattgctgactgtggatcaccggctagaggagaatgcagaggagcgtgagcgcgtcacagctagtggaggagaggtcagccggcttaatctctgtggtggacaggaggtgggtcctctcgatgctnggccagtggattgtgcctttcaaggtcattggggatactgatggcggcgagttcatcgtaccgattc

SEQ ID NO: 68296 - DNA, 332 bp, Zea mays
  Clone ID: MRT4577_162281C.1
gtggaactggcacgtgatcgccatgctgataatggtgggcctgtagaacacggacctgtttaacatatggtacaaagacgaatgcgtcatattcatggccttgtacgtgaaggaccgaactcggtactactagttaatgatctcggacatgctactcactgcttagctggatcgagccgacatacaccatgctctcagacgcgcactacgttactggcgctccgtgttgttatgcgctaggagttcacgcgagctctcaccttgcgcgtggttatgcacattattaaggagatgtaccagatctacgcgcttatgtgcagtctctcttgctg

SEQ ID NO: 68297 - DNA, 2038 bp, Zea mays
  Clone ID: MRT4577_162282C.1
ctcgagccgcttcgaccaggggagggcctgtttgctttattaaaatcctcgtccccttttgccgccgctctgttcacggccctcgccaaatccccaaaatccaagcgcgtcgccgacggcattgcgtcgccattgcctccaaatccgtgtgcgactcgcgtgatcccagatcccgctcgccgtattccccgcagtgacctctgaccagagcattttccgcgcggaaaatgccgccgtttcggccggctcttggaagggcgcttcttctgtaggaccgcggcgcgaggctgcgatggcgttcgccgccagcgagggaaatctttccccggcgctgcccctggccactctgatcggccgcgagctccgcggcgacggtaccgagcgcccgcacgtgcgctacggccactctggcttcgccaagcgcggcgaggactacttcctcgtcaagcccgactgcctccgcgtccccggagacccttcctcctctttctccgtcttcgctgtattcgacggccacaatggcgtgtcggcggcggtgttcagcaaggagaaattgctggagcacgtgatgagcgcggtgcccgagggcatcagtcgcgaggactggctacaggcgctgccgcgcgcgctcgtcgcaggattcgtcaagacagacattgacttccagcgcaagggtgagacgtcaggaacgacggcgacacttgttgtggttgatgggttcacggtcactgtcgcgtcggtgggagattctaggtgcattctggatacacagggaggcgaggtctcattgctgactgtggatcaccggctagaggagaatgcagaggagcgtgagcgcgtcacagcgagtggaggagaggtcagccggcttaatctctgtggtggacaggaggtgggtcctctccgatgctggccaggtggattgtgcctttcaaggtcaattggggatactgatgtcggcgagttcattgtaccgattccacatgtcaagcaagtgaagctcccaaatactggtggaagactaataattgcatcagatggaatatgggacgctctgtcctcagagagtgctgctcaggcgtgccggggattacgtgcagaactggctgcaaaacttgttgttaagcaagctctgaagacaagtgggctgaaagatgacaccacatgtgtggttgtcgacatcatcccatctgatcattgttcaacaccaccagcattgtctccaaagaaaaatcagaacaagttgaagcatcttatttttggtaaaaggtctcatagttctgttggaaagctcagcaaatctgcttcattgggttcagtggaagaaatattcgaggagggatctgcaatgttggaagaaaggttgggaagtaattttccaccaaaagcaaatctgcctccatttcgctgtgcaatctgccaagtggaccaagagccattcgaaggtttaatgacggacaatgtaggtggctgctgctcaaccccatcaacaccatggggtggtccttatctttgctcaggctgtaggaaaaagaaggacgcgatggaaggtaaacgatcgaatcgttcaacgacgtgcaggtgaaggttctgataggaatcactgggactgggtcctgtgatcctgtcatgcaagcttgcaaagtagtctccgatttcggttttctgctccttgtaaaaagagaagaataaaccgtctgtcgtttgattgaagtattgttcggtgaaaactaactgcactccagcctgatctgagaaaaaccggggtactaataacaagcctgatttctattgacatcccctatcaaactttcgtttgctctgagaggatagctgacagaactttgaggctgtagttttgtgaacccttagcatgtagagggaaatgagtagcttaacaatgttttatagaacgatggtgtggcttctcattgttgctttagaatgtattttgtgtttgtggagctaaagacccaaatgttttttttaaaaaaaaaaaaaaaaaaaaacaaagaaaaaaaaaaaaaaaaaagcggcc

SEQ ID NO: 68298 - DNA, 227 bp, Zea mays
  unsure (1)..(227): unsure at all n locations
  Clone ID: MRT4577_162283C.1
agatccaggacaagnagggcattccaccggaccatgcagcgcctganctgcgcnggcaancagctggaggatggccgtaccctcgcngactacancanccagaaggagagcacccnccacctggtgcaccgcttgttangnggtaagcaganctttgtgannacctcnannggcannaccataaccctggaggtngagagngccgacaccatcgacaacgggaangt

SEQ ID NO: 68299 - DNA, 151 bp, Zea mays
  Clone ID: MRT4577_162284C.1
aaggatctctagctgccgaggagcaggctaacaaggccaatgccaaggctgttgaacttgagaagcagattgacaagctcaaaaaggatacacagcaaagcctcaaaacctgatcatcagagaaacgaaaaggaagaggtgagcgtgggag

SEQ ID NO: 68300 - DNA, 282 bp, Zea mays
  Clone ID: MRT4577_162285C.1
gccactatatgcttaatccagcgacctttatctcattcagcactaggattctcatatggcgggtcatttataagcgtgccatgtgcccactaaacttgttcatcattttagatcaattctgttcccttttgtccgactatgagcttgcttttgcttatactcacccacacaataatgcttgtctgagaagtggggccttctgtaataagtgattaattttttaaatcctaaccctttaggttttcaaatttatctttcgccttaattcgaaaaaaaaaatat

SEQ ID NO: 68301 - DNA, 352 bp, Zea mays
  Clone ID: MRT4577_162286C.1
acccacgcatccggccgtgaggcctcggtcgaagagtacgggctcacccgttgccgacattcacaccgggggagaggtgatcgaggggcatgggcaccattccggcgacaaccttcgcagtaatcataccggtctgcttccgtaccacgtgtggtacagcagtcgacgacaattgcactaacggagtcttgtagcgccacatgtattgacgacactaggcgcgccggtgttcgtgaataatgtcatgcactagatccatggcgcgaacgtgaaggtggcgtgcaagcatctcatcagcgggactgctcgagcgctccatcgacagggtgatggactggaaccgtacgtacac

SEQ ID NO: 68302 - DNA, 126 bp, Zea mays
  Clone ID: MRT4577_162287C.1
ctttggaggtttaacaactcagggtacgtctgtacataaaggacccgcgtgagcatgacttgcatctgcagcgaaagggaactggcacgtagactgatgaatgggcgggtttaaaaaaataactgg

SEQ ID NO: 68303 - DNA, 513 bp, Zea mays
  unsure (1)..(513): unsure at all n locations
  Clone ID: MRT4577_162289C.1
ccagaaattactgttaacatggtatatcatccaaacagtcgttttacgtgccctttaacgatgtgtaattcactcgtctttacagtgggcgtatttcatttttacatctacgctgattttggcatcaggcttccaccaatcttccatctttgacattgaactgagagaacggcgccatagttactgggtaggaggcgtacatctttggatgcgataaggactccacgagaacatctatatgagaaacagagagcgccaccaagcgtagaatgcgccggcgtcgccgcgtcgtgcctgccgcgctgcccgtgctccnacgcgtcccggggtcgtccatccngcgcggtggaaacagccaggagaatggcccccattgcaccatcgtagggggctctctctccactccctgttcctggtgttgccgttgcttccgcgcgaggtgcggcctggctgctgccgttggacccgctctagtagctggtatcgcagaccggcaggagttgtgcaggcgag

SEQ ID NO: 68304 - DNA, 450 bp, Zea mays
  Clone ID: MRT4577_16228C.1
cagcaatagaatgggtggcggcggctggagcccggcagcgagcggcgggagcagcgtcagcgaggatgactgagacgccgggtagaaagctgtcattgactccatcacgtccgggggattctgctgtttttagtactttggttcatctcaggtcttctatattgtgaggctttgtttattgaattaatctcattggttgctctttttgtcttatactctgtttgttatttctactctttatttttttctgtattaaatctttttatatttttattgagtttttttgttttttttgactttttttgtttctatattttttgtttttatcttttttttgtattgttatttttgtttattattcttttgtttgtaatctatttttttatattatttttccttcttttatatgtttgtggttctttttattttatattctttttcttttttttt

SEQ ID NO: 68305 - DNA, 347 bp, Zea mays
  unsure (1)..(347): unsure at all n locations
  Clone ID: MRT4577_162290C.1
ccccaaactcccaccccgcagcanccgcacgccaccacaccncgncgcgncgcgacggcaccggcgngaaganggacgggccaggccncaacaccgagancggcaagaagaccagggancngcngnacaaggacnaccagacggaccacaagagcacccacacgaccaacaccnccaagggcggggcgggaacggccacaagcacaaagaaagcngaccnganccngggcgaganccaancacagacaaagaacaagaacangaccanagangngaaagcaaacccggaggcaaanaggacgacgacaacgacgggggacgagaaggcaacaccagggccgaagacc

SEQ ID NO: 68306 - DNA, 247 bp, Zea mays
  Clone ID: MRT4577_162291C.1
cccaagccccggttttttttgccactgaaaattacagtttcaaagggacccaatacagaaggtttttgtatttaggaccacacggggaactgtactgaaaacccaattggggtaattattttccggggggggtagaacgaatccctgggggcccgtccaggtcccggaagtggcgaccccaagggcccgggggaaaaaaatctacagggcataccttgggggccaggtcctcggggggttttttaac

SEQ ID NO: 68307 - DNA, 196 bp, Zea mays
  Clone ID: MRT4577_162292C.1
tcgcgtcttcacacgggccacggcgtcgtcttcggcgaaccttcgcgaggccttgggttccctttaccaccggtggcgcgaccccggctacggagcattcttgggtagcgctctggctttccgtgccggcggacgttctgcaggagggggggggcttcggggcatggtgatgagggccgtcggttatcttcctttg

SEQ ID NO: 68308 - DNA, 1062 bp, Zea mays
  Clone ID: MRT4577_162293C.1
caagtgcaaaagattcttcgttcatatccaaaagacagtactagctagctagactggtagttcatacatgcacatcaggaacagcatgtctagctaggtagattcatacaatagccactggactgctggtcattttgaagtggacgacacgtcgtgaacgtagacgatgatcagtggccgaccctgacgtcttggttttcgcctcgcatcagctccggccacacctccatggatatctcgtagagctcctggttgcggtatttgcgaatgcgcctgccgccgctggcagcgaacttggcagcggccttcacgtactttttcttgagcttgtacaccttatcagaaagctcgatggcatccacgccgcggcggacgaggccgccgttggcgcagagcttcttgagaagcacggagacctgggggagcacgcccatgttgtccctgcggagctcggccagggtagcgaggaccttgcgctcgtcgtcgatgccccactttcggtaccgcgccttcctcttgggccggctcgtggcctcgtcatcgccgccgccgctggagggacgggctggggctggggatggggcgacgccgcctggtgcgcggacggacaaaacagagcgcggcgacgagcactgctgccgcgcagccgccgtcggcctccgccggctcgtggcctcggctctgctgccgtcggcgaatgaagcagcggtgacgactgtcgacgaaaggacgggcacgacggatggcgccgtcgagtgtgggcgccggttccgcggcgcgtccctggcctggtcgccgccgccacggctggcgcatgggtctgggaggatggcgacggagcgagaggagaaggtcgccgaggacaggtcgacgagggtgttgctaacaggttgatcggatccagaggaggacacgatgacgagggtgttgctaacgggttgttcggataaagaggaggagatggtgatggcgtcggcggggatggttggtgccatggtggagctggaagatgtcgaccccgtccggcctcgaggtcgccaatggcggagcagaaagaccatc

SEQ ID NO: 68309 - DNA, 315 bp, Zea mays
  Clone ID: MRT4577_162294C.1
cggacgcgtgggctgacgcgtgcgccgacgctttatccgacgcgtgggagatcgcgagcttgggggatacctacaagatgatgcttattaataaatcctatatatatatactatattttataattcctattctctaattattgtataatcttcaataatattgttaatatccaatcacccctcatgattacataagcatttatgattgtataaccaaattatataattttcatatactatgcaattaaaaaatattaataattcattaatttattataaaatatattaattatttattaaaattctatattttta

SEQ ID NO: 68310 - DNA, 287 bp, Zea mays
  Clone ID: MRT4577_162295C.1
ggtggctgaagtcgggggacatggtttctttctccgcttcctaagattcctcttcttccccccaaccccacctacaccttttgcagcgccgcacctgcacggccgctccatgcgccgccgtatctcagtctcaggtcagcatcaccaaccgcagttccacctcccgaccccagccgcaatctaggaggagggccgccgctctcccctcggccgcatcgcatgctaccgcgaccgaccaccagcagcagcagggcaagatgttccagctttcacggcaacggttcttc

SEQ ID NO: 68311 - DNA, 289 bp, Zea mays
  Clone ID: MRT4577_162296C.1
aggacaccaaccaaccactccaactaatttccgttctatgattaaatttggttcaaaacaagtgccaattaaaagttaccgtaatccattgtgtcatttaaacatttataggccgtaatcattttgatgcccatattcaaaattgccacaacttggttgcgcacatttggtggggggtggggtggggattgacattatcttatttgcggttgacttattagctttatttttttgtattaataaatattatttcttattattttggtttcttgggcctttacatattggg

SEQ ID NO: 68312 - DNA, 869 bp, Zea mays
  Clone ID: MRT4577_162297C.1
ggaccctcgaggccggccgggccgggatcccttcgcgcacgcaacgcaaaaacaagcacaaacacgcgcgatccgatctgggccggccaagcagccacccatccatggcgactagggtttggctcaccgccctcctgcttggtttcctcgtcgccgcctcccccttcaccagccgaggtaacagcagcgcgccggtgccccccccccccattctctctctcctccctcgcttcccgccactcagatccgccccgctagtcgtgaattccggcgctagatctgtgcgcgccgcttctccggcgcgcgggaatggagatgatcgggctcggctgggctgcggcggattggggcgtgctcggttgggggtacatcggtggtttcgaaagggtttggaagcgttggtcggatgtgtagaatgggtcctggggagctttggttggcagagttttgggaaatcttatgtgatgcggctcacttaattgcgtatcgcgtgtatctgcatttgcatgttactagctaatcgtctgaggactgggctgttatttgactttccccaagttttatcggttaggtttcatggtctaatctgtaacttttcagtaggtaaaattttgaagcacaacatcattacatcagtgcctttttagtactcccatcccatgcgactccagcaaatggctatgaaagcagaagctgcagtcgccgttcacattaggcaattaacttaagtgagtagcatgtgtttaaaggtttaagtactcatcacgatggactgctttcaccacatgtcttttatcagctaggataagttgtccatctgtgtgctatcattgactttggtttcgcagtattcttatacctgaagctca

SEQ ID NO: 68313 - DNA, 312 bp, Zea mays
  Clone ID: MRT4577_162298C.1
ccatcgccaagcgattctgcaggatttcaataaatataaatgtcgggcaaatcacaggcaaaaaaagaagctgggcgaagccagcaacacccctgcactgcgacgtgcagcagttttgagtgagaatctatgaatggagtgggggtttttttttttattcaaaacattgggggggcaattgctctctggatgtggtagaatttactcggggcatgagtaagcaggcgtcttgaacgattttccattcaccaccactgcatgttactgggaatgaataaatgagtccagagggaacaccgtatgaaccatcag

SEQ ID NO: 68314 - DNA, 687 bp, Zea mays
  Clone ID: MRT4577_162299C.1
gccggccgggtcgcgatgagctccccatgccttgcctgcctgactgacagtgtgaggcacagccacctgcggtagcagtgcgctgtgcctgtgagcagcggcagttcctgagctgcggtggcggtactgcagtgccgcggcccgctctctgcagcaccgccagggttcctgcggctactgaccccctcattatgcttcccggcttcccgcagctcacagagcggtgttcttcctactgtaatctatttattatttggcaaccggagacacagtgaaggtacgtactattgtcgccttactcgccctcgtcccctgctctccaccttcacacatcaggtcgatcgatctctagacagggcatcgacatgcatgtcaaatgtcatgaacgcagtagtacgagcaagcctgcagagtcaactgctctcctgcttcgtcacagccagcctcacagctgcatccaggctccctactgaggatccatccagtctccgggacatcttgcagctggcagggatcgccacgccgttggtgttccagaggaagaaattgcctagagaagatcttgcgccaccccgttcaaccaaaggttaagatatataagactacatgaaagcatatagtacctctgatcaatcagtgaatactcagtcattttctgctgaaaaaaaaaaaaaaaaaaggccccta

SEQ ID NO: 68315 - DNA, 582 bp, Zea mays
  Clone ID: MRT4577_16229C.1
ccccgcgtccgccccgcgtccgccccgcgtccgcgagaaagtcaagctggtatctatctaatgcagaagtacagataaactcatggcggattcccatctggcagaaatctaagatttgcttctatgtgatggaccatcctgctgcagagtcggtcgaatcagttagcagtggtggagaaattgagatcgagaagttacctcttcatgaggttgagatcaggagaagggaattgctccctgtattcaagcagttcctatattctgagcgacattctagtgataggaatattgcaaatggagtttgaatgcactatttttagtagtttagctaataaatcttaggaacgttgcaaatggaaggagtaatgcaaatggaggttttcagaatgtcttgtccgtcatcaatgatgtacaatatggctctgtaaaggataatggtgaatatgaaaccaaatcggtggctcctttgtctgggttttacactgatacgagggaaacggttaacacaaatggtctagctacgcaaacattctctggacctggctcagctgttaatcttcagcaagtggggaagcgcaattc

SEQ ID NO: 68316 - DNA, 267 bp, Zea mays
  Clone ID: MRT4577_1622C.1
acgcaagacccaaaacccacaatctatctttgtgcacagcatggaagaagaaagaacctatggcacagtcgtggtgcggctccctcaagctgctgaatctgcttctccctgcgctcctgctgatacgagaacgatcgcaatgtatagtataacggaccttctatgcttatgggagcgacgacgagtgcctgattccctgcgctctagattcttactttcggtcaaatggtggtaatcgtggcagatgttgacccacatggaacagaa

SEQ ID NO: 68317 - DNA, 1103 bp, Zea mays
  Clone ID: MRT4577_162300C.1
tttttgtttttaacccacttgggaaaaggggatttttttccaagggatttaatttggtaaacccaaggtttttcccatttccacgtttttaaaacccggcccatttattttatttttgtggccccattaaaaaaatttttccttgcaaacaccgggtaataaaatttttttcttttaaacggccccccctttttttttttttttttttttttttttttttttttttttttttttttttttttttttttttttttttttttttttttttttttttttttttttttttttttttttttttttttttttttttttttttttttttttggatctaaatgaaactttaaaagatagttaggcaccaggaaagcaacaaaagtatgctaccactttcatcgtcaagcgattctgcaagatttcaataaatataaatgtcgtgcaaatcacaggcaaaaaaagaagctgggcgaagccagcaacacgcctgcactgcgacgtgcagcagttctgagtgagaatctatgaatggagttggagtttctttttttattcaaaacattggggtggcaattgctctctggatgtggtagaatttactcgaggcatgagtaagcaagcgtcttctcctccgtcagctcttgggcagtggcatccatcttcttccttgagaactcatcaatcgggaggccttgaacgattttccattcaccaccactgcatgttactgggaatgaataaatgagtccagaaggaacaccgtatgaaccatcagagtacacacccatggaaacaaatgtaccctcaggtgttccaagaacccaatcacgaatgtggtcacaagcagagctagcagccgagagagcactggagaactttctcgctttaatgattgcagcaccacgctgttggacagttgtgatgaattcaccattaagccactcgtcatcagagacaagctcacgaacaggcttctccccagtggaagtcttcactgtggcatggttaacatcagggtactgagaggacgagtggttaccccagatgataacggacgcgtgggcggacgcgtgggcggacgcgtgggcggacgctgggcggacgctggg

SEQ ID NO: 68318 - DNA, 775 bp, Zea mays
  Clone ID: MRT4577_162301C.1
cggacgcgtggcgctagcgaaaaagcatccgcccacctcccctcgtctctctcgcgctccgccgccgcgcaaaactgtctggtgatgacgaacgccgccggtacggcccctcacccgactccgccgacgccgctccaacaacaacagcatcagccacccaaggaccagcagcagaaggcgctggccttgaacgcattccgcctgaaggggatcggcgaccgcatcaggttccacctgaagggcgtgagcgtgcccccagtcgccgagttggcccacctcatctacgcgttcgccagagggattgacttcgcggtctcagctggtgatattcctctgacagccggtgacatacccgagattctgagaaaggtatatgagctgaggaaagaaacaattatacaatcttcgcttatgatactagcgatctcttgcaagaatgcttgctccaataaatggtttcaacctgcagattccagagacattcttagaatggtcaatgagctctctggcaacttctgcacgtccacaggccaggcagctagtgacagcactgtgcttgaaattatatcacaaataatgccaaggtattaccctcggttgaagtttgagcgcctaatcacttctattgaagcaaaggttggctatgatatattaatggctgacttctttattgagaggagcctatctcgagatgaaagattagactaattgtcgtacaaaaggaaatttagatgcctcatcatgtgtctcaagtccaccacatgtgagctttttg

SEQ ID NO: 68319 - DNA, 541 bp, Zea mays
  Clone ID: MRT4577_162302C.1
gactcatgtgttaataaattcattgatcattccacttgttttctcaacaatggcaatcgcaaggcacaatgatttttaatgggaatgcaactagccctaactacatttcttccccttcactttgcctcacttctttaatcctttttaattaaggatatatcctaaacagcataaaacaattcaattactcaactgctaagtttacaatgaaaaaaaatgaatacagtgtggacataaactactcaagtcaaaaccttttgttgcctgtatttgaactctatctgtgctgtgatatttccaaacatctgtaccagagagattaccaatcaagccttttaccaccactgatgcacaaggacgccgttctcccgcagcgagctgaaaaggtccaagcactcctcgtaagtgttgtcatacttgggcgaccgctcaccagggcagcacttctgccaccgattgtaatggcactccaggaaaagctcgtcgaccaagcagattgcaccccgtgtcgaactagttctagatcgcgagcggccgctct

SEQ ID NO: 68320 - DNA, 1359 bp, Zea mays
  Clone ID: MRT4577_162303C.1
gcggccggtcgggctctttaccacctggtggtcagtcagtcacccaccccacaccgccgccgggaacttgttcatcgagccgagaggatagatagatagatagatagatagggtaaccgatcgaatccgccaaccaaacaatggcgtccgacggcagtggcgtggtgacggtgtacggcaacaacggcgcggcgctgctggagccgccgaagcagcccaagtcgtcgactttctccgtgaaggtgggcctggcgcagatgctccgcggcggtgtgatcatggacgtggtgaccccggagcaggcccgcctcgccgaggaggccggcgcctgcgccgtgatggcgctggagcgtgtccccgccgacatccgcgcgcagggtggcgtggcgcgcatgtcggacccgggcctgatccgcgacatcaagcgcgccgtgaccatccccgtcatggccaaggcccgcatcgggcacttcgtggaggcgcagatcctggaggccgtgggcgtggactacgtggacgagagcgaggtgctgaccccggccgacgacgcccaccacatcaacaagcacaacttccgcgtgcccttcgtgtgcggctgccgcgacctcggcgaggcgctgcgcagggtccgcgagggcgccgccatgatccgcaccaagggggaggccggcacgggcaacgtcgtggaggcggtgcgccacgtgcgctccgtcgcgggcgccgtccgcgcgctccgcggcatggacgacgacgaggtgttcgcctacgccaagcgcatcgccgcgccctacgacctggtcatgcagaccaagcagctggggcggctccccgtcgtgcagttcgcggcggggggcgtggccacgcccgccgacgccgcgctcatgatgcagctcggctgcgacggcgtcttcgtcggctccggcatcttcaagagcggcgaccccgcgcgccgcgcccgcgccatcgtccaggcggtcacccactacagcgaccccaccatcctcaccgacgtcagcgcggggctcggggaggccatggtcggcatcaacctcaacgacccaaaggtggagcgatacgccgccagatccgagtgaacactcccctttcctactccacttatatttatcagtatcatctccgctccgccggctctgccaacaaatttttttgcactgcatgcagtagcttaagtaataatggaatgagtgaatgaaatggtgagaaacgaagctatggcactatgcagaagctctgtaattttgtgccgttcttataaagtttgcataggctcccctggattatgaatcagtcactcagcctgcttatgacttatgaatcacatgctcttcatctggtcgg

SEQ ID NO: 68321 - DNA, 294 bp, Zea mays
  Clone ID: MRT4577_162304C.1
ggaagccgtacctcataagattgctcttactgctgcctacaccgatgggctatctcagcccatgaaactggtcatataggcctgaccatacatggttcgacaacgtgccggacctggagctaaacatagataatgccgaacactactgcatacgcgtagacggactcagatcactctacgcttggtgcggtacaaagtttactgtcacagcattcgatcacgatgacgacatcatcatgctatctcacgtctacgacagatccatctatacgactctatgacagcttctatagc

SEQ ID NO: 68322 - DNA, 142 bp, Zea mays
  Clone ID: MRT4577_162305C.1
cgcggcgactccgcctgcagcaccgccgacgacaccgcgcaccgcgtcgtggtggtcgctcgtagcagagcgcgtcgcgcggcggcgcccccacgtcttataaacccgcgcgcgcgtgtggagcccccctctctggggcccc

SEQ ID NO: 68323 - DNA, 362 bp, Zea mays
  Clone ID: MRT4577_162306C.1
cggccgtcatacacctcacgctccccctcgcttgcattctgtgaccccaaaagccttctcttgatgtgtttaatggatctggactacatcaactcactcattggtggaggcttctcttttcagaatccaaacgcatcaaaaacctgtatgtgcggcaaatctttcgcgactgcgaaggaattcgaggctgcatcaaacgcttgctacatctagagtagtcaaatattgatagcaaatcgtgatgtaacttgttatatatctttgttctgatcaaatcacgtagcttcaccacttatacttggttcgtttcaaaatagttggctttgtttttattaacatgtttacttttttaatatttttct

SEQ ID NO: 68324 - DNA, 491 bp, Zea mays
  Clone ID: MRT4577_162307C.1
agggggagggatcgataagcttatatgtactttggctatgtgagttaggtgttaagtaacctaattatcttgatatgcatattacaaggtatatatgatttgtgttttggttgcataactatgtttggttaataatatgaatgtaaagagttgtgaattagtatattgtaataaatctgcttaagacagcagctgtaatgtgattttggaaaatcaccataaattgagggaaaggagttagaagctgaataaattatgtaattaaatattaatgagtctagtttctaataaaagaaaccgtgtaagcaaaagagtttccaataatgagatatttgaaatgatgtgggacagggtcaaaatgacttctagatcctctattctgtgtttatagaataattataaattgtacaaaaatgattataagatgaagtttacatgcttagactccgtaatgagtctagtttcaaatgaaataaacgagaacatatttt

SEQ ID NO: 68325 - DNA, 983 bp, Zea mays
  unsure (1)..(983): unsure at all n locations
  Clone ID: MRT4577_162308C.1
acgcgnntccgagcgctgcagngaaagaggcataccaagagtcggccaaacgcctgagagctgaactagacatggcttcggctcttgagaatgtaaacgagctgtatcagcacgaggtaaggcagcgcaaagcgatcgaggaaacgctggcgagacaagcgcaggagatggaggaaatgaagagacagcacggtgtggcatccaaggagctgcacgacgtcaaggagcagagactcgtcctggagcggcaagtaacagagatggcgtctgctgtccaaggctacgaagagaaggtggcagctgctgaaacgctgaacaccgccgagttctcctattctgagctggaacaagcgacccaaggctttgacgaggggctcaagatcggcgagggtggcttcggaagcgtctacagaggcttcctccgcaacacagccgtcgctgtgaagctgctggatccggaaagcatgcaaggcccgtcagagttcaaccaagaggttgctgttctcggtagagtgcggcatccaaacctcgtgacactgataggggcgtgccgggaggcgctcggcctggtgtacgagtacctccccaacgggagcctggaggaccggctggcgtgcaccaacgacacgccgccgctgacatggcaggtgcgcaccaggatcatctgcgagatgtgctcggcgctcatcttcctccactcgaacaggccgcacccggtagtgcacggcgacctcaagccgggcaacatcctgctggacgccaacctggtgagcaaactaggggacttcggcatctgccgcctgctgatgatgagccagtccaccaccactaccaccatgcccgtcgccaccacgaagctgcacaggacgaccaccccgaaggggaccttcgcgtacatggacccggagttcctgtccaccggcgagctcaccccgcggtccgacgtgtactcgctcggcatcatcatcctgcggctgctcacg

SEQ ID NO: 68326 - DNA, 850 bp, Zea mays
  Clone ID: MRT4577_162309C.1
ctttcctctccttctcctcttcgtcctgctcctcgcctccccttccatggccgcccctcttcctcctcctgctagcctccccttccatggccgcctatagcttctcaagctagtctcctcccggcctatctcgccacctcctgctagctacccttctgagcttgcaaactttttgttgcacgcacgccttgagagctgcatgcagctagagatcgatcggagttctatttttgcataggcacgcgaacatatgtagctcttctgctagatctcactgccagtcgtcagctctcagcgaaggttgtctgggctaccttgtcgatcgctagatctgttgttggtcgtgttgttacttggcaggcaaggtatacatctccatataggaaattaggattggcgccgcctgttctttgtccgtgaggcgggagatagatactacgcatgtgccagtgaacaaatggaaagaagctactgaggcggcaggaattagggttccagaggttctgagagggagaaatgatgatcccggcgaggcacatgccgccgatgatcgtccggaacagcgccgcggcttacgggtcctcgtcggcgctttcgctcggccagccgaacctcctgctggacaaccagcagctccagctactgcagcagcaacacctgctggaccagatcccggcgacgacggcggagagcggcgacaacatggggcgcggcggcggcggggtgtccgacccgctgctgggcgacgagttcgagagcaagtccggcagcgaccacgtggacggcgggcgtctccgtggacaagctgcaggaccccaacccaacggcccaacaagaaaaaacgcttacc

SEQ ID NO: 68327 - DNA, 307 bp, Zea mays
  Clone ID: MRT4577_16230C.1
cgctctccgctacacttgctctgccttgaaggcgaagatcatgcttgactgccaccctgaggccacggccgtcccgatcacccctcttgcttacctggtgaccatacataccccgatggaggaggacgagctagctccttctgtgcttggatatggagtctaacggccctacagctgcctatagatggcacatgtgatctggtcctatctaggatagagtcttatactttgggcatggctaaaacggattgtgccgctaaactcttgatatacactaatatgcgtcgatacttgcacatgtacattt

SEQ ID NO: 68328 - DNA, 996 bp, Zea mays
  Clone ID: MRT4577_162310C.1
taccctcgaggccggccgggctgctgccgctgcatcttccactcgcgtcaagaaacgaaacccagctgcaccagcaacttctgccagcagacccaacgaccgaagctttttttttctttcttttcatcgccgccgctcggggttcaaggttcagcgcgtccccgaatgacgggcacgtacgaggcctccgaccgtcctcctcctcccaactccgccggctaccggaccgacaaagtccggcgaaagcggctgacggcgcagaagaggaaagagatcaaggaggcgttcgacctcttcgacatcgacggctccggcaccatcgatgcaagggagctgaacgtcgcgatgagagcccttggattcgagatgacaccggagcaaatcgggcagatgatcgcggaggtggacaaggacggcagcggcaccatcgacttcgacgagttcgtgcacatgatgacggacaagatgggcgagcgggacgcccgggacgagctccacaaggcgttccgcatcatcgaccaggacgccaacggaaagatctcggacatggacatccagcggctggccatcgagaccggcgagcacttcacgctggacgaggtccgggagatgatagaggccgccgacgaggacggcgacggcgagatcgacctggaggagttcatgaagatgatgaagcggacagactttggctctgggttctagtagtcacagacaagccaatcccaacatacattgatacataccatcggtgaaaaatacatatcacctagctactacgctacatatgactggagtattgggatttatttgagaaataatggcgtacacacaccacacatcattgtgcactaactactctagtacgtcctagctacgggttgtgtatttatttacacgtaatgaaacacatactactatttgtactgtcgtttttcagtaaaaaccagtaaaaatcgatatttttattggtggctattttggaatagccagtgg

SEQ ID NO: 68329 - DNA, 1475 bp, Zea mays
  Clone ID: MRT4577_162311C.1
ggtacccctccgcctctcggccggggagagcaaaggatcagatgcccaaaattcccggctcgaagactgcaggcatcggacgcgccccccgccgagaagctactcgaatcccctccaaaattcggaggcgagagccactgatctatcgcaaaacccatcaaattacacaattcaaatcagccaaccccacctacagccaccaattcgtgcgcatcaagtctagccccctaccccttcgcaatcagtgaacccccaatccacacacagcctgcgaatcgctggatcaaaatttggtctcggactctcgatccaccattccccgaggaaggagatctcagtcaaccgaataagtctcgggaagctctgtgttggaaacatggggaaaccgctgatctacgagatactggagaagccggcgagcagcagcgtcatcggcatctgctctctgatctggtggctcatccagaagcggggcatcgggtacgcggacgtcgggctgagctacgaggccgcggtggacggcgggcagtactggcgggtcatcacctccgccttctcgcacgtcagcgtggtccacctggtgttcaacatgagcgcgctgtggagcctcggcgccgtcgagcagctgggccagatcgggctcggcgtccagtactacctgcactacacgctcgtcctcgtcgtgctgtccgggctactggtcctcgggttctaccacgtgatgatccagaggttcaaggtggagtacttcaggagggtcaccgcggtcgggtactcgtgcgtcgtgtttggctggatgacaatcctggccgccaagcaaccgtcgtccaagctgaacatcttcggggttctctcactgcccatcagcttcgcgccgttcgagtcgctgatattcacatccatcatggtgccacaggccagtttcattggccacctgtccgggataattgttgggtactcgattgcctggggtctggtccatgggatgaacaactactgggcagtcaccatgcttggctggactgcacttgtgtttgtcttgagcttgaagcgcacagggtctatggagctgagttttattgagatcgagccagtgacggacccctcgctgccttctgttggtgtggtagccaccagaaatggtagaagtagaactctgcaaatggatgccttgtctggaagaagagttgcagacattgtataacacgcagagaggaaatgtttgaggaatcctgagtttttgttctgaaaactgtatcatgtcgacacaatgatacgtattgggtttggaattctggtgtcgctgatgtctttggtcattgctggtgtaaaggaattcttcgtcttggccttccagatgcatgttcattttgaatagaaatgaattctttgcgctagttgcctagttaccatgtaatgtaaagagattttttttccagtttaactggattccttcagtgctgccctcttcatgc

SEQ ID NO: 68330 - DNA, 1070 bp, Zea mays
  Clone ID: MRT4577_162312C.1
ccctctcgtccgcaacgaccgaagctttttttttctttcttttcatcgccgccgctcggggttcaaggttcagcgcgtccccgaatgacgggcacgtacgaggcctccgaccgtcctcctcctcccaactccgccggctaccggaccgacaaagtccggcgaaagcggctgacggcgcagaagaggaaagagatcaaggaggcgttcgacctcttcgacatcgacggctccggtcggtgacgtgctagtgatgtagcgtttatatatacaaacacatgcgcatgtgttcgcccatggcggccgctgtgactttcacctttcacctgcttgcatcctccaggcaccatcgatgcaagggagctgaacgtcgcgatgagagcccttggattcgagatgacaccggagcaaatcgggcagatgatcgcggaggtggacaaggacggcagcggcaccatcgacttcgacgagttcgtgcacatgatgacggacaagatgggcgagcgggacgcccgggacgagctccacaaggcgttccgcatcatcgaccaggacgccaacggaaagatctcggacatggacatccagcggctggccatcgagaccggcgagcacttcacgctggacgaggtccgggagatgatagaggccgccgacgaggacggcgacggcgagatcgacctggaggagttcatgaagatgatgaagcggacagactttggctctgggttctagtagtcacagacaagccaatcccaacatacattgatacataccatcggtgaaaaatacatatcacctagctactacgctacatatgactggagtattgggatttatttgagaaataatggcgtacacacaccatacatcatagtgtactaactactgtaatatatgtgtagtgctgtccatgtacatcctagctagctacggcttgtgtatttacctacacgtaatgaaacacatattactacaaaaaaaaaaaaaaaaaaaaaaaaaaaaaaaaaaaaaaaaaaaaaaaaaaaaaaaaaaaaaaaaaaaaaagaaaaaaaaaaaaaaaaaaagcggcc

SEQ ID NO: 68331 - DNA, 901 bp, Zea mays
  Clone ID: MRT4577_162313C.1
cattgggtacctcgaggccggccgggcttcctcccgtctacaccgagcgagcttgggccctccccggcctcctccgcctccgcctccgcctccacctccgcctccgcccgccgcgcccgttcccttcccgcgcaccgcgcgtccccgagctatccctggtgctgctggtgctggacgcgcgccagtccgagatcctcggggccctgggaccgaattgctcctcctcttctccgccgcgtcggttgattccagccgcgtctgctgcttggtcgccaccaaaacgtcaggagcacgatgaagcgcaagcacggccgcaagccggcggacaagaaggctgatccgtcggagtccacctcgccggaatccgcgtccagttccagcacggaggcgtcggacagcccgcgaaaccaggctgaggaggataacccgccgctcgtagatgctggggcagcagtgcctgaaccaccgtctcctcctcctgctcaaccttctgagccacctcggaagcccagtgccaccgcgccggctaatcctccagcggacataacgtacagcaggcccaaggtgggggctgtgtacggccgtgtcaaactgaagttcaagtcgtccaagacggtggactcgccgctgcgcccgcagcagcaggattctttggaagctcaagtgctgcctgctgatgctggtgcatcggagagcgctgctgtccctgaagtggtcaaaggagctgatgcggagaaggctacggttgtaatggatgggcagcaagcagaggggcaggggctggagtcgagtgacgcagataaggaaaaaggttttcagggaagtaggaggcatcaagatcaagttggcggggctgccttctgtaaaagcaacactccggatcggaaatccccgatcacag

SEQ ID NO: 68332 - DNA, 117 bp, Zea mays
  Clone ID: MRT4577_162314C.1
tttgtctggtacaacactcgacttcttgtcacaagggatacaaacccattcacggggtcttggatcacttatcacaatgcgatgataatcatagaacaaatcctagattgtagacac

SEQ ID NO: 68333 - DNA, 250 bp, Zea mays
  Clone ID: MRT4577_162315C.1
tcccggctcgagacccacgcgtccgggtttcaaaaggtcctagggagatcagtgcagtgaaggagaaagttcttagcgagaacgaacagttcaaattttctaggggagttctatgtttttggtccatccttattcaactggaagataattttatggtttcctttatacttaatgccttcgttacaaattatttcttagtcaggttggtcctttcttttcagtttctctacaattgacctctccattctct

SEQ ID NO: 68334 - DNA, 209 bp, Zea mays
  Clone ID: MRT4577_162316C.1
cccacgcttacgaaaggcctaaatcgttgagtatgcgaaccgcggggagactgggatgcattctcaactatcgtgactacagaagtgcaacaaggctcgcaatttagtactatactattgtatatatcatcttgtgtcattttcccaaagaatcattgatatacctaatcacaataatatacacttaaattagcatctgcaaccacaac

SEQ ID NO: 68335 - DNA, 192 bp, Zea mays
  Clone ID: MRT4577_162317C.1
ggggactggggcggaagcggaggaagggggccgcttttttggctggttccgggaggcgtttccttacattcggggccaccggggcagcaccttcgtcgtcaacatctccagggaggtcattttcaaacctgaccattacaggattttgcacgatatatcctttcttcatggtctagggatcaaatttgttct

SEQ ID NO: 68336 - DNA, 321 bp, Zea mays
  Clone ID: MRT4577_162318C.1
aacaaacatcaatcaaacaaaaagtagggaacgtccatttatatcgatccatccaccacccatcgttaaaaaaaccgcctgaccccgccccctgcagctcggaaccaacagcacataccattcgggaaaccattgaatccaaccgggcaagaggcccaccccctcccccctactgagggggcccactccaacaaagattctaaagagacttttgcttttgaaaaaaacgaaccccctcccccgctgactaatgacaggcaatattttctaaccaacccgtaccataaattaagctccgttcgagcaagatatagttacctt

SEQ ID NO: 68337 - DNA, 329 bp, Zea mays
  Clone ID: MRT4577_162319C.1
cctttgttttcttttttaacaggtgaaggtactactcataatctgcggagatgcctgtcaccggtttcttaccagcataccctgcagagaggagatctgccagatttccttacacccaaaacatcactaccagctagttgagctgcataagaagaaaaactgctgactgctaggtactgaccgcaccttcaggggtactgaccatgaacccatctcgacagtagttttttcttgagaagcttaataagcactttcggctgtgccctcttcctgcagctgcctcaggagtgccctcagccccaaaacgattaacaggctggtgagagata

SEQ ID NO: 68338 - DNA, 362 bp, Zea mays
  Clone ID: MRT4577_16231C.1
ccccctctcgagtttttttttttttttttttttttttttttttttttttttttttttttttttttttttttttttttttttttttttttttttttttggggcgggggggggggggggccccccgggaacaagaactggggaaaggcccaaaaaccggccgaacctccgtttccttaaattaaagaacaaccattggggaaaaaacttccccatgcgggtgaaggggggggctggaactgccccctcttgccacggggcaattaccgaaaggaacggccggcccgcctgcctattttggcccccacaaacttgggctgtgtgggggggggggacgggggtattcgggccggggggaaaaaggg

SEQ ID NO: 68339 - DNA, 306 bp, Zea mays
  Clone ID: MRT4577_162320C.1
gagctcacatccggcggccgcccttcttttttttttttgggttttttttaatttttttttggtattcttctccttttgggactatttcatccttttcttggaagcaaaaggggccaaaggacgaccccactttatctatatctttcaaaaccctgatttcaggggatgttgggccctgagcatgtaaacccgaaacctatcttaccaccaggaaaggttgaaatcaaaccctctaaacaaaatggaaagaaaacgtttcgtgtcggccgatggacaaaagaggaaccaaaaaattgtcccgatgcc

SEQ ID NO: 68340 - DNA, 371 bp, Zea mays
  Clone ID: MRT4577_162321C.1
gtgcctttccgactgtcggacgggtgcgacttctgttctgctgcctcaagcttgcgctttgataccaaaagcgggtttatcgcaaaacctatgggttggggggcaaggtggagatttacaaaaagagcgccgaaaaagcccgggccacggggttttccaaaaaactctgagcaaatcgggaaacacctgggcacccccatgttacggcgttattcctaaaatccccagcctcgcccacaaaataattgaaagggcgtggggcccccgtacgggaataaaaaccccagcttgggggtgtcaagacaggaatcccttacctccggcccggggaaccggtcccggggggccccgggcccaatttcgcgctttcc

SEQ ID NO: 68341 - DNA, 302 bp, Zea mays
  Clone ID: MRT4577_162322C.1
cccactcgtccgaaaaaaaaaaaaaaagattaaaaaaaaaaaaaaaaaaaaaaaaaaaaagaaaaaataaaaaaaaaaaaaaaaaaaaaaaaaaaaaaaaaaaaaaaaaaaaaaaaaaaaaaaaaaaaaaaaaaaaggacagacctaatctaaaaaaatccaaattttacttcccctttcttgcaaccaattactttttcttttggttcccctaatttaatttaactggcctgtatttaaaaactttttaactggaaaaaccttaactttcccaaactaataaaactttaagcaaatcccct

SEQ ID NO: 68342 - DNA, 956 bp, Zea mays
  Clone ID: MRT4577_162323C.1
gccggcggtaccggtgcccggtcgacctcatccaagttccatttattattttctccgaggaagccctttccccaggcacagatccggctcctcgccgccgccatggccgcccgcctccccctcctggtcctcgccgttgtcgctgcgtccctcctcgctgccgacgcgcggccgtgccacaccttcttcgtcgccttccgcgccgaccccaaccccagcagaggcgacgacgctgtaccccaccacctcggcgccccgcatgtcgctacagtcatcaccgtcttccgtgtccgccgtctcggtccgcacgtcccccacggccaccgtaaccaccaccacctccactccatccccgccaacgtccggatccaccgccccgatctcccgcaccccgccgcggggccccaggagcgcgccagggacatcttcgtggtcgtcatcgggctcctctttggcgtcgcctgcggagcgctcaccgctgcttccgtgtacctcgtctggtccatggtcgccggagctgctgcggtctccgcgtacgacgagctctacgacgacgaggacgaggcgtccgacatcgagagccccaagaaggtcggctacgtcatcatccaggagctcgaggtcgatgaaggcggtaagaactagggccggatttggtggcgctcgtgctcccgggaggtagggcaagttcctgaagtgggttggcctatggccatatgttgagtgaatcgtaatgtctgtatgacaatgtgatgcgcagttgggacttgggagccttaggggtttgccctccatgtgaatatgatcgtgaagcatgcttaagctaccaaatgtgcttgtttctgacgaacctatcaatcaatgttatgcaccactgtgaaactgttcatttgatctgctatctaatgtattatggcctggcttcgagatgaaaaaaaaaaaaaaaaaagcggcca

SEQ ID NO: 68343 - DNA, 571 bp, Zea mays
  Clone ID: MRT4577_162324C.1
aaaggatcagagttttatatatatgcatttcatttctttccatttacacaattcactagtggagcgtgatttagcaacaactgaattgtcaacctaatgtacaattacatggcattcatactaaacaaaaacacgaatggcttccatacccaggtgtagaactatactgagtatacatggtgttatgcagctacttaaagagcatagacatcatgacaacaaaaggaagcctctatagcactaaaagttcacctatacattggggcattcctatatcgtaagcatcaccgatcatcagtatgcagacacacagccgagacccttcccaagacccagctacagcagctcgactgctcgagtcagcatgttgcacttcgtcactatcttgtagcacagcacaagacccttcagacaatgaaacgctcaagctggtatcttgcattctgtctgcaccccaatattgcaactttttaccagctcgtcatgtaaaatcactgccacattttttttcagatgcctgatttcataaccttgcttgggtatcatctctgaaaggaatgtcatcccattc

SEQ ID NO: 68344 - DNA, 296 bp, Zea mays
  Clone ID: MRT4577_162325C.1
agcagtggtaacaacgcagagtactttttttttttttttttttttttttttttgggcaacacacaggtttcagcaacataattgaaggttgacactggctccactacaagtgtactagataataatacagacactgcctctggcgacagtcctacactacatagatcctcctctccgggagctccaacgtatatatataaaggctaaaggcgaagaggtccatactgagggccccgtgtactctgcgttgttaccactgcttaagggcgaatttcaacacactggcggtcggtact

SEQ ID NO: 68345 - DNA, 254 bp, Zea mays
  unsure (1)..(254): unsure at all n locations
  Clone ID: MRT4577_162326C.1
tttcttcttcaaaaatgcagagcaagttaagccccgtgctgagaactggagcaagatggcaagaacattctgggctccatttctcattttcttatcatantnnnccanctctggtgttatgcataggcatataccnatatacaaaacttattcttaattcctacttaataaacttccttttattttcttcaancaactcaaaacccanctttttcaacnatnntnnancaccttctcatttcctnnncacccac

SEQ ID NO: 68346 - DNA, 136 bp, Zea mays
  Clone ID: MRT4577_162327C.1
tcaatgtctgctcaaactgttgatgcacaagttttgcctcatgtagcaactggatttttgggatcgtggcattaaagacaatgctcatattagcaccagaactatctcagcgtacaatctgtgtgttctctcttga

SEQ ID NO: 68347 - DNA, 361 bp, Zea mays
  Clone ID: MRT4577_162328C.1
aaagggtcatggcggcggcggttcgcctcctccctctcctcggtcgcctcctcgtcgtcggcgagatccgccggagcccggactacctccgccgcatcataccccaccttccctcacacccgaaactagccgccgccgtctccagcctctacttcccgctcttcccgtcctccgtcaccttcctccacaacctgctaatccgcgccttcgccgcgttctcttccccgcgccttttcttcgccgtatacttctgcctccaccggtccggccaccttccggaccactttacctttcccccgctagccaagttcgcctccaaattcccattctttccgcgcacgggcgcgcatgtgcacgccca

SEQ ID NO: 68348 - DNA, 490 bp, Zea mays
  Clone ID: MRT4577_162329C.1
cgggtcgacccagcgttctgccagcgcccgccaatcctccggggggggttcgggtaggaccaaacaagtgcgggtggagtgcatcaccgccgccgacgcgcccccatattttcgactacgggaccgccccaggccactaccccttcttctacacctggaacacaactgcctactcctacatgctctcgcggggggggggatacactactcctacctctggccggtgcaccccagcacaagatattactatcggtacaccggcagcccctctggcctatctcttcttccggacgccggcacccaggctgcccttgcggttcgcgtccccgctgacctaggccacaccgggtggtccgagtccacgctcaagcacgtcgacctggccgactacgacgcgctgctgctcccgggcgacctgtcctacgccgtcctggtgcacccccgggggcactcgtacctggctgctcgaggcagccgcatggcacagacg

SEQ ID NO: 68349 - DNA, 822 bp, Zea mays
  unsure (1)..(822): unsure at all n locations
  Clone ID: MRT4577_16232C.1
gggtacccctccgaggtctcggccgggngaaaaaaacatataacgataggctaattaatggcatggcagcataaacaagccctaaagttatatagaagatttcatgtagcatacccagaacacacacacatggttgaaatgaagccatattccaatgtacattccagcaacattcgctaaatttatcttctatattcatcctttacggtcttctttaaaagaatctattctctatatttcctccttcaataatattttctatatctcattctttatacataaatatctatattagagacatattttacttttaatttttatacgtacgtatttgtcgtactcttaaatgtatgatacatattttagtttttctaaatctattgttttaaatattaaaatagatagaggagaggagagtgaaactatatatagaggatccagtcatattctctatatttagaggatgatttagatgacaccgttgaagatataaatgagataaatcttctctaaaatttagagtacaagacgctttaaagtaactgctggagagtcttaactctttcgatctccacagataataaagcaatttattatggattctgggaacaagaaaaggcatgaaggcacatcaactcggatgcaccgtcgacctctgacacaagttgcaacaaactagttnttgtgttacttgataggccacaacgatctgataaatgcttcatcattaagtaatatgatatacaatgatacgctaacgctgacactgttgatctaagttaaagtctttaacttgacacagatgctcgtattttgctaatt

SEQ ID NO: 68350 - DNA, 1138 bp, Zea mays
  Clone ID: MRT4577_162330C.1
aaactgcaggcctaaaaaagaagattagaccccgctcctcccgcccccgccgcccccgcccgaaccgaactcatctcctttccgtttgggcgccaaaacagcatccgccgcgcgacgcgtctcgtcagcgccgccagccccgtcagaatgtctaagaagagggggctttcgttggaggagaaacgggagcaaatgcttcaaatattttatgagagccaggaattctttctgcttaaggagctagagaaaatgggtcctaaaaagggagtgattagtcagtctgtgaaagatgtggtgcaaagcctggtggatgatgatcttgtcttgaaggataaaattgggacttctgtgtacttttggagtcttccaagttgtgctgggaaccagctgaggaatacttacaacaagctggaatctgacctttcaaactctagaaagcgttacatggaccttgttgaacacagagataacttgaaaagaggccgggaagactctgaagagagggaagctgctttggaggagctgaagactgtagaactacaccataagaaactcaaggaggaactggctgcatatgcagatagtgatccagctgcagtagaagcaatgaaggatgctactgatattgctcattcagcagctaacaggtggacagacaacattttcactttgcaacaatggtgttcaaccacattcccagaagcaaaagaacaactggaacatatgtacagggaggttgggatcacagaagattttgagtatttgcagtgatgtccaacagcctattacagcgtcgaaaatgtgccacggaatgttggatcgaccacagatgcaagtttatcatgttggtgctgtgagttatctgcagtaaatagattttgtatatttcacatgcttggcaacaatgaccgatatggccacatgcatgttagggactacttttcctagatgctaccaagtggctagactataccgaaggctcctgctatgcttgaaaactttaccgaaggctcgattttattggatgtagtggctagactatatcatgaaatgtatatttctttgctgatggaaagaacaacaatagcttgccatctggaaataaaaatactgccctaaaaaaaaaaaaaaaaaaaaa

SEQ ID NO: 68351 - DNA, 381 bp, Zea mays
  Clone ID: MRT4577_162331C.1
tttttgctgactacgaggcgacccggcccgagggcccgggcgcgcaccacttcaagcagggcatctcgccggacggcgagcgcgtatggtaccaccggggccggggcagcatgaacggggacttgccgctgctgctggagagcatcaagggccccgtgccggacacgttctggctcttcaggatcgacgggccgtgccacggcttctcgcacgacgggaagaggatcgccttcgacgggctgccggggctgtacgaggacaactccgactgcttcggtggccgcagacgggtcttctagggcaacgcggtcccgacggcatgggactggaagaggaaagggtacatctacaccagcgatggtccaaacttatacagcgaga

SEQ ID NO: 68352 - DNA, 572 bp, Zea mays
  Clone ID: MRT4577_162332C.1
ctccccaatcggcaaccgcggattccctcctcgatagatccggcaggcgcacaggcgacggccccgagctgcgacagaaggcgccatggggctctgggactcgctcctcaactggctccgaagcttgttctttaagcaggagatggagctctccctggttgggcttcagaatgctgggaagacatctctagtcaattcaattgctaccggtggctacagcgaggacatgattccaactgtaggctttaatatgcggaaagtcaccaagggaaatgtcacaattaaactttgggatcttggagggcaacgtagattccggactatgtgggagcgctactgtcgtggagttactgctattttatacgttgtcgatgctgctgaccgggatagcgttccgattgctaaaagtgaattgcatgacctgctgacaaaacaatctttatctgggatccccttacttatccttggcaacaaaattgacaagtcagaggcactttctaagccggcattagttgatcaactaggtctggaatctataaaggaccgtgaagtttgctgctacatgatctctt

SEQ ID NO: 68353 - DNA, 252 bp, Zea mays
  Clone ID: MRT4577_162333C.1
gctgccgcctccttcttctgccgctcctggtgctgcttgtgtgctcgtttggtgcggacctggtacctcttttgtgaagcggcagctgaggagactccggcgctcgccatggccgacgaaaagcccaaggaaggagtccagactgagaacaacgatcatattaatttgcaggtggcggggcaggatggttctgtggtgcagtttaagattaagaggcatacaccacttagtaaactaatgaaagcctattgt

SEQ ID NO: 68354 - DNA, 272 bp, Zea mays
  Clone ID: MRT4577_162334C.1
tcggctacacctacttctagaactggctgcggggatgggtgtgcaggttctcgccgactaagagggagaactgcgtgctgcgctgcctctctactgagtgctactacctcatatacagctgtactccgggtggggcacggcagatgaaccatggttcttaaggagaacttcaattgttgtgtgccgtgcaaatctacaggagatggcttgtgtgtgagtggatatatcccttcatatcgcaaataaggtgcggatcctgagttatggacaat

SEQ ID NO: 68355 - DNA, 378 bp, Zea mays
  Clone ID: MRT4577_162335C.1
tactctagactttttatccttcaatctccatgggaacaagtactgtttcctatattgtgggaccttatccctttaatttctccaacttttttttcctacttttctagcaattccttctgttcttcttccaacttcttatgtaaacgacgtcccatttctttcaaatacttttcaaacaacatttttaacacatttttcccttttatcttttaacttttttaacttcttttttttcaaactattttttatacattttctctaatatctttttcctatatacttttccatttttcttctaaaaaaattttttccactcataattttcgatcaaatttttacctacagaattttttcaatttttatttaataacatatttt

SEQ ID NO: 68356 - DNA, 856 bp, Zea mays
  unsure (1)..(856): unsure at all n locations
  Clone ID: MRT4577_162336C.1
tactcgcccttaagcagtggtaacaacgcagagnacttnnttttttttttttttttttttttttttaggtttttatactatacgtataatcacctttccggggaaggggtaacatagacggaggcacatgtagacagatacagacttttgaaatcttttgcctaagcgaagtagataagtatgagggaagaagtattttattgtccagcatgatcggtttcataagtccagttgtgccagaagctagagttgcctttattagtggataagggtgggttaggcttttcattcttaatcgtagacaaggcgcgctgcggaagagcttgattgctaactaattgcttgcttttaaccagtgactgacttacacggctactactttcctgagtaccgcttcagaatcgttcctactttcctttttaaaggtcttcctctctctactaggattgactcgcttagaagtcgagggggtcccatttccattcctttgccaaagaccctaacgacagcttgaactacctcaaagatttgtctcattgatccgaaaagaaaggaaagaagaggattcctgggaaggatagagtatatcagcaggttcatcgcacagctcactccaaaaaggatttgagtggaaggttgagcgccccttaacgtttagaagtatccttttttcaacggttagaaacctttctattctaagacggctaggctaagtcgagggcagacacaacaggtcacgaagagctagaggatatagaattcctatttaccgggaagaaaagcggaaggaaacatcggctcttccgagatcttatgtaaggaatactaggtctctaaaaagtagagctaaaagatc

SEQ ID NO: 68357 - DNA, 409 bp, Zea mays
  Clone ID: MRT4577_162337C.1
gtaattaccattacgcttaacgatacattaatactaaccgaaaagcacaccgctgctattatataatgaactcgatagtgcttttgcactctgcaccagtgaaaggcaaagatacgtgccggttggtcctctacaagaactcagcagttgatgtgcatgttcatcctctgggtatgccatagtgccccaactcatactcatattactgcgaagtacacaacactcgctactccgcgatacaagtcaggaattcgatcgcctgacacagcgttcaacaatgatagtaagaatgaacgtgatgcatgtgatcgatgcatacgtgtcacaacgctatgacattgtcttgaattccatagctgaatctactctgaactcgataagacaacaagaagaatatgcccctacatca

SEQ ID NO: 68358 - DNA, 277 bp, Zea mays
  Clone ID: MRT4577_162338C.1
caaacgcccacaccctccggagcgtcgcagttatcccacccctccttctccccttcggacgtcgatggcggagcgcggcggcgagcgtggcggcgagcgcggcgggtttggccgtggcttcgggcgctgctggcgcggcgaccgtggccggcgcccaagggggccgcgcgggccggcgcaaggggcaaaggaatgggtccccggttccaaacttcggcggcttgttcaggggaaccaggtccaccaggtccaaggggaccaacttcaattggttccc

SEQ ID NO: 68359 - DNA, 406 bp, Zea mays
  Clone ID: MRT4577_162339C.1
ggattgcgggtgggggggcagtgagttatttccacccgttttgtagctagggcaccgaggggctattacaggcctggtgcagttcttgagcccagcacatgggtttgcaccgccgccagtgcaagagaggttttccgggcccgcgctctattctataggtcctgaaagggaattgccctgcgctggcaaagtgagagactagaaccatgcaacactatccaggagggtagcagcatatgcacctaccgcgggcctgacatggcgaatcggtagctggagaacctcctccgagactgcacagatataggtggcccgcttaggattaagtccagctatttggcctaatcgttagtgacaaatacactgtctaagcaggaaaagtcggcacgaatgacagcctaagcta

SEQ ID NO: 68360 - DNA, 256 bp, Zea mays
  Clone ID: MRT4577_16233C.1
aaaaaaaacacttataaagtaagatttaagataagagataagagggggtaagagacattaacacaacttttgcacaagccttgaagataggaacacaactcctacacaagcatttggtggttcactttgccgtattacttcctccggtcttttttatttgggagggtttagttcaaaaataaactagggggcgggaaatattcgagaatggggggagtattgcatcccttgggagttggtatgccggacgcgtggg

SEQ ID NO: 68361 - DNA, 698 bp, Zea mays
  unsure (1)..(698): unsure at all n locations
  Clone ID: MRT4577_162340C.1
agatgctggctagggttttgagatttcgtcggcggggaatcgaccgccgcctcatctccacgagcacccgccgccgccttccctcgcccccgacgtcgtgcgctccgccgaccttctcggagctccgcggcctccctgccccctcctcctcgagcaccaccgctctcgatccccactcgcgccgcccgcagatctgattcaggggttcccggctctcccatccagggtcagggtcatactcgtcggccaccatgcaggctagtgacaggttcaacatcaattctcaacttgagcatcttcaagccaagtatgtcggaacagggcatgctgacctgaccagatttgaatgggctgtaaatatccaaagagacagctatgcatcttatgttggacactacccgatgttggcatatttttccattgctgagaatgaatctattggaagggagcgttatgaattcatgcagaaaatgctgcttccgtgtggcctcccccctgagagagacgaagactgagggagttggtactatagtgctacctccacagcagcttatgttcagaattcagatgatgtttgttaccagaatctttaactctaaggcaccttatgtggttgtgtttgaacttcctgaacatctttagcaccgtgtaccctgtttattgcactccatggatctttatccctgttcatgatgngc

SEQ ID NO: 68362 - DNA, 375 bp, Zea mays
  Clone ID: MRT4577_162341C.1
atgctcttcagtctttgggacttcacagggcacggcgccaagagaggggagaagctttcgccctgaaaaagagcaaagtttcagccctttcccccccggttccttcccccaacgaaccagcagagatatatcgcagggaacaaaacacaaggaggccaccagccgtagccgacacatggacacgcagcagagcgtcgccgccgccgcggtccagtccagaggcatggtggccgccgccgcaaaccaccccgtgagtgtcgtcgcggcgggagacgttggcagctcgccccgcgccacgtgcggcggcttcgtcgccctcgacgtcggcgcgctgtcgtctctggccggcgacgccggcccaccgggcacgcccac

SEQ ID NO: 68363 - DNA, 609 bp, Zea mays
  Clone ID: MRT4577_162342C.1
ggccgcttttttttttttttttttggagaatgatgatggtcatctgatattattgctagcattcagaaaatcagaatagccgccgaaagggatgattcaagtggtcgttatcgttgacaacactacagcctttatacatgcgcaggcctaagaaaaacgaccaaagagaagaaaggagccgtaaacaggaactaggtgtggagttacagttagtaatcagccattagctttcatattctgatatcactgcatctgctgtgccatcacctggactcggttgtggcccctctagtctggttaagacatctggtgctccagcagcgtccctgataatcgagtggcaatttaagcccctccgaagcagcttcccttatagggctaggaagttgttgtagagctcctgcagtttggccaagcaagcccttcaactgttcaggcaatgattcttcattgattctgggaatcgctataaggccctcaacatattcctctttcatcctgatggggccctcaacggacaattgagtagtcagtaggaatttgctttgtatcatgtttagaaacttgaggttagatgagagcctggagtatccatccttgatcaacaca

SEQ ID NO: 68364 - DNA, 726 bp, Zea mays
  Clone ID: MRT4577_162343C.1
gtccgcggacgcgtgggcgtacgcgtgggcgccgcagcccgcagcgggcagccaacgccgccaggccggggaaggggaacggtggaagagaagtggagcaccagcgaaccgcatatgctcggggttcttcgtcgcgcagccctcgccgcagcgtcatcgccggcggcggacctccgacagtttcagtgtgcttaccatagaagcagtgagagattatcacctatccgagaccaagaagtttcatatggtcttaattgggctattgctggaaaaggtgtcattgtgaaagataaggtcctccataacttggaaacatctgagcttcagaaaggtggcgctacttaccctgactttttgtctggtataccacttcatgttagaggagatgttattggtggtgtccctggtgtttctaaagctcaatttgcaaagcttctaaaactggtgacgttccatctttcatccatctcgtgtctatatgttcaagatggcgccattggttcgtcagcagaatgtgatgcaaaggttcgggtcattactgataatccctctgctgttatgttactgtcgaatgtcctttggaaaataccagatcgtgcgatttcccatgacacatcccctttgactatatatgctaccagttcaataagtaacaacgttaagactgttcttggttcttgaacacaatatgctaatggatttgctgtggcggatattgaacgatca

SEQ ID NO: 68365 - DNA, 1332 bp, Zea mays
  unsure (1)..(1332): unsure at all n locations
  Clone ID: MRT4577_162344C.1
gacaatagaagtagatggaggcaaaatatcagtcaaattttctctgctaccaccaccacggcaccgcaccaccggcggctgtagactgtagcacgagagagaaatctgtagcccagcagctcgtcaggcatggcagccgccgtggcgctgactccggcctatccagcgttcctccctgtccccttccgcgtccgccgcgacggccgggtgcgcctctcgccccgccgcccccgctactccgcggggcgctgcagagccatggcccagaccttccaggggggcgccgctgccagctacgcccgcgagatggagcgcctctccgccaaggagtccctgctcctcgcctttaaagatgctgggggtttcgatgccttagtcagcgggaagaccactgagatgcagaggatcgatgtcaatgagcgaattgttggacttgagcgcttgaatccgacaccacgccccacaacatcgccgtttctggagggtcgatggaattttgaatggtttggtgatagcagtccgggagcatttgcggcccgccttttgtttgagaggtcgcctacatcggttgcacactttatgggacttgatgtgctgatcaaggatggatactccaagctctcatctaacctcgagtttctagacacgatacaaagcaaattcctactgactaaatgaagaatcattgcctgaacagttaaagggcttgcttggccaaactgcaggagctctacaacaacttcctagccctataagggatgctgtttcagaggggcttaaattgccacttagtggatcatttcaacgcttattcatgatctcttacttggatgaagaaatattgattatcagagatgctgctggagcacctgacgtcttaaccagacttgaggggccgcaaccgaatccaggtgacggcacagcagatgcagtgatatcggaatatgaaagctaatgcccaagcgtccggggccacaacggagtccaggtgatggctcagcagatgtagtgatatcagaatatgaaagctaatggctgattactaactgtaactccacacctagttcctgtttacggctcctttcttctctttggtcgtttttcttaggcctgcgcatgtataaaggctgtagtgttgtcaacgataacgaccacttgaatcatccctttcggcggctattctgattttctgaatgctagcaataatatcagatgaccatcatcattctttatatgaatcaatgtaaaaaatagaaagtcaatgctgccgagataaaaaataaatcccccctttttttgtgngtgtgnaatagggaaaatataaaaaagatt

SEQ ID NO: 68366 - DNA, 149 bp, Zea mays
  unsure (1)..(149): unsure at all n locations
  Clone ID: MRT4577_162345C.1
ggcctcaacccgggaagctacccgctgtgttcctcatcctcttcctcttcacatgggtgaccttgctgatcgcggaggcgtgcctagctggcgggatcagtacaaacccaccttnntttctttgtagcaaagtgcactgtaaataacca

SEQ ID NO: 68367 - DNA, 1664 bp, Zea mays
  Clone ID: MRT4577_162346C.1
cctcgcggacgggtgggagtacgcgtgccgcagccagacgccgcccggccggggaaggggagcggtggaagggaagtggagcaccagcgaaccgcatatgctcggggttcttcgtcgcgcagccctcgccgcagcgtcatcgccggcggcggacctccgacagtttcagtgtgcttaccatagaagcagtgagagattatcacctatccgagccattacaaactatctgcgaaatttcacgattactttttgttgcacagagaagaccaagaagtttcatatggtcttaattgggctattgctggaaaaggtgtcattgtgaaagataaggtcctccataacttggaaacatctgagcttcagaaaggtggcgctacttaccctgactttttgtctggtataccacttcatgttagaggagatgttattggtggtgtccctggtgtttctaaagctcaatttgcaaagcttctaaaactggtgacgttccatctttcatccatctcgtgtctatatgttcaagatggcgccattggttcgtcagcagaatgtgatgcaaaggttcgggtcattactgataatccctctgctgttatgttactgtcgaatgtcctttggaaaataccagatcgtgcgatttcccatgacacatcccctttgactatatatgctaccagttcaataagtaacaacgttaagactgttcttggttctggaacacaatatgctaatggatttgctgtggcggatattgaacgatcatctctaatcctatgcggtaaagcatttgctgattcagctatcgtgaaagatgcacttactgctatgacagccccaatattgtctgcaagaggaggcctccctgttccaggatggattctgaactttggtggttctactgtattattgtttgccccagtggaaatcatgatgtcctgcgtagaaatccacaatgctctattgtccattgactgtggtgcagtcatatcttccaaggggtctactgtgcttttcccaacaaaggcaagcagggagcagaaactgcttaccaaaccaactgcagtaattatcgtatcatctgatagctctggcgccataccatctgtatgtaagctctctcctggccaggctgcctaccatttcttggctggatatcacgatggaaaatttgtcccagcatacaacagagccccctctcctgctgacccacttgcacttgcaagttctttattctcacatttgaaagaagatgatacaccatcgtatctgatcaacgctaagcactctggaaagtacattgacggcaatgggtttatgaaattattaaagctggcactatctcacgatcttcctgacatcaaaactgaaggctctagagttggggaactcaaggggaagtacaggagctttctatccagcaagtttggccaatgtttacccgaggaattctctttttaggagatacaccctgaggttgcaatgaacatgtatatttactggcataggtttacattttggtttgaaaaggtgtcagtattcccattctgtctcagtttcaatgtaatactctattaccttacattgcatctttccgcctcctggtgtttggatatactgacgtaacgacaatgtagctagtacctacatgcaaaaaaaaaaaaaaa

SEQ ID NO: 68368 - DNA, 1280 bp, Zea mays
  unsure (1)..(1280): unsure at all n locations
  Clone ID: MRT4577_162347C.1
ctcgaggccggccgggaaattttctctgctagccgcaccacggcaccgcaccaccggcggctgtagactgtagcacgagagagaaatctgtagcccagcagctcgtcaggcatggcagccgccgtggcgctgactccggcctatccagcgttcctccctgtccccttccgcgtccgccgcgacggccgggtgcgcctctcgccccgccgcccccgctactccgcggggcgctgcagagccatggcccagaccttccaggggggcgccgctgccagctacgcccgcgagatggagcgcctctccgccaaggagtccctgctcctcgcctttaaagatgctgggggtttcgaggccttagtcagcgggaagaccactgagatgcagaggatcgatgtcaatgagcgaattgttggacttgagcgcttgaatccgacaccgcgccccacaacatcgccgtttctggagggtcgatggaattttgaatggtttggtgatagcagtcctggagcatttgcggcccgtcttttgtttgagaggtcgcctacatcggttgcacactttatgggacttgatgtgttgatcaaggatggatactccaagctctcatctaacctcaagtttctaaacacgatacaaagcaaattcctactgactactcaattgtccgttgagggccccatcaggatgaaagaggaatatgttgagggccttatagcgattcccagaatcaatgaagaatcattgcctgaacagttgaagggcttgcttggccaaactgcaggagctctacaacaacttcctagccctataagggaagctgtttcggaggggcttaaattgccacttagtgggtcatttcaacgcttattcatgatctcttacttggatgaagaaatattgattatcagagatgctgctggagcacctgacgtcttaaccagacttgaggggccgcaaccgaatccaggtgacggcacagcagatgcagtgatatcggaatatgaaagctaatgcctcagtgctgactgtagctccgcacctagctcctgtttatggctcctttctcctctttggtcattttctcagtctcgcgcatatataaagctttctagttctagtgttgtcaacgataacgaccacttgagtgtttttacttaatacatcccattcggcggctattctgattttttctgaatgcgagcaataatatcagatgaccatcaaaaatctttctatgaatcnnnnnnnnnnnnnnnnnnnnnnnnntcgacgcggccgcg

SEQ ID NO: 68369 - DNA, 576 bp, Zea mays
  Clone ID: MRT4577_162348C.1
atatgttgagggccttatagagattcccagaatcaatgaagaatcattgcctgaacagttaaagggcttgcttggccaaactgcaggagctctacaacaacttcctagccctataagggatgctgtttcagaggggcttaaattgccacttagtggatcatttcaacgcttattcatgatctcttacttggatgaagaaatattgattatcagagatgctgctggagcacctgacgtcttaaccagacttgaggggccgcaaccgaatccaggtgacggcacagcagatgcagtgatatcggaatatgaaagctaatgcctcagtgctgactgtagctccgcacctagctcctgtttatggctcctttctcctctttggtcattttctcagtctcgcgcgtatataaagctttctagttctagtgttgtcaacgatgatgaccactcgagtgtttttacttaatacataccatttgtctattcggaatatgagcaacaatatctaaatattcaaatgtccatcaccagtttatatgaaacacggtaaagaaaaaaaaaaaaaaaaaatttgcggcc

SEQ ID NO: 68370 - DNA, 288 bp, Zea mays
  Clone ID: MRT4577_162349C.1
tccgggcacacgtagggcgggccctgcccaaaccaaacaatttttttttttttatgcagacacaactctcaggggggggggttaaatataataagtagtttcgacactccctagtctaaatgaaaaaatacaaaattacccgaggtcactaaaaactaccttgggaaatccataatgaaacacattcagagtaatattacctaacgacaatgccagtatgcgcttgtgctcgaaaatacgaaatagcacatggtaggcgtaccaaaatatgaggaaatccacccgatc

SEQ ID NO: 68371 - DNA, 353 bp, Zea mays
  Clone ID: MRT4577_16234C.1
gagcccatccacatatgtttaaagctaaagggtccgcaaaaacacaaacaaccggcggaaaaaacccccaccccccaaaggaaaaaggttcaaccccgggggcaacctacggccaaatttaagtgggttaaaaatctccgggggggaggggtcccatctgggggccccacccggggaagggggggaaaattccttttggggggggggggataaaaaaggtttgggcgggtcatcgctaatggggaaaacattttggaaaggggaaaaggttacaaccatttgccataaatggggggaggggggcccaagagaaccttggaacccccccggcctggccggggtggcaggaaaaa

SEQ ID NO: 68372 - DNA, 306 bp, Zea mays
  Clone ID: MRT4577_162350C.1
aaaagcaaatccttaatgtgggggccctgttttcactcaaggggaatagatccgttttgcttttccacttttggagggacccaaacccaatccgtaggattctgcttttaggagttccaacatttcagcttaccacgaatggcaaaccctgccaccccttaacataaaacgttataccaagtcctaaagttcattttttcaaatttctggggtgataacccccctaataggatcctgcccccctaaagcataatagttttggctgcccccaccatagcggccccttggttcgacccggaatttccg

SEQ ID NO: 68373 - DNA, 492 bp, Zea mays
  Clone ID: MRT4577_162351C.1
gaaacaatggcaaacaacacatttccattttctgaatcttaatcattacacattttgcaaaatccccttgaacctactcgtattccttcacataataaacacagttaataagtcactactatttcgtttctttgtactagtaatctatgcacacttttgcaacgggacaggtcgcccctttcttccctgccttttctacatttttgtcaggaagtggttactgtctgaccctaatcgtgtattacttgcagccatcgcatggtaaattggccagcagcggtggcggcttcctacctgcgctggaaattgaggtgcttgatggcgaggaagaagaggaaggcgaagaggccaatgattgcgagatggaggcaggtcaccagctcaaagtagcgatcctgcaggcctaggtacccctccaggaactcacgcaccgtctgcaccccgagccctggcaccaggatctgctccgtccggtctgcgagctgtgagaac

SEQ ID NO: 68374 - DNA, 471 bp, Zea mays
  Clone ID: MRT4577_162352C.1
ggggcccactggaaaaacattgccaagcaactaagggaaaccaaacgagagattaatccggggagaggggggggaaaaaaaccaaacccctgaggagggttgggtaattacccaagggtagccggaaaacaagcagcagcagcagctacaagctaaaaccaacccgatcaagggtggaatgggcccagcaattgggcaatctcacactttaaaacggggccctaaacacaccaccaaacaccttccgcaaaaaagggggggaatgccaaaaacccgggctggttaaggaccaacagggtaacccgtaaatccaacagggtaaaaaatgcccacccaaaaaaacaggtgactcaatcgaaaaaaggaatcatcgaatgcgcgaaacgattgaatgccggctaaaattataacaaaatttttttttttcagggcaacccatatcaaggagcaaacgggttggtcggggccccc

SEQ ID NO: 68375 - DNA, 249 bp, Zea mays
  Clone ID: MRT4577_162353C.1
gcctcggtactttccactgagatgagaaatacaggcgcgaatggcgagcggcaccatggacctctcctccacggccttcgccgctaaggccgtaaacatgccgacgtcaaccgccttcccggaggtccgcgtgaccatggggaagatgcggaagaaggccaagacggccaaggcgtccggaagcccgcgggagccccccgaccggatgctgaacctgagaccaatgtgggcccagtcgacgaggtacct

SEQ ID NO: 68376 - DNA, 629 bp, Zea mays
  unsure (1)..(629): unsure at all n locations
  Clone ID: MRT4577_162354C.1
ctcgaggccggncgggccggggtatgtaacaattttcatgctggaatggacctcaagcgctaggagagatgtacgtcgccttcctagataagaggcacaacaccttcgagaatataccatactttgctaccgtgcgctttgataacttcggcggcaaggtcaacaattggttgacctttagtgagcacccacacatttacttcactgttcctacggaactggcgttctttggcccagggccctgctcacctggactagactgtgccgacccaactgtggaattctctctacgagacttacactgctggacataccgttctcctagcccacgctgaggatgtctgatctttacaactagcataacgagcgcgacgactcccacatatggcttgacgttagacctaatgtgtcctgggccatatggaacatcttctccggataaacaggttcttactaaaggtcctgagacatcaacctatgatggttcttatagcccgtgcgttactggagaccaccccttctccgtgagaccattggatatggaacgactaaccccttcttcacggaggagcagacagagaagcttcgcggctcctataacatgacgggggttaaattactacccctca

SEQ ID NO: 68377 - DNA, 391 bp, Zea mays
  Clone ID: MRT4577_162355C.1
gagctcactagttggcggccgcccctttgggtttttttcgttcagagcatgttttctttcattttttttttttttttttgggaatcgtgacttgtttcttgcgtttgaacaaaattacatttgatatgatttgacgattgtaggggacatgttttgctgggccttgtgttgaaaatggcaagagggtttcttggtggatggtagacatcggacaggagcaccaggttggttcatatattcctggcatctgatctgatggttgccaatgcagtagataatgggatggcgaattgccttacagttgatgtgcaactactacacggtgaggcaggatggctccacagcattcatgaggtcttgggctttccctcgagccgaattccgagcttac

SEQ ID NO: 68378 - DNA, 183 bp, Zea mays
  Clone ID: MRT4577_162356C.1
attcgattcaactttgctactaaaaaggagcgactaccatactgaggctggcaattcagcaacctacacggtctgtggtctggttatggtgacgactgagacaaaaaagactacaccagcagcgtactcatggggatggaaagaccccctcgctttacatgctccagactgtgtgctgatcac

SEQ ID NO: 68379 - DNA, 876 bp, Zea mays
  Clone ID: MRT4577_162357C.1
ctgcggacgaccaccaccctcgaggccgggaatcaccacgccagcttatatgccccacccggcgccactcgacgtctcacggagaaaaagaaagaggagctcggacaaggcaggcgccatcgttcggtttccttgctgaattcccgatcgctcgctcgctcgaaaagaaagaagctagcttttagcatggcgtctctggcgttcggcagcaccgtagcggcggccgtggcggcgacctcggggaggacgcggccggcgcgccggtccgtgctggtcgtgccgcccgctgccagcaggggcggcccggcgccggccaaggaggagaagggcctcggcgagaccatcttcggcttcatcttcaagaaggaccagctggtggagacggacccgctcctcaacaaggtcggcgccgcgccggccgccggcctcccgcgccaagacgaccgccggcaagaaggctgccggcggcgacgacagcggcagcggcggggggttcaacctcggcggcctcggcgggctcttcgccaagaaaagcagctgaacgtggcgttgtttatggattgtcgaactcaaagctggatttggcttttgagggggaaatggttgcgcatatatatttgtggacgtgtggtggtgtgaccagtgatctttgatgtcataatgtgatatactctacttccaaaaaatcaatcgaaagttccaaatcctttgttctcgtcgcataccgcaccgagctcactccccctttcgccttcgtcccagatctcaagcccgccgcagagaacgacaggacccaaaccccaactccacaatgaggccgtcgctgatgagatccacctcccagctcctccgccgccggaactactccctccgcat

SEQ ID NO: 68380 - DNA, 184 bp, Zea mays
  Clone ID: MRT4577_162358C.1
ctttgttttttttttttttttttttttttttataaagaagaaagcaatgcttttgctactattgacaaggagggtagacactctctggcttcctcagaggagatgccacaagatgtgcgcctggagatgtatccatgcgatccccttgatttgtcctaacacttgggcaatcttctacaagttt

SEQ ID NO: 68381 - DNA, 457 bp, Zea mays
  Clone ID: MRT4577_162359C.1
cttatacagtagttttgccaccgtctctcttctgcggtggtgctgactctagcccacgaccccgcggacggcggcgcaggtaactgcccctgccaccactggttccttgactgtcccttcctggacgacctggcggccgcccactgcggcgcctttcggtggtacgcgtacaatcgttgttccaacctcatggtggaagtgggcacgtatacgaataccaaggatgcggtcccatgacctcaatgatgaatgcaatgaccctgaggataatcagccgcttgggtgagaatttaatgatgtgcatgtgcaagacatgttaagcttgtaatgaaaaaatgcagacgaacaagctgtatgacaggcttcctgaatcggggtctacattagaaccagggaatacagcaaaaggtgacaaatctgctatactaagtgaagctactaacatggatattgaact

SEQ ID NO: 68382 - DNA, 305 bp, Zea mays
  Clone ID: MRT4577_16235C.1
tcggggaattccaattccacattttcaagaattaaggaggcaaaatggtgcatgttgattggaaatatttggtttcttattatgcctattctgaagccacaggagatgagatcggaattcctcggggaattccaatttcacattttcaagaaataaggaggcacaaatgttcatatatgaattggaattatttgttgtcttattatgcctatcctgaagccaccggaaatgagatcggaattactcggggaattacaattacacattttcaagaaataaagaaggcaaaatgttcatatatgaat

SEQ ID NO: 68383 - DNA, 207 bp, Zea mays
  Clone ID: MRT4577_162360C.1
aaaaggagatatcatatatatgtgatcacaggataacctaacgacttgactcgaacacttgaagtttaaatagtgatgtctacgtgataataattattaaataacacaagccgttaccaggcaggcatagatattgataggggaccacgagtactctgtgggaacatcgttgaaggtgaggtagaccatgcagtgcatagatgttca

SEQ ID NO: 68384 - DNA, 498 bp, Zea mays
  Clone ID: MRT4577_162361C.1
agaagcgcgcgcccttggtttttttttttttttttttttttttttttttttttttttttttttttttttttaaggggggggaaaacaaaacaatttttccattttgtgcaaatgggtgtaaagttttgaggtttttatctttaaaacataacggggcatcaattttacattttttttcctttttttttaccaataatcagttttccccccccctcaatttgagtctcggtttaaataccgctgcaacaagtttccttgctgaaaatgggaccattgtaaaaaaatgaacaaagttgaacaatgggcaacgaaattattttttcaaaacttatcccatcctgaattggtgggggcagctcgagttctccaatcgatatgactatccgagggctctaaaatttttttttgcacattaagcctccaaactgttttgggcttttttcggggacccacttgctcaaaaagaaatgtctttcagggctccttttcgttctggga

SEQ ID NO: 68385 - DNA, 902 bp, Zea mays
  Clone ID: MRT4577_162362C.1
attcggccccacgcgttcgcccgtgctggctagctccgctccatcggcccgccttacctctagcctcgtcgccacggcgacagcggcgatgctgatgcaaggcgccgtggtagtgacggactgtaccccgacgggcgtagcgtcgctgtcctcgtccgtgcggtgtcggctgggcccggcgggcgggcacacggggaagcggcgccggctgcggccgtccaagcgcgcgcccaccacgtacatcagcaccgacgtcgccaccttctgcgccatggtgcagcgcgtcaccggcgccgacgaggccgacctacagtcgccgcagcaggacgggcttaaccttggcctcctcctgccgcacctcggcgtcgagctgttcctacaggcggcgggacacgcggcgccgcgcgtcgctgctgcaccgtacacgcctgccccgcccgccgcggcagcggagcagcagccgctgtacccgatgctggctggactcgtggaacgtgatgtatgggaagaagaccgaggtggtctcagccctgactgaccaatgaaaccgtcccgattgttccccatccgttccaggcaagcctgtacgtgcctgcgcagcattagcatctacccgtcgatgatctgatcagcagacgatcccttcttctccatggcggcggagaagctgtacatcatatattcatatatcagttgggtggcctcgatgcgtggactaggggatggagtagcagagttgtgttaatcagagaaccagcagtcacgcgttctattgtctcgtggtctgcagttgcatctgctgatctgcactttgcatgcttttccatgatcccgtcaatgtgagcttcctgctatttgtgtaaaaatgtctctttggtagccgccacaaaattttcagctgc

SEQ ID NO: 68386 - DNA, 319 bp, Zea mays
  Clone ID: MRT4577_162363C.1
aggcgcgtgcaggcgtgcgtagactcggggttgggctcgaggctgtgggcagcgtgcgcacgtggggtacctggctcgctctgctggcgtgccgtggctggtcgccaccggggtgcgacgggaggtggcgggggctgcggcgacctccagcgcgggggcggcgtgcacggcgaggcgcacagcagcagaagcagggcgccgtgatggcggcgctcaaggccgcgacggccgcgacgttcggcgggtcggtgctggtgctgtccgggctgatcctggccggcaccgtggtcgcgctcacggtggccacccccgtgctggt

SEQ ID NO: 68387 - DNA, 339 bp, Zea mays
  unsure (1)..(339): unsure at all n locations
  Clone ID: MRT4577_162364C.1
ttcccctcacctccgggtgggggtcagcgcctcaccagctctcccgtgtgcggcgtggcaacagnnaacagcctcctcccaggcctcgggtcaagggagtttcattttcctctctcccaggcgtcccacagngatatccggnacattttcttttgatcgtttggggctcagggcggcggctggggtggggggcgcgggcgccntgtccctggcgcccacgtccagctgcctttccgggcggggggggggcgggcacccgggtggcgggaggcggtgtggcctacgtgcgtgcgttggactgcttcggacgtggcgcctgtgcctcctgccttcttctgg

SEQ ID NO: 68388 - DNA, 718 bp, Zea mays
  Clone ID: MRT4577_162365C.1
ccggcgggaaccttgtttgttctttcccgccgtctgctctgttcccttacgctgatccgctcgggtctggatcatctcgtgtcctgtttctgatgtaccagctgcttaccccgggatctactgcgaactctgtcatcatccctttggccgagagagtgtccttctcttaggattcattgatacccaagccgctatacattgttgcgtaagcatgacagatgattctggtgaacaatgcctacctgcagctcacagctcaacttcgagagattcgctggatgatggttctctatcggatttcaacattcctgggtctgaccgttgttttctaggtgctttgaagacatcttgatggatgtgtcttgaagaatatggaacattgcctcaggaccagcctaacagagaccatgccaaaatcagggctctaagctctgaggcatgaccactaacacgagccctgagaccaccaagagacctttcccacgcatggcaagctacagcctctcaagtacgagaacggacatcttaccagaacaggatcccgaacagcccctgtctgaaattcctcgactaggatctgatgctgatgatgaacacgatggcagttctgacgacacgaactacgaggatgtgcatacatatggactcgctgattggcacgagctatagcgaccacggtacttcgagtattcgacggtgaacatcacgcaacagacta

SEQ ID NO: 68389 - DNA, 207 bp, Zea mays
  Clone ID: MRT4577_162366C.1
cttgtcctgacttataggagtcgcgggtctatccaagcgatgtggcaccatgaggtactgttacagaagaaggtaccgaagccttatcatattcttggaagagacagtgtgggctcaactcttgtgttcgaatgacagacacggagctgatgacaatcaactggatctgcatgcggataacgaccttcaaactattcaagcgcatgc

SEQ ID NO: 68390 - DNA, 184 bp, Zea mays
  Clone ID: MRT4577_162367C.1
acggccgcccagacaagtccaatgttaacctctttaaaactttcatctatttgtttcgggatagtttggtgtgtggggggggtttgtcttgatcctttgtgctactgcaacatttggtcctcgacattgtaaattatttaatcctaaacataggaaaaaaaaaaaaaaaaaaaaaaaaaaccaa

SEQ ID NO: 68391 - DNA, 374 bp, Zea mays
  Clone ID: MRT4577_162368C.1
ggaaaccaggtccggggattaacaaccaaacccttattaaaaaaaaagggatcgggaaaagaaatttactaccaaagcaaaggaaaaggtcggtggcctgatccaaacgggaagaaaaaataaaaaaacggggggaaatttgggtaatgggaaaaaaagagctcaaactaaaaaaaaatggcggggggaaactgggggcaggaataggtaaattggaaaaaggccattccaaaaactatgaaaaaactaatgggtaaacccggggaaggggatttccatttaaaacaaaaagccaccaatgggggaactcaattaaaaagggctccaaagcccgggagctttccatggcaaaatcacaaaaaaaaagttcagtt

SEQ ID NO: 68392 - DNA, 144 bp, Zea mays
  Clone ID: MRT4577_162369C.1
cggcaagaacaaatcagattgtactgaaggcggaggtagtggtagtagaggaggcgcccatggtgccagtgcgtctgctcctactagggcagtgcctagtcttccacaatcaacccatattcgtccaagatcaactagaaaaag

SEQ ID NO: 68393 - DNA, 272 bp, Zea mays
  Clone ID: MRT4577_16236C.1
ataagaaacaaaaaaaaccgcccccttcgacttttttattccggaaggggtacaaaaaaccctcgggcctttacaaagggggggagaaaataaatgccccccccttaaaggggggaaagaactcgggccaccccgttctccaaagggggaaagggatggccctttggtggcccccggccccttttttatgggggggggggccccctttatgggaattaacaagggcctctgggcggggctaagctaaatgccggcggggggtgcattggggt

SEQ ID NO: 68394 - DNA, 223 bp, Zea mays
  Clone ID: MRT4577_162370C.1
catttatatagtgatattcaagattataggagccaatcacttatgtgtctgcgctcaggagatgatggtacaatgttccaaggtagtgctcgaaggtgcaaattactactcattaggttctgagtagtgatcaacatggcgagagtctatatgtaccttaatagcacctggctttgcacagatctgttgttacattttattatagataagtggtgacatgagt

SEQ ID NO: 68395 - DNA, 571 bp, Zea mays
  Clone ID: MRT4577_162371C.1
gatgtcgccaatgccggcggcgccaagcccctgacgcccggcgggcgcgtggtgcaccacaaccacggcaagttcaccgccggcgagtggaagcgcgcccacgcgaccttctacggcggccgggacgggtccggcaccacggcgggcgcgtgcgggtacaaggacacgcggtccgagggctacggcgtgcagacggtggccgtgagctcggtgctgttcggcaatggcgcggcctgcggcggttgctacgaggtgcggtgcgtggacagccccgacgggtgcaagccgcccggcgcggcggcggcggcggcggcgctggtggtgacggcgacgaacctgtgcccgcccaacgagcagcagtcggcggacagcggcgggtggtgcaacccgccgcgggagcacttcgacctgtccatgccggcgttcctccagatcgcggaggagaaggccggcatcgtgcccgtctcctaccggcgggtggcgtgcgcgaggcagggcggcatccggtacgccatcgccgggaacaagtacttcaacatggtgacggtcaccaacgtgggcggcgccggcg

SEQ ID NO: 68396 - DNA, 374 bp, Zea mays
  Clone ID: MRT4577_162372C.1
gcccacacatatattgacatcgcgcaaaaaattattgatttcacataaggtacaaagggaacaacgcgcggagcgctagctcaaaggccagaaacgctaagtcctacgggctcaaaaaggctaacccaaaagagcaaattgagggcgagcttggtaacccgtctgaccttaacccattttaaaccaaaaaacccgctgttaacactgtaacaggcaacctaacagccactggactccatatcacgccatggcctcgggtgccctagaatagcccccacccttgcgcaaagacattggaagatgaccaaaatcaaactctgccaccagcatttcctgtgcaacagcaccaaggatgttgcactatttttgcgggc

SEQ ID NO: 68397 - DNA, 532 bp, Zea mays
  Clone ID: MRT4577_162373C.1
ataaaaaaaaaaaaagagaaaaaaaaaaaaaaaaaaaaaaacaaaattatataaaaaaataaaaagggatggcgttctgggggatctaatctatccaaccctgccttgccaggttaacgtctcttatatattttcaaataaattaaattaagtgacctgcgtgggacaccgtttatactgggaaagccggggaatcccccaccttatccgctttgaaaccaattcccttttccccatttggggtattttgaaagaggccgaaacggaccgcccttcccaacacttcctcaggttgaacggtttttgggacgctccctgttccccctcataaagctcataaatcgtggtggttttgctcaattttacctatacaattgccagagccgtaagccccggaccgttggatttattacttttcttgctttccacgaccgccgcctttgcccggtttagctttaaaatggtgaatgcgttggggtcttgagtaactggattaagggctcttcaccccaaaaaactaaaaaaggttgat

SEQ ID NO: 68398 - DNA, 333 bp, Zea mays
  Clone ID: MRT4577_162374C.1
cggggacgggggggtcaacccggaaattccggaccggtccctggaggggtaccatttttccttttagggagtggttttaaagtttggggaaataaagggcatagttgtttcctgggaaaaattgttttccgttaaaaattccacaaaaaataagagccggaaaattaaagggtaaagccgggggggcctaaggagggacctacctccattttattgggggggcctcactgcccgttttccaaggggaaaacctgttgggccatttgttttaataaatcggccaacccccggggaaaggggttttggtttttgggccccaggggggtttttttt

SEQ ID NO: 68399 - DNA, 516 bp, Zea mays
  Clone ID: MRT4577_162375C.1
tcgggaactctttatcttctcttccattcgcaatatacatccgagccgccagggaatggagctgcacgctatatgcatgtctccttttttcttctgcttgctctacatgcaatatatgtctgttcatttcgaatgcaagatctttatccatgactgttcgcatggatgataattctcactggttatatttttttttcagcgaagcctcaacgaaccgcaaagagaaccagggtgtgtgtctggacgactgctccctgtatcactaacactaatccgaccactcactgaatgctttctagtattgttctttgcagcaatgtgactccgccgccaacgacaactacacatttgcactgtgcaattgaactcgaatctacctcccgcttactcaaatcccttactgtgtaggaacacataaaatatgaatatctctgtaatgaaatcgagctatgcacgtattaaagatctcatatccgctgccaaatataagaacaacaaaggtccctacgacctgac

SEQ ID NO: 68400 - DNA, 462 bp, Zea mays
  Clone ID: MRT4577_162376C.1
aggatcttggggtgaatctgaacaaatctttaattcaacaggcattgaattaatgctcgggatggagcacgaaatcctacctatatgcatcctaaatgagttgcggcataaatccatgatgtggggggacatcccctgcggactaatctctatctaccatctgcctggacacacgtgaatttaataacacgactgcttcatatgccatccatttacacatgatgagtgagtggcctgtgccgtctacttgtctaactccacctagggcttataatcctgatgtttctggaaaggatcgacatcctcgtcctggcgaacagagggggacgtcaataaccttttttcttggctggaccgcatgatgagcatgtgtctagtcttacttaaggacgacatggttctcaccagtgaactccacattctgggaatagcattgagctcgcgcttcttatcaatgttagg

SEQ ID NO: 68401 - DNA, 862 bp, Zea mays
  Clone ID: MRT4577_162377C.1
gccggccgggtcattgggcggagtgcatccggctaatccggttggcactctctccatcctctgttcgtggcaacagttgctttgctttccccacctggttctactccatgtttgtaaaagccatggctggacctgctgttctcaatgagcgtatcctttcttccatgtcccagaaacatgttgctgctcacccatggcatgatttggagataggaccaggggctcctgaattcttcaattgtgtggttgagattcctagaggcagcaaggttaagtacgagttggacaaggcatctggtctgatcaaggtggaccgtgttctttattcctctgttgtttacccacataactatggcttcattccacgcacactctgtgaggataacgaccccctggatgtcctcatactgatgcaggaacaagttgtccctgggtgtttcctgcgagctcgtgctattgggctcatgcctatgatcgatcagggcgagaaagatgataagattatagcagtctgtgctgatgaccctgaattccgtcactacacggacatcacggacctcccaccgcatcgccttcaagagatccgccgcttttttgaagattataaaaagaacgaaaacaaggaggtcgcagtgaatgagttcctgccagcgaaagatgccatcaacgcaatcaagtactcgatggacctgtatggctcatacgtcatcgaaagcctgaggaagtgatctccagctgcttgatttgtggtgtggatgctacaccattttctcaacagctcatccagattaccgtagtacagacttaacacgcacgaactgtaatcgtgaccaagggatattattaccttctggtcatgctg

SEQ ID NO: 68402 - DNA, 925 bp, Zea mays
  Clone ID: MRT4577_162378C.1
gacagcagcagcagcagcagcatcgagctcgaggccgctccgccaccccgcactcgcctgtcgcctcttctcgctttcgccaccggggcagcgctccgccatggctggacctgctgttctcaatgagcgtatcctttcttccatgtcccagaaacatgttgctgctcacccatggcatgatttggagataggtggttgagattcctagaggcagcaaggttaagtacgagttggacaaggcatctggtctgatcaaggtggaccgtgttctttattcctctgttgtttacccacataactatggcttcattccacgcacactctgtgaggataacgaccccctggatgtcctcatactgatgcaggtattttaatggcgagaaagatgataagattatagcagtctgtgctgatgaccctgaattccgtcactacacggacatcacggacctcccaccgcatcgccttcaagagatccgccgcttttttgaagattataaaaagaacgaaaacaaggaggtcgcagtgaatgagttcctgccagcgaaagatgccatcaacgcaatcaagtactcgatggacctgtatggctcatacgtcatcgaaagcctgaggaagtgatctccagctgcttgattgtggttgtggatgctacaccattttctcaacagctcatccagagtaccgtagtacagacttaacacgaacgaactgtaatcgtgaccaagggatattattaccttctgttcatgttgaaacaatcagcagtgcctttctttccattatatgccataccgaatcaaggcaacttggccctgaaatctttgtggttcaagttaaaccagcactttgacagaacaacgattgctggatgcctggattactgttacataaatgaccattactgaacttcatttcttgctct

SEQ ID NO: 68403 - DNA, 1587 bp, Zea mays
  Clone ID: MRT4577_162379C.1
gcgataagaggaccatccgggccgccgggtgtcactctctcatcctctgttcgtggcaacagttgctttgctttccccacctggttctactccatgtttgtaaaagggccacgctcccgtccggcctgcagcgcggcccggccgcggcagctgggcgcccgaggccgccccggcagccggcccgcgacctcgccccccgccccctctcgccctcgccaccgtgccacggaagggaccatccgatcggctccgtcatgcctggagctgctgccctcaatgagggtatccttccttccgtgcccaggaaaaatgtggttgctcacccatggcatgatttggagtataggaccagaggctcgctgaattgtttgattgggtggttgggattggtagaggcagcatggtgaagtatgcgatggacaagatatctgggattattcaggtggaccaggcagccagccccggagccctggacagcagcagtgaactcgaggccgctccgccacctcgccactcgcctcttctcgctctcgccaccgggccagggaagggaccatccgatcggctccgtcatggctggagctgctgctctcaatgagggtatcctttcttccgtgtccgagaaaaatgttgctgctcacccatggcatgatttggagataggaccagaggctcctgaagtgttcaattgtgtggttgagattcctagaggcagcaaggttaagtatgagttggacaagatatctggtctgatcaaggtggatcgtgtcctttactcctctgttgtttacccacataactatggtttcattccacgcacactctgtgaggatagcgaccccatggacgtcctcgtactgatgcaggaacaagttgtccctgggtgttttctgcgagctcgtgctattgggctcatgcctatgatcgatcagggtgagaaagatgataagatcatagctgtctgtgctgatgaccctgaattccgtcactacaaggacatctcggacctccccccgcatcgccttcaagagatccgccgcttttttgaagattataaaaagaatgaaaacaaagaagttgcagtgaatgatttcctcccagccgaagatgccatcaaagcaatcgagcactcgatggacctgtatggctcgtacgtcatggaaagcctgaggaggtgatctgctgctgcttgattgtggatgctacgtaattttctcaacagctcatcgagagtaccgtagtccgtagtacggcaaatgttaacacgcacgaactggaatcatgaccaagggatattaccttctgttcatgctgaaacgatcagcagtttctttctttgcatcatatgccacgtcaaatcaaggcacttgcctctgaaatctttgtggtcaagtcaaaccagcacttcgacagaacgattgatggatgcctcatgcctgtattactgttacataaatgtccatttgctcaacttcatttcttatatgagatgcctacttgcctaggactcgtctgataaaaaaaaaaaaaaaaaaaaaaaaaaaaaaaaaaaaaagaaaggcactaggcctaaacctactcttaagg

SEQ ID NO: 68404 - DNA, 526 bp, Zea mays
  unsure (1)..(526): unsure at all n locations
  Clone ID: MRT4577_16237C.1
ggggggggggggtgtttttttttttttttttttttttttttttnttttttttttttttttttttttttttttgggggggaaaaaaagcgccgcccgaatttgcattaacaaggacattacatacccgattccccccctggtctccaaaggtttccagggggggcaaaccccctcccaaggaaccatgacggggggcggccccccagcagttagacccccgaatcactcgggcgggggggaccaaaccccctggatcttgacatccttgggcgccttggccccgagggcggggtcggacgggtgcaccctctcgaagaccccgatgaccccgccgggctccggggtgctcttggggacccccaacgggatgttgccgggggggggggggggggtcttgggggtccccttcgggggcccccccccgaacttgagcgggccgggggagcccaccccgggcgggcccttgatctcgtccagggggtacggggggggggtcatgagcttggtcttctggaactcgggcggg

SEQ ID NO: 68405 - DNA, 1289 bp, Zea mays
  Clone ID: MRT4577_162380C.1
ccggccgggattcggaaatatcaatcacactgatccggcctggagcgctggacagcagcagcagcatcgagctcgaggccgctccgccaccccgcactcgcctgtcgcctcttctcgctttcgccaccggggcagcgctccgccatggctggacctgctgttctcaatgagcgtatcctttcttccatgtcccagaaacatgttgctgctcacccatggcatgatttggagataggaccaggggctccccacttgtccggtcgggtggttgagattcctagaggcagcaaggttaagtacgagttggacaaggcatctggtctgatcaaggtggaccgtgttctttattcctctgttgtttacccacataactatggcttcattccacgcacactctgtgaggataacgaccccctggatgtcctcatactgatgcaggaacaagttgtccctgggtgtttcctgcgagctcgtgctattgggctcatgcctatgatcgatcaggtctagtgtctccgtcacctgatcgcatagtgtttgctatgtttaccttaggccatatattttttccgtgtaattttgagaccacttgacatgttagttttgacttttgaccaagccaccataagacctttctatagaatataataatatagttcttgtaaactagttctgtcccaaggctgaattcttgcatcttatttaatcgttgttcaacatcactagggcgagaaagatgataagattatagcagtctgtgctgatgaccctgaattccgtcactacacggacatcacggacctcccaccgcatcgccttcaagagatccgccgcttttttgaagattataaaaagaacgaaaacaaggaggtcgcagtgaatgagttcctgccagcgaaagatgccatcaacgcaatcaagtactcgatggacctgtatggctcatacgtcatcgaaagcctgaggaagtgatctccagctgcttgattgtggttgtggatgctacaccattttctcaacagctcatccagagtaccgtagtacagacttaacacgaacgaactgtaatcgtgaccaagggatattattaccttctgttcatgttgaaacaatcagcagtgcctttctttccattatatgccataccgaatcaaggcaacttggccctgaaatctttgtggttcaagttaaaccagcactttgacagaacaaggattgctggatgcctggattactgttacataaatgaccattactgaacttctaaaaaaaaaaaaaaaaaagcggcc

SEQ ID NO: 68406 - DNA, 383 bp, Zea mays
  Clone ID: MRT4577_162381C.1
gggtggccgccacacgctcgctgcgcctgcgtgcgtgtgctcgcctcccaccctccccgcaatagatctgcactttccctgccaatcataacttgttcacaacttactgcccgactacatctcaacaccttctatcctccccccagagaccgccgccctctccgaatcatctgacttccatcaatatacatcgaggaccatccaccagcgagtcaaaaatctgttcatgatcaaagttcacgagatcctagggaacaaagctcagttctctgactcttacatgtcagcgcaccaataatcctagcatatcacctgaatcttaaagctgcaaaacctagacattgactccaacagcattcttgataaatgactgccaaacgatc

SEQ ID NO: 68407 - DNA, 215 bp, Zea mays
  Clone ID: MRT4577_162382C.1
tacgactctctataggaagctggtcgcctgcagtccgggccgattccggtcgaccagcgtcgggtgtcgtactgaggagtctgagtcgacggaccgaaaggcgaaactcagagcctccagtttcctcggatctgaggcgatggctgggaagggagggaaaggcttgctccgccgcaaacactacggcgcccaattcccccgaataaggacatagg

SEQ ID NO: 68408 - DNA, 391 bp, Zea mays
  Clone ID: MRT4577_162383C.1
ccaagcagggggtaaatggcaattccggcaaaaaacattgtttggagaagcgggccgggtttattccaactaaaactggggaccgggatggccaattttatttttatccccgggggcgtctccccccccgcaaagcttttaatcacccaacttgttttcgggagggacccccccccccttgggttgggaatcctttcaaaaaaattttttcctttttggttaaaaaacgggacgaccccccattttcgggggggcgccccccccttttaagggaacaaaaggttttggatatacaacccgcgggggagggaatccttaaaaaacttttcctaaaccaaacatggggccccaggttgggtttatgacataaaaacatacagggccagacttt

SEQ ID NO: 68409 - DNA, 673 bp, Zea mays
  Clone ID: MRT4577_162384C.1
cattgggtacctcgaggccggccgggaatcctcccgacgcgaagacgccttcctctccctcctgtctcccgcccatgctacgccgctgacacgttcgcccaatttaaccttacaatgctcgacgccgcctacaacatcaccggcgtgtccagcgctgtgcttccccacgccttgctatcccacctatcgccgccgccgcacgctctggccgcggactctgcattccgccggctctgcttgtgcgcctctcctgcgcgcatcactcatataatccctcgggtctcgatgaacgtgccgaactctggagaccgggtagcctgtcgctgcttcacgttaatcccaacagatgaggcccagcgatctgtctcatgtggtgcgactgcggagcgaaccggacgtcgcccgtagctttcttaaggatgacctccgcggaaatacttggtattctgaataacaggtcattgatgaacgctgaaaatgtgaagactgtactctagatcttaggcctggcgatatcattgagcttaggatgcaacgtgccaactacaggagatgtgtcgagtctctaaaggtctaatcatcgctcagcacaaagctggtggtcacaccacaatcggtgtcacaaggatcattgctggtgcatgagcagagactaccttcgcagtgtactcac

SEQ ID NO: 68410 - DNA, 209 bp, Zea mays
  unsure (1)..(209): unsure at all n locations
  Clone ID: MRT4577_162385C.1
gaagcttaataaactcaaaatgaaatcttttctcatttttgccttgtttttggccgaagtgccactgctcagagcaatttgcatgccgaatggactcgatggactcacaaatatggcgacacctacanaactgtggaagaaagccaaattcgtttcaacaacttcaaagnaaatttgaagcaaatacaacaacacaatgctatgtatcg

SEQ ID NO: 68411 - DNA, 280 bp, Zea mays
  Clone ID: MRT4577_162386C.1
gagatattcgtgctcgcgggcaccaaacctggtcttgtcgacaaacgacaggtgtccacagaagatggagcgagctaggcagaggaatcgaatgtcgcgtccatcgacaccagcgcgaaagccggcttcaacatcacgccgctgttccggaagatcgctgcacccctgccaggaatggagacatcgtcagcgaagctggaggacatggcggatgtcaaccctgactctacttgtagccagtccaactcacaacatcaggagggacatgcctgcgcctgct

SEQ ID NO: 68412 - DNA, 468 bp, Zea mays
  Clone ID: MRT4577_162387C.1
gttgaaatcaaacatccccagattcagacagagaaaagacgcgaaattgcaccctattcgttcggtgccggcacaataaatcaagcttccaaaactgtttattagggttggacctaaccagccccgacacaaaccgagcggaaactcccctcatcactcccccggcccaaggaaatgacgacatgctgcaaacctggaccccaattacaaaaactctctgggtggccagcccgaaacctatggctgcgtaggggatcacaggacaacgccctttcagacaaggatggggacaatgaggccgaaaggcctaccaccgtgaagatcctgtcactccacagaaatgggaactctgggatcctccctgccaaggggaactattcgatccaccgggttttgagcacctgcgtgaccccaacaaggaggctgatccttccttaaatccggcccaggacaaagaggcctaccagc

SEQ ID NO: 68413 - DNA, 350 bp, Zea mays
  Clone ID: MRT4577_162388C.1
aaaaaaaaacattcagttccatattttttatcaaaggcacccaaaaaatcccttgggaactcaaaacaagagggtgtttaaactggtcgcttcggattaaagcccgctttttaaacttttggagctggaccccatagagacaaaaacaatgttaaagttgtaaaagccggtcccaattgaaaccaaaccaacgggctgaccgatgtagcatggcactcaaagggcgtccttgactcccatgttcaaaagtctaaccagttttccactttccttggagtcaacaatgtcttcagaaccacccaagggctttccatggacaaaaacttgggggacagtacccctgccaactt

SEQ ID NO: 68414 - DNA, 274 bp, Zea mays
  Clone ID: MRT4577_162389C.1
tttctttcccgatgccggcccaccgtgccgggggggggttttttggcagagacacgagcgcgattttagcggcgacgctagtactttgggctgtgtgtggggggttcgagatcggtgtgcgggggagacgcgagctggcgcccttggccacctgcttcgcctaatttcaggccgtcaacaccgtatgccgcggctcggtcttccgcgatccgttctttatgaacaccggccgaatcgcttttccactagatcactacctgcgtctacggtaaag

SEQ ID NO: 68415 - DNA, 249 bp, Zea mays
  Clone ID: MRT4577_16238C.1
tttatattttcctccctttctttttttttttaattaaacacacatttacacaaaggagcaaatccacaacagcaaccctcatcttttaacccaatttacaacactcacataaccattaacaacatacaaacaacccaaattaacaaatgctcaacaccaacacttatcttttaaaccaaattacaactcatcacattacattttacaacatacataattaacattttacgaactaattacatacctaac

SEQ ID NO: 68416 - DNA, 2837 bp, Zea mays
  Clone ID: MRT4577_162390C.1
atatttaaaaattcaatatttgtttgtttatgagtgtttgatgagtatattgtacctcttgtaaactgaagcacacgattaattctttgttaaagaatgccatgataatagtttgctataaatgaaattaatgttaaatcaatttgttaaaaattatggtttcttctgaatttagttattgccgatagagaaaaaacattgaaaaaatatttagatcatatacggctgaatttagttattgatgatcttatttgttatattttatttgtttgagcaatacacgcttattttacttcaccctgtttgttactttagtcactagattaaactttagtttaatcgctaaagtacctcgttggtttcagtgactaaaccagactaaagagcattaattgatgtaaataatgactatgttgtccatattaattagtggatatttgctgcaaacagaaagtgaagagggcaaataaggtggaggtcctactttaatcccttttagccatcccttggtgactaaagaattaaagtttagtcacaacactttagtcaccatatttaattctttagggactaaaagtgactaaactttagtcaccccaaactaaacggtaccttagatctatttatttgaggaatgcaagtgtttgaatatatcaactaactattttacatctacctaacgacgtacggacatctaactagtatagaattaacgtacacatgtattgatttgagtgacccatggctgattccagtgatcaacaataatcctgccaagcatcaagctaatcccaaggtgccacggaatggtctcgcccgccgccgctggccacatataccagcaggtgaccgtcggattgggtggcgcttggcacggaaaaaaatttggtgcagcactgctgcaaaccagagtggtttgcagcccctcacaaaaaggaggatagaccccacctgcaggtccagcagataacgttttagttgtattattgttgctgcgggtggggtctatcctcttttttgtgaggggctgcaaacactctggtttgcagcagtgctgcaccaaatttttttcccttggcacgtgttcgggtggtagctggctcctccatgcaatgcctatgcctgtcgtcgcgatcgcaaccaccagtcaagacgaatggcaggcagctaagtagctaacaacaacaggcttgtattgtatgtacagcaatatatatacatctcgagaagctcctagcagagatgcatccatctcgacgacgatccatccatcttaaagcaagcagagacatggagtcgtcgccgctgctgcagctgccggcggcacgcgtggaggctctgagcctcagcggcctctccgccatcccgcccgagtacgtccgccccgccgacgagcgagccggcctcggggatgccttcgacctggcgcgcacccatgccaacgaccacaccgcgccgaggatccccgtcgtcgacatctccccgttcctcgacagcagcagccagcagcagcagcgggacgaatgcgtggaggccgtgcgtgccgccgccgccgactggggcgtcatgcacatcgccggccacggcatccccgccgagctcatggaccgcctgcgcgccgcaggaaccgccttcttcgccctccccgtccaggacaaggaggcctacgccaacgaccccgccgccggccgcctgcagggctacggcagccgcctcgccaccaacacctgcgggcagcgcgagtgggaggactacctcttccaccttgtgcaccccgacgggctcgccgaccacgcgctctggcctgcgtacccgcccgactacatcgccgccacccgcgacttcggccgccgaacgcgggacctggcctccacgctgctcgccatcctctccatgggcctccttggcacagaccgtggcgacgcgctagagaaggcgctcaccaccaccaccaccaggacagcagctgacgacgacctcctcctgcagctcaagatcaactactacccgaggtgcccgcagccggagctggccgtcggcgtggaggcccacacggacgtcagcgccctctccttcatcctccacaacggcgtgccgggcctgcaggtgctccacggcgcccgctgggtgacggcgcgccacgagccgggcaccatcatcgtccacgtgggggacgccctggagatcctcagcaacggccgctacaccagcgtcctccaccgcggcctcgtcaaccgggaggccgtgcgcatctcctgggtcgtcttctgcgagccgccaccagactccgtgctgctgcacccgctgccggagcttgtcacggaaggccaccccgcaaggttcacgccgcgcacattcaagcagcacctggatcgcaagcttttcaagaagaaacagcagcacaaagcaaaagcagaggaagaggatggcggcaatggtgaccaccaccgccacgagccgccgccgcagaccaactgatgggctgcacatgtctttccatccgcccacgcatatcttctctcgcgaaattaataaggatccatcagcattttccatatatttatattagtttcatgctcctacgttactacgagaaaaaaaatagtatctatgatatatagaatccatgtgttaaaatatcactgtaacactaatattatatatgttgttacgaaatcaatataataaaataatttgatataccaaaacactaattattattctatagttttgttagagtaactaaaagttaagatttatatactttaaaagatatataagattgtaccatcactagtaaaaaataaacaataccaatattttataaatatgagtat

SEQ ID NO: 68417 - DNA, 248 bp, Zea mays
  Clone ID: MRT4577_162391C.1
gccacacgtcctgtccaaaacaagaaaccacccgtttgtagagcaggtggtcgaacacctgagtatataaacgggcatggttgtcgtctagggacaagatgtgcaaacttatacaggctctagaataggcatgcagaagcggttgagcacgataacggtgttgtacgtgaaccccaacgcgctgatctttattgcggggtgttaccggcaggtggaggtcttctggtctcagtggggggagttagtca

SEQ ID NO: 68418 - DNA, 315 bp, Zea mays
  Clone ID: MRT4577_162392C.1
gccggccgggctggggctactagttgctagtgctaccaagaacaggaaggaaacaccgccgccgccgcgccttccattccagtactcgcggaggaaaggaacaccagccaacttcttctgagcggccggctgcgggcatgttcttgagcctgcctgtattctactccgtgtgtgttgagccatatatctgatgctcaaggattggttaatttgaacaagtggtgcaactgcgcgtgtacatggatttgctcttcctctaaaaaaaaaaaaaaaaaaaaaaaaaaaaaagaaaaaaaaaaaaaaaaaaggccccta

SEQ ID NO: 68419 - DNA, 770 bp, Zea mays
  Clone ID: MRT4577_162393C.1
cgggtactcttttccacttgaagagtcatcttcagaaatatatgttaggtaaacaatctggtggagaggggtcagggcaatctaaagatggtaagttgttatccagttaatgttcaattctttctgtggtgtttctatttttttttatgatttcaaagttcaatttgaatcaacgcaacctgtattttattaacaggtgcactttttctttatgacactctgtgggatgtttattgctgttatgattgatcaatggtctctatgtgttagcttccttattgttttttgtgaaatgatatatcacctatgtgtgaacatatagtatgtagtcttttatgaaagatggaagttgatgataactttgtaaaggagaatctggtcttttcctagttataaaatagacatctgttgtggatcaacagcgtctgtggtaaggatgcagaatgagactaataaggaagactacaggaagggtcagagtagtctgttcttatgatgactaaatatgcaggattttttagtcatagtgaggctatggttgatagggatgcagagcagattgatactgctgaaattactgcatcatgggaggtagaagagatggcctggacatttgttacttgattaggatgttggtgctaacaataatttgtaaagggatttagttatatgcatttccaaatgccctatccaaacaaaaattgaacttgcctcatatacacctgagacctcacatgagtatacacacgtgtacttctaaaaatgataca

SEQ ID NO: 68420 - DNA, 713 bp, Zea mays
  Clone ID: MRT4577_162394C.1
ctcgaggggccggccggaaaaaaaagggaaaaaaaaaaaaaaaaaaaactagttgctagtgctaccaagaacaggaaggaaacaccgccgccgccgccgcgccttccagtactcgcggaggaaaggaacaccagccagcgccatggtcacgtcgacgaccgccgccgccgtgctgtccccgccgtccgtggccgggcttcgcctggcgccgtctccccgggtgcgcgtggcgttccgcgcggcgccggcgcggcggtccgtggcggcgcgcgcggagctgagcccgtcgctggtgatcagcctgagcacgggcgtgtcgctctttctgggccgcttcgtcttcttcaacttccagcgggagaacgtggcgaagcaggtgcccgagcagaacggcaagacgcacttcgacgccggcgacgagcgcgccaaggagttctcgggcctgctcaagtccaacgaccccgtgggcttcaacctcgtcgacgtcctcgcctggggctcgcttggccacatcgtcgcctactacatcctcgccacctcaagcaacggatacgaccccaacttcttctgagcggccggctgcgggcatgttctcgagcctgcctgtattctactccgtgtgtgttgagccatatatctgatgctcaaggattggttaatttgaaaaaaaaaaaaaaaaaagcggccacaaaaaaaaaaaaaaaaaagcggcc

SEQ ID NO: 68421 - DNA, 451 bp, Zea mays
  Clone ID: MRT4577_162395C.1
ccggccgggagtccggccggggttttagggacgtcgatggtgacgcccaacacgatgcatgagcaacgacaccctaccctgccgatgtgcgcacgatgacggtttcttgagggagcatggcggctatgaccatccgaggcaggagcggatgcggttgtggccatccaaggtaggagcagaggcggcggttacgacctcccctaggcgtgagcgacgacggtggatcctagaggcacgcgtcacagcggcggccacctgaggcgcgcatgacggcgatggctccctgaggcgagtgcggcggcaacgacctgctccaatcattgtttatgcatgaggttgttggttgagcccatattaagactttttcatcaaatttttatgcaactttctataaacatttatacttttgcgcgattcttgtcatccgaaaaaaaaaaaaaaaaaagcggcc

SEQ ID NO: 68422 - DNA, 696 bp, Zea mays
  Clone ID: MRT4577_162396C.1
cctcgaggccggccgggactggttgttagtgctaccaagaacaggaaggaaacaccgccgccgccgcgccttccattccagtactcgcggaggaaaggaacaccagccagcgccatggtcacgtcgacgaccgccgccgccgtgctgtccccgccgtccgtggccgggcttcgcctggcgccgtctccccgggcgcgcgtggcgttccgcgcggcgccggcgcggaggtcagtggcggcgcgcgcggagctgagcccgtcgctggtgatcagcctgagcacgggcgtgtcgctcttccttggccgcttcgtcttcttcaacttccagcgggagaacgtggcgaagcaggtgcccgagcagaacggcaagacgcacttcgacgccggcgacgagcgagccaaggagttctcgggcctgctcaagtccaacgaccccgtgggcttcaacctcgtcgacgtcctcgcctggggctcgctcggccacatcgtcgcctactacatcctcgccacctcaagcaacggatacgaccccaacttcttctgagcggccggctgcgggcatgttcttgagcctgcctgtattctactccgtgtgtattgagccatatatctgatgttcaaggattggttaatttgaaaaaaaaaaaaaaaaaagcggcctacatgaaaagacaaaaaaaaaaaaaaaaaagcggcc

SEQ ID NO: 68423 - DNA, 846 bp, Zea mays
  Clone ID: MRT4577_162397C.1
cctcgagccattgggtacctcgaggccggccggggctactagttgctagtgctaccaagaacaggaaggaaacaccgccgccgccgccgcgccttccagtactcgcggaggaaaggaacaccagccagcgccatggtcacgtcgacgaccgccgccgccgtgctgtccccgccgtccgtggccgggcttcgcctggcgccgtctccccgggtgcgcgtggcgttccgcgcggcgccggcgcggcggtccgtggcggcgcgcgcggagctgagcccgtcgctggtgatcagcctgagcacgggcgtgtcgctctttctgggccgcttcgtcttcttcaacttccagcgggagaacgtggcgaagcaggtgcccgagcagaacggcaagacgcacttcgacgccggcgacgagcgcgccaaggagttctcgggcctgctcaagtccaacgaccccgtgggcttcaacctcgtcgacgtcctcgcctggggctcgcttggccacatcgtcgcctactacatcctcgccacctcaagcaacggatacgaccccaacttcttctgagcggccggctgcgggcatgttctcgagcctgcctgtattctactccgtgtgtgttgagccatatatctgatgctcaaggattggttaatttgaacaagtggtgcaactgcgcgtgtacatggatttgctcttcctctctaaaaaaaaaaaaaaaaatccggccactttccctgtttcactatgccatgttctgctgccagctcagggcttgtgaataacacatacataaggagagcagatgtctgatagcatacaatagcataatgaaacacccggcaaggggaa

SEQ ID NO: 68424 - DNA, 1028 bp, Zea mays
  Clone ID: MRT4577_162398C.1
cccaatccagtgatttcccacatctaggattcgagttgccaataatgaggaaatttgttttgcttgtgtacattcgaacaatcttcttggggcctattttttatgggcacctcattattcttatacaaaagaaattgggctcgacgcttgggataccacacagattcaggggaaaaaaaaacaaagtcggttcagcaaaacgtatcaaaatgaggctccctgccacaggttcagcaaacaaattccagaggccaaggcatgggtttattggagctatttgacttcctgaaaggagccgcgccttcaaagttgcgttccgttatcatttcagtttgtcgaagagctttggtgcaacacacttgtcaacgcatgaccagtagtcgaaggactagttctagatcgcgagcccacttccgtcgctctcgactctcttgacgcatttctcataatcatacaatgtttttacacattgcggcttgcaacgttcctcaaggtaattcttctgatcaacaggttcagcatccgccatggattcgtgattgcaagagaaacctcgcgtccgcccacgcgtccgcggacgcgtgggcggacgcgtgggagaacaggaaggaaacaccgccgccgccgcgccttccattccagtactcgcggaggaaaggaacaccagccagcgccatggtcacgtcgacgaccgccgccgccgtgctgtccccgccgtccgtggccgggcttcgcctggcgccgtctccccgggcgcgcgtggcgttccgcgcggcgcgggcgcggcggtccgtggcggcgcgcgcggagctgagcccgtcgctggtgatcagcctgagcacgggcgtgtcgctcttcctgggccgcttcgtcttcttcaacttccagcgagaacgtggcgaagcaggtgcccgagcataacggcaagacgcacttcgacgccggcgacgagcgcgccaaggatttctcgggcctgctcaagttcacacgatcccgtgcgcttgaaaatcctggacgttctcgactgg

SEQ ID NO: 68425 - DNA, 653 bp, Zea mays
  Clone ID: MRT4577_162399C.1
ctctgggggggggtaataaaattatttgtataataaataaagttacatgctgactttgatttgattcgttccttgaacaacataaatctcagatatctcatggaaagacacttatatttggttgagtttaaaagctcatatttcgtttgcgaaaaaacagaccgttgggtgcgttgtgcaaaacaattccaaccgatgtcaatgtgtcgcacaaaccccctcttgcaaacaaataacaaggcagctttatccggtgatcatggtgccggtgccctcgtccgtgaggatctcgagcagcagcgagtgcgggacgcggccgtcgatgatgctggcggtgcgcaccccctgggcgatggcacggatgcagcactccaccttgggaatcatcccgccgccgaccttctcctcggccaccatccgtctcaccccggcgacgtccacctccctcaccaggctccctggatcatcgcggtccgccagtatgccggacacgtccgtgaggagcagaagcttctcggctcccaccgctgccgcgatctccccggcggcggtgtcggcgttgatgttgtaagcctgcccggcctcgtcggccgctacggtggcgatgaccgggatgtgcccggacgcgatgatggggtggagtacggcggggt

SEQ ID NO: 68426 - DNA, 501 bp, Zea mays
  unsure (1)..(501): unsure at all n locations
  Clone ID: MRT4577_16239C.1
tccgcccacgccgtccggtctccgtgcaagggggggaaaacaaggcaccnnagctctggctgcgagccctctgcgatatnncctcaccaaacnnatgctgnatgaggggttgccgnngcctcaagggtagnacgcccatnaccctgcgtgnngtgggatacccgcaagnnttcaccgnatgnaggntnncggcaagncnntgtgggaccgtggacgtgggcggtgattacctanntgttagggagaagnngcctttttnnngaaaaagnnctagggnatgtnnnattcgagggaagggtnncttttcttcaggtgggttaccccgtcaaggggagttcagnnncgtggtatttttgagggcattatacaccagnntttgagcangaagtatgccnnntgcggcaaagcttcgaggctttgctgaggaaaagaaaggggctngnnaggatgtgaaaccgagggnnaagggggcaagaaagnaagcgggatccgatatattta

SEQ ID NO: 68427 - DNA, 356 bp, Zea mays
  unsure (1)..(356): unsure at all n locations
  Clone ID: MRT4577_1623C.1
acgaagttaggatccgatagagcggcttctcttttttctcttttcggannaaaaaaaagggacaattaagttttcctttgggggatatacccgattgcacctatatccaaattacaggcaacattacagtattaatttatttacagactacggcccaaaccctgtgcacataaataaaatgtctggacggtccatcccttagaagggattatgaataaaacaccacccctgggttacccaggggtatgatagatcctatttaacagactatactggttccttaacctactggaggactggtgattacttttggaaaagaaaaacaagggcggaccataagtggactaaacccaaag

SEQ ID NO: 68428 - DNA, 322 bp, Zea mays
  Clone ID: MRT4577_162400C.1
gaatgtgtgatggagaagtaagcaagtacaccgcaccgcccggccgcaaaatcgatcggtcgtttaccaacaggacaatggcggatctcaccgccctgcactgccgctgcggcagccacaccggcccggccggccagtcaggcaggcaaagaccatgcatgcgcgcacgcaacgtgagacagatagacaggtccgctcgcacgggcgcgtcctctgccggggaccgatccgatccggctgtcgttacgtccgccggcgtgtcgccgtccgccatgatccgttccgatgcaccacccaccaccccaacggtcgacgcggccgc

SEQ ID NO: 68429 - DNA, 578 bp, Zea mays
  Clone ID: MRT4577_162401C.1
cgaggaagaggaacaccagcagcgccatggccacatcgaccgctgccgtgctgtccccgccgtccgtggccgggctccgcctggcgccgtccccccgccgggcggcgcgcgtggcgttccgcgcggcgccggcgcggcggtccgtggcggcgcgcgcggagctgagcgcgtcgctggtgatcagcctgagcacgggcgtgtcgctgttcctgggccgcttcgtcttcttcaacttccagcgggagaacgtggcgaagcaggtgcccgcgcagaacggcaagacgcacttcgacgccggcgacgagcgcgccaaggagttcgcggccctgctcaagtccaacgaccccgtgggcttcaacctcgtcgacgtcctcgcctggggctcgctcggccacatcgtcgcctactacatcctcgccacctccagcaacggatacgaccccaacttcttctgagcgccggctggccgtgtgtcttgagcttgtattctactccgtgtgtgtgtctggctctgcgccatgcatgtatctgatgctcaaagattgtttaatttggacaagtagtgtaactgcgcgtgt

SEQ ID NO: 68430 - DNA, 2710 bp, Zea mays
  Clone ID: MRT4577_162402C.1
gaggttcggccgggaaaaaaaaaaaaaaaaagaaaaaaaaaaaaaaaaaaaaaaaaaaaaaaaaaaaaaatagttgctagtgctaccaagaacaggaaggaaacaccgccgccgccgcgccttccattccagtactcgcggaggaaaggaacaccagccagcgccatggtcacgtcgacgaccgccgccgccgtgctgtccccgccgtccgtggccgggcttcgcctggcgccgtctccccgggcgcgcgtggcgttccgcgcggcgcgggcgcggcggtccgtggcggcgcgcgcggagctgagcccgtcgctggtgatcagcctgagcacgggcgtgtcgctcttcctgggccgcttcgtcttcttcaacttccagcgggagaacgtggcgaagcaggtgcccgagcagaacggcaagacgcacttcgacgccggcgacgagcgcgccaaggagttctcgggcctgctcaagtccaacgaccccgtgggcttcaacctcgtcgacgtcctcgcctggggctcgctcggccacatcgtcgcctactacatcctcgccacctcaagcaacggatacgaccccaacttcttctgagcggccggctgcgggcatgttcttgagcctgcctgtattctactccgtgtgtgttgagccatatatctgatgctcaaggattggttaatttgaacaagtggtgcaactgcgcgtgtacatggatttgctcttcctctaaaaaaaaaaaaatctgggtccagccatatatcttatggctcaaggattggttcatttgcacaagtggtgcaaccctgcgagtacatggatgttcaatgccaatacgtctgagtatctctgaaaacggtaactttccctgtttcactatgtcatgcacattggcattgccatgttctgctggcagcggaggtagctgttaaagaactcatacataaggagtgcaaaaaaaaagaaaagaacgaatttactcaagaagtatatatactaagagaagttcaacatacaaatgttgtgcgattcaatggtgcttgcacaaaaccaccacaattttgcataattacagaatacatgtctggaggaagcttatatgactttgtgcacaagcagcataacgttctaaacctcacgactctattgaagtttgcagttgatgtatgccgagggatgtgctacttgcatgaaaggggtatcatccatagagacttaaagactgccaaccttctaatggacaacgatcatgctgtgaaagtggctgattttggcgtagctcggttccaggatcaaggaggtatcatgacagctgaaactggaacatacagatggatggcgcctgaggttataaaccaccaaccctatgatagcaaagcagatgtgttcagctttgccattgttctctgggagctgataacgtccaagatcccatatgataccatgacccctctccaagcggctgtaggtgtgagacaggggttgcgcccaggacttccgaagaagacgcacccaaagctgttggacttgatgcagagatgttgggaagcagatccatccgaccggcctgctttctcggacattttagccgaactggaggatcttttggcacaagctcagggaacatcgggaaagacggtccaagatccatcaaactcgaacgcgaaagattaacccccatacctgacattttttctcaatccagtgatttgccacatctaggattcgagttgccaattatgaggaaatttgttttgcttgtgtacattcgaacaatcttcttggggccaattttttatgggcacctcattattcttatacaaaagaaattgggctcgacgcttgggataccacacagattcaggggaaaaaaaacaaagacggttcagcaaaacgtatcaaaatgaggctccctgccacaggttcagcaaacaaattccagaagccaaggcatgggtttattaaagctatttgacttcctgaaaggagccgcgccttcaaagttgcgttccgttatcatttcagtttgtcgaagagctttggtgcaacacacttgtcaacgcatgaccagtagtcgaaatattggccggtgcagtgcttctgcccacttccgtcgctctcgactctcttgacgcatttctcataatcatacaatgtttttacacattgcggcttgcaacgttcctcaaggtaattcttctgatcaacaggttcagcatccgccatggattcgtgattgcaagggggaaatccctagtctcgtgcgcccagtaatgccgatacccgatccagcggttggagggccaggccttatgggacgtctgggccccgcccagaacggcaagacgcacttcgacgccggcgacgagcgcgccaagggccggccgggccgggtcaagtccaacgaccccgtgggcttcaacctcgtcgacgtcctcgcctggggctcgctcggccacatcgtcgcctactacatcctcgccacctccagcaacggatacgaccccaacttcttctgagcggtcgtcgaggatgtattctacagacagccgtgtgcgtgcgtgtgtgcttgtcatgtatccgatcaaagtttggttaatttggacaagtagtgcaactgcagaataattggtatttgtatagtgcaccatgccaacatgaatttgatctgtctctgtcttcagaaaaaaaaaaaaaaaaaaggccccta

SEQ ID NO: 68431 - DNA, 707 bp, Zea mays
  Clone ID: MRT4577_162403C.1
gtgcatgacaacttctatatcatatttattcacaatggaagaaagaagaccacaaattttacatttgaataaaaatcatgaaccatccctaatttgaaggctaaaatgtatggttttagagttcaagaaagaaaataggacaaggagattagttcaaaaaggtagagtagaatttctacatgaaaggaagactgcaaggctttggtgcgtcgaaatcagccagcaggccagaaatttgccgttctgccaatcgaaacatttggcttctcccgtttgccgtcaacagccagttttttatataaaaaaacacggccagtagttcgatttgttgccagttccccattttaaattcaatcttgtgtcctcattgctcttctgccattgtatggccatgtgcattgacgatcttaccccttatattctttcacaagtcctggagtctggatggcagctcctatagaacaggtgaatgctgacaactaatggaattcaacttcacttctagaaacaaaatgagactcgcttcacactaatatgcgatctaagtagttgcgagttcataaacatactatgaagttcctcatcttctactgcatttgtacataataaaaatggctgacccatccaagacctagacccctttggtatgcgggatctgattactgcattccaaaggtcgcagtatttagaataacaaccccggccgg

SEQ ID NO: 68432 - DNA, 168 bp, Zea mays
  Clone ID: MRT4577_162404C.1
cggtgacagcggtagggccatctccctcttgggtgaaaaagatggtgcccttgacaccggatgtgcctcttgcctcaagcctggcctacatggcacccatggcggcaggcttgacgtagagaccttccgtgacagccgtagcggccatctccctcatgcctggcctcc

SEQ ID NO: 68433 - DNA, 394 bp, Zea mays
  Clone ID: MRT4577_162405C.1
actgaatgcacttccaacgaatcaaaaaagaggctaaactggaaaagggacccagacaaatgctggttccacggtggtataacctgatgcagcgatgaaaaggacggcaaagaagaacatgttttaaatatcctaccctgagacgcaattttcgccgttaactactgaatatcttgagcggctacgacgtggtctgccggacctccggagagcagaaccctttgaatgagcaacaccaggtaggtgagcctcgctctaggacgacgtcgccgccgccacagggcgccggacacgggacctgtggaacacgcggcaaaacacttacaccgactgtcttctttcggctattccgccctttataatcttggacaccacctcggggcaccttccacct

SEQ ID NO: 68434 - DNA, 426 bp, Zea mays
  unsure (1)..(426): unsure at all n locations
  Clone ID: MRT4577_162406C.1
gggaacaaaaaccctggtcatttttttttcggctcgtttcatagggggggccaacaaaggggacaaccgggggcccccccccttatccaaaggggggacgggcccttacccgggggccgaagcgaacgggaaccccatccttttgattggtaaaataactcggccgaagcccgggtgggcccccacattatttccttcagccgccgccgccgccgccgtagccggcaccaccacccttgggccgaccggcgtagccgccaccgccttcgttggcggcggcaccacccttgcgccgaccggcgtaggcggcaccgccgccataacccccgtcacggggcccgccaccatatccgccgccgccgggaccgccggcgtagncaccggcgccaccgccaccgacacgggaatgggcctggttaacggtga

SEQ ID NO: 68435 - DNA, 494 bp, Zea mays
  Clone ID: MRT4577_162407C.1
tgaaaaacctgagcacactattatgaaataaatctttgaatgaaagaagatagacgcggttttagctaacaactttataagaacgcttaccgaaccaaacaatggacaactttctattcatgaggatctcacagctgctttttttctttccatgctatgtatataatcggctatatagcatagtatgactgttactgcaatagagcctcgatactcaagcctactttttcccgtgaggaacactatatagcccagacgtcatactttactaaatgagtattaagaggactgttacaacaggataaaaacctagcatgattcagcaggagcacgttgctttatgtcgtaccatactatgtgagctgacagacagcaagctcatactaagaagctagctaggattccaggtctaatagaaatgtgatagaatgaacacacattgttgactacggactcagacgagccactgctttatgattatgcacactgcccgg

SEQ ID NO: 68436 - DNA, 305 bp, Zea mays
  Clone ID: MRT4577_162408C.1
gaaaagttggtttaatgcatcgttccgtgcaccgaatgatttcggtaaaaaaaaacacgctatctccaaccacgcattttaacatggagcggccgcaataaattatgggatcacattttaaaacttattacactttgcatgggcctaatatcaaccacacgaaggtgtgtgcactctgcaaagcatctgcgaagccaaatggcttcttttcttacgggggagggccctgaagaatcggtgcgggggcgtaatatatacaatgggatccacaccgaagcctgcccaaagcccactgcattgcacca

SEQ ID NO: 68437 - DNA, 384 bp, Zea mays
  Clone ID: MRT4577_162409C.1
tcctttcttcacgccaatagagacaccggaggggttttctatatatgttgcggcgaaacaaccccaccaagtccaggtaactgccaacctcatcaacgctgaggttgaccacaaggtgcatcaaaatgcaatgactgctaaaacacagagtattaggaacacacgctgatagcaaggttattatatcgaccacacttgaatttttagcccttttctttagccacatgacaatttgatgaaatcgctgttaaagaaaggccatacacttttgatagtggcttgcacccatcgaacaagttttcataaaaacatggaatagtattttttaggacaattattcatgaaccgttttttaaccattacggcaaggattaaaaggtgaat

SEQ ID NO: 68438 - DNA, 193 bp, Zea mays
  Clone ID: MRT4577_16240C.1
gtcaagatcacctccacgcaatcaactttcttttacagcgaccaaaaaaaaacggaaggggaacaaagttttgttgtcaccaaccccccaaattgtgctatcaccctcgcaagctagggcccccaacaccatgaagccaaacacaaaatcaagtcgacatactccacaaaccacggaaagaacgtgcaaaaca

SEQ ID NO: 68439 - DNA, 511 bp, Zea mays
  unsure (1)..(511): unsure at all n locations
  Clone ID: MRT4577_162410C.1
agcttcctaattatgtnggttgtcatcattgtcccttcagtcaaggggcaaggtatgatgacgcttccatcatattccttaaccatgtatcataaggcttctacttgataattgcgtctggacgatcgacatagtttatgtccagttactggtctgtttaatatctattaaggattgccatcactctcaataggtatttgatagtagtcattttctttgctgctatctaatttagtcttaacaacatggttcctttatgcattcgtcttggatgtctgttggaaaggatcaactcagataagtcacattgtcacgtggatggtcctcatgtttgcctgtttaaatatggtcctcatgtttacctgttagaaggtgttccaattgaagtcatccagagagctgacattgttttggaggacattcattccaaaaaacctacgaggcgtgtgtgatcagtgaaattacagcacagacagagcagtaccagtgcatgacttgatgcagagactaa

SEQ ID NO: 68440 - DNA, 2622 bp, Zea mays
  Clone ID: MRT4577_162411C.1
atccaatgtgacatctggtatacttgttaggtttacatatgcgtttggtgtacttattcttcagcctaatttttaatagacactgcacctgtccagtgctagcccgttttctatgtatttgtgtttcttgtgtgggcttattacatcttatgtcttggactcttttgcatgatattgatagatctttaataattattcaatgtcttgctttagagtgttgatctccttgatcatttcgttgtcttcgttcatcctttggactataataaacaacactagcaaacacattagtctaaataactatattgatcatcaaatacaaaaaaaactttaattaaataggcaacaatccattttttgtttaggctctctagagcaaggccatcagaatagtaacctgcaacccgcaaaccactctctaatctacaaatttacctttgtgagaaggaaaccacggccattaatgtttcataaattatgattatagtttttttagtaatagcataaacatgtttatacgtgtgttatcttggtattgtatttcccactataaagtatgaccatatattacatagttatattataaaacaattataaaacaaaagacatcattgatgcttacttaaaccgcaccacacccaaacccaacccaaccgatgacactagctatctataaacccgagcaaacaaaagcaaaccgcacccacaccacacgggacggggacgggaacacggcgagggcgaagccacgcaaacggacacggcacgcgcggcctcacgccgtcacctgcttcgctgctgtccatttagcgaagcggaaagggagggtgcgaccggaaggcccgaccccgacccggaagacgaggtagaggagggggcgagcgacagaggcagtggaggggcgcggtgaggaggccggcggcgcgcgcgcgcttgcggcgccggcggcctggcgatgggggaggtggccgcgctgcgccagctcgtcggccaggtccaggagctctgggacctctacggcgccaacggcaaccccgtccccaggtggtatttacctgacttcgaacatggttcaatcaaggatgattattgtgggggaagctcaggatacaactcggaattactgaagatcatggaaactaaccaatctcccccttgcaagcgaccgcggagagatcgaaaccgtgaaaaggcaccctcctcaaacaaaattgaagtcatggaacaagagatatggagagatttccctgaagatcttttcgaaactgtcatagcaaggcttcctgttgctgcaatttttcgattccgcactgtctgccgaaggtggtcttcccttttgggctcagacagtttctctcgtcagtactctgaagctccacatggactgccatggttctatacaatcactcatgagaattcaaacaacaatgttgcgatgtatgatcctttgctgaagaaatggcaccaccaatctgttcctctcaatcatacgaagatagttattccagtggcatccgtgggtggccttgtatgtttattggatctgagccacaggaatttttacatctgcaaccctcttacgcaatcactgaaggagatcccaccaagatcagtccatggttggtcaagagtcgttgtagggatggtgttgaatggaagaagttctagtgatggctacaaagtaatgtggttagatattgatgggacttgcgaagtttatgactctacaaagaacgtgtggtcttgccctggaacttttcctccaagcatcaaacttccacttgctctaaatttgaggtcacaaccagtggcggttggcagcatgatatacttcatgtgcgcagaaccagatggtgttttgtcatatgatgtaagcaccgggatttggaggcaatttgccatcccactgccactgcatctgactgatcacacacttgccgagttccagggaagggttatgctggtgggtctgctgtgcaaaaatgcagcgacctgcatctgcatatgggagttgcagaagatgactctcctctggaaggaggtggacagaatgccaaatctctggtgcttagagttctacggtaagcacatgaagatgaaatgcctgggcaacagtggtttgctcatgctctccttgaaggcgaagcatatgaaccgccttgttacatacaaccttttgaaaagggagtggcagaaggttcctgattgcatgctaccatggagtcgaaaaaggcaatggataacatgtggcacagcatttgatccggtcccctgcgccttggtctgacatggaattttaccttctttgtctgagcactataatattttagtcctttcatatcattggcctatctttagatctttctatgttgttgtgacaagttctgcgaaaacgcattactgtggtttgctttgtataacgccgccgaaacaatcgaacggtttcctttatcacctgctgttctgttaagcttgtaatctttctgaacgtgcagttacctgcccagagctgagttcattatacaataaataccgggatgttaatgtttggactctggtgcatggagatgcagtggtgcttgttattaccatgaaaataatgtttttaattattatgcatgg

SEQ ID NO: 68441 - DNA, 370 bp, Zea mays
  Clone ID: MRT4577_162412C.1
tatacggtcgcttgcgtccacttaactgctcctatggggcccacctaatttcactggactgaaccgtggttttacccgggtggggcgggtaaaaccctggccccccccacctaattggcctagcagcaaatagccctttaccgagcggccttaccaccgtatgggcccgctgaatgggcattgggacacaccctgcaaccctgaatgaagagcgggacgcgcggtggttccgcgcattaagcccggtgcatttggtggtttcctaacacccgatcctttcgcttttttccgttccttctccgcctttttgccgtttttcccttctttgctctacacgttgggctgccttcccggttccgatttaaagctt

SEQ ID NO: 68442 - DNA, 301 bp, Zea mays
  Clone ID: MRT4577_162413C.1
tgaccgcggcccagcacaataaaccttgatgggggggtggggggatgttcagaatctatctattcttctcgctgaaaccacgcgatgggtcactcaactttgccgtacataggccacatgtaatcagtactctgcctcttgtaaatacaaaaccgccactcttctttcatcgatactggtaatgtaaaaatagcaactttataccagtattaaaaccattttgaccttttccataaaactggactgacctgtttgtctacaaaaatattggtgcatattggggttattcttgaaattattg

SEQ ID NO: 68443 - DNA, 787 bp, Zea mays
  Clone ID: MRT4577_162414C.1
gaaaggagctcagataagaaaaagtcgaacaagcatgtggacagttctgttccagtattcaatctcgaagacatagaggagggtgttgaaggtgctgggtttgatgatgagaaatcagttctcatgtctcaaatgagcttagagaagagatttggccagtcagcagcatttgttgcctccactctgatggaatatggtggtgttcctcagtcctccactccagaatctcttttgaaagaagctatccatgtcataagttgtggctatgaggacaagtctgaatggggaactgagattggttggatctatggatctgtcacagaagatattcttactggattcaagatgcacgcaagaggctggcgttcagtctattgcatgcccaagcgcccagctttcaagggatctgcccccatcaatctttcagatcgtctgaaccaagtgctgcggtgggctctcggttctgttgaaattcttttcagccggcattgccccttatggtatggctacggagggcgcctcaagttcctggagagattcgcttacatcaacaccaccatttacccactaacctctctcccgcttctagtctattgtatattgcctgctatctgtctgctcactggaaagttcatcatgccagagattagcaacttggccagtatctggttcattgcgctcttcctttcattttcgccctggtatccttgagatgagggggaagtggtgttggcattgacgagtggtggaggaatgaacagttctggggtcattggaggtatctctg

SEQ ID NO: 68444 - DNA, 362 bp, Zea mays
  Clone ID: MRT4577_162415C.1
gggggtcaaacaaacttcaacttaaaacatggtttgtaataaaagattacaaaccctaaaccccgtcaatccttggtttaaacccccccttgggacccgcgaagacccctgggtacatgacacacacccctgcttcacaaggttcaaatcccaaatccaatccccccccctcggggggtggttaaatttaacccgacctccttatttatttttgccctacacacacatgcctgcataaacatgcctgggttgcccataaaccggaacataaataccactacctcaccctcccaaaacgattgaaacataaacaagtgacccacccctccccggacccctgggcggacccctgggccgacccc

SEQ ID NO: 68445 - DNA, 327 bp, Zea mays
  Clone ID: MRT4577_162416C.1
aagagtactccgaatgagagcatcttgcgttctcacggcttggagactcgcctattcaggggcgcgtgtgaaaccctgtgcgacaacggactaaaatggctgagctgcgcgaactagtatcttgtgtgctagagcatatacatcacgacttggatatcgttggttatacaaagagtgtatgcacctgaaagcattagtgcttgtgcaatgccatttcctgaacacgccaactacaccagggacacataatgaacattgaaatgagtgtctactcgagagcttatcaatcgggtacctcgaagagacttctttgtggataaacagatg

SEQ ID NO: 68446 - DNA, 410 bp, Zea mays
  unsure (1)..(410): unsure at all n locations
  Clone ID: MRT4577_162417C.1
nnnnnnnnnnnnnnnnnncaagnanannnacncnnnanggcannccnncannggcannaaacaanannnanannnnncaananagnnngggacaaaacacaaagacannnaagcccaaaaaacaagagacacaaggnaacacaanggngngcgggggggaggaggaggcaagaggcaagcccnnagaggaanccagganacgggccaccaggaaccacaggagcgcacaagacaagcgacggcgggaaaagccacaaaanaagccagggaagaaaacccaaaacaaagaagananaacanacaaggccccaagaaaaggggccaaanngcaagaaagggagaagannggccnncncacagggggacaaaggacagaagagccacacccaagggccacgggggccacaagc

SEQ ID NO: 68447 - DNA, 412 bp, Zea mays
  Clone ID: MRT4577_162418C.1
cctccgatcccctctgcccccctctcggagctaagcacccatcccacccaaatggcggcggcggcgaggaacctggtgctacggcacctccgcttggccgcgtcccccgcgtcgtcggtggccctcaggccggcagcggcgctgcagggggccctgtcggggcggcggtggatgtcgtcagaggacgccaaggggtcgttcctggacaaggacgaggtcaccgagcgcaccatcaaggtcgtcaagaacttccagaagatcgacgacccatccaaggtgaaagcagatgcccacttcaaggatgatcttggcctgggcagtttggatgcagtagaggttgctatgtccttggaagaggaatttggctttgagatacctgacaatgaagctgacaaaattgactccattaaag

SEQ ID NO: 68448 - DNA, 278 bp, Zea mays
  unsure (1)..(278): unsure at all n locations
  Clone ID: MRT4577_162419C.1
tggttaccgttgttccggagcgcacacacactcaaccatatctcccccaaatccatccgtctgcacctccgctncaatatgcatatcgatgataaaacccttactggcaatactatcaccctcgacgtggagtcgtctgacaccattgacaacgttaaggccaagatccagtacaatgagggcaaccctctagaccagcagcggctcatctacgctggcaaacagcttgatgacgttctcactgctgctgtctacaacatccagaattagagcaccct

SEQ ID NO: 68449 - DNA, 405 bp, Zea mays
  unsure (1)..(405): unsure at all n locations
  Clone ID: MRT4577_16241C.1
caaaacancagggcacaacaaccacaacaacccgngcnagcaaaccnngcngcanacncncagcaacancagnnncnnccaaacaaccaacnggcngcanngaacncngcggggggggggcaacaacaannaccanncagccagcnagnngcngccnacccccagcaannncnnccanncaaccaacnagcagcanngaacncngcngcnnannnacagcagcaacaacnacaaccanncagccagcnagcngangngagcccngcngccnncnngacacaacaacagnngnngccgnncnaccngcacgcnangccnaacgcnggcacccnnnaacaacngcaacaanngcngccanncaaccaacnngcnnngacaaacccaacagngnncnaccaacaaccc

SEQ ID NO: 68450 - DNA, 155 bp, Zea mays
  Clone ID: MRT4577_162420C.1
agcaggctgaccaaaagaactcctggggggaaggattttaaggtacaagtaaataggttatgcaaaacacgtatttatactggcttttgagagtccgtgattaccactactagaacttggcttttttccaaaaagttggagagagacgaattcct

SEQ ID NO: 68451 - DNA, 810 bp, Zea mays
  Clone ID: MRT4577_162421C.1
gcacgagcatcggctcacgcactgacgcacatccattaccttctataatacgtctgcggtgtcaaaatttccctctcagccgtgttgctcgccgccgccccgccgtgttgctcgccgacaccgccccgccggcagccaaaatgccgttcaagaggttcgtggagatcgggcgagtggcccttgtaaactacggcaaggagtatggccgcctcgtcgtcatcgtcgacgtcgtcgaccagaacagggctcttgttgatgcccccgacatggttcgttgccaaatgaacttcaagcggctttccctgactgacatcaagattgacattaaacgtgtcccaaagaagactacactgatcaaggcaatggaggaagctgatgtgaaaagcaagtgggagaatagctcatggggcaagaagctgattgttcagaagaggagagcatcactcaatgactttgacaggttcaaggtcatgttggcgaagatcaagaggggcggtgccatcaggcaagagcttgctaagcttaaaaaggtggctgctgctgcttagattgctttggtggttcctctatgcttcgatctcttgaaatgtaatgcacgaattactttgacagttagcttgtcaagatgtcaattttaaactggcttatttagatattttgtccaaaatgctattctgaatctgagatagtgttgtattctgatatctatcaagtgttgcattgttgttacattcaacgttgttgccggctggctttcagtttcatgtgaccaatatttgccatctagaaaaaaaaaaaaaaaaagcggcc

SEQ ID NO: 68452 - DNA, 426 bp, Zea mays
  Clone ID: MRT4577_162422C.1
cgaacccggggttttacggaggagtgggggacccggaaatttcgggaccccaccttgcggtataacaagtttttttaaaggggggggtaataaaggctgggggtattccggggaaaaattggttccggggaaaaattgttacccattaaaaatcccaaaaaaaaaaagggccaaacctaaaaggcttaaagcgggggggcccaaaaaagaaggggaccccaattaatgggggttgcccaaacgggaaattttccaggggaaaaactttaaggacccggtcaattaaaaaaaagaccaacccccggaaaagggcgcctggggttttgtcccccaggggggtttttttttaaacaagggaaagggctaaaaggtgtggcccttaaaacgttgggccatgaaaaaaacgctggatggccccaaccgggg

SEQ ID NO: 68453 - DNA, 336 bp, Zea mays
  Clone ID: MRT4577_162423C.1
cctcgagccggcgggacacagtcctcatcctgtagcagcctccttcgggaaccctatcaagggacaccgtgggccgggatggaccgcgacgcaagaggagctgtgtggactgtaccaccacacgagctcacccgaggacgtcttccgccatttcggggagcacagaggaagtatcggcaaggagctcaccacggatcgcgcagaagatctatcagcagtgccatccagacaaagacaacttgtgcctctatgatttgtcaaatgagacttgggacgccacccttaccgttgagagaagacctcctgtggttcctcacccagtactggagaaaaact

SEQ ID NO: 68454 - DNA, 406 bp, Zea mays
  Clone ID: MRT4577_162424C.1
attagggacgggaggaaactagtaaccaaatggggggaaccaaaacttcggataagccttaaataacactttggctttaacgaaaatgacagttctaaatagcccacccaaacctggcgagcatagtttatacaatgacgtgaacaagacgagaagttttacgctcacactaggaatccctaaagcaaactccgaaccagccagacacatcctttcttctttgaggcttccttggacaccatggctccagggggatacttcttctccccactcttgaagactgcaacaaccaccgtttgcctaatgtcccggccagcaaagctaccaagaggaggatattcaaaaaacggcttcactaccaagggcctaatgggaaccatattcaccataccagcatctgcattgt

SEQ ID NO: 68455 - DNA, 184 bp, Zea mays
  Clone ID: MRT4577_162425C.1
tttcgttgagcaacataagaagggtctgtgatggagaggaggatagttctcactgcaccatagcatgctcaaagaagaggcgaacatgttatgaatgtggcatccctgggcacctctcttctaattgcccaaacaagaaagatcctgaatttatttctgatgaaaagaacactaatgttgattc

SEQ ID NO: 68456 - DNA, 751 bp, Zea mays
  unsure (1)..(751): unsure at all n locations
  Clone ID: MRT4577_162426C.1
ggtaccctcgggccgccatcgaagaacacacgcgaactagtgtcgccacgccgcctccgctccgacgcgcgtgtccgccaaatgccgcgcggccacccccacccgctcccacgccgcggtcgcctcctccagttcgccgcggcggcgtccgggctcctgctccttacgctgctcgtcctcctcccggccgcgccgccctgggagcacaccaccgcgcccgcctcgctcctccacgcggccatcgctgcgcacccgttgccgaattcctacgcgcggccctgcgccgaccacctcgccctctcgctgcaccgcctccgcgcctcgctgtcgtccctggagtccggcgacgtccccgccgcgctccacctcgcctccggctcgctccagtgccagtacgactgctcccacctcctctcgctcccggccttccgctcccaccccctcacgtcccgcttcctcaattcccttgccccacaaaccctaaatgccgccctgaaacctcctccctcttccgcccctgccgccgcattccctgcgaggatccgccccgacgccacggtgtgcaaaccgaattccggtgtgaagccgtgtggctactcgaccgtgcaggccgcggtggacgcagcgccgaaccacaccgctggcgctgggcactccgccatcgcagntggtgcaggtacgtacaaggaaaatgtcgtgattccgtatgagaagncaacattttgctgatggggcagggtatgggagctac

SEQ ID NO: 68457 - DNA, 378 bp, Zea mays
  Clone ID: MRT4577_162427C.1
aactgtcccaaaaaaacacaaacaattgttaataacactatttcaagatatttgagtttcatggaatcacagtacaagttcaagaagaatattgcctctaactcaaaagccttctcactacactgagttgttaatttcgtaataatctgctgcatattcatcatggatgcattagcagatgatgtatcaccactttttccagcgctcgcatatgtcttctgacagccattattcttcaattcttctgcgcttgtcgtagccaaccttcgttgcaagctgagcagggacttctcggtcttcctccgttgtcatacctgcttcaccttgtccatcatgtccttggtcgccgaaggctcaacccacacttgcatgctcaca

SEQ ID NO: 68458 - DNA, 338 bp, Zea mays
  Clone ID: MRT4577_162428C.1
acgaggagatccgaaaatttcggagtaggcaatgaattaatggaaatttgcctggatgaatcggtttttgattgaataagccactaagaataacagccaataatgagtgcacttgacctccaatgaagggcaaaccaaaactgaaggacacaatgagctggatactgagggcagaaatagattctgatacgattagagtctgagaggatccctgttcatcgcgtgcgttcactgcgcttcgtacttcgtcaacggaagagggaacccatggatccattgcggttgggttcccttggcccatcagaatactatacagatcacgtggcaagccgaggcca

SEQ ID NO: 68459 - DNA, 359 bp, Zea mays
  Clone ID: MRT4577_162429C.1
aagggcaaaacctatcccccatttatatcggttaaaacggtgtctgttttttccgaaccttacaaccctttcaaaaaaaaacactttgagtttacaacaatccccacccaaaacagggggtggtcaccacccatccaataatttttttttaattcaggggcgaaatcattccccaattttttcaaaattatcattaaactaatattttcatgaacctaaccccctaaaataaagcctggcccctttttttttaacaccccggttgaaacacctttttgcacatatttttaattaaccaggccatcctttccttgatccccttaaaatcctcctcctttttcaccttaaggttggtaaac

SEQ ID NO: 68460 - DNA, 439 bp, Zea mays
  Clone ID: MRT4577_16242C.1
aatacagaagactgcagcaaaaccatcagatctagcagaactctctcgacctcatcggcgttggcggagcgcgtgttgaccggagatggcgccgagcgggtggaggaggagcgcggcggcgcgcttcgcctgtcgcccggccacggtttgcctgctcctcgagatcgacgtcgccgtactgaccctcgcccaggctatgaacgacctgacgcacgttacccacaaggtctacttcgacatcgagatcgacggcaagcccgcatgccggattgtcctgacgctttttggtgaagactgttcctattacgcgagagaacttccgagctctttgcacttgtgataaaccggtcggccacagtggcaaagacctccactacaagggaagtaagttccccataatcatccccagtttcatgctccaacgaggtgactccactct

SEQ ID NO: 68461 - DNA, 705 bp, Zea mays
  Clone ID: MRT4577_162430C.1
gcaaccgcagaaaagcccaccccatgttctgcaaacccggcgtaacggggaccgtcacggccaccaacttctgcccgcccaacctggcgctgcccgagggcggctggtgcaatcagcagcgcccgcacttcgacatggcgcagccggcctgggagaagatcggcgtctacggcggtggcatcattccggtcatgtaccagagggttccttgcgtgaagcgaggtggagtcaggttcaccatcaacgggcacgactacttcaacctcgtgctcgtgaccaacgtcgcggctgctggctccatcagatccatggacgtcaagacctccaactccactggctggacccggatggcacgaaactggggcgcgaactggcactctctcgcctacctcacagggcaagcgctctcgttcagggtcatcgatacagacggacaaactattgagttcgcaaatgtggtgtcacaaggatggaagtttggccaaacatttgcatccgggttacagttcaagtgatgatggtcagagctccatcaccgtcccgggttatttccggtctctcctcgtcactactagtcagtagtcacaggagtacacagtttggaggtgtatatagacactgaatattcatgagccatatatgtggcttgtacctctcattctttttatttgtattgtatatataacaacagccatgtctaaattc

SEQ ID NO: 68462 - DNA, 1573 bp, Zea mays
  Clone ID: MRT4577_162431C.1
aagcgatttgcctctcgtggttcggtgacggatcggaggcgctgcgaattcgaagctggtttctctgggctaagtcgattcggacttacttgttcagtaggtgtagtgtaggcgtgtagctcgatagacgagaagaatatttggcgtcgaagtttcagctaagcaacgagatcaggaagtttcagcaaagctcctggattaaatatttggcatcatagaggttcgcaaaccgtttggaatctagctagctaagaacaatgcatcctcggttgatctaggaatgtaaacccaatttatgagtctgaataggaccaggcatcaggatcctatatgtgggcttcggttaaaacaacgaggcgacttcatttttttatccagattccaataacagtccgaattcgagacaaacatgcgtgcatgcagttcgaagttgccttgttattatatttttcacacgctttcagtgagatatactagaactcgtcactacagcattacatgaatttttgcaggattcaaatctgccggaaacctgtatcttcatccagtatcaaggggaagttctgttgttgtgtgttcggtgatggatacatccaaaagcaagcaaggaccagaacatctccttgttcttgtccatggtatcatggctagccccaaagactggacatatggggaagcagtgctgaagaggcggttgggtgatgattttttcatatatgctagttcaacgaacagctacaccaaaacctttgatgggattgatgttgctggaagaagcttccgtttcttcaaggcctatcaatcctagaaaagcttgctgcgcctttggctcctttaattgttgggcgcaccggtgctcaactcttcctcactgatggtgatcctagcaaggcacctctcctgttacagatggcatccgactgtgatgacaaaaactacatatcagccttggcagcttttaagaaccgtgtcctgtatgccaacgtctcgtacgaccacatggtcggctggcgaacgtcttcgctaaggagagagaagaatcttataaagccctcacatcgttcactggatggctataagcacattgtgaatgtggaatactggacggccgtgtcatcggagggcccacatttcccttccaaggctgccagagctaaagaagctgcacagcgatcgccaaaccgagaaaataccgaggagtaccaccaaatgatggacgaaggttggctggaagaaggtggacgtcaacttccattcgtcattctggccttactctgctcacaacaacatacacgtcaagaacgagtggcttcacaatgctggcgctggtgttatcgcgcacgttgcggacagcatcaagcagcaggagtcacggccatgtcttcctgccaatctatagcagtagcattcagcaatccatttgttcaaattatctgtcgctagcaaataaacccatgaccaaattctgttcgtcagcatccactgagcggcgaaatatttgggactgggacacacaataagctgtgtatcattatcggccgcctaggttttacattgtttgatgtcaattgtc

SEQ ID NO: 68463 - DNA, 138 bp, Zea mays
  Clone ID: MRT4577_162432C.1
aaagaatataaaagcacaacatggccaatcattttttatcattaggtataaacagaaatatcggtgaattacaagggtccctttaatcaaaatgaaatgaaggtccaagcgtgacccaaaaagcgaatgttaaatcag

SEQ ID NO: 68464 - DNA, 763 bp, Zea mays
  Clone ID: MRT4577_162433C.1
agttgccaaaacaagagacggaagacgacccgccagcccctctcgtttttcatccgccttcacctccaaccgcgtgcgctccacgcctcctccaggaaagcgagagcttctgcataacaacaacaaatcaaaagcgagatcatgtcgcagccaacaaaacctcaacaaccaagattcatgtcggatctcgacgtaccaccttgccatctgcactttgataccgactgctgaggaaaatgatgacgactctgtcgactgtgcctgtcaactcaaggcattatgggcatgtgctcatacaacaacgcaacgcatgaaatagtctgactacagaccactatctgaaaaaggagttcaggtatagacaagatcctcaaggacctgaagaactaattctgctgcaatgaaactgtagttcacgacccatagctaggccaatgcattcatctccaaggagatcaccgcaagtagatgtagctactgttcctatgttcagtgctgaggattcgcgaataaagagaacatccagaatcacgacttctaaggtacctgaaaatgcttgtgcccatatattgagcgcctccacatattggggcatttgaatgatcgacgagtaacgagtcattgcttacttatataagaacataagcaccatttgctattgtcacagcgcgccttgcatgatgcaagtagggtatccgaatcatgatcatcatgaacgggcatcgaaccagtataggcttgtatggcatattgccaacttaat

SEQ ID NO: 68465 - DNA, 846 bp, Zea mays
  unsure (1)..(846): unsure at all n locations
  Clone ID: MRT4577_162434C.1
gcatcccttccgagcggaagcggcagcccgtcaggttagctcgctcttgatcgcttcctggtttgctaagcgatttgcctctcgtggttcggtggcagatcggaggcgctgcgaattcgaagctggtttctctgggctaagtcgattcggacttacttgttcagtaggtgtagtgtagctcgatagacgagaagaatatttggcgtggaagtttcagctaagcaacgagaccaggaagtttcagcaaagctcctggattaaattggcatcatagagggcgcaggatccaaatctgccggaaacctgtatcttcatccagtatcaaggggaagttctgttgttgtgtgttcggtgatggatacatccaaaagcaagcaaggaccagaacatctccttgttcttgtccatggtatcatggctagccccaaagactggacatatggggaagcagtgctgaagaggcggttgggtgatgattttttcatatatgtgccggtttatgacctaaatggatgttaaaaaaagtgtatgcaaacatctttgtctacagctagttcaacgaacagctacaccaaaacctttgatgggattgatgttgctggaagaaggtcttggaagtggttaacaagatgcccagcttgagaaagatttccttcctagcgcattctctgggtggtttgtttgctagatatgttattgtattacttcagttagtgtnagtgggaatcaaagaatgcatgttagagtagtgcactttttgtttctacaacaagtgtgttgtgtaatttgtgttgtgcttttagtgttgggtttttttgttggtttttgtgtttagtattttttatt

SEQ ID NO: 68466 - DNA, 292 bp, Zea mays
  Clone ID: MRT4577_162435C.1
taccaggacacggacggtggcctcatactcatctgagacttaccgattgagatgttctttagcacctgcaggaagctgacgatcatgaagagatctgaaaccacaagcctgcgatcggcgagacaattaacaatgtgtgacgacgaccgagggcccgacaacgttcatgtcgagctcttctttttttttatttgagccccagtattttatttggttcttcttgtgcgaaagaccaccagccaaaagggtgagctttgggggtggtgcataatctacaaagcgcatgcatata

SEQ ID NO: 68467 - DNA, 448 bp, Zea mays
  Clone ID: MRT4577_162436C.1
gacggtatcgataagcttgtgaaattgaaaagaaaaaagaagaagagaaaactattgtaaaatcctatatgttagggaagttgctgtcactcattctatgtaccattataacaaatatgttttttttttacttgagccatcattttgggccttatataggtttcaattgggctaagtttggtctatttaattatgacatgtttgacaaaacagtagcatgggtcgactagattagtcacccaatcaacttcctttagatggtttgataatgtaacatcctatactcggtccagtcaccaaacctgagctataggatgttacaacagtaaaagtgatgtttggaatgttaggattatttggtatttatttcactaaagtttttaacttttaatgatgctttacttaagataactaaaagtgaaccacaattttaaactcgatattctat

SEQ ID NO: 68468 - DNA, 851 bp, Zea mays
  Clone ID: MRT4577_162437C.1
gcatcccttccgagcggaagcggcagcccgtcaggttagctcgctcttgatcgcttcctggtttgctaagcgatttgcctctcgtggttcggtggcagatcggaggcgctgcgaattcgaagctggtttctctgggctaagtcgattcggacttacttgttcagtaggtgtagtgtagctcgatagacgagaagaatatttggcgtggaggtttcagctaagcaacgagaccaggaagtttcagcaaagctcctggattaaattggcatcatagagggcgcaggatccaaatctgccggaaacctgtatcttcatccagtatcaaggggaagttctgttgttgtgtgttcggtgatggatacatccaaaagcaagcaaggaccagaacatctccttgttcttgtccatggtatcatggcaagccccaaagactggacatatggggaagcagtgctgaagaggcggttgggtgatgattttttcatatatgctagttcaacgaacagctacaccaaaacctttgatgggattgatgttgctggaagaaggttagcaaatgaagtcttggaagtggttaacaagatgcccagcttgagaaagatttccttcctagcgcattctctgggtggtttgtttgctagatatgctattgcaatactccactcagtctcagtggaaacaaagaatgcaggacagagtagtgcgcttattgttcctacaacaagagggccagcaaaatcaagatgtgcttcaggattaggttctattgctggattgcagccaattaattttattaccttagcaaccccacaccttggggttagagggagaaatcagcttccgtttcttca

SEQ ID NO: 68469 - DNA, 858 bp, Zea mays
  Clone ID: MRT4577_162438C.1
gccggccgggttccggaatcccttccccgcggaagcggcagcccgtcaggttatatagctcactcttgatcgcttcctggtttgctaagcgatttgcctctcgtggttcggtgacggatcggaggcgctgcgagttcgaagctggtttctctgggctaagtcggttcggacttacttgttcagtaggtgtagtgtagctcgatagacgagaagaatatctggcgtggaagtttcagcaaagctcctggattaaattggcatcatagagggcgcaggatccaaatctgccggaaacctgtatcttcatccagtatcaaggggaagttctgttgttgtgagttcggtgatggatacatccaaaagcaagcaaggaccagaacatctccttgttcttgtccatggtatcatggcaagccccaaagactggacatatggggaagcagtgctgaagaggcggttgggtgatgattttttcatatatggtaaggcatgctagcatttgaattcttcattcactaggctcattactagtcattatctaaccatttgttctagcttctacagtgccggtttatgaactaaatggatgttaaaaaaagtgtatgcaaacatctttgtctacagctagttcaacgaacagctacaccaaaacctttgattgggattgatgttgctggaagaaggttagcaaatgaagtacgtccctttgaagtttgtcctagaaaaaaggtttcaagcattctccttgttggagactgatatctcctgttcctggatcctaatgaactgctttagaagctctgataattgtgcctatgggaacaagggtcttgggatgtgggttacaaagatgcccag

SEQ ID NO: 68470 - DNA, 1878 bp, Zea mays
  Clone ID: MRT4577_162439C.1
atttcttccgagcggaagcggcagcccgtcaggttatagctcactcttgatcgcttcctggtttgctaagcgatttgcctctcgtggttcggtgacggatcggaggcgctgcgaattcgaagctggtttctctgggctaagtcgattcggacttacttgttcagtaggtgtagtgtaggcgtgtagctcgatagacgagaagaatatttggcgtcgaagtttcagctaagcaacgagatcaggaagtttcagcaaagctcctggattaaatatttggcatcatagaggattcaaatctgccggaaacctgtatcttcatccagtatcaaggggaagttctgttgttgtgtgttcggtgatggatacatccaaaagcaagcaaggaccagaacatctccttgttcttgtccatggtatcatggctagccccaaagactggacatatggggaagcagtgctgaagaggcggttgggtgatgattttttcatatatgctagttcaacgaacagctacaccaaaacctttgatgggattgatgttgctggaagaaggttagcaaatgaagtacgtcctttgaagtttgtcctagaaaaaagcttccgtttcttcaaggtctatcaatcctagaaaagcttgctgcgcctttggctcctttaattgttgggcgcaccggtgctcaactcttcctcactgatggtgatcctagcaagccacctctcctgttacagatggcatccgactgtgatgacaaaaactacatgtaagtgaagaacagaaccatttagaggctaagttcatcatcttactgaagcataatgttcctttctcattgtttgacagatcagccttggcagcttttaagaaccgtgtcctgtatgccaacgtctcgtacgaccgtatccttccctgcaaaaatcgtttcttgaactactggttacctccccccaaactatctctgcttctgttcctgttctttgttttcttgatctttcttgtcccagacatggtcggctggcgaacgtcttcgctaaggagagagaagaatcttataaaggtagcagtacctccagagctgattccactgacagcttacttgtcacactaaactgaacggcatttgaatagatcatcttgttgcatttcctctgcctgcatgcagccctcacatcgttcactggatggctataagcacattgtgaatgtggaatactgttcgcccgtgtcatcggagggcccacatttcccttccaaggctgccagagctaaagaagctgcacagcgaacgccaaaccgagaaaataccgaggagtaccaccaaatgatggagggtaagtaccagttttgcagtccacaccggatttgcttcttttttttgaacgaattgtgtgacactgattcttgaaacagaggagatgctccatggcttgcagaaggttggctggaagaaggtggacgtcaacttccattcgtcattctggccttactctgctcacaacaacatacacgtatgtcttgttcttctggagtgatgtatttttctctctagtttgatccaaattcttctgtattaaagaagagccatccaaattcgtggcatctatgcaggtcaagaacgagtggcttcacaatgctggcgctggtgttatcgcgcacgttgcggacagcatcaagcagcaggagtcacggccatgtcttcctgccaatctatagcagtagcattcagcaatccatttgttcaaattatctgtcgctagcaaataaacccatgaccaaactctgttcgtcagcatccactgagcggcgaaatatttgggactgggacacacaataagctgtgtatcattatcggccgcctaggttttacattgtttgatgtc

SEQ ID NO: 68471 - DNA, 150 bp, Zea mays
  Clone ID: MRT4577_16243C.1
cggacgcgtgggcggacgcgtggggtcattgtttgaatgctctccttttgcgctcgagttaaggactttgaaattggtcacacggatttgttgaggaaaacaaaatgctcttgtccaatattgattagaagggatttgataaggattccc

SEQ ID NO: 68472 - DNA, 2727 bp, Zea mays
  Clone ID: MRT4577_162440C.1
tcgaggccggccgggatcccttccgagcggaagcggcagcccgtcaggttagctcgctcttgatcgcttcctggtttgctaagcgatttgcctctcgtggttcggtggcagatcggaggcgctgcgaattcgaagctggtttctctgggctaagtcgattcggacttacttgttcagtaggtgtagtgtagctcgatagacgagaagaatatttggcgtggaagtttcagctaagcaacgagaccaggaagtttcagcaaagctcctggattaaattggcatcatagagggcgcaggatccaaatctgccggaaacctgtatcttcatccagtatcaaggggaagttctgttgttgtgtgttcggtgatggatacatccaaaagcaagcaaggaccagaacatctccttgttcttgtccatggtatcatggcaagccccaaagactggacatatggggaagcagtgctgaagaggcggttgggtgatgattttttcatatatggtaaggcatgctagcatttgaattcttcattcactaggctcattactagtcattatctaaccatttgttctagcttctacagtgccggtttatgacctaaatggatgttaaaaaaagtgtatgcaaacatctttgtctacagctagttcaacgaacagctacaccaaaacctttgatgggattgatgttgctggaagaaggttagcaaatgaagtacgtcctttgaagtttgtcctagaaaaaaggtttcaagcattctccttgttggagactgatatctcctgttcctggatcctaatgaactgctttagaagctctgataattgtgcctatggaaacaggtcttggatgtggttaacaagatgcccagcttgagaaatatttccttcctagcgcattctctgggtggtttgtttgctagatatgctattgcaatactccactcagtctcagtggaaacaaagaatgcaggacagagtagtgcacttactgttcctacaacaagagggccagcaaaatcgagatgtgcttcaggattaggttctattgctggattgcggccaattaattttattaccttagcaaccccacaccttggggttagagggagaaatcaggtgcatcaccaaaatgtttcggattacgtttacaaaatatactgcacattatccagcaaaggctcgattcctgggaaaacgaactctctatttgttattttgttcattcatgtagattttgaagttgcatggtatgatttttacaagcttggattatatcattgctgaagtggtcaataccaactagcatctataacttttgaggaaaaaacgacgaacttattgggacctgttcctgttagtgctgatcaatttctttgacacatgcttatatgtttttcccccgaattaccagcttccgtttcttcaaggcctatcaatcctagaaaagcttgctgcgcctttggctcctttaattgttgggcgcaccggtgctcaactcttcctcactgatggtgatcctagcaagccacctctcctgttacagatggcatccgactgtgatgacaaaaactacatatcagccttggcagcttttaagaaccgtgtcctgtatgccaacgtctcgtacgaccacatggtcggctggcgaacgtcttcactaaggagagagaagaatcttataaagccctcacatcgttcactggatggctataagcacattgtgaatgtggaatactgttcgcccgtgtcatcggagggcccacatttcccttccaaggctgccagagctaaagaagctgcacagcgatcgccaaaccgagaaaataccgaggagtaccaccaaatgatggaggaggagatgctccatggcttgcagaaggttggctggaagaaggtggacgtcaacttccattcgtcattctggccttactctgctcacaacaacatacacgtcaagaacgagtggcttcacaatgctggcgctggtgttatcgcgcacgttgcggacagcatcaagcagcaggagtcacggccatgtcttcctgccaatctatagcagtagcattcagcaatccatttgttcaaattatctgtcgctagcaaataaacccatgaccaaactctgttcgtcagcatccactgagcggcgaaatatttgggactgggacacacaataagctgtgtatcattatcggccgcctaggttttacattgtttgatgtcaattgtcaaatggcatgtgtttcctcatggaacagacgaagcattcgaagttgatataaagacaacctgacgtcaacttccattcgtcattctggccttactctgctcacaacaacatacacgtcaagaacgagtggcttcacaatgctggcgctggtgttatcgcgcacgttgcggacagcatcaagcagcaggagtcacggccatgtcttcctgccaatctatagcagtagcattcagcaatccatttgttcaaattatctgtcgctagcaaataaacccatgaccaaactctgttcgtcagcatccactgagcggcgaaatatttgggactgggacacacaataagctgtgtatcattatcggccgcctaggttttacattgtttgatgtcaattgtcaaatggcatgtgtttcctcatggaacagacgaagcattcgaagttgatataaaggccaccctaaatgtcattaaagaaaaaaaagtaaaaaaaaaaaga

SEQ ID NO: 68473 - DNA, 314 bp, Zea mays
  Clone ID: MRT4577_162441C.1
agctgagaacgacagcttttcaatatacaacaccctgtacttttattgactattgacacggagaccgaacggaagattatttaccaccttcaaaagattggcggagaacgggtaaattaactgatccaaaccaatcatacatacatgcatcgctattcataagtcatttgtgctaaagctcattctgaaatgagacgctaatgaatacgcaagatgctgaaagcctattgacacgtctttttccacacatgctactaatctaattaactaacttaacaaactgcttatacatgtccactataaagtgatgctct

SEQ ID NO: 68474 - DNA, 401 bp, Zea mays
  Clone ID: MRT4577_162442C.1
aagccccctaaaatgacagcttttttatttggcgaacgaatgaactagttttaatttcctgggtcgggcgtgaagaagatttaacttgcaccaagggctgaaataaagagattgggagagaagagattggctaaaaaaacaaattaactcaaccttttgcagctagctaacgagggggaaaaaaaagggggggactgggtactgggtaaaaacagcttttcagcctgcacgaccgttggaactgctacacaacaacggaagacgccgtggtcgacaagaaggcgcctcccgccgcgtcgccggcgcaacaacaggtgttcacgatgagcaggggctcaactttgcgtagcaacagcgacagcgcggaggggcacatgtcagcctcaagaccgggctctact

SEQ ID NO: 68475 - DNA, 409 bp, Zea mays
  Clone ID: MRT4577_162443C.1
tttgttttttcttttgttttttctttttctttaacccccgaggcagtgcaaccggccccaaagctttgcgggcgtaccaaaccttatggtggctaaataaaaaaagccatcaaactgttaaaacccaaaaaaggcggatggcctttcggaagaaaaactaccctcgaattgcagctcaaaaggcctttctaaatgttctggggaattgaaccaccgggcttgcaaacaaaacttatagggtggcacgcccataacccttctaaaaacttgggaaccaaaatggaccttagtgggccaggatttaatgggcggcaacttaaattagggactggcccgtaatcagggggggcctcaaatgcgagggggctaatcacaatggggggtaccctggggaccccagggattggaa

SEQ ID NO: 68476 - DNA, 477 bp, Zea mays
  Clone ID: MRT4577_162444C.1
ccggccgggaccgccagatcgcgactgttccccttccttatccgcggaggcgacgcaacgcaacgtcgcccgcgggttcggacggcggctaggtcatgggcggggccgtgcggatatggcttgccgctgactgcaccttcggctcggcagagcgtgaaggcatctggaaccttcggtcgctacagatctctcagattgccgccacgccatggagagccaagagaggctatagatgatctcatgcttgacgtctcgccagcacccgacctatgagagctcgcctcatagcgcttgggtcgacctcacattcccacctgtgatagtagcctagagcgcccgtgactacctatatagcatgttcattcatctgagtgctcataggctagctgtagaaagagacggatgtgacttatatacagagatgatatatgctacatactccgatcgccaaaaaaataaaagagatattgcggccca

SEQ ID NO: 68477 - DNA, 250 bp, Zea mays
  unsure (1)..(250): unsure at all n locations
  Clone ID: MRT4577_162445C.1
ggttgctctagatccgtgtcatcctggtggttttgtgaggtcnaaagccgcnacctaatgagaagaggctttacaaggtgtgggactactttttttctcttcctctcccagagacgggcctctagaagctcctcaagggcaccaccgcccggccggtcttgatcaacaaagacgcggacgggggcagctacaagcgggctcattctacgccgtctttccctactacttcccttaagctcttctttttttc

SEQ ID NO: 68478 - DNA, 788 bp, Zea mays
  unsure (1)..(788): unsure at all n locations
  Clone ID: MRT4577_162446C.1
ccacactgagcttcccgctcccgtggccttagttctttcttaacacttattcactcgcacattcccccttttcttgaaattcatagagaaagttctaattgtcataccacaccggactcatccataccagtggacacggactattcgaataggtttcaactctgcgcagaggggtacactttacccactagcccggtttctgcgatctcaccgtcgcgagacccgaatgccggatctctttccttacccgtacgtcctaaccttaacggttatccggaaggagtcaggccaccaccatgcccaaaccggacaaaactttccccctccttatcctcccggtgctccccagccttcttaaccctggggttggaccgtacgagttcggatcgagtgactgcccacacagtctcgagtggttgtacgataaaggagtacaggtagtgaaaaatgacaagccggtccttatatgaggggacgatccttctgctcacgcctaaaccagctgagccaacaccttaggccctcccctgaaccagggagtccctgatcaccccactctcaaggtgatgagggtgagtacccttcatcgcataacttttcagaaagaggttttatttgaagaaacactttgccctacttccagatccacatttcgtaatcggaaataatatgttaatgcgggccatctcttactcacaatgcaatattcccncatagttcccggcctaggcagtggtagagagaataggtaatttatgcatcgagggnaggatggnactgccttcgtc

SEQ ID NO: 68479 - DNA, 330 bp, Zea mays
  Clone ID: MRT4577_162447C.1
aaattcaagacgaaaccaaaattcccaacctttcgcaacctaaaatttcccaatccttcttggatcaagcccgggggggaaaagccatggccgtttccgaaaccaacgacgcccccttggtggccggcaaccagccaacggaggaggaggtgccggtggaaaggcccgcgccaccggaggaccaggagggggagaggttgcgttccctgaggttcgggcagaaggcggcggcccaggccctgttgctggcggccgttttagaggatccaggtttacttccgcgtgcttgcaacgtaatagtttttttatggggcaacctaaatcaaatta

SEQ ID NO: 68480 - DNA, 2026 bp, Zea mays
  Clone ID: MRT4577_162448C.1
gtccctgggtttctcttgatgagcaaagaacttatgggaggtccattcggttttcatcttcctcagtgatggttcaatttttgtcctctgcccagttgttccatttggaagtgactatagcaagaagctattttcaggaaatatatgaagatgttaatgcatttggattgaaatcttcaaatccaaatgttgtcactaattcacatttggccatagcttggttggaggcaacatttcctgacctgttacatcaatcaacagataccagttttctgatgtcaaaagctcatgcatatgcgccattagatgattctctaacattacaggggcctctttgtacagtttgtgaggaaagtaatgaatctgaaagcaagagcagcagttgtgaaggaaaagctgtaggttttatgtacagttctgctggcaaagattcagttcttgtgactgcctggggtagtgggctgcttcaggttgatgctcttgcagatgaaattcaaccgcggtggaacattggggttccttcgcgtcttaatgtcgattcacatggacaaataaataatgttgccatgatatgtgactccaattcgcaagatccattggcgttgagatcgcatcgaccatctagtacaggatcaaacgtgaagagcaacatagaagctgtttggatgggacactctcctcctttgctaaggctcgcaattgtggatttggcattaccaaaaactcctaatgataactctctgtcattgtttgctgatccccttgttccagagagattttattgtgcgcatggtggggggcttgacatggtcacactgcacttcctaccattttcataccctgaaatgtcttcgacaccaccctctgtgcatcctgtcctcactacagggaacagcgaaacaagctcaccttttctttctggatttgttaccatagctgatgcatatggtcatgtacagttagctggcatcacatgcttgggtgagtgctttgtggtggagatgaagggttggaaggaaccggcacctcttcagcttgacttagaaagcaaaatcgtcaaggatgtggagcctcctgcaactggaatgatcagcaaagaacttattgctggtccagacccacccatacttccatcatcttcaagcctgaaatcgttgaccccagactctattgaaggaaaatctacacttcaccactatattaaggtcttccatgagtactatgtggagtacggacacaaggtgttcattgaactcaaggagcatgcggactatttgaagacagaaatggaagataaacagaaacgcttggaagcagtgaagaaatcacttatatccgtagaagccaaagatggagacatcaacaagaggatagatcgggccttcaaggtgtatgaactgttggagaagcgaatagatagcttcaagatgcttcctgctgcaaacaagaaaccattaacccaggcagagcaggagttcaaatcacagcttgatcggttcgcagatgtggagctggatgctttgcgttcctccattgccgccctgagtgctaggatgaaacgttttgctcagcaatccacgggcagtgcggctagcacaggaatggtgccatggcaggcacaaagggctggacggagccatatctcagaatcccagatgtcacttctgaaatcttcgcttgagaagctctccctcctcaacgaagagaacagtctgaagctccggcttattgatcatgaactcaagaaccaggaacgataggttggcaggtccatgtgcgacttattgccatattggtattttgttgttcggacactaagtacaggatccataggagcctgtttgctgtcactttctgtggggggctcgcgaactgcatttgcatgtcagcgtgttgtaagttgtaactagcaatacagaaccaagtgcaaaccgctacaccttttcctcccaaaaaaaaaaaaaaaaaaaaaaaaaaaaaaaaaaaaaaaaaaaaaaaaaaaaaaaaaaaaaaaaactcgagaaga

SEQ ID NO: 68481 - DNA, 461 bp, Zea mays
  unsure (1)..(461): unsure at all n locations
  Clone ID: MRT4577_162449C.1
acagggcgcccgnccgcgggggggaggggcgacccccaacgcgaggcgacgcagcccgcgacaggccccaccccggcccccagcgcgcccgcgcgaggacggagagttgtaaggaccgaggcggcgacggccgagacgaagcngaagcgcaagacccncgagggcaccaacggcgggagggaggcgagcccccangcancgggggcgggcgcgaagaggaccancgggagccacncaagggcggaggacccagccgggcggaccggcccaggcgcccacaccaagggaaaggncgcagcgaggaacagcaccngggaaagcgacggccncggagggggcagcncccgggccacgaggaggcccggggccgaggcaaaaccgaggggagccgcgaccgcaacaccgggggaaggccccgcagcgcgggcccaagcngggggcccgggggcccccgccgcccc

SEQ ID NO: 68482 - DNA, 275 bp, Zea mays
  Clone ID: MRT4577_16244C.1
aaaaaaaaaataatttaaaaaaaaaaaaaaaaaaataaaaaaaaaataaaaaaaaaaagccagggggtgggaaaataaaaaaaattacggaccgcctcttacaatcataacacttcttatttagtaggggccgaaattctataacctttccgtttgtcaacaatataagtggctgggaaacccctttttttaccctttttaatagtttttcacctcccccccctttcaactgttggaataataaaaaaataggccatcaccaattgcccttccca

SEQ ID NO: 68483 - DNA, 442 bp, Zea mays
  Clone ID: MRT4577_162450C.1
tgctaggatgaaacgttttgctcagcaatccacgggcagtgcggctagcacaggaatggtgccatggcaggcccaaagggctggcggaagccatgtctcagaatcccagatgtcactgctgaaattttcgcttaaaaagctctccctcctcaacaaaaagaacagtctgaaggtccggcttattgatcatgaactcaagaaccaggaacgataggttggcaggtccatgtgcgacttattggtattttgttgttcggacactaagtacaggatccataggagcctgtttgctgtcactttctgtggggggctcgcgaactgcgtttgcatgtcagcgtgttgtaagttgtaactagcattacagaactaaggtgctgtttggttcacgaaaaaaaaaaaaaagggtaatgatcgtggtttacattcgattacgggcggtaac

SEQ ID NO: 68484 - DNA, 129 bp, Zea mays
  Clone ID: MRT4577_162451C.1
tcgcgcacacatagcccggttgccgaggatggatttctatgaatgcaacgtgcctgatcatagtcctgtttcataccttacggcttggaagctccaactccagccgccatcgttggactcaacaccgat

SEQ ID NO: 68485 - DNA, 544 bp, Zea mays
  Clone ID: MRT4577_162452C.1
gcggtggtttttgttttttttttttttttttttttttttttttttttttttttttttttttttttttttttttttttttttttttttttttaaatggggacacaagggagagcgttgattcatcacgggggggggcatatattaaaaaccacggggggggggggggggctctcctaattaacgagatctccattaaaaaaggggggagcttgccatcctttttttcccacttataaaaaaacgagaccccccccgagggggggatccatccccagggtcaaaaagatcggggttaattaaaccaaaaacaccttcccgcccgtcaatggacggggcggaacaaaggggggcttaaaaggaccctcccaacgggtcaaaaaaggggggggggagcggggccctcaaggggggggcccaattggggagggggcccttgccgggggggggggcctgcacggggaaacccaggaaggggaccatggggagccccgcgtgcttaatctcccccagggggagccggtccttttttttagggggggccccc

SEQ ID NO: 68486 - DNA, 328 bp, Zea mays
  Clone ID: MRT4577_162453C.1
aaaaattgatgtggtatagggatatttttttatttcctgcacaacacacatttcaaaacaaaagggccataaaacccctatcacccacagacattgacttacaccaggggccttgttattcctgaatctccatcacctggaacactattatcctactacacagagcccaggtcccataacatggattggtccctaaggcaccattcatctgaaccccctccaaccactccttgaaccgagctatgcattccatgcaagctcgaattcccccctctccaagaaagctgaacccgcgtatcacaggatccccctacagagctgttgttta

SEQ ID NO: 68487 - DNA, 544 bp, Zea mays
  Clone ID: MRT4577_162454C.1
gtacgcctgcaggtccggtccggaattcccgggtcgacccacgcgtccgaaaggtgtggcagaggaaggagaatgtccctgatgcatcctgatgcttgagaaagagactcgtgagctggagagatggctcagcggttaagagcaccgactacccttccaaagggcttgagttcaaatcccagcaaccacatggtggctcacaactacctgtaatgagatctgatgccctcttctggtgtgttggaagacagctttcgtgtacttacatataataaataaataaatctagaaaaggaaaggaaaggaaaggaaaggaaaggaaaggaaaggaaaggaaaggaaaggaaaggaaaggaaaggaaaggaaaggaaaggaaaggaaagaaaagagactcgtgagttgttctgaggctggaagttctaggatggatagaaatgaatgaatgggccgaagcagtgtggaaggaaatctgccatctgccatagtagactatgccatgtttagatgactccaggtatgggcggatcaacgtcgtgcggtgct

SEQ ID NO: 68488 - DNA, 288 bp, Zea mays
  Clone ID: MRT4577_162455C.1
agctcggaattcgtctcgagcaatattcaaaaccctattttttcactccacttcgcacccaacctaaaggtgcgggatcaactaaaacatgctgttggaaccacaaaccccccggctaaataccttcatttaggggcaccaatcaatatcaacgcgtactctgaagctcacatagcgaaccgtgcactcctttaaccctatatggctgatggaaggaccctttttatcaaggcatcttacggacaatagcccaaccattaaccaatctgaacatgtttaatactacat

SEQ ID NO: 68489 - DNA, 504 bp, Zea mays
  unsure (1)..(504): unsure at all n locations
  Clone ID: MRT4577_162456C.1
cccacgcgtttgaccactttatacaccactgggacacgcacactcacactcacatcccatgacactcatatccagagaggcagcacaaaactaatgatcgtagattggttggaacagaggcngcttacgctctataggacacgcgcgtgatgccgcgtcactggccatctcgtccagtagactcactaggagtctctccggacaacgagcaaacagacgaccacgccggatatgattaaggttggcgtcctgtagggactccggagcgaggtcgacacttacatgggcgcacgcaccccagcctggagcggtgcacctcgctggtctgttggcgcgcggagggtcctgtggaccagcagaggtctgctgaggacgacgaccgcgggcgtgctgcttgtatggtcctcatggcctgcacgctcccgggggtgaagagtgcgcagagcacgccgactcggcactgcgtagcggggatacgagctgaggctagcggaggtggcacgg

SEQ ID NO: 68490 - DNA, 191 bp, Zea mays
  Clone ID: MRT4577_162457C.1
gaacacaattattccttgtcgattgaacaatagtttacatcatggttcaaactgaaaaccaacgtgcgctcaaattcattctggcaccttaaggtcaacgggggggccttccttaattgccggggaccaaagttgtggctttggcccaaactttgtttttgaccggtttgctatgttgttaacgaagtttt

SEQ ID NO: 68491 - DNA, 522 bp, Zea mays
  unsure (1)..(522): unsure at all n locations
  Clone ID: MRT4577_162458C.1
nnnnnnnnnngggggggngnnnnnnnnngcagcaccaagaagcaccaggggnnccnnaagannaacnnnagaaaaagccggacgggggnaacagcanccancganccgcagnccaggcngnnggangcangggncngcngaaaccgagggggaacacagcacgaacaacggacacagagcgaccnngcaancaaaaacacagangggcaacaacaaacacgacacgaacgaagaaaaacccncgggacnagggnaaacancacgggagcgaacaggaaaacngggccgcgcgggccccaccgcncagnnccnccagggcccggcggaggggccggagccgccgccacgggggccaccgccgaagccgccgccaccaccaccggagccggcggcgccaccggagccgncgccaccggcggagccggcaccgcccncacgggggccgccaccggcagagccgccgccnncacggcccccaccgggccccccggcggcgcngcacggccggcgggggacggggcc

SEQ ID NO: 68492 - DNA, 388 bp, Zea mays
  Clone ID: MRT4577_162459C.1
gaagcgtagtaaacttcgagcgggaccggcgatatccgccatggacatgaccactgccgccgctcgctggagcttccccgcccgtctccagctcctcacgagacgtcgcctttgcctcaccgcctcatctgcagcaccacttacttctgtatcagggttcagttgggcggacgtactccgcatcgctgtggaacgactgcgcagccacgagtcctacctcacagggaagatggcattcgttctcaggtgcaaatgcgatctggatcgtggagagcactacgtgaagatcactgtcgacgatgacgccctctggtacatctacatgggatttacaatgcacatcattgcacctccattattcaggataaatggttaagtttagaccatg

SEQ ID NO: 68493 - DNA, 505 bp, Zea mays
  Clone ID: MRT4577_16245C.1
ggcttggaacctttgggctgatttatgtgcttgctgaaacttctctttctcgagtcagactcccgcctttacttacgtcgatgtattcgtgtcatgtaccttgcgtcgaaacttcctttcgtttcaaaccttgctgacggaagcttgaagggagtatagagcagaggcgaaacctacgttaatctacgttaatctgcctcagttgcggagttgtgtttgaggaggattgtcgcggctcgttgaggttggttggccgggtatgtgttgtgccgggacgtacggccgtcggggttagattgtgtttgttttcgtgttggacttgaggttgaggttgtgtttccgtttggaggtagagtagcctgtcgtctgcggttatgtggaggttgagtgggttcgttcgtgtgtgttgggcggtgaggttgaatatcatctatactcgcgcatacgtagctgtcggggagttaggcggtgccttagattacggcgcttactgtgatgtcgagct

SEQ ID NO: 68494 - DNA, 281 bp, Zea mays
  Clone ID: MRT4577_162460C.1
agtcgtgcggtcttaaccattggaggcacaatgatccgagaataaggacaaaacaatggcggtgctactccacccacaccagggaactattcttcatggctgctgtctgcacggacagagcatgcacgttctactagatacgactatcgtcatcagaaacggggtggataaacctacacaacaactttgcaaatctcccatctgcctacttgcctcatgaggcaccaaaaactacataacacatctacacacttctgctggtctaatgctacattacaaat

SEQ ID NO: 68495 - DNA, 605 bp, Zea mays
  unsure (1)..(605): unsure at all n locations
  Clone ID: MRT4577_162461C.1
gaccccgagtctcggccggggttcatacccgcctaccttttctccctaccagctaccatcctccacctttgtactcttgtcctcatctccctttcccctccataggatgctgtcacaggaggaacagtgactcagcggcagctcagtgttggtgagctgcaggcctgctgcagctcagccacaccaatccactccactcctcgctgtcactgaagggaacttttcatattatcattgaatactgatagatataaagcatcctttgatggatcataaggcatggctctggagaaagaaatcagcagaaagggagttggagaaggagaaggttttgttattagagaaatccttgcaagacttaaatgagcaactttcgtttgctcattccgagtgcgttgagaaggatgccattttagctaaacagtcaaaagtagctgaagaagccatattaggttgggaaaaagctgaggccgaggcactagctatcaagacacaacttgatgatacattagatgaaaaaatggcaatgcancacaggattccccagctcgatgaggctctaaatgttgccctggccgagagggactcactcccgcgggagacag

SEQ ID NO: 68496 - DNA, 830 bp, Zea mays
  Clone ID: MRT4577_162462C.1
gggccgggacatgacgtgtaccccaagaaccagagagccaccaacccaacccctgagcatctccggccacgcatccgctaagcacacgcaaacagccgcccccacgatactcacgaggctccttcccctccgtgcgctctcttgtttcccccgtcccatggccaccccaaccacgacgccggcgacgatgcgggccgtgcagtacgacgcctgcggcggaggcgccgccggcctcaagcatgtagaagtccccgtcccttctgcaaagaagaatgaggtcctgctgaaactgcaagctgcaaccatcaacccagttgactggaagatacagaaaggggacatgaggcctctgctgcctcgtagactgccttttatcccagtgactgatgttgcaggagtagttgttgatgttggtcctggagtgaaaggtctcacagcgggtgatcaagtcgtcgccatgttgaactcttttaacggaggtggactggcagagtatgctgtagcatccgcaaacctgaccgtcaaaaggccagctgaggtttctgcagctgagggtgctgggcttcctattgctgcaggcactgcgctccaggcactgaggtccattggtgccaagtttgacggcaccggcaagccattaaacgtgttggtcaccgctgcctctggcggcgtaggcctgtacgcggtgcagcttgcaaagctagcgaaccttcatgttaccgccacctgcggcgcacgcaacatggatcttgtgaagagcttgggcgcagacgaggtgatggactacaggaccccagagggggcgagcctgcagagcccctccggcagga

SEQ ID NO: 68497 - DNA, 429 bp, Zea mays
  Clone ID: MRT4577_162463C.1
gtgtttttttttttttttttttttttttttttttttttttttgaagagaaatcttaaaaatacatgcccgtttaacgtaacagcacagtccacagttccccacacacagatggggagacagattctacaaaggtaaaataccaatccttactcactcagggctggttttatttggtggaactggaagcacagtaccggagcacgcccccgtgcggggacgggcagtcttttcccgaagagggacttggaccaccacacccccttggtgtcggggggcgcggggtcttttttcgggggggggtcgtcctgcggggttctgggcagtttgctcacgtcgaaaccttcctccttgggccgctccaccagctgggtggacacgtccttgtggatgcttgttttcctgcaaaggatccaaaggtttttgggggg

SEQ ID NO: 68498 - DNA, 319 bp, Zea mays
  unsure (1)..(319): unsure at all n locations
  Clone ID: MRT4577_162464C.1
ggaaaaaccgggccgacccacgcgtacggtttttttgggcgtgtgaccgtgtcctatgtttaactgagtacataaagagagatgggcgacgttcgttgtacatacgggttgtctatgtatatgtcgatacatatgaaacgtgaggcaagccttgtgtagttgtgtacctgcctgcatacatagggtattagggatggtagctgtgggtatggatactagcgagtttcgtatctggtggatatgaataatggtnnaaaaaaaaaaaaataaaaaaaaaattaaaacatacctttttaccaaaataaaaaaaaaatgggcg

SEQ ID NO: 68499 - DNA, 322 bp, Zea mays
  Clone ID: MRT4577_162465C.1
gaacaaaggcaaggggcacgcggcgatgttggacaacaacaagcacccccgaatggggaagccgcaggagaacccaaccctgagtacgcggagcgggacaggcaccgaggtggagcaatacgacgaaacgggagacgagatcaggacaatgcaggacggcaccacgatcgacaagaacttgacgacggaggaggagaaaggcgccaaccgcatgctggagaagacccggaagcagacggaggagggcaagaaggaaaaggagaaggcagaggaggaaggagaagccgcagaggggcccaatgaccaaaaggagaagacccgt

SEQ ID NO: 68500 - DNA, 464 bp, Zea mays
  Clone ID: MRT4577_162466C.1
aaaggggcaaccaaacttaaatttaaaaaaaagggacaggtgaaaaacccttctacaaaaaaaaacaaaaatattacaaaatcaaaaagttctcccacaaaaaccgatttgaaaaaaggcccccaagggaaagggaaccccccccaggggtccaaccaaacaattcaaagggaaaggcatggaaaaacctcattccaggggaaaaatccccaccccattttttataaaacaaagggcaataaaagaggaccgaaatatgaggggttattacaaaaaaaaaaacactgggttttaaagcccccctcgaaaacaggggaatcccccccttaactggttcaaaaggttttacttaattggctttccaaggctttgcaaagttatccaaaaaagggcctttggatttggcccccccaaaaaaacccgtatacccaaaaaaaccggtcaaaactgaagggctgggcccc

SEQ ID NO: 68501 - DNA, 641 bp, Zea mays
  unsure (1)..(641): unsure at all n locations
  Clone ID: MRT4577_162467C.1
atcgattcgtcgctgagggatacctggtcaccacctgcgggctcaccccagcgcaagcgggcagggcgtccaaggggctcacccacctcaagtctccggttaagcccgacgccgtcgtcgcctttctcgcgggcgtcggtctcgccaaagcgacatcatcgccggtatcgccaggcatgaggcccgagagtgtcagggaaagggtggcatgcgctgagaagcttggtgtgccgcgcaatacagggatgttcaagagtgccctgtgggccgtctattgcgttggtcccaactccattggtgcaaaattggatgtcatcaaggcgactcttggatgctctgaggcggagctgacccttgtggtgcgcaagtcacctccaattctgaggatgtcagaaggcaagctgagtcgcgcattgaagttcctgaaggtggatgttgggttgaagcttcagtacatcttgcttaggccagcaatacttgcctttagcatgcagaggcggctgatgcccagacattatttcatcaagattctgaaggcgaaggggcttgtgaaggaaaatgttgacttttataatgctctttgtttaactgaanagagatttgcccagaagtttattgatccttacaaccagagtattgca

SEQ ID NO: 68502 - DNA, 1682 bp, Zea mays
  unsure (1)..(1682): unsure at all n locations
  Clone ID: MRT4577_162468C.1
tgggtacccctcgnggtccggccgccagaccatggccccgcggggtcaatctgtcggcaactcgccatggcctccctgtgagccaacttggccgcccgacaaaacgtctctcgtcgtctgcgcgtctcttccccaccgaggctgaggcggcgttccgcagcgatgctgcgccttcaacatcatttcttgtcctccatccgcgcgtcctcccatcgccactgcagcctcctctctattgctaccactgccacttctcccgatcgattcgtcgctgaggaatacctggtcaccacctgcgggctcaccccagcgcaagcgggcagggcgtccaaggggctcacccacctcaagtctccggttaagcccgacgccgtcgtcgcctttctcgcgggcgtcggtctcgccaaagacgacatcaccgccggtatcgccaggtacccgcggctcctctgctccaaggtggacaaaaccctaacccctcgcttcgctcagctcatgagccttgggctatccccttcccaaatctcccgcctcattaccatcgtccccaacatcttcgtcgctcccaaaaagatctcccacctccagttctatctctccttcatgggttgcttcgatcgggttcactccgccatcaggatcaatccaatgctcctcagtcggaaccttgaggatgtggtcaagcctaacatagcattcctactgcagtgcggtctaactgtttctaatgttctagagttcccattgctgataggcatgaggcccgagagtgtcagggaaagggtggcatgcgctgagaagcttggtgtgccgcgcaatacagggatgttcaagagtgccctgtgggccgtctattgcgttggtcccaactccattggtgcaaaattggatgtcatcaaggcgactcttggatgctctgaggcggagctgacccttgtggtgcgcaagtcacctccaattctgaggatgtcagaaggcaagctgagtcgcgcattgaagttcctgaaggtggatgttgggttgaagcttcagtacatcttgcttaggccagcaatacttgcctttagcatgcagaggcggctgatgcccagacattatttcatcaagattctgaaggcgaaggggcttgtgaaggaaaatgttgacttttataatgctctttgtttaactgaaaagagatttgcccagaagtttattgatccttacaaccagagtattgcagggcttgcagatgcttatgctgctgcttgtgctgggaaaatgcctcatgaagattaggcgcattagcagcagcatgctagggatcatggtgaagcaaaggcagagatagtcggttcaggtcttctctgcatgtacttgaacagcccctcgccaaactattgtgcagttccttgatgcataccaatgcttgcaacagatgctgcctttgtgtgttgaaatgaaattagttcttccttaagaccggtgttgtgacctatcatttcaggtaagccattggctattttcagatgggtataatgatatgttactctgttctttctgtgtttcaggtctaaatattgtctgtacttgaagtcttgaattaattatgtattgaacttgtcacacagttaattatttgatttaatcaaatatttctatctgaagtatgattcttatttcaatattataaacaattttcc

SEQ ID NO: 68503 - DNA, 260 bp, Zea mays
  Clone ID: MRT4577_162469C.1
attcggctcgaggcgcgtctagggccatgaggtaatggtacaggtgttccagaccatagcggatggctgcacccacgcggggatctctgactgacgctcgatgcttagggtgcaactcacgcgaccgagcaggaaaagggggtgcctcatatcgatgcattgggtaaaaaagctatggccctatcacgggcatgaactagacgctattaaactctagatgctgatggccaagctgattgtggatacggagctcatggcta

SEQ ID NO: 68504 - DNA, 807 bp, Zea mays
  unsure (1)..(807): unsure at all n locations
  Clone ID: MRT4577_16246C.1
agtcaccctcctctgctctttgaaacgcgcaaaccagcaggctcatctcatctgctggtggtagtgctgccccacaatggctagagctgcactgcttcctgtcgcgctgctgctgtgccttgcgctggccgccggcgccaatgccgagcggaagccggtcggtttctacgggctcaagaacaagaagggggatttctccatcaaggtcaccaactggggagccaccctcgtctccgtcctcgtccctgatggccaaggaaacttggctgatgttgtcctcgggtacgacacccttcgtggatatgttaatggcaccggctcattcggggccacggtcgggcgcgtggtgaacagaatcgccaaatcccgcttcgtgctcgacgggaaagcctaccgtctcttccgtaacgacggcaataactccattcacggcgggcacagggggttcggcaaggtcatatggaccgtcaaggagtacgtgcgcggcggtgacaccccgtacatcaccttcttctaccacagcttcgacggagagcaaggattcccgggcgacctggacgtgtacgtgacgtaccagctctccggcccctacgagctcagcatccgcatgaacgccacggcggcgaccaaggcgacgccggtgaacctcgcgaaccacgcgtactggaacctcgccggcccggnnagcggcgacgtcctggagcacgagctccagctgctcgcgtcgcgctacacgccgctcgacgaaccaaagatcccgacgggccaggtggcgcccgtggcgngcaccatgtacgacttccgcgc

SEQ ID NO: 68505 - DNA, 302 bp, Zea mays
  Clone ID: MRT4577_162470C.1
ctgactgtgtgataaacgtggctgagaaggcgtccagcggcggtaacaaggagaacaagtccactaagaaggtggccaagtccacgaagaaggcaaccaagtccccgataaaggcctagaaattagtcagttcacgagcactctgctgaagcatgttcgtgcttagatatgaggagcttatgtgttccatcctaatttactctttggcgtgaggcccgtgatatgaacactagcgtgtttggcgtgatgtgcgccgtgatctgattttgcaattcatcatctcggtgaattaaacaatcaag

SEQ ID NO: 68506 - DNA, 178 bp, Zea mays
  Clone ID: MRT4577_162471C.1
aaacgatccaatggccttattttgtttaataaataaactggtattacacaacgtttgagtggagtccttcggaaccccaactgacaatctacctacacagtggggggcttcaagcaggggccggcaatcttcttatgttttttcacaacagagtcgttttaccatcagctagtaacat

SEQ ID NO: 68507 - DNA, 208 bp, Zea mays
  Clone ID: MRT4577_162472C.1
tcggtttatgaatgggtacgacaccgtgcttagttaaggctgtggagacggactactcgctcccactcgcttgcatgatcaaggatgtacctctaggacccgagccagatgctgacgctgctcctgtagctcgatgcggactctattagctgtgctgcagccaaagaccaatatactgctccaaatcctggcgaggatctggaccatg

SEQ ID NO: 68508 - DNA, 474 bp, Zea mays
  unsure (1)..(474): unsure at all n locations
  Clone ID: MRT4577_162473C.1
tcgcgcggccatatggccgcgaacgtgccatccctcaaccggctgcggggatgcccgtgtgactatacgcaacacggccgcgaagggaagccaccaggggcgtccgggaggccgaggcacaggcccaacggctcgccggacttgcctccaccgcctacctagacagcaagctgccggacgacaaaggtttcgacccactacggctgggacaccgaccccgataacctgggatggtttttttttctcaccacccccccgccggaggggacatgctctggcgtggncgtgatggtcatccctgaggtgctgactaaacgaggtgtgatccaggaaccgcagcgagaccacggaggccatgcggatcactgccggctcccagacactcagcgagggggggatggactaccgcggcaatacgaggataatcgacgcggagaggatacttggtatctgggcctggcaagccaggatcat

SEQ ID NO: 68509 - DNA, 553 bp, Zea mays
  Clone ID: MRT4577_162474C.1
ctcgaggccggccgggaaaaccgtatagttgagacgccggcgtcgcgggcctgcctgcgggagtactccagggggcttcgccggaccatggggatcgcttccgtcgtgtttccaagcttcgagagtgtgtggtggcgaggtaattcctcgtcggtgtatacacggcgtcgccagtccgccatgtgatgtcgccaaagccctgcactgcatgatttctgacaacgagcagtccgaggttcccgagtgtattgttggagacctccctgagcaacaacctggtgaaggttgtccccactatactcagtgctcaggaggtgatgctggcaacatggaggactttgaggagttccaggactacgacgagttctagtttttcttagtggcaaacccccagtcagctgcctgtgaaggccttatcttctacgtttcgtattccacactttgatattaatgttaatgactttggctatgtattagactctgtggatgtctcggacatcttattgtaataaattacctttccgccaaaaaaaaaaaaaaaaaatttgcggcc

SEQ ID NO: 68510 - DNA, 344 bp, Zea mays
  Clone ID: MRT4577_162475C.1
cccacgcgtccgggaaaaaaaaaaaaaaattaaaaaaaaaaaaaaaaaaaaaaggaaaaaagaaaaaaaaaaaaaaaaaaaaaaaaaaaaaaaaaaaaaaaaaaaaaaaaaaaaaaaaaaaaaaaaagggcggcagtttttaaggtttaaagtttacttacccgtgatttcaagatatttgtttttttatagtgtaactaaatttaaattaactggccttctttttaaatcgttttgactggaaaaaccttggcgttaccaaatttaatcgctttgaagaaaatacccttttcgccagttggctttttagcgaaaaggcccgaacatatggcctttccaaaaat

SEQ ID NO: 68511 - DNA, 190 bp, Zea mays
  Clone ID: MRT4577_162476C.1
tggactacttcgagatcgcgagcggtcgccctttttttgtttttttgaataactcaacgataactctttgtacagactcagtaaacgagccggggctcaaattcggagatatgaaccgacccagactctatggggggcatgaggtaggccgcgatgatcttggacaccagagatgcgacaagaggaatcc

SEQ ID NO: 68512 - DNA, 628 bp, Zea mays
  Clone ID: MRT4577_162477C.1
cggggtggggcggtccccattgttgcagacccggatcttgctacaggcgccgcccgccgctcgggtaccccttgtaccgattgtctttcttcccgccttactccggtccgcgctgcctgcctcatactcttgccaggacggtgtccgcccttctcttcatttttgaagccacgcggcgcgacccgttgaaagctacaccctggtgcggggtccccatcgtctgatcgcgcccctaaggaggagctaagagaggcctatgaacttgcagatcgaggatcatgcataacgatcagcatcccacaacaccagggatggccgtgatacgcatgctacgcgcagcggtgttccgcctggtcttatacacgcgctgccccatcaaacatgacctttacttcgactctgtgggtgcgccatgcatgacgcgctctaggagaagtcatacccctttgtgatcgctgctgattgcctgtgacccgacttgccaggtgggttgcttggcaagatgatcgactggcctgacacgaccagactctgcacctgttataagcactactgttatacgcagcgtgactcctcgctgacctcagttaacgctcaaggcaatggtttggcccgttgctgacctgca

SEQ ID NO: 68513 - DNA, 1061 bp, Zea mays
  unsure (1)..(1061): unsure at all n locations
  Clone ID: MRT4577_162478C.1
cattgggtacctcgaggccggccgggaccactccagactccactcttcttgctctcccctccccccagtccgtcgataaagccgaggcatcgggactgcggcaggtagaaggagcacccattgattccgcatctcgtgcaggctctccccaccgcactcccacgcctgataccataccattccgccgccgcatcgacttctcctcctctgaacccgcggcgggggcggacggagatccagccggacctggatcggcctactccgacaccggtaaacaagactgcccctcagctgtgtgctcggaagaagtggagggatttcacggttcatatccgtatctgcctcgaggaacccgctgcgagaaaaagggagtggacaggggccccccggctcggtcacgagctatggacagaaccgccaatgcagtgttggatatcgagggtctgcctcaaccacctgataaatgctgctccggaagtccaaaaatgatcagggccttgtcacgcaagggttcgaatcggatggaaatgaagggtggtgatgagctgcagcagcaagaggatctgaccagaaaacttatcatcaaagttgtgccatctcagctggagcagcagcgggccctggttcactgcactccctgcgcgcctgtcctcctcattgactccgcggaaggaaggagcagcaggaggtttggccggctcatcacgcccgtcaataaccctcggaggattctgctcttattcgcgacgctgtcgagcgtggggacgacgatactgatctacttcacgctggcgatcaacagcagagcagaggcctagtcgtctgaagaggaccaggggagatcagatgcagcgtgtctgtctttattcgtgagcgagtgagacgatggatgagggggagttgtacccccttcttcctcgcgtgtatgtatatcggttgctctcatgctctgtgtgcctttttttcttcatcttcttcttgtagatgaacgttgaccttgttgattttcctctcgatagcnnnnnnnanaaanaaaaannnaaaaaaaaaagggcggccgc

SEQ ID NO: 68514 - DNA, 842 bp, Zea mays
  unsure (1)..(842): unsure at all n locations
  Clone ID: MRT4577_162479C.1
ttgggaccctcgagtccggccgccgccgctttaccactccagactgcactcttcttccttccgcttccgccttcgccacctcccccacctctccctccgtctggtcctgcccgcgcctcccctccccccagtccgtcgataaagccgaggcatcgggactgcggcaggtagaaggagcacccattgcttccgcatctcgcgcaggctcccccctccgcactcccacgcctgataccataccattccgccgccgcatcgacttctcctcctctgaacccgcggcgggggcggacggagatccattccagccggacctggatcggcctactccgacaccggcgctttttgggaagataaacaagactgcccttcagctgagtgctcggaagaagtgggagggatttcacggttcatatccgtatatatctgcctcgaggacgaggaacccgctgcgagaaaaagggagtggacagggcccccccccccggctcggtcactcacgagctatggacagaaccgccaatgcggtgttggatatcgagggtctgcctcaaccacctgataaatgctgctccggaagtccaaaaatgatcagggccttgtcacgcaagggttcgaatcggatggaaatgaagggtggtgatgagctgctggagcaagaggatctggccagaaaacttatcatcaaagttatgccatctcagctggagcagcagcgggccctggttgctccacactgcactccctgcgcgcctgtcctcctcttgactccgcggaaggaagagcagcaggnagtttggncggctcatcacnccgtantaacccctcggaggattctgctc

SEQ ID NO: 68515 - DNA, 778 bp, Zea mays
  Clone ID: MRT4577_16247C.1
ctgtcgagccctagtcctctgttacttctcccgccgccgccatcccctcccgttctccgccaccggcaatcccctcccgacctccgccacctctgctgagagcgagaagagatggccggaaagggagatgggccggcaatcggcatcgatctcgatacgacctactcttgcgtgggtgtgtgttactactaccgtgtcaagatgatcgccaacgaccagcggaaccgcaccacaccctcgtacgtcatcttcaccgacgtccgagcgcctcatcgagagatgcggacaagaaccaggttcgcatgaaccgcatcaacaccgacatgtgatgcgcaagcgtctcgttgtcacgaggattagctgatgcctctgtccagagagatattaagctgagtgccttcaaggtcattcctgggcccggtgagaagccaatgatagctgatcatgacaagggggtaggagaaatatgattgcagccgaacagatcatctcgtctcatggttctcatcaagatgtgtgagatcgctgaagattaccttggaagtacgatcaagaatgctgtgtgtcacggatcctgcctacttcaacgactcacagatgcacgtcacgaatgatgctgccgtgattgctggcctcaatgtgctgcgtatcatcaatgagccaaccggtgctgctattgcctatgatcttgacaacaaggcgaccagcgactacgagaataatgtcctcatctttgaccttgtacgtggtaccttcgatgtctccctccttactattg

SEQ ID NO: 68516 - DNA, 123 bp, Zea mays
  Clone ID: MRT4577_162480C.1
ctggcattattttccttgacaagtctaactagaggttttgttcgtacttcgagtgggagaacattcaattagaagagagataaacaactaactagaaaataaagaagtatgcctgcgcactta

SEQ ID NO: 68517 - DNA, 486 bp, Zea mays
  unsure (1)..(486): unsure at all n locations
  Clone ID: MRT4577_162481C.1
ttttgttgtttgctgttttcctgtttttgttttttggggncgttcntcggccaaaatgtgttcaggggaaagcaaaacagcaagcgacgaccgaactgcgtggtttttgaaaataacaaatgggtttggtgccttaaactgatgttcagggggggggctcgagcagcgtcataagacttgggtccggngcattcctcccggcgtcctagagcgaggggaaggtccggctcaagccctgaggaaaacgggagaacgcctggctcctgccatgatacttggtgggcttggacttgtnccaccagaaccaggccctgtcctttttcacactagcctgccagaacaggggggggcagttcaaaagggaggccaacttggcggtcaccgtcgccggcgttgagaagatgacattgaccatcacgtggaacgctactgaatgggtgggaactgggccgaagccgaagaacatttcggaaacccggaaggact

SEQ ID NO: 68518 - DNA, 301 bp, Zea mays
  Clone ID: MRT4577_162482C.1
ctctccactgccatcttcaccccgccatggcttcgcccgcggcggcttctcgccatgttcagcgcgtggtctcgcaagcccgcctgcgctcagcacggcctttgagaagccaattggctctcaaccgatgggcttcctcctcttcaggcgctcggcggtctcccgccagctttggagcttcttccgcatcttcctcggcagctatatggcttgcagcagccgctattggcatcactgctcccttggcttacagcttgtcaacggcagagtctgccaagctggatgtctcgtcacttgccga

SEQ ID NO: 68519 - DNA, 361 bp, Zea mays
  Clone ID: MRT4577_162483C.1
ctgtatttactttgatgccagctgaaattccagaaaacaacaacttggtgtatgcttctttcactgacaggattcatgcattttttcccttacattttatcctgtgctagtagagaacaagctgttacatatatattgtaataccgtttaatgttgttatgtttcattcatgatttcttaagaagctgctagtcatctagatgttttcaaatattgtttaattggttgtttccttgcagattttagtctgatgaattttttatatgcagaatttttagtggagggctcataatacttattggattagcttcaagatggattaaatcaaatagttccagcttttggctatatctcactcgag

SEQ ID NO: 68520 - DNA, 362 bp, Zea mays
  Clone ID: MRT4577_162484C.1
gacacatcacaagaacccgggagcgtggaacactttatatccgcacacatcagacgacgcacacacaggctttcatcgaagatacaagaaaggaaggactcgattcataacattgcatggattactcatgcatggaagatcctttacactccacacgtatctgtacgtaactttttgaccgccatctcctgttatctgctcttcaccttccttttggtttcccggagattctgctcatcctttttaacgccttcgatcttcgcggctgacggattcgtagacgttttgctgagcttgggcgccagctacttgccctgcgccaaaactacattgggcttttcggccttaatggaaaccatttt

SEQ ID NO: 68521 - DNA, 825 bp, Zea mays
  Clone ID: MRT4577_162485C.1
atggttcagatcgtcaagcatcgcgacttgtctcccaaggacttcctgatggaggaaggggcagcatcttctgtgccacgaggctcttaccgccctgcacctggtgctgctactatgcacgctgcgcagcagcacacgctcgtgcagacatccagggctctgtcaggggctgctcatggtggggcgttgtctgcagctagggagttgctgcgtaacccaccaagttccacggcctcgccgggagccatgaggcagtggcgcgaagatgtcgaccgtctccccgtgaggcaggaacccagggagactctccgggctttcatctctcgtttcaccaaggtacgggggactatacctcgcatctccgatgcctccattatcactgctttccgacaaggggtgcatgataagaagatgttggagaaattggcgatgcatgacatggaaaccgtcactacgctcttcactctggccgacaaatgtgccagagctgctgagggccgtgcatggcactcggcgccgcaaactggagttacccagacgggcggctcaagtgccaccacccacggcggtggcaagaaaaagaagaagaaccgcggtcacgataggccacagtctggtgctccggtcgccgcagctgcggctgggggctgggacaaacgcagcaagcgcccacagcaacagggaagtgacagtgcgtcatgccctgtccaccccaacagtcgccacagcgcctcggaatgccgagagatcctaaaactcgcgaagcgcatcaacgagcggctcgacgccggcctggcaaggagaaggtcgacgaaggtgatgtag

SEQ ID NO: 68522 - DNA, 414 bp, Zea mays
  Clone ID: MRT4577_162486C.1
cggccggggcccagttctcaccagggacgggaaggagaagacggtacgcgacggatcctcacccccatgcgccaccagaagaacctgtccaccccgatgcctgtgagcgccatggcgtcaaaaactgaacctcaatatctacaggctcaatagccccaaccgtttcatgctcgccaaactggtgctagatcatgttaccaagcaaacccccgtaccttacaaggctagggacacgcctgccactgatcctcatcctgaggaacaagatgatcgcctgtttcacataccggaagggcaataacgtcctgcagctgctccatagccttctcaatggcaaggacaacgaccacatcactaacaacgttagcgacactcgatgcctttggcatccccatacacaatcacatctacctt

SEQ ID NO: 68523 - DNA, 450 bp, Zea mays
  unsure (1)..(450): unsure at all n locations
  Clone ID: MRT4577_162487C.1
gaaaaaaagcgggccttaatttaaaaaaaaccaaaaattttggaagacccacccaaaaaaatgggggaaaccacaggggggggggggcttcatttaaccggagagatacaaaaaggggaggggggaggggggttgagggaatttcccaaataaaaagaaacannnccggggcggggggggggccggaaccccacacagggggggcggggagagtgcacccatggcccgggtaaagtccccccacggccgggctgtgggggggaaacaaaagggggacgggggggggaccctgggctgcaaaaaatttgggttggtaatgcaaaagaagggggcggaaaaaggttcaagcggcggcaaaagcaccaccaaattgcaaaatgattggaagggggtgggcaaaagaaggtaattncataaatttaattggggggggggaaaaatggggggggg

SEQ ID NO: 68524 - DNA, 512 bp, Zea mays
  Clone ID: MRT4577_162488C.1
ggctgctacactgtgatatggtgttgctggacgaagagggaaatagcatacatgctacgatatacccacccttcatagagaaattcaggccactcataaaagaaggcagcgtgtacaacatgacatactttcgagttcgagcatcaaacaacttgtacaagccagttccaaatgatatcatgattaccttcacgaattggacaaagttagagcagggtattgagattcctcctgcatttcctacacttacctactccctcactcacatagaccagatccattcgcgcatcgaccataaagactactatacagatgccattgggatagttacttcagtctcgaatggttcgccacatcgctcaaaaggacagcaagcttccagcttgaagaggaacatttccatatgcagtgcgaggtgtggtcctccgggctgtgccgtcctggggggcgcccaggcctcccgtttccctggtggccgcgtcttccagattcggcagaattccccacagatt

SEQ ID NO: 68525 - DNA, 641 bp, Zea mays
  Clone ID: MRT4577_162489C.1
gtgttaagtaatacattgttaagtttgtgtgtattggtgttttttgtgttggggataaagtttatatgcattcttccggtatatatcggttgatgctaattcgtagaaaaataaatagtggggaggcttggatggtactatactttgaattcggcgcacttgcatccgttcacagttctctttgtcatctgcttctcttcatgttcttttccgaatataccattacccacaaaggcaaacaccctaaagtgcttctcttaatgtgcttttccaattacatcggttgctctgtgagacaaccactcactctgaatttctcaccaaagttattcttaccaattgatgaacacatatatataacaacctagggagactgaatgcataaactcgcttgacgacatgatgactgattagattaaatggccttataaagtaaacgacatgataaatgatcaagttccatatgccaacatcacatttttgaaccgcgaaattatgacatgtgttccatttaaatttaaatttgaaattttgttaaaggctagaaggttttgatggaaccggtcatattgaaccgagaaagagacgcagcggaccgcataaaacggatgcctatgtaagttattacataaatatattta

SEQ ID NO: 68526 - DNA, 817 bp, Zea mays
  Clone ID: MRT4577_16248C.1
gggtacctcgaggccggccgggagggtttcggccctccagacagctacttgatcttatccgagcgcgccgtccggctgcgccgcggcggccggagccggctcctccttggccgtgtcgcccccgccgacctccaagggtcattgggttggtggcgcggtttgttggaaagagccggcgctggcacccgcggttgctgccggcgacgagcgatgacgactgcccgcggtcggagcgcgcgcgatgatggccgcgcgggttcaccccaaaacaacaaacaattcgcgatgctctgctttcctttcatttgttcttttcgaaaaattagaagtattttttaataaaaaagatatctgttgtttgttgaatggctctgtcttctgtttgtgcataatcgttttcttagtggggtctaattctatatcacatcattgtcttgatttacgtggctctgttattgcgggtgcaggcgtgcagctctgttataagtgctattaatatggtgctgcataaatattttactgatgtaaacattttctgtcattaaattatctgtttcagtatcaatagtcattgcccttgctcgataagtttagcttctacaatctgttgcaatcttctgcctatttgaaattaattcatactgccgcattgctagttaacctcatggctaaacatttagaatgcacttgtcaccatatgtattgcgtattttctcaatgtatgatatttggctgcttctgctcatattaggtgctacactggcatcaatcaactaatggtcccggtagatagcattgaaaaagcatctaatagctt

SEQ ID NO: 68527 - DNA, 554 bp, Zea mays
  unsure (1)..(554): unsure at all n locations
  Clone ID: MRT4577_162490C.1
ttgtgttaggttgctaggtttactactaaatgcatatccatgtcttttcatttcagcatctatgttattgacttagaatcagttcatggcacatttatcgaaaatgagagattaacaaaagacaatgttgttgaacttgaagttggacagtgacttttgcgaaagaacatagctgctctattcccaactcctagccttttatatcagataagctacaagaggtccttaaaagagtgaagagcgcaataatacctggaatctacagtgacctttgtggggattctgtccagcaaaagtggggtcatcttgggcatacaaatgattacttgtctggtgactcgtgattcagagttgacagtggatacaaacaaatatattcttcagaattttgtagtagagttgtttcaattagtagatgttttttgcattagtttataaatgattgtaccctactgcaaatcaaggtatgcacccttgaaattggcgacttcatagctgtttgaactngacatttttgctataacaacttttttcttaatcacactgatatattt

SEQ ID NO: 68528 - DNA, 404 bp, Zea mays
  Clone ID: MRT4577_162491C.1
tgctgcggtgctgggcaagagccgggtgcaccaaattcggtcttaacggaaatcctgcccatcaccatcgaagaattggccaagaacaaaaacctgaaggcgaaacctgacatccagacaacccatgccgaatgcgagatggagtccgcgtccgcgccgggatcagcattcgggttcaatgttgtgcttacagctctagacacctgactctgatgatccaaacgagaaacctggctctgatgacgattctcaggatgaatctgggtcctcaaattacgaagaaatgcatatcggctgcatgcatttatgaaccttattaatgtgccattccttatgaatgattgtactgaatggaaagccggtgccaccgttttgagttgaaagttgcaactgaaacatttgtg

SEQ ID NO: 68529 - DNA, 1244 bp, Zea mays
  Clone ID: MRT4577_162492C.1
atttgtttttttttttttttttttttttttttttttttttggcgcaaaaaacaaatctgaatacataattgaacaacaacggatacagaatgcggacgctacattctgcatggttttaccacttcatctgcatggttttaccacttcatcagcacataaatgttcagtgactacagacaaatgtgatgactccaacatgaattccttgcagggttttaccacttctgcggccattgaagatctatatagttcgtttcacttggaccaagcctgcaacgcaaatcccatgacctgcgagtgcctccaccagcgatttgttcgtgagctgacagcgtcatccatgctgcttgcttcatgctctcgatccccagcctcccagtctcacttggaggctgctacaactggcaataggatcagcacagtggcatgtgtggccttttggtgacaacgtagtgaccaaactcggtgacgacatgcttaccggcaacagaattcggtttgccaataagaaatatatccagcacatcagtggtgacaacatagtgaccaaactgaccagatgtcttgttgaacagtgatcctaaatatgagccccaaacagatggattacctgagcatggaactaattatcggaccaggaatttagaaagggttatagatatctgctttccttgctatctgcatggctctgcatccaattggcccgacccttttgttcagatccggttgtggatggattccaagctatctccaccaaaagcacctcttgcgcagcaacatcttttctccggccttagattaggactaatggttgtatgcattatttgccatcaatgtcagaaaccgatcccagcaaccgtttatcaaatctttcagcttccatctccagcaacctagcagcttcatccatcccgtgtgcagtgtatgcctgaatcatggtggcataagttattctgtcaggcttgcacctcttctccttcataagctgcagcatctcctccatgattttgatatccccagacttggcatatgcgcttatcacacagttaaagaatggtgtgtccaagacaacattagtgttctcggtctgtcgaatgacccccgcaaccttatcaagaagcccggctttgctgtacccgttaaccagcgagcagtaggtgatggggttgggtttgacaccctgaattttcacggacgcgtgggagaacgccatcttttcccggtcgccagcacgtccgaaacac

SEQ ID NO: 68530 - DNA, 263 bp, Zea mays
  Clone ID: MRT4577_162493C.1
gcagttatctatcagagcgagtacaggcatggcctatgcgggccaacgcgctgtggcggtggcagacatggatgcggaggtggcggccgtcgatctgacaatggtcgcctgagtacccttacgcggagtgactgcgactactgcttcaaggactgcatgtccaaggacaaggccatgaaagactactgaagctacgcatgctacaagacctgcgcgccacacgcctggcaagagaacacctcggacgcccccatgaactgcca

SEQ ID NO: 68531 - DNA, 770 bp, Zea mays
  Clone ID: MRT4577_162494C.1
cattgggtacctcgaggccggccgggccctctattaagacaaggactactcgttcacttggccaaccagctcggtttcgccgagaacaaggacttcgttgagctgatgcgcctgtacctcaccatccacaccgaccacgagggtggcaacgtcagcgcccacaccacccacttggttggatctgctctcagctctccttacctgtctctggctgccggtctcaacggtcttgctggtcctctccacggattggccaaccaggaagtccttgtctggctccagaagatgaagaaggctattggcaacgacctcagcgaccaggccatcaaggactacttgtggtccaccctcaaggctggccaagtcgttcccggatacggccacgctgttctccgcaagactgacccccgctacgtctcccagcgcgagttcgctcagaagcacctgcccgacgaccccatgttcaagctcgtcagccaggtctacaagatcgcccccggtgttctcaccgagcacggcaagaccaagaacccctaccccaacgtcgacgcccactccggtgtcctcctccagtactacggcctcactgagcagaactactacactgttctctttggtgtatcccgtgcgctcggtgtccttccccagctcatcatcgaccgtgccgtcggtgcccccattgagaggcccaagtctttcagcactgaggcttacgccaagttggttggcgcaaagttgtaagcacgttactgcaacgtgctctacagtca

SEQ ID NO: 68532 - DNA, 618 bp, Zea mays
  Clone ID: MRT4577_162495C.1
gccggccggtccgggtcctttttcccttttattactaaactagctttataaaaatgaacgctgataaactcgccaagcttcaaaaccaagtccgtattggtggcaagggtactcctcgtcgtaaggtcaagaaggtcagcgccaagtcctctggtgatgaccgtaagctctctgctgctcttcaaagcttgaaggttcaacctattgccggcgttgacgaagtcaacatgttcaaggaagacggcaaggtgatccactttagcaaccctcgcgtccaagctgctgctaacgccaacacgtttgccattcacggtcgttctactgaaaaggaattggctgaacttattccttccatcttgaaccaattgggtcctgactctatggctgccctcaagaagctcgctgaatctttcaagcaagcccaaggtgaagatgctgctgctgctggtgaagatgatgatgaaattcccgacttggtcgaaagcttcgacaaggctgaaattcaagaagaaaagaaggaagaatcctctgcttaaatttttcactaaatgtatatcatacacttcattaaaaatatattgttttaaattacaaaaaaaaaaaaaaaaaaggccccta

SEQ ID NO: 68533 - DNA, 590 bp, Zea mays
  Clone ID: MRT4577_162496C.1
gcactcttccctgctctcaccgcaaatcccgtccgcgcccatgctttcgtgccgcaatccatgctctctcctcgccacgctgctggatccgctccacgctctacatggaaggcaagccgacgccccgctcttccctgctcccgcgctctacatggaaggcaagtcggtgcccaaatcgagcgaaatcactgctcgcggacgagattgtgggctcgatccgcgctctcccctgctctcacgttgtacatggaaggcgaaccctaagccccgctctcctctgcggacacgttgtacgtggaaggaggtgccggtactcaaatcagatatgcgctctcaactgctcgcggacgggattgcggcctcgatccgcgctctcccctgctctcgcgttgtacatggaaggcgaacccgaagccccgctctcccctgcgaacgtgtggtacatggaaggaggtgccgacgcccaaatcggatccgcgctctcagctgttatgcgcctataaaatgtcaagcaggcacgccacaacaacccaagatcattttcgcgctctccatacatctactactgccaggtaccgcccaagatcatt

SEQ ID NO: 68534 - DNA, 383 bp, Zea mays
  unsure (1)..(383): unsure at all n locations
  Clone ID: MRT4577_162497C.1
aaccgattcactccgaatggcaatgtttgaagtgaatccagcgaacggaaaaggttaggttctgtcgtgcgtgcaacgtggtggtagactggtagtcttccaatgcagcaggcatagagacacgtggtaccctaaaagtgcagcaagatagtctaagttcaagctaaaagttaatactttctcagcagaaagtgcagcagaggggatattactgaaccacaaccatgacacacctaaacgaacagatctcctaaaaaatgtttcacatggagctcgtttgactgcactattagactttattctgctattcccattatatatgtnnnnnnnnnnnnnnnnnnnnnnnnnnnnnnnnnnnanaaaaaaaaaaaaaaacccccant

SEQ ID NO: 68535 - DNA, 358 bp, Zea mays
  Clone ID: MRT4577_162498C.1
ctccaattattttgcttgggttatataggttttctgagcctttgatctctaaagcttcattcgcgcttttatttctcttcttgaggctcataacttcttcggtcccttttacttaatccctgggaccttcttcattcattcgtggccattttcttttaatcctttattccattttggggttttaatctctttgcctgtgctggtgctccgcttctcttgtgggttctgtgggcacctttgcacatttccgtgaggggtacagcaggcccataattaggccatccttattcgatttcattatactccacacttgaaggcctgctatgggccattcttggggaacttacgaattataatt

SEQ ID NO: 68536 - DNA, 346 bp, Zea mays
  Clone ID: MRT4577_162499C.1
gccacgcgtgcggcggacgagacggcacaggacatggtctaccacatcctgtacgaggacggccaccatgacgcgtaccatatggagatccacatccgcaccctcagcagcgaactgaagggcaaacacacagcgatgtaccaatacatgtaccactacaggaacttctccagcaagttcaccgccaagctcaccaaggatctgaaggaggatctaaaggtgctacaagttgtgctgcacgatactcaccacctaaattaccatgtacatggtactgagtatggcactaaacacagcacgagacatatgtggaggcttatgagaatgcatatgatagtgaataaga

SEQ ID NO: 68537 - DNA, 252 bp, Zea mays
  Clone ID: MRT4577_16249C.1
tcggtccatgggagctggttacggcattggtcggactggtgtaggtgcaatggcacctcctaacgaaatgggtgccaggaggggcatggctataggtcctggtgccggtgccatttatggtggtggaatgggaatgaaccggacaatgggcatggtgatgggaatgaatcaacaacatatgatgatggggatgaaccaacaaccgatgggaatggggattgggattaaccaacaactgatgggagggaatca

SEQ ID NO: 68538 - DNA, 231 bp, Zea mays
  Clone ID: MRT4577_1624C.1
attcacactcttttagattttgcacaaattgaggtaaatataggacacactgctagtttcttgatcaaccatgaaaagaaattcagagattggatttattgaccactacagtagaattagtaataatgtctctatggaatcactgtaacagatgtgtttttgatggttgctctcctgaccttgctagtctgctagctctatccataggaatttggcgtctgtggagtaggg

SEQ ID NO: 68539 - DNA, 272 bp, Zea mays
  Clone ID: MRT4577_162500C.1
aacaaaaataactcaaaactcaaatttaccttttaataaaacaaaaaactaactgtaggtaaactatactatgggtgggcccttatttactaataaaaaaacatcttgttaattttctcaatctaacaacataccttgcccttccaaaaacaaccaaatcttctaaccacacctctttcactatctaattccattccaatttaccaaacttctcctcttttattaccctacatactcccctttaatccccttacattcccacttccattctt

SEQ ID NO: 68540 - DNA, 761 bp, Zea mays
  Clone ID: MRT4577_162501C.1
acaagcaaatcccctatctccaacctgtgaacggtgaaccccgatcgaatgacgccgacggcgaacctccttctcccggctcccccattcgtccccatctccgatgtgcgccgcctccagctccccccgcgcgtccgccaccagcatcgtccctgctggaagggcgtggagtggggctccaggatggtctcttctttcgttggtagccaggaatttggggaagactttgcgtgctttccaaccaaccattagagaactacaggatgtatcaagggagttcaggagcactcttgaacgagaaatcggaattgatgaggtttcctaatcaacgaactataggcccacaaccatgaataacaaccaacaacctgctgccgacccaagatgtcaagcctgaaccagcaccttatactagcgaggaactaatgaaagtaactgaagaacaaattgctgcatcagctgctgctgcttggaatccacaacagcctgccacgtcgcaacaacaagaagaagcgtccactactccaagaagtgaggacgctcctacatcaggaggaagcgatggtcctgctgctccagctcgtgctgtgagtgactctgatccaaaccaagtgaataagtcacagaaggcggaaggagagagatgactccgcttgacagtttgacactggacggaaagagcacagtgcataggtcaggacgagcagtcatgttttttttttcattttgtagacgatgaaataattgtatgagagcgtttt

SEQ ID NO: 68541 - DNA, 1093 bp, Zea mays
  Clone ID: MRT4577_162502C.1
cgagagcaaatcctcctatctccaagcctccaatctgtgaacggtgaaccccaatcgaatgacgccgacggcgagcctcctcctcccggctcccccattcgtctctatctccgatgtgcgccgcctccagctccccccgcgcggcggccaccggcctcgcccctgctggaagggcttggagtgcggctccgtacagacgcggatggtctcttctttcgttgggagcagaacacgccgcagaaacgttatatgtgcttccctgttcggagttggagctcccgaagcactggtcattggagtagtcgccttgttggtgttcggccccaagggtctagcagaggtagccaggaatttggggaagactttgcgtgctttccaaccaaccattagagagatacaggatgtatcaagggagttcaggagcactcttgaacgagaaatcggaattgatgaggtttcccagtcgacgaattatacacccacgaccatgaataacaaccaacaacctgctgccgactcaaatatcaagcctgcacctgcaccttacaccagcgatgaacttgtgaaagtaactgaagaacaaattgctgcatcagctgctgcagcttggaacccgcaacaacctgcatcgtcgcaacagcaagaagtgtacactactccgagtgaggacgctcctacatcaggaggaagcgatggtcctgctgctccagctcttgctgcgagtgactcggatccaaagcaagtgaatctggacaaggcggaaacacagagatgactccgcttaacagcttgacactggatgggatgagcacactgaacacgtcaggacgagcagtcttattttaattttgtaggcgatggacttcagattaaagccagttatttggactgctgcagctataatctatagagacataacactgtaaaaatagtagaatccgttttagattaaagccaaacgagatgagagcgttttctgtgtttactaggcttgttctgtagcagcatgcatgggcaggttcatacaaaaaggctatgtgtatgcgtaacataaccacgagtttatatggattaaatatatttagcctcgttg

SEQ ID NO: 68542 - DNA, 1236 bp, Zea mays
  Clone ID: MRT4577_162503C.1
aaaaaaaaaaaaaaaaaaaaaaaaaaaaaaaaaaaaagaagaacaaaaaaaaaaaaaaaaaaaaaaaacatggaacctcgaggccggccgagggggtccgcaagcaaatcccctatctccaacctgtgaacggtgaaccccgatcgaatgacgccgacggcgaacctcctcctcccggctcccccattcgtccccatctccgatgtgcgccgcctccagctccccccgcgcgtccgccaccagcctcgtccctgctggaagggcgtggagtggggctccatacagacccggatggtctcttctttcgttgctgtagggagcagaacacgccgcagaaacgttatatgtgcttccctgtttggagttggagctcccgaagcactggtcattggagtagtcgccttgttggtgttcggccccaagggtctagcagaggtagccaggaatttggggaagactttgcgtgctttccaaccaaccattagagagctacaggatgtatcaagggagttcaggagcactcttgaacgagaaatcggaattgatgaggtttcccaatcaacgaactataggcccacaaccatgaataacaaccaacaacctgctgccgacccaaatgtcaagcctgaaccagcaccttatactagcgaggaactaatgaaagtaactgaagaacaaattgctgcatcagctgctgctgcttggaatccacaacagcctgccacgtcgcaacagcaagaagaagcgcccactactccaagaagtgaggacgctcctacatcaggaggaagcgatggtcctgctgctccagctcgtgctgtgagtgactctgatccaaaccaagtgaataagtcacagaaggcggaaggagagagatgactccgcttgacagtttgacactggacggaaagagcacagtgcataggtcaggacgagcagtcatgttttttttttttcattttgtagacgatgaaatagttgtatgagagcgttttcgatggttaggcttgttttgtagcagcatgggccaggtagatgaaaaaaaggctatgcgtatattatttcccacgttgtgtggccgcaattgtttttcaatcgtaagagtaacttcaagacactctctgtattctttttaattgctaggaatagatttttttgtaaaaaattttcttcaaaagcttatttaaatgattatctgaatatatctattttttttttccccgtgttaatttctaa

SEQ ID NO: 68543 - DNA, 446 bp, Zea mays
  unsure (1)..(446): unsure at all n locations
  Clone ID: MRT4577_162504C.1
aagacaggaaaggatttcacaccttcgaatctgatatttatgattacctaaagagataggagacctacgaatatatatatatatattctttacttaagtgtttgaatgtttgttctgatgataaatgcttgatttgcttctttgattgagtgaaatactatagtagggcattatagcatgtaccactataggttaatgtattagtattaagtagttgacactctaacctactgagctatgatgacccaaaagatcgtgacttaaggttgggtgtctcgtaattattcatcttatctgcaattctatcttaccatgtgtttcaaacccagatggtcaataccaggaagggaggctgtatcgatctacctgcttgtattcatcgcaggaggatagttacgtaaccacaaccggagatgaatcctcctttgaatcctncatcgactggg

SEQ ID NO: 68544 - DNA, 373 bp, Zea mays
  Clone ID: MRT4577_162505C.1
cgcgtccgtagcttgatcctatcagtgggcggccttcctttttttttttttttttttcgacgacttttttggctgggtaaattaacatatgacggcatgatggggacaacacagaacatccaatgtgcacactgacggcaatcggtatgaggggtccacatgaagatcagcctcaaggcgcccatgggtcaggtagtgaaccgccttttgaaggcacctgcgacaacttggtagtctttttattttgaagcacccacagctgtagcttctaaggtggattaaggtgattgatttcctgataaaagcaaaggggtttctttccctgcgcttttttcggcttttacgatgaagacggtttatatttggttttatg

SEQ ID NO: 68545 - DNA, 471 bp, Zea mays
  unsure (1)..(471): unsure at all n locations
  Clone ID: MRT4577_162506C.1
cccagcaggtcgactctagaaagacagtgaaaggttttcacaccttcgcctcatatcttcatgattacctaaagagataggagaccttcgaatatatatatatatattctctacttaagngctcgaatgttcgccctgatgacaaacgctcgactcgctcctccgatcgagtgaaacactatagtcgggcattatcgcatgtaccactataggtcaatgtatcagtattaagtagttgacactctaacctactgagctatgatgacccaaaagatcgtgacttaaggttgggtgtctcgtaattattcatcttatctgcaattctatcttaccatgtgtttcaaacccagatggtcaataccaggaagggaggctgtatcgatctacctgcttgtattcatcgcaggaggatagttacgtaaccacaaccggagatgaatcctcctttgaatcccccatcgactgggatag

SEQ ID NO: 68546 - DNA, 954 bp, Zea mays
  Clone ID: MRT4577_162507C.1
gcgcccctgcgggtggtggagctgggcgtcacgcacatcccgcgggaggtgttcgaggactacctccgcgacatcgcgccccggtacacggccgagacctaccgcctgctcacccacaactgcaacaacttcagccacgaggtggcgcagttcctcgtcggcactggcgccggcgtgcccgactacatcctcaacctccccgccgaggtcatgtccagccccatgggcccgctcatcatgcccatgatccagaacctcgagtccacgctcaggagcaacgtcgctccgcagaccacgcagttcgtgcccacgcccgcctccgtatccgcgccgaccgaggctcccgcctccgagcgaaaagcgccggcgccggcggagaaggcttcgaaggaagctcctactcctgcgcctgcgaagaaggaagcccctactcctgcggctgacccgctcgggagcgccagggggaaggtgcaggaggaggtgatgaaggagttcgcggccatcatggccagcggtacgctacgggccagcgaggcggcggcgctggccatgcgccgggtcatggagcgccacggcgacggcgccacgatgcagcagggctagacgaatcaggctgtgaacgcgttccggttccatgggaattggaatttgtcatctgcatgctgatgccgccgccgtatggaaaaaattggagaagttattcctgatatgttcgtgcgattatttgggttggcattaattgcggccgccggacttgttgcccaccgtattactatatgggcggttaatttggtgaaatatgctaaaaaaaaaaaaaaaaaaaaaaaatcgtattactctatgggcggttaatttggtgagatatgctaatttacgttcgctacttcgctactacatgttttaatccgtcagctatgcattgttcctgctgccaaaaagaattccgagcttacg

SEQ ID NO: 68547 - DNA, 223 bp, Zea mays
  Clone ID: MRT4577_162508C.1
gttcaaatactcctacgccgtgtcgaggccgagtgattctactcacagttatgtcttggctccgtaactctctgaaacatgcagatacctggagagacaggcttcgcgtctgagaatacgagctcattatctgatctgtcgaacgaccttattgcgactctctacggttttgaagattaccatgtagtcggatatccgtcgtggtaaaggtatctctggcttt

SEQ ID NO: 68548 - DNA, 370 bp, Zea mays
  Clone ID: MRT4577_162509C.1
gttctgacaccaactagactttgtggctttgctgcgagtaaaggaggacggagaccttttgagctactaggactccgtctactgatgaactagacttacgaacgctgaaggtatggcgctactaatttttgaaacgcgctgcttacgcacggcatggacagcattagagttaacaactggagttctctatctaaattaggacgggtaggttctctgtatgcgacgtccatgagaacaggcgttagctttgtgatactaacgacgaggagaagcgtgctctgatgcacaaactttacccgtctgtagtacagagccttgaggggctgcgattgcactgctgataagaacaatactcttattgctagacacc

SEQ ID NO: 68549 - DNA, 390 bp, Zea mays
  Clone ID: MRT4577_16250C.1
cgccagaaacagcacacacaacaccccccgggagcggggccacgcaaaacaaagaggaggagcacggcccgagccccaagccccacacaagcagcagaacccagggccaccccaacgggaggcgcggggacggcaaaacacgaacgagaccgacaccaggcccaacaaaacagagagcagcacaacagcacggggagaagagggcacacagcggcaacaggagaggaggaaccacagcagacagccggccgagaacagaacggaaccgaccagcagagacagggaaccaaccccaaggaagaacacgcaagcaaccagagcgccggcaccggaacaggccagaacggccacgaaggcaaaacggagaacaacaagggcagggagcggggc

SEQ ID NO: 68550 - DNA, 310 bp, Zea mays
  Clone ID: MRT4577_162510C.1
tttcttttgggtcgtttaaacaacatgggtgcatgcaacagaattgccaacaaaacacgtagaatcaaacatactactagttcacaatcgctcacaaccgccaaacccagaactgagtaccacaacatctacagccatacgtgctggaccttattgtcggttacgactgaactgaattcattcaggcagactcaaacgcatgctcatgcgcggcatgatacttcattagggctcgagagcttctccttattggcactcacgatggtcgcgaccgctttgccgcttttgaccacttggaaggataacttct

SEQ ID NO: 68551 - DNA, 202 bp, Zea mays
  unsure (1)..(202): unsure at all n locations
  Clone ID: MRT4577_162511C.1
nncgtccgaaaaaaaaaaaaaaaaaaaaaaaaaaaaaaaaaaaaaaaaaaaaaaaaaaaaaaaaaaaaaaaaaggggcgggccggctctaagaggggtccaacgcttactgtacggctccacatgtcaaccgccatagcgttttgctatagtggtcaccttatatttataattgactcggcacgatngatttacacatcgtc

SEQ ID NO: 68552 - DNA, 321 bp, Zea mays
  Clone ID: MRT4577_162512C.1
cccggaaacaaaaaaaaaatcagttcatccagggaacccaggtaagggggggcccccaacatgagcaaaggagcaggggggaacaaaagagaggggattcacaggccaggcagggcccgggaatcgcccaggggctttgggcggggccctgggctagcaggggcaacactacaaacgggggggcacgacacccaaacccacatgatcagggttattaaacaggagaatcgaacggatccgggaataaaaaaaaaaaaaggggtgggtggtttttgcgggcgaacgaggggcccgggggggcaagccggggggggaaggcca

SEQ ID NO: 68553 - DNA, 474 bp, Zea mays
  Clone ID: MRT4577_162513C.1
atgctttcttttttactgttcgttcatgaaacccacagggaaatgcacaaatcttactagaagcaaacgggttcgggattaacgggtacaagctggttaacctgactgatacgactggtggtccaaggaaaagcatacgatgcgagcggcgccggcgcaacgacgggctgagacagtctaccatgcatgcacgtgcacgagagaaactaaacggggggcagcgggccggggagagagagctggattctatctgcgctgcgctgtgcacccctgggtgggtcggtttcggcttttaatacatggtggaggggagctggtcgtgggtgtgggagatgaagagcaattcgtagattacgcctgcgaggccgccggcgatgagggggccgacctagtacacacactggttgccgaaccccatctgtctagggcgaggccgaatgacactgggggttcatggacgcgcccgcgaagcgg

SEQ ID NO: 68554 - DNA, 267 bp, Zea mays
  Clone ID: MRT4577_162514C.1
tttgttttccggacaaagctgcaattttcttgcgcccagaaggtactggcaccatcgcatgaggcacccgacaaacgatacccctgtttcacgaaccctcgcggggacgcaaccacgtgacaccggctgcatttttcgtccagggcctgcctgttcgagcgatgtgacactgccctgctcttgtggtgcacatgaaggtaaatttagtgatagcgcggcggcgccctccgtgaaccacaattgccgacctctccagcagtgggagtc

SEQ ID NO: 68555 - DNA, 609 bp, Zea mays
  Clone ID: MRT4577_162515C.1
atggcggtggctcagcagcaccacatcaaggcgctgacgccgacgtggttcctcgtcaaggttacgccggccccggcgccgagggagggcggtaagaaagccgcctactcgccgctgctactgtcgccggcggtgtggcagagggcgcagaacgagaaggagagggacgaggacggccccgagcgcgccgccggcggcctgccggtgtcgccgagggtcggctgcatggggcaggtcaaggggaggaggaggataggctgctcgagcgcgcgcggacctgcgcccccgaggggctcgggctcgggctcggggtgccgcggcgccggcggcaaggtggcgagtctcgtgctcgggatgttcgggatgaggcggcggaacgcaaggagggcgtcgcgtgcctgcgccaaggtcagggacgtaccgcgtggcggcggcgcggcctccgcgccggggagcactcgtggtgtccgtcgcggggcggccgtgtcggtggacgtgtttgatccgccgttgccggtggtgagacggcccgtgaccgacggcaacgcgccgagcctgtgggagcgccggcgcggcggcagggccttggagggtcttcagctgacgtag

SEQ ID NO: 68556 - DNA, 772 bp, Zea mays
  Clone ID: MRT4577_162516C.1
ttccctctccctccctccctccctccctccgtcgctcgcaccggcaggatgagctccaggcggccgacgtgctccgggcgctgccgccgatcaggacgaataagccacgggcgccggagccggcctgctcgtcggcggcctcgtcgtcgccgtcgccggtgccggcgccggacgcgggggggggggcggccccgccgccggcggaggagcagaaacagggggagacccgcgggccgggggccccgcaagaggcggagcccgcgacagcagcgtccgaggggagcctgctgcggcggccggcgccggcgccggcgcgccgggccttcttccccgtcgcgcgcgacctcaccaccgtgttccgcgccctggcgccgcccaataacaggatccgcgcgggctggcaacgggggcggtggcgttctccctggcgcgcagcacgggacgggaccggcgtggcgtggatctggtgcccggtccgccgtcggccgtcgcgacgccgtcagtcagtcagtaggtgcgccgcgcggtcatggcatggtacagggctctcgtacaaataagttctgttttttttttggggagggggggagtgtagaattgggaaagaggctgttgtttacgcatgggggaggatgaatggggcattgaaagcttgtaaagagaattcctacagatttgttcattgtatttgttaaactatacttgctgacagtttgagaaaaatagtgaactttcacctgaataacaaaaaaagatcatgggttcagctctc

SEQ ID NO: 68557 - DNA, 530 bp, Zea mays
  Clone ID: MRT4577_162517C.1
tgggcgcctccgccgccgtccacgccggcctacaagcgcagcaggccgtccccgccctcctccaggagccggcgctcggcgcgccgggccttcttccccgtcgcgcgcgacctcaccaccgtgttccgcgccctggcgccgcccaagaaacggatccgcgcgggctgacgacgggggcggtggcgttctccctggcgcgcagcacgggacgggaccggcgtggcgtggatctggtgcccagtccgccattggccgtggcgacgccgtcagtcatcagtaggtgcgcggtcatggcatggtacagagctctcgtacaaataagttctgttttttttatttggggggagggggagtgtagaattgggaaagaggctgttgtttacgtatgggggaggatgaatggggcaattgaaagcttgtaaagagaattcctacagatttgttcgttgtatttgttaaactatacttgctgacagttgaagaaaaacgatgagcttttgctctatacgggtgtagttttgtgttgcttc

SEQ ID NO: 68558 - DNA, 703 bp, Zea mays
  unsure (1)..(703): unsure at all n locations
  Clone ID: MRT4577_162518C.1
gctcgcaccggcaggntgagctcccggcggccgacgtgctccgggcgctgccgccgatcaggacgaataagccacgggcgccggagccggcctgctcgtcggcggcctcgtcgtcgccgtcgccggtgccggcgccggacgcggagtcggtggcggccccgccgccggcggaggagcagaagcagggggagacccgcgggccggaggccccgcaggaggcggagcccgcgacgccgacgtccgaggggagcctgctgcggcggccggccgagtgcccgccggcgccgcggaagccggcgtgggcgcctccgccgccgccgacgcccccacgcgtgcgcacacgggcccgcggacgcgtgggcgcgccctgctgcccaagaagcggatccccgcagggtgaccctggcgcgcaggacgggacgtcgtggatctggtgtccggtccgccattggccgtggcgacgccgtcagtcagtaagtgcgcggtcctggaatggtatagagctatcgtacaaataagttctgttttttttggtggctgtagaattgggaaagaggctgttgtttatgagggaggatgaatggggaattgaaagcttgtaaagagaattcctacagatttgttcgttgtatctgttaaactatacttgctgacagttcaagaataaatgatgagctttcacctgaaaaaaataaccatggtt

SEQ ID NO: 68559 - DNA, 658 bp, Zea mays
  Clone ID: MRT4577_162519C.1
agcgtcctcaaggctgggaaagatagcaccgtcgtcgtcgccgtcatcgttcgttcgttcgttcgttcacagaggagtggcggtgttggcagtgagagagggtgagaggagggaggaaggaaggttcaggggaggggagtgagagacgaaatccatttattcccccgtctatcggaggcaaacccgcggcctcctttcccgagccggctggatggagagggacttcctgggcaccataggccacgagcagctgcagcagcagcagcagcagcagcagcgccagcgcgccgccgccgaggacgccgccgccagaaaggagtcagctcactttgggggaggaggagtgccgcccatggattggtccttcgctggcagggccggggccgcgccggcggtcatgtccttcaggtcggcgccgagggaggagcagcggggcgagctcgcctaccccaagcagcaggcctcccgcgtcctgacgccacagagatcgtttggtgctgagagccacggcagcgtgcagtacgccgccgccgcgcgtgcggcttacggcgggcagcctccgcagcagcaccagcatgctcctaatggtgctagagtgattccaatgtcgtcgccgttcaatcccacaatcccatgttcagggttcagagttcgccta

SEQ ID NO: 68560 - DNA, 379 bp, Zea mays
  Clone ID: MRT4577_16251C.1
gagatctacactcaaacccgggattaggtcaccatcgacggggtaccctccacggttgacgagaacgaagtcgggtcactacgcgcgtaaaccgaacgcctccatgctgctctcaagatcgagaatggccatcaccagctgaacaatcagagacaccagaaggtccccaaggaagcggatgccgtaccccaacagaatctcaagctacaggaacagatcagacccctgaaggcttccgacaccgacgccgccaccaccaacgagaggcaagctcaacctgcttctgaagccccgaaagaatgggaagtctcataactggaaattgcaatcgctgcagctgcccgcgccaacctcacggatgccatcatactactatatc

SEQ ID NO: 68561 - DNA, 140 bp, Zea mays
  Clone ID: MRT4577_162520C.1
ctcacgcgttcgcccacgcgtacgcctacgcgtacgacctctctttcgctcacacgtccggcatcacctgcgtacctcttcaagaggtctgtgcgcaacaacctgcgcgtccagctgtcctacatagccggcacgcccct

SEQ ID NO: 68562 - DNA, 329 bp, Zea mays
  Clone ID: MRT4577_162521C.1
ttgtctcttccgtcgacacgtccacgcccacggggacacatacacacacaggggctagccacgccatccacaggtacgcccatgggaactataggcatgccgagtgcaactgcacaatcacaccgcaaccgtcctgcgtgcgagcatacgtcgcagtaccctgctaggattatgggcactcctgatccgccatctgctggaggtgcttctatgcgagaccatgcatctcgagccagactaccaacctaagacctgaatagctgatacactgaactaggtcagtcctccagaccacagtacgcacagaagcacatgaatcggcatgactg

SEQ ID NO: 68563 - DNA, 278 bp, Zea mays
  Clone ID: MRT4577_162522C.1
gcagctgccggcctgcagccgctcgaccttcatccttggccgacccgcccttcgcggcgtaacacctatcagcaaggccgagcggcagcagcagtagggaaagaggatggaagcctaccaggcacggcggcggaagactaaggactagtccttgagccggtgttcggctggttgcgcgcggggcgccgcgcggaaaactcgctggttgctcgacccccaggtactgcggaacagcgccacccggcgccgctggagctagggtgcccgaactcccgggg

SEQ ID NO: 68564 - DNA, 106 bp, Zea mays
  unsure (1)..(106): unsure at all n locations
  Clone ID: MRT4577_162523C.1
ctcgganttcggctcgaggtgaatttgagctgccaatggtcggtgaaatatttgacaggagatctggaggttgtcctttacatactcatatagctggggaccatgg

SEQ ID NO: 68565 - DNA, 345 bp, Zea mays
  Clone ID: MRT4577_162524C.1
gggaaaccacccttctccttggttttggtcccccccgccgggggggcccgggtctttttacaaaaaaattttccgcccccgccgcccaatagctgatcatcccatccaattcattgggcctttggggggggggggccctttcctttttagacccccggcttgccgtatcaatgaaaaaaaaccccaagccggggggggtttaacaccgttttaaaaacccatgcgccgatgccggtgtaccccccgccgggggggccaaagtgctttcccaaaacccaaagcgggggggggtttacccacgttttgaaaacccatgccccgatgccgcttcaccccggacggggg

SEQ ID NO: 68566 - DNA, 390 bp, Zea mays
  Clone ID: MRT4577_162525C.1
ccttattttagattgattattagttgtaattcaataataaagttttttggatgatgtatgtggccaaccagaaataagaagttacatttccagattctaatgtagaaaaaaaatttgtccttggcccccaccccccctaggggcaatttttgcaaatttccatcaccctgggggccgtttaaccatccttttagggggcccatttccccttttggggggtcgtttaaaaatcaatggcccggggttttaaacctctttacctggaaaaaccctgcccttccccactttagtcccttggaagaaaatccccttttcgccgtttggcttttacccgaaaagcccccacccgaccccctttccaaacatgttgcccacctttaaagggtaaag

SEQ ID NO: 68567 - DNA, 907 bp, Zea mays
  Clone ID: MRT4577_162526C.1
gatgaagtttaagatttggacgccggttggtgagcctgtcaatttcgcaaggataggtaacggctagaatccattaaatgtggcgatttgaggttaaaagccttttggccattgtccgcgcctccgctaatcctgtcttttgcacaccgctacgcccccaattcggcccctagccccctccgcctcctcgccggcgcgctctaccccgcctcactccccatcagtgtctctcatcggcggctctccgggcttcaagttggtccggggtacctctcctgcgatccgcgcgcaatggagcaagatcaaagcccagccgtcgacagcgcggattctggcgccgcggcttttgattttgcgactggcaatgcacctagctcggctgtgaccagcggaagcgccgtggcccctgacggtggggctcaggcagctgatacttctgcctaccaggccgagcacacggagttgaatgggacgactggcgatatgtctaattaccaatctgcaggagctgcagagaatggcacagccgtcaccgagataggcgagccggttcctgagccatcctacgaggaagctgtgctttcagcagaagaggctagattgtggagtgttgttactgcaaattgcttagatttcaatgcctggaccacacttattgaggagacggagaaaaatgctgagaacgatattttgaagatacggaaagtgtatgattcatttcttgcggaatttcctctttgctttgggtactggaagaaatggctgatcatgaagcgagacttgatggtgtcaatgaattttagagtagttagaacgagtagctagggtcaggatttacatgtttatttgcaatatgtcgacgccaaaggattcggtctttaaactgataataaaccgctattgattt

SEQ ID NO: 68568 - DNA, 762 bp, Zea mays
  Clone ID: MRT4577_162527C.1
gggtattcgaaggagcttccttgggtttgctgggagttatttcttgtcacttggaagaacatcaaacgtcgttgcaggaaaacccaacactgaaaatgaaggctcggaataaaaaacatagaccaaagataatcagagagaataagctagccaaagtcagaaggatcacctgaaggctggcgcgtggagtccctggctgaaggttggcgcatggagtcactggctgaaggctggcgcgtggagtccctggctgaaggcggctgaaagctagagcgtggagtccctggcgcgtggagtccaattatttgatggctttaaagcaccgttagcagtaacactttgggtctaatcactttgggtctaatcactttgggtctaatctagaagccattaatagttgtatgtactagtataggcatgcagacaacaattggaaaattgtatgattcatgtgatcattttccttgtattcttttctattgttggttatatatcagattttagaagattcttgtgatccttttccttgtattcttttctattgttggttatatatcagattttagaagattcttgagatccttttccttgtattcttttttattgttggttatatatatcagattttagaagattcttgtgatcattttccttgtattttattcacctgcgtgttttattgatgtgtgtctgagagaacagaaacttctagattggtctttggatttttcttggaacgtatcagtaaattgaatatatttc

SEQ ID NO: 68569 - DNA, 708 bp, Zea mays
  Clone ID: MRT4577_162528C.1
tcttttgcataacaccgctacgcccccggatccaaccctacccccctccgcctcctcgccggcgcgctctaccccgcctcactccccatcagtgtctctcatcggcggctctccggtgcatgcccctcgccctccctctcacctatacacgcctccttccacttactgcgcgtcaatttcaccttctgctctcggtctcttcgccttagggcttcaagttggtccggggtacctctcctgcgatccgcgcgcaatggagcaagatcaaagcccagccgtcgacagcgcggattctggcgccgcggcttttgattttgcgactggcaatgcacctagctcggctgtgaccagcggaagcgccgtggcccctgacggtggggctcaggcagctgatacttctgcctaccaggccgagcacacggagttgaatgggacgactggcgatatgtctaattaccaatctgcaggagctgcagagaatggcacagccgtcaccgagataggcgagccggttcctgagccatcctacgaggaagctgtgctttcagcagaagaggctagattgtggagtgttgctactgcaaattgcttagattccaatgcctggaccacacttattgaggagacggagaaaaatgctgagaacgatattttgaagatacggaaagtgtatgattcatttcttgggggaattccctctttgctttg

SEQ ID NO: 68570 - DNA, 269 bp, Zea mays
  Clone ID: MRT4577_162529C.1
taaggatgggatagctgcagcgcatagaactatcaatgggtacgggtacccaatggataaaaatcatattaggttatgagtataacgaattttgatgtcacattatatctatctagtatagtgggtgtgagcatgacatgttctttcttgtccaatatttgctacctgttggggtctttctcttccgaaggtcctcaaaaacgtgagtaaccatatgttcagtatgacagactgttacaggaggcttcgactttggaatgaaggttcgc

SEQ ID NO: 68571 - DNA, 478 bp, Zea mays
  Clone ID: MRT4577_16252C.1
ggatttaaaaactggaacggtgaaggtgacagcagtcggttggagcgagcatcccccaaagttcacaatgtggccgaggactttgattgcacattgttgtttttttaatagtcattccaaatatgagatgcattgttacaggaagtcccttgccatcctaaaagccaccccacttctctctaaggagaatggcccagtcctctcccaagtccacacaggggaggtgatagcattgctttcgtgtaaattatgtaatgcaaaatttttttaatcttcgccttaatacttttttattttgttttattttgaatgatgagccttcgtgcccccccttcccccttttttgtcccccaacttgagatgtatgaaggcttttggtctccctgggagtgggtggaggcagccagggcttacctgtacactgacttgagaccagttgaataaaagtgcacaccttacaaaaagagtaaatgaacaa

SEQ ID NO: 68572 - DNA, 363 bp, Zea mays
  Clone ID: MRT4577_162530C.1
cggggcaccttcaggccgccgcggcaacagcagacaggccaggaggcagcagccaggaggccgacgcctggagccagtagctgcgcgggggctccagcgtgctggggatcctcaacttcatcaccttcctgatctcgatcccgatcctgggcggtggcatctggcctggcggcgaggtccagctccaccgactgcctgcgcttactgcagtggcccatcatcatcgtggggctcggcctcatggtcatctccctcatgggcttcgccggcgcctgctaccgccagacctggctgatccgcctctacctcttcgccatgtgcttcagacatcctcgcgcttctcttgttgatggacttcgcctt

SEQ ID NO: 68573 - DNA, 275 bp, Zea mays
  Clone ID: MRT4577_162531C.1
gttaaaacaatatttgggatccttaaacacaccaaagggggcccttttaaaagccaaaaaattggttgctacaaggcgggaactttgagggtacaccacaaaaaagattccctcccggcagttcaaagccattttcaaggggttttgatcccaggattcgagtctacccccctccacctgggagggacaaacccacgccttgggcccggcttgcatggggccccaaaaaggcccccaccttgccccaaaggggccctttttctgggggggggggc

SEQ ID NO: 68574 - DNA, 206 bp, Zea mays
  Clone ID: MRT4577_162532C.1
gcgtccggttatgctatcattgaaacatcatcttatcttcggctgcggatgttacttctacgggagatttaaaaaaaacaaagtaaggttcctaaaccagctcgaacagcattgcttcgatctttgcatgaacaagaaggcttgcccactttgcaaggtccaggctacatctctcgagtattcgacgttaatgttattctatgggg

SEQ ID NO: 68575 - DNA, 281 bp, Zea mays
  Clone ID: MRT4577_162533C.1
tcttttttcacaggagcagtcaccatacgtgggcggtctataaaacaacggtcgggccaaacaatatcatcaggcactcacttatctcggtaccaggtgtgaccactttactgtcctcaacattggttctctttttcttgtcctatgttattatacccaccacaagcatttttttcttatttttcattgttgacatttttgttttctttttgtctattctctcgttgtttcttttaatttttctccatatcttatttctaatatttttttatactatattt

SEQ ID NO: 68576 - DNA, 390 bp, Zea mays
  Clone ID: MRT4577_162534C.1
aagcaacacaaaaagctgcatccattttcttcagcccagcaacaatggcgcccggggtgattttgcctccttatgctccatgctctttctcgcatgtagggctaacgcgacaatcttccctcaatgctcacaagctcctatagcttcccttcttcccccataccttccatcaatgatagcttcagtatgtgaaaacccagctcttcaaccctataggctccaacaagcaatcattgcaggcagcagtctacaacaacccatggcccaattgcaaccacccttctcggcgcatctaacattgcaacaaaccataacgccacagcatctgcagtaactactgctacctgtgatcctagccatggtgaaccctgtcgcctacttgcaacagca

SEQ ID NO: 68577 - DNA, 274 bp, Zea mays
  Clone ID: MRT4577_162535C.1
gtacttggatcgagattctacgtgtggataacctggtcatcaccggcaagggaaaccttgacgggcagggcccatacgtgtggagctagaactctgacagaagtacgactgcaagaaccttcccaattcgcttgttatggacttcgtgaataacggggaagtgtccggggtcacgctgctcaactccaagttcttccacatgaacatgtaccggtgcaaggacatgctgatcaaggacgtgaccgtgactgcgctcggggatagccccaacacg

SEQ ID NO: 68578 - DNA, 638 bp, Zea mays
  Clone ID: MRT4577_162536C.1
caggagaggccagtcaccctccgcgttgatgctacgctctccgggcgcgtcgcctctgcttcggctttgcttcttttcctctcccgtccggcgtgacgcacatggactgcatcgtcgtatgttctgtcctttgcttggccaggcccggcaaggaacacaaaacatatagtttagttatcgcaccggaggggaaggataacatattgcttggactgaaagcaaaggatatgagatctgtgcgctgcgctgacaggaacgatacaccagacaagggtggtgagaaagaaaaaaatcggtttgctttaccagaccatactgaagggtgaggcgaaacgaaatgatctgaacgcagagcaaatgcactggacacagatgggaatgagatgagaggagcagagcactattatagtagaggagaggagggcagagaccaaacaatcagcagaggagaagacgcccctgacctaaacgactggcgtggtgatagcaaagcgtagtaccgtacctactgtagcgctaccctaccaggctaagcccttgacttgagctaggatggtatgaacataagagatgtgattcgcaccgcactggcgatgctagcgccgtaacgaaacaagacgagatatgcgaagcgagag

SEQ ID NO: 68579 - DNA, 304 bp, Zea mays
  unsure (1)..(304): unsure at all n locations
  Clone ID: MRT4577_162537C.1
aacacagcgncgaaacacnggangaagcgacggaagcgcncaggaggagaagcagcaagncnaggnggcacacaaagagcncagncanaggacgcccnngaaagcngaagcnggaggcncnanagaacagnnngnacagngcggcagcagncncnaccanggnangngccaanaagaggaaccccgnnccagagnnncgncnacggccaagggccncgnngangngggngggnngaanaaacacgcaannngagaagacgcngnngngaccangaannnaganngaacgcacaacggcaaaaag

SEQ ID NO: 68580 - DNA, 265 bp, Zea mays
  Clone ID: MRT4577_162538C.1
ccccctcgtacttctagtctcctcctggacagcaaagcacagtacaacacactgtgaaagaacaagcagccttcactggtgctcaataccaccatcagctgcagctgtacacccggacaacctgtctcacacacccgctcacacacatcatgatgggggaacatgctccatttaagttgtagtggccgttaaggagctttccaacgtttgcttcgaggaccacctggcgctgatggcgaatcgattgggtgaggactttctgact

SEQ ID NO: 68581 - DNA, 226 bp, Zea mays
  Clone ID: MRT4577_162539C.1
gccgggccgggacttcttatagaaaaattttttactcctgtctgtcatggaagcgcctatcatatactacaatcgttcggaatacattgagactgatacaggaaataaagtgagtagaaagtcaatcatttgtggtagtcaaaatatcattcttggtggaaaaacaatcatccaaacagattgtgtaattcgtggtgatcttcggcgtacaggcggaggacatgca

SEQ ID NO: 68582 - DNA, 186 bp, Zea mays
  unsure (1)..(186): unsure at all n locations
  Clone ID: MRT4577_16253C.1
ctggtnngatctggcagnagtgnaatgccgatcaagcgaagtcttcaagggaccctatctgggnatctaaaataaatgctaactctaagtccatgnataggnacgattgcctttgnggtgctagcaggtnnngtttggaagctctattgctttactgnntcaaagnctgataactttactgggatg

SEQ ID NO: 68583 - DNA, 2703 bp, Zea mays
  Clone ID: MRT4577_162540C.1
aattctactcaccattgttgcctctcccgacgcccctccctaccctacttcaaaacatttcaaaccactctacgcgactacgcctccttcctctcttctcaccccctccccctccactcgctcgccactgaggcgcctgaccagtgatcgtaccatctcccctcgaccacagtccaccgcccgtccccgccccgccccgcccgctcgacgaggccgcggccgccgcgccgggtggtgaagagggtgctgctatgagtagcgctgcgaaggaccaactgcagcagatgtcgacgacgtacgattctctcctgttggagctcaacatgatttgggatgaggtcggtgagcccgacatggcgagggaccggatgctgctggagctcgagcaggaatggctcgacgtctacaggaggaaggtcgaccaggccaatcggtgcagggcccagttgcggcaggccattgcggatgcagaggccgagctcgctggcatctgctcggccatgagcgagccaccgatacatgttagacagtcaaatcagaagttacatggtttaagggaggaattgaatgcgattgtcccatacttggaggagatgagaaagaagaaagttgaaagatgggaccaatttgttgatgtcatagagcaaattaagaaggttgcatctgaaatcaggccttcagattttgtacccttcataattccctgtggatcagtctgatctgtcattaagaaagctggatgagctaacgaaagagctacaatcccttcagaaggagaagagtgatcggctgaagcaagtgatggaacatcttagcactttgcattcgttatgcgaggtgcttggtgtagacttcaaacaaacagtaaatgaggtgcaccctagcctgggtgaggctgatggatcaaagaacctaagcaactgtacaattgaaagccttgcatcagctgcaagcagactgcgtgaattgaaagtccagaggatgcaaaagcttcaagatttggcctctagcatgcttgaactttggaatctcatggatacaccacttgaagaacagcagatgttccagaatgtaacgtgcaatattgctgcttctgaacatgaaataactgagcctaacacgctctctactgacttcctcagctacgtggaatctgaagttttaagacttgaacagcttaaagcgagcaagatgaaagaccttgttcttaaaaagaagacagaactggaagatcataggagacgtgctcatttgattggcgaggaaggctatgcagctgaatttagcgatgaggctattgaggcaggagctgttgatccttcgctggtgctggaacaaattgaggctcacattgccacagtgaaagaggaagcctttagcaggaaggatattctcgagaaggttgaaagatggttgaatgcatgtgaggaggaagcttggctggaagattataacaaagatgacaatcgttataatgccgggaggggggcccacttgacactcaaaagggctgagaaagctcgtattttggttaacaagatcccaggactggtagatgttttaaccacaaaaattgtagcctgggaggcagaaagaggaaaggaattcacatacgacggtgtccgccttatgtcaatgcttgaagagtacatgatcgttcgccaggagaaagagctacagaagaagaggcaaagggatcagaagaaaatccaggatcaactcaaagctgagcaggaagcgctctatggatcaaaaccaagtccttctaagcctcaaagcacgaagaaggcgcctaggcactccatgggtggtgcgaaccgaagactgtctcttggtggagccactatgcaagcccccaaaacagatatactgcactccaagacagctcgtgccgccaagaaggctgaagatttgggcgctttatctcctagtagtagaggcttggacattgccggtcttcccatcaagaagttatctttcaacgcaagcactttgcgagaggcagaaacaccgcgcaagccttttgcccagatcatgccaggaaacaacgtctcaccgatgcctacgcggcccatctccagcgccacagaggaagagaacaaaacccccaggacatttgtaggagggctcaatgcgaaaacgccggcgacagtgacggctcctatgcagatggcgatgacaccagccgtggctaacaaggtcatagccactcctgcaacccttttccaggagaaggcagattcgccagcactgccagcggacatcgagtactcgttcgaagagaggcggctcgctgtttacctggccaggcaagtggcttaaactcggtcattcacgtagttgaaagctgaactgactgcgatttctcgtcagaggccaatgttacctgttggtcgatactcgatagtagtcggcctcgttcgtaccttgcagtactattctgattcatagccatatttgctacagctagtaaggatttatttgggtactctaatattgatctcaatccacatgtgttgaaatgaattggagtgtaaattaatttaagttacacttcaatctatctcaatacatgtggatttgggagttttagacccgtatcgtaagttgtatagcttcacctggttgcatcgtggatgacctgttattgtttattactgttatccaaatatcttgccgcatgttatgtttctgatctcgagc

SEQ ID NO: 68584 - DNA, 161 bp, Zea mays
  Clone ID: MRT4577_162541C.1
ggatgccagagacagttgcgtgcgctgcagctacctaaaccccctcgtcgagatacgcggacggccggtgtaacaaccccccgggtctctcggccccagctgggcgttcacggctccgcgcgctagtatatggaggcgtgacgccctggtcgtgctcttta

SEQ ID NO: 68585 - DNA, 372 bp, Zea mays
  Clone ID: MRT4577_162542C.1
aaaaaaaaaaaaaaaaaaaaaaaaaaaaaaaaaaaaaaaaaaaaaaaaaaaaaaaaaaaaaaaaaaaaaaaaaaaaaaaatttaaactttaaaacgaggaggggtgctcccttgggggggtaccccctcttgggggcccatttttgggggttttgccttccccgtgggggcctgctccggggcgctgcttttttggggggtcccatttccccctttagtgggccgggtttttaaattttctgggggcctgtttttcccacttccggtgctgggaaaaaccttggggggcccccattttatttccttttagcaagggccttttttggcgggtgggggccttcccctttggccctccccaattggcctttcctg

SEQ ID NO: 68586 - DNA, 462 bp, Zea mays
  Clone ID: MRT4577_162543C.1
gttattcattgcagccgtctcatacctgaccccaccatatagctacatcacagagggtatcgtgcgctgcaaaggtgaggacctttgagggatagtccccaactgtggcctcacggtgaacaaggaaccgtgccgagtgacgtgcatttcaacattcctggacggggagactcatgaacacgtaacgcagatggtcactgtaggtgcagccaaggacactacgagtctgctgtgacgagaactggcttcagtgaggggactctacttaggcttacacggccacgatatgaatctcggtggacgagagcgcttagaaaacctgcatcacgtgtcagactcactagacatgcactctatgccaatgactatgacggctgaggagttgagaccatgaccacggggattgatacaaggagggacgtacactgggcatgcagggagagatgagcgactgaaaggtga

SEQ ID NO: 68587 - DNA, 294 bp, Zea mays
  Clone ID: MRT4577_162544C.1
gttttctctctcttgtaggttggcggctggactgtggtgtacgacggcctgacattcgtcaccgtgagatctgccgggcacatggtcccgtccacgcagccgcagcaagcgctcgagctgttcaagcacttcctggccaacacgaaactgccctccgagcccttctagatatataatagtgtgcaacaaagctctccactcctggataaacaagcaggagcgatcgtccgtgcaccacatttattagacctgttgtacctgcgttcttggaaggtgtaatggaacagtgctgtg

SEQ ID NO: 68588 - DNA, 410 bp, Zea mays
  unsure (1)..(410): unsure at all n locations
  Clone ID: MRT4577_162545C.1
ccctctacttggaccttaagccgcttttttttttttttttttagcagtacctgcattttcatgggaatgagattataaaaggctcacaggaacattctaaaaacatccatattgggtacacaaaggtacgtctctataacaaagcgtgaacacaattactactatgtctctcactaacataatatcccaatattaataaataaaatttggaatatccaagctgtgtatagaacccatgtgagtctgagctccactaagtgaggcagtgcctgtgtgtaaagcctggctatcaaataacttgctgaatctctattgccctgggcccttatcaagactcggaaactcaagtcacctgagggcttgactncgggctggagtcagtcggcccctgaagcggtgtgtctgactgt

SEQ ID NO: 68589 - DNA, 151 bp, Zea mays
  Clone ID: MRT4577_162546C.1
gctcgcttttatccacaaaaaggtttaagaagcgagagagtccgctgctggttgcaaccgagcaagagctgtatgggccacaacggcatggcgccacaggaggaaaagagcacgcgaaatataaaaaatagtatacacacagactaccata

SEQ ID NO: 68590 - DNA, 814 bp, Zea mays
  Clone ID: MRT4577_162547C.1
atctccgggctcacgccgcgctcgcggtgctgcctcccgggctcccgttccagcattccaggctcgcatcgcacggcctggccccgcccgctccgacccttctcggcgacactcctcgtaggctcgtactggcacgtccccgctctgtcttctgcccacccggcactagcgggtgcgggtccacgcttccaagggttccaaactctcggcggcgcaagcaatggcggcgcggggccgggagcactggtagtttcgcatatcgcggcggcttgttgccacctcgccatcgcagattatggggatcaacggcgaggagtgggaggagacggtactgggcgacggcgttgggaggcggaagggtggtgctgaggcttccggtttggtcgcatcctcctcctttgctgaggggatgggggaattcgtgctgaggtctatggacgccaggttctccggatcggtcgacgacgatgaatatgtctcgtctcggcagccagtatttggccatagtaaatcgacagctactacttctggtaccattaaagggcaagataacgtttttgtaaggtcatactctgataggttgctgaagtgtgacctcactttggatatgctatcagaaaatgagaagataaagataaccgagagattggtaaagatccagaatgatggtacagtggaggtagatgtgacgcgcagtgctcttgttgcctcagaactctcggagactgatgcttttggctgcgtaccacacgatattgaagaagttacacctgtcatcacaaatcagtcccaaagctgaagatgctatacttgt

SEQ ID NO: 68591 - DNA, 398 bp, Zea mays
  Clone ID: MRT4577_162548C.1
cgcttcgctcctctctgtcccgaccgagcagcagcgaccgagccctggccgagccgccctcccccaacgcgcctgcaccgacgccggctccgtgtcgggcaagctcagctacgagatcttctcgctgctggagagcaagttcctcttcggcaacggctccatgtcgggcacgccagggcagccgggccccggcaaggacagggacaagggcagggtgcgggtgctggcaatcaacgggtgcgggccgggccccagcgacgcgctgctggcgtcggccgcgctggcgaggctggaggagaggccgtcgccgctgcgacgggtgttcggggacgccacgctcaaggacaccgtggcgccggtgctggtccccagctacgacctggccacggtggcgccct

SEQ ID NO: 68592 - DNA, 1106 bp, Zea mays
  Clone ID: MRT4577_162549C.1
ttttgggtacccctcgggccggccgggcattggaagccccagcgtccggcaagagaccaacagcaagggtgcgaagaaagggtggccccctagctagcctagctagagagagagagagagagagagtcatcataatactcagaccgccgcacgtccgcagctgctccggctagctagctactgcaaagaagcaagctctcgatcacaatggccgccattccttctctgctgcgtcgtcgactcgccattgtcgtcgccaccaccgccatgctcgtcctccttccctccccgtccgtcgccggcgaccccgacctgctccaggacatctgcgtcgcggacctcacgtccaccgtgaaggtgaacgggtacgcctgcaaagcggcggcggcggtgacggcggacgacttctacttcagcggcctaggcggcgcgggcaacacgagcgccagcgcctacggctcccgcggtgacgggcgcgaacgtggagaaggtgccggggctgaacacgctgggcgtgtacatgtcgcgcatcgactacgcgccgggcgggggggtgaacccgccgcacacgcacccgcgcgccaccgagatggtgttcgtgctgcagggcaccctggacgtgggcttcgtcaccgccgccaacaaccgcctggtggcccgcaccctggcgcccggcgacgtgttcgtcttcccccgcggcctggtccacttccagcgcaacgccggcgacggccccccccccgttttgtccgcgttcaacagccagcttcccggcacgcagtccctcgccgccgcgctgttcgcggcgtcgcccgagctgcccgaccccgtgctcgccaaggcgttccaggtcggcaccaaggaggtggacaagatcaaggctaggctcgcgcccaaaaaggcctgaagatcgtactgttgacgcggtcatccttgaattttttttttttttctaccctattatgatttatgacttggttgcttccctgctgtacctccactaataagcaactgtatcagctagtctgctgcatgccttttatctgttatgtatgatccttcagctcctgcctacctttaatcgattatattccgcgcttttgtgt

SEQ ID NO: 68593 - DNA, 209 bp, Zea mays
  unsure (1)..(209): unsure at all n locations
  Clone ID: MRT4577_16254C.1
tctagtatcgcgagcggccccttttttttttttttttgagcatataacgaacttcaattgaaccacaaaattgctacagggagtacacggagcggaagcttagaacggagaacagctcgagcaggctgaagaaggagtagacgccggctggccgcgaggctgggttgttgaggattggtngttggggggtggggggcgtggattttttt

SEQ ID NO: 68594 - DNA, 394 bp, Zea mays
  Clone ID: MRT4577_162550C.1
ggccaagcatacgagagaacaaaggagctggacacacccaattatagactctatggggggctcgcggcagccatggttctaggggagaaactccaacgcgcacaggcaagagctctcgagagggagtacagggctgtggaaaggagcatcccgcagagctgagctcatgcgcactctcgagcgcgctaaggagatagcagaggaactctgcaagctgcaggacaagaggcagggcaaggacccttgcttgggcgcttggtttagagcacaatatggacaccgatgggagttttatacagggtggccgcgaggctgggaacgaggcaacaaccgtgagaaaaatcttgagctgaacgataactgctaggataagcacggacacctttggacagat

SEQ ID NO: 68595 - DNA, 285 bp, Zea mays
  Clone ID: MRT4577_162551C.1
taccggtcgaccgcacacgacggcaaaaaaaaaaaaaaaaaaaaaaaaaaaattttaatacttttaaaaaaaaaaaaaaaaaacggggaaaagggaaaagaaaaaagggggggcctcttataaaaatcaaaattaactaccccttccttgcaaagaaaaacttttttatatgggcaccctaaaattaaattacttgccctcgttttaaaaaatgcgtaatgggaaaaacccgtgcgtaaccaaactaaaacgcttttaaaaaaaacccctttttacacaagggtt

SEQ ID NO: 68596 - DNA, 318 bp, Zea mays
  Clone ID: MRT4577_162552C.1
agactggcgcggagactcgcggagcagggccagcaacgagtcgccgctgtcaggcgggcggatcccttcgcagagggacagggaaacaactcctgctatataacccaagccggtctaggcgactgttgttgggcgatccgatcaggctgcgaggcaggcatgcatcacgggagatttcgttgatcaacaagtgtacagcagctgcaggctgcacctgaagctcgaaacccaccacaggatgtgtacagctctatgcttcagcctactagtactagcactgctggattttatttttttcaacgcgtctttggcacctca

SEQ ID NO: 68597 - DNA, 2337 bp, Zea mays
  Clone ID: MRT4577_162553C.1
ccggtcggggaggggctctgtgaggtggaatgaccgcacacggctccgctgcttcgcgactcctctccggctctccgcacaggactccaaccgcctcgccgttgcatcgccgcgggcgtcaacctaggctgctgccggtaccggtgcgtccccagccatggctcggccgccgcaggaggcgatcgacaccttcgtcagcatcaccggcgccgacgaggtcaccgcagtccgcgtgctcgaggaacatggtcatgatctaaatgaagctgtgaatgcttattttaatgaaggagataggaccaccaccagaatcaatcagaatcctgtgcctgccactgccagttatgatgacatgatggagctggatgaaccacttgatcccatgttcaacagacctttgttccctagaactttgggcaacccttttgcccttttggatccaggttttgctgacataactgctggtgatatatttggacgtggaccccgagttacacaacctagggacgtgaggcagatacctattgaagttaaggacagcaatactcaaacaggcagttctggtcagggtcccattattgaggatgttactggacgtgaatctttctatggtccagaggtccatgggaccgttatagttgacgaagatgatgaagacttgccattaacactatctgctcaggatcctaagatcccaagcagtgctttgcacccaaaccatttcatgcctagtgcgcctccagtggttgatgttagtgaccataacaatgatatagaagaggagatgattaaggcagcaattgaagcttcaaaaagggaagctgacgggatgaaaaatgttctaagtagtggtcaatctgaaaacatgtcacgtggcagaggtgatcatgagcttgctcgggcggtttctttgtccttggagacagcagagcgagagagagctctgcgccaagagggaatgtatgtagcagatcactctcctgacttatctgataaagaaggcggtcaaggaggaagtgggataagcgaaaggcgaggactaactacaggagaagtgggaacttctgagcaaacagtagatgaagagaacttccaagaggacaatgaagatggtgaagaacaacctttagttaggactcgttctaggcgacttcgaggcagaactattgagccagcagaaactgttcaaagggctgacagcccgccctcaagtccccaacctcatgttcaaattggtcatcagcgtaatgtggggtttccttcagtagagtggggtggtatttcttctgaagagcgtgatgaagctcttatgcttgaggctgcaatgtttggtgggattcctgaaggagcaccatatccattttccttcccagcccatggcaggtcgactcactatcccctagtagcacgtcctccatcaccatcattaacggcacagcggttgttaagggagcagcaggatgatgagtatcttgctgctctccaagctgatcgagaaaaagagttgaaggctgtgcaggaggctgaacttcgcagggtagaggaagctgcagcaagagaggctgctcttgaacgtcaaaagaaagaagaggaggagaagctaaagaaacaacgtgaggaagaggagttggaatccaagcttgcagccaaacaagcatcactacctaaggagccactacaaaatgacgagggggctgtcacagtggtagtccgcatgcctgatggtagtcgtcgaggacggcgctttctcaaatctgacaggcttcagtatctttttgatttcatagacatcagccggactttcaaaccaggaacttatagactggcgaggtcttatcccaggcgtgccttcactgaattggagagccagatgtcactgagcgatctcggtctcactagcaagcaggaagctctgttcctagaaaaactgtctgcgtagagtacaaggttctggagttatggtcgagtagtatatgcacttataaaatcggtcatttagatcgtgcctggcgtgtgttcatgaaaatactgcagcggttgaatgattactgatctctagagatcccgtcgccatcttctgtgctctgaaacggaggtgtttcgatctgactgtgcagatgggcagttctacattcagatttcagaacaactgtagctcttgcggttttaagacttgagtatggtttactttggagatagtggtttagaccatccgtgttggtctcctgagcggtattcttacgtgatcacgtgtcaaaacgaacagaatcctttgttgcagtcattatagttaaccgtctcgctggaactcgcaaaaaaaaaaaaaaaaaagcggcc

SEQ ID NO: 68598 - DNA, 240 bp, Zea mays
  Clone ID: MRT4577_162554C.1
attcccttctctagccacgcatcccatatcattctataaatcatatatagccatggttgaacacacaactaactcactactaggcagcgtctattgatgggacgtcagtcctcacactactatcttccgatccaacgacttataaaattcatatctgcaactaaaacaaacttctacgtaacatcaaacctattagatcactatcagaaaccaaacctatacacattcataaccactatc

SEQ ID NO: 68599 - DNA, 262 bp, Zea mays
  unsure (1)..(262): unsure at all n locations
  Clone ID: MRT4577_162555C.1
cggcccgtatccccggatgactaacccccgcgtaaacccccgcccaaaccgccaccgcgggggggcccgaacaaccgacggcgggccacccccacgagaagcggcgcaaccngagcgagggaagcgaggacggaccgagcccacgggggggcaagcgccgagaaggaccccgcagaccaagcgcaagggcacccaggaggcccggcacaggccgaccggagcagcggaggacacagccaaaagaaggacccagaaaagcaaa

SEQ ID NO: 68600 - DNA, 662 bp, Zea mays
  Clone ID: MRT4577_162556C.1
agcatttcgatatcggactggtagttggactgttgtttggcctccaggtcgcaggagggtgagcaatggcggggcagagcagctacagccggctcgccgccgacgaggccgccgccgcgatatccgccgacgactacgactccaaaaagctccggctgcttggctacgagccgcagctcaagcgcaatctctcgctgctgtccaacttctcggtgaccttctcgatcgtgtcggtgctgacgggcatcacgacgctgtacgggacggggctcgagttcggcgggccggtgaccatggtgtacggctggcccatcgccggcgccttcaccatcgtcgtcggcctggccatggccgagatctgctccgcctacccgacctccggcggcctctacttctggagcgccaggctctgcaccgagcgccgctggggccccttcgcctcctggctcaccggctggtttaacatcgttggacagtgggcagtgacaaccagcgtggactactcgctagcgcagctgatccaggtgatcatcctgctgagcaccggcggcaaccaacggcggagggtacctggggtccaagtacgaggtcatccccatccatgccgccatcctgctcggcccacgcgtcatccacagcctccccattggatgactctcctt

SEQ ID NO: 68601 - DNA, 1046 bp, Zea mays
  Clone ID: MRT4577_162557C.1
cttttagatcggttccatttgttctggttagtactgaattaggaaatcctacgggagtggtacatataaatgtggataaggcggatcaaccgttgcctcttactacagtgtttcataaacttatcccacttgagacgactccttacacattgtttcaaactattattggcaacggctatccgattgcgttgttggatgaagaaaaaatactactgattggtaagaaaattacagcaataggactatgtcaagcaaaggatgcagaaagtgttgagataacatcgtgcccagagatcccctttttcttatctgaactaaccaaggatgagatgcaagctcagctggcttcacgtgctaggatactcttttggggtagtattgctttgggaaccttgtcggtttgcctagtgggccatgccatttacaggggctggacgagaatcaaactacgaagagaggctaggcaggcacgacagatgtttgaggaggctgaagatgctattcacagggatgactctagtgatgatgatgaaataggagacgggcaactatgtgttgtgtgcttaaggaagagaaggagggcagcttttattccatgtgggcatcttgtctgctgttccgaatgcgctttaacaatagagcgtacacctcatccattgtgccctatgtgtcgtcaagacatcagatacatgatgagggtttatgactcttgagtgctgtggaagaggttgcaaaaaaaaaatgctgctcgtcgtgatgaacgcagtgctgttcctgctctacggtaacctggcaccagataacagcggtgtccctgcgccggagccttatgcttgccagcggataacatcgccgaagcgttaagtctgttctgatgctggctgcgtggtgtttagtttgccagaacagtggtgtccactctacgccgaatcattgagaaactctagtgttagcaaattgtaattttagaacaggcgtagagtggagtttttaaaactctaaactggctgcctggtgaatgctgttctaacaatactgtggttttc

SEQ ID NO: 68602 - DNA, 117 bp, Zea mays
  Clone ID: MRT4577_162558C.1
tggcgctaaaatatacccttccccagaccccgcacagtgcgggaagcctacggcactgggtacgccctatgtagtcagttggaagccactgctaattggttgtaatgcttaattttc

SEQ ID NO: 68603 - DNA, 404 bp, Zea mays
  Clone ID: MRT4577_16255C.1
cataaggatgatgacggattcttcctggactttatctgggactatgctcttacacacttaggtgataccaagcagcacgcgggagggtctatgactttcacattgcctgcgaagttcatccattgataaacggacactatccacagatcatgcatagatctcaatgaatcgatcaggtctgcctcagcattcactacctgaacatgctaaactggagaatcgctcccctagactacatatgctatcaacgagtacacatccatctacatgaatgatcaaaaactgtatcacctgactcccaataactactctggccattgacacgatcactatactgctgtacacaattgcatacccattggaccacatgcgaattctaagttgctcttcattgcccctacaat

SEQ ID NO: 68604 - DNA, 262 bp, Zea mays
  Clone ID: MRT4577_162560C.1
agcctacaaggccacgcaccatcaatggtccccactccttctggtggcctccgccctcgccgtcagcgccgaccctggtcggacggcgctggagagaggatgcaggcccatctcggtcgggtggccccgaatccgtctacgtgagcgactcggacatccaggagcgaggctcatgggcgctggcgcccggggagcgccacatgctggtcggcggcaggcttcgcgagacgtcgggacgcggccgcggagctccgcgcctccg

SEQ ID NO: 68605 - DNA, 608 bp, Zea mays
  Clone ID: MRT4577_162561C.1
aaacatggtccgtgccgcctcggcctggccctagaatcctcactctctcactcaccgccacggatccatctttgctttactagcagtgcgcagcgagctagcttgggtcggacgatatatcgatcgatcgctcgggcatcatggagcaggaaggagcagtcgctgttgtcgacggagatagtgaaccgcggagtgtagccgtcgggcccggacgccgtctcgtcggccttctctgtgcgcgtgcgccggcgactgccagacttccttaagtcgggaaccttagtcgtgcgccttggtccactacctatagccattgttgacctggcctccatccgatgatcgtgctgtagtgcggcgcctagctgggcagcctcagccgctacgagctgtggagcaaggtgtgaggggaggccacctacgatctatccaccgtgctcgccttcctcggcgtgctcggcttgaccatctacgtttacatcatgtacagacccaggcccgtgtacctcattgactttgcatgctacaagccggccggcgagctcaaggtgtgcaaggcggcgctcatagacctggcgcgcaagtccggcaagcttgacgaggacagcctg

SEQ ID NO: 68606 - DNA, 338 bp, Zea mays
  Clone ID: MRT4577_162562C.1
caaaaacataccaagcgattttttgtattttcaaccaaacaacaatggggaccgggatattatccttccttgcgcttctaacccttactgcgagctcaacaaatgcattcataataccacaatgcccacttgctccaagtatcattattacacatttcctcccatcaataacttcaatgggcttctaacacctagctgcgcaagcctataggctacaacaagcaattgcggctagcgttttacaacaaccaatttctcaattacaacaacaatccttggcacatttaacaatacaaaccatcgcatcgcaacagcatcaacattttctaccatcactg

SEQ ID NO: 68607 - DNA, 284 bp, Zea mays
  Clone ID: MRT4577_162563C.1
aaaccactgagagggttcatatatttatgaccacttaaccccttttaaaacgtttaaatgcacgccacaacaaattaaaggggctttccaacacaacctgaccacacttcaacatcccccgccttaaaaaaggtggtattccaagttctttccccgcatattcttatatagggagcccccaaattttccctacaaataaatattacacctgttgtacaagcggctcacccaaaaaaccagggtccaaatcacatctcataacgtcattatacatcagcaaacac

SEQ ID NO: 68608 - DNA, 375 bp, Zea mays
  Clone ID: MRT4577_162564C.1
cttgagaatcattttcacaagacaaacgtctaggctctcgtagaattgaacgtgatcaagaaccttgtcgtttcagtggagctcttgggggtttcaatgcccatgcaagtaacattgtggtagccatcttcattgctactggtcaggaccctgcatagaacgtggagagttcccagtgcatcaccatgttggaagctataaatgatggcaaagatctccacatctccgtgactatgccatctatcgaggtttaaaacatcctatgctaatgatgtttgctctacatggaattttatggtaacacaatttgcttggagctaatatatcccttcattgactatggatgagacttttgtgatgtaattgatgagacta

SEQ ID NO: 68609 - DNA, 1830 bp, Zea mays
  Clone ID: MRT4577_162565C.1
atgggagaagcagagagtgtgagggggtatataaaggatcccccaaaagctggcagccattgggagaaaaggagcaaaaaccggttgaaccggttttcagaccggttgaaccggtttctaccagggggatcccggtccactgagctactcagccggagactcgaccggtttcaaaaccggctgagtagggaaaaatttcagctcaaccggtttctgaaaaatatctgctacgacttttctgacagctctgactgtcagacaggtttcgcctatccacccccctctaggcgactttcagcggcactggtgcaggagcagacagttgagggcgtgatcaggcagtgcccagtgtattatgtctccgaagtgctaacaccatccaaatgtaacatgacggaactggagaagattgcctatgcagttgttatgtcttcgcgcaaattgcgccattattttgaagcattcaaggtttgggtcacctcagacaggggactaggtgaattgttcagaaacccggaggcgtcggtcaggattgccaagtgggcggccgaactctccggctaccacatcaatttcgagcccagggcagccatcaagtcacaagtcctggcagacttcgtcgtcgactggactgggccaataacacagccggacccgtccacagagaaggtttggacgatccactgcgacggcgcatggtgccatgcgggggcaggcgccgctgcagtcatcacctcactcgccggggtcaagcaccgatacgcggcacgcctcagcttcgctctggaatctgacagatgcacaaacaacatagcagaatacaaagcagtcatcctcggcctccgcaagctgcgggcccttggtgtcaccacctgcattatcagaagagactccaaggtagttgccagccaagtcgagaaagactatgcagcaaaggaccccgcacttatgcaatacctcgcggccatccgaagtctcgagagacaattcaagggatgcaccttgcagcatgtggaccgggccaagaatgaagaggccgacgcattggccaaggctgccgccagaggcgagtccctgccctccgacgtgttctaccatgttatcggcacgccagccgtccggagccccgaagggctccaaataaccaatgacagcgaaggccaccgcatagtcaacctcattatgaccgaagactggcgggcaccaataaccttgttcctacaggggtactaccacccaatcgacatcaacgaggccaagcgcctcaaacatcgaagccgggacttcgcactgattgagggccaactctacaagaaaggggtcagccagccaatgcttaaatgtgtcaccgagaccgaaggcgtccaaatcctgcgcgaagtccacagtggtacttgcggctctcacgcagggccaagggccctagccgcaaagggcctggacatcgtcgggcccctgcccacggctcaggggaacctcaagttcacattcgtcgctgtcgagtactttaccaaatggatcgaggcgagggctgtttccacaataacatcaaagactgcacagaaattcttttggcaaaacattgtttgtcgcttcggcgtaccgtccgaactaacagttgacaacggcaagcagtttgacagccaagacttcaaggatttttgcttctccattggcaccaagcttgccttcgcctcagtatatcacccacagtccaacggagttgtggaacgcgccaatggaaaaattttcacagctgtcaaaaagatgctcctcgacgaaaaaagggcaggtgggccgatttgttacccgaggcggtctgtgcgctaa

SEQ ID NO: 68610 - DNA, 534 bp, Zea mays
  Clone ID: MRT4577_162566C.1
atggcgagcaaggctcggggctcaagtggccgagggcgagcaaaggaccccgcacttatgcaataccacgcggctatccgtagtctcgagagacaattcaagggtttcaccttgcagcatgtggacctagccaagaatgaggaggccaacgcattggccaaggcttccgccagaggcgagtccctgccctccgacgtgttctaccatgttatcggcacgccagccgtccgcagccccgaagggctccaaataaccaatgacagtgagggccaccgcatagtcaaccttattatgaccgaagactggcgggcaccaataaccctgtttctacatgggtactaccatccaaccgacatcaacgaggccaagcgcctcaaacatcgaagccgggacttcacgctgattgaaggccagctttacaaaaagggggtcagtcaaccaatgcttaaatgtgtcaccgagaccgaaggcgtccaaatcctgcgcgaagtccacatcggtacttcggctctcacgcagggccaagggccctag

SEQ ID NO: 68611 - DNA, 388 bp, Zea mays
  Clone ID: MRT4577_162567C.1
gtagcggcggctttttatggaggggtaggcatccatcctaataaccaaaaacattcaacctattcatgttttgtcactgttcgggggagcccgcacacacaacacaaccggtctattatttaaccaacactgccaccatttatgacacgaacaggtgattctttgacaacctccatttggagagggggcaccaaacaacctaggcacattggcagcttaatcgacccaggaattactgtccctcgggggtttggccattacaggatggatggctcgttggaaagatccaagcttctgtgtgggggcggtcattttacaagtgtttgccgccgaaaatcaaaccctgctgagccggggggagccccttctttgagtggcttttttcgga

SEQ ID NO: 68612 - DNA, 1266 bp, Zea mays
  Clone ID: MRT4577_162568C.1
atggcgagcaaggctcggggctcaagtggccgagggcgagcaaaggaccccgcacttatgcaataccacgcggctatccgtagtctcgagagacaattcaagggtttcaccttgcagcatgtggacctagccaagaatgaggaggccaacgcattggccaaggcttccgccagaggcgagtccctgccctccgacgtgttctaccatgttatcggcacgccagccgtccgcagccccgaagggctccaaataaccaatgacagtgagggccaccgcatagtcaaccttattatgaccgaagactggcgggcaccaataaccctgtttctacatgggtactaccatccaaccgacatcaacgaggccaagcgcctcaaacatcgaagccgggacttcacgctgattgaaggccagctttacaaaaaggggcgctggggcctggacattgtcgggcccctgcccacggctcaggggaacctcaagttcaccttcgtcgctgtcgagtattttaccaaatggatcgaggcgagggctgtatccacaataacatcaaagactgcacagaaattcttctggcaaaacattgtttgccgcttcggagtaccatccgaactcacagttgacaacggcaagcagtttgacagccaagaattcaaggatttctgcttctccattggcaccaagcttgccttcgcctcagtataccacccgcagtccaacggagttgtggaacgcgtaaatggcaaaattttcacagatgtcaagaagatgctcctcgacgagaaaaagggcaagtgggccgatttgttacctgaagcggtctgggcgctaaacacgactgagtgcagggcgactgaggtcacccctttccgccttctatatggatcggaggccatgaccccgcaagaaataaaacacgggtccccacggacagtctcgtcagctgtccccaacgtggacgaacccacttcgaaggatctcatcgatggagaccgcgtcttcgccctacaggctctaaataaataccaagcccaaacaaaagcatggcgtgaccacacagtcatcccgagggaattcagcgaaggggacatcgtactcgtccgaacagctcggacagagtccaggggcaagctggagcccaagtgggagggccatttcatcgtcaagacgaaggcatcccccagcgcatacaggctcacaacgccatccggcgaggacttggagcattcctggaacattgataatctccgcaaattttttgtttga

SEQ ID NO: 68613 - DNA, 186 bp, Zea mays
  unsure (1)..(186): unsure at all n locations
  Clone ID: MRT4577_162569C.1
aaaanngggccgacgacgcgtccgtaaatcttatcaccactccatatcaaattatctcactccaccaaaacaattgggcatgtagacgaatatgttgtcataccagccattaaaaaccctctcacaacttctaatatcaaccactactcttcgaatcattcaacagcacaaactgcattcacagaa

SEQ ID NO: 68614 - DNA, 410 bp, Zea mays
  Clone ID: MRT4577_16256C.1
gatggacacacatgctataacattttaccgatgatcgttcactaatctctgtctgtttggcatcagtggcaatcaaaaccagtagcgtagtgcgtgctccgtagtacttcactggcaaaatcagcatggcctacgaggactttactcacttcaagagattacgttagagttcaggcgctggctggttgcctggccacgctttattaatgagttcagttctaaacccctgctgaagcccaggcagtgtccatgtctctacgagatagttgtgcccagggcaagtggacgtgcaggtgtgcagcgcacagccttgttggcttcggcacagacccagcttcgaattcgtgctggtgctgcgcataaagatggaacttgtttgtgtccagcggtcgcagtgctggtgcctgctg

SEQ ID NO: 68615 - DNA, 134 bp, Zea mays
  unsure (1)..(134): unsure at all n locations
  Clone ID: MRT4577_162570C.1
ggggggccaacaacacaacganggtttgggcttcggcgngacccgnggcaccgggcctactccntttcggccttcgccccgaacacaacttcggcaccgngccggagcacctctttgtcgcggcataccctggc

SEQ ID NO: 68616 - DNA, 140 bp, Zea mays
  Clone ID: MRT4577_162571C.1
cacatgcaagaaaggattggaagatgagaccctcggtatcaaccgtagttaggccaactacagggtccacggccttgtccttaagcggaggcccaatgcgctgaattactgttcttcgtaactagacgcagcatacgcac

SEQ ID NO: 68617 - DNA, 253 bp, Zea mays
  Clone ID: MRT4577_162572C.1
gagagagagaaaacgtagtttcacatttgaacccacggtcacattttacatggcccaagtttggttcaccaaaaagtaagggaaggttgacaagatgtttgcacttgtacatatgctggtcttagcaaaccaccattacctacactggtcaagttacaagaattttggtgggcattaccttttggggcaaatggtgtacaaaccaacacattatttatttcattattatgaatcctacaggttcctttaccca

SEQ ID NO: 68618 - DNA, 476 bp, Zea mays
  unsure (1)..(476): unsure at all n locations
  Clone ID: MRT4577_162573C.1
gngcggcccctgtctccccgggggggcgncnnnttttgttccgtcttctgcngncggcttccccggctnggtngggggngtccnggcgtgttttcgcttcgtttgccctggttctttcccttccttttcttttgtttccggggggggtccttccgtttcnggtgtgnggctgcggngnttcngcttgnccttgntccccctgccnctttttcngctcgggctttctcttgggcctccggcnggttctccggcttccgccccccngcttgggcgnntttgggcttgcctccccgcctccgccgcngggtttggctttgccgctcncgnncttcccggcctgcggccccttttcgncgcttgccgggctgngggctgcntccnggcctggcttttccgtcccctgggcttgttctctttcttccccgcngccgggtctttgggtgggtgtctgtgtngcttgctccgcggcgcctttt

SEQ ID NO: 68619 - DNA, 279 bp, Zea mays
  Clone ID: MRT4577_162574C.1
gggaaaaagaaaacttcctaatatttactacagaaccttttgggtgcaaacaagaatgctgggcttttttcagggcatagggacacacttcaatattagcatagggaatttttagtagataggttttcctaatttcccaccccattttgggggttaaaacaaaaacttttttttttccttgaacccccttgttgttacatatactaatatgacaatttggaggggtgatgcttttcaagggcacttccaaaggaaattagtttaagaggggttggggaa

SEQ ID NO: 68620 - DNA, 290 bp, Zea mays
  Clone ID: MRT4577_162575C.1
cccacgcgtccgaataatggacgcacactattatctgacggggctctgaggggaatgggtgctgagggggagataaacacaagaggtatacatgctcgggggcccaagacagttgaagggctcttaacaacgcgctggatcatgccagggagcggacatgtggtgaacggcgacaatgatattgcatacacccataagaaccttagattgctatgaggacgcttttgtgacatatgaggagtagcgtctatccagggatgtttcatagcgtccttatacaggaccagaga

SEQ ID NO: 68621 - DNA, 624 bp, Zea mays
  unsure (1)..(624): unsure at all n locations
  Clone ID: MRT4577_162576C.1
tgtgtttttttttttctttgtctttattatttatttttattgcttatgatattatttttatttcttacattattgtcctagtatgatatgttttatgtaatgtcaaatgtctatgtatgttaatgttgtctgtgcattatgtaatgtgccattacacctgtatgccgcaagcctggtatgtcactagcgcgtgtatgtgttctctaagaaacaatgcacgacctttagcgtgctgcatgtctccttgagggagacgacctttgtgatgctctctttctgcctgttacttttcttggcgggtaatcaggnncgttgacttttttctgcttgttaagcctcttgcggttgccctttatggagacgacnntttggatgctttcttcgcctttttaccttaggcgggaatcatgcgttgaccttttcgcctgtaagcgtctgcagttcctcttatggaacgaacttttggagccttctttcgcgcttttatctttaggcggtgtaaagctcgtgcgattccctttaggtaaccgtcttttggacgcttctctcgttgtgtacgttcttcggcncctcgtgtggtgccgctcgtcagcgttttaacatttacactctcttggtggggga

SEQ ID NO: 68622 - DNA, 577 bp, Zea mays
  unsure (1)..(577): unsure at all n locations
  Clone ID: MRT4577_162577C.1
gcacaaaccttgattatctatatcaggtctctcattttgctacagactcttaacccaaatatctttggattaattaccacatagctccaaaggtgggtaaaaacacacagattcagacttagatgttttactgtttgaaaatccccaacacctgacaactgatctttaggcaaacattactctactttttatgtagcaccatgtcaatctcaccttatgaaacgtattcgccatactgtggtctccaagttttctatagaaactacagtctaaaaccactcatattgatcacaaaacagctccaaactaggcattctacactgaaattcagatttcagagacagaacaaaattcagcccaattaaactgacagtccaattttgagccacattttctccacattttgcgtaggattacacccattcccattaaatgaatttgtacactnaacttgtggtctttaactcctctatagacgtctcagcccaaagctccttagattttccacaaatgagctccaaaaacagcacaaacctgcaattcagaccaaccttctgttcctggtctgaaactgaaa

SEQ ID NO: 68623 - DNA, 868 bp, Zea mays
  Clone ID: MRT4577_162578C.1
tccgcatcagccagttagctcttttttctatgcgtatgaaatcttacatgaacaggaggccaacaacaagacaaggaattggagtgcacgcgaccacaccagcaaatttgtatatttttttttactacccgatttgcatcttacgactggtaatttcgcgtccgaatgtccagctgaatgtcgggccctacatcagtcgccgatatgaaaacagggcggcccacgacgcagcacaacaaaaatatcttggtggcctccagagtcttcacgcctaatcctagacactgttaagaaacctatcaaagcccatctggcctatatacctcaaactctcgttttttctataaatactacctttagaaatttatttctgaaataataccaagttaaatactacaaatttaccttcttgtacatttaaatttgtatattgggccatttattttaagcatttgtttttacaattatttatttcattctctaaaatgattacaataagtaatctaattatcaaatttatcacatgtagatgactagtattgtgagccgtgaattcgaggtctgatgtgcagattgtgcttgggggcaagaagatcaaagctgcaatcgggtttggccaaaaatatgaagtggccaccgacgagcaaaatcaccaagcattgcactttctgcggcaccatctctcgtctacgctcaagaatgagtacatgtcagatagaaagtcaagcaacctctgaaatgcattgcaacaacgtttttgagaggttcaagtacaaagtcttgtcccaagcaccgcaagactgggcgcacagcaagattggactcaccttagatatattgactttaaaacttgagagatacatgcagc

SEQ ID NO: 68624 - DNA, 580 bp, Zea mays
  Clone ID: MRT4577_162579C.1
gccggccgggtttcggacgctcgccggatgactaaatcatcgtgcccgtgctgagatccctgcgctcgaagctgttctcttacatgctcagtcttaccgtgcgacctgattactgctcggcagggcgccctctcgattcgctcgaatgtaattgccaatcatgtcaacgatgcgacctgtcacctacagacgccacccagttgagtgagctgatctatatacatcgccctcctgagtctgcggccatccacgcgactgcattacatgtccagaaggccgagtgaatacgcagccagcagaatgctgatcacctggagatcgacgacaagctcgaacatcctgccctgctccagcacaactgcaccaaattattctatcaccacaaaagatcttcagcatattaattacccaatatgatcacggtcctgcatgacatcaaccggaacccatagacctgcttgcgactatcgcgacgaactagctccttgagccagatgctgattcacctccatatactctataaatagagtagatatgattattagttccgacatcactcaaaaataatatccctaataca

SEQ ID NO: 68625 - DNA, 332 bp, Zea mays
  Clone ID: MRT4577_16257C.1
tgcagtttggcgccattcagcgggcagtcagaggtttctttccattaacctggaaagcttggctcaagcttttgactcccaaaaggatactagaggaccggatgtttgtatatggtctggccaaggagaggctcgctcgccggatggctcatgatacagacagatatgactttgttcactatatgttgcagggatctgagacacttagatttgaggagatggtgtcgcaatcacaaatcctcctacttgctggtagcgaaacaacagcatcgtcattatccggcatgttatactacctccttataaatcctaacgtattagctcgcttaact

SEQ ID NO: 68626 - DNA, 399 bp, Zea mays
  Clone ID: MRT4577_162580C.1
gtctgttttttttccccattaattgtcaatctgcaattcaaatcacattcacaatgggtagcgtcagccacaagacaggaactttcctgttcacctccgagtccgtaggtgaaggtcaccctgacaagatcgctgatcaggtctctgacgccgttctcgatgcctgcttggccgaggaccctctctccaaagtcgcttgcgagactgctaccaagaccggtatgatcatggtcttcggtgaaatcaccaccaaagccaagctcgattaccagaagatcatccgtggtgccatccaggacatcggatacgacgactcctccaagggtttcgactacaagacttgcaacgtcttggtcgctattgaacaacaatcccctgatattgctcaaggtcttcact

SEQ ID NO: 68627 - DNA, 207 bp, Zea mays
  Clone ID: MRT4577_162581C.1
ggtcaactctagtagatctatgacgtgcctgccgcctgcggagctcggatcttaagcggcgccttgcgttcgattttacgttaacatctagctgttcttggttatgataagaaagaaattaactaaacttgctctcgtctcctgcatatgctacataactgaagtggtcaggcgtacagacgaatactgatgtatgagtttaaatac

SEQ ID NO: 68628 - DNA, 1646 bp, Zea mays
  Clone ID: MRT4577_162582C.1
cggacgcgtgggctcgcgcccaaggcgctcgcggcgtaccaccagcctgcgctcatcctccaccagcgacgccggcatggaccgccccccgtcgccgcggtcactgcctccaagccggttctcaaggacccgaagaagtaccaggagtgggactccatgacggccaagttcgccggcgccgccaacatccccttcctactgctccagctcccgcagatcgtcctcaacacccgcaacctcctcgccggcaacaagaccgcgctcttcgccgtgccgtggcttggaatgctcactgggctgctgggcaacctctcgctcctctcctatttcgccaagaagaaggaaacggaggctgtcatcgtgcagactcttggcgtcatctccacctatgcggtcctcgtgcagctcgccatggcggagtccatgccggtgccgcagttcgtggccacttcggttgttgtggccgcaggactcatcctaaacttcctcaactactttggctggctccctggaaccctcttgctgatgtgggaggatttcattacagtcggcggccttgccgtgctccctcaggtcatgtggtcaacttttgttcccttcatccccaatagcgtactgcctggcataatctctggttctttagctgttgcagctgttgcgatggcaaggatgggcaagctttccaatgcaggggttaaatttgttgggtcattgtctggttggacagccacacttctcttcatgtggatgccagtggcacagatgtggacaaattaccttaacccaagtaacatcaaagggttgtcagctttcagcatgttgcttgcaatgcttggaaatggacttatgattcctcgcgctgtattcatccgtgatttgatgtggttcactggttctgcatgggcatctgtcctacagggttggggtaacctggcgtgcatgtactgctttaatagcatcagtggagaagttttctttgcaacatcagctggtctgcttctatggctaggatttactctatggagagatgccattgcctatggcaacagctcgcccttgtcttccttgaaggagctgttttttgggaagtgatgaaccgtcggcaaccttgtttctcttgcactttaagcagctaactgttcccgggtaggacgctctcctgcaataaatcatggtagctgttaagaacggtggttcagttgctctcatatggtctgaagaaacggtgcttcagtctttagcattttgaggaggaaacgtgaaacttactggtcagctgaaagctataaacattgccatggccctggactggaagccccaactttcccaagcctgtagaaagcgccatgtgcctctacagaagccaccgcgtgatgaccagcttcatccggcagggtgggtacagtagctagctatagccctagtctgatgtaagaacaaatttatattatccatcccatattgtctttaattagattcttttttgaaaccaatgcaatttcagctcttgctgtcgtgcaaatttgtaccattgtccatggatgagtagatgacctgggagaatcacacaatacatattgtaattgtaaaggctctcaggcctactggctatatatataacctatagttcttaggaactaatcatc

SEQ ID NO: 68629 - DNA, 245 bp, Zea mays
  Clone ID: MRT4577_162583C.1
cccacgcgtccgaaacattgccatggccctggactggaagccccaactttcccaagcctgtggaaagcgccatgtgcctctacagaagccaccgcgtgatgaccagcttcatccggcagggtgggtacagtagctagctatagccctagtctgatgtaagaacaaatttatattatccatcccatattgtctttaaaaaaaaaaaaaaaaaaaaaaaaaaaaataaaaagataaaaagggtagac

SEQ ID NO: 68630 - DNA, 1327 bp, Zea mays
  Clone ID: MRT4577_162584C.1
atgtcgtcgccgtcggtagccagcctccgtctcccgatgctcccagcgtcgccgcccctctcccgccgcgctatcgccggagttaccccgagcgcggccgcaccccgcgctcttctcctacaacccctcgcgcccaaggcgctcgcggcgtaccaccagcctgcgctcctcctccaccagcgacgccggcatggaccgccccccgtcgccgctgtcactgcctccaagccggttctcaaggacccgaagaagtaccaggagtgggactccatgacggccaagttcgctggcgccgccaacatccccttcctactgctccagctcccgcagatcgtcctcaacacccgcaacctcctcgccggcaacaagaccgcgctcttcgccgtgccgtggcttgtacggcccccaattcgcgtctcagattccacctcctctggaatgctcactgggctgctgggcaacctctcgctcctctcctatttcgccaagaagaaggaaacggaggctgtcatcgtgcagactcttggcgtcatctccacctatgcggtcctcgtgcagctcgcaatggcggagtccatgccggtgccgcagttcgtggccacttcggttgttgtggccgcagggctcatcctaaacttcctcaactactttggctggatccctggaaccctcttgctgctgtgggaggatttcattacagtcggcggccttgccgtgctccctcaggtcatgtggtcaacttttgttcccttcatccccaatagcgtactgcctggcataatctctggttctttagctgttgcagctgttgcgatggcaaggatgggcaagctttccaatgcaggggttaaatttgttgggtcattgtctggttggacagccacacttctcttcatgtggatgccagtggcacagatgtggacaaattaccttaacccaagtaacatcaaagggctgtcagctttcagcatgttgcttgcaatgcttggaaacggacttatgattcctcgcgctgtattcatccgtgatttgatgtggttcactggttctgcatgggcatctgtcctacagggttggggtaacctggcgtgcatgtactgtgcaagtgtgctagattgtctttctgaccatacatgtcacttttttgcaacatcagctaggatttactctatggagagatgccattgcctatggcaacagctcgcccttctcttccttgaaggagctgttttttgggaagtgatgaaccgtcggcaacctttgttctcttgcactttaagcagctaactgttcccgggtaggacgctctcctgcaataaatcatggt

SEQ ID NO: 68631 - DNA, 1506 bp, Zea mays
  Clone ID: MRT4577_162585C.1
gcagctgaaatcttattaccaaattttacaagttacatcaagttttataatgtacatgatcggagtggttagaaagtggttcaaagacataaatttgaactgttataattatttatagttttgaaatatatgctagcttaagtgaccatccttagtaagaagtatagaagaagtacttatacttataagaaggtcgtgcccaccggcgcttaacatcaatcacaatcaaagtgactcgtaacctgaataacactaggttagtgttgttagacgacgtccgcttgacgatcagcttttggtctgacacttgttcagtttatctatctttagattcatctatcagcttcactatgcggagtagcccgcgcttggggtcgatttggctcgccttccgcgcgcgatcaactagcgtacctaaacccgatctgaattcgtgagattgacgacgatgttcggtgggagcatttctcagcacaccatggaagcgatgaatggggttcactttttctttacccagatttccctagatttctttctcgcggagtacggaacaataacgaatcaacgtggctattgacagaatcgacggtcgacgatgccgaccaccagagccgaccataacgagcacgacatccagggcacggcaggggatgacagcgttgtggtgaacaggaaatcgacgacgggcacaaaaggcatgacgctgggcataatgaaacgacagcgtgcccagatcttgcgtcgccccgaccatgcccgcaaccaatacccaccacgccaccgctgcgcacagtgatgcgacgaccagggccatggcgaacaaggagctgggcgtgttcgacggccacagacgagcgcagatcggcgcgacagagacgaagaccgagtgaggcagcaggaagggcgcgccggcgagcagagaaacgtgcaggcgagcacagagagcagcgcgcgggaagcagctcggctgtgcacgcgcaggagctgtgcgatccgccgagcagagagggagaaagatgggcgcgcaacggcatggggtcggcttgcgcagggaagaagcgaccggcgcgcagagacgagctcggctggtggcgcgtccagcaagctcgacggggacggctagcaaggttcgatcaccagagggagctatggctggggtgagctcggattgggggagaggctcggccggtttggaggaacagggggcacagcagccatgggaactgagcgcgcagcgatgggtgaggacgctcggtcctagcaggggccttggcgaggtgctgccggatggacgccatgggagggagcaccgcgagctggagggagcagaggaggcaccgtgaggaggagaagagcaccggccaacagagaaccgagagggagaggaaggagctggaggccagcaacgccggcgagctcggctggggaagaagctccacggcgagcttgagggagaagatgagcaggggctggggcgcgtggagaagccagcgagctcgagcacac

SEQ ID NO: 68632 - DNA, 389 bp, Zea mays
  Clone ID: MRT4577_162586C.1
gcgcttgctcctagtgccattattccacagttcctcgcactcagactacttcaacggggtgagagcgtccagccgtgcaagcctacaggctacaactagcgcttgcggcaagcgccttacaacaaccaattgcccaattgcaacaacaatccttggtacatctaaccctacaaaccattgcaacgcaacagcatcaacaacaacagtttctgccatcactgatccacctagccgtggacgaaccctgtcacctacttgcagcagtaactgcttgcatgcaacccacttgctctcgctaacgtcactgcataccagcgacaacagcagactgcatcatggaatgccagagctcagtcaactagccatggtgaaccatgccgtctacctac

SEQ ID NO: 68633 - DNA, 237 bp, Zea mays
  Clone ID: MRT4577_162587C.1
ctcttccgaactgaagcgtgcatcatggtgtcgtccattaattctactagctgctggttgtcactttgctttcccaacccgcgctggcagttttggcgtgttatacgtgtagtgtatgccatcatcatgcttcgtgcatgcatgcgtgccatgccatgccatgcaaaacgatgggccattaattgggctgggctttatttgcatcgccaggaaatggaaatccttgtgcgcgcggcg

SEQ ID NO: 68634 - DNA, 270 bp, Zea mays
  Clone ID: MRT4577_162588C.1
cggttcggaattcccggctcgacccacgcgtaccgggggtacaatgccgttgttagctcgtttagaagagtatcggctatgtgcaagggatggcgatatgcattcaaccaacttgctttgacaaacccagcagcgttctaccaacaacccatcattggtggtgccctcttttagattgcttatgagttatagttcaataataaagttgttgtgatgatgtttgtggcttaccagagataagaaagtacagctctagatgcttatgtgcaa

SEQ ID NO: 68635 - DNA, 390 bp, Zea mays
  Clone ID: MRT4577_162589C.1
attcggctcgagtctcactgtacaagctgccggaaggcaagggctggatgacacaactcctttcggtggcgtgtgtttctctggctgccaagatggaggaaaccgccgtcccgcaatgtctggaccttcaggtcggagatgcacgttttgtgttcgaggcgaagacgatccagagaatggagctccttgttctaaccaccctcaactggaggatgcaggccgtgacacctttctcctatgtggattacttcctaaacaggctcagtggcggcaatgcggccctaagaaattgcctgtttcaatccgcggagcttatcttgtgtgcagctagaggaaccagctgcatagggtttaggccgtctgagatcgcggccgccgacaagtgagctc

SEQ ID NO: 68636 - DNA, 1994 bp, Zea mays
  Clone ID: MRT4577_16258C.1
gccggccggtccggcgcattcgtgttcaaccaggaaccaatcggacctccgtaccaaattatttcttggcacctcagatcagcatattccatctccaatcccccgccgcgttcccccgcacgctttgacccataaagtcgatccatctccgagcaccaagttgaacacgcgatcccattcccattctcttgctcaatacaacctccggctccagcaagccgcagcgccaagcctagaagcggagcgcggaacacacgaggccaggaagaggaggtgctgccgtccccgcgccgccgctgtgggagtgcggggaatggggcggcacggcgtggaccagatcggcgctgtggcagcgttcgtctgggtcaccctccttcccttgctgcttgtgtgcgtcgtgtggccgggcgcccaggccggccatacaagcgagtaccggcgccaactcggctccgccatcgacatgccactcgacgccgatgtcttccgccctccctcgggctacaatgcgcccgagcaggttcacatcacacaaggcaatcatgatggcacagccatgataatctcatgggtgacaacaagtgagcctggctcgagtactgtgatctacgggacttcagaggataacctcaactatactgcaaatgggaagcatactcagtatactttctacaactacacctcaggatacattcatcattgcacaataaaaaagttggagtttgacacaaagtattactatgctgttgggattggacaaactgtgaggaagttttggtttttgacccctccaaaaagcggcccagatgttccatatacactcggtctcataggtgatcttggtcagagctttgattccaatgttacgctcacccattatgagtccaatgcaaaagcacagggagttctttttgttggggacttgtcatatgcagataactacccatatcatgataatgtgagatgggatacgtgggcaagatttgtagaaaggagcgtcgcgtaccagccttggatctggactgctggaaatcatgagatagatttcgctcctgaacttggtgaaacaaagccattcaagccattcagccataggtaccccacaccctacaaggcttctggtagcacggcaccttattggtattccatcaaaagggcctctgcctacattattgtcttggcatcgtactcagcatacggcaaatacactcctcagtacaagtggcttgaagctgaatttcccaaggtcaacaggagcgaaacgccatggttggttgtcctcatgcatgctccatggtacaatagctataactatcactacatggaaggtgaaaccatgagggtgatgtatgagccatggttcgtgaagtacaaagttgacgttgtgtttgcaggacatgtccacgcctacgaacgcacacacaggatatcgaatgtcgcatacaatgttgtgaatggcctgtgcactccaatccctgatcaatcggccccagtttacatcaccatcggtgatggagggaaccaggaaggattggctaccaacatgtcgcagccgcagccgagctactcggccttcagggaggcgagcttcgggcacgccatcctggacatcaagaaccggacacacgcgtactacacgtggcaccgcaaccaggacgggagcgcggtggccgccgactccatgtggttcaccaatcggtactgggaaccgacggacgattcggccgacgatttccagtgaggacgagagctgcagctgggttggttattcgttgcggttcctcacgaccaataagcatcgtcctgaatacacgaagccacccaagctccgatgcaggcctctgcatcttcttaggctgagtccagggcacagcctctctctcgcccctgctgctccagtgcacaggctgtagcagactacaacttcaggctatagtcacgtcagcttttctatttcagaattaagtaatttacgcggatttatttcaacgctc

SEQ ID NO: 68637 - DNA, 182 bp, Zea mays
  Clone ID: MRT4577_162590C.1
catggggggggaaagacaccacagggggcggttatgctattgcgatccgaaaaaaaagcttcaccccgaatgccgtcaaaggatccccatgggcagtaacacaaaccgaactgcgtcaaaagactggccagatcacaagctgggggtacaacccagggcgaataacctaacaggggaggccc

SEQ ID NO: 68638 - DNA, 197 bp, Zea mays
  Clone ID: MRT4577_162591C.1
agggacccggggatgtttttttttaatttcctaacgatacccacattgttacaaagtttccctatcaccttggactttagatcgtggctgatctatgtgaataggaggcgcctgtggtaaattagtatccgctcataaaccaaaataatatagaacccgtaaacaaaattagtaaacactccgggggccaatgaacc

SEQ ID NO: 68639 - DNA, 415 bp, Zea mays
  Clone ID: MRT4577_162592C.1
gtcaggacaggttatctagggagtaaaggaacggctggtgatataaggggaaaacagggaagaacagcccagcatgggggaaatcggacaaaagcccctctccagcaaaaaaagcgcaaaagaccctacagaactaaaacgcgcgaaaaaccgaagcacccctctcctggtgcttagacacagcccgctaatttggcttctcaaagccaacccgcttaattttgttatcttggacctctgacctccctacgttagcctaaaacaacgtggcccctacaccttcctcagtcaccccgggggcatcaccctttgtagcggcatcacgggtgacatccccagaatccacctgctttggcacaccagcagaaacaccaccaccttcctgactgatcccagccccagccattttgacatc

SEQ ID NO: 68640 - DNA, 843 bp, Zea mays
  unsure (1)..(843): unsure at all n locations
  Clone ID: MRT4577_162593C.1
cactcctataggggattgggttcctcgaggccggccngggagttaacaataaacaagttcacccatgagacctgtcgcctgttcggttcagcgaacaacacagatttcgaagcatctccaacacaccatgtctgcctctcagcctacttcagccgcaccatggcggacagaatttctatctcacatcaagaagatggactcacctacatttgtgctcagcactcttcaccaccatgattcctcttctgtcacccctcgttcccgcactgttgtgtacagaggtacttgggcagagataccggtcaacccaaagaaccaggcgccactgaaccctcccctctacgagagcgaccttctgaccatcactaccgacgctcgcatggaaaaggttcctgagctgtcacccgacgggaagaacgtcccgcaaactggtggtggggggcctgttgaggctgtcttttgggtcaccgagacacaaactcagtggcgcatgcgcggccatgcctacctcctcggtcaagacattgacgacccatcagcatcacatgtaaggggggagatagaacagcacatgcggaaaaagagtgacgacaactcaatcccatggaactggggcaaagagatcacggcgcactttggaaacttgagccccggcatgcgagggtcctttcgcaatcctcctcctggaacgaagcgngatgagaaacccgatgctggactcggactcgggcaaaaggtggaggacctggatgacagatttgcagaaagactntcgangtgcgtatannttccgacgagggtgatcaggtggacttatccgacccggcgatggtaacgatggaa

SEQ ID NO: 68641 - DNA, 1000 bp, Zea mays
  Clone ID: MRT4577_162594C.1
tgaacaagagtaagtacgggggcgggttgccgctgaagaccttcgaggccggcgggccgggaacgaagggacagttagaggcggtttgtcattagactcaccccccaaacccaaggtgcgagagctgcgaccgccgcagccgccatgtcgggaggaatcgcgcgcggccgcctcgccgaggagcgcaaggcctggcgcaagaaccacccccacggtttcgtggcgaggccggaaacgctggccgacgggtcggcgaacctcatggtctggagctgtaccatccccggcaagcaggggactgattgggaaagtgggtactacccacttacccttcatttcagtgaagattacccaagcaagcctcccaaatgcaagttcccacagggttttttccacccaaatgtttatccttcaggaacagtctgcctctcaattctcaatgaggatagtggttggagacctgctatcactgttaagcagattctagttggaatacaagacttgcttgatcagcccaatccagctgatcctgcccaaactgatggttatcacctattcatccaggatccaacagaatataagcgacgtgttcgtctgcaggccaagcaatatcctgctctggtctgaggatgttggcataccagagatccatgatccatcctgcacatccgcatagtagttgcaaatgttaaaattatggtctcaaattggatttgacaagacataagttgtctggaggattgtccagtgtaaacctgaaccttctatgatgtgtatgagtccagtattgatagcaagaacagattcgtttactgctgtgagtgctgcagccactgatattttgtctatttaacttaaactatttgttgtgttggtgctctatcttgaagacatatttcgtttgtttatcgaagaaagttatatgcttagagattattatgtatttgtcaaaaaaaaaaaaaaaaaaaaaaaaaaaagggcgccgctcgcggacgcgtgg

SEQ ID NO: 68642 - DNA, 303 bp, Zea mays
  Clone ID: MRT4577_162595C.1
ccttgttacggagggtaccaagaacaccccccgatgggaggccacgaaggaaacgggggcacacagacaggacaccacgagcagataaacaaaaggagcccaaagcacaaagggggcaccgagcgagccagagtgcaccaagactggcaacccaaaaaacagccgagaaaaagggccaaaaagacctgacggccgggccgaaaactggaaacaggagaccggcccaaaacaccaacagagcaggaaactcggaaaccaaaaagcccgacccaagagagaaaccacggccaccccggcgggaaa

SEQ ID NO: 68643 - DNA, 1074 bp, Zea mays
  Clone ID: MRT4577_162596C.1
gccggccgggccggaaagggggggggtgccgccggagactttcggaaacccaaactaacccttctaatccaaggctgtgaagggagctgctagccgccaccagccgccatgtctggagggatcgcgcgcggccgcctcgccgaggagcgcaaggcctggcgcaagaatcacccccacggtttcgtggcgaggccggagtcgctgaccgacgggtccgtgaacctcatggtctggaactgtaccatccccggcaagcacgggaccgattgggaaggtgggtactacccacttacccttcatttcagtgaagattacccaagcaaacctcccaaatgcaagtttccacagggttttttccatccaaatgtttatccatcaggaacagtctgcctctcaattctgaacgaggatagcgattggagacctgctatcactgttaagcagattctagttggaatacaggacttgcttgatcagcccaatccagctgatcctgctcagactgatggttatcacctattcatccaggatcctgcagaatataagcgacgtgttcgtctgcaggccaagcaatatcctgctctggtctgaggatgttggcatactagagatccatgatccatcctgcaaatctgcatggtagttgcaaaatgtatcgtctcaatttggatttgacaggatacaagttatctggcggattgcccagtgtaaacctgaaccttttatacataatacatcttctaagcatataactttcttgataaacatttgtcttcaagatagactaccaacacacaaacagtcaagttaaatagacaaaatatcagtggctgcagcacttacagcattaaacgaattggtttttgctgccaataccgtacacccctcaggattgaagggtttggtttacactggtcaattcgccggataccttgtatcctgtcctatccaaattgagacgctacattttgcagctgcctcgccgatttgcagcatgggtcatgggtctgtagtgtgcctacttcctcagaccagagcgggatattgctgggcccgccgacgaacacgtcgctt

SEQ ID NO: 68644 - DNA, 285 bp, Zea mays
  Clone ID: MRT4577_162597C.1
ccaaacgaataaatactcatttaaagaatatactgtgatgttgtttcttcaaatgagtatttattcgtttgaagaaacaacatcacagtatattctttaacactgacatcactcgtttggcgatcgcacataagcagaggggcggccgctcttggggcccgcgctctcgtacgcgtgcgcgcgacgttctagctcttcggattgtgcctccttggttcttttcgctggccgtgcccttgccccctatgattcacattgcctgccgctcgctccctctttctgctg

SEQ ID NO: 68645 - DNA, 897 bp, Zea mays
  unsure (1)..(897): unsure at all n locations
  Clone ID: MRT4577_162598C.1
gcaagatccaaagagggcgacgcgtcaaaaaggcgggacgggacatggagcgcaaactgcagaccaaacgccttcgtcacgcacaagcaaagcaacgccgtctgcgagagagagaagaagaagtcggctttgccggggatcgacttcgatatgaaccctcagtcacagggcacaaggcaaaagccaagtgaaaaaaaaaaggaactctcctcagaagcaaggcccagggctgtcgtgtccttttccatccgtgcaagcaagcaacaaagcctcagtgcctgtgcctcactcgtcgccgtcgttctagctagctagccttccttccttcgtcctgccactgccagccggccgggcagaagaaggaaggacatatgggtggagcccgcgggccgccgacgtcgtggagggcggtggccgcggcggctctggcgctgtggctgctcccggcggctctggcgctggccgtcctctggctgccgctgctctgctgcgccgtggccgccgtccgcttcctgagggtcaggaggaagctggtggccagcgggagatcgcgtggcggctgctgcgacggcgacggagaccgcgaccgcgaccgcgtgccggacgagacgacgatggtgcgcgctggcggccggctccggctgctgcaccggtacctcgacgaccaggtggagctcgtcgtcggcgttggagtccacgacgaccaagaggagcatgaacaagggtagcgccgaaagcgagacatgattcacatgaatagctagtgctactgctaactgctaagaagaggcatcngaaaacgcaaatctcctcatcttcttctttctcctctttncattcggnttgcagttcgtcgcctgtaaacaggggagccaatgagcttgcagtttctttcag

SEQ ID NO: 68646 - DNA, 333 bp, Zea mays
  Clone ID: MRT4577_162599C.1
ggccgacgggctcattgaagacgcctgattgggacggaaccaaacggaatacacgcttcgtcagataaccacggaagacacgctcttgctaatggctcgatggagaactgcataaccgacgatcatgggcacatcgccttgggatgcctgccgccttatcagcgcgggggctgatctgggaccccggatgacaacgaccagggaccctgattgtgggacatgcagtgaccactctgtctcattcttcagagggttcttcgcgattctctgcgtggcggctttcacgttggttccgtccttggctggctgtcttgagcccgccggggcggacgc

SEQ ID NO: 68647 - DNA, 312 bp, Zea mays
  Clone ID: MRT4577_16259C.1
gccacgcgtacgttgtatgaatagattgcagtctatacagagatcataaagctatactcaggtgcaagcgcatgaccaagaactgcactgcttactattatgagtggcctgatatataaggaacctttaccagtttgaggcacccaacttttatttgccaaaacagtttgtttaacagcatcaactaattgctcaacagttgtagcaggcatacacatctatctctgcaccgttttagtatacttatagcattctttttatgacttaatataaggatggacccatcattttttctatatgcttttaggcctt

SEQ ID NO: 68648 - DNA, 252 bp, Zea mays
  Clone ID: MRT4577_1625C.1
gcagaccaacggggctgttcctgatgtcctgcagcagggccggttgctggttgtggactatgccacctgctccagctctgcctggtggggcagcagcgtgaaaaccagtatgatctgtgctgggggtgatggcgtgatctccagctgcaacggagactctggcgggccactgaactgtcaggcatctgacggccggtggcaggtgcacggcatcgtcagcttcgggtctcgcctcggctgcaactactacca

SEQ ID NO: 68649 - DNA, 328 bp, Zea mays
  Clone ID: MRT4577_162600C.1
ttttttttttttttttttttttttttttttttttttttttttttttcaatattttttttttttttttaaaccaacacaaggggtttgcaaaagtgccaaatgtcatgcccaaaccaaacggggctccccccctgcgggttttacatattccaatttaccgaggggggaaaaaagggggaccaaattgaacgggggggtgaaacaacgcgttcacacccaatttgaaggccttcgttttttttttaaccggactccacccggttacccgccctggcttcctcccataaatccccccgaccctcttttaattttacttgggggggccagg

SEQ ID NO: 68650 - DNA, 255 bp, Zea mays
  Clone ID: MRT4577_162601C.1
gagctcactagtctgcggctcgacctttttttttcatttttacattttactgttgtttgttactattaccatagtaatgcatttttattcgtctcccgtctgagagacgtctttctttttttgtctgccgccggaactaatggcagggggaccacacgggggattttttttaaaaagagcgcagggaaccttgttccgaacacggggtactttaactccggaatcactggagccacccgggaaaatctgcggggc

SEQ ID NO: 68651 - DNA, 349 bp, Zea mays
  unsure (1)..(349): unsure at all n locations
  Clone ID: MRT4577_162602C.1
ggagcatgcacaggtgtgcgagtgggagatccctgctncaagggattcttagcagtgcctgtgatcaagcactgcggagtcagctccacatccgtttcccactacaaatnnnttgtcagtattatttgggaaggagatatgccaggacaatgtcatcgtgctaccgtcatgcagaaaatcatgtatcctgttggcacaacgttgcgcagaagtaaacatgagcatgttgtaaccagtttgtcccgtcttcatctatcttatttatataacctgccagtgtgtgtctaagtatttgttttgtnttcttctgtctctttaagaaggacagcttgtcaaatctaactggcta

SEQ ID NO: 68652 - DNA, 424 bp, Zea mays
  Clone ID: MRT4577_162603C.1
cccacgcgtccgcccacgcgtccgcccacgcgtccgcccacgcgtccgagaaaatttgacagctgtattgttccattacgacgggaatgtcaatgggtggaatgatctaccatggagcaaaagtgtgatacatatagctgcttctaaccagactaaatggtggtttgcaaagaggttcctccatcctgctgttgtgtctatgtaccagtacatctttctttgggatgaagacctggaagtagataactttaatccgagaaggtacttaaatatagttagatcagaaggactggagatatcacaaccaggtcttgattctaagctttctgaaattcatcaccgaataactggtcgtaaaaatacagggacctttcatagaagagttagtcgggcttacaaacgttgtttaagagaaggaccgcct

SEQ ID NO: 68653 - DNA, 382 bp, Zea mays
  unsure (1)..(382): unsure at all n locations
  Clone ID: MRT4577_162604C.1
atcccctggtcggccgactcatactgcttctactctatctcgactcatttttcgctctctantctccaccccttcctctagcaatagtaccttctcaacccggcaaatgatctcactaattatgattctattgctaattcaactttattctattgctcatttttaggatgtactctcctgattccctactaatgttttttctattttccctaaacatgatttctcaatcactatcaatgtgacatgaaacgaagcttctacatctttgatttccaatatagttaatcctatttttattaaacatccatctctctcttcattataaattcattataagttttattatcattttacattcacttttatcattttacaatttctt

SEQ ID NO: 68654 - DNA, 315 bp, Zea mays
  Clone ID: MRT4577_162605C.1
tttttttttatttttttatttttattgcggcggttgttatttagttttttttttgtatggtcttttttacatataaacaatggccttttttggtcatgatttctctagtgtccggacacgaacatacaatgtacagccagcagggtgggcccaaaaaaaaaacaaaggtgaaataaatcgcaggaccaccccaggggacttagggggtcaaataacggagggggtcgttgataaaaacaccctgggcgaacggaaaaccgcccgactgaggttgggggacattttctgataaaagttatggggtggcccagagag

SEQ ID NO: 68655 - DNA, 461 bp, Zea mays
  Clone ID: MRT4577_162606C.1
gtgagcacatgcgattcgggacgacagtcgaccatgattcaggcagccaccaatgatgatgctatgtacatgtgcacatttcacacgcactcccactggcaataacattgccactcggggcgatagactctctcgccagaattccatatcgaagaataaaacgatgtgcccggatctggactctgtgcgagcattgcacacccatggatgactatgacggaccacagagaagatcaggctgactgttgcagagctaaaagaggaaccctgttactcgacgtctaatactacgacttgcagtgcatgtacagcggcctgaatatgatgacgctgccctgagaggacttctactccttgctctacacgtctctcagggtaaatgggaacctacccaacagagccgccgggatgggacattcctcagctgaggcaactatgtagccattgatcaccagatgaag

SEQ ID NO: 68656 - DNA, 351 bp, Zea mays
  Clone ID: MRT4577_162607C.1
ccgaacacggtttcaaatcgcaccatgttcttcactttcatcaaaccctgatccgtcgtgacgcatcatcagaagactccgcgttaacctgttcgcaaccatgtatttgtacagtagcacaattttgcatctccatacagaacagaccgagttaacaaaacaaaccgccaaaattgtccattgtcacgctcgcttaagaaccaccactacatgtcgcgctagttctcttcggtgcttctgccgcctcatacagatcctagtttcaccactttaccaaatacgtttgctatccagatgtaaccttcacatttgctgacgctcctaacatgctttaaggggcaattaccatca

SEQ ID NO: 68657 - DNA, 396 bp, Zea mays
  Clone ID: MRT4577_162608C.1
cacccgcacgcgcagctatcacgctccgccaacatcatcacattcaccacctaggggcccaaggcgcagccgctatatacgagcggggccaaagcgccgtcgcagaggagactgacattggcgttttctagcacatcctgtggatgatgtgttaccttggcgctacttcttaaagctatcactaacaggtgacaatttcaagaggcaaatggacagcaccctgaatgatgcctgcgtgtataagctgattatggacttactcaaagctgatatgaataagtgccaacgatataatgcactctatctatttaggactctatctgaggcacagatggctaatgggtgatatagctaccaaatccagattactgagaattgaaaagaattgtgccgatg

SEQ ID NO: 68658 - DNA, 201 bp, Zea mays
  Clone ID: MRT4577_162609C.1
ctgggtgtttctttttgttcgttagaatggcctttaattccaagaaaatactatgccacgataaagctatcactgactggggcgtcgaaaagaaaaaaaaaaaccccctaaaaaataaaacgtccaccggaagcgcacatttcccgcttttttttcatagggggtgcaagcccccccccattccacaagaaaaaaccctcc

SEQ ID NO: 68659 - DNA, 2244 bp, Zea mays
  Clone ID: MRT4577_16260C.1
aattcggcacgaggattctcttgctcaatacaacctccggcttcagcaagccgcagcgccaagcctagaagcggagcgcggaacacacgaggccaggaagaggaggtgctgccgtccccgcgccgccgctgtgggagtgcggggaatggggcggcacggcgtggaccagatcggcgctgtggcagcgttcgtctgggtcaccctccttcccttgctgcttgtgtgcgtcgtgtggccgggcgcccaggccggccatacaagcgagtaccggcgccaactcggctccgccatcgacatgccactcgacgccgatgtcttccgccctccctcgggctacaatgcgcccgagcaggttcacatcacacaaggcaatcatgatggcacagccatgataatctcatgggtgacaacaagtgagcctggctcgagtactgtgatctacgggacttcagaggataacctcaactatactgcaaatgggaagcatactcatttgacacaaagtattactatgctgttgggattggacaaactgtgaggaagttttggtttttgacccctccaaaaagcggcccagatgttccatatacactcggtctcataggtgatcttggtcagagctttgattccaatgttacgctcacccattatgagtccaatgcaaaagcacagggagttctttttgttggggacttgtcatatgcagataactacccatatcatgataatgtgagatgggatacgtgggcaagatttgtagaaaggagcgtcgcgtaccagccttggatctggactgctggaaatcatgagatagatttcgctcctgaacttggtgaaacaaagccattcaagccattcagccataggtaccccacaccctacaaggcttctggtagcacggcaccttattggtattccatcaaaagggcctctgcctacattattgtcttggcatcgtactcagcatacggcaaatacactcctcagtacaagtggcttgaagctgaatttcccaaggtcaacaggagtgaaacgccatggttggttgtcctcatgcatgctccatggtacaatagctataactatcactacatggaaggtgaaaccatgagggtgatgtatgagccatggttcgtgaagtacaaagttgacgttgtgtttgcaggacatgtccacgcctacgaacgcacagtaagcagctccatactatcaatttcttctgttgcaaatggttgggttatttttttccactctgctatggacttctgagagttatactaagtaggatgtcgtctttgtgcgcaggtgagattttcataggttgtaaacctaatgagtatacacactgaacctctaaaaaaacttctgagaattatgtgtatatatgtttgtcgtcatattagtgcaagcttccagctcaatttgttagggttcagtactctggttatgacagtatcataatcctaagtcttgatgctgattgatgttctctgattgcagcacaggatatcgaatgtcgcatacaatgttgtgaatggcctgtgcactccaatccctgatcaatcggccccagtttacatcaccatcggtgatggagggaaccaggaaggattggctaccaacatgtcgcagccgcagccgagctactcggccttcagggaggcgagcttcgggcacgccatcctggacatcaagaaccggacacacgcgtactacacgtggcaccgcaaccaggacgggagcgcggtggccgccgactccatgtggtttaccaatcggtactgggaaccgacggacgattcggccgacgatttccagtgaggacgagagctgcagctgggttggttattcgttgcggttcctcacgaccaataagcatcgccctgaatacacgaagcctccgaagctccgatgcaggcctctgccacttcttatagctctccttggtcgttgcccgtcttctcttggagagagaaaaaaacgtgtgaagagtaaaacggagtgtctctactctgattgtgtaaagaactcacgttcacagcatacgttgccggtcgcatgtcgacgtggtgtgtaaattgctaagcagcgtgtactagtcatctaggtgctgctcattggtcaatagtaccgtttcctcttcaccgaaaaaaaccctgcctccttgcaaaaataataaaatgaaataaaataatgccctgctttcgcagcaaagaaaattgcaacataaaaaaaaagaaaaaa

SEQ ID NO: 68660 - DNA, 706 bp, Zea mays
  unsure (1)..(706): unsure at all n locations
  Clone ID: MRT4577_162610C.1
ctcgtgccgggaggcacagactgctttaccagctaaacagtcgctggatctacggaaagattccgctgctccacttcggttgtctttcttttgcaaatggctgccgtgagtctgctcacgcgcaagtacaaccagtactatgcagcgcgaccagtcctcaccacaatgatcaccaacgccgtgttgggtggtattgcggacacggtggcgcagaccctgactgctgtgcgagagcgcgccgttcgcaagaagggcggcccaggcaaggacgacttcctggcgattgagattcacgacctcgacaagcgcaatccattcaacgagaacgatctcattcccgactcgaagaaactgccgccgccttttgatttcgagcgcaccaccaggttcatgtcgtacggtttcctcatgtcgcccatccagcacaggtggttcaggttcctgtccgccacattccccgtcacaaagactgctacatggatgccggcattgaagcgcgtggcttttgaccaattcctgtttgccccagctggtctggctgcattctttacctttatgacaattgccgagggcggcggtaagcgagccgtgcagcgtaagttccaggatgtctatgtgcctgcgctcaaagccaactacatggtctggccagcagngcaaatcatcaacttccgtgtcatgcccattcaataccaaattccttttg

SEQ ID NO: 68661 - DNA, 181 bp, Zea mays
  Clone ID: MRT4577_162611C.1
atattttacagaaaggcaaagctacatgcataatgtggatatatgctgacctgtgcagtggcgcctccagcaggtccttgcatgcccatgtttacacctggtgcccctggagttggtcagtatatgttttattgtcagtcaccatctgccttcatcatcccttaggctggatttagctttt

SEQ ID NO: 68662 - DNA, 577 bp, Zea mays
  Clone ID: MRT4577_162612C.1
ttgggtacctcgaagccggccggggttgccctcccagtgcgagcgtctatggaaactcacctcctctgacgcaccttccagcggacaaataacttcatttcctcccgacgttttttcctctgcttctcacatgtcgcttctccctcgtaatatctccctggcgcgagtgtccatgatcgccttcctgctgtgcacaccatagctgacttctctgcctttcccccatctacttcccttggcgagcttgaacactccgagaacattgctgctcgtctatgcccgagacctcgacaaaccgcgtactccctgctctccttccccaatccggaagacaaagcaccatctgcgtccttgactcagcgatccgcctaagtggaactcatccaactccctagacatctctgctcacaactactctttttctgtgtgagcagcatcactgcgaatgatacctacgatcacgacgacttccaatcgttcgatgacataccgataagagcatccgacccggatctgagtagccccaacacaagctgtcgatcacgacatacatgacacacgccgtgctcttcctatt

SEQ ID NO: 68663 - DNA, 331 bp, Zea mays
  Clone ID: MRT4577_162613C.1
ccacccctgtcacgttcgtccacaccgagataggagctgccgtccactggacgtgtcggtggtcccgcacggagagaccgcgtggaacgcctccggcgactgccacggtcaactggaccccgggctgaacgcggcctggagcgtgtgagcctgcgtggcgggccgacgggtggcgagataagaaaacccgccgcgctgtactcgtctgatctgggggtagccgccgagaccgcccataacatcgcaaggagctgtgctggatcaaacgtggtggtggcgagggccctctcggagatgcacttgaggtacctgcaggagctcaagctgggga

SEQ ID NO: 68664 - DNA, 340 bp, Zea mays
  Clone ID: MRT4577_162614C.1
ctgttcggcaacgccctcttaccacatctgaatctcacccacccacccccgcgcccgccgccaaagcatggcgccggcgatggggctgaagcggcctgcggctgctgcggcggcggcgggaggcggggcagcagcagcgcagacggtcacgctgtccgcgccggccgtgcgtggaccggtgcgcgccgccgtgaggcatgccgaggccaccgccccggccgccaaggtcccggcgacggcggcagcgacggcggagatcgctagggacggggtgctgtgcctggatgaggtcgacgggaggcggtggagctacgtggtcgacgccgccggcgccgcggtc

SEQ ID NO: 68665 - DNA, 417 bp, Zea mays
  unsure (1)..(417): unsure at all n locations
  Clone ID: MRT4577_162615C.1
aaggagnaagggggaggaagnagaaaaaacaaagagnaagggaggaagagaagagaaccaaagaggagacaaaaaaagacagagaaaagaggaaagaaaaggaaaaggaccagcagcgagaggacagaggacgggggggggaancacaagaccggngcnagccaaacccccaacaaaaccacacaggagcaaaggaaagccacgaagagggcagcgagcaagncaagaagaccgggaaggaacggacgacacggaaggagagaagaccccagccggaggagaccccaaacacacgacacaggaagnaccaaaacagagccaaaggcaacccgacaccggggagaggaagaccagaanaggggcaggcgaaccgagagcacagagacaccacccgcccagccaccagccacgggaggg

SEQ ID NO: 68666 - DNA, 470 bp, Zea mays
  Clone ID: MRT4577_162616C.1
aaatggactaaaaaaaaacaaagccaaaaaaaaaaaaaaaaaaaaaagggggagcaaaaaaaaaaacgcttcggggggggaaaaaagaaaaaaggggacaccgggaaaaaaaggaaggcgttcggcaccacaagaaaaaagtaacaaaaggcaagaaaaaaaaaaaaaaggaaccagaggaaaacaccgaaagggacaacttaaacagcaaaaaagccggagggggcaaacgggggggcctaaaagaacgagaaaaaacccacaaggtgatggggccaaaaaaaaagaaatttctacgatgtgtacggggacgcaaaggaccccacacaaaaaaaggggcccacctggagcggccccagaaaaggctcggcaaacccgcccaaggaaaggttgaagcagaaggagcaaaacacgggggaatgtagcagggggggaaccaccccatccggagcgggccccttagggggggc

SEQ ID NO: 68667 - DNA, 140 bp, Zea mays
  Clone ID: MRT4577_162617C.1
ggccgacggacaagctatgattaactttttggaaacaatcatcatgcctatgatattatgagcaatgaactcgcaatgaaccaattcaaaggcaataggaaaaactgatcacccatgaaaggaagggtgacaactaaaaa

SEQ ID NO: 68668 - DNA, 160 bp, Zea mays
  Clone ID: MRT4577_162618C.1
cccacgcgtccgtgtaaattcattgatgaaatccttcggtttgtggagcttgtgctattaatgtacttttgacatttacaaaatctgtgctgtgttcgtggtgcagaaaagttttgttctgagtattatcttgaaacttttgttcaaccaaccttttgag

SEQ ID NO: 68669 - DNA, 137 bp, Zea mays
  Clone ID: MRT4577_162619C.1
acgggaggcggaagtcaatttttgttttttggtttgtgtgtgtgaatgccgtctgtggcatcagttccttttaactgtcctctatccttctctgattattaaataccctgtctgtcactgcatcagtggcaaccgtt

SEQ ID NO: 68670 - DNA, 389 bp, Zea mays
  Clone ID: MRT4577_16261C.1
gttgactgtcattatgaccccgatcgagtatctcgctataaacattgtcccgactatggcggttgtcgtgcaccgaaaggtagctatggtcgtgatactcctggtcactgcttaagtatggacacagcacatgtctccatagtgcaatcatcggatatgaaggagatgggactgatatgtgctggagatatgacacctatggcggcggcggcggtcagcgcgaggaggcgtatggtcctgacctgccgttcgacctatactctgcgcctgcccgctatgacgtcacctatggcgagtgggagcgctacaaccacgaccgatcatggtactactaatggcagtacctctacattcagaagtatgtgacatgccaggctcacagtctatct

SEQ ID NO: 68671 - DNA, 407 bp, Zea mays
  Clone ID: MRT4577_162620C.1
attcggctcgagaaatatctccgtgctgtcgtgcttggcataacagggggtcgacagtagagagttctgccacccatggtataggtcggggaccgcgacctacttggggcccagctttgcctataacgggtcggactagaacttgttggaaagctgggcatgcccgtcctccaacagaaatgggaatccgccgaccatcacacaggtgttacgatgcgcagggatcaagaggccagcctggggcggctactacgtgaactacccgacattcatggccaagaggctactgggccttttcagggcgccaaacctgtagtgccccatgccttaatgactggtgcaactctcggtgagaggctctctgtgagggggaagcggggaacactctgctcttgacccgggagaca

SEQ ID NO: 68672 - DNA, 914 bp, Zea mays
  Clone ID: MRT4577_162621C.1
ggacaacatcgggccggggaacatcacaggaggagttgcgagttgcgacccagtccgtcgtaatggcgtgctgcaaaaagtcatcctagtgtaccacatgccaggaccggagcgagtcggtcccggcgtgacgtgaacgtgactttctactctaccttcagattcagaagcttctgttgtctgaccactcgtcaggttccaagttcccccgtagtccagtccaatacctgctgttcaagaggaactgcatacgcatgcggcatgtcaaacagtcaaagtcaaacgtgggaaacgcagacttgatccgcaccatccactcctcgtgccaggacggatcgtcgtcgtccccggcgccggccccgtcgtcgtcggctccagcggggctgcccccgctaaccgtctttgacccgtgcctgatgcactactgctgttacggcggcgcctgcgagaaggcttctgacttcgcccaccgctgcagctgccgcgacggctactccaacctcctcaacgacacctcctacccgtgctaccgacagtgttcgctgggcccggactgcaagggtctggggatcgacgtgatcaacgggtccacgccgagctcgtcgccgcctgcacccttctccttcaccgtcaagaagtccggcgccggagcttccgccgcgccggctggcacgctcctcgcgctgctcgcattcttcgggctccaggcgatatgggctgtgtttggttcagcttttttctgactagcttttccgagaatctagctgtggagagaatctggctgtgtagataatctgaatatcattaggattacgtgcggagcaagataaagttgtccatgagattcaggatctccccagtggcggattgctcctaaaaagaaaaaacaaaaaaaaaaaaaactcgagccgaat

SEQ ID NO: 68673 - DNA, 353 bp, Zea mays
  unsure (1)..(353): unsure at all n locations
  Clone ID: MRT4577_162622C.1
gggaagaanccggtgtgtccgtgtggacggtnccttttgcctgtgagtttgcaacgggtctgatgtcgtttttgcggtccgggtgaaatggacggtgtagttgttaggagggtaatccgttggggctaacaggtgtctttttaacgctgtggcctacggggtggggcttatccggatgtggggttttgatgtcagagtggtggtgcagtaagagtgggtggggttcctgggaattttattgtagtgtttgttgtggggtgattggggggtatggtgcttgtgtttgtggttgttgtnttgggggggggngttgtggtggtgtttgttgtttgtttgtgtgtgggggggtggtt

SEQ ID NO: 68674 - DNA, 1314 bp, Zea mays
  unsure (1)..(1314): unsure at all n locations
  Clone ID: MRT4577_162623C.1
gagcactcnagtcggcggccgcccggacaacatcgggccggggtacatcacaggaggagttgcgagctgcgacccagtccgtcgtaatggcgtgctgcaaaaagtcatcctagtgtaccacatgccaggaccggagcgagtcggtcccggcgtgacgtgaacgtgactttctactctaccttcagattcagaagcttctgttgtctgaccactcgtcaggttccaagttcccccgtagtccagtccaatacctgctgttcaagaggaactgcatacgcatgcggcatgtcaaacagtcaaagtcaaacttccgaaacgtagctcagcagtcagcagcttgctgcattgcttcctctcggccgctgtcctgccggccggccggcaaggaacacacctgcaggagctagcttacgccggtaccaagaatggagggtgccagccggccgccgctccgcgcgctggcgtgtctctggctctgcgccgttgccgccgccttgctgccccatggagccagcgcagccggcggcgagtgcgggaacgtgagctgcggcatggggacgtgcagcgagtccagcgactacgccttcggcttcgcgtgcgagtgcaagcccgggtggagccgctaccacctcgccggcctgcagttccccttcctcccctgcgtcatccccaactgcaccatccactcctcgtgccaggacggatcgtcgtcgtccccggcgccggccccgtcgtcgtcgcctccagcggggctgcccccgctaaccgtcttcgatccgtgcctgatgcagtactgcggcgacggcggcgcctgcgagaaggcgtcggacttcgccccccgctgcagctgccgcgacggctactccaacctcctcaacgacacctcctacccgtgctaccgacagtgttcgctgggcccggactgcaagggtctggggatcgacgtgatcaacgggtccacgccgagctcgtcgccgcctgcacccttctccttcaccgtcaagaagtccggcgccggagctgccgccgcgccggctggcacgctcctcgcgctgctcgcattcttcgggctccaggcgatatggtgaacgagctgccagggcgcgggacaaacgaaagcactgctgtgggactccagacaaagatttcacgcagttttgatttccgtatgtactacatggtttaggatatttcctacgtgtagccttgaccgtcaggagccgcaaagtaccgttttgtccatcaaccgctatagcagagtaaaaaattaccgctactagtgttatccaacatagtaagcaaaaaaaaaaaaaa

SEQ ID NO: 68675 - DNA, 857 bp, Zea mays
  unsure (1)..(857): unsure at all n locations
  Clone ID: MRT4577_162624C.1
ngatactcaatatacatatcgtcagcaagacagcaaccctctcgatcggcactactactacagcgatccgccggcggacggaggagctccaagaaggcgacgagatgtgcttagctccgccggcggcggccatggccacggaggagctccaagaaggcgacgagctatgcccggactactaccatagctcagacgacggccgcggccagcggcggctgcaaccgcaccgctggtccggtaggaagccctgctgcctccgcacggacgacgaaaacgctgcatgtaaagtccgccgacccggctcgttgtcggcgcccgtggccatcgtcgtccctgtaaccgcagtggcgacgacgacggaggacgacgacgatgaggcggcatttgtgccgccgcacgtagccctggaggcgaggcggcggcggtcggaggggagggtggcctcgtccatgtgcgaggggctcggtcgcacgctcaagggccgggacctccagttcgtgcgcacggccgtgctccgcatgactggattcatcgagtcctgtccagatgaagactgagctacatgcatatgcatatcctcgatctcctccagcatgcaaaatgcaatgcaatcaggatgtggtagcgagcaatagccacaaggtccatagataaataagcttcattagccgaagtgacgcatagttttgcattttaattaaatcgactgtgtagtacgttatttccaaatttccaggatgagggtatcactttgaattttcagaaggaatttatttgtaataaattccaaattaaaaacgttgcaatcagtgatgatggatataggtttaatgaaaaaggagccaaaagttttttcc

SEQ ID NO: 68676 - DNA, 555 bp, Zea mays
  Clone ID: MRT4577_162625C.1
gttataatatatttttttttttgttatattaaacgttttttatttaaagttttttttttttttctacagttttatcctttcggcagttcgaacacggaagaggaacaaaggccgtgaccgggcgggagatcggagagccggagggaaccgaagggctagaaccggacctggtggatccccttcccgaaccaaaggatgcggtcgaaccatgccggagcgcggagctgtttctcaaggccggtggagacgccgtaaacccaccaggggaggtggtcggagttgcggcaatacttgaaggccggggcgaaggtgacttgtcccttgtgccatccgtgaaactgaggggcactggaaagcttcaggaggagctgggcgccctgcggggggatgccccatttcctggccgggggggggggggtgcttagaaatcggccatggggatccgggggtgggaggcccacgagcaacaccacgcgggtttgggcaaaaaaacttcttgaaaaacgagccgggggctgccgggacgccgccaaaaaaaaagaagctgaccctggt

SEQ ID NO: 68677 - DNA, 241 bp, Zea mays
  unsure (1)..(241): unsure at all n locations
  Clone ID: MRT4577_162626C.1
ttgtgctccngctggccatcgcgcttggcttcttggttgcttccttggttccctggtgttccgtggttttttgcgctcttggggctgttggggtgtgtgtgagctgccgttcttgcgtccataatgcttgcttgctcccttgttccttgttgcacagttgaatcggtgccgtgtctttattggttggtgggcccccggtctggccggtgtgttggcttctttgggtttttttggtgtgggt

SEQ ID NO: 68678 - DNA, 191 bp, Zea mays
  Clone ID: MRT4577_162627C.1
gggaaaatctaaaatcatgcctgagatcaaatacacacactgcccaattacaccacatactccttaacacatagatcaaaaatgcacacctccaggtcatgcctacataccacaacgttaagtccaaggcacactactccttgaaatacccattaagaaccggcccaaaaaatgcatgaggcaaaccccca

SEQ ID NO: 68679 - DNA, 445 bp, Zea mays
  unsure (1)..(445): unsure at all n locations
  Clone ID: MRT4577_162628C.1
gaacactatctccactaagcttaacgcgatttttggtttatcatactccgccgancaggcgcgagtaagcaatggatccaagcactgcattacacaagccgtactcgctgtttgctcacctgactgactaaactacgatacactacgcactattgcgacaaataccctcacaccgctagacttgctcctgccacgccagttattctcactacaagcatatcaaacaatttcctgctaaagccacagtcacttgccttcagtgatcaatgaaacattcaaggatccttgattctttgctcttcatctaatccaacaaggtcttgtttttcctaaagagttgcttgaagacaatccttctattggcagaaagcaccctacacttctaaatttatccgatgagatctattagcatattatctatccacctgctaaacacaccaacttt

SEQ ID NO: 68680 - DNA, 292 bp, Zea mays
  Clone ID: MRT4577_162629C.1
ctataggggatcccacgcttcaaacccagcaaatttgatctccttccatacttcacaaggtgaggatatttcaacactccgttagcaaggtgcttttataatatggttaccttcacgagcaagatccccccctttgttactagcttagaacacaggcttctaaagccacacgaataattgctgaaccaggtgcatttccccaaggacgtcctaaagttcctccaccaaatagtaaacatgaatcatttacaaatatttcggggaaacctggcatacgccaaacatgaatacc

SEQ ID NO: 68681 - DNA, 561 bp, Zea mays
  Clone ID: MRT4577_16262C.1
aagtctttaagtaatccgcctcacttatgtatgaaggctcctttcgctgcagggctccttggttgcctggccggagaagtcgcttctggcagccgtcgccggagctgaggagcgggaaagcctgacgctgacgtgcgcacggtgctcagcattgtggcaaatgtgctttggtaaataatattatgactggaaatctcatacaccgccatgataagataaagcgtgaagctggcatcagtggcaatattaagatttttacggaagatgagattgaaagaattaccaacaacttcagcactcttatcggaaaaggtggctttggagaagtttacaggggaacccttgatgacgacaacgagcctgtagcagtgaagaaatacatcaacgaagattcgagggaagtgttcatggaagaggtacgcatccacagtaaaattggccacaagaacgtggtgaagctcataggctattgcatcggggaaagcactctcatgatcgcgatgcagcaatgcccacaggaaatctccccgacctgctccactctgaaatcacgcatacctt

SEQ ID NO: 68682 - DNA, 924 bp, Zea mays
  Clone ID: MRT4577_162630C.1
aagttgcatcacagacagcaggcacggaatgttccgttaggcgcacacgcagctagcctctccgtcccgttgctctcgcgctcgcgggcctatatagccgggcaccagcagcgcccccttgttcctccccgcgacgctcgcctctctcaccatccacccacctcgcctcgcatgtagttgtgtgatcaccgcgcctgtgcccgcggcgctggcacgctagccgctagctacgtccacccgccgctcttcttgtccgtgtcattgtatgccgcggaacgggtcgccgctatacgctacgtggcctctcgttggtgcccggcggccgtccgcgggaatttctatttctgggcggttcgtacgtacggcctggatgccggatctgagcttttgggcgcgcgcgtgtacctcctcctcgcacggattcgggattccctcccattcgcttggtacggacaagccgctgctagccctgttcattgtttccgaggaaagggaagggatccaaccgttgcctgcgcctgcaagcttctcgggaaggtaaattcttcaatgttcatcgttcggaaggacggaaggtacagtagtatgtgggtgttggtgttagttgaccagatccgttccgctttcctcaattttgagatgtcaattgctactaccagttgtcttccaattccccttttacagtaccccatgcatcatctaatctccagattctggatttcgccatggcagcagaagacgctggtgacagaagaattccaatggaagcacaccgccggtcgattctctgtcttagatctgcttagcatcgtcacattgttctcttttctccttgccagggtcagtggtacccccgatccatatattcagagatttaacaggagatggacgatagatggcgctgcattctgcagatcctggtca

SEQ ID NO: 68683 - DNA, 348 bp, Zea mays
  Clone ID: MRT4577_162631C.1
ctccggtttatgcgaccctgctcgcatccataaacgcctccccccgggtcgcctggacactggcacgagctggcaggccataccggatggcatccggcgaggacgcacagcggcactggaacttgcgctacatcaggaagtgagccgccggggccttagcaactgcacgggcgctcgcggactggcgatgcgcgacggatactacggcaacgacgcgggatcccccgtacttcgaggcatccacgctgcgctggcgctggccactgcgccggaaccgcagcggcaagctgatccagttgtaactgaccatgtcgctcggggggatgcggtaccttcttgcccgcgccc

SEQ ID NO: 68684 - DNA, 941 bp, Zea mays
  Clone ID: MRT4577_162632C.1
aaaaaaaaaaaaaccaccgcatcccacaccccccgagctcagcttagctccactccagctccaatcacagtcgtgaccagagcgcgagagctagctagagggccgtgaaaatgccgatcaataggatcgccctggggagccaccaggaggtgtaccacccgggcgccctcaaggcggcgttcgctgagttcatctccaccctcatcttcgtcttcgccggccagggctccggcatggccttcagtgagtcctccgctgtccgctcctacccatgtgcatgcaacacaggctcgatcggccctcgtcttgccttcaacgagcagctagctagttagcctgccctgtacacggcacgccccaccaacagcttcacgacttcttctaagctgttctttaaacaccttgtttaaacaccttgtctaagctagttagccggctcttttgagttcgtcaccgaatgactgaaacgaaggggcagaaaaaaaaagatgtccttttcgtcctactagctagtaccaggctttcggtaggtatttctttaatacaaggccagtgtttaatagaagctcgcagaaatgtctttttgaaaaggtcaaaagcgaggaaagcgaagccttttaggtgaaatgattagtgcaaatgacagatttagacctgtcatcatgttagagggctgcagaagatgggaatccttggcagaatcagtagtaccttctattcgcgtattacttgtgatgccacaaggcccagttcccatgtgcagatgtgctgctgctccccagaactactagcaaaaatgctccacctccactgacacgaaggcctcctgtgtcctggaaaaagaaacatgctgtagtttttataatagtatcaggaaaagaagaatgttacagacgggccagaaaaaaaaatatcagacagtgcttgtgcttgatactagt

SEQ ID NO: 68685 - DNA, 875 bp, Zea mays
  unsure (1)..(875): unsure at all n locations
  Clone ID: MRT4577_162633C.1
accccgtatcccacaacccccgagctcagcttagctccactccagctccaatcgcagtcgtgaccagagcgcgagagctagctagagggccgtgaaaatgccgatcaataggatcgccctggggagccaccaggaggtgtaccacccgggcgccctcaaggcggcgttcgctgagttcatctccaccctcatcttcgtcttcgccggccagggctccggcatggccttcagtgagtcctccgctgtccgctcctacccatgcatgcaacacaggctcgatagcctgtacacggcacgccccaccaacagcttcacgacttcttctaagctgttctttaaacatcttgtttaaaacaggctctagtatctctttgagctcagcttggtctgtcatgctctagcctctagcagtagcacaaggtcatggccggctcttttgagttcgacaccgaatgactgaaacgaaggggcagaaaaaaaagaatgtccttttcgtcctactagctagtaccaggctttcggtaggtatttctttaatacaaggccagtgtttaatagaagctcgcagaaatgtctttttgaaaaggtcaaaagcgaggaaagcgaagccttttaggtgaaatgattagtgcaaatgacggatttaggcctgtcatcatgctagagggctgcagaaggtgggaatccttggcagaatcagtagtaccttctattcgcgtatacttgcttgtgatgccacaaggcccagttcccatgtgcagatgtgctgctgctcggctgctcccagaactactagcaaaatgctccancctcaccgacacgaacgcctcctgtgtcctggaaaaagaaacgtgctgtagtttttatattagtat

SEQ ID NO: 68686 - DNA, 605 bp, Zea mays
  unsure (1)..(605): unsure at all n locations
  Clone ID: MRT4577_162634C.1
gaattcggcacgaggccaggccatactccgatccccaagcagaattaaacctcacctaaccccatgggcgaccacccggtcgccggggagcaccaccacccttcggccgccacggccctgggcgcgctgctgctgctcccgtcggagctcctccacgagatcctgctccgcctggccgtcccggagctcctccgcgtgcgctccgtggcgcggccgctctccagcctcatctcctcgccggacttccgccgcctgtaccacctctcgtcggcgtcctccgggcccgggccggccgccgcgtggctgctcctcttcaagaagctcccgccccgcgacgccgccatcaggggcttccacgggccctcgggccgctggttccgcatccccgtctcggcgatcctcgcccccgccgtgccgcccggcgaggacctctacttcctggccgcgtccggcagctccttcctgttcgccgccaacggccgccgcgagctcgtcgtcgtcgacctcaccgcgcgcgccgcgcgccgnctcccgccgtacccgctcggtccccgcggaacctcctcctggagacagttcgacctcaagctcgacgacgatccccc

SEQ ID NO: 68687 - DNA, 349 bp, Zea mays
  Clone ID: MRT4577_162635C.1
atacccgctgatgcttcccatctatccacttgagatcttcttcgcttgataaatatcaggagcatgaaggctgacggctgaacacggagctgggctcgaggccgtcaccgattggagatccttgcatacctgcgcgccgtcagtccgtctccgcttgtagatccgcccatacgagcttccctgcgcgccgccagccgtcgccgatccgtgcgccgcgtccgccgccgccagccctaaggaccagccgcgagccagcccggctggcgacgtgacgaactgcgcaatcgtcctggagataaacatgcaactgcatggtccgattatcaggaatcttgtccatgactccccg

SEQ ID NO: 68688 - DNA, 309 bp, Zea mays
  Clone ID: MRT4577_162636C.1
acaccaaacaatcatcagattcactaaaccctactctgttcttcatcatggagagcagaggacgaacaagtacaaaaaacacatgtacgaggactcttggctaactaaattacctagcagctggttttttcttgacgaaacaagagcgatgacctgtaatcgccatatacgtaaaatcctgcatatcagtagaacgacacggctagggaagtgagcgcgtgatggtcatggcacgcagacgctgcgggacggctgcgccgtcctgtcgacggcgaagagcctgcggaagagcctcagtaggagcgccca

SEQ ID NO: 68689 - DNA, 287 bp, Zea mays
  Clone ID: MRT4577_162637C.1
ggcttatcctttacctgtttactgctacttgtatttggaagcatcgggtacatgtatcccggagcctccggatgtattcattaaccgattcgcccttccatatgtgcagggccactctaggtaccgaatctaattgataacaaccgggaaagaaacgatcgtataaatctatgttctaactcaccctatgacaaaatagatacaggaggctcagtgttcgtcttatgcgaatgctgttactgttaaagacaacgaaaacaaacgcacggcagaacgccttgctgtga

SEQ ID NO: 68690 - DNA, 186 bp, Zea mays
  unsure (1)..(186): unsure at all n locations
  Clone ID: MRT4577_162638C.1
ccaaatttctttgcttctttaccattcaaactatgttttttgaatttcatatggagaccctacttaccattattaatcaaccatcttgattgtaattttccagagggcttcttatttttgcatttttctttcttgggtactcatataccatatctttcccacacatcctgctgtttacctnnntgc

SEQ ID NO: 68691 - DNA, 817 bp, Zea mays
  unsure (1)..(817): unsure at all n locations
  Clone ID: MRT4577_16263C.1
gggtacctcgaggccggccgggagggctccttggttgcctggccggagaagtcgcttctggcagccgtcgccggagctgaggagcgggaaagcctgacgctgacgtgcgcacggtacaaccgtgaataccgacatccctgttgtactcacagggctcagcattgtggcgaatgtgctttggtaaataagattatgactggaaatctcatacaccgccatgataagataaagcgtgaagctgatatcagtggcaatattaagatttttacggaagatgagattgaaagaattaccaacaacttcagcactcttatcggaaaaggtggctttggagaagtttacaggggaacccttgatgtcgacaacgagcctgcagcagtgaagaaatacatcaacgaagattcgagggaagtgttcatggaagaggtacgcatccacagtaaaattggccacaagaacgtggtgaagctcataggctattgcatcggggaaagcactctcatgatcgtgatggagtatatgtccaaaggaaatctcaacgacctgctccactctgaaatctctatccctttggatgtgagattgggtatcgctatagggtgtgcagaggcattgagctacatgcactcgatgcatgtatcatccggcaaccttgtctgtcatggtgacattaagccggccaacatacttttagacgacaatctgacagcaaaattgacgggattttgggatctcagggctttctggttggntggcgtcactcgatacactaccactgtganaggaagcataggttacatggatcctatatacattc

SEQ ID NO: 68692 - DNA, 1087 bp, Zea mays
  Clone ID: MRT4577_162640C.1
gcagcgaaaataaattctttattgcaaaatgattacatgttacaataagtttacattatacaattatcggagtgattacaaaagaaagtgattcaaaagaattacaatttaaaatgtataaaatatttataggttttaaaatacatgctagcttaagtgacaatcctcaataaagaagctaaagatgggatacacctatataagaaggccgagcccaccggcacttagcagcatccacaacagaacaaaattataacctgaaaaacaacagggaataaaaccctgagtacgcaattactcagcaagacttacccgactaaagaaaagactctcaagggtatgctggtttattgggaatcaaggtaaagcttatcaaatttcaaagactcattttgcagaagagcttactagtagtggatccttatgccaaaattttacttcacaggttaagtacctttcctgaatctagatttgcctaatctagagcattcacttgtcctatactagcttcattttagcagctttagtttcacttgttatctacgatgcagggcagtgatccagtcttcatatccgagaagtatcggcgatccgaatcgattaatactcagctgaggatctccaaccacacgacatatgtagcacttaacccttgcatatgtcaactcgcccacggttttctcaagaccagaacgggttcacgtgacccgagagcacagcactccaccgtccagccgttggcctagttggtacacgtaactctcgccatggtgcccgccatgtttccgagagtacagcaccccaccttccagtctcttgccacggagggtacacgctactctcgccatctctccactcccagtgcgtgcgagctgttctggtattggtccgaccgaggcaaagcttacccatgatgaggcatgtggccagttaaagggtcctagatcagcaagcctactttcggtacggtccttaatcgacacagacgggcgacctttcctgctcaacgtctggtctcatattattatttccttcccaaaaccatgtacctgatagaggtaccatgcttgaatgatgaattcgtcac

SEQ ID NO: 68693 - DNA, 618 bp, Zea mays
  Clone ID: MRT4577_162641C.1
ggccgcttttttttttttttttttacagcggaaattctttattacaaaatggttacaagttacaacatttacaagttataacaagattacaatatatatcatcggagtgattacaaaagaaagtgattcaaaaaaaattacaatttaaaatgtataaaatatttataggttttcaaatacatgctagcttaagtgacaatcctcaataaagaagctaaagatgggatatacttatataagaaggccgagcccaccggcacttagcaccatccacaacagaacaaaatttcaacctgggataacactaggttagtgtggttagatgacgtccgcttggtgagcatcaacaatcctgacacttgatcaagtcgtccctatagagatgggttcatcaaagccaccttgtgatccatcctgatccatgccctccaattcacataatcatctagcgtaccacatcatgccccgactcgatttcagcaagagcgaagacggccaccagttcttgtatatcatcgaacacctaaggagcgttgaacttaaccttcttctccaccaatttctccagggattttacatgggagcagcagaggtggccggccaccagaaaccagagag

SEQ ID NO: 68694 - DNA, 331 bp, Zea mays
  Clone ID: MRT4577_162642C.1
ggaatgaacgatccatccactccaaacgtttcggttgatttaaacagaaactacaaaaattctacttgtgacgattgttaactggtacttggtataaccatcatttaaattgaaaacaaaggcccttagaaccaaacggaattattcctttagaaaattaacaaattattacatttgaggggaaccaaaccaaaacaaattttaaccacgcccccaaaggaacaagttgttaaacaaaattaggggaaccgaaacaaacaacgggaaccaaattgaatcaataaatgatggatttttcttggttaacggccccccgcccgtaggtggcccg

SEQ ID NO: 68695 - DNA, 285 bp, Zea mays
  Clone ID: MRT4577_162643C.1
gggacgcatacagctttatcggaatgctttcaattttttgaaagacaaacccctactgcgctctatgccgattggtgaagccctaactgctttaccacatgaacaaccgtgcacacgctctatgattctatgaaactggaacaatcagcacttaaagcatttactggtcatgaaacacaagctgattctatatagggggatccaactgaagcgtttttacgcttcatgcatggacgatggcacatcgaacatatggtgtatgaaacaagacaaaccatattaaga

SEQ ID NO: 68696 - DNA, 1031 bp, Zea mays
  Clone ID: MRT4577_162644C.1
ggccgcttttttttttttttttttgcagcggaaattctttattacaaaatggttacaagttacaacatttacaagttataacaagattacaatatatatcatcggagtgattacaaaagaaagtgattcaaaaaaaattacaatttaaaatgtataaaatatttataggttttcaaatacatgctagcttaagtgacaatcctcaataaagaagctaaagatgggatatacttatataaggaggccgagcctaccggcacttagcagcatccataacagaacaaaattataacctgaaaaacaacagggaataaaaccctgggataacactaagttagtgttgttaattgacgaccacttggtgagcatctcccattctggcactctatcagatcatccatccttaggttcgttcactagcatcattttgggatcaactcggctcttgtccttcgcatcacgtgtaacgaaccacatcatgctccgactcgatttcagcaagaacgaagacggccaccagttcgagcatatcatcgaacacctaatgagtgttgaacttaaccttcttctccacctaattctccaaggattttactccatatcgcacacatcaacacacataaaacctcacatcagcagggtattaacaagaactagtaaaacaacaaagggatttagagatcaccatgggagcagcagaggtggctgggcgagctaggttggacgaccatgggacttgtgcttggggaaggagatggaagaggggctatccatggcaacaagagagggggctggcgtccataccatgggcagcagggagggcgctggacagagggcaggggcgagctccagggaggagcgtcgagctgcagcagggaggggcggccatggcaggaaggggagagacgtcgagagagcagggatgaccagcgaggctctgtaggatcggcgcctagggaggaggcgacgtgaagaagctgacttcctatgcgcaggggatgagggagagatcacaggtgaagaaactagaa

SEQ ID NO: 68697 - DNA, 224 bp, Zea mays
  unsure (1)..(224): unsure at all n locations
  Clone ID: MRT4577_162645C.1
tagcttcatctgcgccggagtgcttcagnnctccaacagaaagnagagcgtgctcnncaaaggtctacattagnagacctcaacgnaacatgccctgctaaagnngcccttgcagnaccccaggnannnaatgtggccccccgtaaaagtnngtttttggtgggtgaacagtnnnaatggggacnntctgctctataagtncncctccctgcgnaccccgtcag

SEQ ID NO: 68698 - DNA, 331 bp, Zea mays
  Clone ID: MRT4577_162646C.1
tgctcagcggggcaaccgggggtccaagagcgggaaaatggaggcgggacgcacggacaacgagagcaggaactactggaagacggagaggactgagaagctgcagaagatgggcatcgaccgtgcgacctacatgaagatacagccacaggcagaatatccttctgcgactgatcaggagtaggacacggtatgttcgctcgaagaggagggggagaaggccgacgtggtcatgatggcagtagttacgtcgattattgggctcaagactgatcacatatttacggacgaggaggaaatgctggagcacctgcttgactacatggacgac

SEQ ID NO: 68699 - DNA, 1012 bp, Zea mays
  Clone ID: MRT4577_162647C.1
ataacaagattacaatatatatcatcggagttgattacaaaagaaattgattcgaaaagattacaatttgaatgtataaaacatttataagttttaaaatacatgctagcttaagtggcagtcctcaataaagaagctaaagatgggatacatctatatgagaaggccgagcccaccagcacttagcaccatccacaacagaacaaaattataacctgggataaacactaagttagtgttgttaattgacgaccacttggtgagcatcttctatcctggcacttggttgattcatccattttagcttcgtccatcagcatcacttggagatcaattccactcgtcttccatagcacgtgatcaattaacgtaccgagtagataatgatttccagtttaagcataacactgaacaccaaacaatcatcgcacggcttgtctcgcttcacacatatgagatttttcctcacatcccacacataagcatacacatatacacatggttagcatttaattaatcggcgtcgaatacatgtaccggagaggaataaacacaaggaaaacaacgggttctcattggggttcggcgaggtcacactagggctgcacagatcgaggtggagctcgctgcggtatttcatcgagcacatcgagggcgcgacacgaaggggttccatggttgttgctgctccatgaccaagggcgaggttggcgtgcggctgtggtcgggggcgagctgtaggtggaggagagcgcctggtgaaggagatagtggccgacacaggaggggatctcggctagggtttgggatagccatgggaggaactcggcgcgtggagatgtcgtcctggtggccgacgagcagggagggtgcagcactaggtcgacgacttgccgtggctgagcaggggagtagcagacggcgtggccgagcgctgctgctcaagcgagcatggggacaattttctggtggctggatcgcacatgttgaaggcatcccggccggcctcgag

SEQ ID NO: 68700 - DNA, 917 bp, Zea mays
  unsure (1)..(917): unsure at all n locations
  Clone ID: MRT4577_162648C.1
ggccgcttttttttttttttttttacagcggaaataaattctttattgcaaaaagattacatgttacaataagtttacatcatacaattatcggagtgattacaaaagaaaatgattaaaaagaattacactttaaaatgtataaaatatttataagttttaaaatacatgctagcttaagtgacagtcctcaataaagaagctaaagatgggatatacttatataagaaggccgagcccaccggcacttagcaccatccacaacagaacaaacttataacctgggataaacactatgttagtgttgttaattgacgaccacttgatgaggatcttccattctggtgcttgaccagatcatccaagcttcaggttcattcatcatcttcatgttgggatcaactcaactcttgtcctctgtaaaaaaatggggaggacgccggccaagggggatgactgaagatcagggcgccagcagagatggggcgcgcgtgtacggagctcggcgagcggagggcttcagcagagaggaggttggggacttcagcgccagactgctggacggagagggcagcgccggacctgagcaccatagcagcgcgacaggcaggcccggacggaggtcgaggctggggcaagcaccgcggcggacgacgcggacgagctgcacggctgggaggcgccgagcaggtgaagcggcgcgcggcaccggggaagagctcgcgccagagatggaggtcgagctgggacggcggggaagctccacggctctggagcgagctggagaaatcagggagcgtgccatgggcgactaggaaaaggaggcccagcgagcaccagagaagccgagcggtgcagggagacgaaggctatgcaaaggctgatanacaatgccagggagatgagatcgaccccgc

SEQ ID NO: 68701 - DNA, 579 bp, Zea mays
  Clone ID: MRT4577_162649C.1
gcagcggaatttctttattacaaaatggttacaagttacaacatttacaagttataacaagattacaatatatatcatcggagtttattacaaaagaaattgatccaaaaagattacaatttgaatgtataaaacatttataagttttaaaatacatgctagcttaagtgacagtcctcaataaagaagctaaagatgggatatagttatataagaaggccgagcccaccggcacttagcaccatccacaacagaacaaacttataacttgaaaaacaacagggaataaagccctgagtacgcaattactcagcaagacttacccgactaaagaaaagactctcaaggatatgctagtttgatgggaatcaaggtaaggcttaccaaatttcaaagactcagttttgcagaaaagcttactagtattggatccttaagccaaacttttacttcacaagttaagtacttctcctgaatctagattcgcctgatctagagcattcacttgtcctatactagcttcattttagtatctttagtttcacttgttatctacgatgcagggcagtgatccagtct

SEQ ID NO: 68702 - DNA, 421 bp, Zea mays
  Clone ID: MRT4577_16264C.1
ttttttcttttttcttttttttttttttggggatgggaattttttatttttttttttttccctccccttggggtttttttttttgggaaaacgggccattaaaatatttttgggggtttttaacctgaacaaaaagacccgggaaccccatgcccgcaaaaaaaaagccccggaaaaattttaacaattcccaaggcccccaaagccgtttgtccccttcccaaggcccaaaaaggaaaacaaggatttgaaccctttccccggtatatgtatgggcacgtttaaaaaaaaaaaaaatggccttcctttgaaggggggaaaaggttataccggtttggccccccccccccagggtaaaaaccaaacctttttcgcgggcgggacaccccaaaaatggcaaaaaaaagggttttctttgaac

SEQ ID NO: 68703 - DNA, 1636 bp, Zea mays
  Clone ID: MRT4577_162650C.1
tttttttttttttttttttgcagcggaaataaattctttattgcaaaatgattacatgttacaataagtttacattatacaattatcggagtgattacaaaagaaaatgattaaatagaattacaatttaaaatgtataaaatatttataagttttaaaatacatgttaacttaagtgacaatcctcaatagagaaactaaagacgggatatacttatagaagaaggccgagcccaccggcacttagcaccatccacaacagaacaaaattacaacctgaaaaacaacagggaataaaaccctgagtacgcaattactcagcaagacttacccgactaaagaaaagactctcaagggtatgctggtttgttgggaatcaaggtaaagctcatcaaatttcaaagactcggttttgcagaaaagcttactagtagtggatccttatgccaaacttttacttcacaaattaagtacttttcctgaatctagatttgcctgatctagagcattcacttgtcctacactagtttcattttagcaactttagtttcacttgttatctacgatgagggtcgaagatccagtcttcatatccgagaagtaacggcgatccgaatcgattaatacccagctggggatcttcaaccacacgacatatgtagcacttaacccttgcatatgtcaactcgcccacaggtttctcaagaccagaacgggttcacgcgacccgagagcacagtactccaccgtccagccattggcctggttggtacacgttactctcgccatggtgcccgccatgtttccgagagtacagcaccccaccttccagtctcttgccacggagggtacaagctactctcgccatcgctccactcccagtgcgtgcgagctgttctggtattggtccgaccgaggcaaagcttacccatgatgaggcatgtggccagttaaagggtcctagatcagcaggccaacaatcggaacggtccttaagcgacacagacgggcgacctttcctgctcaacgtctggtctcatcttattatttaacacccaaaccatgtacctgacagaggtacaatacttgaataatgaattcatcatcgcgagtggtgccttcattactgcaagtttctttttcataaaacccatatccaatgttacataatattcttttaaaaaggaacaagttttaattttctaggcagggctaagcctcattagttctctttgtaaaacaggtatcaaggaggataatcaaattccaaggaatggtaatgcatcaactgtttcatcactcaactcctatcacctaatgcagcatataagtgataaaagttttaaaaacaacaaggaggtggcaaatgcaccggggcttgcctgggataacactaagttagtgttgttaattgacgaccacttggtgagcatctcccattctggcactctatcagatcatccatccttaggttcgttcactagcatcattttgggatcaactcggctcttgtccttcgcatcacgtgtaacgaaccacatcatgctccgactcgatttcagcaagaacttagacggccaccagttcgagcatatcatcgaacacctaaggagtgcttaacttaccttttctccac

SEQ ID NO: 68704 - DNA, 1080 bp, Zea mays
  Clone ID: MRT4577_162651C.1
ttttttttttttttttgcagcggaaataaaattctttattgcaaaatgatttcattattacaataagtttacattatacaatttatcggagtgattacaaaagaaagtgattaaaaaaaattacaatttaaaatgtataaaatatttataggttttcaaatacatgctagcttaagtgacaatcctcaatagagaaactaaagacgggatatacttatagaagaaggccgagcccaccggcacttatcaccatccacaacagaacaaaattacaacctgggataacactaagttagtgttgttaattgacgaccacttggtgagcatcttctatcctggcacttggttgattcatccattttagcttcgtccatcagcatcacttggagattaattccagtcgtcttccatagcacgtgatcaattaacgtaccatagttaaaccaaactgcggatatgctgatgattccgattcaaacatttcatcgaacacggggtgtttgctgcactggagttcctttcttcttctctacccaaacacttgggattttgctcctcaacaaaaatacaaccatacacacaattaatagcagcgaaccaacgccgatgcggaattgaacggagaaggaacatcgggatctcaccagggtgacgacaacgtaatcgggactgcacaaatcaaggtgcagcacgctgcgacattttgttgagcacatggtgaacgactggtgtaggggataagggagtggttgtttggaacaaagaggagcgccataaaagaggacagcaccatgggaaggcagctccagcatctagtatccaagaaacagtagggaaaggaaataatgggcgccatgggagggaaggatcagccgatgtccatagccatgagaggaaactgagggagaggactgccgccatggcttgctgcaggaagggaggggggcgtccatgggagaggctgaaacagggaagtggagctccggcgagcagaagggcagggcgatgaggccagcatgtccgtggaggtgtgtgtggtatgatacatagaatagatgtatgggacccaggaaatcgaaa

SEQ ID NO: 68705 - DNA, 487 bp, Zea mays
  Clone ID: MRT4577_162652C.1
tggcttggaacctttgggctgatttatgtgcttgtggatgtgcgggtaagtgagaagtgattgatctttgttgttgccgttagttacggatggtggcgatgattctgttgtttcgtatgagtaggctgtttctgtacctcttgttgttactctggttcttgattctgattccgttccttagtcttaggctgttgaggttacttaagttctttctggtccgtttaacgttgttgttttgctactactgctgtaagttgttttagagctacttcttgatgttattcatgttcctgttgcttaggttgttgactctgtgtgtgtagaggaggattgttgtgatgttgaggttcgttgagttgctaatgtttgagttgctgctaatgtttgtgctgctgtgtatgatgtttctcctgtttgtgattctgtcgttacttttgaggaatagcgggattatgatggtgatcatcctgagtgttttgctgagctt

SEQ ID NO: 68706 - DNA, 519 bp, Zea mays
  Clone ID: MRT4577_162653C.1
taggggccttttttttttttttttttcttattacaataagtttacattatacaattatcggagtgattacaaaagaaagtgattaaaaaaaattacaatttaaaatgtataaaatatttataggttttcaaatacatgctagcttaagtgacaatcctcaatagagaaactaaagacgggatatacttatagaagaaggccgagcccaccggcacttagcaccatccacaacagaacaaaattacaacctgggataaacactacgttagtgttgttagatgatgcttgcttggcgagcatctcccattctggcacttgtttgattcgcccattttagcttcgtccatcagcattatcttgagatcaatccaaaccttgtcttccacatcacgtgatcaattaacgtaccacttgacaaaagggagggggctggcgcttgggctttcattcatggagaacaaaagaaaaagggggagctgctgctgcagaattagaggagggctactgctcctcgtgccg

SEQ ID NO: 68707 - DNA, 1047 bp, Zea mays
  unsure (1)..(1047): unsure at all n locations
  Clone ID: MRT4577_162654C.1
ataacaagattacaatatatatcatcggagttgattacaaaagaaattgattcaaaaagattacaatttgaatgtataaaacatttataagttttaaaatacatgctagcttaagtgacaatcctcaatagggaagctaaagatgggatatacttatataagaaggccgagcccaccggcacttagcaccatccacaacagaacaaaattacaacctgggataaacactacgttagtgttgttaaatgatgaccacttggtgagcatctctcctcctggtatttgaccagatcatcaaatcttcatgttcaatcgtcagcctcaccttgagattaatccaactcttgccctccaactcacgtgattaattaacgtaccatactaaaccaaataacagaaacgatgatgattcaaactcaatcattccgtcgagcgctaggtgtgtgatgcgcgagagctttctttattcttctccacccaactgccacaggtgtttctcctccgcaaaaatcacacgcataagcacacacatatacacatgattagcatttaattaatcggcgtcgaatacatgtaccagagaggaataaacacaaggagaacaacgggtcctcaccgggattcgacgaggtcacaactggggctgcacagatcgaggtggagctcgctgcgatatttggtcgaacacgacgagggcgcgacgaccagcgagctgcgaggggtggagtagggaggagtggatcttgggcgccgagaggccgagagcaatggaggcctgggcaagctcgaccagtctgctgcgttgagcagagaggagaggagcagggcatgctgttggggagccgatggccatggggaaaagttgccggtgcagaccgtgcatgatggagggagccgagcggagggctgctcgtgcgaccctggtgcctgctcgcctgagctctgagcgtggggatcgagcgccgcaggggaagaaagtggccggtgtccgacgaagataacgatccgaggtgccgaggaacagggaggctnctgtgttntncaaaa

SEQ ID NO: 68708 - DNA, 299 bp, Zea mays
  Clone ID: MRT4577_162656C.1
catgagaagcacctcactatgggcgaccgacccccagatgacggaacctggtcaagtgaccggcttgggatccctgcccaaccggacgcatctatcatgaggtctccggcaggtggagtccgctgagccggaacatgcctcgctggacccatgcatcacaatcgccttaaggacaaacttggcaggcaaagaagtatgttgaagaggcactactgcaagagcaggacccaggatggagaagaattgcatggccaatcaagatggtgctagagacattttttttcggtgcttagggaaaa

SEQ ID NO: 68709 - DNA, 163 bp, Zea mays
  Clone ID: MRT4577_162657C.1
ctgaatcgctgtgaaatatgcgttaataattttatctcagatgttaaaacatggagatatgggggaatattgtcaactatatgaataggtacaggcattaaaattaattgtgcagcattttgctaaaactcaaaatgtaaatgaaacttattacggaacactt

SEQ ID NO: 68710 - DNA, 864 bp, Zea mays
  Clone ID: MRT4577_162658C.1
atccccattggataccgggctcgccggggatctaatccgatccgatggcccgcgccgccgctcgcctcctccccatcttcctcccatggcggcgtcctcccccgccccgcctcctccgccggggcttcctaaaccctagcagccccagaacctccgcgcgcgtcgacaccctcgttctccctggagacgagcgcttgcccttcccctcgcccccacgcctcccgaaccagctgcgtcctgactacgggagtggcggcggaggcggcgctccctcgaccatcgcggccatcgtcacctcactcggcggaggccctgcagcggtggggatcgtgcggatctccggccccgatgccgtcgccgtcgccgaccgcgttttccgcccagccgggaccaggagggcgtcgacgccgtggcaaccgcgcagccactttgttgagtacggactcgcgctcgacgcggacggcagcgttattgacgaggttttggtggtgccaatgctctccccgaggtcctacacgcgagaggatgttgtggagcttcagtgccatggcaacgatctctgcttgcgccgcttgctcagggcttgcttggaagctggagccagacttgctgatcctggtgagttcacccttcgtgcattcctgaatgggaggttggacttggcccaagctgagaatgtgtctaggcttatttcagcaaagtcagcagctgcagcggactcagctttggctggcatccagggaggcttttctaccctagtaaagtcattgagatcagggtgcattgagttgctaacagaaattgaaggctcgtttagattttgaagatgagatgcctcctttggacccagtgatgcttgtcagc

SEQ ID NO: 68711 - DNA, 248 bp, Zea mays
  Clone ID: MRT4577_162659C.1
tgccttctactacgacgtcactgctctggctgcgagccagtgcctgacctgcggcctgtcaacgttcgctacctgccatggatgccctgctgcgatcatctgcgacggggtatctgtcctgctcattgacccttaccacatcggcccggccgcgggtatcctgtgcaacttctttgccgcatgcaaggctgatccgggctactgggaccgatcttacagggctgcctgcagataatctatgcgaagtt

SEQ ID NO: 68712 - DNA, 206 bp, Zea mays
  Clone ID: MRT4577_16265C.1
cgacgccttccacggcgacagggacgactgctgcgtgcacgacggggccgtcctcgtgctctgggagtggtgcaagggcgagaaccagagctggaagatcctgccgtggggtcccgaggccaactccgacgtgttctacgcgggaggcccgcacgccgtgctcgttttctgtaaggtctgtggtgaggactacagtcttactgtgt

SEQ ID NO: 68713 - DNA, 152 bp, Zea mays
  Clone ID: MRT4577_162660C.1
atggcagccaaagaatatgcctccttatgctcctgagttcgttctgcaagcgctgcaacaagaaccatttccccacaatgatcacaagctgctatagcttgcctaggtccaccgtaccactgaccaccgcagcctttacaacatgacaaacc

SEQ ID NO: 68714 - DNA, 633 bp, Zea mays
  unsure (1)..(633): unsure at all n locations
  Clone ID: MRT4577_162661C.1
cccggngtcgacccacgcccgtccgcgagnacccaaccagctgccccgccatgcccgacaccgaaggcggccacgctgccgtcgcccgccagctggatctcgtggcacctcccgctgcaccggccaccaccaccagcagccgtgccactgccaccgcccgtcacgacgacgaggaggaggacggattcaccttcgccgccgtcgccgtgccgtgccccgtgtacgccgtcttcggccgcccacggtggtcgccgcagaagcagcgtcaacaggaggaggaggaggaggagggccctgctggcacgggcgcggccaccgcgcggcgggtgccgctcgggcggctcctcctggaggagcggtggtgcgacgatggcgcaccgtcggtgtcggggaaacagcccgcggacgccgccgaggccgagctcgacggcgtgccggcggagacctactgcctgtggtctcccgcgtcgccagagcaggatcttctcggcgggcgtcccccgcgcgctgccggacgagaggatcatcagccggtttgtcggtccttccgtggcagcggcagcggcgggtcgccgccggcaggacaagttcgtgttcctggccgggcggcgaagacagggagcgccgcggggt

SEQ ID NO: 68715 - DNA, 561 bp, Zea mays
  Clone ID: MRT4577_162662C.1
gtacggagaattctatccatgaccggaactattctttgcggcctgctaaaacaaacgggcggttttctaaggttgggggaagcttattaacactgtcgatctatctatccacacatagcacaggtcgcataaacacacaatatagcgcgggtgcctgtggactggccgctgacaaaccatgtctctaggatcgtctctgcgaagccaaccctaacgttgccatattcgaaaacggggtggtagacttccaccaaaacatcacgcaagctccttagagggccagggatgtggttgcatatccatcagctgggaatactgtgatgcactgcgcaggctgtccttcaacaaccttcacaatgttctgttctggcttcaagtagaacttatgggctacaatggtataactcaatgtaccgcttagacgcaagactggcacataacaaagctgattttcccattggactgggaagactctctaaagataattaatgtagcacacgatgagctcctgtgtctgggtcttggcaagtaggttctgcatccataccactatcctctcac

SEQ ID NO: 68716 - DNA, 810 bp, Zea mays
  Clone ID: MRT4577_162663C.1
cattgggtacctcgaggccggccgggactttcctctaccttgcagactgcacactgcctcaagatggtttcctgttcctcatctccacggccacccatccctctcctgctcctcttcctcctccacttctcctctgtcctcgccgtatcagctccttcagcctcacaacaggctggtaccgacggcggcggcggcaatgtgtcggagacggcggcatggacgccgcggctgaggaagacgttcttggacggcggcatcgagcactggcacgggcggcggctggtggggcggttccaggtgtgcgcggtgtgcacctgctgcgggggcccgcacgggatgtgcatcccggcgccgtgctgctacgccatcaactgcaacatccccaaccgtccattcggcgtctgctccttcaccccgcgcacctgcaactgcctcaattgccacctctagcctagccttgccgccaaggatgccaaggtgtggcgaactgctgctggatccatggttttgattgtttcgctttttaagttggttgccgatgcaagggattcgtggtgagagattcgttaatttagggaccaagtggaagattccatcattgcataatactagtattgttagtagtatatactcttgtcctgcattgtagttgtagccatgactcatagtaagtagcagtatggtgatggttggattaattcagcttttttgctcttgcttggtgttgttcaactgtggatagtatctatcattgcagtgtggtacttgtattatttttttcctcatggcagtaggcatgacctttgttct

SEQ ID NO: 68717 - DNA, 406 bp, Zea mays
  Clone ID: MRT4577_162664C.1
cccctactttcctctaccttgcagactgcacactgcctcaagatggtttcctgttcctcatctccacggccacccatccctctcctgctcctcttcctcctccacttctcctctgtcctcgccgtatcagctccttcagcctcacaacaggtacggctccctccctctttatctatccctccctcgcacctgtgtggggttggttggtaacgcgtcgtgtaccgacgtttatcccttccattgtgtgatgaactactgtaggctggtaccgacggcggcggcggcaatgtgtcggagacggcggcatggacgccgcggctgaggaagacgttcttggacggcggcatcgagcactggcacgggccggcggctggtgggcggttccaggtgtgcgcggtgtgcacct

SEQ ID NO: 68718 - DNA, 321 bp, Zea mays
  Clone ID: MRT4577_162665C.1
ggtttggaaaaggctgaatatatagtgggaaatttagtagcgattctaactaagaactgatgctaaagatgttttgagcgtgagagtgaaagttctaggcggaaactagaatatctttagtattaattgtttctataaaaaaatcggtacaaaccctttatttttagtaccggttctttttaagaacgagtactagagtatttgagacgcggaggtaaaacttctagcaataatgaaaaatagcaccggtactaaaggctctctattttgtgtcggctaagggtctttagtatcgattgatgttttcaaccgattctagaa

SEQ ID NO: 68719 - DNA, 870 bp, Zea mays
  unsure (1)..(870): unsure at all n locations
  Clone ID: MRT4577_162666C.1
gctccaggaccttggtatcatccccgatgacagattctgtggctgccttctcagcgtggcagcaaacacaccagcggaagaactgggcaaggtgatcagctgcattgagagaagcaacgtccagcttggtgccgtagtgaagctccttgtggacaggagctcctctgaatcttttagagaagcagcccgtgaactgctgaggagctcccgcggcgtggtgaagatgccttactgcaactgcctgatggacctatgcgtgaacctgaaccagatggagaaggcctgcgcgctcctggacgccgcacagcagctcggcatctacgccaacatccagacgaggacccagacacagtggtcgctgcacctcaggggcctctccgtcggcgcggcactgaccacattgcacgtctggatgaacgatctgtatacgtctctacagaccggcaacgaagggctgccaccattgcttggaatccacacggggcaggggaagaacacgtactcggacagagggctggctgctatgttcgaggcgcatctgaaggagctcgacgcgccgttccacgaggcacccgacaaggcaggctggttcttgacgacgaacgttgctgccaagcaatggctggagtcgaaggcggcatcagaactagtaactgtgtaaactggttactctggcgcgtacataggattatttttccgtgtaagctacatgtgttctccgatatatgcaggtgaagatgttgagttagcctatctccgaccttactcatccgtatacctatattcaaatttcactctatgatttataatgaaatttaaaatagatcttaaataaaaaaaaaaaaaaaannnnnnnnnnnnaaaaaaaaa

SEQ ID NO: 68720 - DNA, 225 bp, Zea mays
  Clone ID: MRT4577_162667C.1
gcgggacccgcatcgcatcccagtgaatcgacgcagctggggtgcacacagacccagggcagcacaggcatcatcagcggcaatcagccgtcctaggctgggagtgacgactcttcaaggctggaacacaaccacgcccgcgcgtgcggacgcatctcgcgggggtgggcatatccgtgcaggcgggccgtccgtgcaacagcgcggggcacccactatctgtgc

SEQ ID NO: 68721 - DNA, 950 bp, Zea mays
  unsure (1)..(950): unsure at all n locations
  Clone ID: MRT4577_162668C.1
acgaggtacagtggttcgattggcatgtctcgtatggcggataaagttgtaggatccaacaggagatacaactctactggaaatgaaattaggcagttcaatacagaacaagattccctgacaaatnnnnntttacctgcaccagcaggttggcgtgcccaaannnnnnnnnnnnnnnnnnnnnnngggttcttgaaatatatatcaagaagagtcattgctatatttcttaaagtnnnnnnnnnnnnnnnnnnnnnnnttcgtcgacgacaacacttggccaatgatcatccacatactgcaagtgcacccagtaatctggcagatcttcagacaattaaggaagatcgtgtaaatccttgcctggaacggcttgataggcttgagttaatgtttaatcagctgagcagaaagcctccagagcttccacaggataaggatcgggccatacaagattcttttgacaggataaagtccattgagtttgatctggagaagacaaagaaggtattgcatgcatcatatggataacatgctgtttagaattgctttggcttttgcctttatggctcgagtgccatgagaccttttatatcatttctttttactaaacaaaatctttgttcacactcaggcaatgtgagttgaacttataaacaaaagttggttttacttaatttattaaaattggcaagtttgtgatgctaaaatttcacattgaaggccaaaacattgccactcgttgagtcattgttcaaaagaactacagggaccatcatctgatgtaagcttgtgattttgctgggtaatcccttaaccgttgtcaggtggatatatctttaggacaactttgtggggacccacaggtctatatttggtcgataccttcttaaaacacatcttttgatgatatcgagtttctgttgtgtatgtttcataaagtcctgctg

SEQ ID NO: 68722 - DNA, 133 bp, Zea mays
  unsure (1)..(133): unsure at all n locations
  Clone ID: MRT4577_162669C.1
ttcccgtccgacgccactcaaactaaactacttcatacttaatggattttcatttcaagccnccaatacatctnnaaaacgacgatttattttataaaccttaccaccctaaacaactctccaccattttatc

SEQ ID NO: 68723 - DNA, 256 bp, Zea mays
  Clone ID: MRT4577_16266C.1
acttaatattatttttatttattaatttcgggaatataatcatatcgagacagtacaataatgaagaaataattacaatcaaccataaaaatcaatccgttgatataaataagctttatagacatttgaaacaaataaatcccagtattaaaaaaatacctttaattcaaaaactaaattcaaaattagaaatcccgattgaaacaaataatttttataaacacaatcaagataaaattggcaatacgacaaagtt

SEQ ID NO: 68724 - DNA, 296 bp, Zea mays
  Clone ID: MRT4577_162670C.1
tacaacacccaatagtgagtcgtattattccggccccggcgacaattagcgccgccgtagtcctaagcggatgcatcgtccacacgagagccgcaggtgatgaccacagttgcgacgagtagttgatcaatagcctcatgtagggctagacctgacttgacgggttcgtgaccaacgtcaccgaggtagatccccgacacgaatgtgacgcaggtgtgcatgcacgtcagctcaggcaacctcgagcgcgtcatctacggtgtcatcgatgccagtggtatctacacgatgtaact

SEQ ID NO: 68725 - DNA, 985 bp, Zea mays
  Clone ID: MRT4577_162671C.1
ggccgcttttttttttttttttttgcagcggaaataaattctttattgcaaaatgattacatgttacaataagtttacattatacaattatcggagtgattacaaaagaaagtgattcaaaagaattataatttaaaatgtataaaatatttatagtttttaaaatacatgctaacttaagtgacaatcctcaataaagaagctaaagatgggatatacttatataagaaggccgagcccaccggcacttagcaccatccacaacagaacaaaatttcaacctgggataaacactaagtcagtgttgttagatgatactcgcttggcgagcacctcccattccagcacgatcagatcatttagctttgggttcattcatcagtcccatcttgagattattccagttgttgtcctccacattacgtgatcaatgaacgtaccatgactaaactcgactcgactccgcgagatcgacaaccacatccggttgaggcgattcaccaagcacttggcaagcgcctcgctatagctttcttctcatctaaatttcctaggatttacctccaccacaaacacacaaacatatacagtaaataatcaaatataggaattggtggggaataaacatagcgcaagcaactggtctcaccggggttgcaaaggttcgacgtgctgctgcgattgtacaaaaacctaggggaggggcagatgcttgggctttcatccatggagaacaaaagaaggagtgggctgctgctattggcgtccatggaagaagattcaaccaccaggaataggaaggggcagcagccagaggatgagggcgaggggagataggaacgggtggcccgacggtgtccatggctgggggcagggcgagcaggaatgcaggggcagcgagtaaaggggctggcatccagggcaccatggaaaaactcggctagggcttgagggaggagggcagagagctgctggcgagctggac

SEQ ID NO: 68726 - DNA, 421 bp, Zea mays
  Clone ID: MRT4577_162672C.1
gaccccatctaatgtagggtggtgccatccatttaccgtgggggataaattgtccggtctcctgactacaatactagttggctgttacaggctgtacgctctacattcttgcttactgacacgacccccgggggggggggggggggctcacgcttgcttactacctttccacagtatacacgtgcctggggctagaccgctagtatgccgctgcaccaacgttctaatgggactggaggctggtgagcccctcgttgctgacggggtcactcacgcggttccgcatgttttggagccgccctactccggtgactagcccctgcctgaaggtaccgtcgttggctagcatgcggagtcctgccgttcttgtccttgctctgcaccgggctcattcattgctcttatccgggcttgcctccag

SEQ ID NO: 68727 - DNA, 634 bp, Zea mays
  unsure (1)..(634): unsure at all n locations
  Clone ID: MRT4577_162673C.1
gcagcggaaataaattctttattacaaaatgattacatgttacaataagtttacattatacaattatcggagtgattacaaaagaaaatgattaaaaagaattacaatttgaatgtataaaacatttataagttttaaaatacatgctagcttaagtgacagtcctcaataaagaagctaaagatgtgatatacttatataagaaggccgagcccaccggcacttagcaccatccacaacagaacaaacttataatcctgggataacactaggttagtgtggttagatgatgaccacttggtgagcatctctcatcctggtgcttgtttgattcatccactttagcttcgtccatcagcatcaccttgagatcattccagttgttgtcctccacattacgagatcaatgaacgtaccatactaaaccaaataacggaaaacggcgacgattcaaactcaatcattccgtcgagcgctaggtgtgtgatgcgcgagagctttctttattcttcttcacccaactgcctcaggtgtttctccacaaaaatcacaaacataagcacacatatacacacgattagcatttaattaatcagcgtcgaatacatgtaccgnagaggaataaacacaagga

SEQ ID NO: 68728 - DNA, 239 bp, Zea mays
  Clone ID: MRT4577_162674C.1
gggggggggaaccatattacgtgctcttatttctgtgggtacatcggtgtccacattttagcaaccaccggggggtaaatttgcacaagctatgacatggggaaaaacggcggaacggacttgaacaccattctataggggggttttatccacagacaggtttacatggaccatggggaagaactcttgggggattaagggcctaccgcccgagcttcaatcccatatgcgggctgaac

SEQ ID NO: 68729 - DNA, 722 bp, Zea mays
  Clone ID: MRT4577_162675C.1
cgggaaacccaaacacccatacaagaatgatatgccactcatgacctgatcactccagtcgaccgcagccggccattgctacctctgtggcttagtcttctgcaagctttcctcttccttctcggctttgaacaaccaagaagctcagctagcacaccgtcgtcgacgttgcaacaaaccccaaccgctaccatgaccaccaccacgatgacgacgacgacgacagcagctcctgatctctccctccacatcagccctccgtcgccaccggagccgaggctgctgctggggttggagctcgacgacgacacggcggcggcggtggcggcgaaggccgcgacgaagaaggcggacgacgcggcgatgcgggagtacaacaacctccgccaggtgcagcggcgccagctgcaccagccgagccagacggcgggccacgggttcaagaggggcacgtcgggcagcgccgccgccggcgccggcgggaggagaagttccagggcgccgcggatgcggtggaccaccgcgctgcacgcgcacttcgtgcacgccgtcgagctccttggcggccacgagagagcaacaccaaagtcggtgctggagctgatgaacgtgaaggatcttacactggcacatgtgaagagccacctgcagatgtacagaacagcgaagcagcagggcgcagacagaccatgtgtagcagttgcaggccatgggcatgccag

SEQ ID NO: 68730 - DNA, 1162 bp, Zea mays
  Clone ID: MRT4577_162676C.1
acagcggaaataaattctttattgcaaaataattacatgttacaataagtttacattatacaattatcggagtgattacaaaagaaaatgattcaaaagaattacaatttaaaatgtataaaatatttataggttttaaaatacatgctagcttaagtgacaatcctcaataaagaagctaaagatgggatacacctatataagaaggccgagcccaccggcacttagcagcatccacaacagaacaaaattataacctgggataaacactacgtcagtgttgttaattgacgaccacttggtgagcatcttccattctggtgttggcttgatgcatccacaagattaatccaccaatatcatcttatggttcgctctgatccatgtccttcagctcgcataatcatctagcgtaccataactgaatctgccttgattatcgcatgaacagcgaagtcggcgagggttccatgactcaggcattttatcgagcacctagtgagcatcgcgctaaacctcgttttcttcctctaattctattcttccacatcgagcgcttgtgaccacggtgtcagtcatcaggcctgatggcgaggagcagtggctgctgtgcagtgtggcggagcttcgtagcctgctgcagcaacagagaaggacacggatatcgaagtaggagcatcaggtgcgtaagcttggcgagcggcaaaagtcgacggaactaggaagcgagggcgcgtgcgccggggaaggctggagagggagctcgcgcgctaggggaccttgacggtgaggcgaggcaaaactcgacggcatgctgaagcgttgtcgagcaggaacgacgaggtccaggcaagatccacggctagctgtagacgacatcgagctgagtcgacggccaccagaagcgaagctcgatgcggcgttgggctcgtccatggctaatgaccggcgaccatgcagaggcgttgtgcgccaaggctgccggcgctagcacagctcgccatgcaggccagagttgaggctacgtccggcaaggagacgcggctctagcatccagcacactgccgaggccgagcacgtcttgtggaggaagccgagttctactctgattcatggaagcacaacgtccaaatatgggagcaatgcacaagatgagaacgtc

SEQ ID NO: 68731 - DNA, 329 bp, Zea mays
  Clone ID: MRT4577_162677C.1
tcccgctggacccactcatccggttcctaatggtggtttcttggcttgtctgactacaattcactcaaattgaagatagaacttattcacacatatggcaggcacagcaatcaaagcacgaatctgacgtagactacgaccaccacgctcataacaaccaaacctcccaaataccatccactaactaaagggaaggtcaatactctaataacatcatcgcctagtaccatgctatcaaccccaactgccgccaccatcaccatactccacgatctcttacttcacctcttctactccatcattcagaatccttcctcctctatccgact

SEQ ID NO: 68732 - DNA, 954 bp, Zea mays
  Clone ID: MRT4577_162678C.1
gtagcggaaataaattatttattacaaaatggttacaagttacaacatttacaagttatagcaagattacaatatatatcatcggagttggttacaaaataaattgattcaaaagattacaatttgaatgtataaaacatttataagttttaaaatacatgctagattaagtgacaatcctcaataaagaagctaaagatgggatatacttatataagaaggtcgagcccaccggcacttagcagcatccacaacagaacaaaattataacctgggataacactaggttagtgtggttagatgacgtccgctcggtgagcatcaacaatcctgacacttgattaagtcgtccctatagagatgggttcatcaaagccaccttgtgatccatcctgatccatgccctccaattcacataatcatctagcgtacctggtggtcgtcgtgatagagctttcctttcccaccaaactctagaatctttcttttcgccacacttgcacacaaatacacataacctcatatcaacatacgctaacaaaatctgctcgcactagaaaattagtgaaataaaaagaaaggagttaggaatcaccatgtctaatcacgacgacgacactggggctgcggacagtggggaaaagcagagggtatggccggtgaggttggtgtgctgcgtcctgtggccagcctccatgccgagccgagcttggggaggagatgggggaagggctaggcgaggtcgaccatggggttgagggcgaccatgggaaggaaacccctgcacacagattagaaaggaggcgtccatgggggaactgcagggcagccgacgagcacaggtgagctcaacaggggcgagctccagtggaggtgagggcgccagggaggagcggcggacgtggggagctcggccatagaacgagcagagaaggaacaagaaggcttggactt

SEQ ID NO: 68733 - DNA, 261 bp, Zea mays
  Clone ID: MRT4577_162679C.1
cgtctcggagacgagatccctcgcactcgcatatcgcagcgctttgcgttcatcacaaccaccgtcgaaacacccagcatgccgcatctgatgtgcgcccaagggcggagaaagaagccggctgcgaatgaagccagcggagggaggagccccgctgtccgcgaagggccccggcggggaaagaagcccaagggccgagaagtcgccttccggcggccaagtcgtccggcaaagaaagcggcgacaagaagggtaagaaga

SEQ ID NO: 68734 - DNA, 269 bp, Zea mays
  Clone ID: MRT4577_16267C.1
ctacttctaaaaccccagcggcctctcgcgaggggagcgggtaatttaactggggatctattccaccgtcaacttatagcaccctaatgatgcttgcaatcatatacaagaagatgacaagaatgtgcttattatttttcctgtcaaagataacatccccatctactataacagcaatactaccaatcagaacaactccctctagtcaatcattagaaactcctgatacaccaacaaatgacttgcgccctatataaatgatctcgacc

SEQ ID NO: 68735 - DNA, 964 bp, Zea mays
  Clone ID: MRT4577_162680C.1
acaagttataaccatattacaatatatcatcggagtgattataagagaatttgattcaaaaatattacaatttaaaatgtataaaacatttataggttttcaaatacatgctagcttaagtgacaatcctcaataaagaaactaaagatgggatatacttatagaagaaggccgagcccaccggcacttagcaccatccacaacagaacaaaattacaacctgggataaacactacgttagtgttgttaattgacgaccacttggtgagcatcttccatcctggcacttggttgattcatccattttagcttcgtccatcagcatcacttggagatcaattccactcgtcttccatagcacgtgatcaattaacgtaccacatcatgcttcgactcgatttcagcaagaacgaagacggccaccagttcgagcatatcatcgaacacctaaagagcgttgaacttaaccttcttctccacctaattctccaggaattttactccatatcgcacacataaacacacagagaacatcacatcagcagggtattaacaagaacctatatgaacaagaactagtaaaacaacaaagggatttagagatcaccacagcagactccaaggagcagctgggcaccatggatgaaggtgttgctctaaaggaagtgatgaactcgtctggcacaggggggtgagctcgccatgtgctgccagcacgtggataggggaggacgcctggtgaaggagacagtggccaacacaggaggggatctcggctagggtttgggatagccatgggaggaactcggcgcgtggagacgccgtcctggtggccgacgagcagggagggcgcggcacatggtcgacggcttgtcgtggctgagcaggggagtagcagccggcgtggccgagcgctgctgctcaagcaagcgtggggagatggaggttgcgtgcccaagagccg

SEQ ID NO: 68736 - DNA, 685 bp, Zea mays
  Clone ID: MRT4577_162681C.1
gcagcggaaataaaattctttattgcaaaatgatttcatattacaataagtttacattatacaattatcggagtgattacaaaagaaagtgattcaaaaaaaattacaatttaaaatgtataaaatatttataggttttcaaatacatgctagcttaagtgacaatcctcaatagagaaactaaagatgggatatacttatagaagaaggccgagcccaccggcacttagcaccatccacaacagaacaaaattacaacctgggataacactatgttagtgttgttaattgacgaccacttggtgagcatcttccattatgttgctggcttgatgcatccacaagattaatccaccaataccatcttatggttcgctctgatccatgtccttcagctcgcataatcatctagcgtaccatatcgcaaatcaaaacgatatttatacgcatgacgacgattcccggtttgagcataacactgaacacccgacaaccgtcgcgtgacttgtttcgcttcacacatatgagatttctcctcacatctcgcacatacatatacacataattagaatcgaataaaccgatgttgggtacagatactggcgatgaatacataaggagaacaacggttccttaccaaggtgaacgacgacgaacgacaaggtcgacgacgcgattggggatt

SEQ ID NO: 68737 - DNA, 319 bp, Zea mays
  Clone ID: MRT4577_162682C.1
acgtaagctcggaattcggctcgagctgggcacatggtgccatactaccagcctcgcagtgcattggcactgttctcatcattcctcgaagggaagctccctccacactgatccattaagctagcatgggttgtgaatgtcatgtactacacttgtagctcgcctttaggaaggggttttcaatgaaccaagcaggagtgctgctgattatattaataaaaaaaaccttcagttcaacttccttgcgcaagcacagacaaaaaaaaaaaaaaaaagggggggccgccgattagtaacctcttcacccggggaattattt

SEQ ID NO: 68738 - DNA, 1268 bp, Zea mays
  Clone ID: MRT4577_162683C.1
gcagcgaaaataaattctttattgtaaaattattacatgttataataagtttacattatacaattatcggagtgattacaaaagaaagtgattcaaaagaattacactttaaaatgtataaaacatttataagttttaaaatacgtgctagcttaagtgacaatcctcaataaagaagctaaagatgggttatacttatataagaaggacgagcccaccggcacttagcaccatccacaacagaaaaaaaaattataacctgaaaaacaacagggaataaaaccctaagtacgcaattactcagcaagacttacctgactaaagaaaagactctcaagggtatgttggtttattgggaatcaaggtaaagcttatcaaattttaaagacgtatttttgcagaaaagcttactagtagtggatccttatgccaagtttttacttcaccagttaagtatttttcctgaatctagattcgcctaatctagagtattcacttgtcctatactagcttcattttagcatctttagtttcacttgtcatctacgctgaaggtcgaagatccggtcttcatatccgagaagttcggcgatccgaatcgattaatacccagctggggatctccaaccacacgacatatgtagcacttaacccttgcatatgtcaactcgcccacttggctcttgtcgtcacaattaaatcgcctcgaatccgagagatcgacaataacctccgattgaggtgttccaccgagcacccgacgggcgttacctttagaacttcgatctcttcgccctccaacaccgggaaaatttctcctccaagccacatacacaaacacgcaaaatacatcatctagatacaaatatcagcgaggaatactcacaaaagaaatgacaaatcctcactgagacggacgacgcaccagggttggcggcttgagaacaatctgcaggggcaagggaatggagggctagacgtcatggatgaagggggctgttgttccgtgcgccatggacgagctgagcttgggtgatggctgggcgaacatgccaggaacctagcaggggcatcaagtaaaggggctggcatccagggcaccatggaaaactcggctagggcttgagggaggagggcagagggctgctggcaagctggactgagggcaagcgccataggatggagcagggacggcggccatcagtagagagggctaggcgtggggaggaagcctccatgggctacttggctaggcaccatgggatatg

SEQ ID NO: 68739 - DNA, 953 bp, Zea mays
  Clone ID: MRT4577_162684C.1
ttttttttttttttttgttttataacatccatttaattatactcgacatatgtactctctaagcactcctcgtaaaatttgcacctaatacctaaacttcccctcaaacaacacttctactatccaatcatgacgtcaaaaaaatcatggcacacagccaaattatttcatcatacatcaaataccattacagcaataattatataaccaaatcattcattaactaagtagtcggagaaacgacttggctcacgacatcatgctccgactcgatttcagcaagaacgaagacggccaccagttcgagcatatcatcgaacacctaaggagcgttgaacttaaccttcttctccacctattcctccaaggattttactctatatcgcacacatcaacacacataaaacatcacatcagcagggtattaacaagaactagtaaaacaactaagggatttagagatcactatgggagcagcagaggtggctgggcgagctaggttgggcgaccatgggacttgtgcttggggaaggagatggaagaggggctatccatagcaacaagagagggggctggcgtccataccatgggcagcagcagaggtggctgggcgagctaggttgggcgaccatgggacttgtgcttggggaaggagatggaagaggggctatccatggcaacaagagaggggggcggcgtccataccatgggcagcagggagggcgctggacagagggcaggggcgagctccagggaggagcgtcgagctgcagcagggaggggcggccatggcaggaaggggagggcgccatgggagagacgtcgagagagcagggatgaccagcgaggctctgtaggatcggcgcctagggaggaggcgacgtgaagaagctgacttcctatgcgcaggggatgagggagagatcacaggtcccggccgttttcccggccgg

SEQ ID NO: 68740 - DNA, 849 bp, Zea mays
  unsure (1)..(849): unsure at all n locations
  Clone ID: MRT4577_162685C.1
attgggtccctcgaggccggccggggaacctgatagacagagatttaaaaaacatcagaacaaagtatatgagtgaaattgtgctaagtactcggttgctgtttacacgtgtttggattctccacacttgctatcaagccatcatgtctgaccaacaaaagaactccagaacggaaaaaccatctacctgggctgaagaagtagaagagattagcgacctattcgacgcagcaggactccaaccagttcctattaatgagctcatgaagacggttgaaaaaaatcgaagagactaaagttcccgacgaagagattgaagcaccctcaagctcagaggccacgcccgtgatacggaagaaggacgctaagttccctcagaaacttcctgtgttgcctgaagctgccgagcccgcaaagaaggggaaagagaaactggttgatgtctcagactctagctcagagaacggggctggttatgcagagtcttttgcaacccaacatgagacagctgagattcgagaagactttgagaagctcgcacaaaaagtggactctctcactagcagggtaagtctcatgatgaaagagcgagagcagttaccccattcttcaaaacatgagagcagacttgaatgaccagctgacaatgtttagtgagaagatgcacagcctggttggagtcccacgcgactaatccaaacgttcaagcagcgctatcggaagtcgagacaatcaaggcagagcactccgatcaactcaaggtagcggctggttatttggtttcagcacctaggggagggtcccctttgacaacgaagggaacatctcttaagggaaagggnnaatcag

SEQ ID NO: 68741 - DNA, 1081 bp, Zea mays
  Clone ID: MRT4577_162686C.1
agcagtggtaacaacgcagagtacgcgggcaaaatttttggcacacaggctatttccatcatcgaggttctcaatctggttagacagcaaactgagactacaaactgatcctatccttatcctagagtattttctctggcggcatggttatgaatatgctatttccaatcactatgatcgccattgtgtttgggaggaagtagcacaaaataaaaagctgaacaagttcaaccacacaataattgaccagcaatttgagttttatcaagcggatggactgacaaggttcaacccatcggatcccagcaggcttctaccaagctatgtccctgaaggctcttttatcgcaagagagcacacaccgatgtccaacttattttcctgcctgtggtacaatgaagttgatcgattcacacctcgtgaccagctcagctttgcatatacatacttaaaactgagaaggacaaatcctgacagaccattccgtctcaatatgtttaaggattgtgagagacgatcaatagcgaagctattccatcaccggacagaagagagacacaacagtgcacaattaacaagatgacacatccttcctagtgatggagggcagaagagagaggtcagggattgtattctttgatatagctcagctatccacaagactctccattgaaactttatgcccctgtctaggagtttgtactttatataatgcaagccttctttcctttgtcactccaaacctgcaggccagttcccgcctaacattttttgcagttgacaaggcggattaggagtttctagctgtttggtttttctttgttctccgtaaagctctgtttattctcttgataatatggcccatggatgatctggggaagctatgagtggtcatggactttccccagattgcccatgcacaatgtattattaccacaccactgtaggactgtgtagtgaggccattgttctcctgcaattctgactgaaaaaaaaaaaaaaagactaagatcgcgataaattactcaccccttacgcgagtctttgatcaaaaaaaaaaaaaaaaaaaactcgagcccgg

SEQ ID NO: 68742 - DNA, 1733 bp, Zea mays
  Clone ID: MRT4577_162687C.1
tttttttttgcagcggaaataaattctttattgcaaaataattacatgttacaataagtttacattatacaattattggagtgattacaaaagaaaatgattcaacagaattacactttaaaatgtataaagtatttataagtttttaaaatacatgctagcttaagtgacaatcctcaataaagaagctaaagatgggatatacttatataagaaggccgagcccaccggcacttagcaccatccacaacagaacaaaattataacctgaaaaaaaacagggaataaaaccctgagtatgcaattactcagcaagacttacccgactaaagaaaagactctcaagggtatgctggtttgttgggaatcaagataaagctcatcaaatttcaaagactcgtttttgcagaaaagcttattagtagtggatccttatgccaaagttttacttcatagattaagtacttttcctgaatttagatttgcctaatctagagcattcacttgtcctaaactagcttcattttagcagctttagtttcacttgttatctacgatgagggtcgaagatccagtcttcatatccgagaagttcggcgatccgaatcgattaatactcagctgaggatctccaaccacacgacatatgtagcacttaacccttgcatatgtcaactcgccaccggttttctcaagaccagaatgggttcacgcgacccgagagcacagcactccaccgtccagccattggcctggttggtacacgttactctcgccatggtgcccgccatgtttccgagagtacagcaccccaccttccagtctcttgccacggagggtacaagctactctcgccatctctccactcccagtgcgtgcgagctgttctggtattggtccgaccgaggctaagcttacccatgacgaggcatgtggccagttaaagggtcctagatcagcaagcctactttcggtacggtccttaatcgacacagacaggcgacctttcctgctcaacgtctggtctcatattattatttccttcccaaaaccatgtacctgacagaggtaccatacttgaatgatgaattcatcactgcagatgatgctctcaccattacaagtccttttttcataaaacaaacccatacccagtgttacacagcattcttttaaaaaaatcaagttttagttctctaggcagggctaagcctcattagttctctttataaaacaggtagcaaggaggataatcaaattccaaggaatggtaatgcatcaattgtttattcacacaactcctatcacctaatgtagcaggtaagtgataaaagtttttaaaacagaaggaggtggcaaatgcaccggggcttgcctgggataacactatgttagtgttgttaaatgacgatcacttggtgagtatctcccatcctggcacttggttgattcatccactttagcttcgtccatcagcatcgtcttgtgattaatccagctcttgtccatgggtcagctatgggaggaagagcagggagcagaggaaatcgtccatgcacagggagtggagacgccagccatcagggagaggagggcgacatccatgggaagctagggctgatccacaccaggagagggatccaggggaagcccctgggagggagcaaggggcggcagcacaaaatggaggggctggtgttggcgtgtaggaaataaggatgagggaggagacg

SEQ ID NO: 68743 - DNA, 858 bp, Zea mays
  Clone ID: MRT4577_162688C.1
gtaaataagaaggggattctagcccctccaatcaccttcggttttgtggcttccaaactagaccttagattcttcagagaaagatgtagatccgttgtgcattgtggcctttggtggttgatccgtcggtttgtttcgtttcatgttgtttcttggctagacctaattgtttagtgaacctcgtatcacgggatgcatgtcttcccagatggtacccgtttgcgtgtgagcttgcaaaatcctgggcttggtcatctttcttcagtgtttctctttccaacaatcaagatgagccgtggcggtagcgcgggtggtggtcaaagttctctgggttacctctttggaagcggtgagccccccaaaccagcagtggcaccagctgtaagtgctccacctgctgctgcaggtgctccacctgctgagaaaccacctgctgcaaagcctgatggcaccagtcagattgctgctggggttaccagccaaaccaataactaccacagggccgacggtcagaacaccggcaacttccttacggaccgcccttcgaccaaggtccacgctgctcctggcggtggctcttccctgggatacctgtttggtggcaactgatgccgctcaccaagctatcaccccccactgtcgccgcatgccttttctgaatcgtgaacagccgttgtcattccatgtgtacccaaacctcccgtcccgcgtgggcccttaagctgcgtctagatttcagggctaatcgtgtgcctgaaccctcatcataagtcgtctctgtacccagcttctcgtttcgtttgcacccgtgatggtatggtttggttgttgccaaaaaaaaaaaaaaaaaaagcggcc

SEQ ID NO: 68744 - DNA, 1408 bp, Zea mays
  Clone ID: MRT4577_162689C.1
gcagcggaaataaattctttattacaaaatgattacatgttacaataattttacattatacaattatcggagtgattacaagagaaaatgattcaaaagaattacaaattaaaatgtataaaatatttataggttttcaaatacatgctagcttaagtgacaatcctcaataaagaagctaaagatgggatatacttatataagaaggccgaacccaccggcacttagcaccatccacaacagaacaaacttataacctgggataacactatgttagtgttgttaaatgacgatcacttggtgagtatctcccatcctggcacttggttgattcatccactttagcttcatccatcagcatcgtcttgtgattaatccagctcttgtccttcacatcacgtgattaattaacgtaccaaagctaaatccggattgaaaccattaaatcgacgacgctgtccggcttgcgtatatcaccgatttgacgagcgtggcactggtgcttccctttcgtctttcggcgtgatcgcaaggtgcaacaaggctgctgaaacgatgacgatgctgggatgcagatgttgatgtctcagatgtggacacgaccaaaacccgcacgaggacaagggaagccagaacgacaatggcgcggcgacctcgacactaagcacccgagcacgacgatgtcgcggcgcaacaggaaatagtgacgccatgatggccagggaggcgtggctggcggtgcaaggcgcggtcgagaacggacagagggagccgggagaaagaactgcggcgctgcgagcagagcgcagggcgcacgcagcaaggagagaaggggaggaagagaagcaggggggcgcggcgagaggagcatgcgcgcgccaacaggctgggcgacggcacgagcagagaggagctggggagggagatccgcgagagatagatgggcgcgcagcggctagcgcgcagagagccatgggagagggatccgagctggagctggaagaagctccggccatggggaatacaaggggctggggcgagctcggggaggaagaccgtggcgcacaggaaaaccggacgccgagcaagaacacggcagggaggagctcggccgggcgccatggggcgagctcggggaagctccacggcggggttcgcggcgcaggacgcaggcgcgcgcgcgcagagggagatgcgcacggctggcgagcgcagggagcatggccagggcgcggccgagcagtgagttccatggcagcggcatggtggagggagctgggaggaaacgccggggaagatgaggttggcgagcgctggggctggcagccaggcaccggatgcgagaggtagagggatcgagaatggatgcgatggtaccgaaggaaaaggatcccggccggcttcgagg

SEQ ID NO: 68745 - DNA, 332 bp, Zea mays
  unsure (1)..(332): unsure at all n locations
  Clone ID: MRT4577_16268C.1
caaaaagaccaaagggggggttccatttattcatcccccaaaagggggccggggtttcgacatataaacccacagggggggcattatttgggttgcttccccatgcccaacgatttcgatcaacgtttccctccccaggaatggaggggggcaaaacactcaagagccttttttttccggggattgctaccccctgttggggctccggggccccctgtttccaacagggagcaaaccattgngtccccctcccccccgaatatgctggaggcccccttgacccggatggagcgtaagcccattggggggggcaactgcttgctgcgagttaa

SEQ ID NO: 68746 - DNA, 166 bp, Zea mays
  Clone ID: MRT4577_162690C.1
ttgagttgaacgtgttgaggctttgcaatttcacttgtgttaaaggctctggcatttttccatttctatgcaaatttacttgaagcagaattgctttctctgccgtcacagaaagcagagtttctttcaaacttcactgaggcatcagttgctctttggcaatgtc

SEQ ID NO: 68747 - DNA, 794 bp, Zea mays
  Clone ID: MRT4577_162691C.1
cgggttcccccctcggagtcgacccacgcggcgggcgtagcctcccaacgcaacaaagggatttgcttcgtccgacgtccactacctttaccgccgcggcgccgccccagaatttcccccttcttcgttcgcggaaacgagagcgcccgaaggaatagcgaggtcggaggcgccgttcgattccagaagtttccatcgccgcgccgtgacgatcttgtgtagcctgcgcattggtctgctcgtcggacgtcggcgtcggtcgagtcctggggtgcgcggtcgtgcgagatcgaggcggggagctcgcgaatcggaggccgcggggcgcaatgccgcgtcggtagggatggcggaggcggcgccatggcgaggggcgtagcgcgggcggtgtctttcgggcgccgtgccacaacggggtggtgctcctaccggcgcgtcaccgtggccgtctgcatcggcaaccttgtcgccgtgctgctcgtgctccgctccctcaccgcccccgcttccttcgcacccaccgctcccaaccgcggggaagtggtgcagtacacggaggagcagattaggtgggtggaggagtcgatccggattcgccgcgaggctgagcccgtcgagctcgttctggcggtaaagaagctgcggaagaaactcgcccaggaggtgaagcggcgggaggagctgtcgctggtgctgaagcagaagtttattatgatattgcgcgggggctgcacgaagttggggataacagcagcctcgcgcagcaaagagaagtggtggaatcatggcgtgtt

SEQ ID NO: 68748 - DNA, 297 bp, Zea mays
  Clone ID: MRT4577_162692C.1
ggtaaggatggaattgcaattacaaacacaagggcagagggaaaacgtacaattccttggaaggaacattacacgttttgagtcaatttgtgtgaatgtacacgccatagaggaaacgtggcataagacatctccctatatatcacaccaaaattatacaaacatacaggtcagtggctcaaaggatgccaaatgcaacgatttgggagcaaagtacaatttacaatggttgccaccaaatgcgtccatctccagccttctcaagctctaacgtggtgaagtgttgctgcctgctgt

SEQ ID NO: 68749 - DNA, 239 bp, Zea mays
  Clone ID: MRT4577_162694C.1
gttgggtcgcctaggcagctatgcctgaatcgggaatgtttgccattttacccggctaatgcccggatgcgtcatttacaggtagaaacatagcactgatgtatgtgatgcccgtaaaccaagattacatagagctggagcacaaagcccccatacgctgcatcttcaccatactctctgattcgcgccacactggacggcttcttgacaagaccactgtccagattgtgcacagcacc

SEQ ID NO: 68750 - DNA, 1995 bp, Zea mays
  Clone ID: MRT4577_162695C.1
ctaacagaaggccgagatgtcctcagacatggccatgcggtcagcctccttctgctcggccgcctgggcaagtgccttgcagttcttgacggactcgttaagagccatctcgaaccctttggcccgggcatgctgctgtgaggccatggcctgggcggaccaggcagacccgacggccacgaccagtccctccgaaagggtcccggccctagcggtcgcctcggcttgccgctccgtaaccgcagccagctgtcccctaagggcctcagcccggctcacggcctcggcagcttggctccagaattggtcccgctcgctggtgacctggccaggctccagctgccgctgctgcatctcctcggcctgggaagccacagcccactgggaccgcagtgattcccaaacgctgctctcacggcagaggaacagcgacttagcggtgctcatgtccgcgagctccaacgttggcaacaacggccgcccctcctcatggtcgaaaatggggggatcggggatgaccagggccaaaggagctgggggtggaggcatctcagccatctcaacatcggcggcaacgggcggctccgtgggcgaatcagcgacggccccgacaggaatcgaagtcagcgccggcaacaaggcaggcgggctcgaggccgcggccgcgtcaacggcctcccccgacatgatggccgctccaacaggggggtcgacctgggaggcttgccccatgacagcccgtgcctcctgggcccccaccgaagggtgcccgctccggggcaaggccaatcgtgcctgcggggagacctctcgggccccggtctccgcaggccctgccgagggttgtcccgcagccggcttcgatgccgcttccgcctcggacacccgaggcgccgagggggcagcctgcccgggcgacgtcacgacagccgagggaccaacttcccgtacggctggcacgggcacttgctcttggggggcatgcggttcgacctgaccccccagagtcaccccaattatctcggccaaggggtcaagtaccccctcggcctgcctccgctcctcagaccgggaccccggcatcccagccccaaacgctggtggcgccggcccacctggaggctggcttgacgacctctggcccagccttggatccggactgaggccaagccgggccgccatgtcgtcgtcctcgtcatcatcatcatcgtcgtcctcgggcgtgtccggcgatggctccaacgggagcccatcccttgcttgcctccgacgacgcttctccaaggcttcccgagctcgcatcctctcgcaagctcgggccttttccgcgtccttcttctccttatccttctctgcaacaagcctacacgcggttcggcccgccgcgtcctccgggaccggtgaccgggagattttaaaattcctcaaccccagggacacatatccgtggtcgggacgcatcgggggctggttaaggacgccagtgtctagcctccctaccgtgcccgctatccgtctgaggaggtcgtcggtggagaggggggtcgaggacatccgtgaaccctccaagtcaacccccgccttcttcacgttcgtcgatgcggcgaagaattcagcggagaagagatgggtccacaggtcccagtgggggtcaatccccaaaaaccccttgcaaaccgccacgaaaatggccgcctgcgcgatggagttggggttgaagttgtgaagctccaccccgtagtaatgcgggagcgcccgcatgaagtggctcgccggcatcccaaacccccgctcatgaaagggggtgaagctgaccacgtaccccggcggcggagtcaggtcggcctcgctcctgggggccaaccactcaggctgcggcccgccggagagaggacggagcaaaccctcggcgatgagggcctgcagatccaccacagtgacggtggagaagggccacgggtcacgcagcggaaggacggtcgccttgtcagccat

SEQ ID NO: 68751 - DNA, 334 bp, Zea mays
  Clone ID: MRT4577_162696C.1
tcgcgcgaggaggacgtggacaacctcggggagggcttgaagacactgggcatctaccacgcggccgtgagcatgttggaataacaccatgcgaatgccggcggccaacaaaatcatcaactactgctgtgaagcgtacaaggctaaggagcacaaattggcccacccataagcagctcagatgctgagactcacactgctatctcacgacgcggaggtgcatatgcagcacatcgaagagccaagcacctatacaaagagaggatgatatagcacgctcacaagcgctaaacccaagtcatgctcaacatagactagtaacaacaattatagc

SEQ ID NO: 68752 - DNA, 347 bp, Zea mays
  unsure (1)..(347): unsure at all n locations
  Clone ID: MRT4577_162697C.1
aaaagacagaggcaccgacagacaacatgagcagacaccgccaccaccggatccgaccacggcggcgccaaccagggcagacacacgggtggcnccaccagcgacgagcgggacagccaggagacggagaggaaccccccgacgagcaggaacccggagaggaacgggaggaccaccaggacagagaaaccccgggacagagtgcggagggaccaagaagacacccgaagccggcacaaccgccggaagaggacgaccagcggcccgaacagcaacgacaacagccccacgaggatctccaccaccagaaacgagacacgagcagacacactgccccacgcccccga

SEQ ID NO: 68753 - DNA, 829 bp, Zea mays
  Clone ID: MRT4577_162698C.1
actccttagggcgattgggttcctcgaggccggccgggcgtcctccttcctctgctccttccgatccccctcccggcgtggaggtatagcgtccgccatctcccccggccgaccggatccctcacccctctaggtacgtagctagctaggccaggttatcgtcgattcgatagattcaataagcaaaggcgatcaacaacacaattaatggggggcggcggcggcggcaactcgcgggagctggaccagacgccgacatgggcggtggcgtcggtgtgcggcgtgatcgtgctcatctccatcctgctggagaaagggctccaccacgtgggcgagttcttctcccaccgcaagaagaaggccatggtggaggccctggagaaggtgaaggcggagctcatggtgctgggcttcatctccctcctcctcgtgttcggccagaactacatcgtcaaggtgtgcatcagcaaccacgccgccaacactatgctcccctgcaagctcaaggaggccgccgtccctggcaagaagaaggccgccgcagcagcagagcatctcgggggcgtgctggactggccgccgccctactacgcgcacaacggcaggatgctggcggaggcgagcatggcgaccaagtgccccgaggggaaggtgtcgctcatctccatcaacgccttgcaccagctgcacatcttcatcttcttcctcgccgtcttccacgtctcctacagcgccatcaccatggcgctcggcagggccaagatacgcgcgtggaaggagtgggagaaggaagcagcagggcaggactacgagttctctaacgacccta

SEQ ID NO: 68754 - DNA, 358 bp, Zea mays
  Clone ID: MRT4577_162699C.1
ttctttctttttttcttaaagctcgaaattcggggggggcttaatatctggaagggagcctgtgcattcagaacataacccatatgaccagatcatatcccatagcctcttcccctcatgcttcaactcagctctgttctactctgctcactcactcactccagtacccgtcattttccttctcacatttctcaacctcatcctcatcatcctcctcgccgatctccatcactgcctctcggaaccgtttgacatcatccaatgccgccttccgaaacatagcaatgtccactgcgccagctaccatatggttacccttcaatttgagctgctccgtcggttcattctgcattgtata

SEQ ID NO: 68755 - DNA, 315 bp, Zea mays
  unsure (1)..(315): unsure at all n locations
  Clone ID: MRT4577_16269C.1
ccgcagtgtgctggactcgcccttagcagtggtaacaacgcagagtacttttttttttttttttttttttttttttttgttttttttttttcatatcttatgcttattttgcacggtcatgttttgaattgtctgcgtaactcccatttgagaatactgcattatcttggccccacacatcaagctcctcgtttatctttatcagcacgcgatggttgctagntatcgctgtaccggatcttctcccnntcccatccatgtttcgcctgcctcnctctcattctgcatggctgatgcccttcgcgtttgatactg

SEQ ID NO: 68756 - DNA, 217 bp, Zea mays
  unsure (1)..(217): unsure at all n locations
  Clone ID: MRT4577_1626C.1
ggaacccacatggcaacgggccataggcagggaacacaggcgcggggcggagaaaaaggctacgagcgaatgatgcgaacagctcaacccatggagaaactgactgacacctctccgagngagaggcaccaggtcacacacagcaaccatgaagcccaacaaccctagagacacacaaagagctgccccgaatataaccgaagaaaggaccgcgaaa

SEQ ID NO: 68757 - DNA, 321 bp, Zea mays
  Clone ID: MRT4577_162700C.1
gaaaaccgggtaccccatttttggttaaaaccaaaggacaaaaaccccaacaaaaacagcccaaaagggaaacccaccccccaaacttaaaacacggaccccaaaccccggaccccaccaacaccaaaggggggtaacccaacccccgggaacagggggaaggacccaaattattcgaaacaaaaggccctggtgggttttggggtcaacaaaccaaggagctaccaaaacgggcttatttcgcgccgcccggctgggggcggatgagcttgggggcggagaccatgttgggcaggggaggcttcacccccggggacttgg

SEQ ID NO: 68758 - DNA, 1981 bp, Zea mays
  Clone ID: MRT4577_162701C.1
ccggccggaggcattcgtggtctggaattcttgcatgcccgtgctacgtcgtccatcgtctccccggccggctggagctagctaggtccggtgatcatatcgtcgattggaactgaagatcaagcgatcgatagaataaattaaaggcgcgggggcaacaacaagaatggggggcggtggcggtggcggcaactcgcgggagcttgaccagacgccgacatgggcggtggcgtcggtgtgcggcgtgatcgtgctcatctccatcctgctggagaaggggctccaccacgtgggcgagttcttctcccaccgcaagaagaaggccatggtggaggccctggagaaggtgaaggcggagctcatggtgctgggcttcatctcgctcctcctcgtgttcggccagaactacatcatcaaggtctgcatcagcaaccacgccgccaacaccatgctcccctgcaagctcgaggccgccgccgtcgagggcaaggacggccacggcaaggaggccgccgccgtggtcgctggcaagaagaaggtcgccgtcgccgtccctggaaagaagaagaagaaggccgccgccgccgccgaccatcttggcggtgtggtggactggccgccgccctactacgcgcacaacgccaggatgctggcggaggcgagcatggcgaccaagtgccccgaggggaaagtgccgctcatctccatcaacgccctgcaccagctgcacatcttcatcttcttcctcgccgtcttccacgtctcctacagcgcaatcaccatggcgctcggcagggccaagatacgtgcatggaaagagtgggagaaagaagctgcaggacaagactacgagttctcacatgacccgacgcggttcaggttcacccacgagacttccttcgtgaggcagcatatgaatgtgctgaacaagttcccagcatcattctacatcagcaacttcttccggcagttcttcaggtccgtgaggcaggcagactactgcgcgctgcgccacagctttgtcaacgtccatctggcccctggcagcaagtttgatttccagaagtacatcaagcggtctctggaggatgacttcaaggtgatcgtggggatcagtcctcctctgtgggcttctgctctcatcttcctcttcctcaacgtcaatggatggcacaccatgctctggatctccatcatgccggtggtgatcatcctgtcggtggggacgaagctgcagggcatcatctgccgcatggcgatcgacatcacggagcgccacgccgtcatccagggcatcccgatggtgcaagtcagcgactcctacttctggttcgcacgccccaccttcgtgctcttcctcatccacttcaccctcttccagaatggcttccagatcatctacttcctctggattctgtatgagtacggcatggactcgtgcttcaacgactccgaagagttcgtctttgcacgactctgccttggcgtggttgtccaggtgctgtgcagctacgtgacgctcccgctgtacgcgctcgtctcccaaatgggctccaccatgaagcagtccatcttcgacgagcagacctccaaggcgctcaagaactggcgcgccggcgccaagaagaaggctcccaccggcggctccaagcacggcggtggtggctcccccaccgccggcggcagccccaccaaggccgacggcgacgcgtagagaggaacacgctaactttaatttctgtgtgcttaattgcctaggctcgttaagtcagaacatgcatgcatgtaacaccactgctggttttcatatagtgtcgacagatggtcaacgtactttttgcgatcccacttgtatttttttttacaatgaagcacccgtccgcgtccgtggacactgcaagtgcattgccatgtcataagccaagtcatgaattacatatttactatgggtttatgggaaaaaaactctttattatataaa

SEQ ID NO: 68759 - DNA, 414 bp, Zea mays
  Clone ID: MRT4577_162702C.1
gtcagatcacagaatgtttctcatgaaagtttgttcaaggaaacagcttcactcatggtgtcacccatctttctaactttgttcattggttatcgccgctctttattatattgctttacacctaagaccaggctattccttgtcattttacaagttatatgcctgctaaacatgacgagtaccacttaagtcggagactgcaaggccatcaaactgatgttattgcacattagctgatcagataacttgtaaaatgacaaggaatagcctggtctgaggggtgggtggcggtgtgtgtgggtgggtgctttgatgcctatcagttgggacggttgttgaatgacatgtctgaaggtggataggtcagaccactaatgtttcccattgaaagttgtttatggaaacagcttttct

SEQ ID NO: 68760 - DNA, 539 bp, Zea mays
  Clone ID: MRT4577_162703C.1
gaacccaagcgtccgtaaaaaaactctggttagcgaggcccgggaagagaagcgatggtggaccagcgctggtgggacacagaccgagtggagcagacccggccgtgcagaagcggcgtggccgtcgaagacgcgtccttccaccacgctcgcgccggggcgcgctaggaggggatcgcaggggcaggattggcggacatggactggagcggagcgacgggagacgatctggggggcgcactgggggaggcggactgggacaggccggcggggactgtctcggagtactgctcccggctcaccgtccaaggctactattccaagtgggcgagacgtctacaacgccacgtctactactacaggacagactatgtcatttcgagcatggggatccttgggatgggctgcctttggaagcgaggtgctattcacggtgcttatatgactggacttaacagagcgtttctcaatgattgttaatgagacagtttcaaggagagaatgacagggaccgccagacagagctgaccagatgaagc

SEQ ID NO: 68761 - DNA, 328 bp, Zea mays
  unsure (1)..(328): unsure at all n locations
  Clone ID: MRT4577_162704C.1
tactctaatattgtctctgttctcatcgtttgaatcctcattcattggcttgccaccagaattaattggtccatggtcatgagtaactgccaacttcctagctttgtaaaaggaagacagatcacatgtcatgaagacatctaaaagttttgcaagcatatatgcaataatagctcttaacagaagagaataatgtagatatacagaaaaagcatgtgagaaaccgaaggatcaggatttcntaactgaatagnatgcnagnagnnctnncctggtgttnnntctgaaccaatgacaaggaaccagtcttgtctgttatccgattaat

SEQ ID NO: 68762 - DNA, 162 bp, Zea mays
  Clone ID: MRT4577_162705C.1
atggtgggtacaagtgcggtcactgtacggcggcagccggggtcagtggagcattgtacgcttcagggcatggttgatagtgtgacttggcctactaccctgccaccgggttggacggacgagtgggatgctgctccagcaggagaggagcaagaggagtag

SEQ ID NO: 68763 - DNA, 1028 bp, Zea mays
  Clone ID: MRT4577_162706C.1
ccgggctcgagtttttttttttttttttttttttttgcaaggaggataatcaaattccaaggaatgataatgcatcaattgtttattcgcacaactcctatcacctaatgcagcaggtaagtgataaaagtttttaaaacagaaggaggtggcaaatgcaccggggcttgtctgagataacactaagtcagtgttgttagatgatgtccgcttggggagcatctctcatcctggtacttgaccagatcatccaagcttcaggttcgttcaccagcatcattttgggatcaactcggctcttgtcgtccgcatcacgtgatcaattaacgaaccgcggtgaacagaacgacaacgaacttcagttcaagcacttcatagaacacctaaggagcgttgaacttaaccttctcctccacctaattctccagggattttactccatatcgcacacatcaacacacataaaacttcacatcagcagggtattaacaagactagtaaaacaacagaaggatttatagatcaccatgggagcagcagaggtggccggccaccagaaaccagagaggggcagcgtccgtaggaaagggatgttggcgtggggaggggctggtgcttgccacaggaatggaaaaatggcacagggccagggcgagcagaagagcagggggagctcgccaggaaccaagcagagaagatgatggagagagggacgccagcctgctgcaggaatgggagggctccgccgtccaaggaagaagctggagccaggacgagctcggctggggcgctcggcatggagtcaagggaagaagaccaggcgccatgggagggaaacccctgcacgcagatcagagaggaggggcagggacgatcgtccagggcgagctccacatcgcagctagggagaacaagcagggcggccggttgtaggagatggggagggactcgatcggcggccatggacgaggtggagtgcgcgtgggagctggaggctgagcgctggaagccgcggcgcaggaaaatct

SEQ ID NO: 68764 - DNA, 461 bp, Zea mays
  Clone ID: MRT4577_162707C.1
acactctcttttttaatatttaaccgacacgtggacgggggccaggagcaccccggcaaaccgggagccaatgcctgaaggacaccacccataccctgtggggggcgcgctagaagctgggaaccttccaggggctagctgcgaacggaaagaaatggactagccgcaaccatcgctgagaaaaaacaccccagaaataaaacgggaacgactaggcggccaaaaactatgcctaacctgcataaaaagcgccgcgcaaacacgctcctttccaacggtaaaaacatcgccccctggttgatttttaacataggcaaccaccagagaaaaggtgcaggagcattggaccccaggggggctttacttatcccatgggagactggacaaagacgaaccccctatccccctgccggctctaacagatccattaacgaaacaaccctgggtacccccaaaaggcg

SEQ ID NO: 68765 - DNA, 587 bp, Zea mays
  Clone ID: MRT4577_162708C.1
gcagcggaaataaattatttattacaaaatggttacaagttacaacatttacaagttatagcaagattacaatatatatcatcggagttggttacaaaagaaattgattcaaaaagattacaatttgaatgtataaaacatttataagttttaaaatacatgctagcttaagtgacaatcctcaataaagaagctaaagatgggatacacctatataagaaggccgagcccactggcacttagcagcatccacaacagaacaaaattataacctgaaaaacaacagggaataaaaccatgagtacgcaattactcagcaagacttacccgactaaagaaaagactctcaagggtatgctggtttattagaaatcaaggtaaagcttatcaaatttcaaagactcattttgcagaagagcttactagtagtggatccttatgccaaaattttacttcacaggttaagtacttttcctgaatctagatttgcctaatctagagcattcacttgtcctatactagctttattttagcagctttagtttcacttgttatctacgatgcagggcagtgatccagtcttcata

SEQ ID NO: 68766 - DNA, 1144 bp, Zea mays
  Clone ID: MRT4577_162709C.1
attgcaaaatgattacaagttacatcaagatttcattatacatcatcggagtgattacaaaagaaattgattcaaaaagattacaatttgaatgtataaagcatttataagttttaaaatacatgctagcttaagtgacaatcctcaataaagaagctaaagatgggatacacctatataagaaggtcgagcccaccggcacttagcagcatccacaacagaacaaaattataacctgagataacactaagttagtgttgttagatgacgaccacttggggagcatcttctatcctggtatttgaccagatcatccattttagcttcgtccatcagcatcattttgggatcaattccactcgtattccatagcacgtgatcaattaacgtaccacatcatgctccgactcgatttcagcaagaacgaagacgaccaccagttcgagcatatcatcgaacacctaaggagcgttgaacttaaccttcttctccacctaattctccaaggattttactccatatcgcacacatcaacacacataaaacctcacatcagcagggtattaataagaactagtaaaacaacagagggatttatagatcaccatgggagcagcagatgtggccggccaccagaaaccagagaggggcagcgtccgtaggaaagggatgttggcgtggggagggactggtgcttgccgcaggaatggaaaaatggcacagggccagggcgagcagaagagcagggggagctcgccaggaaccaagcagagaagatgatggagagagggacgctggcctgctgcaggaatgggagggctccgccgtccaaggaagaagctggagccaggacgagctcgactggggcgctcggcatggagtcaagggaagaagaccaggcgccatgggagggaaacccctgcacgcagatcagagaggaggggcaaggacgatcgtccagggcgagctccacatcgcagctagggagaacgagcagggcggccggttgtaggagatggggagggactcgatcggcggccatggacgaggtggagtgcgcgtgggagctggaggctgagcgctggaagccgcggcgcagtgaaaatatcagggagatgagcgccacggagaagataacgctgag

SEQ ID NO: 68767 - DNA, 612 bp, Zea mays
  Clone ID: MRT4577_16270C.1
tggggcattgtgccggcaccggcccggactggcccggaattcccaggcctaccgcttcagatgggcgtcagcgccatgctttcataggtttaggcttccgggaaagacctgaagcatatgacttccaagctgccctacatgatcatatgaagtatccttctgttcatcaaacatgttatgaatctcataatttgcaaaattacgtgtttttccgtgtgtgattcctcaatgactagttctatatgtggaattctatttgatatggccatttgctattgattttcgattagcaatggtggtagtacatagtagaatgtagattgttgtctgggacctttcaacatctgattatttgatcctctacccatgccagatcttagtttatttggcaagtgtgttttaacgtgagttctatgaaatatttctaagtttttcgataaggaatccaattcatttcctgcgatcatcatttttgtgattatccttccaatatcttctttacatgatgcactggttttcctctatgattggttttctcttacattagcaaagatatttaaacaagaagaaggcggctgaagagatgattcagcattatgagaagcaatcttc

SEQ ID NO: 68768 - DNA, 945 bp, Zea mays
  Clone ID: MRT4577_162710C.1
gcagcggaaataaattctttattacaaaatgattacaagttacaacatttacaagttataacaagattacaatatatatcatcggaggtgattacaaaagaaattgattcaaaaagattacaatttgaatgtataaaacatttataagttttaaaatacatgctagcttaagtgacaatcctcaatagggaagctaaagatgggatatacttatataagaaggccgagcccaccggcacttagcaccatccacaacagaacaaaattacaacctgaaaaacaacagggaataaaaccctgagtacgcaattactcagcaagacttacccgactaaagaaaagactctcaagggtatgctggctttaagggaatcaaggtaaagcttgtcaaatttcaaagactcgtttttgcagaaaagcttactagaagtgggtccttaagccaagttttatttcaaaagttagtttattacctgaatcttctagcctgaatctagcatttgcctaatctagatcattcacttgtcctacactaggttgcttttaaaatccaaattttgtttcgcttcttatctacgatgatggtcgaagattcagtcttcatatccgagaagttcggcgatccgaatcgattaatacccagctggggatctccaaccacacgacatatgcttgccttaactcttttgcacatgtctaccattcccatggatcctccaccacatgaacaggtccgcgccacccgagagcacaccaccccttttaggcggtcctttgccaggagggtacgtgcccctctcgccatctctccactcccaggtgcgcgattttcttttcatgtatggattagcagggttcaggcttacccatgacgaggtatgtggccagataaagggtcctagatcagcaggccaccaatcggtacgatccttaatcgacacagac

SEQ ID NO: 68769 - DNA, 115 bp, Zea mays
  Clone ID: MRT4577_162711C.1
ctcctactgaccgccagctactggcacaggccgagggggggcttataaaaacacaggcggcttgacaacaacccacggacaggactcacggcacaccagcacctcgcaggtccag

SEQ ID NO: 68770 - DNA, 2759 bp, Zea mays
  Clone ID: MRT4577_162712C.1
gcagcggaaataaattctttatttcaaaatgattacatgttacaatcagtttacattatacaattatcggagtgattacaaaagaaagtgattcaaaagaattataatttaaaatgtataaaatatttatagtttttaaaatacatgctagcttaagtgacaatcctcaataaagaagctaaagatgggatatacttatataagaaggccgagcccaccggcacttagcaccatccacaacagaacaaaatttcaacctgggataacactaagtcagtgttgttagatgatgtttgcttgacgagcatctcccattctggcacttgtttgattcacccattttagcttcgtccatcagcattatcttgagatcaatccaaactttgtcttccacatcacgtgatcaattaacgtacctaaatgacatgcataatgcatatgagtgagtaggagcatatataacacaagatagataagctatactaaggaggatacagacttaaagcaaaacatcacaactaattctacatcaaacatgacgttctagtcaatcggacctaaatcaatcatcaagtaacattagcaacatacaagtcctaatatatttagaatataacattgatgtaccgcaatacttaaaaacaattactatatgttgacatatcactacgtatcacaattacgtttgtctggcttaaccaaatctaacacaaacatcaaagaatattgaaccctacacaagctatgtattttccttaactagaacataggatcgagagtcaagtaacaattcaagctcacaattattgaacacatctaaaacttagtatggttaaaagtcactcatctagctttctcaaacattcctctagattaactatcaacgtatatcgactaaacaaaacatcaaaacatacttagaactaacggatatttcattaccaattaacatagggttcaatgaaattgcactcatcttaacttaaaggtctaaatggtcgctaactcaaatacactcaccaaagtatttacttccttcttaaaatgctaaagtctaaggcaagcattaagaaagaaaagaacaaacatatgcaactaccatacttcattgatcaagccaaggactaaccaaatctagttacctacacaagaaattccaagcaaatcattttaatgcttgctgattttggacagcaatacagcagtcagttgttttattcataactcacacgatattcatccaaaaatagtaaactaagactttttggaaagcttataaagtcctctaaaattttggtattatcatcacagtgagattcgacatatagaaatatcaaacagtactaaacgcaatttctgtccagatttggacagaatttgactactcacttcaaaaatccataaccggagtttcagaaatccaaatcaggtgatcctacactttttagaaagctaatagaattgtctacaatttatttgtaaacatctcagggtgattcaatgtgtatcgaagtcagttaatacaaataaacattgctgtccagatttggacagattcagacatcacatttcaaacagccataacctgacttctagatcaccaaaaagggtgatccaaaatttgttggaaagattaagcaaagtaatacaattctcctataattactaagaactgattctcagtttaacttgggcaaacaaggtcattttcgaaatctgtacagaatctggacagattctgaaactggacttggaaaaatcataactcctaaacttctagtcctatggtcatgaaattttagcacaagcaagataaaaaagttatctataacttttctatataacatttctacaaaaaacatagtttacatcattgaactagctgcataactaaaactggtcatgcagtcccaaacagcaagaattcaatttagctcctagttaacttctacaatcaccatgtgcttgatacttattaagacaaggtatgaaggttaccataaattaggagttcacacaagtaccagtaataactctccttggcaaaatgctaggaataataagcatattcttgacactactaatttaaccatgccgtactacttcatctcatacaagcacaaccatcacaagtaaattagagaaaggacatccttctctaagcatcgtcacacaatagcacttgaaacaacaaaaatttggagagcagcactgtaacattcctatacttcagataaaagaatcattgcaataattatctatccaatccaatcatcactaagcagcaagagaagtgacttagcttaacacatcacaatatgactcagtattcgccaacatagcaaagatctccggttcgggtatatcatcgaacaccaagcagccgtcatgtcggagcttgctcttcctcatatacacatacatacaaagcagccacaacagcaatattttaacaaggatctatttatactaagaattagtgaaacaacagagaggagatggggaatcaccgcttcaaccaaaaacaattagagcgaggttaagtgatgagactggagctcacaggaaacggtccaatgtgctggtgattagggcgctgctgcaggggagcatgggaggaggtgagggcgcagctggctgccatctatggagagatggagatgtcctatgcagctcagagcaggaaggaacgagcaccatgctgccagcaaggggataggggagggcagcgagcagaggggctgggagatgaaattcag

SEQ ID NO: 68771 - DNA, 367 bp, Zea mays
  Clone ID: MRT4577_162713C.1
gcagcggaaataaattctttattgcaaaatgattacatgttacaataagtttacattatacaattatcggagtgattacaaaagaaagtgattcaaaagaattaccatttaaaatggataaaaatatttataggttttaaaatacatgctagcttaagtgacaatcctcaataaagaagctaaagatggaatatacttatataagaaggccgagcccaccggcacttagcaccatccacaacagaacaaacttacaacctgggataaacactacgttagtgttgttaaatgatgaccacttggtgagcatctctcctcctggtatttgaccagatcatcaaatcttcatgttcaatcgtcagcctca

SEQ ID NO: 68772 - DNA, 2282 bp, Zea mays
  unsure (1)..(2282): unsure at all n locations
  Clone ID: MRT4577_162714C.1
aaaccagcgtgccttttcttcttccatacagcctagtgtgcgctctctctcgtgggcacgcttgggcgaccgtcgtcgccgccgccaccgtcgccgcctacgataggtggccaggtcttcttcgatctctccgccggagacgagcaccatcaggtttttgtggagtgactgttgctgagaagagaccaatgatgcaatctcgtgatgttgataaatatttgaacaaagctgacaacattaaccatgtgctcatgaactctggcgacatttctaaaattggtggtcactgcctgcatggtacacatggtttggggactcggctagattctgatgctcagagctcatcccctggagaaaatatgaacaacaaaatcagaaggcccatcgaaatatgtacctttgatgctcaaggtcggtgcaagaaaggaaagagttgcatctctcttcatgaaagggagggatttggttctgcaaagactggtctgctcgcaccagctggttctggaaatcatagaggttctgaaggaggttctcaagtacaacatatatctgacttgaaagtgcatcagttcaaggattcagagggtttgtcaaaagatgaaatgtgtcggaatcttatttatgcatttggcaaagataatcagatgtcggtacatcttgctggtaaacacagctctcccattcctggggtttcacaaaggatgcccgccagcattggtcattcattggctcagaatccattagttcatgagaagaacaacanacgtttcatgggacaccatattgatgtggctgctgaaaactatttggatgctggaggtacctatccaagattagatggaggtatttttcagtttgacatagacaaggaaagcagtgttagtgattcccatgtctcaagaacttacctttcagattatccatataaatcatttggcttgtctatttcatctgatcctctccagctcagtgagaagctgtcagcatatggtggagtgacaaatactattcctaacatacatcagaaagaacatcactcatgccatgcttcatacagctcacatagcttaacaggatccagaaatccttgctttgctacctctgaacatactttcggtagcccatctcttctagcaacttctcatctgggaatacagtcccatcatctgttcacatctgatattgagaaggctgatctccatagatgccttgatgttggaaagggctatggtacttctagttctggacccgcatattctgctagcggtaaacctgaaccttctatgacgccagttgggccccactctccaattaagaatgaggtctgggaaacatcagtgccttttgtaccttcttttagttttcctgatagcacaacagcttcagaaagtcaatatgatccatttgttgactatgttgaacctcctaaagttgggaatacaaataatctcaagccctccactatatcctgcaacattacaagtcagcatacagatcagtacgcagttactgataaatccttgaattgcaatgacaaattgaccaggaatataactgccaaaggatcaaatgaacctgcttactttattgctcctgatagaggatgcagctctagcctggatgatactatcaaggtgaaagcttgtgacagaaaaaaggatgcagttgattacaatgagaaaacaagggatttccgttttcatttggcagaacatataaaggagttggtcaaaccaatatggaaaaaaggtaatctgagtaaagatgctcatcaaactggttagttgagaaaatctgtcgagaaggttgtggactccattgagccaaatcaagtaccaactactgaagagttgattacgaagtacatagccacatgtggaccaaagatagaaaaacttgtgaaggcatatgttgataggcacagtacatgtcatccaaccatcaaatacagcagctctgagatgggagcttgagcttaatggtgatgacagcttgaaccttctgtcctaccaatctggttaaccttcatttgtaggcccaacaagttaatattgttcatacaaacatgtatgtccatgacttcttgaggcaagtagtcagcgaagttccagatattggtgcatctgatgttattgctgatgataagcttggcaaaggacgtatatctatcctgtagttgataaggttcttacatgtcaaaataatcttctacgaagtgttaataaatgctgaattgtcatcaagaaagctggagatggaagcgaggaggaattaaagaggac

SEQ ID NO: 68773 - DNA, 852 bp, Zea mays
  Clone ID: MRT4577_162715C.1
ggaaagaaacaactttaagtttttataagtagggtaagcctcattagttccctttataaaacaggtggaagggaagataatcaaattacagggaatggtaatgcatcaattgtttattcacacaactcctatcacctaatgcagcatttaagtgataaaagttttttaaaaaaaaaaaagggggcaaatgcactgggcttgcctggaataatcactacgttaggggtggtaaaagacgaccacttggggagcatctttcctcctggtacttgatcagatcgtcaaatcttcaggttcaatcgtcaccatcaccttgagattaatccaacttttgccctccacataacgtgattaattaacgtaccacatcatgctccgactcgatttcagcaagaacgaagacggccaccagttcgagtatatcatcgaacacctaaggagcgttgaacttaaccttcttctccacctatttctccaagaattttactcatgggagcagcagaggtggctgggcgagctaggttgggcgaccatgggacttgtgcttggggaaggagatggaagaggggctatccatggcaacaagagagggggctggcgtccataccatgggcagcagggagggcgctggacagagggcaggggcgagctacagggaggagcgtcgagctgcagcagggaggggcggccatggcaggaaggggagggcgccatgggagagatgtcgagagagcagggatgaccagcgaggctccgtaggatcggcgcctagggaggaggcgacgtgaagaagctgacttcctatgcgcaggggatgagggagagatcacaggtgaagaaactcccggccgg

SEQ ID NO: 68774 - DNA, 276 bp, Zea mays
  Clone ID: MRT4577_162716C.1
gggaggatgggccaaaaagggacatagacttagaaatttagagaaaaccggcggattgtcttaggcttgtcacattcgaatttggcaacatacaatgagagccagggacccccccccctatttagactcatcaagtcttcggactctgcattggggctcggccttgcccaccacccaaaaacctcttcagttggccttgacggccccccaagtagcttaaatggatgaccccccagcaaaaaaaaaaaaaaagtggattcaccccttcaacccgtt

SEQ ID NO: 68775 - DNA, 268 bp, Zea mays
  Clone ID: MRT4577_162717C.1
aaaaaagattgtacaatcaggatctttcaaacgcgagggttcagattccgtagatgttggatcatcaaaacaaaagcaaacatttcatttgtctcgagatgaaaaaccaggagtactgaagccaataaaggaacagaatttaacagaaagaagggcttcttttagtttgaaaaaaccaaacattccttcatctccaaggtctgacagctggaatgagtcaggggaaaggaaaaatgatcagcatatttccaagtctggaaccaacata

SEQ ID NO: 68776 - DNA, 790 bp, Zea mays
  Clone ID: MRT4577_162718C.1
gaaataaattctttattacaaaatgattacaagttacatcaggattttattatacatcatcggagtgattacaaaagaaaatgattcagaaagattacaatttgaatgtataaaacatttataagttttaaaatatatgctagcttaagtgacaatcctcaataaagaagttaaagatgggatatacttatataagaaggccgagcccaccggcacttagcagcatccacaacagaacaaaattataacctgaaaaacaacagggaataaaaccctgagtacgcaattactcagcaagacttacccgactaaagaaaagactctcaagggtatgctggtttattaggaatcaaggtaaagcttatcaaatttcaaagactcattttgcagaaaagcttactagtagtggatccttatgccaagcttttacttcaccagttaagtacttttcctgaatctagattttcctaatctagagcattcacttgtcctacactagcttcattttagcagctttagtttcacttgttatctacgatgcagggcagtgatccagtcttcatatccgagaagtaacgggatctgaatcgattaatactcagctgaggatctccacccacatgccatatgtagcacttaacctttgcatatgtcaactcacccacgggtttctcaagaccagaccgggtccccgccaactaagagctcagtaccccaccatccagcctcttgtcaggtggatacatgatactctcgccatctctccactcccattgcgagccggcctttt

SEQ ID NO: 68777 - DNA, 207 bp, Zea mays
  Clone ID: MRT4577_162719C.1
tttctctccgccggtggctgctgctgcgatggctgcgtatggctctcgcagctctggtgatatggttagactgctgcctgtagctgtgtacttggtgtactgtcttcccgcgtatgtggatttggcgaaaacctccgcatgaacaccttccactacacaccctccaaagactccttcttaaaacagactggggactttgactacata

SEQ ID NO: 68778 - DNA, 396 bp, Zea mays
  Clone ID: MRT4577_16271C.1
ggaaaccggaagcaaacgaaaaaaaaaaagaaaccagaagacaggggcaaaaaaacaaaaaaagccacgcctttcccccggggggggggaagccccaacaaaaccgacgcctaaaatagaccaccaaaaaagggggagaggccccttacccccccgcccggaaaccaaaaagcacgccccgatctacccaaccccgaccggccggggcccgcccgccaaccctgccaacctagaggaaagccaaccagacccccacctatagctatatataggagccgggtgaaatagaggaacaagcgcaaacccgggcaaaacccggaccagacgaaaatttcgcaaagccagccaggcccaaggagagagggaaacaacttaaatcccgtggggcccaccgac

SEQ ID NO: 68779 - DNA, 1412 bp, Zea mays
  Clone ID: MRT4577_162720C.1
gcagcggaaataaattctttattgcaaaatgattacatgttacaataagtttacattatacaattatcggagtgattacaaaagaaagtgattcaaaagaattacaatttaaaatgtataaaatatttataggttttaaaatacatgctagcttaagtgacaatcctcaataaagaagttaaagatgggatacacctatataagaaggccgagcccaccggcacttagcagcatccacaacagaacaaaattataacctgggataacactaagtcagtgttgttagatgacgtccgcttggggagcatctctcatcctggtacttgatcatattatcagattatccaagctttaggttctttcaccagcatcaccttgagagaaatctggttcttgtcctccgcatcacgtgatcgattaacacacccaaaattaaattcagctcggagactataagcaccacgtcgagctacaatttagcccatacgtcgagtacctaatgaacgacacctcgagacttcgctttcattcaaccaaacttccagggatttctctcctcacaagcacaccatacatacacatgattagcatctaataaatcggcgtcgaatacatgtaccggagagaaataaacacaaggaaaacaatgggtcctcaccgggattcgacaaggtcacaactggggctgcacaaatcgaggtggagcttgttgctgtatttcatcgagcatgccaagggcactacatagaggtcattccatatccgctgctgctgctgcgattgtacgaaaccctacgagagacgcagccatggggaggagtagatgcttgggttttccatggaaaacaagaggagaaggggcgccatggcttcttgctgcaggaaagaaaatcgtcatccatggaagaagaggtcggcggccatggctgatgaaggccctgcgcggctggcagcattgggaactcgcgagcaaccattagggagcagctcgacgagcaggagaggacagcgccggcatggagaggaagatgaagggaggcgtcgtgctcatcaacaggaagggaaagaacagggcggccggcgttggggttgtgcgtccatgggaggagttggggtcggccatgggagatggtggtcggcactagcgtgttgcaggagagggttcgcgcagggagggatccaggaggagctgccatggggaggggagcagatggcgacgagctgcaggtggaggagcacagggggcgccggtgagggaagctcccaggagcggctgtagagggagaagagatgaagacgacgcgtgtactggtgatacagccacgatggcttctagaaaatttccatgcgcggtggagtggattgggtcgaccagtgctgctgcaaggaattgctcacgtgagggagacacc

SEQ ID NO: 68780 - DNA, 956 bp, Zea mays
  Clone ID: MRT4577_162721C.1
ggggctcacggggaagggggaagtagatggaagcaggcggcggccacggccacgaccggcagcttgtcaccgtaacagcagcggagggcgaggagccgccgatctgacctgttcctacttctacttcctagttgcgcgcgtgtcccgtgaggcgggagctctggaggccatggagagggagccggcggtcgaggaggaggacgacgaggaggaggaggtggcgtgcgagtgctgcggcttcacggaggagtgcacggcgccgtacatcgcgggcgtgcgcgcgcggttcggcgggcggtggatctgcgggctgtgcggggacgcggtgggcgaggagctggggcgcgcggggaccccgcccatctcccccgccgaggcgctggaccgccacgcccgcgcctgccgcggggcgtccgcgccgccgtcgcccgcgggcagccccgacgggctcatcgctgcgctgcgcctgctgctgcgccgcaggctcgggtccccgccggcgtcgaggaaggcgcggtccacgccgagcagcccgacgcgcgacgccgccgaccccggcgtctccgccctcgccgcgggggcgtcccggagctcgctggcgcgcacggggagctgcttcgccgcgctcgtcgaatgagaaggggaaacgaggacggactgacggaaggggaaaagatcagggtagtctctctctctctttttgccttcaatgtgtaatgtatttctgctcgtttctatctatggaggagtgcgtaggtagtagtactagaggtgccaataaacatccgtgtatatatatatatatgatggggaggaagatcgacgacgatctgtgttatttataatatagtatatatacttgtatgagaaaaaggaagtaattccatgtttttctcaggcacggatcaaaaaaaaaaaaaaaaaagtgggcagagtctacactccgcttccgtgca

SEQ ID NO: 68781 - DNA, 324 bp, Zea mays
  Clone ID: MRT4577_162722C.1
cactctatactcaaaccaaatttccattttaaaacataacaacctttaagaccgctaccgtgtgcccattacatctttgacaaccactccccatcctaatttaaaaaattcactatataactcccacatcaaaaataattttgatatcccctccacaaaagacaacccatacttctctactcacctctctgcacataacgcccaaaaggagacacataacactcactacttgcagttttagcacacactaaaagccccactaattgacaagtttctgaccattctttgctggaactcttttaacagataaatcaccctctatca

SEQ ID NO: 68782 - DNA, 1389 bp, Zea mays
  Clone ID: MRT4577_162723C.1
agcggctttttttttttttttttttttagcggaaataaattttttattgcaaaatgattacatgttacaataagtttacattatacaattatcggagtgattacaaaagaaagtgattcgaaagaattacaatttaaaatctataaaatacttatagggtttaaaatacatgctagcttaagtgacaatcctcaataaagaagccaaagatgggatatacttatataagaaggccgagcccaccggcacttagcaccatccacaacagaacaaaattataacctgggataacactatgttagtgttgttagatgatggccacttgacgatcaacttttattctgacacccgcttagttcatctagcttcaggatcatcggccgacatcgtcttgtgagttgttttgatccacacccttcgcttcgcacgattttcaactagcgtaccacatcatgctccgactcgatttcagcaagaacgaagacggccaccagttcgagcataccatcgaacacctaaggagcgttgaacttaaccttcttctccacctaattctccaaggattttactccatatcgcacacatcaacacacataaaacctcacatcagcagggtattaataagaactagtaaaacaacaaagggatttagaaatcaccatgggagcagcagaggtggtcggccatgggaacaagggaggggctgggggcatccacttgctgcagaaaaggggagggcactgcttgctgcgatattctgtcgaacacgtcgagggcgcgacacgatggggtttcatggctgtcgctgttgtaccgcggccgggcatgaggataatctagggcaggagcaaccggccatccaacgcagggggcagaggtgagcaccagggagggcagcacagccagcatccatggaagaagactcagccaccaggaataggaaggggcagcagccagaggatgagggcgaggggagataggagacgggtggcccgacggcgtccatggctggggcagggcgagctcagcgacggcgccctggcaagaggagattggggagctcctgcgccatgggagatggtggtcggcactggcgttcaggagcagtagcggctggtggagcagcagcggcatttccggcgttggggacgagggcgccaggggagggagcacgacgtgctgcaggaaggggcggcaccatccacgggagaggggccgcgcagggagggatccagggggagccgccatgggaggggcagggagaggagcgcccaagtggtggttgccgcagggatgaacaccaggaaagaggatggcgtgagggagttcggctagagcttgaggaagagatggggaagaaggacccggccggcctcgagggtcccaatg

SEQ ID NO: 68783 - DNA, 409 bp, Zea mays
  Clone ID: MRT4577_162724C.1
caagaacccagccccttgtctcgtcccttcctttcttgccgctcccgcccgctgctcttggattctttaattgcgtgctgttgctgttgctgccgccgccgccgccgccgctgtgatctctctctctctttcccgtcctccaaagctttttggttgccatcaactttgcttttgctctctgggcgagcagtacacagctgttgttccgtctccaacggcctgcgcacgcagcagcagccagcagagcagaaaggcctcccaaaatccaccattttggagccggccgccaccagcgtacgaagtcgccggcctgcttgggttgagtcccgaggagagagctgctactccctgtgcaaggatcccgacaacaggcaggcacgtacacgcgcgtcggcctggggacgggctg

SEQ ID NO: 68784 - DNA, 237 bp, Zea mays
  Clone ID: MRT4577_162725C.1
ccgccctccctttttttttttttttttttttttttttttttttttaaacacttgcggacagaattaatataaatagttgccttgatcaacaaacaccaaaacacttgcaatgtcgctgcacttcttaaccgtagaacaatccacaaaacaccaaaacatgctcccaaatcatcctgctacaaaacttggtccagcaaggtaacaaacaaacttttcacaattagatgattttcacaa

SEQ ID NO: 68785 - DNA, 390 bp, Zea mays
  Clone ID: MRT4577_162726C.1
ggggggggggggttttttttttttttttttttttttttttttttttttttttttttttttttttttttttttttttttttttttttttttttttttaaaggggcagggggtttttaatacaacctaaaattttgccttgggatcagggggggtggcggatttaaaagcaaggaatgggcccaacccccaaaacgaaagaaaaaaaaggggggggtaaacgcccccaaacacacccaacatttttaaagaaaaacattatcccccaatcttaaaagggagaatacagacgtaaaagaagagcccctccaaaaaatggggcccttggaaaagaaacgggggtttactttaaaatccaaggccgggggaaccaaaaggggccccatttttgcc

SEQ ID NO: 68786 - DNA, 410 bp, Zea mays
  Clone ID: MRT4577_162727C.1
aatcccctctgaagagaatactgcggtacgaagagtggaagaacgccacatatgaatgttcaacatggctccgttgctgactgggggctgtttgccttcactcgggcgcggatcatcagcgtccatgagaagaggaggctaagcgaacataacaacaactgttctcccaagaaaacagacgaagctgcacctgcatgagtttctcgcaggcgtaggaaaaggaagagaatacaatacactggagatgaaacatagagaactttgatcaggaaagactatagattaggggaagaagatgagaagagcactagctttgggataacattaggaggcaggcactgcaactaaaaaacaaagcaaggacctgaagcaccactgaaccatcggtgtccgaaactcagatgcccggt

SEQ ID NO: 68787 - DNA, 188 bp, Zea mays
  Clone ID: MRT4577_162728C.1
cccacgcgtccgcggacgcgtgggcgtacgcttaacttgccctgtgacccatgctatatctgctgtgggatttagtctagcaatgcactttgtgctcgagcgaatacttataaattatcaatgatgaaaaccaggctgtcgctttataggatccagcattactatacgccatgattcgccgggcatgc

SEQ ID NO: 68788 - DNA, 300 bp, Zea mays
  Clone ID: MRT4577_162729C.1
gcgtccgaagaaacaaacggcgacagcaaacacatataagaagaggaggaagaaagaagacgagcaggctgacaactaagcagatcggggcgccaactaaaaaggggaccgccgatcggagagaacacgtcgacggacgccggcaggcacgacagagaggaggaagacgagagcaagctcaaagaggacgatccgctcggctacaaggacgcgcccgaggacaccttgccgatcaagaacggactctcgagctactacacccgcaagtctaaggcgggcaccagcctcaacgaggccaca

SEQ ID NO: 68789 - DNA, 154 bp, Zea mays
  Clone ID: MRT4577_16272C.1
gaacacagcatatccggcttgcagtttcacgggatactgggggaaccagttcattgtccattcagtcattgcaaattggtccactgatcatggcccaccagatttccaggaacccctttcaagggaaccttgtttccccacaaaaaacacgttt

SEQ ID NO: 68790 - DNA, 357 bp, Zea mays
  Clone ID: MRT4577_162730C.1
aaggggcaaaaccccggggcaaaaatttaatttaaggcaatgttccgaataactcagtttacttggggggggggggtgtttaacaaggcagaagaacaaatgccggaagatcccccttctgggggggctttttttctggtcacccggggtagttttggtgtttttagaatcccccgggtcaattatggtgggggagcagaccccaaagtttttaccccagggggttccaagggcgacattttttccatgggagggggggacagggaccttggcccgcatagcatagtcctcaatttcagacttaccaaggggcgggcaggtgttagcgataatcactagctttaacttaaagttcct

SEQ ID NO: 68791 - DNA, 405 bp, Zea mays
  Clone ID: MRT4577_162731C.1
aaacgcaaaaaaacccaaatccctgcctttaaattttaattccggcacgaaacggacatgaccgggagccctttacacagatgaacatgaaccccaggagcgaccttggatcgataatggggggtgcagttgacaggattttttttaaaccctgtttttttttttatacccctcggggggggggtccttttaacttttgggccccatccccgggccgggggggccggtttaattgcagttgcaaaaggaacacccccagttggggccccatttgcaggggttgcaatcccaccccccccccttgggggcccccttaaaacccccggcgctggccttgggggtcggcccaaggaggaccatggtttttattctgttggcggggggggtctccacgtcaggggacat

SEQ ID NO: 68792 - DNA, 1824 bp, Zea mays
  Clone ID: MRT4577_162732C.1
ctcgagggctcggccgggaaaaaaaaaaaaaaaaaaaaaaaaaaaaatcaaaaaaatttaaaaaaaaaaaaaaaaaaaaaaaaaaacccggccggggttggatcccacgcggcgcccatgccagcgacacctgttcgaccacctgacccgcgcgcgccctgatggctcccgcgctcacctccaacccgccctccttccgtcccctaacgtccccactccgccgtcgtgccgccaccgtcccatgccgcgtcggtaagcccggcaaggactcctccgctgcggatgacgctaccggccccaacaagaggcccaacctcttcgcggacttcgggaatgccaagtcgctcatacaggcgttcccgtcgcagtcgctgttcgcgggcggtggcaggggcaggaaggacccgcagacggtgttcgtcgcaggcgccacagggcaggccggggtccgcatcgcgcagaccctgctgcggcaggggtttgccgtgcgcgctggcgtcccggacctagcgtcggcgcaggagctagcgcggctggcggcggcataccggctcatctcccccgcggaagcgcggcggctaaacgcggtagaggcgggcttcggtgaccccgacgcgatagccaagtccatcggccccgccgcgaaggtggtggtcaccgtcggctcggccgagaaagggccagaaggcggaggcgtcaccaccgacgacgcgctccgagtggtgcgggccgcagatctcgccagcgtggcgcacgtcgttgtcgtgtatgacgagggggcggccagcggcggccttggcggcgggggctccacttacaatgtgctcgacggcttcacgtccttcttctccaacctcttctcgcgagagcaggcgctgacgctgagccagttcttggccaaggtggcggagaccgatgtcaggtatacactggtgaaggcttcactcaccgacgactatacccctgagagctactacgcccagctggtactcacgaaggagggagtatcgcctagcgacacaggcaaagtgtcaaggtcacagattgcagcccttgtagctgatgtcttctccaatgtggcagtcgctgagaacaaagtcgtcgaagtttcaacttcctcgtcagcaacagcaaagaacatagcggaggctttcacagctatccctgaagacagaagaagaacagagtacctagaagctgctgcgaaagcacaagccgaagaggaaacgttggcctcagaacgagctaataaaaaagccgaagcggctgccagtaaatctgaagccgacacgaagacgacaccttcagaggaggcagctgctactcctagcgcggtgaacggggctcaggcctctctagagaacctcttgagtagagccaaagtgatcagtgcggatttctcgtgggagaagttcagcacacagtttgccgacgtgacgacccctctaacctcatcactagagaaggaacccaacaaggcacagatagccactgtgcgaggccaggaaaaagcgaagaagctggcaccgcggattgctgttgtgaagccagcagcgcagaaggcgaagcagccggatcccaaaccagaagtgagagcactgtttggtggcctcttcaaacaagaaacggtgtatgtggatgatgactaaaacgaggagcgccaatttatcctctacgtgattttctttcttttgtttttttttgtttgtccagtgccttggtgtactcttgaaataggaacgcttaaagttgtacaaaaattggctatatataagaaccaatgatcatgtgttgatcatgtgttacaaaaaaaaaaaaaaaaaa

SEQ ID NO: 68793 - DNA, 322 bp, Zea mays
  Clone ID: MRT4577_162733C.1
gcgctcgccttggagcacacgccgtcgctagcgcctgcggcctgcctcgcttaacctgttgcggtaacgtccgcccggcttgggtcttcatcaatcaccaagatatctggcatctacctggcactgcatctgatcaggccttttctggctttcttgccagaggtgcccagctctgatcttaagatacccttcagagaaaaaacattatccactgttatttgcttcttaattctcgtggtctgcaatcctctactactctataatatatattcatcaactgaatctgatcctatctacactatgccacttatcctcatattaa

SEQ ID NO: 68794 - DNA, 306 bp, Zea mays
  Clone ID: MRT4577_162734C.1
ggatgctggtgtgtgtgggcgggagcagagcaccggaagagagagcgggtgccgtctgccgtgcgtgcttggagatgataactgtcccagacgatatcgtctgtacggaacgggcggttgtaaatttacctgatattaataattaatctatttatcggcgagtgacgactaataataaaaaaaataaaaaaaaataattaaaaattaaataatataataatattaaatataaataaatacaaaataataaaaatattaaaatgtttaattttataaaataaaaataataatgggggggccgtttta

SEQ ID NO: 68795 - DNA, 575 bp, Zea mays
  Clone ID: MRT4577_162735C.1
ccttgccgctgcgcgtcacctacgggcggcaacggcaacccaggccgccggcgacccattcaccgctaggcgaccgcgcggcatggtggcgctgtcacactacctatgctagactgccggatgctacatttccacgagggttaagctgactacgatagcgcgtgtcactgatgggcttccattgtacgagggattagatgatagccgggatctcaaagacgatgacttatacaagcagcaagcaaaactgtagaacaagaacttgaacagagggcagcatgagccatcaaggatgccaattgagacaggaccataccgtttccactgatgcatatcatatgatctatcgcctgtctacatggatgtggggattacaccaatacctagaagatctcaaaaatgaatctgagaaaggcaatggcagacaaagagaaactgctgcaaggccatatgcatttattaaagttgatgcattcatacaaaagaccaagaaactgtatttggataccagaacacagaggaaccttgctaagctgaacgatgagctctatgaggcgcaccagatcatgactcgc

SEQ ID NO: 68796 - DNA, 288 bp, Zea mays
  Clone ID: MRT4577_162736C.1
cagccttccgttgccttgccaagttcccaacccttcacccgaatattacccttggttgggaaaacctgattagggtgcttggaatggagaacaggaatttcaccatctggcaacctgattttttaagccacaattccacttggtccagggttagaccaccggttcagaatccttccacttttgcttccaatgtaagccatattggttaatggaagtggatggtaaacctttggttttctaccttggccccaacccttgttaccaataccaccccgttattaaaaaaca

SEQ ID NO: 68797 - DNA, 535 bp, Zea mays
  Clone ID: MRT4577_162737C.1
attgccaaaggtttcatgctgctgcaatttgcagacagaagaacttacattttggcacaccgatacagaactacacctaccacacgaacgcaatcaatgacctggcacggcacccctgccaacgaccactcccaaacggaaaggaatgttcagactacaaagggcgttcacacctgtgacacaccagacacaagttactccctaacgatcccatacaacccccatacctggggacacgtaggtgccttaacatatatcatttcatctcactgtgcacacccaggatacctgctggagctcccaatgaatgctggcgctgcaaattcgttcatggctcctcctactgagttctgcccatagtgttttccgaacaaataacccatgctctaagacactcctcattcttgccttgtattaaatcggatgcctcttcatgtcgtatcataccttcaaaagacgactcccttactaaacccgctgacactatcagtcacaactcgagcgtgcataatttggccaaactcccacgggcata

SEQ ID NO: 68798 - DNA, 483 bp, Zea mays
  Clone ID: MRT4577_162738C.1
ggctctccagatggcccaagtactgcccccctgttcgggctgaaagctgatggttcttgggtcccttccttcaggcttggggctgccagaacggggagatacttcacagggcttgctacctcagcagacgcacccaagaaattggctatggcagaaggccttgccgataccggggaataaaacaagaaggatgtgtttactgccaattctgccttggatgagtccctacatgggggctcgaaagaaggaggaaaaggcgaactgactctgaacgtgactgtatcctactccggcggtgagagagcccggctcgtcatgcgggctaagggcaactaccgtatggaactgaacgcgagcctctacgacgacatgtccgtcaatgacatggccaataagggcgtgacgtttgcctagttgaacagaattggagagtcgacgagcactctggacacgtttggtctcatgttcaaggacacagccacc

SEQ ID NO: 68799 - DNA, 145 bp, Zea mays
  Clone ID: MRT4577_16273C.1
ccggccgggacacctttcttccgttcagtctgcttcgccactctctacccagaaggaaagaccggatcactcttcgcctctcgattcctaggtcttactacatctcgcgctcccgctcgcagcatttctacccaacaatctgtac

SEQ ID NO: 68800 - DNA, 1362 bp, Zea mays
  Clone ID: MRT4577_162740C.1
gggaccctcgaggccggccgggccgggatacgttgcctcctcccttgctgtgacgcacggctcctggaagcctctctccccaccgcatcttctatcttcggctccttgctctgcaccgcctcctgctcatccatatcccatggtgcccagccgagcagcccatggaggcttccaccccacgcccagccctctctactgatggccgccatccctgctccatcctatggcgcctgccctcagtccagctcgccagcagctctctgccctcctccctcaagccctagccgagtttttccatggtgccctggatgccagcccctttactcgatgcccctgctaggttccatggccgtcgctgcccccagccatctccttggtggccgacctcgcccctgccccagccacagcttccccttcggccctgctgctgcaagcactcagcctctcctatggcacacggtgctcgtccagcccctttctactggtgtttgcgccatctctctggtgctcgacgaaatgaccatgaggagttttgtgttgtgtgcagccccacctacgacaccttcgacccccggtgaggttttgttctcgccctgtcgttttagcgctcgacgtcgattactattgtgtgtgttgatgagggagttaaccggtaaagaagtgaggtccgtgcgacgtttgccaagtgttcgatggaaggtccgaaccgggaacctcgcctttctcgcggatcttcgggtcggtttgtgaattggtacgctagatgattatgcgagctgaaggacatggatcagagcgaaccataagatggtattggtggattaatcttgtggatgcatcaagccaacaccagaatggaagatgctcaccaagtggtcgtcaattaacaacactaacgtagtgtttatcccaggattataagtttgttctgttgtggatggtgctaagtgccggtgggctcggccttcttatataagtatatcacatctttagcttctttattgaggactgtcacttaagctagcatgtattttaaaacttataaatgttttatacattcaaattgtaattctttttaatcattttcttttgtaatcactccgataattgtataatgtaaacttattgtaacatgtaatcattttgtaataaagaatttatttccgctgcaaaaaaaaaaaaaaaaaaaaaaattaataaaaaaaaaataaaaataaaaatcagactaataaggctctaacataaaaaaaggccaatacacgcaaaaatatatctactatagcccctgtttacctggcggtcgttctggagtacctacccctttatgtcctggaactcgccggcaactctttctatgacaac

SEQ ID NO: 68801 - DNA, 319 bp, Zea mays
  Clone ID: MRT4577_162741C.1
ccggtccgattttattcccgtttcgacaagctcatttttttcggccgcccttactttattttttggctgggtttttaccaaaacgaaaaagaactacaaactgattaaaagggtaaacataacaaatataccagactaatatccttgtccagcatgacaaccgataacttgccaaaaacctcaaacaatagtgaaaattaagccttcacaggtagcttagatagggataagattaacagtaagcatgcaatgcaacacattaatatactttcatacatcttgcttacaaccagcttacttcctcaatcatgggcatctt

SEQ ID NO: 68802 - DNA, 979 bp, Zea mays
  Clone ID: MRT4577_162742C.1
ggccgggtcggggtcccagaacgcgccccagcctcccacctagaactccgcgcccagcgctttccgtaaccaccaccaccacagcgggcacagtgacaggttgaggagacggccgccatgggagaggagaagaagacgggcaagggcggcggcggcggcggcggcgacaagaagaaggacgccggcgctggggccgcgccgcagcccatcgtgctgaaggtcgacttgcactgcgccggctgcgccaacaaggtccgcaaggccatcaagcacgccccaggcgtggagtcggtgacgccggacatggcggcgggcaaggtggtcgtgaccggtccggcggacgcggtgcagctcaaggagcgcatcgaggctagggccaagaagcccgtgcagatcgtctccgccggcgccggttcgcccaagaaggacaaggagaagaaagctgacggcggcgagaaaaatgcggccaaagagaagggcggcggcgatgcagagaagaagaaggccgacaagaagaagggaggcggtgatggaggagagaaaaatgccgacaagaagaagggcggcggcggcggcgataagaaggccgacaaggagaagggcactggcaaacccaaggaggaagaggaggaggaggagaagcccaaggaaccccaaggaggagacggttacgctcaagatccaactgcactgcgacggctgcatggaccgcatcaagcgccgcatctgcaagatcaaaggtgtgaaggatgtggcgttcgacgccgccaaggacctggtgaaggtgacgggcaccatggacgccgccgttctgccggcgtacctcagggagaagctcagccgggacgtcgaagtcgtcgcgcccggcaagaaggacggcggcggcggcggcgacaagaagggcaagggcgcaggagacggggcagagaagaagaacaagaagaaggacggtggggccgaggggaagaacgatagagcc

SEQ ID NO: 68803 - DNA, 1198 bp, Zea mays
  Clone ID: MRT4577_162743C.1
aaaatgtataaaatattaataggttttcaaatacacgctagcttaagtgacaatcctcaatagagaaactaaagatgggatatacttatagaagaaggccgagcccaccggcacttagcaccatccacaacagaacaaaattacaacctgggataaacactacgttagtgttgttaacttaattgacgaccacttggtgagcatcttccattctgttgctggcttgatgcatccacaagattaatccaccaataccatcttatggttcgctctgatccatgtccttcagctcgcataatcatctagcgtacctgggataaacactacgttagtgttgttaacttaattgacgaccacttggtgagcatcttccattctgttgttggcttgatgcatccacaagattaatccaccaataccatcttatggttcgctctgatccatgtccttcagctcgcataatcatctagcgtaccatagtcaatccccactagacaccatgagattgacgatgatttttgattcgggcctccaatcggatgcctagcaagcgtcacccggacctcgcttggctttcacccaacatccgggattctctcccctccaccacaaatacataaagacacttaattaaacatccaggtatatgcaccaacggaaacgaacagagcataatcaacaagtctcaccgcggtgaacataacgacaacgaacttcagttcaagcatttcatagaacacctaaggagcaccgcgctggtttgccttcttcactaatgtgctgcagccgtatccgtgagctcccgggagggaggggactggcgtccagcataggaagcaggggagggtggctggacatagggcagggatgagctacagcagggaatgagggagggggcgagctcaccaggaaaggggcggccatgggcgagctccaaacaggggcagcactagggttgtgcacggccatggggatggcgccggcttaagggaaaccatggcgtgctggctgcagggagatgggcaagggatggcgtcgaccttgctgcaggaaagggcgtcatggcagggaacagctggaggccgaccatggaaccagggcagggagcgacaaggtgaaagagatggggggggcgaccaccagggcacattcggccaccagggggaggcggctggtgcccatggcgccatgggaagag

SEQ ID NO: 68804 - DNA, 1267 bp, Zea mays
  Clone ID: MRT4577_162744C.1
cgcgtgtgcccggagccaagtcgcgggagggaaagcggcgcgcgtcatccgttaccagtggccagtgggggcaacgtcaccacagcggccaactcgaacgaatacgcatccatcccatcccaagccagcaccagcagttcctccaccaccagcccagccctcgccccgtccgttcgtccgcccgcgcccgctgctgcttgcctgcttcccacgcacgcgagctctgttccgtgctgcagcaaccgcaaccgcatccgcatccgaatccgcacacgatccccgcgccacttgccccgtcaccccccacgcggcccgcgcctccgcccgctcgtcggccaatgcccggcgcaggccagctcggcgagatgagatgacgccgccgcgcggcggtgcccggcctcccgtcgctcacgcgcgccagcaccagcaccacccggccccatcgggattcttcatcccgtcctccacctagcgcggtagcgccgcatttattccctccccagcacaacggtcacgtttccatcgccccgtcttctctccctcgtcgcatccggcgctcctcctcgtctcctatttaaagcgcgccgggctgggagccagcgatcatgctattctctaggaggcggcgagaagaaggccgacaaggagaagggtgccgacaagcccaaggaggagaagaagaagcccaaggaggtcatttactagccgattattcaagtccggcgaccctcgtctcgtcaccgtctgcctccttgctctgcaactgaacgacggtcttttttttcttttctttcaggagactgtgacgctgaagatccggctgcactgtgacggctgcatcgagcgcatcaagcgccgcatctccaagatcaaaggtgaggttttccttggcatccgtcgcagttttattcgcatcccacgagaatcgtcaaaaggctttgagagccttttccgtggagatctaaaaattggacctgacaattttgtgcgtccattccattccattccaggcgtgaaggacgtggcgttcgacgccgccaaggacctggtgaaggtgaccggcaccatggacggcgccgctctgccggcgtacctcagggagaagctcagccgggacgtggaagtggtggcgcccggcaagaaggacggcagcggcggcggcggtgacaagaaggacaagggcgcaggagacgggggagagaagaagaaggacggtggcggcggcggcggcggcggggccgaggagaagaaggacaaggccggggcc

SEQ ID NO: 68805 - DNA, 565 bp, Zea mays
  unsure (1)..(565): unsure at all n locations
  Clone ID: MRT4577_162745C.1
gcagcggaaattctttattacaaaatggttacaagttacaacatttacaagttataacaagattacaatatatatcatcagagtgattacaaaagaaagtgattcaaaaaaaattacaatttaaaatgtataaaatatttataggttttcaaatacatgctagcttaagtgacaatcctcaataaagaagctaaagatgggatatacttatataagaagactgagcccaccggcacttagcagcatccataacagaacaaaattataacctgggataacactaagttagtgttgttaattgacgaccacttggtgagcatctcccattctggcactctatcagatcatccatccttaggttcgttcactagcatcattttgggatcaactcggctcttgtccttcgcatcacgtgtaacgaaccacatcatgctccgactcgatttcagcaagaacttagacggccaccagttcgagcatatcatcgaacacctaaggagtgttgaacttaaccttcttctccacgtaatctnccaaggttttactccatatcgcacacancaac

SEQ ID NO: 68806 - DNA, 1550 bp, Zea mays
  unsure (1)..(1550): unsure at all n locations
  Clone ID: MRT4577_162746C.1
accgcggataatacccgttttctgagagagatggcgagtcaacagtttccacaacaaggcgggcggggttatcaacagggcccccgtgaaacctcttacatggacttctcagagacgcgactcccgctgtttgtcaaagccgaagacccgttagaagcagatgaatggcttcgtgtgatcgagcaaaagttcggactgctgcgatgttcagaaacccagaagcctttattcgcagcccagcaactgcgcggacctgccaacacttggtgggngtaattttgtggccgttcaaccggccaatcatcagataacttgggaagaattcaaggtggccttccgcgaacattacataccagaaggtgttcttcacatgaagcatagaagaatttatgaagctgggataacactaggttagtgttgttagatgaaggccacttgacgatcaacttttgttctgacatctgcttagtccatccatcttcgggctcatcggccgacatcgtcttgtgggttgttttgatccacacccttcgcttcgcacgatttttcatctagcgtaccgaggttcgacgaagtggtgatcgggtcggcatagatcgaggtggagcttgttgcggtatttcatcgagcacatcgagggcgcgacacgaagggggtttcatagttgttgctgctccatgaccttgggcgcatgggctggacatgtgctgcaagaagccgagcagggcgcggtccagtgaaggaaatcgacgacgaggtgtgcttggtcggacagggagaggaaacggaggtaggagaccgagctgggagtgggcgcgagctggacgagcacggacctgaggaggggtgagcaccagggaggagagggcgctcgacgcagcttggacgcgatagacagggttcttttcttcttcgccagattcctaccgaatgcaacatcaaggagagcttggaacgcagatcaacgatgagacgagcagcgccaggtgctgactggaaggagcagcgagacaaacgtgaccaagcctgggatggagtcacaacgaccggcggcgagctgctcactggcaggaggcgaagggcgctgatgcccgcaacgaaggtgaggacgagtggatgagcgagggcgagctcgacgaacaggatgtggagtgggaggacacgacgactaggacacagggcacagcttggcaccagcgagcgggcgccacgaaagggagcaggggcgacgtccggcgaggtcggcacgtgccggggcagagctggagctgggcgctgagcacaggaaagggcagttccaaggcgagcaccagggttggcggcagcagcactgaagggtgctcagccggcgaccagcacgacagcgcagcagggcgcgacctcatggagaagcacgagctagagaaatggaggaacggctgggagagacgtgcgtgaggtgggagaggagttgaggttgcgtgctagcttgagggagggaaatggttgggcggcagtgagataaggccagcagatgagcgacaacaggcccggcccggccggcctcgagg

SEQ ID NO: 68807 - DNA, 493 bp, Zea mays
  Clone ID: MRT4577_162747C.1
cattgttgtttttttgtgggattctttccggttcttccccgccgtcgttgttttttttttttttttggggaccaaaccgggggtcgagggtgtctggaacagggttaaaaaaaacacactgtgcccatttttaaacccaaagcccttgcaaatttgggggcaaaaaccccatttccccaaaaaacttttttttaaatcaaccggtgagtcccctaatggccgggaacaggggccagcccgtttgtaagaaatttcccgcgccctatgaaacccgcgaaaaacgattttggggaaaaactttttggccggcctaaacgcttggacaaattatttttaagccccttggggggaaaacccccaggtgttttctctacccatttgggggggggccccccggtggaatcctgtccttttttcttttcccgttttcaggggggggggttcctcccctaatgtattttgtggccccttaaaaaggtggccttctttcgga

SEQ ID NO: 68808 - DNA, 939 bp, Zea mays
  unsure (1)..(939): unsure at all n locations
  Clone ID: MRT4577_162748C.1
cggccgggntattcggttatttgcctatgttcgtacccaccgccatcactacgcatgccggtccgttaagcttcctccccagcttaccgcgtgctgaaaccctagccgccgaggagccgacgatgtcggacccttacaacccgtactaccgtggagccttcccaggcggcgacggtgcgccgccgccgctgccgccttactcggactttgatgtcgacctcgtcgcgacccgttacaccggcaccccacggtctcatccatcctctgccgacgtcggcgccttcgaatcgcatctcggcgcgagacgattcgcggaaggtcctgaatgatgaggattcttatcctgagcgaccaggggaaccagattgtccttatttattgagtagtagatgtaagtttaaatctaaatgcaagttcaaccatccaaaggaaatggtgaacgcattaggaacaagaacagacaatgaatgaggccttctgaacccgtttgttcgttctatgcaaaaacaggcaaatgtaaatttggtgccgtttgcaagttcaatcacccaaagctagaagatattaagacatcatctttgattgcaaaggaaaccatatatagagcaacaactgatgcagcagcgcacattggtgggacagatgattctgttcccgcaaagacacatgcaccaattgccccagccgaggcacataatgcaaaggggcttccaataagaccagtatgtatttaccaaatggttgtttagctagagcagtaaacttcagttaacttttttctttgatagaacatttgatacagtaaatttctgttttatccagatcttttatttggaaacctcattagtaaatatgttgcaaaaatgcaaaatatatgcagaaatgtaaagctagaactctgtcccatgcttactgaaaaaaaaaaaaaaaaaagcggcc

SEQ ID NO: 68809 - DNA, 1113 bp, Zea mays
  Clone ID: MRT4577_162749C.1
tttttttttttttttttgcagcggaaattctttattacaaaatggttacaagttacaacatttacaagttataacaagattacaatatatatcatcggagtgattacaaaagaaagtgattcaaaaaaaattacaatttaaaatgtataaaatatttataggttttcaaatacatgctagcttaagtgacaatcctcaataaagaagctaaagatgggatatacttatataagaaggccgagcctaccggcacttagcagcatccataacagaacaaaattataacctgggataacactaagttagtgttgttaattgacgaccacttggtgagcatctcccattctggcactctatcagatcatccatccttaggttcgttcactagcatcattttgggatcaactcggctcttgtccttcgcatcacgtgtaacgaaccacatcatgctccgactcgatttcagcaagaacgaagacggccaccagttcgagcatatcatcgaacacctaatgagtgttgaacttaaccttcttctccacctaattctccaaggattttactccatatcgcacacatcaacacacataaaacctcacatcagcagggtattaacaagaactagtaaaacaacaaagggatttagagatcaccatggaagcagcagaggtggccggccatgggaacaaaggaggggctgggggcacccacttgctgcagaaaggggagggcactgcttgctgcaggggagggcatcgagctacagcagggaggggcgtcggccatggcaggaaggggagagagctcggctgggcaccatagcaagaggaggatggggagggctggagcgcggaccagggcgtggttgtggttgggggcgagcttggaggaagccaggcaccgcgggagagggaagcaggagctcggctgggcgtgcgtggtgcgtgtgaccagcgtcgagcgagagatttgattggcagtggtgaaaggcctggaagttggcgtgcatgagctgagaggaggagctgaacgcgcatcagaggagacgcacaggtttccagggatttgaacacatgcacaggataaggctgggaattttctaggagcgcctgc

SEQ ID NO: 68810 - DNA, 252 bp, Zea mays
  Clone ID: MRT4577_16274C.1
cagcagagaatctctcatcattcttcgattgtctaatattcgccttctctcaattgtataaatgacgctcggagaaactgctagctcatacgcaggtatcatccttcatgaagatggcatcagtgtgactgccgacaagatcagcaccttgttggaaactgcacaggttcaagtagatacctatgggccaaccttatttgctaaacttgctgagaagaaagatcttgtcgatttgatagccaatgcagcagg

SEQ ID NO: 68811 - DNA, 323 bp, Zea mays
  Clone ID: MRT4577_162750C.1
agcggttgatcaaatggggtgggtagatggacgcgctttcgagtacgtgcatgagaggacgaccgatcattgtggcaacgcggaacatccatgcattcacgaccaacctaaagttctgctccaggaattaccgctactaaagcctgttgtgggtatgccatgcgagctgaaagcagatcagcatacacatctgaaactcctatgccagctgttgactgacgatatatgtaaggcatacagaaatgtggatgacgagggcatacagtgaacaatatcatagcggaatatatttaccgccagggactgtttgatctcggtgacat

SEQ ID NO: 68812 - DNA, 342 bp, Zea mays
  Clone ID: MRT4577_162751C.1
ccccccgaaggcgggctcctggagggggccgcccttttttttttttttttttttgcctaagatcaaagaagcatgaagcgggaatttgatgtctgataagattcgagatgactgtagaaacatagcaggtgctacacgatgcaggccaagggggcagggggactcacagagccagacctaaacctgtaagatgaaaatgcccgcgattcataacatgctagagagcagcactcataatcatacatccttttattcagatccaaaggaaaggaccctagcgagagtagaccatgatcgaaggagggcgggcgagcagacccgatctgaaagatctgcgagagc

SEQ ID NO: 68813 - DNA, 606 bp, Zea mays
  Clone ID: MRT4577_162752C.1
cacccttttgaccggtctgcacctcattccaaagaaaacgaggatacacagcagcctgtggcacttactcttgctggccttccaaggagagaggatgctgaggcctgtgccttctacatgaggtctggcacgtgcgggttcggtgcgcgctgcaagttcgaccaccctcctcgccagcgacaactaaaaaaacggaggaagtatcctgtatcaggatgtggtaccatgcgaatcgcactgttaatgcttgatgctgtcactgccatggtgggagcctgacttgtaaagttcagtatcaccggaagtgtttgtcggcgcgtgctggtactaacggtgtaccttcggcggttggatggtgtcaagagtaaaaatacaccgcctgttctcaaactttgactggatgctaatctccaaaatgtgagaaccaagttaccgtaacttgagttaatccgcttgcatggttatgtgatgataaggcgttgggacgtggagtctacatgatggtagggatataggagatcgaatcgcatgttcgcctcacatgttgatgcaatgccaacgtgcaattagcttgtcaacagattaatttagcattattggcatatt

SEQ ID NO: 68814 - DNA, 1333 bp, Zea mays
  Clone ID: MRT4577_162753C.1
ttttttttttttttttcagcggaaaatctttattacaaaatggttacaagttacaacatttacaagttataacaagattacaatatatatcatcggagtgattacaaaagaaagtgattcaaaaaaattacaatttaaaatgtataaaacatttataggttttcaaatacatgctagcttaagtgacaatcctcaataaagaagctaaagatgggatatacttatataagaaggccgagcccaccggcacttagcaccatccacaacggaacaaacttataacctgggataacactaggttagtgtggttagatgacgaccacttggtgagcatcttccgtcctagcacttgatcagatcatccattccgctggttcgttcaccagcatcattttgagatcaactcggctcttgtcctccgcatcacgtgtaacgaaccataactaaaccaaactcgaaatcacgagatcgacgatgatttttggttcgaaccttctaccgaacatttagcaaacgtcgaacgggcctcacttcttcatcatcggtcccgagggtttctctcatcgctgtgcaaagacttgcgggtcacgtatggaaaataatgaactccagttcaaacctcccatcaaacatctggtgcgcgtcgaggacataggtctgccccgtcgtgctgctgctcgcacagagacagagaggggcgagcagagatggctagggagttgggcgagctcggacctagggaacagaggcatggccatgagaactagctggagcagggacgaacgccagcgacgagaacgaagcggcagccgtccaacgcaggggagatgggatgccagccaccaacagagagagggggaaacagaggcaaccgaatttggacaggggcgagctccatggcggctagagggagtgagctgagggaggggcggcgtccatgggagggacaggagcagggacgccgagctttgaaccgatggagggagatcaggaaaagaaggggcagcgacctccatggctgagtagtcgagggcgctggccaaggtaatcacgcagggagcggcgacggagaagacacctcgtggaggagatggcagccagcgctggagataggaacgactggaagaggcgagcaccatggttggcggcgcccatggctgaagggcgagatggggatggaggagcagaggaagcatcggccacctgcaaagaaggaagggggcatcgtcctcagggctaggagctgcggtgaggaagatggctggtgtggggaggaaatggtgcagcaggccgaagccaacagcgtcctgcgctcgatggggatgtgggcacc

SEQ ID NO: 68815 - DNA, 130 bp, Zea mays
  unsure (1)..(130): unsure at all n locations
  Clone ID: MRT4577_162754C.1
cactagcagagaccaaccgnntcccccttcgagccttgaccgaaggngatgttccgnattagtcttcaggtttacanncatgcgnatacggccgcagcctcnntngnccccantcttncatagtnganta

SEQ ID NO: 68816 - DNA, 415 bp, Zea mays
  Clone ID: MRT4577_162755C.1
gagaacaagcggtgtatttttggggcttgacaccatccaaccgccgaaggtacaccgttagtaccagcacgcgccgacaaacacttccggtgatactgaactttacaagtcaggctcccaccatggcagtgacagcatcaagcattaacagtgcgattcgcatggtaccacatcctgatacaggatacttcctccgtttttttagttgtcgctggaaaaggaagagtagcttgaactggagccataaaagctatatccacaactgaccgatcaggatgattgaagcgacaaatagaaccatatttgcagctgcctgtcttcatataaaacgagcaatccacttcacctggtcttattggaagcccctttgcattatgtgcctcggctggggcaattggtgcatgtgtctttgctg

SEQ ID NO: 68817 - DNA, 1259 bp, Zea mays
  Clone ID: MRT4577_162756C.1
attacaaaatgattacatgttacaataattttacattatacaattatcggagtgattacaagagaaaatgattcaaaagaattacaaatttgaaatgttataaaatatttgtaaatttgaagatacatgctagcttaagtgacaatcctcaataaagaagctaaagatgggatatacttatataagaaggccgagcccaccggcacttagcaccatccacaatattatttttcttataacctgggataacactaagtcagtgttgttagatgacgtccgcttggggagcatctctcatccgatcctggtacttgatcagatcatccaagcttcaggttcattcatcatcttcacttgagattaatccaactcttgccctccacatcacgtgattaattaacgtacctgggataacactaagtcagtgttgttagatgacgtccgcgtggggagcatctctcatccgatcctggtacttgatcagatcatccaagcttcaggttcattcatcatcttcacttgagattaatccaactcttgccctccacatcacgtgattaattaacgtaccacaactaaatcgcctcgaacccgagagatcgacaacaacctccggttgagacgttccaccaagcacccggcgggcgttacctttagaacttcgagctcttcgccctccaacaccggaaagtttctcctccaagccacatacacaaacacgcaaaatacatcatctagatacaagtatcagcgaggaatactcgcaaaagaaatgacaaatcctcactgagacggacgacgcaccagggttggcggcttgagaacaatctgcaggggcaagggaatggagggctagacgtcatggatgaagggggctgttgttccgtgcgccatggacgagctgagcttgggtgatggctgggcgaacatgccaggaacctagcaggggcatcaagtacaggggctggcatccagggcaccatggaaaaactcggctagggcttgagggaggagggcagagggctgctggcgagctggactgagggcaggcgccataggatggagcagggacggcggccatcagtagagagggcttggcgtggggaggaagcctccatgggctgctcggctaggcaccatgggatatgtatgaccaggaggcggtgcagagcaaggaaccgaaggtagaagatgcggtggggagagaggcttccaggagccgtgcgtcacagcaagggaggaggcaacgtcccggccgg

SEQ ID NO: 68818 - DNA, 2115 bp, Zea mays
  Clone ID: MRT4577_162757C.1
tcctctagagcggccgccaccgccggcggcggcgagacgtcggtgctcgacctgccggagctggccatggattgcattctggaccagcgcgtccgggcggagctgcggagcatggccgccgtctgccgcgcgcatgcgcgagcgctgccgcggcgaccacctctgggagcggcacatgacaaacaggtggggccgtgtcctgggccgcgccgccagggacgccgggaggacgcacctggcttccgccagcgagtcccgcgccgcgggcggcggcggcggcggcaagcgccggaggtggctcgccgcgctgtcctgcgtttgcccggtggtgtcctggatgcggcccagggccgacggtggcaagtcgtccgcccccgtgctggacgattccatcatgtcgtggtacctgtccgtggagagcggcaagttctggttcccggctcaggtctacaaccgcgagcatgggcatgttgggttcatgatgtcatgctatgatgcagcgctcagttacgatttccatacggacacattccgtgcaaggtacccaccacacggtcgacgaaccgtggtgttggaggatggcgtgcaatgggacagggtgagggcaccgcctgttgacacccttgcgcatgacctgcacacctctgactgcctgcatgagctccggcccggcgaccacatcgagattcagtggagaaggaacaaagaattcccatacggctggtggtatggagttgttgggcacttggagtcatgtgatggaagcgaacacttttgtcggtgccatcttagtgataccgtggtgctggagtttaatcagtacacgccgggctcaaggtggaggcaagcgttggtgaaacggaaggagcatagggaggagggcaacgagggcgacgggttctacggcggcataaggaagctccgcggcaacgatgacatctccaagtggaggcagctgtggccaacagacgtcctggagtaagcaggaaccgcatcccttctcacaccgacattgatccatcgctcaaatgacacgcctttctttcatcatcatattgaccaaattcgtcgtctctgtcgcgctgttgtaaacgggttagtagaagaacaaatcccgtagctggacaagggtgtaacacttactctctccgtttcgttttagttgtcgctggatagtgcaaaattgaactatccagctacaactaaaaagaaacggatggagtatttgttaggcgtaccaggcgcagactgcttcctatttgttcgtggggctgtaactgtaagccttgtttgtgacccctaagcagtctgcgtcttgtgcctgctgctgtagcggtagagcagagagagatcaaatgtaaattacatttttttagctcaaattcacgacaaattggttgtcgaaaacgaggatacacagcagcctgtggcacttactcttgctggccttccaaggagagaggatgctgacgcctgtgccttctacatgaggtctggcacgtgcgggttcggtgcgcgctgcaagttcgaccaccctcctcgccaggacgatgtcctgcccgaccctgatgtctaatacggtactccctccgtttcgttttagttgtcgctggatagtacaaaattgaactatccagcgacaacttaaaaaaaccggaggaagtatcctgtatcaggatgtggtaccatgcgaatcgcactgttaatgcttgatgctgtcactgccatggtgggagcctgacttgtaaagttcagtatcaccggaagtgtttgtcggcgcgtgctggtactaacggtgtaccttcggcggttggatggtgtcaagagtaaaaatacaccgcctgttctcaaactttgactggatgctaatctccaaaatgtgagaaccaagttaccgtaacttgagttaatccgcttgcatggttatgtgatgataaggcgttgggacgtggagtctacatgatggtagggatataggagatcgaatcgcatgttcgcctcacatgttgatgcaatgccaacgtgcaattagcttgtcaacagattaatttagcattattggcatattaaagagtttaggccttcaggtatcaggatatacattttggaattttg

SEQ ID NO: 68819 - DNA, 2191 bp, Zea mays
  Clone ID: MRT4577_162758C.1
tacaacatttacaagttataacaagattacaatatatatcatcggagttgattacaaaagaacttgattcaaaaagattacaatttgaatgtataaaacatttataagttttaaaatacatgctagcttaagagacaatcctcgatagagaagctaaagatgggatatacttatataagaaggccgagcccaccggcacttagcaccatccacaacagaacaaaattacaacctgaaaaacaacagggaataaaaccctgagtacacaattactcagcaagacttacccgactaaagaaaagactctcaagggtatgctggtttgtcgggaatcaaggtaaagcttatcgaatttcaagacacattttcgcagaaaagcttactagtagtggatccttatgccaaacttttacttcacaaattaagtatttttcctgaatctagatttgcctgatctagagcattcacttgtcctacactagcttcattttagtagctttagtttcacttgttatctacgatgagggtcgaagatccagtcttcatatccgagaagttcggcgatccgaatcgattaatacccagctggggatctccaaccacacgacatatgtagcacttaacccttgcatatgtcaactcgcccacgggtttctcaagaccagaacgggtccccgccaaccgagagcacagtactccaccgtccagccattggcctggttggtacacgttaccctcgccatggtgcccgccatgtttccgagagtacagcaccccaccttccagccgttggcctggttggtacacgttaccctcgccatggtgcccgccatgtttccgagagtacagcaccccaccttccagtctcttgccacggagggtacaagctactctcgccatctctccactcccattgcgggccggcctttctggtattggtccgaccgaggctaagcttacccatgatgaggcatgtggtcagttaaagggtcctagatcagcaggccaacaatcggaacggtccttaagcgacacagacgggcgacctttcctgctcaacgtctggtctcatcttattatttaacacccaaaccatatacctgacagaggtactatacttgaatgatgaattcatcactgcagatgatgcgctcaccattacaagtccattttcataaaacaaacccattcccaatgtcacacatcattcttttaaaaagaaacaagttttaattctctaggcagggctaagcctcattagttctttttgtaaaacaggtatcaaggaggataatcaaattccaaggaatggcaatgcatcaactgtttcatcactcaactcctatcacctaatgcagcatataagtgataaaagttttaaaacaacaaggaggtggcaaatgcaccggggcttgcctgggataacactacgttagtgttgttaattgatgaccacttggtgaccatattcatctcggcacttgataggtccatctctcattaggtcgattcgtcaacatcgtttgtcggagtagttcatcatttcatcatcttgagatcaactcggctcttgaactccgcctcacgtgatcagctagcgtaccactactaagttgactcggatgaaagcaaacatagcgacgatctaatgtttagaccttacgtcgagcacatagcgagcgtcgcactggcctcgcttcttctccatccaaaaacctgagatctttctctccgccacactcgcacacaaatacacataaccgcatatcaacatcaataaaaatctgctcgcattagaagaattagtgaaataaaataaaggggttaggaatcaccatgactaaacacggcgacgacgtcggggctgcggacggtggggaggagcagagggtatggccgaccaacaaggaggcagggagcagcgtggtgaaggagatggggggcagggcgagctcgtccatgggagaggcagagagcagtgccgtaagatggagtagggacggcggccatcagtagagagggctgggcgtgggaagcctccatgggctgctcggctgggcaccatgggatatggatgagcaggcggcggtgcagagcaaggaaccgaaggtagaagatgcggtggggagagaggcttccaggagccgtgcgtacggcaagggaggaggcaacgtatcccggcccggccggc

SEQ ID NO: 68820 - DNA, 277 bp, Zea mays
  Clone ID: MRT4577_162759C.1
ttttataaaccgaaccagattaccgttttacttaaaacgccggccccgataatattgtccaccaacaaaaggttttaacgcggaaaccccgggaccaccactataaattgggcagggtctgggccaaccaaccactgtgtcagacacacgagactgacacaaaccggttagaccaccttctcgattttggggccagggccaccgtttccaaccggagggtcctccttcattccgccggaaccttcaatgtgggcacccccgcccgggtacaattttg

SEQ ID NO: 68821 - DNA, 149 bp, Zea mays
  Clone ID: MRT4577_16275C.1
accagcaacaccaacacgtctcgctcctgttgataggggcgcagattgatcagcctcacccatgaacgactcagcgcgcatagacctgggtcatagtggagacggcaatgagagactgagggtctgacccatagcagttgggcgctgct

SEQ ID NO: 68822 - DNA, 972 bp, Zea mays
  Clone ID: MRT4577_162760C.1
cccacgcgtctcggcacgcggagagagacggccggccggccggagaaggaagccattcgctgcagctgcaagcaggatagtcaggagtagcgtgcaacggagatggaggaggactacgtgttcaagatcgtggtggtcggcgactcggcggtggggaagacgcagctgctggggcgcttcacccgcgacgagttcttcctggactccaagtcgaccatcggcatcgagttccagacacgcaccgtcgacatcgcgcgccaccgcgtcaaggcccagatctgggacaccgccggccaggagcgctaccgcgcggtcaccagcgcctactaccgcggcgcgctcggcgccatgctcgtctacgacgtcaccagccgccgcaccttcgaccacgccacgcgctgggtcgccgagctgcgcgcccacgccgacaagtccatcgtcgtcatgctcgtcggcaacaaggccgacctggcgcgcgacgcccgccgccgcgcggtggacacggacgaggccgccgccttcgcggaggagcaggggctcttcttctcggaggcgtctgccctcagcggcgacaacgtcgagcgcgccttcctcacgctgctccgggagatccacgccatcgtgtccaggaagacgctggatgcggcggcagaaaccggcggcaccaccgacgtcctggctctcaagggcaccaagctgtcgcttgctgatgagatatccatcatggagacgagcgccttgagaacagcaagcggcggcagctgctcgtgcacgtgatggtggtgcatgcatatacgattatacatgcatatacagctcatggaattctaatccggaaatatatgttcaaacagtgtgctgtgctccgagagaaattttcataacggagataaaatatataaaaaaggatatgcagtgcatgttttaactaaaaaaaaaaaaaaaaaaaaaaagaaaaaaaaaaaaaaaaaa

SEQ ID NO: 68823 - DNA, 392 bp, Zea mays
  Clone ID: MRT4577_162761C.1
gacaatcgttgttctgtcgagattgactcttctggagctagtgatacagattatgctcgtcggcgatgtccacctcagaaccgacaactgcaacttccagtacacagctgttggtgtccaacgccacctctgatggtatgtacataactaaccttggtgaggcctgtgacgacactaagtctgctaccacgtggcattgtggccttggtaaccccggacacaatatcgtgctgcatgttactgattatggcactatggcatgtactaaatcacatgatgagaatgtttgccatgccatccatggagggcactctgttggtacatctaccaaccatttttacacctatgctagtgatgcattcgatcttatacactgtgacccgaggactgaa

SEQ ID NO: 68824 - DNA, 421 bp, Zea mays
  Clone ID: MRT4577_162762C.1
gaccacgcgtccgatgaagcgagcggacattccttaaaagaacggtgaatgacctgaacagggagtattcttggagttggtctatggctcgaatcggctgaccaaatcagcgagaatggcaaccaaatatgcttcgtacttgatacccgcgttgccttgagacatgtgcgagttctcacaattcatttgattggtgatcatggttgttaaagcggtaaggcgaacaaccgcagtgaaataccggttggacacctaaacaccacctaggccactccttggcctagtaatcggacaaagcgcatacactttacaccaccggacggacacctaggcgttgactatacgacaccttaaaaactcaagaagaaagtggcgaaagttacgtcagcattgtatggcttgtcacattaagtatatggtc

SEQ ID NO: 68825 - DNA, 853 bp, Zea mays
  Clone ID: MRT4577_162763C.1
cttatggatcttctgtccattggatcatctccatcacagaatggcacccccgtaacagacttcggtcatcctggacaagagtctaaacctgttcctggtgtacctgaagctgttgacctcctcggtagtttgtcaccagccgagtctaaacccacaccagttgtacctaaggacatggatctgctcgacggtttgtcatcaaatacatctatttctggacatgagaatacaacccacccatcaataacagcttttcagagtgcaaccttgaagatcacgtttgatttcaaaatgaagcttggaaacccacgagagactacaattcatgccacttttaccaatttgacatctagtacttttacagattttatttttcaggctgctgttccaaagttcatccaattgagactggatccggctagtggcaacactgttccagctaatggaagtggttcagtcacacaagggctcaacatcaccaataaccaacagggacagaaaccgcttgcaatgcggatccggatgtcttataaagtgaatggcgaggacagattggaacaaggccaagtcagcaattttccttctggactataggccgtttctgtatactatgacgtgtcggggacaggcatatagaacgaagccttgttttaccctctacctcattttttaattattctggggatttgtcggggtgcttagagaaaatgttttttccggcggttagttttcctgtactaagtatattgtatattattccagcagcgatgtgatcttcaaattcatcgtgatgtattcgacaccacgctaaaggatggtctgagcaaactttcttcagctcctcaatcattgt

SEQ ID NO: 68826 - DNA, 340 bp, Zea mays
  Clone ID: MRT4577_162764C.1
gcaataataatattttcttccatacattctggggtgttatggtatgcatgccatatgcatatatattatgggcaagttcttcgcgtcatccgtttaatgcatggcgtctcgatccatgtatgcatacaaatactcgctcgcatgcatgcatcatgtggttgctttgctgatcagaccagctaacttgcaagcaggggtctgattcttccaagttaaagatggatcataacctgagcgacatgacgatcctgagcgagcacccatggggcgacaaggccggcgccgtcttgctgtcgccaccggaggtgggcagcgtcatcaaaggcggcgggggcatgac

SEQ ID NO: 68827 - DNA, 302 bp, Zea mays
  Clone ID: MRT4577_162765C.1
ctttcaaccagggagcaccgacgacgcacgggggccactttaagagcgcttacggggtaggacccccagaaaccagccacagccacggaggcaaacaaagaggacccgacaaactaacagcccccagacatgccggacaagcaaaccggactcctcccaggcgatgcgcacgactccacacctccaggggcggagcccggagaagacagctcagacgcccccgcaagctcaaccctcaagaagggcagagacgcgaacgcgacaaccgacgaggcgtgcccgaagaaagaccggaccacgga

SEQ ID NO: 68828 - DNA, 240 bp, Zea mays
  Clone ID: MRT4577_162766C.1
ccggccgggttccctcatctacataatcaacttctgcttggtttgtgtcgtaatctcagacatagagagcgagtcacagacctagaccacaggctagatcgtgaatcctcaaacgaagatgacgacggtgtccagctgcgatgcggtgcaggtagccggaggagctgatggcgatcgggctgccgtacaccctcttccaagatgaatgcgtctatgctggcggagagcttcctggacatt

SEQ ID NO: 68829 - DNA, 2065 bp, Zea mays
  Clone ID: MRT4577_162767C.1
ccctttctccggttctagatcgcgagcggccgctcgcgatctagcattgggacctcgagccggccgggaagcgttgcgcccgtcgagaaataaaaagaaaaaaaaaaaaaaaaaagagaggaaaaggggacaaaccaccaacaacaaccagaatatcgcatcgccgtcgcgtcgtcgtcgatctccccgccccgcccgcgccgcggaatctgacacatctctctaatctctcctaggaccgggtgcccttacatccacgccgcaacgcaaatcgccgtccgagccctcgcggtctctcgtctccccgtgcgagaggacgccggcagcagcggcgtgccagtgcggtggcttggtgggggaagaccggaggcggcggcagagctcgcgcccagaggtgcacggcaggcctgttctcggcgtcggctgggggaaggcgagtagccgcgggaaggacgagtgaataatcatgagctcgatctgccctttcgcgggagccaccactggtggtggtgtatgccctgtgaaatctgataagagcaacactggggtgtgccctgcaaaatctgacaagagcatcagtggtgtatgccctgtcactggcaaggatcatggtagcaagctcaaggaaagtggtgatcatggtgaagaaaagggcaccgatcctcgtgtcgtaccagcaaaatgcccattcggctatgactccaacactttcaagctgggtccgcttagctgcattgtctgccaggcactactccatgaaagtagcaaatgcaagccgtgtgcccataaattttgcaaggcatgtatatcacgctttaaagactgcccactatgtggtgctgatatagagggtattgagcctgatgcggaacttcaagctcttgttgaccgcttcattgatggtcatgccagaatcaagcgatcacatgctgcaggggatgtggaagcagcagatggcaagaacaaagtcatatatgaggatgtttccatggagagaggggcttttctggtgcagcaagctatgagggcttttcgtgcccgaaacattgaaagtgcaaagtcaaggctcactatgtgtgcagacgacatcagggaggagttaaaatcttcagaagataacttagacctatgttcacagcttggagctgtgttaggaatgcttggggactgctgtcggaccttgggagatgttcctgcagcaatcacctactatgaagaaagtgctgagttcctctcaaagccccctgcaaaagatcttgagctggttcatactctctctgtttcactaaataaaatcggtgaccttcgctactatgatggcgacctccaatctgcaagaaactattatgcccgttcattggatgttcgcagaaatgcagtaaaagaacactctgctgtggcttcccaggtcattgatctagcaacttctcttgcaaaagttgcggatgtggatagaaatcttggtaacgaaagtaccgcagttgagggttttgaggaagcaattcgatgccttgagaagttgaagctggattctgaacaaactagcctcgaacagcggcgcctctcggttctcgacttcctgcacaaccagttggccgataagtaagacatagtcttctcctaagaatgcacaaccagcagatgtctcctcatggtaatgttcaactctactacataagttccctttggaaggagttggtctagaagcagcgatgagtgtgtgtttaccatcgtttgaaactttgtcacggcacaaaataagagctcctgcactgtaaatgtaatcatatatatgctcatcgagtattcttgatgattgccgatatggtttagtagtctaagcactctggtttgtcaatgtcatagcctggagcagcgcataagatgttagttaacttgtggcaagtaccatctcgctttgaagtgtcatgtgtgaagacctatcctgttgtatatttgacaataagacagggaggtagtaatcaaaaccgtggccgtcgtttctcatacgaaaaaaaaaaaaaaaaaaaaaaaaaaaaaaaagcgctctagtctctcctcgtgc

SEQ ID NO: 68830 - DNA, 584 bp, Zea mays
  unsure (1)..(584): unsure at all n locations
  Clone ID: MRT4577_162768C.1
ccgggcttgcaaagttgagtgcacgtgcaagnaaatgagaatcttgcattagnagatagtatttggaagaagcttgtattcaagtataaaaattatggtaagggctgtagggggcgagcaagagtgcgaaggccatatttggagaagcttggcaggccaataagagaggcagaagaggcctaatccaaccttttggtacaatggctggggaaacaattcttttagccgtccacttaggctgccattgatggtgggaacttagacagacttccttttattggaaatcatggttctgtagggcgtcactttagaaataaacgaaggaatatcttgctaaattgcattcttgatggtcaccggtcaccgccacaacttcctttgaagccatgccaatgagtttgacttgtatattaagagtggtcggtaagtagtgcatagacggttagagcgccttgttcttatcaaatatcaattatcatcaactcacacattatgcatatgccttatcctaataaatcccccagtactcctttctatttacacagaaggcttttgtgactgctagagagtgatagacaaggtcg

SEQ ID NO: 68831 - DNA, 898 bp, Zea mays
  unsure (1)..(898): unsure at all n locations
  Clone ID: MRT4577_162769C.1
aaaaaaagagaggaaaaggggacaaaccaccaacaacaaccagaatatcgcatcgccgtcgcgtcgtcgtcgatctccccgccccgccccgcccgcgccgcggaatctgacacatctccctaatctctcctaggaccgggtgcccttacatccacgccgcaacgcaaatcgccgtccgagccctcgcggtctctcgtctccccgtgcgagaggacgccggcagcagcggcgtgccagtgcggtggcttggtgggggaagaccggaggcggcggcagagctcgcgcccagagggaaggacgagtgaataatcatgagctcgatctgccctttcgcgggagccaccactggtggtggtgtatgccctgtgaaatctgataagagcaacactggggtgtgccctgcaaaatctgacaagagcatcagtggtgtatgccctgtcactggcaaggatcatggtagcaagctcaaggaaagtggtgatcatggtgaagaaaagggcaccgatcctcgtgtcgtaccagcaaaatgcccattcggctatgactccaacactttcaagctgggtccgcttagctgcattgtctgccaggcactactccatgaaagtagcaaatgcaagccgtgtgcccataaattttgcaaggcatgtatatcacgctttaaagactgcccactatgtggtgctgatatagagggtattgagcctgatgcggaacttcaagctcttgttgaccgcttcattgatggtcatgccagaatcaagcgatcacatgctgcaggggatgtggaagcagcagatggcaagaacaaagtcatatatgaggatgtttcatgggagagaggggtttttctggtgcagcaagctatngagggcttttcgtgcccgaaacattgaaa

SEQ ID NO: 68832 - DNA, 282 bp, Zea mays
  unsure (1)..(282): unsure at all n locations
  Clone ID: MRT4577_16276C.1
ggggcgcagntgngcgaggcggngagggaggggagggacaggcgctgccttttttatgtccacgacaacggggtntgcncgggtttttttttttttttccggccggncaccggccgggagaggggggaggcggagggcccccccccgcgcgcgctgggcctgccgctgccgcgttgtcagcggctgcaggacgtgaggctggagtgccggtgcgccgacatgcgccgtgtggtgaggcgctgcgcggtgngcttgccgattccttttggggatgggctggtc

SEQ ID NO: 68833 - DNA, 836 bp, Zea mays
  unsure (1)..(836): unsure at all n locations
  Clone ID: MRT4577_162770C.1
ggtaccctccgggtcgggcgggatatcgcatcgccgtcgcgtcgccgtcgacgggcccgccccgcccgcgccgcggaatctgacacatctccctaatctctcctaggaccgggtgcccttacatccacgccgcaacgcaaatcgccgtccgagccctcgcggtctctcgtctccccgtgcgagaggacgccggcagcagcggcgtgccagtgcggtggcttggtgggggaagaccggaggcggcggcagagctcgcgcccagaggtgcacggcaggcctgttctcggcgtcggctgggggaaggcgagtagccccggtgggtgattctcgccctctcccacctggtttggaatcgaattgaaggaaggacgagtgaataatcatgagctcgatctgccctttcgcgggagccaccactggtggtggtgtatgccctgtgaaatctgataagagcaacactggggtgtgccctgcaaaatctgacaagagcatcagtggtgtatgccctgtcactggcaaggatcatggtagcaagctcaaggaaagtggtgatcatggtgaagaaaagggcaccgatcctcgtgtcgtaccagcaaaatgcccattcggctatgactccaacactttcaagctgggtccgcttagctgcattgtctgccaggcactactccatgaaagtagcaaatgcaagccgtgtgcccataaattctgcaaggcatgtatatcacgctttaaagactgcccactatgtggtgctgatatagagggtattgagcctgatgcggaactcaagctcttgntgaccgctcattgatggtcatgccagaatcagcgat

SEQ ID NO: 68834 - DNA, 790 bp, Zea mays
  Clone ID: MRT4577_162771C.1
gccaaggccatcttgctttcaaggataagcttagggctctcagatccgtaatacctgaagtgcgatattattttaacttgcaatattttgtatataggtcattgatctggcaacttctcttgcaaaagttgcggatgtggatagaaatcttggtaacgaaagtaccgcagttgagggttttgaggaagcaattcgatgccttgagaagttgaagctggattctgaacaaactaccctcgaacagcggcgcctctcggttctcgactttttgcacaaccagttggccgataagtaagacatagtcttctgttttttcctaaacaccagcccctatcagattcatcctaatgttcaactctactacataagttccctttggaaggagttggtctagaagcagcgatgagtgtgtgtttaccatcgtttgaaactttgtcacggcacaaaataagagctcctgcactgtaaatgtaatcatatatatgctcatcgagtattcttgatgattgccgatatggtttagtagtctaagcactctggtttgtcaatgtcatagcctggagcagcgcataagatgttagttaacttgtggcaagtaccatctcgctttgaagtgtcatgtgtgaagacctatcctgttgtatatttgacaataagacagggaggtagtaatcaaaaccgtggccgtcgtttctcatagagattcccgggtcaagctgaaaaaaaaaaaaaaaaaaaaaaaaaaaaaaaaaaaaaaaaaaaaaaaaaaaaaaaaaaaaaaaaactcgag

SEQ ID NO: 68835 - DNA, 314 bp, Zea mays
  Clone ID: MRT4577_162772C.1
tgttgcacgctcaccgtgccggaccgcccactgggttttttggggatgttccggggtgcccacaccgtgcgggactgatccaacgccggttgcaagctcgccgagctgttcgccatcaacgacacgccgctgtaccacgacaggctcgttaaatcctacatgaggattggtttcaaagcacctcatgaggctgatcgatcatcaataacagatcttggtcacatcttggtgtggggaggaaggggaactaaaatggatgctgctatagaagaggatactattgagtggggagacacattcagactacaagacta

SEQ ID NO: 68836 - DNA, 251 bp, Zea mays
  Clone ID: MRT4577_162773C.1
gattgtcgatctgatcacgcgacgtagctcgaattcgctcgagagaagtctcaggcctcttgctgctagctcactggcttgagaccagggccaatgccaggggggccccactgactcaccttgtgaccgttgcgaagcaagccgtgaccacagagcctctgcgacgaggtggacacccagcctcacgtgcctgggaacctggagcagcagacattcgtagcctcctggaaactggcctcttgaggcggctg

SEQ ID NO: 68837 - DNA, 280 bp, Zea mays
  Clone ID: MRT4577_162774C.1
cctagaccgcgagccggcaggtactataggatcacagattacactcgcgggcatgcgacgtgatagctattttatagagccacctaaacccaatacaccggccgctgctgacaacccccaggactgggaaaacacccggcgatacccaacttaatggccttgcagacaattcacagttcgccagatctactaccattcagccagctagctggtgtgagccctgctaccttgttgacacaaccacagttgttgccgttctaccagcacgctgcgcctaaag

SEQ ID NO: 68838 - DNA, 552 bp, Zea mays
  Clone ID: MRT4577_162775C.1
aggagctgttgccgcgctctcggagctatagactgagagatgatgaagttttgctgagctgacttatagcatgatataatagaaggtacccctcccccaacagcacccaagagagaatgtgcagacactaactggatgaaaaaaaaggacgctgggcggtattttttgctcaccaagagcaggcaggcaacagcgggacacgcacgacgagtatgtcgccgctcgtcgtcggagacgtagcagcagcaggcatgccgctgactggctatagagtttacccccagctttagccggcccacacttagttattcctcctcctagcaactgcatttgcttcaattttgttttcctcgtttttttggtaggtggaccttgggagtgtcagcaaacacaacatgttttcttcctcttctttttttgatgattcttttcgtttgtaagaaactttgtaaaaacctgctggtgtctgtgctgtgcttgccatgcaagtcgtggaacctttttaagataagctcagcatggctagagagcagtttggttggttgagggggc

SEQ ID NO: 68839 - DNA, 399 bp, Zea mays
  Clone ID: MRT4577_162776C.1
acggcactgcttggtagcgtcatgtctgtccagatccaggtgttggccctgtctactcttcgtcgcctatcgcgaacactacttctcgctatttgctgtcgagggagggtaggaaacgaatggtgttcatgctgtcgcgaaagacactatccttcatgctgataaaggttactgacggaagagactgctcctcgcgattaatacttttcctgatcatcaagacgaaattaggaaggatattcatcagcttaggcacatctactatcatcatcacctgagacacagtatgaatgccaactcggatctgtctgtccgcgacatctggacatgattctaagccaggggaccgtcttgcccagttaacttccttgatgaagattaggtagtccaactacatat

SEQ ID NO: 68840 - DNA, 370 bp, Zea mays
  Clone ID: MRT4577_162777C.1
aattaacgaggcgcggccctgacccaccagcagaatggagcgacttatcaagggagatgtaggaacgcaggatcagggtctaccataccggataagcagcatagatataataataataacgtggctccgatagccagacaaccacaatgatttatccacatgccattgagtctatcaccggatgaggactatggaccctgatctgttcctgccctgcagaccagactgggccggggatgatcgactcattggatacgtgggtgatacccggacgggcacgaacgaacaggatacataggtaggcgagtctggggatgaccttcgcagctcatcatgggccgcatattaatgcaggcggctaggacgaggg

SEQ ID NO: 68841 - DNA, 282 bp, Zea mays
  Clone ID: MRT4577_162778C.1
ctcttctctcttctccgttccttccctcctgaaattctccgctcgcgcctatccaggcacgcatatgactgagagcccgagctgagcaaccagccaaagagagaaatccatttggataatcttctgcgcctccctcccgaacgtatgcgtcccggtccgatgaggggagcacgcctgcgctctgcgcctgcgactagggtttctcccgtgccgacgatgacgtccgccaagtcgtcaagccctcgtaccggcgaccactcctgagtgttcccgccgaacgct

SEQ ID NO: 68842 - DNA, 1584 bp, Zea mays
  Clone ID: MRT4577_162779C.1
tagcactccagttcatttggtgcccgctctggtcgacatttctctgcgcacgcccagccactctcctttcttcctccctgctgtgccaatccccctgcttgtggagcttcttctccgcccggctccttgctcgcctggccgcacagctccctggtgccgtgcccagcccatctccatctccctcgctgagtccctgttcttctcccatagcgccccctcagcccgtcacgctcagccatggcgtccaccgcgccggacctccctgctctctgctccctcgcggcaggccggcaacttcctatctctctgctcggctcctcccacggcacgccgtgctccagctcggattccccctccatggcgcgcccgagcactccggctctctgctcgagctcgcccagctccctgctgcggtgactagcgctcagcgtccggctccctgggtgcttgccctgctcgccgccatcctgctggatcccctccacggcgcccgttcttcccgggtgtcttcctccaccgcgctctcctctgcaagcaactgggttctgctctgccctgggcgtcgttctcagtcactggtggaccgcgcgcccctctgtttgctggtcgtggctccctcatgctcgccgtcattcgatatgccgccacgtcctcgcctcgtctcggtagcgcgcctgccagtgtcgttcctcgctatgtcgagctccctccccgtcctgtccaattcgccgtgtgggtggaacctacgtgcacgctgtcatcgacaccatggtcgtctccctgtgcgttgtgtccctcgtctccagccgacgcactaaggaatgggcgtggagtatagaagaaagtgaagcccgaaatggtgctcgccaggcgctcaacaaaatgcctgaatcttgttcttccctactcaatctcgttgaaccccgaatcccggacgttagacaaaataagcgaggtccgtgtgcatcgctcatcaagtgctcgacacaaagagctgaatcagaatccttgccgtgttcgcggatagcgcgtcagatttagaatggtaagtcgattcaaaatttccgttagcttaattattgaagtagttctaattattgaagtagttcgatgaatgtgatgtgcttattttcgtgattttgaagcagtcgtgtcgcggtaggattaaatatatgtgaaatacgatgaagttagtaatgcgaaagatagattaagtattttatctggctagctagtaagttcagatgacgttgtcgtgccgatttagttgcttaaataaattaatgctttgctagtagacattctaattagcatagtgagttagaaagttataaatgatttctatcagtagtcttgagcttaattatcttagaaacgtgaacctagttttcgttaattgtttggtatagactatagcttagaaaaaatatagaacttatacttagggtgttgttacctgatatatgaattaaattcggtgaaataggaaggacgggagtattgtacttcttgtatgtttatagatcattgttccgtgatgtttgagctagcaccagataaataaaagaagcacgaatattatcg

SEQ ID NO: 68843 - DNA, 332 bp, Zea mays
  Clone ID: MRT4577_16277C.1
gccaatcttgttacgagtttagtccttgtctgggtactatttatgaatgacattctggatgtcattcaatggaaattagtcttaagtttctctgcacttagattagtagacgcagagcagttggtctcatgtcctttgtcataaactattgtataatttttaataatgtgtgcctatgttgatattttttcttgaagtgtgaaatgtgtgatagtaggaattcattgtttaggtacaaaactttaggtacaaaactcatgtttggaattcattgtttagaataaatatcaaatcggtcgagtcgtcgtgattgtaggaattcattgttttct

SEQ ID NO: 68844 - DNA, 375 bp, Zea mays
  Clone ID: MRT4577_162780C.1
gtttactccgcgaaaaaaaaaaagcaccactgaccgagctcaccacagcacccacaacagcttatagctacagtatgcttgcctcacccaaccctgtcgcgaccaccgtcatgcccaagccggtccgctcccccctcgacccaagccaaatccaatacgcgtccaaaaagcagcagcaagctgtcgccgagattgttgagcagctgacagttgatgcgtcgacgctgaaggggatcaaggaccactttattcaatagatgagaaagggccttgccaaggatggcgagaccatagccatggtgccctcttacgtcctggatcgactgaacggtacggtgacaggttcttatctgacgctggatgtcgggggcacgt

SEQ ID NO: 68845 - DNA, 245 bp, Zea mays
  Clone ID: MRT4577_162781C.1
aaaaaaaaaaaaaaagttttttttttggggggggggggggggctaaatcctaaactttaagaaaagaaaaacaaactttttttacaaatattttatttttcccccccaacacctttgtgaaccccaaaaaattcgtatattacctattgggccaaaaccttttcctttttaggagacttattaaaaactgcaggttaaaatgggctacaggctgattctggaaaattctgcatctctttaaattt

SEQ ID NO: 68846 - DNA, 272 bp, Zea mays
  Clone ID: MRT4577_162782C.1
ggtcgtcttttgctgttgtgcccccgacagacgagggcggggcggggataattgaaaccttgttctggttcctgcacaaggaatagaagggtgccagggccggatcgggcgccagaaagggcggattgtgcccgaacagctcgtaggaaagaggaaccttgactgcggggaagattgcgagacggaagatcatgttgagcgggctgcccagtattatccagttgacgcccgacgacacgtacccgtttgtcacacgccgctagatcatgtac

SEQ ID NO: 68847 - DNA, 387 bp, Zea mays
  Clone ID: MRT4577_162783C.1
aaacccggtacgcctagcggccccgcccgagaattccgggcccaatacccgcgtccaccaacacgtccgaggtttatggttcgtttttccaaagaacaacggacaaaaaactgggatgcaccgtcgggaggatattaaagccaataaaataccgcaatccacattctaaggaaaaacaaccttgcattacgacctgaaacatcagctgacattaagaatggccgcaactcaacatgagaaacccttttgcctgtatgggcatttcccaggaatcggccaataactggaggcatgaaacccgggaagcctcgttcaagaaggatgcctagcatgccccccctggacaacgataactggaaaccatgcccgttctaaagcaatgccaaa

SEQ ID NO: 68848 - DNA, 650 bp, Zea mays
  Clone ID: MRT4577_162784C.1
ccggccgggacttcatcattcctcaccccttcccttagaagctgcaggcggtgcatgccaaggtgacagggcctcgatactgtttgagatggaaggtgtcatgacgacgagaagcaagcatcgttgtcatgaggaggaccaggagatgactatggtggagctgaggagaggcccctggacgctcgaggaagacaacctcctcatgaactacactgcttgccacggcgagggccgctggaatctcctggcccgctgctccggtacgtatgatccatttctctgtggccgaattaacctatcggcctcatcttgatgtgctgcgtctgcgtgtgcatgcttgaattagggctgaagaggaccggcaagagctgccggctgaggtggctcaactacctcaagccggacatcaagcgcggcaacctggcgccggaggagcagctcctcatcctggagctccactccaagtgggggaaccggtggtccaggatagcgcagcacctgccggggcggaccgacaacgagatcaagaactactggcggacgcgggtgcagaagcaggcgcggcagctgcgcgtggacgccaacagcgccgtgttccgcgacgccgtccgctgatactggatgccgcgcctgctcgagaagacgatggc

SEQ ID NO: 68849 - DNA, 1733 bp, Zea mays
  unsure (1)..(1733): unsure at all n locations
  Clone ID: MRT4577_162785C.1
attgggtacctcgaggccggccggggtctttgctcgcagctaggtccctccttgaactctgcttcttcttcttccaactgatcatctcctaccttttcttttccaatccctaaacctacacacagctttacggtagctgctagtgctagtgcatggccatatatatgcatctataagtagataggttgcaccctccaaggggttcatatcatccaaggtgcatgcaaggagacaggccacaataatgtcccagaggaaaggcgccatggcggctgcagtgacggccagcaagcatcgcgaggaccaggaggcgatgatggtggagctcaggagaggcccctggacgctcgaggaagacaacctcctcatgaactacattgcttgccacggcgagggccgctggaatctcctcgcccgctgctccgggttgaagaggaccggcaagagctgccggctcaggtggctcaactacctgaagcccgacatcaagcgcggcaacctgacgcctgaggagcagctgctcatcctcgagctccactccaagtgggggaacaggtggtcgaggatagcgcagcacctgccggggcgcaccggccaccagatcaagaactactggcggacgcgcgtgcagaaacaagcgcggcagctgcgggtggacgccaacagcgccgtcttccgcgacgccgtccgctgctactggatgccgcgcctgctggagaagatggccgcgcaccaccacggcgacggcgagctgccgccgccactgcacccctcgcacaacatcgccggcacggcctcctcgcgctcgccgccggcccacggnagccagcaggaggacccgagtagtagcgcgccggcggccagcggccactactgncagcaggtcgacccgagcccgagcacgtcgacgacgtccgggtcgacgacctcggccgcgctcccgccggtgccctgcttctccgaatccgaactaaggtgggtcgtggaccagtacggcgccgcttacggttacaccgacgacctcgacctcgacggcggcgccggcgtggtcgacgacgactcggctgccgccgccgcgctggacagcctcgggctggacgggctggacctggggccggccgacggcggcgtgtactcggacgcgacgctgctggactacctcaacgccacgtgcgccggcggcaccaccgtgatgacaatgatgggcggcgtccacggcgccgcgggcggtggcgacggccactacgggccggcgccgtggcggacggacgagctcggccaggcggcgaggaagctcggcgatcctcagcatcaatggagaggaggtatctagctagaagcaatcgatccagagaggtgagctagctcgctagctcactcgctgctaaagcctagctagctacaaggatggtggatgatgctgatgatgggcgcaggttgcttcttgcgacgtctcactctcagctccccctccctctctcccaagcgatgatcgagatgtcacgccagttattaattgggattagcggcgatccaaagtcgatcttattaggtgacgttcccatcgatcgatcgatcgagacatctctgctgttaatttgttcgatcgatcgtggtttgtgtagcgcagatgtagtagtttgatggttgcgtgctgtcacttttatttattagtggcgcgtatgatcaattattcacgtacatatacataanaaaaaaaaaaaaaagcggcc

SEQ ID NO: 68850 - DNA, 303 bp, Zea mays
  Clone ID: MRT4577_162786C.1
acacggaagacgcgcgctaagggagcttccacatctcgaaggtgggacacggtcagggccgcgactaggacgctgcttatgagcaccaaagtggaagaggcgacaacagctccttagagccccaacgtgttttctctaggggagggccacaccatggaataggggctgctgtttttgttctgtacgcaagccaccaaagccctgctcaactacgcagccgagcgaggcttacacctgcagatgctctccaaatactgctgcatgccagactcgcacaccagtctgtgctaccagctcactgat

SEQ ID NO: 68851 - DNA, 708 bp, Zea mays
  Clone ID: MRT4577_162787C.1
tccgcctccgccgcgctgggcgccgtggagcccgcgcctggtgcaggccgtggtgttcggctgcatccccgtcatcatcgccgacgacatcgtgctgcccttcgccgacgccatcccgtgggaggagatcgccgtgttcgtgcccgaggacgacgtcctgaggctggacaccatcctcacgtccatccccatggacgagatcctccgcaagcagaggctgctggccaacccgtccatgaagcaggcgatgctgttcccgcagcccgcggagccgagggacgccttccaccaggtcctcaacgggctggcgcgcaagctgccccacgccaaggacgtcttcctcaagcccggccagaaggtgctcaactggacagagggcacccaggatgacctcaagccgtggtaggccgtcgtggctgctgctcttttgtaaacgacacaaccagatcgatgatggtgatgctgatgagtgaaccacacaaccattggttaaatgtaaagctcttaatcctcttgctcctccaacctttcttctttttgattttgaggcaatgtgcatgtcttgcctgtatatatacactagtacatgacaatcagggtggccggccggagcaagacaaattgaggtgccaacacacttagtattagtattatattctagcatgtatgttttggcggcgaaaaaaaaaaaaaaaaatcggtacagca

SEQ ID NO: 68852 - DNA, 393 bp, Zea mays
  Clone ID: MRT4577_162788C.1
accacgcgtccgaaaaaaaaagaaggctttaagcgatggacctgttcatggctggacgacgcgctgcgtcgcctatgctgacggcgccggcactcatcatggcgtgtggagcataatcacccggtccatgttccagagcatgctgatccaccgtggctacagatggtgccagggcgccttatacacctacgacgcctttatcgaggccgtcagcaagttccccggctttggcaccaccggcgactagcaaacacgcaggcgggagctcgacgactttattgtccaaaagttccacgaaaccaccagtggatgggctactgctcctgatggaccgtttgcctggggatacttgccggtgaaggaactaaaacagacggacccaccctactatgg

SEQ ID NO: 68853 - DNA, 145 bp, Zea mays
  Clone ID: MRT4577_162789C.1
attggcgaaaagagaatagaactagagcatcccgtggagagaaggcggcggcagcgcctgtgaggagatgtcaatcctgtggtagaagagcgcgggtatgcgattgcttgttcggcggactcttgactcgaagcccttctttttc

SEQ ID NO: 68854 - DNA, 132 bp, Zea mays
  Clone ID: MRT4577_16278C.1
ccggtggcactccataccatacgtattccatttttttatctcactttctacaatttacttctggggaactactggggcagcattaaccaaacatgtgaccattcattaaactactcacagtacgtcctccat

SEQ ID NO: 68855 - DNA, 376 bp, Zea mays
  unsure (1)..(376): unsure at all n locations
  Clone ID: MRT4577_162790C.1
gggggcgccgggaggcacccggcccggcgnggcgagcgcacgcncaggggccgggccggngcancanacacgcccccggncgaccgggcgaccaganagacccaccaggaagccgggagcgccnggggggccaccannggccagccacancacagcggggggaggcaggacnngcccccggcccccccgcggcccccggcgggcgagaagcccccggacgccccggcggccgcggcggcccccaccagggccgggcggagcgcggggacgcgggggnaccgcgcggggnncgccggcgccgaccgcccggggccggcgccgcggggcggggccccgcccgcccgcgggcngaccgcgggcgcccgnggcccccccc

SEQ ID NO: 68856 - DNA, 218 bp, Zea mays
  Clone ID: MRT4577_162791C.1
tcgttagagttgtgcttcagtgactgtacccgatgggacacccggtggagcgtaaactccttttcgaaacagtgcatatgtatcagttgatggcactgacaatcttgaccagtgagcacccaacactaccgtaccgagaactacccatgtacaacaacatgctatttctatgatctctacaagagtggacattgggcatccacatactgagcacactg

SEQ ID NO: 68857 - DNA, 306 bp, Zea mays
  Clone ID: MRT4577_162792C.1
aaaacaaccacgcctccatcacatcactgccgccgcggtcgctacagtcgctgataagccgctgcatccacggatggagatgaacaggatcccccacacagtctcctcctgcctctgcacattcacttacacctctgcgctagcgcaatctctgaccagatgatcgtccgccgtcttacacgccatcgccggggaaaacgttggcgttatcctcgcgaagcacattcacttaaccccccgattaagaaccggagccagaaggaagaaagccaggtccggtgacacatctcactactctgcgctgct

SEQ ID NO: 68858 - DNA, 769 bp, Zea mays
  Clone ID: MRT4577_162793C.1
cccagcgtccggtcgcctccaaagttctgctttgcgtaagctgtgcatcaaggcatgtccagtgtctgatgcaggaatgaataagcttgctgaaggctgcccacgccttgtcaaggttaaggtgaagaagtgccgtcgggtgacctctgagtgtgctgagcacctccgggctagcaggaatggagctcttgctgtgaattttgacacacctggtggagctggtgagttgcaggatggtcggagtgtggatgacagtggtgcgctagacaatgccggcagtgatgttttgcccgaggatttggatgatcggataggaccagacctttcgagtggaagcagtggcaggccatcaagatggaaagcactgatgggtgctttgatgttgaggagcttttctgtttccatatttcaaagacaaccgcgtggagcctgctctacaagtcacgagtcatgaaaattggatgacatggttattccttgagccctttaaattcttttatatttgtatgttcaattaattggtgctgttatttgttgtatcactgtttgtcgttgtggatggtaccatgcttgtcattctgatttcggttaaagaatttagatatattgctagacttgtcagttggagcatacttattattaattgtcctagcaacagggattcatgcgattgcatgctgtaatcttcttagaaacaattgtttgggctgaaaaatatgatgtggaaacaagactatcagatcatttcaaaagtgtgaatttttcttgg

SEQ ID NO: 68859 - DNA, 515 bp, Zea mays
  Clone ID: MRT4577_162794C.1
cctcgaggccggcctggggcttcgtccatatgacttcccattcacgactcgacccagacgagctgtcacctgtcaagatatatctcccctgcgacactaactcaaaccgagcaagacatgtaggactgcgccgtgctagagcatcctcctatggccgacctccgttcccgatccccgccctgatcctgctgaacatgtctctggccgagaacaatctcctgtacgagatggtgcccagcaagagagagctgctgctccctatctacccgtggcgccaaatgatccccgtcgctgctccagcacaggtaccccctctccgactcccttgtcatccctcagaacctcgacattccctgcccctccaagacgactgcaatcatcctcgcctacgaccctaacgcgagcgactaccgtggtttctgtttgcagaacttatactacactcttgacccggtcatcctcgtactgttcctaactgacgacgggaacctacaccaggtcgtctttgatctgtg

SEQ ID NO: 68860 - DNA, 452 bp, Zea mays
  Clone ID: MRT4577_162795C.1
atcacagaccaggggccacaaaaaacagggcacccggcaggcccaagggaaaaccggaaacccgtaaacggacgcgggccgccgtttggggggggggaaggaaaataaacaaaagcggacgcggggggcgacccgggaaccggggaccggggcccgggggcggaccaggttcccctatagcgaggcgggagagagcttggggcaaggagggacaaaggggatacccgggggaaaggggaaaccggtaacaattccaaacaacaaacaaaccggaagcctaaagcgtaaagcctggggccccgaaggggtaagcaaacacacaacaaacgggaagggcccaccgcccactgcccagttgggaaaccggaaaccccagcggccaaaaggaaaaaggaaacgccccgggagaggggggaggcggattgggccccggggccgcagttttttttacc

SEQ ID NO: 68861 - DNA, 167 bp, Zea mays
  Clone ID: MRT4577_162796C.1
tccccatgtgatgacaaaccttggagagaagttaacagatgaagacgttgatgaaatgatcagggaagcagatattgatggtgatggtcaagtaaactatgaagagtttgtacaaatgatgacagcaaagtgaagaccttgtacagaatgtgttaaatttctgtaca

SEQ ID NO: 68862 - DNA, 285 bp, Zea mays
  Clone ID: MRT4577_162797C.1
aaaatatcaaaagtgcaggagcacaggtactggtctagaccctcaagactcagctaaaatgggtggaactaggtcggttttttatctgaaaaacatgtatacctttgtgacatacgcttcataaacggtttgagttggggtgttgtttttttttttccccctccttcatactcctgtcccgcccctgtccttttgcttaacctcctgcaaatatttattttcataaagaaacaaaaatggtgacccataagtgctgggccctgggcttctaccctgaagagatta

SEQ ID NO: 68863 - DNA, 433 bp, Zea mays
  unsure (1)..(433): unsure at all n locations
  Clone ID: MRT4577_162798C.1
ttttgctgcnncgcctgcgncctgggctgcccgttcttgtgccctccggcccttcgttttcttcngtggccgggctgctttattttttctgtttttgcnggnnccgngncntttttggtgggggggggggntnccnnnngnncntntgcnggttttttggtggggggtggggcgagcccctcgntccatctgccgattgcgggtctggcttgtcttctcttgtttagatgttttgggtgtcgctgtttggcctcctagtttgttgtcccgttcatttcttgattttgttggtttttgtggcgtgtggggcggccgttcttgtggttccaggcttgcgttcgcgtgcgtgcgacgtcttccctcttctgtggtgtcgcctcgcttgggttcgctggccgtgggttgtcggcgtttgtgactggggaagccctgg

SEQ ID NO: 68864 - DNA, 264 bp, Zea mays
  Clone ID: MRT4577_162799C.1
ctatggcgccacatgcacgcatgctaagctaggatgctctagagcggtcgccttttttttttaatttaagacttggcactgatcacattgtctagttagacacccaattggacgtggttgttctttcacttgagactacatatatgtgtaaataactctgtgatgtagaactagggacctacgagtccttacctttcctatctcgaggtttacagcaactcagaatggtgatgtaagagatatccttgtcatcaatctccatgg

SEQ ID NO: 68865 - DNA, 683 bp, Zea mays
  unsure (1)..(683): unsure at all n locations
  Clone ID: MRT4577_16279C.1
gccggccggngtacaaaaacgaccgactttccattgacccgccgcctgtagcccttcccgtctctggagtctggaagcttcttcctcctcgcctccgactccgtcatggccggcggcaacctgttcgggcgggcgctgagctacgtagtcaacgagctcctcgtcgagggcctcgccaacaaccgtgcattccagaggttcgctgtgaagaccaacaggactctcgagagcctatcgtctaaagctaaggaagtgagggaggagttatcggaacaattgaaggaagctcgtggccagaaagatcacttcaagcagtgaagctggttcccacatcgattcagcaagatgatactgacaatcttgttacgagtttagtccttgtctgggtactatttatgaatgacattctggatgtcattcaatggaaattagtcttaagtttctctgcacttagattagtagacgcagagcagttggtctcatgtcctttgtcataaactattgtataatttttaataatgtgtgcctatgttgatattttttcttgaaaaaaaaaaaaaaaaaaggcccctagtgatagtaggaattccttgtttagggtcaaaactttagggtcaaaactcatgtttggaattccttgtttagaataaaaatcaaatcggtcgagttgttgtggttgtagg

SEQ ID NO: 68866 - DNA, 403 bp, Zea mays
  Clone ID: MRT4577_1627C.1
gttggagcctatggaaatggatccgtatcctttggggcttgtcttttccccaaacatgaccgtgtcgcgcgcgtgctgccttatcaataccgacagcaagagcgccgaccgtgaagcaaaggcatcgccgtgcgtgtgttcctagatggccccagctatagctttactgctctgcactgacttggtacaatgcaccagcttgtccatggatgacggcaactttatttatcaccggtccaacaccagaaccatgagtttttgcaccaacgccattgagaattcctagtgacagcctaacagaggttgtttgctttataccctatatagactgagcaaacagtccgctataagggttctgtcctcctggcattagccatatgcatctttctgtcgattacacact

SEQ ID NO: 68867 - DNA, 352 bp, Zea mays
  Clone ID: MRT4577_162800C.1
aagaaaaaaaaaaactaaaaaaccttttttaaacaaaaaaaaaaaaaaaaaaaaaggagaaaatatcaaaaaatcaaaaaggacaaaaaaaaacaaaaaggtcgtcccttctatacatcccatacttacttccccctccatccaacttcttagcttttctataagcactcctaaattcacttcactgcccatcttcttacaactaatagacttgcaaaacctttcctttacccaacttaactgcctttcacaaaatcccccttctaccacatgtcttaatacccaaaacgcccgaaccgatcacccttcccaacaattccccacccataatggccaatggtacaaccccttt

SEQ ID NO: 68868 - DNA, 1179 bp, Zea mays
  Clone ID: MRT4577_162801C.1
atgcttctaagaatgagaaataagaggagaaggtacatagcatgtgcagcagctgttattggtatgtttcactatgaaacttacatgaacaaagcctcttatagaattccagctcaatctggctatgcttgggtaatgcaaacactaggaaatagaactagttgctataacatgtttaggatgagcagaaacgtgttcgataaattgcatagtgtgcttgttgaatgttatgggctgacaagcactagacgaatgtcatcattagaggcattgggtctatttttatggatctgtggtgctcctcagtcacttcggcatgcagaagatcgtttttgtaggtcactagaaacatgtagtagaaaatttgacaaagttttaaatagtgtaaacaaactggcagcagacatcattaggccagtagatcctaagtttacatgtgttcatccaaggttgcagtcacctagatttagccctttctttgacaattgcattggagccattgatggcacacatatcccagttgtggttcctactaccaaagtagttcaacatactggaagacatgggtacacttcacagaatgtcatggccgtttgtgattttgatatgaggtttacttttgttgtggctggatggccaggatcagttcatgacatgagagttttcaaagatgcaattggaaaatacggagataggtttccacatcctccagaagggaaattctatcttgtggactcggggtatccaaatcgtataggatatcttgctccatacaaaggtacaaaataccatcttcctgaatttcgtcaaggtccaatgccaagaggtagaaaagaaaattttaattatgcacattcttcacttagaaatgtaattgaaaggtcatttggtgtcttgaaaatgaaatggaggactctattagatctccctagatatcctatggcaaaacaaagtagaataattatagggtgtatggcacttcacaatttcattagggggagttttttgggagataaggattttgagttgtgtgaccatgatgagaattatgtgcctgaagttggtgagtcaagtacacaagaacaagaacaagtagcaggttcagtacaaggtgaagaagatcggaatatgaatcaatttcgtgattggatagcagatggcttgttcaacaaactgtaa

SEQ ID NO: 68869 - DNA, 337 bp, Zea mays
  Clone ID: MRT4577_162802C.1
tacagcactggcccagccccaaccaccccaggggctcctctcggaactgctgccctaaccaccttccagccagctttcactggtgccgccaaccgcgccgtcattggctccgccgctggccttgctggtctcctcggcctcgctgcttacattttgtaagcggtgaattcatttcgcacctgggtcacgatgcacgatttctttttgaccggacaacatcctgaactgtagtcggcacgcgatctcagttcatgacgtggtttagggagcgggtggactaggggggtttttcggtgtagactactgatataatatagagctatgatttgctttaggg

SEQ ID NO: 68870 - DNA, 335 bp, Zea mays
  unsure (1)..(335): unsure at all n locations
  Clone ID: MRT4577_162803C.1
aaaccaaagaaaggaaccccgcgcaccaaaaggggggaaggccccatcccctaaacaaacttgggcaacaaaaccccaccgggttcccccaaccaagggaaaacaaattcgggggcccgaaaaagaaaaagaaaaaccgggttcccccaaaccgggggacaacaggcctggttaacaaacccaaaacgggtttcccaaaaccaaaacccaaaccaaaaagggggccaaggggcggggaaaaaaaaaacaaaggggccaaatgcaagtccagtttccacccctttttgctgaggaaaagggcaaatggggcccccgggggaggggngggttcttcc

SEQ ID NO: 68871 - DNA, 1503 bp, Zea mays
  Clone ID: MRT4577_162804C.1
agaaataattctgtaatgcaatttgcctcgaaagcatggattcatgtcattttcttgtttcaccatctgatatctgacatagtgaatattgaaatgacagtaccatgctaatgccctaatgtccccatcaaccattcatcgagataaataacgaattgtcattgttttaactgaaagttatttacttattcatttgcataaatacaaactcaaacggtcctctttcatgctgcacaaacaataatccaacaacactgtagaaagagtttaggcaataatgcaaaggtatatgtacaattaaacaaacaagggccacatgttgtcagcatcctttccctctcattcaagaggtcagtttctgaccatggtcttctcggtaagaaaactttccatctttagcaatgcctcaatggcgatggtactaggtgtaagtatagtgacatcattatggccttgttttaatgcaatatgttcaagtgaaactctggcatcagcattagcatacgagtccattctttgctcaaaaagtgatgtaagttttgcataagcctttgcataaggatcaccagattcctgatgcaagagtggtcgagacgcggttcctacagcagcgattcttcttgcaagtgcatccagtgggacatctaaccatacggtcagccctttcttcatgtaactccaattgattggtcggatcactgcaccacctccggttgcaacaaccaaccgatgcattgatgacagatccctcaggacctcactctcattatctctgaagaatgtttcgctatggagctgaaagatctcagcaacagatgaaataccaacagccttctctaccaacttatcactgtcgaagaacgaataacctaacacttcggatagtatcttcccaactgtagttttgcctgaacccatcattccaacaagataaacgcaacggccatccaagtaaggcagaacatcctgggctttttgctgtagtatgagagcgtcatcagcagagtagtggacctttcctgttcctgcagattgcgcggcgcaacggagggcaggatccgcggccctccgcgtatcggcgcccagcagcaccagcctccgcggcctgtccgccgcgaccgcgagcctcgccgtcgggactctggcgcagcaagcggcgcgcggcggcttctcgagggcggcccaggcacggccacgcggcggcgcgcggacgcccacgatggcctccatctcctgccgccccgacgaggagagtgagacggcctccctccgggcgctgccgccgctagctgctcgacgaccgaccagccagctgccgcctaggcgggggcgctgctcgtgttaggtggagccggtgttggataggtcggccatcgcccgccgaggtaatggagcgcgcgcgggcgagcggtgggcagtggcggacgcagaggagaggagaggacggcctccgtggggagacgaggggtggtgtgttcaggagcccggccctcgacgagccca

SEQ ID NO: 68872 - DNA, 281 bp, Zea mays
  Clone ID: MRT4577_162805C.1
caggtgccatgcactcttctttctagcacttttctcaacaatggttttacatgtatgtctttattttcctactgtacgccttacttcacagcagaaacacatgagggacatgattaggtcaatgtcaatacctggtacacattagttgcttctacatatttgatgaatgactgagttagtggatggatcacgaggcagtcacctaagagcagggatttccatgacctggggtctatggatcagctactaaataccctaacctctgagatcgtctgcactag

SEQ ID NO: 68873 - DNA, 1000 bp, Zea mays
  Clone ID: MRT4577_162806C.1
gaaaaacgttgccaatcccatggagcatccgcttcaggatcgccgctgacatcgcaactggactcctcttcctccaccaagcgaagccagaaccacttgtccaccgggacctgaagcccgccaacatcctcctcgaccacaacttcgtcagcaagatcagcgacgtcgggctcgcgaggctggtgccacagtccgcggccgacgtcacgcagtacaggatgacatcgacggccggcaccttctgctacatcgacccggagtaccaacagactggcatgctcaccaccaagtccgacgtgtactcgctcggcatcatgctgctccagatcatcacggcgaggtcgcccatggggctcacgcaccatgtggagaacgccatagagagaggagccttccaggagatcctcgacccgacggtgaccgactggccggtggaagaggctctggaattcgccaagctggcgctgcggtgcgcggagctgcggaagaaagacaggccggatctcgggaaggaaatcttgccggagctgaacaggctgcgcaatcttgggcatgagtatgagacttcccaggtcagctgcgcaagtacgaactgctcaagctccgctccttacagtttcaataacgatgacatctgaatgccatgggaaggaatcttccgccggatcaagcaaatcaagcatactcataattgtatagagtatagacgggcatgaggttgccttccaggtctggaaaaccactgctgtccatgcttgttcagattcagtcctgactcagatgagatggtcatggactgcagcgcctgatgatggggcctaaaatagttccagtgaacccaaacgagattgttagcgtgtagataaggggagcatacaaaggaaacttatggtgtgtacatgtgtgtaaaatgtgttgatttcttttttgctgtaacagcagcctcaagtttccaaactatggtttgcctctattaaaaaaaaaaaaaagtcggttcctg

SEQ ID NO: 68874 - DNA, 530 bp, Zea mays
  Clone ID: MRT4577_162807C.1
ccggaattcccgggtcgacccatcgcgtccggccacgcgtacggccacgcgtacggcgggcgcccttttgctgtcaatttgggccagcagaaataagctatatgccagaacactagactacattgagcatgatctgacctatttcctgcggcaatccgtctaaaatgatcgcactgtagcgtgctcttaatctacccaaagcaaggggcccatcagacctagagtgcgtctgctacgcgacgtagctggccttctcgtgcttcatggcatcagggagcttggaccagtcgacgcggacggtgacgaccagcagctagcaggcctgtgacttgaggccgcagatgagccccgtgcacaggcccctgatgcgcaggtcgagctcgaaggcgaacagtatggccatcgacatgccgactatgtctaacggctccagggtggtgaccgacgccaggtgctgccaacctgatgccctagacactcccgacagcacgccctgcacggagttcaagtcgatggagatcaccatgagc

SEQ ID NO: 68875 - DNA, 576 bp, Zea mays
  Clone ID: MRT4577_162808C.1
gcccgcctcccctcccctccacgcgcaagtgatgcctctcctcttcgcacgccttgtcacatcccacccgcccgcccctgacgcctgtctcggcttaccccgcatcctccgctgcacgcaccgcaatactcctcaaccatccgacgccatccatgccagcttctctggatcccccactgctcacgcatgggcgcccgccctcgctcccgctcggctctggctcgcccgtcctccctgcctcggcgccgccctcgacctcgacttcgacctcgcttgatctacctgctcccgccgcacccatcgtgatccgacctcgcttgacctcgacctcgcttgatctgcccacgcgcggtcccgacccacgcggtcgcgccgtaaccccggcgggcagcaggccctcccgcccggttggttgagagtaaagaaaccccctccccgacgagacgaccccaagcctcctccccctggtcgcagacgtcctttccaagccgagatcgccgcagagctccctcgctcaggtcccatacccccacccgagatcgtggatctgcgcccgatgtgggtgtggggctacgt

SEQ ID NO: 68876 - DNA, 313 bp, Zea mays
  Clone ID: MRT4577_162809C.1
cacactcatcagccacagcccacgtcacgctatctctctagcggtccagccagtccacacagcacagggatgacatagttcgccgtgaccacggcgcagatcatcacagcgcacgcagcaagtatgacgcgaacgctggcataacatacgctcgagaccaggattgccaagagcaggacaaacggggccagcactggcaccatactcggagtgcgcatgagtacctattcctctctcgctgagctcctgttctctcaggtacaattcagcaagtaaggactccactgcgcataccgcgccaagcttagaggca

SEQ ID NO: 68877 - DNA, 798 bp, Zea mays
  unsure (1)..(798): unsure at all n locations
  Clone ID: MRT4577_16280C.1
ctcccttcctcctctattctgttcccccctttccacctccctccctcctcgctaaccccacccaccggccaccgcccgccttcagcctcgccggtcctcgccgcccaccccgccggaaccctagctccggagagtgccccggcctccccagccgccgatcggttccgggggcccggcgcccctccgcacgatcgcgcgagatccggggtcgccgccggccggggagcagaagccatatgtcgggggtcggcagcggcaggccgccggccgcccagaagatcctgcagtcgctgcgaccgccgctgtccttcgccacgccgtcgcggtcgcccttcgccgcgcccgacgactaccaccgctttccgacaccggctgcggccacggcacccgccgccacctcaggcggcgtcggtgcgggggctcctcctcgtgatactatcgaggaggggctggtcatacggactccggtgagatgatgcttctgctcccccaagagctccggatttgttttcccttcttgggccagcttacagtgtttggagacccatgcttcaagtcgtattgttggtcgacttttttgtctcctgttgtttatgtatatggatttgggtttcactacacctgtcataagtagaaacgcgtgaaattctgtccaatttcatttctccctggaagtcttcccgaagctcaaatgctccgtactcgcggntatggtgtcagataggcaggaactgtaattgttacgcaaccgggatcattatcagaaaagaatttatctcacacagttgtccctgcagc

SEQ ID NO: 68878 - DNA, 282 bp, Zea mays
  unsure (1)..(282): unsure at all n locations
  Clone ID: MRT4577_162810C.1
tcggggctgaggcctgaggctcataaggcacgcaccatgccaaacggtgtccagtatatataataaaagacaancaacgacaccgaaaaaacataataaactacaactccaggngcgttacaaacaagagggcacgtcgcgtcccgtcgagaagcgctgcacttgtagctggattgcatgcaccaacacaggagtgtttttccacttttctaaaccctctgaccccggccctgacctcaaaacccatgactactttgtttgaaacacaggggggacgccttc

SEQ ID NO: 68879 - DNA, 365 bp, Zea mays
  unsure (1)..(365): unsure at all n locations
  Clone ID: MRT4577_162811C.1
gccgcctttgggggccccgccaggggagagggacacgccgcnncancnnccgcgggagcccgagncaacgccggccgaacgccnggggaccgccgcggcngnncncncgccggncannnnnggcncaggggcngancgcnngancggancggngncgcagcccnanacancanacagggcggggcccggcnccngnccngcgacaaccgccgccacccacccncccaggggcgccgcgagcgccgcaggnggancgcaaaaaagggggcgnccgcgacnagggcncnncggggacnccancaccgagcagnccnnccgccccggnggcnggggggccgcaccggccggggcccacncgcgcaagg

SEQ ID NO: 68880 - DNA, 545 bp, Zea mays
  unsure (1)..(545): unsure at all n locations
  Clone ID: MRT4577_162812C.1
ctcggccggggnaaaaaaattaaaaaaaaaaaaaaaaaaaaaaaaaaaaaaaaaaaaaaaaaaaaaaaaaaaaaaaaaaaaatttttcccttttctttttaatcgaaaaagggaggggcttggataacaataagaagaaggaaacggttaagttcctctctcccacaaaatttccggcggaattccgcgccccccggcggggcccttccgtttccggcggaagggttcggggtttggggccccgcggggggtgggaataaccggggggaacggggggggttggggggggtttgggggaatttggccaacaacggaaggtttagggaatatacgggccctccaaaggaagggaaaatggaggaggtttttccaaatttcccacaaaaaagaataaaaggaagggaaggggtcaggggaaagggggaactggtggtcccggtgggtccaaaggtaagggccccaatggatagggaagaacaagttcaaaaattggagaaaaaagaaaatcgttcagcctttcgggatttaaaagcccagctggaggc

SEQ ID NO: 68881 - DNA, 434 bp, Zea mays
  unsure (1)..(434): unsure at all n locations
  Clone ID: MRT4577_162813C.1
gggggggggggtttttttttttttttttttttttttacacaaacaagaccgatttttattaaaaacaaatcaatagagccagagacgcgggtgctcgttttgcgcatccggttcttaaaaaaaaagaacaagaaatggggctcggggggggggggggtttttttttttttttacggnnngcacgggcgaagacgggccggggaaagaggggcggcccccccacccccaagcngnngcngcngcnncccccccacnnccggcagcagagcccccaacaagccccaaaccaccccggcggccgccaacgggggccccacaaaaaacnccgnccacagcccgcgcccggacaggcgggagcggaggccccngggccngacgnccaagcccnngaggggcccgagcgccccgaacaaggagnagaggggggacgccgg

SEQ ID NO: 68882 - DNA, 380 bp, Zea mays
  Clone ID: MRT4577_162814C.1
attcttgagactaacctaatcagcattctttacataataatattataaggaggattaatttcatatacaatactatatataagaaataatgcttcgataattggtagcctatcaagagtatgaatctatacaaatataataatgagaaactaatgtagagggaaaataaatgccaaacaccagatcagagttgaatcaatgtaatcctgtttttatgtagagaacaagattgcagatcaccttcaaaattggaagtctgagttaatgaatcgggttggtcaaaaagctatagtgcattttgttctcagctctatgatggtctatcttgttatggcagttgatctccctccatgggtcatcatagaaattggtaagatttg

SEQ ID NO: 68883 - DNA, 172 bp, Zea mays
  Clone ID: MRT4577_162815C.1
cgaccctctcacgtggtggaggtcttcgtacgcgtgacgggacgcgaagtcggcacggcgtcgtcgctggacctcaagatcggtacgctcggtctctccacgaagaagatcggttacgacatcgccaaggagaccgccaacgactggaggggcctccgcgtcaccgtcaagc

SEQ ID NO: 68884 - DNA, 444 bp, Zea mays
  Clone ID: MRT4577_162816C.1
aggccggccgggccgggatattcctttctgttgagctcaggaaatcgcttctgctctccccatctcccattccactcgccgacgacgaccttccgacgcctgttacatatgtgtgtggaaaacctcaagaatatgtggggtgctgtgcccactgctatgaaaaggctatgtgcttaataacagcactgcagtctccaagagcacaaccaccgaggtcatgaggcttttgagcacgttctacataacgctagtgaacactattcctggcattgcggtcgtcattctatcttcattgatgacgttgttatccaattccataaccctaaagtgcagaaatccatttctgctgatacctgtgtacagcatgggagtgcccctgacgcaagtattcttgaccttctggccacgattatgcaccaatgtgtgtcctgataacctgaagaa

SEQ ID NO: 68885 - DNA, 491 bp, Zea mays
  unsure (1)..(491): unsure at all n locations
  Clone ID: MRT4577_162817C.1
tggtctggacctttgggctgatttatgtgcttgtgcttgtaagcgttctgtttgtatcgatcactagcgcctgcccgcggagtattggaatcatgaaggctgcccataggtgtcatgttctttcccctccttctgctggtgctgatagtgacgagaacgagccagtcacttccgaacctacatactcctcggcggaaatcacggactgttatcctggtaacgcgcgtgagtccgacactacgccttactcggagaaagcgtatcctacgtcggaagagacggcgacgaacggccgtaccgcggagataagcaaatagaatactccggtattaacataatccacggagaaaatccttcgaaacagcgacacttacccgcgcagccccttacttatccggtataaccgttcgctcgttttcncttacaaaaccctttctcgcacgcgagagcgtaaaataactctcgcaattacggagcaccgaaccgattcg

SEQ ID NO: 68886 - DNA, 677 bp, Zea mays
  Clone ID: MRT4577_162818C.1
cctcgaggccggccgggccgggagcactcgttcagcccatatcagatcgactgctaagagagtcgtcccagactatcccgccgggtagctaaccttatcttcccatggagccagcgaagctcgcagctttccttgccgtcgctgccgtcgcctacgctgttgccgtcgcaccggctgccgcggaatactccggcggcgcgaccgccccagaaagctgccagacgcaaatcatgtacttcaccaactgcctggcccgtgatgagatccgcgggcagtgctgtagcgtggtcgagagccgcgagtgcctctgccagctgaagcgggaggtggcgctgccctgcagcctgcatcgccaccatcaacgcagatgctccaaggaagggtcgcctccacggtcggtgaagctggccgagctgcagcgcctcccatgcttcaagacactcaagtgctaggagccgttacgagttcgtatttttgttttgtgtacgtgtgcttttgtttgtttcacaattgttccttgttactgtttatttccattcagcttgctatggatgtaggtacctgtgcttgtccgttgagaattaaagaacgtttttaaaaaatcaaaaatgaaaaataaaaaaaaaaaaaaaaaaaataaaaaaaaaaaaaaaaaaaaaaaggaacctagggccatc

SEQ ID NO: 68887 - DNA, 294 bp, Zea mays
  Clone ID: MRT4577_162819C.1
atgtggcggctggagaatgcctcggaggttccgccgatcgagttccctcaagaattactacagaaggaagtcgaccggccgccgacccagcagttctttccgcccactactacggccgcgcagcaggcgacttctaccgcctaccgcggcgtcaccttctaccgccgcaccggccgctgggagtcccacatctgggactgtgggaaacaggttggatttatttcgtttgagacatgtaaggacttctccggagagattggaaatgtgcttgtattcttccgctcttccgtctaa

SEQ ID NO: 68888 - DNA, 904 bp, Zea mays
  unsure (1)..(904): unsure at all n locations
  Clone ID: MRT4577_16281C.1
ggccgggttttcgaataattataatcgcaggatggcatgttgcataaattgctccccaaaaaaaaaaaaaaaaaaaaaaaaacaaaaccaaaaaaaaaaaaaaaaaaaaaaaaaaaaaaaaaaaaaagaatcaatcatgcacggggaacctcgaggccggccggggtaacgaccgactttccatcgacccgccgcctgtagcccttcccgtctctggagtctggaagcttcttcctcctcgcctccgactccgtcatggccggcggcaacctgttcgggcgggcgctgagctacgtagtcaacgagctcctcgtcgagggcctcgccaacaaccgtgcattccagaggttcgctgtgaagaccaacaggactcttgagagcctatcgtctaaagctaaggaagtgagggaggagttatcggaacaattgaaggaagctcgtggccagaaagatcacttcaagcagtgaagctggttcccacatcgattcagcaagatgatactgacaatcttgttacgagtttagtccttgtctgggtactatttatgaatgacattctggatgtcattcaatggaaattagtcttaagtttctctgcacttagattagtagacgcagagcagttggtctcatgtcctttgtcataaactattgtataatttttaataatgtgtgcctatgttgatattttttcttggaagtgtgaaatgtagatttgaagaaaaaaaaaaaaaaaaaaaagtgatagtaggaattcattgtttaggtacaaaactttaggtacaaaactcatgtttggaattcattgtttagaataaatatcaaatcggtcgagtcgtcgtgattgtaggaaaaaaaaaaaaaaaaggcggccgcaaaaaaanaaaaaaaaaggggcggccgc

SEQ ID NO: 68889 - DNA, 331 bp, Zea mays
  Clone ID: MRT4577_162820C.1
aattcggcacgaggctgatacgtcttcccatatctcccgctccatgcgcgagagaatgttaaatacctacacttcctatcacctgattcgatccttgactgccaggtcttccctcttctttggtacgaagtactcgctcgacctcatttggaaaggagaggaggacagatgaggtacatgcatgtgcgtccacatgggacaggctagcctccaagtccggacaatctactgcgaactgtactggctggagaccggatcccatctaactaccaaatgtctagagataagaacgactgacatgttcatatttgcatcatcaaattattgatgc

SEQ ID NO: 68890 - DNA, 1322 bp, Zea mays
  Clone ID: MRT4577_162821C.1
tttttttttttttaactgctcaaagttgatagtgattaacttaggacaaacttttttttttttttttcggaggaagtagtcttttgtatagacagtatagtaatgacctttacccttttttttttttaagcaaactgcacttattccttttatcaaatcacatattcacatccacgaaaactgaaatgaattggagaaaacagggtaacatcgaccgatattaacagatcgtatgcattaataatcaagcagcaatttgctccttggtagaaaccttgacgtactccgccgccgatgcctcggtgctccccttgcactcgtagtagaacgcggccatggtgcaggtcgcaaacagctgcaaggcggacatcaagatgacgtacagaaactccaggagcaaccctgctgccatgttagtaagctcgcgtctcttggccagagtgtacataggggtcaaggctgcggcgagcacgccagtgacagaaatgaaaagcatgacccgagtgcgcttccccttcagcagccgccacgccctcccaagagcgccagcgccgtagcagccgggctcggccactgccacgacgacgctcatggagcagaggaaggagaagtacacgaggaagacgaagagagccaggaggagaagcgaccccacgaagaacaaaccgtagtatttcttgatcatgaggaccatgaccagaatagacatggcgacaaggagcgcaacgtaggtgatctccagtgcgtagacgaaggcgaacgtaagcacggggcctttcacctgcgccttgactctgccgaggagcgacccgatggtgtgcagctcaccggaatatgtcgagacggcggcaaacaagacgacgatctggatggctgatctgatgaccgcgccaaacagaaaataggctgtgctggtgagcaagagagccctggtgtcagcttgggtcttccggatgagtggaagtaagtccgggctacggaaatcggtgctgttgagcgcctttgtgtcgagattaagctcgactgcgaggggctggacgacgaggtcgttgccgacgaggagtagacaggtggaggcggcgataactgtgaagacagccgcgaagagcctccggttgtggctcgggaggagcaggccttctttgaggaaattgaagaacgatggtggggtcgagcttatttgcccggttgccatggctggaggtggaggctggaagctcgcgctagctagctaactagagagatagacaaggtaaggtcgaatagaagatgatgacctttaagggcatggtgagtcccggccggccccgagggacccaatg

SEQ ID NO: 68891 - DNA, 338 bp, Zea mays
  Clone ID: MRT4577_162822C.1
tgttgttgtcgcgtggggagaggcttatatgactacactgttagggacattgatggaaaagcttctcctctataaacggtcacggatatggtgaagttgactgctagcgaagactctcactgtgagctgacaacaggaaatcccactgaactgtctaaggtatatgagaaggtcaagactcaaaggtgcgagatccttctattgccctgcaatcaattcggtgcacaagaacctgggaccactcctgagattaagcagactgcacgtacaagattcatagctgaaagctcgattagggacatggacgatgtcaatggacctaatacagctaccatcta

SEQ ID NO: 68892 - DNA, 362 bp, Zea mays
  unsure (1)..(362): unsure at all n locations
  Clone ID: MRT4577_162823C.1
aaccccgggncgacccagcgnccggnncaccaccggggcgccnncgaccctaagaacgggggncactanggccgcaaagaggggggaaggggagggacgccaagaagccaaaccccaanaccanagcaggggccaagggngcnggccccgaccgccangacgggggcaaaggagcccgcaggaaccacaacnacaccgaagcagcgggggggggcaacgccggnccagncgccgcaaagggagcgcngncgggggacggccacggcgggggggacaagaacaccangggcncngcagnaccgcccaagggcccnncgcccccgccgccgccggcgccaaggaaaccgcgacggcccgcgggg

SEQ ID NO: 68893 - DNA, 288 bp, Zea mays
  Clone ID: MRT4577_162824C.1
ccttccccccctattactctctctctctctctctcttctctctgttggttttctaacaccaccttgcatcctacaaccctagcaagccctttcctctccttccccattattcccaggattcccattgcgactgcaccacgccccacccaaacccacctaccgtcttcgctccctttttcagccagacgggggcaccgaccggactgtacggtaccagacgaccaggccatggggaagtccatgcccaagggctacggtgtcctgcgaggtccccgatatggacgtacc

SEQ ID NO: 68894 - DNA, 397 bp, Zea mays
  Clone ID: MRT4577_162825C.1
gagctcactagtcgtttgccgccctttgttttttttttttttaatcgaagtaatcatccagcagccttggctagcatccaaatcagatacttacaggggagcacgctttcggggaagaggccatggcccattggggggagggagcgagcgcactggttgggcaaacacggttacgtggcccatccccggcgctggcaagtgcggccgtcaatgggcaccaacaaggcctgactttcacgtggcactgggcccacttacagggacatacaggttggcctttacttctgactcgctcaggtcaaatacggtctttctataaagtctctacgcaaatttgcactggagtgcaaacccaacccaggccctgaggatgaccggggttcccaccaaaataata

SEQ ID NO: 68895 - DNA, 241 bp, Zea mays
  Clone ID: MRT4577_162826C.1
gtcattagcagaccttttaatccgttagatttagatccaaccatagatacaatgtgtcactgctgcacgagttttctctttggctattactattgttgtaatgacaggtctgcaatcatttgatggcctttctggctcaaactgctagtatctaaatcattttttttgtaaaaatgatactgttgcataaatatcaccaaagagtttagttgtcttcaccatgttttcctacagattcaga

SEQ ID NO: 68896 - DNA, 324 bp, Zea mays
  Clone ID: MRT4577_162827C.1
ggacctttgggctggtttatgtgcttgtggatgtgcgggcactgtcggcaggcgacactaccttcttagaaacgtcctagaagccgatacactcggtcactagatattacttctagaccaagtgcgccgatattgcctgagtacatattcccggggcgtcccatcccgccgaggccgataccgagtccctagaggatccgttatccaaggaggtatatgttaccggagaactctcttaaactaagaccgaggagtcattcgaagccgagtgagtacctgcctattcagaccctgaacgcgattacaagttggagtacctaacct

SEQ ID NO: 68897 - DNA, 668 bp, Zea mays
  unsure (1)..(668): unsure at all n locations
  Clone ID: MRT4577_162828C.1
aactcggcacgaggaactccgacacgcctctccgcgccgcccgtcgacctccgacggacgcggagcagcaaaaagcagcagcgcccgcgccagcgcccgcgccgcaaaggggcagaagcggaagttggaggacgatgcatccgccgccaccgccgccgccgcgtcctcgctcggcagtgcgggcgccgaccatgacaacgaggaggaggaccggctcggcgggcacccccgagatctgccgccacttcccacgcggcgccttgcgcgccgaggtccgcgccgcaggttgatgtcctcattcgctgcgcctcttcgtggcgccacgccaaacgcgccgccgccaagcgcgccacccacgtcctcgctgagctcgccaaaaacgaggaggttgtcaacatgattgtagagggntggcgccgtggcggcctttggtgtgtcacctagaagaacctgctgtggcggcgcaaacgcaggaggaacaacaacntgcggccgtttgagcttgagcctgaacatcaacaatttatangttgatgctggtgcactacctcccctagtgaaacttttgaaaaggcagnagaagtactacaaattcagggatggttaanntagcgtatcaagagagcagctgatgcaattaccaaccttgcacatgagaatagcacatc

SEQ ID NO: 68898 - DNA, 187 bp, Zea mays
  unsure (1)..(187): unsure at all n locations
  Clone ID: MRT4577_162829C.1
tgancattattatgttcccatcaatnntatncccatcatcagnacgcctaatcaggnaccgactacactcatttcaacactgactaatcnnncttatnatcnnacaaataatgttaatccagacaccnnaaggncgaacctgagcnctaataattgtatccctaatgatatttatcggctcaacnac

SEQ ID NO: 68899 - DNA, 392 bp, Zea mays
  Clone ID: MRT4577_16282C.1
tcgactccacgcaccagctccacggcatcttttaggccgcgagcttcggcgggaccaacatcgacccgacggcgtgggaggacaagaagtgccccggcgagtcgcgcttccctgcgcaggtaccctactgtactgtctgcttcgatccacagtctagtactctagtctagcagccatggcggcggcggcggcgggtgatcgatcagctcaaccacacgccggccacactagcgaagcgtgacttgtacgcttgtttcaattgtgttcaacaccaccaaacagtacatgtatacatgtatcaccgacagacgaaaggctattaatcacatcacgtgctgtgctgcgatggcgtgtggaatcgcaaaaagatttgttcagcggaggttggtttt

SEQ ID NO: 68900 - DNA, 383 bp, Zea mays
  unsure (1)..(383): unsure at all n locations
  Clone ID: MRT4577_162830C.1
gttgtggggncccacattaaaaaggggcgggggggtgtcaaaacaacatgggattatttgcataaaaggtctagaaaaaaaaagatccccctggagcttataaccaggttatttaggctggcagacttatgattatcgtatgatatgtccccctcgtcagaatttgcgtacaacacttttttggggccagtttttaagtggtgatggggtggtctgtggtccctgcggacttaacttctctccccgggtgtgccccccccccggggttttgcgcctgggggcgtctgggctggggggtgcgctggtggtggctgcggggttgggggggggggggcgttcttttctgttggggccggttgggccggggctctgggtggcgtttg

SEQ ID NO: 68901 - DNA, 219 bp, Zea mays
  Clone ID: MRT4577_162831C.1
ggggcgaaaaacacaaatttttttttttggaataaggattagatttccaagacttgtgctggttgggaaagcccaaactttatttttttttttttataggggggcaagagcacaacccaaatacttctcctggcagtggctggacctgggaattgggaaccggaacctgtacctgtaccagttttattttttcttagagggattagagttaggggtggg

SEQ ID NO: 68902 - DNA, 191 bp, Zea mays
  Clone ID: MRT4577_162832C.1
gctcggaattcgctcgaggtaatattccccccctgatcacagcccccccgagcaaatccccaggggggccttcttagacgaaaggggcgtcaatacaccggcctcccactaaggccagagctgacatgctaaaagaccataggggacgcaccccgctcgaaaaacccgacggcccagcccatatgctcctt

SEQ ID NO: 68903 - DNA, 270 bp, Zea mays
  unsure (1)..(270): unsure at all n locations
  Clone ID: MRT4577_162833C.1
aatataaattatatatctatatatatatatattaactatcttaaggaccagctgcttggatttacattaggccctcgctataaaaaccatccccccgttaaggcctaacaagcaaccatgtgtgttaggaagggggggaacagatactaccacctgacttgctacacaggggggggcagcatctgagcctnagtccatatatatatatatgttccagaaaacgttggcaggatcccatnctacccaccacctgcagctaaaaagaggctg

SEQ ID NO: 68904 - DNA, 506 bp, Zea mays
  Clone ID: MRT4577_162834C.1
cttccctgtgcttcgtcgcactgcgtgctgccgtcccgtcccggtggtctgctctgcctgtagcttgccgtcgtcgtgaccgttgctggcctcctcttcggcggccgcctcctggcgctggcgtccctccgcgtctccttggctggctcacggccctgcgaggtggagtgtgcggcgtcctttgtccctcgtgagccggctcgaggactgcttcaagtactgcagtatctgttggggcacctgcaactgcgtgccttccgaggaatcctttgggatggacaagtgcccatgctaccgcgtgttgtccaccggacacgagagccgcaccagttccaagtggccctgatgataatgctgtattcgctttcggtgtgctgggtatgtcaggtttacgctgtacaatgcatgcatccatgatacatggcgtgactcagtatcgacggaggggtaagggggtctcccctttttgctggtactactactactcttcgtggcttcctagtggg

SEQ ID NO: 68905 - DNA, 251 bp, Zea mays
  Clone ID: MRT4577_162835C.1
gaccggacccttcccacggggaagcttttgttctgatcacgcgcgcgtacattgtccagacttgcttgcaccacatcggagggaaaataataataatcgtgtttcaacttaaatgattttcgtttcgtctcttgtactgcttacagcgtcgtcttcaattagcgagtgatgtaaaaatgcgactgctaatcttgaccgctaatttactggtatctcagcatccatgtgaaaccttgatgacgatataatca

SEQ ID NO: 68906 - DNA, 189 bp, Zea mays
  Clone ID: MRT4577_162836C.1
cagctgcactagagtaagatgaggctcgagtcattaacgctcccggtcgacgtactattgtcgcactcattctcactcttcttgctatcatcgcctccctcgctctacatcatactctcctgctccaatgctttctaatgtctacacttcctctctaacgtgacacgactcccattgctcatctccttc

SEQ ID NO: 68907 - DNA, 1416 bp, Zea mays
  unsure (1)..(1416): unsure at all n locations
  Clone ID: MRT4577_162837C.1
cctcgagcggctcgagcggctcgagctcgaccgaatcggctcgaggcctcttcccctccacccctgctctcaactttgagaccctaactatcccgtcgtcgcaagtcgccacgccgtcgggcacgccccgacgaccaacacctgctccctccgccgccgcccgtgtcctcccgctccgtcnnnnnggcgcgcgcagccctcgtccggccgcccgggtccgagcgcgctcgctcctcctccccacgtcggacagtttaagtgtggcttcattgcatgagtagttgcagttagcgtggcttttctccgtgcttgctcctggtcgtgctttgccttgcaaaggaaggaatcatgacatctgttgttcacagtgtttcaggtgaccacagggctgaggatcaaaatcaacagaagaagcaagctgaacctggggaccagcaagaagccccagttactagttcagatagccaaccaacagtaggcacaccatcaacagattatgtggcaccctatgcccctcatgacatgagccatgcaatgggtcaatacgcttatccaaatattgacccatactatggaagcctttatgcagcagcttacggtggacagccattgatgcatccaccgttagttggaatgcatccggctggcttacctttgcctaccgatgcaattgaagagcctgtgtatgtaaatgcaaagcaatacaatgccatattaagacggcgtcaatctcgggctaaagctgaatcagaacgaaagcttatcaaggggcgtaagccctatctccatgagtcacgtcatcagcatgccttgaaaagggccaggggagctggaggtcggtttctcaactcaaagtcagatgacaaggaagagaactccgactcgagtcacaaagagaatcagaacggagttgcgccccacaggagcggccaaccgtcaacccctccgtctcccaacggtgcatcgtcagctaatcagggcaggcagtcgtgaatgatggatgattcaaaactcacagctgaagagatttcagcccctgagctagatatggcagcagttttgtacagaaaacgctagcaacatggtgtcggtcggtcggtcggttgttgtaggacatgttccatagaaaaagcatagacgagtctacaggttttggagccttggtttggtcctctgtgtattcacctttctgtacaatcttagtagcgttgtgtaccttcccctggaaggaaggatagcttcagttagcgcttcagaaagtcaagtgtgtagcatattggcttattgtttgctttgcttggacaatggagatttgggagtggagttcataaccctgctgaataaatactcttagctggctatgtgtatgttggacgacaatatgatccctaatgtagtacacgtgaccacctccaa

SEQ ID NO: 68908 - DNA, 260 bp, Zea mays
  Clone ID: MRT4577_162838C.1
cctgagactatggccgactactaccacgggggcctggctcgtgtactcctacaccgatgagtgatacggactactgatagatcgttgacattgtttgggcgcactcttgttcctacaagaagtactacaacgcgaacgtttgtgtgaagctcatcaccaacgtcgcctaacacggcggttacctcgactgggagaccgacccggacgacgacaaccacgcacctgccggacagcactactgccagcgcgtcgtctgcggc

SEQ ID NO: 68909 - DNA, 1511 bp, Zea mays
  Clone ID: MRT4577_162839C.1
gcgatgcatccaggtccacgccaccactctgatgcaggtcaccagcgataggccccaccgggcaccacccagcctcttcccctccacccctgctctcaaatttgagacccaaactatcccgtcgtcgccagtcgccacgccgtcggccacgccccgacgaccaacacctgctccctccgccgccgcccgtgtcctcccgctccgtccgcgcgccgccctcatacctccaagcgcggttggatctgctctgggtccaagtccgctcgatcctcctctcgtcggaaactttatgtgtgccttcatccacgaagagctgaagatatcacatgactagttgcagttagtgtggcttttctccctgcttggtcctgattgtgtgctttgccttgcaaaggaaggaatcatgacctctgttgttcagagcgtttcaggtgaccacagggctgaggatcaaagtcatcagaagaagcaaactgaacctggggaccagcaagaagccccagttactagttcagatagccaaccaacagtgggcacaccatcaacagattatgtggcaccctatgcccctcatgacatgagccatgcaatgggtcaatatgcttatccaaatattgatccatactatggaagtctttatgcggcggcttatggtggacatccattgatgcatccaacattagtcggaatgcatccggctggcttacctttgcctaccgatgcaattgaagagccagtgtatgtaaatgcaaagcaatacaatgccatattaagacggcgtcaatctcgggctaaagctgaatcagaacggaagcttgtcaagggccgcaagccctatctccatgagtcacggcatcagcatgccttgaaaagggccaggggagctggaggtcggtttctcaattcgaagtcagatgacaaggaagagaactccgactcaagtcaaaaagagattcagaacggagttgcgccccaaaagggtggccaaccgtcaacccctccgtctcccaacggtgcgtcgtcagcttatcaggcgcctagtcgtgaatgatgattcggaactcacaactgaagagattttagtccctgacgctagttgtggcagcagctttgtacagtaagtgctagcgggcagcagcgaaatggtgtcatagaaaaacgttgacgagtcagacaggttttggagtcttggttttttttcctctgtttattttacctgtctgcaattttagtagctttgtgtcccttcccctggatagttttttggtcagcgcttaaaaaagtttaagggctgatttgttgatcggggatcccgaggggatccatgggagaaaaatcgtcttgctattcaaaattgtattgtaaggggattcctcgcctatggatcctctcgagatccctaaccaccaaatcagccctaagtgtgtagcatattggtctattgtttgcttttgctttgacttggagatttgggagtggagttcataaccttaccggagatttgggagttt

SEQ ID NO: 68910 - DNA, 202 bp, Zea mays
  unsure (1)..(202): unsure at all n locations
  Clone ID: MRT4577_16283C.1
accacagcaacaatttgtggaanncagnancaacaacagagcaacaagggngaccaananannnnaccttcttatgctncttgntntttntgcatggtgttggtaacgcaacaattttncctaaatgctnacaaagctctataantaacacttctttcccnaatacctnncatnaaagaataaataaaaaaaggngaaaaac

SEQ ID NO: 68911 - DNA, 430 bp, Zea mays
  Clone ID: MRT4577_162840C.1
cccggatcaggaccagccgcagtccgagacgggaccggtcggcgcaagcacaggaactagagtgctcaacaatgggcacaaatgaagggagcatctgaccgatgagcgattgcatatggttgtcagcttgtatataatgacgagtggtaggcacataagctaaaatgcagggatggcctccttgactgattagaagacgggcataccgcccatggaactgctgaggcattgcttgggaaagcccggatgatatagcccagagctacggctgatagacagcatgatgtatgccatgcacgcaatgttttggcagggtggggttgcgagtgctgataatgatgatactggactgttgatatgatgtctacttgcgtgtgcgcgaacgacccgattcttgtaacctgtggaggagataacggtcatcatcatg

SEQ ID NO: 68912 - DNA, 1014 bp, Zea mays
  Clone ID: MRT4577_162841C.1
cctcgaggccggccgggagcatcggatgcactgagaccgaccttatggagtctgccatgtttgccggctgctggctcctcgcggcttctctcgtgctcgcaacgctcgcgtctccccaccgtctgggcgcggcggcgggtgaaggaagcgagacgaagtggcacgttgtgagcgtcaactcgctgctgcccagcacagtctgcacgcccacgaaagcggcacccagctcgtcggcgcttaccgtcgtgcacgggcacggcccgtgctcgccacaggagtcacgccgcggcgcaccgtcccataccgagatcctaggaagggaccaggaccgagtcgacgccatacgccgcaaggtggctgccgtaactactgcggcgtccagctccaagcccaagggcgtgcccctgcaggttggctggggcaagtatctcgacaccaccaactacttcacctcgctccgcctggggacgccagcgacggacctgctagtggagctcgacaccggcagcgaccagtcgtggattcagtgcaagccgtgcccggactgctacgagcagcacgaggcgctgtttgaccccagcaagtcgtcgacgtactctgacatagcgtgcagcgcgcgggagtgccaggagctgggctcgtcgcacaactgctcgtcggacgcgtagtgcccgtacgagattacctacgccgacgactcgtacaccgtcggcaacctcgcgcgcgacacgctgactctttcgccgaccgacgcggtcccgggcttcgtcttcgggtgtggccacaacaacgccgggtccttcggcgagatcgacgggctcttgggcctcgggcgcgggaaggcgtcgttgtcgtcgcaggtggcggccaggtacggcgcgggcttctcctactgcctcccgtcgtcgccgagcgccacggggtacctgtccttcagcggagccgcagccgccgcccctaccaacgcgcagttcacggagatggtggccggtcagcacccgtcgttctactacc

SEQ ID NO: 68913 - DNA, 260 bp, Zea mays
  Clone ID: MRT4577_162842C.1
gctacgagagagaggtgagggtactgatagcgctctgtgcgcgctggacagcggagtgcatgaactcacagcgactgctgggttcttgcggcatcatgacgaaggtcgtcggcacactatggcgaatgaccagctgccacacacctctgcccgtctattggttacaataagcaacttcgggatgtacctcacagcagagaactactacatgcgtttatacctgctttgcggatataaccatcaatagattggcatcggaa

SEQ ID NO: 68914 - DNA, 365 bp, Zea mays
  unsure (1)..(365): unsure at all n locations
  Clone ID: MRT4577_162843C.1
ctccaactctctctccccctcctcagtcctcggtcacacacacactcactctggtcaccgaagactagcaaggctagctactagctcgtactggaactagctcgtttcaaggaacttgccgcgtgccaattgcataagtacgtcgtacggttaggcctccctcagttatctcttgtacgttgtgttcgcgatggcgtcggagtgggaaatggccatgggggtggagctcggcatgggaatgggcacgtaccactaccaccacaacgcctncagcatcaccaccgcgccgatgagcagccaccacagcggcggcgccagctactccacgccgcaccaccaccactactatgggatgccgcccacgg

SEQ ID NO: 68915 - DNA, 849 bp, Zea mays
  Clone ID: MRT4577_162844C.1
cattggccgcctcgaggccggccggggcgtccctcctccaaccctaaccttctctcccccactccgccgccgcattgagcacggggtcgcaaatctcgcctccggtcctccgcacacagggcggcgactctgcgtgcgcacctcccgcctccggtgggccgtcgcgcccagccccggcggctgcactgcacgccgcgggcgggcagcgggagccagcagccgctgctgctccacataggcagcctttccgctatgttagcgcttgtgccccaagcgaagcgttacccttacccaccgtttagcgcgtgcgcttagtgccgcattttggaaccctgagtgatagtacatgcagtatttcaatcttggtgtttggtcactgaccgtaacagtttgctttgtatgcatggcccttaagatcgcctcccttttgctatgtgggagcgtgtcgagtcatagccatgcaaaattaacgacgaggttctggagagtttttctctggaacttcctcccttcctgttgcagttctaggtgtcttcatccggtgcatcgagttccctgtagtgtatgatgaccattatgtggcagctgttttctgcagcgcttctgtgagctcatcactcgtgcgactctttgccaaatcaaatggagatgtctaagctttggaagggaacatgttttttaaaaaaagaatttgtgaaaaaaaaaattgtttcctcgtatagttctaccataatttcgaatttccattagttcagtcaaactgcagtacacagttttaccattattcttaattctactgattgtcaattttcttttcaatttgacctttaagatgtcttgcttccaaaa

SEQ ID NO: 68916 - DNA, 182 bp, Zea mays
  Clone ID: MRT4577_162845C.1
atggaatctgttgcactggagcacattgggcgatggtgtccgtaagtttctttggtgataatatgctatattgaaattccttgcttcagttagcattcctagacatttactctcctttttatgagcagttctttaatgtcaacttgatgtgctgtgagtaaactaaacataattttggactt

SEQ ID NO: 68917 - DNA, 126 bp, Zea mays
  Clone ID: MRT4577_162846C.1
gtatacacatgcatatatttactaatcctatctgccaaaatggcttagacacaaaaacacctcagcagaaatgaatatacctagcactcagatcttcgtgtctaatatagtttgccactaaaagga

SEQ ID NO: 68918 - DNA, 449 bp, Zea mays
  Clone ID: MRT4577_162847C.1
gaacaacaggcttgaaggcattggaaatacacaatccgttttttaaataattgtgtgaaaactatagtgagtgttgtagcactcgcagaaatatgcttagcaacactcgcatgtcaggatctgtgtgtgcaatgtttgcttggtggtggtctgacctacaacaatggcatccataaaacgagtgcaagtaacagatgatcttggagttgcaagggaaaaagaggtgactgcccgaacgtgagaaaaatagcatgacatgtagacctctgtgttggagttgttgtgtaaaccacaaatgccacactgaaacacatagtataaaactgcttgaaacctcctgtagccatctatgcatcaaattatcaactagcatttccagcatactgaactctcttctagccttgtgtaatgtgtatgtcaaatgtataagtcatgacatttcatattct

SEQ ID NO: 68919 - DNA, 420 bp, Zea mays
  Clone ID: MRT4577_162848C.1
ccgaatgccctgcgattcctctgccatcgcctgctagtcttcccctatgggatcgtccgacaggaatagcatagagggccgcatgatccgagtcaatgaagccatggaccacaatgaggctgcttgcctggccccctagggacccatcctctgcatcaataactgtcggttattcggcagcgcggcgaccatgaacatgtgctccaagtggcacaaggagatgataacttatcacgatcagtccaagctggctgagtactgtatcgacagcatcgcgaacggcaacgacgccgtcatagagccggttgttgctggcatcaacaatgtgatcgctgttgcccaatttgagtagcaaacaatgtacgtgcaacaggccggtgatgttgacggacccacagaggcggtggcggctatctccaa

SEQ ID NO: 68920 - DNA, 311 bp, Zea mays
  Clone ID: MRT4577_162849C.1
tgtttccgcttccatctccgtcctctgggcgcatgccttctgcatccacactctcccaccatccgtaaaaaggagaacgccctacccacttcggttattccgcatatgtccttttgcgagaagcacaacacaaagaaccttatctacgatcttcaaaacgttaacgtcaccatcgctctacagttctaccaagccagctactataatctactatccgaggttccaaaacacatgcatatcacaccatctatactatttgaccgccacaaggttaatgcattcttttcacttatggccatttaggatctcct

SEQ ID NO: 68921 - DNA, 592 bp, Zea mays
  unsure (1)..(592): unsure at all n locations
  Clone ID: MRT4577_16284C.1
cccgaggccggccgggagggcggaggagtggcaggctgactagtagcgttggctgtgttgatcgtgtttagggnnagggnnngcggggaagaggaggncgcggagaggagagcgggcggatccgacgagcggcnngggcgaancggagggcnnagagnggaaaacgncgagggacaggagganggaggggncgngcggggacaggnggggcggaagcgggaggacgaggcgcncgnnccaggnnggnnngcacccgccgccgncgncggggcgggnagcggcgcggcgggaggggncaaggnacaccacgacgnaggcacggaggncgccacggcgccagnngacanncnncaggngcnncccgcagacgacggnaaccncaagggcgagcgccnnnggcagcgccgnngacggcggcggnggcggcancgaaggcggnagggangggaanggangaagcggngaagnacaaggagganaagggngcagaacgggnggaagagaaggnggnaccngcngggagggangannacagcgagnancgnggcgacnanngaaccgaagnnngngngacgggggaacnaagaaagcg

SEQ ID NO: 68922 - DNA, 336 bp, Zea mays
  Clone ID: MRT4577_162850C.1
ttcagcattcacaaacacaccaatcgaagcgcactaacaacaacctaacaacagtggctaccgagatattagccctccttgcgcttcttgcccttttagtgagcgcaacaaatgccaacattattccacagtgtgtacttgctcctagtgccattattacacaattcttttcatcattaacttaatgggctttgaatattcagccgtataaaactacatgctacaactagcgtttgcgggtagcgttttacaacaaccaatttatcaattgcaggaacaatccttggcacatctaaacctactaaccatctcaacgcaacagcaacaacagttttt

SEQ ID NO: 68923 - DNA, 550 bp, Zea mays
  Clone ID: MRT4577_162851C.1
cgggcttactactcttctgttgcatgccctgattctaatcgtccaatgtaatttattttagcctgaatagttcacactgtgctgattatgtgtcgatttctgccgtttccaggtccctgttgtttttaagaaaaacaaaacaatggaggcaacattagcattctccaaggacagcccaccaatttcgataatttgtgcagcaaagtttgtgggtttacccctaaccatggatcctagccttctggcttcgcacccaccctacgttttgcttctggagaatcactccatggtgtcaacccaatcctcctgtacattgccagcggtgcaacaattccctgcttctctgggaagaatgatattgagtttgggcatgttgttgaatggcttgaatatgtccccatctttctttcaggctctgaatttgaaaatgcctgcttatttgttgatggattcttggcctccatcaaagaataccaaaatcttgtccgctggttcaacagcatagattcagaatacagtgacacactgaacgaaattttggctgcatatg

SEQ ID NO: 68924 - DNA, 250 bp, Zea mays
  Clone ID: MRT4577_162852C.1
gttggcgcgacttactggcggcgagataggtccggcgaagggcagggttggctcggggaggctctggcggtcacagcgaggtgcgactcggtggcggggatggccggaatcgctcggtccacgcgtgcaggcgggtgttctcatcggcggagagtgtaccggccaaaccacggcgatctggttcaatccaagggcacggtgagcttcacggggtaacgtagtgaccgtgtgcacaaggaatcggaaaatg

SEQ ID NO: 68925 - DNA, 763 bp, Zea mays
  unsure (1)..(763): unsure at all n locations
  Clone ID: MRT4577_162853C.1
gcggggctccctctgtctccctcttagcgacgactgggcggccgtcgctgctggcctgctgccctacgccaggtgcccaagtcttcttcgggctcctcgtcgtagtcggcgacgaccaccaccaggtccctgttgtttttaagaaaaacaaaacaatggaggcaacattagcattctcccaggacagcccaccaatttcgataatttgtgcagcaaagtttgtgggtttacccctaaccatggatcctagccttgcttctggcttcgcacccaccctacgttttgcttctggagaatcactccatggtgtcaacccaatcctcctgtacattgccagcggtgcaacaattccctgcttctctgggaagaatgatattgagtttgggcatgttgttgaatggcttgaatatgtccccatctttctttcaggctctgaatttgaaaatgcctgcttatttgttgatggattcttggcctcccggacctttctggttggtcatggcctcacaattgctgacattgtagtttggtcaaatcttgctggaattggtcaacgatgggagagtctaaggaaatcaaagaaataccaaaatcttgtccgctggttcaacagcatagattcagaatacagtgacacactgaacgaagttttggctgcatatgttgngaaaagaggaattggaaaatctcctgcaccaagccttaaggaaaaggtacatgtttcanaggatccatcagctccagaagttgatctccctggtgc

SEQ ID NO: 68926 - DNA, 500 bp, Zea mays
  Clone ID: MRT4577_162854C.1
aaaaaaaaaaccccgccgggttgcccatgaattgggaacaaggttcattttcctcccgaaaaatttgacccaagggacaaatccccctaaaaaaaacaaagccttttttaggggacatttcggaccggtaaaaatcttttcactggaacgggggccccttgcttcccactaaatcccaacaggggttttagcacggaaacataaggggccccttcaacaaaaaaaccacggggggcacccttgggatccccatttttgccagcttccaacagggcagggacaaacgttttaagttcttaattcactccacaaaacgggaaaaaggtctttgggccctgcccattttcaccaaaaaaaaaccccggggagccatgttttccactataaaccccacgttctaccggaatgggccctttggtcccatcgcccccccaaaaaatcttgggggatcttgaatggaggggaaacacaaaaacccagggcatccattttccaggggg

SEQ ID NO: 68927 - DNA, 185 bp, Zea mays
  unsure (1)..(185): unsure at all n locations
  Clone ID: MRT4577_162855C.1
cctcagccccgacctaccagccttgccggacgccccactccttccttcctctcgatctctggnnttgnaacccgggtgcccccttgcttcgnaattttcccncccccgccaagagcctttcccnaanncccgaagctcttgcgctgggtttctctccctggtgtgctcgcctgtaccgcaacgtc

SEQ ID NO: 68928 - DNA, 266 bp, Zea mays
  Clone ID: MRT4577_162856C.1
tttttccccaaaaggcagaaaaaaccattgtcaacgggttaaatagagcatttaaatgccagtaaaaaggggtttttaaatgttttggggaggttgaacaccttgcttgaaaaaagaaattattgaatgcgtggccattttcctttttaaaacttttgaacccaaattggccatggctggccaggatttaggtggcagccactttaattagggtttgtttgtagttagaaggggcctaaaatccaggggggttcatcacaggtgcg

SEQ ID NO: 68929 - DNA, 162 bp, Zea mays
  Clone ID: MRT4577_162857C.1
caccaagtgcatggttatgtcaccactcaggagtcaggactccagccaacgacccacacacaagtgcttgtcgagattccgtttcttgagtttcaaacgaaaaaaccactagagccttgctatcagtggtagtctttacagtcactcccacacacatagcga

SEQ ID NO: 68930 - DNA, 1441 bp, Zea mays
  Clone ID: MRT4577_162858C.1
atttgcccatgctccactgtgtgtacattgtacatgaaaaacacctaggccttgttcgattatttctatcccatgtggattgggtgagattagaaaaaaatatgaaagattttgacttgtttatgatttaaaccaactcaatcccacccaatttacacgaattgagagcaaaacaaacgagccctcattaggatttcaaccccatataggattcctcccttcgtttatgtcgatgaccagtagatggtctggctttgaaccattcggtccctctttgtacaacttgggcaaatatgcgtggtatgctggtaggtagcgtgatacaaaatccataacctcctcatcagacattccaggttttccatctgctctcatagctatctctgcctgcagcctccactggtagacagaactaggttctcttatttttataacgatccatgagtcgatgaacctgtcccaagcgtcatagtatgcttcaaggttgttgttaaccacctcgagctggggatccactgctttcacaacttcatttggaagaggtttaaatccaagcatccatccttcaaagaaaacaacctctaagggcccttcaacctccggccacacagaaggatcagcacgatcacctcttcccccaaaagcagacttgtcataccgtggaaccttcatcttgatgccttcttttgttagtttcatcagtgactcaagtgtttcaacactgaattggagattgtggcttccagcatttccacggagctccaaaagagcatttccagggtatctgtccctcagttcattctgctcttttgctgtcaaatagaagtcatctatagacaatgtggcggatttcctaccagcaacctgaaaaagataatcaagtgcgaagaccagagtcgtctttccacttccttggggagcgctgaccccgatcaccaatggcgggatgtcgtcgccctcgctgtacttggctctatgctctatgacctggtcctcgcaccagaggaagacggggatgtagaactggtaaacccgggccttctcggcctccgacagctggagctcgtcgaggcggaggaggcgcgccacctcaaccccgcagcgaagccaccggccgatggagtcggcgaccttctctttggtatagccgatcctgtccaccagtggaccgctgcatatgaagctgtagaggtcccgcgcgctgagcgccggggatggcggcggggcggcgcgcggcggcgaagccgtcgggccgtcgtccaggcatgacaagaacgcatccatacagtcaagatccgaggacctgaacaatcgatcggctaaccagtatattagtaggagcggctaacagaagatcggttctccagtatataagtttagcgacagagtgggtgcgggattttttttgtttatagcgcatcatcgaacattgtatgcccgg

SEQ ID NO: 68931 - DNA, 216 bp, Zea mays
  Clone ID: MRT4577_162859C.1
ataactcccattttctactctactattcactatgcacaacacatcacacatggcgatccttacttttttttcttcctactaaccaacataatcctctaaatactaataacttctacctctccactttactccttcatcctactgttcacttttccatactcaacctattacctctcaacctcaccaactcttatacatataatttaccactcattc

SEQ ID NO: 68932 - DNA, 376 bp, Zea mays
  Clone ID: MRT4577_16285C.1
tcgatccggcaaaaggtgagttcttggctgccttttccccccgcccctgcctaaaaacctatgttcttttcatgggtagcttgattcagtcggtgaattgagcttccggcttcgacaggagactcagagcacactcacggctgctttgttgtttaatcacaccgctaatcgtgttatgaagagaacacatggaaagcataccaactcaattcttgagacttctattgtaaatgcttctttttgaagatctcagggaactagaccatcaaagcatccactgtatttggacttgatcacatataacttccgcctgctagatatttgctatttacgtggcaacaaactcactaaacatataacccatgactagggaaca

SEQ ID NO: 68933 - DNA, 225 bp, Zea mays
  unsure (1)..(225): unsure at all n locations
  Clone ID: MRT4577_162860C.1
tcatactaaaaacttcattatttaactatatctcatcaaatatctaaattaaaccaccaccaataattgcttcttcatcaaattctatctagtcggttgtgggcaantttattcaattccancaattataacaattctaataacntcccancattatcctcatcattctcataaaacaccaacaactctatttatntcaataaactancatnactcacaccacct

SEQ ID NO: 68934 - DNA, 487 bp, Zea mays
  Clone ID: MRT4577_162861C.1
aaccccccacaaaaacggtttgggttcccaaatgagggaaaacccggtttttcaaacaggggggatcctgggaaaataaggagaaaaaccccgggtttttttgggcggggtttttggcccccttggggggggggccctcccggggctgggccccttttttgggaaccttttcctggaagggcttgggggccccccccccccggtggttcgggggggaccccggttccccccccttgggccggggcccgccgccctggcccctttgggggggggggtccctttggggcggggggggttttgggaaccctttggaaccttggggggaaaaaagggcggggtccctgaagggagccctttgaaccaggggaaaacccctcggcccaatttcggggccccggggggtccccttttttttgggggggccccccccggggggggcccccacttttggcccctttgggggggggaaaaggggccccggggggaa

SEQ ID NO: 68935 - DNA, 572 bp, Zea mays
  Clone ID: MRT4577_162862C.1
gttctatatcgcgagcggccgccctggtttttgtttttttttttttttttttttttttttttttttttttttttttttttttttttttttttttttttttttattttttttttttttttttttttaaaaaaaaagaacgggcatttttttcaggcaaaaaaattttttccttccctggcgggggggttaaacccccccaaacaacgctttaataaatcttccaaattcaacacagggtctacaaaagggggtttggctaaagaaccaccccaatgcccaaaaaccaccctaagggcgtgtttggatcccttgcaaaaaaaccacgccgggccaaaccccaagccccgaaattgggggggccaaattggcccccccattttaggggggggggggccctccacctaaacccccaaacaggccttaaattttttaaaggcttcccaccacccccccccaatttggggcccttggaacccttttggacccccccctttggttgggtcttttgagacttgccaacccccgcctttttgggttttttataaaccctgggcttattgagaccccccctg

SEQ ID NO: 68936 - DNA, 243 bp, Zea mays
  unsure (1)..(243): unsure at all n locations
  Clone ID: MRT4577_162863C.1
gcgtacatttcctttttgtataaagtatagtatcatctttgtatgttantcctaaggggcgacaaacaaacaggcgagtgaggcctacacctatcatgttccaaaggaaatgcatcactctctctatctaaaaaaaaaaaaaaataaaaaaatcaaaaaaaaaatataataaaaaaaaaaaaaaataaaaaaaaaaaaactaaaaaaataaaaaaaaaaaaaaaaaaaattaaaaaaaaaata

SEQ ID NO: 68937 - DNA, 1003 bp, Zea mays
  Clone ID: MRT4577_162864C.1
agcgtccgcggccgcgtgggctgctccagcgcagtcgttcagggctcgctcaagtgctcgaggccgacatccagcacgccaacacccttgcagcgggtttctcgagggactacgacggggcctgcctccagatgcgcatgtcctacagccccgccgcccacttcttcctcttcctcgtgcagtggacggactgcagcctagccggcgcgctcgggctgctcaggatactaatctacaaggtttatgtagatgggagtaccaccatgtcgacgcacgagaggaaagcgagcatcagggagttttatgctgttatctttccctccctgatgcaactgcccaagggatcagcgacgtggacgaccggaggcagaaggcggcgtgcacggagaggtaccggaggagggacgaggacgagggcaagaggccggtttcggaggccgacatcgaaagggaggaagagtgcggcatctgcatggagatgaacggcaaggtggtgctgcccagctgcagccatgccatgtgcatcaagtgctaccgccaatggcgatcaagatcgcaatcctgccccttctgtcgggacagcctgaaacgagtgaactccggggacctgtggatgctcaccgactgccgggacgtggtcgacatggcgacggtgacgagggagaacatcaggcgtctgttcatgtacgtcgagaagctgcccctcgtcgccccggacaacatcttctacgcctacgattctcatgtaaaatagctggagctagctgtgctgtgttctgagagtgatgacgcatggcttatcgattcttcatgcagaggagtagagggtgttcctcgtcctagctaggacgtggctaaacgcttggaccggggtgcggactctgacgacagaccttttcagtctatctaactgggtgtgggtgtacagtctgctcaggtcctgtaaatataatgtctgtgcatatttatggcttcaaatgccccgttgtttttcagcttggat

SEQ ID NO: 68938 - DNA, 1881 bp, Zea mays
  Clone ID: MRT4577_162865C.1
ttgcacaccctgtctctacagtctctctctctctctctctctgctgcgcccgcggctattaagcccgatctggatgagtcggtgagggagtgcgacgaggagagccggcgacatctaatcactggcgagggtcctcactttgagcgacagaaaggtggcgggcatgacggaactatatggcacgggcttagaaatcaattgaaaacgcggggttggcaatttgggcctggtgaaggtcctgatgtgggcgctcgaattccgttgctgtcgcagggaagcgaggccaagggagcggagcggggcttcggctgggttccgcgcgcggccgctcgctacttccagtgttccatggtgtgggtgtgggcggctgtggcgatagccggagcctgaagcggcgggtggtgtgtggtgggcgcaaggagccacacggagcaggccgccacggcgaggaggaggaggaagaggaggagatggtcgtctgctccacgcgcaagtcgttcaaggactcgctcaaggtgctcgaggccgacatccagcacgccaacaccctgtgagtgcccccggccccgtttccatcccggccgccccgaattcacgctcgccgcagctgccgcctgccgcagatcgatctccgcgggctccgcccgccccgattccatcctgaccgaaaccggggcggcgaaataaagttgctccagtgggtgggtggggtgggtatgctacagtggcggttgagctctcatgtcatgtcatgtcgtgtcacgccgcgcgcatgagcgagcggtgggcgccgacgatcgggctggcacaccacctgccttcctgacgcgtgccttccctcgtgctgactgctcgctcgctcaaacaactcgacagtgcagcggatttctcgagggactacgacggggcctgcctccagatgcgcatgtcctacagccccgccgcccacttcttcctcttcctcgtgcagtggacggactgcagcctagccggcgcgctcgggctgctcaggatcctaatctacaaggtttatgtagatgggagtaccaccatgtcgacgcacgagaggaaagcgagcatcagggagttttatgctgttatctttccctccctgatgcaactgcccaaggggatcagcgacgtggacgaccggaggcagaaggcggcgtgcacggagaggtaccggaggagggacgaggacgagggcaagaggccggtttcggaggccgacatcgaaagggaggaagagtgcggcatctgcatggagatgaacggcaaggtggtgctgcccagctgcagccatgccatgtgcatcaagtgctaccgccaatggcgatcaagatcgcaatcctgccccttctgtcgggacagcctgaaacgagtgaactccggggacctgtggatgctcaccgactgccgggacgtggtcgacatggcgacggtgacgagggagaacatcaggcgtctgttcatgtacgtcgagaagctgcccctcgtcgccccggacaacatcttctacgcctacgattctcatgtaaaatagctggagctagctgtagtgtagcagcacaccatctgtgctgtgctgtgctgtgctgtgttgtgttctgagagtgatgacgcatgatttatcgattattcatgcagaggggtagagggtgttcctcgtcctagctaggacgtggctaaacgcttggaccggggtgcggactctgacgacagacctttttcagtctatctaactgggtgtacagtctgctcaggtcctgtaaatataatgtctgtgcatatttatggcttcaaatgccccgttgtttttcagctggataaaaatgtgtctcccataaaaagccatagagttgcacagacattatatttaca

SEQ ID NO: 68939 - DNA, 407 bp, Zea mays
  Clone ID: MRT4577_162866C.1
cttctccctagccgccgccttctctcctccctgtcttctccctcgcgcagcagtccttccacggcaagcagcgagcctcgtcggacgctatatgctctggtcgcgcctgggactcctatggccgagctagccacctgccaggacaagccgcagacccctctgctcctccatggccatgagctcgacgtccccttcttcctctcctcccccatttccctctatcggccattaggcccctgcacgtgcctctccatcgcacaagcgcaggagacctgtccgtgggttggggccagggttttccctgggtggcctcgctgagagtagcaggtcgagtttcccttgtccatggcgcgacatctccaatggcgtcttcccctctggataacatgctcggctacctactctag

SEQ ID NO: 68940 - DNA, 683 bp, Zea mays
  Clone ID: MRT4577_162867C.1
ggcaagtccagctcccgccggccactcgtctagactcgagagcggcacgatgcctccttctctgcaccctccccacctccacttccacaagctcaagcgccgccaccaccccgccgccatggccaagaagggcctggccgccatcctctacaagttccgcgacgtgcactgcccgccctccgcctcgctgccgccgtcgaccccgtccgcgcactacgcccagcgctgctacccgccgccgctgtccgcgtggccctggccgtcgtgccggcacccgcgcaccagctcgttccgcgggcccaaagacgacgccgccgcggtgttccggaccgtgaacaccgtctacgactacgacacgatctcgggctcggagcaggtcctccggcaatcctccatcgatgaggcggcgtgcatcgaccggcgcccactgtcgttgctcggagaggccattgcggagcaggcggtggacgaggaggaggagaaggagacggagctgcgagagacggccgtcgtgcgcggcatgcgttcggagcgactgttcttcgaaccggccggcgcagagttcttgcccaatcagaggtttcaaagcgtggcggtggcgccggcgagaagcaaggacgaggcggccacggcggacgtcaagagcgaggaacaagcgacgacagacgcgccgcacgacaagg

SEQ ID NO: 68941 - DNA, 626 bp, Zea mays
  unsure (1)..(626): unsure at all n locations
  Clone ID: MRT4577_162868C.1
aattcggcacgagggtatttcacatgaaaagcattcggacgttccctctattttttcgaatataattgttggctctgatcctgacaaatctgtactcatacacgggttcttacgtcaatggcccttgggctttttgcctctaagttgcccgtaagctcatggcaagtggttttaagtccactagcaaatcacctcatgtctctctcaggagtccagagacaagtggcttcaatgatcatcgtttcttggttcaaagatctgagaggcagagatcctgtatcagtgggtacattgctagcttttctatcttccttgaaagagtggctggtggacttattgacttgctctgatccagcattacccacaaaaggnttctgtgcttccatattctgaactttcaaggacatacacgaagatgcgcaatgaagccaataatttgctccacttaatcgattcatgtgctgctttcaaagattatagtagcagcttaaaccttaacactgacgtgctgactgttgatgatgctatcaactttgcatcaaagctttttgttaccatctgaatctgatattccttcagaactgagaacattntcttgaaaacatagaatagcaaacaggcctatt

SEQ ID NO: 68942 - DNA, 334 bp, Zea mays
  Clone ID: MRT4577_162869C.1
gggaaaaaaagaatttggcaaccctgtcaattagaaatttaatcaaaaaatttccgcccgttatgaacgccgcgcaaagttgcttgtttcaattagggcagcaaacatttcgcttttcagaggtaaaggaaaatcttgagccctgttttttacagcaattttttaaaaaggaaaacaatctttttcaggaatccttttattttttgtccccccattacacatggaagcttctgtgagcaacaacaattaccggtacacattaaaaattacccttaagttgaaaagaaaccttcaggggttttttttttttggttaaccatcccttatgaatttt

SEQ ID NO: 68943 - DNA, 286 bp, Zea mays
  Clone ID: MRT4577_16286C.1
cagcagatgagtaatcatcaagaatgagtcaggtgatcatatattgtctgttggctagttgtgaagaatagatagattctttacatgatgtattaaaatatatacactgaaatacaggttggtctatctctattccatggcaaatttcttcttgaaacttttcagtaaacatcaagtttcatgcgcagacgtgtctggatgtacaacatagactggttcctcttcaatattagtttgtgtttgcataaaaaaaaaaaatcatcgagaccctgatgttactgtacat

SEQ ID NO: 68944 - DNA, 1164 bp, Zea mays
  Clone ID: MRT4577_162870C.1
cggacgcgtgggcagccaccacacagcaggtcacgtaaatctgcttctcacgtctcttgctcccttgttcttatctcaagccatcgtaatatcccagattcctatacacgtgctacctctggaattctctctgaattctatcactgcacgtcatcggccatgcagatcaagtccatggtaaattttagtgctcgcctccctgtacatcaatgcaccccgcgtaaacgttcagctcgccggtccagcctttggtgctaaccccggccgccgcagcgtcctctactgacgtgccgcacgtctgctccaggccgcaggtttcttcctcgcccagatcatgccgtcgtcactgctcctcgacgctccctgctcggcctccggcggctgtccctcgccacatggcgcagcttgcctccctccccaacaccgggcatgccctctgctcttcatcaccatgcagcaagcccagctttcaaccctagcgccggtagctacccctccttgttctagtcctcagttcatctctcgccgtctcctagtcgcggagacatcattgctcgaccctgcctcaccaagccgtgtgccgtcgtccctgctcggcctccggtcctccccaccgtgtcaagtaatggctccctggtgctcgtcgtctctgttcaactcttcttcatcacgccctagtgtgcgcgctgctgttcgccgcgcttggcctgtgtcgtcatctcctcgagccactctcgtctcagcaggactcgcggccatacgtgttcaactgacttccttcgacggtcgcctaagctcgtccctgcttatctactcctcctcatcatgaccaggtctacgtctccgtatgccgatgtgcccagactgtcggtctcgtcaaagcgtcaccggcggtccgcgcggataggtacgctagctgatcacgtgttgcggaggagaagaaccatgtcgacccaagaggatgaaaggatgaactactctaagaatcaatgatggcgaatcaacctaatgagagatgggccaatcaagtgccaggataaagatggtcgtcaagtgatcgtctatctaacaaaccctaacctagtgttttgttaagccccaaattgatagaagaaaaataataataataaaataaataaatatatttattatagtgatttgggg

SEQ ID NO: 68945 - DNA, 135 bp, Zea mays
  Clone ID: MRT4577_162871C.1
tgatgtcttatgaatgaataaccaatgacaatccgaagtagcctttttaggcgttttcattatatttgaatggaccggaacatattgtgttcaataattatctgtgtgaagcctgtttatgctacttctgactgt

SEQ ID NO: 68946 - DNA, 657 bp, Zea mays
  Clone ID: MRT4577_162872C.1
gcggggtgcctgcgcattggggcctgttttgatagctaccgtgccgccgaaccgtatcgtcttaccacagcagagtgaacaccttcccttgctactgattcccaatctacatggacacactttcctacagtcatgcccaacgaaagagaatcccatccccactgtttccattggccatggcgagtgtgatccaaagaccaccactgcgaacctgatctacaagcttgcaggcatttatacctaacagcatgacaggttcgacaaagaagctgcccagatgaacaattcgtcattcaagtatacttgatcgcttgaccagctcaagggtgaacgtgacataggtattacaattgatattgccctgtggaacttcgagaccaccaagtactactgcactgttattgatgccccgacacaccgtgacttcatcaagaatatgatcactggcacttcccaaggtgactgtgctgttcttatcattgactcaaccactgatggttttgaagctggtatctccaatgatggccagacccgtgagcatgctctccttgctttcacacttgatagcgaagtagatgatttgctgtttgaaccagaaggatgctactacacccaagcattcaaagggccccttatgatgatattgccaaggaaatc

SEQ ID NO: 68947 - DNA, 510 bp, Zea mays
  Clone ID: MRT4577_162873C.1
ttttcatattcttttctttttttttttttgacctataagcttgttgaggtttatgtttgtagggagaagacagctgtatagtacctagtgcacgatcactatggagtcggcccataccacaaataccttgccgctttgggcgtaagtggccaaacacaacatcaccggcacattcgaatgtggtctgtttagtaacatgaatccatggaagttccacgactcggaatagagggcaccaaccaaaggacctggagcttgaactggtcacatggacctctgctggcgagggactgatcaccaagcctccgttcttaccggatcatttcatctgtacacaccttcatctcctccgggtcgtgatcaaccccaatgccaaccactcccttgccgaagtgcctgatgttcatcctgcttttaggacatcaatcgcacctgggacacaacactgacctttgtgctcttcaccgaagagctcacaaactgcttgatggaaccgacctggaccagggc

SEQ ID NO: 68948 - DNA, 1188 bp, Zea mays
  Clone ID: MRT4577_162874C.1
aggaaaatgaaaagctgatagcgagccatgcatatggcatgtattcactcggacaggcatgcacgcgcctttgcatgctggagggattattggcaacgactgactttggtccaagtcaatctctctgactacctctcttcactctttaggctagcagtactatgggactaatatcaagggggatgttacaaaatattacatatgtgatcaatccaaggggtacgacagttttccccaatggacacaccttttgggatacaccccttcacttgtatataagtgtaatgatctggggaatacaaacaggtctctcatttgtattctctccatctttttccactgagtatacttcaacaatacatacccaaggggcagtcgtcatcactatgatgcatgccccacggggccaggccggtagcacggtttatggcgagaggctgtacttggcataaatgcccaggctgatgaggaccaacgccacccccccgagcacggggaaggtcacctttttccggttatggaggaagccgtaaccttggcgtgaccacctgggaaaagcgggggccattaccttctgccctaccccacctgcagttgtgtggtcgcccctaccgctactgccgccggcgtgtttccgcccttgcacgtgcgtcgtcgccagcggcagcggccgtaccagcatgcttcggcagcggcgtctcctgctgctgctgctgctggtcggcggtgccggcgacgaccgggaggacgggctccggctgctggacgccaggcatggtgacgcggacgacgccgttgtcgaacctagcgtggacggccttggcgtcgcagccgtcggggacggggagatcgaggcggaagcggctccagcggttgccgtcgacggggcgctccccgcgcacgatgaggcaccggtggctgtggaccatctgcaccctgatgtgctccttcctgtacccttgggcagagaggtcgacggtgagcgtgtgggtggccggctcgcgctccatcttgtgcggaggcttgaagtcctcgtacacgcgctcgccggaagccatggatcacccgccttcagttcttcctcccgatgcagagctacctcagacgtacggtactgacgatggacgagccgatttttttttaaacaaaaaacaaggaaattttgggagaggagtatgcacggagcag

SEQ ID NO: 68949 - DNA, 698 bp, Zea mays
  Clone ID: MRT4577_162875C.1
gccggccgctccgaaacgcctgttctgactccaagaactgttcccgccaaggaagccggttccttcaccgctcaagtcattatcttgaaccaccctggtcaaattggtgctggttacgctcccgttttggattgtcacactgctcacattgcctgtaagttcactgaattgatcgaaaagatcgacagacgttccggtaagtccttggaagctactcccaagttcgtcaagtctggtgactctgccatcgtcaagatgatcccctccaagcccatgtgtgttgaagcttacactgactaccctcctctcggacgtttcgctgtccgtgacatgagacagaccgtcgctgttggtgtcatcaagtccgttgaaaaggccgacaagcaggaggccggtaaggtcaccaaggctgccgtctaggccggcaagaagtaaacggattgacacttttgttcccaaaagctcgtcttttctttgcttaggtgctcttctcaaggtcacatgagttgagcatttcactaacgataccacctttctgctgtcacgaccttgcatgaaacatgatggcgaggcagttgcttcgagggatctgggtttatggcttagattattagtttgcagcagcaattcaaaactcattgttgattgcacaaaaaaaaaatgtattaccaaactaaaactaatataatagggcggcc

SEQ ID NO: 68950 - DNA, 1022 bp, Zea mays
  Clone ID: MRT4577_162876C.1
cggctaatgccagcgtcattttcgggtgcggtgctcaacaagtgtgtggttttgggaagttcaaaccaagccctgggcggagttcttggttttggtgaggcaaatacatcaatgctatcacaactaactaccgctggtaaagtgaagaagatatttgcccattgtttggataccataaaaggaggtggaattttttctattggggatgtggtgcatccaaaagtaaaaacaacgccattggtagccgacaaaccatcacattccattttgaggatgatcttgcactacatgtgtatccccatgagtactttttcgcaaatgggaatgacgtatactgcgtgggattccaaaatggtgcatcacagtcaaaggatggaaaggacattgtgcttatgggagatcttgtcctttccaacaagttggttatctatgacttggaaaatcgagtcattgggtggactgactacaactgttcgtcgagcattaaaattaaggacgacaaaacgggcgcaacatctactgttaattcacatgacttgtcctcaggatggaagttccactggcacatgtccccggttctattgttggtaacaacggtgtgcagttatttaatatgctaactccactgtacaggaaatccatctggttcgtatatcctttccacgaaaaggatcggagagatgtagggctatctttaggttgtgttctccgaccacggaaaacaatggaaatagaaaaacactgtaatgctatactgagccattgtttgactagggtaatgccgaggtgaccgcacgtgagttcagtttcccgtttaaaaaatatgcatgtacagcagcaatgtatatggccaaataagaatttcttttgtttgcagtacagcaatgttctgtcatttctttgggaaaacaattgttgtttagtgtgagcttcgattctgccgttttttttaaaaaaaaaaaaaaaaaaaaaaaaaaaaaaaaaaaaaaaaaaaaagaaaaaaaaaaaaaaaaaaagcggcc

SEQ ID NO: 68951 - DNA, 377 bp, Zea mays
  Clone ID: MRT4577_162878C.1
cgtctctatccctggaggtactcaacgcctacgaggggatctatgggcaatctgggtgcaacaactgcgcaatggcgcactgcaccacctgttgaaggtgatcaaccgcaaagctatgggccatggcaagccgaaagccactgtagatctaggatgaggaggcagcgccttcccaggacatggactgacgccctacgatcctattgacctagctctatcacaccgacgtctacctctgtgaggacaacgcgcatacatctcgtgtttgctcacatcttcggccatgaagcaggcggtatcacacagagtgtaggagagggtcatactgacgtatgtccgcccgaccatcaccttcctgtgttcactcgcggaaccaa

SEQ ID NO: 68952 - DNA, 334 bp, Zea mays
  Clone ID: MRT4577_162879C.1
tctcttttttttttttttttttttttttttttttgtttttttttttttttttttttttttttggcccccccaaaggggccccacaaaaaaaaggggcaaggggcccgtaataagatagtaccccaattccggggggacaagagatcaaaaactctcacacaaattggccctgaaccccaaaataaaaaacggggggacgatggccaaccccccccccttgaaccctagggggagaacaaaaactgctgggctgatgactggttcgggaagccactcaaaagggcctgagaaccagcagcagcaagaagacctggaaaaacctgacccgggagac

SEQ ID NO: 68953 - DNA, 446 bp, Zea mays
  Clone ID: MRT4577_16287C.1
cactgggcagtgcaaaatggtctccatctatcaagaagcactgtggtgtacttcaagcacaatgatatggcttcaattgcaagcactttggaaaaacttactcgtggaaataaacgtgctgaaaagattagacgctacattattgtagaatctatttaccaggtgcagtgcttttgattgttttgtgttgatttgtgctgtcttttcttatatgtccttatgaaaatttggaaaataaaatgtccatttaacctgtgcaacctagacaattcatgaaacctctcttacagtcgtcatggtttgtgaacacagaattctagccaaattgccccattggatgagattgtcaggttgaaggagaaatatcgattccgtgtatcccttggacaatctggttttgacatgatgcaaccgatgtatcccttgaacaatctagttttgacatg

SEQ ID NO: 68954 - DNA, 223 bp, Zea mays
  Clone ID: MRT4577_162880C.1
cagagtttcttagagaaatggtggattctgagttgggggcaggaaatgtgttgaaaggtcaggaggctctcaaaggccactgggccactgggtcatgtcacagccacagaggcctcttaaaggggcttcttctggacaatgatggaataattcaaagactgagaagaatgccaataaatgactaaaacacatccaatgtatgacaacccaagagttaataaaa

SEQ ID NO: 68955 - DNA, 200 bp, Zea mays
  Clone ID: MRT4577_162881C.1
attcggctcgagcgcgactttgctatagggagttttttttctcactggagcgaagactaccataggggcgtgacttacaaaccggggggggcggctaaccgtagggaaaatattacgcgctcagccgacgtagactgaaattgcttggcgccaagatgatgaccgaccccgtgctgcaaactggacatgtcctaaaacca

SEQ ID NO: 68956 - DNA, 355 bp, Zea mays
  Clone ID: MRT4577_162882C.1
accttgctgtctactctcagcaacagcagaaaaacccggaaaagcaaccacctaaattggggggggcccacccatttgcccaaaaacctttatcagggaatcccactaacagccgcctaaaaaaagggcccccccccaggggaccctctgggaaaaaagccaccctgccgcttaaaaacaagggggacaaagggcaaccattggggcaactaaaaaaagggaggccgggtaccccccagatgcgggcaaaaagggggccactcgacccggacccaaaaaacaaacacgggcacccccctacaactgcaaaaagggctggcaatcaacccacctgcaaaaacaaacccaacaaagg

SEQ ID NO: 68957 - DNA, 296 bp, Zea mays
  Clone ID: MRT4577_162883C.1
agcagtggtaacaacgcagagtacgcgggttataaaagaaaccctgggttttctcggattcaacccgccgtcctgtgcgggtgtagcctgagtctcggaaatcttgcgtagagcccctgcgcttttcagtaaatgaggcccagtccagagagttataaaatcaggaaaattaattagaaaatgagtttttaatataaaaataattcctagaatttatataattcatagaaaatgcatatgaactccaaaaaaaaaaaaaaaaaaaaaaaaaagtactctgcgttgttaccactgct

SEQ ID NO: 68958 - DNA, 411 bp, Zea mays
  Clone ID: MRT4577_162884C.1
ataaggaaggaagaagggcctcctcctgtctcacttccctcagtcctcgcccgtctctgctctccctcctctctctctctctacctagatagctagctagcgcttcctgtagcgcggcagatatggctgcctccaccacggcggcggcggcactgctgctgctcctcctgtcgctcgccgcggcagcgaacatgtcgatcgtgtcctacggggagcgcagcaacgaggaggcgcgttcgcatgtacgcggagtgcatggcgatgcacggtcggacctacaacgccggccgcggggaggagcgacggtaccaggagatccgggacaacctccgctacatcgacgcgcacaacaacaacgtcgacgcgagggtgcacatccttccgcctcgagactcaaccggttcaccgacc

SEQ ID NO: 68959 - DNA, 1813 bp, Zea mays
  Clone ID: MRT4577_162885C.1
gtcgggggagcccagcagttcgtggaccggagcaaggtgaggattcttctctgcgacggcgacgccaccagctcccgggaggtgctgcggctcctctgcaactgctcataccatgtgacctgcgccaagtctccgcggcaggtgatcaatatcctcaactacgagggcggcgagatcgacatcatcctggctgaggtcgatcttccggtctccaagtgcttcaagatgctcaagtacattgcccggaacaaggacctgcgtcacatccccatcataatgatgtccaacagagacgaggtgtctgttgttgtcaagtgcttgcggcttggcgccgccgagtacctggtgaagccgctgcgcacgaatgagttgctgaacctttggacccatgtgtggcggcggagacggatggtaaagggcactatgctgactcaccttaacctctgcgtttagaagcatgctctaggctgagatgctcgtaggcgttgatgtaccgccgtgaattattctttaaatcgagtgctggtgttggcagcttggtttgcccgagaaaaacttcttcaatgacaacttcgagttggtgctctcagaacctagcgatgccaataccaatagcaccaccctcctctcagacgagaccgacgataggcctaaaggaaacacgaatcaagaaacaggcacctcaaagcaacttgaatacgagtctaatccttcggttgctgagcccgaccagagagaaaagatggagggtgttccaggctctgccctagatgccagtaaaaaatcctctccaagaagagcgttttcacgccctataaaaactaacctgagggttgccgagtcgtctgcatttctagcatatgtcaagccaagcaccccagccaccagctcatttgacagcgaattacaaaggggtggcagccgattagattccttggataaccagggtaattgctctagcgcaaccgatagaagtgacactggtactgatgtaaatattcggagtaaagaagcttttgagatgcctgcgcagtaccctatggtatggttttcttcctctaacatgcatatggagcgaagcagcgaaggccataatgatacttcaggaactccacctgcataccatttcccattttattacccagggatggtagagcacaacatggcactttcgtcggcgcaagattttcaagcaaacataaacaatgctcaagcacatacaccgccagcgatgcttcctcagtacaatgtttatcctcagtgccatggtttacctgtgataccatcatttcagtttaatccttctggcatgagtacgcactcaagtcatttaccaacgcaaaatgtgtggtcatcggcatcgagcacaccaccagtgcctgaggaaacatgcagtcgctctgaaaggagggctgcagcacttgccaagttcaggctgaagaggaaagagcgctgctttgacaagaaggtgaggtatgtgaaccggaagaaactcgctgaaacgaggccaagggtgcgaggtcagtttgttagacagccaaccaatacggatgtcatcagcattggagatgatatatctgaagacgaagatgacgatccatcgtccagggaggtagatatggtttcttctccagagtagtagtggagaggtcctccatgtgaaaaaatagactgcagatggttactgctcatcttgttacaactcagtagacctaggcaatacaccctttttgctcacacacagtattacatttttgtccctaaaacatgtggctgttaccctggttgctttaatgaagaaatcatctttgat

SEQ ID NO: 68960 - DNA, 1397 bp, Zea mays
  Clone ID: MRT4577_162886C.1
agtaaactctgtgttaccactactttccttggaggggggggctttctcatcacatcagctatctgagtactccatgtactgtctgatccgttgataacggtaagatagtcaatcgagcatctttaagaggagcactcattattcatttgtcggatagggtaatgcccggagccatccacgcccccgtagaagacgccattacagtgctaccgtggcggcacaggcatgggggcaatgaacaacgagatcggggatgggagtgtgggaaggcaatctggtggatggatatgggcatggttgacgccggtggcaccaaggtggagatcggcgatggtggtgggaaggggggctatgccaccatagcccagcatgccttagggcaaagcagcagcactggtggtggcagaagctggaggcggcggtggtggcggtgtcctgctggacatgccgttgatggtggcggtgagggcagcgaactgctgcaccaacagctactgaaatgccatgaagtccgcctgggagattggaccagtggcgacagccgtcgcatcaatagatgtggcgacggtggtgggtggtgttggtcctggcggcacgttatcggcctggcatctccgataccagactgttatggtggctgcagcgccacagtacccacggtgctacagtacccgcgggaactgttcgcagggtggggctacgcggagttagatggctttagtctctccttgcaggttgatgctgagaggacatatcatcaaaatgctgctgatattctgaataaacttcatgatgagatgctctatgcaaagcatcataatgagtcagcaaaccactacgatgaacagtcttcagagcctgaatcagatgcaggcccagcacaagtgcactcacgtagcacatctgaagatccagtattgactaaacctagcgaatccacagggaacagtcaggaggtgcaatttctgggggaggttattcatccattcgatgctcaggctgatggtgagctcagtctcgcggtgggtgaatatgttgtggtccgccaggtggctgcaaatggttggtctgaaggtgaatgcaagggaaaggctggctggttcccatctgcctacgtagagcagagggacaaagccccggcaagcaagattattgttcttctagccttttcgttggtcggtaactcttgtaatgaaacagaagcagcagttcggcagggtaaagatgaggctgctggcttggcagatcagcagatggactggggtcacgttgagaggataggacaccgagtaacagacagcgcagctcagctcagcaacctctgggtcgcctcgtcggtcaggggttcggccccaccggcagctcttgcatcaacgtcccgtgatctgcacccgtag

SEQ ID NO: 68961 - DNA, 3437 bp, Zea mays
  Clone ID: MRT4577_162887C.1
tgggacctcgagccggccggggccgggaaacattcgcttattccttccttcctcgtcgcctcacactcgtctcgccaccaaacacgcagcggcagcttgctcaccccgctggttcggccgccgccctccaccacttctcaagcttgctggaagcgtccgtcctgcctgcgtattggctaggctaggatctgcatacgcctttttcagtgaagaaccaagactgaaagaccgctgtcccgaccacccagcaatttgccagattctttcttgccccaaaacccccagagagaaaacagaaaagacccaatgttctgctaagctggagatgttcctagagccaggcagccatcttctcgcgtagcaaagctgctgtgaattagagtagagggccttttgagacaccaacaaccagatggcacacccagcctcgtcaggcatcctcggatgcgtcacactgctctgcatcttctcatccgccgctgcggttggcagcaacgccaccggctctggccagatacgcttggactgtggggcatcaagctcgacgagcacagacgctgatggccggagttgggacagcgacgccagctccaagttcgcgccttcactgaatggagtcgcagccactgcttcatcccaggacccttcgctgccatcccctacgccttacatgactgctcgcgtcttcacctcaaactacacctactcctttcctgttactcctggccgcatgttcgtgcgcctctacttctatcccaccatctatggcggtaaccatgctcctgcagatgcttacttcggcgtcacagcagccaacctgacccttttacagagcttcaacgcctcccaaacctctctatcacttggtgttgccttctttgtccgtgagtactccgtaaacgtcactgaaggcagcctagacctcactttctctccatccacacaccacaatggctcgtacgcgttcatcaacgggatcgagatcgtgcccacgcctgacctcttcacgacaccgacaccaacactatccaatgggggcaacccggatccgttccctattcttgctggaacggggttcgaaacaatgtaccggcttaacgttggaggccaggccatctcaccaggaggagatactggcttctatcgttcatgggttaatgacgtcccttacatatatgctgctggttttggggtggcttttgggaaagacgacaaccttaccatcagctacagacccactgtgccaaactacactgcaccggttgatgtctatgcaactgctcgctctatggggccaaatgcccagatcaacctgaactacaatctcacatggattctacccgttgatgccgggttctactacctcctgaggttccatttctgtgagatccagtatccgatcacaaaggtcaaccagaggtcgttcttcatctacatcaacaaccagacagcgcagcaggagatggatgtcatcgcgttcagcggaggaatcggcaggacggtgtacacggactacgtcaccgtcacggctggttctggtcagacgtccctatgggttgccctccacccggatcttacgacgaggcccgagtacttcgacgcaatactcaacggcctggaggtcttcaagctgcagaattacggaaacaacagtcttaatgggctcaaccctccccttccatctgttcagcctaacaacgggaatggggagcctagtgtgagacggaaaggtgctgcgccggcaccggcagccattgctggagctgttggtggttttgctgtgctactcattgctgcctttggtgcgtgcatcgtctgcagaagaaagaaggcagcaaataaggagtctaggaaacccgatgacggccactggactcctctcactgactacagcaagtcacggtcgaacacctcagcgaagacagcgaccacagggagccgtacatcaacgttgccatccaatctgtgccgccatttctcgtttggcgagatccaggcggccaccaagaacttcgaccaagcctctctcctcggtaaaggcggctttggaaacgtgtaccttggagagatagacagtggcacgatggtggcgatcaagcgcgggaacccgacgtctgagcagggcgtccacgagttccagacggagatcgagatgctgtcgaagctccggcaccggcacctcgtgtcgctgatcgggtactgcgacgacatgaatgagctgattctagtgtacgactacatggcgaacgggactctgagggagcacctgtacaacaccaagagggcggcgctgtcctggaagaagcggctggagatatgcatcggcgcggcgcgggggctgcactacctgcacacaggcgcgaagcacaccatcatacacagggacgtgaagaccaccaacatcctgctggacgacaagctggtcgccaaggtttccgacttcgggctgtccaagacgggtcccaacaacgtcgacaacacccacgtgagcacggtcgtgaagggcagcttcgggtacctcgacccggagtacttccggcggcagcagctgacggagaagtcggacgtctactcgttcggggtcgtgctgttggaggtcctgtgcgcgcggcccgccctgagcccctcgctccccaaggagcaggtgagcctggccgactgggcgctgcactgccagaggaagggcgtgctcgggcagatcatcgacccgcacctgcaggggcaggtctccccgcagtgcttcctcaagttcgcggagaccgcggagaagtgcgtggcggaccgcagcgtcgacaggccgtccatggccgacgtgctctggaacctcgagttcgcgctgcagctgcaggggagcgcggaggacagcggcagcgtcgtcgtcgtcaccgacggaacgacggcgtcgtcctcgaacaggtcgtcgccgcttatcgtctccaggcttcactcggacgagccgccgacggacagtacgaccaccaccaccaccacgtcgtcgacgacgactttgagcatgatgggacggagcctcgccagcgtggagtcggacgagctgaccccgagcagcgtcttctcgcagctcatgcatccaggtggcagatgaaaacggaaagtacaactggagtagatatcgtctgatcgatgtgctatatatatgtttctagttcatgctatatatatatatgtgggcaactagtatagttatgctctatacatattcatcatatagttcatcctatatacttgtagtatgtattgtgctagagccctgcagagttacttccctttccctttgaattatatatcttgaacatgtaactgagctatgttctcacttattcaaggccgatttgtaatgtttgcgtctacaagcaatgagaatgaggcaacagtgtcctcttcaaaaaaaaaaaaaaagcggccaaaccaacaaacag

SEQ ID NO: 68962 - DNA, 1289 bp, Zea mays
  Clone ID: MRT4577_162888C.1
ccaagggtgactacgacggcgcccttgagcacctcgtgcttgcctccatgaccatggttgccaatggccgtgacattgaggttgccaccattgacgtcgccataggcaacacgtacctcgccctcgcccgcttcgacgaggccgtcttctcctaccagaaggcactgactgttctcaaatcggcccgtggcgacgaccatccgacggttgcgtcggtctacgtccgccttgctgacctttaccaccggacaggcaggctccgtgagtctaaatcctactgcgagaacgccctgcgtgtctatgccaagcccgcgccaggtgctgcccctgatgagatcgctggaggcttaatggagattgctgccatctatgaggcgcttggcgatctcgatgaggccctgaagcttcttcagagggcactcaggttgctcgagggctcaccggggcagtggagcactgttgccggtattgaggcacagatgggtgttctgtactacatggttgggaggtatgcagattcgaggaactcgttcgagagtgcggttgcaaagttgagggccattggtgagaggaagtcggcatttttcggcgttctgttgaaccagatggggctagcttgcgtgcagctgttcaagatagacgaggctgcacagttgtttgaagaggcaagggcggttctggagcaggagtgtggcgcttctcatcctgatactcttggtgtgtacagcaaccttgctgcaatctatgatgctatgggaagagtggaggatgcaatcgagatcctggagcatgtgctgaaggtgagggaagagaagcttggcacggcgaacccagacgtggatgacgagaagaagcggttggcggagctcctgaaagaggcggggcggtctcggaaccggaagcagaagtcgctgcagaacctgttcgggaccaactcgcagcgggcgaagaaggaagccgggaggaggtggtccaactttgggttcagaagctgaggaagctgcactgttggtcgtcgtcgtcgtcgggcggttgtggcctttgtaacataaaggagggatgggaaaggaaaaaaaagcacgtgtaaagatgttgctgtaggttattattattaggaatgtgatggtggtgttggtttgctgtttgtgtatgtgtggcactgcattactgtgttacttgtcttgggttatattttcagtagcgattattgttaactgggtgctgttataccttgagaagagaacattggttttgtcgtggaggaatggtgttgactggtgggtgatgag

SEQ ID NO: 68963 - DNA, 614 bp, Zea mays
  Clone ID: MRT4577_162889C.1
ggtccctcgaggccggccggggttttctttctttctccctacgcgtcgtgcgctcctctctctctcgttatcgtactcggctttctcgatccccgaggcgatcccatcggagactcggtgccgcatctcccctaacgggaagggttctggaaggacgaggtagagtgggatgccacgcccatgctcctggaggagccctttcgcctcgcctccgtgctctcccccgccaagactaaggtattcccatcactcaccagcataagagggacgctcgggcccatttctcactcggtccgagattattcgacgaatgcgctcactgactggaatgtcagttgcacgggttgatctctcatgcatggatggtgcgtatcaccaggagagccttgatatttttaggcaagcgtgacagaatgtgaataacatgggccctgtaatgttggatactcttgagccagaaattcaggttcacaattccactggtgtagccacattgatataaaagctgttaatccatgttatcataactccagatatttcatagagctcgtctctgctgagatcctaccaattaagatgggtgatgttgcaaaagctgtctcgaactgcgatac

SEQ ID NO: 68964 - DNA, 618 bp, Zea mays
  unsure (1)..(618): unsure at all n locations
  Clone ID: MRT4577_16288C.1
caagcagtgcgaagttagtcgccggtcggcagcgtccccctcgccccccaagtccctagtggttgacactgacagaggtctgcagagactagcggcgatggcgccaccctgccccgaaccctaaccccactccaccaccggccatgggatcccagccgccggcctcccgcgcggccctggagcacctcgctacgcttgaccccgccgcactcgccggcctccctgtctcctccccgctcaccgtccgctccgccgccgtctccgcccacctgctctatctcggcaccggcggcggcaagctgctcctcttctccctgcaggatccctccactcctgagttcctccgcctcctccccatcggcgccaccctacccgtctctgctatcgtcccgctcccctccgtcgcccgcctcctcgtcctcgctgacggcctcctcctcctcgccgacccgctcctctcgcgccccgtccgccgcctcggctccctgcgcagcgtcaccgccgtcgccgnccgccgcgtcgtcctcgcggacccatcatcatgctccgtcgccatctccgtncggaagaagctgctccgtgtcgacttcacgctgcacgacgccgacgagctggatg

SEQ ID NO: 68965 - DNA, 485 bp, Zea mays
  Clone ID: MRT4577_162890C.1
atacccaaactgccatgtctgtatattagaaagacagaaagaacaggaaccaaccgcacaagacacaacaagactgcagcacgcggcaggcgtggcgcaccgaaccactgacaccgggccccaccaccattacgacccgaaacacactttatttaccccacgttactcccatcccgtgaccggacacgtccacgcgacagtcactgctaccacctaccggtctacgtgcgaaacacacacacacacagagacagacgccaaaaacaaccgcagcgtgctgaacaacaaaatacaccgtgatactgccatgtacgcgcgcgagcgaggtaccccgacacgcgcgcacgccgatcccctgagccctggcccccatcgctgggtgcacacggccccactaactggccttcacggactgcgcaagaacaagaagctcctcccactggcgggccgactgctgttgaccagcaggaacaggaccctccggc

SEQ ID NO: 68966 - DNA, 269 bp, Zea mays
  Clone ID: MRT4577_162891C.1
gttatgaataaattggatttgtggcccccatgactatgaaaaccatgcgaaattttttgtttttacatcaaggaccagctggtaatgaagattaccatgaatctgaccttcccaaattttagtagcgcacataacccgtccatacctatgtgatgaaacaaacagctacggatacggcgaattggacattcaaaaacccttgtacaacacaaaaggaacagcccttcttatttctgtcataattcccgcctttttaattaactccagat

SEQ ID NO: 68967 - DNA, 298 bp, Zea mays
  Clone ID: MRT4577_162892C.1
tcgtttttttttggtctctcgacctggatcacctccaacatattatcgagggtggaggtgaattaaaggacaaacatcattcgatgggcacaatctataggggttcaatcttacattctaagcattccccgtggcactagatctggcctcttcattggaagcaacggcccacagtttatacttaagtccatagagacacagtctccactatgtacgtgactgtactggatcggtggaagctacgaccgctacaatagtctggctgggtgaaacctattgcactggctcccagctagct

SEQ ID NO: 68968 - DNA, 677 bp, Zea mays
  Clone ID: MRT4577_162893C.1
ccggccggggatgaagaagaccagctctcgtctcctgatcggcctgttcctcatcgcagcagccatggagaacgtgccggagaagaaggggggccccgtgggacaggagacggtcgtgcacatcgtgtaggtggaccgcctcgaggacttcgaccctgaggagatgcacatcctgagcctacaccctcgccctcgagagccacacacaaggtcagcggacaacatggatctcaccactacatcatcgtcgccagcggcgttctccagctaagctcacccccctaggaggacaaggatctcgaggagctatcacgcagtatcatctcagggtgaggcgagtccagacttactcggctacttggtcctgtgtctgtcactcaccggggtgacatacatcacgcctatgtgccttatgtgaatcgcgtatgaagaatcaccaatattgcgtttagcataggctgaatggcacatgggctgacgaatgtgtatatgtacagtactatgtaagaataaagcacgtatcgactatatactgacattgcgcttgctcagacctgctctaaaggttgcaatgcaccgagtgcgtatgtgttcaatacaatgacaagtatgctatcttgtttgctgcttaaaattgatatccgctcaaaattccacacgcggtcctcgagctccag

SEQ ID NO: 68969 - DNA, 713 bp, Zea mays
  Clone ID: MRT4577_162894C.1
tttctgtttgtggtttgtttctcttaattccagttggtgcttatggtgcaaagcaacagtaagtttttctgcgtaagatttgttatttgatttggccgaataacttcgagaaccatacagactaatctgtgtatcgggtgcccgatgatgatagaagtcaaggcttgtttctctacattcgcagttgccgcctaagagctttcgccctgccaggcttgagagctaatgctgctaattccttccttggatgtctgagggcacaataatgccagataattttgctttgaaatctgtttaactgttgttaccctggttttatagttttaattattaaattttattttatttgaaggatttgtaagagtatgcaggctttgtgggaagattttataagaacatgcgaggttcgtttgaagaatttaactggtttctatggataaaagccagcttgtgtggactgtttcatctgcaatctctgtagaagcaaccaacagagtacggattaaaagccaagtgaatagactgtatgatgtaaattctgttgtagatcttcataggtcccattgttaacactataaatatgttaatcctccatgcggctttccttcatcattcatgttacatgctctgctttgttggaggttgaaaaccaacggacagcttgacattggccggatcactgaacttttgctggtgcctgattttaacaatcc

SEQ ID NO: 68970 - DNA, 583 bp, Zea mays
  Clone ID: MRT4577_162895C.1
tgcctgcgggtcgattctagacgacatgttctctacaaacactgtcaatttgcttctctaatagatctgccaacaattcagcactagctacctcacttgatgcatcaacagaagctaaaacgaatgtccttgcaggactattagcaagaaagttgatcaaatgttgttgtcttgtatcggtccatgcatctgacataattgagcagccatattccttccaagcttgttcatgcttcgacctcaatgttgttgtcctctcgacaaccctatcaagccaaggcaccctaacatcatggtacgatggaccacgatatccaggaccaaattgcccaattgactccaacataacctcccagctccttgaattgacgacgtgcaatggtattttgttctcatatagaaaatctgcgacatggtcgttaacaatttgcttggcttcctttcctttctttgtgcaagcttcaagagttgactgagtgtttttatttttatgcctatcagcaacaaattcttttggcgtcttgcaaaacatggcagccactgacttgccgcacttttggttttgggtgggatgaactgaaac

SEQ ID NO: 68971 - DNA, 359 bp, Zea mays
  Clone ID: MRT4577_162896C.1
gttgcagccaactagcagcagaacctgtacatttgcgttccaacaatggcagccaaaatatgtcgcttgcttatgctcattggtctgtctgcaagtgttgctaccgcagccatgttcccacaatgcttacaagcttccatagctttccttctaccgccatacctgtcaccagcggtgtcttcaatgtgtgaaaacgcacatgttcatccctacaggatccaacaagcaatctgaacaggcatattaccattctcacccgtggtcctccaacatccgacagtcctattacagcagttacctccggtccatttggtggcacaaaacatgagggcacaccaacttcaacagactgtgctagc

SEQ ID NO: 68972 - DNA, 204 bp, Zea mays
  Clone ID: MRT4577_162897C.1
aactaaccccccctctctctctctccttctgcttcaatcctccctccccgcgctggagttggaggagggagaggggacaagcttccctgtgccgactcctacgcggacccctccccgacacgatccgagggaccaagtgtatcacaccttttagggaggtcttatgctatataatcttttttcactcaatatattatatatatt

SEQ ID NO: 68973 - DNA, 383 bp, Zea mays
  Clone ID: MRT4577_162898C.1
gccgcggcggcgaggtgatggcgatggacccggacgcggtggcaaaggccttgccggagcactactaccggacgttcgacaccaaccgcgcggcgctggtggggctgtatcatgagacctccatgctcactttcgagggccagatgttccagggcccatccgccattgccggcaagctcggatctcttcacttgcaggcctgcgagcaccaaatcgttaccgtcgactggcagccgaccaggcctcatggaggcatgctcgacttctactacggctacatccataccggcctatacgagcactccatcaaggtctgttaggcatgacatttgctgacagcagctggttccttattgatgcagaatgacatgttccgactgaac

SEQ ID NO: 68974 - DNA, 3122 bp, Zea mays
  unsure (1)..(3122): unsure at all n locations
  Clone ID: MRT4577_162899C.1
gagcgttctcttctcaccgcctcccggccgggagttgtcacgccccaaagaccggcaccccgccgggtccgaggtgcatcgcggcatcggcatcgccacaaagcccatctcacagcctcgcagcctcttctcctcgtccatctcttccgcctccctccccgcgccgccgttcgccgaagccccgcgtcgcgtcgcgtcgcgtagagtgcttgatggctgccgcaaggggcattaaccagcttctgaagagaattctccacaaccagtccgctggtccatggctgctttcttcatttcggggaaatcatgaagagtcctctgctggattgagagcattggcgcttcttggagttggtgcctccggtcttttgagttttgctacaatagcatctgctgatgaagctgagcacggtttggcagccccagattatccatggccacatgctggcatcatgagctcttatgatcatgcatcaattcgccgagggcatcaagtttacacacaagtttgtgcttcttgtcactccatgtccttgatttcataccgtgatttggttggggtggcctatactgaggaggaaacaaaggcaatggctgctgagattgaggtcgttgatggtcctaatgatgagggtgaaatgttcacccgccctggtaaactcagcgatcgctttccacagccttatgcaaatgagcaagcagcccgatttgctaatggtggcgcctacccgccggaccttagtcttatcacaaaggcaaggcacaatggtcagaactatgttttcgctcttcttactggataccgtgatccacctgctggtgttcagattcgtgagggtctgcactacaacccctacttccctggtggtgccatagccatgcccaagatgctcaatgatggagctgttgagtatgaggatggtactcctgcaactgaagcccagatgggtaaggatgttgtatcattcctttcatgggcagctgagcctgagatggaagagagaaagctgatgggagtgaaatggatctttctactatcactagcgcttcttcaagctgcatactaccgccgcatgaggtggtcagtcttgaagtcccgtaagctggtcctggatgttgtcaactgaggactaccattacccttttttatatttaaatatgagctgttaaggagtattcaaaataatgaatttgtgatgtacaattttgccactgggggctaggttccatgcctagagattattttgttttctttactctgctgagctgcaaaagcatttcaccaacgggtacatttcacgtttttttggtttgcaatgcctcgatgttatcagcaaccttgtaacttaacagctgatgagagttgataaattcttgtgctatgaaatacacaaaaaaaaaaaaaaaaaaaaaaaagagagctctctacaaccagtctgctggttcgtcgccgcttttctcatttcggggaaagcatgaagaatcctctgctggactgagagcattggctcttcttggagttggtgcctctggtcttttgagtttttctacaatagcatctgctgatgaagctgagcatggcttggcagccccagattatccctggccacatgctggcatcatgagctcgtatgatcacgcatcaattcggcgtgggcatcaagtttacacgcaagtttgtgcctcttgtcactccatgtccttgatttcataccgtgatttggttggcgtggcctatactgaagacgaaacaaaggcaatggctgctgagcgagcaagcagcccggtttgctaatggtggtgcataccctccggaccttagtctcatcacaaaggcaaggcacaatggtcagaactatgttttcgctcttcttactggatatcatgatccacctgctggtgttcagattcgtgagggtctgcactacaatccctacttccctggtggtgccatagccatgccgaagatgcttaatgatggagctgttgagtatgaggatggtacacctgcaactgaagcccagatgggtaaggatgtcgtatcattcctttcgtgggcagctgagcctgagatggaagagagaaagctgatgggagtgaaatggatctttctactatcactagcgcttctccaagctgcctactaccgccgcatgaggtggtcagtcctgaagtcccgaaagctggtcctggatgtcgtcaactgaggactatcattaccctttttttattgaaatatgttgagccgttaaggagcattcaaaataatgagttggtggtgtacaattttgccactggggctaggttccatgcctagaaattaatttgttttctttaatggtcctaatgataaaagaaaaaaaataacccgccctggtaaactgagcgatcgctttccacagccttatgcaaacgagcaagcagcccgatttgctaatggtggtgcatacccgccggaccttagtctcatcacaaaggcaaggcacaatggtcagaactatgttttcgctcttcttactggatatcatgatccacctgctggtgttcagattcgtgagggtctgcactacaatccctacttccctggtggtgccatatccatgcccaagatgctcaatgatggaatagccaagcataagatgcttaatgatggagctgttgagtatgaggatggtacacctgcaactgaagcccagatgggtaaggatgtcgtatcattcctttcgtgggcagctgagcctgagatggaagagagaaagctgatgggagtgaaatggatctttctactatcactagcgcttctccaagctgcctactaccgccgcatgaggtggtcagtcttgaagtcccgaaagctggtcctggatgtcgtcaactgaggactatcattaccctttttttattgaaatatgttgagccgttaaggagcattcaaaataatgagttggtggtgtacaattttgccactggggctaggttccatgcctagaaattattttgttttctttactctgctgagctgcaaaagcatttcaccaagggagtacatttcacggtttttttttggtttgcaatgcctcaatatcaccagcaatcttctaacnnnnnnnnnnnnnnnnnnn

SEQ ID NO: 68975 - DNA, 471 bp, Zea mays
  Clone ID: MRT4577_16289C.1
gtggcacgacccttatccttagggtggcggcaggcggaaaccttctgcgctctggctctggcatctctgcgatgaaggcggatagttgttgcactgacgggcacgctccggcggccggatgattgaacgcacgaccatgtttacggtgctaaatttactactacgtgcagagagggggggggtgagggcctgaatataagcaaggtgatgctcaaaaccctagtttgtgcctagatgtacgcgcagaggctggcaatgctttctcagacctgaggatttatcgggaggccgactaacaggaaggcagctttgcaagatcaatcaatctatcacgatagagattttgacccgcttgtcccaattgcaatggactatgcatctcttggctctatatgcatgtcggatgaagcaagcggtgtgaatggcgtcctggaatggcatgctaagatagctactgcaacaaggaattat

SEQ ID NO: 68976 - DNA, 1788 bp, Zea mays
  Clone ID: MRT4577_1628C.1
attcttagactaaaactctatgagttagtgctaccaactgaaggatacgccatggctgttctgacactggttaatatccttatcagcttcgctgcttgtgctgaagctctaaggagagcagacttccctcaaggtttcgtctttggcactgcttcttcagcttaccagtatgaaggtgctgtcaacgagggtcaacgtggacctacaatatgggatactctcacaagacgacccggacgggtgatagatttcagcaatgcagatgttgccgttgatcactaccatcgttataaggaagatgtggacttgattaaggacattggcatggatgcataccggttctctatctcgtggtcacgtatctttccaaatggaactggtgaacctaatgaagaaggattgaattactataacagcctcataaatactctattagacaaaggtatacaaccatatgtaacactctttcactgggaccttccgcaagcactagaagacagatatggtggatggttaaactcccaaatcgtggatgattttgttcactatgcctctacttgcttcaaggaatttggagatagagtgaaacactggatcactttcaatgagccccataattttgcgattgaaggctatgaccttggcatccaggcacctgggaggtgttctattctgtctcatatattctgcagggagggcaaatcatcgactgagccttatgtcgtagctcacaacatactcttagcgcatgctggtgcctttcatacttataagcagcatttcaagaaagaacaaggaggtatcattggcattgcactcgattctaagtggtatgagccactgtcagatgttgatgaggacacagaggcagcagcacgagcaatggactttgagcttggatggttcctggatcccttaatgtttggccactatcctccttctatgcagaaacttgtgggcgacaggctgcctcagttttcagctcgggcttcgatgttagtgtcaggctcactagattttgtgggcataaaccattacaccacactgtatgttaggaacgacagaatgcggatcaggaaacttgtaatgaatgatgcttcaactgatgctgcggtcatacctactgcttatagacatggaaagaaaataggagaaacggcagcgtcaggatggctgcacatagtgccctggggcatgttcaagctgatgaagcacatcaaagaaaagtacgggaatccgcccgtgatcattactgaaaacggcatggatgatgcgaacaaccggttttcgaaattagaggatgatctgcaggatgataaacggatacagtaccacaaggactacatgtctaacctcctagacgcaattaggaaggaaggctgcaacgtccatggctacttcgtctggtcgctgctcgacaactgggagtggaactccgggtacacggtgcggtttgggctctactacatcgactacaacaacaatttgacacggatacccaaggcgtccgtggagtggttcaggcaggtcttggcccagaagacggctggtttggagtacagtggttctacagtggccagtagttgagtgtatataacatacacggcacggctaccatcgatctgtacatgcgtacgtagctttagattagattgtgattattctcgatgtatatagactcaccatttggacgaccttcaaccgcacagttgaatgtgtcgttatgcttgctacaaattggttgattggtgctaaagaaatcagtgaggggtgctcggttctactact

SEQ ID NO: 68977 - DNA, 1402 bp, Zea mays
  Clone ID: MRT4577_162900C.1
gaataggtgtcaagtggaagtgcagtgatgtatgcagctgaggcatcctaacgaacgaacgatttgaaatcgcggcatcggcatcgccacaaagcccatctcacagcctcgcagcctcttctcctcgtccatctcttccgcctccctcccgcgccgccgttcgccgaagccccgcgtcgcgtcgcgtcgcgtagagtgcttgatggctgccgcaaggggcattaaccagcttctgaagagaattctccacaaccagtccgctggtccatggctgctttcttcatttcggggaaatcatgaagagtcctctgctggattgagagcattggcgcttcttggagttggtgcctccggtcttttgagttttgctacaatagcatctgctgatgaagctgagcacggtttggcagccccagattatccatggccacatgctggcatcatgagctcttatgatcatgcatcaattcgccgagggcatcaagtttacacacaagtttgtgcttcttgtcactccatgtccttgatttcataccgtgatttggttggggtggcctatactgaggaggaaacaaaggcaatggctgctgagattgaggtcgttgatggtcctaatgatgagggtgaaatgttcacccgccctggtaaactcagcgatcgctttccacagccttatgcaaatgagcaagcagcccgatttgctaatggtggcgcctacccgccggaccttagtcttatcacaaaggcaaggcacaatggtcagaactatgttttcgctcttcttactggataccgtgatccacctgctggtgttcagattcgtgagggtctgcactacaacccctacttccctggtggtgccatagccatgcccaagatgctcaatgatgaagctgttgagtataagaatggtactcctgcaactgaagcccagatgggtaaggatgttgtatcattcctttcatgggcagctgagcctgagatggaagagagaaagctgatgggagtgaaatggatctttttactatcactagcgctttttcaagctgcatactaccgccgcatgaggtggtcagtcttgaagtcccgtaagctggtcctggatgttgtcaactgaggactaccattacccttttttatatttaaatatgagctgttaaggagtattcaaaataatgaatttgtgatgtacaattttgcccctgggggctaggttccatgcctagagattattttgttttctttactctgctgagctgcaaaagcatttcaccaacgggtacatttcacgtttttttggtttgcaatgcctcgatgttatcagcaaccttgtaacttaacagctgatgagagttgataaattcttgtgctatgaaatacccctatcgtatgtcttggtctc

SEQ ID NO: 68978 - DNA, 180 bp, Zea mays
  Clone ID: MRT4577_162901C.1
gttgcttggtgtgaaagctttgttgaactcttgtcaaccataacgcttacatttttgtccttttaaaagaattccactatcttatccagaaaaaaccaacgggagcttacgcatttgttacggagggtaaaacagggtaaaaacatccgcttgctggaccggtcacctgacaccagcaaa

SEQ ID NO: 68979 - DNA, 1960 bp, Zea mays
  unsure (1)..(1960): unsure at all n locations
  Clone ID: MRT4577_162902C.1
ctcgagggcccggccaaaaaaaaaaaaaaaaaaaaaaaaaaaaaaaaaaaaaaaaaaaaaaaaaaaatcgcggcatcggcatcgccacaaagcccatctcacagcctcgcagcctcttctcctcgtccatctcttccgcctccctccccgcgccgccgttcgccgaagccccgcgtcgcgtcgcgtcgcgtagagtgcttgatggctgccgcaaggggcattaaccagcttctgaagagaattctccacaaccagtccgctggtccatggctgctttcttcatttcggggaaatcatgaagagtcctctgctggattgagagcattggcgcttcttggagttggtgcctccggtcttttgagttttgctacaatagcatctgctgatgaagctgagcacggtttggcagccccagattatccatggccacatgctggcatcatgagctcttatgatcatgcatcaattcgccgagggcatcaagtttacacacaagtttgtgcttcttgtcactccatgtccttgatttcataccgtgatttggttggggtggcctatactgaggaggaaacnnnnnnnnnnnnnnnnnttggggccgggaatccggccgggaaaagaccgcgcccgcaaccccgacgggtccgagttcgaggcgcatcgggcatcggcatcgccacaaggccctctcacgctcacgcggtcacgcccccggacccttctccccgcgccgccgctcgccggagctccgcgtctccgcccgcgccacaccctgtagaatcctcaatggctgccgcaaggggcattaaccagctcctgaagagaactctctacaaccagtctgctggttcgtcgccgcttttctcatttcggggaaagcatgaagaatcctctgctggactgagagcattggctcttcttggagttggtgcctctggtcttttgagtttttctacaatagcatctgctgatgaagctgagcatggcttggcagccccagattatccctggccacatgctggcatcatgagctcgtatgatcacgcatcaattcggcgtgggcatcaagtttacacgcaagtttgtgcctcttgtcactccatgtccttgatttcataccgtgatttggttggcgtggcctatactgaagaggaaacaaaggcaatggctgctgagattgaggtagttgatggtcctaatgatgagggtgaaatgttcacccgccctggtaaactgagcgatcgcttcccacagccttatgcaaacgagcaagcagcccggtttgctaatggtggtgcataccctccggaccttagtctcatcacaaaggcaaggcacaatggtcagaactatgttttcgctcttcttactggatatcatgatccacctgctggtgttcagattcgtgagggtctgcactacaatccctacttccctggtggtgccatagccatgccgaagatgcttaatgatggagctgttgagtatgaggatggtacacctgcaactgaagcccagatgggtaaggatgtcgtatcattcctttcgtgggcagctgagcctgagatggaagagagaaagctgatgggagtgaaatggatctttctactatcactagcgcttctccaagctgcctactaccgccgcatgaggtggtcagtcctgaagtcccgaaagctggtcctggatgtcgtcaactgaggactatcattaccctttttttattgaaatatgttgagccgttaaggagcattcaaaataatgagttggtggtgtacaattttgccactggggctaggttccatgcctagaaattaatttgttttctttactctgctgagctgcaaaagcatttcaccaagggagtacatttcacggttttttttggtttgcaatgcctcaatatcaccagcaatcttctaacgaaaaaaaaaaaaaaaaaagcggccccccgcccgggggg

SEQ ID NO: 68980 - DNA, 278 bp, Zea mays
  Clone ID: MRT4577_162903C.1
tggcaataagctgtgtcctttggggagcacaggtctgtacaggattacttgtgttcgtgatcagttctactgctacctgaatttcatcgttgtatatttccgccccttatgcgaagcttatggattttagatctctgtaacattcggagtacatgccttcatttctgagttctgactggacattgatgattgtttcagagtggccagtgcaggacttgaacattttggatgcccgttcgttgacattttaatgttatccattactctgctgtgtggcc

SEQ ID NO: 68981 - DNA, 728 bp, Zea mays
  Clone ID: MRT4577_162904C.1
attgggtccctcgaggccggccggggtctctattcgcaattcctctactattctcctagctggagttcggttaagcattgctccactgcgctcgtcgaccagcactactcacggcttctttcatcacggtgactgaagaccgcgaagcagcaacctgctggaagtgctctcccacgaaggcgaggaagcctcttctgggaccagaccgcctcgagtattaggccgacaggttgcgatcctcgcctactgacacctctgcagggtcctctccaatagtgcccgactgcgcaagtttctaaaaagatgacgtctactgcgttgccgcctctcgtctgacctgtagtatcgccgtgttaaagcttgtacttaagtgttaccaacatggtagctgctacgcgatgagcagtatgcatctcgtccacgagatctgtgagcctaggaaagctcttatagcgcagacctcatgcgcgcactagaagcaggagggctgtcttaagaccaccaagtgctgacacctcctctcgacatatatcatccgtaggcgtgatactccctcataggacaatctgttgaaatgcctgcttgattcataagcatgtaggacataatgtgatgaactgaaacctcttatgagccatgggagaagatgaggaagcttatctgcgccgtcgcatcggtagatcagcaccagagtagtatgcttattggatatgtggaagaagaagaga

SEQ ID NO: 68982 - DNA, 407 bp, Zea mays
  Clone ID: MRT4577_162905C.1
aaaaaccaaacgggtttggtgggaaaacagctttaccccgagggacacaacacaggtccttaaaatttaagggaatttttttggcaattacccccgaaaattggtcggctaaaaaataaaggaaaccatccttgtaaatgataaaaaagccaaaacttgcctcattttgacaaaaacagcacttttagtcgacaaaaaggctgaaacccattttctcggccaactcctttttaggctccggaacctttttttttttcttgggaacacttgttggcccaaattaaccaactacaaccggggggggaaaaacaaatttgcttggggccttaagggacccctttatttttggaacatggggatattaataagttgtctcaaaaaaaaaaaaaaacacatttttttaccca

SEQ ID NO: 68983 - DNA, 415 bp, Zea mays
  unsure (1)..(415): unsure at all n locations
  Clone ID: MRT4577_162906C.1
cggagaggntgaatggttgcacattttttaagacagacaggccttaaactttggctttggagtgaacaaagttaatcatggttaattccataattggacttcataggtattttcttcttatagacataaatgagctaaattagtcattacaaagccataatttaatgggagcttagcatgcccctttactctcacagatccaaggagcagcttttggagtggtcttcatttagactgtgagactaactaataatcctgcagttctggangtacagctggggagtgtggntctggatgtcttctatctttcctttattttctgccaggagataataacagcaagtgggtgaagcactgggtaaaangtggatattattattaccacaatctggagacccaggaangaggatgggat

SEQ ID NO: 68984 - DNA, 305 bp, Zea mays
  Clone ID: MRT4577_162907C.1
aacaggaaacagggcatgttgccttcaacaaattaacaaaaaaagttgggggcttaaaccccttcccccaagggtcattaatgcccattttttttatgcaggggaaacccccgcctcaaaaacattttacataatgctttacacaggcccgagagctatagcttattttccagccccatttggggtttttacttattccacggggacttcctaaaaaaaaaccccggaccggttggaaagattaaaccaccggggggggttgggggggcataacaggcgacctaatttcgtcatcaacatcattt

SEQ ID NO: 68985 - DNA, 624 bp, Zea mays
  Clone ID: MRT4577_162908C.1
ggccgcttttttttttttttttttgtgcaagtgctattacatttaaacaatcaagaatcgaacattttaagagaaagtaacaatatctgctcatattattccactgcaaatacatgatggtgcagtttctagtttttgctacatacttctcttgatatcatcataccaactggccctattcaacatctgcttaaaaatgttagcgtatggtagtaggcctgatacattatttttctccattcttgaacagggcagctaaacccagccgccaattgaacttcatagacatctcttgtctcgccaccttcgaagcctctgcgaacgctgcggcggaggcggaaccgctagcgggcggcggcggaggcaggtgaacgcacgagacggcggctgcttcggcgatggtggagaagccctggcgctgcttgtgcttggcgttggccgtgcattggacgaagacgattccccggcgcttcaccaccttgcagaaccggcacaggcgcttcaccgccgcacggaccttcatcttcttctttgatcccccgctcgcctcggccccttctcgtcttccttccgtccgaatcgtctagcgccggatcggaccccggccggcctcgaggtacccaa

SEQ ID NO: 68986 - DNA, 348 bp, Zea mays
  unsure (1)..(348): unsure at all n locations
  Clone ID: MRT4577_162909C.1
gccgtccctgctgccggcgacggcgggnggggggacgcgctcgtggtctgcggcgggctggtctccgacatggactgcccgctgcacctcgtgctccggtacgacgtgtgccggaacaggtgggccgtgatggcgcggatgctggcggcgcggtccttcttcgccggcggcgtggtggacggccgcgtgtacgtcgcgggagggtacagcgcggaccaattcgagctgagctccgccgaggtgctcgaccccgccggcgccggcgcgtggcggccggtcgccagcatgggggccaacatggcgtaggtcgactccgccgtactcgatgggaaggctgtacgggaccta

SEQ ID NO: 68987 - DNA, 374 bp, Zea mays
  unsure (1)..(374): unsure at all n locations
  Clone ID: MRT4577_16290C.1
cgttacactaacaatttggactccngcttttnattttccaaaaacancacatgctatgtggtcgcttatatcatcaatgaaatgctatcaccacttctttggtctggagtatcatcttcatttattcaacattcttcttgttccttatttcaatattgtaccaatgtaaaacaagatctttaatatatttcaatctacactttttttgtcatcaccttatacttccactgatgtttattatgctcctattttccctgtccttggacatgactatttccacaactttaactggcaatatactaacttttcctgatttgttccatcttaccctttaagaattacttaccctttttcaatcatcaagcacttctctt

SEQ ID NO: 68988 - DNA, 825 bp, Zea mays
  Clone ID: MRT4577_162910C.1
ggttgtctgcacttagttatcaactactgctaaaaaaaaaaaaaaaaaaaaaaaaaaaaaaaaaaaaaaaaaaaaaaaaaaaaaaaaaaaaaaaaaaaaaaaaaaaaaaaacgtccacttccacactcaccaccacgggaaccctaaccaagaagatccgacccggcgctagacgattcggacggaaggaagacgagaaggccccgaggcgagcgggggatcaaagaagaagatgaaggtccgtgcggcggtgaagcgcctgtgccggttctgcaaggtggtgaagcgccggggaatcgtcttcgtccaatgcacggccaatgccaagcacaagcagcgccagggcttctccaccatcgccgaagcagccgccgtctcgtgcgttcacctgcctccgccgccgcccgctagcggttccgcctccgccgcagcgttcgcagagacttcgaaggtggcgaggcaagagatgtctatgaagttcaattggcggctgggtttagctgccctgttcaagaatggagaaaaataatatatcaggccttctaccatacgctgacatttttaagcagatgttgaatagggccagttggtacgatgatatcaagagaagcatgtagcaaaaactggaaactgcaccatcatgtatttgcagtggaataatatgagcagatattgttactttctcttaaaatgttcgattcttgattgtttaaatgtaatagcacttgcacaaagctgttgtgcttaactctgttttttacatcttgctgcgtggcccatttatcttattgggtggcaccgaaaaaaaaaaaaaaaaaatgaggc

SEQ ID NO: 68989 - DNA, 480 bp, Zea mays
  Clone ID: MRT4577_162911C.1
cactaccactccatcacttgacactagtatgattcagcagggcagatagctagcagagtcacaatggatgctaccaaggaccgaccgtgcagcagccaccacacgacggcgacgacgacgaacgcgggcgctcatgtgaggaacgacaacgaggcgctgactgcggggcctggcggacccatactgctggaggactaccaacagaacgagaggggggggcactttgacgcgcgagcgcatcccggagcgcgagcggcacgcgcgcggaggctgcgacagggctaataccagtgcaccccgacgagaaggcgctgacgtgcgccaactagctgagcgcgcccggcgtgcggacgctcgagatcgagctgtcttcgacggcgacgcacgagcgggggaccgagacagacgatccgcgacccgagcggctatcagcgccgaagtaatacaaccccgagggcaactgggacgctgctgggcaac

SEQ ID NO: 68990 - DNA, 676 bp, Zea mays
  Clone ID: MRT4577_162912C.1
gggtaccggcgcactccctcgagtttttttttttttttttttttttttttttttttttttttttttttttttttttttttttttttttttttttttttttttttttacatggggattggcttgtcccgttaatacaaggggccgggatttacgggacaaaaaaccgaaccctgaactaagggcccaaaaccggcaccaggaacccagtccaacaatggcaccccaccaaacaagaaggccctcccaaacccaaaagacacaacccccaccctagggccaaaggaacaaaaatgtgccaaagggcaaagggaacagaaagggggctaacggccttgaccagggcagggggaatggggattgtcacaaatccacagggcagggcgattgtcacagggctccaaagcgggccgatttttaatggggggggaagcaacccgcccgatatcaacccggagaagatgctaggggggggcaccccccaaatggtaattggagtggaaacggcccgttggggggcggacccggaaaaaaacgggccgggggggaacccgcccccagggcacccacccctgaagagggacctggcgcccccaaggggggcaaggggggggggggcccataagggggggtgacctacctgggggaataaacaaatgcaaggggacggttacggttc

SEQ ID NO: 68991 - DNA, 448 bp, Zea mays
  Clone ID: MRT4577_162913C.1
gtagactccaattctacttcattccagcgaagcaaacatggtcgtgctcagtggccatgcgctcaattctgagtttcacaataaaaagctaaattacagcggcccgttttaccataaacctgttggtggtgacacatgtcgatcggcttgggcctggttctggacgtggctcatgattggagagctccttttgcataaaaagcgtggggtttcttaaacgcaggttaccagttacaagaaactagtgcccagtgaaacgggagtaaacttataatgaatctgcgagcgcttagttccaatctgctgctctattctgagctgctcttctaaagacttaatatggtacttagaaagatgctcaaagtcgatgtatttaatctgggccagtacgatgcgtcttgccatttgacttgaaatgcctggacgattttgcatttaattcacagac

SEQ ID NO: 68992 - DNA, 680 bp, Zea mays
  Clone ID: MRT4577_162914C.1
atcccgttctgtccatcctagctgacgtcctcctcatcctctatcgttcttgatttgtatccgttcatcccgtcagaactcagaggatcaacagagcattgttctgcagagtttttgctagctcctcctgcgactcgatcatgagctaccagcagggctacccgccgccgggcactgcagcagcgtaccctccgccgggccaccagcagcaggcctacgtcgcgccgccgccggctatgtaccagcaggatcagcagtaccctcctgccggcgccgacaccaccagccgcggcggacacggaaacggcggcgatggcttcttgaaaggatgctgcgcggcgctctgctgctgctgcctcctcgacgcctgcttctgatccacttcgtcccatgtttttcgaccggcacgatcagacgtggcatatactgtagattatagagtatcgtcatacttattttgcttcttttttaaacgtggttcatgtgttgagtactagtcccagaacaggaattttttttttgagaggcagaacaagatttcttgtgtgataaaaaaaaattaacaagtttctgtgtgtgatagatagacatgtgagactgatctgatggccttatggaatgtatattttcttggtgtttcctttttaaatgaaattcaggaatctcgtcggagaccacct

SEQ ID NO: 68993 - DNA, 524 bp, Zea mays
  unsure (1)..(524): unsure at all n locations
  Clone ID: MRT4577_162915C.1
tttcggatagttatttgcattctaaatttctgatgctgctctngaaggttcttngaanaactattagatagagcccaanaagagatcacacctggcccttctatactcatgtgttataattataatccgtatgctcagtattatctttgctttttaacaagttttgctgactctcgttgggcgggggtgcgtttaatttccagggacatcattttggaggcccaatcaaatgacaaaatggagtgtcaccatggttcgtgccagttatcgactcctcatattcatagccataaggtcattctgagcgtgagctgcgaatacctccgtgctttgttccagtctgggttgcatgagaggtacgccttctgtttcctggcttctgatgcagggtgtcgcacgccttatctttgttgcttctctctccggactgtnggccacgtcgtgaatgtttaattcctccggtgagagccctgtgtgcggctttgcggcgcctttccgggttcctgtctgggtgggaagcgctg

SEQ ID NO: 68994 - DNA, 293 bp, Zea mays
  Clone ID: MRT4577_162916C.1
agtaaacgcaagtctctgacaccgacatcataccggtatcgccgcgccaccaacagcagctgctgctgccaatgctcggttgagtcgtcagagccggagtgatgtatcggggcggtcacagcctaaccgcgagtactgcgatgaacgaggtggactgctccaggagaacctgctcgagcatgggatacgccctcgtggtcgccgacgtcgtgtacctcgacgtcgacgtcgcgcacactcggcgctgggacagggcgagatcccagctcgtccaaatctcgcacgcacccgag

SEQ ID NO: 68995 - DNA, 305 bp, Zea mays
  Clone ID: MRT4577_162917C.1
aaacaagaacatccgggggccttaaaaacaaagatttcctgggttcaggggccccccccctcagggtttaggaaaccggccaagggggcccaattaaagctttgccgaagtcccaagggccccccccccgcctggggggtcaacctcgccaaattttttccggggaagccaatcccccaattgggtgggtcccattgccccccggggcaaaagcccccttgtttccttccgggcggcaggaggtgtcccccccaggggggggttttttaagcataaaaaaccccccttttgggggggttgggggg

SEQ ID NO: 68996 - DNA, 422 bp, Zea mays
  Clone ID: MRT4577_162918C.1
gggaaaccttcccggggtggggccccccagggaaaaaacgggggagccccccgggttttttttcaaacaagaggtccccacgaaaaacaggggcgggggccgacctattttaacatttttgggcaacaccgggcataggggacccccctaaaattttatggggaaaatattgggaaaaagcggggggggccaaaaacccttccgaaaaacaacttattcggggggaaatgggcccaaagaaacaaattggcccttagttaaatttttggcccctgccgcccgggggggttggcccggggcaacatttaaattttttggtttgacaggggggttcttttttcctgggaagcccttgggcttcaaaacaaacaaagccgggtttattaaagggttaaaaactgtttgaacatcaacgggccccg

SEQ ID NO: 68997 - DNA, 357 bp, Zea mays
  Clone ID: MRT4577_162919C.1
cagcccagccgattcgacccgagttcgcgacgagagcacgagatggcgatgcggaccgcgctgacttccctccccgcgctcctcctcctcagcgaggaggagcgcgccaaggagagcgtctacatccagaagatggagagggagcggcaggagaagctcaagaagaggctcgagcaggagaaggccgactctgacaaggccaagcccgccgacaccgacaagaaggccgagggatctacctagctaggattggcatggcgctgtcggaaggcaatcacgtttcgcatgtatccgaatccgatggtcagctttgtgaatgaataaattctggaaaacgtcaacagcactggatatgct

SEQ ID NO: 68998 - DNA, 1169 bp, Zea mays
  Clone ID: MRT4577_16291C.1
cctcgaggctcgaggcagaaaaaggcagcgtgcatcgcggctcccgctcccacactcgcctccctcatcagtggcagctagtagcggcagcacccgcagctcgcaggagagagagagagagagagagagagagagagcagccatgaaccacggaggcggagccgacaacggtgtgagccccggcaacgtcccggtgtgctactacggcgcggcggggcgcgtgccggcggcgctggagcggcgggtgcgcgccgcggagctgttcatgcggtgcgcggcgtgcgggctcgcggtgctcgccgcggcgctgctgggcgccgaccgccagacccgcaccttcttctccgtggagaaggcggcccggttcaccgacatgcagtcgctcgtattcctggtgatagcaaacgggatggcagcgtgctacagcctgctgcagggcgggaggtgcctggtgagcatcctcacaggtggtggcgtactaatcaacaggcccatggcatgggccatcttctcctgcgatcaggtgatggcgtacttcacgatctcggcggtggccgtggcgatggaggcggcgatgatcggcaagtacgggtcgcagcagttccagtggatgaagacgtgccacctctacaagcgtttctgcgcgcaggcgggtggcgccgtggcctgcgcggtggcggccagcctgaacatggtcggcgtctcgctcgtctcggcgttcaacctcttccggctgtacggcagcggcaaagggaggaagtgatctcgatcggcctgctgccactaggaacacagggccggcagcgccgcccctgtgctggcatttctcttaggttttaacacccagtatggaaccatagcgccatggatggatggatggtctcttcttctccggtttgagtttttctggtgttgggtaggcatacctgtcgtctgtcagcgtagacataaaaaaaaaggtctctgggacgctcgcccatgtatgtatgtatatgatgtgaagtgatccaaggtggttcgcgtactatggcaataaacgtgtgggaaagcgatgtatcgtcgatgactgtcgccgcctgcagggatggcaggggaatttactctctgggttattatacaatgcggtagctggctttgctgatgctgtgccaactgccatcatttactcc

SEQ ID NO: 68999 - DNA, 796 bp, Zea mays
  Clone ID: MRT4577_162920C.1
cattgggtacctcggccggagtacggcagacttcagtccacccagccagccagcaactgcaaggcagcacccaagacacgcagcgcagggccgcaggcgcaggctgcgcagcccagccagaaccagattcgacccgagttcgcgacgagagcacgagatggcgatgcggaccgcgctgacttccctccccgcgcgcctgcgcgcccctgcgccccccgcggcgacgggcggccggcgcctcctcagcgacgggaaggggcgcgtgctcagcgaggaggagcgcgccaaggagagcgtctacatccagaagatggagagggagcggcaggagaagctcaagaagaggctcgagcaggagaaggccgactctgacaaggccaagcccgccgacaccgacaagaaggccgagggatctacctagctaggattggcatggcgctgttggaaggcaatcacgtttcgcatgtatccgaatccgatggtcagctttgtgaatgaataaattctgtaaaacgtcaacagcactggatatgctgttgcttcggttgcttgcatgttgaagttgaagacgacattcatattttgatactgctgctctttgtggactcgcggtagatcggtctttgtggtgttacctgctgttttgagttttctggttcctggctcggagacaaggacttcgaggtacagctgacgcgtttcctcggtctgcctgcttgcacttgccccctcgacccaaaggctgcttcaaattgcatagtgatccaaccaagtttatgccaaaaaaaagaaaaca

SEQ ID NO: 69000 - DNA, 353 bp, Zea mays
  Clone ID: MRT4577_162921C.1
gcggtgcgtcccaccacgctcgatttatatttactgcaacacaagccttttagctgtgtcgaccgctgactattggatcacaagcactgcccattcttatttacacgacttggcaaaaccactttaacacaccacatgggctactccatctactgcctatgagcgcccaactaagtgtctactctatactacgcttgcttcccttaactgagcctgctcaaggccaccactatgttcccttagctcacgattccctggatcgaacctttctactacatctcggtctccaagaacgcctacaacacgtgataagctctttggcacgtagacacgctgaaagcttattggaacaa

SEQ ID NO: 69001 - DNA, 491 bp, Zea mays
  Clone ID: MRT4577_162922C.1
tctcgaggccggccgggacggcaccgacacgaatctgccatcctctccaacactaatacggcgtacatcagcaatagtcgcaaagaatgcggcggacgagggcgaactgctgctagctcgaccggtgctacctgccgcacacgcagaccgccaagaccatgtcttcaggggagacgacctacccgctccccccactacacatcatcaccatgggcgccaagcgcttccgatgtcccacagaacccctacgatcctccatcatcggaataaaacctgccaggatacacgagaacacctaatactcctccctgcagtgaactacctgaattacgaagtatctctacaggaaccccgcacgtccccatgcatacctccatgttacctgaaattgctcacaacctgagcactgagatcactgccctggatctcaatcgagatcaaaacacggtgagaacctcctcctcagaggaaacacaaccttcggatcggag

SEQ ID NO: 69002 - DNA, 134 bp, Zea mays
  Clone ID: MRT4577_162923C.1
cggggcttatgagatactgtcttcggtgggaaacagtggcaaactcgatgaaaatagacacgctgataaagagcacgcattacgtcttgcgcgagcactggcagaacatgatgatcttttgggcgaaaatgggg

SEQ ID NO: 69003 - DNA, 294 bp, Zea mays
  Clone ID: MRT4577_162924C.1
gaaagacaactccgggctctgagctccagagttaagatataccacgagtacaaacataaatgcatgcagcattcaggtaacaagaaacatatgaccatgtgtcatacggactatgatttatccaggatttgcaaagtgaaactcagtctaccagacagacaatataggatgacaccaattaaccggccactgcaggattgagtgcagctggaaacatcgactcagatctgaggctgagacttctccaggtcagtagaggccgaaccaagctaggcagtgaatctaaagagaccc

SEQ ID NO: 69004 - DNA, 982 bp, Zea mays
  Clone ID: MRT4577_162925C.1
cggacgcgtgggcgcctacaaagatgtggagcaagacatcactctaggagatgattattttttcagtaggtacccgattgtggagaagaggttagcgcaggctggaatcagattggcgttggtacttaatcggatatttggtggaggtgaagctgatgatataccgctacaaatccttgtaatagctatgcttgcccggaaaaaaaaaaaaaaaaaaaaaactgctggctacatcattggccatgctgtaagactagcttatctgtattactgcacttgctctccggctccgggcagccacgagtatcagccccggcgagcggcggcgatgcagaacctgctgtccggcgcgtcccacgagacgctcccggacagcttcatcttcccggccgagcagcgcccgccggcgtcggccgccgccgtcgcgctccccgtcatcgacctgtccgggcctcgcgacgaggtccggcgagccgttcttgaagctggcaaggagctaggcttcttccaggtggtgaaccacggcgtgccggagcaggtggtgcgggacatggaggcgtgctgcgaggagttcttccgcctccccgcggaggacaaggcggccttctactcggaggacacaagcaagcccaaccgcctcttcaccagcaccacctacggcaccggcggcgagcgctactggcgggactgcctccgcctggcctgcggcttccccgtcgccgccgacgccagggacgcctggcccgacaagcccgacggcctcagggaggcggcggagaggttcgtcgcgtcgacgcggcgcctgaacctggagctgctgcggctgctgtgcgagggcgtgggcctccgcccggactacttcgagggggacctcagcgccggcgacgtgggtcgtgaacgtcaaccactacccgccgtgcccggaccccgggcgcacgctgggcctgccgccgcactgcgaccgcaacctcatcacgctgct

SEQ ID NO: 69005 - DNA, 443 bp, Zea mays
  Clone ID: MRT4577_162926C.1
ggggggggaaaaaaaaatttaaggcccctaacaaacaaaattgccccccggctttgggggcagcccttgcattaatttttattccatttttttacaggcaaaaaggttttttactaacaggggaatcgatctagttctttaaaggggcccccttttatttaaacggcttaaaaatgggggggggctatccactggttcgctttcataatcggggctgaaaaacttcgatttggacataactttggaaaacccatagccaaaaaaatttcctggcgtaacaaaaaaatttgtaagctttgacaaaaaaaaattccggaacccggggaggctttcctgaaactttgacattgggagttttgtttgggcaaaaacaacaacagctagctgaaaacttgggtccaagggcttagggacaacccgtgtggcaccaattttttccaaat

SEQ ID NO: 69006 - DNA, 555 bp, Zea mays
  unsure (1)..(555): unsure at all n locations
  Clone ID: MRT4577_162927C.1
cggccggggacaccaatacacatcccgcgcggagcgaatctgcatcttcgctcgatcagggccgcgtagcttggctgactgaacacatggccggaagcggcccggccgactcggagcgagcacgcctctggagggcatgtgctaccagcgagccgtgcacgacctccccgacctaaggtgctacagctacgtaacaactcgttactggggaccccgaccccaccccggaaggaccgggaggcgtgtacctgttttttttggagcattgccatgccaaaagcaaatacggtgccatagacaccaacaagagggacagagctagaagatgtgcctctggagaaaacagctgggactttacgcatgggaaccagcctgagcgccagatgggcgatatataagaggatggagctgntagtccttactacttcaaaggtgcacactaaggataagcttagacttccagctgatgagactcttgatcgccatatcaaggaccggtgtcaaggcttcacggattttgaggtgagtgtgcagagggctatgatggaggagctt

SEQ ID NO: 69007 - DNA, 287 bp, Zea mays
  Clone ID: MRT4577_162928C.1
aaagacaaccgtatctacgcacacagtgatgtgcccgctcctgcagtcaccctctatagaacaaaaccatatgctgacttgtatgtgcggacgctctctttgattagctgcgggaccccactggcctgtaggactaactgagagtttgtttagcataggaacatccttatcattgatccatacattagtacaacagacactagtagcggatgtcctgatgataagagattcctgctaggggtcacatgagcacaacacggacacactataacataggatttgagcaa

SEQ ID NO: 69008 - DNA, 195 bp, Zea mays
  unsure (1)..(195): unsure at all n locations
  Clone ID: MRT4577_162929C.1
cnccccaacgggaaaaacagacccgggaaaatgggacacgaaaagcccccccgagaggcctttttattatgtatttaaaaagcgaaccgggcaacccaaccttaaagggtcccatattagggacccgggggggggggggggggnccccccacactactttttaaaatgctcttctaaaagggcccgggggggggg

SEQ ID NO: 69009 - DNA, 448 bp, Zea mays
  Clone ID: MRT4577_16292C.1
ggcggtgcagccacacagcagcagcaggtgaggaggagaggagacccgccgccgccgccgccatgggtatctcgcgtgattccatgcacaagcgccgcgccacgggcggcaagcagaaggcatggcgcaaaaagcgaaagtatgagctcggaaggcagcctgccaacaccaagctgtcaagcaacaagacagtgaggagggtgcgtgtccgtggaggtaatgtgaaatggagggccctccgtttggatactggcaactactcatggggaagtgaggccgtgacccgcaagacccgtatccttgatgtggtctacaatgcatccaacaatgagcttgtcaggactcagacccttgtaaagagtgctattgtgcaagttgatgctgcccccttcaagccggggtacctcactcactatgggagtgatattggtaggaagaagaaaggctc

SEQ ID NO: 69010 - DNA, 1708 bp, Zea mays
  unsure (1)..(1708): unsure at all n locations
  Clone ID: MRT4577_162930C.1
tcgaggccggccgggctcaaatatnnctagatgagccctggaaaaaaaaaaaaaaaaaaaaaaaaaaaaaaaaaaaattcgtatccgggtcggctcgggccgggcccacgccagctccccctcccaatctcgattctcctcatcacatatcactgccgatgaaccttccagtagcctgtagctagagcgcctgggccatcggtagcagagaggttttgctgcagagagctcaagaaagatgtacgtggtgaaggatattggcggcgccatcgggctgatggcggtggcgctggtgctcctgggcacctggccggttgtcctggcggtgctggagcgccggggccggctgccgcagcacacgttccttgacttctccgccaccaacttcatggccgccgtgctgatcgccctcaccttcggccagatcggccccgccagcagcacgcccaacttcctgacgcagctcactcagttcaagaacaactgggcttcggtcttgtttgccatggcgggcggcgtcaccctgagcctgggcacattggccacgcagtacggctgggcgttcgtcgggctctccgtcactgaagtcatggcctctagcctcaaggtcgtcatagggacaacgctcaactatttcctggacggccggatgaacaaggcggagatcctctttcctggcgtcggctgcttcctgattgcggccatccttgggtcacttgtccacgcttccaatgccgccgacaaccaggagaagctggctaataataacgcttccaatgcagctgcagctgcagatgaggagaaggatctcaccaaacacctcctagagctagagatacaatcccaagaagcagagccggatgcaggaacggcagggttcctggttggtctggaggagaagaggtcgattaaagtgctgggatcccacacgcttctgggccttggcatcgtggtgttcgcgggcatcttctacgcgctcttcgcgcccgcgttcaacctggccactaacgaccagtggcacacgctccccgccggcgtgccgcacctggcggtgtacacggcctacttctacttctccctcgcatgcctcgccgtcagcgccgccctcaacgtgtggctcctctaccggcccatggtcggcgtgccaagctccaccctggcggcctacgtcctcgacggcgacggcaggggcctcgcgatgctggccgggatgctgtgcgggctcgggaacgctctcacgttcatggcagggcaggccgccggttacgccgccgccgactccgtgcaggcgctgccgctggtcagcacgttctgggccgtcgccctcttcggcgagtaccgccggtcgtcgcggcgcacgtacacgctgctggcgagcatgctactcatgttcacagtcgccatggtcctcctcatggcttcctcaggaagccgctccatcattcactgagctggccacgtggatggatatgcgatgcgatgcgatgaggagaatggacaccgggatagctcttgtcttgtgctggaatggaatggaaccaacccactagctgtacagagcgatcatgctacgtccacccactcgtccatgaattgatttgtctctgtatttttttttaaaaaagcgtgcgctgtcacccgcgggccgcggtagcatgcagcccgtctccagcggtctacataaagtttacttaaaaaactgttttat

SEQ ID NO: 69011 - DNA, 766 bp, Zea mays
  Clone ID: MRT4577_162931C.1
agcctgtagctagagcgcctgggccatcggtagcagagaggttttgctgcagagagctcaagaaagatgtacgtggtgaaggatattggcggcgccatcgggctgatggcggtggcgctggtgctcctgggcacctggccggttgtcctggcggtgctggagcgccggggccggctgccgcagcacacgttccttgacttctccgccaccaacttcatggccgccgtgctgatcgccctcaccttcggccagatcggccccgccagcagcacgcccaacttcctgacgcagctcactcagtacggctgggcgttcgtcgggctctccgtcactgaagtcatggcctctagcctcaaggtcgtcatagggacaacgctcaactatttcctggacggccggatgaacaaggcggagatcctctttcctggcgtcggctgcttcctgattgcggccatccttgggtcacttgtccacgcttccaatgccgccgacaaccaggagaagctggctaataataacgcttccaatgcagctgcagctgcagatgaggagaaggatctcaccaaacacctcctagagctagagatacaatcccaagaagcagagccggatgcaggaacggcagggttcctggttggtctggaggagaagaggtcgattaaagtgctgggatcccacgcgcttctgggccttggcatcgtggtgttcgcgggcatcttctacgcgctcttcgcgcccgcgttcaacctggccactaacgaccagt

SEQ ID NO: 69012 - DNA, 391 bp, Zea mays
  Clone ID: MRT4577_162932C.1
ctccaaacttaataacccattttcaaatctttttttattaattcttacactttttttttttaaccacacatcttctttttttttaaaagccggcccccctcataaaacaaatcccatctattcaaggcaaagcagatggtcccaaaaaaacaaaacccttacaacgccattccaatccatcttaaacaactgggcaccctggtgctcaaactcaccctcccaaaactcatcaccgacctacccccaaaccctcacaaacgcatccagatcctcacgagcctctcagaactcaacctcctccataccctaaccgacgtaccattgcacgaaagcgcgcttgccttacatgaggtcgaacctttatcaatgcgggagaagacctccacaacac

SEQ ID NO: 69013 - DNA, 432 bp, Zea mays
  Clone ID: MRT4577_162933C.1
aaatcaaccacattttcccggcttataaatgagtggcttggccggggtgattcgcctatttatactgaggggcggggttcaaactatacaacgaacgaggggtgtcagggaaaccccccgaatttttttgccggattgactccaccgggttataaagaaaaccttttgaagtttacgaatgaacggtaaaggccttgctttagggggtagtttcagatgtttttgaccaccattttggacttccctggggggatggccttctcgaaagggaaggcgaaaaacgcttccccggacttttttatggttttgtttccaaatcttttttttccccggattaaggccccgggctaaggcctgtttgaccatgtttttgttggggccaagaaaaaggccggtgggggcctccaacccgggctgggggaagtacttttt

SEQ ID NO: 69014 - DNA, 886 bp, Zea mays
  Clone ID: MRT4577_162934C.1
atcgaccgttatcaggtagcagtcagggatccgcgttccgaccacgactacgggtcgcggcagcgcgctcctccgcgagccccttcttcttcagtttccctcacattactgccactgacgttcattccgtttccttgcttgctccaggtactcccatcgctatcgaccgggtcctcgagcgcgggagatggcggatcaggagaccccagttgcagttgaggcccctaccccggtccttggggagccgatggacttgatgactgctctgcagcttgtcatgaagaagtcgggtgctcatgatggccttgttaagggtcttcgtgaggctgccaaagcaattgagaagcatgctgctcagctttgcgtgcttgcggaggactgtgaccagcctgattatgtcaagctggtgaaggctctttgctctgagcacaacgttcacctggttactgtgcctagcgctaaaactcttggcgaatggtctgggctttgcaagattgattctgagggcaaggcgaggaaggttgtgggttgctcctgtgttgtcgtcaaggactatggcgaagaatctgagggccttaacatagttcaggagtacgtcaagtcacactagatacagtgcatcggtatctggaacttgtgctctacactagctttaagacctgaatttaaatttgtgctggttcttgggcttttctaggagattatctcaattcttgttttaagtgatgtcatctggtgttaatacaaatcattaagcggtggtattctgcttctgttctttgttaccattccatggcaactgctgccgagtcatttgtggttgcctgttcaagccgattgaaattaggcgtatactgtttctttgggacaaaaaaaaaaaaaaaaa

SEQ ID NO: 69015 - DNA, 387 bp, Zea mays
  Clone ID: MRT4577_162935C.1
aacaaaaaacaaatcgattgaattgagaccacactacgaccktttaaagmacggaaccgatgtcccaactcccaaccmacwattggcccccacagctcgktawtgcatacwtgacwtgawkaatttaggatggattyttytgatwattggcytcaacaatttcttgaatgaccctgtgcaggttaaattcatcckttacgatcgwagawtgctgggcyttttcgttyttgatggwtttgaagcwgcttcttctgctccggctgccgacgcwtctcyttttyaaacgccasgtcgtttttyttttttktctkgccctcgtgccgkgggcctgcagcccgggggtkccwctdgttctagggcggccgccaccgcgggggggcgccggct

SEQ ID NO: 69016 - DNA, 445 bp, Zea mays
  Clone ID: MRT4577_162936C.1
tcgagcggccgcccgggcaggtactactgaagttggcttaatgaaatcttttgagaataacttgcctatttaacttgtgtcctttttgatggtggcgttgtttgttagctacaaaatcatcaatcaaagattgtaattatatcaaaaaaaaaaaaaaaaaaaaaaaaaaaaaaaaaaaaaaaaaaaaaaaaaaaaaaaaaaaaaaaaaaaaaaaaaaaaaaaaaaaaaaaaaaaaaaaaaaaaaaaaaaaaaaataatagaaataaaaaaaaaaaaaaacatagagaaaggggagtgcacaagaggaacttagtttggatttttccaatattccaactccctttaaagttgccgtggcctacttttaaaggggcccaatctgccaaaaccgtggcgtaacaaaatttatgggccgaggattaaaaccccttttcttgggaaaacc

SEQ ID NO: 69017 - DNA, 334 bp, Zea mays
  Clone ID: MRT4577_162937C.1
aaccctagcctatcgcagccgcatccacaaccttcctctctcgtcccctggcggcgtccgcggcaggatggcggaatctacggcgaggacggtgtaggatgtcaacaccgacgagttcgtcaaggcctactccggccacctcaagcgctccggcaagatggagctccctgagtggtttgacattgggaagactgcgaggctcaaggagcgtgcggcctatgattcttttttttttctacatcagggctgcatccattgcaaggaagatctacctaagggaaggcatccccgccgggggctttcaaaagatctacggggaccggctgaggaatgg

SEQ ID NO: 69018 - DNA, 435 bp, Zea mays
  Clone ID: MRT4577_162938C.1
ccggccggggacaaaccgtcatcggatgatgctttatacatgcaatcgacgccgctgtgatcctgctgttgatcctgccatccagctaggtaagcgaacacggtttcgagggcacagttcgctgcaatgactctgttaagttcatgaacactgctacaacatatagggaaaacagcggcaaggtaccagggcatcctcctaaaggatgacatggttactcccggcgatgtagccaaatacaggcctaccccagatcaagtacccggatgcacactcaagttcctacaccgccgtatcccctcatgcgaagcactgagatcatgctccttctactacgccaagttataagttgagggtacacaaaacctaaacgtcatcaaccaggcttccaacatgtggcaagtgtgcttttactacgctaggacgctgtagaac

SEQ ID NO: 69019 - DNA, 270 bp, Zea mays
  Clone ID: MRT4577_162939C.1
cccacgcgtccgcccacgcgtccgcggacgcgtgggcggacgcgtgggcgagtcataagaaggtactgctgcaatcgacgtcacttgagaatgctgatgctccaatggaccacgcgagacattcaaaagcacaggggtccattgatccacagactcgtgggagtgatagtccagtgccctctaagagcacttaagcttttgcaatgttcgtgaaagcttgcaggtccatgcagtaaaggattgcttccactgtgttgaacaccttattac

SEQ ID NO: 69020 - DNA, 308 bp, Zea mays
  unsure (1)..(308): unsure at all n locations
  Clone ID: MRT4577_16293C.1
gaaaaanggctggacgcacgcgtccgaccacgcgtncgcccacgcgtacggtgtttttctgctctccgacccctagctccaaaggccggatcattaggcgcggtccccctctcatgtaaccgacatggcgctgccgaatcaggggaccgttgattaccccagcttcaagctcgtcatcgtcggcacatggtggaactggtaaaactacatttgcgaagaagcatatcactggatagtttgagaacaaatatgaaccaaccattggtgtgaaaaatcattctttggatttcaccactaactgtggttag

SEQ ID NO: 69021 - DNA, 735 bp, Zea mays
  unsure (1)..(735): unsure at all n locations
  Clone ID: MRT4577_162940C.1
cgcctgcaggtatcggtccggaattcccgggtcgacccacgcgtccgagcgagtctctcctgcggtcagacgcccagccctgcttttgtcagcgtgtgtgacctcagggctgcacctcgtggctctcaggcgctgtgaaacgcgtggacagaccaatcccgacctgaggagagctggttccttcctggggaaggcgcagatttgggattttgaacttctgacgctctcgccaggaaaaggtgcgctctgtgtcagtgtatccaccatgtcgggcgtgcagtccaaagcagccaggcttcaaaaggagtggaaagaaaagctgtcggcagacagggagagaaaaacggccacatctctgtgcttaaaacacagcgaagtacctgcatccatgatgaagcagtttaatgctttaatggaaatgcaagaggtgatgtttgcagagatgagagaaacctataaaaacgatataaaggaaatgctgttaaaacgaacagcaccttgggtgaagcatttggaagagcggatagggcagcaagaaggagatgcaatctcggaaaggccaaagccaggagagaaagtggaagagttaagttctggaacagacgaggacactgaaaacctgactgtgagaagcaagaagggtaagcaggacanagctaaaccactcaacagcagccatgtcctgaaatcatcactagagagagagggagaagccctgcatggnngacatggcag

SEQ ID NO: 69022 - DNA, 187 bp, Zea mays
  Clone ID: MRT4577_162941C.1
ccacaacctcaccggacgtgtcttcattccgaccggaggggtcaaattatacacggtgctctttccagtcatagatgaatgacactagtcactctgccattgttttcaagacttctatttttcacaactactcgcgtttcacctcaactccaaaaaattaatgtgtaacgaagactttttattttta

SEQ ID NO: 69023 - DNA, 1800 bp, Zea mays
  Clone ID: MRT4577_162942C.1
atgccgggcttcgctcagcgtctcgcgggcatcccgtggcggagcatcgcgaggcaaggcctctcccgcgtgttcctggtggcgaaggcctactgcgtgatccacatcgccaacgagcacctctgctcggtcgctttagtgcggggcgccagcatgctgccggccctgaacctggcggacgacgtggtggcggtggacagggtcagcgtgaggttcggccgggtcgcgccggcggacatcgtgctgatgatctcccccgaggacccgcgcaagtggctcatcaagcgcgtcgtcgggatgcagggggactccatcacctaccttgtcgaccccggcaacagcgattcctccagaaccatcgtgatcctcaatgaattagaactatgtgctgaaggtgttgttttcagtgtgaggcctacaaagaaaagttggaaaaacatttccaatatatcttgtggtgagaaggtcaaaggtcagttttgtggaaaacatacagatgaggaggtgatactgagaaatgcagctacaataaaggatatggagaatatactgccaatagtgtgggcagtcactcaatctgaactcgtacggtccaaccccagggttatgaaggctggggagcaccaggaggataaggagggggaatgttttgtccggtttgggcatggcggtggcctgactcctttcggtataaccgttaaggtggggacgtgcgaggaaagaaagagattcggtatttgggtctcacgacgaagtcaaatggaggttcgctgccaaaccagcttttgccagaatgaagatggtttccccaagttgctgagagcatgcacagttcgcctcgaaatcaggagccagccagagtatgatggtcgtgaattcgtcgagcatggcacagagaagtgtgtcgtgactgtatacattggatccagtctgcaccatgtggaatggagtgtcactgctgctgggcacagattcaaagacacctgccaagtcgtcgctcgcaaggcattgaggaccttgtgtcaactgtatgaagaagaagtggccgacacaccgctcagattctttccaccctttcagagagaccgtcccgtttggatggccaggatgcgtgcattggaaggtcagcagctacttgaggacgacccctcagtcgtgtacctcactgcctacctgctcaccctggatgcacaaagatgcagaaagctcaaccgtaagctccatgtggatctcacctcagctcaagcccgtgtagctgccttggaaagtcgtgaagccattgttgttgaagccctgaagcaagccaaggatgagcatatccagaagctgatggaggcctacttggtaacccataaccaacgtagagccctgcggacccaagagcccgctccatctaacccagttcaacccaggagagctgaagatccccagattcttgaaggtcacccggtctctatcagaggagataagaagacttgggaactaccggaaggagccatagtcttggaaggaattccagtcttccctcaggctatgaataagcaagagcaccccgagtcctctcaagatccctcgctagagttgtttgagcccttctccgtgaagaagattccagcacctctccgtgaaatcaaggaagaagctgcaagcaccccgccagcaccgccgccctctgaggagctacaagagccagtcccgcttgaagaagagttcgaccccgtgttgccatctcagtcgccgccagaagaagtcatcaacatcagctcccttttgacccatccaggagatgtctcagattga

SEQ ID NO: 69024 - DNA, 1329 bp, Zea mays
  Clone ID: MRT4577_162943C.1
atggacgagtctggtgtgacaaaggagatcggcctcctgggactagtaattgtatcacatttgagtcccagaggatctggggcgctccaggtggtatcagagctgttaggttggccgcaggacgtagcccttagcctgatccaaaagtttttgagtccaaactattttattaaaaaagttcttgctttcatcccttcatttcaaaaatgctttccccctttccttctctcagaagtcagatggaggtgcgttgccaaaaccagcttttgccagaatgaagatggtttccccaagttgctgagagcatgcatagtccgtctcggaatcaggagccaaccagagtatgatggtcgtgaattcatcgagcatggcacagagaagtgtgtcgtgactgtatacattggatccagtccgcaccatgtggaatggagtgtccctgctgctgggcacagattcaaagacacctgccaagtcatcgcccgcaaggcattgaggaccctgtgtcagatctatgaagaagaagtggccgacacactgctcaaattctttccgccctttcagagaaaccgtccagtttggatggccaggatgcgtgcattggaagggcagctgctgcttgaggacaacccctcagtcgtgtacctcactgcatacctactcaccctagatgcacgatatgatttcttggctcggcaccaccgtcagatgattgcccgagcagaagatgcagagaagcgcatccgtcagctccatgtggatctcacctcagctcaagcccgtgtagctgccttggaaagtcgtgaagtcattgctgttgaagccctgaagcaagccaaggatgagcatgtccagaagttgatggaggcctacctggtcacccataaccaacgttgagccatgcggatccaagagcccgcttcatccaacccagttcaacccatgagagctgaagatccccagattcttgaaggtcacccggtctctatcagaggagagaagaaggcttgggaactcccggaaggagccatagtcttggaaggaattccagtcttccctcaggctatggataagcaagagcaccccgaatcctcccaagatcccccgccagagttgtttgagcccctcaccatgaagaagattccagcaccgtcccttgaggtcaaggaagaagctgcaagcaccccgccagcaccgccaccctctaaggagctacaagagccaatcccgcttgaagaagagttcaaccccgtgttgccatctcagtcgccgccagaagaagtcatcaacatcagctccctcttaacccatccaggagatgtctcggattaa

SEQ ID NO: 69025 - DNA, 978 bp, Zea mays
  Clone ID: MRT4577_162944C.1
atggaggtccgctgccaaaccagcttgtgccagaatgaagatggtttccccaagttgctgagagcatgcacagtccgcctcggaatcaggagccagccagagtatgatggtcgtgaattcgtgactgtatacattggatccagtccgcaccatgtggaatggagtgtcacagctgcggggcacagattcaaagacacctgccaagtcgtcgctcgcaaggcattgagggccatgtgtcagatctatgaagaagaagtggccgacaccccgctcagattctttccgccctttcagagagaccgttcagtttggatggccaggatgcgtgcattggaagggcagcagttgcttgaggacgaccccacagtcgtgtacctcactgcatacctgctcacccttgatacacactcaagcccgtgcaactgccttggagatgccttggagagtcgtgaagtcattgctgttgaagccctgaagcaagccaaggatgagcacgtccagaagttgatggaggcctacttggtcacccataaccaacgtagagccctacggatccaagagctcgcttcatccaaccctgttcaacccatcaaagcagaagacccccagattcttaaaggtcacccagtctctaccagaggagaaaagaaggcttgggaactcccggaaggatccatagtattggaaggaattccagtctcccctaaggctatggataagcaagagcaccctgaatcctcccaagatcccccgccagagttgcttgagcccctcaccatgaagaagattccagcaccgtcccttgaggtcaaggaagaagctgcaagcaccccgccagcaccgccaccctcagaggagctacaagagccagtcccgcttgaagaagagttcgaccccgtgttgccatctcagtcgctgccagaagaagtcatcaacatcagctccctgttgacccatccaggagatgtctcagattga

SEQ ID NO: 69026 - DNA, 199 bp, Zea mays
  Clone ID: MRT4577_162945C.1
aatgtaccattcataaagaaaaagttactttgcaaaatggaagactttacatttcaaaacaccatccatgacaaaacaaaacccaaattttgactcccccaattcttaactataatatagatatcgcatttaaacatgcaccccaccagtttaactcttcactcaaaccatcctaaacctctactgtctcaattggggc

SEQ ID NO: 69027 - DNA, 1323 bp, Zea mays
  Clone ID: MRT4577_162946C.1
ggggacacgactctcggcaacggatatctcggctctcttatcgatgaagaacgtagcaaaatgcgatacctggtgtgaattgcagaatcccgcgaaccatcgagtttttgaacgcaagttgcgcccgaagccttctggcggagggcacgtctgcctgggcgtcacgcggtacgaggtaggccaactataaaatccatcccgatctcatcccacttccactgaggaatccgcaaaggctaggttcgttgccaaaccagcttctgccagaatgaagatggtttccccaagttgctgagagcatgcacagtccgcctcggaatcaggagccagccagagtatgatggtcgtgaattcgtcgagcatggcacagagaagtgtgtcgtgactgtatacattggatccagtccgcaccatgtggaatggagtgtcactgctgctgggcacagattcaaagacacctgccaagtcgtcgctcgcaaggcattgagggccctgtgtcagatctatgaagaagaagtggccgacaccccgctcagattctttccgccctttcagagagaccgtcccgtttggatggccaggatgcgtgcattggaagggcagcagctgcttgaggacgaccccacagtcgtgtacctcactgcatacctgctcaccctggatgcacagtatgatttcttggctcggcaccaccgtcagatgattgcccgagcagaagatgcagagaagcgcaaccgtcagctccatgtggatctcaccacagctcaagcccgtgcagctgccttggaaagtcgtgaagtcattgctgttgaagccctgaagcaagccaaggatgagcacgtccagaagttgatggaggcctacttggtaacccataaccaacgtagagccctgcggatccaagagcccgcttcatccaaccctgttcaacccatcagagctgaagacccccagattcttgaaggtcacccggtctctatcagaggagagaagaaggcttgggaactcccggaaggagccatagtcttggaaggaattccagtctcccctaaggctatggataagcaagagcaccccgagtcctcccaagatcccccgccagagttgtttgagcccctcaccatgaagaagattccagcaccatcccttgaggtcaaggaagaagctgcaagcaccccgccagcaccgccgccctctgaggagctacaagagccagtcccgcttgaagaagagttcgaccccgtcttgccatctcagtcgccgccagaagaagtcatcaacatcagctccctcttgacccatccaggagatgtctcagattga

SEQ ID NO: 69028 - DNA, 262 bp, Zea mays
  unsure (1)..(262): unsure at all n locations
  Clone ID: MRT4577_162947C.1
nactanattcttctttanacaaacgcgcccagggagggctaccggagcataagcgggccaacaccgagccgacacaggacccgaacagcaggaacttagaccacccccaaaaggagagggcacccgaccacacaagcacaatgggaggaaaaacaacccctgaacaaaagaccagcagagaaaccgggcacaaggcggggggcgccctcctgcaggaggaaggagccgggccaggagcggacaggccccacccggtacacgg

SEQ ID NO: 69029 - DNA, 284 bp, Zea mays
  Clone ID: MRT4577_162948C.1
tgtcgtcgcagtgcccctactgccgcgcgtcggggccggcgcggtgcgcgacgacgcagccgccgctctcgcgcgccgtctccgagtgctccgcctgcgcccgaatcgtcctcgagcgccacctccacacgcaccccttcttccccctcctcccctcactccatccgctcccacttgtcacccccaacctaaccacaccaatccatccaacctgaggtggatccaccaccgacgaataagacgagaaccgatttataaccacggaatgatgaatcccactacca

SEQ ID NO: 69030 - DNA, 556 bp, Zea mays
  Clone ID: MRT4577_162949C.1
tccgctggggcgagtacgatcgcccctgccgcaacgaggtcgtgccctacggcgatcgccgcctcgacaccgtcgtcaagccgccagccgggtcgccggcgccgccgctgccggtatccaccaggagcggcgggagaggggtggggtcagcgtggtgtttcagcgacccggagatgaggaggcggcggcgggtggcgagctacaaggcctactcggtggagggcaaggtcaaggcatcgttccgcagggggttccgctggatcaaggccaagtgctccgagctcatccatggctgaacctgggatatcggtgaaattctgttccgttgtcatggtggaaattgcagctacaatgcgtgaggggtggtcgctgggtgtatttcgctcccaaaatgtggaagagaaattgtatgattgttggcccctggttataggaaaagaactcgatggagctctgctcaggtcacttgtcgctgcctgctaagtgctaactacccctaattttgttcgaaaacatttgaagaattgatctcggaaaaggaaattcttcgcaaaaa

SEQ ID NO: 69031 - DNA, 403 bp, Zea mays
  unsure (1)..(403): unsure at all n locations
  Clone ID: MRT4577_16294C.1
tccacgcgtcacgcccactgcgtccgcccacgcgtnccggtctgggcccaggggtcatcgatcgtcgggcgccggcagtgtctgggaacctcgngcggctgaataggctgtgcggcaggccgggataacgcgacctgctgcattctggaaaacgtacggaccacattcagcgggcgagatgcgacacgacgaacttcggccggcagtcaacgtgcgagcttagagcgcacacactgtggtggaggtgcgtgcaactggcggcatagatgataccccatcttggcccatcgtacaancgccatccctcaagtctccgacaacttaccgcgtccgacttgcgactatcctcgctcgagaacgtactacacaggaggacaagtggcagtctaccgatcgaagatta

SEQ ID NO: 69032 - DNA, 304 bp, Zea mays
  Clone ID: MRT4577_162950C.1
aaaaaaaaaaaaaaaaaaaaaaaaaataaaattaaaaaaaaaaaaaaaaatgaacatgcggaaggaaaacatacacactagctgaactaaaatttcaaaaatctattaatttcaattgttcttcctaagttcacactattgcccttcaacttttcaacttgcatattactagaatccttcccatataatacctacgtatccttccgctgttcaccttttcagcgtacaacgtgatactatgtgctaccttcctttctttccttaatctgtgctgctctcttacatgctttgactgttctatccc

SEQ ID NO: 69033 - DNA, 164 bp, Zea mays
  Clone ID: MRT4577_162951C.1
cacgtcttacctgtcctatagtgccacctaaattaacttcactagccgatgattcacaacttcatgactttcaaaaccttatccctacccaaattaatcatattgcatatacataccactttagccagctcttgtcataacctataagcctaaacagatctccc

SEQ ID NO: 69034 - DNA, 2201 bp, Zea mays
  Clone ID: MRT4577_162952C.1
gccataggtcattgaaaccttattggattatgtctatgccaataagttaatagaacattatatcttgtatgtatgtacagaaagttaataaaaaacacacttatctcgctcagggggtccctagtttcaagctagccacgctaacaagcataatcacataatttcactatcgcggcaaacaaggaaagtgcactttacagttacgataattctagtgttgcccccaaatcgcaagacaaaaatccatacagctccagttgtgaagtgcttggccctttattttgctgatttcttcaagctgctcattaatgctcgcaaagcttctttcacattttggcccttcgtttgtctgacctcctgagatgtgagacgtaagctctcgaggccgcggcccagagatgcaatcatgggaacagaaggtgctgcctcggctgcgcactcgatcccatctccatgcatcacaaggccagcacatgcagccatgctgcagccaaatgttgcccaaggaaatattctgaaaggctgcctgtgcctcttctgcattatttcgtagaatgaagtccgcataaccaataagctgagttttttttttttttttttttttttgaaaatgtaattgcgttgcttatatgaaataaaagatattatgacgaggaacagtggccagtgggggtaggggccttttttttttttttttttacctgagcacctcgaatttgccataggtcattgaaaccttattggattatgtctatgccaataagttaacagaacattatatcttgtatgtatgtacagaaagttaataaaaacacacttatctcgctcagggggtccctagtttcaagctagccacgctaacaagcataatcacatactccaatttcactatcgcggcaaacaaggaaagtgcactttacagttacgataattctagtcttgcccccaaatcgcaagacaaaaatccatacagctccagttgtgaagtgctggccctttattttgctgatttcttcaagctgctcattaatgctcgcaaagcttctttcacgttttggcccttcgtttgtctgacctcctgggatgtcagacgtaagctctcgaggccgcggcccagagaagcaatcatgggaacagaaggtgctgcctcggctgcgcactcgatcccatctccatgcatcacaaggccagcacatgcagccatgctgcagccaaatgttgcccaaggaaatattctgaaaggctgcctgtgcctcttctgcattatttcgtagaatgaagtccgcataaccaataagcttgttctctcggccgatgatattacggtatgcgtgaccgctcgaatcttctctgctgaagccgtgaactgcaaagcagaagccttcgagccagcggtaacaaccccgtgagggagtatcttgcttaatacaatagcagcatgtctttggagctgcattaatccatacttcagaaccgctggacttttgtaaggggccatcttaaggaaggcagaagcctgaagagatttcgataatgatgaaaagcccaggagtgctgtccctcctgcaccaacagcaaccacaggtttctcagatatccaactttttttgtcagtgtcgtctgctgaaggtacctcaattttatcatcattttcagcaccatagtgattgaagcatctgctagctaattgagtgatttctgaaggaacaggggtgttccaatgtctccttattccagctaagcagctcgcgtcaactatagccaccacagaaccaaactctcttagttgactcctgagagcttgcacaagaagaatgtggcacttctcatcagattggagttttgaaaaatccagatcatttgagccatgtttatctccggtatcaatttgggacctggctgcactgtttaagcccatcctgagggcttctattgcaattctaaatacatacacatcagacaacatatcactgctgattggctcccccttgtgaacttgtgtaagcaacttctgagcagaaaccatagccctaccaatcgatggaatatcagcaaatatatgataaagatcagcaagtaaagggtagacagactgagcaaatggtggagcttcatatctgtcaatcaacttgcattcagcggacgcgtgggcagaggcagcattggagggggctgcttggacatcaagaaatcccggccgg

SEQ ID NO: 69035 - DNA, 370 bp, Zea mays
  Clone ID: MRT4577_162953C.1
ggattttcgttgtatgtgagtaccaggtcttgtgaaaaaaaaaaaaaaaaaaaaaaaaaaaaaaaaaaaaaaaaaaaaaaaaaaaaaaaaaaaaaccaaaaaagaaataaagaaaaaagatagcggcgcccttccgggggccccaggggtgctctcttctgcgtccccagtcttacctcctgttcggtgccccccattttcttttctggggcggcccttaaactccgtcgcttgggggactttctccacgttcccctttggaaagcccttgggttacccccctttttcgccctgggggcctttccccttttggccccatccggtatgcctaatgggccccgcccctgcctcctttccaaacggttgcccc

SEQ ID NO: 69036 - DNA, 258 bp, Zea mays
  Clone ID: MRT4577_162954C.1
acaaccacacccctaggtagtgcataattacctattaaataagcagaaaagcatctggaaagccaaatttgtgtgcactgtggttacaggatagagcagtatacagcgaacgtcgaataaagggggacctggtgcaacacaacaaaaggggggttaggggggctctttgggcaaaaaaagcccaggtttccaaagggggagcgctttaaataacttcgggcaactggggaggatgaaggaaacaaaagtttctttgct

SEQ ID NO: 69037 - DNA, 388 bp, Zea mays
  Clone ID: MRT4577_162955C.1
cgggcagatcgcgctcatgcggtggatcactgacgatattggatgctaaggaagtgtctttcgtccagaatggtttatacctcaaggttcaagttactctcgtaaggtttcaagctaagcagcatggttttgctcactctattaggcctgttactaatttcaatgaattggcgctgcacttcattgaatgtatgtatgtgcatttggaaaatgtccggccaaagatgaaggatcaattccctcgtgctgttcaagcaaatgtgtctgctcacgagatgcaagctcaagtcgctcacacagttcaaacaaatgtgcctgcttatatgcccttctctggtggagtaagagagcatcacgttgattttgctcctgaagtaaaccaagggcg

SEQ ID NO: 69038 - DNA, 1489 bp, Zea mays
  Clone ID: MRT4577_162956C.1
gcggaggaattcgcgtattaggttggtgggttcgaccgatccgcgtccccgggttcccaagttcccaggtaagccgagcccggagcatggcgccgctgtcgtggcggcaccacacgctgctgcaggcgctgctccaccgcggtcccctctccgaacgcgacttccacgccgtcttcgctggcgtctccggcaagaaccccgccactcaccaacaactgttcaatgatacacttctcaagatcaacaaggaccttgcctacttgcagttcgagttgcgggcatgcatgaaccaatatgatggaatggtttactacggggtggttaataacattgctgacgaagaatctaagcttggaacaaagtactctgtgccccagatcgcattctacaagggactgctagaagcaatagttcaggaagctggaaatgatgggagcataaccagtatcgacgccctcaatgtccggcttgataaccaggtcgcagtattagacggttcacaggacagccagtctcgccttcctagctccataaagaacttctcaatgagccagaaggagaaaactctcgatgagctgatacgggaccgctggttgtcgtacaccgccacaggcaagatcggtctgggcaccaggtcatttcttgacctccggagctggttccgtggcaacgatatcccgtcttgtgttgtctgcaacgaagcttgtataaagtaaaggcatcgagttgtccgaacgagggatgcgatgttagaattcacgagtactgcttgaagaagaaattctcacagagaaaggcctcgagagcgtgtcctagttgcggtactggatggccgtgtcaagatggcgaggccgacgacgtgaacgaacctggggaggaggagctagcctcgccagctaaccatccctcggggaagaagcgcaggagagtcaaagctgagctggtggaggaaaacgacatcgcaggcccgtcgacggaggtgcctaggactaggaggaccctgagaagcgctaaagccgaagcagtcgaggccgatcaagaggcgtcgtccaccgcagcttcgcagccaggcaggggttctaaaacaaggaagaagtgagtgatgactgatgatgcatgcttataaaggagggagattgcaaatgctcctcctttgccatgtgtagatactaccgtagacgtgctggtatggtatccggtgggtagtttttcaagtgccagggcaaaagagccttctagttctgctctttgctacagtagggactcgtagactggtggagctctctcatgacgtctaagttatttatcttgtgaagccattcccatattattacttgtttgttatggtagttgagaacatcttggagcactgaaaaacttgagggcatgggatggggtgctgtcgcttgcatttgttgattctggattgaggcatgacatgcatgctgtagcttgcaattggcagctccttcaagttaaagttatctat

SEQ ID NO: 69039 - DNA, 635 bp, Zea mays
  Clone ID: MRT4577_162957C.1
atcgttgaaaccctccaaacgcttaccgcaatgggcaggaaaccctcggcttccgccgccgccgccgctgccgctgcggctgccgaccacgactccaccggtggcagcgccaaggccgccggaactctctagcagcatggcgcctgactggtgagggcatccatgggcactccatgttcttcgacgccctcgttcagcttatacccccgcgcttctacctctccgccgacgatgatgtccgcccctactaccaggggctctccaaggccgccaaggcggccatgaaggctcagtcccgcgccaatatcaaggctgcccgccgagcccgcctcgaccccgcgagcccgccttcctccaccctggaccttctcaagaagaccgtcgccgaccaagaggcggaggagaagaaggaagaggaggaggataactcacaagacggaagccagaagtccgacgacgaggcaacctcagagggtggcgacgatgaccaggactaggaggagggagatgaagaggagcaggcagaggatgaaaaggaggagatgcagatggcctcggcagcagttgtttctgaagaccggtcggtgacttacgaggagctgcgagagcggcttcatcgccgcattacagagctc

SEQ ID NO: 69040 - DNA, 459 bp, Zea mays
  Clone ID: MRT4577_162958C.1
gcccggccgggtctcgggatccaatgcctcatcacactacaacaaaccaaaacctacttcgcaaacaccacaaatatgtctagccttttgaacaaagccaaggatgccctgggcaagagcggcggcagcggcagcggtcacaccgagggtggacagcagcagtccagcattgagaagggcgtttccggccaggctcacacccagatcgataacctgaccgaccgcgccgggttcggcgacaagtacgacgacaagatcaacaagttcgcagacggccagatcaacaaccagatccctggcggtgctggcaacaacgccggcggcagcagcggtggactcggcggtcttggaaagtaaaagacagctgcggctactcacgacccgatacgcgaatgaatacggtagactaccaatgtaatgaatttatcttccaaaaaaaaaaaaaaaaaaaggccccta

SEQ ID NO: 69041 - DNA, 176 bp, Zea mays
  Clone ID: MRT4577_162959C.1
ggaagctgcggatccggcgacggggagggtggcaccgccgatgtcgtggcggaggcgggtgtgcgtgctcaacaaagcgaacctcagggacgccacgagccgtgccgacggcgcggtgtacccccgtgtgctctgtattcttgacacggcgggggcggagtcccgactatccgaga

SEQ ID NO: 69042 - DNA, 1510 bp, Zea mays
  Clone ID: MRT4577_16295C.1
atctcgcgcaggttggagggtgaccgaaatgttctcccaactcccaagtgtggtcctgacttcggccatctgtaaaacctccatcaaagcggacagccggacactggtgttggaaaaaaaaccctgctgggccgtccgctcccgttcccatcagatcggatcgatcactcgacgagacatctcgcctcctcggccaatcggcatggcggcgctgctgctccgtagactcgccggaacccaccgcggccgcgtcccgctgggggccgccgccgccgccgcctgcggtggagcgacgctcttctacgcgtcgtcttcccccaccgttgcgcacttggaggagacgggcaaagccgctgagcaagttgcacttaaccctgataagtggctagagttcaagctccaagagaaggcaacagtcagtcacaactcacagttattcaggttttcatttgatccatcaactaaactgggacttgatgttgcctcgtgcctcatcacaagggcacctataggcgaggaagctgagggaagaaggaaatatgtgattcgcccgtacacacctatctctgatccagactctaaagggtattttgacctattgatcaaggtttatcctgatggaaaaatgagtcagtattttgcaagtttgaagccaggagatgttgttgaagtcaaagggcccattgaaaagctcagatacaacccgaacatgaaaaaacaaattgggatgatcgctggtggttctggtataacaccaatgctgcaggttgtcagggctatcctcaaaaaccctaatgacaacactcaggtctccttaatttacgccaatgtgtcaccagatgatatcttgctcaaaagagaactggatagacttgccagtagctatcctaacttcaaggtattttatacagttgataaaccgtcaactgactggaggggtggtgttggttttgtatcaaaggacatggttttgaaaggtttgccaggcccagcggaggactctctgattcttgtttgtggtccaccaggaatgatgaatcacatatctggagacaaggccaaggatagatcacagggcgagctctctggcgttctgaaagacttaggatacaccgcagagatggtatacaaattctgagaagacagtagtagactctgctgacgcacacacattcttgctgccctgcagtcaataaaccacacctgaactttttgttgttgctgctgcatctggctctgaactggaaaccgttttgacttgtttcctgatgtaataataattttcatccgagaattctaggtgtagcttcgggtgttctgcagatgccacgctgcgatgtttgcgaaaattctagtatgctggcacttgagataagagctatcgagttctactggacagctgcagcgaaatatggtatgttggaagttggaacccaaaaaagtcgccaaaaaaaaaaaaaaaaaaaaaaaaaaaaaaaaaaaaaaaaaaaaaaaaaaagaaataaaaact

SEQ ID NO: 69043 - DNA, 431 bp, Zea mays
  Clone ID: MRT4577_162960C.1
acccgtccgccaaaacgcacaggttgcctaatccaaaccggccgacaatttttccgctctctgatcctcaccccatgtcctgtgacggtataggtgtactttcgattatacgctgttcccctacgcgtctggctttgatgcactgaaatcctgtgctgagatcaattagtcttgcgcagtagcgcggtacaccgtgctacaggccatggttagccaacagtaagcaaaaggcacaatcctgtgagccaatcaacactcactatgactcttggagacatgggcattgatttatataactctgataacatttttgttgcctattttgacaggattacatgatgagcgctcttgaatttactctgattgatatatgtgatccagtgaacaccatgtataatttataaacatttcaaattttgtaacgtttgaat

SEQ ID NO: 69044 - DNA, 375 bp, Zea mays
  unsure (1)..(375): unsure at all n locations
  Clone ID: MRT4577_162961C.1
ctcgagccgttttgatggagtgagcccttccgttggtttgacgaatatgttgttggtagatnagttgatcagttggagtaaggcgggagcgaagcatttagacagtttgggaattattgtcactttaaatagggtctcgtagggcccatcaagcttcccccttgtgggggaggcttgagggtttggtcttggtgttgtaattcggtccactttgaacctttcctttcttaatataatgatgcgcagctctcctgtgttttcgagaaaaaaaaagatggatagcctatactatacctaataaaatttgaaggtacccacctggtcgcattctgaaattatagatgattagatgtagataatgcttgattgatactt

SEQ ID NO: 69045 - DNA, 299 bp, Zea mays
  Clone ID: MRT4577_162962C.1
cgtccggtgaggcactacactacactacaccacagagacccggcgacaacacacacacgcgtaagagcgattgcgctcggaacgcgaacgggacgcaatactctgtgagctagccaagacaggaataatattggctgcgtcaccaggggcgagcctctctgttccggtgaccacgacgaccttcgcggcggcagcggccgcggccggcgccgacttgctgatcgtcgtgccgagtgagacatgcgctgctcgcggtatggttcccccgtgctgatgcgcagcgcgacgatgcagcacac

SEQ ID NO: 69046 - DNA, 484 bp, Zea mays
  Clone ID: MRT4577_162963C.1
attccctttccctcccccgcctcctctgctcctcgctctcccacccgctcgggcatccgccacacggccacaccaacactgcactccaccgcggcccgccacagtcctcctcctccgtcgccgtcgttcttcagcggcgccttcgcttccccagcacggtaccctagcatcagcgattcagcgctcaatacaagccaccgcggccatggcgcccgcaccggcagctctctccgcggccaacgccctctcgctgctcgcgcccgctagagtctcctccggaaggtggagcagcctgtccgtctccgtctcagcccggcccgtgaccggggtggtgtctgtcgcggcggccacggcgcagaggaggctggtcgccgcggcggcggcgacggagatggcgcccgcggcgagcggggaagaagggagcaagccgttcgtggaggagatgcgggcggtcgcgatgaagctccacaccaaggaccaggcc

SEQ ID NO: 69047 - DNA, 514 bp, Zea mays
  Clone ID: MRT4577_162964C.1
cccacgcgtccgaaccacacacacctccacccactctctgagacaagtgaagcatctcgcgcactgtcgcagtcgcagacggagatgatgaagcactcgagcagcttgtgcttgctcttcctcttggcgctctgcaccaccctgctggcctgcggcctggtccaggcacaagtcctcttccaggggtttaactgggagtcgtgcaagcagcagggaggctggtacaacaggctcaagacccaggtagatgacatcgccagggccggcgtgacgcacgtctggctgcctccaccctcgcactccgtctcgccacaaggctacatgccaggccgcctatacgacctggacgcgtccaagtacggcacggcggcggagctcaagtccctgatagcagcgttccacggcaggggcgtgcagtgcgtggcggacatcgtcatcaaccaccggtgcgcggaaaagaaggacgcgcgcggcgtgtactgcattttcgagggcgggactcccgacgaccgcc

SEQ ID NO: 69048 - DNA, 907 bp, Zea mays
  Clone ID: MRT4577_162965C.1
ttttaaaccacgggctgatgccgcttttttttttttttttttggttaaaccacgggctgattgcttcaaattaaacctagttcagatgtagctagttcagattaaagccataggaagtcaggaacatgctgtccattgttagggtcacccgaaaccataggttgacaccgctccccagtaccgatcaaacacagacaaacattcattagggcctcttgtaattgtgctgctatgttgtatgccatgtcaagaatgagtattggtaagcattcaagagttcactcaaaacttcaatcgatacaaaacctaataactcagtatattagatgcagacagacttgaactgctacatctgacagggcaccacgtcaggactcgaaattacagcctccttcctcttctaccaccctttctgcgtgtgctgtctgtggggactggagtaacatcctcaatacggcctatcttcatgccagatcgagcaagagctctaagagcagactgagcaccagggccaggggttttggtcttgtttccaccagtagcacggagcttaatgtgcaatgcagtaattccaagctccttgcatctttgcgcgacatcctgtgaggcaagcatagcagcataaggcgaggactcatcacgatcagctttaaccttcatgccaccagtgatgcggacgagcgtctcccttccagacagatccgtcacatggatgaaagtgtcgttgaaggaggcgaagatgtgcgcaacgccaaagacgtgttctccctcgcggacagcggggccaagcgtcacgttctcctccttgggctcccgcgtcttcttcctcccagacatggcggcgcggaagagggtacgttaggtttgctagggaggacagccccggccggcctcgaggtacccaatg

SEQ ID NO: 69049 - DNA, 586 bp, Zea mays
  Clone ID: MRT4577_162966C.1
ccgctcaggcggcgggcgggacttactgctgtgctttcagttcgtggcgtgttgcctcctggtcctgctctactcgcttcgatctggttctgccagcagcgctggccatggcccgagaagctacccggtcatcggctgcctgctcgccttctacgagaaccggcggcggctcctcgactggtacaccgagatgctggcggcctcgcccacccagacgatcgtcgttgaccgcctgggcgcgcgccggaccgtggtgaccgcgaacccggccaacgtcgagtacatcctcctgggcaacttcggcaacttccccaaggggaagcccttcaccgacgtgctcggcgacctgctcggcaatggcatcttcaacgtcgacggcgacaagtggttcgcccagcggaagctggtcagccacgagttctcggcgcgcacgctccgtgagctggagattgccgtgctcgaggcggaggcgctcgaccgcctcgtgccggcgatggaagcggccgctgagccgggcggcggcgccgtggacatgcaggatgtcctccgccggttcgcattcgacgtcatctgccgtgtctcgctg

SEQ ID NO: 69050 - DNA, 2571 bp, Zea mays
  Clone ID: MRT4577_162967C.1
caatcggaatttgtccagctaacatatcgtgcctaatagtacaatttttatctgtatttttcaagtgcaagacaacagaaaaaaatcagaacatcggctactggagctcagtatgctcgaaaatcggaatggttcgaaccatctgttcggaaactctagcaactaaagtccgatcggggatcgctccaatggtcttggttcgttttttcatctcacggttcggcttttgagcaacactggagctgctctcaaaaaggctacctgcatgacaaacaagtagggccaatcccttctggaagactggaacggacgaacagcgacagtgactgcaaccacacactggaatctgctcacagcgctctcggatctgccgctctcgtctctctcgctcgcgtgcattggccgacagggacgacacgccggcgtggctgctcacgtgttctggcagccctgcgctctcgccgcccggggcaactggcgagcgagtgtggctgccgcttcctctccgagtcgggcgccattttaataattcaattctacccccaagcccacgcttccgaattcaccgactcctcctccacgccgcgtcgagatcgctcaggccttcgcttccagcaactccaccactcagcccacccgccggagcaatggggagcacggggcgcgagccggaggtgacccgcgccgacttccccgacggcttcgtcttcggcgtcgctacctccgcgtaccagattgagggagcgagaagggagggaggcaaaggagacagcatatgggatgtatttacagatgacaaagaacatgtcttagacagaagcaatggagaaattgcagttgatcactaccatcgatacaaggaagacattgagctcatggcaagtctaggttttagcgcatacagattttctatatcttgggcgcgtatatttcctgatggcttggggggaaaggtcaatgatcaaggagtcgccttctataatgacctcatcaactttatgatttcgaaaggtattgagccttacgcaactctatatcattgggatcttccaaacaatcttcagaagactctggggggctggatttctgacaagattgtggagtactttgcattgtatgcagaagcttgctttgcaaattttggagacagagtaaagcattggataacaatcaatgaacctctccaaactgcaatcaatggttatgggattggaatttttgcacctggaggatgccaaggtgaaactgctagatgttacttggctgcccatcaccaaatcttggctcatgctgctgctgttgatgtttatagaagaaaattcaaggctgcacaaggtggtgaagtagggttggttgttgattgtgaatgggcagagccattttctgaaaatgtggaagaccaaattgctgcacagcggaggcttgactttcaacttggatggtacctagatccaatatattttggtgattacccagaaagcatgcgtcagcgactgggcagtgatcttccaaccttttcagagaaagataaagagttcatgaggaacaaaattgattttgttggagtaaatcattatacttcaagactcattgctcatctccaaaatccaaatgatgtttatttctaccaagtgcaacaaatggagcgaatagaaaaatggaatagtggtgaaaaaattggtgaaagggctgcatctgaatggcttttcatagttccttggggccttcataagtcacttaattatatagcgaagaagtacaataatccagcaatttatgttactgagaatggcatggatgaagaggacgatcaatccgcaacgcttgaccaggtcctaaacgacacgacgagggtcggttacttcaaagggtacctcaattcagttgcgcaagcgatcaaggacggagctgatgtccgcgggtactttgcgtggtcgttcctggacaacttcgagtgggcaatgggctacaccaagaggttcggcatagtctacgtggactacaagaacgggctgtccaggcacccgaaagcatcggcgctgtggttctcgcgcttgctcaagggcgaggctggcactggcacaagctgagcgaactgcacgcagcatgcaagcacagaacgtcgtcgttattacaatataaatattccacacaactagacgttttctcctgttgttgtatcgtactactgtacagtaagcgccaataagctagcctcagatgtgtgctacctgcctatacctctagtgactgccattgatccagcactagctgaaatgtacccggcctccatgaatcagcaccagaatatatgctttgaattgaactcataccaagaatcagccccaatatttgctttgaattgtacttatccgaaaacagctatagctagagctgccatagactgatggaacagtccgcggcaagtacagaacattacatacacacatttctcctgtctgttgttgtgttgtgtcttacagtgagtgcacccgggtatgtatgtatgtatgtatgtaatctcaagatgtgctagtctgtcgttgatccgacgctggctgagacatgttc

SEQ ID NO: 69051 - DNA, 269 bp, Zea mays
  Clone ID: MRT4577_162968C.1
cgtaaaccctgccacaatcctcgacagacaccgcccgctcgcctccgcaaaccacgccgcgaacgccgcaatccccaacggaaactgcccgcctgcccgtgcaaaccacgccgcgagctcaccgcaatctgcccgcctccgcaatccaccccgacgaaagccacaatccccaacggaaaccgctcgcctcgctgtgatgccagcccgcgcaaaccacgccgcgagctctctgcaatccgcccgactcaccttcagcttcagggtggagc

SEQ ID NO: 69052 - DNA, 1316 bp, Zea mays
  unsure (1)..(1316): unsure at all n locations
  Clone ID: MRT4577_162969C.1
aaaaaanntnnnnnanaaaaaaaaaaaaaaaaaaaaaaaaaaaaaaaaaaaaaaaaaaaacccacgcttcggaggggacgtcaggggcgttcgccagcccccccccacaccaccaccaccaccaccacaagtccacaatccccaagctcacgtttccgaattcaccaactcccgcacgccgcgttgagatcgttcacgccttagcttcggggagctccaccaataagcccaccggccggagcaatggggagcacggggcgcgagccggaggtgacccgcgccaacttccccgacggtttcgtcttcggggtcgccacctccgcgtaccaaatcgagggagcgagaaaagagggaggcaaaggagacagcatatgggatgtatttacagatgacaaagaacgtgtcttaaacagaagcaatgcaaaaattgcagttgaccactaccatcgatacaaggaagacattgagctcatggcaagtctaggttttagcgcatacagattttctatatcttgggcacgtatatttcctgatggctttgggggaaaaggtcaatgagcaaggagtcgcattctataatgacctcatcaactttatgatttcgaaaggtattgagccttacgcaactctgtatcattgggatcttccaaacaatcttcaaaaaactctggggggctggatttctgacaagattgtgtaagccactgcaggcatcttaagcgtgtagtatgaatgtatgattaccgaagttttcttaacacgcaaatgaatggttacatatgagattcttctcgactcaacctttttgtttcaaaagtgtttgcagcttgatttgctgtttttttacgagtttctcaccataaaaatatcctagggagtactttgcattgtatgcagaagcttgctttgcaaatttcggagatagagtaaagcgttggataacaatcaatgaacctctccaaaccgcaatcaacggttatgggattggaatttttgcgcctggaggatgccaaggtgaaactgcaagatgttacttggccgcccatcaccaaatcttggctcatgctgctgctgttgatgtttatagaagaaaattcaaggctgcacaaagtggtgaagtaggcttggttgttgactgtgaatgggcagagccattttctgaaaaactcgaagaccaaattgctgcgcaacggaggattgactntcaacttggatggtacctagatccaatatattttggtgattacccagaaagcatgcgtcagcgactgggcagtgatcttccaaccttctcagagaaagataaaaattcatca

SEQ ID NO: 69053 - DNA, 376 bp, Zea mays
  unsure (1)..(376): unsure at all n locations
  Clone ID: MRT4577_16296C.1
ggggggggtggnncggacttcccggggggaggccagcgtggggcgaattccctgacccgacgcgaccaaccaccttgttcagtcaccctctcccccgctcggggcaccgggggggcgcgtgtaccctaaccaccgtgcggatctgggagcatctggcggcgctccctcaaatggtccccggcggcgaggggggccccggaaggcagaacagctgagatgcgacgcgacgcggtgccagcacccaccgccctttgagcctactttctcgttatgccttttcagcggcggtcgcggcgagcagcttttcgtgtctgggcccattccagttgttttcctttccctgcttctgatccagggcggtgggttggaccttttt

SEQ ID NO: 69054 - DNA, 664 bp, Zea mays
  unsure (1)..(664): unsure at all n locations
  Clone ID: MRT4577_162970C.1
gaagtagagacccaccaaagcaagccagcgcgtgcactagctgtcgcgcggtgtgcaggcgtaggcaaggcgcaagcacgcggcgggacgggacgggacggcaagcgaaggcggccccgcgggatgagatggggacggcggcggccgggtactaacctggtacgcggaggtggcgacgccgaagacgaagccatcggggaagtcggcgcgggtaacctccggctcgcgccccgtgctgcccattgctccggcgggtgggctgagtggtggagttgctggaagcgaaggcctgagcgatctcgacgcggcgtggaggaggagtcggtgaattcggaagcgtgggcttgggggtagaattgaattgaattattaaatggcgcctgactcggtgaggaagcggcagccacactcgctcgccagttgccccgggcggcgagagcgcagggtaagaactgagaacacgtgagcagccacgccggcgtgtcgtccctgtcggccaatgcacgcgagcgagagagacgagagcgacagatccgagagcgctgtgttccagtgttcagtctactgtggcagttcgtccgttccagtcttccagaagggattggccctacttgtttgtcatgcangtagcctttttgagagcagctccagtgttgctcaaaag

SEQ ID NO: 69055 - DNA, 355 bp, Zea mays
  unsure (1)..(355): unsure at all n locations
  Clone ID: MRT4577_162971C.1
gcggcaacaacaacgaccagacacaggccaccgcacgaggcgcgcaacagcgaaagcgcggcgcaaccacgcagcgncccagggggggggacaaggcagnaagcaaccaagaacgagagacaagcgagggcaaagacacnacngcaaccaacagacgaaaacccggagaaagngacgnnacccgggcacccgcacacaaacacgcccgacgggcaggcccacggagcgaacacaccgaccaacgccacacacggcgagcccggccccagaacacccaggaagcagcccgaggcagcacaacgacgcgcagcagacacacggaacaanccagccgaaggaagaaacccagcacagc

SEQ ID NO: 69056 - DNA, 289 bp, Zea mays
  Clone ID: MRT4577_162972C.1
agaacccttgctgattacaacatgtcaaaggcaatccacccttcacttggtgcttcgtttgataggtggtatgcagattttcggtaaaactttgaccggaaagaccataaccttggaggtggagagttcagataccatagacaatgtgaaagcgaagattcaggacaaggaaggtatcccaccagaccaacagaggcttatctttgccgggaaacatcttgaagatggaagaacccttgctgactataacatccagaaggaatctaccctgcactggtgttgcggcttc

SEQ ID NO: 69057 - DNA, 604 bp, Zea mays
  Clone ID: MRT4577_162973C.1
cggacgcctagtctgctgacacggtcctagctccctcgtgccgcggtcgccctactcgccatggccggcgcgcccgactccacctccctgctcctctcttctccctcagctcgctggtgcgtgtcatgcgctggttcggattccgctcggcgattgtccttgcgcacgcgccgcgtctctcagcttgtaatctctctgctcgcttcagctccagcgcccagctcctgttctcccatagacgtgtgtgcctggctcctgttttcctcgccggcctatagctcgcccgagctcctcctctatgagctcgccctcggccatggcagacgccgccgccaccttccttttggtgctcgtcgagccctttcccccagccgcggagctctgtccctgccgcgtgctgttccagctcccgcgcgcagccgcctcttgatgctcggtgctcctctctgctcggctccgccgcgtcgcgttccccttcctagccatggtggttggtcgctgttgcacagcttcctggtgccgcgacccccgccgtggatcccctccagccgtgcccctgctctgctctctgtttgtgcgcgcgctgggctcggcgttctacgcg

SEQ ID NO: 69058 - DNA, 257 bp, Zea mays
  Clone ID: MRT4577_162974C.1
attaaataggcgctgtcaaaattatttgatgttagccctacttcttcacgtgacagtagccgggagagttctacaaattccacaaaaaatgaaaataggaatgaaaaacacgaaacagctcccaaggaaaaaacatcaaacaagaacccgaagatggagaaagaagtcgcacacaccgttcctgtcaagcctaaaaaggaaaataggcctttggttctgccttttgaattatctgctatgggtatcttattgctcat

SEQ ID NO: 69059 - DNA, 242 bp, Zea mays
  Clone ID: MRT4577_162975C.1
gtttcataactgttcttgttctcgttcctctagtagagaggcaaaaaaatgaaacaataatctgatgaccatcacttgtactcgctctacgccaacccacattccgtggggaagccaccggggaacctctttggagtcggtgcagtagttgtagatcatgtacatatcctccgcctccttcagctgctcctgccgcttcatgtcgtccagcccagctgctccgccgtcaagccagtcaccgg

SEQ ID NO: 69060 - DNA, 969 bp, Zea mays
  Clone ID: MRT4577_162976C.1
ccggccgggaaccctcaatctttcaatctctcaaacatcagctctgatcttccgaactttgcgaaaaactcatcgcagagcccccctaaaccagtcctagtccccataccccacgtcaaaagtatcaccaccacaaccaacaatggccgaaggacgctctgagcccctccgcctgggcagcaccgcccccaatttcaaggccgaaaccaccgccggccccatcgacttccacgagttcatcggcgactcgtgggccatcctcttctcccaccccgcagaccgcacccccgtctgcaccaccgaacttggtgccttcgcaaagctcgaacccgaattcgcgcgccgcaacacaaagctcatcggcctgtccgccgactccatcgagtcgcacgacgagtgggtcaaggacattgacgaggtcactggcagcaacctcaagttccccataataggcgacaaggagcgcaaggtcgcgctgctgtacgatatgctggaccaccaggatgccaccaatgtcgatcagaagggtattgcgtttacgattcgctcggttttcatcatcgatcctaagaagactattcgcttgattctgagctacccggcgtccactggtaggaataccgccgaggttctgcgtgtgctggattctctgcagacgggtgataagcacagggttaccacccctattaactgggttcctggtgatgatgttatcgtccacccatccgtttccaacgagcaggccaaggatctcttccctgacttccgcatcgtcaagccttacctgcggttcaccccgcttgcaaaggagaagaccagcgcggcttaagtgcctgacaagctggggaggacttggaggagaagtgtctagatgttttgggcaagcctaggaatttattttcatcctttgtaggacctgggccatgatattaaattgatcatgataatgaaatacatatattcccaaag

SEQ ID NO: 69061 - DNA, 426 bp, Zea mays
  Clone ID: MRT4577_162977C.1
gcccggctcgagcgtcccatcccacagaatgctccacactctagttaggctaaagaagggatgtctgctgtcttcggagagattagttcaaaacctgtgactgcagggttgcgaaaggttaccgatgacatgaagtctaaaaaccgcgctgatagaagcggtgttgtcagcagcactgctcctgctcctgctgcagctcctgaaaagacttcccgtgcagggtccttctctttcaaatctggaccccctaaactggaacttcagatgggacgcaaatgggtggctgagaatcaggttggcaagaagacccttgctattgatgattgtgattccagacaatctgtctatgtgtatggatgcaaggattctgtccttcaagtaaacggcaaggttaacaatatcactggtgacaaatgcactaaagtt

SEQ ID NO: 69062 - DNA, 324 bp, Zea mays
  Clone ID: MRT4577_162978C.1
caccgctgccagcacagagcgtccttcccactgtagactagtgccgtagggagtacctgctgccccagctgactgtggccccctccgtgatccatccatctccagggagcaagacagagacccaggaatggaaagcggagttcctaacaggatgaaacttcccccatcagttcccccagtacctccaagcaagtagctttcctcatttgtcacagaaatcagaggagagatggtgttgggagccctttggagaacgccagtctcccaggccccctgcatctatcgagtttgcaatgtcacaacctctctgatcttgtgctcagc

SEQ ID NO: 69063 - DNA, 400 bp, Zea mays
  Clone ID: MRT4577_162979C.1
aaaaaaaaaaaaaatttttttttttcccgccaaaaattaaagttaaaaagttggtgggggtttaaaggggggggtaggaaaaaaggggtaaaaaggggtttacggggttgtttaaaagggcctaaaatccagaaaaaaaaagttttttgaaaatttggtttgaaggggttttaagtcctatactggttaaaaggaaaaattaattttgtaaaaaaattaatggggggggaggaagtccgaggggaaaccatgtaaaaaaggttaatgtggatggtttattttaaaaacaaattctttggggaccaactttgtggttgggggggaccttattttttttggtttacaaaaaacattttttgtttggtttaaagcctgttgggggcgatttaagttttggggg

SEQ ID NO: 69064 - DNA, 700 bp, Zea mays
  Clone ID: MRT4577_16297C.1
gagtgttggaaaaaaaccctgctgggccgtccgctcccgttcccatcagatcggatcgatcactcgacgagacatctcgcctcctcggccaatcggcatggcggcgctgctgctccgtagactcgccggaacccaccgcggccgcgtcccgctgggggccgccgccgccgccgcctgcggtggagcgacgctcttctacgcgtcgtcttcccccaccgttgtacgaaactgagaactgcctgctgtcctccccccaaccccatttcatttctcgggttctgtttcttctgtccctagctactgctgatttctgaatgtgaggtgatgcgttttttttttttgcttggctcacggtgccggatgattgcaggcgcacttggaggagacgggcaaagccgctgagcaagttgcacttaaccctgataagtggctagagttcaagctccaagagaaggcaacagtcagtcacaactcacagttattcaggttttcatttgatccatcaactaaactgggacctgatgttgcctcgtgcctcatcacaagggcacctataggcgaggaagctgagggaagaaggaaatatgtgattcgcccgtacacacctatctctgatccagactctaaagggtattttgacctattgatcaaggtttatcctgatggaaaaatgagtcagtattttgcaagtttgaagcca

SEQ ID NO: 69065 - DNA, 411 bp, Zea mays
  Clone ID: MRT4577_162980C.1
aaaggggggcctcccaaaaacccataaattattcaacaatttttatacccagttaaaaggccaaagctgggttcaggcaactagggccccactaaaattatccagggggcccattttaagcaaggctgccccaagagggggtttcagaaaaacgaagggccgtttgaccaccaatcggggggaggctaaaaattggctagactctgtaaccccacggaaaaaggatgcccccctgttggccaggccaaaaatttggcacctcctttttgggggcccactacaacagttataaggggggggcagccgggttggccttttaaaaaccctttgggacagttttaaggagcgacggcttaaactccttgtgggtggcaaagatccctgggtcaagatccaaaaatctcctttggg

SEQ ID NO: 69066 - DNA, 607 bp, Zea mays
  unsure (1)..(607): unsure at all n locations
  Clone ID: MRT4577_162981C.1
ccgaggacctggccgggaagccacctggatgccgtcaagcggatggtggaggagtacaggaggccgctggtgaagatcgagggcgccagctgnaccgtcgcccaggtcgcggccgtkgcsgcccggncgakggcccgcgtggagctcgacgagtccgcgcgcggccgcgtcaaggccagcagcgattkggtcatggacagcatgatgaacggcaccgacagchacggcgtcaccaccggcttcggcgccacctcccaccggagaccaaggagggcggcgcctccagagggagctcatccgattcctcaatgccggagcgttcgggaccggcgacgacggccacgttctgccggcggcggccacgcgcgccgcgaatgctcgtccgcatcaacaccctgctgcaggggtactccggcatccgcttcgagatccttgaggcgatcgccgtgctgctcaacgccaacgtgacgccgtgccttccgctcaggggcaccaatcaccgcgtcgggcgacctggtcccgctctcctacatcgcggggctcgtcaccggccggccmaamtccacggcggtggcgcccgacggcaggaaggtcggcgccgcggaag

SEQ ID NO: 69067 - DNA, 406 bp, Zea mays
  Clone ID: MRT4577_162982C.1
cagcggataggaacataccgttcagagaaaaagggatgctacactggtatttgcctcttgattatcctggtctgcggccagctaccactgtatggaattcattagaaactgaagctgatcctttctactgcatgcgtattatgctagcatcaaaccgagacactgcgatggagctgggtattactccaattgtgacagccagggatggtaatgcaacttcttgctgaatcgaagatcattgaagctgacaacagcgtgagagacgatggtgctctgctgaatagtgcacaacagttgcactacactcctgactgctattagggaagctgtggcatatgaccctgtctcgaatgcatggtagcagttagccaacttctaacagggaatgctatcctcattatacttc

SEQ ID NO: 69068 - DNA, 782 bp, Zea mays
  unsure (1)..(782): unsure at all n locations
  Clone ID: MRT4577_162983C.1
cattgggaccctcgaggccggccgggaactctcgctgcgttcactatggttgggcaaaggatctgtcttgccgggctccgcgctcttcggagccgctgccctagcgtcgtccgacttggtcactagacaggctggtgagctcgacgcttgtcctgggtacgcggcgagcaatgtcgtggacgagggggggcgggtgactgcggatcttgcgcttgccggcacggcatgcaatgtatatggcgacgatttgacggatctgaagctcgaggtcgaatatcagactgaaaaccgcatccacgtcaagatctacgatgccgccgagcaggtgttccagatccaggagtccgtctggccccgcccgcagagcgagggtgatgttgatccggcgagctctgcgctggtgttcacgcacacggcgaatccgttctcgtttgccatctcgaggagagagactaacgagacgctgtttgattcgtctgcggccagcctggtctttgagacgcagtatctccgactcaggacgcgtctgcctgagtccccgaacctgtacggtctgggcgagtcgacggacgatttccatctgaatactactaattacacccgcactctctggaaaccgtgatgcgtatggcactccccctggaaccaacttgtacgnatcccacccatctacttcgaccaccgcggcgagaatggcaccccacgcgtcttcctcgccagttcccagggcatggacatcanaatcgacgacacccgacgtcaattccttgagtacacactct

SEQ ID NO: 69069 - DNA, 298 bp, Zea mays
  Clone ID: MRT4577_162984C.1
atattctaagaggactgcccatccatgaccggtactcagaaaaagattatgttcactatagacaaactgatatacaaaatcagtgaagcagcatcaagcattggcatctgatcaaatggacaacctgatcttccaactgtatttatatgaaaagtcaaggtctcctgcgagctattttaatccggtctatcaaaaaaatacacgagccgtcctacatgatgacaacacataccattccgaatgtcattctaatcctacagaattaactattcatcccatggagtatgggaatgaaaaa

SEQ ID NO: 69070 - DNA, 620 bp, Zea mays
  Clone ID: MRT4577_162985C.1
caagctgtgccgcctcaactacaccgacaccctcttcatctccaagtgcaaactcacaaggacaattcagtgagagatgcaaatgatgctggtctgatctgatttggttcgatgatgcgtggtttgtcgattgaccttgctgagttcagagttccaaggaaatggagttggcaaattgacgaatgatggcaagactggtggttaccacaacaatttccggggagacaagaagcgatgcagcctaatgactggcaagttagatggcaagcaggcgggtgtacatgcaaattgttgagaatttgatcagctcaataagcacatgaggctgggtggtaagtacagccagttttgccattaggagtagctagcattaagcaaaaccagcaaacttagatttttggcaatgtgggtatctcggagctgtagatgtcgttcccttccttgtaattacacagtactgttgcttctacactggaatatacattgccattgttccggggggaaaattgaattgtcatcttgatccagtactgccgagtcaaattgtcgaagtgtgtgctctttcatctccaacaattatgtaaatttagcaaccctaaattatagatttagaacttgct

SEQ ID NO: 69071 - DNA, 110 bp, Zea mays
  Clone ID: MRT4577_162986C.1
ggaccagctgatgatgggcatcttcggcatgtgattgacacaatgggtctgcacgtacataatggtgggtatgtgtctgaacaagctgtaatggatagagggcgaggaaa

SEQ ID NO: 69072 - DNA, 477 bp, Zea mays
  unsure (1)..(477): unsure at all n locations
  Clone ID: MRT4577_162987C.1
gagggccgctttttttttttttttttggggcctgaccctgatttcagtttgatcttcagaaatatttcatcaccatattgttacattcgtatatgcatttaaatagatttacattttgcttttatcacaaggnaanngcaacccagnccaagcnnnngncncaanncgnccaacgaagccaaagncaacaaagccnaaacgcncnngcaaagcgcncaagaacgagnangccaagaccncccnaaaannnnnnggcaaacaagagaaagaaagcnganngcancaaaacgacggggagagccgggggaacgnngccaaagcgccaancgncgccnccgncncgccgggggcgcgcaccgaggcaaagccgnccccnccggcggcaggggcgagggggaagaggcccnncnccnggcaagnccgganggnggcgnngaacaagnncnncagcgncnngnnccngaaggngaacccgag

SEQ ID NO: 69073 - DNA, 2578 bp, Zea mays
  Clone ID: MRT4577_162988C.1
gcgcgcggcagcagaacgttggggccctcctctagctgcgccgcgtttccgactcccgcaccctcttccccatcccccctccactccccccctgggttttccccttcctttaccccccatcagatcttcccccatatctctgtcctgcatcactcgccgccatccactcccgatccaaacccgagagctcccacctccgccgccctgttcgctcgtccgccttttcactccccgtagctagctgctgtcgcggagcaaccccgcgattccaagaaaagcaacttggtcaagaaagagtgcaagaaaggaggacggtgctgacgatgatggcgataagccaccccatgattcgccacatcattccgtcgcctccggggcctgcgcgctagctgctagaagggcctcgccgtccgtcgtggtggtggtggtggtgtgcgcggggcgggaggggaggcgaggggatgcagccgtcgaaggtgtcgatgccacaggaccaggagctgccctgcggcgggcagccactcgctatcgtctccgcgctatccgctggctcattcgggggcgcggctggcgcccgtggatgctgcggcgggggacgatggcaatcagcccgtggagccgcgcaggatgatggacgagctggacgcggcggccggggacggcggcggcggcggcggggacgaggcgggggcggcggtcttcatctgcccgatctcgctcgagcccatggtggatccggtgacgctctgcacggggcagacgtacgagcgggccaacatctcgcggtggctagccctgggccaccggacctgcccgaccacgatgcaggagctctgggacgacgcgctcaccccaaacgccaccctccggcagctcatcgccgcctggttctcccgccggtacacgaggtttaagaagcgctccgccgacttccacggccgcgccgccgacctcgtcggcagcctccggggcacggcggtgcccaggcggcagcccctcaagggccaggcccgcgtcgcggcgctgcgggagctgcgcaccctcgccgccgcccaccagtccgtcaccaaggccatcgccgaggccggcggcgtggccctgctgacgtcgctgctcggacccttcacgtcccacgccgtggggaccgaggccgtcgcgatactcgtcagcggggtgctgcttgacgctgacaccaaggccgcgctcatgcagccggcgaaggtgtcgctcgtggtcgacatgctcaacgagggcgccgcggacaccaagatcaactgtgtccgcctcatccgcatcctcatggtcgagaggggtttccggccggagacggtggcgagcctcagcctcttggtcggcgtcatgcgcctcatccgggacaagcggcatccggacggtgtggccgcggggctcgagctgctgaattcgatctgcgcggtgcacaggccagcgaggtgtatggttgttagcatcggtgcggtgccgcagctggtggaattgttgccggagctagcgacggagtgtgtcgagccggctttggacatcttggatgccctgtctgcggttccagaggggaggatggctcttaaggattgtccgcggacgatccccaatgctgtccggttgctgatgagagtttcagaggcatgcactagacgcgcgctgtcgatgctgtggacggtgtgtcggatggctccggaagaatgtgcacctgctgcagtggaggctgggctggcggcgaagcttctgcttgtcatccaaagtggttgtgcgccggagctgaagcagaaggcgtcggagctgctcaagctgtgccgcctcaactacaccgacaccctcttcatctccaagtgcaaactcacaaggacgattcagtgaggagatgcaagtggtgtgatttgattcgatgatgcgtggtttgtcgattgaccttgctgagttcagagttccaaggaaatggaatttgccaaattgacgaatggtaataatgagcatgtatagaaacctgcagatttagccctgtcatcttatccgaagagatcagggtggttgagcagatggcgagactggtggttaccataacaattccaggggagaaaagaagcaagcaatgcagcatgattactggcaagcaggcgggtgtacatgcaaattgatgtggatttgatcagctcaataaacacctgaggctgggtggtaagtacagccagttttgccattaggagtagctagcattaagcaaaaccagcaaattttagatttttggcaatgtgggtgtcccagggctgtagatgttgctccctcccttgtaattacacagtactgttgcttctacactggaatatacattgccattgcttcgagattttaagaaaaaaaaaaaaaaaaaaggcccctagtcatctggatcgactactgccctagtcaaactgggaaagtgtgctctttccctgtagcccacgctaaaaagctcgatgctgcgttactcctgctaaagttgaggctctgtactgcttgagcagtgttctcatttctcaatgttgtttagctcctggagtttcagtatctgatttattagtgt

SEQ ID NO: 69074 - DNA, 670 bp, Zea mays
  Clone ID: MRT4577_162989C.1
tgggtacctcgaggccggccgggccgggcatggacgtaggtgtcctaaaggaaacacaaggaattgaacatggccacttctcacaagcttcagccggtcctcgctgtcatgttcttcaccatctttgtgatagatacggagcgaatggcgagcgatgcaacacgtcgagcatcgcggtggacaccgtcaacaccggcgccacggtaccctggggagacaccatcttctcggtggaggtgaagaaccggtgcccatgcgccgtcaggaacgtgcgcctcgacggcgggggcttcgcgaccacggtggacgtggaccaggccgcgttccgtgccgacggcggcggcggcggcagcggcgtctacctggtgaacggcgacgagccgatcgcgagtatggccgccgtcagcttccagtacgcctgggaccgctagcttccagatgactccaccgtgcttggaggtcgacgacgatggccagtgctagctacgaggaggaccatggtattatgcatggattggtgcccttactgtatcttataaaagctcaacatgtgtccatccctcgtgtatatacagagtatatgtggcactagcttatagattgccatccttccgtatatatacacagtgttctagtggatgaaaaaaaaaaaaaaaaggcccctagggcc

SEQ ID NO: 69075 - DNA, 1154 bp, Zea mays
  Clone ID: MRT4577_16298C.1
tatgatattaaggtagagttgaatctgtcttttagcgaagctgccaatggctgcataaagcaagtgtcctatcatgcaaaaaatgtttgtgattcatgtggtgggagaggtcacttgccaaatgcaaagatatatgtttgtccctcatgtaaaggattgggaagagtcactatgtatccattcacatccgtttgtagttcgtgcagaggcatcgggaaagtaataaaggattactgcttgacatgccaaggttcaggggtagtaggtggtatgaaacatgtaacattggatatgccagcaggacttgattctggtgacacaatcaatgtaccggaggctggagatagtggtggacttggtgtccagtctggaaatttacacataaaaattcaagtagaaattgatccgttgtttacccgagatggtgctgacatccatgtcgataaaaggataagcttcacacaggcaatgcttggtggaaaagttgaagtacctactttaaatgggaaaacagaagtgaagatacccaaaggagtccaaccagggcaagttgtagttttaagggggaaaggattgccaaatccgtcaggatatttgggggaccaatatgtccgattccgaattcatttcccctcggtggttactgaacgtcagcgcatgctgctggaagaatttgcagtagaggaagctgcgaaagaacataacacttttgtagcaggaaattggtgggagctagttgcagaaaatatgacaaagcaaaatgtcatggtcggaatcggcatcctcctactgattcacctaatgctgagcaaagctatgaattaaggcttggacccatgctcatttgtgctggggcagtggtggggcaacgtcaaacagtaaaaattctccgaagattcagcataaaacaataaaacaatgagattgtgaatctttaaagactattttcacccactagagatcacaattttgaaggtgttggttagaaggttgttgatttctatggtaaaatacattacaataatatctgctcacatagttctgaactatatgaagctgtcaattgagttgccttaattttttcctcttctttcggtgtaaatgtaatgtggatgctctacagttggaaaagttcaacgtgctgggtgaaattg

SEQ ID NO: 69076 - DNA, 225 bp, Zea mays
  Clone ID: MRT4577_162990C.1
agatgactggacataccaagatggactagggcgtgaccaaaggcggcgccaagcgccatcaaagggcgctgcgtgaccacatgcagggcatcaccaaaccagtcatccgcaaggtgccgaggaggcgcggtgccaagcgcatctccgggctgagcggcgacgatacccgcggcgtgctcaagatcttcctcgagaacgtcatccccgacgtccgtacctacaccg

SEQ ID NO: 69077 - DNA, 273 bp, Zea mays
  Clone ID: MRT4577_162991C.1
tgttttcccacactggctgcggcacacggcgccaggatcccaacgaaggcggggacgtcctgattcatgctgcgcatggtgcgcgcactgggtgccgtgatggcgttcaacgctcatgcagctttgacatcacctaagaccatgatgacctgttatacctgcgcaccgatttacaatatgattgaatacgctcgtgcgtgtaacaaacatgccctctagaattacctaccacctgggcacatatattgatgatactacgccatggtaacatgt

SEQ ID NO: 69078 - DNA, 154 bp, Zea mays
  Clone ID: MRT4577_162992C.1
ggggccatcatcatggtagggatttctagagaaatagatccaaagaaacatttgcttcgccattttggataacatgacttcagcgacggggatttataattcgatttgaaaactgtgaccacttacagcacgcttttttttccaaggcattttc

SEQ ID NO: 69079 - DNA, 340 bp, Zea mays
  Clone ID: MRT4577_162993C.1
gcccacgcgtccggggagacaccatggaatgtctccgctccatgtttatgctgctattgctgatgcccatcatcaggctaaatatgagaggctcctatgcattaataatatggaaagatttgctcataatcacggggagcaagtgaccacatgtactgcagctaatgagctaacaaggagcctggatttaaaatcgcgcgatatcctgcttttgcatatgagcagagaatctctgaggacaggagaaatacctgcctgcagtgtccatgggcgtgagactgcaactgttcacagagtgattaatgtccatgaacattacgacactgtcaacatggacata

SEQ ID NO: 69080 - DNA, 194 bp, Zea mays
  Clone ID: MRT4577_162994C.1
ggaaatcaaagttgtatgagacagggacgacaccatcccctcaattttttaaatcacaccatcaccaaaaaattactccgatgtttatctcaccccacgtgactttaatccaaacactatagaatctgtggccacccctttccatccctccatatccatccaaccaaacacacccttaatgacccaacacctga

SEQ ID NO: 69081 - DNA, 394 bp, Zea mays
  Clone ID: MRT4577_162995C.1
tttttttttttttttttttttttttgggtgggggttttttttttttgggtttttttttttttgggacccaaacatccctgggggggttttttcctttttggttttggcaaacaaccaagcagaagcccccccacagatactttaaaaaaaacccctttaaaactgggtggtaactctgtttttaaatatttggcggtcggtagttcatttttgaactaaaacccacccccttaaaaagaattggtcataaaacatggaatgatttgggccctttgccgctgcccattgaaaggaaccacaacctggggattggtggaccaaacattttggcccttttggttaccgggcacaacttttaccaactcccctggttttttttaaaaatgaacctttc

SEQ ID NO: 69082 - DNA, 1050 bp, Zea mays
  unsure (1)..(1050): unsure at all n locations
  Clone ID: MRT4577_162996C.1
aacggcgtattcaaatatcaacgcatacaggcatacttgctctagtcctatatcgatcgatgggcgttgaacgacgacgctagatagctacacagaccattcattatttatatttatgtttattaattaacgtccatgaacgaagcggggataggtggagtacgatacattgcaacaaccacaagtctccagtccaccacacataaccccacgtccccacgctcacggctcaccatgacaacaaccacctactccaacagcagcagcatccatcgagtgaactaagctgctgctacacgtactaatagctagctttagctcctccgatcctaacaccctgcgggctagctgtccagtggatgatccaacggcagtcagtcagttcgcccttcgccgggctagctagctagctagctagcttagctgaccctccgtatgagcatccactgggcgcgcggcgcgggcacgggcacgggcacgggcaccaccaccagcttcttacggcggcctcacttcacctgcgcttacggcggtgcacctgcttcttcttgtcgccgtcgtcagcggcggcggcggcctgcctggcgccgccaccaacacggccggcctcgccgtggagcaggtccaccaggcacggctgcttgcagttgacgcaggtcgggtagtccttcttggccaccatgcagtacatgaggcaccgcgtgcaggcgccgatcaccatcggcgacttactgcccccggggctgctgccgccgccgccgctcgagctccgcccgtccgacgacacgcacgagctcggcgacgacgacgacgacgagtcgctgtcgccgtggacgcccccggcgccgtccacctccantccccaccgggggcggggacaggtccagctgcagctcctccagcctggcggcgctcctcacgccgccgttgctgctgccccggctcatcgctgaacgctgatggcttagtccttaggcgagctgagcgtggatcgaggacggatgccgacttgccgagagaggccgggggagacgggaacagagggaagag

SEQ ID NO: 69083 - DNA, 520 bp, Zea mays
  Clone ID: MRT4577_162997C.1
tttttatatcctttttttttttttttttttttttgtttttttttttttttttttgttttttttgtttattattatcatactagccgacgtttagtctcctctaatcctctcgaattgttctatggcacgacaccgaacattggtacgcacaaaaccgcagggccgtccggatctaaaagcatacaagaccggaacaaccgaaccaccggagggggggggacaacgcttcgtttctggagaacaaaaggatcactgcaggggcgaaaaaaggaaatccaagcttggtaggcaccaaaaggatcttgcatagatggttactgacatcctagaagttgaggagaacgcgtttttgagaatcgccggacaaatttctaactttctagcctggaagggccgcgtttgcaactttctcaaaaaccccaccctgtggcgctatgaactattgctccctttgttccgaaaaaagggggcctttgtcaaccggacggccggacaagggaaaaagggcgacccggcggct

SEQ ID NO: 69084 - DNA, 171 bp, Zea mays
  Clone ID: MRT4577_162998C.1
tgatctttcatgtgacttctgcgttcgtcactccatcaggctcacatggtatatagtgaacatgcatcaggcactagctaatcctacgagatattaactgctgttcatgccgtgttcgttactactcgtatgctcaagcaatgagcggcagaactgcactatttttatcca

SEQ ID NO: 69085 - DNA, 589 bp, Zea mays
  Clone ID: MRT4577_162999C.1
tgcccagcagcaactgcagcttagcttgtgggtgatcccacaaccaatgtgtcatgttaggttaactattgctaatacacaatccaaatgcttgctggtgtggtttttctgcactttacagtgagaatgctttatgaaatctaacagtgttacaaaaatctgatactctgctacaggcgggatcaccacaggcataggtggcggagatggagttgtacccatatctgtggcctggcaacaatgttaaataaaaggaatgctttatgttgtgctttcaagttgataaattgtggcaacaagagattttgctttacctaggcaatatattgagaagctactcttactcatccaccatgaataatctttgctgcagtggagcttcatgtcggcgaacaatgcaaacgttgtacttctttcatgcgattgagtagttgatgttttacttctgttgccaccaacagttgaacgctgtacttgcagaatgataagaactcctggcttactttcttatttgcgttgttactgatgaaattaacaaaacttttattggtggttttatttgaaaattgtgtatgggttgttggatttt

SEQ ID NO: 69086 - DNA, 1110 bp, Zea mays
  unsure (1)..(1110): unsure at all n locations
  Clone ID: MRT4577_16299C.1
ctcaaaanagaactggttagacttgccagtagctatcctacttcaagtattttatacagttgataaaccgtcaactgactggaggggtggtgttggttttgtatcaaaggacatggttttgaaaggtttgccaggcccagcggaggactctctgattcttgtgagtagttcatgaattcatgacacatctgctgagtttcttcttctgaatatttgtgtttttttaacgaagtcactttgattaatgttaatgtaagaggtatgcaagagccctcgtaaacttaattcctctatatcaccatatagggtgcatttgtaacaaaaattctctcagatatttctctccaacagattctctatctcaaatgacatataaggcggataacatatcaccctgtatttgagggagagggtgatttaggacagcactaaatataggatgttggagggtgatttttgctgcatactccttaactttgatttaaaaggtttgtggtcccccaggaatgatgaatcacatatctggagacaaggccaaggatagatcacagggcgagctctctggcgttctgaaagacttaggataccccgcagagatggtatacaaattctgagaagacagtagtagactctgctgacgcacacacattcttgctgccctgcagtcaataaaccacacctgaactttttgttgttgttgcagcatctggctctaaaccggaaacagttttgacttgtttccctatgtaataataatgttcatccgagaattctaggtctagcttcgggtgttttgcttctgcagatgccacgctgcgatgtttgcgaaaattctagtatgctggcacttgagataagagctaccgagttctagtggacagctgcagcgaattatggtatgttggaagttggaacccagtcatttgtcgcaatcattagcacttcagcagcagtaataggagattggatgctgcgtgtggtcgcgctaaagttctgtgcttctggcgcgtatgtgccgtggcatctaggaactcgttgccgtatggtggatgtcgtaatcgtagagagatgctttgtctaaaaaaaaaaaaaaaaaaggcccctagggcc

SEQ ID NO: 69087 - DNA, 1616 bp, Zea mays
  Clone ID: MRT4577_1629C.1
ctatgaccttggcatccaggcacctgggaggtgttctattctgtctcatatattctgcagggagggcaaatcatcgactgagccttatgtcgtagctcacaacatactcttagcgcatgctggtgcctttcatacttataagcagcatttcaaggtaatttactataaacacatccacgagatgtgtcaaaaggtaaaaacaacataagggctagtttgggagcaagggagaggcaaacctagggagagaaaacccgctataagggctagtttgaaaacctaaatcctctccaggattcccggtgattgaggggaaatttaagctaatttccccctcattccctcggaataccggtggggtttaagtttcaaactagccataaattactaaatatcttattcaaatgacactccttgggattactacccggggaaatgacagggatcccggaggggatttgggttctcaaactagccctaaattgtttcatgtattcattgcagaaagaacaaggaggtatcattggcattgcactcgattctaagtggtatgagccactgtcagatgttgatgaggacacagaggcagcagcacgagcaatggactttgagcttggatggtgatacatctatcacaatttcgatattaccaagtcgattagttcctatgtagttgcagtacacagctgttgctcataatattaattgtgaaactttccaagtgtgaatacaggttcctggatcccttaatgtttggccactatcctccttctatgcagaaacttgtgggcgacaggctgcctcagttttcagctcgggcttcgatgttagtgtcaggctcactagattttgtgggcataaaccattacaccacactgtatgttaggaacgacagaatgcggatcaggaaacttgtaatgaatgatgcttcaactgatgctgcggtcatacctactgcttatagacatggaaagaaaataggagaaacggcagcgtcaggatggctgcacatagtgccctggggcatgttcaagctgatgaagcacatcaaagaaaagtacgggaatccgcccgtgatcattactgaaaacggcatggatgatgcgaacaaccggttttcgaaattagaggatgatctgcaggatgataaacggatacagtaccacaaggactacatgtctaacctcctagacgcaattaggaaggaaggctgcaacgtccatggctacttcgtctggtcgctgctcgacaactgggagtggaactccgggtacacggtgcggtttgggctctactacatcgactacaacaacaatttgacacggatacccaaggcgtccgtggagtggttcaggcaggtcttggcccagaagacggctggtttggagtacagtggttctacagtggccagtagttgagtgtatataacatacacggcacggctaccatcgatctgtacatgcgtacgtagctttagattagattgtgattattctcgatgtatatagactcaccatttggacgaccttcaaccgcacagttgaatgtgtcgttatgcttgctacaaattggttgattggtgctaaagaaatcagtgaggggtgctcggttctact

SEQ ID NO: 69088 - DNA, 588 bp, Zea mays
  Clone ID: MRT4577_162C.1
cgaatatgctgtcacgaatctcaccccctctactaatacggactacactcataggagcctctattcacaactgccaacactgtgctcgccctttcgttcaactcgcatctgccaaacccagcagccttctaccaacaacacatcattggcgatgccctctttcagatggcttattagttgtcattcaatcatgaagctttgtggccgccagaaaacttataccaaacaaacacataattgtggactccgtcttttacatcgctaaggcgaagtccatcaaaattgaaggcgtttgttcgggatcccaacttgggaccaaacttggagagaattatggtcatacctggttcccggggggaaatggtcttccctcacggattgcccacaacaatcgaacccgaatccttaacgggcaaggccggggggccgaaatagggggcttacttacaataattgggttgggctcactggcccctttccaatcgggcaaactggttagcccgcttgctttatggatccgacaaagcgccgggagaagctgttttgggtttgggcgcctttccgctttcctggttaataaactggtgg

SEQ ID NO: 69089 - DNA, 990 bp, Zea mays
  Clone ID: MRT4577_163000C.1
tttacatttcagactacacggctttacagagcacagtttaaaataaaagataaaacaggatagcctgttggagactgtcttatgagttatttttatgctaaaagacgatgcaaaacatttgcagacaagcacagttatgcctgcagcttcgtcgtttcctgcacggcggctggcacgttcatctcaaatcgtgtacgttttgttgtctattcccttgtccatttggcactcgactttgcttgaagcacagcatctgaagtagacaaaaaaaaaatctagagcctgaagctcatcatcatcatagtagcagcaccgaaatataacattgactgtgactggactttatgtcagtccacggtaacggtacagctccactgttcctttcgttaggtgaggtccatgaaaattatttgcgattcagcgcacaggtactcgtgattatctagcaaagcatcctcctagccttcagggagccggccatgctgtacacggacggcacacgctcgactggaaaaaagtgcggaaagagttcaggctatggagatcggttcctcttccttcccatcatttgctcctggcggcgcgggcgcgggcgcgagcggcgcgggctcctcctcgccgtagatgtggcggagccgggacgcggaaatgggggaggagggcgcggcggcgagggcgaagagctcctcccgccaggcccacatggcggcggacatagaggcgttggtggctcggagagagctcttctcggccaacaggctctggatctcgcgctgctgctccgacgacttccaccccagcgccaccgccgagcccagcagcagaccgctgatcaccttctcccggtgctccgtcagcttggccctgatcccgcgcagcgccgcctccatcgcgctcactcgtcgtctgcgcagattcgccgagctccgacggcgacccgtgcggtaattcgggcccagccgtgaacgtgtgaaccccgacccggccggc

SEQ ID NO: 69090 - DNA, 410 bp, Zea mays
  unsure (1)..(410): unsure at all n locations
  Clone ID: MRT4577_163001C.1
caaggccgggggccgggcccggaccggaactgcagggccgacccaccccacgataggatacgtgagccagngacgcaccctagaggggccatgggatctacagacgggggaccgcaaagcgccaagcggaccagacgcaaccccaccgaagaaggctccaccataggggacgccatctacgcaggtcacagggacaaggaataccctgctgagggatatccgcagtgggaaatgcaccacacagatagccgctcaacgggatggcacctacgtcagcgtggcacggagcaggaattatgatctgacaagagggagagataacgcgcacaaccttactgatgcaagaacgctggagatccgaggaacatgcaaggccaggggcaacagagtggcgagcaactggggcaaac

SEQ ID NO: 69091 - DNA, 1112 bp, Zea mays
  Clone ID: MRT4577_163002C.1
ggcgcggtggcgctgcggtggaaggggcagccggtgtccttctgctcgctgtggcggccggcgtgcagcggctaagagcatctccaagagagcccaaaaaaataatctcccaatacaagggaataaggatctccctaaatctcttaattccattctatgggtaccatctccaacagatcccaagattttctcaaaatgtaaatccataaaggcccacaactgccgtacgtacctgccaaccttcctgcgcgcagctgccatctcaaccttcatgcgccgccaccgaacgtcctggcgtacagttcattcttttggttgaaacttggtggcatagggcatcgtggtggcgttgattttttccccaggcgctgctgattattccaggtcgacgccggaaagctcatgtttgatctggctcagccatagagccatgaatattcgacaatcaatgttgcaattgaatgagtcatcatcagacgatgatgaagaaattagtttcgccgagtatcatatctttcatcagccttcacacagtaaaagaaagcatggtgggtctatccccggacatttagttaaatttcgagacagacaagcaggacatgcaagaatgtatcaagattacttagcggacaattctacgtttagcttaactgatttcagacgaaggtatagaatgagtcgcgatctatttaaacgtataatggttgcagtagaagatcatgatgactacttcaagttcaagttcaatgcagccagtacacctggattaagttgtttccagaaagtcaccgcggtatttcgtatgataacatatggagtagctgcggatgctacagatgagtatgttcgtatcggagaaagtacggttatagagagtctgaaaaagttcgtgaaggcaattattaaagtgtttggggatgaatatttgagagcacctaatgaaatggatacatctcggttacttgcaattggacaagaaagaggatttccaggaatgcttggttctatagattgtatgcattggaagtggaagaattgtccatcatcatggcacggcatgtattcaggccatttacatgagcctacaattatattagaggctgttgcttcac

SEQ ID NO: 69092 - DNA, 224 bp, Zea mays
  Clone ID: MRT4577_163003C.1
aggttatgcaaatgttaaccttttttctgaaatgagctagcttattgagggcttctatttaaatgcctgactcatttatatctacttggcgatattaggctcccttttgaacttgaagccacaaaataattagacttctagaggagtgaggctatttgggtttctcataggaataggagtgaaacagattttgtctagagattactttccttcatttgctaagt

SEQ ID NO: 69093 - DNA, 168 bp, Zea mays
  Clone ID: MRT4577_163004C.1
gaagctcaactaatgaacaaggggccggccccggggaaatggcgggaaccggtcacttggaagcgcgtccacaccttttccttatagggaaggtggattataaagcttggcgtgtattaattggcatatagtgtgtttctctggggagaaatggtatatcggttacac

SEQ ID NO: 69094 - DNA, 258 bp, Zea mays
  Clone ID: MRT4577_163005C.1
ggttggtggcctgtatagcgacctgctgcagctgtcgtcagtcagcctactcttgcccaaagccatctccacttccgtccctgttgcgtccgccgttgctaccgacccgccccagccaccttcttccaaaacgcgtcgttgccatccaggaaggtgcaaggatagagaaaataaacactagcaagatgcgaaaagagatgctggacttaaccagacaagatcgcgatggtgaagtgtcggtgaaggatgcagtagcgc

SEQ ID NO: 69095 - DNA, 129 bp, Zea mays
  Clone ID: MRT4577_163006C.1
cctcgaggccggccggggactaatcgttcttcgcagagataggtgcctacagactctactacctcagcgtttcaacctttccccttatccaattcacatcgccgctctacgagtacaagtgacacacat

SEQ ID NO: 69096 - DNA, 209 bp, Zea mays
  Clone ID: MRT4577_163007C.1
ttgtctacgcgtccgcccacgcgtccgcccgctcttctttaaacgcgggcgcgcgactcatacacccactcatcctctgctgatgacttccctgaatgtgacctattactgctccttccgcgccccgccccgtcaactcttctttttactgctagcccttgcgttacggctttcattctctccttcttaccattgctgaccactttctt

SEQ ID NO: 69097 - DNA, 256 bp, Zea mays
  Clone ID: MRT4577_163008C.1
gaaaaaatgttcttcgaaaagagccaatgagcaaggacatagctgaggatgatgcattcttctttaatgacaaattcaccagtaagttcttcaaggtaaagatagggatgttgttgctcagagggagtctgaaccagaaaacctagaaactaggcaaagagtggaagaatacagaaagccacagatcgaagcagccattgtgaggataatgaagtctaggcggactctagatcataataatattgttgctgaggtc

SEQ ID NO: 69098 - DNA, 166 bp, Zea mays
  Clone ID: MRT4577_163009C.1
acctcggaatccgcctcgggtggatccgttcccttcgccgcaacgccgttccgacccatttgcggttgtcgcgcccacggcaactcgctcgctagctgatcacgacagctcgctcgggctcgaccggaatggcgcccgcggggctgctggccgtgctttcggggcg

SEQ ID NO: 69099 - DNA, 503 bp, Zea mays
  Clone ID: MRT4577_16300C.1
gccggccgggtcgggctggatagacttgccagtagctatcctaacttcaaggtattttatacagttgataaaccgtcaactgactggaggggtggtgttggttttgtatcaaaggacatggttttgaaaggtttgccaggcccagcggaggactctctgattcttgtttgtggtccaccaggaatgatgaatcacatatctggagacaaggccaaggatagatcacagggcgagctctctggcgttctgaaagacttaggatacaccgcagagatggtatacaaattctgagaagacagtagtagactctgctgacgcacacacattcttgctgccctgcagtcaataaaccacacctgaactttttgttgttggtgctgcatgatctggctctgaactggaaaccgttttgacttgtttcctgatgtaataataattttcatccgagaattctaggtgtagcttcgggtgttctacaaaaaaaaaaaaaaaaaaggccccta

SEQ ID NO: 69100 - DNA, 389 bp, Zea mays
  unsure (1)..(389): unsure at all n locations
  Clone ID: MRT4577_163010C.1
gcagccccgaccagcactngaagagacgnncgttgtctcctcncccggcccggggcccgncgccggcacgctgnaccngaccagccngaacgncgccnncngcagcgaccgcccgcncnccnncgccgcgccgncnggagagaccgccnggagcnaccacaaggnnangancccccnnggcaagaacgcgacggnggagccggngacgaggaaggagagcccgccggagaagnacgnccacgncgncaccgncgacccccacgacnncnggnncangggccncgncagcnacgacaaggccgngcacaaccccgncgaggccgncncccagcacggcgncgccaccgccggcggcaagcgacgaggcgacgccgcnccggagaccgggc

SEQ ID NO: 69101 - DNA, 194 bp, Zea mays
  Clone ID: MRT4577_163011C.1
gggcgaccacgcgtgccccaaacgtgcggacaccatctgaaaatgtttaaatagagatagctctgacggcaacaccaatgccaagcttttataaagaaccaaccccagccaacgttgaattgaaaaagatccccccaaccagaactaaatcaccaaagctaggtacatctaaaaacaaattcatatcaaaaact

SEQ ID NO: 69102 - DNA, 433 bp, Zea mays
  Clone ID: MRT4577_163012C.1
acataaggatgagtattattattatatcataagaattcatttattcaggtattctataaaagcataagaatatcaacaatataaatgttacattgataccttcagcttgctcgaaggcgaggatgcgagagagtgaataccatccagtgtgaacagtacggaggtactgttcatctatttataggcacgggacacagcccggtgaaattacatccatgtccttggacattagtttacaagcaacttaaactaagaaggtctaactagtcctttttccttctttgcttggtctgggccgaagctaccgagcttcggcattccgcattgttgcttctacacagagtcttcgtcttgaggaccttcggcagagaagaaggcccccaacagtgatgcctttctaaccgcactaacattcaatcttcatcataagcta

SEQ ID NO: 69103 - DNA, 536 bp, Zea mays
  Clone ID: MRT4577_163013C.1
agaaatgtcttgactcatgtgttgcaagaaagtgggtacgcacaaaagattgacatttcaccctctgagactttatgaaggtaagcgtatttctcctttaagaggtaaatttactcagtcataactcataaacatgttatcaccattcataatctactttgggcacataaatattactttcatgttaccacaagatgttatgccaatgttcttacagatggaaagaagatatcaaatgcagtcaagctgtcaaggctagttcctgattgaatgatcaggtattgcgctattcttaatttcttttccgttgtgtttagttttggatatttttttattgggagtacaaaggggtcccaaatagcacatattctatcgtggttatatcattacctacttgcatggaattgcaatgtatgaataaaagaaatatcataaatggtgctgcaaataattcaatacggtaagcaggaccaaattgtagtatgttttacaacatctctgccttagtgctattatgttttaagtagtgaatggca

SEQ ID NO: 69104 - DNA, 334 bp, Zea mays
  Clone ID: MRT4577_163014C.1
cgcctgtgtgcgatgcccttctccgagagctgctcttcttcgcgggcgtgctgtgccgccacctgatccggtccaagggctccacgccggcgaggccgaccaccccaggtgacgcctcggacgccgcgccctaaatcccgtacttcaagcgcgcgttcgaacacttctgcatgcatgcggacagccgcgacgtgctggagcacctgaagagcaacctgggactgcgcaacgtccacctgcaggcctaccgcggcgcgctgcagcgcttcggcaacacctccagcaatagtatctgctactagctggcgtacctggaggacaaaggccgcaatcc

SEQ ID NO: 69105 - DNA, 137 bp, Zea mays
  Clone ID: MRT4577_163015C.1
cgcttatagacccgccgtggaacgacagctcgtacaccaacctcctcgcgctcgaggtgcccgtgaacgtgtggataatcacccacgcacagctggccatacgcaaggaaacggcgcgggccctgggcatggacagc

SEQ ID NO: 69106 - DNA, 591 bp, Zea mays
  Clone ID: MRT4577_163016C.1
ccacgcgtccgcaagcctgccctgtcctgccttgttaagcaacacagcgagacatcacgagagcgagagggagatggcagccacggtgtcctccttcccggtggtgaacatggagaagctggagaccgaggagagggacacggccatggcggtcatcttcccggcgcccgcgctcgtcggcgccgccgaggaggaccgcgccgaggccgcgtacccgagcttcgtgttcgaggccatgaagtcggccatcgccaccgcgtgagaaagactgccttccgctgccggcttccttcgtggcgtcaagccttgaggcttgaacgaacaacgtacgtccatgtgcttatagtggcacagttatgtgtgtaactaccgatcgtggaacggcctaatgtatttcggttgcctcagatcgatctatatgtgcgtatacattatgtactgaaaagtgtgtagcgtctggttaatgtacgagcagtgtgtatgtgaccaggacccggtgtgtagttgctattactaccatatccggtgaatgatcaaaccttttggtgtattaaaactagatgttcatccaaaaaaaaaaaaaaaaaaaaa

SEQ ID NO: 69107 - DNA, 521 bp, Zea mays
  Clone ID: MRT4577_163017C.1
ccggccgggagagataagacccagggcacctacgcccctccttcttatccttcgtgcaagactcatcgaaaccgccacaagagagagagtcgggagagctgtcgccgccgcatagccgtgcggcttgagagagaggcgtcgtgctgggcgaaccgccactgttaggctcgaccaattgggtcagtgggattcggcaacgctcgagaagaccggttgtcgcatcgacggacgaagtggtgatcggagcgcgtgacgatttcacgccggagtcggagctccatcgtcgattccattgcgtcctgcgagcgggctacttcacagctatcactgcagtgaggacacgtgtcatctgaagatcatcctggtacctggaatctcaagtcacaggtcaagaacaggtaccgcaggatgaggcacatggaggatgctgtgatgagttcgtgagtggtctaggccgtcgtctcccagtcaactttgggttgctggattcgttccttatatgaggtaattatttaataatt

SEQ ID NO: 69108 - DNA, 1366 bp, Zea mays
  Clone ID: MRT4577_163018C.1
actgtctactcaaacgcacagcaagcgcttgcagagaagcatagagctgcccgagatcggttccagcaccaggcgccgcaggccgcagaacaagttcgagagctagaaatggcgccggcttcgtcgttcccgatcatcgacatggggctgctggccggggaggagcgacccgcggccatggacctgctgcatgacgcatgcgagaactggggattcttccaggtcctggaccacggcatctcgacggagctgatggacgaggtggagaagatgaccaaggggcactacaagagggtgcgcgagcagaggtccctcgagttcgctagcaagacgctgcaggacggcggcagggcggcggagaacctggactgggagagcaccttcttcgtgcgccacctcccggagcccaacatcgccgagatacctgacctcgacgacgactaccggcgggtgatgaagcagttcgcgtcggagctggagaggctggcggagcggctgctggacctgctctgcgagaacctcggcctcgataaagggtacctcacgcggcgcgttccggggctccaacggcgcccccaccttcggcaccaaggtcagcagctacccgccgtgcccgcgcccggaacctcgtcaagggcctccgcgcccacaccggacgccggcggcatcatcctgctcttccaggacgacccgcgtcggcgggctccagctgctcaggggcggggagtgggtggacgtgccgcccatgcgccacgccatcgtcgccaacgtcggcgaccagctggaggtcatcaccaacgggcggtacaagagcgtcatgcaccgcgtgctcacgcgccccgacggcaaccgcatgtccgtcgcgtccttctacaacccgggcgccgacgccgtcatcttcccggcccccgcgcttgtcggcgccgccgaggaggaccgcgccgaggccgcctacccgagcttcgtgttcgaggactacatgaacctgtacgtgcgccacaagttcgaggccaaggagccccggttcgaggccatgaagtcggccatcgccaccgcgtgagcaaatactgacttccgctgccggcttccttcgtggcgtcaagccttgaggcttgaacgaacaacgtacgtccatgtgcttatagtggcacagttatgtgtgtaactaccgatcgtggaacggcctaatgtatttcggttgcctcagatctatatgtgcgtatacattgtgtactgaaaagtgtgtagcgtctggttaatgtatgagcagtgtgtatgtgaccaggacccggtgtgtagttgctattactgccatatccggtgaatgatcaaaccttttggtgtattaaaactagatgttcatccc

SEQ ID NO: 69109 - DNA, 882 bp, Zea mays
  unsure (1)..(882): unsure at all n locations
  Clone ID: MRT4577_163019C.1
ngatttccctacatctttagcttactcgtgctttaaataagttagcagaactatcataaagatatggccattttggtcctcttcccttagatagcgtagctactgactactcaaattgttgtagttgaatctgatatatctattacaaaaattaatcctaggacctcgtccatcctcacgtggcaacaccaatcccccacttccatacttcaaattgctttatttaccagcaatataaacttcaaggctgttagttgtatataattgatttttttgttgaatgacatttgattactatgccttgtcaggtgtcactcttgattgatgtttcaaacaaaaaagatgtcattcttggttatgtagtagtgatcatgcagcagcatataaagcacatgtgttccaggtgactctaactttaattattagcttactataacttggctgctgcagcaaagaaagggactgtcgttaaggctctattcatgagcacgatgccaaaaaagccacggtccaactgttgatggcatcgcctcttgcgtttttacgattcagtagccccagtgtgacacacaaggtgcgctctgttgtcaataggatgtcactttatccatgtagttatcgtgtccctctgctatacatttcacagtctatcatctggttctagctgtttgtcaaatattattgctagcatggctcaaatccacggtcaaaaattggcatccctcaagttgtcagatttgaaagctccctcacatcccctaaaagattgggttatcatgatgaagatacatgtcacgtggacaaaaaacacaagaactatatttatggatatactattttcttcttttgtattattatattcatatccttttttacctttgt

SEQ ID NO: 69110 - DNA, 262 bp, Zea mays
  Clone ID: MRT4577_16301C.1
ggccggccgggctcctcctggaggtactgattcttgtatccttgtctctctctctccgtttttggttcttgttgccaaaaagggggagaaaatccaatctctagtttgtggttctttctattttgtggttctttcggttttcttttggattattttcgttttcggccactgttgtggtttgtactttaccattgtatgaaacaaaactgttggattgttattcaaaggaatatgatggtcttctggccatcatcttttgtcc

SEQ ID NO: 69111 - DNA, 396 bp, Zea mays
  Clone ID: MRT4577_163020C.1
tctgcgagccgagaagaaggccaccacgtgccggaggttcgtgttcgaggactacatgaacctgtacgcgcgccacaagttcgaggccaaggagccccggttcgaggccatgaagtcgtcggccatcgccaccgcgtgaacagataatactgccttgttttctcccttcgtggggtgcatatgcttgagcttgaagagccttgaggcttgaacaagcaacgtcgtccatgtgcttgtatgtagtggcacctacggtggttatgcgtgtatcgtggaatggcgtgatgtattttggttgtctcagatctacgtgtgtgcgtatatattgtgtactgtaaagtttgcaacggttgattcccgcccgagcagtgtgtccctaaccaaaaaaagaaaaag

SEQ ID NO: 69112 - DNA, 440 bp, Zea mays
  Clone ID: MRT4577_163022C.1
ctagctcgtactcctcaccacagcgcagcgactccatagggtgcctctacccctagctgcggatctccgcgggagcgggggaagtgttcaatcccctagtgtccatgttcgaggacgtcctgctcacgtggcactaccagttctaggctctctacgacagcttcgtcatcttcttcaactccggcatcgcccagatcaactgccatctaactacttgtggacgatcgctcgtgattagaagcaaatgtatgaatgggaagaatgcaatatctgatcaactgggaattgctgaacaggagcatgatgacgtacagtgacgaagacaagctctcggggcaagtggtgcatcatcagctcctattcgttctaataaatgcgttgctttccaaccgtcgcatgaacatccaagatcttcacatgcgcgctttgatgagcctgaa

SEQ ID NO: 69113 - DNA, 539 bp, Zea mays
  Clone ID: MRT4577_163026C.1
taaaaatcaaatgactattattggggggatgaaagagtactataaaatgtcgattcaaaaaaaaaaaaaaaaaaaaaaaaaaaaaaaaaaaaaaaaaaaaaaaaaaaaaaaaaaaaaaaaaaaaaaaaaaaaaaaaaaaaaaaaaaaaaaaaaaaaaaaaaaaaaaaaaaaaaaaaaaaggggggggcggggtgtaaaaaaaccaaatttaactaccccttccttccaactaaaaaatttttttttggggcccccaaaataaaataaatgggccgggtttaaaaaactcgggaacgggaaaaacccggggttacccaaattaaatcccttggaaaaaaatccccttttcccaaggggggaaaaaaaaaaaaagcccccaccaaatcccctttcaaaaaatttcccaaccctaaatggaaaagggaacccccctttaacggccaaataaagccgggggggggggggggtaaccccaagggaaacctttaaattggcaagccccttagcccccgtcctttcggttttttcccttttttttt

SEQ ID NO: 69114 - DNA, 498 bp, Zea mays
  Clone ID: MRT4577_163027C.1
ccacccttacacacccccaatcgtgctatttaacaagcctcctgacattaacgatgttttactcaacatcagagatcaacggggaacggtaacccacgcctagtttcctaatcttaaaatagcttggggggcggccggccctgaactcgacgcacggggtttctttcacaaagctctcccccgcccatcagcaagggccgtggaacttctatcggctcccgtggtcctcgcggtgccggtgggggcgggcaccggggaaccggccctccccttcgtaccgttcctggacgggcctttcaaggggttcttccggggccttgagagcaccgggttcgacaacattagggctctacatcccctggcggcttgctctcctggtaaagggagggcttctcaaaggggttatcggtcttggccgaattcttatatggctgctcggtcttcctcctggggaacgtaacttgcttggctttgacctgcctgttctttacatcaacc

SEQ ID NO: 69115 - DNA, 285 bp, Zea mays
  Clone ID: MRT4577_163028C.1
cagcaaccttctaactacggtccaatgaagagtggaaactttggtggtagcaggaacatgggaggaccatatggtggagggaactatggtcctggaggaagtggaggaagtgggggctatggtggaaggagccgatattgagcttcttcctacttaccatgggcttcactgtataaataggagaggatgatagcccagaggtaacagaacagcttcaggttatcgaaataacaatgttaaggaaactcttatctcagtcatgcataaatatgcagtgatatggca

SEQ ID NO: 69116 - DNA, 266 bp, Zea mays
  Clone ID: MRT4577_163029C.1
cgacaccggcccacgtgtcaaccgctccccactggctgagccaacggcggaccggcgggataggatatggtggccggccggcggcgcacgcggcgagccaactcaattagtacagcgtcgagcaagaaggccgaagcggggcgagagggagagagaggccggcgcggcggccggcggttgggacgaaggggaggaaccgcggaagccggcagcagccaacgaagagggcacagggcagcgcacactgggagccggcagcggcggtg

SEQ ID NO: 69117 - DNA, 422 bp, Zea mays
  Clone ID: MRT4577_16302C.1
ggcattgtgtagtgtttgagaaaataaacagaaaatcgacccaactcatagtgtcatcctatcgatgagagtaagagtactgttgcttatattgtcaagattggtcaatggccatgctgttattcataccctatcaaatccttacatcttaataatgtccttcatgttcctcaagcccaaaagaatttagtctctgttcatcgttttcttctgacaataatacctcatttgagtatttccttgaccactttttaattaaagatctggtcacagggaaggtactacttcaaggtagatgtgaagatgggctctatcctttgcctatgtccagtcgatggtgagtagggatgaaaacgggtatccgaatggttaggacaaatttaatattttaaaatagatatgtatgaaatttgatgctaatt

SEQ ID NO: 69118 - DNA, 392 bp, Zea mays
  Clone ID: MRT4577_163030C.1
ctcactctgaccctgcctggcactccattgcggcagtattcatagcgggggagacactacctagggcaggggatcattgtggatggatctaagatgatctacgatgctcgtcagatgaatgactacaaagcaccacacttcagcatgatcaatgaagctgatgcacgcagcacacagcagcatgacagtataatgggcatgagatagagaagtcccaaggacagacgcctaatcaccgacccaggtaggcggaatcagcaccaatgagaggataaaggcgatagctgaaacagagcaggctgatattctggatccatgtctgaatagatgatggcggataaaactgaacactatgtgctctcatgcatcagaagaagcgagagctaaagtcc

SEQ ID NO: 69119 - DNA, 278 bp, Zea mays
  Clone ID: MRT4577_163031C.1
tcggaggatgtctgcatccaaggcaggctcctagggttcaagcaggaaagccacagaccaggagaagacactggacgcgacgcccatgccgagcacgaggatgaggagggccagcaggggaagagcctggctgaaggccaccataatgacaagctgttcgtcaacaaccgtgcgctcgccgacgccaggaagctcctgctggagggcgcggagaacggagcgcaggggcacctgctgctgcagctgaatgactacaaggacaataagaacggggacag

SEQ ID NO: 69120 - DNA, 291 bp, Zea mays
  Clone ID: MRT4577_163032C.1
caactagcaacatagaaagcacaatagtgtaccaacaatggccgccaaaatattgggccttcttatgctcctcgctctttgcgcaagtgctgataccgacacaatctttcatgaatgcatacaggtcactatatctatgttccattattacacacctttcaccaaccagtgtacttcaatgtggcttagaacacccatctaagcaagcctatatgctacaacaagcaatagctgcgtgcgtcttacaacaaccaatttcccagttgcaacaacaatccttagtcacatcta

SEQ ID NO: 69121 - DNA, 472 bp, Zea mays
  unsure (1)..(472): unsure at all n locations
  Clone ID: MRT4577_163033C.1
caatatttcctttggtttcctttttttcccagttgcctatatcatccattgcttgattgctgtactcaactcaccttcttgggtttattgtaggcattctggcagacatcatcctattccagagtttttttctgggatctgtagtagatgtttgctaagctaaaggtccttatcctgtaaaagtcacaagatctggattgccttgtattttgaatccaagtgtgttaatattttgggcaactttgccaaggttaccaatatttcctttggtttccttttttttcccagttgcctatatcatccattgcttgattgccgcactcaacacaccttcttgggtttattgtaggcattctggcagacatcatcctatttccacagttttttttctgggatctgnagaaaatgtttgctgagctaaaggtccttaccctgaaaattcacaagatcaggatggctttgtattttgaat

SEQ ID NO: 69122 - DNA, 840 bp, Zea mays
  unsure (1)..(840): unsure at all n locations
  Clone ID: MRT4577_163034C.1
ataaaaatagtccccgttccattcccgtggtcgctctcggcctctcatctcgtccgtcactcccacagtccagtagcacctatggcggctagggtttgtgtcggcggttgagaactcacgcgcccacgctacatcgcctccatccccactcgcccaagctccattgcctccatccccactcgctcacagctcgctgggacgtgtcggcagtggatccggagccggtgacgcgatctgcagctacgaaggagagagcagccgcccgacggagggcgtgggtttcttcgtgtttaaaccacgctgacgccacgccaagcctggtagcagttcgcgcggcgtcaccaaccgaactcaccaaccctcgatcagaggagctgagctgcgagcctgcgactgcgacttgttggggaccctgcctgagcactgaacttggttctgtcagtgtcaaccttgttcggcttgctggaaaaggtgtggactctgcctggaatagaagttcagaaaactgaaacacggacctgaaggttacaagttcagttcagaaacagagactaaaagtgatcagcagacgacagtgctccctgacactgggatttcgctcagaacagaagctaccacgctatgagtaaaggagaaaactctagggctcattggaacttcaataaagaaaaaggcctagttgatatattgaatgagcacaatcatcaaaggttctgagggcaaaatgaatgggcggccgaagggtggaagagcattgtgaagagttttaatgaaagtttccatctgatccggttacaaaggtccaaatacnagaaaaggagaaagagctttaagcaacta

SEQ ID NO: 69123 - DNA, 1698 bp, Zea mays
  Clone ID: MRT4577_163035C.1
gacacgggccaaaatgtacggacctttttattcctaaccctgtcgatctacggggaagtaaaaaaactagtccccgttccattcccgtggtcgctctcggcctctcatctcgtccgtcactcccacagtccagtagcacctatggcggctagggtttgcgtcggcggttgagaactcacgcgcccacgctacatcgcctccatccccactcgcccaagctccattgcctccatccccactcgctcacagctcgctgggacgtgtcggcagtggatccggagccggtgacgcgatctgcagctacgaaggagagagtgatcagcagacgacagtgctccctgacactgggatttcgctcagaacagaagctaccacgataatggcccctagtgacaagattatggaacatcgaaaggaaaaaattaggaaattcatgcaattacaacaaaaagaagacgatgaattattttttgtaatagttcctgccatacttcagtgccttaatgatgagaaaagaccagttcatacttctgaatatactggtgctaaaaagatgaaggaaattctagaggggcatgagagttggtgtaagtcagagtttcgtatggagccagagatttttaaggcaacgtgcaactatctaaggcgggaggggttgttgcgtgacacgcggagagttaccattgaggagcagctaggaatgtttctattcatgatttcacacaatgctagcaatgaaaggctgaagaaaacatttcaacatagtggggaaacagtccataggcacataaaggcgattttcaatataattccaactctcacccacaaatttttgaagcttcctagttccaaccaaactcaccccaagattgcaacagatcctcgattctggcctttttttaggaaacaggaagcattgctacaggtgatttaaacttcacatcagctgaaccagcaccccaaccaactgaacatgttagcactattgatattgatgctcatgattctcaccttaaccctttccttgcaaatgtggatgatcacatgacatctagtggacccatagacatagatgagatagaaacaccatcttcatcttgctctaaaaattttgaaaataggattgggaagaaaagaaagctcagtattgctggagttttacaaaactatgtggacattagggcaaatgaaacaaaaatatttatgaatgaactcaatgagacaactaaggaagcagatgactattctatcaagcggtgtctggatcttttagaatcaattgaagaactttcagatgaggaaaaggcgcaagcaacaaatgtgctgaagtgtgaggtcaacagagaaattttcatgaacttcaagattccaaaggttcgtttgttatgggtcaaaggcgaaattgctcccaaggtctaatctacattgtatcgtggttgctggtggtgtttacaagctgatggctgcatatggtgcttacatttttggcttctttgtatctggttttgagacattgtagtgaaggttgacatgagaaactcttgtatgaactttggaatggttatctttggagtgccttgtgacaatttacctttttatgtacttcggatctgtatggaatatttttctttgatgcatgtacttcggatttgtatgaatatttttatccttgctaataattttgtgtattgccgcaac

SEQ ID NO: 69124 - DNA, 458 bp, Zea mays
  Clone ID: MRT4577_163036C.1
gaaataagaccatgacacttccgcacatgcttatattataaaaccacggataaaaggacgaaccatgtttgggatatacacgggttaataaaaggatttgacccaaccatggggtgggtaggacggcatgaatcaacttaattgtgggcgcatctggtaatggagaaagcagtataccttgtgaccccaaggggctaaagctctagaagccttagtccgcgctcaatgggacgcgagctgacccaccctatagcacgttgccagatcctggctcacgaggcctaaacacaccatggcagctcattcttttcatcaactgttcacgaatgccctggacggtagctcaatgggcggagggcgaaagggccatattctgatttattgtgactgcgtacccaactgcaaagaccggttgaacactcgcaacatgtcgggcgccccaatcgcagggcgggatg

SEQ ID NO: 69125 - DNA, 651 bp, Zea mays
  unsure (1)..(651): unsure at all n locations
  Clone ID: MRT4577_163037C.1
cggacgcgtgggcggacgcgtggggcatgttagtgtgtgtcggtagcccaattttttatgaggagtctatagtcaaataattaggtgaagatcaccgtatatcatacacaagtaattagatgaagatcatcatacatattgaactccctgtctactttacaattggatgttggtgaaagctgaaattacgtagaggtgtcctagtaatggaatttcaaagtttggtaaaaaactaagagtcaacatagtaaatgaaaatatttatgttggcatatattatactagtcgggtgcccgtgcgttgcaacggcatacaataactcttgaattttatgtctataatcaaatatatgataataaatttagaccatatataaatcacgtacacctgtattgtatgaatttagtaattatttaaaatgattttttaacttcggacggatggagtagtcgttaaacactgagcaaacaaatgcaataatgacagattattcacaaaactttaagatctaagacgaatctaattaaatgtgtggttataattaacttgttgcgtaacaaaatcaactaaatccaattaaataacaaccaaaatgagtactcaaataaatacacaaacgtattntacataactaagcaacagaaagttact

SEQ ID NO: 69126 - DNA, 161 bp, Zea mays
  Clone ID: MRT4577_163038C.1
gtgaaacacaagtcattctgtcacatatgatcgtagatctcaaccagatcctattctcgtgggtcttttcaaacatgggtggtgcatatcaacaataacagaaagtttgttactcaatttattcatcttcttccaactgatctattatcttacacttcagt

SEQ ID NO: 69127 - DNA, 222 bp, Zea mays
  Clone ID: MRT4577_163039C.1
tgtttggtcacgcgtccagaaactataggtggggacagcatactacacggagtgcaggtattaccgatgcaagataaccaaaaggcggtctcggcaggcacttgagacgatataaagtatgaggcgaatttgaaaaatgatgaaatggagcaaactaatgaagagaggagaaagactaccagaccgaaaggtaacgatctgagcatggagaaattccggcag

SEQ ID NO: 69128 - DNA, 263 bp, Zea mays
  Clone ID: MRT4577_16303C.1
aatcggaagggtttaaaggtcgttagaatagggggacagccaactgattatggggcacagttattgtgcatactgagtggagcgaacatcaaccgaagtctgactacttattggacgaaaacatacacacgctgaaccaagggtaatgaacctgcaaaaagcccattaatatttggtactcacatacgagggcagaagatcttcattgtcagacaggaaggtggttactcgttctgcatccactatatgaggctcagaccata

SEQ ID NO: 69129 - DNA, 392 bp, Zea mays
  Clone ID: MRT4577_163040C.1
atgcgtaacaccttgttccccataatcaatctactatctactttcctgtagtaacgaacaaatcagctgaaggtgttgatgcatgaactcaaattccatacttcttttagaaacattgttgtatggttgataataaagctacgcatttataatattcaacgctgtaactttggaatatgtaagtcaacacaaggatatagtaaaaatgttgtcaccctcacattgttgtgtgcttgagcaacgtttttttttttgtagttgagatctattttcagtaattatatacatttgttgaaacttagacaaccatcattccatgtttcttatgtctgtatacagagattgaaggatataaatacacagtaccaggagaaactattaacacttagagc

SEQ ID NO: 69130 - DNA, 379 bp, Zea mays
  Clone ID: MRT4577_163041C.1
caagcaacacgttgctctgatggctaccgtgaatagtgggaagacgtacattgccggcgctaccgctccagaaatgaaatggggtgatgatggcgtgaagttacgttcggctgccgtatctctatcgatttcatgatttattgtgcaaaatataacaactaaaaaaatgtgatacaactctcggattcagcggttcgcatagagggatctattactggtctagtcattgaaagaaggttaatagttgggttagtcgacaaaagcgacaaaagcactggatgagactgcaaggtttcagtcaagtctgtaaacaattttggaagtggatatgtattgttatgaagactgcattatgattgaaatttataaatattattat

SEQ ID NO: 69131 - DNA, 363 bp, Zea mays
  Clone ID: MRT4577_163042C.1
aaaagtttctggtcctcgtcagctaacaaagtagattgcagacgctccgattcacaaggtcggacgagcgagatgcacaaattggtcgaggcctagccgcgccaaccccctaacgatggtcggccatgcctgggacccaactacccgagcgctttcttgcattatggattacaggcgtccatccataatatggacaactgctactacatgctactgatgttttgaaccaaactctacaaacaacagaatgattgaacatgtgtcatattgtactagggagaattactacatatacccggacaacatataaggaagagtaagatatttcacaaaaaattaataacagtttacgttgcttattac

SEQ ID NO: 69132 - DNA, 517 bp, Zea mays
  Clone ID: MRT4577_163043C.1
aaaggaaaccccgctgcagctaaattcaaacacaaaagtcagctgcccaacaagtaaaaaaaaacaaaacctgagggggcaggcccatctaaagggccccagcaagacatgacattcgaccatggccttccaaaaaatcttcttcggcgtttttttttttcccatcccgttggccaaaacaagaaatccgaaaatcccccatcatccataataaaaaaaacccccgaaattgcaaatctgggcccaaaagaaaacttgggagtggagctactaaccattccctccaaaaaggggggaaaacttatccatctctacaccatttttcccccaatcttgggggggggagcccacaaaccctgccataaagcagcccaaaaatcccaaacagccgagtataaaaaaaacagggcaatgtaaatccccaatgcacaagggataagttaaaaaccatgcctaaaggacaacttccacaatggacacttgttaatacctgcataaactaaaaaaaccgcttaaa

SEQ ID NO: 69133 - DNA, 364 bp, Zea mays
  Clone ID: MRT4577_163044C.1
cttgggcgctgttaacggaattaatgggcggttttgtctgccgacgacaacaaactgagggagggggagaaggtcacaaggaacatagcccaagacatagatatgctgggccggggccaagctacccatgctgtaggcgcaaactgacctagcaaggaacggatacaggctgatactcgttcacgaggcccgctgctgcaagatcgagcggggcaaccttgataccagggaggagaaggacgctacaccgatccctctgcacccgtcaccggacagggccaggggataccaagatacaccgtaacgctccacgatcgagacctcttgatcagccttagttcattgatgccagccaccatgcagc

SEQ ID NO: 69134 - DNA, 235 bp, Zea mays
  unsure (1)..(235): unsure at all n locations
  Clone ID: MRT4577_163045C.1
gcgttaatttctgcactgtaggaatacggtgtgaatgctgacatgagttttataaagatatgttccatggactgcaatccgttcatcctaataaaaaataaaatatatatatattaaaaaaaaaaaagatataataatatattactatgaataataaggggccgtcatattcttcaacactgattccccggtactatattccaatccggntccttcatatcgtgccacttttgca

SEQ ID NO: 69135 - DNA, 543 bp, Zea mays
  Clone ID: MRT4577_163046C.1
gcaaggttgcaggttttgaagattgatctgatggcactacaacagccttggatgagcaggctgcgggtgtgagggcggcctgcatgcacccaggcctgtcagtttgctatccaccctccaccctagggcggaggtcatagacttcatctgtactaactccaaccaaagtgtcaaaggcttgctatgaggcataaatctagcgaatcgtactggtgacttgatgtggaagctctgtatgctaatcactatttatactacaggtaaggtggccgatgaatactgacgcacatatgaggataactgtacaaaaaacgaggatggacatttactttgcaaaacactgtccatacaagaagctcttgcttctgcagcacaaacatggctcgaccctagcactgagctggcgttataagtatcggtaccctcgctgcagactaccgtgcattccaacaaggaaatgatccttaaatattacagagatctccacactgtgcaaaacgtactcagaaatatggtgtatattaacgatgatgtctgatgcta

SEQ ID NO: 69136 - DNA, 423 bp, Zea mays
  Clone ID: MRT4577_163047C.1
aaataccggtcggacaacccttccgccacacccttccggaaccataaaaggaccattattgtcccaccattgccacccaaaaggtgtgggcctcttaatcctcctggggggttctcaaaatcctgttacggcaaccattttcccgaattgttcgaaggctctaatagtttccttttttcccccgtacctttaacaagcggggttttcggattgtaaaaacccaatttttaaaccttccaggatccaacaggcaataacagttggcatttaaccttaataacccttgttcctccaccaataataagcctaataacataagttacctttggggcattaattgccccaaaccataagggcccaccacctccaacaacttgtgctagcaaaccttgttgcctactttaagaaacagaagttttttcc

SEQ ID NO: 69137 - DNA, 309 bp, Zea mays
  Clone ID: MRT4577_163048C.1
tcatgacggggccgcctaccggagaccactggggaggacccaatggtgaccatcactcccgccctgggatacctgacccagatgcatggcgcattgtgcgccaccgaccaccatagggacggccaatggtgaaagcactacacgatctacaaccaagacaactggaagggcatgaaaaagtacacgactggcggcaaattgatgtagaacgacctgatcgacacataaaaaggccggtgtaagagctacaaagaagtctgaaacaagaacagaatcatgtgctggtacaacctaaagaaagggaaggcc

SEQ ID NO: 69138 - DNA, 363 bp, Zea mays
  Clone ID: MRT4577_163049C.1
cgcttattgcatctgataaattatataaaacgtttcccactgttcatttattaccatcaccaaaaacaagaaaaacccggggccggttattttttatggagggccagccctactgaaaaaaaaaaccgggggcaaaagaagggggccacacaccaaccgccaaaacaccggcattttcaccgggaacaaggggggggggccatagccaacccggggggaaacggacgccaaaaaaaaaaagagggccccccgggaaggatttagcggaaaaaaaagaaaagggttaggcataataagaatttgcacccccaaagcccgaacatggtggggacagacccgggcgtcccccataacatggacaaa

SEQ ID NO: 69139 - DNA, 159 bp, Zea mays
  Clone ID: MRT4577_16304C.1
cgtaaataagagcaagagcagctcactcacacagtcacactcacactccttgctctttaactggagtggggaacaactgaggccagcggaaaccagagaggggagggagataatagcagtggggcagtttgagagctcgccgatctgctgcggggatgg

SEQ ID NO: 69140 - DNA, 579 bp, Zea mays
  Clone ID: MRT4577_163050C.1
cattgggtacctcgaggccggccgggaaggagttccgctccctctctactcctatccactgcttactggacgcgtggtagagacttgagcctgcagcttctgcatctatggcgcctctgaagctgtacgggatgccgctgtcccccagcttggagcgcgtggtcaccgtgctcaacgataaagtgctcgacttggagatcgtacccgtcgacctcaccaccggggcctgcaagcaccccgacttcctcgtcctcaaccctttcggacagatcctggttctcgacgacggagactaaggcctcttgaagtccctagagatcaaccgttacatctgcagctcgtacttgtcggaggggactatacctgcatctacagctacgcgtctacttgccacactggatgtgtgactataagaggattatcatgacttcttcccaaacgcatgagcgctgtcgttccagctgctcgtgaggccgcatcctgggcggtgcccacgaagcggttgtggttgataagcatgtggataatctcggcaatggtggttgaactgtacgatgctctcctcgcctcgaacatgta

SEQ ID NO: 69141 - DNA, 295 bp, Zea mays
  Clone ID: MRT4577_163051C.1
atatcagcacaggatatagttttggctgtcatctcctttgaacaataggaatttgagaggaattatatagaagccagtgcattgcttcattctataggaaaattacagaaacgggaataaaattgcacattgcaaaggccatgggagggttgtatggccatgcaatccgcgctacagcaaaatggcccggtggacctcaagagcaaagagagctaatttacgcgagtcaccaatggctagaagtttaatggcgaggaagataaaagccctagtaaatccggcagggaggaaggcc

SEQ ID NO: 69142 - DNA, 466 bp, Zea mays
  Clone ID: MRT4577_163052C.1
cctcaggtcacggtatcgataagctttctgggattagctggctattatcaacgctttgtaaaaggattctcgatgatttctacaccgaggactcattttctatagaaagatgtgaagttcgaatggtctaagaaatgtcaatagagttttgaacaactgaaagcattgttaactaaagcaccagttttagttcagcttgaatttggtaaagagtttgtgatcttcagcgacatgtcattgaacaatttgggatgtgttttgatgcaagaaggcaaggtgatagcttatgctactaaacagttgaaactgcatgaaaagaattatccgatgcacgacttagaattggtcgctattgtatttgcattaaaaatttggcgacatcatttatttggtgaaaagtgccacatcattactaacaacaagagtttgaagtatttaatgactcaaaagatttgaatttgcaaca

SEQ ID NO: 69143 - DNA, 762 bp, Zea mays
  unsure (1)..(762): unsure at all n locations
  Clone ID: MRT4577_163053C.1
gaagcaccgaacagtgaagaactaacgaaacaagctcaacagagtccgtttcagctttctcgtattttcgtatgtgtatgacaacaatccacgcctcgccaaacaactgaatccgctgcgcatccgacaggatacgtgaaaaaaaatcaaagaacggtgggccatttcgccatcgcctcccgatccgggcggcgcgctatctgaaccccatcctgagagagtggcttgcctgcctcacggcgatcctgtcagaagtgccagcgcccgggcgcacggcctccggcagcgccgcgtcagagagcaccagcagaacggccgacggaggcgggcactgggcggtgacgaagagccgggtgatgtcgcggaggggcgtccgccgacgcggcaccgccttgctgcccccgcccgatctcttcatcgcctggcgcttgacgacgatgccacgcgcggcagacgacggcggcggcgcgttctccttgtcgcagccgcagccgcagccgccgagactgctgagaaccgccatctaggatggatggctctaaggtgtgcggacggtgctctgaaggtggacgcgaggaggcgaggagagagaggtgatctgtcgtggagaaagaggagggggacgggatggctccgcaggaagtggtgctcgctggtagtatttgtaacttgtcaagggttggtggaggaggccgtgccgccatggctctgaaattttgagctgggggagaagaggtttcagaggcagggagggaaagccan

SEQ ID NO: 69144 - DNA, 424 bp, Zea mays
  Clone ID: MRT4577_163054C.1
ctctactcgttcggtgaggtatgggattgtttttgttgtgaacaagtttcgattgtacttgggtctaccgaccgcggacacggtgaactcgaaaggctacacgggcgccaaaaacctatacctcctttaaaaaaaaggaataatgggccgctttaacaaactaaagttggggtgtcccggggacataattttgggctccctacaaaatggagggccccaccttaagaggaacctgatggttgaattcctccttcaccaccgctggcccagacattggaaagactgtttctacatgttcaacccatatcaagctggggtgaaaggaaagcctttgggggacatgaaaggctatgccaaaggggacctactccttggagtgggtcccgttttgccaaaacttttattgcaccttgggaatacaatg

SEQ ID NO: 69145 - DNA, 632 bp, Zea mays
  unsure (1)..(632): unsure at all n locations
  Clone ID: MRT4577_163055C.1
atgggcatatacataaattcttattaaaaagagaaaaatacgagcagcatacaatgagaagtacaatattcaagtgtaaaaggctagagatcaacagtagtttttacagtatatgcacagctctaggtacctcttttccatctattgaagattcagcttcactagtgtttgacaatacagcataacagtgtctatcgtgaccatcctctctcaaataagatggaacaccgctcctacacctagtaccttctgtgtgcatcctgagaagctgaatctttctcactgctgaaagcatgtgcatgttcttaagcttctccagcacaagatcaaaggtcgcctgctgtggagtaaagcccttcagcaccatctcctccaagaataagcaggactgggtgagcctcccgttccggcatagccagcacaccagcaatgtgtatgtgctgaaatcanaggggtgatggtccttccggaacatatgacatatcaggaacagaagcgtcttcacccatttccttctgcagcagagttcagcaaggggggtgtacgtcttgaatatctgggttgcatgactgttcctccatctgaaccaacaatttaagtgcgttctcagccagagagtgatcacaggcagc

SEQ ID NO: 69146 - DNA, 217 bp, Zea mays
  Clone ID: MRT4577_163056C.1
gttccaactactgagcactttcttctcgtcccatacaagccaatcgaagccgagatacgaccgtggactccaccggcaccggagcagggggtaaggagaaccatctcagtctactgctctttgcgcgtggatccatggctactttacgccggtcacgttctttctagtcgtcaatcttttcatcggcatcagtgcgtgaacgcgcgcgcggactact

SEQ ID NO: 69147 - DNA, 372 bp, Zea mays
  Clone ID: MRT4577_163057C.1
acaagcttttttttttttttttttttttttttttttatttttttttttttttttttttttttttttttttttttttttttttttttttttttttttttttttttttttttttttttttttttttttttttttttttttttttttagcttttttttttttttttttttttttttttttttttttttttttttttttttttttttcttccatttttccaaagggccgcactgaactccgctgtttattagtaataccatatactactgccaatcaatggagatttctgcaaaaactaatgctttcttcttgacacattttcaagtgttgaccctctacaattattgtgcggcttacccctcaacccttttaaaa

SEQ ID NO: 69148 - DNA, 317 bp, Zea mays
  Clone ID: MRT4577_163058C.1
gctccactgcccagtgcgcgcgtcaagcttgcttacctagccaacatggagtacctaccagacgtctacgagaagcccgaggccataaaaggtcttgccggaagatgcatgtccggaaggaagctcggcgtgtgcaggccgtctgccccctccatacgtaggccccgcgcaggcgccgtggtggccaagtacggcgacaagagcgtctactttgacctcgacgacatcggcaacaccaccggacagtgggacctgtacggctctgacgcgccctcgccctacaacccgctacagagcaagttcttcgagacgttcgc

SEQ ID NO: 69149 - DNA, 344 bp, Zea mays
  Clone ID: MRT4577_163059C.1
gggttcggcgggagcgatagttacgggagagctgagctgagaaaacgacggctcagttccttgattcgtgggcccggattacgtaaactgcctagaatgcgggaacacgatcttttcgtgggcccggatgtcgcgagacgtgcgctcaccaaaagagtgtaaacggttacaaaaaggagcataactcgtatttataattgacgtaacggtgtattacagtaaaccagtaaagcgtgcgcgccggtcagagcacctggtcggtgtctggtcggggcttcctgtagttagagagagcccagggctctaaatactatatctatctatctatctatatatatatatat

SEQ ID NO: 69150 - DNA, 276 bp, Zea mays
  Clone ID: MRT4577_16305C.1
aaacaatatagctgatatcgtaaaatagtattaggcacgagcatatacacaatttgttggccattaaccttaaagctaatacatctatctatgcttactgaaaagatatgttcatgaaagcaataagacctatccagtcgcatataatgctatgaaatattaatataaccattgaacacgacggatgtcgtcatacaatcaaaaattcgatggaatgaactcatgcgtggtgactacaggattaaatctaagataagctggtatgctgaacccatt

SEQ ID NO: 69151 - DNA, 318 bp, Zea mays
  unsure (1)..(318): unsure at all n locations
  Clone ID: MRT4577_163060C.1
acgcccactcctccggctcttcttctccatcggcaccagtccaccgggtccacctggtgccaccgcgcggccccaaccagggcaccgcagcgcagcaatggcgggcaacggcgccatcgtggagagcgacccgctgaactggggcgcggcggtggcggagctggccgggagccacctggacgaggtgaagcgcatggtgggtcgtnggggggagtccgtggtcaagatcgagggttccaccctccgagtcggacaggtggccgacgtcgcctgcgtcaaggacgcgtccggagcccccgttcagctgtatgaggaggt

SEQ ID NO: 69152 - DNA, 310 bp, Zea mays
  Clone ID: MRT4577_163061C.1
tgtagaacctccgacacaaaacgatgcacaggcaggtgaaggccggtgatgaaaaatgcctcaaaaacaaccaattcgccctcgggctcggggacctcctctgcccccgggacccaaccaaccccgccgccaaaataccctaaccgttgcatatcttgcacgcagaccaacaacatccgcgaaacaccgaattccactgtatcacccggtcgcaattccgccgccgccacagtgcccgagagatcttcagaagacgcctcggccatcggcgtggtcgcagcagacgaggaggaagacggcatggctacgt

SEQ ID NO: 69153 - DNA, 401 bp, Zea mays
  Clone ID: MRT4577_163062C.1
gccaccgcgcgggggcatgaccagcctacgtagagtacactctattgcaagacacacacacaaggtagggctagacgatctctgaccggatgaacatgtacccgacgagcaaccaactgatctcgaagaccaagtgtatcttcctgagcctcttaccaagggtgcacgaccagacccgcggggaccacatcctggtggcgctgactaacacgctgcagagccacctgctttgtcgccgctatctaggagccatcatcgaaacaagaggcgcacaagaaggcgaccctgacacaatcgatgacgctgacctcagatataatcaggccggggtcgacgacggggagctcggccaacggtggcggtaggtccacagcaacaacaactggcagggtgtggttgac

SEQ ID NO: 69154 - DNA, 1190 bp, Zea mays
  Clone ID: MRT4577_163063C.1
ggtcattttgtagaccaaacgcatgggagactacgcgtgattgcattttcagaaacggctgcttggattccagacccccataggctgccaatgctcatccgtaggttcatctccactttctccgggcaatttgtagctttcttcatccctgtcttgctggttgatttctattctggcacacgcccgacgcagcggcaagcagaggtagcaaagaggaggatcagatcttgatagctgacgagtggcgaccatgcatctggtggctggggctatcggcaacctggcccccaagctcctccggcttctgcgagacgagtacagcctgcagaagggtgtgaggaagcaagtccagttcctttcagaggagctggagagcatccacgccgccctccgcaaggtggctgctgtgccgccggaccagttggacgagcaggtcaagatctgggcgcgccaggtcagggatgcgtcctacgacatggaggacgccctcgacaccttcctggttcgcgtggagggccgccccgagcccaattgcggccatggcaggctcaagggcgccgcgaagaggatgggcaggctgttcaaaaaggctaatgcccaccgccacgtcgcaagcgtcattgccggcatcaagatgcagctgcaagaggtggccgagcggcgcgcacggtacagagtggacgaggtcgtggcgaccaggcctgctgcagcttcggcgatcgatcctcgtcttgaggccatgtacaaacaggcgacacagcttgttggcgtcgacggggccatgggtgacctggtgctattgctgtccctggaggtttcgattcttggagttggaggattgggcaagactactcttgccaaagcggtgtacgataacctgaaatcacagtttgattgcggggcttttgtttcggttggtcgaaatcctgacctgaagaaggtctttagggacatccttatagatcttgacaagcacaaatacacggccgaggtaaacctgtcgatattcggcgaaacacaactcatcgacgaaatccgagagctcctggagagcaagaggtatgatttggctagctataaaaatgctcactctattcatcagtgtaacttgtcgtgtcattctcgctattcacaatttcggtgaaattgactgaaattcatgaaatatcacatttaccccttgggtttag

SEQ ID NO: 69155 - DNA, 411 bp, Zea mays
  unsure (1)..(411): unsure at all n locations
  Clone ID: MRT4577_163064C.1
aataaaaaatcctgctaatgacagggacgatcnctatacgaggttgggcttgacaggcaggcacgccggcaacctatagtcgcgctctagcaacttcgttacaccatggtgcgccagaaaacacaggggagggaagctattcccaccattactatcgggagtcaaaaggtttacccgccgcttgaccctgctggcatatgtcatcagcatgtcagcgatgcaagagaccttgattagcagaagaaaacaaaacagggttcgactacacttgcgttctatatggagcggactatggatgcctgggacttgaccggctggaacatggctcgagtcgcatggcctccgaactgaggagagacagggttcgttcagcatttgcatgcttataagcctgtcccccccgttgggggg

SEQ ID NO: 69156 - DNA, 335 bp, Zea mays
  Clone ID: MRT4577_163065C.1
ctgacaattttgaatctccggagctcctagtgccaacggcgtcagggactgataaaaatggcgcgtattgtctaccactcgatgacgcttcctcctattcgcctcgcgaaatcctgacgctcaacctgacagacaacaccttctcataaactgccatgccaaatgctgtacaaagccacaagctgaaactattccacctggaaagaacgctccatttattgttgacacattccgatggatctatcattatagtgtcacatatttggttatcgagacttatctcgtgaagactgagtccacttgcggactattatccccctgacgcatctgaacat

SEQ ID NO: 69157 - DNA, 265 bp, Zea mays
  Clone ID: MRT4577_163066C.1
tcggactagttctagagcgcgcgggtccgcctggccgaggccgtgccgtcgtcgctcacgctcgcggggcgcggcggggccggggccggcgcgcgtttccgcgtgcagtgcgcgatcctgtcgttggccgcgcctgtggcgcccaccgagtcgaggccggcgcgccggatctcgccgtccgggccggacggcgcgctgcggcccaagccggctgtgctggtcgccgagaagctgaacgaggtctggcttgccgtgctgcagcagt

SEQ ID NO: 69158 - DNA, 684 bp, Zea mays
  unsure (1)..(684): unsure at all n locations
  Clone ID: MRT4577_163067C.1
ctccgaaccccccgcactggggatcccccattctgcatcgcacctccctcgcgcgcgaaggggtctaggagcagcaaggcccaccaacgatgggacctgggagcggcaagagatcgacctccactcttcggcgaacgagctcgtatattcaagttcgagtccagcggcatggcgaacatttcgtcgcccatgacgaagctgctgaggctggccaagtacggggtcgtcggacggagggaggttctggagtccggcgacatggcagtgctgttgcggaatgcgaaggccggggacaaggtgtcggctcgagcgctgctgcacctcatcctcgacggcgacgaaggggacgcctccaagaaagcttgtaggtactgatcactgcacattcaactccacacagaaaggttttggttctgatgattttcgtaagattcgtaatggtgcaatggaatgtcgatagctgatttggaaaacctgcaaagtctattcacaaaagcctacaaaccggccaaacagcatcgatcctgctctttagaaaatttgggaaggtttggctggggaaattgacattggagttcctgatgaaagttggccggcttgagggttcttccgtattcacactaaagaacatgaagctagccggaagatgtttaatttngaactcattttaaaggaaacccatgg

SEQ ID NO: 69159 - DNA, 294 bp, Zea mays
  Clone ID: MRT4577_163068C.1
acgcgcatctgcttccagagccccccgccgacgctgcgccctcctctcggtcctgccgtccgacgaggtaaaaggacagcatggagagggtcagcgtgctcaatgatgctctcaagtccatgtacaatgctgaaaagatagggaaacgtcaggtcatgatcaggccgtcatccaacgcgatcatcaaggtcctgaccgtcatgcagcgccatggctacattggtgagttcgagcacgtggatgaccacagagctgtgaagatcgtggtggaactgaatggaacactgaataaat

SEQ ID NO: 69160 - DNA, 158 bp, Zea mays
  unsure (1)..(158): unsure at all n locations
  Clone ID: MRT4577_163069C.1
cttgctgttcatctgtccaaaactgctaatatagcttctgaaaatggatgacatgctgggcacttgctcactggggtcttgattttnattttgaaaagttctgttcaatctccttgtcaaatttgaatgtgtatgcgtgcttggtctgtggaaaatat

SEQ ID NO: 69161 - DNA, 144 bp, Zea mays
  Clone ID: MRT4577_16306C.1
cagtactacacacctcagtgtcctacttagaacacgcgtagaggagtattaacggagaaccgacgggacccgaacatgtttattcatcaggttcggaaccctcgcctacgccggcaccaccagacgaaccacgaacctgcagga

SEQ ID NO: 69162 - DNA, 592 bp, Zea mays
  Clone ID: MRT4577_163070C.1
accgggtccccccctttttttttttttttttttttaacatgatctgaactcaacatgaccattattcataaaaccatgatctgaattgaacatggtccatccaaataaatatttcaagttacattcacaactaaatggcagaaaatactacagcctatccaaataaatattacaagtgtcatttcacaactaaatatcagtagtatcagctattcgtcatcactgtcaacatcatttgtagcaccttcttcggcttcgctgcaatactccaaaattgtatcgtcatcatcttcttcttcactatcactcccatacactttttggccattttcttgtaccaattgagcaatttcagcagcttcaaaaataagaccttgttcatcatctctacttaaaggcttctcatatatattatcggaaactgcttgtcgactagcattctcttcacaacactcattttcttgatatgcaggagcattatgttgggcaacatcattttcactcacattataaagatgtctatgggcaaatgtctgaacaacatgccaatttttaccaattttgtgtcccccaaatagaaaaccttcctagc

SEQ ID NO: 69163 - DNA, 375 bp, Zea mays
  Clone ID: MRT4577_163071C.1
tacggcactggctggaagcactccgcgcgtgggccaagcacgcgtgctaaaacctacgacggccgacggacaagccgcggaagaagattatccgaatcattaacactactgccccactgatctggatccgaagacgtgtgctctcagtactcacgcctgacatgtgtgtgagactgaatgtgtgcgtggcaaggaaccatctgccgcgaaacccgacgacatcagaaacaaaggcagacaaaaacaccctgaaagatgagacaaggaagaatggatggaagaagaaagaataaatcggcggacaataacaccaaagaggcactcaaaaggaccaccaagaagtcaggaggaaggactagccgagggcacgacacc

SEQ ID NO: 69164 - DNA, 390 bp, Zea mays
  unsure (1)..(390): unsure at all n locations
  Clone ID: MRT4577_163072C.1
gtgtttttggtttttctccccactacgaagcaacatgaactaccctgaccccattgttggttaagttacatacaatccgacattcacaagaggtgaaaatgcgattgaaacgggacgcttcatttctcggntgaacagaggggcaggcatggggggggggcccaccgatttggattttattttctgtcgttgtgcctggcgggcggtgacaggaacagcagctttntgcattcggttgatgattcacctggctgcgncaggtgatttgtttacccattgcagctgctactgtntctccccgctctcgtcgttcttgggccggtggttcttgtcctgcgcggccttgccgttcctccnctgccggggctttcgttggcctggctgttcttg

SEQ ID NO: 69165 - DNA, 200 bp, Zea mays
  Clone ID: MRT4577_163073C.1
aatcgcgtgcaaaaaacaagggtaatcaccattccaatgaccataacccgaaaattttagccatcgccaacctccgacattttcctctctctgaccagggagcgaacgccacgccttcttctggaagctttataaagcaaggaaccccctcgccatgggggggagacccatgagcgaaaagatggcatcgacggtggtcg

SEQ ID NO: 69166 - DNA, 754 bp, Zea mays
  Clone ID: MRT4577_163074C.1
ccaaatttgaggataagcacatcaagtgatgttacaggagtagaaatcgcaggtgccctgaagaacgttcttgcaatagctgcaggtatagtggaaggcatgagtctcgggaacaactgtatggctgcccttgttgcccaaggctgttcagagatacggtggttggcgacgaagatgggagcaaagccaaccactctttctggcttgtctgggtccggtgacatcatgctcacatgcttcgtcaacctttcgcggaatagaacagtgggactacgcctcggttctggtgaaaagcttgacagaatcatgggttctatgaatcaggttgctgaaggcgtatcaactgctggggctgtcattgcgttggcgcagaagtacaaggtcaaaatgccggtattgacagcggtggcacggataattgataatgagttaactccaactaaggcggttttggagttaatgaatcttcctcaggttgaggaagtctgacgaggctagcagttgagttctgcattttttccacttggctccgagtgtagcttgggcccatggccgaccgtatgaaaaatctgccaaagaccgttacttttttttgggtagcattacattattaatgaaaaaatgatatccagtaacggtggtatttagcatttcctaaatttcgaaacacattttcctgtccttgtacaccggcaaaaactttacgttgacgtttcttttgaaagaggaaactgttctcaaaatctagcatttc

SEQ ID NO: 69167 - DNA, 951 bp, Zea mays
  unsure (1)..(951): unsure at all n locations
  Clone ID: MRT4577_163075C.1
ngaaaccctctcatttccctcccttctctggcccgcgtctttcctcctcgacccgccgccgccgccgccgccatggccgccgggacgaagaccgtcgactacgcggcggaaagagcgctcgccaaggacttcctcaccaacttcgccggcccgcacggcgagcccaagtaccagaacatcctgcaagacatcgcgaaccggaagatccgcgccgcccagatcgagctggacgacctgttccactacaaggatgtggacgaggagttcctgcagagggtcaccgagaacaccaagcgctacatcggcatattcgccgaggccgtggacgagctcatgccagagcccacggaggccttcgctgtcgacgaggacagggacatcttgatgacgcagcgcgtggatgaaggggctgatggaggcgctgacggcacagaccctctacagaggatgccgccggaaatcaagcggttctttgaggtatacatcaaggcattctcgaaggtgacaccactcacccttaggcaagtgaaggcatcccacattgggcagcttgtgaaaatatctggaattgtcactcgctgctcggatgtgaagcccttgatgcaggtggcggtttatacatgcggttgtccaggaaactgctgtctttatgcctctctttgatcccgatgcaagctgaagggggatgatccttcatcatgagtttgcggcttcatgatttgtgacgggagggatgaacaccgtcgactgaagcctaacaggatccaaaacgaacaagcccttcatgatgtcgatgatgtaatgctatcacaggcacagctgtactagtagaaccattcttctctgacttattatgagtagcaatctccttgtgtgacactaatgtagatgtaccctactgtgtttcctttattgcagctgatataagagatgtgtattcttttggctacc

SEQ ID NO: 69168 - DNA, 639 bp, Zea mays
  Clone ID: MRT4577_163076C.1
ctagagtttgttccacgtacacttcctccttgattggtccattgagaaggcgttgttcacgtccatttgaaagaacttaaaaaagtggtgagcagcataggccaataatatgcgaattaattcaagcctagctacatgagcaaaagtctcctcaaaatccaaacctgcaacttgggcataaccttttgccacaagtcgagccttgttccttgtcaccacaccgtgttcgtcttgcttgttgcggaacacccacttggtacccacaacgttttgttttggacgtggcaccaggatccacacttcatttctcttgaagttgttgagctcttcctgcatggccaacacccagtctggatcctgcaaggcttcttctaccctgaaaggctcaatagaagaaacaaacgagtaatgctcacaaaacttagctaaacgtgagcgggtagttactcccttgctgatatcacccaatatctgatcccagtccggtgtacgaagcatcacaatagtctgagatggcttatgaacacctggcagaactaatatcgatgttgttgtcaacttctgcttcaacatctcaaatgattcttggcacgcgggggtccacttgaactcaaccttcttcgccaacaaggctgtcat

SEQ ID NO: 69169 - DNA, 645 bp, Zea mays
  Clone ID: MRT4577_163077C.1
agttcttctcgtcgggcggtttcatttacctcctcaatcctgagttgaacctgtgacacgtctaggagaagatagggtggaatctaaccgtgcacctgactgtaaggagaatgttctgaaacgttttgtagagggtgatggaggtgggaagcaacggcgagctgctctaccaacaggtacaagaaggcaagctctgcgccgtcgcttgccccaacaccgccctgcaggtacccctcttctccgagttcgatctcgacgtagctcgacgacgacctctaccagcgacagcgtctgctgatgctcgatgactcccgaatccccggtgcggaaaactgtgctgcaggcgactctcgttctctccgatggctgaggctatctcgcaaagtctcccttgatcggggattgtcagcatccaagatgttagtcgaaatgcgctggaggattgcgatctcctagatcatacccctatgattccccagatggctgaccggccctatttgcaccctgtatgatgaggctggttgtcgttcgccacctgcaggatcatctgaattctgcatgtatagaaagtgaacgtcgactggtacgactctaatagtactgctacccacgctcccgatgtacctgatgaatctctacctctca

SEQ ID NO: 69170 - DNA, 327 bp, Zea mays
  Clone ID: MRT4577_163078C.1
acaagctttttttttttttttttttttttttggctttacttttttttggttatttaaatattttttttttttgttgattgttatgaagttttagaattaccatggatgtgttagcactgattgttgatggtcaacatgatttctgggagcgacgaagtttttacaaagaagaacaacacaacctctatgcgcggccttgatgaggcgcaaacacgcgaccgaaacactcgtactgagagcacctacggatcattaaactattcgacgtagcagcgttcaatggtgggatattggcgtaccaactcgtttgctgataactaaataaaa

SEQ ID NO: 69171 - DNA, 379 bp, Zea mays
  unsure (1)..(379): unsure at all n locations
  Clone ID: MRT4577_163079C.1
ttnntttttttgaagaaaattaatanntctttnntttttctttgagtaccctccctttttgnntcatgcccactgnnncattagaggtggggcaannatatcntntnncgtcgttntaggtacctggtnntgttacgggcacgnngcagcntgnngtagtgggtggcattgggttaaacaaacnaagtgaccttatcacaannnaccattgatgnncagaccaataaacccaaatggcnnaccctagnatccagaggggcatgcanntgcatgcaagaaaagtacccnngtccttattccaaatcatctnnaggcaattgcatcacaagaaaccctagcttcctcgtccctcgtcgggcgggtccctagcagggtaggg

SEQ ID NO: 69172 - DNA, 102 bp, Zea mays
  Clone ID: MRT4577_16307C.1
gcaaagataacgttagcatgcagggtgctggctggtttggacaagggtgttttagagagagctattacaactgtgcttgggaggtttgctgaccacattcac

SEQ ID NO: 69173 - DNA, 779 bp, Zea mays
  unsure (1)..(779): unsure at all n locations
  Clone ID: MRT4577_163080C.1
gatttccaccggacaagagcaagaagggttggaaggcggcggcaggatagaggagaggagtcagaagatggctccggtgaagaagcccaaaaaggccaagcggaagatcagtgactccggcgagaccaagatcgatgactccagcgaggcgaagaccaaggacgccagcaaggtcaagagaaccaagtccggcggctcgttggcgttgcttccggcggaccttcgtggccccgatacggaatggtggtatgtcttcctcagcaagcacggggaactccacaaggaagccgaatcaggtggtcgtgctccagtgccttcagatgatgaggaagcgttcaggtacttcttcaggacatcgaggaggacttttgagtacatctgctcgattgtacgggaggatttgatatcgaggccgccttctgggctgatcaacattgaggggagactgcttagtgtggagaagcaagtagcaattgccatgaggaggctggcatctggggattcgcaggtgtccgttggagctgcttttggtgtggggcagtctactgtttcccaagtcacatggaggtttatcgagtcgatggaagagagggctcggcatcatttggtgtggccgggccaggagaggatggaggagatcaaagctaggttggaggctgtctctggtctaccanattgctgcggtgccattgatgccacacacattatcatgacgcttcctgctgntgagtcatctgaagactggtgtgaccctgcgaaaaactacagtatgttcctac
